(19) United States
(12) Patent Application Publication
(10) Pub. No.: US 2004/0241651 A1
(43) Pub. Date: Dec. 2, 2004

(54) Detection of single nucleotide polymorphisms (snp's) and cytosine-methylations

(76) Inventors: Alexander Olek, Berlin (DE); Christian Piepenbrock, Berlin (DE); Kurt Berlin, Stahnsdorf (DE)

Correspondence Address: KRIEGSMAN & KRIEGSMAN, 665 FRANKLIN STREET, FRAMINGHAM, MA, 01702, US

(21) Appl. No.: 10/257,017

(22) PCT Filed: Apr. 6, 2001
(86) PCT No.: PCT/IB01/00713

(30) Foreign Application Priority Data
Apr. 7, 2000 (DE) 100 19 173.8

(51) Int. Cl. C12Q 1/68; C07H 21/04; C07K 14/00

(52) U.S. Cl. 435/6; 530/350; 536/24.3

(57) ABSTRACT

A set of oligonucleotides or PNA oligomers and a method which is suitable for the detection of cytosine methylations and SNPs in genomic DNA samples is described.

This method serves for the diagnosis and/or prognosis of adverse events for patients or individuals, as well as diseases.

[0001] The present invention describes a representative set of oligonucleotides or PNA (peptide nucleic acid) oligomers, which are particularly suitable for the simultaneous detection of SNPs (single nucleotide polymorphisms) and cytosine methylations in genomic DNA samples for distinguishing cell types, as well as a method that is used.

[0002] The levels of observation that have been well studied in molecular biology according to developments in methods in recent years include the genes themselves, the transcription of these genes into RNA and the translation to proteins therefrom. During the course of development of an individual, which gene is turned on and how the activation and inhibition of certain genes in certain cells and tissues are controlled can be correlated with high probability with the extent and nature of the methylation of the genes or of the genome. Pathogenic states are also expressed by a modified methylation pattern of individual genes or of the genome.

### Prior Art

[0003] The Human Genome Project, the first sequencing of the human genome, will be completed in the next few years. Due to this Project, it will be possible to identify all approximately 100,000 genes. The sequence information opens up unexpected possibilities for the clarification of gene functions. This in turn can become a driving force in pharmacogenetics and pharmacogenomics. Pharmacogenetics and pharmacogenomics relate to the application of medications as a function of a genotype. The effectiveness of medications will be increased in this way. The necessary intermediate step is the determination of polymorphisms and genotypes which are associated with a specific response. Thus, continuously more efficient genotyping methods will be required.

[0004] Currently, there are two categories of polymorphic markers, which are utilized for genotyping: microsatellites and single nucleotide polymorphisms (SNPs). Microsatellites are highly polymorphic, i.e., they have a multiple number of alleles. They are characterized in that a repetitive sequence element, with a different number of repetitions for different alleles, is stamped by conserved sequences. On average, there is one microsatellite marker per 1 million bases. A map of 5,000 positioned microsatellite markers was published by CEPH. Microsatellites are genotyped by determining the size of products of a PCR with primers of conserved, flanking sequence. The fluorescently labeled PCR products are separated on gels.

[0005] There are comparatively few SNP markers that have been described. A map with 300,000 SNP markers is currently being developed by the SNP Consortium and will be made accessible in the public domain. If SNP markers are identified, they can be assigned genomic positions. It is attempted to map 150,000 SNP markers by the year 2001 (Mashall, E. (1999); Science, 284, 406-407). There is a handful of genotyping methods for SNPs. Several are based on the separation of products on gels, such as the oligonucleotide ligase assay (OLA). The latter is suitable rather for an intermediate throughput. Others rely on pure hybridization, which does not have the same stringency, however. DNA arrays (DNA chips) are suitable for the analysis of a large number of SNPs in a limited number of individuals. Up to now, examples have been shown, in which 1,500 SNPs were genotyped on one DNA chip. The true strength of DNA chips lies in approaches, such as resequencing und expression analysis. Approaches which apply primer extension have been shown (Head, S. R. et al., (1999); Mol Cell Probes, 13(2), 81-87). If one is working with fluorescently labeled terminator bases, these chips have the advantage that the results can be compiled with a simple ELISA reading device.

[0006] There are several SNP genotyping methods, which use mass spectrometry for analysis. These have the basic advantage that the allele-specific products are a physical representation of the product and not, e.g., a fluorescent signal that is indirectly assigned to the product. Matrix-assisted laser desorption/ionization time-of flight mass spectrometry (MALDI) has revolutionized the analysis of biomolecules (Karas, M. & Hillenkamp, F., Anal. Chem. 60, 2299-2301 (1988)). MALDI has been applied in different variants to the analysis of DNA. The variants extend from primer extension to sequencing (Liu, Y. -H., et al. Rapid Commun. Mass Spectrom. 9, 735-743 (1995); Ch'ang, L. -Y., et al. Rapid Commun. Mass Spectrom. 9, 772-774 (1995); Little, D. P., et al. J. Mol. Med. 75, 745-750 (1997); Haff, L. & Smirnov, I. P. Genome Res. 7, 378-388 (1997), Fei, Z., Ono, T. & Smith, L. M. Nucleic Acids Res. 26, 2827-2828 (1998); Ross, P., Hall, L., Smirnov, I. & Haff, L. Nature Biotech. 16, 1347-1351 (1998); Ross, P. L., Lee, K. & Beigrader, P. Anal. Chem. 69, 4197-4202 (1997); Griffin, T. J., Tang, W. & Smith, L. M. Nature Biotech. 15, 1368-1372 (1997)). The greatest disadvantage of all these methods is that they all require a basic purification of the products prior to the MALDI analysis. Spin column purification or the use of magnetic bead technology or reversed-phase purification is necessary.

[0007] The analysis of DNA in MALDI is very dependent on the charge state of the product. A 100-fold improvement of sensitivity in the MALDI analysis can be achieved by the fact that the charge state is controlled on the product to be analyzed, so that only a slight positive or negative excess charge is present. The products modified in this way are also essentially less susceptible to the formation of adducts (e.g. with Na and K, Gut, I. G. and Beck, S. (1995) Nucleic Acids Res., 23, 1367-1373; Gut, I. G., Jeffery, W. A., Pappin, D. J. C. and Beck, S. Rapid Commun. Mass Spectrom., 11, 43-50 (1997)). An SNP genotyping method, which makes use of these conditions, with the name “GOOD Assay” has been proposed recently (Sauer, S. et al., Nucleic Acids Research, Methods online, 2000, 28, el 3).

[0008] The most frequent covalently modified base in the DNA of eukaryotic cells is 5-methylcytosine. For example, it plays a role in the regulation of transcription, genetic imprinting and in tumorigenesis. The identification of 5-methylcytosine as a component of genetic information is thus of considerable interest. 5-Methylcytosine positions, however, cannot be identified by sequencing, since 5-methylcytosine has the same base-pairing behavior as cytosine. In addition, in the case of a PCR amplification, the epigenetic information which is borne by the 5-methylcytosines, is completely lost.

[0009] A relatively new method that in the meantime has become the most widely used method for investigating DNA for 5-methylcytosine is based on the specific reaction of bisulfite with cytosine, which, after subsequent alkaline hydrolysis, is then converted to uracil, which corresponds in its base-pairing behavior to thymidine. In contrast, 5-methylcytosine is not modified under these conditions. Thus, the original DNA is converted so that methylcytosine, which originally cannot be distinguished from cytosine by its hybridization behavior, can now be detected by “standard” molecular biology techniques as the only remaining cytosine, for example, by amplification and hybridization or sequencing. All of these techniques are based on base pairing, which will now be fully utilized. The prior art, which concerns sensitivity, is defined by a method that incorporates the DNA to be investigated in an agarose matrix, so that the diffusion and renaturation of the DNA is prevented (bisulfite reacts only on single-stranded DNA) and all precipitation and purification steps are replaced by rapid dialysis (Olek, A. et al., Nucl. Acids Res. 1996, 24, 5064-5066). Individual cells can be investigated by this method, which illustrates the potential of the method. Of course, up until now, only individual regions of up to approximately 3000 base pairs long have been investigated; a global investigation of cells for thousands of possible methylation analyses is not possible. Of course, this method also cannot reliably analyze very small fragments of small quantities of sample. These are lost despite the protection from diffusion through the matrix. An overview of other known possibilities for detecting 5-methylcytosines can be derived from the following review article: Rein, T., DePamphilis, M. L., Zorbas, H., Nucleic Acids Res. 1998, 26, 2255. With just a few exceptions (e.g. Zechnigk, M. et al., Eur. J. Hum. Gen. 1997, 5, 94-98), the bisulfite technique has only been applied in research. However, short, specific segments of a known gene are always amplified after a bisulfite treatment and either completely sequenced (Olek, A. und Walter, J., Nat. Genet. 1997, 17, 275-276) or individual cytosine positions are detected by a “primer extension reaction” (Gonzalgo, M. L. and Jones, P. A., Nucl. Acids Res. 1997, 25, 2529-2531, WO Patent 95/00669) or an enzyme step (Xiong, Z. and Laird, P. W., Nucl. Acids. Res. 1997, 25, 2532-2534). Detection by hybridization has also been described (Olek et al., WO-A 99/28498).

[0010] Other publications which are concerned with the application of the bisulfite technique for the detection of methylation in the case of individual genes are: Xiong, Z. and Laird, P. W. (1997), Nucl. Acids Res. 25, 2532; Gonzalgo, M. L. and Jones, P. A. (1997), Nucl. Acids Res. 25, 2529; Grigg, S. and Clark, S. (1994), Bioassays 16, 431; Zeschnik, M. et al. (1997), Human Molecular Genetics 6, 387; Teil, R. et al. (1994), Nucl. Acids Res. 22, 695; Martin, V. et al. (1995), Gene 157, 261, WO-A 97/46705 and WO-A 95/15373.

[0011] A review of the prior art in oligomer array production can be derived from a special edition of Nature Genetics that appeared in January 1999 (Nature Genetics Supplement, Volume 21, January 1999) and the literature cited therein.

[0012] Probes with multiple fluorescent labels are used for scanning an immobilized DNA array. Particularly suitable for fluorescent labeling is the simple introduction of Cy3 und Cy5 dyes at the 5′-OH of the respective probe. The fluorescence of the hybridized probes is detected, for example, by means of a confocal microscope. The dyes Cy3 and Cy5, in addition to many others, can be obtained commercially.

### Statement of the Problem

[0013] The present invention will offer a set of oligonucleotides or PNA oligomers and a method which are suitable for the simultaneous detection of SNPs (single nucleotide polymorphisms) and cytosine methylations in genomic DNA samples.

### DESCRIPTION

[0014] The problem is thus solved by a set of oligonucleotides or PNA (peptide nucleic acid) oligomers for the detection of single nucleotide polymorphisms (SNPs, single nucleotide polymorphisms) and for the detection of the state of cytosine methylation in chemically pretreated genomic DNA, wherein the base sequences are selected from SEQ-ID: 1 to SEQ-ID: 382046.

[0015] It is further provided according to the invention that the set according to the invention contains both base sequences with the SEQ-ID: 1 to SEQ ID: 382046 itself and/or contains the named sequences with SEQ-ID: 1 to SEQ-ID: 382046 by extension, truncation or modification. The set according to the invention may thus be comprised of unmodified sequences according to the invention and/or sequences modified in the way according to the invention.

[0016] The present invention describes a set of oligomer probes (oligonucleotides and/or PNA oligomers) for the detection of single nucleotide polymorphisms and/or the state of cytosine methylation in chemically pretreated genomic DNA, which most preferably comprises at least 10 of the listed oligonucleotides or PNA sequences selected from the sequences SEQ-ID: 1 to SEQ-ID: 382046, or at least 10 PNA oligomers or oligonucleotide sequences, which in turn contain the sequences listed therein, namely the sequences SEQ-ID: 1 to SEQ-ID 382046.

[0017] In another variant of the method, the set of oligomer probes (oligonucleotides and/or PNA oligomers) for the detection of single nucleotide polymorphisms and/or the state of cytosine methylation in chemically pretreated genomic DNA comprises at least 100 oligonucleotides or PNA sequences selected from the sequences SEQ-ID: 1 to SEQ-ID: 382046, or, however at least 100 PNA oligomers or oligonucleotide sequences, which in turn contains the sequences listed therein, namely the sequences SEQ-ID: 1 to SEQ-ID: 382046.

[0018] Particularly preferred, the set of oligonucleotides for the detection of single nucleotide polymorphisms and the state of cytosine methylation in the chemically pretreated genomic DNA is characterized in that the base sequences mostly at the 5′ end and/or at the 3′ end can each be extended by another base, whereby the bases can be A, T or C.

[0019] Particularly preferred, the set of oligonucleotides for the detection of single nucleotide polymorphisms and the state of cytosine methylation in the chemically pretreated genomic DNA in turn is characterized in that the base sequences mostly at the 5′ end and/or at the 3′ end can each be extended by another base, whereby the bases can be A, T or G.

[0020] The set of oligonucleotides for the detection of single nucleotide polymorphisms and the state of cytosine methylation in the chemically pretreated genomic DNA is preferably characterized in that the base sequences mostly at the 5′ end and/or at the 3′ end can each be extended by at least two other bases, whereby the bases can be A, T or C.

[0021] The set of oligonucleotides for the detection of single nucleotide polymorphisms and the state of cytosine methylation in the chemically pretreated genomic DNA is preferably characterized in that the base sequences mostly at the 5′ end and/or at the 3′ end can each be extended by at least two other bases, whereby the bases can be A, T or G.

[0022] That the set of PNA (peptide nucleic acid) oligomers for the detection of single nucleotide polymorphisms and the state of cytosine methylation in the chemically pretreated genomic DNA is most preferably characterized in that a nucleobase is omitted at the 5′ end and/or at the 3′ end of the oligomer.

[0023] The set of PNA (peptide nucleic acid) oligomers for the detection of single nucleotide polymorphisms and the state of cytosine methylation in the chemically pretreated genomic DNA is preferably characterized in that at least two nucleobases are omitted each time at the 5′ end and/or at the 3′ end of the oligomer.

[0024] A representative set of oligonucleotides and/or PNA oligomers, comprising oligomers and/or oligonucleotides according to the sequences SEQ-ID: 1 to SEQ-ID: 382046, will be used for the detection of cytosine methylations and single nucleotide polymorphisms in genomic DNA for distinguishing cell types or tissues or for the investigation of cell differentiation. For this purpose, the following process steps are sequentially conducted:

[0025] In the first step of the method, a genomic DNA sample is chemically treated in such a way that cytosine bases unmethylated at the 5′ position are converted to uracil, thymine or another base dissimilar to cytosine in its hybridizing behavior.

[0026] The genomic DNA to be analyzed is preferably obtained from the usual sources for DNA, such as, e.g., cell lines, blood, sputum, stool, urine, cerebrospinal fluid, tissue embedded in paraffin, histological slides and all possible combinations thereof.

[0027] Preferably, the above-described treatment of genomic DNA is conducted with bisulfite (hydrogen sulfite, disulfite) and subsequent alkaline hydrolysis for this purpose, which leads to a conversion of unmethylated cytosine nucleobases to uracil.

[0028] In a preferred variant of the method, the amplification is conducted by means of the polymerase chain reaction (PCR), whereby a heat-stable DNA polymerase is used.

[0029] In a second method step, more than ten different fragments, each of which is less than 2000 base pairs long, are amplified [simultaneously] from the chemically pretreated genomic DNA with the use of synthetic oligonucleotides as primers.

[0030] In a particularly preferred variant of the method, the oligonucleotides or PNA oligomers are bound to defined sites on a solid phase.

[0031] In another preferred variant of the method, different oligonucleotides and/or PNA oligomer sequences are arranged on a planar solid phase in the form of a rectangular or hexagonal grid.

[0032] The solid-phase support surface is preferably comprised of silicon, glass, polystyrene, aluminum, steel, iron, copper, nickel, silver, or gold.

[0033] In the third step of the method, the amplified products are hybridized to a set of oligonucleotides or PNA oligomers, which comprise at least 10 of the above-named sequences, namely the sequences of SEQ-ID: 1 to SEQ-ID: 382046.

[0034] In a preferred variant of the method, the amplification of several DNA segments is conducted in one reaction vessel.

[0035] In a preferred variant of the method, the base sequences of the set of oligonucleotides according to the invention, namely the sequences SEQ-ID: 1 to SEQ-ID: 382046 are each extended mostly at the 5′ end and/or at the 3′ end by one additional base, wherein the bases can be either A, T or G.

[0036] In a preferred variant of the method, the base sequences of the set of oligonucleotides according to the invention are each extended mostly at the 5′ end and/or at the 3′ end by at least two additional bases, wherein the bases can be either A, T or C.

[0037] In a preferred variant of the method, the base sequences of the set of oligonucleotides according to the invention for the detection of single nucleotide polymorphisms and of the state of cytosine methylation are each extended mostly at the 5′ end and/or at the 3′ end by at least two additional bases, wherein the bases can be either A, T or G.

[0038] In a preferred variant of the method, a set of PNA oligomers comprised of the above-named base sequences is used, wherein one nucleobase is omitted each time at the 5′ end and/or at the 3′ end of the oligomer.

[0039] In a preferred variant of the method, a set of PNA oligomers comprised of the above-named base sequences is used, wherein at least two nucleobases are omitted each time at the 5′ end and/or the 3′ end of the oligomer.

[0040] In another preferred variant of the method, at least 10 of the above-named oligonucleotides or PNA sequences, namely selected from the sequences SEQ ID: 1 to SEQ-ID: 382046, are used for the detection of the state of cytosine methylation, or, however, at least 10 PNA oligomer or oligonucleotide sequences, which in turn contain the above-named sequences, namely the sequences SEQ-ID: 1 to SEQ-ID: 382046, [are used].

[0041] In another preferred variant of the method, at least 100 of the above-named oligonucleotides or PNA sequences, namely selected from the sequences SEQ-ID: 1 to SEQ-ID: 382046, are used for the detection of the state of cytosine methylation, or, however, at least 100 PNA oligomer or oligonucleotide sequences, which in turn contain the above-named sequences, namely the sequences SEQ-ID: 1 to SEQ-ID: 382046, [are used].

[0042] In another preferred variant of the method, at least one primer is bound to a solid phase.

[0043] In still another preferred variant of the method, different amplified products are arranged on the solid phase in the form of a rectangular or hexagonal grid.

[0044] This solid-phase support surface is preferably comprised of silicon, glass, polystyrene, aluminum, steel, iron, copper, nickel, silver, or gold.

[0045] In the last step of the method, the hybridized amplified products are detected. The labelings introduced on the amplified products can be identified at any position of the solid phase on which an oligonucleotide sequence is found.

[0046] In a preferred variant of the method, the labels of the amplified products are fluorescent labels.

[0047] In a preferred variant of the method, the labels of the amplified products are radionuclides.

[0048] In another preferred variant of the method, the amplified products bear removable mass labels, which are detected in a mass spectrometer.

[0049] In another preferred variant of the method, the amplified products, fragments of the amplified products or probes complementary to the amplified products are detected in the mass spectrometer.

[0050] In another preferred variant of the method, the fragments produced have a single positive or negative net charge in the mass spectrometer for better detectability.

[0051] The set of oligonucleotides and/or PNA oligomers according to the invention preferably is used for the diagnosis and/or prognosis of adverse events for patients or individuals. Preferably, the set of oligonucleotides and/or PNA oligomers according to the invention serves for the diagnosis and/or prognosis of adverse events for patients or individuals, whereby these adverse events belong to at least one of the following categories:

[0052] undesired drug interactions; cancer diseases; CNS malfunctions, damage or disease; symptoms of aggression or behavioral disturbances; clinical, psychological and social consequences of brain lesions; psychotic disturbances and personality disorders; dementia and/or associated syndromes;

[0053] cardiovascular disorder, malfunction and damage; malfunction, damage or disorder of the gastrointestinal tract; malfunction, damage or disorder of the respiratory system; lesion, inflammation, infection, immunity and/or convalescence; malfunction, damage or disease of the body as an abnormality in the development process; malfunction, damage.or disorder of the skin, the muscles, the connective tissue or the bones; endocrine and metabolic malfunction, damage or disorder; headaches or sexual malfunctions.

[0054] Preferably, the set of oligonucleotides according to the invention and/or PNA oligomers is used for distinguishing cell types or tissues or for investigating cell differentiation.

[0055] Another subject of the invention is a kit, which contains at least 10 oligonucleotides or PNA oligomers and primers for the production of amplified products as well as instructions for conducting the method.

[0056] According to the invention, a set of oligonucleotides is preferred for the detection of single nucleotide polymorphisms (SNPs, single nucleotide polymorphisms) and of the state of cytosine methylation in chemically pretreated genomic DNA, wherein the base sequences mostly at the 5′ end and/or at the 3′ end can each be extended by another base, whereby the bases can be either A, T or C.

[0057] According to the invention, a set of oligonucleotides is preferred for the detection of single nucleotide polymorphisms (SNPs, single nucleotide polymorphisms) and of the state of cytosine methylation in chemically pretreated genomic DNA, wherein the base sequences mostly at the 5′ end and/or at the 3′ end can each be extended by another base, whereby the bases can be either A, T or G.

[0058] According to the invention, a set of oligonucleotides is preferred for the detection of single nucleotide polymorphisms (SNPs, single nucleotide polymorphisms) and of the state of cytosine methylation in chemically pretreated genomic DNA, wherein the base sequences mostly at the 5′ end and/or at the 3′ end can each be extended by at least two additional bases, wherein the bases can be either A, T or C.

[0059] According to the invention, a set of oligonucleotides is preferred for the detection of single nucleotide polymorphisms (SNPs, single nucleotide polymorphisms) and of the state of cytosine methylation in chemically pretreated genomic DNA, wherein the base sequences mostly at the 5′ end and/or at the 3′ end can each be extended by at least two additional bases, wherein the bases can be either A, T or G.

[0060] According to the invention, a set of PNA (peptide nucleic acid) oligomers is preferred for the detection of single nucleotide polymorphisms (SNPs, single nucleotide polymorphisms) and of the state of cytosine methylation in chemically pretreated genomic DNA, wherein each time a nucleobase is omitted at the 5′ end and/or at the 3′ end of the oligomer.

[0061] According to the invention, a set of PNA (peptide nucleic acid) oligomers is preferred for the detection of single nucleotide polymorphisms (SNPs, single nucleotide polymorphisms) and of the state of cytosine methylation in chemically pretreated genomic DNA, wherein each time at least two nucleobases are omitted at the 5′ end and/or at the 3′ end of the oligomer.

[0062] A set of oligomer probes (oligonucleotides and/or PNA oligomers) is preferred according to the invention for the detection of the cytosine methylation state and/or of single nucleotide polymorphisms in chemically pretreated genomic DNA, comprising at least 10 of the above-named oligonucleotide or PNA sequences.

[0063] A set of oligomer probes (oligonucleotides and/or PNA oligomers) is preferred according to the invention for the detection of the cytosine methylation state and/or of single nucleotide polymorphisms in chemically pretreated genomic DNA, comprising at least 100 of the above-named oligonucleotide or PNA sequences.

[0064] The subject of the present invention is also a method for the analysis of a representative set of cytosine methylations and single nucleotide polymorphisms in genomic DNA samples for distinguishing of cell types.

[0065] In the first step of the method, unmethylated cytosine bases at the 5-position in a genomic DNA sample are converted by chemical treatment to uracil, thymidine or another base that is dissimilar to cytosine in its hybridization behavior.

[0066] In the second step of the method, more than ten different fragments, each of which is less than 2000 base pairs long, are amplified [simultaneously] from this chemically treated genomic DNA with the use of synthetic oligonucleotides as primers.

[0067] In the third step of the method, the amplified products are hybridized to a set of oligonucleotides or PNA oligomers comprising at least 10 of the above-named sequences selected from the sequences SEQ-ID: 1 to SEQ ID: 382046, or, however, sequences which have been extended, truncated, or modified in the above-described way.

[0068] In the fourth step of the method, the non-hybridized amplified products are removed.

[0069] In the last step of the method, the hybridized amplified products are detected.

[0070] It is preferred according to the invention that the chemical treatment is conducted by means of a solution of a bisulfite, hydrogen sulfite or disulfite.

[0071] It is preferred according to the invention that the amplification is conducted by means of a polymerase chain reaction (PCR).

[0072] It is preferred according to the invention that the oligonucleotides or PNA oligomers are bound to defined sites on a solid phase.

[0073] It is preferred according to the invention that different oligonucleotides and/or PNA oligomer sequences are arranged on a planar solid phase in the form of a rectangular or hexagonal grid.

[0074] It is preferred according to the invention that the labelings introduced on the amplified products can be identified at any position of the solid phase on which an oligonucleotide sequence is found.

[0075] It is preferred according to the invention that at least one primer is bound to a solid phase in the amplification.

[0076] It is preferred according to the invention that different amplified products are arranged on the solid phase in the form of a rectangular or hexagonal grid.

[0077] It is preferred according to the invention that the labels of the amplified products are fluorescent labels.

[0078] It is preferred according to the invention that the labels of the amplified products are radionuclides.

[0079] It is preferred according to the invention that the amplified products bear removable mass labels, which are detected in a mass spectrometer.

[0080] It is preferred according to the invention that the amplified products, fragments of the amplified products or probes complementary to the amplified products are detected in the mass spectrometer.

[0081] It is preferred according to the invention that for improved detectability in the mass spectrometer, the produced fragments have a single positive or negative net charge.

[0082] It is preferred according to the invention that detection is conducted and visualized by means of matrix-assisted laser desorption/ionization mass spectrometry (MALDI) or by means of electrospray mass spectrometry (ESI).

[0083] It is preferred according to the invention that the polymerases are heat-stable DNA polymerases.

[0084] It is preferred according to the invention that the amplification of several DNA segments is conducted in one reaction vessel.

[0085] It is preferred according to the invention that the solid-phase support surface is comprised of silicon, glass, polystyrene, aluminum, steel, iron, copper, nickel, silver, or gold.

[0086] It is preferred according to the invention that the genomic DNA has been obtained from a DNA sample, wherein sources for DNA include, e.g., cell lines, blood, sputum, stool, urine, cerebrospinal fluid, tissue embedded in paraffin, histological slides and all possible combinations thereof.

[0087] The subject of the invention is also the use of a set of at least 10 of the above-named oligonucleotides and/or PNA oligomers, selected from the sequences SEQ-ID: 1 to SEQ-ID: 382046, or, however, of at least 10 oligomers or oligonucleotides which contain the above-named sequences, for the diagnosis and/or prognosis of adverse events for patients or individuals.

[0088] The use of a set of at least 10 of the above-named oligonucleotides and/or PNA oligomers, selected from the sequences SEQ-ID: 1 to SEQ-ID: 382046, or, however, of at least 10 oligomers or oligonucleotides which contain the above-named sequences, is preferred according to the invention for the diagnosis and/or prognosis of adverse events for patients or individuals, whereby these adverse events belong to at least one of the following categories: undesired drug interactions; cancer diseases; CNS malfunctions, damage or disease; symptoms of aggression or behavioral disturbances; clinical, psychological and social consequences of brain lesions; psychotic disturbances and personality disorders; dementia and/or associated syndromes; cardiovascular disorder, malfunction and damage; malfunction, damage or disorder of the gastrointestinal tract; malfunction, damage or disorder of the respiratory system; lesion, inflammation, infection, immunity and/or convalescence; malfunction, damage or disease of the body as an abnormality in the development process; malfunction, damage or disorder of the skin, the muscles, the connective tissue or the bones; endocrine and metabolic malfunction, damage or disorder; headaches or sexual malfunctions.

[0089] The use of a set of at least 10 of the above-named oligonucleotides and/or PNA oligomers, selected from the sequences SEQ-ID: 1 to SEQ-ID: 382046, or, however, of at least 10 oligomers or oligonucleotides which contain the above-named sequences, is preferred according to the invention for the distinguishing of cell types or tissues or for the investigation of cell differentiation.

[0090] The subject of the present invention is also a kit containing at least 10 of the above-named oligonucleotides and/or PNA oligomers, selected from the sequences SEQ-ID: 1 to SEQ-ID: 382046, or, however, of at least 10 oligomers or oligonucleotides which contain the above-named sequences, and primers for producing the amplified products as well as instructions for conducting the method according to the invention.

[0091] The sequence protocol containing the sequences SEQ-ID: I to SEQ ID: 382046 is attached to the International Application in electronically readable form and is a component of this Application.

The application's sequence listing, which the Patent Office published only in electronic form, follows.

SEQUENCE LISTING (382046 sequences)

SEQ ID NO: 1 - DNA, 13 bp, Artificial Sequence
  Oligonucleotide for detection of SNP TSC0000002
tttattggtttat

SEQ ID NO: 2 - DNA, 13 bp, Artificial Sequence
  Oligonucleotide for detection of SNP TSC0000002
ataaaccaataaa

SEQ ID NO: 3 - DNA, 13 bp, Artificial Sequence
  Oligonucleotide for detection of SNP TSC0000002
tttattagtttat

SEQ ID NO: 4 - DNA, 13 bp, Artificial Sequence
  Oligonucleotide for detection of SNP TSC0000002
ataaactaataaa

SEQ ID NO: 5 - DNA, 13 bp, Artificial Sequence
  Oligonucleotide for detection of SNP TSC0000003
tatttttggaggy

SEQ ID NO: 6 - DNA, 13 bp, Artificial Sequence
  Oligonucleotide for detection of SNP TSC0000003
rcctccaaaaata

SEQ ID NO: 7 - DNA, 13 bp, Artificial Sequence
  Oligonucleotide for detection of SNP TSC0000003
tattttcggaggy

SEQ ID NO: 8 - DNA, 13 bp, Artificial Sequence
  Oligonucleotide for detection of SNP TSC0000003
rcctccgaaaata

SEQ ID NO: 9 - DNA, 13 bp, Artificial Sequence
  Oligonucleotide for detection of SNP TSC0000003
gtttttgaaagtg

SEQ ID NO: 10 - DNA, 13 bp, Artificial Sequence
  Oligonucleotide for detection of SNP TSC0000003
cactttcaaaaac

SEQ ID NO: 11 - DNA, 13 bp, Artificial Sequence
  Oligonucleotide for detection of SNP TSC0000003
gtttttaaaagtg

SEQ ID NO: 12 - DNA, 13 bp, Artificial Sequence
  Oligonucleotide for detection of SNP TSC0000003
cacttttaaaaac

SEQ ID NO: 13 - DNA, 13 bp, Artificial Sequence
  Oligonucleotide for detection of SNP TSC0000003
gttttcgaaagtg

SEQ ID NO: 14 - DNA, 13 bp, Artificial Sequence
  Oligonucleotide for detection of SNP TSC0000003
cactttcgaaaac

SEQ ID NO: 15 - DNA, 13 bp, Artificial Sequence
  Oligonucleotide for detection of SNP TSC0000004
aaaaaaattttaa

SEQ ID NO: 16 - DNA, 13 bp, Artificial Sequence
  Oligonucleotide for detection of SNP TSC0000004
ttaaaattttttt

SEQ ID NO: 17 - DNA, 13 bp, Artificial Sequence
  Oligonucleotide for detection of SNP TSC0000004
aaaaaatttttaa

SEQ ID NO: 18 - DNA, 13 bp, Artificial Sequence
  Oligonucleotide for detection of SNP TSC0000004
ttaaaaatttttt

SEQ ID NO: 19 - DNA, 13 bp, Artificial Sequence
  Oligonucleotide for detection of SNP TSC0000005
ggtatagttaagg

SEQ ID NO: 20 - DNA, 13 bp, Artificial Sequence
  Oligonucleotide for detection of SNP TSC0000005
ccttaactatacc

SEQ ID NO: 21 - DNA, 13 bp, Artificial Sequence
  Oligonucleotide for detection of SNP TSC0000005
ggtataattaagg

SEQ ID NO: 22 - DNA, 13 bp, Artificial Sequence
  Oligonucleotide for detection of SNP TSC0000005
ccttaattatacc

SEQ ID NO: 23 - DNA, 13 bp, Artificial Sequence
  Oligonucleotide for detection of SNP TSC0000007
ttaataattgttt

SEQ ID NO: 24 - DNA, 13 bp, Artificial Sequence
  Oligonucleotide for detection of SNP TSC0000007
aaacaattattaa

SEQ ID NO: 25 - DNA, 13 bp, Artificial Sequence
  Oligonucleotide for detection of SNP TSC0000007
ttaatatttgttt

SEQ ID NO: 26 - DNA, 13 bp, Artificial Sequence
  Oligonucleotide for detection of SNP TSC0000007
aaacaaatattaa

SEQ ID NO: 27 - DNA, 13 bp, Artificial Sequence
  Oligonucleotide for detection of SNP TSC0000007
agataattattgg

SEQ ID NO: 28 - DNA, 13 bp, Artificial Sequence
  Oligonucleotide for detection of SNP TSC0000007
ccaataattatct

SEQ ID NO: 29 - DNA, 13 bp, Artificial Sequence
  Oligonucleotide for detection of SNP TSC0000007
agataagtattgg

SEQ ID NO: 30 - DNA, 13 bp, Artificial Sequence
  Oligonucleotide for detection of SNP TSC0000007
ccaatacttatct

SEQ ID NO: 31 - DNA, 13 bp, Artificial Sequence
  Oligonucleotide for detection of SNP TSC0000010
tttatagagtggg

SEQ ID NO: 32 - DNA, 13 bp, Artificial Sequence
  Oligonucleotide for detection of SNP TSC0000010
cccactctataaa

SEQ ID NO: 33 - DNA, 13 bp, Artificial Sequence
  Oligonucleotide for detection of SNP TSC0000010
tttataaagtggg

SEQ ID NO: 34 - DNA, 13 bp, Artificial Sequence
  Oligonucleotide for detection of SNP TSC0000010
cccactttataaa

SEQ ID NO: 35 - DNA, 13 bp, Artificial Sequence
  Oligonucleotide for detection of SNP TSC0000011
gtttaaatagtgy

SEQ ID NO: 36 - DNA, 13 bp, Artificial Sequence
  Oligonucleotide for detection of SNP TSC0000011
rcactatttaaac

SEQ ID NO: 37 - DNA, 13 bp, Artificial Sequence
  Oligonucleotide for detection of SNP TSC0000011
gtttaagtagtgy

SEQ ID NO: 38 - DNA, 13 bp, Artificial Sequence
  Oligonucleotide for detection of SNP TSC0000011
rcactacttaaac

SEQ ID NO: 39 - DNA, 13 bp, Artificial Sequence
  Oligonucleotide for detection of SNP TSC0000012
attttaatttttg

SEQ ID NO: 40 - DNA, 13 bp, Artificial Sequence
  Oligonucleotide for detection of SNP TSC0000012
caaaaattaaaat

SEQ ID NO: 41 - DNA, 13 bp, Artificial Sequence
  Oligonucleotide for detection of SNP TSC0000012
attttagtttttg

SEQ ID NO: 42 - DNA, 13 bp, Artificial Sequence
  Oligonucleotide for detection of SNP TSC0000012
caaaaactaaaat

SEQ ID NO: 43 - DNA, 13 bp, Artificial Sequence
  Oligonucleotide for detection of SNP TSC0000012
attttaattttcg

SEQ ID NO: 44 - DNA, 13 bp, Artificial Sequence
  Oligonucleotide for detection of SNP TSC0000012
cgaaaattaaaat

SEQ ID NO: 45 - DNA, 13 bp, Artificial Sequence
  Oligonucleotide for detection of SNP TSC0000012
attttagttttcg

SEQ ID NO: 46 - DNA, 13 bp, Artificial Sequence
  Oligonucleotide for detection of SNP TSC0000012
cgaaaactaaaat

SEQ ID NO: 47 - DNA, 13 bp, Artificial Sequence
  Oligonucleotide for detection of SNP TSC0000014
attggtgtgatat

SEQ ID NO: 48 - DNA, 13 bp, Artificial Sequence
  Oligonucleotide for detection of SNP TSC0000014
atatcacaccaat

SEQ ID NO: 49 - DNA, 13 bp, Artificial Sequence
  Oligonucleotide for detection of SNP TSC0000014
attggtatgatat

SEQ ID NO: 50 - DNA, 13 bp, Artificial Sequence
  Oligonucleotide for detection of SNP TSC0000014
atatcataccaat

SEQ ID NO: 51 - DNA, 13 bp, Artificial Sequence
  Oligonucleotide for detection of SNP TSC0000016
ttattatgattaa

SEQ ID NO: 52 - DNA, 13 bp, Artificial Sequence
  Oligonucleotide for detection of SNP TSC0000016
ttaatcataataa

SEQ ID NO: 53 - DNA, 13 bp, Artificial Sequence
  Oligonucleotide for detection of SNP TSC0000016
ttattacgattaa

SEQ ID NO: 54 - DNA, 13 bp, Artificial Sequence
  Oligonucleotide for detection of SNP TSC0000016
ttaatcgtaataa

SEQ ID NO: 55 - DNA, 13 bp, Artificial Sequence
  Oligonucleotide for detection of SNP TSC0000016
ttagttgtaatag

SEQ ID NO: 56 - DNA, 13 bp, Artificial Sequence
  Oligonucleotide for detection of SNP TSC0000016
ctattacaactaa

SEQ ID NO: 57 - DNA, 13 bp, Artificial Sequence
  Oligonucleotide for detection of SNP TSC0000016
ttagttataatag

SEQ ID NO: 58 - DNA, 13 bp, Artificial Sequence
  Oligonucleotide for detection of SNP TSC0000016
ctattataactaa

SEQ ID NO: 59 - DNA, 13 bp, Artificial Sequence
  Oligonucleotide for detection of SNP TSC0000016
ttagtcgtaatag

SEQ ID NO: 60 - DNA, 13 bp, Artificial Sequence
  Oligonucleotide for detection of SNP TSC0000016
ctattacgactaa

SEQ ID NO: 61 - DNA, 13 bp, Artificial Sequence
  Oligonucleotide for detection of SNP TSC0000019
ttaaaaaatagta

SEQ ID NO: 62 - DNA, 13 bp, Artificial Sequence
  Oligonucleotide for detection of SNP TSC0000019
tactattttttaa

SEQ ID NO: 63 - DNA, 13 bp, Artificial Sequence
  Oligonucleotide for detection of SNP TSC0000019
ttaaaatatagta

SEQ ID NO: 64 - DNA, 13 bp, Artificial Sequence
  Oligonucleotide for detection of SNP TSC0000019
tactatattttaa

SEQ ID NO: 65 - DNA, 13 bp, Artificial Sequence
  Oligonucleotide for detection of SNP TSC0000019
tattattttttag

SEQ ID NO: 66 - DNA, 13 bp, Artificial Sequence
  Oligonucleotide for detection of SNP TSC0000019
ctaaaaaataata

SEQ ID NO: 67 - DNA, 13 bp, Artificial Sequence
  Oligonucleotide for detection of SNP TSC0000019
tattatgttttag

SEQ ID NO: 68 - DNA, 13 bp, Artificial Sequence
  Oligonucleotide for detection of SNP TSC0000019
ctaaaacataata

SEQ ID NO: 69 - DNA, 13 bp, Artificial Sequence
  Oligonucleotide for detection of SNP TSC0000020
tattaagataagt

SEQ ID NO: 70 - DNA, 13 bp, Artificial Sequence
  Oligonucleotide for detection of SNP TSC0000020
acttatcttaata

SEQ ID NO: 71 - DNA, 13 bp, Artificial Sequence
  Oligonucleotide for detection of SNP TSC0000020
tattaaaataagt

SEQ ID NO: 72 - DNA, 13 bp, Artificial Sequence
  Oligonucleotide for detection of SNP TSC0000020
acttattttaata

SEQ ID NO: 73 - DNA, 13 bp, Artificial Sequence
  Oligonucleotide for detection of SNP TSC0000021
ttttaatagtttt

SEQ ID NO: 74 - DNA, 13 bp, Artificial Sequence
  Oligonucleotide for detection of SNP TSC0000021
aaaactattaaaa

SEQ ID NO: 75 - DNA, 13 bp, Artificial Sequence
  Oligonucleotide for detection of SNP TSC0000021
ttttaagagtttt

SEQ ID NO: 76 - DNA, 13 bp, Artificial Sequence
  Oligonucleotide for detection of SNP TSC0000021
aaaactcttaaaa

SEQ ID NO: 77 - DNA, 13 bp, Artificial Sequence
  Oligonucleotide for detection of SNP TSC0000021
aaaattgttaaga

SEQ ID NO: 78 - DNA, 13 bp, Artificial Sequence
  Oligonucleotide for detection of SNP TSC0000021
tcttaacaatttt

SEQ ID NO: 79 - DNA, 13 bp, Artificial Sequence
  Oligonucleotide for detection of SNP TSC0000021
aaaatttttaaga

SEQ ID NO: 80 - DNA, 13 bp, Artificial Sequence
  Oligonucleotide for detection of SNP TSC0000021
tcttaaaaatttt

SEQ ID NO: 81 - DNA, 13 bp, Artificial Sequence
  Oligonucleotide for detection of SNP TSC0000022
gttttatgggaay

SEQ ID NO: 82 - DNA, 13 bp, Artificial Sequence
  Oligonucleotide for detection of SNP TSC0000022
rttcccataaaac

SEQ ID NO: 83 - DNA, 13 bp, Artificial Sequence
  Oligonucleotide for detection of SNP TSC0000022
gttttacgggaay

SEQ ID NO: 84 - DNA, 13 bp, Artificial Sequence
  Oligonucleotide for detection of SNP TSC0000022
rttcccgtaaaac

SEQ ID NO: 85 - DNA, 13 bp, Artificial Sequence
  Oligonucleotide for detection of SNP TSC0000022
gtttttgtagggy

SEQ ID NO: 86 - DNA, 13 bp, Artificial Sequence
  Oligonucleotide for detection of SNP TSC0000022
rccctacaaaaac

SEQ ID NO: 87 - DNA, 13 bp, Artificial Sequence
  Oligonucleotide for detection of SNP TSC0000022
gtttttatagggy

SEQ ID NO: 88 - DNA, 13 bp, Artificial Sequence
  Oligonucleotide for detection of SNP TSC0000022
rccctataaaaac

SEQ ID NO: 89 - DNA, 13 bp, Artificial Sequence
  Oligonucleotide for detection of SNP TSC0000022
gttttcgtagggy

SEQ ID NO: 90 - DNA, 13 bp, Artificial Sequence
  Oligonucleotide for detection of SNP TSC0000022
rccctacgaaaac

SEQ ID NO: 91 - DNA, 13 bp, Artificial Sequence
  Oligonucleotide for detection of SNP TSC0000023
gtaaaaaatagga

SEQ ID NO: 92 - DNA, 13 bp, Artificial Sequence
  Oligonucleotide for detection of SNP TSC0000023
tcctattttttac

SEQ ID NO: 93 - DNA, 13 bp, Artificial Sequence
  Oligonucleotide for detection of SNP TSC0000023
gtaaaagatagga

SEQ ID NO: 94 - DNA, 13 bp, Artificial Sequence
  Oligonucleotide for detection of SNP TSC0000023
tcctatcttttac

SEQ ID NO: 95 - DNA, 13 bp, Artificial Sequence
  Oligonucleotide for detection of SNP TSC0000024
aataatatgaaaa

SEQ ID NO: 96 - DNA, 13 bp, Artificial Sequence
  Oligonucleotide for detection of SNP TSC0000024
ttttcatattatt

SEQ ID NO: 97 - DNA, 13 bp, Artificial Sequence
  Oligonucleotide for detection of SNP TSC0000024
aataatttgaaaa

SEQ ID NO: 98 - DNA, 13 bp, Artificial Sequence
  Oligonucleotide for detection of SNP TSC0000024
ttttcaaattatt

SEQ ID NO: 99 - DNA, 13 bp, Artificial Sequence
  Oligonucleotide for detection of SNP TSC0000024
tttttatattgtt

SEQ ID NO: 100 - DNA, 13 bp, Artificial Sequence
  Oligonucleotide for detection of SNP TSC0000024
aacaatataaaaa

SEQ ID NO: 101 - DNA, 13 bp, Artificial Sequence
  Oligonucleotide for detection of SNP TSC0000024
tttttagattgtt

SEQ ID NO: 102 - DNA, 13 bp, Artificial Sequence
  Oligonucleotide for detection of SNP TSC0000024
aacaatctaaaaa

SEQ ID NO: 103 - DNA, 13 bp, Artificial Sequence
  Oligonucleotide for detection of SNP TSC0000026
gaattaaaagtgy

SEQ ID NO: 104 - DNA, 13 bp, Artificial Sequence
  Oligonucleotide for detection of SNP TSC0000026
rcacttttaattc

SEQ ID NO: 105 - DNA, 13 bp, Artificial Sequence
  Oligonucleotide for detection of SNP TSC0000026
gaattagaagtgy

SEQ ID NO: 106 - DNA, 13 bp, Artificial Sequence
  Oligonucleotide for detection of SNP TSC0000026
rcacttctaattc

SEQ ID NO: 107 - DNA, 13 bp, Artificial Sequence
  Oligonucleotide for detection of SNP TSC0000027
ttagtttgagtgg

SEQ ID NO: 108 - DNA, 13 bp, Artificial Sequence
  Oligonucleotide for detection of SNP TSC0000027
ccactcaaactaa

SEQ ID NO: 109 - DNA, 13 bp, Artificial Sequence
  Oligonucleotide for detection of SNP TSC0000027
ttagttcgagtgg

SEQ ID NO: 110 - DNA, 13 bp, Artificial Sequence
  Oligonucleotide for detection of SNP TSC0000027
ccactcgaactaa

SEQ ID NO: 111 - DNA, 13 bp, Artificial Sequence
  Oligonucleotide for detection of SNP TSC0000027
ttagtttgagcgg

SEQ ID NO: 112 - DNA, 13 bp, Artificial Sequence
  Oligonucleotide for detection of SNP TSC0000027
ccgctcaaactaa

SEQ ID NO: 113 - DNA, 13 bp, Artificial Sequence
  Oligonucleotide for detection of SNP TSC0000027
ttagttcgagcgg

SEQ ID NO: 114 - DNA, 13 bp, Artificial Sequence
  Oligonucleotide for detection of SNP TSC0000027
ccgctcgaactaa

SEQ ID NO: 115 - DNA, 13 bp, Artificial Sequence
  Oligonucleotide for detection of SNP TSC0000027
ttgtttgggttga

SEQ ID NO: 116 - DNA, 13 bp, Artificial Sequence
  Oligonucleotide for detection of SNP TSC0000027
tcaacccaaacaa

SEQ ID NO: 117 - DNA, 13 bp, Artificial Sequence
  Oligonucleotide for detection of SNP TSC0000027
ttgtttaggttga

SEQ ID NO: 118 - DNA, 13 bp, Artificial Sequence
  Oligonucleotide for detection of SNP TSC0000027
tcaacctaaacaa

SEQ ID NO: 119 - DNA, 13 bp, Artificial Sequence
  Oligonucleotide for detection of SNP TSC0000027
tcgtttgggttga

SEQ ID NO: 120 - DNA, 13 bp, Artificial Sequence
  Oligonucleotide for detection of SNP TSC0000027
tcaacccaaacga

SEQ ID NO: 121 - DNA, 13 bp, Artificial Sequence
  Oligonucleotide for detection of SNP TSC0000027
tcgtttaggttga

SEQ ID NO: 122 - DNA, 13 bp, Artificial Sequence
  Oligonucleotide for detection of SNP TSC0000027
tcaacctaaacga

SEQ ID NO: 123 - DNA, 13 bp, Artificial Sequence
  Oligonucleotide for detection of SNP TSC0000027
ttgttcgggttga

SEQ ID NO: 124 - DNA, 13 bp, Artificial Sequence
  Oligonucleotide for detection of SNP TSC0000027
tcaacccgaacaa

SEQ ID NO: 125 - DNA, 13 bp, Artificial Sequence
  Oligonucleotide for detection of SNP TSC0000027
tcgttcgggttga

SEQ ID NO: 126 - DNA, 13 bp, Artificial Sequence
  Oligonucleotide for detection of SNP TSC0000027
tcaacccgaacga

SEQ ID NO: 127 - DNA, 13 bp, Artificial Sequence
  Oligonucleotide for detection of SNP TSC0000028
ttgtatattttgt

SEQ ID NO: 128 - DNA, 13 bp, Artificial Sequence
  Oligonucleotide for detection of SNP TSC0000028
acaaaatatacaa

SEQ ID NO: 129 - DNA, 13 bp, Artificial Sequence
  Oligonucleotide for detection of SNP TSC0000028
ttgtattttttgt

SEQ ID NO: 130 - DNA, 13 bp, Artificial Sequence
  Oligonucleotide for detection of SNP TSC0000028
acaaaaaatacaa

SEQ ID NO: 131 - DNA, 13 bp, Artificial Sequence
  Oligonucleotide for detection of SNP TSC0000028
ttgtatatttcgt

SEQ ID NO: 132 - DNA, 13 bp, Artificial Sequence
  Oligonucleotide for detection of SNP TSC0000028
acgaaatatacaa

SEQ ID NO: 133 - DNA, 13 bp, Artificial Sequence
  Oligonucleotide for detection of SNP TSC0000028
ttgtatttttcgt

SEQ ID NO: 134 - DNA, 13 bp, Artificial Sequence
  Oligonucleotide for detection of SNP TSC0000028
acgaaaaatacaa

SEQ ID NO: 135 - DNA, 13 bp, Artificial Sequence
  Oligonucleotide for detection of SNP TSC0000028
atgaggtgtgtaa

SEQ ID NO: 136 - DNA, 13 bp, Artificial Sequence
  Oligonucleotide for detection of SNP TSC0000028
ttacacacctcat

SEQ ID NO: 137 - DNA, 13 bp, Artificial Sequence
  Oligonucleotide for detection of SNP TSC0000028
atgaggagtgtaa

SEQ ID NO: 138 - DNA, 13 bp, Artificial Sequence
  Oligonucleotide for detection of SNP TSC0000028
ttacactcctcat

SEQ ID NO: 139 - DNA, 13 bp, Artificial Sequence
  Oligonucleotide for detection of SNP TSC0000028
acgaggtgtgtaa

SEQ ID NO: 140 - DNA, 13 bp, Artificial Sequence
  Oligonucleotide for detection of SNP TSC0000028
ttacacacctcgt

SEQ ID NO: 141 - DNA, 13 bp, Artificial Sequence
  Oligonucleotide for detection of SNP TSC0000028
acgaggagtgtaa

SEQ ID NO: 142 - DNA, 13 bp, Artificial Sequence
  Oligonucleotide for detection of SNP TSC0000028
ttacactcctcgt

SEQ ID NO: 143 - DNA, 13 bp, Artificial Sequence
  Oligonucleotide for detection of SNP TSC0000030
tggagggagatag

SEQ ID NO: 144 - DNA, 13 bp, Artificial Sequence
  Oligonucleotide for detection of SNP TSC0000030
ctatctccctcca

SEQ ID NO: 145 - DNA, 13 bp, Artificial Sequence
  Oligonucleotide for detection of SNP TSC0000030
tggaggaagatag

SEQ ID NO: 146 - DNA, 13 bp, Artificial Sequence
  Oligonucleotide for detection of SNP TSC0000030
ctatcttcctcca

SEQ ID NO: 147 - DNA, 13 bp, Artificial Sequence
  Oligonucleotide for detection of SNP TSC0000032
tatggtatttgag

SEQ ID NO: 148 - DNA, 13 bp, Artificial Sequence
  Oligonucleotide for detection of SNP TSC0000032
ctcaaataccata

SEQ ID NO: 149 - DNA, 13 bp, Artificial Sequence
  Oligonucleotide for detection of SNP TSC0000032
tatggtgtttgag

SEQ ID NO: 150 - DNA, 13 bp, Artificial Sequence
  Oligonucleotide for detection of SNP TSC0000032
ctcaaacaccata

SEQ ID NO: 151 - DNA, 13 bp, Artificial Sequence
  Oligonucleotide for detection of SNP TSC0000032
tatggcgtttgag

SEQ ID NO: 152 - DNA, 13 bp, Artificial Sequence
  Oligonucleotide for detection of SNP TSC0000032
ctcaaacgccata

SEQ ID NO: 153 - DNA, 13 bp, Artificial Sequence
  Oligonucleotide for detection of SNP TSC0000032
tttagatgttatg

SEQ ID NO: 154 - DNA, 13 bp, Artificial Sequence
  Oligonucleotide for detection of SNP TSC0000032
cataacatctaaa

SEQ ID NO: 155 - DNA, 13 bp, Artificial Sequence
  Oligonucleotide for detection of SNP TSC0000032
tttagacgttatg

SEQ ID NO: 156 - DNA, 13 bp, Artificial Sequence
  Oligonucleotide for detection of SNP TSC0000032
cataacgtctaaa

SEQ ID NO: 157 - DNA, 13 bp, Artificial Sequence
  Oligonucleotide for detection of SNP TSC0000033
gattttaaaaatg

SEQ ID NO: 158 - DNA, 13 bp, Artificial Sequence
  Oligonucleotide for detection of SNP TSC0000033
catttttaaaatc

SEQ ID NO: 159 - DNA, 13 bp, Artificial Sequence
  Oligonucleotide for detection of SNP TSC0000033
gatttttaaaatg

SEQ ID NO: 160 - DNA, 13 bp, Artificial Sequence
  Oligonucleotide for detection of SNP TSC0000033
cattttaaaaatc

SEQ ID NO: 161 - DNA, 13 bp, Artificial Sequence
  Oligonucleotide for detection of SNP TSC0000033
tatttttaagaty

SEQ ID NO: 162 - DNA, 13 bp, Artificial Sequence
  Oligonucleotide for detection of SNP TSC0000033
ratcttaaaaata

SEQ ID NO: 163 - DNA, 13 bp, Artificial Sequence
  Oligonucleotide for detection of SNP TSC0000033
tattttgaagaty

SEQ ID NO: 164 - DNA, 13 bp, Artificial Sequence
  Oligonucleotide for detection of SNP TSC0000033
ratcttcaaaata

SEQ ID NO: 165 - DNA, 13 bp, Artificial Sequence
  Oligonucleotide for detection of SNP TSC0000034
tttattgaataay

SEQ ID NO: 166 - DNA, 13 bp, Artificial Sequence
  Oligonucleotide for detection of SNP TSC0000034
rttattcaataaa

SEQ ID NO: 167 - DNA, 13 bp, Artificial Sequence
  Oligonucleotide for detection of SNP TSC0000034
tttattaaataay

SEQ ID NO: 168 - DNA, 13 bp, Artificial Sequence
  Oligonucleotide for detection of SNP TSC0000034
rttatttaataaa

SEQ ID NO: 169 - DNA, 13 bp, Artificial Sequence
  Oligonucleotide for detection of SNP TSC0000035
ttttttaatatgg

SEQ ID NO: 170 - DNA, 13 bp, Artificial Sequence
  Oligonucleotide for detection of SNP TSC0000035
ccatattaaaaaa

SEQ ID NO: 171 - DNA, 13 bp, Artificial Sequence
  Oligonucleotide for detection of SNP TSC0000035
ttttttgatatgg

SEQ ID NO: 172 - DNA, 13 bp, Artificial Sequence
  Oligonucleotide for detection of SNP TSC0000035
ccatatcaaaaaa

SEQ ID NO: 173 - DNA, 13 bp, Artificial Sequence
  Oligonucleotide for detection of SNP TSC0000035
tttttcgatatgg

SEQ ID NO: 174 - DNA, 13 bp, Artificial Sequence
  Oligonucleotide for detection of SNP TSC0000035
ccatatcgaaaaa

SEQ ID NO: 175 - DNA, 13 bp, Artificial Sequence
  Oligonucleotide for detection of SNP TSC0000035
ttatgttggagaa

SEQ ID NO: 176 - DNA, 13 bp, Artificial Sequence
  Oligonucleotide for detection of SNP TSC0000035
ttctccaacataa

SEQ ID NO: 177 - DNA, 13 bp, Artificial Sequence
  Oligonucleotide for detection of SNP TSC0000035
ttatgtcggagaa

SEQ ID NO: 178 - DNA, 13 bp, Artificial Sequence
  Oligonucleotide for detection of SNP TSC0000035
ttctccgacataa

SEQ ID NO: 179 - DNA, 13 bp, Artificial Sequence
  Oligonucleotide for detection of SNP TSC0000036
ttatatatgtgta

SEQ ID NO: 180 - DNA, 13 bp, Artificial Sequence
  Oligonucleotide for detection of SNP TSC0000036
tacacatatataa

SEQ ID NO: 181 - DNA, 13 bp, Artificial Sequence
  Oligonucleotide for detection of SNP TSC0000036
ttatatttgtgta

SEQ ID NO: 182 - DNA, 13 bp, Artificial Sequence
  Oligonucleotide for detection of SNP TSC0000036
tacacaaatataa

SEQ ID NO: 183 - DNA, 13 bp, Artificial Sequence
  Oligonucleotide for detection of SNP TSC0000036
ttatatatgcgta

SEQ ID NO: 184 - DNA, 13 bp, Artificial Sequence
  Oligonucleotide for detection of SNP TSC0000036
tacgcatatataa

SEQ ID NO: 185 - DNA, 13 bp, Artificial Sequence
  Oligonucleotide for detection of SNP TSC0000036
ttatatttgcgta

SEQ ID NO: 186 - DNA, 13 bp, Artificial Sequence
  Oligonucleotide for detection of SNP TSC0000036
tacgcaaatataa

SEQ ID NO: 187 - DNA, 13 bp, Artificial Sequence
  Oligonucleotide for detection of SNP TSC0000036
tatgtatatataa

SEQ ID NO: 188 - DNA, 13 bp, Artificial Sequence
  Oligonucleotide for detection of SNP TSC0000036
ttatatatacata

SEQ ID NO: 189 - DNA, 13 bp, Artificial Sequence
  Oligonucleotide for detection of SNP TSC0000036
tatgtaaatataa

SEQ ID NO: 190 - DNA, 13 bp, Artificial Sequence
  Oligonucleotide for detection of SNP TSC0000036
ttatatttacata

SEQ ID NO: 191 - DNA, 13 bp, Artificial Sequence
  Oligonucleotide for detection of SNP TSC0000036
tacgtatatataa

SEQ ID NO: 192 - DNA, 13 bp, Artificial Sequence
  Oligonucleotide for detection of SNP TSC0000036
ttatatatacgta

SEQ ID NO: 193 - DNA, 13 bp, Artificial Sequence
  Oligonucleotide for detection of SNP TSC0000036
tacgtaaatataa

SEQ ID NO: 194 - DNA, 13 bp, Artificial Sequence
  Oligonucleotide for detection of SNP TSC0000036
ttatatttacgta

SEQ ID NO: 195 - DNA, 13 bp, Artificial Sequence
  Oligonucleotide for detection of SNP TSC0000037
tttttagtgtaat

SEQ ID NO: 196 - DNA, 13 bp, Artificial Sequence
  Oligonucleotide for detection of SNP TSC0000037
attacactaaaaa

SEQ ID NO: 197 - DNA, 13 bp, Artificial Sequence
  Oligonucleotide for detection of SNP TSC0000037
tttttaatgtaat

SEQ ID NO: 198 - DNA, 13 bp, Artificial Sequence
  Oligonucleotide for detection of SNP TSC0000037
attacattaaaaa

SEQ ID NO: 199 - DNA, 13 bp, Artificial Sequence
  Oligonucleotide for detection of SNP TSC0000040
gagatgtagttty

SEQ ID NO: 200 - DNA, 13 bp, Artificial Sequence
  Oligonucleotide for detection of SNP TSC0000040
raaactacatctc

SEQ ID NO: 201 - DNA, 13 bp, Artificial Sequence
  Oligonucleotide for detection of SNP TSC0000040
gagatggagttty

SEQ ID NO: 202 - DNA, 13 bp, Artificial Sequence
  Oligonucleotide for detection of SNP TSC0000040
raaactccatctc

SEQ ID NO: 203 - DNA, 13 bp, Artificial Sequence
  Oligonucleotide for detection of SNP TSC0000040
gagacgtagttty

SEQ ID NO: 204 - DNA, 13 bp, Artificial Sequence
  Oligonucleotide for detection of SNP TSC0000040
raaactacgtctc

SEQ ID NO: 205 - DNA, 13 bp, Artificial Sequence
  Oligonucleotide for detection of SNP TSC0000040
gagacggagttty

SEQ ID NO: 206 - DNA, 13 bp, Artificial Sequence
  Oligonucleotide for detection of SNP TSC0000040
raaactccgtctc

SEQ ID NO: 207 - DNA, 13 bp, Artificial Sequence
  Oligonucleotide for detection of SNP TSC0000040
gagattatgttty

SEQ ID NO: 208 - DNA, 13 bp, Artificial Sequence
  Oligonucleotide for detection of SNP TSC0000040
raaacataatctc

SEQ ID NO: 209 - DNA, 13 bp, Artificial Sequence
  Oligonucleotide for detection of SNP TSC0000040
gagattttgttty

SEQ ID NO: 210 - DNA, 13 bp, Artificial Sequence
  Oligonucleotide for detection of SNP TSC0000040
raaacaaaatctc

SEQ ID NO: 211 - DNA, 13 bp, Artificial Sequence
  Oligonucleotide for detection of SNP TSC0000040
gagattacgttty

SEQ ID NO: 212 - DNA, 13 bp, Artificial Sequence
  Oligonucleotide for detection of SNP TSC0000040
raaacgtaatctc

SEQ ID NO: 213 - DNA, 13 bp, Artificial Sequence
  Oligonucleotide for detection of SNP TSC0000040
gagatttcgttty

SEQ ID NO: 214 - DNA, 13 bp, Artificial Sequence
  Oligonucleotide for detection of SNP TSC0000040
raaacgaaatctc

SEQ ID NO: 215 - DNA, 13 bp, Artificial Sequence
  Oligonucleotide for detection of SNP TSC0000041
gttattatatata

SEQ ID NO: 216 - DNA, 13 bp, Artificial Sequence
  Oligonucleotide for detection of SNP TSC0000041
tatatataataac

SEQ ID NO: 217 - DNA, 13 bp, Artificial Sequence
  Oligonucleotide for detection of SNP TSC0000041
gttattgtatata

SEQ ID NO: 218 - DNA, 13 bp, Artificial Sequence
  Oligonucleotide for detection of SNP TSC0000041
tatatacaataac

SEQ ID NO: 219 - DNA, 13 bp, Artificial Sequence
  Oligonucleotide for detection of SNP TSC0000042
tattttggtggtt

SEQ ID NO: 220 - DNA, 13 bp, Artificial Sequence
  Oligonucleotide for detection of SNP TSC0000042
aaccaccaaaata

SEQ ID NO: 221 - DNA, 13 bp, Artificial Sequence
  Oligonucleotide for detection of SNP TSC0000042
tattttagtggtt

SEQ ID NO: 222 - DNA, 13 bp, Artificial Sequence
  Oligonucleotide for detection of SNP TSC0000042
aaccactaaaata

SEQ ID NO: 223 - DNA, 13 bp, Artificial Sequence
  Oligonucleotide for detection of SNP TSC0000043
tataagatagtaa

SEQ ID NO: 224 - DNA, 13 bp, Artificial Sequence
  Oligonucleotide for detection of SNP TSC0000043
ttactatcttata

SEQ ID NO: 225 - DNA, 13 bp, Artificial Sequence
  Oligonucleotide for detection of SNP TSC0000043
tataagttagtaa

SEQ ID NO: 226 - DNA, 13 bp, Artificial Sequence
  Oligonucleotide for detection of SNP TSC0000043
ttactaacttata

SEQ ID NO: 227 - DNA, 13 bp, Artificial Sequence
  Oligonucleotide for detection of SNP TSC0000043
ttgttgttttgtg

SEQ ID NO: 228 - DNA, 13 bp, Artificial Sequence
  Oligonucleotide for detection of SNP TSC0000043
cacaaaacaacaa

SEQ ID NO: 229 - DNA, 13 bp, Artificial Sequence
  Oligonucleotide for detection of SNP TSC0000043
ttgttgatttgtg

SEQ ID NO: 230 - DNA, 13 bp, Artificial Sequence
  Oligonucleotide for detection of SNP TSC0000043
cacaaatcaacaa

SEQ ID NO: 231 - DNA, 13 bp, Artificial Sequence
  Oligonucleotide for detection of SNP TSC0000046
ttttttgttttat

SEQ ID NO: 232 - DNA, 13 bp, Artificial Sequence
  Oligonucleotide for detection of SNP TSC0000046
ataaaacaaaaaa

SEQ ID NO: 233 - DNA, 13 bp, Artificial Sequence
  Oligonucleotide for detection of SNP TSC0000046
ttttttattttat

SEQ ID NO: 234 - DNA, 13 bp, Artificial Sequence
  Oligonucleotide for detection of SNP TSC0000046
ataaaataaaaaa

SEQ ID NO: 235 - DNA, 13 bp, Artificial Sequence
  Oligonucleotide for detection of SNP TSC0000047
tttatgaatgttg

SEQ ID NO: 236 - DNA, 13 bp, Artificial Sequence
  Oligonucleotide for detection of SNP TSC0000047
caacattcataaa

SEQ ID NO: 237 - DNA, 13 bp, Artificial Sequence
  Oligonucleotide for detection of SNP TSC0000047
tttatggatgttg

SEQ ID NO: 238 - DNA, 13 bp, Artificial Sequence
  Oligonucleotide for detection of SNP TSC0000047
caacatccataaa

SEQ ID NO: 239 - DNA, 13 bp, Artificial Sequence
  Oligonucleotide for detection of SNP TSC0000048
ttttatagtgaaa

SEQ ID NO: 240 - DNA, 13 bp, Artificial Sequence
  Oligonucleotide for detection of SNP TSC0000048
tttcactataaaa

SEQ ID NO: 241 - DNA, 13 bp, Artificial Sequence
  Oligonucleotide for detection of SNP TSC0000048
ttttatggtgaaa

SEQ ID NO: 242 - DNA, 13 bp, Artificial Sequence
  Oligonucleotide for detection of SNP TSC0000048
tttcaccataaaa

SEQ ID NO: 243 - DNA, 13 bp, Artificial Sequence
  Oligonucleotide for detection of SNP TSC0000049
gttagtgtaagta

SEQ ID NO: 244 - DNA, 13 bp, Artificial Sequence
  Oligonucleotide for detection of SNP TSC0000049
tacttacactaac

SEQ ID NO: 245 - DNA, 13 bp, Artificial Sequence
  Oligonucleotide for detection of SNP TSC0000049
gttagtataagta

SEQ ID NO: 246 - DNA, 13 bp, Artificial Sequence
  Oligonucleotide for detection of SNP TSC0000049
tacttatactaac

SEQ ID NO: 247 - DNA, 13 bp, Artificial Sequence
  Oligonucleotide for detection of SNP TSC0000050
tttgattgtagtt

SEQ ID NO: 248 - DNA, 13 bp, Artificial Sequence
  Oligonucleotide for detection of SNP TSC0000050
aactacaatcaaa

SEQ ID NO: 249 - DNA, 13 bp, Artificial Sequence
  Oligonucleotide for detection of SNP TSC0000050
tttgatcgtagtt

SEQ ID NO: 250 - DNA, 13 bp, Artificial Sequence
  Oligonucleotide for detection of SNP TSC0000050
aactacgatcaaa

SEQ ID NO: 251 - DNA, 13 bp, Artificial Sequence
  Oligonucleotide for detection of SNP TSC0000050
aattgtgattagg

SEQ ID NO: 252 - DNA, 13 bp, Artificial Sequence
  Oligonucleotide for detection of SNP TSC0000050
cctaatcacaatt

SEQ ID NO: 253 - DNA, 13 bp, Artificial Sequence
  Oligonucleotide for detection of SNP TSC0000050
aattgtaattagg

SEQ ID NO: 254 - DNA, 13 bp, Artificial Sequence
  Oligonucleotide for detection of SNP TSC0000050
cctaattacaatt

SEQ ID NO: 255 - DNA, 13 bp, Artificial Sequence
  Oligonucleotide for detection of SNP TSC0000050
aattgcgattagg

SEQ ID NO: 256 - DNA, 13 bp, Artificial Sequence
  Oligonucleotide for detection of SNP TSC0000050
cctaatcgcaatt

SEQ ID NO: 257 - DNA, 13 bp, Artificial Sequence
  Oligonucleotide for detection of SNP TSC0000052
ataattagaggtg

SEQ ID NO: 258 - DNA, 13 bp, Artificial Sequence
  Oligonucleotide for detection of SNP TSC0000052
cacctctaattat

SEQ ID NO: 259 - DNA, 13 bp, Artificial Sequence
  Oligonucleotide for detection of SNP TSC0000052
ataattggaggtg

SEQ ID NO: 260 - DNA, 13 bp, Artificial Sequence
  Oligonucleotide for detection of SNP TSC0000052
cacctccaattat

SEQ ID NO: 261 - DNA, 13 bp, Artificial Sequence
  Oligonucleotide for detection of SNP TSC0000054
ttatttgtggatg

SEQ ID NO: 262 - DNA, 13 bp, Artificial Sequence
  Oligonucleotide for detection of SNP TSC0000054
catccacaaataa

SEQ ID NO: 263 - DNA, 13 bp, Artificial Sequence
  Oligonucleotide for detection of SNP TSC0000054
ttatttatggatg

SEQ ID NO: 264 - DNA, 13 bp, Artificial Sequence
  Oligonucleotide for detection of SNP TSC0000054
catccataaataa

SEQ ID NO: 265 - DNA, 13 bp, Artificial Sequence
  Oligonucleotide for detection of SNP TSC0000054
ttattcgtggatg

SEQ ID NO: 266 - DNA, 13 bp, Artificial Sequence
  Oligonucleotide for detection of SNP TSC0000054
catccacgaataa

SEQ ID NO: 267 - DNA, 13 bp, Artificial Sequence
  Oligonucleotide for detection of SNP TSC0000054
tatttatgggtag

SEQ ID NO: 268 - DNA, 13 bp, Artificial Sequence
  Oligonucleotide for detection of SNP TSC0000054
ctacccataaata

SEQ ID NO: 269 - DNA, 13 bp, Artificial Sequence
  Oligonucleotide for detection of SNP TSC0000054
tatttacgggtag

SEQ ID NO: 270 - DNA, 13 bp, Artificial Sequence
  Oligonucleotide for detection of SNP TSC0000054
ctacccgtaaata

SEQ ID NO: 271 - DNA, 13 bp, Artificial Sequence
  Oligonucleotide for detection of SNP TSC0000055
agagagggattta

SEQ ID NO: 272 - DNA, 13 bp, Artificial Sequence
  Oligonucleotide for detection of SNP TSC0000055
taaatccctctct

SEQ ID NO: 273 - DNA, 13 bp, Artificial Sequence
  Oligonucleotide for detection of SNP TSC0000055
agagagagattta

SEQ ID NO: 274 - DNA, 13 bp, Artificial Sequence
  Oligonucleotide for detection of SNP TSC0000055
taaatctctctct

SEQ ID NO: 275 - DNA, 13 bp, Artificial Sequence
  Oligonucleotide for detection of SNP TSC0000056
tgttttggttaty

SEQ ID NO: 276 - DNA, 13 bp, Artificial Sequence
  Oligonucleotide for detection of SNP TSC0000056
rataaccaaaaca

SEQ ID NO: 277 - DNA, 13 bp, Artificial Sequence
  Oligonucleotide for detection of SNP TSC0000056
tgtttttgttaty

SEQ ID NO: 278 - DNA, 13 bp, Artificial Sequence
  Oligonucleotide for detection of SNP TSC0000056
rataacaaaaaca

SEQ ID NO: 279 - DNA, 13 bp, Artificial Sequence
  Oligonucleotide for detection of SNP TSC0000056
tgtttcggttaty

SEQ ID NO: 280 - DNA, 13 bp, Artificial Sequence
  Oligonucleotide for detection of SNP TSC0000056
rataaccgaaaca

SEQ ID NO: 281 - DNA, 13 bp, Artificial Sequence
  Oligonucleotide for detection of SNP TSC0000056
tgttttcgttaty

SEQ ID NO: 282 - DNA, 13 bp, Artificial Sequence
  Oligonucleotide for detection of SNP TSC0000056
rataacgaaaaca

SEQ ID NO: 283 - DNA, 13 bp, Artificial Sequence
  Oligonucleotide for detection of SNP TSC0000056
ggtaattgggata

SEQ ID NO: 284 - DNA, 13 bp, Artificial Sequence
  Oligonucleotide for detection of SNP TSC0000056
tatcccaattacc

SEQ ID NO: 285 - DNA, 13 bp, Artificial Sequence
  Oligonucleotide for detection of SNP TSC0000056
ggtaatggggata

SEQ ID NO: 286 - DNA, 13 bp, Artificial Sequence
  Oligonucleotide for detection of SNP TSC0000056
tatccccattacc

SEQ ID NO: 287 - DNA, 13 bp, Artificial Sequence
  Oligonucleotide for detection of SNP TSC0000056
ggtaatcgggata

SEQ ID NO: 288 - DNA, 13 bp, Artificial Sequence
  Oligonucleotide for detection of SNP TSC0000056
tatcccgattacc

SEQ ID NO: 289 - DNA, 13 bp, Artificial Sequence
  Oligonucleotide for detection of SNP TSC0000056
ggtaacggggata

SEQ ID NO: 290 - DNA, 13 bp, Artificial Sequence
  Oligonucleotide for detection of SNP TSC0000056
tatccccgttacc

SEQ ID NO: 291 - DNA, 13 bp, Artificial Sequence
  Oligonucleotide for detection of SNP TSC0000057
agggttgttgtgg

SEQ ID NO: 292 - DNA, 13 bp, Artificial Sequence
  Oligonucleotide for detection of SNP TSC0000057
ccacaacaaccct

SEQ ID NO: 293 - DNA, 13 bp, Artificial Sequence
  Oligonucleotide for detection of SNP TSC0000057
agggttattgtgg

SEQ ID NO: 294 - DNA, 13 bp, Artificial Sequence
  Oligonucleotide for detection of SNP TSC0000057
ccacaataaccct

SEQ ID NO: 295 - DNA, 13 bp, Artificial Sequence
  Oligonucleotide for detection of SNP TSC0000057
agggttgtcgtgg

SEQ ID NO: 296 - DNA, 13 bp, Artificial Sequence
  Oligonucleotide for detection of SNP TSC0000057
ccacgacaaccct

SEQ ID NO: 297 - DNA, 13 bp, Artificial Sequence
  Oligonucleotide for detection of SNP TSC0000057
agggttatcgtgg

SEQ ID NO: 298 - DNA, 13 bp, Artificial Sequence
  Oligonucleotide for detection of SNP TSC0000057
ccacgataaccct

SEQ ID NO: 299 - DNA, 13 bp, Artificial Sequence
  Oligonucleotide for detection of SNP TSC0000058
ttattatgggttg

SEQ ID NO: 300 - DNA, 13 bp, Artificial Sequence
  Oligonucleotide for detection of SNP TSC0000058
caacccataataa

SEQ ID NO: 301 - DNA, 13 bp, Artificial Sequence
  Oligonucleotide for detection of SNP TSC0000058
ttattacgggttg

SEQ ID NO: 302 - DNA, 13 bp, Artificial Sequence
  Oligonucleotide for detection of SNP TSC0000058
caacccgtaataa

SEQ ID NO: 303 - DNA, 13 bp, Artificial Sequence
  Oligonucleotide for detection of SNP TSC0000058
taatttgtggtaa

SEQ ID NO: 304 - DNA, 13 bp, Artificial Sequence
  Oligonucleotide for detection of SNP TSC0000058
ttaccacaaatta

SEQ ID NO: 305 - DNA, 13 bp, Artificial Sequence
  Oligonucleotide for detection of SNP TSC0000058
taatttatggtaa

SEQ ID NO: 306 - DNA, 13 bp, Artificial Sequence
  Oligonucleotide for detection of SNP TSC0000058
ttaccataaatta

SEQ ID NO: 307 - DNA, 13 bp, Artificial Sequence
  Oligonucleotide for detection of SNP TSC0000058
taattcgtggtaa

SEQ ID NO: 308 - DNA, 13 bp, Artificial Sequence
  Oligonucleotide for detection of SNP TSC0000058
ttaccacgaatta

SEQ ID NO: 309 - DNA, 13 bp, Artificial Sequence
  Oligonucleotide for detection of SNP TSC0000060
taggtgtgttgtg

SEQ ID NO: 310 - DNA, 13 bp, Artificial Sequence
  Oligonucleotide for detection of SNP TSC0000060
cacaacacaccta

SEQ ID NO: 311 - DNA, 13 bp, Artificial Sequence
  Oligonucleotide for detection of SNP TSC0000060
taggtgcgttgtg

SEQ ID NO: 312 - DNA, 13 bp, Artificial Sequence
  Oligonucleotide for detection of SNP TSC0000060
cacaacgcaccta

SEQ ID NO: 313 - DNA, 13 bp, Artificial Sequence
  Oligonucleotide for detection of SNP TSC0000060
tatagtatatttg

SEQ ID NO: 314 - DNA, 13 bp, Artificial Sequence
  Oligonucleotide for detection of SNP TSC0000060
caaatatactata

SEQ ID NO: 315 - DNA, 13 bp, Artificial Sequence
  Oligonucleotide for detection of SNP TSC0000060
tatagtgtatttg

SEQ ID NO: 316 - DNA, 13 bp, Artificial Sequence
  Oligonucleotide for detection of SNP TSC0000060
caaatacactata

SEQ ID NO: 317 - DNA, 13 bp, Artificial Sequence
  Oligonucleotide for detection of SNP TSC0000060
tatagcgtatttg

SEQ ID NO: 318 - DNA, 13 bp, Artificial Sequence
  Oligonucleotide for detection of SNP TSC0000060
caaatacgctata

SEQ ID NO: 319 - DNA, 13 bp, Artificial Sequence
  Oligonucleotide for detection of SNP TSC0000061
gttattgattaag

SEQ ID NO: 320 - DNA, 13 bp, Artificial Sequence
  Oligonucleotide for detection of SNP TSC0000061
cttaatcaataac

SEQ ID NO: 321 - DNA, 13 bp, Artificial Sequence
  Oligonucleotide for detection of SNP TSC0000061
gttattaattaag

SEQ ID NO: 322 - DNA, 13 bp, Artificial Sequence
  Oligonucleotide for detection of SNP TSC0000061
cttaattaataac

SEQ ID NO: 323 - DNA, 13 bp, Artificial Sequence
  Oligonucleotide for detection of SNP TSC0000061
gttatcgattaag

SEQ ID NO: 324 - DNA, 13 bp, Artificial Sequence
  Oligonucleotide for detection of SNP TSC0000061
cttaatcgataac

SEQ ID NO: 325 - DNA, 13 bp, Artificial Sequence
  Oligonucleotide for detection of SNP TSC0000061
tttagttgatggy

SEQ ID NO: 326 - DNA, 13 bp, Artificial Sequence
  Oligonucleotide for detection of SNP TSC0000061
rccatcaactaaa

SEQ ID NO: 327 - DNA, 13 bp, Artificial Sequence
  Oligonucleotide for detection of SNP TSC0000061
tttagtcgatggy

SEQ ID NO: 328 - DNA, 13 bp, Artificial Sequence
  Oligonucleotide for detection of SNP TSC0000061
rccatcgactaaa

SEQ ID NO: 329 - DNA, 13 bp, Artificial Sequence
  Oligonucleotide for detection of SNP TSC0000062
ggaagttgggatt

SEQ ID NO: 330 - DNA, 13 bp, Artificial Sequence
  Oligonucleotide for detection of SNP TSC0000062
aatcccaacttcc

SEQ ID NO: 331 - DNA, 13 bp, Artificial Sequence
  Oligonucleotide for detection of SNP TSC0000062
ggaagtcgggatt

SEQ ID NO: 332 - DNA, 13 bp, Artificial Sequence
  Oligonucleotide for detection of SNP TSC0000062
aatcccgacttcc

SEQ ID NO: 333 - DNA, 13 bp, Artificial Sequence
  Oligonucleotide for detection of SNP TSC0000062
aattttggtttty

SEQ ID NO: 334 - DNA, 13 bp, Artificial Sequence
  Oligonucleotide for detection of SNP TSC0000062
raaaaccaaaatt

SEQ ID NO: 335 - DNA, 13 bp, Artificial Sequence
  Oligonucleotide for detection of SNP TSC0000062
aattttagtttty

SEQ ID NO: 336 - DNA, 13 bp, Artificial Sequence
  Oligonucleotide for detection of SNP TSC0000062
raaaactaaaatt

SEQ ID NO: 337 - DNA, 13 bp, Artificial Sequence
  Oligonucleotide for detection of SNP TSC0000062
aatttcggtttty

SEQ ID NO: 338 - DNA, 13 bp, Artificial Sequence
  Oligonucleotide for detection of SNP TSC0000062
raaaaccgaaatt

SEQ ID NO: 339 - DNA, 13 bp, Artificial Sequence
  Oligonucleotide for detection of SNP TSC0000063
tgtttggggtttg

SEQ ID NO: 340 - DNA, 13 bp, Artificial Sequence
  Oligonucleotide for detection of SNP TSC0000063
caaaccccaaaca

SEQ ID NO: 341 - DNA, 13 bp, Artificial Sequence
  Oligonucleotide for detection of SNP TSC0000063
tgtttgaggtttg

SEQ ID NO: 342 - DNA, 13 bp, Artificial Sequence
  Oligonucleotide for detection of SNP TSC0000063
caaacctcaaaca

SEQ ID NO: 343 - DNA, 13 bp, Artificial Sequence
  Oligonucleotide for detection of SNP TSC0000063
tgttcggggtttg

SEQ ID NO: 344 - DNA, 13 bp, Artificial Sequence
  Oligonucleotide for detection of SNP TSC0000063
caaaccccgaaca

SEQ ID NO: 345 - DNA, 13 bp, Artificial Sequence
  Oligonucleotide for detection of SNP TSC0000063
tgttcgaggtttg

SEQ ID NO: 346 - DNA, 13 bp, Artificial Sequence
  Oligonucleotide for detection of SNP TSC0000063
caaacctcgaaca

SEQ ID NO: 347 - DNA, 13 bp, Artificial Sequence
  Oligonucleotide for detection of SNP TSC0000064
atgtgggtattgg

SEQ ID NO: 348 - DNA, 13 bp, Artificial Sequence
  Oligonucleotide for detection of SNP TSC0000064
ccaatacccacat

SEQ ID NO: 349 - DNA, 13 bp, Artificial Sequence
  Oligonucleotide for detection of SNP TSC0000064
atgtggatattgg

SEQ ID NO: 350 - DNA, 13 bp, Artificial Sequence
  Oligonucleotide for detection of SNP TSC0000064
ccaatatccacat

SEQ ID NO: 351 - DNA, 13 bp, Artificial Sequence
  Oligonucleotide for detection of SNP TSC0000064
atgcgggtattgg

SEQ ID NO: 352 - DNA, 13 bp, Artificial Sequence
  Oligonucleotide for detection of SNP TSC0000064
ccaatacccgcat

SEQ ID NO: 353 - DNA, 13 bp, Artificial Sequence
  Oligonucleotide for detection of SNP TSC0000064
atgcggatattgg

SEQ ID NO: 354 - DNA, 13 bp, Artificial Sequence
  Oligonucleotide for detection of SNP TSC0000064
ccaatatccgcat

SEQ ID NO: 355 - DNA, 13 bp, Artificial Sequence
  Oligonucleotide for detection of SNP TSC0000065
aaggttgtgaatt

SEQ ID NO: 356 - DNA, 13 bp, Artificial Sequence
  Oligonucleotide for detection of SNP TSC0000065
aattcacaacctt

SEQ ID NO: 357 - DNA, 13 bp, Artificial Sequence
  Oligonucleotide for detection of SNP TSC0000065
aaggttatgaatt

SEQ ID NO: 358 - DNA, 13 bp, Artificial Sequence
  Oligonucleotide for detection of SNP TSC0000065
aattcataacctt

SEQ ID NO: 359 - DNA, 13 bp, Artificial Sequence
  Oligonucleotide for detection of SNP TSC0000065
aaggtcgtgaatt

SEQ ID NO: 360 - DNA, 13 bp, Artificial Sequence
  Oligonucleotide for detection of SNP TSC0000065
aattcacgacctt

SEQ ID NO: 361 - DNA, 13 bp, Artificial Sequence
  Oligonucleotide for detection of SNP TSC0000065
aatttatgatttt

SEQ ID NO: 362 - DNA, 13 bp, Artificial Sequence
  Oligonucleotide for detection of SNP TSC0000065
aaaatcataaatt

SEQ ID NO: 363 - DNA, 13 bp, Artificial Sequence
  Oligonucleotide for detection of SNP TSC0000065
aatttacgatttt

SEQ ID NO: 364 - DNA, 13 bp, Artificial Sequence
  Oligonucleotide for detection of SNP TSC0000065
aaaatcgtaaatt

SEQ ID NO: 365 - DNA, 13 bp, Artificial Sequence
  Oligonucleotide for detection of SNP TSC0000066
agtttatggatgg

SEQ ID NO: 366 - DNA, 13 bp, Artificial Sequence
  Oligonucleotide for detection of SNP TSC0000066
ccatccataaact

SEQ ID NO: 367 - DNA, 13 bp, Artificial Sequence
  Oligonucleotide for detection of SNP TSC0000066
agtttagggatgg

SEQ ID NO: 368 - DNA, 13 bp, Artificial Sequence
  Oligonucleotide for detection of SNP TSC0000066
ccatccctaaact

SEQ ID NO: 369 - DNA, 13 bp, Artificial Sequence
  Oligonucleotide for detection of SNP TSC0000066
ttatttatgagtt

SEQ ID NO: 370 - DNA, 13 bp, Artificial Sequence
  Oligonucleotide for detection of SNP TSC0000066
aactcataaataa

SEQ ID NO: 371 - DNA, 13 bp, Artificial Sequence
  Oligonucleotide for detection of SNP TSC0000066
ttatttttgagtt

SEQ ID NO: 372 - DNA, 13 bp, Artificial Sequence
  Oligonucleotide for detection of SNP TSC0000066
aactcaaaaataa

SEQ ID NO: 373 - DNA, 13 bp, Artificial Sequence
  Oligonucleotide for detection of SNP TSC0000067
gttattatgagat

SEQ ID NO: 374 - DNA, 13 bp, Artificial Sequence
  Oligonucleotide for detection of SNP TSC0000067
atctcataataac

SEQ ID NO: 375 - DNA, 13 bp, Artificial Sequence
  Oligonucleotide for detection of SNP TSC0000067
gttattgtgagat

SEQ ID NO: 376 - DNA, 13 bp, Artificial Sequence
  Oligonucleotide for detection of SNP TSC0000067
atctcacaataac

SEQ ID NO: 377 - DNA, 13 bp, Artificial Sequence
  Oligonucleotide for detection of SNP TSC0000067
gttatcgtgagat

SEQ ID NO: 378 - DNA, 13 bp, Artificial Sequence
  Oligonucleotide for detection of SNP TSC0000067
atctcacgataac

SEQ ID NO: 379 - DNA, 13 bp, Artificial Sequence
  Oligonucleotide for detection of SNP TSC0000067
attttatgatagy

SEQ ID NO: 380 - DNA, 13 bp, Artificial Sequence
  Oligonucleotide for detection of SNP TSC0000067
rctatcataaaat

SEQ ID NO: 381 - DNA, 13 bp, Artificial Sequence
  Oligonucleotide for detection of SNP TSC0000067
attttacgatagy

SEQ ID NO: 382 - DNA, 13 bp, Artificial Sequence
  Oligonucleotide for detection of SNP TSC0000067
rctatcgtaaaat

SEQ ID NO: 383 - DNA, 13 bp, Artificial Sequence
  Oligonucleotide for detection of SNP TSC0000068
ttttttgtgattt

SEQ ID NO: 384 - DNA, 13 bp, Artificial Sequence
  Oligonucleotide for detection of SNP TSC0000068
aaatcacaaaaaa

SEQ ID NO: 385 - DNA, 13 bp, Artificial Sequence
  Oligonucleotide for detection of SNP TSC0000068
ttttttatgattt

SEQ ID NO: 386 - DNA, 13 bp, Artificial Sequence
  Oligonucleotide for detection of SNP TSC0000068
aaatcataaaaaa

SEQ ID NO: 387 - DNA, 13 bp, Artificial Sequence
  Oligonucleotide for detection of SNP TSC0000068
tttttcgtgattt

SEQ ID NO: 388 - DNA, 13 bp, Artificial Sequence
  Oligonucleotide for detection of SNP TSC0000068
aaatcacgaaaaa

SEQ ID NO: 389 - DNA, 13 bp, Artificial Sequence
  Oligonucleotide for detection of SNP TSC0000068
aggttatgaaggg

SEQ ID NO: 390 - DNA, 13 bp, Artificial Sequence
  Oligonucleotide for detection of SNP TSC0000068
cccttcataacct

SEQ ID NO: 391 - DNA, 13 bp, Artificial Sequence
  Oligonucleotide for detection of SNP TSC0000068
aggttacgaaggg

SEQ ID NO: 392 - DNA, 13 bp, Artificial Sequence
  Oligonucleotide for detection of SNP TSC0000068
cccttcgtaacct

SEQ ID NO: 393 - DNA, 13 bp, Artificial Sequence
  Oligonucleotide for detection of SNP TSC0000069
agttatgtggggt

SEQ ID NO: 394 - DNA, 13 bp, Artificial Sequence
  Oligonucleotide for detection of SNP TSC0000069
accccacataact

SEQ ID NO: 395 - DNA, 13 bp, Artificial Sequence
  Oligonucleotide for detection of SNP TSC0000069
agttatttggggt

SEQ ID NO: 396 - DNA, 13 bp, Artificial Sequence
  Oligonucleotide for detection of SNP TSC0000069
accccaaataact

SEQ ID NO: 397 - DNA, 13 bp, Artificial Sequence
  Oligonucleotide for detection of SNP TSC0000069
agttacgtggggt

SEQ ID NO: 398 - DNA, 13 bp, Artificial Sequence
  Oligonucleotide for detection of SNP TSC0000069
accccacgtaact

SEQ ID NO: 399 - DNA, 13 bp, Artificial Sequence
  Oligonucleotide for detection of SNP TSC0000069
attttatgtggtt

SEQ ID NO: 400 - DNA, 13 bp, Artificial Sequence
  Oligonucleotide for detection of SNP TSC0000069
aaccacataaaat

SEQ ID NO: 401 - DNA, 13 bp, Artificial Sequence
  Oligonucleotide for detection of SNP TSC0000069
attttaagtggtt

SEQ ID NO: 402 - DNA, 13 bp, Artificial Sequence
  Oligonucleotide for detection of SNP TSC0000069
aaccacttaaaat

SEQ ID NO: 403 - DNA, 13 bp, Artificial Sequence
  Oligonucleotide for detection of SNP TSC0000069
attttacgtggtt

SEQ ID NO: 404 - DNA, 13 bp, Artificial Sequence
  Oligonucleotide for detection of SNP TSC0000069
aaccacgtaaaat

SEQ ID NO: 405 - DNA, 13 bp, Artificial Sequence
  Oligonucleotide for detection of SNP TSC0000070
aaaagtataaggt

SEQ ID NO: 406 - DNA, 13 bp, Artificial Sequence
  Oligonucleotide for detection of SNP TSC0000070
accttatactttt

SEQ ID NO: 407 - DNA, 13 bp, Artificial Sequence
  Oligonucleotide for detection of SNP TSC0000070
aaaagtgtaaggt

SEQ ID NO: 408 - DNA, 13 bp, Artificial Sequence
  Oligonucleotide for detection of SNP TSC0000070
accttacactttt

SEQ ID NO: 409 - DNA, 13 bp, Artificial Sequence
  Oligonucleotide for detection of SNP TSC0000071
aattagagaatgy

SEQ ID NO: 410 - DNA, 13 bp, Artificial Sequence
  Oligonucleotide for detection of SNP TSC0000071
rcattctctaatt

SEQ ID NO: 411 - DNA, 13 bp, Artificial Sequence
  Oligonucleotide for detection of SNP TSC0000071
aattagggaatgy

SEQ ID NO: 412 - DNA, 13 bp, Artificial Sequence
  Oligonucleotide for detection of SNP TSC0000071
rcattccctaatt

SEQ ID NO: 413 - DNA, 13 bp, Artificial Sequence
  Oligonucleotide for detection of SNP TSC0000071
aattagagaacgy

SEQ ID NO: 414 - DNA, 13 bp, Artificial Sequence
  Oligonucleotide for detection of SNP TSC0000071
rcgttctctaatt

SEQ ID NO: 415 - DNA, 13 bp, Artificial Sequence
  Oligonucleotide for detection of SNP TSC0000071
aattagggaacgy

SEQ ID NO: 416 - DNA, 13 bp, Artificial Sequence
  Oligonucleotide for detection of SNP TSC0000071
rcgttccctaatt

SEQ ID NO: 417 - DNA, 13 bp, Artificial Sequence
  Oligonucleotide for detection of SNP TSC0000072
tatgttgttttty

SEQ ID NO: 418 - DNA, 13 bp, Artificial Sequence
  Oligonucleotide for detection of SNP TSC0000072
raaaaacaacata

SEQ ID NO: 419 - DNA, 13 bp, Artificial Sequence
  Oligonucleotide for detection of SNP TSC0000072
tatgttattttty

SEQ ID NO: 420 - DNA, 13 bp, Artificial Sequence
  Oligonucleotide for detection of SNP TSC0000072
raaaaataacata

SEQ ID NO: 421 - DNA, 13 bp, Artificial Sequence
  Oligonucleotide for detection of SNP TSC0000072
tatgtcgttttty

SEQ ID NO: 422 - DNA, 13 bp, Artificial Sequence
  Oligonucleotide for detection of SNP TSC0000072
raaaaacgacata

SEQ ID NO: 423 - DNA, 13 bp, Artificial Sequence
  Oligonucleotide for detection of SNP TSC0000072
gagaggtgatatg

SEQ ID NO: 424 - DNA, 13 bp, Artificial Sequence
  Oligonucleotide for detection of SNP TSC0000072
catatcacctctc

SEQ ID NO: 425 - DNA, 13 bp, Artificial Sequence
  Oligonucleotide for detection of SNP TSC0000072
gagaggcgatatg

SEQ ID NO: 426 - DNA, 13 bp, Artificial Sequence
  Oligonucleotide for detection of SNP TSC0000072
catatcgcctctc

SEQ ID NO: 427 - DNA, 13 bp, Artificial Sequence
  Oligonucleotide for detection of SNP TSC0000073
gtgggggtatttt

SEQ ID NO: 428 - DNA, 13 bp, Artificial Sequence
  Oligonucleotide for detection of SNP TSC0000073
aaaatacccccac

SEQ ID NO: 429 - DNA, 13 bp, Artificial Sequence
  Oligonucleotide for detection of SNP TSC0000073
gtggggatatttt

SEQ ID NO: 430 - DNA, 13 bp, Artificial Sequence
  Oligonucleotide for detection of SNP TSC0000073
aaaatatccccac

SEQ ID NO: 431 - DNA, 13 bp, Artificial Sequence
  Oligonucleotide for detection of SNP TSC0000073
gcgggggtatttt

SEQ ID NO: 432 - DNA, 13 bp, Artificial Sequence
  Oligonucleotide for detection of SNP TSC0000073
aaaatacccccgc

SEQ ID NO: 433 - DNA, 13 bp, Artificial Sequence
  Oligonucleotide for detection of SNP TSC0000073
gcggggatatttt

SEQ ID NO: 434 - DNA, 13 bp, Artificial Sequence
  Oligonucleotide for detection of SNP TSC0000073
aaaatatccccgc

SEQ ID NO: 435 - DNA, 13 bp, Artificial Sequence
  Oligonucleotide for detection of SNP TSC0000074
atttggaggtaty

SEQ ID NO: 436 - DNA, 13 bp, Artificial Sequence
  Oligonucleotide for detection of SNP TSC0000074
ratacctccaaat

SEQ ID NO: 437 - DNA, 13 bp, Artificial Sequence
  Oligonucleotide for detection of SNP TSC0000074
atttgggggtaty

SEQ ID NO: 438 - DNA, 13 bp, Artificial Sequence
  Oligonucleotide for detection of SNP TSC0000074
ratacccccaaat

SEQ ID NO: 439 - DNA, 13 bp, Artificial Sequence
  Oligonucleotide for detection of SNP TSC0000077
tgatatgtgttta

SEQ ID NO: 440 - DNA, 13 bp, Artificial Sequence
  Oligonucleotide for detection of SNP TSC0000077
taaacacatatca

SEQ ID NO: 441 - DNA, 13 bp, Artificial Sequence
  Oligonucleotide for detection of SNP TSC0000077
tgatatttgttta

SEQ ID NO: 442 - DNA, 13 bp, Artificial Sequence
  Oligonucleotide for detection of SNP TSC0000077
taaacaaatatca

SEQ ID NO: 443 - DNA, 13 bp, Artificial Sequence
  Oligonucleotide for detection of SNP TSC0000077
tgatacgtgttta

SEQ ID NO: 444 - DNA, 13 bp, Artificial Sequence
  Oligonucleotide for detection of SNP TSC0000077
taaacacgtatca

SEQ ID NO: 445 - DNA, 13 bp, Artificial Sequence
  Oligonucleotide for detection of SNP TSC0000077
taagtatgtatta

SEQ ID NO: 446 - DNA, 13 bp, Artificial Sequence
  Oligonucleotide for detection of SNP TSC0000077
taatacatactta

SEQ ID NO: 447 - DNA, 13 bp, Artificial Sequence
  Oligonucleotide for detection of SNP TSC0000077
taagtaagtatta

SEQ ID NO: 448 - DNA, 13 bp, Artificial Sequence
  Oligonucleotide for detection of SNP TSC0000077
taatacttactta

SEQ ID NO: 449 - DNA, 13 bp, Artificial Sequence
  Oligonucleotide for detection of SNP TSC0000077
taagtacgtatta

SEQ ID NO: 450 - DNA, 13 bp, Artificial Sequence
  Oligonucleotide for detection of SNP TSC0000077
taatacgtactta

SEQ ID NO: 451 - DNA, 13 bp, Artificial Sequence
  Oligonucleotide for detection of SNP TSC0000078
ttaagttttttta

SEQ ID NO: 452 - DNA, 13 bp, Artificial Sequence
  Oligonucleotide for detection of SNP TSC0000078
taaaaaaacttaa

SEQ ID NO: 453 - DNA, 13 bp, Artificial Sequence
  Oligonucleotide for detection of SNP TSC0000078
ttaagtgttttta

SEQ ID NO: 454 - DNA, 13 bp, Artificial Sequence
  Oligonucleotide for detection of SNP TSC0000078
taaaaacacttaa

SEQ ID NO: 455 - DNA, 13 bp, Artificial Sequence
  Oligonucleotide for detection of SNP TSC0000078
taaagggatttag

SEQ ID NO: 456 - DNA, 13 bp, Artificial Sequence
  Oligonucleotide for detection of SNP TSC0000078
ctaaatcccttta

SEQ ID NO: 457 - DNA, 13 bp, Artificial Sequence
  Oligonucleotide for detection of SNP TSC0000078
taaaggtatttag

SEQ ID NO: 458 - DNA, 13 bp, Artificial Sequence
  Oligonucleotide for detection of SNP TSC0000078
ctaaataccttta

SEQ ID NO: 459 - DNA, 13 bp, Artificial Sequence
  Oligonucleotide for detection of SNP TSC0000079
ttattagtaataa

SEQ ID NO: 460 - DNA, 13 bp, Artificial Sequence
  Oligonucleotide for detection of SNP TSC0000079
ttattactaataa

SEQ ID NO: 461 - DNA, 13 bp, Artificial Sequence
  Oligonucleotide for detection of SNP TSC0000079
ttattaataataa

SEQ ID NO: 462 - DNA, 13 bp, Artificial Sequence
  Oligonucleotide for detection of SNP TSC0000079
ttattattaataa

SEQ ID NO: 463 - DNA, 13 bp, Artificial Sequence
  Oligonucleotide for detection of SNP TSC0000080
tggaatgtgtttg

SEQ ID NO: 464 - DNA, 13 bp, Artificial Sequence
  Oligonucleotide for detection of SNP TSC0000080
caaacacattcca

SEQ ID NO: 465 - DNA, 13 bp, Artificial Sequence
  Oligonucleotide for detection of SNP TSC0000080
tggaatttgtttg

SEQ ID NO: 466 - DNA, 13 bp, Artificial Sequence
  Oligonucleotide for detection of SNP TSC0000080
caaacaaattcca

SEQ ID NO: 467 - DNA, 13 bp, Artificial Sequence
  Oligonucleotide for detection of SNP TSC0000080
taggtatatttta

SEQ ID NO: 468 - DNA, 13 bp, Artificial Sequence
  Oligonucleotide for detection of SNP TSC0000080
taaaatataccta

SEQ ID NO: 469 - DNA, 13 bp, Artificial Sequence
  Oligonucleotide for detection of SNP TSC0000080
taggtaaatttta

SEQ ID NO: 470 - DNA, 13 bp, Artificial Sequence
  Oligonucleotide for detection of SNP TSC0000080
taaaatttaccta

SEQ ID NO: 471 - DNA, 13 bp, Artificial Sequence
  Oligonucleotide for detection of SNP TSC0000086
ttttgtgttaggy

SEQ ID NO: 472 - DNA, 13 bp, Artificial Sequence
  Oligonucleotide for detection of SNP TSC0000086
rcctaacacaaaa

SEQ ID NO: 473 - DNA, 13 bp, Artificial Sequence
  Oligonucleotide for detection of SNP TSC0000086
ttttgttttaggy

SEQ ID NO: 474 - DNA, 13 bp, Artificial Sequence
  Oligonucleotide for detection of SNP TSC0000086
rcctaaaacaaaa

SEQ ID NO: 475 - DNA, 13 bp, Artificial Sequence
  Oligonucleotide for detection of SNP TSC0000086
gtttggtatagag

SEQ ID NO: 476 - DNA, 13 bp, Artificial Sequence
  Oligonucleotide for detection of SNP TSC0000086
ctctataccaaac

SEQ ID NO: 477 - DNA, 13 bp, Artificial Sequence
  Oligonucleotide for detection of SNP TSC0000086
gtttggaatagag

SEQ ID NO: 478 - DNA, 13 bp, Artificial Sequence
  Oligonucleotide for detection of SNP TSC0000086
ctctattccaaac

SEQ ID NO: 479 - DNA, 13 bp, Artificial Sequence
  Oligonucleotide for detection of SNP TSC0000088
ttttttggggatg

SEQ ID NO: 480 - DNA, 13 bp, Artificial Sequence
  Oligonucleotide for detection of SNP TSC0000088
catccccaaaaaa

SEQ ID NO: 481 - DNA, 13 bp, Artificial Sequence
  Oligonucleotide for detection of SNP TSC0000088
tttttttgggatg

SEQ ID NO: 482 - DNA, 13 bp, Artificial Sequence
  Oligonucleotide for detection of SNP TSC0000088
catcccaaaaaaa

SEQ ID NO: 483 - DNA, 13 bp, Artificial Sequence
  Oligonucleotide for detection of SNP TSC0000088
tatttttaagaga

SEQ ID NO: 484 - DNA, 13 bp, Artificial Sequence
  Oligonucleotide for detection of SNP TSC0000088
tctcttaaaaata

SEQ ID NO: 485 - DNA, 13 bp, Artificial Sequence
  Oligonucleotide for detection of SNP TSC0000088
tattttaaagaga

SEQ ID NO: 486 - DNA, 13 bp, Artificial Sequence
  Oligonucleotide for detection of SNP TSC0000088
tctctttaaaata

SEQ ID NO: 487 - DNA, 13 bp, Artificial Sequence
  Oligonucleotide for detection of SNP TSC0000093
tattttggtgtty

SEQ ID NO: 488 - DNA, 13 bp, Artificial Sequence
  Oligonucleotide for detection of SNP TSC0000093
raacaccaaaata

SEQ ID NO: 489 - DNA, 13 bp, Artificial Sequence
  Oligonucleotide for detection of SNP TSC0000093
tatttttgtgtty

SEQ ID NO: 490 - DNA, 13 bp, Artificial Sequence
  Oligonucleotide for detection of SNP TSC0000093
raacacaaaaata

SEQ ID NO: 491 - DNA, 13 bp, Artificial Sequence
  Oligonucleotide for detection of SNP TSC0000093
tatttcggtgtty

SEQ ID NO: 492 - DNA, 13 bp, Artificial Sequence
  Oligonucleotide for detection of SNP TSC0000093
raacaccgaaata

SEQ ID NO: 493 - DNA, 13 bp, Artificial Sequence
  Oligonucleotide for detection of SNP TSC0000093
gagtattgagata

SEQ ID NO: 494 - DNA, 13 bp, Artificial Sequence
  Oligonucleotide for detection of SNP TSC0000093
tatctcaatactc

SEQ ID NO: 495 - DNA, 13 bp, Artificial Sequence
  Oligonucleotide for detection of SNP TSC0000093
gagtatagagata

SEQ ID NO: 496 - DNA, 13 bp, Artificial Sequence
  Oligonucleotide for detection of SNP TSC0000093
tatctctatactc

SEQ ID NO: 497 - DNA, 13 bp, Artificial Sequence
  Oligonucleotide for detection of SNP TSC0000093
gagtatcgagata

SEQ ID NO: 498 - DNA, 13 bp, Artificial Sequence
  Oligonucleotide for detection of SNP TSC0000093
tatctcgatactc

SEQ ID NO: 499 - DNA, 13 bp, Artificial Sequence
  Oligonucleotide for detection of SNP TSC0000094
tgatttgtatatg

SEQ ID NO: 500 - DNA, 13 bp, Artificial Sequence
  Oligonucleotide for detection of SNP TSC0000094
catatacaaatca

SEQ ID NO: 501 - DNA, 13 bp, Artificial Sequence
  Oligonucleotide for detection of SNP TSC0000094
tgatttttatatg

SEQ ID NO: 502 - DNA, 13 bp, Artificial Sequence
  Oligonucleotide for detection of SNP TSC0000094
catataaaaatca

SEQ ID NO: 503 - DNA, 13 bp, Artificial Sequence
  Oligonucleotide for detection of SNP TSC0000094
tatatgtaaatta

SEQ ID NO: 504 - DNA, 13 bp, Artificial Sequence
  Oligonucleotide for detection of SNP TSC0000094
taatttacatata

SEQ ID NO: 505 - DNA, 13 bp, Artificial Sequence
  Oligonucleotide for detection of SNP TSC0000094
tatatgaaaatta

SEQ ID NO: 506 - DNA, 13 bp, Artificial Sequence
  Oligonucleotide for detection of SNP TSC0000094
taattttcatata

SEQ ID NO: 507 - DNA, 13 bp, Artificial Sequence
  Oligonucleotide for detection of SNP TSC0000095
ttatatagttttt

SEQ ID NO: 508 - DNA, 13 bp, Artificial Sequence
  Oligonucleotide for detection of SNP TSC0000095
aaaaactatataa

SEQ ID NO: 509 - DNA, 13 bp, Artificial Sequence
  Oligonucleotide for detection of SNP TSC0000095
ttatatggttttt

SEQ ID NO: 510 - DNA, 13 bp, Artificial Sequence
  Oligonucleotide for detection of SNP TSC0000095
aaaaaccatataa

SEQ ID NO: 511 - DNA, 13 bp, Artificial Sequence
  Oligonucleotide for detection of SNP TSC0000095
ttatacggttttt

SEQ ID NO: 512 - DNA, 13 bp, Artificial Sequence
  Oligonucleotide for detection of SNP TSC0000095
aaaaaccgtataa

SEQ ID NO: 513 - DNA, 13 bp, Artificial Sequence
  Oligonucleotide for detection of SNP TSC0000095
aaaaattgtatga

SEQ ID NO: 514 - DNA, 13 bp, Artificial Sequence
  Oligonucleotide for detection of SNP TSC0000095
tcatacaattttt

SEQ ID NO: 515 - DNA, 13 bp, Artificial Sequence
  Oligonucleotide for detection of SNP TSC0000095
aaaaatcgtatga

SEQ ID NO: 516 - DNA, 13 bp, Artificial Sequence
  Oligonucleotide for detection of SNP TSC0000095
tcatacgattttt

SEQ ID NO: 517 - DNA, 13 bp, Artificial Sequence
  Oligonucleotide for detection of SNP TSC0000102
ttttatattggtg

SEQ ID NO: 518 - DNA, 13 bp, Artificial Sequence
  Oligonucleotide for detection of SNP TSC0000102
caccaatataaaa

SEQ ID NO: 519 - DNA, 13 bp, Artificial Sequence
  Oligonucleotide for detection of SNP TSC0000102
ttttattttggtg

SEQ ID NO: 520 - DNA, 13 bp, Artificial Sequence
  Oligonucleotide for detection of SNP TSC0000102
caccaaaataaaa

SEQ ID NO: 521 - DNA, 13 bp, Artificial Sequence
  Oligonucleotide for detection of SNP TSC0000102
tattaatatagga

SEQ ID NO: 522 - DNA, 13 bp, Artificial Sequence
  Oligonucleotide for detection of SNP TSC0000102
tcctatattaata

SEQ ID NO: 523 - DNA, 13 bp, Artificial Sequence
  Oligonucleotide for detection of SNP TSC0000102
tattaagatagga

SEQ ID NO: 524 - DNA, 13 bp, Artificial Sequence
  Oligonucleotide for detection of SNP TSC0000102
tcctatcttaata

SEQ ID NO: 525 - DNA, 13 bp, Artificial Sequence
  Oligonucleotide for detection of SNP TSC0000109
aggattagttata

SEQ ID NO: 526 - DNA, 13 bp, Artificial Sequence
  Oligonucleotide for detection of SNP TSC0000109
tataactaatcct

SEQ ID NO: 527 - DNA, 13 bp, Artificial Sequence
  Oligonucleotide for detection of SNP TSC0000109
aggattggttata

SEQ ID NO: 528 - DNA, 13 bp, Artificial Sequence
  Oligonucleotide for detection of SNP TSC0000109
tataaccaatcct

SEQ ID NO: 529 - DNA, 13 bp, Artificial Sequence
  Oligonucleotide for detection of SNP TSC0000109
aggatcggttata

SEQ ID NO: 530 - DNA, 13 bp, Artificial Sequence
  Oligonucleotide for detection of SNP TSC0000109
tataaccgatcct

SEQ ID NO: 531 - DNA, 13 bp, Artificial Sequence
  Oligonucleotide for detection of SNP TSC0000109
tgtgattgatttt

SEQ ID NO: 532 - DNA, 13 bp, Artificial Sequence
  Oligonucleotide for detection of SNP TSC0000109
aaaatcaatcaca

SEQ ID NO: 533 - DNA, 13 bp, Artificial Sequence
  Oligonucleotide for detection of SNP TSC0000109
tgtgatcgatttt

SEQ ID NO: 534 - DNA, 13 bp, Artificial Sequence
  Oligonucleotide for detection of SNP TSC0000109
aaaatcgatcaca

SEQ ID NO: 535 - DNA, 13 bp, Artificial Sequence
  Oligonucleotide for detection of SNP TSC0000110
tttaaaatgtttg

SEQ ID NO: 536 - DNA, 13 bp, Artificial Sequence
  Oligonucleotide for detection of SNP TSC0000110
caaacattttaaa

SEQ ID NO: 537 - DNA, 13 bp, Artificial Sequence
  Oligonucleotide for detection of SNP TSC0000110
tttaaagtgtttg

SEQ ID NO: 538 - DNA, 13 bp, Artificial Sequence
  Oligonucleotide for detection of SNP TSC0000110
caaacactttaaa

SEQ ID NO: 539 - DNA, 13 bp, Artificial Sequence
  Oligonucleotide for detection of SNP TSC0000111
gttattgtttttt

SEQ ID NO: 540 - DNA, 13 bp, Artificial Sequence
  Oligonucleotide for detection of SNP TSC0000111
aaaaaacaataac

SEQ ID NO: 541 - DNA, 13 bp, Artificial Sequence
  Oligonucleotide for detection of SNP TSC0000111
gttattatttttt

SEQ ID NO: 542 - DNA, 13 bp, Artificial Sequence
  Oligonucleotide for detection of SNP TSC0000111
aaaaaataataac

SEQ ID NO: 543 - DNA, 13 bp, Artificial Sequence
  Oligonucleotide for detection of SNP TSC0000112
tttttgattttgy

SEQ ID NO: 544 - DNA, 13 bp, Artificial Sequence
  Oligonucleotide for detection of SNP TSC0000112
rcaaaatcaaaaa

SEQ ID NO: 545 - DNA, 13 bp, Artificial Sequence
  Oligonucleotide for detection of SNP TSC0000112
tttttgtttttgy

SEQ ID NO: 546 - DNA, 13 bp, Artificial Sequence
  Oligonucleotide for detection of SNP TSC0000112
rcaaaaacaaaaa

SEQ ID NO: 547 - DNA, 13 bp, Artificial Sequence
  Oligonucleotide for detection of SNP TSC0000112
gtagaattagaga

SEQ ID NO: 548 - DNA, 13 bp, Artificial Sequence
  Oligonucleotide for detection of SNP TSC0000112
tctctaattctac

SEQ ID NO: 549 - DNA, 13 bp, Artificial Sequence
  Oligonucleotide for detection of SNP TSC0000112
gtagaaatagaga

SEQ ID NO: 550 - DNA, 13 bp, Artificial Sequence
  Oligonucleotide for detection of SNP TSC0000112
tctctatttctac

SEQ ID NO: 551 - DNA, 13 bp, Artificial Sequence
  Oligonucleotide for detection of SNP TSC0000114
atggtggtaggag

SEQ ID NO: 552 - DNA, 13 bp, Artificial Sequence
  Oligonucleotide for detection of SNP TSC0000114
ctcctaccaccat

SEQ ID NO: 553 - DNA, 13 bp, Artificial Sequence
  Oligonucleotide for detection of SNP TSC0000114
atggtgataggag

SEQ ID NO: 554 - DNA, 13 bp, Artificial Sequence
  Oligonucleotide for detection of SNP TSC0000114
ctcctatcaccat

SEQ ID NO: 555 - DNA, 13 bp, Artificial Sequence
  Oligonucleotide for detection of SNP TSC0000119
ttatgtataaaty

SEQ ID NO: 556 - DNA, 13 bp, Artificial Sequence
  Oligonucleotide for detection of SNP TSC0000119
ratttatacataa

SEQ ID NO: 557 - DNA, 13 bp, Artificial Sequence
  Oligonucleotide for detection of SNP TSC0000119
ttatgtttaaaty

SEQ ID NO: 558 - DNA, 13 bp, Artificial Sequence
  Oligonucleotide for detection of SNP TSC0000119
ratttaaacataa

SEQ ID NO: 559 - DNA, 13 bp, Artificial Sequence
  Oligonucleotide for detection of SNP TSC0000119
ggtttgtatatga

SEQ ID NO: 560 - DNA, 13 bp, Artificial Sequence
  Oligonucleotide for detection of SNP TSC0000119
tcatatacaaacc

SEQ ID NO: 561 - DNA, 13 bp, Artificial Sequence
  Oligonucleotide for detection of SNP TSC0000119
ggtttgaatatga

SEQ ID NO: 562 - DNA, 13 bp, Artificial Sequence
  Oligonucleotide for detection of SNP TSC0000119
tcatattcaaacc

SEQ ID NO: 563 - DNA, 13 bp, Artificial Sequence
  Oligonucleotide for detection of SNP TSC0000122
ttgtagagttgag

SEQ ID NO: 564 - DNA, 13 bp, Artificial Sequence
  Oligonucleotide for detection of SNP TSC0000122
ctcaactctacaa

SEQ ID NO: 565 - DNA, 13 bp, Artificial Sequence
  Oligonucleotide for detection of SNP TSC0000122
ttgtagggttgag

SEQ ID NO: 566 - DNA, 13 bp, Artificial Sequence
  Oligonucleotide for detection of SNP TSC0000122
ctcaaccctacaa

SEQ ID NO: 567 - DNA, 13 bp, Artificial Sequence
  Oligonucleotide for detection of SNP TSC0000123
ggtgggttatggt

SEQ ID NO: 568 - DNA, 13 bp, Artificial Sequence
  Oligonucleotide for detection of SNP TSC0000123
accataacccacc

SEQ ID NO: 569 - DNA, 13 bp, Artificial Sequence
  Oligonucleotide for detection of SNP TSC0000123
ggtggggtatggt

SEQ ID NO: 570 - DNA, 13 bp, Artificial Sequence
  Oligonucleotide for detection of SNP TSC0000123
accataccccacc

SEQ ID NO: 571 - DNA, 13 bp, Artificial Sequence
  Oligonucleotide for detection of SNP TSC0000123
ggcgggttatggt

SEQ ID NO: 572 - DNA, 13 bp, Artificial Sequence
  Oligonucleotide for detection of SNP TSC0000123
accataacccgcc

SEQ ID NO: 573 - DNA, 13 bp, Artificial Sequence
  Oligonucleotide for detection of SNP TSC0000123
ggcggggtatggt

SEQ ID NO: 574 - DNA, 13 bp, Artificial Sequence
  Oligonucleotide for detection of SNP TSC0000123
accataccccgcc

SEQ ID NO: 575 - DNA, 13 bp, Artificial Sequence
  Oligonucleotide for detection of SNP TSC0000123
attatggtttgty

SEQ ID NO: 576 - DNA, 13 bp, Artificial Sequence
  Oligonucleotide for detection of SNP TSC0000123
racaaaccataat

SEQ ID NO: 577 - DNA, 13 bp, Artificial Sequence
  Oligonucleotide for detection of SNP TSC0000123
attatgttttgty

SEQ ID NO: 578 - DNA, 13 bp, Artificial Sequence
  Oligonucleotide for detection of SNP TSC0000123
racaaaacataat

SEQ ID NO: 579 - DNA, 13 bp, Artificial Sequence
  Oligonucleotide for detection of SNP TSC0000123
attatggttcgty

SEQ ID NO: 580 - DNA, 13 bp, Artificial Sequence
  Oligonucleotide for detection of SNP TSC0000123
racgaaccataat

SEQ ID NO: 581 - DNA, 13 bp, Artificial Sequence
  Oligonucleotide for detection of SNP TSC0000123
attatgtttcgty

SEQ ID NO: 582 - DNA, 13 bp, Artificial Sequence
  Oligonucleotide for detection of SNP TSC0000123
racgaaacataat

SEQ ID NO: 583 - DNA, 13 bp, Artificial Sequence
  Oligonucleotide for detection of SNP TSC0000124
ggagatgagaatt

SEQ ID NO: 584 - DNA, 13 bp, Artificial Sequence
  Oligonucleotide for detection of SNP TSC0000124
aattctcatctcc

SEQ ID NO: 585 - DNA, 13 bp, Artificial Sequence
  Oligonucleotide for detection of SNP TSC0000124
ggagataagaatt

SEQ ID NO: 586 - DNA, 13 bp, Artificial Sequence
  Oligonucleotide for detection of SNP TSC0000124
aattcttatctcc

SEQ ID NO: 587 - DNA, 13 bp, Artificial Sequence
  Oligonucleotide for detection of SNP TSC0000129
gttgatgggggaa

SEQ ID NO: 588 - DNA, 13 bp, Artificial Sequence
  Oligonucleotide for detection of SNP TSC0000129
ttcccccatcaac

SEQ ID NO: 589 - DNA, 13 bp, Artificial Sequence
  Oligonucleotide for detection of SNP TSC0000129
gttgattggggaa

SEQ ID NO: 590 - DNA, 13 bp, Artificial Sequence
  Oligonucleotide for detection of SNP TSC0000129
ttccccaatcaac

SEQ ID NO: 591 - DNA, 13 bp, Artificial Sequence
  Oligonucleotide for detection of SNP TSC0000129
tttttttattaay

SEQ ID NO: 592 - DNA, 13 bp, Artificial Sequence
  Oligonucleotide for detection of SNP TSC0000129
rttaataaaaaaa

SEQ ID NO: 593 - DNA, 13 bp, Artificial Sequence
  Oligonucleotide for detection of SNP TSC0000129
ttttttaattaay

SEQ ID NO: 594 - DNA, 13 bp, Artificial Sequence
  Oligonucleotide for detection of SNP TSC0000129
rttaattaaaaaa

SEQ ID NO: 595 - DNA, 13 bp, Artificial Sequence
  Oligonucleotide for detection of SNP TSC0000134
taagtaggtttat

SEQ ID NO: 596 - DNA, 13 bp, Artificial Sequence
  Oligonucleotide for detection of SNP TSC0000134
ataaacctactta

SEQ ID NO: 597 - DNA, 13 bp, Artificial Sequence
  Oligonucleotide for detection of SNP TSC0000134
taagtaagtttat

SEQ ID NO: 598 - DNA, 13 bp, Artificial Sequence
  Oligonucleotide for detection of SNP TSC0000134
ataaacttactta

SEQ ID NO: 599 - DNA, 13 bp, Artificial Sequence
  Oligonucleotide for detection of SNP TSC0000135
gatttttgaaaag

SEQ ID NO: 600 - DNA, 13 bp, Artificial Sequence
  Oligonucleotide for detection of SNP TSC0000135
cttttcaaaaatc

SEQ ID NO: 601 - DNA, 13 bp, Artificial Sequence
  Oligonucleotide for detection of SNP TSC0000135
gattttcgaaaag

SEQ ID NO: 602 - DNA, 13 bp, Artificial Sequence
  Oligonucleotide for detection of SNP TSC0000135
cttttcgaaaatc

SEQ ID NO: 603 - DNA, 13 bp, Artificial Sequence
  Oligonucleotide for detection of SNP TSC0000135
ttttttgaagaty

SEQ ID NO: 604 - DNA, 13 bp, Artificial Sequence
  Oligonucleotide for detection of SNP TSC0000135
ratcttcaaaaaa

SEQ ID NO: 605 - DNA, 13 bp, Artificial Sequence
  Oligonucleotide for detection of SNP TSC0000135
ttttttaaagaty

SEQ ID NO: 606 - DNA, 13 bp, Artificial Sequence
  Oligonucleotide for detection of SNP TSC0000135
ratctttaaaaaa

SEQ ID NO: 607 - DNA, 13 bp, Artificial Sequence
  Oligonucleotide for detection of SNP TSC0000135
tttttcgaagaty

SEQ ID NO: 608 - DNA, 13 bp, Artificial Sequence
  Oligonucleotide for detection of SNP TSC0000135
ratcttcgaaaaa

SEQ ID NO: 609 - DNA, 13 bp, Artificial Sequence
  Oligonucleotide for detection of SNP TSC0000140
atatttattttta

SEQ ID NO: 610 - DNA, 13 bp, Artificial Sequence
  Oligonucleotide for detection of SNP TSC0000140
taaaaataaatat

SEQ ID NO: 611 - DNA, 13 bp, Artificial Sequence
  Oligonucleotide for detection of SNP TSC0000140
atatttgttttta

SEQ ID NO: 612 - DNA, 13 bp, Artificial Sequence
  Oligonucleotide for detection of SNP TSC0000140
taaaaacaaatat

SEQ ID NO: 613 - DNA, 13 bp, Artificial Sequence
  Oligonucleotide for detection of SNP TSC0000141
taatgaaatttty

SEQ ID NO: 614 - DNA, 13 bp, Artificial Sequence
  Oligonucleotide for detection of SNP TSC0000141
raaaatttcatta

SEQ ID NO: 615 - DNA, 13 bp, Artificial Sequence
  Oligonucleotide for detection of SNP TSC0000141
taatgatatttty

SEQ ID NO: 616 - DNA, 13 bp, Artificial Sequence
  Oligonucleotide for detection of SNP TSC0000141
raaaatatcatta

SEQ ID NO: 617 - DNA, 13 bp, Artificial Sequence
  Oligonucleotide for detection of SNP TSC0000141
ggaagttttatta

SEQ ID NO: 618 - DNA, 13 bp, Artificial Sequence
  Oligonucleotide for detection of SNP TSC0000141
taataaaacttcc

SEQ ID NO: 619 - DNA, 13 bp, Artificial Sequence
  Oligonucleotide for detection of SNP TSC0000141
ggaagtgttatta

SEQ ID NO: 620 - DNA, 13 bp, Artificial Sequence
  Oligonucleotide for detection of SNP TSC0000141
taataacacttcc

SEQ ID NO: 621 - DNA, 13 bp, Artificial Sequence
  Oligonucleotide for detection of SNP TSC0000142
gtttttattatga

SEQ ID NO: 622 - DNA, 13 bp, Artificial Sequence
  Oligonucleotide for detection of SNP TSC0000142
tcataataaaaac

SEQ ID NO: 623 - DNA, 13 bp, Artificial Sequence
  Oligonucleotide for detection of SNP TSC0000142
gtttttgttatga

SEQ ID NO: 624 - DNA, 13 bp, Artificial Sequence
  Oligonucleotide for detection of SNP TSC0000142
tcataacaaaaac

SEQ ID NO: 625 - DNA, 13 bp, Artificial Sequence
  Oligonucleotide for detection of SNP TSC0000142
gttttcgttatga

SEQ ID NO: 626 - DNA, 13 bp, Artificial Sequence
  Oligonucleotide for detection of SNP TSC0000142
tcataacgaaaac

SEQ ID NO: 627 - DNA, 13 bp, Artificial Sequence
  Oligonucleotide for detection of SNP TSC0000142
ttatggtggaagy

SEQ ID NO: 628 - DNA, 13 bp, Artificial Sequence
  Oligonucleotide for detection of SNP TSC0000142
rcttccaccataa

SEQ ID NO: 629 - DNA, 13 bp, Artificial Sequence
  Oligonucleotide for detection of SNP TSC0000142
ttatggcggaagy

SEQ ID NO: 630 - DNA, 13 bp, Artificial Sequence
  Oligonucleotide for detection of SNP TSC0000142
rcttccgccataa

SEQ ID NO: 631 - DNA, 13 bp, Artificial Sequence
  Oligonucleotide for detection of SNP TSC0000143
tatttggttttat

SEQ ID NO: 632 - DNA, 13 bp, Artificial Sequence
  Oligonucleotide for detection of SNP TSC0000143
ataaaaccaaata

SEQ ID NO: 633 - DNA, 13 bp, Artificial Sequence
  Oligonucleotide for detection of SNP TSC0000143
tatttgtttttat

SEQ ID NO: 634 - DNA, 13 bp, Artificial Sequence
  Oligonucleotide for detection of SNP TSC0000143
ataaaaacaaata

SEQ ID NO: 635 - DNA, 13 bp, Artificial Sequence
  Oligonucleotide for detection of SNP TSC0000143
ataaaattaaata

SEQ ID NO: 636 - DNA, 13 bp, Artificial Sequence
  Oligonucleotide for detection of SNP TSC0000143
tatttaattttat

SEQ ID NO: 637 - DNA, 13 bp, Artificial Sequence
  Oligonucleotide for detection of SNP TSC0000143
ataaaaataaata

SEQ ID NO: 638 - DNA, 13 bp, Artificial Sequence
  Oligonucleotide for detection of SNP TSC0000143
tatttatttttat

SEQ ID NO: 639 - DNA, 13 bp, Artificial Sequence
  Oligonucleotide for detection of SNP TSC0000148
ttatttaataagt

SEQ ID NO: 640 - DNA, 13 bp, Artificial Sequence
  Oligonucleotide for detection of SNP TSC0000148
acttattaaataa

SEQ ID NO: 641 - DNA, 13 bp, Artificial Sequence
  Oligonucleotide for detection of SNP TSC0000148
ttattttataagt

SEQ ID NO: 642 - DNA, 13 bp, Artificial Sequence
  Oligonucleotide for detection of SNP TSC0000148
acttataaaataa

SEQ ID NO: 643 - DNA, 13 bp, Artificial Sequence
  Oligonucleotide for detection of SNP TSC0000148
atttgttgaatgg

SEQ ID NO: 644 - DNA, 13 bp, Artificial Sequence
  Oligonucleotide for detection of SNP TSC0000148
ccattcaacaaat

SEQ ID NO: 645 - DNA, 13 bp, Artificial Sequence
  Oligonucleotide for detection of SNP TSC0000148
atttgtggaatgg

SEQ ID NO: 646 - DNA, 13 bp, Artificial Sequence
  Oligonucleotide for detection of SNP TSC0000148
ccattccacaaat

SEQ ID NO: 647 - DNA, 13 bp, Artificial Sequence
  Oligonucleotide for detection of SNP TSC0000153
aatgaaagtttay

SEQ ID NO: 648 - DNA, 13 bp, Artificial Sequence
  Oligonucleotide for detection of SNP TSC0000153
rtaaactttcatt

SEQ ID NO: 649 - DNA, 13 bp, Artificial Sequence
  Oligonucleotide for detection of SNP TSC0000153
aatgaatgtttay

SEQ ID NO: 650 - DNA, 13 bp, Artificial Sequence
  Oligonucleotide for detection of SNP TSC0000153
rtaaacattcatt

SEQ ID NO: 651 - DNA, 13 bp, Artificial Sequence
  Oligonucleotide for detection of SNP TSC0000153
aatgaacgtttay

SEQ ID NO: 652 - DNA, 13 bp, Artificial Sequence
  Oligonucleotide for detection of SNP TSC0000153
rtaaacgttcatt

SEQ ID NO: 653 - DNA, 13 bp, Artificial Sequence
  Oligonucleotide for detection of SNP TSC0000153
gtgaatttttatt

SEQ ID NO: 654 - DNA, 13 bp, Artificial Sequence
  Oligonucleotide for detection of SNP TSC0000153
aataaaaattcac

SEQ ID NO: 655 - DNA, 13 bp, Artificial Sequence
  Oligonucleotide for detection of SNP TSC0000153
gtgaatgtttatt

SEQ ID NO: 656 - DNA, 13 bp, Artificial Sequence
  Oligonucleotide for detection of SNP TSC0000153
aataaacattcac

SEQ ID NO: 657 - DNA, 13 bp, Artificial Sequence
  Oligonucleotide for detection of SNP TSC0000153
gtgaacgtttatt

SEQ ID NO: 658 - DNA, 13 bp, Artificial Sequence
  Oligonucleotide for detection of SNP TSC0000153
aataaacgttcac

SEQ ID NO: 659 - DNA, 13 bp, Artificial Sequence
  Oligonucleotide for detection of SNP TSC0000154
ttatataaatata

SEQ ID NO: 660 - DNA, 13 bp, Artificial Sequence
  Oligonucleotide for detection of SNP TSC0000154
tatatttatataa

SEQ ID NO: 661 - DNA, 13 bp, Artificial Sequence
  Oligonucleotide for detection of SNP TSC0000154
ttatatgaatata

SEQ ID NO: 662 - DNA, 13 bp, Artificial Sequence
  Oligonucleotide for detection of SNP TSC0000154
tatattcatataa

SEQ ID NO: 663 - DNA, 13 bp, Artificial Sequence
  Oligonucleotide for detection of SNP TSC0000154
ttatacgaatata

SEQ ID NO: 664 - DNA, 13 bp, Artificial Sequence
  Oligonucleotide for detection of SNP TSC0000154
tatattcgtataa

SEQ ID NO: 665 - DNA, 13 bp, Artificial Sequence
  Oligonucleotide for detection of SNP TSC0000154
tatatttgtgtga

SEQ ID NO: 666 - DNA, 13 bp, Artificial Sequence
  Oligonucleotide for detection of SNP TSC0000154
tcacacaaatata

SEQ ID NO: 667 - DNA, 13 bp, Artificial Sequence
  Oligonucleotide for detection of SNP TSC0000154
tatattcgtgtga

SEQ ID NO: 668 - DNA, 13 bp, Artificial Sequence
  Oligonucleotide for detection of SNP TSC0000154
tcacacgaatata

SEQ ID NO: 669 - DNA, 13 bp, Artificial Sequence
  Oligonucleotide for detection of SNP TSC0000155
attttgagggtat

SEQ ID NO: 670 - DNA, 13 bp, Artificial Sequence
  Oligonucleotide for detection of SNP TSC0000155
ataccctcaaaat

SEQ ID NO: 671 - DNA, 13 bp, Artificial Sequence
  Oligonucleotide for detection of SNP TSC0000155
attttgtgggtat

SEQ ID NO: 672 - DNA, 13 bp, Artificial Sequence
  Oligonucleotide for detection of SNP TSC0000155
atacccacaaaat

SEQ ID NO: 673 - DNA, 13 bp, Artificial Sequence
  Oligonucleotide for detection of SNP TSC0000155
attttgcgggtat

SEQ ID NO: 674 - DNA, 13 bp, Artificial Sequence
  Oligonucleotide for detection of SNP TSC0000155
atacccgcaaaat

SEQ ID NO: 675 - DNA, 13 bp, Artificial Sequence
  Oligonucleotide for detection of SNP TSC0000155
atatttttaaagt

SEQ ID NO: 676 - DNA, 13 bp, Artificial Sequence
  Oligonucleotide for detection of SNP TSC0000155
actttaaaaatat

SEQ ID NO: 677 - DNA, 13 bp, Artificial Sequence
  Oligonucleotide for detection of SNP TSC0000155
atatttgtaaagt

SEQ ID NO: 678 - DNA, 13 bp, Artificial Sequence
  Oligonucleotide for detection of SNP TSC0000155
actttacaaatat

SEQ ID NO: 679 - DNA, 13 bp, Artificial Sequence
  Oligonucleotide for detection of SNP TSC0000155
atattcgtaaagt

SEQ ID NO: 680 - DNA, 13 bp, Artificial Sequence
  Oligonucleotide for detection of SNP TSC0000155
actttacgaatat

SEQ ID NO: 681 - DNA, 13 bp, Artificial Sequence
  Oligonucleotide for detection of SNP TSC0000156
aattagaataagg

SEQ ID NO: 682 - DNA, 13 bp, Artificial Sequence
  Oligonucleotide for detection of SNP TSC0000156
ccttattctaatt

SEQ ID NO: 683 - DNA, 13 bp, Artificial Sequence
  Oligonucleotide for detection of SNP TSC0000156
aattaggataagg

SEQ ID NO: 684 - DNA, 13 bp, Artificial Sequence
  Oligonucleotide for detection of SNP TSC0000156
ccttatcctaatt

SEQ ID NO: 685 - DNA, 13 bp, Artificial Sequence
  Oligonucleotide for detection of SNP TSC0000158
gttattaagattg

SEQ ID NO: 686 - DNA, 13 bp, Artificial Sequence
  Oligonucleotide for detection of SNP TSC0000158
caatcttaataac

SEQ ID NO: 687 - DNA, 13 bp, Artificial Sequence
  Oligonucleotide for detection of SNP TSC0000158
gttattgagattg

SEQ ID NO: 688 - DNA, 13 bp, Artificial Sequence
  Oligonucleotide for detection of SNP TSC0000158
caatctcaataac

SEQ ID NO: 689 - DNA, 13 bp, Artificial Sequence
  Oligonucleotide for detection of SNP TSC0000160
ttatttgagtttt

SEQ ID NO: 690 - DNA, 13 bp, Artificial Sequence
  Oligonucleotide for detection of SNP TSC0000160
aaaactcaaataa

SEQ ID NO: 691 - DNA, 13 bp, Artificial Sequence
  Oligonucleotide for detection of SNP TSC0000160
ttatttaagtttt

SEQ ID NO: 692 - DNA, 13 bp, Artificial Sequence
  Oligonucleotide for detection of SNP TSC0000160
aaaacttaaataa

SEQ ID NO: 693 - DNA, 13 bp, Artificial Sequence
  Oligonucleotide for detection of SNP TSC0000164
tagggtataatgg

SEQ ID NO: 694 - DNA, 13 bp, Artificial Sequence
  Oligonucleotide for detection of SNP TSC0000164
ccattatacccta

SEQ ID NO: 695 - DNA, 13 bp, Artificial Sequence
  Oligonucleotide for detection of SNP TSC0000164
tagggtgtaatgg

SEQ ID NO: 696 - DNA, 13 bp, Artificial Sequence
  Oligonucleotide for detection of SNP TSC0000164
ccattacacccta

SEQ ID NO: 697 - DNA, 13 bp, Artificial Sequence
  Oligonucleotide for detection of SNP TSC0000177
gtaagggtggggg

SEQ ID NO: 698 - DNA, 13 bp, Artificial Sequence
  Oligonucleotide for detection of SNP TSC0000177
cccccacccttac

SEQ ID NO: 699 - DNA, 13 bp, Artificial Sequence
  Oligonucleotide for detection of SNP TSC0000177
gtaaggatggggg

SEQ ID NO: 700 - DNA, 13 bp, Artificial Sequence
  Oligonucleotide for detection of SNP TSC0000177
cccccatccttac

SEQ ID NO: 701 - DNA, 13 bp, Artificial Sequence
  Oligonucleotide for detection of SNP TSC0000178
tttttttggagtt

SEQ ID NO: 702 - DNA, 13 bp, Artificial Sequence
  Oligonucleotide for detection of SNP TSC0000178
aactccaaaaaaa

SEQ ID NO: 703 - DNA, 13 bp, Artificial Sequence
  Oligonucleotide for detection of SNP TSC0000178
ttttttcggagtt

SEQ ID NO: 704 - DNA, 13 bp, Artificial Sequence
  Oligonucleotide for detection of SNP TSC0000178
aactccgaaaaaa

SEQ ID NO: 705 - DNA, 13 bp, Artificial Sequence
  Oligonucleotide for detection of SNP TSC0000178
agttttggaagag

SEQ ID NO: 706 - DNA, 13 bp, Artificial Sequence
  Oligonucleotide for detection of SNP TSC0000178
ctcttccaaaact

SEQ ID NO: 707 - DNA, 13 bp, Artificial Sequence
  Oligonucleotide for detection of SNP TSC0000178
agttttagaagag

SEQ ID NO: 708 - DNA, 13 bp, Artificial Sequence
  Oligonucleotide for detection of SNP TSC0000178
ctcttctaaaact

SEQ ID NO: 709 - DNA, 13 bp, Artificial Sequence
  Oligonucleotide for detection of SNP TSC0000178
agtttcggaagag

SEQ ID NO: 710 - DNA, 13 bp, Artificial Sequence
  Oligonucleotide for detection of SNP TSC0000178
ctcttccgaaact

SEQ ID NO: 711 - DNA, 13 bp, Artificial Sequence
  Oligonucleotide for detection of SNP TSC0000179
tattaggtttaaa

SEQ ID NO: 712 - DNA, 13 bp, Artificial Sequence
  Oligonucleotide for detection of SNP TSC0000179
tttaaacctaata

SEQ ID NO: 713 - DNA, 13 bp, Artificial Sequence
  Oligonucleotide for detection of SNP TSC0000179
tattagttttaaa

SEQ ID NO: 714 - DNA, 13 bp, Artificial Sequence
  Oligonucleotide for detection of SNP TSC0000179
tttaaaactaata

SEQ ID NO: 715 - DNA, 13 bp, Artificial Sequence
  Oligonucleotide for detection of SNP TSC0000179
tttaaatttgata

SEQ ID NO: 716 - DNA, 13 bp, Artificial Sequence
  Oligonucleotide for detection of SNP TSC0000179
tatcaaatttaaa

SEQ ID NO: 717 - DNA, 13 bp, Artificial Sequence
  Oligonucleotide for detection of SNP TSC0000179
tttaaaattgata

SEQ ID NO: 718 - DNA, 13 bp, Artificial Sequence
  Oligonucleotide for detection of SNP TSC0000179
tatcaattttaaa

SEQ ID NO: 719 - DNA, 13 bp, Artificial Sequence
  Oligonucleotide for detection of SNP TSC0000186
aaggttatagggg

SEQ ID NO: 720 - DNA, 13 bp, Artificial Sequence
  Oligonucleotide for detection of SNP TSC0000186
cccctataacctt

SEQ ID NO: 721 - DNA, 13 bp, Artificial Sequence
  Oligonucleotide for detection of SNP TSC0000186
aaggttgtagggg

SEQ ID NO: 722 - DNA, 13 bp, Artificial Sequence
  Oligonucleotide for detection of SNP TSC0000186
cccctacaacctt

SEQ ID NO: 723 - DNA, 13 bp, Artificial Sequence
  Oligonucleotide for detection of SNP TSC0000187
tatagtaaagaaa

SEQ ID NO: 724 - DNA, 13 bp, Artificial Sequence
  Oligonucleotide for detection of SNP TSC0000187
tttctttactata

SEQ ID NO: 725 - DNA, 13 bp, Artificial Sequence
  Oligonucleotide for detection of SNP TSC0000187
tatagtgaagaaa

SEQ ID NO: 726 - DNA, 13 bp, Artificial Sequence
  Oligonucleotide for detection of SNP TSC0000187
tttcttcactata

SEQ ID NO: 727 - DNA, 13 bp, Artificial Sequence
  Oligonucleotide for detection of SNP TSC0000187
tatagcgaagaaa

SEQ ID NO: 728 - DNA, 13 bp, Artificial Sequence
  Oligonucleotide for detection of SNP TSC0000187
tttcttcgctata

SEQ ID NO: 729 - DNA, 13 bp, Artificial Sequence
  Oligonucleotide for detection of SNP TSC0000187
tttttttgttgtg

SEQ ID NO: 730 - DNA, 13 bp, Artificial Sequence
  Oligonucleotide for detection of SNP TSC0000187
cacaacaaaaaaa

SEQ ID NO: 731 - DNA, 13 bp, Artificial Sequence
  Oligonucleotide for detection of SNP TSC0000187
ttttttcgttgtg

SEQ ID NO: 732 - DNA, 13 bp, Artificial Sequence
  Oligonucleotide for detection of SNP TSC0000187
cacaacgaaaaaa

SEQ ID NO: 733 - DNA, 13 bp, Artificial Sequence
  Oligonucleotide for detection of SNP TSC0000192
ttgattattgtga

SEQ ID NO: 734 - DNA, 13 bp, Artificial Sequence
  Oligonucleotide for detection of SNP TSC0000192
tcacaataatcaa

SEQ ID NO: 735 - DNA, 13 bp, Artificial Sequence
  Oligonucleotide for detection of SNP TSC0000192
ttgattgttgtga

SEQ ID NO: 736 - DNA, 13 bp, Artificial Sequence
  Oligonucleotide for detection of SNP TSC0000192
tcacaacaatcaa

SEQ ID NO: 737 - DNA, 13 bp, Artificial Sequence
  Oligonucleotide for detection of SNP TSC0000192
ttgatcgttgtga

SEQ ID NO: 738 - DNA, 13 bp, Artificial Sequence
  Oligonucleotide for detection of SNP TSC0000192
tcacaacgatcaa

SEQ ID NO: 739 - DNA, 13 bp, Artificial Sequence
  Oligonucleotide for detection of SNP TSC0000192
ttataatggttag

SEQ ID NO: 740 - DNA, 13 bp, Artificial Sequence
  Oligonucleotide for detection of SNP TSC0000192
ctaaccattataa

SEQ ID NO: 741 - DNA, 13 bp, Artificial Sequence
  Oligonucleotide for detection of SNP TSC0000192
ttataacggttag

SEQ ID NO: 742 - DNA, 13 bp, Artificial Sequence
  Oligonucleotide for detection of SNP TSC0000192
ctaaccgttataa

SEQ ID NO: 743 - DNA, 13 bp, Artificial Sequence
  Oligonucleotide for detection of SNP TSC0000194
tagaaaattttaa

SEQ ID NO: 744 - DNA, 13 bp, Artificial Sequence
  Oligonucleotide for detection of SNP TSC0000194
ttaaaattttcta

SEQ ID NO: 745 - DNA, 13 bp, Artificial Sequence
  Oligonucleotide for detection of SNP TSC0000194
tagaaagttttaa

SEQ ID NO: 746 - DNA, 13 bp, Artificial Sequence
  Oligonucleotide for detection of SNP TSC0000194
ttaaaactttcta

SEQ ID NO: 747 - DNA, 13 bp, Artificial Sequence
  Oligonucleotide for detection of SNP TSC0000211
gttgtttggtaga

SEQ ID NO: 748 - DNA, 13 bp, Artificial Sequence
  Oligonucleotide for detection of SNP TSC0000211
tctaccaaacaac

SEQ ID NO: 749 - DNA, 13 bp, Artificial Sequence
  Oligonucleotide for detection of SNP TSC0000211
gttgttcggtaga

SEQ ID NO: 750 - DNA, 13 bp, Artificial Sequence
  Oligonucleotide for detection of SNP TSC0000211
tctaccgaacaac

SEQ ID NO: 751 - DNA, 13 bp, Artificial Sequence
  Oligonucleotide for detection of SNP TSC0000211
tttatcgaataay

SEQ ID NO: 752 - DNA, 13 bp, Artificial Sequence
  Oligonucleotide for detection of SNP TSC0000211
rttattcgataaa

SEQ ID NO: 753 - DNA, 13 bp, Artificial Sequence
  Oligonucleotide for detection of SNP TSC0000212
taataagaattta

SEQ ID NO: 754 - DNA, 13 bp, Artificial Sequence
  Oligonucleotide for detection of SNP TSC0000212
taaattcttatta

SEQ ID NO: 755 - DNA, 13 bp, Artificial Sequence
  Oligonucleotide for detection of SNP TSC0000212
taataaaaattta

SEQ ID NO: 756 - DNA, 13 bp, Artificial Sequence
  Oligonucleotide for detection of SNP TSC0000212
taaatttttatta

SEQ ID NO: 757 - DNA, 13 bp, Artificial Sequence
  Oligonucleotide for detection of SNP TSC0000219
tatgttggttagg

SEQ ID NO: 758 - DNA, 13 bp, Artificial Sequence
  Oligonucleotide for detection of SNP TSC0000219
cctaaccaacata

SEQ ID NO: 759 - DNA, 13 bp, Artificial Sequence
  Oligonucleotide for detection of SNP TSC0000219
tatgttagttagg

SEQ ID NO: 760 - DNA, 13 bp, Artificial Sequence
  Oligonucleotide for detection of SNP TSC0000219
cctaactaacata

SEQ ID NO: 761 - DNA, 13 bp, Artificial Sequence
  Oligonucleotide for detection of SNP TSC0000224
attttttagtaay

SEQ ID NO: 762 - DNA, 13 bp, Artificial Sequence
  Oligonucleotide for detection of SNP TSC0000224
rttactaaaaaat

SEQ ID NO: 763 - DNA, 13 bp, Artificial Sequence
  Oligonucleotide for detection of SNP TSC0000224
atttttgagtaay

SEQ ID NO: 764 - DNA, 13 bp, Artificial Sequence
  Oligonucleotide for detection of SNP TSC0000224
rttactcaaaaat

SEQ ID NO: 765 - DNA, 13 bp, Artificial Sequence
  Oligonucleotide for detection of SNP TSC0000224
gttattgaaggat

SEQ ID NO: 766 - DNA, 13 bp, Artificial Sequence
  Oligonucleotide for detection of SNP TSC0000224
atccttcaataac

SEQ ID NO: 767 - DNA, 13 bp, Artificial Sequence
  Oligonucleotide for detection of SNP TSC0000224
gttatttaaggat

SEQ ID NO: 768 - DNA, 13 bp, Artificial Sequence
  Oligonucleotide for detection of SNP TSC0000224
atccttaaataac

SEQ ID NO: 769 - DNA, 13 bp, Artificial Sequence
  Oligonucleotide for detection of SNP TSC0000225
tttttagttatta

SEQ ID NO: 770 - DNA, 13 bp, Artificial Sequence
  Oligonucleotide for detection of SNP TSC0000225
taataactaaaaa

SEQ ID NO: 771 - DNA, 13 bp, Artificial Sequence
  Oligonucleotide for detection of SNP TSC0000225
tttttatttatta

SEQ ID NO: 772 - DNA, 13 bp, Artificial Sequence
  Oligonucleotide for detection of SNP TSC0000225
taataaataaaaa

SEQ ID NO: 773 - DNA, 13 bp, Artificial Sequence
  Oligonucleotide for detection of SNP TSC0000225
taatagttggaag

SEQ ID NO: 774 - DNA, 13 bp, Artificial Sequence
  Oligonucleotide for detection of SNP TSC0000225
cttccaactatta

SEQ ID NO: 775 - DNA, 13 bp, Artificial Sequence
  Oligonucleotide for detection of SNP TSC0000225
taatagatggaag

SEQ ID NO: 776 - DNA, 13 bp, Artificial Sequence
  Oligonucleotide for detection of SNP TSC0000225
cttccatctatta

SEQ ID NO: 777 - DNA, 13 bp, Artificial Sequence
  Oligonucleotide for detection of SNP TSC0000229
tgtatataagtta

SEQ ID NO: 778 - DNA, 13 bp, Artificial Sequence
  Oligonucleotide for detection of SNP TSC0000229
taacttatataca

SEQ ID NO: 779 - DNA, 13 bp, Artificial Sequence
  Oligonucleotide for detection of SNP TSC0000229
tgtatagaagtta

SEQ ID NO: 780 - DNA, 13 bp, Artificial Sequence
  Oligonucleotide for detection of SNP TSC0000229
taacttctataca

SEQ ID NO: 781 - DNA, 13 bp, Artificial Sequence
  Oligonucleotide for detection of SNP TSC0000229
tgatttgtatata

SEQ ID NO: 782 - DNA, 13 bp, Artificial Sequence
  Oligonucleotide for detection of SNP TSC0000229
tatatacaaatca

SEQ ID NO: 783 - DNA, 13 bp, Artificial Sequence
  Oligonucleotide for detection of SNP TSC0000229
tgatttttatata

SEQ ID NO: 784 - DNA, 13 bp, Artificial Sequence
  Oligonucleotide for detection of SNP TSC0000229
tatataaaaatca

SEQ ID NO: 785 - DNA, 13 bp, Artificial Sequence
  Oligonucleotide for detection of SNP TSC0000230
taggataatttty

SEQ ID NO: 786 - DNA, 13 bp, Artificial Sequence
  Oligonucleotide for detection of SNP TSC0000230
raaaattatccta

SEQ ID NO: 787 - DNA, 13 bp, Artificial Sequence
  Oligonucleotide for detection of SNP TSC0000230
taggattatttty

SEQ ID NO: 788 - DNA, 13 bp, Artificial Sequence
  Oligonucleotide for detection of SNP TSC0000230
raaaataatccta

SEQ ID NO: 789 - DNA, 13 bp, Artificial Sequence
  Oligonucleotide for detection of SNP TSC0000230
ggaagttattttg

SEQ ID NO: 790 - DNA, 13 bp, Artificial Sequence
  Oligonucleotide for detection of SNP TSC0000230
caaaataacttcc

SEQ ID NO: 791 - DNA, 13 bp, Artificial Sequence
  Oligonucleotide for detection of SNP TSC0000230
ggaagtgattttg

SEQ ID NO: 792 - DNA, 13 bp, Artificial Sequence
  Oligonucleotide for detection of SNP TSC0000230
caaaatcacttcc

SEQ ID NO: 793 - DNA, 13 bp, Artificial Sequence
  Oligonucleotide for detection of SNP TSC0000231
tatagaggtatay

SEQ ID NO: 794 - DNA, 13 bp, Artificial Sequence
  Oligonucleotide for detection of SNP TSC0000231
rtatacctctata

SEQ ID NO: 795 - DNA, 13 bp, Artificial Sequence
  Oligonucleotide for detection of SNP TSC0000231
tatagaagtatay

SEQ ID NO: 796 - DNA, 13 bp, Artificial Sequence
  Oligonucleotide for detection of SNP TSC0000231
rtatacttctata

SEQ ID NO: 797 - DNA, 13 bp, Artificial Sequence
  Oligonucleotide for detection of SNP TSC0000246
tgttgaatggttg

SEQ ID NO: 798 - DNA, 13 bp, Artificial Sequence
  Oligonucleotide for detection of SNP TSC0000246
caaccattcaaca

SEQ ID NO: 799 - DNA, 13 bp, Artificial Sequence
  Oligonucleotide for detection of SNP TSC0000246
tgttgagtggttg

SEQ ID NO: 800 - DNA, 13 bp, Artificial Sequence
  Oligonucleotide for detection of SNP TSC0000246
caaccactcaaca

SEQ ID NO: 801 - DNA, 13 bp, Artificial Sequence
  Oligonucleotide for detection of SNP TSC0000251
gttttgatttttt

SEQ ID NO: 802 - DNA, 13 bp, Artificial Sequence
  Oligonucleotide for detection of SNP TSC0000251
aaaaaatcaaaac

SEQ ID NO: 803 - DNA, 13 bp, Artificial Sequence
  Oligonucleotide for detection of SNP TSC0000251
gttttggtttttt

SEQ ID NO: 804 - DNA, 13 bp, Artificial Sequence
  Oligonucleotide for detection of SNP TSC0000251
aaaaaaccaaaac

SEQ ID NO: 805 - DNA, 13 bp, Artificial Sequence
  Oligonucleotide for detection of SNP TSC0000252
gtttggattttta

SEQ ID NO: 806 - DNA, 13 bp, Artificial Sequence
  Oligonucleotide for detection of SNP TSC0000252
taaaaatccaaac

SEQ ID NO: 807 - DNA, 13 bp, Artificial Sequence
  Oligonucleotide for detection of SNP TSC0000252
gtttggtttttta

SEQ ID NO: 808 - DNA, 13 bp, Artificial Sequence
  Oligonucleotide for detection of SNP TSC0000252
taaaaaaccaaac

SEQ ID NO: 809 - DNA, 13 bp, Artificial Sequence
  Oligonucleotide for detection of SNP TSC0000252
tgagagtttaggy

SEQ ID NO: 810 - DNA, 13 bp, Artificial Sequence
  Oligonucleotide for detection of SNP TSC0000252
rcctaaactctca

SEQ ID NO: 811 - DNA, 13 bp, Artificial Sequence
  Oligonucleotide for detection of SNP TSC0000252
tgagaggttaggy

SEQ ID NO: 812 - DNA, 13 bp, Artificial Sequence
  Oligonucleotide for detection of SNP TSC0000252
rcctaacctctca

SEQ ID NO: 813 - DNA, 13 bp, Artificial Sequence
  Oligonucleotide for detection of SNP TSC0000264
tttggaagtaaga

SEQ ID NO: 814 - DNA, 13 bp, Artificial Sequence
  Oligonucleotide for detection of SNP TSC0000264
tcttacttccaaa

SEQ ID NO: 815 - DNA, 13 bp, Artificial Sequence
  Oligonucleotide for detection of SNP TSC0000264
tttggaggtaaga

SEQ ID NO: 816 - DNA, 13 bp, Artificial Sequence
  Oligonucleotide for detection of SNP TSC0000264
tcttacctccaaa

SEQ ID NO: 817 - DNA, 13 bp, Artificial Sequence
  Oligonucleotide for detection of SNP TSC0000265
tagaaatgttaga

SEQ ID NO: 818 - DNA, 13 bp, Artificial Sequence
  Oligonucleotide for detection of SNP TSC0000265
tctaacatttcta

SEQ ID NO: 819 - DNA, 13 bp, Artificial Sequence
  Oligonucleotide for detection of SNP TSC0000265
tagaaacgttaga

SEQ ID NO: 820 - DNA, 13 bp, Artificial Sequence
  Oligonucleotide for detection of SNP TSC0000265
tctaacgtttcta

SEQ ID NO: 821 - DNA, 13 bp, Artificial Sequence
  Oligonucleotide for detection of SNP TSC0000265
tttaatgttttta

SEQ ID NO: 822 - DNA, 13 bp, Artificial Sequence
  Oligonucleotide for detection of SNP TSC0000265
taaaaacattaaa

SEQ ID NO: 823 - DNA, 13 bp, Artificial Sequence
  Oligonucleotide for detection of SNP TSC0000265
tttaatattttta

SEQ ID NO: 824 - DNA, 13 bp, Artificial Sequence
  Oligonucleotide for detection of SNP TSC0000265
taaaaatattaaa

SEQ ID NO: 825 - DNA, 13 bp, Artificial Sequence
  Oligonucleotide for detection of SNP TSC0000265
tttaacgttttta

SEQ ID NO: 826 - DNA, 13 bp, Artificial Sequence
  Oligonucleotide for detection of SNP TSC0000265
taaaaacgttaaa

SEQ ID NO: 827 - DNA, 13 bp, Artificial Sequence
  Oligonucleotide for detection of SNP TSC0000266
tgatgtgggttty

SEQ ID NO: 828 - DNA, 13 bp, Artificial Sequence
  Oligonucleotide for detection of SNP TSC0000266
raaacccacatca

SEQ ID NO: 829 - DNA, 13 bp, Artificial Sequence
  Oligonucleotide for detection of SNP TSC0000266
tgatgtaggttty

SEQ ID NO: 830 - DNA, 13 bp, Artificial Sequence
  Oligonucleotide for detection of SNP TSC0000266
raaacctacatca

SEQ ID NO: 831 - DNA, 13 bp, Artificial Sequence
  Oligonucleotide for detection of SNP TSC0000268
tatgggaaaaaga

SEQ ID NO: 832 - DNA, 13 bp, Artificial Sequence
  Oligonucleotide for detection of SNP TSC0000268
tctttttcccata

SEQ ID NO: 833 - DNA, 13 bp, Artificial Sequence
  Oligonucleotide for detection of SNP TSC0000268
tatgggtaaaaga

SEQ ID NO: 834 - DNA, 13 bp, Artificial Sequence
  Oligonucleotide for detection of SNP TSC0000268
tcttttacccata

SEQ ID NO: 835 - DNA, 13 bp, Artificial Sequence
  Oligonucleotide for detection of SNP TSC0000268
ttttttttttata

SEQ ID NO: 836 - DNA, 13 bp, Artificial Sequence
  Oligonucleotide for detection of SNP TSC0000268
tataaaaaaaaaa

SEQ ID NO: 837 - DNA, 13 bp, Artificial Sequence
  Oligonucleotide for detection of SNP TSC0000268
ttttttgtttata

SEQ ID NO: 838 - DNA, 13 bp, Artificial Sequence
  Oligonucleotide for detection of SNP TSC0000268
tataaacaaaaaa

SEQ ID NO: 839 - DNA, 13 bp, Artificial Sequence
  Oligonucleotide for detection of SNP TSC0000271
ttttttagtagty

SEQ ID NO: 840 - DNA, 13 bp, Artificial Sequence
  Oligonucleotide for detection of SNP TSC0000271
ractactaaaaaa

SEQ ID NO: 841 - DNA, 13 bp, Artificial Sequence
  Oligonucleotide for detection of SNP TSC0000271
ttttttggtagty

SEQ ID NO: 842 - DNA, 13 bp, Artificial Sequence
  Oligonucleotide for detection of SNP TSC0000271
ractaccaaaaaa

SEQ ID NO: 843 - DNA, 13 bp, Artificial Sequence
  Oligonucleotide for detection of SNP TSC0000274
tattttattttty

SEQ ID NO: 844 - DNA, 13 bp, Artificial Sequence
  Oligonucleotide for detection of SNP TSC0000274
raaaaataaaata

SEQ ID NO: 845 - DNA, 13 bp, Artificial Sequence
  Oligonucleotide for detection of SNP TSC0000274
tattttgttttty

SEQ ID NO: 846 - DNA, 13 bp, Artificial Sequence
  Oligonucleotide for detection of SNP TSC0000274
raaaaacaaaata

SEQ ID NO: 847 - DNA, 13 bp, Artificial Sequence
  Oligonucleotide for detection of SNP TSC0000279
ttgtttgtttaat

SEQ ID NO: 848 - DNA, 13 bp, Artificial Sequence
  Oligonucleotide for detection of SNP TSC0000279
attaaacaaacaa

SEQ ID NO: 849 - DNA, 13 bp, Artificial Sequence
  Oligonucleotide for detection of SNP TSC0000279
ttgtttatttaat

SEQ ID NO: 850 - DNA, 13 bp, Artificial Sequence
  Oligonucleotide for detection of SNP TSC0000279
attaaataaacaa

SEQ ID NO: 851 - DNA, 13 bp, Artificial Sequence
  Oligonucleotide for detection of SNP TSC0000282
taaagggtttttg

SEQ ID NO: 852 - DNA, 13 bp, Artificial Sequence
  Oligonucleotide for detection of SNP TSC0000282
caaaaacccttta

SEQ ID NO: 853 - DNA, 13 bp, Artificial Sequence
  Oligonucleotide for detection of SNP TSC0000282
taaaggatttttg

SEQ ID NO: 854 - DNA, 13 bp, Artificial Sequence
  Oligonucleotide for detection of SNP TSC0000282
caaaaatccttta

SEQ ID NO: 855 - DNA, 13 bp, Artificial Sequence
  Oligonucleotide for detection of SNP TSC0000294
ggaggtttggagg

SEQ ID NO: 856 - DNA, 13 bp, Artificial Sequence
  Oligonucleotide for detection of SNP TSC0000294
cctccaaacctcc

SEQ ID NO: 857 - DNA, 13 bp, Artificial Sequence
  Oligonucleotide for detection of SNP TSC0000294
ggaggtgtggagg

SEQ ID NO: 858 - DNA, 13 bp, Artificial Sequence
  Oligonucleotide for detection of SNP TSC0000294
cctccacacctcc

SEQ ID NO: 859 - DNA, 13 bp, Artificial Sequence
  Oligonucleotide for detection of SNP TSC0000294
tttttagatttty

SEQ ID NO: 860 - DNA, 13 bp, Artificial Sequence
  Oligonucleotide for detection of SNP TSC0000294
raaaatctaaaaa

SEQ ID NO: 861 - DNA, 13 bp, Artificial Sequence
  Oligonucleotide for detection of SNP TSC0000294
tttttatatttty

SEQ ID NO: 862 - DNA, 13 bp, Artificial Sequence
  Oligonucleotide for detection of SNP TSC0000294
raaaatataaaaa

SEQ ID NO: 863 - DNA, 13 bp, Artificial Sequence
  Oligonucleotide for detection of SNP TSC0000295
ttttttagtatta

SEQ ID NO: 864 - DNA, 13 bp, Artificial Sequence
  Oligonucleotide for detection of SNP TSC0000295
taatactaaaaaa

SEQ ID NO: 865 - DNA, 13 bp, Artificial Sequence
  Oligonucleotide for detection of SNP TSC0000295
ttttttggtatta

SEQ ID NO: 866 - DNA, 13 bp, Artificial Sequence
  Oligonucleotide for detection of SNP TSC0000295
taataccaaaaaa

SEQ ID NO: 867 - DNA, 13 bp, Artificial Sequence
  Oligonucleotide for detection of SNP TSC0000295
tttttcggtatta

SEQ ID NO: 868 - DNA, 13 bp, Artificial Sequence
  Oligonucleotide for detection of SNP TSC0000295
taataccgaaaaa

SEQ ID NO: 869 - DNA, 13 bp, Artificial Sequence
  Oligonucleotide for detection of SNP TSC0000295
tgatattgggaga

SEQ ID NO: 870 - DNA, 13 bp, Artificial Sequence
  Oligonucleotide for detection of SNP TSC0000295
tctcccaatatca

SEQ ID NO: 871 - DNA, 13 bp, Artificial Sequence
  Oligonucleotide for detection of SNP TSC0000295
tgatatcgggaga

SEQ ID NO: 872 - DNA, 13 bp, Artificial Sequence
  Oligonucleotide for detection of SNP TSC0000295
tctcccgatatca

SEQ ID NO: 873 - DNA, 13 bp, Artificial Sequence
  Oligonucleotide for detection of SNP TSC0000297
gtgtttagaaaga

SEQ ID NO: 874 - DNA, 13 bp, Artificial Sequence
  Oligonucleotide for detection of SNP TSC0000297
tctttctaaacac

SEQ ID NO: 875 - DNA, 13 bp, Artificial Sequence
  Oligonucleotide for detection of SNP TSC0000297
gtgtttggaaaga

SEQ ID NO: 876 - DNA, 13 bp, Artificial Sequence
  Oligonucleotide for detection of SNP TSC0000297
tctttccaaacac

SEQ ID NO: 877 - DNA, 13 bp, Artificial Sequence
  Oligonucleotide for detection of SNP TSC0000297
gtgttcggaaaga

SEQ ID NO: 878 - DNA, 13 bp, Artificial Sequence
  Oligonucleotide for detection of SNP TSC0000297
tctttccgaacac

SEQ ID NO: 879 - DNA, 13 bp, Artificial Sequence
  Oligonucleotide for detection of SNP TSC0000297
tttttttgggtay

SEQ ID NO: 880 - DNA, 13 bp, Artificial Sequence
  Oligonucleotide for detection of SNP TSC0000297
rtacccaaaaaaa

SEQ ID NO: 881 - DNA, 13 bp, Artificial Sequence
  Oligonucleotide for detection of SNP TSC0000297
ttttttcgggtay

SEQ ID NO: 882 - DNA, 13 bp, Artificial Sequence
  Oligonucleotide for detection of SNP TSC0000297
rtacccgaaaaaa

SEQ ID NO: 883 - DNA, 13 bp, Artificial Sequence
  Oligonucleotide for detection of SNP TSC0000298
ttataaatgttta

SEQ ID NO: 884 - DNA, 13 bp, Artificial Sequence
  Oligonucleotide for detection of SNP TSC0000298
taaacatttataa

SEQ ID NO: 885 - DNA, 13 bp, Artificial Sequence
  Oligonucleotide for detection of SNP TSC0000298
ttataagtgttta

SEQ ID NO: 886 - DNA, 13 bp, Artificial Sequence
  Oligonucleotide for detection of SNP TSC0000298
taaacacttataa

SEQ ID NO: 887 - DNA, 13 bp, Artificial Sequence
  Oligonucleotide for detection of SNP TSC0000299
ttgagtattttgt

SEQ ID NO: 888 - DNA, 13 bp, Artificial Sequence
  Oligonucleotide for detection of SNP TSC0000299
acaaaatactcaa

SEQ ID NO: 889 - DNA, 13 bp, Artificial Sequence
  Oligonucleotide for detection of SNP TSC0000299
ttgagtgttttgt

SEQ ID NO: 890 - DNA, 13 bp, Artificial Sequence
  Oligonucleotide for detection of SNP TSC0000299
acaaaacactcaa

SEQ ID NO: 891 - DNA, 13 bp, Artificial Sequence
  Oligonucleotide for detection of SNP TSC0000301
atttttattttty

SEQ ID NO: 892 - DNA, 13 bp, Artificial Sequence
  Oligonucleotide for detection of SNP TSC0000301
raaaaataaaaat

SEQ ID NO: 893 - DNA, 13 bp, Artificial Sequence
  Oligonucleotide for detection of SNP TSC0000301
atttttgttttty

SEQ ID NO: 894 - DNA, 13 bp, Artificial Sequence
  Oligonucleotide for detection of SNP TSC0000301
raaaaacaaaaat

SEQ ID NO: 895 - DNA, 13 bp, Artificial Sequence
  Oligonucleotide for detection of SNP TSC0000301
attttcgttttty

SEQ ID NO: 896 - DNA, 13 bp, Artificial Sequence
  Oligonucleotide for detection of SNP TSC0000301
raaaaacgaaaat

SEQ ID NO: 897 - DNA, 13 bp, Artificial Sequence
  Oligonucleotide for detection of SNP TSC0000301
gggaggtgaagat

SEQ ID NO: 898 - DNA, 13 bp, Artificial Sequence
  Oligonucleotide for detection of SNP TSC0000301
atcttcacctccc

SEQ ID NO: 899 - DNA, 13 bp, Artificial Sequence
  Oligonucleotide for detection of SNP TSC0000301
gggaggcgaagat

SEQ ID NO: 900 - DNA, 13 bp, Artificial Sequence
  Oligonucleotide for detection of SNP TSC0000301
atcttcgcctccc

SEQ ID NO: 901 - DNA, 13 bp, Artificial Sequence
  Oligonucleotide for detection of SNP TSC0000305
attattatggata

SEQ ID NO: 902 - DNA, 13 bp, Artificial Sequence
  Oligonucleotide for detection of SNP TSC0000305
tatccataataat

SEQ ID NO: 903 - DNA, 13 bp, Artificial Sequence
  Oligonucleotide for detection of SNP TSC0000305
attattgtggata

SEQ ID NO: 904 - DNA, 13 bp, Artificial Sequence
  Oligonucleotide for detection of SNP TSC0000305
tatccacaataat

SEQ ID NO: 905 - DNA, 13 bp, Artificial Sequence
  Oligonucleotide for detection of SNP TSC0000306
gaaagaggaaaaa

SEQ ID NO: 906 - DNA, 13 bp, Artificial Sequence
  Oligonucleotide for detection of SNP TSC0000306
tttttcctctttc

SEQ ID NO: 907 - DNA, 13 bp, Artificial Sequence
  Oligonucleotide for detection of SNP TSC0000306
gaaagaagaaaaa

SEQ ID NO: 908 - DNA, 13 bp, Artificial Sequence
  Oligonucleotide for detection of SNP TSC0000306
tttttcttctttc

SEQ ID NO: 909 - DNA, 13 bp, Artificial Sequence
  Oligonucleotide for detection of SNP TSC0000307
atttttaaaatta

SEQ ID NO: 910 - DNA, 13 bp, Artificial Sequence
  Oligonucleotide for detection of SNP TSC0000307
taattttaaaaat

SEQ ID NO: 911 - DNA, 13 bp, Artificial Sequence
  Oligonucleotide for detection of SNP TSC0000307
attttttaaatta

SEQ ID NO: 912 - DNA, 13 bp, Artificial Sequence
  Oligonucleotide for detection of SNP TSC0000307
taatttaaaaaat

SEQ ID NO: 913 - DNA, 13 bp, Artificial Sequence
  Oligonucleotide for detection of SNP TSC0000307
tggttttaaaaat

SEQ ID NO: 914 - DNA, 13 bp, Artificial Sequence
  Oligonucleotide for detection of SNP TSC0000307
atttttaaaacca

SEQ ID NO: 915 - DNA, 13 bp, Artificial Sequence
  Oligonucleotide for detection of SNP TSC0000307
tggtttaaaaaat

SEQ ID NO: 916 - DNA, 13 bp, Artificial Sequence
  Oligonucleotide for detection of SNP TSC0000307
attttttaaacca

SEQ ID NO: 917 - DNA, 13 bp, Artificial Sequence
  Oligonucleotide for detection of SNP TSC0000308
ttattaggtagay

SEQ ID NO: 918 - DNA, 13 bp, Artificial Sequence
  Oligonucleotide for detection of SNP TSC0000308
rtctacctaataa

SEQ ID NO: 919 - DNA, 13 bp, Artificial Sequence
  Oligonucleotide for detection of SNP TSC0000308
ttattaagtagay

SEQ ID NO: 920 - DNA, 13 bp, Artificial Sequence
  Oligonucleotide for detection of SNP TSC0000308
rtctacttaataa

SEQ ID NO: 921 - DNA, 13 bp, Artificial Sequence
  Oligonucleotide for detection of SNP TSC0000309
agtttggaggatg

SEQ ID NO: 922 - DNA, 13 bp, Artificial Sequence
  Oligonucleotide for detection of SNP TSC0000309
catcctccaaact

SEQ ID NO: 923 - DNA, 13 bp, Artificial Sequence
  Oligonucleotide for detection of SNP TSC0000309
agtttgaaggatg

SEQ ID NO: 924 - DNA, 13 bp, Artificial Sequence
  Oligonucleotide for detection of SNP TSC0000309
catccttcaaact

SEQ ID NO: 925 - DNA, 13 bp, Artificial Sequence
  Oligonucleotide for detection of SNP TSC0000309
agttcggaggatg

SEQ ID NO: 926 - DNA, 13 bp, Artificial Sequence
  Oligonucleotide for detection of SNP TSC0000309
catcctccgaact

SEQ ID NO: 927 - DNA, 13 bp, Artificial Sequence
  Oligonucleotide for detection of SNP TSC0000309
agttcgaaggatg

SEQ ID NO: 928 - DNA, 13 bp, Artificial Sequence
  Oligonucleotide for detection of SNP TSC0000309
catccttcgaact

SEQ ID NO: 929 - DNA, 13 bp, Artificial Sequence
  Oligonucleotide for detection of SNP TSC0000310
taatttatggaaa

SEQ ID NO: 930 - DNA, 13 bp, Artificial Sequence
  Oligonucleotide for detection of SNP TSC0000310
tttccataaatta

SEQ ID NO: 931 - DNA, 13 bp, Artificial Sequence
  Oligonucleotide for detection of SNP TSC0000310
taatttgtggaaa

SEQ ID NO: 932 - DNA, 13 bp, Artificial Sequence
  Oligonucleotide for detection of SNP TSC0000310
tttccacaaatta

SEQ ID NO: 933 - DNA, 13 bp, Artificial Sequence
  Oligonucleotide for detection of SNP TSC0000311
aatagagaagttt

SEQ ID NO: 934 - DNA, 13 bp, Artificial Sequence
  Oligonucleotide for detection of SNP TSC0000311
aaacttctctatt

SEQ ID NO: 935 - DNA, 13 bp, Artificial Sequence
  Oligonucleotide for detection of SNP TSC0000311
aatagaaaagttt

SEQ ID NO: 936 - DNA, 13 bp, Artificial Sequence
  Oligonucleotide for detection of SNP TSC0000311
aaacttttctatt

SEQ ID NO: 937 - DNA, 13 bp, Artificial Sequence
  Oligonucleotide for detection of SNP TSC0000312
agtagtataggty

SEQ ID NO: 938 - DNA, 13 bp, Artificial Sequence
  Oligonucleotide for detection of SNP TSC0000312
racctatactact

SEQ ID NO: 939 - DNA, 13 bp, Artificial Sequence
  Oligonucleotide for detection of SNP TSC0000312
agtagtgtaggty

SEQ ID NO: 940 - DNA, 13 bp, Artificial Sequence
  Oligonucleotide for detection of SNP TSC0000312
racctacactact

SEQ ID NO: 941 - DNA, 13 bp, Artificial Sequence
  Oligonucleotide for detection of SNP TSC0000312
agtagcgtaggty

SEQ ID NO: 942 - DNA, 13 bp, Artificial Sequence
  Oligonucleotide for detection of SNP TSC0000312
racctacgctact

SEQ ID NO: 943 - DNA, 13 bp, Artificial Sequence
  Oligonucleotide for detection of SNP TSC0000312
ggtttgtgttatt

SEQ ID NO: 944 - DNA, 13 bp, Artificial Sequence
  Oligonucleotide for detection of SNP TSC0000312
aataacacaaacc

SEQ ID NO: 945 - DNA, 13 bp, Artificial Sequence
  Oligonucleotide for detection of SNP TSC0000312
ggtttgcgttatt

SEQ ID NO: 946 - DNA, 13 bp, Artificial Sequence
  Oligonucleotide for detection of SNP TSC0000312
aataacgcaaacc

SEQ ID NO: 947 - DNA, 13 bp, Artificial Sequence
  Oligonucleotide for detection of SNP TSC0000313
attatatgggtay

SEQ ID NO: 948 - DNA, 13 bp, Artificial Sequence
  Oligonucleotide for detection of SNP TSC0000313
rtacccatataat

SEQ ID NO: 949 - DNA, 13 bp, Artificial Sequence
  Oligonucleotide for detection of SNP TSC0000313
attatacgggtay

SEQ ID NO: 950 - DNA, 13 bp, Artificial Sequence
  Oligonucleotide for detection of SNP TSC0000313
rtacccgtataat

SEQ ID NO: 951 - DNA, 13 bp, Artificial Sequence
  Oligonucleotide for detection of SNP TSC0000313
gtgtttgtgtaat

SEQ ID NO: 952 - DNA, 13 bp, Artificial Sequence
  Oligonucleotide for detection of SNP TSC0000313
attacacaaacac

SEQ ID NO: 953 - DNA, 13 bp, Artificial Sequence
  Oligonucleotide for detection of SNP TSC0000313
gtgtttatgtaat

SEQ ID NO: 954 - DNA, 13 bp, Artificial Sequence
  Oligonucleotide for detection of SNP TSC0000313
attacataaacac

SEQ ID NO: 955 - DNA, 13 bp, Artificial Sequence
  Oligonucleotide for detection of SNP TSC0000313
gtgttcgtgtaat

SEQ ID NO: 956 - DNA, 13 bp, Artificial Sequence
  Oligonucleotide for detection of SNP TSC0000313
attacacgaacac

SEQ ID NO: 957 - DNA, 13 bp, Artificial Sequence
  Oligonucleotide for detection of SNP TSC0000316
tagagtatatttg

SEQ ID NO: 958 - DNA, 13 bp, Artificial Sequence
  Oligonucleotide for detection of SNP TSC0000316
caaatatactcta

SEQ ID NO: 959 - DNA, 13 bp, Artificial Sequence
  Oligonucleotide for detection of SNP TSC0000316
tagagtgtatttg

SEQ ID NO: 960 - DNA, 13 bp, Artificial Sequence
  Oligonucleotide for detection of SNP TSC0000316
caaatacactcta

SEQ ID NO: 961 - DNA, 13 bp, Artificial Sequence
  Oligonucleotide for detection of SNP TSC0000316
tagagcgtatttg

SEQ ID NO: 962 - DNA, 13 bp, Artificial Sequence
  Oligonucleotide for detection of SNP TSC0000316
caaatacgctcta

SEQ ID NO: 963 - DNA, 13 bp, Artificial Sequence
  Oligonucleotide for detection of SNP TSC0000316
taaatatgtttta

SEQ ID NO: 964 - DNA, 13 bp, Artificial Sequence
  Oligonucleotide for detection of SNP TSC0000316
taaaacatattta

SEQ ID NO: 965 - DNA, 13 bp, Artificial Sequence
  Oligonucleotide for detection of SNP TSC0000316
taaatacgtttta

SEQ ID NO: 966 - DNA, 13 bp, Artificial Sequence
  Oligonucleotide for detection of SNP TSC0000316
taaaacgtattta

SEQ ID NO: 967 - DNA, 13 bp, Artificial Sequence
  Oligonucleotide for detection of SNP TSC0000323
atggatatatagg

SEQ ID NO: 968 - DNA, 13 bp, Artificial Sequence
  Oligonucleotide for detection of SNP TSC0000323
cctatatatccat

SEQ ID NO: 969 - DNA, 13 bp, Artificial Sequence
  Oligonucleotide for detection of SNP TSC0000323
atggatgtatagg

SEQ ID NO: 970 - DNA, 13 bp, Artificial Sequence
  Oligonucleotide for detection of SNP TSC0000323
cctatacatccat

SEQ ID NO: 971 - DNA, 13 bp, Artificial Sequence
  Oligonucleotide for detection of SNP TSC0000324
gaagagtttttag

SEQ ID NO: 972 - DNA, 13 bp, Artificial Sequence
  Oligonucleotide for detection of SNP TSC0000324
ctaaaaactcttc

SEQ ID NO: 973 - DNA, 13 bp, Artificial Sequence
  Oligonucleotide for detection of SNP TSC0000324
gaagaggttttag

SEQ ID NO: 974 - DNA, 13 bp, Artificial Sequence
  Oligonucleotide for detection of SNP TSC0000324
ctaaaacctcttc

SEQ ID NO: 975 - DNA, 13 bp, Artificial Sequence
  Oligonucleotide for detection of SNP TSC0000324
ttgagggttttty

SEQ ID NO: 976 - DNA, 13 bp, Artificial Sequence
  Oligonucleotide for detection of SNP TSC0000324
raaaaaccctcaa

SEQ ID NO: 977 - DNA, 13 bp, Artificial Sequence
  Oligonucleotide for detection of SNP TSC0000324
ttgaggtttttty

SEQ ID NO: 978 - DNA, 13 bp, Artificial Sequence
  Oligonucleotide for detection of SNP TSC0000324
raaaaaacctcaa

SEQ ID NO: 979 - DNA, 13 bp, Artificial Sequence
  Oligonucleotide for detection of SNP TSC0000327
tatgttattaaty

SEQ ID NO: 980 - DNA, 13 bp, Artificial Sequence
  Oligonucleotide for detection of SNP TSC0000327
rattaataacata

SEQ ID NO: 981 - DNA, 13 bp, Artificial Sequence
  Oligonucleotide for detection of SNP TSC0000327
tatgttgttaaty

SEQ ID NO: 982 - DNA, 13 bp, Artificial Sequence
  Oligonucleotide for detection of SNP TSC0000327
rattaacaacata

SEQ ID NO: 983 - DNA, 13 bp, Artificial Sequence
  Oligonucleotide for detection of SNP TSC0000327
tatgtcgttaaty

SEQ ID NO: 984 - DNA, 13 bp, Artificial Sequence
  Oligonucleotide for detection of SNP TSC0000327
rattaacgacata

SEQ ID NO: 985 - DNA, 13 bp, Artificial Sequence
  Oligonucleotide for detection of SNP TSC0000327
gattgatgatata

SEQ ID NO: 986 - DNA, 13 bp, Artificial Sequence
  Oligonucleotide for detection of SNP TSC0000327
tatatcatcaatc

SEQ ID NO: 987 - DNA, 13 bp, Artificial Sequence
  Oligonucleotide for detection of SNP TSC0000327
gattgacgatata

SEQ ID NO: 988 - DNA, 13 bp, Artificial Sequence
  Oligonucleotide for detection of SNP TSC0000327
tatatcgtcaatc

SEQ ID NO: 989 - DNA, 13 bp, Artificial Sequence
  Oligonucleotide for detection of SNP TSC0000332
aggtgtatttgtg

SEQ ID NO: 990 - DNA, 13 bp, Artificial Sequence
  Oligonucleotide for detection of SNP TSC0000332
cacaaatacacct

SEQ ID NO: 991 - DNA, 13 bp, Artificial Sequence
  Oligonucleotide for detection of SNP TSC0000332
aggtgtgtttgtg

SEQ ID NO: 992 - DNA, 13 bp, Artificial Sequence
  Oligonucleotide for detection of SNP TSC0000332
cacaaacacacct

SEQ ID NO: 993 - DNA, 13 bp, Artificial Sequence
  Oligonucleotide for detection of SNP TSC0000332
aggtgcgtttgtg

SEQ ID NO: 994 - DNA, 13 bp, Artificial Sequence
  Oligonucleotide for detection of SNP TSC0000332
cacaaacgcacct

SEQ ID NO: 995 - DNA, 13 bp, Artificial Sequence
  Oligonucleotide for detection of SNP TSC0000332
tatagatgtattt

SEQ ID NO: 996 - DNA, 13 bp, Artificial Sequence
  Oligonucleotide for detection of SNP TSC0000332
aaatacatctata

SEQ ID NO: 997 - DNA, 13 bp, Artificial Sequence
  Oligonucleotide for detection of SNP TSC0000332
tatagacgtattt

SEQ ID NO: 998 - DNA, 13 bp, Artificial Sequence
  Oligonucleotide for detection of SNP TSC0000332
aaatacgtctata

SEQ ID NO: 999 - DNA, 13 bp, Artificial Sequence
  Oligonucleotide for detection of SNP TSC0000333
taaatttatatgt

SEQ ID NO: 1000 - DNA, 13 bp, Artificial Sequence
  Oligonucleotide for detection of SNP TSC0000333
acatataaattta

SEQ ID NO: 1001 - DNA, 13 bp, Artificial Sequence
  Oligonucleotide for detection of SNP TSC0000333
taaattgatatgt

SEQ ID NO: 1002 - DNA, 13 bp, Artificial Sequence
  Oligonucleotide for detection of SNP TSC0000333
acatatcaattta

SEQ ID NO: 1003 - DNA, 13 bp, Artificial Sequence
  Oligonucleotide for detection of SNP TSC0000333
taaatcgatatgt

SEQ ID NO: 1004 - DNA, 13 bp, Artificial Sequence
  Oligonucleotide for detection of SNP TSC0000333
acatatcgattta

SEQ ID NO: 1005 - DNA, 13 bp, Artificial Sequence
  Oligonucleotide for detection of SNP TSC0000333
atatatggatttg

SEQ ID NO: 1006 - DNA, 13 bp, Artificial Sequence
  Oligonucleotide for detection of SNP TSC0000333
caaatccatatat

SEQ ID NO: 1007 - DNA, 13 bp, Artificial Sequence
  Oligonucleotide for detection of SNP TSC0000333
atatattgatttg

SEQ ID NO: 1008 - DNA, 13 bp, Artificial Sequence
  Oligonucleotide for detection of SNP TSC0000333
caaatcaatatat

SEQ ID NO: 1009 - DNA, 13 bp, Artificial Sequence
  Oligonucleotide for detection of SNP TSC0000333
atatatcgatttg

SEQ ID NO: 1010 - DNA, 13 bp, Artificial Sequence
  Oligonucleotide for detection of SNP TSC0000333
caaatcgatatat

SEQ ID NO: 1011 - DNA, 13 bp, Artificial Sequence
  Oligonucleotide for detection of SNP TSC0000334
ttttatatttttt

SEQ ID NO: 1012 - DNA, 13 bp, Artificial Sequence
  Oligonucleotide for detection of SNP TSC0000334
aaaaaatataaaa

SEQ ID NO: 1013 - DNA, 13 bp, Artificial Sequence
  Oligonucleotide for detection of SNP TSC0000334
ttttatgtttttt

SEQ ID NO: 1014 - DNA, 13 bp, Artificial Sequence
  Oligonucleotide for detection of SNP TSC0000334
aaaaaacataaaa

SEQ ID NO: 1015 - DNA, 13 bp, Artificial Sequence
  Oligonucleotide for detection of SNP TSC0000335
agttttatttttg

SEQ ID NO: 1016 - DNA, 13 bp, Artificial Sequence
  Oligonucleotide for detection of SNP TSC0000335
caaaaataaaact

SEQ ID NO: 1017 - DNA, 13 bp, Artificial Sequence
  Oligonucleotide for detection of SNP TSC0000335
agttttttttttg

SEQ ID NO: 1018 - DNA, 13 bp, Artificial Sequence
  Oligonucleotide for detection of SNP TSC0000335
caaaaaaaaaact

SEQ ID NO: 1019 - DNA, 13 bp, Artificial Sequence
  Oligonucleotide for detection of SNP TSC0000335
tagaaatgaagtt

SEQ ID NO: 1020 - DNA, 13 bp, Artificial Sequence
  Oligonucleotide for detection of SNP TSC0000335
aacttcatttcta

SEQ ID NO: 1021 - DNA, 13 bp, Artificial Sequence
  Oligonucleotide for detection of SNP TSC0000335
tagaaaggaagtt

SEQ ID NO: 1022 - DNA, 13 bp, Artificial Sequence
  Oligonucleotide for detection of SNP TSC0000335
aacttcctttcta

SEQ ID NO: 1023 - DNA, 13 bp, Artificial Sequence
  Oligonucleotide for detection of SNP TSC0000336
ttgggggtggagt

SEQ ID NO: 1024 - DNA, 13 bp, Artificial Sequence
  Oligonucleotide for detection of SNP TSC0000336
actccacccccaa

SEQ ID NO: 1025 - DNA, 13 bp, Artificial Sequence
  Oligonucleotide for detection of SNP TSC0000336
ttggggttggagt

SEQ ID NO: 1026 - DNA, 13 bp, Artificial Sequence
  Oligonucleotide for detection of SNP TSC0000336
actccaaccccaa

SEQ ID NO: 1027 - DNA, 13 bp, Artificial Sequence
  Oligonucleotide for detection of SNP TSC0000336
attttatttttag

SEQ ID NO: 1028 - DNA, 13 bp, Artificial Sequence
  Oligonucleotide for detection of SNP TSC0000336
ctaaaaataaaat

SEQ ID NO: 1029 - DNA, 13 bp, Artificial Sequence
  Oligonucleotide for detection of SNP TSC0000336
attttaattttag

SEQ ID NO: 1030 - DNA, 13 bp, Artificial Sequence
  Oligonucleotide for detection of SNP TSC0000336
ctaaaattaaaat

SEQ ID NO: 1031 - DNA, 13 bp, Artificial Sequence
  Oligonucleotide for detection of SNP TSC0000337
attttaagttata

SEQ ID NO: 1032 - DNA, 13 bp, Artificial Sequence
  Oligonucleotide for detection of SNP TSC0000337
tataacttaaaat

SEQ ID NO: 1033 - DNA, 13 bp, Artificial Sequence
  Oligonucleotide for detection of SNP TSC0000337
attttaggttata

SEQ ID NO: 1034 - DNA, 13 bp, Artificial Sequence
  Oligonucleotide for detection of SNP TSC0000337
tataacctaaaat

SEQ ID NO: 1035 - DNA, 13 bp, Artificial Sequence
  Oligonucleotide for detection of SNP TSC0000338
gagttgatattta

SEQ ID NO: 1036 - DNA, 13 bp, Artificial Sequence
  Oligonucleotide for detection of SNP TSC0000338
taaatatcaactc

SEQ ID NO: 1037 - DNA, 13 bp, Artificial Sequence
  Oligonucleotide for detection of SNP TSC0000338
gagttggtattta

SEQ ID NO: 1038 - DNA, 13 bp, Artificial Sequence
  Oligonucleotide for detection of SNP TSC0000338
taaataccaactc

SEQ ID NO: 1039 - DNA, 13 bp, Artificial Sequence
  Oligonucleotide for detection of SNP TSC0000352
gagatagaagtty

SEQ ID NO: 1040 - DNA, 13 bp, Artificial Sequence
  Oligonucleotide for detection of SNP TSC0000352
raacttctatctc

SEQ ID NO: 1041 - DNA, 13 bp, Artificial Sequence
  Oligonucleotide for detection of SNP TSC0000352
gagataaaagtty

SEQ ID NO: 1042 - DNA, 13 bp, Artificial Sequence
  Oligonucleotide for detection of SNP TSC0000352
raacttttatctc

SEQ ID NO: 1043 - DNA, 13 bp, Artificial Sequence
  Oligonucleotide for detection of SNP TSC0000355
tgattaaagagat

SEQ ID NO: 1044 - DNA, 13 bp, Artificial Sequence
  Oligonucleotide for detection of SNP TSC0000355
atctctttaatca

SEQ ID NO: 1045 - DNA, 13 bp, Artificial Sequence
  Oligonucleotide for detection of SNP TSC0000355
tgattatagagat

SEQ ID NO: 1046 - DNA, 13 bp, Artificial Sequence
  Oligonucleotide for detection of SNP TSC0000355
atctctataatca

SEQ ID NO: 1047 - DNA, 13 bp, Artificial Sequence
  Oligonucleotide for detection of SNP TSC0000355
atttttttaatta

SEQ ID NO: 1048 - DNA, 13 bp, Artificial Sequence
  Oligonucleotide for detection of SNP TSC0000355
taattaaaaaaat

SEQ ID NO: 1049 - DNA, 13 bp, Artificial Sequence
  Oligonucleotide for detection of SNP TSC0000355
atttttgtaatta

SEQ ID NO: 1050 - DNA, 13 bp, Artificial Sequence
  Oligonucleotide for detection of SNP TSC0000355
taattacaaaaat

SEQ ID NO: 1051 - DNA, 13 bp, Artificial Sequence
  Oligonucleotide for detection of SNP TSC0000357
tattttttgtatg

SEQ ID NO: 1052 - DNA, 13 bp, Artificial Sequence
  Oligonucleotide for detection of SNP TSC0000357
catacaaaaaata

SEQ ID NO: 1053 - DNA, 13 bp, Artificial Sequence
  Oligonucleotide for detection of SNP TSC0000357
tattttgtgtatg

SEQ ID NO: 1054 - DNA, 13 bp, Artificial Sequence
  Oligonucleotide for detection of SNP TSC0000357
catacacaaaata

SEQ ID NO: 1055 - DNA, 13 bp, Artificial Sequence
  Oligonucleotide for detection of SNP TSC0000357
tatatagaagata

SEQ ID NO: 1056 - DNA, 13 bp, Artificial Sequence
  Oligonucleotide for detection of SNP TSC0000357
tatcttctatata

SEQ ID NO: 1057 - DNA, 13 bp, Artificial Sequence
  Oligonucleotide for detection of SNP TSC0000357
tatatataagata

SEQ ID NO: 1058 - DNA, 13 bp, Artificial Sequence
  Oligonucleotide for detection of SNP TSC0000357
tatcttatatata

SEQ ID NO: 1059 - DNA, 13 bp, Artificial Sequence
  Oligonucleotide for detection of SNP TSC0000360
ggtgatattatag

SEQ ID NO: 1060 - DNA, 13 bp, Artificial Sequence
  Oligonucleotide for detection of SNP TSC0000360
ctataatatcacc

SEQ ID NO: 1061 - DNA, 13 bp, Artificial Sequence
  Oligonucleotide for detection of SNP TSC0000360
ggtgatgttatag

SEQ ID NO: 1062 - DNA, 13 bp, Artificial Sequence
  Oligonucleotide for detection of SNP TSC0000360
ctataacatcacc

SEQ ID NO: 1063 - DNA, 13 bp, Artificial Sequence
  Oligonucleotide for detection of SNP TSC0000360
ggtgacgttatag

SEQ ID NO: 1064 - DNA, 13 bp, Artificial Sequence
  Oligonucleotide for detection of SNP TSC0000360
ctataacgtcacc

SEQ ID NO: 1065 - DNA, 13 bp, Artificial Sequence
  Oligonucleotide for detection of SNP TSC0000360
ttgtgatgttaty

SEQ ID NO: 1066 - DNA, 13 bp, Artificial Sequence
  Oligonucleotide for detection of SNP TSC0000360
rataacatcacaa

SEQ ID NO: 1067 - DNA, 13 bp, Artificial Sequence
  Oligonucleotide for detection of SNP TSC0000360
ttgtgacgttaty

SEQ ID NO: 1068 - DNA, 13 bp, Artificial Sequence
  Oligonucleotide for detection of SNP TSC0000360
rataacgtcacaa

SEQ ID NO: 1069 - DNA, 13 bp, Artificial Sequence
  Oligonucleotide for detection of SNP TSC0000361
tagtgagtgagag

SEQ ID NO: 1070 - DNA, 13 bp, Artificial Sequence
  Oligonucleotide for detection of SNP TSC0000361
ctctcactcacta

SEQ ID NO: 1071 - DNA, 13 bp, Artificial Sequence
  Oligonucleotide for detection of SNP TSC0000361
tagtgaatgagag

SEQ ID NO: 1072 - DNA, 13 bp, Artificial Sequence
  Oligonucleotide for detection of SNP TSC0000361
ctctcattcacta

SEQ ID NO: 1073 - DNA, 13 bp, Artificial Sequence
  Oligonucleotide for detection of SNP TSC0000361
tagcgagtgagag

SEQ ID NO: 1074 - DNA, 13 bp, Artificial Sequence
  Oligonucleotide for detection of SNP TSC0000361
ctctcactcgcta

SEQ ID NO: 1075 - DNA, 13 bp, Artificial Sequence
  Oligonucleotide for detection of SNP TSC0000361
tagcgaatgagag

SEQ ID NO: 1076 - DNA, 13 bp, Artificial Sequence
  Oligonucleotide for detection of SNP TSC0000361
ctctcattcgcta

SEQ ID NO: 1077 - DNA, 13 bp, Artificial Sequence
  Oligonucleotide for detection of SNP TSC0000365
tatatagattaat

SEQ ID NO: 1078 - DNA, 13 bp, Artificial Sequence
  Oligonucleotide for detection of SNP TSC0000365
attaatctatata

SEQ ID NO: 1079 - DNA, 13 bp, Artificial Sequence
  Oligonucleotide for detection of SNP TSC0000365
tatatatattaat

SEQ ID NO: 1080 - DNA, 13 bp, Artificial Sequence
  Oligonucleotide for detection of SNP TSC0000365
attaatatatata

SEQ ID NO: 1081 - DNA, 13 bp, Artificial Sequence
  Oligonucleotide for detection of SNP TSC0000365
attaatttatgta

SEQ ID NO: 1082 - DNA, 13 bp, Artificial Sequence
  Oligonucleotide for detection of SNP TSC0000365
tacataaattaat

SEQ ID NO: 1083 - DNA, 13 bp, Artificial Sequence
  Oligonucleotide for detection of SNP TSC0000365
attaatatatgta

SEQ ID NO: 1084 - DNA, 13 bp, Artificial Sequence
  Oligonucleotide for detection of SNP TSC0000365
tacatatattaat

SEQ ID NO: 1085 - DNA, 13 bp, Artificial Sequence
  Oligonucleotide for detection of SNP TSC0000367
tttatatgagtta

SEQ ID NO: 1086 - DNA, 13 bp, Artificial Sequence
  Oligonucleotide for detection of SNP TSC0000367
taactcatataaa

SEQ ID NO: 1087 - DNA, 13 bp, Artificial Sequence
  Oligonucleotide for detection of SNP TSC0000367
tttatacgagtta

SEQ ID NO: 1088 - DNA, 13 bp, Artificial Sequence
  Oligonucleotide for detection of SNP TSC0000367
taactcgtataaa

SEQ ID NO: 1089 - DNA, 13 bp, Artificial Sequence
  Oligonucleotide for detection of SNP TSC0000367
tggtttgtatggg

SEQ ID NO: 1090 - DNA, 13 bp, Artificial Sequence
  Oligonucleotide for detection of SNP TSC0000367
cccatacaaacca

SEQ ID NO: 1091 - DNA, 13 bp, Artificial Sequence
  Oligonucleotide for detection of SNP TSC0000367
tggtttatatggg

SEQ ID NO: 1092 - DNA, 13 bp, Artificial Sequence
  Oligonucleotide for detection of SNP TSC0000367
cccatataaacca

SEQ ID NO: 1093 - DNA, 13 bp, Artificial Sequence
  Oligonucleotide for detection of SNP TSC0000367
tggttcgtatggg

SEQ ID NO: 1094 - DNA, 13 bp, Artificial Sequence
  Oligonucleotide for detection of SNP TSC0000367
cccatacgaacca

SEQ ID NO: 1095 - DNA, 13 bp, Artificial Sequence
  Oligonucleotide for detection of SNP TSC0000371
tggttttgttttt

SEQ ID NO: 1096 - DNA, 13 bp, Artificial Sequence
  Oligonucleotide for detection of SNP TSC0000371
aaaaacaaaacca

SEQ ID NO: 1097 - DNA, 13 bp, Artificial Sequence
  Oligonucleotide for detection of SNP TSC0000371
tggtttcgttttt

SEQ ID NO: 1098 - DNA, 13 bp, Artificial Sequence
  Oligonucleotide for detection of SNP TSC0000371
aaaaacgaaacca

SEQ ID NO: 1099 - DNA, 13 bp, Artificial Sequence
  Oligonucleotide for detection of SNP TSC0000371
agaaatggaatta

SEQ ID NO: 1100 - DNA, 13 bp, Artificial Sequence
  Oligonucleotide for detection of SNP TSC0000371
taattccatttct

SEQ ID NO: 1101 - DNA, 13 bp, Artificial Sequence
  Oligonucleotide for detection of SNP TSC0000371
agaaatagaatta

SEQ ID NO: 1102 - DNA, 13 bp, Artificial Sequence
  Oligonucleotide for detection of SNP TSC0000371
taattctatttct

SEQ ID NO: 1103 - DNA, 13 bp, Artificial Sequence
  Oligonucleotide for detection of SNP TSC0000371
agaaacggaatta

SEQ ID NO: 1104 - DNA, 13 bp, Artificial Sequence
  Oligonucleotide for detection of SNP TSC0000371
taattccgtttct

SEQ ID NO: 1105 - DNA, 13 bp, Artificial Sequence
  Oligonucleotide for detection of SNP TSC0000375
ataaagatttttt

SEQ ID NO: 1106 - DNA, 13 bp, Artificial Sequence
  Oligonucleotide for detection of SNP TSC0000375
aaaaaatctttat

SEQ ID NO: 1107 - DNA, 13 bp, Artificial Sequence
  Oligonucleotide for detection of SNP TSC0000375
ataaagttttttt

SEQ ID NO: 1108 - DNA, 13 bp, Artificial Sequence
  Oligonucleotide for detection of SNP TSC0000375
aaaaaaactttat

SEQ ID NO: 1109 - DNA, 13 bp, Artificial Sequence
  Oligonucleotide for detection of SNP TSC0000375
aaaaaatttttat

SEQ ID NO: 1110 - DNA, 13 bp, Artificial Sequence
  Oligonucleotide for detection of SNP TSC0000375
ataaaaatttttt

SEQ ID NO: 1111 - DNA, 13 bp, Artificial Sequence
  Oligonucleotide for detection of SNP TSC0000375
aaaaaaattttat

SEQ ID NO: 1112 - DNA, 13 bp, Artificial Sequence
  Oligonucleotide for detection of SNP TSC0000375
ataaaattttttt

SEQ ID NO: 1113 - DNA, 13 bp, Artificial Sequence
  Oligonucleotide for detection of SNP TSC0000376
tatgtcggttagg

SEQ ID NO: 1114 - DNA, 13 bp, Artificial Sequence
  Oligonucleotide for detection of SNP TSC0000376
cctaaccgacata

SEQ ID NO: 1115 - DNA, 13 bp, Artificial Sequence
  Oligonucleotide for detection of SNP TSC0000376
tttggttggtatg

SEQ ID NO: 1116 - DNA, 13 bp, Artificial Sequence
  Oligonucleotide for detection of SNP TSC0000376
cataccaaccaaa

SEQ ID NO: 1117 - DNA, 13 bp, Artificial Sequence
  Oligonucleotide for detection of SNP TSC0000376
tttggtcggtatg

SEQ ID NO: 1118 - DNA, 13 bp, Artificial Sequence
  Oligonucleotide for detection of SNP TSC0000376
cataccgaccaaa

SEQ ID NO: 1119 - DNA, 13 bp, Artificial Sequence
  Oligonucleotide for detection of SNP TSC0000383
atgtgtgggttaa

SEQ ID NO: 1120 - DNA, 13 bp, Artificial Sequence
  Oligonucleotide for detection of SNP TSC0000383
ttaacccacacat

SEQ ID NO: 1121 - DNA, 13 bp, Artificial Sequence
  Oligonucleotide for detection of SNP TSC0000383
atgtgttggttaa

SEQ ID NO: 1122 - DNA, 13 bp, Artificial Sequence
  Oligonucleotide for detection of SNP TSC0000383
ttaaccaacacat

SEQ ID NO: 1123 - DNA, 13 bp, Artificial Sequence
  Oligonucleotide for detection of SNP TSC0000383
atgtgcgggttaa

SEQ ID NO: 1124 - DNA, 13 bp, Artificial Sequence
  Oligonucleotide for detection of SNP TSC0000383
ttaacccgcacat

SEQ ID NO: 1125 - DNA, 13 bp, Artificial Sequence
  Oligonucleotide for detection of SNP TSC0000383
ttaatttgtatat

SEQ ID NO: 1126 - DNA, 13 bp, Artificial Sequence
  Oligonucleotide for detection of SNP TSC0000383
atatacaaattaa

SEQ ID NO: 1127 - DNA, 13 bp, Artificial Sequence
  Oligonucleotide for detection of SNP TSC0000383
ttaattagtatat

SEQ ID NO: 1128 - DNA, 13 bp, Artificial Sequence
  Oligonucleotide for detection of SNP TSC0000383
atatactaattaa

SEQ ID NO: 1129 - DNA, 13 bp, Artificial Sequence
  Oligonucleotide for detection of SNP TSC0000383
ttaattcgtatat

SEQ ID NO: 1130 - DNA, 13 bp, Artificial Sequence
  Oligonucleotide for detection of SNP TSC0000383
atatacgaattaa

SEQ ID NO: 1131 - DNA, 13 bp, Artificial Sequence
  Oligonucleotide for detection of SNP TSC0000388
gagaaagtatatg

SEQ ID NO: 1132 - DNA, 13 bp, Artificial Sequence
  Oligonucleotide for detection of SNP TSC0000388
catatactttctc

SEQ ID NO: 1133 - DNA, 13 bp, Artificial Sequence
  Oligonucleotide for detection of SNP TSC0000388
gagaaaatatatg

SEQ ID NO: 1134 - DNA, 13 bp, Artificial Sequence
  Oligonucleotide for detection of SNP TSC0000388
catatattttctc

SEQ ID NO: 1135 - DNA, 13 bp, Artificial Sequence
  Oligonucleotide for detection of SNP TSC0000397
ttttgtattttaa

SEQ ID NO: 1136 - DNA, 13 bp, Artificial Sequence
  Oligonucleotide for detection of SNP TSC0000397
ttaaaatacaaaa

SEQ ID NO: 1137 - DNA, 13 bp, Artificial Sequence
  Oligonucleotide for detection of SNP TSC0000397
ttttgttttttaa

SEQ ID NO: 1138 - DNA, 13 bp, Artificial Sequence
  Oligonucleotide for detection of SNP TSC0000397
ttaaaaaacaaaa

SEQ ID NO: 1139 - DNA, 13 bp, Artificial Sequence
  Oligonucleotide for detection of SNP TSC0000397
ttaagatgtaagg

SEQ ID NO: 1140 - DNA, 13 bp, Artificial Sequence
  Oligonucleotide for detection of SNP TSC0000397
ccttacatcttaa

SEQ ID NO: 1141 - DNA, 13 bp, Artificial Sequence
  Oligonucleotide for detection of SNP TSC0000397
ttaagaagtaagg

SEQ ID NO: 1142 - DNA, 13 bp, Artificial Sequence
  Oligonucleotide for detection of SNP TSC0000397
ccttacttcttaa

SEQ ID NO: 1143 - DNA, 13 bp, Artificial Sequence
  Oligonucleotide for detection of SNP TSC0000400
ttttatatgttaa

SEQ ID NO: 1144 - DNA, 13 bp, Artificial Sequence
  Oligonucleotide for detection of SNP TSC0000400
ttaacatataaaa

SEQ ID NO: 1145 - DNA, 13 bp, Artificial Sequence
  Oligonucleotide for detection of SNP TSC0000400
ttttatttgttaa

SEQ ID NO: 1146 - DNA, 13 bp, Artificial Sequence
  Oligonucleotide for detection of SNP TSC0000400
ttaacaaataaaa

SEQ ID NO: 1147 - DNA, 13 bp, Artificial Sequence
  Oligonucleotide for detection of SNP TSC0000400
ttggtatgtgaag

SEQ ID NO: 1148 - DNA, 13 bp, Artificial Sequence
  Oligonucleotide for detection of SNP TSC0000400
cttcacataccaa

SEQ ID NO: 1149 - DNA, 13 bp, Artificial Sequence
  Oligonucleotide for detection of SNP TSC0000400
ttggtaggtgaag

SEQ ID NO: 1150 - DNA, 13 bp, Artificial Sequence
  Oligonucleotide for detection of SNP TSC0000400
cttcacctaccaa

SEQ ID NO: 1151 - DNA, 13 bp, Artificial Sequence
  Oligonucleotide for detection of SNP TSC0000401
gtaaatatgtttt

SEQ ID NO: 1152 - DNA, 13 bp, Artificial Sequence
  Oligonucleotide for detection of SNP TSC0000401
aaaacatatttac

SEQ ID NO: 1153 - DNA, 13 bp, Artificial Sequence
  Oligonucleotide for detection of SNP TSC0000401
gtaaatgtgtttt

SEQ ID NO: 1154 - DNA, 13 bp, Artificial Sequence
  Oligonucleotide for detection of SNP TSC0000401
aaaacacatttac

SEQ ID NO: 1155 - DNA, 13 bp, Artificial Sequence
  Oligonucleotide for detection of SNP TSC0000402
aattatataaata

SEQ ID NO: 1156 - DNA, 13 bp, Artificial Sequence
  Oligonucleotide for detection of SNP TSC0000402
tatttatataatt

SEQ ID NO: 1157 - DNA, 13 bp, Artificial Sequence
  Oligonucleotide for detection of SNP TSC0000402
aattatgtaaata

SEQ ID NO: 1158 - DNA, 13 bp, Artificial Sequence
  Oligonucleotide for detection of SNP TSC0000402
tatttacataatt

SEQ ID NO: 1159 - DNA, 13 bp, Artificial Sequence
  Oligonucleotide for detection of SNP TSC0000403
ttagttattagag

SEQ ID NO: 1160 - DNA, 13 bp, Artificial Sequence
  Oligonucleotide for detection of SNP TSC0000403
ctctaataactaa

SEQ ID NO: 1161 - DNA, 13 bp, Artificial Sequence
  Oligonucleotide for detection of SNP TSC0000403
ttagttgttagag

SEQ ID NO: 1162 - DNA, 13 bp, Artificial Sequence
  Oligonucleotide for detection of SNP TSC0000403
ctctaacaactaa

SEQ ID NO: 1163 - DNA, 13 bp, Artificial Sequence
  Oligonucleotide for detection of SNP TSC0000403
ttagtcgttagag

SEQ ID NO: 1164 - DNA, 13 bp, Artificial Sequence
  Oligonucleotide for detection of SNP TSC0000403
ctctaacgactaa

SEQ ID NO: 1165 - DNA, 13 bp, Artificial Sequence
  Oligonucleotide for detection of SNP TSC0000403
ttttgatggttgg

SEQ ID NO: 1166 - DNA, 13 bp, Artificial Sequence
  Oligonucleotide for detection of SNP TSC0000403
ccaaccatcaaaa

SEQ ID NO: 1167 - DNA, 13 bp, Artificial Sequence
  Oligonucleotide for detection of SNP TSC0000403
ttttgacggttgg

SEQ ID NO: 1168 - DNA, 13 bp, Artificial Sequence
  Oligonucleotide for detection of SNP TSC0000403
ccaaccgtcaaaa

SEQ ID NO: 1169 - DNA, 13 bp, Artificial Sequence
  Oligonucleotide for detection of SNP TSC0000404
tttgagattttag

SEQ ID NO: 1170 - DNA, 13 bp, Artificial Sequence
  Oligonucleotide for detection of SNP TSC0000404
ctaaaatctcaaa

SEQ ID NO: 1171 - DNA, 13 bp, Artificial Sequence
  Oligonucleotide for detection of SNP TSC0000404
tttgaggttttag

SEQ ID NO: 1172 - DNA, 13 bp, Artificial Sequence
  Oligonucleotide for detection of SNP TSC0000404
ctaaaacctcaaa

SEQ ID NO: 1173 - DNA, 13 bp, Artificial Sequence
  Oligonucleotide for detection of SNP TSC0000405
gtggggagtttag

SEQ ID NO: 1174 - DNA, 13 bp, Artificial Sequence
  Oligonucleotide for detection of SNP TSC0000405
ctaaactccccac

SEQ ID NO: 1175 - DNA, 13 bp, Artificial Sequence
  Oligonucleotide for detection of SNP TSC0000405
gtggggtgtttag

SEQ ID NO: 1176 - DNA, 13 bp, Artificial Sequence
  Oligonucleotide for detection of SNP TSC0000405
ctaaacaccccac

SEQ ID NO: 1177 - DNA, 13 bp, Artificial Sequence
  Oligonucleotide for detection of SNP TSC0000405
ttaggttttttay

SEQ ID NO: 1178 - DNA, 13 bp, Artificial Sequence
  Oligonucleotide for detection of SNP TSC0000405
rtaaaaaacctaa

SEQ ID NO: 1179 - DNA, 13 bp, Artificial Sequence
  Oligonucleotide for detection of SNP TSC0000405
ttaggtattttay

SEQ ID NO: 1180 - DNA, 13 bp, Artificial Sequence
  Oligonucleotide for detection of SNP TSC0000405
rtaaaatacctaa

SEQ ID NO: 1181 - DNA, 13 bp, Artificial Sequence
  Oligonucleotide for detection of SNP TSC0000406
attaaagttatty

SEQ ID NO: 1182 - DNA, 13 bp, Artificial Sequence
  Oligonucleotide for detection of SNP TSC0000406
raataactttaat

SEQ ID NO: 1183 - DNA, 13 bp, Artificial Sequence
  Oligonucleotide for detection of SNP TSC0000406
attaaaattatty

SEQ ID NO: 1184 - DNA, 13 bp, Artificial Sequence
  Oligonucleotide for detection of SNP TSC0000406
raataattttaat

SEQ ID NO: 1185 - DNA, 13 bp, Artificial Sequence
  Oligonucleotide for detection of SNP TSC0000407
ataatgggtttaa

SEQ ID NO: 1186 - DNA, 13 bp, Artificial Sequence
  Oligonucleotide for detection of SNP TSC0000407
ttaaacccattat

SEQ ID NO: 1187 - DNA, 13 bp, Artificial Sequence
  Oligonucleotide for detection of SNP TSC0000407
ataatgagtttaa

SEQ ID NO: 1188 - DNA, 13 bp, Artificial Sequence
  Oligonucleotide for detection of SNP TSC0000407
ttaaactcattat

SEQ ID NO: 1189 - DNA, 13 bp, Artificial Sequence
  Oligonucleotide for detection of SNP TSC0000408
aattttatggtag

SEQ ID NO: 1190 - DNA, 13 bp, Artificial Sequence
  Oligonucleotide for detection of SNP TSC0000408
ctaccataaaatt

SEQ ID NO: 1191 - DNA, 13 bp, Artificial Sequence
  Oligonucleotide for detection of SNP TSC0000408
aattttgtggtag

SEQ ID NO: 1192 - DNA, 13 bp, Artificial Sequence
  Oligonucleotide for detection of SNP TSC0000408
ctaccacaaaatt

SEQ ID NO: 1193 - DNA, 13 bp, Artificial Sequence
  Oligonucleotide for detection of SNP TSC0000408
aatttcgtggtag

SEQ ID NO: 1194 - DNA, 13 bp, Artificial Sequence
  Oligonucleotide for detection of SNP TSC0000408
ctaccacgaaatt

SEQ ID NO: 1195 - DNA, 13 bp, Artificial Sequence
  Oligonucleotide for detection of SNP TSC0000408
ttgttatgggatt

SEQ ID NO: 1196 - DNA, 13 bp, Artificial Sequence
  Oligonucleotide for detection of SNP TSC0000408
aatcccataacaa

SEQ ID NO: 1197 - DNA, 13 bp, Artificial Sequence
  Oligonucleotide for detection of SNP TSC0000408
ttgttacgggatt

SEQ ID NO: 1198 - DNA, 13 bp, Artificial Sequence
  Oligonucleotide for detection of SNP TSC0000408
aatcccgtaacaa

SEQ ID NO: 1199 - DNA, 13 bp, Artificial Sequence
  Oligonucleotide for detection of SNP TSC0000416
aatggtgattttg

SEQ ID NO: 1200 - DNA, 13 bp, Artificial Sequence
  Oligonucleotide for detection of SNP TSC0000416
caaaatcaccatt

SEQ ID NO: 1201 - DNA, 13 bp, Artificial Sequence
  Oligonucleotide for detection of SNP TSC0000416
aatggttattttg

SEQ ID NO: 1202 - DNA, 13 bp, Artificial Sequence
  Oligonucleotide for detection of SNP TSC0000416
caaaataaccatt

SEQ ID NO: 1203 - DNA, 13 bp, Artificial Sequence
  Oligonucleotide for detection of SNP TSC0000416
aatggcgattttg

SEQ ID NO: 1204 - DNA, 13 bp, Artificial Sequence
  Oligonucleotide for detection of SNP TSC0000416
caaaatcgccatt

SEQ ID NO: 1205 - DNA, 13 bp, Artificial Sequence
  Oligonucleotide for detection of SNP TSC0000416
aatggttatttcg

SEQ ID NO: 1206 - DNA, 13 bp, Artificial Sequence
  Oligonucleotide for detection of SNP TSC0000416
cgaaataaccatt

SEQ ID NO: 1207 - DNA, 13 bp, Artificial Sequence
  Oligonucleotide for detection of SNP TSC0000416
aatggtgatttcg

SEQ ID NO: 1208 - DNA, 13 bp, Artificial Sequence
  Oligonucleotide for detection of SNP TSC0000416
cgaaatcaccatt

SEQ ID NO: 1209 - DNA, 13 bp, Artificial Sequence
  Oligonucleotide for detection of SNP TSC0000416
aatggcgatttcg

SEQ ID NO: 1210 - DNA, 13 bp, Artificial Sequence
  Oligonucleotide for detection of SNP TSC0000416
cgaaatcgccatt

SEQ ID NO: 1211 - DNA, 13 bp, Artificial Sequence
  Oligonucleotide for detection of SNP TSC0000416
tgaaattgttatt

SEQ ID NO: 1212 - DNA, 13 bp, Artificial Sequence
  Oligonucleotide for detection of SNP TSC0000416
aataacaatttca

SEQ ID NO: 1213 - DNA, 13 bp, Artificial Sequence
  Oligonucleotide for detection of SNP TSC0000416
tgaaatagttatt

SEQ ID NO: 1214 - DNA, 13 bp, Artificial Sequence
  Oligonucleotide for detection of SNP TSC0000416
aataactatttca

SEQ ID NO: 1215 - DNA, 13 bp, Artificial Sequence
  Oligonucleotide for detection of SNP TSC0000416
cgaaattgttatt

SEQ ID NO: 1216 - DNA, 13 bp, Artificial Sequence
  Oligonucleotide for detection of SNP TSC0000416
aataacaatttcg

SEQ ID NO: 1217 - DNA, 13 bp, Artificial Sequence
  Oligonucleotide for detection of SNP TSC0000416
cgaaatagttatt

SEQ ID NO: 1218 - DNA, 13 bp, Artificial Sequence
  Oligonucleotide for detection of SNP TSC0000416
aataactatttcg

SEQ ID NO: 1219 - DNA, 13 bp, Artificial Sequence
  Oligonucleotide for detection of SNP TSC0000416
tgaaatcgttatt

SEQ ID NO: 1220 - DNA, 13 bp, Artificial Sequence
  Oligonucleotide for detection of SNP TSC0000416
aataacgatttca

SEQ ID NO: 1221 - DNA, 13 bp, Artificial Sequence
  Oligonucleotide for detection of SNP TSC0000416
cgaaatcgttatt

SEQ ID NO: 1222 - DNA, 13 bp, Artificial Sequence
  Oligonucleotide for detection of SNP TSC0000416
aataacgatttcg

SEQ ID NO: 1223 - DNA, 13 bp, Artificial Sequence
  Oligonucleotide for detection of SNP TSC0000417
tattattttttta

SEQ ID NO: 1224 - DNA, 13 bp, Artificial Sequence
  Oligonucleotide for detection of SNP TSC0000417
taaaaaaataata

SEQ ID NO: 1225 - DNA, 13 bp, Artificial Sequence
  Oligonucleotide for detection of SNP TSC0000417
tattatgttttta

SEQ ID NO: 1226 - DNA, 13 bp, Artificial Sequence
  Oligonucleotide for detection of SNP TSC0000417
taaaaacataata

SEQ ID NO: 1227 - DNA, 13 bp, Artificial Sequence
  Oligonucleotide for detection of SNP TSC0000417
tgaaaggatgatg

SEQ ID NO: 1228 - DNA, 13 bp, Artificial Sequence
  Oligonucleotide for detection of SNP TSC0000417
catcatcctttca

SEQ ID NO: 1229 - DNA, 13 bp, Artificial Sequence
  Oligonucleotide for detection of SNP TSC0000417
tgaaagtatgatg

SEQ ID NO: 1230 - DNA, 13 bp, Artificial Sequence
  Oligonucleotide for detection of SNP TSC0000417
catcatactttca

SEQ ID NO: 1231 - DNA, 13 bp, Artificial Sequence
  Oligonucleotide for detection of SNP TSC0000420
taatgggtatttg

SEQ ID NO: 1232 - DNA, 13 bp, Artificial Sequence
  Oligonucleotide for detection of SNP TSC0000420
caaatacccatta

SEQ ID NO: 1233 - DNA, 13 bp, Artificial Sequence
  Oligonucleotide for detection of SNP TSC0000420
taatggttatttg

SEQ ID NO: 1234 - DNA, 13 bp, Artificial Sequence
  Oligonucleotide for detection of SNP TSC0000420
caaataaccatta

SEQ ID NO: 1235 - DNA, 13 bp, Artificial Sequence
  Oligonucleotide for detection of SNP TSC0000420
taatgggtattcg

SEQ ID NO: 1236 - DNA, 13 bp, Artificial Sequence
  Oligonucleotide for detection of SNP TSC0000420
cgaatacccatta

SEQ ID NO: 1237 - DNA, 13 bp, Artificial Sequence
  Oligonucleotide for detection of SNP TSC0000420
taatggttattcg

SEQ ID NO: 1238 - DNA, 13 bp, Artificial Sequence
  Oligonucleotide for detection of SNP TSC0000420
cgaataaccatta

SEQ ID NO: 1239 - DNA, 13 bp, Artificial Sequence
  Oligonucleotide for detection of SNP TSC0000420
tgaatgtttattg

SEQ ID NO: 1240 - DNA, 13 bp, Artificial Sequence
  Oligonucleotide for detection of SNP TSC0000420
caataaacattca

SEQ ID NO: 1241 - DNA, 13 bp, Artificial Sequence
  Oligonucleotide for detection of SNP TSC0000420
tgaatgattattg

SEQ ID NO: 1242 - DNA, 13 bp, Artificial Sequence
  Oligonucleotide for detection of SNP TSC0000420
caataatcattca

SEQ ID NO: 1243 - DNA, 13 bp, Artificial Sequence
  Oligonucleotide for detection of SNP TSC0000420
cgaatgtttattg

SEQ ID NO: 1244 - DNA, 13 bp, Artificial Sequence
  Oligonucleotide for detection of SNP TSC0000420
caataaacattcg

SEQ ID NO: 1245 - DNA, 13 bp, Artificial Sequence
  Oligonucleotide for detection of SNP TSC0000420
cgaatgattattg

SEQ ID NO: 1246 - DNA, 13 bp, Artificial Sequence
  Oligonucleotide for detection of SNP TSC0000420
caataatcattcg

SEQ ID NO: 1247 - DNA, 13 bp, Artificial Sequence
  Oligonucleotide for detection of SNP TSC0000421
ttagtttgggttt

SEQ ID NO: 1248 - DNA, 13 bp, Artificial Sequence
  Oligonucleotide for detection of SNP TSC0000421
aaacccaaactaa

SEQ ID NO: 1249 - DNA, 13 bp, Artificial Sequence
  Oligonucleotide for detection of SNP TSC0000421
ttagttcgggttt

SEQ ID NO: 1250 - DNA, 13 bp, Artificial Sequence
  Oligonucleotide for detection of SNP TSC0000421
aaacccgaactaa

SEQ ID NO: 1251 - DNA, 13 bp, Artificial Sequence
  Oligonucleotide for detection of SNP TSC0000421
aaatttgggttga

SEQ ID NO: 1252 - DNA, 13 bp, Artificial Sequence
  Oligonucleotide for detection of SNP TSC0000421
tcaacccaaattt

SEQ ID NO: 1253 - DNA, 13 bp, Artificial Sequence
  Oligonucleotide for detection of SNP TSC0000421
aaatttaggttga

SEQ ID NO: 1254 - DNA, 13 bp, Artificial Sequence
  Oligonucleotide for detection of SNP TSC0000421
tcaacctaaattt

SEQ ID NO: 1255 - DNA, 13 bp, Artificial Sequence
  Oligonucleotide for detection of SNP TSC0000421
aaattcgggttga

SEQ ID NO: 1256 - DNA, 13 bp, Artificial Sequence
  Oligonucleotide for detection of SNP TSC0000421
tcaacccgaattt

SEQ ID NO: 1257 - DNA, 13 bp, Artificial Sequence
  Oligonucleotide for detection of SNP TSC0000427
agttttaggtagy

SEQ ID NO: 1258 - DNA, 13 bp, Artificial Sequence
  Oligonucleotide for detection of SNP TSC0000427
rctacctaaaact

SEQ ID NO: 1259 - DNA, 13 bp, Artificial Sequence
  Oligonucleotide for detection of SNP TSC0000427
agtttttggtagy

SEQ ID NO: 1260 - DNA, 13 bp, Artificial Sequence
  Oligonucleotide for detection of SNP TSC0000427
rctaccaaaaact

SEQ ID NO: 1261 - DNA, 13 bp, Artificial Sequence
  Oligonucleotide for detection of SNP TSC0000427
gttatttggaatt

SEQ ID NO: 1262 - DNA, 13 bp, Artificial Sequence
  Oligonucleotide for detection of SNP TSC0000427
aattccaaataac

SEQ ID NO: 1263 - DNA, 13 bp, Artificial Sequence
  Oligonucleotide for detection of SNP TSC0000427
gttattaggaatt

SEQ ID NO: 1264 - DNA, 13 bp, Artificial Sequence
  Oligonucleotide for detection of SNP TSC0000427
aattcctaataac

SEQ ID NO: 1265 - DNA, 13 bp, Artificial Sequence
  Oligonucleotide for detection of SNP TSC0000429
gatattgtagagt

SEQ ID NO: 1266 - DNA, 13 bp, Artificial Sequence
  Oligonucleotide for detection of SNP TSC0000429
actctacaatatc

SEQ ID NO: 1267 - DNA, 13 bp, Artificial Sequence
  Oligonucleotide for detection of SNP TSC0000429
gatattatagagt

SEQ ID NO: 1268 - DNA, 13 bp, Artificial Sequence
  Oligonucleotide for detection of SNP TSC0000429
actctataatatc

SEQ ID NO: 1269 - DNA, 13 bp, Artificial Sequence
  Oligonucleotide for detection of SNP TSC0000431
aataaagtaaaaa

SEQ ID NO: 1270 - DNA, 13 bp, Artificial Sequence
  Oligonucleotide for detection of SNP TSC0000431
tttttactttatt

SEQ ID NO: 1271 - DNA, 13 bp, Artificial Sequence
  Oligonucleotide for detection of SNP TSC0000431
aataaaataaaaa

SEQ ID NO: 1272 - DNA, 13 bp, Artificial Sequence
  Oligonucleotide for detection of SNP TSC0000431
tttttattttatt

SEQ ID NO: 1273 - DNA, 13 bp, Artificial Sequence
  Oligonucleotide for detection of SNP TSC0000435
ggtaaagtttttg

SEQ ID NO: 1274 - DNA, 13 bp, Artificial Sequence
  Oligonucleotide for detection of SNP TSC0000435
caaaaactttacc

SEQ ID NO: 1275 - DNA, 13 bp, Artificial Sequence
  Oligonucleotide for detection of SNP TSC0000435
ggtaaaatttttg

SEQ ID NO: 1276 - DNA, 13 bp, Artificial Sequence
  Oligonucleotide for detection of SNP TSC0000435
caaaaattttacc

SEQ ID NO: 1277 - DNA, 13 bp, Artificial Sequence
  Oligonucleotide for detection of SNP TSC0000437
tgggtagtagata

SEQ ID NO: 1278 - DNA, 13 bp, Artificial Sequence
  Oligonucleotide for detection of SNP TSC0000437
tatctactaccca

SEQ ID NO: 1279 - DNA, 13 bp, Artificial Sequence
  Oligonucleotide for detection of SNP TSC0000437
tgggtaatagata

SEQ ID NO: 1280 - DNA, 13 bp, Artificial Sequence
  Oligonucleotide for detection of SNP TSC0000437
tatctattaccca

SEQ ID NO: 1281 - DNA, 13 bp, Artificial Sequence
  Oligonucleotide for detection of SNP TSC0000441
tatttatgataay

SEQ ID NO: 1282 - DNA, 13 bp, Artificial Sequence
  Oligonucleotide for detection of SNP TSC0000441
rttatcataaata

SEQ ID NO: 1283 - DNA, 13 bp, Artificial Sequence
  Oligonucleotide for detection of SNP TSC0000441
tatttacgataay

SEQ ID NO: 1284 - DNA, 13 bp, Artificial Sequence
  Oligonucleotide for detection of SNP TSC0000441
rttatcgtaaata

SEQ ID NO: 1285 - DNA, 13 bp, Artificial Sequence
  Oligonucleotide for detection of SNP TSC0000441
gttattgtgaatg

SEQ ID NO: 1286 - DNA, 13 bp, Artificial Sequence
  Oligonucleotide for detection of SNP TSC0000441
cattcacaataac

SEQ ID NO: 1287 - DNA, 13 bp, Artificial Sequence
  Oligonucleotide for detection of SNP TSC0000441
gttattatgaatg

SEQ ID NO: 1288 - DNA, 13 bp, Artificial Sequence
  Oligonucleotide for detection of SNP TSC0000441
cattcataataac

SEQ ID NO: 1289 - DNA, 13 bp, Artificial Sequence
  Oligonucleotide for detection of SNP TSC0000441
gttatcgtgaatg

SEQ ID NO: 1290 - DNA, 13 bp, Artificial Sequence
  Oligonucleotide for detection of SNP TSC0000441
cattcacgataac

SEQ ID NO: 1291 - DNA, 13 bp, Artificial Sequence
  Oligonucleotide for detection of SNP TSC0000442
atatatagttttg

SEQ ID NO: 1292 - DNA, 13 bp, Artificial Sequence
  Oligonucleotide for detection of SNP TSC0000442
caaaactatatat

SEQ ID NO: 1293 - DNA, 13 bp, Artificial Sequence
  Oligonucleotide for detection of SNP TSC0000442
atatatggttttg

SEQ ID NO: 1294 - DNA, 13 bp, Artificial Sequence
  Oligonucleotide for detection of SNP TSC0000442
caaaaccatatat

SEQ ID NO: 1295 - DNA, 13 bp, Artificial Sequence
  Oligonucleotide for detection of SNP TSC0000442
atatacggttttg

SEQ ID NO: 1296 - DNA, 13 bp, Artificial Sequence
  Oligonucleotide for detection of SNP TSC0000442
caaaaccgtatat

SEQ ID NO: 1297 - DNA, 13 bp, Artificial Sequence
  Oligonucleotide for detection of SNP TSC0000442
taaagttgtgtat

SEQ ID NO: 1298 - DNA, 13 bp, Artificial Sequence
  Oligonucleotide for detection of SNP TSC0000442
atacacaacttta

SEQ ID NO: 1299 - DNA, 13 bp, Artificial Sequence
  Oligonucleotide for detection of SNP TSC0000442
taaagtcgtgtat

SEQ ID NO: 1300 - DNA, 13 bp, Artificial Sequence
  Oligonucleotide for detection of SNP TSC0000442
atacacgacttta

SEQ ID NO: 1301 - DNA, 13 bp, Artificial Sequence
  Oligonucleotide for detection of SNP TSC0000443
ttaatatttataa

SEQ ID NO: 1302 - DNA, 13 bp, Artificial Sequence
  Oligonucleotide for detection of SNP TSC0000443
ttataaatattaa

SEQ ID NO: 1303 - DNA, 13 bp, Artificial Sequence
  Oligonucleotide for detection of SNP TSC0000443
ttaatagttataa

SEQ ID NO: 1304 - DNA, 13 bp, Artificial Sequence
  Oligonucleotide for detection of SNP TSC0000443
ttataactattaa

SEQ ID NO: 1305 - DNA, 13 bp, Artificial Sequence
  Oligonucleotide for detection of SNP TSC0000443
ttgtgggtattaa

SEQ ID NO: 1306 - DNA, 13 bp, Artificial Sequence
  Oligonucleotide for detection of SNP TSC0000443
ttaatacccacaa

SEQ ID NO: 1307 - DNA, 13 bp, Artificial Sequence
  Oligonucleotide for detection of SNP TSC0000443
ttgtggttattaa

SEQ ID NO: 1308 - DNA, 13 bp, Artificial Sequence
  Oligonucleotide for detection of SNP TSC0000443
ttaataaccacaa

SEQ ID NO: 1309 - DNA, 13 bp, Artificial Sequence
  Oligonucleotide for detection of SNP TSC0000446
tttagatgataga

SEQ ID NO: 1310 - DNA, 13 bp, Artificial Sequence
  Oligonucleotide for detection of SNP TSC0000446
tctatcatctaaa

SEQ ID NO: 1311 - DNA, 13 bp, Artificial Sequence
  Oligonucleotide for detection of SNP TSC0000446
tttagacgataga

SEQ ID NO: 1312 - DNA, 13 bp, Artificial Sequence
  Oligonucleotide for detection of SNP TSC0000446
tctatcgtctaaa

SEQ ID NO: 1313 - DNA, 13 bp, Artificial Sequence
  Oligonucleotide for detection of SNP TSC0000446
tttattgtttgag

SEQ ID NO: 1314 - DNA, 13 bp, Artificial Sequence
  Oligonucleotide for detection of SNP TSC0000446
ctcaaacaataaa

SEQ ID NO: 1315 - DNA, 13 bp, Artificial Sequence
  Oligonucleotide for detection of SNP TSC0000446
tttattatttgag

SEQ ID NO: 1316 - DNA, 13 bp, Artificial Sequence
  Oligonucleotide for detection of SNP TSC0000446
ctcaaataataaa

SEQ ID NO: 1317 - DNA, 13 bp, Artificial Sequence
  Oligonucleotide for detection of SNP TSC0000446
tttatcgtttgag

SEQ ID NO: 1318 - DNA, 13 bp, Artificial Sequence
  Oligonucleotide for detection of SNP TSC0000446
ctcaaacgataaa

SEQ ID NO: 1319 - DNA, 13 bp, Artificial Sequence
  Oligonucleotide for detection of SNP TSC0000450
agattaattttat

SEQ ID NO: 1320 - DNA, 13 bp, Artificial Sequence
  Oligonucleotide for detection of SNP TSC0000450
ataaaattaatct

SEQ ID NO: 1321 - DNA, 13 bp, Artificial Sequence
  Oligonucleotide for detection of SNP TSC0000450
agattatttttat

SEQ ID NO: 1322 - DNA, 13 bp, Artificial Sequence
  Oligonucleotide for detection of SNP TSC0000450
ataaaaataatct

SEQ ID NO: 1323 - DNA, 13 bp, Artificial Sequence
  Oligonucleotide for detection of SNP TSC0000450
atagaattggttt

SEQ ID NO: 1324 - DNA, 13 bp, Artificial Sequence
  Oligonucleotide for detection of SNP TSC0000450
aaaccaattctat

SEQ ID NO: 1325 - DNA, 13 bp, Artificial Sequence
  Oligonucleotide for detection of SNP TSC0000450
atagaagtggttt

SEQ ID NO: 1326 - DNA, 13 bp, Artificial Sequence
  Oligonucleotide for detection of SNP TSC0000450
aaaccacttctat

SEQ ID NO: 1327 - DNA, 13 bp, Artificial Sequence
  Oligonucleotide for detection of SNP TSC0000456
taaatagtttatg

SEQ ID NO: 1328 - DNA, 13 bp, Artificial Sequence
  Oligonucleotide for detection of SNP TSC0000456
cataaactattta

SEQ ID NO: 1329 - DNA, 13 bp, Artificial Sequence
  Oligonucleotide for detection of SNP TSC0000456
taaatattttatg

SEQ ID NO: 1330 - DNA, 13 bp, Artificial Sequence
  Oligonucleotide for detection of SNP TSC0000456
cataaaatattta

SEQ ID NO: 1331 - DNA, 13 bp, Artificial Sequence
  Oligonucleotide for detection of SNP TSC0000456
tataggttatttg

SEQ ID NO: 1332 - DNA, 13 bp, Artificial Sequence
  Oligonucleotide for detection of SNP TSC0000456
caaataacctata

SEQ ID NO: 1333 - DNA, 13 bp, Artificial Sequence
  Oligonucleotide for detection of SNP TSC0000456
tataggatatttg

SEQ ID NO: 1334 - DNA, 13 bp, Artificial Sequence
  Oligonucleotide for detection of SNP TSC0000456
caaatatcctata

SEQ ID NO: 1335 - DNA, 13 bp, Artificial Sequence
  Oligonucleotide for detection of SNP TSC0000457
atgagtattaagt

SEQ ID NO: 1336 - DNA, 13 bp, Artificial Sequence
  Oligonucleotide for detection of SNP TSC0000457
acttaatactcat

SEQ ID NO: 1337 - DNA, 13 bp, Artificial Sequence
  Oligonucleotide for detection of SNP TSC0000457
atgagtgttaagt

SEQ ID NO: 1338 - DNA, 13 bp, Artificial Sequence
  Oligonucleotide for detection of SNP TSC0000457
acttaacactcat

SEQ ID NO: 1339 - DNA, 13 bp, Artificial Sequence
  Oligonucleotide for detection of SNP TSC0000464
atatataatttaa

SEQ ID NO: 1340 - DNA, 13 bp, Artificial Sequence
  Oligonucleotide for detection of SNP TSC0000464
ttaaattatatat

SEQ ID NO: 1341 - DNA, 13 bp, Artificial Sequence
  Oligonucleotide for detection of SNP TSC0000464
atatatgatttaa

SEQ ID NO: 1342 - DNA, 13 bp, Artificial Sequence
  Oligonucleotide for detection of SNP TSC0000464
ttaaatcatatat

SEQ ID NO: 1343 - DNA, 13 bp, Artificial Sequence
  Oligonucleotide for detection of SNP TSC0000464
atatacgatttaa

SEQ ID NO: 1344 - DNA, 13 bp, Artificial Sequence
  Oligonucleotide for detection of SNP TSC0000464
ttaaatcgtatat

SEQ ID NO: 1345 - DNA, 13 bp, Artificial Sequence
  Oligonucleotide for detection of SNP TSC0000464
ttagattgtgtat

SEQ ID NO: 1346 - DNA, 13 bp, Artificial Sequence
  Oligonucleotide for detection of SNP TSC0000464
atacacaatctaa

SEQ ID NO: 1347 - DNA, 13 bp, Artificial Sequence
  Oligonucleotide for detection of SNP TSC0000464
ttagatcgtgtat

SEQ ID NO: 1348 - DNA, 13 bp, Artificial Sequence
  Oligonucleotide for detection of SNP TSC0000464
atacacgatctaa

SEQ ID NO: 1349 - DNA, 13 bp, Artificial Sequence
  Oligonucleotide for detection of SNP TSC0000473
atataaatataty

SEQ ID NO: 1350 - DNA, 13 bp, Artificial Sequence
  Oligonucleotide for detection of SNP TSC0000473
ratatatttatat

SEQ ID NO: 1351 - DNA, 13 bp, Artificial Sequence
  Oligonucleotide for detection of SNP TSC0000473
atataagtataty

SEQ ID NO: 1352 - DNA, 13 bp, Artificial Sequence
  Oligonucleotide for detection of SNP TSC0000473
ratatacttatat

SEQ ID NO: 1353 - DNA, 13 bp, Artificial Sequence
  Oligonucleotide for detection of SNP TSC0000474
aatttgatattta

SEQ ID NO: 1354 - DNA, 13 bp, Artificial Sequence
  Oligonucleotide for detection of SNP TSC0000474
taaatatcaaatt

SEQ ID NO: 1355 - DNA, 13 bp, Artificial Sequence
  Oligonucleotide for detection of SNP TSC0000474
aatttggtattta

SEQ ID NO: 1356 - DNA, 13 bp, Artificial Sequence
  Oligonucleotide for detection of SNP TSC0000474
taaataccaaatt

SEQ ID NO: 1357 - DNA, 13 bp, Artificial Sequence
  Oligonucleotide for detection of SNP TSC0000475
ttatatattttty

SEQ ID NO: 1358 - DNA, 13 bp, Artificial Sequence
  Oligonucleotide for detection of SNP TSC0000475
raaaaatatataa

SEQ ID NO: 1359 - DNA, 13 bp, Artificial Sequence
  Oligonucleotide for detection of SNP TSC0000475
ttatatgttttty

SEQ ID NO: 1360 - DNA, 13 bp, Artificial Sequence
  Oligonucleotide for detection of SNP TSC0000475
raaaaacatataa

SEQ ID NO: 1361 - DNA, 13 bp, Artificial Sequence
  Oligonucleotide for detection of SNP TSC0000475
ttatacgttttty

SEQ ID NO: 1362 - DNA, 13 bp, Artificial Sequence
  Oligonucleotide for detection of SNP TSC0000475
raaaaacgtataa

SEQ ID NO: 1363 - DNA, 13 bp, Artificial Sequence
  Oligonucleotide for detection of SNP TSC0000475
gaaagatgtgtaa

SEQ ID NO: 1364 - DNA, 13 bp, Artificial Sequence
  Oligonucleotide for detection of SNP TSC0000475
ttacacatctttc

SEQ ID NO: 1365 - DNA, 13 bp, Artificial Sequence
  Oligonucleotide for detection of SNP TSC0000475
gaaagacgtgtaa

SEQ ID NO: 1366 - DNA, 13 bp, Artificial Sequence
  Oligonucleotide for detection of SNP TSC0000475
ttacacgtctttc

SEQ ID NO: 1367 - DNA, 13 bp, Artificial Sequence
  Oligonucleotide for detection of SNP TSC0000477
aagataggaaaat

SEQ ID NO: 1368 - DNA, 13 bp, Artificial Sequence
  Oligonucleotide for detection of SNP TSC0000477
attttcctatctt

SEQ ID NO: 1369 - DNA, 13 bp, Artificial Sequence
  Oligonucleotide for detection of SNP TSC0000477
aagataagaaaat

SEQ ID NO: 1370 - DNA, 13 bp, Artificial Sequence
  Oligonucleotide for detection of SNP TSC0000477
attttcttatctt

SEQ ID NO: 1371 - DNA, 13 bp, Artificial Sequence
  Oligonucleotide for detection of SNP TSC0000478
tttatagtagtat

SEQ ID NO: 1372 - DNA, 13 bp, Artificial Sequence
  Oligonucleotide for detection of SNP TSC0000478
atactactataaa

SEQ ID NO: 1373 - DNA, 13 bp, Artificial Sequence
  Oligonucleotide for detection of SNP TSC0000478
tttataatagtat

SEQ ID NO: 1374 - DNA, 13 bp, Artificial Sequence
  Oligonucleotide for detection of SNP TSC0000478
atactattataaa

SEQ ID NO: 1375 - DNA, 13 bp, Artificial Sequence
  Oligonucleotide for detection of SNP TSC0000483
ttgattagaggat

SEQ ID NO: 1376 - DNA, 13 bp, Artificial Sequence
  Oligonucleotide for detection of SNP TSC0000483
atcctctaatcaa

SEQ ID NO: 1377 - DNA, 13 bp, Artificial Sequence
  Oligonucleotide for detection of SNP TSC0000483
ttgattggaggat

SEQ ID NO: 1378 - DNA, 13 bp, Artificial Sequence
  Oligonucleotide for detection of SNP TSC0000483
atcctccaatcaa

SEQ ID NO: 1379 - DNA, 13 bp, Artificial Sequence
  Oligonucleotide for detection of SNP TSC0000484
tattggaaaggtt

SEQ ID NO: 1380 - DNA, 13 bp, Artificial Sequence
  Oligonucleotide for detection of SNP TSC0000484
aacctttccaata

SEQ ID NO: 1381 - DNA, 13 bp, Artificial Sequence
  Oligonucleotide for detection of SNP TSC0000484
tattggtaaggtt

SEQ ID NO: 1382 - DNA, 13 bp, Artificial Sequence
  Oligonucleotide for detection of SNP TSC0000484
aaccttaccaata

SEQ ID NO: 1383 - DNA, 13 bp, Artificial Sequence
  Oligonucleotide for detection of SNP TSC0000484
agtttttttaata

SEQ ID NO: 1384 - DNA, 13 bp, Artificial Sequence
  Oligonucleotide for detection of SNP TSC0000484
tattaaaaaaact

SEQ ID NO: 1385 - DNA, 13 bp, Artificial Sequence
  Oligonucleotide for detection of SNP TSC0000484
agttttgttaata

SEQ ID NO: 1386 - DNA, 13 bp, Artificial Sequence
  Oligonucleotide for detection of SNP TSC0000484
tattaacaaaact

SEQ ID NO: 1387 - DNA, 13 bp, Artificial Sequence
  Oligonucleotide for detection of SNP TSC0000491
aaataatgaatag

SEQ ID NO: 1388 - DNA, 13 bp, Artificial Sequence
  Oligonucleotide for detection of SNP TSC0000491
ctattcattattt

SEQ ID NO: 1389 - DNA, 13 bp, Artificial Sequence
  Oligonucleotide for detection of SNP TSC0000491
aaataacgaatag

SEQ ID NO: 1390 - DNA, 13 bp, Artificial Sequence
  Oligonucleotide for detection of SNP TSC0000491
ctattcgttattt

SEQ ID NO: 1391 - DNA, 13 bp, Artificial Sequence
  Oligonucleotide for detection of SNP TSC0000491
ttatttgttattt

SEQ ID NO: 1392 - DNA, 13 bp, Artificial Sequence
  Oligonucleotide for detection of SNP TSC0000491
aaataacaaataa

SEQ ID NO: 1393 - DNA, 13 bp, Artificial Sequence
  Oligonucleotide for detection of SNP TSC0000491
ttatttattattt

SEQ ID NO: 1394 - DNA, 13 bp, Artificial Sequence
  Oligonucleotide for detection of SNP TSC0000491
aaataataaataa

SEQ ID NO: 1395 - DNA, 13 bp, Artificial Sequence
  Oligonucleotide for detection of SNP TSC0000491
ttattcgttattt

SEQ ID NO: 1396 - DNA, 13 bp, Artificial Sequence
  Oligonucleotide for detection of SNP TSC0000491
aaataacgaataa

SEQ ID NO: 1397 - DNA, 13 bp, Artificial Sequence
  Oligonucleotide for detection of SNP TSC0000492
tgtgtaaggttty

SEQ ID NO: 1398 - DNA, 13 bp, Artificial Sequence
  Oligonucleotide for detection of SNP TSC0000492
raaaccttacaca

SEQ ID NO: 1399 - DNA, 13 bp, Artificial Sequence
  Oligonucleotide for detection of SNP TSC0000492
tgtgtagggttty

SEQ ID NO: 1400 - DNA, 13 bp, Artificial Sequence
  Oligonucleotide for detection of SNP TSC0000492
raaaccctacaca

SEQ ID NO: 1401 - DNA, 13 bp, Artificial Sequence
  Oligonucleotide for detection of SNP TSC0000499
tttaatataatta

SEQ ID NO: 1402 - DNA, 13 bp, Artificial Sequence
  Oligonucleotide for detection of SNP TSC0000499
taattatattaaa

SEQ ID NO: 1403 - DNA, 13 bp, Artificial Sequence
  Oligonucleotide for detection of SNP TSC0000499
tttaatgtaatta

SEQ ID NO: 1404 - DNA, 13 bp, Artificial Sequence
  Oligonucleotide for detection of SNP TSC0000499
taattacattaaa

SEQ ID NO: 1405 - DNA, 13 bp, Artificial Sequence
  Oligonucleotide for detection of SNP TSC0000499
tttaacgtaatta

SEQ ID NO: 1406 - DNA, 13 bp, Artificial Sequence
  Oligonucleotide for detection of SNP TSC0000499
taattacgttaaa

SEQ ID NO: 1407 - DNA, 13 bp, Artificial Sequence
  Oligonucleotide for detection of SNP TSC0000499
tgattatgttaaa

SEQ ID NO: 1408 - DNA, 13 bp, Artificial Sequence
  Oligonucleotide for detection of SNP TSC0000499
tttaacataatca

SEQ ID NO: 1409 - DNA, 13 bp, Artificial Sequence
  Oligonucleotide for detection of SNP TSC0000499
tgattacgttaaa

SEQ ID NO: 1410 - DNA, 13 bp, Artificial Sequence
  Oligonucleotide for detection of SNP TSC0000499
tttaacgtaatca

SEQ ID NO: 1411 - DNA, 13 bp, Artificial Sequence
  Oligonucleotide for detection of SNP TSC0000500
ttttttaaaaaty

SEQ ID NO: 1412 - DNA, 13 bp, Artificial Sequence
  Oligonucleotide for detection of SNP TSC0000500
ratttttaaaaaa

SEQ ID NO: 1413 - DNA, 13 bp, Artificial Sequence
  Oligonucleotide for detection of SNP TSC0000500
tttttttaaaaty

SEQ ID NO: 1414 - DNA, 13 bp, Artificial Sequence
  Oligonucleotide for detection of SNP TSC0000500
rattttaaaaaaa

SEQ ID NO: 1415 - DNA, 13 bp, Artificial Sequence
  Oligonucleotide for detection of SNP TSC0000500
gatttttaaaaag

SEQ ID NO: 1416 - DNA, 13 bp, Artificial Sequence
  Oligonucleotide for detection of SNP TSC0000500
ctttttaaaaatc

SEQ ID NO: 1417 - DNA, 13 bp, Artificial Sequence
  Oligonucleotide for detection of SNP TSC0000500
gattttgaaaaag

SEQ ID NO: 1418 - DNA, 13 bp, Artificial Sequence
  Oligonucleotide for detection of SNP TSC0000500
ctttttcaaaatc

SEQ ID NO: 1419 - DNA, 13 bp, Artificial Sequence
  Oligonucleotide for detection of SNP TSC0000501
tttattagtataa

SEQ ID NO: 1420 - DNA, 13 bp, Artificial Sequence
  Oligonucleotide for detection of SNP TSC0000501
ttatactaataaa

SEQ ID NO: 1421 - DNA, 13 bp, Artificial Sequence
  Oligonucleotide for detection of SNP TSC0000501
tttattggtataa

SEQ ID NO: 1422 - DNA, 13 bp, Artificial Sequence
  Oligonucleotide for detection of SNP TSC0000501
ttataccaataaa

SEQ ID NO: 1423 - DNA, 13 bp, Artificial Sequence
  Oligonucleotide for detection of SNP TSC0000501
tttatcggtataa

SEQ ID NO: 1424 - DNA, 13 bp, Artificial Sequence
  Oligonucleotide for detection of SNP TSC0000501
ttataccgataaa

SEQ ID NO: 1425 - DNA, 13 bp, Artificial Sequence
  Oligonucleotide for detection of SNP TSC0000501
ttatattgatgga

SEQ ID NO: 1426 - DNA, 13 bp, Artificial Sequence
  Oligonucleotide for detection of SNP TSC0000501
tccatcaatataa

SEQ ID NO: 1427 - DNA, 13 bp, Artificial Sequence
  Oligonucleotide for detection of SNP TSC0000501
ttatatcgatgga

SEQ ID NO: 1428 - DNA, 13 bp, Artificial Sequence
  Oligonucleotide for detection of SNP TSC0000501
tccatcgatataa

SEQ ID NO: 1429 - DNA, 13 bp, Artificial Sequence
  Oligonucleotide for detection of SNP TSC0000504
tagtatattaatt

SEQ ID NO: 1430 - DNA, 13 bp, Artificial Sequence
  Oligonucleotide for detection of SNP TSC0000504
aattaatatacta

SEQ ID NO: 1431 - DNA, 13 bp, Artificial Sequence
  Oligonucleotide for detection of SNP TSC0000504
tagtattttaatt

SEQ ID NO: 1432 - DNA, 13 bp, Artificial Sequence
  Oligonucleotide for detection of SNP TSC0000504
aattaaaatacta

SEQ ID NO: 1433 - DNA, 13 bp, Artificial Sequence
  Oligonucleotide for detection of SNP TSC0000504
agttaatatattg

SEQ ID NO: 1434 - DNA, 13 bp, Artificial Sequence
  Oligonucleotide for detection of SNP TSC0000504
caatatattaact

SEQ ID NO: 1435 - DNA, 13 bp, Artificial Sequence
  Oligonucleotide for detection of SNP TSC0000504
agttaagatattg

SEQ ID NO: 1436 - DNA, 13 bp, Artificial Sequence
  Oligonucleotide for detection of SNP TSC0000504
caatatcttaact

SEQ ID NO: 1437 - DNA, 13 bp, Artificial Sequence
  Oligonucleotide for detection of SNP TSC0000506
aaggatatagtgg

SEQ ID NO: 1438 - DNA, 13 bp, Artificial Sequence
  Oligonucleotide for detection of SNP TSC0000506
ccactatatcctt

SEQ ID NO: 1439 - DNA, 13 bp, Artificial Sequence
  Oligonucleotide for detection of SNP TSC0000506
aaggatgtagtgg

SEQ ID NO: 1440 - DNA, 13 bp, Artificial Sequence
  Oligonucleotide for detection of SNP TSC0000506
ccactacatcctt

SEQ ID NO: 1441 - DNA, 13 bp, Artificial Sequence
  Oligonucleotide for detection of SNP TSC0000506
aaggacgtagtgg

SEQ ID NO: 1442 - DNA, 13 bp, Artificial Sequence
  Oligonucleotide for detection of SNP TSC0000506
ccactacgtcctt

SEQ ID NO: 1443 - DNA, 13 bp, Artificial Sequence
  Oligonucleotide for detection of SNP TSC0000506
ttattgtgttttt

SEQ ID NO: 1444 - DNA, 13 bp, Artificial Sequence
  Oligonucleotide for detection of SNP TSC0000506
aaaaacacaataa

SEQ ID NO: 1445 - DNA, 13 bp, Artificial Sequence
  Oligonucleotide for detection of SNP TSC0000506
ttattgcgttttt

SEQ ID NO: 1446 - DNA, 13 bp, Artificial Sequence
  Oligonucleotide for detection of SNP TSC0000506
aaaaacgcaataa

SEQ ID NO: 1447 - DNA, 13 bp, Artificial Sequence
  Oligonucleotide for detection of SNP TSC0000507
ttttgtattttta

SEQ ID NO: 1448 - DNA, 13 bp, Artificial Sequence
  Oligonucleotide for detection of SNP TSC0000507
taaaaatacaaaa

SEQ ID NO: 1449 - DNA, 13 bp, Artificial Sequence
  Oligonucleotide for detection of SNP TSC0000507
ttttgtgttttta

SEQ ID NO: 1450 - DNA, 13 bp, Artificial Sequence
  Oligonucleotide for detection of SNP TSC0000507
taaaaacacaaaa

SEQ ID NO: 1451 - DNA, 13 bp, Artificial Sequence
  Oligonucleotide for detection of SNP TSC0000507
ttttgcgttttta

SEQ ID NO: 1452 - DNA, 13 bp, Artificial Sequence
  Oligonucleotide for detection of SNP TSC0000507
taaaaacgcaaaa

SEQ ID NO: 1453 - DNA, 13 bp, Artificial Sequence
  Oligonucleotide for detection of SNP TSC0000507
taaggatgtaagg

SEQ ID NO: 1454 - DNA, 13 bp, Artificial Sequence
  Oligonucleotide for detection of SNP TSC0000507
ccttacatcctta

SEQ ID NO: 1455 - DNA, 13 bp, Artificial Sequence
  Oligonucleotide for detection of SNP TSC0000507
taaggacgtaagg

SEQ ID NO: 1456 - DNA, 13 bp, Artificial Sequence
  Oligonucleotide for detection of SNP TSC0000507
ccttacgtcctta

SEQ ID NO: 1457 - DNA, 13 bp, Artificial Sequence
  Oligonucleotide for detection of SNP TSC0000508
gttattaagtttg

SEQ ID NO: 1458 - DNA, 13 bp, Artificial Sequence
  Oligonucleotide for detection of SNP TSC0000508
caaacttaataac

SEQ ID NO: 1459 - DNA, 13 bp, Artificial Sequence
  Oligonucleotide for detection of SNP TSC0000508
gttattgagtttg

SEQ ID NO: 1460 - DNA, 13 bp, Artificial Sequence
  Oligonucleotide for detection of SNP TSC0000508
caaactcaataac

SEQ ID NO: 1461 - DNA, 13 bp, Artificial Sequence
  Oligonucleotide for detection of SNP TSC0000508
gttatcgagtttg

SEQ ID NO: 1462 - DNA, 13 bp, Artificial Sequence
  Oligonucleotide for detection of SNP TSC0000508
caaactcgataac

SEQ ID NO: 1463 - DNA, 13 bp, Artificial Sequence
  Oligonucleotide for detection of SNP TSC0000508
taggtttggtagy

SEQ ID NO: 1464 - DNA, 13 bp, Artificial Sequence
  Oligonucleotide for detection of SNP TSC0000508
rctaccaaaccta

SEQ ID NO: 1465 - DNA, 13 bp, Artificial Sequence
  Oligonucleotide for detection of SNP TSC0000508
taggttcggtagy

SEQ ID NO: 1466 - DNA, 13 bp, Artificial Sequence
  Oligonucleotide for detection of SNP TSC0000508
rctaccgaaccta

SEQ ID NO: 1467 - DNA, 13 bp, Artificial Sequence
  Oligonucleotide for detection of SNP TSC0000509
gagtttattttag

SEQ ID NO: 1468 - DNA, 13 bp, Artificial Sequence
  Oligonucleotide for detection of SNP TSC0000509
ctaaaataaactc

SEQ ID NO: 1469 - DNA, 13 bp, Artificial Sequence
  Oligonucleotide for detection of SNP TSC0000509
gagtttgttttag

SEQ ID NO: 1470 - DNA, 13 bp, Artificial Sequence
  Oligonucleotide for detection of SNP TSC0000509
ctaaaacaaactc

SEQ ID NO: 1471 - DNA, 13 bp, Artificial Sequence
  Oligonucleotide for detection of SNP TSC0000509
gagttcgttttag

SEQ ID NO: 1472 - DNA, 13 bp, Artificial Sequence
  Oligonucleotide for detection of SNP TSC0000509
ctaaaacgaactc

SEQ ID NO: 1473 - DNA, 13 bp, Artificial Sequence
  Oligonucleotide for detection of SNP TSC0000509
ttgaaatgagtty

SEQ ID NO: 1474 - DNA, 13 bp, Artificial Sequence
  Oligonucleotide for detection of SNP TSC0000509
raactcatttcaa

SEQ ID NO: 1475 - DNA, 13 bp, Artificial Sequence
  Oligonucleotide for detection of SNP TSC0000509
ttgaaacgagtty

SEQ ID NO: 1476 - DNA, 13 bp, Artificial Sequence
  Oligonucleotide for detection of SNP TSC0000509
raactcgtttcaa

SEQ ID NO: 1477 - DNA, 13 bp, Artificial Sequence
  Oligonucleotide for detection of SNP TSC0000512
attaattattaat

SEQ ID NO: 1478 - DNA, 13 bp, Artificial Sequence
  Oligonucleotide for detection of SNP TSC0000512
attaataattaat

SEQ ID NO: 1479 - DNA, 13 bp, Artificial Sequence
  Oligonucleotide for detection of SNP TSC0000512
attaatgattaat

SEQ ID NO: 1480 - DNA, 13 bp, Artificial Sequence
  Oligonucleotide for detection of SNP TSC0000512
attaatcattaat

SEQ ID NO: 1481 - DNA, 13 bp, Artificial Sequence
  Oligonucleotide for detection of SNP TSC0000512
attgatgattaat

SEQ ID NO: 1482 - DNA, 13 bp, Artificial Sequence
  Oligonucleotide for detection of SNP TSC0000512
attaatcatcaat

SEQ ID NO: 1483 - DNA, 13 bp, Artificial Sequence
  Oligonucleotide for detection of SNP TSC0000512
attgattattaat

SEQ ID NO: 1484 - DNA, 13 bp, Artificial Sequence
  Oligonucleotide for detection of SNP TSC0000512
attaataatcaat

SEQ ID NO: 1485 - DNA, 13 bp, Artificial Sequence
  Oligonucleotide for detection of SNP TSC0000513
tatgaagatgtgt

SEQ ID NO: 1486 - DNA, 13 bp, Artificial Sequence
  Oligonucleotide for detection of SNP TSC0000513
acacatcttcata

SEQ ID NO: 1487 - DNA, 13 bp, Artificial Sequence
  Oligonucleotide for detection of SNP TSC0000513
tatgaaaatgtgt

SEQ ID NO: 1488 - DNA, 13 bp, Artificial Sequence
  Oligonucleotide for detection of SNP TSC0000513
acacattttcata

SEQ ID NO: 1489 - DNA, 13 bp, Artificial Sequence
  Oligonucleotide for detection of SNP TSC0000517
attataataaggg

SEQ ID NO: 1490 - DNA, 13 bp, Artificial Sequence
  Oligonucleotide for detection of SNP TSC0000517
cccttattataat

SEQ ID NO: 1491 - DNA, 13 bp, Artificial Sequence
  Oligonucleotide for detection of SNP TSC0000517
attatagtaaggg

SEQ ID NO: 1492 - DNA, 13 bp, Artificial Sequence
  Oligonucleotide for detection of SNP TSC0000517
cccttactataat

SEQ ID NO: 1493 - DNA, 13 bp, Artificial Sequence
  Oligonucleotide for detection of SNP TSC0000518
tttattattgtta

SEQ ID NO: 1494 - DNA, 13 bp, Artificial Sequence
  Oligonucleotide for detection of SNP TSC0000518
taacaataataaa

SEQ ID NO: 1495 - DNA, 13 bp, Artificial Sequence
  Oligonucleotide for detection of SNP TSC0000518
tttatttttgtta

SEQ ID NO: 1496 - DNA, 13 bp, Artificial Sequence
  Oligonucleotide for detection of SNP TSC0000518
taacaaaaataaa

SEQ ID NO: 1497 - DNA, 13 bp, Artificial Sequence
  Oligonucleotide for detection of SNP TSC0000518
tagtagtgatgag

SEQ ID NO: 1498 - DNA, 13 bp, Artificial Sequence
  Oligonucleotide for detection of SNP TSC0000518
ctcatcactacta

SEQ ID NO: 1499 - DNA, 13 bp, Artificial Sequence
  Oligonucleotide for detection of SNP TSC0000518
tagtagggatgag

SEQ ID NO: 1500 - DNA, 13 bp, Artificial Sequence
  Oligonucleotide for detection of SNP TSC0000518
ctcatccctacta

SEQ ID NO: 1501 - DNA, 13 bp, Artificial Sequence
  Oligonucleotide for detection of SNP TSC0000519
gggtagaggtaaa

SEQ ID NO: 1502 - DNA, 13 bp, Artificial Sequence
  Oligonucleotide for detection of SNP TSC0000519
tttacctctaccc

SEQ ID NO: 1503 - DNA, 13 bp, Artificial Sequence
  Oligonucleotide for detection of SNP TSC0000519
gggtaggggtaaa

SEQ ID NO: 1504 - DNA, 13 bp, Artificial Sequence
  Oligonucleotide for detection of SNP TSC0000519
tttacccctaccc

SEQ ID NO: 1505 - DNA, 13 bp, Artificial Sequence
  Oligonucleotide for detection of SNP TSC0000521
tagagatgtggta

SEQ ID NO: 1506 - DNA, 13 bp, Artificial Sequence
  Oligonucleotide for detection of SNP TSC0000521
taccacatctcta

SEQ ID NO: 1507 - DNA, 13 bp, Artificial Sequence
  Oligonucleotide for detection of SNP TSC0000521
tagagacgtggta

SEQ ID NO: 1508 - DNA, 13 bp, Artificial Sequence
  Oligonucleotide for detection of SNP TSC0000521
taccacgtctcta

SEQ ID NO: 1509 - DNA, 13 bp, Artificial Sequence
  Oligonucleotide for detection of SNP TSC0000521
tgttatgtttttg

SEQ ID NO: 1510 - DNA, 13 bp, Artificial Sequence
  Oligonucleotide for detection of SNP TSC0000521
caaaaacataaca

SEQ ID NO: 1511 - DNA, 13 bp, Artificial Sequence
  Oligonucleotide for detection of SNP TSC0000521
tgttatatttttg

SEQ ID NO: 1512 - DNA, 13 bp, Artificial Sequence
  Oligonucleotide for detection of SNP TSC0000521
caaaaatataaca

SEQ ID NO: 1513 - DNA, 13 bp, Artificial Sequence
  Oligonucleotide for detection of SNP TSC0000521
tgttacgtttttg

SEQ ID NO: 1514 - DNA, 13 bp, Artificial Sequence
  Oligonucleotide for detection of SNP TSC0000521
caaaaacgtaaca

SEQ ID NO: 1515 - DNA, 13 bp, Artificial Sequence
  Oligonucleotide for detection of SNP TSC0000522
ttttttataatag

SEQ ID NO: 1516 - DNA, 13 bp, Artificial Sequence
  Oligonucleotide for detection of SNP TSC0000522
ctattataaaaaa

SEQ ID NO: 1517 - DNA, 13 bp, Artificial Sequence
  Oligonucleotide for detection of SNP TSC0000522
ttttttgtaatag

SEQ ID NO: 1518 - DNA, 13 bp, Artificial Sequence
  Oligonucleotide for detection of SNP TSC0000522
ctattacaaaaaa

SEQ ID NO: 1519 - DNA, 13 bp, Artificial Sequence
  Oligonucleotide for detection of SNP TSC0000529
tgtaatttatttt

SEQ ID NO: 1520 - DNA, 13 bp, Artificial Sequence
  Oligonucleotide for detection of SNP TSC0000529
aaaataaattaca

SEQ ID NO: 1521 - DNA, 13 bp, Artificial Sequence
  Oligonucleotide for detection of SNP TSC0000529
tgtaatgtatttt

SEQ ID NO: 1522 - DNA, 13 bp, Artificial Sequence
  Oligonucleotide for detection of SNP TSC0000529
aaaatacattaca

SEQ ID NO: 1523 - DNA, 13 bp, Artificial Sequence
  Oligonucleotide for detection of SNP TSC0000529
tgtaacgtatttt

SEQ ID NO: 1524 - DNA, 13 bp, Artificial Sequence
  Oligonucleotide for detection of SNP TSC0000529
aaaatacgttaca

SEQ ID NO: 1525 - DNA, 13 bp, Artificial Sequence
  Oligonucleotide for detection of SNP TSC0000529
aaaataggttgta

SEQ ID NO: 1526 - DNA, 13 bp, Artificial Sequence
  Oligonucleotide for detection of SNP TSC0000529
tacaacctatttt

SEQ ID NO: 1527 - DNA, 13 bp, Artificial Sequence
  Oligonucleotide for detection of SNP TSC0000529
aaaatatgttgta

SEQ ID NO: 1528 - DNA, 13 bp, Artificial Sequence
  Oligonucleotide for detection of SNP TSC0000529
tacaacatatttt

SEQ ID NO: 1529 - DNA, 13 bp, Artificial Sequence
  Oligonucleotide for detection of SNP TSC0000529
aaaatacgttgta

SEQ ID NO: 1530 - DNA, 13 bp, Artificial Sequence
  Oligonucleotide for detection of SNP TSC0000529
tacaacgtatttt

SEQ ID NO: 1531 - DNA, 13 bp, Artificial Sequence
  Oligonucleotide for detection of SNP TSC0000530
tataatgataatg

SEQ ID NO: 1532 - DNA, 13 bp, Artificial Sequence
  Oligonucleotide for detection of SNP TSC0000530
cattatcattata

SEQ ID NO: 1533 - DNA, 13 bp, Artificial Sequence
  Oligonucleotide for detection of SNP TSC0000530
tataataataatg

SEQ ID NO: 1534 - DNA, 13 bp, Artificial Sequence
  Oligonucleotide for detection of SNP TSC0000530
cattattattata

SEQ ID NO: 1535 - DNA, 13 bp, Artificial Sequence
  Oligonucleotide for detection of SNP TSC0000531
ggatttggaaaag

SEQ ID NO: 1536 - DNA, 13 bp, Artificial Sequence
  Oligonucleotide for detection of SNP TSC0000531
cttttccaaatcc

SEQ ID NO: 1537 - DNA, 13 bp, Artificial Sequence
  Oligonucleotide for detection of SNP TSC0000531
ggatttagaaaag

SEQ ID NO: 1538 - DNA, 13 bp, Artificial Sequence
  Oligonucleotide for detection of SNP TSC0000531
cttttctaaatcc

SEQ ID NO: 1539 - DNA, 13 bp, Artificial Sequence
  Oligonucleotide for detection of SNP TSC0000541
atatatgtatgty

SEQ ID NO: 1540 - DNA, 13 bp, Artificial Sequence
  Oligonucleotide for detection of SNP TSC0000541
racatacatatat

SEQ ID NO: 1541 - DNA, 13 bp, Artificial Sequence
  Oligonucleotide for detection of SNP TSC0000541
atatatatatgty

SEQ ID NO: 1542 - DNA, 13 bp, Artificial Sequence
  Oligonucleotide for detection of SNP TSC0000541
racatatatatat

SEQ ID NO: 1543 - DNA, 13 bp, Artificial Sequence
  Oligonucleotide for detection of SNP TSC0000543
atttgtgttgttg

SEQ ID NO: 1544 - DNA, 13 bp, Artificial Sequence
  Oligonucleotide for detection of SNP TSC0000543
caacaacacaaat

SEQ ID NO: 1545 - DNA, 13 bp, Artificial Sequence
  Oligonucleotide for detection of SNP TSC0000543
atttgtattgttg

SEQ ID NO: 1546 - DNA, 13 bp, Artificial Sequence
  Oligonucleotide for detection of SNP TSC0000543
caacaatacaaat

SEQ ID NO: 1547 - DNA, 13 bp, Artificial Sequence
  Oligonucleotide for detection of SNP TSC0000543
atttgtgtcgttg

SEQ ID NO: 1548 - DNA, 13 bp, Artificial Sequence
  Oligonucleotide for detection of SNP TSC0000543
caacgacacaaat

SEQ ID NO: 1549 - DNA, 13 bp, Artificial Sequence
  Oligonucleotide for detection of SNP TSC0000543
atttgtatcgttg

SEQ ID NO: 1550 - DNA, 13 bp, Artificial Sequence
  Oligonucleotide for detection of SNP TSC0000543
caacgatacaaat

SEQ ID NO: 1551 - DNA, 13 bp, Artificial Sequence
  Oligonucleotide for detection of SNP TSC0000544
aagaataaaaaaa

SEQ ID NO: 1552 - DNA, 13 bp, Artificial Sequence
  Oligonucleotide for detection of SNP TSC0000544
tttttttattctt

SEQ ID NO: 1553 - DNA, 13 bp, Artificial Sequence
  Oligonucleotide for detection of SNP TSC0000544
aagaattaaaaaa

SEQ ID NO: 1554 - DNA, 13 bp, Artificial Sequence
  Oligonucleotide for detection of SNP TSC0000544
ttttttaattctt

SEQ ID NO: 1555 - DNA, 13 bp, Artificial Sequence
  Oligonucleotide for detection of SNP TSC0000544
tttttttattttt

SEQ ID NO: 1556 - DNA, 13 bp, Artificial Sequence
  Oligonucleotide for detection of SNP TSC0000544
aaaaataaaaaaa

SEQ ID NO: 1557 - DNA, 13 bp, Artificial Sequence
  Oligonucleotide for detection of SNP TSC0000544
ttttttaattttt

SEQ ID NO: 1558 - DNA, 13 bp, Artificial Sequence
  Oligonucleotide for detection of SNP TSC0000544
aaaaattaaaaaa

SEQ ID NO: 1559 - DNA, 13 bp, Artificial Sequence
  Oligonucleotide for detection of SNP TSC0000556
aaataaaattgag

SEQ ID NO: 1560 - DNA, 13 bp, Artificial Sequence
  Oligonucleotide for detection of SNP TSC0000556
ctcaattttattt

SEQ ID NO: 1561 - DNA, 13 bp, Artificial Sequence
  Oligonucleotide for detection of SNP TSC0000556
aaataagattgag

SEQ ID NO: 1562 - DNA, 13 bp, Artificial Sequence
  Oligonucleotide for detection of SNP TSC0000556
ctcaatcttattt

SEQ ID NO: 1563 - DNA, 13 bp, Artificial Sequence
  Oligonucleotide for detection of SNP TSC0000566
ggttttatgtagg

SEQ ID NO: 1564 - DNA, 13 bp, Artificial Sequence
  Oligonucleotide for detection of SNP TSC0000566
cctacataaaacc

SEQ ID NO: 1565 - DNA, 13 bp, Artificial Sequence
  Oligonucleotide for detection of SNP TSC0000566
ggttttgtgtagg

SEQ ID NO: 1566 - DNA, 13 bp, Artificial Sequence
  Oligonucleotide for detection of SNP TSC0000566
cctacacaaaacc

SEQ ID NO: 1567 - DNA, 13 bp, Artificial Sequence
  Oligonucleotide for detection of SNP TSC0000567
ttggtagaaatat

SEQ ID NO: 1568 - DNA, 13 bp, Artificial Sequence
  Oligonucleotide for detection of SNP TSC0000567
atatttctaccaa

SEQ ID NO: 1569 - DNA, 13 bp, Artificial Sequence
  Oligonucleotide for detection of SNP TSC0000567
ttggtaaaaatat

SEQ ID NO: 1570 - DNA, 13 bp, Artificial Sequence
  Oligonucleotide for detection of SNP TSC0000567
atatttttaccaa

SEQ ID NO: 1571 - DNA, 13 bp, Artificial Sequence
  Oligonucleotide for detection of SNP TSC0000568
tttttgaatgtga

SEQ ID NO: 1572 - DNA, 13 bp, Artificial Sequence
  Oligonucleotide for detection of SNP TSC0000568
tcacattcaaaaa

SEQ ID NO: 1573 - DNA, 13 bp, Artificial Sequence
  Oligonucleotide for detection of SNP TSC0000568
tttttggatgtga

SEQ ID NO: 1574 - DNA, 13 bp, Artificial Sequence
  Oligonucleotide for detection of SNP TSC0000568
tcacatccaaaaa

SEQ ID NO: 1575 - DNA, 13 bp, Artificial Sequence
  Oligonucleotide for detection of SNP TSC0000568
tttttgaacgtga

SEQ ID NO: 1576 - DNA, 13 bp, Artificial Sequence
  Oligonucleotide for detection of SNP TSC0000568
tcacgttcaaaaa

SEQ ID NO: 1577 - DNA, 13 bp, Artificial Sequence
  Oligonucleotide for detection of SNP TSC0000568
tttttggacgtga

SEQ ID NO: 1578 - DNA, 13 bp, Artificial Sequence
  Oligonucleotide for detection of SNP TSC0000568
tcacgtccaaaaa

SEQ ID NO: 1579 - DNA, 13 bp, Artificial Sequence
  Oligonucleotide for detection of SNP TSC0000574
atttatatttaty

SEQ ID NO: 1580 - DNA, 13 bp, Artificial Sequence
  Oligonucleotide for detection of SNP TSC0000574
rataaatataaat

SEQ ID NO: 1581 - DNA, 13 bp, Artificial Sequence
  Oligonucleotide for detection of SNP TSC0000574
atttatgtttaty

SEQ ID NO: 1582 - DNA, 13 bp, Artificial Sequence
  Oligonucleotide for detection of SNP TSC0000574
rataaacataaat

SEQ ID NO: 1583 - DNA, 13 bp, Artificial Sequence
  Oligonucleotide for detection of SNP TSC0000575
ttgttttgtagaa

SEQ ID NO: 1584 - DNA, 13 bp, Artificial Sequence
  Oligonucleotide for detection of SNP TSC0000575
ttctacaaaacaa

SEQ ID NO: 1585 - DNA, 13 bp, Artificial Sequence
  Oligonucleotide for detection of SNP TSC0000575
ttgtttggtagaa

SEQ ID NO: 1586 - DNA, 13 bp, Artificial Sequence
  Oligonucleotide for detection of SNP TSC0000575
ttctaccaaacaa

SEQ ID NO: 1587 - DNA, 13 bp, Artificial Sequence
  Oligonucleotide for detection of SNP TSC0000575
ttgtttcgtagaa

SEQ ID NO: 1588 - DNA, 13 bp, Artificial Sequence
  Oligonucleotide for detection of SNP TSC0000575
ttctacgaaacaa

SEQ ID NO: 1589 - DNA, 13 bp, Artificial Sequence
  Oligonucleotide for detection of SNP TSC0000575
ttttgtgaaatag

SEQ ID NO: 1590 - DNA, 13 bp, Artificial Sequence
  Oligonucleotide for detection of SNP TSC0000575
ctatttcacaaaa

SEQ ID NO: 1591 - DNA, 13 bp, Artificial Sequence
  Oligonucleotide for detection of SNP TSC0000575
ttttgttaaatag

SEQ ID NO: 1592 - DNA, 13 bp, Artificial Sequence
  Oligonucleotide for detection of SNP TSC0000575
ctatttaacaaaa

SEQ ID NO: 1593 - DNA, 13 bp, Artificial Sequence
  Oligonucleotide for detection of SNP TSC0000575
ttttgcgaaatag

SEQ ID NO: 1594 - DNA, 13 bp, Artificial Sequence
  Oligonucleotide for detection of SNP TSC0000575
ctatttcgcaaaa

SEQ ID NO: 1595 - DNA, 13 bp, Artificial Sequence
  Oligonucleotide for detection of SNP TSC0000576
ggtgttagtagga

SEQ ID NO: 1596 - DNA, 13 bp, Artificial Sequence
  Oligonucleotide for detection of SNP TSC0000576
tcctactaacacc

SEQ ID NO: 1597 - DNA, 13 bp, Artificial Sequence
  Oligonucleotide for detection of SNP TSC0000576
ggtgttggtagga

SEQ ID NO: 1598 - DNA, 13 bp, Artificial Sequence
  Oligonucleotide for detection of SNP TSC0000576
tcctaccaacacc

SEQ ID NO: 1599 - DNA, 13 bp, Artificial Sequence
  Oligonucleotide for detection of SNP TSC0000579
gtattaggaaggg

SEQ ID NO: 1600 - DNA, 13 bp, Artificial Sequence
  Oligonucleotide for detection of SNP TSC0000579
cccttcctaatac

SEQ ID NO: 1601 - DNA, 13 bp, Artificial Sequence
  Oligonucleotide for detection of SNP TSC0000579
gtattaagaaggg

SEQ ID NO: 1602 - DNA, 13 bp, Artificial Sequence
  Oligonucleotide for detection of SNP TSC0000579
cccttcttaatac

SEQ ID NO: 1603 - DNA, 13 bp, Artificial Sequence
  Oligonucleotide for detection of SNP TSC0000581
gttttgaaatgta

SEQ ID NO: 1604 - DNA, 13 bp, Artificial Sequence
  Oligonucleotide for detection of SNP TSC0000581
tacatttcaaaac

SEQ ID NO: 1605 - DNA, 13 bp, Artificial Sequence
  Oligonucleotide for detection of SNP TSC0000581
gttttggaatgta

SEQ ID NO: 1606 - DNA, 13 bp, Artificial Sequence
  Oligonucleotide for detection of SNP TSC0000581
tacattccaaaac

SEQ ID NO: 1607 - DNA, 13 bp, Artificial Sequence
  Oligonucleotide for detection of SNP TSC0000584
ttttatgttttat

SEQ ID NO: 1608 - DNA, 13 bp, Artificial Sequence
  Oligonucleotide for detection of SNP TSC0000584
ataaaacataaaa

SEQ ID NO: 1609 - DNA, 13 bp, Artificial Sequence
  Oligonucleotide for detection of SNP TSC0000584
ttttattttttat

SEQ ID NO: 1610 - DNA, 13 bp, Artificial Sequence
  Oligonucleotide for detection of SNP TSC0000584
ataaaaaataaaa

SEQ ID NO: 1611 - DNA, 13 bp, Artificial Sequence
  Oligonucleotide for detection of SNP TSC0000584
atgaagtataaaa

SEQ ID NO: 1612 - DNA, 13 bp, Artificial Sequence
  Oligonucleotide for detection of SNP TSC0000584
ttttatacttcat

SEQ ID NO: 1613 - DNA, 13 bp, Artificial Sequence
  Oligonucleotide for detection of SNP TSC0000584
atgaagaataaaa

SEQ ID NO: 1614 - DNA, 13 bp, Artificial Sequence
  Oligonucleotide for detection of SNP TSC0000584
ttttattcttcat

SEQ ID NO: 1615 - DNA, 13 bp, Artificial Sequence
  Oligonucleotide for detection of SNP TSC0000585
gttaatgaggaga

SEQ ID NO: 1616 - DNA, 13 bp, Artificial Sequence
  Oligonucleotide for detection of SNP TSC0000585
tctcctcattaac

SEQ ID NO: 1617 - DNA, 13 bp, Artificial Sequence
  Oligonucleotide for detection of SNP TSC0000585
gttaataaggaga

SEQ ID NO: 1618 - DNA, 13 bp, Artificial Sequence
  Oligonucleotide for detection of SNP TSC0000585
tctccttattaac

SEQ ID NO: 1619 - DNA, 13 bp, Artificial Sequence
  Oligonucleotide for detection of SNP TSC0000588
gagaatatagggy

SEQ ID NO: 1620 - DNA, 13 bp, Artificial Sequence
  Oligonucleotide for detection of SNP TSC0000588
rccctatattctc

SEQ ID NO: 1621 - DNA, 13 bp, Artificial Sequence
  Oligonucleotide for detection of SNP TSC0000588
gagaatgtagggy

SEQ ID NO: 1622 - DNA, 13 bp, Artificial Sequence
  Oligonucleotide for detection of SNP TSC0000588
rccctacattctc

SEQ ID NO: 1623 - DNA, 13 bp, Artificial Sequence
  Oligonucleotide for detection of SNP TSC0000588
gagaacgtagggy

SEQ ID NO: 1624 - DNA, 13 bp, Artificial Sequence
  Oligonucleotide for detection of SNP TSC0000588
rccctacgttctc

SEQ ID NO: 1625 - DNA, 13 bp, Artificial Sequence
  Oligonucleotide for detection of SNP TSC0000588
gttttgtgtttty

SEQ ID NO: 1626 - DNA, 13 bp, Artificial Sequence
  Oligonucleotide for detection of SNP TSC0000588
raaaacacaaaac

SEQ ID NO: 1627 - DNA, 13 bp, Artificial Sequence
  Oligonucleotide for detection of SNP TSC0000588
gttttgcgtttty

SEQ ID NO: 1628 - DNA, 13 bp, Artificial Sequence
  Oligonucleotide for detection of SNP TSC0000588
raaaacgcaaaac

SEQ ID NO: 1629 - DNA, 13 bp, Artificial Sequence
  Oligonucleotide for detection of SNP TSC0000590
tggagatgtagaa

SEQ ID NO: 1630 - DNA, 13 bp, Artificial Sequence
  Oligonucleotide for detection of SNP TSC0000590
ttctacatctcca

SEQ ID NO: 1631 - DNA, 13 bp, Artificial Sequence
  Oligonucleotide for detection of SNP TSC0000590
tggagacgtagaa

SEQ ID NO: 1632 - DNA, 13 bp, Artificial Sequence
  Oligonucleotide for detection of SNP TSC0000590
ttctacgtctcca

SEQ ID NO: 1633 - DNA, 13 bp, Artificial Sequence
  Oligonucleotide for detection of SNP TSC0000591
tgatagtggataa

SEQ ID NO: 1634 - DNA, 13 bp, Artificial Sequence
  Oligonucleotide for detection of SNP TSC0000591
ttatccactatca

SEQ ID NO: 1635 - DNA, 13 bp, Artificial Sequence
  Oligonucleotide for detection of SNP TSC0000591
tgatagcggataa

SEQ ID NO: 1636 - DNA, 13 bp, Artificial Sequence
  Oligonucleotide for detection of SNP TSC0000591
ttatccgctatca

SEQ ID NO: 1637 - DNA, 13 bp, Artificial Sequence
  Oligonucleotide for detection of SNP TSC0000591
ttatttgttgtta

SEQ ID NO: 1638 - DNA, 13 bp, Artificial Sequence
  Oligonucleotide for detection of SNP TSC0000591
taacaacaaataa

SEQ ID NO: 1639 - DNA, 13 bp, Artificial Sequence
  Oligonucleotide for detection of SNP TSC0000591
ttatttattgtta

SEQ ID NO: 1640 - DNA, 13 bp, Artificial Sequence
  Oligonucleotide for detection of SNP TSC0000591
taacaataaataa

SEQ ID NO: 1641 - DNA, 13 bp, Artificial Sequence
  Oligonucleotide for detection of SNP TSC0000591
ttattcgttgtta

SEQ ID NO: 1642 - DNA, 13 bp, Artificial Sequence
  Oligonucleotide for detection of SNP TSC0000591
taacaacgaataa

SEQ ID NO: 1643 - DNA, 13 bp, Artificial Sequence
  Oligonucleotide for detection of SNP TSC0000595
ttagagatatttt

SEQ ID NO: 1644 - DNA, 13 bp, Artificial Sequence
  Oligonucleotide for detection of SNP TSC0000595
aaaatatctctaa

SEQ ID NO: 1645 - DNA, 13 bp, Artificial Sequence
  Oligonucleotide for detection of SNP TSC0000595
ttagaggtatttt

SEQ ID NO: 1646 - DNA, 13 bp, Artificial Sequence
  Oligonucleotide for detection of SNP TSC0000595
aaaatacctctaa

SEQ ID NO: 1647 - DNA, 13 bp, Artificial Sequence
  Oligonucleotide for detection of SNP TSC0000596
ggtggtaaattta

SEQ ID NO: 1648 - DNA, 13 bp, Artificial Sequence
  Oligonucleotide for detection of SNP TSC0000596
taaatttaccacc

SEQ ID NO: 1649 - DNA, 13 bp, Artificial Sequence
  Oligonucleotide for detection of SNP TSC0000596
ggtggtgaattta

SEQ ID NO: 1650 - DNA, 13 bp, Artificial Sequence
  Oligonucleotide for detection of SNP TSC0000596
taaattcaccacc

SEQ ID NO: 1651 - DNA, 13 bp, Artificial Sequence
  Oligonucleotide for detection of SNP TSC0000599
ttttatataaaaa

SEQ ID NO: 1652 - DNA, 13 bp, Artificial Sequence
  Oligonucleotide for detection of SNP TSC0000599
tttttatataaaa

SEQ ID NO: 1653 - DNA, 13 bp, Artificial Sequence
  Oligonucleotide for detection of SNP TSC0000599
ttttatgtaaaaa

SEQ ID NO: 1654 - DNA, 13 bp, Artificial Sequence
  Oligonucleotide for detection of SNP TSC0000599
tttttacataaaa

SEQ ID NO: 1655 - DNA, 13 bp, Artificial Sequence
  Oligonucleotide for detection of SNP TSC0000600
ggagatatgtggt

SEQ ID NO: 1656 - DNA, 13 bp, Artificial Sequence
  Oligonucleotide for detection of SNP TSC0000600
accacatatctcc

SEQ ID NO: 1657 - DNA, 13 bp, Artificial Sequence
  Oligonucleotide for detection of SNP TSC0000600
ggagatgtgtggt

SEQ ID NO: 1658 - DNA, 13 bp, Artificial Sequence
  Oligonucleotide for detection of SNP TSC0000600
accacacatctcc

SEQ ID NO: 1659 - DNA, 13 bp, Artificial Sequence
  Oligonucleotide for detection of SNP TSC0000600
ggagatatgcggt

SEQ ID NO: 1660 - DNA, 13 bp, Artificial Sequence
  Oligonucleotide for detection of SNP TSC0000600
accgcatatctcc

SEQ ID NO: 1661 - DNA, 13 bp, Artificial Sequence
  Oligonucleotide for detection of SNP TSC0000600
ggagatgtgcggt

SEQ ID NO: 1662 - DNA, 13 bp, Artificial Sequence
  Oligonucleotide for detection of SNP TSC0000600
accgcacatctcc

SEQ ID NO: 1663 - DNA, 13 bp, Artificial Sequence
  Oligonucleotide for detection of SNP TSC0000601
agttaattttaag

SEQ ID NO: 1664 - DNA, 13 bp, Artificial Sequence
  Oligonucleotide for detection of SNP TSC0000601
cttaaaattaact

SEQ ID NO: 1665 - DNA, 13 bp, Artificial Sequence
  Oligonucleotide for detection of SNP TSC0000601
agttaagtttaag

SEQ ID NO: 1666 - DNA, 13 bp, Artificial Sequence
  Oligonucleotide for detection of SNP TSC0000601
cttaaacttaact

SEQ ID NO: 1667 - DNA, 13 bp, Artificial Sequence
  Oligonucleotide for detection of SNP TSC0000601
tttgaggttaatt

SEQ ID NO: 1668 - DNA, 13 bp, Artificial Sequence
  Oligonucleotide for detection of SNP TSC0000601
aattaacctcaaa

SEQ ID NO: 1669 - DNA, 13 bp, Artificial Sequence
  Oligonucleotide for detection of SNP TSC0000601
tttgagtttaatt

SEQ ID NO: 1670 - DNA, 13 bp, Artificial Sequence
  Oligonucleotide for detection of SNP TSC0000601
aattaaactcaaa

SEQ ID NO: 1671 - DNA, 13 bp, Artificial Sequence
  Oligonucleotide for detection of SNP TSC0000602
agatatagataty

SEQ ID NO: 1672 - DNA, 13 bp, Artificial Sequence
  Oligonucleotide for detection of SNP TSC0000602
ratatctatatct

SEQ ID NO: 1673 - DNA, 13 bp, Artificial Sequence
  Oligonucleotide for detection of SNP TSC0000602
agatattgataty

SEQ ID NO: 1674 - DNA, 13 bp, Artificial Sequence
  Oligonucleotide for detection of SNP TSC0000602
ratatcaatatct

SEQ ID NO: 1675 - DNA, 13 bp, Artificial Sequence
  Oligonucleotide for detection of SNP TSC0000602
ggtgtttgtgttt

SEQ ID NO: 1676 - DNA, 13 bp, Artificial Sequence
  Oligonucleotide for detection of SNP TSC0000602
aaacacaaacacc

SEQ ID NO: 1677 - DNA, 13 bp, Artificial Sequence
  Oligonucleotide for detection of SNP TSC0000602
ggtgttagtgttt

SEQ ID NO: 1678 - DNA, 13 bp, Artificial Sequence
  Oligonucleotide for detection of SNP TSC0000602
aaacactaacacc

SEQ ID NO: 1679 - DNA, 13 bp, Artificial Sequence
  Oligonucleotide for detection of SNP TSC0000603
gaatagtgggagt

SEQ ID NO: 1680 - DNA, 13 bp, Artificial Sequence
  Oligonucleotide for detection of SNP TSC0000603
actcccactattc

SEQ ID NO: 1681 - DNA, 13 bp, Artificial Sequence
  Oligonucleotide for detection of SNP TSC0000603
gaatagcgggagt

SEQ ID NO: 1682 - DNA, 13 bp, Artificial Sequence
  Oligonucleotide for detection of SNP TSC0000603
actcccgctattc

SEQ ID NO: 1683 - DNA, 13 bp, Artificial Sequence
  Oligonucleotide for detection of SNP TSC0000603
atttttgttatty

SEQ ID NO: 1684 - DNA, 13 bp, Artificial Sequence
  Oligonucleotide for detection of SNP TSC0000603
raataacaaaaat

SEQ ID NO: 1685 - DNA, 13 bp, Artificial Sequence
  Oligonucleotide for detection of SNP TSC0000603
atttttattatty

SEQ ID NO: 1686 - DNA, 13 bp, Artificial Sequence
  Oligonucleotide for detection of SNP TSC0000603
raataataaaaat

SEQ ID NO: 1687 - DNA, 13 bp, Artificial Sequence
  Oligonucleotide for detection of SNP TSC0000603
attttcgttatty

SEQ ID NO: 1688 - DNA, 13 bp, Artificial Sequence
  Oligonucleotide for detection of SNP TSC0000603
raataacgaaaat

SEQ ID NO: 1689 - DNA, 13 bp, Artificial Sequence
  Oligonucleotide for detection of SNP TSC0000618
gtggttagttgty

SEQ ID NO: 1690 - DNA, 13 bp, Artificial Sequence
  Oligonucleotide for detection of SNP TSC0000618
racaactaaccac

SEQ ID NO: 1691 - DNA, 13 bp, Artificial Sequence
  Oligonucleotide for detection of SNP TSC0000618
gtggttggttgty

SEQ ID NO: 1692 - DNA, 13 bp, Artificial Sequence
  Oligonucleotide for detection of SNP TSC0000618
racaaccaaccac

SEQ ID NO: 1693 - DNA, 13 bp, Artificial Sequence
  Oligonucleotide for detection of SNP TSC0000618
gtggtcggttgty

SEQ ID NO: 1694 - DNA, 13 bp, Artificial Sequence
  Oligonucleotide for detection of SNP TSC0000618
racaaccgaccac

SEQ ID NO: 1695 - DNA, 13 bp, Artificial Sequence
  Oligonucleotide for detection of SNP TSC0000618
ggtagttggttay

SEQ ID NO: 1696 - DNA, 13 bp, Artificial Sequence
  Oligonucleotide for detection of SNP TSC0000618
rtaaccaactacc

SEQ ID NO: 1697 - DNA, 13 bp, Artificial Sequence
  Oligonucleotide for detection of SNP TSC0000618
ggtagtcggttay

SEQ ID NO: 1698 - DNA, 13 bp, Artificial Sequence
  Oligonucleotide for detection of SNP TSC0000618
rtaaccgactacc

SEQ ID NO: 1699 - DNA, 13 bp, Artificial Sequence
  Oligonucleotide for detection of SNP TSC0000625
ggtaggggttata

SEQ ID NO: 1700 - DNA, 13 bp, Artificial Sequence
  Oligonucleotide for detection of SNP TSC0000625
tataacccctacc

SEQ ID NO: 1701 - DNA, 13 bp, Artificial Sequence
  Oligonucleotide for detection of SNP TSC0000625
ggtaggagttata

SEQ ID NO: 1702 - DNA, 13 bp, Artificial Sequence
  Oligonucleotide for detection of SNP TSC0000625
tataactcctacc

SEQ ID NO: 1703 - DNA, 13 bp, Artificial Sequence
  Oligonucleotide for detection of SNP TSC0000627
gtaaggggagaag

SEQ ID NO: 1704 - DNA, 13 bp, Artificial Sequence
  Oligonucleotide for detection of SNP TSC0000627
cttctccccttac

SEQ ID NO: 1705 - DNA, 13 bp, Artificial Sequence
  Oligonucleotide for detection of SNP TSC0000627
gtaaggagagaag

SEQ ID NO: 1706 - DNA, 13 bp, Artificial Sequence
  Oligonucleotide for detection of SNP TSC0000627
cttctctccttac

SEQ ID NO: 1707 - DNA, 13 bp, Artificial Sequence
  Oligonucleotide for detection of SNP TSC0000629
tttttgtgtatty

SEQ ID NO: 1708 - DNA, 13 bp, Artificial Sequence
  Oligonucleotide for detection of SNP TSC0000629
raatacacaaaaa

SEQ ID NO: 1709 - DNA, 13 bp, Artificial Sequence
  Oligonucleotide for detection of SNP TSC0000629
tttttgcgtatty

SEQ ID NO: 1710 - DNA, 13 bp, Artificial Sequence
  Oligonucleotide for detection of SNP TSC0000629
raatacgcaaaaa

SEQ ID NO: 1711 - DNA, 13 bp, Artificial Sequence
  Oligonucleotide for detection of SNP TSC0000629
gaatgtgtagaaa

SEQ ID NO: 1712 - DNA, 13 bp, Artificial Sequence
  Oligonucleotide for detection of SNP TSC0000629
tttctacacattc

SEQ ID NO: 1713 - DNA, 13 bp, Artificial Sequence
  Oligonucleotide for detection of SNP TSC0000629
gaatgtatagaaa

SEQ ID NO: 1714 - DNA, 13 bp, Artificial Sequence
  Oligonucleotide for detection of SNP TSC0000629
tttctatacattc

SEQ ID NO: 1715 - DNA, 13 bp, Artificial Sequence
  Oligonucleotide for detection of SNP TSC0000629
gaatgcgtagaaa

SEQ ID NO: 1716 - DNA, 13 bp, Artificial Sequence
  Oligonucleotide for detection of SNP TSC0000629
tttctacgcattc

SEQ ID NO: 1717 - DNA, 13 bp, Artificial Sequence
  Oligonucleotide for detection of SNP TSC0000632
gttgttgtaaaga

SEQ ID NO: 1718 - DNA, 13 bp, Artificial Sequence
  Oligonucleotide for detection of SNP TSC0000632
tctttacaacaac

SEQ ID NO: 1719 - DNA, 13 bp, Artificial Sequence
  Oligonucleotide for detection of SNP TSC0000632
gttgttataaaga

SEQ ID NO: 1720 - DNA, 13 bp, Artificial Sequence
  Oligonucleotide for detection of SNP TSC0000632
tctttataacaac

SEQ ID NO: 1721 - DNA, 13 bp, Artificial Sequence
  Oligonucleotide for detection of SNP TSC0000634
aaaaaaaaaaaat

SEQ ID NO: 1722 - DNA, 13 bp, Artificial Sequence
  Oligonucleotide for detection of SNP TSC0000634
atttttttttttt

SEQ ID NO: 1723 - DNA, 13 bp, Artificial Sequence
  Oligonucleotide for detection of SNP TSC0000634
aaaaaataaaaat

SEQ ID NO: 1724 - DNA, 13 bp, Artificial Sequence
  Oligonucleotide for detection of SNP TSC0000634
atttttatttttt

SEQ ID NO: 1725 - DNA, 13 bp, Artificial Sequence
  Oligonucleotide for detection of SNP TSC0000634
atttttgtttttt

SEQ ID NO: 1726 - DNA, 13 bp, Artificial Sequence
  Oligonucleotide for detection of SNP TSC0000634
aaaaaacaaaaat

SEQ ID NO: 1727 - DNA, 13 bp, Artificial Sequence
  Oligonucleotide for detection of SNP TSC0000635
ttagttaggtatg

SEQ ID NO: 1728 - DNA, 13 bp, Artificial Sequence
  Oligonucleotide for detection of SNP TSC0000635
catacctaactaa

SEQ ID NO: 1729 - DNA, 13 bp, Artificial Sequence
  Oligonucleotide for detection of SNP TSC0000635
ttagttgggtatg

SEQ ID NO: 1730 - DNA, 13 bp, Artificial Sequence
  Oligonucleotide for detection of SNP TSC0000635
catacccaactaa

SEQ ID NO: 1731 - DNA, 13 bp, Artificial Sequence
  Oligonucleotide for detection of SNP TSC0000635
ttagtcgggtatg

SEQ ID NO: 1732 - DNA, 13 bp, Artificial Sequence
  Oligonucleotide for detection of SNP TSC0000635
catacccgactaa

SEQ ID NO: 1733 - DNA, 13 bp, Artificial Sequence
  Oligonucleotide for detection of SNP TSC0000635
tatgtttggttaa

SEQ ID NO: 1734 - DNA, 13 bp, Artificial Sequence
  Oligonucleotide for detection of SNP TSC0000635
ttaaccaaacata

SEQ ID NO: 1735 - DNA, 13 bp, Artificial Sequence
  Oligonucleotide for detection of SNP TSC0000635
tatgttcggttaa

SEQ ID NO: 1736 - DNA, 13 bp, Artificial Sequence
  Oligonucleotide for detection of SNP TSC0000635
ttaaccgaacata

SEQ ID NO: 1737 - DNA, 13 bp, Artificial Sequence
  Oligonucleotide for detection of SNP TSC0000636
aggttgaggtagg

SEQ ID NO: 1738 - DNA, 13 bp, Artificial Sequence
  Oligonucleotide for detection of SNP TSC0000636
cctacctcaacct

SEQ ID NO: 1739 - DNA, 13 bp, Artificial Sequence
  Oligonucleotide for detection of SNP TSC0000636
aggttgtggtagg

SEQ ID NO: 1740 - DNA, 13 bp, Artificial Sequence
  Oligonucleotide for detection of SNP TSC0000636
cctaccacaacct

SEQ ID NO: 1741 - DNA, 13 bp, Artificial Sequence
  Oligonucleotide for detection of SNP TSC0000636
tttgttttagttt

SEQ ID NO: 1742 - DNA, 13 bp, Artificial Sequence
  Oligonucleotide for detection of SNP TSC0000636
aaactaaaacaaa

SEQ ID NO: 1743 - DNA, 13 bp, Artificial Sequence
  Oligonucleotide for detection of SNP TSC0000636
tttgttatagttt

SEQ ID NO: 1744 - DNA, 13 bp, Artificial Sequence
  Oligonucleotide for detection of SNP TSC0000636
aaactataacaaa

SEQ ID NO: 1745 - DNA, 13 bp, Artificial Sequence
  Oligonucleotide for detection of SNP TSC0000643
aagatgaggataa

SEQ ID NO: 1746 - DNA, 13 bp, Artificial Sequence
  Oligonucleotide for detection of SNP TSC0000643
ttatcctcatctt

SEQ ID NO: 1747 - DNA, 13 bp, Artificial Sequence
  Oligonucleotide for detection of SNP TSC0000643
aagatggggataa

SEQ ID NO: 1748 - DNA, 13 bp, Artificial Sequence
  Oligonucleotide for detection of SNP TSC0000643
ttatccccatctt

SEQ ID NO: 1749 - DNA, 13 bp, Artificial Sequence
  Oligonucleotide for detection of SNP TSC0000644
ataattaaattgy

SEQ ID NO: 1750 - DNA, 13 bp, Artificial Sequence
  Oligonucleotide for detection of SNP TSC0000644
rcaatttaattat

SEQ ID NO: 1751 - DNA, 13 bp, Artificial Sequence
  Oligonucleotide for detection of SNP TSC0000644
ataattgaattgy

SEQ ID NO: 1752 - DNA, 13 bp, Artificial Sequence
  Oligonucleotide for detection of SNP TSC0000644
rcaattcaattat

SEQ ID NO: 1753 - DNA, 13 bp, Artificial Sequence
  Oligonucleotide for detection of SNP TSC0000645
tataaattagtag

SEQ ID NO: 1754 - DNA, 13 bp, Artificial Sequence
  Oligonucleotide for detection of SNP TSC0000645
ctactaatttata

SEQ ID NO: 1755 - DNA, 13 bp, Artificial Sequence
  Oligonucleotide for detection of SNP TSC0000645
tataaagtagtag

SEQ ID NO: 1756 - DNA, 13 bp, Artificial Sequence
  Oligonucleotide for detection of SNP TSC0000645
ctactactttata

SEQ ID NO: 1757 - DNA, 13 bp, Artificial Sequence
  Oligonucleotide for detection of SNP TSC0000645
ttgttagtttgta

SEQ ID NO: 1758 - DNA, 13 bp, Artificial Sequence
  Oligonucleotide for detection of SNP TSC0000645
tacaaactaacaa

SEQ ID NO: 1759 - DNA, 13 bp, Artificial Sequence
  Oligonucleotide for detection of SNP TSC0000645
ttgttattttgta

SEQ ID NO: 1760 - DNA, 13 bp, Artificial Sequence
  Oligonucleotide for detection of SNP TSC0000645
tacaaaataacaa

SEQ ID NO: 1761 - DNA, 13 bp, Artificial Sequence
  Oligonucleotide for detection of SNP TSC0000655
tttagtattatat

SEQ ID NO: 1762 - DNA, 13 bp, Artificial Sequence
  Oligonucleotide for detection of SNP TSC0000655
atataatactaaa

SEQ ID NO: 1763 - DNA, 13 bp, Artificial Sequence
  Oligonucleotide for detection of SNP TSC0000655
tttagtgttatat

SEQ ID NO: 1764 - DNA, 13 bp, Artificial Sequence
  Oligonucleotide for detection of SNP TSC0000655
atataacactaaa

SEQ ID NO: 1765 - DNA, 13 bp, Artificial Sequence
  Oligonucleotide for detection of SNP TSC0000655
tttagcgttatat

SEQ ID NO: 1766 - DNA, 13 bp, Artificial Sequence
  Oligonucleotide for detection of SNP TSC0000655
atataacgctaaa

SEQ ID NO: 1767 - DNA, 13 bp, Artificial Sequence
  Oligonucleotide for detection of SNP TSC0000655
atatgatgttaga

SEQ ID NO: 1768 - DNA, 13 bp, Artificial Sequence
  Oligonucleotide for detection of SNP TSC0000655
tctaacatcatat

SEQ ID NO: 1769 - DNA, 13 bp, Artificial Sequence
  Oligonucleotide for detection of SNP TSC0000655
atatgacgttaga

SEQ ID NO: 1770 - DNA, 13 bp, Artificial Sequence
  Oligonucleotide for detection of SNP TSC0000655
tctaacgtcatat

SEQ ID NO: 1771 - DNA, 13 bp, Artificial Sequence
  Oligonucleotide for detection of SNP TSC0000674
tgtgttttttttt

SEQ ID NO: 1772 - DNA, 13 bp, Artificial Sequence
  Oligonucleotide for detection of SNP TSC0000674
aaaaaaaaacaca

SEQ ID NO: 1773 - DNA, 13 bp, Artificial Sequence
  Oligonucleotide for detection of SNP TSC0000674
tgtgttgtttttt

SEQ ID NO: 1774 - DNA, 13 bp, Artificial Sequence
  Oligonucleotide for detection of SNP TSC0000674
aaaaaacaacaca

SEQ ID NO: 1775 - DNA, 13 bp, Artificial Sequence
  Oligonucleotide for detection of SNP TSC0000674
aagaaagagtata

SEQ ID NO: 1776 - DNA, 13 bp, Artificial Sequence
  Oligonucleotide for detection of SNP TSC0000674
tatactctttctt

SEQ ID NO: 1777 - DNA, 13 bp, Artificial Sequence
  Oligonucleotide for detection of SNP TSC0000674
aagaaatagtata

SEQ ID NO: 1778 - DNA, 13 bp, Artificial Sequence
  Oligonucleotide for detection of SNP TSC0000674
tatactatttctt

SEQ ID NO: 1779 - DNA, 13 bp, Artificial Sequence
  Oligonucleotide for detection of SNP TSC0000675
tgaaatatggtta

SEQ ID NO: 1780 - DNA, 13 bp, Artificial Sequence
  Oligonucleotide for detection of SNP TSC0000675
taaccatatttca

SEQ ID NO: 1781 - DNA, 13 bp, Artificial Sequence
  Oligonucleotide for detection of SNP TSC0000675
tgaaatgtggtta

SEQ ID NO: 1782 - DNA, 13 bp, Artificial Sequence
  Oligonucleotide for detection of SNP TSC0000675
taaccacatttca

SEQ ID NO: 1783 - DNA, 13 bp, Artificial Sequence
  Oligonucleotide for detection of SNP TSC0000675
tgaaacgtggtta

SEQ ID NO: 1784 - DNA, 13 bp, Artificial Sequence
  Oligonucleotide for detection of SNP TSC0000675
taaccacgtttca

SEQ ID NO: 1785 - DNA, 13 bp, Artificial Sequence
  Oligonucleotide for detection of SNP TSC0000675
tggttatgtttta

SEQ ID NO: 1786 - DNA, 13 bp, Artificial Sequence
  Oligonucleotide for detection of SNP TSC0000675
taaaacataacca

SEQ ID NO: 1787 - DNA, 13 bp, Artificial Sequence
  Oligonucleotide for detection of SNP TSC0000675
tggttacgtttta

SEQ ID NO: 1788 - DNA, 13 bp, Artificial Sequence
  Oligonucleotide for detection of SNP TSC0000675
taaaacgtaacca

SEQ ID NO: 1789 - DNA, 13 bp, Artificial Sequence
  Oligonucleotide for detection of SNP TSC0000689
ttattagttaaty

SEQ ID NO: 1790 - DNA, 13 bp, Artificial Sequence
  Oligonucleotide for detection of SNP TSC0000689
rattaactaataa

SEQ ID NO: 1791 - DNA, 13 bp, Artificial Sequence
  Oligonucleotide for detection of SNP TSC0000689
ttattatttaaty

SEQ ID NO: 1792 - DNA, 13 bp, Artificial Sequence
  Oligonucleotide for detection of SNP TSC0000689
rattaaataataa

SEQ ID NO: 1793 - DNA, 13 bp, Artificial Sequence
  Oligonucleotide for detection of SNP TSC0000689
gattaattaatga

SEQ ID NO: 1794 - DNA, 13 bp, Artificial Sequence
  Oligonucleotide for detection of SNP TSC0000689
tcattaattaatc

SEQ ID NO: 1795 - DNA, 13 bp, Artificial Sequence
  Oligonucleotide for detection of SNP TSC0000689
gattaaataatga

SEQ ID NO: 1796 - DNA, 13 bp, Artificial Sequence
  Oligonucleotide for detection of SNP TSC0000689
tcattatttaatc

SEQ ID NO: 1797 - DNA, 13 bp, Artificial Sequence
  Oligonucleotide for detection of SNP TSC0000690
tttagggttttat

SEQ ID NO: 1798 - DNA, 13 bp, Artificial Sequence
  Oligonucleotide for detection of SNP TSC0000690
ataaaaccctaaa

SEQ ID NO: 1799 - DNA, 13 bp, Artificial Sequence
  Oligonucleotide for detection of SNP TSC0000690
tttaggattttat

SEQ ID NO: 1800 - DNA, 13 bp, Artificial Sequence
  Oligonucleotide for detection of SNP TSC0000690
ataaaatcctaaa

SEQ ID NO: 1801 - DNA, 13 bp, Artificial Sequence
  Oligonucleotide for detection of SNP TSC0000700
ttttggaatttaa

SEQ ID NO: 1802 - DNA, 13 bp, Artificial Sequence
  Oligonucleotide for detection of SNP TSC0000700
ttaaattccaaaa

SEQ ID NO: 1803 - DNA, 13 bp, Artificial Sequence
  Oligonucleotide for detection of SNP TSC0000700
ttttggtatttaa

SEQ ID NO: 1804 - DNA, 13 bp, Artificial Sequence
  Oligonucleotide for detection of SNP TSC0000700
ttaaataccaaaa

SEQ ID NO: 1805 - DNA, 13 bp, Artificial Sequence
  Oligonucleotide for detection of SNP TSC0000700
ttaagttttagaa

SEQ ID NO: 1806 - DNA, 13 bp, Artificial Sequence
  Oligonucleotide for detection of SNP TSC0000700
ttctaaaacttaa

SEQ ID NO: 1807 - DNA, 13 bp, Artificial Sequence
  Oligonucleotide for detection of SNP TSC0000700
ttaagtgttagaa

SEQ ID NO: 1808 - DNA, 13 bp, Artificial Sequence
  Oligonucleotide for detection of SNP TSC0000700
ttctaacacttaa

SEQ ID NO: 1809 - DNA, 13 bp, Artificial Sequence
  Oligonucleotide for detection of SNP TSC0000701
ttgtaagttgtta

SEQ ID NO: 1810 - DNA, 13 bp, Artificial Sequence
  Oligonucleotide for detection of SNP TSC0000701
taacaacttacaa

SEQ ID NO: 1811 - DNA, 13 bp, Artificial Sequence
  Oligonucleotide for detection of SNP TSC0000701
ttgtaaattgtta

SEQ ID NO: 1812 - DNA, 13 bp, Artificial Sequence
  Oligonucleotide for detection of SNP TSC0000701
taacaatttacaa

SEQ ID NO: 1813 - DNA, 13 bp, Artificial Sequence
  Oligonucleotide for detection of SNP TSC0000703
gtattgaaagaaa

SEQ ID NO: 1814 - DNA, 13 bp, Artificial Sequence
  Oligonucleotide for detection of SNP TSC0000703
tttctttcaatac

SEQ ID NO: 1815 - DNA, 13 bp, Artificial Sequence
  Oligonucleotide for detection of SNP TSC0000703
gtattgtaagaaa

SEQ ID NO: 1816 - DNA, 13 bp, Artificial Sequence
  Oligonucleotide for detection of SNP TSC0000703
tttcttacaatac

SEQ ID NO: 1817 - DNA, 13 bp, Artificial Sequence
  Oligonucleotide for detection of SNP TSC0000703
ttttttttagtay

SEQ ID NO: 1818 - DNA, 13 bp, Artificial Sequence
  Oligonucleotide for detection of SNP TSC0000703
rtactaaaaaaaa

SEQ ID NO: 1819 - DNA, 13 bp, Artificial Sequence
  Oligonucleotide for detection of SNP TSC0000703
ttttttgtagtay

SEQ ID NO: 1820 - DNA, 13 bp, Artificial Sequence
  Oligonucleotide for detection of SNP TSC0000703
rtactacaaaaaa

SEQ ID NO: 1821 - DNA, 13 bp, Artificial Sequence
  Oligonucleotide for detection of SNP TSC0000704
agagaaattgttg

SEQ ID NO: 1822 - DNA, 13 bp, Artificial Sequence
  Oligonucleotide for detection of SNP TSC0000704
caacaatttctct

SEQ ID NO: 1823 - DNA, 13 bp, Artificial Sequence
  Oligonucleotide for detection of SNP TSC0000704
agagaagttgttg

SEQ ID NO: 1824 - DNA, 13 bp, Artificial Sequence
  Oligonucleotide for detection of SNP TSC0000704
caacaacttctct

SEQ ID NO: 1825 - DNA, 13 bp, Artificial Sequence
  Oligonucleotide for detection of SNP TSC0000710
tatggtagaatgg

SEQ ID NO: 1826 - DNA, 13 bp, Artificial Sequence
  Oligonucleotide for detection of SNP TSC0000710
ccattctaccata

SEQ ID NO: 1827 - DNA, 13 bp, Artificial Sequence
  Oligonucleotide for detection of SNP TSC0000710
tatggtggaatgg

SEQ ID NO: 1828 - DNA, 13 bp, Artificial Sequence
  Oligonucleotide for detection of SNP TSC0000710
ccattccaccata

SEQ ID NO: 1829 - DNA, 13 bp, Artificial Sequence
  Oligonucleotide for detection of SNP TSC0000710
tatggcggaatgg

SEQ ID NO: 1830 - DNA, 13 bp, Artificial Sequence
  Oligonucleotide for detection of SNP TSC0000710
ccattccgccata

SEQ ID NO: 1831 - DNA, 13 bp, Artificial Sequence
  Oligonucleotide for detection of SNP TSC0000710
ttattttgttatg

SEQ ID NO: 1832 - DNA, 13 bp, Artificial Sequence
  Oligonucleotide for detection of SNP TSC0000710
cataacaaaataa

SEQ ID NO: 1833 - DNA, 13 bp, Artificial Sequence
  Oligonucleotide for detection of SNP TSC0000710
ttatttcgttatg

SEQ ID NO: 1834 - DNA, 13 bp, Artificial Sequence
  Oligonucleotide for detection of SNP TSC0000710
cataacgaaataa

SEQ ID NO: 1835 - DNA, 13 bp, Artificial Sequence
  Oligonucleotide for detection of SNP TSC0000711
ttgtaggtgatgg

SEQ ID NO: 1836 - DNA, 13 bp, Artificial Sequence
  Oligonucleotide for detection of SNP TSC0000711
ccatcacctacaa

SEQ ID NO: 1837 - DNA, 13 bp, Artificial Sequence
  Oligonucleotide for detection of SNP TSC0000711
ttgtagttgatgg

SEQ ID NO: 1838 - DNA, 13 bp, Artificial Sequence
  Oligonucleotide for detection of SNP TSC0000711
ccatcaactacaa

SEQ ID NO: 1839 - DNA, 13 bp, Artificial Sequence
  Oligonucleotide for detection of SNP TSC0000711
ttgtaggtgacgg

SEQ ID NO: 1840 - DNA, 13 bp, Artificial Sequence
  Oligonucleotide for detection of SNP TSC0000711
ccgtcacctacaa

SEQ ID NO: 1841 - DNA, 13 bp, Artificial Sequence
  Oligonucleotide for detection of SNP TSC0000711
ttgtagttgacgg

SEQ ID NO: 1842 - DNA, 13 bp, Artificial Sequence
  Oligonucleotide for detection of SNP TSC0000711
ccgtcaactacaa

SEQ ID NO: 1843 - DNA, 13 bp, Artificial Sequence
  Oligonucleotide for detection of SNP TSC0000711
ttgttatttgtag

SEQ ID NO: 1844 - DNA, 13 bp, Artificial Sequence
  Oligonucleotide for detection of SNP TSC0000711
ctacaaataacaa

SEQ ID NO: 1845 - DNA, 13 bp, Artificial Sequence
  Oligonucleotide for detection of SNP TSC0000711
ttgttaattgtag

SEQ ID NO: 1846 - DNA, 13 bp, Artificial Sequence
  Oligonucleotide for detection of SNP TSC0000711
ctacaattaacaa

SEQ ID NO: 1847 - DNA, 13 bp, Artificial Sequence
  Oligonucleotide for detection of SNP TSC0000711
tcgttatttgtag

SEQ ID NO: 1848 - DNA, 13 bp, Artificial Sequence
  Oligonucleotide for detection of SNP TSC0000711
ctacaaataacga

SEQ ID NO: 1849 - DNA, 13 bp, Artificial Sequence
  Oligonucleotide for detection of SNP TSC0000711
tcgttaattgtag

SEQ ID NO: 1850 - DNA, 13 bp, Artificial Sequence
  Oligonucleotide for detection of SNP TSC0000711
ctacaattaacga

SEQ ID NO: 1851 - DNA, 13 bp, Artificial Sequence
  Oligonucleotide for detection of SNP TSC0000712
aattattttttaa

SEQ ID NO: 1852 - DNA, 13 bp, Artificial Sequence
  Oligonucleotide for detection of SNP TSC0000712
ttaaaaaataatt

SEQ ID NO: 1853 - DNA, 13 bp, Artificial Sequence
  Oligonucleotide for detection of SNP TSC0000712
aattatgttttaa

SEQ ID NO: 1854 - DNA, 13 bp, Artificial Sequence
  Oligonucleotide for detection of SNP TSC0000712
ttaaaacataatt

SEQ ID NO: 1855 - DNA, 13 bp, Artificial Sequence
  Oligonucleotide for detection of SNP TSC0000712
aattacgttttaa

SEQ ID NO: 1856 - DNA, 13 bp, Artificial Sequence
  Oligonucleotide for detection of SNP TSC0000712
ttaaaacgtaatt

SEQ ID NO: 1857 - DNA, 13 bp, Artificial Sequence
  Oligonucleotide for detection of SNP TSC0000712
ttgaaaggtaatt

SEQ ID NO: 1858 - DNA, 13 bp, Artificial Sequence
  Oligonucleotide for detection of SNP TSC0000712
aattacctttcaa

SEQ ID NO: 1859 - DNA, 13 bp, Artificial Sequence
  Oligonucleotide for detection of SNP TSC0000712
ttgaaatgtaatt

SEQ ID NO: 1860 - DNA, 13 bp, Artificial Sequence
  Oligonucleotide for detection of SNP TSC0000712
aattacatttcaa

SEQ ID NO: 1861 - DNA, 13 bp, Artificial Sequence
  Oligonucleotide for detection of SNP TSC0000712
ttgaaacgtaatt

SEQ ID NO: 1862 - DNA, 13 bp, Artificial Sequence
  Oligonucleotide for detection of SNP TSC0000712
aattacgtttcaa

SEQ ID NO: 1863 - DNA, 13 bp, Artificial Sequence
  Oligonucleotide for detection of SNP TSC0000713
atagatgtggaga

SEQ ID NO: 1864 - DNA, 13 bp, Artificial Sequence
  Oligonucleotide for detection of SNP TSC0000713
tctccacatctat

SEQ ID NO: 1865 - DNA, 13 bp, Artificial Sequence
  Oligonucleotide for detection of SNP TSC0000713
atagatatggaga

SEQ ID NO: 1866 - DNA, 13 bp, Artificial Sequence
  Oligonucleotide for detection of SNP TSC0000713
tctccatatctat

SEQ ID NO: 1867 - DNA, 13 bp, Artificial Sequence
  Oligonucleotide for detection of SNP TSC0000714
ttaataatggatt

SEQ ID NO: 1868 - DNA, 13 bp, Artificial Sequence
  Oligonucleotide for detection of SNP TSC0000714
aatccattattaa

SEQ ID NO: 1869 - DNA, 13 bp, Artificial Sequence
  Oligonucleotide for detection of SNP TSC0000714
ttaatagtggatt

SEQ ID NO: 1870 - DNA, 13 bp, Artificial Sequence
  Oligonucleotide for detection of SNP TSC0000714
aatccactattaa

SEQ ID NO: 1871 - DNA, 13 bp, Artificial Sequence
  Oligonucleotide for detection of SNP TSC0000715
aagaaaattagtt

SEQ ID NO: 1872 - DNA, 13 bp, Artificial Sequence
  Oligonucleotide for detection of SNP TSC0000715
aactaattttctt

SEQ ID NO: 1873 - DNA, 13 bp, Artificial Sequence
  Oligonucleotide for detection of SNP TSC0000715
aagaaagttagtt

SEQ ID NO: 1874 - DNA, 13 bp, Artificial Sequence
  Oligonucleotide for detection of SNP TSC0000715
aactaactttctt

SEQ ID NO: 1875 - DNA, 13 bp, Artificial Sequence
  Oligonucleotide for detection of SNP TSC0000725
tagtaatgatgtt

SEQ ID NO: 1876 - DNA, 13 bp, Artificial Sequence
  Oligonucleotide for detection of SNP TSC0000725
aacatcattacta

SEQ ID NO: 1877 - DNA, 13 bp, Artificial Sequence
  Oligonucleotide for detection of SNP TSC0000725
tagtaacgatgtt

SEQ ID NO: 1878 - DNA, 13 bp, Artificial Sequence
  Oligonucleotide for detection of SNP TSC0000725
aacatcgttacta

SEQ ID NO: 1879 - DNA, 13 bp, Artificial Sequence
  Oligonucleotide for detection of SNP TSC0000725
aatattgttgttg

SEQ ID NO: 1880 - DNA, 13 bp, Artificial Sequence
  Oligonucleotide for detection of SNP TSC0000725
caacaacaatatt

SEQ ID NO: 1881 - DNA, 13 bp, Artificial Sequence
  Oligonucleotide for detection of SNP TSC0000725
aatattattgttg

SEQ ID NO: 1882 - DNA, 13 bp, Artificial Sequence
  Oligonucleotide for detection of SNP TSC0000725
caacaataatatt

SEQ ID NO: 1883 - DNA, 13 bp, Artificial Sequence
  Oligonucleotide for detection of SNP TSC0000725
aatatcgttgttg

SEQ ID NO: 1884 - DNA, 13 bp, Artificial Sequence
  Oligonucleotide for detection of SNP TSC0000725
caacaacgatatt

SEQ ID NO: 1885 - DNA, 13 bp, Artificial Sequence
  Oligonucleotide for detection of SNP TSC0000732
atttaaggaggtt

SEQ ID NO: 1886 - DNA, 13 bp, Artificial Sequence
  Oligonucleotide for detection of SNP TSC0000732
aacctccttaaat

SEQ ID NO: 1887 - DNA, 13 bp, Artificial Sequence
  Oligonucleotide for detection of SNP TSC0000732
atttaatgaggtt

SEQ ID NO: 1888 - DNA, 13 bp, Artificial Sequence
  Oligonucleotide for detection of SNP TSC0000732
aacctcattaaat

SEQ ID NO: 1889 - DNA, 13 bp, Artificial Sequence
  Oligonucleotide for detection of SNP TSC0000732
aatttttttaagt

SEQ ID NO: 1890 - DNA, 13 bp, Artificial Sequence
  Oligonucleotide for detection of SNP TSC0000732
acttaaaaaaatt

SEQ ID NO: 1891 - DNA, 13 bp, Artificial Sequence
  Oligonucleotide for detection of SNP TSC0000732
aattttattaagt

SEQ ID NO: 1892 - DNA, 13 bp, Artificial Sequence
  Oligonucleotide for detection of SNP TSC0000732
acttaataaaatt

SEQ ID NO: 1893 - DNA, 13 bp, Artificial Sequence
  Oligonucleotide for detection of SNP TSC0000736
gagaggaaataay

SEQ ID NO: 1894 - DNA, 13 bp, Artificial Sequence
  Oligonucleotide for detection of SNP TSC0000736
rttatttcctctc

SEQ ID NO: 1895 - DNA, 13 bp, Artificial Sequence
  Oligonucleotide for detection of SNP TSC0000736
gagaggtaataay

SEQ ID NO: 1896 - DNA, 13 bp, Artificial Sequence
  Oligonucleotide for detection of SNP TSC0000736
rttattacctctc

SEQ ID NO: 1897 - DNA, 13 bp, Artificial Sequence
  Oligonucleotide for detection of SNP TSC0000736
gttgtttttttty

SEQ ID NO: 1898 - DNA, 13 bp, Artificial Sequence
  Oligonucleotide for detection of SNP TSC0000736
raaaaaaaacaac

SEQ ID NO: 1899 - DNA, 13 bp, Artificial Sequence
  Oligonucleotide for detection of SNP TSC0000736
gttgttgttttty

SEQ ID NO: 1900 - DNA, 13 bp, Artificial Sequence
  Oligonucleotide for detection of SNP TSC0000736
raaaaacaacaac

SEQ ID NO: 1901 - DNA, 13 bp, Artificial Sequence
  Oligonucleotide for detection of SNP TSC0000738
tgagttagtaatg

SEQ ID NO: 1902 - DNA, 13 bp, Artificial Sequence
  Oligonucleotide for detection of SNP TSC0000738
cattactaactca

SEQ ID NO: 1903 - DNA, 13 bp, Artificial Sequence
  Oligonucleotide for detection of SNP TSC0000738
tgagttggtaatg

SEQ ID NO: 1904 - DNA, 13 bp, Artificial Sequence
  Oligonucleotide for detection of SNP TSC0000738
cattaccaactca

SEQ ID NO: 1905 - DNA, 13 bp, Artificial Sequence
  Oligonucleotide for detection of SNP TSC0000738
tgagtcggtaatg

SEQ ID NO: 1906 - DNA, 13 bp, Artificial Sequence
  Oligonucleotide for detection of SNP TSC0000738
cattaccgactca

SEQ ID NO: 1907 - DNA, 13 bp, Artificial Sequence
  Oligonucleotide for detection of SNP TSC0000738
tattgttgattta

SEQ ID NO: 1908 - DNA, 13 bp, Artificial Sequence
  Oligonucleotide for detection of SNP TSC0000738
taaatcaacaata

SEQ ID NO: 1909 - DNA, 13 bp, Artificial Sequence
  Oligonucleotide for detection of SNP TSC0000738
tattgtcgattta

SEQ ID NO: 1910 - DNA, 13 bp, Artificial Sequence
  Oligonucleotide for detection of SNP TSC0000738
taaatcgacaata

SEQ ID NO: 1911 - DNA, 13 bp, Artificial Sequence
  Oligonucleotide for detection of SNP TSC0000747
aaagaaagaaaag

SEQ ID NO: 1912 - DNA, 13 bp, Artificial Sequence
  Oligonucleotide for detection of SNP TSC0000747
cttttctttcttt

SEQ ID NO: 1913 - DNA, 13 bp, Artificial Sequence
  Oligonucleotide for detection of SNP TSC0000747
aaagaaggaaaag

SEQ ID NO: 1914 - DNA, 13 bp, Artificial Sequence
  Oligonucleotide for detection of SNP TSC0000747
cttttccttcttt

SEQ ID NO: 1915 - DNA, 13 bp, Artificial Sequence
  Oligonucleotide for detection of SNP TSC0000749
tatttaagtttga

SEQ ID NO: 1916 - DNA, 13 bp, Artificial Sequence
  Oligonucleotide for detection of SNP TSC0000749
tcaaacttaaata

SEQ ID NO: 1917 - DNA, 13 bp, Artificial Sequence
  Oligonucleotide for detection of SNP TSC0000749
tatttatgtttga

SEQ ID NO: 1918 - DNA, 13 bp, Artificial Sequence
  Oligonucleotide for detection of SNP TSC0000749
tcaaacataaata

SEQ ID NO: 1919 - DNA, 13 bp, Artificial Sequence
  Oligonucleotide for detection of SNP TSC0000749
ttaaatttaggtg

SEQ ID NO: 1920 - DNA, 13 bp, Artificial Sequence
  Oligonucleotide for detection of SNP TSC0000749
cacctaaatttaa

SEQ ID NO: 1921 - DNA, 13 bp, Artificial Sequence
  Oligonucleotide for detection of SNP TSC0000749
ttaaatataggtg

SEQ ID NO: 1922 - DNA, 13 bp, Artificial Sequence
  Oligonucleotide for detection of SNP TSC0000749
cacctatatttaa

SEQ ID NO: 1923 - DNA, 13 bp, Artificial Sequence
  Oligonucleotide for detection of SNP TSC0000750
attttgagattta

SEQ ID NO: 1924 - DNA, 13 bp, Artificial Sequence
  Oligonucleotide for detection of SNP TSC0000750
taaatctcaaaat

SEQ ID NO: 1925 - DNA, 13 bp, Artificial Sequence
  Oligonucleotide for detection of SNP TSC0000750
attttgggattta

SEQ ID NO: 1926 - DNA, 13 bp, Artificial Sequence
  Oligonucleotide for detection of SNP TSC0000750
taaatcccaaaat

SEQ ID NO: 1927 - DNA, 13 bp, Artificial Sequence
  Oligonucleotide for detection of SNP TSC0000750
atttcgagattta

SEQ ID NO: 1928 - DNA, 13 bp, Artificial Sequence
  Oligonucleotide for detection of SNP TSC0000750
taaatctcgaaat

SEQ ID NO: 1929 - DNA, 13 bp, Artificial Sequence
  Oligonucleotide for detection of SNP TSC0000750
atttcgggattta

SEQ ID NO: 1930 - DNA, 13 bp, Artificial Sequence
  Oligonucleotide for detection of SNP TSC0000750
taaatcccgaaat

SEQ ID NO: 1931 - DNA, 13 bp, Artificial Sequence
  Oligonucleotide for detection of SNP TSC0000755
tttataaaggaaa

SEQ ID NO: 1932 - DNA, 13 bp, Artificial Sequence
  Oligonucleotide for detection of SNP TSC0000755
tttcctttataaa

SEQ ID NO: 1933 - DNA, 13 bp, Artificial Sequence
  Oligonucleotide for detection of SNP TSC0000755
tttatataggaaa

SEQ ID NO: 1934 - DNA, 13 bp, Artificial Sequence
  Oligonucleotide for detection of SNP TSC0000755
tttcctatataaa

SEQ ID NO: 1935 - DNA, 13 bp, Artificial Sequence
  Oligonucleotide for detection of SNP TSC0000755
ttttttttataaa

SEQ ID NO: 1936 - DNA, 13 bp, Artificial Sequence
  Oligonucleotide for detection of SNP TSC0000755
tttataaaaaaaa

SEQ ID NO: 1937 - DNA, 13 bp, Artificial Sequence
  Oligonucleotide for detection of SNP TSC0000755
ttttttatataaa

SEQ ID NO: 1938 - DNA, 13 bp, Artificial Sequence
  Oligonucleotide for detection of SNP TSC0000755
tttatataaaaaa

SEQ ID NO: 1939 - DNA, 13 bp, Artificial Sequence
  Oligonucleotide for detection of SNP TSC0000757
agagaagttttag

SEQ ID NO: 1940 - DNA, 13 bp, Artificial Sequence
  Oligonucleotide for detection of SNP TSC0000757
ctaaaacttctct

SEQ ID NO: 1941 - DNA, 13 bp, Artificial Sequence
  Oligonucleotide for detection of SNP TSC0000757
agagaaattttag

SEQ ID NO: 1942 - DNA, 13 bp, Artificial Sequence
  Oligonucleotide for detection of SNP TSC0000757
ctaaaatttctct

SEQ ID NO: 1943 - DNA, 13 bp, Artificial Sequence
  Oligonucleotide for detection of SNP TSC0000760
tgaaatgtattgt

SEQ ID NO: 1944 - DNA, 13 bp, Artificial Sequence
  Oligonucleotide for detection of SNP TSC0000760
acaatacatttca

SEQ ID NO: 1945 - DNA, 13 bp, Artificial Sequence
  Oligonucleotide for detection of SNP TSC0000760
tgaaatatattgt

SEQ ID NO: 1946 - DNA, 13 bp, Artificial Sequence
  Oligonucleotide for detection of SNP TSC0000760
acaatatatttca

SEQ ID NO: 1947 - DNA, 13 bp, Artificial Sequence
  Oligonucleotide for detection of SNP TSC0000762
aaagggatatata

SEQ ID NO: 1948 - DNA, 13 bp, Artificial Sequence
  Oligonucleotide for detection of SNP TSC0000762
tatatatcccttt

SEQ ID NO: 1949 - DNA, 13 bp, Artificial Sequence
  Oligonucleotide for detection of SNP TSC0000762
aaaggggtatata

SEQ ID NO: 1950 - DNA, 13 bp, Artificial Sequence
  Oligonucleotide for detection of SNP TSC0000762
tatataccccttt

SEQ ID NO: 1951 - DNA, 13 bp, Artificial Sequence
  Oligonucleotide for detection of SNP TSC0000769
ggattttaggttt

SEQ ID NO: 1952 - DNA, 13 bp, Artificial Sequence
  Oligonucleotide for detection of SNP TSC0000769
aaacctaaaatcc

SEQ ID NO: 1953 - DNA, 13 bp, Artificial Sequence
  Oligonucleotide for detection of SNP TSC0000769
ggatttgaggttt

SEQ ID NO: 1954 - DNA, 13 bp, Artificial Sequence
  Oligonucleotide for detection of SNP TSC0000769
aaacctcaaatcc

SEQ ID NO: 1955 - DNA, 13 bp, Artificial Sequence
  Oligonucleotide for detection of SNP TSC0000769
agatttgaagtty

SEQ ID NO: 1956 - DNA, 13 bp, Artificial Sequence
  Oligonucleotide for detection of SNP TSC0000769
raacttcaaatct

SEQ ID NO: 1957 - DNA, 13 bp, Artificial Sequence
  Oligonucleotide for detection of SNP TSC0000769
agattttaagtty

SEQ ID NO: 1958 - DNA, 13 bp, Artificial Sequence
  Oligonucleotide for detection of SNP TSC0000769
raacttaaaatct

SEQ ID NO: 1959 - DNA, 13 bp, Artificial Sequence
  Oligonucleotide for detection of SNP TSC0000772
taaaaggaatagt

SEQ ID NO: 1960 - DNA, 13 bp, Artificial Sequence
  Oligonucleotide for detection of SNP TSC0000772
actattcctttta

SEQ ID NO: 1961 - DNA, 13 bp, Artificial Sequence
  Oligonucleotide for detection of SNP TSC0000772
taaaagaaatagt

SEQ ID NO: 1962 - DNA, 13 bp, Artificial Sequence
  Oligonucleotide for detection of SNP TSC0000772
actatttctttta

SEQ ID NO: 1963 - DNA, 13 bp, Artificial Sequence
  Oligonucleotide for detection of SNP TSC0000784
tattatagttttt

SEQ ID NO: 1964 - DNA, 13 bp, Artificial Sequence
  Oligonucleotide for detection of SNP TSC0000784
aaaaactataata

SEQ ID NO: 1965 - DNA, 13 bp, Artificial Sequence
  Oligonucleotide for detection of SNP TSC0000784
tattatggttttt

SEQ ID NO: 1966 - DNA, 13 bp, Artificial Sequence
  Oligonucleotide for detection of SNP TSC0000784
aaaaaccataata

SEQ ID NO: 1967 - DNA, 13 bp, Artificial Sequence
  Oligonucleotide for detection of SNP TSC0000785
tgatagagttagg

SEQ ID NO: 1968 - DNA, 13 bp, Artificial Sequence
  Oligonucleotide for detection of SNP TSC0000785
cctaactctatca

SEQ ID NO: 1969 - DNA, 13 bp, Artificial Sequence
  Oligonucleotide for detection of SNP TSC0000785
tgatagggttagg

SEQ ID NO: 1970 - DNA, 13 bp, Artificial Sequence
  Oligonucleotide for detection of SNP TSC0000785
cctaaccctatca

SEQ ID NO: 1971 - DNA, 13 bp, Artificial Sequence
  Oligonucleotide for detection of SNP TSC0000794
ataaatagagaaa

SEQ ID NO: 1972 - DNA, 13 bp, Artificial Sequence
  Oligonucleotide for detection of SNP TSC0000794
tttctctatttat

SEQ ID NO: 1973 - DNA, 13 bp, Artificial Sequence
  Oligonucleotide for detection of SNP TSC0000794
ataaatggagaaa

SEQ ID NO: 1974 - DNA, 13 bp, Artificial Sequence
  Oligonucleotide for detection of SNP TSC0000794
tttctccatttat

SEQ ID NO: 1975 - DNA, 13 bp, Artificial Sequence
  Oligonucleotide for detection of SNP TSC0000794
ataaacggagaaa

SEQ ID NO: 1976 - DNA, 13 bp, Artificial Sequence
  Oligonucleotide for detection of SNP TSC0000794
tttctccgtttat

SEQ ID NO: 1977 - DNA, 13 bp, Artificial Sequence
  Oligonucleotide for detection of SNP TSC0000794
tttttttgtttat

SEQ ID NO: 1978 - DNA, 13 bp, Artificial Sequence
  Oligonucleotide for detection of SNP TSC0000794
ataaacaaaaaaa

SEQ ID NO: 1979 - DNA, 13 bp, Artificial Sequence
  Oligonucleotide for detection of SNP TSC0000794
ttttttcgtttat

SEQ ID NO: 1980 - DNA, 13 bp, Artificial Sequence
  Oligonucleotide for detection of SNP TSC0000794
ataaacgaaaaaa

SEQ ID NO: 1981 - DNA, 13 bp, Artificial Sequence
  Oligonucleotide for detection of SNP TSC0000795
tatttagaaggta

SEQ ID NO: 1982 - DNA, 13 bp, Artificial Sequence
  Oligonucleotide for detection of SNP TSC0000795
taccttctaaata

SEQ ID NO: 1983 - DNA, 13 bp, Artificial Sequence
  Oligonucleotide for detection of SNP TSC0000795
tatttaaaaggta

SEQ ID NO: 1984 - DNA, 13 bp, Artificial Sequence
  Oligonucleotide for detection of SNP TSC0000795
taccttttaaata

SEQ ID NO: 1985 - DNA, 13 bp, Artificial Sequence
  Oligonucleotide for detection of SNP TSC0000796
gagggagtgttgy

SEQ ID NO: 1986 - DNA, 13 bp, Artificial Sequence
  Oligonucleotide for detection of SNP TSC0000796
rcaacactccctc

SEQ ID NO: 1987 - DNA, 13 bp, Artificial Sequence
  Oligonucleotide for detection of SNP TSC0000796
gagggaatgttgy

SEQ ID NO: 1988 - DNA, 13 bp, Artificial Sequence
  Oligonucleotide for detection of SNP TSC0000796
rcaacattccctc

SEQ ID NO: 1989 - DNA, 13 bp, Artificial Sequence
  Oligonucleotide for detection of SNP TSC0000799
ttataaatatgtt

SEQ ID NO: 1990 - DNA, 13 bp, Artificial Sequence
  Oligonucleotide for detection of SNP TSC0000799
aacatatttataa

SEQ ID NO: 1991 - DNA, 13 bp, Artificial Sequence
  Oligonucleotide for detection of SNP TSC0000799
ttataagtatgtt

SEQ ID NO: 1992 - DNA, 13 bp, Artificial Sequence
  Oligonucleotide for detection of SNP TSC0000799
aacatacttataa

SEQ ID NO: 1993 - DNA, 13 bp, Artificial Sequence
  Oligonucleotide for detection of SNP TSC0000800
gaaaaaattttgt

SEQ ID NO: 1994 - DNA, 13 bp, Artificial Sequence
  Oligonucleotide for detection of SNP TSC0000800
acaaaattttttc

SEQ ID NO: 1995 - DNA, 13 bp, Artificial Sequence
  Oligonucleotide for detection of SNP TSC0000800
gaaaaagttttgt

SEQ ID NO: 1996 - DNA, 13 bp, Artificial Sequence
  Oligonucleotide for detection of SNP TSC0000800
acaaaactttttc

SEQ ID NO: 1997 - DNA, 13 bp, Artificial Sequence
  Oligonucleotide for detection of SNP TSC0000809
taaatagtagata

SEQ ID NO: 1998 - DNA, 13 bp, Artificial Sequence
  Oligonucleotide for detection of SNP TSC0000809
tatctactattta

SEQ ID NO: 1999 - DNA, 13 bp, Artificial Sequence
  Oligonucleotide for detection of SNP TSC0000809
taaataatagata

SEQ ID NO: 2000 - DNA, 13 bp, Artificial Sequence
  Oligonucleotide for detection of SNP TSC0000809
tatctattattta

SEQ ID NO: 2001 - DNA, 13 bp, Artificial Sequence
  Oligonucleotide for detection of SNP TSC0000810
atgatatgtttat

SEQ ID NO: 2002 - DNA, 13 bp, Artificial Sequence
  Oligonucleotide for detection of SNP TSC0000810
ataaacatatcat

SEQ ID NO: 2003 - DNA, 13 bp, Artificial Sequence
  Oligonucleotide for detection of SNP TSC0000810
atgatacgtttat

SEQ ID NO: 2004 - DNA, 13 bp, Artificial Sequence
  Oligonucleotide for detection of SNP TSC0000810
ataaacgtatcat

SEQ ID NO: 2005 - DNA, 13 bp, Artificial Sequence
  Oligonucleotide for detection of SNP TSC0000810
atgaatgtattat

SEQ ID NO: 2006 - DNA, 13 bp, Artificial Sequence
  Oligonucleotide for detection of SNP TSC0000810
ataatacattcat

SEQ ID NO: 2007 - DNA, 13 bp, Artificial Sequence
  Oligonucleotide for detection of SNP TSC0000810
atgaatatattat

SEQ ID NO: 2008 - DNA, 13 bp, Artificial Sequence
  Oligonucleotide for detection of SNP TSC0000810
ataatatattcat

SEQ ID NO: 2009 - DNA, 13 bp, Artificial Sequence
  Oligonucleotide for detection of SNP TSC0000810
atgaacgtattat

SEQ ID NO: 2010 - DNA, 13 bp, Artificial Sequence
  Oligonucleotide for detection of SNP TSC0000810
ataatacgttcat

SEQ ID NO: 2011 - DNA, 13 bp, Artificial Sequence
  Oligonucleotide for detection of SNP TSC0000811
tttggagaatgtg

SEQ ID NO: 2012 - DNA, 13 bp, Artificial Sequence
  Oligonucleotide for detection of SNP TSC0000811
cacattctccaaa

SEQ ID NO: 2013 - DNA, 13 bp, Artificial Sequence
  Oligonucleotide for detection of SNP TSC0000811
tttggaaaatgtg

SEQ ID NO: 2014 - DNA, 13 bp, Artificial Sequence
  Oligonucleotide for detection of SNP TSC0000811
cacattttccaaa

SEQ ID NO: 2015 - DNA, 13 bp, Artificial Sequence
  Oligonucleotide for detection of SNP TSC0000815
attagaaaatttg

SEQ ID NO: 2016 - DNA, 13 bp, Artificial Sequence
  Oligonucleotide for detection of SNP TSC0000815
caaattttctaat

SEQ ID NO: 2017 - DNA, 13 bp, Artificial Sequence
  Oligonucleotide for detection of SNP TSC0000815
attagataatttg

SEQ ID NO: 2018 - DNA, 13 bp, Artificial Sequence
  Oligonucleotide for detection of SNP TSC0000815
caaattatctaat

SEQ ID NO: 2019 - DNA, 13 bp, Artificial Sequence
  Oligonucleotide for detection of SNP TSC0000815
attagaaaattcg

SEQ ID NO: 2020 - DNA, 13 bp, Artificial Sequence
  Oligonucleotide for detection of SNP TSC0000815
cgaattttctaat

SEQ ID NO: 2021 - DNA, 13 bp, Artificial Sequence
  Oligonucleotide for detection of SNP TSC0000815
attagataattcg

SEQ ID NO: 2022 - DNA, 13 bp, Artificial Sequence
  Oligonucleotide for detection of SNP TSC0000815
cgaattatctaat

SEQ ID NO: 2023 - DNA, 13 bp, Artificial Sequence
  Oligonucleotide for detection of SNP TSC0000815
tgggttttttaat

SEQ ID NO: 2024 - DNA, 13 bp, Artificial Sequence
  Oligonucleotide for detection of SNP TSC0000815
attaaaaaaccca

SEQ ID NO: 2025 - DNA, 13 bp, Artificial Sequence
  Oligonucleotide for detection of SNP TSC0000815
tgggttgtttaat

SEQ ID NO: 2026 - DNA, 13 bp, Artificial Sequence
  Oligonucleotide for detection of SNP TSC0000815
attaaacaaccca

SEQ ID NO: 2027 - DNA, 13 bp, Artificial Sequence
  Oligonucleotide for detection of SNP TSC0000815
cgggttttttaat

SEQ ID NO: 2028 - DNA, 13 bp, Artificial Sequence
  Oligonucleotide for detection of SNP TSC0000815
attaaaaaacccg

SEQ ID NO: 2029 - DNA, 13 bp, Artificial Sequence
  Oligonucleotide for detection of SNP TSC0000815
cgggttgtttaat

SEQ ID NO: 2030 - DNA, 13 bp, Artificial Sequence
  Oligonucleotide for detection of SNP TSC0000815
attaaacaacccg

SEQ ID NO: 2031 - DNA, 13 bp, Artificial Sequence
  Oligonucleotide for detection of SNP TSC0000816
attttaggaataa

SEQ ID NO: 2032 - DNA, 13 bp, Artificial Sequence
  Oligonucleotide for detection of SNP TSC0000816
ttattcctaaaat

SEQ ID NO: 2033 - DNA, 13 bp, Artificial Sequence
  Oligonucleotide for detection of SNP TSC0000816
attttaagaataa

SEQ ID NO: 2034 - DNA, 13 bp, Artificial Sequence
  Oligonucleotide for detection of SNP TSC0000816
ttattcttaaaat

SEQ ID NO: 2035 - DNA, 13 bp, Artificial Sequence
  Oligonucleotide for detection of SNP TSC0000817
ttttttatagata

SEQ ID NO: 2036 - DNA, 13 bp, Artificial Sequence
  Oligonucleotide for detection of SNP TSC0000817
tatctataaaaaa

SEQ ID NO: 2037 - DNA, 13 bp, Artificial Sequence
  Oligonucleotide for detection of SNP TSC0000817
ttttttgtagata

SEQ ID NO: 2038 - DNA, 13 bp, Artificial Sequence
  Oligonucleotide for detection of SNP TSC0000817
tatctacaaaaaa

SEQ ID NO: 2039 - DNA, 13 bp, Artificial Sequence
  Oligonucleotide for detection of SNP TSC0000818
taaaataggattt

SEQ ID NO: 2040 - DNA, 13 bp, Artificial Sequence
  Oligonucleotide for detection of SNP TSC0000818
aaatcctatttta

SEQ ID NO: 2041 - DNA, 13 bp, Artificial Sequence
  Oligonucleotide for detection of SNP TSC0000818
taaaatgggattt

SEQ ID NO: 2042 - DNA, 13 bp, Artificial Sequence
  Oligonucleotide for detection of SNP TSC0000818
aaatcccatttta

SEQ ID NO: 2043 - DNA, 13 bp, Artificial Sequence
  Oligonucleotide for detection of SNP TSC0000818
taaaacgggattt

SEQ ID NO: 2044 - DNA, 13 bp, Artificial Sequence
  Oligonucleotide for detection of SNP TSC0000818
aaatcccgtttta

SEQ ID NO: 2045 - DNA, 13 bp, Artificial Sequence
  Oligonucleotide for detection of SNP TSC0000818
agattttgttttg

SEQ ID NO: 2046 - DNA, 13 bp, Artificial Sequence
  Oligonucleotide for detection of SNP TSC0000818
caaaacaaaatct

SEQ ID NO: 2047 - DNA, 13 bp, Artificial Sequence
  Oligonucleotide for detection of SNP TSC0000818
agatttcgttttg

SEQ ID NO: 2048 - DNA, 13 bp, Artificial Sequence
  Oligonucleotide for detection of SNP TSC0000818
caaaacgaaatct

SEQ ID NO: 2049 - DNA, 13 bp, Artificial Sequence
  Oligonucleotide for detection of SNP TSC0000825
atgtttagtattg

SEQ ID NO: 2050 - DNA, 13 bp, Artificial Sequence
  Oligonucleotide for detection of SNP TSC0000825
caatactaaacat

SEQ ID NO: 2051 - DNA, 13 bp, Artificial Sequence
  Oligonucleotide for detection of SNP TSC0000825
atgttttgtattg

SEQ ID NO: 2052 - DNA, 13 bp, Artificial Sequence
  Oligonucleotide for detection of SNP TSC0000825
caatacaaaacat

SEQ ID NO: 2053 - DNA, 13 bp, Artificial Sequence
  Oligonucleotide for detection of SNP TSC0000825
tagtattggatat

SEQ ID NO: 2054 - DNA, 13 bp, Artificial Sequence
  Oligonucleotide for detection of SNP TSC0000825
atatccaatacta

SEQ ID NO: 2055 - DNA, 13 bp, Artificial Sequence
  Oligonucleotide for detection of SNP TSC0000825
tagtataggatat

SEQ ID NO: 2056 - DNA, 13 bp, Artificial Sequence
  Oligonucleotide for detection of SNP TSC0000825
atatcctatacta

SEQ ID NO: 2057 - DNA, 13 bp, Artificial Sequence
  Oligonucleotide for detection of SNP TSC0000828
gtatatgtgtgta

SEQ ID NO: 2058 - DNA, 13 bp, Artificial Sequence
  Oligonucleotide for detection of SNP TSC0000828
tacacacatatac

SEQ ID NO: 2059 - DNA, 13 bp, Artificial Sequence
  Oligonucleotide for detection of SNP TSC0000828
gtatatatgtgta

SEQ ID NO: 2060 - DNA, 13 bp, Artificial Sequence
  Oligonucleotide for detection of SNP TSC0000828
tacacatatatac

SEQ ID NO: 2061 - DNA, 13 bp, Artificial Sequence
  Oligonucleotide for detection of SNP TSC0000832
aatatgaaaataa

SEQ ID NO: 2062 - DNA, 13 bp, Artificial Sequence
  Oligonucleotide for detection of SNP TSC0000832
ttattttcatatt

SEQ ID NO: 2063 - DNA, 13 bp, Artificial Sequence
  Oligonucleotide for detection of SNP TSC0000832
aatatggaaataa

SEQ ID NO: 2064 - DNA, 13 bp, Artificial Sequence
  Oligonucleotide for detection of SNP TSC0000832
ttatttccatatt

SEQ ID NO: 2065 - DNA, 13 bp, Artificial Sequence
  Oligonucleotide for detection of SNP TSC0000834
tttgttttagttg

SEQ ID NO: 2066 - DNA, 13 bp, Artificial Sequence
  Oligonucleotide for detection of SNP TSC0000834
caactaaaacaaa

SEQ ID NO: 2067 - DNA, 13 bp, Artificial Sequence
  Oligonucleotide for detection of SNP TSC0000834
tttgttgtagttg

SEQ ID NO: 2068 - DNA, 13 bp, Artificial Sequence
  Oligonucleotide for detection of SNP TSC0000834
caactacaacaaa

SEQ ID NO: 2069 - DNA, 13 bp, Artificial Sequence
  Oligonucleotide for detection of SNP TSC0000834
tagttggagtaag

SEQ ID NO: 2070 - DNA, 13 bp, Artificial Sequence
  Oligonucleotide for detection of SNP TSC0000834
cttactccaacta

SEQ ID NO: 2071 - DNA, 13 bp, Artificial Sequence
  Oligonucleotide for detection of SNP TSC0000834
tagttgtagtaag

SEQ ID NO: 2072 - DNA, 13 bp, Artificial Sequence
  Oligonucleotide for detection of SNP TSC0000834
cttactacaacta

SEQ ID NO: 2073 - DNA, 13 bp, Artificial Sequence
  Oligonucleotide for detection of SNP TSC0000840
gggggggaagggg

SEQ ID NO: 2074 - DNA, 13 bp, Artificial Sequence
  Oligonucleotide for detection of SNP TSC0000840
ccccttccccccc

SEQ ID NO: 2075 - DNA, 13 bp, Artificial Sequence
  Oligonucleotide for detection of SNP TSC0000840
ggggggaaagggg

SEQ ID NO: 2076 - DNA, 13 bp, Artificial Sequence
  Oligonucleotide for detection of SNP TSC0000840
cccctttcccccc

SEQ ID NO: 2077 - DNA, 13 bp, Artificial Sequence
  Oligonucleotide for detection of SNP TSC0000850
ttattttgtatta

SEQ ID NO: 2078 - DNA, 13 bp, Artificial Sequence
  Oligonucleotide for detection of SNP TSC0000850
taatacaaaataa

SEQ ID NO: 2079 - DNA, 13 bp, Artificial Sequence
  Oligonucleotide for detection of SNP TSC0000850
ttatttcgtatta

SEQ ID NO: 2080 - DNA, 13 bp, Artificial Sequence
  Oligonucleotide for detection of SNP TSC0000850
taatacgaaataa

SEQ ID NO: 2081 - DNA, 13 bp, Artificial Sequence
  Oligonucleotide for detection of SNP TSC0000850
tgatgtgaagtaa

SEQ ID NO: 2082 - DNA, 13 bp, Artificial Sequence
  Oligonucleotide for detection of SNP TSC0000850
ttacttcacatca

SEQ ID NO: 2083 - DNA, 13 bp, Artificial Sequence
  Oligonucleotide for detection of SNP TSC0000850
tgatgtaaagtaa

SEQ ID NO: 2084 - DNA, 13 bp, Artificial Sequence
  Oligonucleotide for detection of SNP TSC0000850
ttactttacatca

SEQ ID NO: 2085 - DNA, 13 bp, Artificial Sequence
  Oligonucleotide for detection of SNP TSC0000850
tgatgcgaagtaa

SEQ ID NO: 2086 - DNA, 13 bp, Artificial Sequence
  Oligonucleotide for detection of SNP TSC0000850
ttacttcgcatca

SEQ ID NO: 2087 - DNA, 13 bp, Artificial Sequence
  Oligonucleotide for detection of SNP TSC0000853
gtttttgatattt

SEQ ID NO: 2088 - DNA, 13 bp, Artificial Sequence
  Oligonucleotide for detection of SNP TSC0000853
aaatatcaaaaac

SEQ ID NO: 2089 - DNA, 13 bp, Artificial Sequence
  Oligonucleotide for detection of SNP TSC0000853
gtttttaatattt

SEQ ID NO: 2090 - DNA, 13 bp, Artificial Sequence
  Oligonucleotide for detection of SNP TSC0000853
aaatattaaaaac

SEQ ID NO: 2091 - DNA, 13 bp, Artificial Sequence
  Oligonucleotide for detection of SNP TSC0000854
ggatattgagaga

SEQ ID NO: 2092 - DNA, 13 bp, Artificial Sequence
  Oligonucleotide for detection of SNP TSC0000854
tctctcaatatcc

SEQ ID NO: 2093 - DNA, 13 bp, Artificial Sequence
  Oligonucleotide for detection of SNP TSC0000854
ggatatcgagaga

SEQ ID NO: 2094 - DNA, 13 bp, Artificial Sequence
  Oligonucleotide for detection of SNP TSC0000854
tctctcgatatcc

SEQ ID NO: 2095 - DNA, 13 bp, Artificial Sequence
  Oligonucleotide for detection of SNP TSC0000854
ttttttgatgtty

SEQ ID NO: 2096 - DNA, 13 bp, Artificial Sequence
  Oligonucleotide for detection of SNP TSC0000854
raacatcaaaaaa

SEQ ID NO: 2097 - DNA, 13 bp, Artificial Sequence
  Oligonucleotide for detection of SNP TSC0000854
ttttttaatgtty

SEQ ID NO: 2098 - DNA, 13 bp, Artificial Sequence
  Oligonucleotide for detection of SNP TSC0000854
raacattaaaaaa

SEQ ID NO: 2099 - DNA, 13 bp, Artificial Sequence
  Oligonucleotide for detection of SNP TSC0000854
tttttcgatgtty

SEQ ID NO: 2100 - DNA, 13 bp, Artificial Sequence
  Oligonucleotide for detection of SNP TSC0000854
raacatcgaaaaa

SEQ ID NO: 2101 - DNA, 13 bp, Artificial Sequence
  Oligonucleotide for detection of SNP TSC0000855
taatttattgtga

SEQ ID NO: 2102 - DNA, 13 bp, Artificial Sequence
  Oligonucleotide for detection of SNP TSC0000855
tcacaataaatta

SEQ ID NO: 2103 - DNA, 13 bp, Artificial Sequence
  Oligonucleotide for detection of SNP TSC0000855
taatttgttgtga

SEQ ID NO: 2104 - DNA, 13 bp, Artificial Sequence
  Oligonucleotide for detection of SNP TSC0000855
tcacaacaaatta

SEQ ID NO: 2105 - DNA, 13 bp, Artificial Sequence
  Oligonucleotide for detection of SNP TSC0000855
taattcgttgtga

SEQ ID NO: 2106 - DNA, 13 bp, Artificial Sequence
  Oligonucleotide for detection of SNP TSC0000855
tcacaacgaatta

SEQ ID NO: 2107 - DNA, 13 bp, Artificial Sequence
  Oligonucleotide for detection of SNP TSC0000855
ttataatggattg

SEQ ID NO: 2108 - DNA, 13 bp, Artificial Sequence
  Oligonucleotide for detection of SNP TSC0000855
caatccattataa

SEQ ID NO: 2109 - DNA, 13 bp, Artificial Sequence
  Oligonucleotide for detection of SNP TSC0000855
ttataacggattg

SEQ ID NO: 2110 - DNA, 13 bp, Artificial Sequence
  Oligonucleotide for detection of SNP TSC0000855
caatccgttataa

SEQ ID NO: 2111 - DNA, 13 bp, Artificial Sequence
  Oligonucleotide for detection of SNP TSC0000857
aatataagagtty

SEQ ID NO: 2112 - DNA, 13 bp, Artificial Sequence
  Oligonucleotide for detection of SNP TSC0000857
raactcttatatt

SEQ ID NO: 2113 - DNA, 13 bp, Artificial Sequence
  Oligonucleotide for detection of SNP TSC0000857
aatataggagtty

SEQ ID NO: 2114 - DNA, 13 bp, Artificial Sequence
  Oligonucleotide for detection of SNP TSC0000857
raactcctatatt

SEQ ID NO: 2115 - DNA, 13 bp, Artificial Sequence
  Oligonucleotide for detection of SNP TSC0000858
ataaatttgttag

SEQ ID NO: 2116 - DNA, 13 bp, Artificial Sequence
  Oligonucleotide for detection of SNP TSC0000858
ctaacaaatttat

SEQ ID NO: 2117 - DNA, 13 bp, Artificial Sequence
  Oligonucleotide for detection of SNP TSC0000858
ataaatgtgttag

SEQ ID NO: 2118 - DNA, 13 bp, Artificial Sequence
  Oligonucleotide for detection of SNP TSC0000858
ctaacacatttat

SEQ ID NO: 2119 - DNA, 13 bp, Artificial Sequence
  Oligonucleotide for detection of SNP TSC0000858
ataaacgtgttag

SEQ ID NO: 2120 - DNA, 13 bp, Artificial Sequence
  Oligonucleotide for detection of SNP TSC0000858
ctaacacgtttat

SEQ ID NO: 2121 - DNA, 13 bp, Artificial Sequence
  Oligonucleotide for detection of SNP TSC0000858
ttaataggtttgt

SEQ ID NO: 2122 - DNA, 13 bp, Artificial Sequence
  Oligonucleotide for detection of SNP TSC0000858
acaaacctattaa

SEQ ID NO: 2123 - DNA, 13 bp, Artificial Sequence
  Oligonucleotide for detection of SNP TSC0000858
ttaatatgtttgt

SEQ ID NO: 2124 - DNA, 13 bp, Artificial Sequence
  Oligonucleotide for detection of SNP TSC0000858
acaaacatattaa

SEQ ID NO: 2125 - DNA, 13 bp, Artificial Sequence
  Oligonucleotide for detection of SNP TSC0000858
ttaatacgtttgt

SEQ ID NO: 2126 - DNA, 13 bp, Artificial Sequence
  Oligonucleotide for detection of SNP TSC0000858
acaaacgtattaa

SEQ ID NO: 2127 - DNA, 13 bp, Artificial Sequence
  Oligonucleotide for detection of SNP TSC0000859
gggtttatttagt

SEQ ID NO: 2128 - DNA, 13 bp, Artificial Sequence
  Oligonucleotide for detection of SNP TSC0000859
actaaataaaccc

SEQ ID NO: 2129 - DNA, 13 bp, Artificial Sequence
  Oligonucleotide for detection of SNP TSC0000859
gggtttgtttagt

SEQ ID NO: 2130 - DNA, 13 bp, Artificial Sequence
  Oligonucleotide for detection of SNP TSC0000859
actaaacaaaccc

SEQ ID NO: 2131 - DNA, 13 bp, Artificial Sequence
  Oligonucleotide for detection of SNP TSC0000859
gggttcgtttagt

SEQ ID NO: 2132 - DNA, 13 bp, Artificial Sequence
  Oligonucleotide for detection of SNP TSC0000859
actaaacgaaccc

SEQ ID NO: 2133 - DNA, 13 bp, Artificial Sequence
  Oligonucleotide for detection of SNP TSC0000859
attgaatgaatty

SEQ ID NO: 2134 - DNA, 13 bp, Artificial Sequence
  Oligonucleotide for detection of SNP TSC0000859
raattcattcaat

SEQ ID NO: 2135 - DNA, 13 bp, Artificial Sequence
  Oligonucleotide for detection of SNP TSC0000859
attgaacgaatty

SEQ ID NO: 2136 - DNA, 13 bp, Artificial Sequence
  Oligonucleotide for detection of SNP TSC0000859
raattcgttcaat

SEQ ID NO: 2137 - DNA, 13 bp, Artificial Sequence
  Oligonucleotide for detection of SNP TSC0000860
gaaaaggataggy

SEQ ID NO: 2138 - DNA, 13 bp, Artificial Sequence
  Oligonucleotide for detection of SNP TSC0000860
rcctatccttttc

SEQ ID NO: 2139 - DNA, 13 bp, Artificial Sequence
  Oligonucleotide for detection of SNP TSC0000860
gaaaagaataggy

SEQ ID NO: 2140 - DNA, 13 bp, Artificial Sequence
  Oligonucleotide for detection of SNP TSC0000860
rcctattcttttc

SEQ ID NO: 2141 - DNA, 13 bp, Artificial Sequence
  Oligonucleotide for detection of SNP TSC0000863
tattataaagttt

SEQ ID NO: 2142 - DNA, 13 bp, Artificial Sequence
  Oligonucleotide for detection of SNP TSC0000863
aaactttataata

SEQ ID NO: 2143 - DNA, 13 bp, Artificial Sequence
  Oligonucleotide for detection of SNP TSC0000863
tattatgaagttt

SEQ ID NO: 2144 - DNA, 13 bp, Artificial Sequence
  Oligonucleotide for detection of SNP TSC0000863
aaacttcataata

SEQ ID NO: 2145 - DNA, 13 bp, Artificial Sequence
  Oligonucleotide for detection of SNP TSC0000863
tattacgaagttt

SEQ ID NO: 2146 - DNA, 13 bp, Artificial Sequence
  Oligonucleotide for detection of SNP TSC0000863
aaacttcgtaata

SEQ ID NO: 2147 - DNA, 13 bp, Artificial Sequence
  Oligonucleotide for detection of SNP TSC0000863
aaattttgtaatg

SEQ ID NO: 2148 - DNA, 13 bp, Artificial Sequence
  Oligonucleotide for detection of SNP TSC0000863
cattacaaaattt

SEQ ID NO: 2149 - DNA, 13 bp, Artificial Sequence
  Oligonucleotide for detection of SNP TSC0000863
aaatttcgtaatg

SEQ ID NO: 2150 - DNA, 13 bp, Artificial Sequence
  Oligonucleotide for detection of SNP TSC0000863
cattacgaaattt

SEQ ID NO: 2151 - DNA, 13 bp, Artificial Sequence
  Oligonucleotide for detection of SNP TSC0000864
ttattttgttatt

SEQ ID NO: 2152 - DNA, 13 bp, Artificial Sequence
  Oligonucleotide for detection of SNP TSC0000864
aataacaaaataa

SEQ ID NO: 2153 - DNA, 13 bp, Artificial Sequence
  Oligonucleotide for detection of SNP TSC0000864
ttatttcgttatt

SEQ ID NO: 2154 - DNA, 13 bp, Artificial Sequence
  Oligonucleotide for detection of SNP TSC0000864
aataacgaaataa

SEQ ID NO: 2155 - DNA, 13 bp, Artificial Sequence
  Oligonucleotide for detection of SNP TSC0000864
agtagtgaagtga

SEQ ID NO: 2156 - DNA, 13 bp, Artificial Sequence
  Oligonucleotide for detection of SNP TSC0000864
tcacttcactact

SEQ ID NO: 2157 - DNA, 13 bp, Artificial Sequence
  Oligonucleotide for detection of SNP TSC0000864
agtagtaaagtga

SEQ ID NO: 2158 - DNA, 13 bp, Artificial Sequence
  Oligonucleotide for detection of SNP TSC0000864
tcactttactact

SEQ ID NO: 2159 - DNA, 13 bp, Artificial Sequence
  Oligonucleotide for detection of SNP TSC0000864
agtagcgaagtga

SEQ ID NO: 2160 - DNA, 13 bp, Artificial Sequence
  Oligonucleotide for detection of SNP TSC0000864
tcacttcgctact

SEQ ID NO: 2161 - DNA, 13 bp, Artificial Sequence
  Oligonucleotide for detection of SNP TSC0000865
ttgggaaagtatt

SEQ ID NO: 2162 - DNA, 13 bp, Artificial Sequence
  Oligonucleotide for detection of SNP TSC0000865
aatactttcccaa

SEQ ID NO: 2163 - DNA, 13 bp, Artificial Sequence
  Oligonucleotide for detection of SNP TSC0000865
ttgggagagtatt

SEQ ID NO: 2164 - DNA, 13 bp, Artificial Sequence
  Oligonucleotide for detection of SNP TSC0000865
aatactctcccaa

SEQ ID NO: 2165 - DNA, 13 bp, Artificial Sequence
  Oligonucleotide for detection of SNP TSC0000870
atttaaatatata

SEQ ID NO: 2166 - DNA, 13 bp, Artificial Sequence
  Oligonucleotide for detection of SNP TSC0000870
tatatatttaaat

SEQ ID NO: 2167 - DNA, 13 bp, Artificial Sequence
  Oligonucleotide for detection of SNP TSC0000870
atttaagtatata

SEQ ID NO: 2168 - DNA, 13 bp, Artificial Sequence
  Oligonucleotide for detection of SNP TSC0000870
tatatacttaaat

SEQ ID NO: 2169 - DNA, 13 bp, Artificial Sequence
  Oligonucleotide for detection of SNP TSC0000872
tgaattattatay

SEQ ID NO: 2170 - DNA, 13 bp, Artificial Sequence
  Oligonucleotide for detection of SNP TSC0000872
rtataataattca

SEQ ID NO: 2171 - DNA, 13 bp, Artificial Sequence
  Oligonucleotide for detection of SNP TSC0000872
tgaattgttatay

SEQ ID NO: 2172 - DNA, 13 bp, Artificial Sequence
  Oligonucleotide for detection of SNP TSC0000872
rtataacaattca

SEQ ID NO: 2173 - DNA, 13 bp, Artificial Sequence
  Oligonucleotide for detection of SNP TSC0000872
tgaatcgttatay

SEQ ID NO: 2174 - DNA, 13 bp, Artificial Sequence
  Oligonucleotide for detection of SNP TSC0000872
rtataacgattca

SEQ ID NO: 2175 - DNA, 13 bp, Artificial Sequence
  Oligonucleotide for detection of SNP TSC0000872
gtataatggttta

SEQ ID NO: 2176 - DNA, 13 bp, Artificial Sequence
  Oligonucleotide for detection of SNP TSC0000872
taaaccattatac

SEQ ID NO: 2177 - DNA, 13 bp, Artificial Sequence
  Oligonucleotide for detection of SNP TSC0000872
gtataacggttta

SEQ ID NO: 2178 - DNA, 13 bp, Artificial Sequence
  Oligonucleotide for detection of SNP TSC0000872
taaaccgttatac

SEQ ID NO: 2179 - DNA, 13 bp, Artificial Sequence
  Oligonucleotide for detection of SNP TSC0000873
tattatgaaaggt

SEQ ID NO: 2180 - DNA, 13 bp, Artificial Sequence
  Oligonucleotide for detection of SNP TSC0000873
acctttcataata

SEQ ID NO: 2181 - DNA, 13 bp, Artificial Sequence
  Oligonucleotide for detection of SNP TSC0000873
tattataaaaggt

SEQ ID NO: 2182 - DNA, 13 bp, Artificial Sequence
  Oligonucleotide for detection of SNP TSC0000873
accttttataata

SEQ ID NO: 2183 - DNA, 13 bp, Artificial Sequence
  Oligonucleotide for detection of SNP TSC0000874
ttatttgtattty

SEQ ID NO: 2184 - DNA, 13 bp, Artificial Sequence
  Oligonucleotide for detection of SNP TSC0000874
raaatacaaataa

SEQ ID NO: 2185 - DNA, 13 bp, Artificial Sequence
  Oligonucleotide for detection of SNP TSC0000874
ttatttttattty

SEQ ID NO: 2186 - DNA, 13 bp, Artificial Sequence
  Oligonucleotide for detection of SNP TSC0000874
raaataaaaataa

SEQ ID NO: 2187 - DNA, 13 bp, Artificial Sequence
  Oligonucleotide for detection of SNP TSC0000874
ttattcgtattty

SEQ ID NO: 2188 - DNA, 13 bp, Artificial Sequence
  Oligonucleotide for detection of SNP TSC0000874
raaatacgaataa

SEQ ID NO: 2189 - DNA, 13 bp, Artificial Sequence
  Oligonucleotide for detection of SNP TSC0000874
gaggtatgaatga

SEQ ID NO: 2190 - DNA, 13 bp, Artificial Sequence
  Oligonucleotide for detection of SNP TSC0000874
tcattcatacctc

SEQ ID NO: 2191 - DNA, 13 bp, Artificial Sequence
  Oligonucleotide for detection of SNP TSC0000874
gaggtaagaatga

SEQ ID NO: 2192 - DNA, 13 bp, Artificial Sequence
  Oligonucleotide for detection of SNP TSC0000874
tcattcttacctc

SEQ ID NO: 2193 - DNA, 13 bp, Artificial Sequence
  Oligonucleotide for detection of SNP TSC0000874
gaggtacgaatga

SEQ ID NO: 2194 - DNA, 13 bp, Artificial Sequence
  Oligonucleotide for detection of SNP TSC0000874
tcattcgtacctc

SEQ ID NO: 2195 - DNA, 13 bp, Artificial Sequence
  Oligonucleotide for detection of SNP TSC0000879
tatggggagattg

SEQ ID NO: 2196 - DNA, 13 bp, Artificial Sequence
  Oligonucleotide for detection of SNP TSC0000879
caatctccccata

SEQ ID NO: 2197 - DNA, 13 bp, Artificial Sequence
  Oligonucleotide for detection of SNP TSC0000879
tatgggaagattg

SEQ ID NO: 2198 - DNA, 13 bp, Artificial Sequence
  Oligonucleotide for detection of SNP TSC0000879
caatcttcccata

SEQ ID NO: 2199 - DNA, 13 bp, Artificial Sequence
  Oligonucleotide for detection of SNP TSC0000882
tagttagattttg

SEQ ID NO: 2200 - DNA, 13 bp, Artificial Sequence
  Oligonucleotide for detection of SNP TSC0000882
caaaatctaacta

SEQ ID NO: 2201 - DNA, 13 bp, Artificial Sequence
  Oligonucleotide for detection of SNP TSC0000882
tagttaaattttg

SEQ ID NO: 2202 - DNA, 13 bp, Artificial Sequence
  Oligonucleotide for detection of SNP TSC0000882
caaaatttaacta

SEQ ID NO: 2203 - DNA, 13 bp, Artificial Sequence
  Oligonucleotide for detection of SNP TSC0000890
gtagaaagaagay

SEQ ID NO: 2204 - DNA, 13 bp, Artificial Sequence
  Oligonucleotide for detection of SNP TSC0000890
rtcttctttctac

SEQ ID NO: 2205 - DNA, 13 bp, Artificial Sequence
  Oligonucleotide for detection of SNP TSC0000890
gtagaaggaagay

SEQ ID NO: 2206 - DNA, 13 bp, Artificial Sequence
  Oligonucleotide for detection of SNP TSC0000890
rtcttccttctac

SEQ ID NO: 2207 - DNA, 13 bp, Artificial Sequence
  Oligonucleotide for detection of SNP TSC0000891
tgtgttatattga

SEQ ID NO: 2208 - DNA, 13 bp, Artificial Sequence
  Oligonucleotide for detection of SNP TSC0000891
tcaatataacaca

SEQ ID NO: 2209 - DNA, 13 bp, Artificial Sequence
  Oligonucleotide for detection of SNP TSC0000891
tgtgttgtattga

SEQ ID NO: 2210 - DNA, 13 bp, Artificial Sequence
  Oligonucleotide for detection of SNP TSC0000891
tcaatacaacaca

SEQ ID NO: 2211 - DNA, 13 bp, Artificial Sequence
  Oligonucleotide for detection of SNP TSC0000891
tgcgttatattga

SEQ ID NO: 2212 - DNA, 13 bp, Artificial Sequence
  Oligonucleotide for detection of SNP TSC0000891
tcaatataacgca

SEQ ID NO: 2213 - DNA, 13 bp, Artificial Sequence
  Oligonucleotide for detection of SNP TSC0000891
tgcgttgtattga

SEQ ID NO: 2214 - DNA, 13 bp, Artificial Sequence
  Oligonucleotide for detection of SNP TSC0000891
tcaatacaacgca

SEQ ID NO: 2215 - DNA, 13 bp, Artificial Sequence
  Oligonucleotide for detection of SNP TSC0000895
gaaaatggtaaay

SEQ ID NO: 2216 - DNA, 13 bp, Artificial Sequence
  Oligonucleotide for detection of SNP TSC0000895
rtttaccattttc

SEQ ID NO: 2217 - DNA, 13 bp, Artificial Sequence
  Oligonucleotide for detection of SNP TSC0000895
gaaaatagtaaay

SEQ ID NO: 2218 - DNA, 13 bp, Artificial Sequence
  Oligonucleotide for detection of SNP TSC0000895
rtttactattttc

SEQ ID NO: 2219 - DNA, 13 bp, Artificial Sequence
  Oligonucleotide for detection of SNP TSC0000896
gagaggatatatt

SEQ ID NO: 2220 - DNA, 13 bp, Artificial Sequence
  Oligonucleotide for detection of SNP TSC0000896
aatatatcctctc

SEQ ID NO: 2221 - DNA, 13 bp, Artificial Sequence
  Oligonucleotide for detection of SNP TSC0000896
gagagggtatatt

SEQ ID NO: 2222 - DNA, 13 bp, Artificial Sequence
  Oligonucleotide for detection of SNP TSC0000896
aatataccctctc

SEQ ID NO: 2223 - DNA, 13 bp, Artificial Sequence
  Oligonucleotide for detection of SNP TSC0000897
agtataatgaaga

SEQ ID NO: 2224 - DNA, 13 bp, Artificial Sequence
  Oligonucleotide for detection of SNP TSC0000897
tcttcattatact

SEQ ID NO: 2225 - DNA, 13 bp, Artificial Sequence
  Oligonucleotide for detection of SNP TSC0000897
agtatagtgaaga

SEQ ID NO: 2226 - DNA, 13 bp, Artificial Sequence
  Oligonucleotide for detection of SNP TSC0000897
tcttcactatact

SEQ ID NO: 2227 - DNA, 13 bp, Artificial Sequence
  Oligonucleotide for detection of SNP TSC0000901
tgtttaggaaggt

SEQ ID NO: 2228 - DNA, 13 bp, Artificial Sequence
  Oligonucleotide for detection of SNP TSC0000901
accttcctaaaca

SEQ ID NO: 2229 - DNA, 13 bp, Artificial Sequence
  Oligonucleotide for detection of SNP TSC0000901
tgtttaagaaggt

SEQ ID NO: 2230 - DNA, 13 bp, Artificial Sequence
  Oligonucleotide for detection of SNP TSC0000901
accttcttaaaca

SEQ ID NO: 2231 - DNA, 13 bp, Artificial Sequence
  Oligonucleotide for detection of SNP TSC0000905
tagaggtgggggy

SEQ ID NO: 2232 - DNA, 13 bp, Artificial Sequence
  Oligonucleotide for detection of SNP TSC0000905
rcccccacctcta

SEQ ID NO: 2233 - DNA, 13 bp, Artificial Sequence
  Oligonucleotide for detection of SNP TSC0000905
tagaggggggggy

SEQ ID NO: 2234 - DNA, 13 bp, Artificial Sequence
  Oligonucleotide for detection of SNP TSC0000905
rcccccccctcta

SEQ ID NO: 2235 - DNA, 13 bp, Artificial Sequence
  Oligonucleotide for detection of SNP TSC0000905
tagaggcgggggy

SEQ ID NO: 2236 - DNA, 13 bp, Artificial Sequence
  Oligonucleotide for detection of SNP TSC0000905
rcccccgcctcta

SEQ ID NO: 2237 - DNA, 13 bp, Artificial Sequence
  Oligonucleotide for detection of SNP TSC0000905
gtttttgttttta

SEQ ID NO: 2238 - DNA, 13 bp, Artificial Sequence
  Oligonucleotide for detection of SNP TSC0000905
taaaaacaaaaac

SEQ ID NO: 2239 - DNA, 13 bp, Artificial Sequence
  Oligonucleotide for detection of SNP TSC0000905
gttttttttttta

SEQ ID NO: 2240 - DNA, 13 bp, Artificial Sequence
  Oligonucleotide for detection of SNP TSC0000905
taaaaaaaaaaac

SEQ ID NO: 2241 - DNA, 13 bp, Artificial Sequence
  Oligonucleotide for detection of SNP TSC0000905
gttttcgttttta

SEQ ID NO: 2242 - DNA, 13 bp, Artificial Sequence
  Oligonucleotide for detection of SNP TSC0000905
taaaaacgaaaac

SEQ ID NO: 2243 - DNA, 13 bp, Artificial Sequence
  Oligonucleotide for detection of SNP TSC0000906
taggggaattttg

SEQ ID NO: 2244 - DNA, 13 bp, Artificial Sequence
  Oligonucleotide for detection of SNP TSC0000906
caaaattccccta

SEQ ID NO: 2245 - DNA, 13 bp, Artificial Sequence
  Oligonucleotide for detection of SNP TSC0000906
tagggggattttg

SEQ ID NO: 2246 - DNA, 13 bp, Artificial Sequence
  Oligonucleotide for detection of SNP TSC0000906
caaaatcccccta

SEQ ID NO: 2247 - DNA, 13 bp, Artificial Sequence
  Oligonucleotide for detection of SNP TSC0000907
agttttaggtatg

SEQ ID NO: 2248 - DNA, 13 bp, Artificial Sequence
  Oligonucleotide for detection of SNP TSC0000907
catacctaaaact

SEQ ID NO: 2249 - DNA, 13 bp, Artificial Sequence
  Oligonucleotide for detection of SNP TSC0000907
agttttgggtatg

SEQ ID NO: 2250 - DNA, 13 bp, Artificial Sequence
  Oligonucleotide for detection of SNP TSC0000907
catacccaaaact

SEQ ID NO: 2251 - DNA, 13 bp, Artificial Sequence
  Oligonucleotide for detection of SNP TSC0000908
gggagaaagttgt

SEQ ID NO: 2252 - DNA, 13 bp, Artificial Sequence
  Oligonucleotide for detection of SNP TSC0000908
acaactttctccc

SEQ ID NO: 2253 - DNA, 13 bp, Artificial Sequence
  Oligonucleotide for detection of SNP TSC0000908
gggagagagttgt

SEQ ID NO: 2254 - DNA, 13 bp, Artificial Sequence
  Oligonucleotide for detection of SNP TSC0000908
acaactctctccc

SEQ ID NO: 2255 - DNA, 13 bp, Artificial Sequence
  Oligonucleotide for detection of SNP TSC0000913
tgatttgagagty

SEQ ID NO: 2256 - DNA, 13 bp, Artificial Sequence
  Oligonucleotide for detection of SNP TSC0000913
ractctcaaatca

SEQ ID NO: 2257 - DNA, 13 bp, Artificial Sequence
  Oligonucleotide for detection of SNP TSC0000913
tgatttaagagty

SEQ ID NO: 2258 - DNA, 13 bp, Artificial Sequence
  Oligonucleotide for detection of SNP TSC0000913
ractcttaaatca

SEQ ID NO: 2259 - DNA, 13 bp, Artificial Sequence
  Oligonucleotide for detection of SNP TSC0000914
tttattatattty

SEQ ID NO: 2260 - DNA, 13 bp, Artificial Sequence
  Oligonucleotide for detection of SNP TSC0000914
raaatataataaa

SEQ ID NO: 2261 - DNA, 13 bp, Artificial Sequence
  Oligonucleotide for detection of SNP TSC0000914
tttattgtattty

SEQ ID NO: 2262 - DNA, 13 bp, Artificial Sequence
  Oligonucleotide for detection of SNP TSC0000914
raaatacaataaa

SEQ ID NO: 2263 - DNA, 13 bp, Artificial Sequence
  Oligonucleotide for detection of SNP TSC0000914
tttatcgtattty

SEQ ID NO: 2264 - DNA, 13 bp, Artificial Sequence
  Oligonucleotide for detection of SNP TSC0000914
raaatacgataaa

SEQ ID NO: 2265 - DNA, 13 bp, Artificial Sequence
  Oligonucleotide for detection of SNP TSC0000914
gaaatatggtaga

SEQ ID NO: 2266 - DNA, 13 bp, Artificial Sequence
  Oligonucleotide for detection of SNP TSC0000914
tctaccatatttc

SEQ ID NO: 2267 - DNA, 13 bp, Artificial Sequence
  Oligonucleotide for detection of SNP TSC0000914
gaaatacggtaga

SEQ ID NO: 2268 - DNA, 13 bp, Artificial Sequence
  Oligonucleotide for detection of SNP TSC0000914
tctaccgtatttc

SEQ ID NO: 2269 - DNA, 13 bp, Artificial Sequence
  Oligonucleotide for detection of SNP TSC0000918
tttttatttttay

SEQ ID NO: 2270 - DNA, 13 bp, Artificial Sequence
  Oligonucleotide for detection of SNP TSC0000918
rtaaaaataaaaa

SEQ ID NO: 2271 - DNA, 13 bp, Artificial Sequence
  Oligonucleotide for detection of SNP TSC0000918
tttttagttttay

SEQ ID NO: 2272 - DNA, 13 bp, Artificial Sequence
  Oligonucleotide for detection of SNP TSC0000918
rtaaaactaaaaa

SEQ ID NO: 2273 - DNA, 13 bp, Artificial Sequence
  Oligonucleotide for detection of SNP TSC0000918
gtgagagtggaga

SEQ ID NO: 2274 - DNA, 13 bp, Artificial Sequence
  Oligonucleotide for detection of SNP TSC0000918
tctccactctcac

SEQ ID NO: 2275 - DNA, 13 bp, Artificial Sequence
  Oligonucleotide for detection of SNP TSC0000918
gtgagattggaga

SEQ ID NO: 2276 - DNA, 13 bp, Artificial Sequence
  Oligonucleotide for detection of SNP TSC0000918
tctccaatctcac

SEQ ID NO: 2277 - DNA, 13 bp, Artificial Sequence
  Oligonucleotide for detection of SNP TSC0000928
tttgttggtagat

SEQ ID NO: 2278 - DNA, 13 bp, Artificial Sequence
  Oligonucleotide for detection of SNP TSC0000928
atctaccaacaaa

SEQ ID NO: 2279 - DNA, 13 bp, Artificial Sequence
  Oligonucleotide for detection of SNP TSC0000928
tttgttagtagat

SEQ ID NO: 2280 - DNA, 13 bp, Artificial Sequence
  Oligonucleotide for detection of SNP TSC0000928
atctactaacaaa

SEQ ID NO: 2281 - DNA, 13 bp, Artificial Sequence
  Oligonucleotide for detection of SNP TSC0000930
aattattgatgaa

SEQ ID NO: 2282 - DNA, 13 bp, Artificial Sequence
  Oligonucleotide for detection of SNP TSC0000930
ttcatcaataatt

SEQ ID NO: 2283 - DNA, 13 bp, Artificial Sequence
  Oligonucleotide for detection of SNP TSC0000930
aattatcgatgaa

SEQ ID NO: 2284 - DNA, 13 bp, Artificial Sequence
  Oligonucleotide for detection of SNP TSC0000930
ttcatcgataatt

SEQ ID NO: 2285 - DNA, 13 bp, Artificial Sequence
  Oligonucleotide for detection of SNP TSC0000930
tttattggtgatt

SEQ ID NO: 2286 - DNA, 13 bp, Artificial Sequence
  Oligonucleotide for detection of SNP TSC0000930
aatcaccaataaa

SEQ ID NO: 2287 - DNA, 13 bp, Artificial Sequence
  Oligonucleotide for detection of SNP TSC0000930
tttattagtgatt

SEQ ID NO: 2288 - DNA, 13 bp, Artificial Sequence
  Oligonucleotide for detection of SNP TSC0000930
aatcactaataaa

SEQ ID NO: 2289 - DNA, 13 bp, Artificial Sequence
  Oligonucleotide for detection of SNP TSC0000930
tttatcggtgatt

SEQ ID NO: 2290 - DNA, 13 bp, Artificial Sequence
  Oligonucleotide for detection of SNP TSC0000930
aatcaccgataaa

SEQ ID NO: 2291 - DNA, 13 bp, Artificial Sequence
  Oligonucleotide for detection of SNP TSC0000931
attataaattatt

SEQ ID NO: 2292 - DNA, 13 bp, Artificial Sequence
  Oligonucleotide for detection of SNP TSC0000931
aataatttataat

SEQ ID NO: 2293 - DNA, 13 bp, Artificial Sequence
  Oligonucleotide for detection of SNP TSC0000931
attatatattatt

SEQ ID NO: 2294 - DNA, 13 bp, Artificial Sequence
  Oligonucleotide for detection of SNP TSC0000931
aataatatataat

SEQ ID NO: 2295 - DNA, 13 bp, Artificial Sequence
  Oligonucleotide for detection of SNP TSC0000931
agtggtttgtagt

SEQ ID NO: 2296 - DNA, 13 bp, Artificial Sequence
  Oligonucleotide for detection of SNP TSC0000931
actacaaaccact

SEQ ID NO: 2297 - DNA, 13 bp, Artificial Sequence
  Oligonucleotide for detection of SNP TSC0000931
agtggtgtgtagt

SEQ ID NO: 2298 - DNA, 13 bp, Artificial Sequence
  Oligonucleotide for detection of SNP TSC0000931
actacacaccact

SEQ ID NO: 2299 - DNA, 13 bp, Artificial Sequence
  Oligonucleotide for detection of SNP TSC0000932
aggaaaaaataty

SEQ ID NO: 2300 - DNA, 13 bp, Artificial Sequence
  Oligonucleotide for detection of SNP TSC0000932
ratattttttcct

SEQ ID NO: 2301 - DNA, 13 bp, Artificial Sequence
  Oligonucleotide for detection of SNP TSC0000932
aggaaataataty

SEQ ID NO: 2302 - DNA, 13 bp, Artificial Sequence
  Oligonucleotide for detection of SNP TSC0000932
ratattatttcct

SEQ ID NO: 2303 - DNA, 13 bp, Artificial Sequence
  Oligonucleotide for detection of SNP TSC0000932
gatgttttttttt

SEQ ID NO: 2304 - DNA, 13 bp, Artificial Sequence
  Oligonucleotide for detection of SNP TSC0000932
aaaaaaaaacatc

SEQ ID NO: 2305 - DNA, 13 bp, Artificial Sequence
  Oligonucleotide for detection of SNP TSC0000932
gatgttgtttttt

SEQ ID NO: 2306 - DNA, 13 bp, Artificial Sequence
  Oligonucleotide for detection of SNP TSC0000932
aaaaaacaacatc

SEQ ID NO: 2307 - DNA, 13 bp, Artificial Sequence
  Oligonucleotide for detection of SNP TSC0000933
ttggaagaattat

SEQ ID NO: 2308 - DNA, 13 bp, Artificial Sequence
  Oligonucleotide for detection of SNP TSC0000933
ataattcttccaa

SEQ ID NO: 2309 - DNA, 13 bp, Artificial Sequence
  Oligonucleotide for detection of SNP TSC0000933
ttggaataattat

SEQ ID NO: 2310 - DNA, 13 bp, Artificial Sequence
  Oligonucleotide for detection of SNP TSC0000933
ataattattccaa

SEQ ID NO: 2311 - DNA, 13 bp, Artificial Sequence
  Oligonucleotide for detection of SNP TSC0000933
atgatttttttaa

SEQ ID NO: 2312 - DNA, 13 bp, Artificial Sequence
  Oligonucleotide for detection of SNP TSC0000933
ttaaaaaaatcat

SEQ ID NO: 2313 - DNA, 13 bp, Artificial Sequence
  Oligonucleotide for detection of SNP TSC0000933
atgattattttaa

SEQ ID NO: 2314 - DNA, 13 bp, Artificial Sequence
  Oligonucleotide for detection of SNP TSC0000933
ttaaaataatcat

SEQ ID NO: 2315 - DNA, 13 bp, Artificial Sequence
  Oligonucleotide for detection of SNP TSC0000934
attgtttgtagta

SEQ ID NO: 2316 - DNA, 13 bp, Artificial Sequence
  Oligonucleotide for detection of SNP TSC0000934
tactacaaacaat

SEQ ID NO: 2317 - DNA, 13 bp, Artificial Sequence
  Oligonucleotide for detection of SNP TSC0000934
attgttcgtagta

SEQ ID NO: 2318 - DNA, 13 bp, Artificial Sequence
  Oligonucleotide for detection of SNP TSC0000934
tactacgaacaat

SEQ ID NO: 2319 - DNA, 13 bp, Artificial Sequence
  Oligonucleotide for detection of SNP TSC0000934
tgttatgaataat

SEQ ID NO: 2320 - DNA, 13 bp, Artificial Sequence
  Oligonucleotide for detection of SNP TSC0000934
attattcataaca

SEQ ID NO: 2321 - DNA, 13 bp, Artificial Sequence
  Oligonucleotide for detection of SNP TSC0000934
tgttataaataat

SEQ ID NO: 2322 - DNA, 13 bp, Artificial Sequence
  Oligonucleotide for detection of SNP TSC0000934
attatttataaca

SEQ ID NO: 2323 - DNA, 13 bp, Artificial Sequence
  Oligonucleotide for detection of SNP TSC0000934
tgttacgaataat

SEQ ID NO: 2324 - DNA, 13 bp, Artificial Sequence
  Oligonucleotide for detection of SNP TSC0000934
attattcgtaaca

SEQ ID NO: 2325 - DNA, 13 bp, Artificial Sequence
  Oligonucleotide for detection of SNP TSC0000935
gtttaaagttata

SEQ ID NO: 2326 - DNA, 13 bp, Artificial Sequence
  Oligonucleotide for detection of SNP TSC0000935
tataactttaaac

SEQ ID NO: 2327 - DNA, 13 bp, Artificial Sequence
  Oligonucleotide for detection of SNP TSC0000935
gtttaaggttata

SEQ ID NO: 2328 - DNA, 13 bp, Artificial Sequence
  Oligonucleotide for detection of SNP TSC0000935
tataaccttaaac

SEQ ID NO: 2329 - DNA, 13 bp, Artificial Sequence
  Oligonucleotide for detection of SNP TSC0000936
tttttttgagttt

SEQ ID NO: 2330 - DNA, 13 bp, Artificial Sequence
  Oligonucleotide for detection of SNP TSC0000936
aaactcaaaaaaa

SEQ ID NO: 2331 - DNA, 13 bp, Artificial Sequence
  Oligonucleotide for detection of SNP TSC0000936
ttttttcgagttt

SEQ ID NO: 2332 - DNA, 13 bp, Artificial Sequence
  Oligonucleotide for detection of SNP TSC0000936
aaactcgaaaaaa

SEQ ID NO: 2333 - DNA, 13 bp, Artificial Sequence
  Oligonucleotide for detection of SNP TSC0000936
aaatttgagaggg

SEQ ID NO: 2334 - DNA, 13 bp, Artificial Sequence
  Oligonucleotide for detection of SNP TSC0000936
ccctctcaaattt

SEQ ID NO: 2335 - DNA, 13 bp, Artificial Sequence
  Oligonucleotide for detection of SNP TSC0000936
aaatttaagaggg

SEQ ID NO: 2336 - DNA, 13 bp, Artificial Sequence
  Oligonucleotide for detection of SNP TSC0000936
ccctcttaaattt

SEQ ID NO: 2337 - DNA, 13 bp, Artificial Sequence
  Oligonucleotide for detection of SNP TSC0000936
aaattcgagaggg

SEQ ID NO: 2338 - DNA, 13 bp, Artificial Sequence
  Oligonucleotide for detection of SNP TSC0000936
ccctctcgaattt

SEQ ID NO: 2339 - DNA, 13 bp, Artificial Sequence
  Oligonucleotide for detection of SNP TSC0000937
gtatataaaaata

SEQ ID NO: 2340 - DNA, 13 bp, Artificial Sequence
  Oligonucleotide for detection of SNP TSC0000937
tatttttatatac

SEQ ID NO: 2341 - DNA, 13 bp, Artificial Sequence
  Oligonucleotide for detection of SNP TSC0000937
gtatattaaaata

SEQ ID NO: 2342 - DNA, 13 bp, Artificial Sequence
  Oligonucleotide for detection of SNP TSC0000937
tattttaatatac

SEQ ID NO: 2343 - DNA, 13 bp, Artificial Sequence
  Oligonucleotide for detection of SNP TSC0000937
tgtttttatatgy

SEQ ID NO: 2344 - DNA, 13 bp, Artificial Sequence
  Oligonucleotide for detection of SNP TSC0000937
rcatataaaaaca

SEQ ID NO: 2345 - DNA, 13 bp, Artificial Sequence
  Oligonucleotide for detection of SNP TSC0000937
tgttttgatatgy

SEQ ID NO: 2346 - DNA, 13 bp, Artificial Sequence
  Oligonucleotide for detection of SNP TSC0000937
rcatatcaaaaca

SEQ ID NO: 2347 - DNA, 13 bp, Artificial Sequence
  Oligonucleotide for detection of SNP TSC0000938
tttaaaagattag

SEQ ID NO: 2348 - DNA, 13 bp, Artificial Sequence
  Oligonucleotide for detection of SNP TSC0000938
ctaatcttttaaa

SEQ ID NO: 2349 - DNA, 13 bp, Artificial Sequence
  Oligonucleotide for detection of SNP TSC0000938
tttaaatgattag

SEQ ID NO: 2350 - DNA, 13 bp, Artificial Sequence
  Oligonucleotide for detection of SNP TSC0000938
ctaatcatttaaa

SEQ ID NO: 2351 - DNA, 13 bp, Artificial Sequence
  Oligonucleotide for detection of SNP TSC0000938
tttaaacgattag

SEQ ID NO: 2352 - DNA, 13 bp, Artificial Sequence
  Oligonucleotide for detection of SNP TSC0000938
ctaatcgtttaaa

SEQ ID NO: 2353 - DNA, 13 bp, Artificial Sequence
  Oligonucleotide for detection of SNP TSC0000938
ttgattttttaga

SEQ ID NO: 2354 - DNA, 13 bp, Artificial Sequence
  Oligonucleotide for detection of SNP TSC0000938
tctaaaaaatcaa

SEQ ID NO: 2355 - DNA, 13 bp, Artificial Sequence
  Oligonucleotide for detection of SNP TSC0000938
ttgattgtttaga

SEQ ID NO: 2356 - DNA, 13 bp, Artificial Sequence
  Oligonucleotide for detection of SNP TSC0000938
tctaaacaatcaa

SEQ ID NO: 2357 - DNA, 13 bp, Artificial Sequence
  Oligonucleotide for detection of SNP TSC0000938
ttgatcgtttaga

SEQ ID NO: 2358 - DNA, 13 bp, Artificial Sequence
  Oligonucleotide for detection of SNP TSC0000938
tctaaacgatcaa

SEQ ID NO: 2359 - DNA, 13 bp, Artificial Sequence
  Oligonucleotide for detection of SNP TSC0000940
atttttagtggtt

SEQ ID NO: 2360 - DNA, 13 bp, Artificial Sequence
  Oligonucleotide for detection of SNP TSC0000940
aaccactaaaaat

SEQ ID NO: 2361 - DNA, 13 bp, Artificial Sequence
  Oligonucleotide for detection of SNP TSC0000940
atttttggtggtt

SEQ ID NO: 2362 - DNA, 13 bp, Artificial Sequence
  Oligonucleotide for detection of SNP TSC0000940
aaccaccaaaaat

SEQ ID NO: 2363 - DNA, 13 bp, Artificial Sequence
  Oligonucleotide for detection of SNP TSC0000940
attttcggtggtt

SEQ ID NO: 2364 - DNA, 13 bp, Artificial Sequence
  Oligonucleotide for detection of SNP TSC0000940
aaccaccgaaaat

SEQ ID NO: 2365 - DNA, 13 bp, Artificial Sequence
  Oligonucleotide for detection of SNP TSC0000940
agttattgaagat

SEQ ID NO: 2366 - DNA, 13 bp, Artificial Sequence
  Oligonucleotide for detection of SNP TSC0000940
atcttcaataact

SEQ ID NO: 2367 - DNA, 13 bp, Artificial Sequence
  Oligonucleotide for detection of SNP TSC0000940
agttatcgaagat

SEQ ID NO: 2368 - DNA, 13 bp, Artificial Sequence
  Oligonucleotide for detection of SNP TSC0000940
atcttcgataact

SEQ ID NO: 2369 - DNA, 13 bp, Artificial Sequence
  Oligonucleotide for detection of SNP TSC0000941
ttatagaaaattt

SEQ ID NO: 2370 - DNA, 13 bp, Artificial Sequence
  Oligonucleotide for detection of SNP TSC0000941
aaattttctataa

SEQ ID NO: 2371 - DNA, 13 bp, Artificial Sequence
  Oligonucleotide for detection of SNP TSC0000941
ttatagtaaattt

SEQ ID NO: 2372 - DNA, 13 bp, Artificial Sequence
  Oligonucleotide for detection of SNP TSC0000941
aaatttactataa

SEQ ID NO: 2373 - DNA, 13 bp, Artificial Sequence
  Oligonucleotide for detection of SNP TSC0000941
agattttttgtag

SEQ ID NO: 2374 - DNA, 13 bp, Artificial Sequence
  Oligonucleotide for detection of SNP TSC0000941
ctacaaaaaatct

SEQ ID NO: 2375 - DNA, 13 bp, Artificial Sequence
  Oligonucleotide for detection of SNP TSC0000941
agatttgttgtag

SEQ ID NO: 2376 - DNA, 13 bp, Artificial Sequence
  Oligonucleotide for detection of SNP TSC0000941
ctacaacaaatct

SEQ ID NO: 2377 - DNA, 13 bp, Artificial Sequence
  Oligonucleotide for detection of SNP TSC0000959
tttttatttttty

SEQ ID NO: 2378 - DNA, 13 bp, Artificial Sequence
  Oligonucleotide for detection of SNP TSC0000959
raaaaaataaaaa

SEQ ID NO: 2379 - DNA, 13 bp, Artificial Sequence
  Oligonucleotide for detection of SNP TSC0000959
tttttagttttty

SEQ ID NO: 2380 - DNA, 13 bp, Artificial Sequence
  Oligonucleotide for detection of SNP TSC0000959
raaaaactaaaaa

SEQ ID NO: 2381 - DNA, 13 bp, Artificial Sequence
  Oligonucleotide for detection of SNP TSC0000959
gagagggtgggag

SEQ ID NO: 2382 - DNA, 13 bp, Artificial Sequence
  Oligonucleotide for detection of SNP TSC0000959
ctcccaccctctc

SEQ ID NO: 2383 - DNA, 13 bp, Artificial Sequence
  Oligonucleotide for detection of SNP TSC0000959
gagaggttgggag

SEQ ID NO: 2384 - DNA, 13 bp, Artificial Sequence
  Oligonucleotide for detection of SNP TSC0000959
ctcccaacctctc

SEQ ID NO: 2385 - DNA, 13 bp, Artificial Sequence
  Oligonucleotide for detection of SNP TSC0000960
tgttttggaaaay

SEQ ID NO: 2386 - DNA, 13 bp, Artificial Sequence
  Oligonucleotide for detection of SNP TSC0000960
rttttccaaaaca

SEQ ID NO: 2387 - DNA, 13 bp, Artificial Sequence
  Oligonucleotide for detection of SNP TSC0000960
tgttttagaaaay

SEQ ID NO: 2388 - DNA, 13 bp, Artificial Sequence
  Oligonucleotide for detection of SNP TSC0000960
rttttctaaaaca

SEQ ID NO: 2389 - DNA, 13 bp, Artificial Sequence
  Oligonucleotide for detection of SNP TSC0000964
tttataggttttg

SEQ ID NO: 2390 - DNA, 13 bp, Artificial Sequence
  Oligonucleotide for detection of SNP TSC0000964
caaaacctataaa

SEQ ID NO: 2391 - DNA, 13 bp, Artificial Sequence
  Oligonucleotide for detection of SNP TSC0000964
tttataagttttg

SEQ ID NO: 2392 - DNA, 13 bp, Artificial Sequence
  Oligonucleotide for detection of SNP TSC0000964
caaaacttataaa

SEQ ID NO: 2393 - DNA, 13 bp, Artificial Sequence
  Oligonucleotide for detection of SNP TSC0000965
ttggggaattagt

SEQ ID NO: 2394 - DNA, 13 bp, Artificial Sequence
  Oligonucleotide for detection of SNP TSC0000965
actaattccccaa

SEQ ID NO: 2395 - DNA, 13 bp, Artificial Sequence
  Oligonucleotide for detection of SNP TSC0000965
ttggggtattagt

SEQ ID NO: 2396 - DNA, 13 bp, Artificial Sequence
  Oligonucleotide for detection of SNP TSC0000965
actaataccccaa

SEQ ID NO: 2397 - DNA, 13 bp, Artificial Sequence
  Oligonucleotide for detection of SNP TSC0000965
attgattttttag

SEQ ID NO: 2398 - DNA, 13 bp, Artificial Sequence
  Oligonucleotide for detection of SNP TSC0000965
ctaaaaaatcaat

SEQ ID NO: 2399 - DNA, 13 bp, Artificial Sequence
  Oligonucleotide for detection of SNP TSC0000965
attgatgttttag

SEQ ID NO: 2400 - DNA, 13 bp, Artificial Sequence
  Oligonucleotide for detection of SNP TSC0000965
ctaaaacatcaat

SEQ ID NO: 2401 - DNA, 13 bp, Artificial Sequence
  Oligonucleotide for detection of SNP TSC0000969
atgtagattatgt

SEQ ID NO: 2402 - DNA, 13 bp, Artificial Sequence
  Oligonucleotide for detection of SNP TSC0000969
acataatctacat

SEQ ID NO: 2403 - DNA, 13 bp, Artificial Sequence
  Oligonucleotide for detection of SNP TSC0000969
atgtaggttatgt

SEQ ID NO: 2404 - DNA, 13 bp, Artificial Sequence
  Oligonucleotide for detection of SNP TSC0000969
acataacctacat

SEQ ID NO: 2405 - DNA, 13 bp, Artificial Sequence
  Oligonucleotide for detection of SNP TSC0000980
taatatgtttggt

SEQ ID NO: 2406 - DNA, 13 bp, Artificial Sequence
  Oligonucleotide for detection of SNP TSC0000980
accaaacatatta

SEQ ID NO: 2407 - DNA, 13 bp, Artificial Sequence
  Oligonucleotide for detection of SNP TSC0000980
taatatatttggt

SEQ ID NO: 2408 - DNA, 13 bp, Artificial Sequence
  Oligonucleotide for detection of SNP TSC0000980
accaaatatatta

SEQ ID NO: 2409 - DNA, 13 bp, Artificial Sequence
  Oligonucleotide for detection of SNP TSC0000981
aaaattgtttttt

SEQ ID NO: 2410 - DNA, 13 bp, Artificial Sequence
  Oligonucleotide for detection of SNP TSC0000981
aaaaaacaatttt

SEQ ID NO: 2411 - DNA, 13 bp, Artificial Sequence
  Oligonucleotide for detection of SNP TSC0000981
aaaattttttttt

SEQ ID NO: 2412 - DNA, 13 bp, Artificial Sequence
  Oligonucleotide for detection of SNP TSC0000981
aaaaaaaaatttt

SEQ ID NO: 2413 - DNA, 13 bp, Artificial Sequence
  Oligonucleotide for detection of SNP TSC0000981
aaaaggtaatttt

SEQ ID NO: 2414 - DNA, 13 bp, Artificial Sequence
  Oligonucleotide for detection of SNP TSC0000981
aaaattacctttt

SEQ ID NO: 2415 - DNA, 13 bp, Artificial Sequence
  Oligonucleotide for detection of SNP TSC0000981
aaaaggaaatttt

SEQ ID NO: 2416 - DNA, 13 bp, Artificial Sequence
  Oligonucleotide for detection of SNP TSC0000981
aaaatttcctttt

SEQ ID NO: 2417 - DNA, 13 bp, Artificial Sequence
  Oligonucleotide for detection of SNP TSC0000985
taattaatgatty

SEQ ID NO: 2418 - DNA, 13 bp, Artificial Sequence
  Oligonucleotide for detection of SNP TSC0000985
raatcattaatta

SEQ ID NO: 2419 - DNA, 13 bp, Artificial Sequence
  Oligonucleotide for detection of SNP TSC0000985
taattagtgatty

SEQ ID NO: 2420 - DNA, 13 bp, Artificial Sequence
  Oligonucleotide for detection of SNP TSC0000985
raatcactaatta

SEQ ID NO: 2421 - DNA, 13 bp, Artificial Sequence
  Oligonucleotide for detection of SNP TSC0000986
attaatgatttag

SEQ ID NO: 2422 - DNA, 13 bp, Artificial Sequence
  Oligonucleotide for detection of SNP TSC0000986
ctaaatcattaat

SEQ ID NO: 2423 - DNA, 13 bp, Artificial Sequence
  Oligonucleotide for detection of SNP TSC0000986
attaattatttag

SEQ ID NO: 2424 - DNA, 13 bp, Artificial Sequence
  Oligonucleotide for detection of SNP TSC0000986
ctaaataattaat

SEQ ID NO: 2425 - DNA, 13 bp, Artificial Sequence
  Oligonucleotide for detection of SNP TSC0000986
ttgaattattaat

SEQ ID NO: 2426 - DNA, 13 bp, Artificial Sequence
  Oligonucleotide for detection of SNP TSC0000986
attaataattcaa

SEQ ID NO: 2427 - DNA, 13 bp, Artificial Sequence
  Oligonucleotide for detection of SNP TSC0000986
ttgaataattaat

SEQ ID NO: 2428 - DNA, 13 bp, Artificial Sequence
  Oligonucleotide for detection of SNP TSC0000986
attaattattcaa

SEQ ID NO: 2429 - DNA, 13 bp, Artificial Sequence
  Oligonucleotide for detection of SNP TSC0000987
ttgttgtttgtaa

SEQ ID NO: 2430 - DNA, 13 bp, Artificial Sequence
  Oligonucleotide for detection of SNP TSC0000987
ttacaaacaacaa

SEQ ID NO: 2431 - DNA, 13 bp, Artificial Sequence
  Oligonucleotide for detection of SNP TSC0000987
ttgttggttgtaa

SEQ ID NO: 2432 - DNA, 13 bp, Artificial Sequence
  Oligonucleotide for detection of SNP TSC0000987
ttacaaccaacaa

SEQ ID NO: 2433 - DNA, 13 bp, Artificial Sequence
  Oligonucleotide for detection of SNP TSC0000987
ttataggtagtaa

SEQ ID NO: 2434 - DNA, 13 bp, Artificial Sequence
  Oligonucleotide for detection of SNP TSC0000987
ttactacctataa

SEQ ID NO: 2435 - DNA, 13 bp, Artificial Sequence
  Oligonucleotide for detection of SNP TSC0000987
ttatagttagtaa

SEQ ID NO: 2436 - DNA, 13 bp, Artificial Sequence
  Oligonucleotide for detection of SNP TSC0000987
ttactaactataa

SEQ ID NO: 2437 - DNA, 13 bp, Artificial Sequence
  Oligonucleotide for detection of SNP TSC0000988
taatttaaaagaa

SEQ ID NO: 2438 - DNA, 13 bp, Artificial Sequence
  Oligonucleotide for detection of SNP TSC0000988
ttcttttaaatta

SEQ ID NO: 2439 - DNA, 13 bp, Artificial Sequence
  Oligonucleotide for detection of SNP TSC0000988
taatttgaaagaa

SEQ ID NO: 2440 - DNA, 13 bp, Artificial Sequence
  Oligonucleotide for detection of SNP TSC0000988
ttctttcaaatta

SEQ ID NO: 2441 - DNA, 13 bp, Artificial Sequence
  Oligonucleotide for detection of SNP TSC0000988
taattcgaaagaa

SEQ ID NO: 2442 - DNA, 13 bp, Artificial Sequence
  Oligonucleotide for detection of SNP TSC0000988
ttctttcgaatta

SEQ ID NO: 2443 - DNA, 13 bp, Artificial Sequence
  Oligonucleotide for detection of SNP TSC0000988
tttttttgaatta

SEQ ID NO: 2444 - DNA, 13 bp, Artificial Sequence
  Oligonucleotide for detection of SNP TSC0000988
taattcaaaaaaa

SEQ ID NO: 2445 - DNA, 13 bp, Artificial Sequence
  Oligonucleotide for detection of SNP TSC0000988
ttttttcgaatta

SEQ ID NO: 2446 - DNA, 13 bp, Artificial Sequence
  Oligonucleotide for detection of SNP TSC0000988
taattcgaaaaaa

SEQ ID NO: 2447 - DNA, 13 bp, Artificial Sequence
  Oligonucleotide for detection of SNP TSC0000989
taaaaaattaatt

SEQ ID NO: 2448 - DNA, 13 bp, Artificial Sequence
  Oligonucleotide for detection of SNP TSC0000989
aattaatttttta

SEQ ID NO: 2449 - DNA, 13 bp, Artificial Sequence
  Oligonucleotide for detection of SNP TSC0000989
taaaaatttaatt

SEQ ID NO: 2450 - DNA, 13 bp, Artificial Sequence
  Oligonucleotide for detection of SNP TSC0000989
aattaaattttta

SEQ ID NO: 2451 - DNA, 13 bp, Artificial Sequence
  Oligonucleotide for detection of SNP TSC0000989
aattaagttttta

SEQ ID NO: 2452 - DNA, 13 bp, Artificial Sequence
  Oligonucleotide for detection of SNP TSC0000989
taaaaacttaatt

SEQ ID NO: 2453 - DNA, 13 bp, Artificial Sequence
  Oligonucleotide for detection of SNP TSC0000991
ttggaagtaggaa

SEQ ID NO: 2454 - DNA, 13 bp, Artificial Sequence
  Oligonucleotide for detection of SNP TSC0000991
ttcctacttccaa

SEQ ID NO: 2455 - DNA, 13 bp, Artificial Sequence
  Oligonucleotide for detection of SNP TSC0000991
ttggaaataggaa

SEQ ID NO: 2456 - DNA, 13 bp, Artificial Sequence
  Oligonucleotide for detection of SNP TSC0000991
ttcctatttccaa

SEQ ID NO: 2457 - DNA, 13 bp, Artificial Sequence
  Oligonucleotide for detection of SNP TSC0000992
tagttttgggtat

SEQ ID NO: 2458 - DNA, 13 bp, Artificial Sequence
  Oligonucleotide for detection of SNP TSC0000992
atacccaaaacta

SEQ ID NO: 2459 - DNA, 13 bp, Artificial Sequence
  Oligonucleotide for detection of SNP TSC0000992
tagtttcgggtat

SEQ ID NO: 2460 - DNA, 13 bp, Artificial Sequence
  Oligonucleotide for detection of SNP TSC0000992
atacccgaaacta

SEQ ID NO: 2461 - DNA, 13 bp, Artificial Sequence
  Oligonucleotide for detection of SNP TSC0000992
atatttgagattg

SEQ ID NO: 2462 - DNA, 13 bp, Artificial Sequence
  Oligonucleotide for detection of SNP TSC0000992
caatctcaaatat

SEQ ID NO: 2463 - DNA, 13 bp, Artificial Sequence
  Oligonucleotide for detection of SNP TSC0000992
atatttaagattg

SEQ ID NO: 2464 - DNA, 13 bp, Artificial Sequence
  Oligonucleotide for detection of SNP TSC0000992
caatcttaaatat

SEQ ID NO: 2465 - DNA, 13 bp, Artificial Sequence
  Oligonucleotide for detection of SNP TSC0000992
atattcgagattg

SEQ ID NO: 2466 - DNA, 13 bp, Artificial Sequence
  Oligonucleotide for detection of SNP TSC0000992
caatctcgaatat

SEQ ID NO: 2467 - DNA, 13 bp, Artificial Sequence
  Oligonucleotide for detection of SNP TSC0000994
ataggtgtaatgt

SEQ ID NO: 2468 - DNA, 13 bp, Artificial Sequence
  Oligonucleotide for detection of SNP TSC0000994
acattacacctat

SEQ ID NO: 2469 - DNA, 13 bp, Artificial Sequence
  Oligonucleotide for detection of SNP TSC0000994
ataggtataatgt

SEQ ID NO: 2470 - DNA, 13 bp, Artificial Sequence
  Oligonucleotide for detection of SNP TSC0000994
acattatacctat

SEQ ID NO: 2471 - DNA, 13 bp, Artificial Sequence
  Oligonucleotide for detection of SNP TSC0000996
tggaagtattata

SEQ ID NO: 2472 - DNA, 13 bp, Artificial Sequence
  Oligonucleotide for detection of SNP TSC0000996
tataatacttcca

SEQ ID NO: 2473 - DNA, 13 bp, Artificial Sequence
  Oligonucleotide for detection of SNP TSC0000996
tggaaggattata

SEQ ID NO: 2474 - DNA, 13 bp, Artificial Sequence
  Oligonucleotide for detection of SNP TSC0000996
tataatccttcca

SEQ ID NO: 2475 - DNA, 13 bp, Artificial Sequence
  Oligonucleotide for detection of SNP TSC0000996
tataatgttttta

SEQ ID NO: 2476 - DNA, 13 bp, Artificial Sequence
  Oligonucleotide for detection of SNP TSC0000996
taaaaacattata

SEQ ID NO: 2477 - DNA, 13 bp, Artificial Sequence
  Oligonucleotide for detection of SNP TSC0000996
tataattttttta

SEQ ID NO: 2478 - DNA, 13 bp, Artificial Sequence
  Oligonucleotide for detection of SNP TSC0000996
taaaaaaattata

SEQ ID NO: 2479 - DNA, 13 bp, Artificial Sequence
  Oligonucleotide for detection of SNP TSC0000997
gtattaggatata

SEQ ID NO: 2480 - DNA, 13 bp, Artificial Sequence
  Oligonucleotide for detection of SNP TSC0000997
tatatcctaatac

SEQ ID NO: 2481 - DNA, 13 bp, Artificial Sequence
  Oligonucleotide for detection of SNP TSC0000997
gtattaagatata

SEQ ID NO: 2482 - DNA, 13 bp, Artificial Sequence
  Oligonucleotide for detection of SNP TSC0000997
tatatcttaatac

SEQ ID NO: 2483 - DNA, 13 bp, Artificial Sequence
  Oligonucleotide for detection of SNP TSC0000998
tagtgtaagaaty

SEQ ID NO: 2484 - DNA, 13 bp, Artificial Sequence
  Oligonucleotide for detection of SNP TSC0000998
rattcttacacta

SEQ ID NO: 2485 - DNA, 13 bp, Artificial Sequence
  Oligonucleotide for detection of SNP TSC0000998
tagtgtgagaaty

SEQ ID NO: 2486 - DNA, 13 bp, Artificial Sequence
  Oligonucleotide for detection of SNP TSC0000998
rattctcacacta

SEQ ID NO: 2487 - DNA, 13 bp, Artificial Sequence
  Oligonucleotide for detection of SNP TSC0001000
aggtaaaggtata

SEQ ID NO: 2488 - DNA, 13 bp, Artificial Sequence
  Oligonucleotide for detection of SNP TSC0001000
tatacctttacct

SEQ ID NO: 2489 - DNA, 13 bp, Artificial Sequence
  Oligonucleotide for detection of SNP TSC0001000
aggtaatggtata

SEQ ID NO: 2490 - DNA, 13 bp, Artificial Sequence
  Oligonucleotide for detection of SNP TSC0001000
tataccattacct

SEQ ID NO: 2491 - DNA, 13 bp, Artificial Sequence
  Oligonucleotide for detection of SNP TSC0001000
tgtgtttttattt

SEQ ID NO: 2492 - DNA, 13 bp, Artificial Sequence
  Oligonucleotide for detection of SNP TSC0001000
aaataaaaacaca

SEQ ID NO: 2493 - DNA, 13 bp, Artificial Sequence
  Oligonucleotide for detection of SNP TSC0001000
tgtgttattattt

SEQ ID NO: 2494 - DNA, 13 bp, Artificial Sequence
  Oligonucleotide for detection of SNP TSC0001000
aaataataacaca

SEQ ID NO: 2495 - DNA, 13 bp, Artificial Sequence
  Oligonucleotide for detection of SNP TSC0001013
ttaaggattttay

SEQ ID NO: 2496 - DNA, 13 bp, Artificial Sequence
  Oligonucleotide for detection of SNP TSC0001013
rtaaaatccttaa

SEQ ID NO: 2497 - DNA, 13 bp, Artificial Sequence
  Oligonucleotide for detection of SNP TSC0001013
ttaaggtttttay

SEQ ID NO: 2498 - DNA, 13 bp, Artificial Sequence
  Oligonucleotide for detection of SNP TSC0001013
rtaaaaaccttaa

SEQ ID NO: 2499 - DNA, 13 bp, Artificial Sequence
  Oligonucleotide for detection of SNP TSC0001013
gtaagatttttag

SEQ ID NO: 2500 - DNA, 13 bp, Artificial Sequence
  Oligonucleotide for detection of SNP TSC0001013
ctaaaaatcttac

SEQ ID NO: 2501 - DNA, 13 bp, Artificial Sequence
  Oligonucleotide for detection of SNP TSC0001013
gtaagagttttag

SEQ ID NO: 2502 - DNA, 13 bp, Artificial Sequence
  Oligonucleotide for detection of SNP TSC0001013
ctaaaactcttac

SEQ ID NO: 2503 - DNA, 13 bp, Artificial Sequence
  Oligonucleotide for detection of SNP TSC0001016
gattttattgaaa

SEQ ID NO: 2504 - DNA, 13 bp, Artificial Sequence
  Oligonucleotide for detection of SNP TSC0001016
tttcaataaaatc

SEQ ID NO: 2505 - DNA, 13 bp, Artificial Sequence
  Oligonucleotide for detection of SNP TSC0001016
gattttgttgaaa

SEQ ID NO: 2506 - DNA, 13 bp, Artificial Sequence
  Oligonucleotide for detection of SNP TSC0001016
tttcaacaaaatc

SEQ ID NO: 2507 - DNA, 13 bp, Artificial Sequence
  Oligonucleotide for detection of SNP TSC0001017
gggtgtgtagaty

SEQ ID NO: 2508 - DNA, 13 bp, Artificial Sequence
  Oligonucleotide for detection of SNP TSC0001017
ratctacacaccc

SEQ ID NO: 2509 - DNA, 13 bp, Artificial Sequence
  Oligonucleotide for detection of SNP TSC0001017
gggtgtatagaty

SEQ ID NO: 2510 - DNA, 13 bp, Artificial Sequence
  Oligonucleotide for detection of SNP TSC0001017
ratctatacaccc

SEQ ID NO: 2511 - DNA, 13 bp, Artificial Sequence
  Oligonucleotide for detection of SNP TSC0001018
gttattagaatga

SEQ ID NO: 2512 - DNA, 13 bp, Artificial Sequence
  Oligonucleotide for detection of SNP TSC0001018
tcattctaataac

SEQ ID NO: 2513 - DNA, 13 bp, Artificial Sequence
  Oligonucleotide for detection of SNP TSC0001018
gttatttgaatga

SEQ ID NO: 2514 - DNA, 13 bp, Artificial Sequence
  Oligonucleotide for detection of SNP TSC0001018
tcattcaaataac

SEQ ID NO: 2515 - DNA, 13 bp, Artificial Sequence
  Oligonucleotide for detection of SNP TSC0001018
ttattttagtgay

SEQ ID NO: 2516 - DNA, 13 bp, Artificial Sequence
  Oligonucleotide for detection of SNP TSC0001018
rtcactaaaataa

SEQ ID NO: 2517 - DNA, 13 bp, Artificial Sequence
  Oligonucleotide for detection of SNP TSC0001018
ttatttaagtgay

SEQ ID NO: 2518 - DNA, 13 bp, Artificial Sequence
  Oligonucleotide for detection of SNP TSC0001018
rtcacttaaataa

SEQ ID NO: 2519 - DNA, 13 bp, Artificial Sequence
  Oligonucleotide for detection of SNP TSC0001019
atggttatggatg

SEQ ID NO: 2520 - DNA, 13 bp, Artificial Sequence
  Oligonucleotide for detection of SNP TSC0001019
catccataaccat

SEQ ID NO: 2521 - DNA, 13 bp, Artificial Sequence
  Oligonucleotide for detection of SNP TSC0001019
atggttgtggatg

SEQ ID NO: 2522 - DNA, 13 bp, Artificial Sequence
  Oligonucleotide for detection of SNP TSC0001019
catccacaaccat

SEQ ID NO: 2523 - DNA, 13 bp, Artificial Sequence
  Oligonucleotide for detection of SNP TSC0001019
acggttatggatg

SEQ ID NO: 2524 - DNA, 13 bp, Artificial Sequence
  Oligonucleotide for detection of SNP TSC0001019
catccataaccgt

SEQ ID NO: 2525 - DNA, 13 bp, Artificial Sequence
  Oligonucleotide for detection of SNP TSC0001019
acggttgtggatg

SEQ ID NO: 2526 - DNA, 13 bp, Artificial Sequence
  Oligonucleotide for detection of SNP TSC0001019
catccacaaccgt

SEQ ID NO: 2527 - DNA, 13 bp, Artificial Sequence
  Oligonucleotide for detection of SNP TSC0001019
atggtcgtggatg

SEQ ID NO: 2528 - DNA, 13 bp, Artificial Sequence
  Oligonucleotide for detection of SNP TSC0001019
catccacgaccat

SEQ ID NO: 2529 - DNA, 13 bp, Artificial Sequence
  Oligonucleotide for detection of SNP TSC0001019
acggtcgtggatg

SEQ ID NO: 2530 - DNA, 13 bp, Artificial Sequence
  Oligonucleotide for detection of SNP TSC0001019
catccacgaccgt

SEQ ID NO: 2531 - DNA, 13 bp, Artificial Sequence
  Oligonucleotide for detection of SNP TSC0001019
tatttatgattgt

SEQ ID NO: 2532 - DNA, 13 bp, Artificial Sequence
  Oligonucleotide for detection of SNP TSC0001019
acaatcataaata

SEQ ID NO: 2533 - DNA, 13 bp, Artificial Sequence
  Oligonucleotide for detection of SNP TSC0001019
tatttatgatcgt

SEQ ID NO: 2534 - DNA, 13 bp, Artificial Sequence
  Oligonucleotide for detection of SNP TSC0001019
acgatcataaata

SEQ ID NO: 2535 - DNA, 13 bp, Artificial Sequence
  Oligonucleotide for detection of SNP TSC0001019
tatttacgattgt

SEQ ID NO: 2536 - DNA, 13 bp, Artificial Sequence
  Oligonucleotide for detection of SNP TSC0001019
acaatcgtaaata

SEQ ID NO: 2537 - DNA, 13 bp, Artificial Sequence
  Oligonucleotide for detection of SNP TSC0001019
tatttacgatcgt

SEQ ID NO: 2538 - DNA, 13 bp, Artificial Sequence
  Oligonucleotide for detection of SNP TSC0001019
acgatcgtaaata

SEQ ID NO: 2539 - DNA, 13 bp, Artificial Sequence
  Oligonucleotide for detection of SNP TSC0001028
tttaaatgtagtt

SEQ ID NO: 2540 - DNA, 13 bp, Artificial Sequence
  Oligonucleotide for detection of SNP TSC0001028
aactacatttaaa

SEQ ID NO: 2541 - DNA, 13 bp, Artificial Sequence
  Oligonucleotide for detection of SNP TSC0001028
tttaaacgtagtt

SEQ ID NO: 2542 - DNA, 13 bp, Artificial Sequence
  Oligonucleotide for detection of SNP TSC0001028
aactacgtttaaa

SEQ ID NO: 2543 - DNA, 13 bp, Artificial Sequence
  Oligonucleotide for detection of SNP TSC0001028
agttatgtttaaa

SEQ ID NO: 2544 - DNA, 13 bp, Artificial Sequence
  Oligonucleotide for detection of SNP TSC0001028
tttaaacataact

SEQ ID NO: 2545 - DNA, 13 bp, Artificial Sequence
  Oligonucleotide for detection of SNP TSC0001028
agttatatttaaa

SEQ ID NO: 2546 - DNA, 13 bp, Artificial Sequence
  Oligonucleotide for detection of SNP TSC0001028
tttaaatataact

SEQ ID NO: 2547 - DNA, 13 bp, Artificial Sequence
  Oligonucleotide for detection of SNP TSC0001028
agttacgtttaaa

SEQ ID NO: 2548 - DNA, 13 bp, Artificial Sequence
  Oligonucleotide for detection of SNP TSC0001028
tttaaacgtaact

SEQ ID NO: 2549 - DNA, 13 bp, Artificial Sequence
  Oligonucleotide for detection of SNP TSC0001029
tgttttgagaaat

SEQ ID NO: 2550 - DNA, 13 bp, Artificial Sequence
  Oligonucleotide for detection of SNP TSC0001029
atttctcaaaaca

SEQ ID NO: 2551 - DNA, 13 bp, Artificial Sequence
  Oligonucleotide for detection of SNP TSC0001029
tgttttaagaaat

SEQ ID NO: 2552 - DNA, 13 bp, Artificial Sequence
  Oligonucleotide for detection of SNP TSC0001029
atttcttaaaaca

SEQ ID NO: 2553 - DNA, 13 bp, Artificial Sequence
  Oligonucleotide for detection of SNP TSC0001030
taggttgtatagg

SEQ ID NO: 2554 - DNA, 13 bp, Artificial Sequence
  Oligonucleotide for detection of SNP TSC0001030
cctatacaaccta

SEQ ID NO: 2555 - DNA, 13 bp, Artificial Sequence
  Oligonucleotide for detection of SNP TSC0001030
taggttttatagg

SEQ ID NO: 2556 - DNA, 13 bp, Artificial Sequence
  Oligonucleotide for detection of SNP TSC0001030
cctataaaaccta

SEQ ID NO: 2557 - DNA, 13 bp, Artificial Sequence
  Oligonucleotide for detection of SNP TSC0001030
tttgtatagtttg

SEQ ID NO: 2558 - DNA, 13 bp, Artificial Sequence
  Oligonucleotide for detection of SNP TSC0001030
caaactatacaaa

SEQ ID NO: 2559 - DNA, 13 bp, Artificial Sequence
  Oligonucleotide for detection of SNP TSC0001030
tttgtaaagtttg

SEQ ID NO: 2560 - DNA, 13 bp, Artificial Sequence
  Oligonucleotide for detection of SNP TSC0001030
caaactttacaaa

SEQ ID NO: 2561 - DNA, 13 bp, Artificial Sequence
  Oligonucleotide for detection of SNP TSC0001035
taatatatgagay

SEQ ID NO: 2562 - DNA, 13 bp, Artificial Sequence
  Oligonucleotide for detection of SNP TSC0001035
rtctcatatatta

SEQ ID NO: 2563 - DNA, 13 bp, Artificial Sequence
  Oligonucleotide for detection of SNP TSC0001035
taatatgtgagay

SEQ ID NO: 2564 - DNA, 13 bp, Artificial Sequence
  Oligonucleotide for detection of SNP TSC0001035
rtctcacatatta

SEQ ID NO: 2565 - DNA, 13 bp, Artificial Sequence
  Oligonucleotide for detection of SNP TSC0001036
ttaagaaataaat

SEQ ID NO: 2566 - DNA, 13 bp, Artificial Sequence
  Oligonucleotide for detection of SNP TSC0001036
atttatttcttaa

SEQ ID NO: 2567 - DNA, 13 bp, Artificial Sequence
  Oligonucleotide for detection of SNP TSC0001036
ttaagatataaat

SEQ ID NO: 2568 - DNA, 13 bp, Artificial Sequence
  Oligonucleotide for detection of SNP TSC0001036
atttatatcttaa

SEQ ID NO: 2569 - DNA, 13 bp, Artificial Sequence
  Oligonucleotide for detection of SNP TSC0001036
atttgttttttaa

SEQ ID NO: 2570 - DNA, 13 bp, Artificial Sequence
  Oligonucleotide for detection of SNP TSC0001036
ttaaaaaacaaat

SEQ ID NO: 2571 - DNA, 13 bp, Artificial Sequence
  Oligonucleotide for detection of SNP TSC0001036
atttgtattttaa

SEQ ID NO: 2572 - DNA, 13 bp, Artificial Sequence
  Oligonucleotide for detection of SNP TSC0001036
ttaaaatacaaat

SEQ ID NO: 2573 - DNA, 13 bp, Artificial Sequence
  Oligonucleotide for detection of SNP TSC0001037
tttattggtaaty

SEQ ID NO: 2574 - DNA, 13 bp, Artificial Sequence
  Oligonucleotide for detection of SNP TSC0001037
rattaccaataaa

SEQ ID NO: 2575 - DNA, 13 bp, Artificial Sequence
  Oligonucleotide for detection of SNP TSC0001037
tttattagtaaty

SEQ ID NO: 2576 - DNA, 13 bp, Artificial Sequence
  Oligonucleotide for detection of SNP TSC0001037
rattactaataaa

SEQ ID NO: 2577 - DNA, 13 bp, Artificial Sequence
  Oligonucleotide for detection of SNP TSC0001040
gaggagaaatttg

SEQ ID NO: 2578 - DNA, 13 bp, Artificial Sequence
  Oligonucleotide for detection of SNP TSC0001040
caaatttctcctc

SEQ ID NO: 2579 - DNA, 13 bp, Artificial Sequence
  Oligonucleotide for detection of SNP TSC0001040
gaggaggaatttg

SEQ ID NO: 2580 - DNA, 13 bp, Artificial Sequence
  Oligonucleotide for detection of SNP TSC0001040
caaattcctcctc

SEQ ID NO: 2581 - DNA, 13 bp, Artificial Sequence
  Oligonucleotide for detection of SNP TSC0001041
tgttattttttgt

SEQ ID NO: 2582 - DNA, 13 bp, Artificial Sequence
  Oligonucleotide for detection of SNP TSC0001041
acaaaaaataaca

SEQ ID NO: 2583 - DNA, 13 bp, Artificial Sequence
  Oligonucleotide for detection of SNP TSC0001041
tgttatgttttgt

SEQ ID NO: 2584 - DNA, 13 bp, Artificial Sequence
  Oligonucleotide for detection of SNP TSC0001041
acaaaacataaca

SEQ ID NO: 2585 - DNA, 13 bp, Artificial Sequence
  Oligonucleotide for detection of SNP TSC0001041
atagaggataata

SEQ ID NO: 2586 - DNA, 13 bp, Artificial Sequence
  Oligonucleotide for detection of SNP TSC0001041
tattatcctctat

SEQ ID NO: 2587 - DNA, 13 bp, Artificial Sequence
  Oligonucleotide for detection of SNP TSC0001041
atagagtataata

SEQ ID NO: 2588 - DNA, 13 bp, Artificial Sequence
  Oligonucleotide for detection of SNP TSC0001041
tattatactctat

SEQ ID NO: 2589 - DNA, 13 bp, Artificial Sequence
  Oligonucleotide for detection of SNP TSC0001045
ttgggtattagaa

SEQ ID NO: 2590 - DNA, 13 bp, Artificial Sequence
  Oligonucleotide for detection of SNP TSC0001045
ttctaatacccaa

SEQ ID NO: 2591 - DNA, 13 bp, Artificial Sequence
  Oligonucleotide for detection of SNP TSC0001045
ttgggtgttagaa

SEQ ID NO: 2592 - DNA, 13 bp, Artificial Sequence
  Oligonucleotide for detection of SNP TSC0001045
ttctaacacccaa

SEQ ID NO: 2593 - DNA, 13 bp, Artificial Sequence
  Oligonucleotide for detection of SNP TSC0001045
ttgggcgttagaa

SEQ ID NO: 2594 - DNA, 13 bp, Artificial Sequence
  Oligonucleotide for detection of SNP TSC0001045
ttctaacgcccaa

SEQ ID NO: 2595 - DNA, 13 bp, Artificial Sequence
  Oligonucleotide for detection of SNP TSC0001045
ttttggtgtttag

SEQ ID NO: 2596 - DNA, 13 bp, Artificial Sequence
  Oligonucleotide for detection of SNP TSC0001045
ctaaacaccaaaa

SEQ ID NO: 2597 - DNA, 13 bp, Artificial Sequence
  Oligonucleotide for detection of SNP TSC0001045
ttttggcgtttag

SEQ ID NO: 2598 - DNA, 13 bp, Artificial Sequence
  Oligonucleotide for detection of SNP TSC0001045
ctaaacgccaaaa

SEQ ID NO: 2599 - DNA, 13 bp, Artificial Sequence
  Oligonucleotide for detection of SNP TSC0001049
tttatgtttaggy

SEQ ID NO: 2600 - DNA, 13 bp, Artificial Sequence
  Oligonucleotide for detection of SNP TSC0001049
rcctaaacataaa

SEQ ID NO: 2601 - DNA, 13 bp, Artificial Sequence
  Oligonucleotide for detection of SNP TSC0001049
tttatggttaggy

SEQ ID NO: 2602 - DNA, 13 bp, Artificial Sequence
  Oligonucleotide for detection of SNP TSC0001049
rcctaaccataaa

SEQ ID NO: 2603 - DNA, 13 bp, Artificial Sequence
  Oligonucleotide for detection of SNP TSC0001049
gtttaggtatagg

SEQ ID NO: 2604 - DNA, 13 bp, Artificial Sequence
  Oligonucleotide for detection of SNP TSC0001049
cctatacctaaac

SEQ ID NO: 2605 - DNA, 13 bp, Artificial Sequence
  Oligonucleotide for detection of SNP TSC0001049
gtttagttatagg

SEQ ID NO: 2606 - DNA, 13 bp, Artificial Sequence
  Oligonucleotide for detection of SNP TSC0001049
cctataactaaac

SEQ ID NO: 2607 - DNA, 13 bp, Artificial Sequence
  Oligonucleotide for detection of SNP TSC0001050
ttttttatttgtt

SEQ ID NO: 2608 - DNA, 13 bp, Artificial Sequence
  Oligonucleotide for detection of SNP TSC0001050
aacaaataaaaaa

SEQ ID NO: 2609 - DNA, 13 bp, Artificial Sequence
  Oligonucleotide for detection of SNP TSC0001050
ttttttgtttgtt

SEQ ID NO: 2610 - DNA, 13 bp, Artificial Sequence
  Oligonucleotide for detection of SNP TSC0001050
aacaaacaaaaaa

SEQ ID NO: 2611 - DNA, 13 bp, Artificial Sequence
  Oligonucleotide for detection of SNP TSC0001050
tttttcgtttgtt

SEQ ID NO: 2612 - DNA, 13 bp, Artificial Sequence
  Oligonucleotide for detection of SNP TSC0001050
aacaaacgaaaaa

SEQ ID NO: 2613 - DNA, 13 bp, Artificial Sequence
  Oligonucleotide for detection of SNP TSC0001050
aataggtgagaaa

SEQ ID NO: 2614 - DNA, 13 bp, Artificial Sequence
  Oligonucleotide for detection of SNP TSC0001050
tttctcacctatt

SEQ ID NO: 2615 - DNA, 13 bp, Artificial Sequence
  Oligonucleotide for detection of SNP TSC0001050
aataggcgagaaa

SEQ ID NO: 2616 - DNA, 13 bp, Artificial Sequence
  Oligonucleotide for detection of SNP TSC0001050
tttctcgcctatt

SEQ ID NO: 2617 - DNA, 13 bp, Artificial Sequence
  Oligonucleotide for detection of SNP TSC0001051
gtttagtatttgy

SEQ ID NO: 2618 - DNA, 13 bp, Artificial Sequence
  Oligonucleotide for detection of SNP TSC0001051
rcaaatactaaac

SEQ ID NO: 2619 - DNA, 13 bp, Artificial Sequence
  Oligonucleotide for detection of SNP TSC0001051
gtttaggatttgy

SEQ ID NO: 2620 - DNA, 13 bp, Artificial Sequence
  Oligonucleotide for detection of SNP TSC0001051
rcaaatcctaaac

SEQ ID NO: 2621 - DNA, 13 bp, Artificial Sequence
  Oligonucleotide for detection of SNP TSC0001051
gtaaatgttaggy

SEQ ID NO: 2622 - DNA, 13 bp, Artificial Sequence
  Oligonucleotide for detection of SNP TSC0001051
rcctaacatttac

SEQ ID NO: 2623 - DNA, 13 bp, Artificial Sequence
  Oligonucleotide for detection of SNP TSC0001051
gtaaattttaggy

SEQ ID NO: 2624 - DNA, 13 bp, Artificial Sequence
  Oligonucleotide for detection of SNP TSC0001051
rcctaaaatttac

SEQ ID NO: 2625 - DNA, 13 bp, Artificial Sequence
  Oligonucleotide for detection of SNP TSC0001055
ttttttgtattag

SEQ ID NO: 2626 - DNA, 13 bp, Artificial Sequence
  Oligonucleotide for detection of SNP TSC0001055
ctaatacaaaaaa

SEQ ID NO: 2627 - DNA, 13 bp, Artificial Sequence
  Oligonucleotide for detection of SNP TSC0001055
ttttttatattag

SEQ ID NO: 2628 - DNA, 13 bp, Artificial Sequence
  Oligonucleotide for detection of SNP TSC0001055
ctaatataaaaaa

SEQ ID NO: 2629 - DNA, 13 bp, Artificial Sequence
  Oligonucleotide for detection of SNP TSC0001056
aagggatggaggt

SEQ ID NO: 2630 - DNA, 13 bp, Artificial Sequence
  Oligonucleotide for detection of SNP TSC0001056
acctccatccctt

SEQ ID NO: 2631 - DNA, 13 bp, Artificial Sequence
  Oligonucleotide for detection of SNP TSC0001056
aagggagggaggt

SEQ ID NO: 2632 - DNA, 13 bp, Artificial Sequence
  Oligonucleotide for detection of SNP TSC0001056
acctccctccctt

SEQ ID NO: 2633 - DNA, 13 bp, Artificial Sequence
  Oligonucleotide for detection of SNP TSC0001056
aagggacggaggt

SEQ ID NO: 2634 - DNA, 13 bp, Artificial Sequence
  Oligonucleotide for detection of SNP TSC0001056
acctccgtccctt

SEQ ID NO: 2635 - DNA, 13 bp, Artificial Sequence
  Oligonucleotide for detection of SNP TSC0001056
attttcgtttttt

SEQ ID NO: 2636 - DNA, 13 bp, Artificial Sequence
  Oligonucleotide for detection of SNP TSC0001056
aaaaaacgaaaat

SEQ ID NO: 2637 - DNA, 13 bp, Artificial Sequence
  Oligonucleotide for detection of SNP TSC0001057
tttttatgtggag

SEQ ID NO: 2638 - DNA, 13 bp, Artificial Sequence
  Oligonucleotide for detection of SNP TSC0001057
ctccacataaaaa

SEQ ID NO: 2639 - DNA, 13 bp, Artificial Sequence
  Oligonucleotide for detection of SNP TSC0001057
tttttacgtggag

SEQ ID NO: 2640 - DNA, 13 bp, Artificial Sequence
  Oligonucleotide for detection of SNP TSC0001057
ctccacgtaaaaa

SEQ ID NO: 2641 - DNA, 13 bp, Artificial Sequence
  Oligonucleotide for detection of SNP TSC0001057
ttttatgtaggaa

SEQ ID NO: 2642 - DNA, 13 bp, Artificial Sequence
  Oligonucleotide for detection of SNP TSC0001057
ttcctacataaaa

SEQ ID NO: 2643 - DNA, 13 bp, Artificial Sequence
  Oligonucleotide for detection of SNP TSC0001057
ttttatataggaa

SEQ ID NO: 2644 - DNA, 13 bp, Artificial Sequence
  Oligonucleotide for detection of SNP TSC0001057
ttcctatataaaa

SEQ ID NO: 2645 - DNA, 13 bp, Artificial Sequence
  Oligonucleotide for detection of SNP TSC0001057
ttttacgtaggaa

SEQ ID NO: 2646 - DNA, 13 bp, Artificial Sequence
  Oligonucleotide for detection of SNP TSC0001057
ttcctacgtaaaa

SEQ ID NO: 2647 - DNA, 13 bp, Artificial Sequence
  Oligonucleotide for detection of SNP TSC0001058
agttttatgtatg

SEQ ID NO: 2648 - DNA, 13 bp, Artificial Sequence
  Oligonucleotide for detection of SNP TSC0001058
catacataaaact

SEQ ID NO: 2649 - DNA, 13 bp, Artificial Sequence
  Oligonucleotide for detection of SNP TSC0001058
agttttgtgtatg

SEQ ID NO: 2650 - DNA, 13 bp, Artificial Sequence
  Oligonucleotide for detection of SNP TSC0001058
catacacaaaact

SEQ ID NO: 2651 - DNA, 13 bp, Artificial Sequence
  Oligonucleotide for detection of SNP TSC0001058
agtttcgtgtatg

SEQ ID NO: 2652 - DNA, 13 bp, Artificial Sequence
  Oligonucleotide for detection of SNP TSC0001058
catacacgaaact

SEQ ID NO: 2653 - DNA, 13 bp, Artificial Sequence
  Oligonucleotide for detection of SNP TSC0001058
tatatatggagtt

SEQ ID NO: 2654 - DNA, 13 bp, Artificial Sequence
  Oligonucleotide for detection of SNP TSC0001058
aactccatatata

SEQ ID NO: 2655 - DNA, 13 bp, Artificial Sequence
  Oligonucleotide for detection of SNP TSC0001058
tatatacggagtt

SEQ ID NO: 2656 - DNA, 13 bp, Artificial Sequence
  Oligonucleotide for detection of SNP TSC0001058
aactccgtatata

SEQ ID NO: 2657 - DNA, 13 bp, Artificial Sequence
  Oligonucleotide for detection of SNP TSC0001059
aggtgtatttgtt

SEQ ID NO: 2658 - DNA, 13 bp, Artificial Sequence
  Oligonucleotide for detection of SNP TSC0001059
aacaaatacacct

SEQ ID NO: 2659 - DNA, 13 bp, Artificial Sequence
  Oligonucleotide for detection of SNP TSC0001059
aggtgtgtttgtt

SEQ ID NO: 2660 - DNA, 13 bp, Artificial Sequence
  Oligonucleotide for detection of SNP TSC0001059
aacaaacacacct

SEQ ID NO: 2661 - DNA, 13 bp, Artificial Sequence
  Oligonucleotide for detection of SNP TSC0001059
aggcgtatttgtt

SEQ ID NO: 2662 - DNA, 13 bp, Artificial Sequence
  Oligonucleotide for detection of SNP TSC0001059
aacaaatacgcct

SEQ ID NO: 2663 - DNA, 13 bp, Artificial Sequence
  Oligonucleotide for detection of SNP TSC0001059
aggcgtgtttgtt

SEQ ID NO: 2664 - DNA, 13 bp, Artificial Sequence
  Oligonucleotide for detection of SNP TSC0001059
aacaaacacgcct

SEQ ID NO: 2665 - DNA, 13 bp, Artificial Sequence
  Oligonucleotide for detection of SNP TSC0001063
taggaggggggta

SEQ ID NO: 2666 - DNA, 13 bp, Artificial Sequence
  Oligonucleotide for detection of SNP TSC0001063
tacccccctccta

SEQ ID NO: 2667 - DNA, 13 bp, Artificial Sequence
  Oligonucleotide for detection of SNP TSC0001063
taggagtggggta

SEQ ID NO: 2668 - DNA, 13 bp, Artificial Sequence
  Oligonucleotide for detection of SNP TSC0001063
taccccactccta

SEQ ID NO: 2669 - DNA, 13 bp, Artificial Sequence
  Oligonucleotide for detection of SNP TSC0001063
tgttttttttttg

SEQ ID NO: 2670 - DNA, 13 bp, Artificial Sequence
  Oligonucleotide for detection of SNP TSC0001063
caaaaaaaaaaca

SEQ ID NO: 2671 - DNA, 13 bp, Artificial Sequence
  Oligonucleotide for detection of SNP TSC0001063
tgttttatttttg

SEQ ID NO: 2672 - DNA, 13 bp, Artificial Sequence
  Oligonucleotide for detection of SNP TSC0001063
caaaaataaaaca

SEQ ID NO: 2673 - DNA, 13 bp, Artificial Sequence
  Oligonucleotide for detection of SNP TSC0001064
tttattgtagtat

SEQ ID NO: 2674 - DNA, 13 bp, Artificial Sequence
  Oligonucleotide for detection of SNP TSC0001064
atactacaataaa

SEQ ID NO: 2675 - DNA, 13 bp, Artificial Sequence
  Oligonucleotide for detection of SNP TSC0001064
tttattttagtat

SEQ ID NO: 2676 - DNA, 13 bp, Artificial Sequence
  Oligonucleotide for detection of SNP TSC0001064
atactaaaataaa

SEQ ID NO: 2677 - DNA, 13 bp, Artificial Sequence
  Oligonucleotide for detection of SNP TSC0001064
atattgtaataag

SEQ ID NO: 2678 - DNA, 13 bp, Artificial Sequence
  Oligonucleotide for detection of SNP TSC0001064
cttattacaatat

SEQ ID NO: 2679 - DNA, 13 bp, Artificial Sequence
  Oligonucleotide for detection of SNP TSC0001064
atattgaaataag

SEQ ID NO: 2680 - DNA, 13 bp, Artificial Sequence
  Oligonucleotide for detection of SNP TSC0001064
cttatttcaatat

SEQ ID NO: 2681 - DNA, 13 bp, Artificial Sequence
  Oligonucleotide for detection of SNP TSC0001067
gttgtgtgagggt

SEQ ID NO: 2682 - DNA, 13 bp, Artificial Sequence
  Oligonucleotide for detection of SNP TSC0001067
accctcacacaac

SEQ ID NO: 2683 - DNA, 13 bp, Artificial Sequence
  Oligonucleotide for detection of SNP TSC0001067
gttgtgcgagggt

SEQ ID NO: 2684 - DNA, 13 bp, Artificial Sequence
  Oligonucleotide for detection of SNP TSC0001067
accctcgcacaac

SEQ ID NO: 2685 - DNA, 13 bp, Artificial Sequence
  Oligonucleotide for detection of SNP TSC0001067
atttttgtatagy

SEQ ID NO: 2686 - DNA, 13 bp, Artificial Sequence
  Oligonucleotide for detection of SNP TSC0001067
rctatacaaaaat

SEQ ID NO: 2687 - DNA, 13 bp, Artificial Sequence
  Oligonucleotide for detection of SNP TSC0001067
atttttatatagy

SEQ ID NO: 2688 - DNA, 13 bp, Artificial Sequence
  Oligonucleotide for detection of SNP TSC0001067
rctatataaaaat

SEQ ID NO: 2689 - DNA, 13 bp, Artificial Sequence
  Oligonucleotide for detection of SNP TSC0001067
attttcgtatagy

SEQ ID NO: 2690 - DNA, 13 bp, Artificial Sequence
  Oligonucleotide for detection of SNP TSC0001067
rctatacgaaaat

SEQ ID NO: 2691 - DNA, 13 bp, Artificial Sequence
  Oligonucleotide for detection of SNP TSC0001071
gatttttttttgy

SEQ ID NO: 2692 - DNA, 13 bp, Artificial Sequence
  Oligonucleotide for detection of SNP TSC0001071
rcaaaaaaaaatc

SEQ ID NO: 2693 - DNA, 13 bp, Artificial Sequence
  Oligonucleotide for detection of SNP TSC0001071
gattttgttttgy

SEQ ID NO: 2694 - DNA, 13 bp, Artificial Sequence
  Oligonucleotide for detection of SNP TSC0001071
rcaaaacaaaatc

SEQ ID NO: 2695 - DNA, 13 bp, Artificial Sequence
  Oligonucleotide for detection of SNP TSC0001071
gtagaggaagaty

SEQ ID NO: 2696 - DNA, 13 bp, Artificial Sequence
  Oligonucleotide for detection of SNP TSC0001071
ratcttcctctac

SEQ ID NO: 2697 - DNA, 13 bp, Artificial Sequence
  Oligonucleotide for detection of SNP TSC0001071
gtagagtaagaty

SEQ ID NO: 2698 - DNA, 13 bp, Artificial Sequence
  Oligonucleotide for detection of SNP TSC0001071
ratcttactctac

SEQ ID NO: 2699 - DNA, 13 bp, Artificial Sequence
  Oligonucleotide for detection of SNP TSC0001072
aaatagggtttga

SEQ ID NO: 2700 - DNA, 13 bp, Artificial Sequence
  Oligonucleotide for detection of SNP TSC0001072
tcaaaccctattt

SEQ ID NO: 2701 - DNA, 13 bp, Artificial Sequence
  Oligonucleotide for detection of SNP TSC0001072
aaatagagtttga

SEQ ID NO: 2702 - DNA, 13 bp, Artificial Sequence
  Oligonucleotide for detection of SNP TSC0001072
tcaaactctattt

SEQ ID NO: 2703 - DNA, 13 bp, Artificial Sequence
  Oligonucleotide for detection of SNP TSC0001072
aaatagggttcga

SEQ ID NO: 2704 - DNA, 13 bp, Artificial Sequence
  Oligonucleotide for detection of SNP TSC0001072
tcgaaccctattt

SEQ ID NO: 2705 - DNA, 13 bp, Artificial Sequence
  Oligonucleotide for detection of SNP TSC0001072
aaatagagttcga

SEQ ID NO: 2706 - DNA, 13 bp, Artificial Sequence
  Oligonucleotide for detection of SNP TSC0001072
tcgaactctattt

SEQ ID NO: 2707 - DNA, 13 bp, Artificial Sequence
  Oligonucleotide for detection of SNP TSC0001073
tttgttaatatgt

SEQ ID NO: 2708 - DNA, 13 bp, Artificial Sequence
  Oligonucleotide for detection of SNP TSC0001073
acatattaacaaa

SEQ ID NO: 2709 - DNA, 13 bp, Artificial Sequence
  Oligonucleotide for detection of SNP TSC0001073
tttgttgatatgt

SEQ ID NO: 2710 - DNA, 13 bp, Artificial Sequence
  Oligonucleotide for detection of SNP TSC0001073
acatatcaacaaa

SEQ ID NO: 2711 - DNA, 13 bp, Artificial Sequence
  Oligonucleotide for detection of SNP TSC0001073
tttgtcgatatgt

SEQ ID NO: 2712 - DNA, 13 bp, Artificial Sequence
  Oligonucleotide for detection of SNP TSC0001073
acatatcgacaaa

SEQ ID NO: 2713 - DNA, 13 bp, Artificial Sequence
  Oligonucleotide for detection of SNP TSC0001073
atatgttggtagg

SEQ ID NO: 2714 - DNA, 13 bp, Artificial Sequence
  Oligonucleotide for detection of SNP TSC0001073
cctaccaacatat

SEQ ID NO: 2715 - DNA, 13 bp, Artificial Sequence
  Oligonucleotide for detection of SNP TSC0001073
atatgtcggtagg

SEQ ID NO: 2716 - DNA, 13 bp, Artificial Sequence
  Oligonucleotide for detection of SNP TSC0001073
cctaccgacatat

SEQ ID NO: 2717 - DNA, 13 bp, Artificial Sequence
  Oligonucleotide for detection of SNP TSC0001078
gggaattggtaag

SEQ ID NO: 2718 - DNA, 13 bp, Artificial Sequence
  Oligonucleotide for detection of SNP TSC0001078
cttaccaattccc

SEQ ID NO: 2719 - DNA, 13 bp, Artificial Sequence
  Oligonucleotide for detection of SNP TSC0001078
gggaatcggtaag

SEQ ID NO: 2720 - DNA, 13 bp, Artificial Sequence
  Oligonucleotide for detection of SNP TSC0001078
cttaccgattccc

SEQ ID NO: 2721 - DNA, 13 bp, Artificial Sequence
  Oligonucleotide for detection of SNP TSC0001078
tttgttggtttty

SEQ ID NO: 2722 - DNA, 13 bp, Artificial Sequence
  Oligonucleotide for detection of SNP TSC0001078
raaaaccaacaaa

SEQ ID NO: 2723 - DNA, 13 bp, Artificial Sequence
  Oligonucleotide for detection of SNP TSC0001078
tttgttagtttty

SEQ ID NO: 2724 - DNA, 13 bp, Artificial Sequence
  Oligonucleotide for detection of SNP TSC0001078
raaaactaacaaa

SEQ ID NO: 2725 - DNA, 13 bp, Artificial Sequence
  Oligonucleotide for detection of SNP TSC0001078
tttgtcggtttty

SEQ ID NO: 2726 - DNA, 13 bp, Artificial Sequence
  Oligonucleotide for detection of SNP TSC0001078
raaaaccgacaaa

SEQ ID NO: 2727 - DNA, 13 bp, Artificial Sequence
  Oligonucleotide for detection of SNP TSC0001082
ttatatatttatt

SEQ ID NO: 2728 - DNA, 13 bp, Artificial Sequence
  Oligonucleotide for detection of SNP TSC0001082
aataaatatataa

SEQ ID NO: 2729 - DNA, 13 bp, Artificial Sequence
  Oligonucleotide for detection of SNP TSC0001082
ttatatttttatt

SEQ ID NO: 2730 - DNA, 13 bp, Artificial Sequence
  Oligonucleotide for detection of SNP TSC0001082
aataaaaatataa

SEQ ID NO: 2731 - DNA, 13 bp, Artificial Sequence
  Oligonucleotide for detection of SNP TSC0001082
aataaatgtatga

SEQ ID NO: 2732 - DNA, 13 bp, Artificial Sequence
  Oligonucleotide for detection of SNP TSC0001082
tcatacatttatt

SEQ ID NO: 2733 - DNA, 13 bp, Artificial Sequence
  Oligonucleotide for detection of SNP TSC0001082
aataaaagtatga

SEQ ID NO: 2734 - DNA, 13 bp, Artificial Sequence
  Oligonucleotide for detection of SNP TSC0001082
tcatacttttatt

SEQ ID NO: 2735 - DNA, 13 bp, Artificial Sequence
  Oligonucleotide for detection of SNP TSC0001083
ttttagaattgtg

SEQ ID NO: 2736 - DNA, 13 bp, Artificial Sequence
  Oligonucleotide for detection of SNP TSC0001083
cacaattctaaaa

SEQ ID NO: 2737 - DNA, 13 bp, Artificial Sequence
  Oligonucleotide for detection of SNP TSC0001083
ttttagtattgtg

SEQ ID NO: 2738 - DNA, 13 bp, Artificial Sequence
  Oligonucleotide for detection of SNP TSC0001083
cacaatactaaaa

SEQ ID NO: 2739 - DNA, 13 bp, Artificial Sequence
  Oligonucleotide for detection of SNP TSC0001083
tatagttttggag

SEQ ID NO: 2740 - DNA, 13 bp, Artificial Sequence
  Oligonucleotide for detection of SNP TSC0001083
ctccaaaactata

SEQ ID NO: 2741 - DNA, 13 bp, Artificial Sequence
  Oligonucleotide for detection of SNP TSC0001083
tatagtattggag

SEQ ID NO: 2742 - DNA, 13 bp, Artificial Sequence
  Oligonucleotide for detection of SNP TSC0001083
ctccaatactata

SEQ ID NO: 2743 - DNA, 13 bp, Artificial Sequence
  Oligonucleotide for detection of SNP TSC0001086
gggatatgtgttt

SEQ ID NO: 2744 - DNA, 13 bp, Artificial Sequence
  Oligonucleotide for detection of SNP TSC0001086
aaacacatatccc

SEQ ID NO: 2745 - DNA, 13 bp, Artificial Sequence
  Oligonucleotide for detection of SNP TSC0001086
gggatacgtgttt

SEQ ID NO: 2746 - DNA, 13 bp, Artificial Sequence
  Oligonucleotide for detection of SNP TSC0001086
aaacacgtatccc

SEQ ID NO: 2747 - DNA, 13 bp, Artificial Sequence
  Oligonucleotide for detection of SNP TSC0001086
aagtatgtgttty

SEQ ID NO: 2748 - DNA, 13 bp, Artificial Sequence
  Oligonucleotide for detection of SNP TSC0001086
raaacacatactt

SEQ ID NO: 2749 - DNA, 13 bp, Artificial Sequence
  Oligonucleotide for detection of SNP TSC0001086
aagtatatgttty

SEQ ID NO: 2750 - DNA, 13 bp, Artificial Sequence
  Oligonucleotide for detection of SNP TSC0001086
raaacatatactt

SEQ ID NO: 2751 - DNA, 13 bp, Artificial Sequence
  Oligonucleotide for detection of SNP TSC0001086
aagtacgtgttty

SEQ ID NO: 2752 - DNA, 13 bp, Artificial Sequence
  Oligonucleotide for detection of SNP TSC0001086
raaacacgtactt

SEQ ID NO: 2753 - DNA, 13 bp, Artificial Sequence
  Oligonucleotide for detection of SNP TSC0001087
tttataagtaatg

SEQ ID NO: 2754 - DNA, 13 bp, Artificial Sequence
  Oligonucleotide for detection of SNP TSC0001087
cattacttataaa

SEQ ID NO: 2755 - DNA, 13 bp, Artificial Sequence
  Oligonucleotide for detection of SNP TSC0001087
tttatatgtaatg

SEQ ID NO: 2756 - DNA, 13 bp, Artificial Sequence
  Oligonucleotide for detection of SNP TSC0001087
cattacatataaa

SEQ ID NO: 2757 - DNA, 13 bp, Artificial Sequence
  Oligonucleotide for detection of SNP TSC0001087
tattatttgtaga

SEQ ID NO: 2758 - DNA, 13 bp, Artificial Sequence
  Oligonucleotide for detection of SNP TSC0001087
tctacaaataata

SEQ ID NO: 2759 - DNA, 13 bp, Artificial Sequence
  Oligonucleotide for detection of SNP TSC0001087
tattatatgtaga

SEQ ID NO: 2760 - DNA, 13 bp, Artificial Sequence
  Oligonucleotide for detection of SNP TSC0001087
tctacatataata

SEQ ID NO: 2761 - DNA, 13 bp, Artificial Sequence
  Oligonucleotide for detection of SNP TSC0001088
ttatatatatata

SEQ ID NO: 2762 - DNA, 13 bp, Artificial Sequence
  Oligonucleotide for detection of SNP TSC0001088
tatatatatataa

SEQ ID NO: 2763 - DNA, 13 bp, Artificial Sequence
  Oligonucleotide for detection of SNP TSC0001088
ttatatgtatata

SEQ ID NO: 2764 - DNA, 13 bp, Artificial Sequence
  Oligonucleotide for detection of SNP TSC0001088
tatatacatataa

SEQ ID NO: 2765 - DNA, 13 bp, Artificial Sequence
  Oligonucleotide for detection of SNP TSC0001088
ttatacgtatata

SEQ ID NO: 2766 - DNA, 13 bp, Artificial Sequence
  Oligonucleotide for detection of SNP TSC0001088
tatatacgtataa

SEQ ID NO: 2767 - DNA, 13 bp, Artificial Sequence
  Oligonucleotide for detection of SNP TSC0001088
tgtgtgtgtgtga

SEQ ID NO: 2768 - DNA, 13 bp, Artificial Sequence
  Oligonucleotide for detection of SNP TSC0001088
tcacacacacaca

SEQ ID NO: 2769 - DNA, 13 bp, Artificial Sequence
  Oligonucleotide for detection of SNP TSC0001088
tgtgtgcgtgtga

SEQ ID NO: 2770 - DNA, 13 bp, Artificial Sequence
  Oligonucleotide for detection of SNP TSC0001088
tcacacgcacaca

SEQ ID NO: 2771 - DNA, 13 bp, Artificial Sequence
  Oligonucleotide for detection of SNP TSC0001089
gtgaatgatattg

SEQ ID NO: 2772 - DNA, 13 bp, Artificial Sequence
  Oligonucleotide for detection of SNP TSC0001089
caatatcattcac

SEQ ID NO: 2773 - DNA, 13 bp, Artificial Sequence
  Oligonucleotide for detection of SNP TSC0001089
gtgaataatattg

SEQ ID NO: 2774 - DNA, 13 bp, Artificial Sequence
  Oligonucleotide for detection of SNP TSC0001089
caatattattcac

SEQ ID NO: 2775 - DNA, 13 bp, Artificial Sequence
  Oligonucleotide for detection of SNP TSC0001093
ggaattgaaaatg

SEQ ID NO: 2776 - DNA, 13 bp, Artificial Sequence
  Oligonucleotide for detection of SNP TSC0001093
cattttcaattcc

SEQ ID NO: 2777 - DNA, 13 bp, Artificial Sequence
  Oligonucleotide for detection of SNP TSC0001093
ggaattaaaaatg

SEQ ID NO: 2778 - DNA, 13 bp, Artificial Sequence
  Oligonucleotide for detection of SNP TSC0001093
catttttaattcc

SEQ ID NO: 2779 - DNA, 13 bp, Artificial Sequence
  Oligonucleotide for detection of SNP TSC0001094
agattaattgaat

SEQ ID NO: 2780 - DNA, 13 bp, Artificial Sequence
  Oligonucleotide for detection of SNP TSC0001094
attcaattaatct

SEQ ID NO: 2781 - DNA, 13 bp, Artificial Sequence
  Oligonucleotide for detection of SNP TSC0001094
agattagttgaat

SEQ ID NO: 2782 - DNA, 13 bp, Artificial Sequence
  Oligonucleotide for detection of SNP TSC0001094
attcaactaatct

SEQ ID NO: 2783 - DNA, 13 bp, Artificial Sequence
  Oligonucleotide for detection of SNP TSC0001095
aaagttatgttat

SEQ ID NO: 2784 - DNA, 13 bp, Artificial Sequence
  Oligonucleotide for detection of SNP TSC0001095
ataacataacttt

SEQ ID NO: 2785 - DNA, 13 bp, Artificial Sequence
  Oligonucleotide for detection of SNP TSC0001095
aaagttttgttat

SEQ ID NO: 2786 - DNA, 13 bp, Artificial Sequence
  Oligonucleotide for detection of SNP TSC0001095
ataacaaaacttt

SEQ ID NO: 2787 - DNA, 13 bp, Artificial Sequence
  Oligonucleotide for detection of SNP TSC0001095
atgatataatttt

SEQ ID NO: 2788 - DNA, 13 bp, Artificial Sequence
  Oligonucleotide for detection of SNP TSC0001095
aaaattatatcat

SEQ ID NO: 2789 - DNA, 13 bp, Artificial Sequence
  Oligonucleotide for detection of SNP TSC0001095
atgataaaatttt

SEQ ID NO: 2790 - DNA, 13 bp, Artificial Sequence
  Oligonucleotide for detection of SNP TSC0001095
aaaattttatcat

SEQ ID NO: 2791 - DNA, 13 bp, Artificial Sequence
  Oligonucleotide for detection of SNP TSC0001097
atattttgatgtt

SEQ ID NO: 2792 - DNA, 13 bp, Artificial Sequence
  Oligonucleotide for detection of SNP TSC0001097
aacatcaaaatat

SEQ ID NO: 2793 - DNA, 13 bp, Artificial Sequence
  Oligonucleotide for detection of SNP TSC0001097
atatttcgatgtt

SEQ ID NO: 2794 - DNA, 13 bp, Artificial Sequence
  Oligonucleotide for detection of SNP TSC0001097
aacatcgaaatat

SEQ ID NO: 2795 - DNA, 13 bp, Artificial Sequence
  Oligonucleotide for detection of SNP TSC0001097
aatattggggtgt

SEQ ID NO: 2796 - DNA, 13 bp, Artificial Sequence
  Oligonucleotide for detection of SNP TSC0001097
acaccccaatatt

SEQ ID NO: 2797 - DNA, 13 bp, Artificial Sequence
  Oligonucleotide for detection of SNP TSC0001097
aatattagggtgt

SEQ ID NO: 2798 - DNA, 13 bp, Artificial Sequence
  Oligonucleotide for detection of SNP TSC0001097
acaccctaatatt

SEQ ID NO: 2799 - DNA, 13 bp, Artificial Sequence
  Oligonucleotide for detection of SNP TSC0001097
aatatcggggtgt

SEQ ID NO: 2800 - DNA, 13 bp, Artificial Sequence
  Oligonucleotide for detection of SNP TSC0001097
acaccccgatatt

SEQ ID NO: 2801 - DNA, 13 bp, Artificial Sequence
  Oligonucleotide for detection of SNP TSC0001098
tatttttgagtty

SEQ ID NO: 2802 - DNA, 13 bp, Artificial Sequence
  Oligonucleotide for detection of SNP TSC0001098
raactcaaaaata

SEQ ID NO: 2803 - DNA, 13 bp, Artificial Sequence
  Oligonucleotide for detection of SNP TSC0001098
tattttcgagtty

SEQ ID NO: 2804 - DNA, 13 bp, Artificial Sequence
  Oligonucleotide for detection of SNP TSC0001098
raactcgaaaata

SEQ ID NO: 2805 - DNA, 13 bp, Artificial Sequence
  Oligonucleotide for detection of SNP TSC0001098
ggatttgagagtg

SEQ ID NO: 2806 - DNA, 13 bp, Artificial Sequence
  Oligonucleotide for detection of SNP TSC0001098
cactctcaaatcc

SEQ ID NO: 2807 - DNA, 13 bp, Artificial Sequence
  Oligonucleotide for detection of SNP TSC0001098
ggatttaagagtg

SEQ ID NO: 2808 - DNA, 13 bp, Artificial Sequence
  Oligonucleotide for detection of SNP TSC0001098
cactcttaaatcc

SEQ ID NO: 2809 - DNA, 13 bp, Artificial Sequence
  Oligonucleotide for detection of SNP TSC0001098
ggattcgagagtg

SEQ ID NO: 2810 - DNA, 13 bp, Artificial Sequence
  Oligonucleotide for detection of SNP TSC0001098
cactctcgaatcc

SEQ ID NO: 2811 - DNA, 13 bp, Artificial Sequence
  Oligonucleotide for detection of SNP TSC0001099
tttgaatatatta

SEQ ID NO: 2812 - DNA, 13 bp, Artificial Sequence
  Oligonucleotide for detection of SNP TSC0001099
taatatattcaaa

SEQ ID NO: 2813 - DNA, 13 bp, Artificial Sequence
  Oligonucleotide for detection of SNP TSC0001099
tttgaagatatta

SEQ ID NO: 2814 - DNA, 13 bp, Artificial Sequence
  Oligonucleotide for detection of SNP TSC0001099
taatatcttcaaa

SEQ ID NO: 2815 - DNA, 13 bp, Artificial Sequence
  Oligonucleotide for detection of SNP TSC0001099
taatatgtttagg

SEQ ID NO: 2816 - DNA, 13 bp, Artificial Sequence
  Oligonucleotide for detection of SNP TSC0001099
cctaaacatatta

SEQ ID NO: 2817 - DNA, 13 bp, Artificial Sequence
  Oligonucleotide for detection of SNP TSC0001099
taatatttttagg

SEQ ID NO: 2818 - DNA, 13 bp, Artificial Sequence
  Oligonucleotide for detection of SNP TSC0001099
cctaaaaatatta

SEQ ID NO: 2819 - DNA, 13 bp, Artificial Sequence
  Oligonucleotide for detection of SNP TSC0001100
gtttaggatagag

SEQ ID NO: 2820 - DNA, 13 bp, Artificial Sequence
  Oligonucleotide for detection of SNP TSC0001100
ctctatcctaaac

SEQ ID NO: 2821 - DNA, 13 bp, Artificial Sequence
  Oligonucleotide for detection of SNP TSC0001100
gtttagaatagag

SEQ ID NO: 2822 - DNA, 13 bp, Artificial Sequence
  Oligonucleotide for detection of SNP TSC0001100
ctctattctaaac

SEQ ID NO: 2823 - DNA, 13 bp, Artificial Sequence
  Oligonucleotide for detection of SNP TSC0001101
atgtttataaata

SEQ ID NO: 2824 - DNA, 13 bp, Artificial Sequence
  Oligonucleotide for detection of SNP TSC0001101
tatttataaacat

SEQ ID NO: 2825 - DNA, 13 bp, Artificial Sequence
  Oligonucleotide for detection of SNP TSC0001101
atgtttgtaaata

SEQ ID NO: 2826 - DNA, 13 bp, Artificial Sequence
  Oligonucleotide for detection of SNP TSC0001101
tatttacaaacat

SEQ ID NO: 2827 - DNA, 13 bp, Artificial Sequence
  Oligonucleotide for detection of SNP TSC0001101
atgttcgtaaata

SEQ ID NO: 2828 - DNA, 13 bp, Artificial Sequence
  Oligonucleotide for detection of SNP TSC0001101
tatttacgaacat

SEQ ID NO: 2829 - DNA, 13 bp, Artificial Sequence
  Oligonucleotide for detection of SNP TSC0001101
tatttgtgagtat

SEQ ID NO: 2830 - DNA, 13 bp, Artificial Sequence
  Oligonucleotide for detection of SNP TSC0001101
atactcacaaata

SEQ ID NO: 2831 - DNA, 13 bp, Artificial Sequence
  Oligonucleotide for detection of SNP TSC0001101
tatttgcgagtat

SEQ ID NO: 2832 - DNA, 13 bp, Artificial Sequence
  Oligonucleotide for detection of SNP TSC0001101
atactcgcaaata

SEQ ID NO: 2833 - DNA, 13 bp, Artificial Sequence
  Oligonucleotide for detection of SNP TSC0001102
ataagatgaaaga

SEQ ID NO: 2834 - DNA, 13 bp, Artificial Sequence
  Oligonucleotide for detection of SNP TSC0001102
tctttcatcttat

SEQ ID NO: 2835 - DNA, 13 bp, Artificial Sequence
  Oligonucleotide for detection of SNP TSC0001102
ataagaggaaaga

SEQ ID NO: 2836 - DNA, 13 bp, Artificial Sequence
  Oligonucleotide for detection of SNP TSC0001102
tctttcctcttat

SEQ ID NO: 2837 - DNA, 13 bp, Artificial Sequence
  Oligonucleotide for detection of SNP TSC0001102
ataagacgaaaga

SEQ ID NO: 2838 - DNA, 13 bp, Artificial Sequence
  Oligonucleotide for detection of SNP TSC0001102
tctttcgtcttat

SEQ ID NO: 2839 - DNA, 13 bp, Artificial Sequence
  Oligonucleotide for detection of SNP TSC0001102
ttttttgttttgt

SEQ ID NO: 2840 - DNA, 13 bp, Artificial Sequence
  Oligonucleotide for detection of SNP TSC0001102
acaaaacaaaaaa

SEQ ID NO: 2841 - DNA, 13 bp, Artificial Sequence
  Oligonucleotide for detection of SNP TSC0001102
tttttttttttgt

SEQ ID NO: 2842 - DNA, 13 bp, Artificial Sequence
  Oligonucleotide for detection of SNP TSC0001102
acaaaaaaaaaaa

SEQ ID NO: 2843 - DNA, 13 bp, Artificial Sequence
  Oligonucleotide for detection of SNP TSC0001102
tttttcgttttgt

SEQ ID NO: 2844 - DNA, 13 bp, Artificial Sequence
  Oligonucleotide for detection of SNP TSC0001102
acaaaacgaaaaa

SEQ ID NO: 2845 - DNA, 13 bp, Artificial Sequence
  Oligonucleotide for detection of SNP TSC0001110
ttttgggtaaaty

SEQ ID NO: 2846 - DNA, 13 bp, Artificial Sequence
  Oligonucleotide for detection of SNP TSC0001110
ratttacccaaaa

SEQ ID NO: 2847 - DNA, 13 bp, Artificial Sequence
  Oligonucleotide for detection of SNP TSC0001110
ttttggataaaty

SEQ ID NO: 2848 - DNA, 13 bp, Artificial Sequence
  Oligonucleotide for detection of SNP TSC0001110
ratttatccaaaa

SEQ ID NO: 2849 - DNA, 13 bp, Artificial Sequence
  Oligonucleotide for detection of SNP TSC0001122
attttagttatgy

SEQ ID NO: 2850 - DNA, 13 bp, Artificial Sequence
  Oligonucleotide for detection of SNP TSC0001122
rcataactaaaat

SEQ ID NO: 2851 - DNA, 13 bp, Artificial Sequence
  Oligonucleotide for detection of SNP TSC0001122
attttaattatgy

SEQ ID NO: 2852 - DNA, 13 bp, Artificial Sequence
  Oligonucleotide for detection of SNP TSC0001122
rcataattaaaat

SEQ ID NO: 2853 - DNA, 13 bp, Artificial Sequence
  Oligonucleotide for detection of SNP TSC0001123
tgttttaatggay

SEQ ID NO: 2854 - DNA, 13 bp, Artificial Sequence
  Oligonucleotide for detection of SNP TSC0001123
rtccattaaaaca

SEQ ID NO: 2855 - DNA, 13 bp, Artificial Sequence
  Oligonucleotide for detection of SNP TSC0001123
tgttttgatggay

SEQ ID NO: 2856 - DNA, 13 bp, Artificial Sequence
  Oligonucleotide for detection of SNP TSC0001123
rtccatcaaaaca

SEQ ID NO: 2857 - DNA, 13 bp, Artificial Sequence
  Oligonucleotide for detection of SNP TSC0001123
tgtttcgatggay

SEQ ID NO: 2858 - DNA, 13 bp, Artificial Sequence
  Oligonucleotide for detection of SNP TSC0001123
rtccatcgaaaca

SEQ ID NO: 2859 - DNA, 13 bp, Artificial Sequence
  Oligonucleotide for detection of SNP TSC0001123
gtttattgggata

SEQ ID NO: 2860 - DNA, 13 bp, Artificial Sequence
  Oligonucleotide for detection of SNP TSC0001123
tatcccaataaac

SEQ ID NO: 2861 - DNA, 13 bp, Artificial Sequence
  Oligonucleotide for detection of SNP TSC0001123
gtttatcgggata

SEQ ID NO: 2862 - DNA, 13 bp, Artificial Sequence
  Oligonucleotide for detection of SNP TSC0001123
tatcccgataaac

SEQ ID NO: 2863 - DNA, 13 bp, Artificial Sequence
  Oligonucleotide for detection of SNP TSC0001127
aatttagtttttt

SEQ ID NO: 2864 - DNA, 13 bp, Artificial Sequence
  Oligonucleotide for detection of SNP TSC0001127
aaaaaactaaatt

SEQ ID NO: 2865 - DNA, 13 bp, Artificial Sequence
  Oligonucleotide for detection of SNP TSC0001127
aatttattttttt

SEQ ID NO: 2866 - DNA, 13 bp, Artificial Sequence
  Oligonucleotide for detection of SNP TSC0001127
aaaaaaataaatt

SEQ ID NO: 2867 - DNA, 13 bp, Artificial Sequence
  Oligonucleotide for detection of SNP TSC0001127
aggagattgagtt

SEQ ID NO: 2868 - DNA, 13 bp, Artificial Sequence
  Oligonucleotide for detection of SNP TSC0001127
aactcaatctcct

SEQ ID NO: 2869 - DNA, 13 bp, Artificial Sequence
  Oligonucleotide for detection of SNP TSC0001127
aggagaatgagtt

SEQ ID NO: 2870 - DNA, 13 bp, Artificial Sequence
  Oligonucleotide for detection of SNP TSC0001127
aactcattctcct

SEQ ID NO: 2871 - DNA, 13 bp, Artificial Sequence
  Oligonucleotide for detection of SNP TSC0001128
tggagggaaaaty

SEQ ID NO: 2872 - DNA, 13 bp, Artificial Sequence
  Oligonucleotide for detection of SNP TSC0001128
rattttccctcca

SEQ ID NO: 2873 - DNA, 13 bp, Artificial Sequence
  Oligonucleotide for detection of SNP TSC0001128
tggaggaaaaaty

SEQ ID NO: 2874 - DNA, 13 bp, Artificial Sequence
  Oligonucleotide for detection of SNP TSC0001128
ratttttcctcca

SEQ ID NO: 2875 - DNA, 13 bp, Artificial Sequence
  Oligonucleotide for detection of SNP TSC0001129
ttgaaatgtggag

SEQ ID NO: 2876 - DNA, 13 bp, Artificial Sequence
  Oligonucleotide for detection of SNP TSC0001129
ctccacatttcaa

SEQ ID NO: 2877 - DNA, 13 bp, Artificial Sequence
  Oligonucleotide for detection of SNP TSC0001129
ttgaaacgtggag

SEQ ID NO: 2878 - DNA, 13 bp, Artificial Sequence
  Oligonucleotide for detection of SNP TSC0001129
ctccacgtttcaa

SEQ ID NO: 2879 - DNA, 13 bp, Artificial Sequence
  Oligonucleotide for detection of SNP TSC0001129
ttgaaatgcggag

SEQ ID NO: 2880 - DNA, 13 bp, Artificial Sequence
  Oligonucleotide for detection of SNP TSC0001129
ctccgcatttcaa

SEQ ID NO: 2881 - DNA, 13 bp, Artificial Sequence
  Oligonucleotide for detection of SNP TSC0001129
ttgaaacgcggag

SEQ ID NO: 2882 - DNA, 13 bp, Artificial Sequence
  Oligonucleotide for detection of SNP TSC0001129
ctccgcgtttcaa

SEQ ID NO: 2883 - DNA, 13 bp, Artificial Sequence
  Oligonucleotide for detection of SNP TSC0001129
ttttgtgttttag

SEQ ID NO: 2884 - DNA, 13 bp, Artificial Sequence
  Oligonucleotide for detection of SNP TSC0001129
ctaaaacacaaaa

SEQ ID NO: 2885 - DNA, 13 bp, Artificial Sequence
  Oligonucleotide for detection of SNP TSC0001129
ttttgtattttag

SEQ ID NO: 2886 - DNA, 13 bp, Artificial Sequence
  Oligonucleotide for detection of SNP TSC0001129
ctaaaatacaaaa

SEQ ID NO: 2887 - DNA, 13 bp, Artificial Sequence
  Oligonucleotide for detection of SNP TSC0001129
tttcgtgttttag

SEQ ID NO: 2888 - DNA, 13 bp, Artificial Sequence
  Oligonucleotide for detection of SNP TSC0001129
ctaaaacacgaaa

SEQ ID NO: 2889 - DNA, 13 bp, Artificial Sequence
  Oligonucleotide for detection of SNP TSC0001129
tttcgtattttag

SEQ ID NO: 2890 - DNA, 13 bp, Artificial Sequence
  Oligonucleotide for detection of SNP TSC0001129
ctaaaatacgaaa

SEQ ID NO: 2891 - DNA, 13 bp, Artificial Sequence
  Oligonucleotide for detection of SNP TSC0001129
ttttgcgttttag

SEQ ID NO: 2892 - DNA, 13 bp, Artificial Sequence
  Oligonucleotide for detection of SNP TSC0001129
ctaaaacgcaaaa

SEQ ID NO: 2893 - DNA, 13 bp, Artificial Sequence
  Oligonucleotide for detection of SNP TSC0001129
tttcgcgttttag

SEQ ID NO: 2894 - DNA, 13 bp, Artificial Sequence
  Oligonucleotide for detection of SNP TSC0001129
ctaaaacgcgaaa

SEQ ID NO: 2895 - DNA, 13 bp, Artificial Sequence
  Oligonucleotide for detection of SNP TSC0001133
ttttttaaaaaaa

SEQ ID NO: 2896 - DNA, 13 bp, Artificial Sequence
  Oligonucleotide for detection of SNP TSC0001133
tttttttaaaaaa

SEQ ID NO: 2897 - DNA, 13 bp, Artificial Sequence
  Oligonucleotide for detection of SNP TSC0001133
tttttttaaaaag

SEQ ID NO: 2898 - DNA, 13 bp, Artificial Sequence
  Oligonucleotide for detection of SNP TSC0001133
ctttttaaaaaaa

SEQ ID NO: 2899 - DNA, 13 bp, Artificial Sequence
  Oligonucleotide for detection of SNP TSC0001133
ttttttaaaaaag

SEQ ID NO: 2900 - DNA, 13 bp, Artificial Sequence
  Oligonucleotide for detection of SNP TSC0001133
cttttttaaaaaa

SEQ ID NO: 2901 - DNA, 13 bp, Artificial Sequence
  Oligonucleotide for detection of SNP TSC0001134
ggtttgtgtgaga

SEQ ID NO: 2902 - DNA, 13 bp, Artificial Sequence
  Oligonucleotide for detection of SNP TSC0001134
tctcacacaaacc

SEQ ID NO: 2903 - DNA, 13 bp, Artificial Sequence
  Oligonucleotide for detection of SNP TSC0001134
ggtttgcgtgaga

SEQ ID NO: 2904 - DNA, 13 bp, Artificial Sequence
  Oligonucleotide for detection of SNP TSC0001134
tctcacgcaaacc

SEQ ID NO: 2905 - DNA, 13 bp, Artificial Sequence
  Oligonucleotide for detection of SNP TSC0001134
ttttatgtaagty

SEQ ID NO: 2906 - DNA, 13 bp, Artificial Sequence
  Oligonucleotide for detection of SNP TSC0001134
racttacataaaa

SEQ ID NO: 2907 - DNA, 13 bp, Artificial Sequence
  Oligonucleotide for detection of SNP TSC0001134
ttttatataagty

SEQ ID NO: 2908 - DNA, 13 bp, Artificial Sequence
  Oligonucleotide for detection of SNP TSC0001134
racttatataaaa

SEQ ID NO: 2909 - DNA, 13 bp, Artificial Sequence
  Oligonucleotide for detection of SNP TSC0001134
ttttacgtaagty

SEQ ID NO: 2910 - DNA, 13 bp, Artificial Sequence
  Oligonucleotide for detection of SNP TSC0001134
racttacgtaaaa

SEQ ID NO: 2911 - DNA, 13 bp, Artificial Sequence
  Oligonucleotide for detection of SNP TSC0001136
attggtgaaatty

SEQ ID NO: 2912 - DNA, 13 bp, Artificial Sequence
  Oligonucleotide for detection of SNP TSC0001136
raatttcaccaat

SEQ ID NO: 2913 - DNA, 13 bp, Artificial Sequence
  Oligonucleotide for detection of SNP TSC0001136
attggtaaaatty

SEQ ID NO: 2914 - DNA, 13 bp, Artificial Sequence
  Oligonucleotide for detection of SNP TSC0001136
raattttaccaat

SEQ ID NO: 2915 - DNA, 13 bp, Artificial Sequence
  Oligonucleotide for detection of SNP TSC0001141
tgttatattgtty

SEQ ID NO: 2916 - DNA, 13 bp, Artificial Sequence
  Oligonucleotide for detection of SNP TSC0001141
raacaatataaca

SEQ ID NO: 2917 - DNA, 13 bp, Artificial Sequence
  Oligonucleotide for detection of SNP TSC0001141
tgttatgttgtty

SEQ ID NO: 2918 - DNA, 13 bp, Artificial Sequence
  Oligonucleotide for detection of SNP TSC0001141
raacaacataaca

SEQ ID NO: 2919 - DNA, 13 bp, Artificial Sequence
  Oligonucleotide for detection of SNP TSC0001142
gttattatattta

SEQ ID NO: 2920 - DNA, 13 bp, Artificial Sequence
  Oligonucleotide for detection of SNP TSC0001142
taaatataataac

SEQ ID NO: 2921 - DNA, 13 bp, Artificial Sequence
  Oligonucleotide for detection of SNP TSC0001142
gttattgtattta

SEQ ID NO: 2922 - DNA, 13 bp, Artificial Sequence
  Oligonucleotide for detection of SNP TSC0001142
taaatacaataac

SEQ ID NO: 2923 - DNA, 13 bp, Artificial Sequence
  Oligonucleotide for detection of SNP TSC0001142
gttatcgtattta

SEQ ID NO: 2924 - DNA, 13 bp, Artificial Sequence
  Oligonucleotide for detection of SNP TSC0001142
taaatacgataac

SEQ ID NO: 2925 - DNA, 13 bp, Artificial Sequence
  Oligonucleotide for detection of SNP TSC0001142
tggatatggtggy

SEQ ID NO: 2926 - DNA, 13 bp, Artificial Sequence
  Oligonucleotide for detection of SNP TSC0001142
rccaccatatcca

SEQ ID NO: 2927 - DNA, 13 bp, Artificial Sequence
  Oligonucleotide for detection of SNP TSC0001142
tggatacggtggy

SEQ ID NO: 2928 - DNA, 13 bp, Artificial Sequence
  Oligonucleotide for detection of SNP TSC0001142
rccaccgtatcca

SEQ ID NO: 2929 - DNA, 13 bp, Artificial Sequence
  Oligonucleotide for detection of SNP TSC0001146
tttattgttattg

SEQ ID NO: 2930 - DNA, 13 bp, Artificial Sequence
  Oligonucleotide for detection of SNP TSC0001146
caataacaataaa

SEQ ID NO: 2931 - DNA, 13 bp, Artificial Sequence
  Oligonucleotide for detection of SNP TSC0001146
tttattattattg

SEQ ID NO: 2932 - DNA, 13 bp, Artificial Sequence
  Oligonucleotide for detection of SNP TSC0001146
caataataataaa

SEQ ID NO: 2933 - DNA, 13 bp, Artificial Sequence
  Oligonucleotide for detection of SNP TSC0001147
ttttaaaaaatta

SEQ ID NO: 2934 - DNA, 13 bp, Artificial Sequence
  Oligonucleotide for detection of SNP TSC0001147
taattttttaaaa

SEQ ID NO: 2935 - DNA, 13 bp, Artificial Sequence
  Oligonucleotide for detection of SNP TSC0001147
ttttaataaatta

SEQ ID NO: 2936 - DNA, 13 bp, Artificial Sequence
  Oligonucleotide for detection of SNP TSC0001147
taatttattaaaa

SEQ ID NO: 2937 - DNA, 13 bp, Artificial Sequence
  Oligonucleotide for detection of SNP TSC0001147
tgattttttgaga

SEQ ID NO: 2938 - DNA, 13 bp, Artificial Sequence
  Oligonucleotide for detection of SNP TSC0001147
tctcaaaaaatca

SEQ ID NO: 2939 - DNA, 13 bp, Artificial Sequence
  Oligonucleotide for detection of SNP TSC0001147
tgatttattgaga

SEQ ID NO: 2940 - DNA, 13 bp, Artificial Sequence
  Oligonucleotide for detection of SNP TSC0001147
tctcaataaatca

SEQ ID NO: 2941 - DNA, 13 bp, Artificial Sequence
  Oligonucleotide for detection of SNP TSC0001154
gtaaaagtggttt

SEQ ID NO: 2942 - DNA, 13 bp, Artificial Sequence
  Oligonucleotide for detection of SNP TSC0001154
aaaccacttttac

SEQ ID NO: 2943 - DNA, 13 bp, Artificial Sequence
  Oligonucleotide for detection of SNP TSC0001154
gtaaaaatggttt

SEQ ID NO: 2944 - DNA, 13 bp, Artificial Sequence
  Oligonucleotide for detection of SNP TSC0001154
aaaccatttttac

SEQ ID NO: 2945 - DNA, 13 bp, Artificial Sequence
  Oligonucleotide for detection of SNP TSC0001155
ttgttaaattggy

SEQ ID NO: 2946 - DNA, 13 bp, Artificial Sequence
  Oligonucleotide for detection of SNP TSC0001155
rccaatttaacaa

SEQ ID NO: 2947 - DNA, 13 bp, Artificial Sequence
  Oligonucleotide for detection of SNP TSC0001155
ttgttagattggy

SEQ ID NO: 2948 - DNA, 13 bp, Artificial Sequence
  Oligonucleotide for detection of SNP TSC0001155
rccaatctaacaa

SEQ ID NO: 2949 - DNA, 13 bp, Artificial Sequence
  Oligonucleotide for detection of SNP TSC0001156
ttttttgtatagy

SEQ ID NO: 2950 - DNA, 13 bp, Artificial Sequence
  Oligonucleotide for detection of SNP TSC0001156
rctatacaaaaaa

SEQ ID NO: 2951 - DNA, 13 bp, Artificial Sequence
  Oligonucleotide for detection of SNP TSC0001156
ttttttatatagy

SEQ ID NO: 2952 - DNA, 13 bp, Artificial Sequence
  Oligonucleotide for detection of SNP TSC0001156
rctatataaaaaa

SEQ ID NO: 2953 - DNA, 13 bp, Artificial Sequence
  Oligonucleotide for detection of SNP TSC0001157
gtaattataatta

SEQ ID NO: 2954 - DNA, 13 bp, Artificial Sequence
  Oligonucleotide for detection of SNP TSC0001157
taattataattac

SEQ ID NO: 2955 - DNA, 13 bp, Artificial Sequence
  Oligonucleotide for detection of SNP TSC0001157
gtaattgtaatta

SEQ ID NO: 2956 - DNA, 13 bp, Artificial Sequence
  Oligonucleotide for detection of SNP TSC0001157
taattacaattac

SEQ ID NO: 2957 - DNA, 13 bp, Artificial Sequence
  Oligonucleotide for detection of SNP TSC0001157
gtaatcgtaatta

SEQ ID NO: 2958 - DNA, 13 bp, Artificial Sequence
  Oligonucleotide for detection of SNP TSC0001157
taattacgattac

SEQ ID NO: 2959 - DNA, 13 bp, Artificial Sequence
  Oligonucleotide for detection of SNP TSC0001157
tagttatggttgy

SEQ ID NO: 2960 - DNA, 13 bp, Artificial Sequence
  Oligonucleotide for detection of SNP TSC0001157
rcaaccataacta

SEQ ID NO: 2961 - DNA, 13 bp, Artificial Sequence
  Oligonucleotide for detection of SNP TSC0001157
tagttacggttgy

SEQ ID NO: 2962 - DNA, 13 bp, Artificial Sequence
  Oligonucleotide for detection of SNP TSC0001157
rcaaccgtaacta

SEQ ID NO: 2963 - DNA, 13 bp, Artificial Sequence
  Oligonucleotide for detection of SNP TSC0001158
ataggaagtatgg

SEQ ID NO: 2964 - DNA, 13 bp, Artificial Sequence
  Oligonucleotide for detection of SNP TSC0001158
ccatacttcctat

SEQ ID NO: 2965 - DNA, 13 bp, Artificial Sequence
  Oligonucleotide for detection of SNP TSC0001158
ataggatgtatgg

SEQ ID NO: 2966 - DNA, 13 bp, Artificial Sequence
  Oligonucleotide for detection of SNP TSC0001158
ccatacatcctat

SEQ ID NO: 2967 - DNA, 13 bp, Artificial Sequence
  Oligonucleotide for detection of SNP TSC0001158
ttatgttttttgt

SEQ ID NO: 2968 - DNA, 13 bp, Artificial Sequence
  Oligonucleotide for detection of SNP TSC0001158
acaaaaaacataa

SEQ ID NO: 2969 - DNA, 13 bp, Artificial Sequence
  Oligonucleotide for detection of SNP TSC0001158
ttatgtattttgt

SEQ ID NO: 2970 - DNA, 13 bp, Artificial Sequence
  Oligonucleotide for detection of SNP TSC0001158
acaaaatacataa

SEQ ID NO: 2971 - DNA, 13 bp, Artificial Sequence
  Oligonucleotide for detection of SNP TSC0001160
attttgtgtttty

SEQ ID NO: 2972 - DNA, 13 bp, Artificial Sequence
  Oligonucleotide for detection of SNP TSC0001160
raaaacacaaaat

SEQ ID NO: 2973 - DNA, 13 bp, Artificial Sequence
  Oligonucleotide for detection of SNP TSC0001160
attttgcgtttty

SEQ ID NO: 2974 - DNA, 13 bp, Artificial Sequence
  Oligonucleotide for detection of SNP TSC0001160
raaaacgcaaaat

SEQ ID NO: 2975 - DNA, 13 bp, Artificial Sequence
  Oligonucleotide for detection of SNP TSC0001160
ggaagtgtaggat

SEQ ID NO: 2976 - DNA, 13 bp, Artificial Sequence
  Oligonucleotide for detection of SNP TSC0001160
atcctacacttcc

SEQ ID NO: 2977 - DNA, 13 bp, Artificial Sequence
  Oligonucleotide for detection of SNP TSC0001160
ggaagtataggat

SEQ ID NO: 2978 - DNA, 13 bp, Artificial Sequence
  Oligonucleotide for detection of SNP TSC0001160
atcctatacttcc

SEQ ID NO: 2979 - DNA, 13 bp, Artificial Sequence
  Oligonucleotide for detection of SNP TSC0001160
ggaagcgtaggat

SEQ ID NO: 2980 - DNA, 13 bp, Artificial Sequence
  Oligonucleotide for detection of SNP TSC0001160
atcctacgcttcc

SEQ ID NO: 2981 - DNA, 13 bp, Artificial Sequence
  Oligonucleotide for detection of SNP TSC0001161
agtgtagtattty

SEQ ID NO: 2982 - DNA, 13 bp, Artificial Sequence
  Oligonucleotide for detection of SNP TSC0001161
raaatactacact

SEQ ID NO: 2983 - DNA, 13 bp, Artificial Sequence
  Oligonucleotide for detection of SNP TSC0001161
agtgtaatattty

SEQ ID NO: 2984 - DNA, 13 bp, Artificial Sequence
  Oligonucleotide for detection of SNP TSC0001161
raaatattacact

SEQ ID NO: 2985 - DNA, 13 bp, Artificial Sequence
  Oligonucleotide for detection of SNP TSC0001166
ttttttattttta

SEQ ID NO: 2986 - DNA, 13 bp, Artificial Sequence
  Oligonucleotide for detection of SNP TSC0001166
taaaaataaaaaa

SEQ ID NO: 2987 - DNA, 13 bp, Artificial Sequence
  Oligonucleotide for detection of SNP TSC0001166
ttttttgttttta

SEQ ID NO: 2988 - DNA, 13 bp, Artificial Sequence
  Oligonucleotide for detection of SNP TSC0001166
taaaaacaaaaaa

SEQ ID NO: 2989 - DNA, 13 bp, Artificial Sequence
  Oligonucleotide for detection of SNP TSC0001166
tttttcgttttta

SEQ ID NO: 2990 - DNA, 13 bp, Artificial Sequence
  Oligonucleotide for detection of SNP TSC0001166
taaaaacgaaaaa

SEQ ID NO: 2991 - DNA, 13 bp, Artificial Sequence
  Oligonucleotide for detection of SNP TSC0001166
tggagatgaggaa

SEQ ID NO: 2992 - DNA, 13 bp, Artificial Sequence
  Oligonucleotide for detection of SNP TSC0001166
ttcctcatctcca

SEQ ID NO: 2993 - DNA, 13 bp, Artificial Sequence
  Oligonucleotide for detection of SNP TSC0001166
tggagacgaggaa

SEQ ID NO: 2994 - DNA, 13 bp, Artificial Sequence
  Oligonucleotide for detection of SNP TSC0001166
ttcctcgtctcca

SEQ ID NO: 2995 - DNA, 13 bp, Artificial Sequence
  Oligonucleotide for detection of SNP TSC0001167
agatatgtttgtt

SEQ ID NO: 2996 - DNA, 13 bp, Artificial Sequence
  Oligonucleotide for detection of SNP TSC0001167
aacaaacatatct

SEQ ID NO: 2997 - DNA, 13 bp, Artificial Sequence
  Oligonucleotide for detection of SNP TSC0001167
agatatatttgtt

SEQ ID NO: 2998 - DNA, 13 bp, Artificial Sequence
  Oligonucleotide for detection of SNP TSC0001167
aacaaatatatct

SEQ ID NO: 2999 - DNA, 13 bp, Artificial Sequence
  Oligonucleotide for detection of SNP TSC0001168
tgagagatagtgg

SEQ ID NO: 3000 - DNA, 13 bp, Artificial Sequence
  Oligonucleotide for detection of SNP TSC0001168
ccactatctctca

SEQ ID NO: 3001 - DNA, 13 bp, Artificial Sequence
  Oligonucleotide for detection of SNP TSC0001168
tgagaggtagtgg

SEQ ID NO: 3002 - DNA, 13 bp, Artificial Sequence
  Oligonucleotide for detection of SNP TSC0001168
ccactacctctca

SEQ ID NO: 3003 - DNA, 13 bp, Artificial Sequence
  Oligonucleotide for detection of SNP TSC0001169
tatgatattttat

SEQ ID NO: 3004 - DNA, 13 bp, Artificial Sequence
  Oligonucleotide for detection of SNP TSC0001169
ataaaatatcata

SEQ ID NO: 3005 - DNA, 13 bp, Artificial Sequence
  Oligonucleotide for detection of SNP TSC0001169
tatgatgttttat

SEQ ID NO: 3006 - DNA, 13 bp, Artificial Sequence
  Oligonucleotide for detection of SNP TSC0001169
ataaaacatcata

SEQ ID NO: 3007 - DNA, 13 bp, Artificial Sequence
  Oligonucleotide for detection of SNP TSC0001169
tacgatattttat

SEQ ID NO: 3008 - DNA, 13 bp, Artificial Sequence
  Oligonucleotide for detection of SNP TSC0001169
ataaaatatcgta

SEQ ID NO: 3009 - DNA, 13 bp, Artificial Sequence
  Oligonucleotide for detection of SNP TSC0001169
tacgatgttttat

SEQ ID NO: 3010 - DNA, 13 bp, Artificial Sequence
  Oligonucleotide for detection of SNP TSC0001169
ataaaacatcgta

SEQ ID NO: 3011 - DNA, 13 bp, Artificial Sequence
  Oligonucleotide for detection of SNP TSC0001170
tatataggaaaag

SEQ ID NO: 3012 - DNA, 13 bp, Artificial Sequence
  Oligonucleotide for detection of SNP TSC0001170
cttttcctatata

SEQ ID NO: 3013 - DNA, 13 bp, Artificial Sequence
  Oligonucleotide for detection of SNP TSC0001170
tatatatgaaaag

SEQ ID NO: 3014 - DNA, 13 bp, Artificial Sequence
  Oligonucleotide for detection of SNP TSC0001170
cttttcatatata

SEQ ID NO: 3015 - DNA, 13 bp, Artificial Sequence
  Oligonucleotide for detection of SNP TSC0001170
ttttttttgtgtg

SEQ ID NO: 3016 - DNA, 13 bp, Artificial Sequence
  Oligonucleotide for detection of SNP TSC0001170
cacacaaaaaaaa

SEQ ID NO: 3017 - DNA, 13 bp, Artificial Sequence
  Oligonucleotide for detection of SNP TSC0001170
ttttttatgtgtg

SEQ ID NO: 3018 - DNA, 13 bp, Artificial Sequence
  Oligonucleotide for detection of SNP TSC0001170
cacacataaaaaa

SEQ ID NO: 3019 - DNA, 13 bp, Artificial Sequence
  Oligonucleotide for detection of SNP TSC0001171
gagattagggtta

SEQ ID NO: 3020 - DNA, 13 bp, Artificial Sequence
  Oligonucleotide for detection of SNP TSC0001171
taaccctaatctc

SEQ ID NO: 3021 - DNA, 13 bp, Artificial Sequence
  Oligonucleotide for detection of SNP TSC0001171
gagattggggtta

SEQ ID NO: 3022 - DNA, 13 bp, Artificial Sequence
  Oligonucleotide for detection of SNP TSC0001171
taaccccaatctc

SEQ ID NO: 3023 - DNA, 13 bp, Artificial Sequence
  Oligonucleotide for detection of SNP TSC0001172
attaaagttttty

SEQ ID NO: 3024 - DNA, 13 bp, Artificial Sequence
  Oligonucleotide for detection of SNP TSC0001172
raaaaactttaat

SEQ ID NO: 3025 - DNA, 13 bp, Artificial Sequence
  Oligonucleotide for detection of SNP TSC0001172
attaaaattttty

SEQ ID NO: 3026 - DNA, 13 bp, Artificial Sequence
  Oligonucleotide for detection of SNP TSC0001172
raaaaattttaat

SEQ ID NO: 3027 - DNA, 13 bp, Artificial Sequence
  Oligonucleotide for detection of SNP TSC0001173
agtattgataaag

SEQ ID NO: 3028 - DNA, 13 bp, Artificial Sequence
  Oligonucleotide for detection of SNP TSC0001173
ctttatcaatact

SEQ ID NO: 3029 - DNA, 13 bp, Artificial Sequence
  Oligonucleotide for detection of SNP TSC0001173
agtatttataaag

SEQ ID NO: 3030 - DNA, 13 bp, Artificial Sequence
  Oligonucleotide for detection of SNP TSC0001173
ctttataaatact

SEQ ID NO: 3031 - DNA, 13 bp, Artificial Sequence
  Oligonucleotide for detection of SNP TSC0001173
ttttgttaatatt

SEQ ID NO: 3032 - DNA, 13 bp, Artificial Sequence
  Oligonucleotide for detection of SNP TSC0001173
aatattaacaaaa

SEQ ID NO: 3033 - DNA, 13 bp, Artificial Sequence
  Oligonucleotide for detection of SNP TSC0001173
ttttgtaaatatt

SEQ ID NO: 3034 - DNA, 13 bp, Artificial Sequence
  Oligonucleotide for detection of SNP TSC0001173
aatatttacaaaa

SEQ ID NO: 3035 - DNA, 13 bp, Artificial Sequence
  Oligonucleotide for detection of SNP TSC0001174
gatattattgagg

SEQ ID NO: 3036 - DNA, 13 bp, Artificial Sequence
  Oligonucleotide for detection of SNP TSC0001174
cctcaataatatc

SEQ ID NO: 3037 - DNA, 13 bp, Artificial Sequence
  Oligonucleotide for detection of SNP TSC0001174
gatattgttgagg

SEQ ID NO: 3038 - DNA, 13 bp, Artificial Sequence
  Oligonucleotide for detection of SNP TSC0001174
cctcaacaatatc

SEQ ID NO: 3039 - DNA, 13 bp, Artificial Sequence
  Oligonucleotide for detection of SNP TSC0001174
gatatcgttgagg

SEQ ID NO: 3040 - DNA, 13 bp, Artificial Sequence
  Oligonucleotide for detection of SNP TSC0001174
cctcaacgatatc

SEQ ID NO: 3041 - DNA, 13 bp, Artificial Sequence
  Oligonucleotide for detection of SNP TSC0001174
ttttaatgatgty

SEQ ID NO: 3042 - DNA, 13 bp, Artificial Sequence
  Oligonucleotide for detection of SNP TSC0001174
racatcattaaaa

SEQ ID NO: 3043 - DNA, 13 bp, Artificial Sequence
  Oligonucleotide for detection of SNP TSC0001174
ttttaacgatgty

SEQ ID NO: 3044 - DNA, 13 bp, Artificial Sequence
  Oligonucleotide for detection of SNP TSC0001174
racatcgttaaaa

SEQ ID NO: 3045 - DNA, 13 bp, Artificial Sequence
  Oligonucleotide for detection of SNP TSC0001176
tggaattgtggat

SEQ ID NO: 3046 - DNA, 13 bp, Artificial Sequence
  Oligonucleotide for detection of SNP TSC0001176
atccacaattcca

SEQ ID NO: 3047 - DNA, 13 bp, Artificial Sequence
  Oligonucleotide for detection of SNP TSC0001176
tggaatcgtggat

SEQ ID NO: 3048 - DNA, 13 bp, Artificial Sequence
  Oligonucleotide for detection of SNP TSC0001176
atccacgattcca

SEQ ID NO: 3049 - DNA, 13 bp, Artificial Sequence
  Oligonucleotide for detection of SNP TSC0001176
atttatggtttta

SEQ ID NO: 3050 - DNA, 13 bp, Artificial Sequence
  Oligonucleotide for detection of SNP TSC0001176
taaaaccataaat

SEQ ID NO: 3051 - DNA, 13 bp, Artificial Sequence
  Oligonucleotide for detection of SNP TSC0001176
atttatagtttta

SEQ ID NO: 3052 - DNA, 13 bp, Artificial Sequence
  Oligonucleotide for detection of SNP TSC0001176
taaaactataaat

SEQ ID NO: 3053 - DNA, 13 bp, Artificial Sequence
  Oligonucleotide for detection of SNP TSC0001176
atttacggtttta

SEQ ID NO: 3054 - DNA, 13 bp, Artificial Sequence
  Oligonucleotide for detection of SNP TSC0001176
taaaaccgtaaat

SEQ ID NO: 3055 - DNA, 13 bp, Artificial Sequence
  Oligonucleotide for detection of SNP TSC0001181
atttagttgaggy

SEQ ID NO: 3056 - DNA, 13 bp, Artificial Sequence
  Oligonucleotide for detection of SNP TSC0001181
rcctcaactaaat

SEQ ID NO: 3057 - DNA, 13 bp, Artificial Sequence
  Oligonucleotide for detection of SNP TSC0001181
atttaggtgaggy

SEQ ID NO: 3058 - DNA, 13 bp, Artificial Sequence
  Oligonucleotide for detection of SNP TSC0001181
rcctcacctaaat

SEQ ID NO: 3059 - DNA, 13 bp, Artificial Sequence
  Oligonucleotide for detection of SNP TSC0001181
atttagtcgaggy

SEQ ID NO: 3060 - DNA, 13 bp, Artificial Sequence
  Oligonucleotide for detection of SNP TSC0001181
rcctcgactaaat

SEQ ID NO: 3061 - DNA, 13 bp, Artificial Sequence
  Oligonucleotide for detection of SNP TSC0001181
atttaggcgaggy

SEQ ID NO: 3062 - DNA, 13 bp, Artificial Sequence
  Oligonucleotide for detection of SNP TSC0001181
rcctcgcctaaat

SEQ ID NO: 3063 - DNA, 13 bp, Artificial Sequence
  Oligonucleotide for detection of SNP TSC0001181
gttttggttgggt

SEQ ID NO: 3064 - DNA, 13 bp, Artificial Sequence
  Oligonucleotide for detection of SNP TSC0001181
acccaaccaaaac

SEQ ID NO: 3065 - DNA, 13 bp, Artificial Sequence
  Oligonucleotide for detection of SNP TSC0001181
gttttgtttgggt

SEQ ID NO: 3066 - DNA, 13 bp, Artificial Sequence
  Oligonucleotide for detection of SNP TSC0001181
acccaaacaaaac

SEQ ID NO: 3067 - DNA, 13 bp, Artificial Sequence
  Oligonucleotide for detection of SNP TSC0001181
gtttcggttgggt

SEQ ID NO: 3068 - DNA, 13 bp, Artificial Sequence
  Oligonucleotide for detection of SNP TSC0001181
acccaaccgaaac

SEQ ID NO: 3069 - DNA, 13 bp, Artificial Sequence
  Oligonucleotide for detection of SNP TSC0001181
gtttcgtttgggt

SEQ ID NO: 3070 - DNA, 13 bp, Artificial Sequence
  Oligonucleotide for detection of SNP TSC0001181
acccaaacgaaac

SEQ ID NO: 3071 - DNA, 13 bp, Artificial Sequence
  Oligonucleotide for detection of SNP TSC0001183
gaagagaaatttg

SEQ ID NO: 3072 - DNA, 13 bp, Artificial Sequence
  Oligonucleotide for detection of SNP TSC0001183
caaatttctcttc

SEQ ID NO: 3073 - DNA, 13 bp, Artificial Sequence
  Oligonucleotide for detection of SNP TSC0001183
gaagaggaatttg

SEQ ID NO: 3074 - DNA, 13 bp, Artificial Sequence
  Oligonucleotide for detection of SNP TSC0001183
caaattcctcttc

SEQ ID NO: 3075 - DNA, 13 bp, Artificial Sequence
  Oligonucleotide for detection of SNP TSC0001185
aaagtagaggaag

SEQ ID NO: 3076 - DNA, 13 bp, Artificial Sequence
  Oligonucleotide for detection of SNP TSC0001185
cttcctctacttt

SEQ ID NO: 3077 - DNA, 13 bp, Artificial Sequence
  Oligonucleotide for detection of SNP TSC0001185
aaagtaaaggaag

SEQ ID NO: 3078 - DNA, 13 bp, Artificial Sequence
  Oligonucleotide for detection of SNP TSC0001185
cttcctttacttt

SEQ ID NO: 3079 - DNA, 13 bp, Artificial Sequence
  Oligonucleotide for detection of SNP TSC0001186
aaggttgtttttt

SEQ ID NO: 3080 - DNA, 13 bp, Artificial Sequence
  Oligonucleotide for detection of SNP TSC0001186
aaaaaacaacctt

SEQ ID NO: 3081 - DNA, 13 bp, Artificial Sequence
  Oligonucleotide for detection of SNP TSC0001186
aaggttttttttt

SEQ ID NO: 3082 - DNA, 13 bp, Artificial Sequence
  Oligonucleotide for detection of SNP TSC0001186
aaaaaaaaacctt

SEQ ID NO: 3083 - DNA, 13 bp, Artificial Sequence
  Oligonucleotide for detection of SNP TSC0001186
aaggtcgtttttt

SEQ ID NO: 3084 - DNA, 13 bp, Artificial Sequence
  Oligonucleotide for detection of SNP TSC0001186
aaaaaacgacctt

SEQ ID NO: 3085 - DNA, 13 bp, Artificial Sequence
  Oligonucleotide for detection of SNP TSC0001186
aagaaatgatttt

SEQ ID NO: 3086 - DNA, 13 bp, Artificial Sequence
  Oligonucleotide for detection of SNP TSC0001186
aaaatcatttctt

SEQ ID NO: 3087 - DNA, 13 bp, Artificial Sequence
  Oligonucleotide for detection of SNP TSC0001186
aagaaaagatttt

SEQ ID NO: 3088 - DNA, 13 bp, Artificial Sequence
  Oligonucleotide for detection of SNP TSC0001186
aaaatcttttctt

SEQ ID NO: 3089 - DNA, 13 bp, Artificial Sequence
  Oligonucleotide for detection of SNP TSC0001186
aagaaacgatttt

SEQ ID NO: 3090 - DNA, 13 bp, Artificial Sequence
  Oligonucleotide for detection of SNP TSC0001186
aaaatcgtttctt

SEQ ID NO: 3091 - DNA, 13 bp, Artificial Sequence
  Oligonucleotide for detection of SNP TSC0001187
gatttaggagata

SEQ ID NO: 3092 - DNA, 13 bp, Artificial Sequence
  Oligonucleotide for detection of SNP TSC0001187
tatctcctaaatc

SEQ ID NO: 3093 - DNA, 13 bp, Artificial Sequence
  Oligonucleotide for detection of SNP TSC0001187
gatttatgagata

SEQ ID NO: 3094 - DNA, 13 bp, Artificial Sequence
  Oligonucleotide for detection of SNP TSC0001187
tatctcataaatc

SEQ ID NO: 3095 - DNA, 13 bp, Artificial Sequence
  Oligonucleotide for detection of SNP TSC0001187
tattttttaaaty

SEQ ID NO: 3096 - DNA, 13 bp, Artificial Sequence
  Oligonucleotide for detection of SNP TSC0001187
ratttaaaaaata

SEQ ID NO: 3097 - DNA, 13 bp, Artificial Sequence
  Oligonucleotide for detection of SNP TSC0001187
tattttataaaty

SEQ ID NO: 3098 - DNA, 13 bp, Artificial Sequence
  Oligonucleotide for detection of SNP TSC0001187
ratttataaaata

SEQ ID NO: 3099 - DNA, 13 bp, Artificial Sequence
  Oligonucleotide for detection of SNP TSC0001193
ttttttagaatty

SEQ ID NO: 3100 - DNA, 13 bp, Artificial Sequence
  Oligonucleotide for detection of SNP TSC0001193
raattctaaaaaa

SEQ ID NO: 3101 - DNA, 13 bp, Artificial Sequence
  Oligonucleotide for detection of SNP TSC0001193
ttttttggaatty

SEQ ID NO: 3102 - DNA, 13 bp, Artificial Sequence
  Oligonucleotide for detection of SNP TSC0001193
raattccaaaaaa

SEQ ID NO: 3103 - DNA, 13 bp, Artificial Sequence
  Oligonucleotide for detection of SNP TSC0001197
atatttatattta

SEQ ID NO: 3104 - DNA, 13 bp, Artificial Sequence
  Oligonucleotide for detection of SNP TSC0001197
taaatataaatat

SEQ ID NO: 3105 - DNA, 13 bp, Artificial Sequence
  Oligonucleotide for detection of SNP TSC0001197
atatttgtattta

SEQ ID NO: 3106 - DNA, 13 bp, Artificial Sequence
  Oligonucleotide for detection of SNP TSC0001197
taaatacaaatat

SEQ ID NO: 3107 - DNA, 13 bp, Artificial Sequence
  Oligonucleotide for detection of SNP TSC0001197
atattcgtattta

SEQ ID NO: 3108 - DNA, 13 bp, Artificial Sequence
  Oligonucleotide for detection of SNP TSC0001197
taaatacgaatat

SEQ ID NO: 3109 - DNA, 13 bp, Artificial Sequence
  Oligonucleotide for detection of SNP TSC0001197
tagatatggatat

SEQ ID NO: 3110 - DNA, 13 bp, Artificial Sequence
  Oligonucleotide for detection of SNP TSC0001197
atatccatatcta

SEQ ID NO: 3111 - DNA, 13 bp, Artificial Sequence
  Oligonucleotide for detection of SNP TSC0001197
tagatacggatat

SEQ ID NO: 3112 - DNA, 13 bp, Artificial Sequence
  Oligonucleotide for detection of SNP TSC0001197
atatccgtatcta

SEQ ID NO: 3113 - DNA, 13 bp, Artificial Sequence
  Oligonucleotide for detection of SNP TSC0001198
ttaagtgttggga

SEQ ID NO: 3114 - DNA, 13 bp, Artificial Sequence
  Oligonucleotide for detection of SNP TSC0001198
tcccaacacttaa

SEQ ID NO: 3115 - DNA, 13 bp, Artificial Sequence
  Oligonucleotide for detection of SNP TSC0001198
ttaagtattggga

SEQ ID NO: 3116 - DNA, 13 bp, Artificial Sequence
  Oligonucleotide for detection of SNP TSC0001198
tcccaatacttaa

SEQ ID NO: 3117 - DNA, 13 bp, Artificial Sequence
  Oligonucleotide for detection of SNP TSC0001202
taaaaagagtgta

SEQ ID NO: 3118 - DNA, 13 bp, Artificial Sequence
  Oligonucleotide for detection of SNP TSC0001202
tacactcttttta

SEQ ID NO: 3119 - DNA, 13 bp, Artificial Sequence
  Oligonucleotide for detection of SNP TSC0001202
taaaaatagtgta

SEQ ID NO: 3120 - DNA, 13 bp, Artificial Sequence
  Oligonucleotide for detection of SNP TSC0001202
tacactattttta

SEQ ID NO: 3121 - DNA, 13 bp, Artificial Sequence
  Oligonucleotide for detection of SNP TSC0001202
tatatttttttta

SEQ ID NO: 3122 - DNA, 13 bp, Artificial Sequence
  Oligonucleotide for detection of SNP TSC0001202
taaaaaaaatata

SEQ ID NO: 3123 - DNA, 13 bp, Artificial Sequence
  Oligonucleotide for detection of SNP TSC0001202
tatattattttta

SEQ ID NO: 3124 - DNA, 13 bp, Artificial Sequence
  Oligonucleotide for detection of SNP TSC0001202
taaaaataatata

SEQ ID NO: 3125 - DNA, 13 bp, Artificial Sequence
  Oligonucleotide for detection of SNP TSC0001203
ggtgatgggataa

SEQ ID NO: 3126 - DNA, 13 bp, Artificial Sequence
  Oligonucleotide for detection of SNP TSC0001203
ttatcccatcacc

SEQ ID NO: 3127 - DNA, 13 bp, Artificial Sequence
  Oligonucleotide for detection of SNP TSC0001203
ggtgataggataa

SEQ ID NO: 3128 - DNA, 13 bp, Artificial Sequence
  Oligonucleotide for detection of SNP TSC0001203
ttatcctatcacc

SEQ ID NO: 3129 - DNA, 13 bp, Artificial Sequence
  Oligonucleotide for detection of SNP TSC0001204
gtagtagtgttty

SEQ ID NO: 3130 - DNA, 13 bp, Artificial Sequence
  Oligonucleotide for detection of SNP TSC0001204
raaacactactac

SEQ ID NO: 3131 - DNA, 13 bp, Artificial Sequence
  Oligonucleotide for detection of SNP TSC0001204
gtagtaatgttty

SEQ ID NO: 3132 - DNA, 13 bp, Artificial Sequence
  Oligonucleotide for detection of SNP TSC0001204
raaacattactac

SEQ ID NO: 3133 - DNA, 13 bp, Artificial Sequence
  Oligonucleotide for detection of SNP TSC0001205
tttttggtttttt

SEQ ID NO: 3134 - DNA, 13 bp, Artificial Sequence
  Oligonucleotide for detection of SNP TSC0001205
aaaaaaccaaaaa

SEQ ID NO: 3135 - DNA, 13 bp, Artificial Sequence
  Oligonucleotide for detection of SNP TSC0001205
tttttgttttttt

SEQ ID NO: 3136 - DNA, 13 bp, Artificial Sequence
  Oligonucleotide for detection of SNP TSC0001205
aaaaaaacaaaaa

SEQ ID NO: 3137 - DNA, 13 bp, Artificial Sequence
  Oligonucleotide for detection of SNP TSC0001205
aaaaaattaaaaa

SEQ ID NO: 3138 - DNA, 13 bp, Artificial Sequence
  Oligonucleotide for detection of SNP TSC0001205
tttttaatttttt

SEQ ID NO: 3139 - DNA, 13 bp, Artificial Sequence
  Oligonucleotide for detection of SNP TSC0001205
aaaaaaataaaaa

SEQ ID NO: 3140 - DNA, 13 bp, Artificial Sequence
  Oligonucleotide for detection of SNP TSC0001205
tttttattttttt

SEQ ID NO: 3141 - DNA, 13 bp, Artificial Sequence
  Oligonucleotide for detection of SNP TSC0001211
tatttaatgtttg

SEQ ID NO: 3142 - DNA, 13 bp, Artificial Sequence
  Oligonucleotide for detection of SNP TSC0001211
caaacattaaata

SEQ ID NO: 3143 - DNA, 13 bp, Artificial Sequence
  Oligonucleotide for detection of SNP TSC0001211
tatttagtgtttg

SEQ ID NO: 3144 - DNA, 13 bp, Artificial Sequence
  Oligonucleotide for detection of SNP TSC0001211
caaacactaaata

SEQ ID NO: 3145 - DNA, 13 bp, Artificial Sequence
  Oligonucleotide for detection of SNP TSC0001212
gggttttgtagty

SEQ ID NO: 3146 - DNA, 13 bp, Artificial Sequence
  Oligonucleotide for detection of SNP TSC0001212
ractacaaaaccc

SEQ ID NO: 3147 - DNA, 13 bp, Artificial Sequence
  Oligonucleotide for detection of SNP TSC0001212
gggtttcgtagty

SEQ ID NO: 3148 - DNA, 13 bp, Artificial Sequence
  Oligonucleotide for detection of SNP TSC0001212
ractacgaaaccc

SEQ ID NO: 3149 - DNA, 13 bp, Artificial Sequence
  Oligonucleotide for detection of SNP TSC0001212
ggttatggggtty

SEQ ID NO: 3150 - DNA, 13 bp, Artificial Sequence
  Oligonucleotide for detection of SNP TSC0001212
raaccccataacc

SEQ ID NO: 3151 - DNA, 13 bp, Artificial Sequence
  Oligonucleotide for detection of SNP TSC0001212
ggttatagggtty

SEQ ID NO: 3152 - DNA, 13 bp, Artificial Sequence
  Oligonucleotide for detection of SNP TSC0001212
raaccctataacc

SEQ ID NO: 3153 - DNA, 13 bp, Artificial Sequence
  Oligonucleotide for detection of SNP TSC0001212
ggttacggggtty

SEQ ID NO: 3154 - DNA, 13 bp, Artificial Sequence
  Oligonucleotide for detection of SNP TSC0001212
raaccccgtaacc

SEQ ID NO: 3155 - DNA, 13 bp, Artificial Sequence
  Oligonucleotide for detection of SNP TSC0001213
aatattgtgtagy

SEQ ID NO: 3156 - DNA, 13 bp, Artificial Sequence
  Oligonucleotide for detection of SNP TSC0001213
rctacacaatatt

SEQ ID NO: 3157 - DNA, 13 bp, Artificial Sequence
  Oligonucleotide for detection of SNP TSC0001213
aatattatgtagy

SEQ ID NO: 3158 - DNA, 13 bp, Artificial Sequence
  Oligonucleotide for detection of SNP TSC0001213
rctacataatatt

SEQ ID NO: 3159 - DNA, 13 bp, Artificial Sequence
  Oligonucleotide for detection of SNP TSC0001214
ttattagttatgg

SEQ ID NO: 3160 - DNA, 13 bp, Artificial Sequence
  Oligonucleotide for detection of SNP TSC0001214
ccataactaataa

SEQ ID NO: 3161 - DNA, 13 bp, Artificial Sequence
  Oligonucleotide for detection of SNP TSC0001214
ttattaattatgg

SEQ ID NO: 3162 - DNA, 13 bp, Artificial Sequence
  Oligonucleotide for detection of SNP TSC0001214
ccataattaataa

SEQ ID NO: 3163 - DNA, 13 bp, Artificial Sequence
  Oligonucleotide for detection of SNP TSC0001218
tagttttgtgtag

SEQ ID NO: 3164 - DNA, 13 bp, Artificial Sequence
  Oligonucleotide for detection of SNP TSC0001218
ctacacaaaacta

SEQ ID NO: 3165 - DNA, 13 bp, Artificial Sequence
  Oligonucleotide for detection of SNP TSC0001218
tagtttcgtgtag

SEQ ID NO: 3166 - DNA, 13 bp, Artificial Sequence
  Oligonucleotide for detection of SNP TSC0001218
ctacacgaaacta

SEQ ID NO: 3167 - DNA, 13 bp, Artificial Sequence
  Oligonucleotide for detection of SNP TSC0001218
tagttttgcgtag

SEQ ID NO: 3168 - DNA, 13 bp, Artificial Sequence
  Oligonucleotide for detection of SNP TSC0001218
ctacgcaaaacta

SEQ ID NO: 3169 - DNA, 13 bp, Artificial Sequence
  Oligonucleotide for detection of SNP TSC0001218
tagtttcgcgtag

SEQ ID NO: 3170 - DNA, 13 bp, Artificial Sequence
  Oligonucleotide for detection of SNP TSC0001218
ctacgcgaaacta

SEQ ID NO: 3171 - DNA, 13 bp, Artificial Sequence
  Oligonucleotide for detection of SNP TSC0001218
ttgtgtggggttg

SEQ ID NO: 3172 - DNA, 13 bp, Artificial Sequence
  Oligonucleotide for detection of SNP TSC0001218
caaccccacacaa

SEQ ID NO: 3173 - DNA, 13 bp, Artificial Sequence
  Oligonucleotide for detection of SNP TSC0001218
ttgtgtagggttg

SEQ ID NO: 3174 - DNA, 13 bp, Artificial Sequence
  Oligonucleotide for detection of SNP TSC0001218
caaccctacacaa

SEQ ID NO: 3175 - DNA, 13 bp, Artificial Sequence
  Oligonucleotide for detection of SNP TSC0001218
ttgcgtggggttg

SEQ ID NO: 3176 - DNA, 13 bp, Artificial Sequence
  Oligonucleotide for detection of SNP TSC0001218
caaccccacgcaa

SEQ ID NO: 3177 - DNA, 13 bp, Artificial Sequence
  Oligonucleotide for detection of SNP TSC0001218
ttgcgtagggttg

SEQ ID NO: 3178 - DNA, 13 bp, Artificial Sequence
  Oligonucleotide for detection of SNP TSC0001218
caaccctacgcaa

SEQ ID NO: 3179 - DNA, 13 bp, Artificial Sequence
  Oligonucleotide for detection of SNP TSC0001218
ttgtgcggggttg

SEQ ID NO: 3180 - DNA, 13 bp, Artificial Sequence
  Oligonucleotide for detection of SNP TSC0001218
caaccccgcacaa

SEQ ID NO: 3181 - DNA, 13 bp, Artificial Sequence
  Oligonucleotide for detection of SNP TSC0001218
ttgcgcggggttg

SEQ ID NO: 3182 - DNA, 13 bp, Artificial Sequence
  Oligonucleotide for detection of SNP TSC0001218
caaccccgcgcaa

SEQ ID NO: 3183 - DNA, 13 bp, Artificial Sequence
  Oligonucleotide for detection of SNP TSC0001219
tgaggggataatt

SEQ ID NO: 3184 - DNA, 13 bp, Artificial Sequence
  Oligonucleotide for detection of SNP TSC0001219
aattatcccctca

SEQ ID NO: 3185 - DNA, 13 bp, Artificial Sequence
  Oligonucleotide for detection of SNP TSC0001219
tgagggaataatt

SEQ ID NO: 3186 - DNA, 13 bp, Artificial Sequence
  Oligonucleotide for detection of SNP TSC0001219
aattattccctca

SEQ ID NO: 3187 - DNA, 13 bp, Artificial Sequence
  Oligonucleotide for detection of SNP TSC0001223
ggttttatagttt

SEQ ID NO: 3188 - DNA, 13 bp, Artificial Sequence
  Oligonucleotide for detection of SNP TSC0001223
aaactataaaacc

SEQ ID NO: 3189 - DNA, 13 bp, Artificial Sequence
  Oligonucleotide for detection of SNP TSC0001223
ggttttgtagttt

SEQ ID NO: 3190 - DNA, 13 bp, Artificial Sequence
  Oligonucleotide for detection of SNP TSC0001223
aaactacaaaacc

SEQ ID NO: 3191 - DNA, 13 bp, Artificial Sequence
  Oligonucleotide for detection of SNP TSC0001223
ggtttcgtagttt

SEQ ID NO: 3192 - DNA, 13 bp, Artificial Sequence
  Oligonucleotide for detection of SNP TSC0001223
aaactacgaaacc

SEQ ID NO: 3193 - DNA, 13 bp, Artificial Sequence
  Oligonucleotide for detection of SNP TSC0001223
aaattgtgaggty

SEQ ID NO: 3194 - DNA, 13 bp, Artificial Sequence
  Oligonucleotide for detection of SNP TSC0001223
racctcacaattt

SEQ ID NO: 3195 - DNA, 13 bp, Artificial Sequence
  Oligonucleotide for detection of SNP TSC0001223
aaattgcgaggty

SEQ ID NO: 3196 - DNA, 13 bp, Artificial Sequence
  Oligonucleotide for detection of SNP TSC0001223
racctcgcaattt

SEQ ID NO: 3197 - DNA, 13 bp, Artificial Sequence
  Oligonucleotide for detection of SNP TSC0001224
gtgtgtgtttttt

SEQ ID NO: 3198 - DNA, 13 bp, Artificial Sequence
  Oligonucleotide for detection of SNP TSC0001224
aaaaaacacacac

SEQ ID NO: 3199 - DNA, 13 bp, Artificial Sequence
  Oligonucleotide for detection of SNP TSC0001224
gtgtgtttttttt

SEQ ID NO: 3200 - DNA, 13 bp, Artificial Sequence
  Oligonucleotide for detection of SNP TSC0001224
aaaaaaaacacac

SEQ ID NO: 3201 - DNA, 13 bp, Artificial Sequence
  Oligonucleotide for detection of SNP TSC0001224
aaaaaatatatay

SEQ ID NO: 3202 - DNA, 13 bp, Artificial Sequence
  Oligonucleotide for detection of SNP TSC0001224
rtatatatttttt

SEQ ID NO: 3203 - DNA, 13 bp, Artificial Sequence
  Oligonucleotide for detection of SNP TSC0001224
aaaaaaaatatay

SEQ ID NO: 3204 - DNA, 13 bp, Artificial Sequence
  Oligonucleotide for detection of SNP TSC0001224
rtatatttttttt

SEQ ID NO: 3205 - DNA, 13 bp, Artificial Sequence
  Oligonucleotide for detection of SNP TSC0001230
tgtaattgaataa

SEQ ID NO: 3206 - DNA, 13 bp, Artificial Sequence
  Oligonucleotide for detection of SNP TSC0001230
ttattcaattaca

SEQ ID NO: 3207 - DNA, 13 bp, Artificial Sequence
  Oligonucleotide for detection of SNP TSC0001230
tgtaatggaataa

SEQ ID NO: 3208 - DNA, 13 bp, Artificial Sequence
  Oligonucleotide for detection of SNP TSC0001230
ttattccattaca

SEQ ID NO: 3209 - DNA, 13 bp, Artificial Sequence
  Oligonucleotide for detection of SNP TSC0001230
tgtaatcgaataa

SEQ ID NO: 3210 - DNA, 13 bp, Artificial Sequence
  Oligonucleotide for detection of SNP TSC0001230
ttattcgattaca

SEQ ID NO: 3211 - DNA, 13 bp, Artificial Sequence
  Oligonucleotide for detection of SNP TSC0001230
ttatttgattata

SEQ ID NO: 3212 - DNA, 13 bp, Artificial Sequence
  Oligonucleotide for detection of SNP TSC0001230
tataatcaaataa

SEQ ID NO: 3213 - DNA, 13 bp, Artificial Sequence
  Oligonucleotide for detection of SNP TSC0001230
ttattttattata

SEQ ID NO: 3214 - DNA, 13 bp, Artificial Sequence
  Oligonucleotide for detection of SNP TSC0001230
tataataaaataa

SEQ ID NO: 3215 - DNA, 13 bp, Artificial Sequence
  Oligonucleotide for detection of SNP TSC0001230
ttattcgattata

SEQ ID NO: 3216 - DNA, 13 bp, Artificial Sequence
  Oligonucleotide for detection of SNP TSC0001230
tataatcgaataa

SEQ ID NO: 3217 - DNA, 13 bp, Artificial Sequence
  Oligonucleotide for detection of SNP TSC0001231
ttttaatgttaaa

SEQ ID NO: 3218 - DNA, 13 bp, Artificial Sequence
  Oligonucleotide for detection of SNP TSC0001231
tttaacattaaaa

SEQ ID NO: 3219 - DNA, 13 bp, Artificial Sequence
  Oligonucleotide for detection of SNP TSC0001231
ttttaacgttaaa

SEQ ID NO: 3220 - DNA, 13 bp, Artificial Sequence
  Oligonucleotide for detection of SNP TSC0001231
tttaacgttaaaa

SEQ ID NO: 3221 - DNA, 13 bp, Artificial Sequence
  Oligonucleotide for detection of SNP TSC0001231
tttaatgttaaaa

SEQ ID NO: 3222 - DNA, 13 bp, Artificial Sequence
  Oligonucleotide for detection of SNP TSC0001231
ttttaacattaaa

SEQ ID NO: 3223 - DNA, 13 bp, Artificial Sequence
  Oligonucleotide for detection of SNP TSC0001231
tttaatattaaaa

SEQ ID NO: 3224 - DNA, 13 bp, Artificial Sequence
  Oligonucleotide for detection of SNP TSC0001231
ttttaatattaaa

SEQ ID NO: 3225 - DNA, 13 bp, Artificial Sequence
  Oligonucleotide for detection of SNP TSC0001232
gttgatgataaty

SEQ ID NO: 3226 - DNA, 13 bp, Artificial Sequence
  Oligonucleotide for detection of SNP TSC0001232
rattatcatcaac

SEQ ID NO: 3227 - DNA, 13 bp, Artificial Sequence
  Oligonucleotide for detection of SNP TSC0001232
gttgataataaty

SEQ ID NO: 3228 - DNA, 13 bp, Artificial Sequence
  Oligonucleotide for detection of SNP TSC0001232
rattattatcaac

SEQ ID NO: 3229 - DNA, 13 bp, Artificial Sequence
  Oligonucleotide for detection of SNP TSC0001233
tgtttaagggtta

SEQ ID NO: 3230 - DNA, 13 bp, Artificial Sequence
  Oligonucleotide for detection of SNP TSC0001233
taacccttaaaca

SEQ ID NO: 3231 - DNA, 13 bp, Artificial Sequence
  Oligonucleotide for detection of SNP TSC0001233
tgtttaggggtta

SEQ ID NO: 3232 - DNA, 13 bp, Artificial Sequence
  Oligonucleotide for detection of SNP TSC0001233
taacccctaaaca

SEQ ID NO: 3233 - DNA, 13 bp, Artificial Sequence
  Oligonucleotide for detection of SNP TSC0001234
ggggtgatataaa

SEQ ID NO: 3234 - DNA, 13 bp, Artificial Sequence
  Oligonucleotide for detection of SNP TSC0001234
tttatatcacccc

SEQ ID NO: 3235 - DNA, 13 bp, Artificial Sequence
  Oligonucleotide for detection of SNP TSC0001234
ggggtggtataaa

SEQ ID NO: 3236 - DNA, 13 bp, Artificial Sequence
  Oligonucleotide for detection of SNP TSC0001234
tttataccacccc

SEQ ID NO: 3237 - DNA, 13 bp, Artificial Sequence
  Oligonucleotide for detection of SNP TSC0001235
tttggtattgttt

SEQ ID NO: 3238 - DNA, 13 bp, Artificial Sequence
  Oligonucleotide for detection of SNP TSC0001235
aaacaataccaaa

SEQ ID NO: 3239 - DNA, 13 bp, Artificial Sequence
  Oligonucleotide for detection of SNP TSC0001235
tttggtgttgttt

SEQ ID NO: 3240 - DNA, 13 bp, Artificial Sequence
  Oligonucleotide for detection of SNP TSC0001235
aaacaacaccaaa

SEQ ID NO: 3241 - DNA, 13 bp, Artificial Sequence
  Oligonucleotide for detection of SNP TSC0001235
tttggcgttgttt

SEQ ID NO: 3242 - DNA, 13 bp, Artificial Sequence
  Oligonucleotide for detection of SNP TSC0001235
aaacaacgccaaa

SEQ ID NO: 3243 - DNA, 13 bp, Artificial Sequence
  Oligonucleotide for detection of SNP TSC0001235
agatagtgttaga

SEQ ID NO: 3244 - DNA, 13 bp, Artificial Sequence
  Oligonucleotide for detection of SNP TSC0001235
tctaacactatct

SEQ ID NO: 3245 - DNA, 13 bp, Artificial Sequence
  Oligonucleotide for detection of SNP TSC0001235
agatagcgttaga

SEQ ID NO: 3246 - DNA, 13 bp, Artificial Sequence
  Oligonucleotide for detection of SNP TSC0001235
tctaacgctatct

SEQ ID NO: 3247 - DNA, 13 bp, Artificial Sequence
  Oligonucleotide for detection of SNP TSC0001236
aataaatgtttaa

SEQ ID NO: 3248 - DNA, 13 bp, Artificial Sequence
  Oligonucleotide for detection of SNP TSC0001236
ttaaacatttatt

SEQ ID NO: 3249 - DNA, 13 bp, Artificial Sequence
  Oligonucleotide for detection of SNP TSC0001236
aataaacgtttaa

SEQ ID NO: 3250 - DNA, 13 bp, Artificial Sequence
  Oligonucleotide for detection of SNP TSC0001236
ttaaacgtttatt

SEQ ID NO: 3251 - DNA, 13 bp, Artificial Sequence
  Oligonucleotide for detection of SNP TSC0001236
ttgaatgtttgtt

SEQ ID NO: 3252 - DNA, 13 bp, Artificial Sequence
  Oligonucleotide for detection of SNP TSC0001236
aacaaacattcaa

SEQ ID NO: 3253 - DNA, 13 bp, Artificial Sequence
  Oligonucleotide for detection of SNP TSC0001236
ttgaatatttgtt

SEQ ID NO: 3254 - DNA, 13 bp, Artificial Sequence
  Oligonucleotide for detection of SNP TSC0001236
aacaaatattcaa

SEQ ID NO: 3255 - DNA, 13 bp, Artificial Sequence
  Oligonucleotide for detection of SNP TSC0001236
ttgaacgtttgtt

SEQ ID NO: 3256 - DNA, 13 bp, Artificial Sequence
  Oligonucleotide for detection of SNP TSC0001236
aacaaacgttcaa

SEQ ID NO: 3257 - DNA, 13 bp, Artificial Sequence
  Oligonucleotide for detection of SNP TSC0001237
tttatagttttay

SEQ ID NO: 3258 - DNA, 13 bp, Artificial Sequence
  Oligonucleotide for detection of SNP TSC0001237
rtaaaactataaa

SEQ ID NO: 3259 - DNA, 13 bp, Artificial Sequence
  Oligonucleotide for detection of SNP TSC0001237
tttatatttttay

SEQ ID NO: 3260 - DNA, 13 bp, Artificial Sequence
  Oligonucleotide for detection of SNP TSC0001237
rtaaaaatataaa

SEQ ID NO: 3261 - DNA, 13 bp, Artificial Sequence
  Oligonucleotide for detection of SNP TSC0001237
gtaaaattgtgag

SEQ ID NO: 3262 - DNA, 13 bp, Artificial Sequence
  Oligonucleotide for detection of SNP TSC0001237
ctcacaattttac

SEQ ID NO: 3263 - DNA, 13 bp, Artificial Sequence
  Oligonucleotide for detection of SNP TSC0001237
gtaaaaatgtgag

SEQ ID NO: 3264 - DNA, 13 bp, Artificial Sequence
  Oligonucleotide for detection of SNP TSC0001237
ctcacatttttac

SEQ ID NO: 3265 - DNA, 13 bp, Artificial Sequence
  Oligonucleotide for detection of SNP TSC0001238
gtatttatttttt

SEQ ID NO: 3266 - DNA, 13 bp, Artificial Sequence
  Oligonucleotide for detection of SNP TSC0001238
aaaaaataaatac

SEQ ID NO: 3267 - DNA, 13 bp, Artificial Sequence
  Oligonucleotide for detection of SNP TSC0001238
gtatttgtttttt

SEQ ID NO: 3268 - DNA, 13 bp, Artificial Sequence
  Oligonucleotide for detection of SNP TSC0001238
aaaaaacaaatac

SEQ ID NO: 3269 - DNA, 13 bp, Artificial Sequence
  Oligonucleotide for detection of SNP TSC0001238
gtattcgtttttt

SEQ ID NO: 3270 - DNA, 13 bp, Artificial Sequence
  Oligonucleotide for detection of SNP TSC0001238
aaaaaacgaatac

SEQ ID NO: 3271 - DNA, 13 bp, Artificial Sequence
  Oligonucleotide for detection of SNP TSC0001238
agaggatggatgy

SEQ ID NO: 3272 - DNA, 13 bp, Artificial Sequence
  Oligonucleotide for detection of SNP TSC0001238
rcatccatcctct

SEQ ID NO: 3273 - DNA, 13 bp, Artificial Sequence
  Oligonucleotide for detection of SNP TSC0001238
agaggacggatgy

SEQ ID NO: 3274 - DNA, 13 bp, Artificial Sequence
  Oligonucleotide for detection of SNP TSC0001238
rcatccgtcctct

SEQ ID NO: 3275 - DNA, 13 bp, Artificial Sequence
  Oligonucleotide for detection of SNP TSC0001240
tggaaggtgttaa

SEQ ID NO: 3276 - DNA, 13 bp, Artificial Sequence
  Oligonucleotide for detection of SNP TSC0001240
ttaacaccttcca

SEQ ID NO: 3277 - DNA, 13 bp, Artificial Sequence
  Oligonucleotide for detection of SNP TSC0001240
tggaagatgttaa

SEQ ID NO: 3278 - DNA, 13 bp, Artificial Sequence
  Oligonucleotide for detection of SNP TSC0001240
ttaacatcttcca

SEQ ID NO: 3279 - DNA, 13 bp, Artificial Sequence
  Oligonucleotide for detection of SNP TSC0001242
tttggtaaggtgt

SEQ ID NO: 3280 - DNA, 13 bp, Artificial Sequence
  Oligonucleotide for detection of SNP TSC0001242
acaccttaccaaa

SEQ ID NO: 3281 - DNA, 13 bp, Artificial Sequence
  Oligonucleotide for detection of SNP TSC0001242
tttggtgaggtgt

SEQ ID NO: 3282 - DNA, 13 bp, Artificial Sequence
  Oligonucleotide for detection of SNP TSC0001242
acacctcaccaaa

SEQ ID NO: 3283 - DNA, 13 bp, Artificial Sequence
  Oligonucleotide for detection of SNP TSC0001243
tttggtgtgttgt

SEQ ID NO: 3284 - DNA, 13 bp, Artificial Sequence
  Oligonucleotide for detection of SNP TSC0001243
acaacacaccaaa

SEQ ID NO: 3285 - DNA, 13 bp, Artificial Sequence
  Oligonucleotide for detection of SNP TSC0001243
tttggtatgttgt

SEQ ID NO: 3286 - DNA, 13 bp, Artificial Sequence
  Oligonucleotide for detection of SNP TSC0001243
acaacataccaaa

SEQ ID NO: 3287 - DNA, 13 bp, Artificial Sequence
  Oligonucleotide for detection of SNP TSC0001245
ggttataggaata

SEQ ID NO: 3288 - DNA, 13 bp, Artificial Sequence
  Oligonucleotide for detection of SNP TSC0001245
tattcctataacc

SEQ ID NO: 3289 - DNA, 13 bp, Artificial Sequence
  Oligonucleotide for detection of SNP TSC0001245
ggttatgggaata

SEQ ID NO: 3290 - DNA, 13 bp, Artificial Sequence
  Oligonucleotide for detection of SNP TSC0001245
tattcccataacc

SEQ ID NO: 3291 - DNA, 13 bp, Artificial Sequence
  Oligonucleotide for detection of SNP TSC0001245
ggttacgggaata

SEQ ID NO: 3292 - DNA, 13 bp, Artificial Sequence
  Oligonucleotide for detection of SNP TSC0001245
tattcccgtaacc

SEQ ID NO: 3293 - DNA, 13 bp, Artificial Sequence
  Oligonucleotide for detection of SNP TSC0001245
tgtttttgtagty

SEQ ID NO: 3294 - DNA, 13 bp, Artificial Sequence
  Oligonucleotide for detection of SNP TSC0001245
ractacaaaaaca

SEQ ID NO: 3295 - DNA, 13 bp, Artificial Sequence
  Oligonucleotide for detection of SNP TSC0001245
tgttttcgtagty

SEQ ID NO: 3296 - DNA, 13 bp, Artificial Sequence
  Oligonucleotide for detection of SNP TSC0001245
ractacgaaaaca

SEQ ID NO: 3297 - DNA, 13 bp, Artificial Sequence
  Oligonucleotide for detection of SNP TSC0001246
agttggaattata

SEQ ID NO: 3298 - DNA, 13 bp, Artificial Sequence
  Oligonucleotide for detection of SNP TSC0001246
tataattccaact

SEQ ID NO: 3299 - DNA, 13 bp, Artificial Sequence
  Oligonucleotide for detection of SNP TSC0001246
agttgggattata

SEQ ID NO: 3300 - DNA, 13 bp, Artificial Sequence
  Oligonucleotide for detection of SNP TSC0001246
tataatcccaact

SEQ ID NO: 3301 - DNA, 13 bp, Artificial Sequence
  Oligonucleotide for detection of SNP TSC0001247
tagagagttaggg

SEQ ID NO: 3302 - DNA, 13 bp, Artificial Sequence
  Oligonucleotide for detection of SNP TSC0001247
ccctaactctcta

SEQ ID NO: 3303 - DNA, 13 bp, Artificial Sequence
  Oligonucleotide for detection of SNP TSC0001247
tagagatttaggg

SEQ ID NO: 3304 - DNA, 13 bp, Artificial Sequence
  Oligonucleotide for detection of SNP TSC0001247
ccctaaatctcta

SEQ ID NO: 3305 - DNA, 13 bp, Artificial Sequence
  Oligonucleotide for detection of SNP TSC0001247
ttttgattttttg

SEQ ID NO: 3306 - DNA, 13 bp, Artificial Sequence
  Oligonucleotide for detection of SNP TSC0001247
caaaaaatcaaaa

SEQ ID NO: 3307 - DNA, 13 bp, Artificial Sequence
  Oligonucleotide for detection of SNP TSC0001247
ttttgaatttttg

SEQ ID NO: 3308 - DNA, 13 bp, Artificial Sequence
  Oligonucleotide for detection of SNP TSC0001247
caaaaattcaaaa

SEQ ID NO: 3309 - DNA, 13 bp, Artificial Sequence
  Oligonucleotide for detection of SNP TSC0001252
ttttagattttag

SEQ ID NO: 3310 - DNA, 13 bp, Artificial Sequence
  Oligonucleotide for detection of SNP TSC0001252
ctaaaatctaaaa

SEQ ID NO: 3311 - DNA, 13 bp, Artificial Sequence
  Oligonucleotide for detection of SNP TSC0001252
ttttaggttttag

SEQ ID NO: 3312 - DNA, 13 bp, Artificial Sequence
  Oligonucleotide for detection of SNP TSC0001252
ctaaaacctaaaa

SEQ ID NO: 3313 - DNA, 13 bp, Artificial Sequence
  Oligonucleotide for detection of SNP TSC0001253
gagattggataat

SEQ ID NO: 3314 - DNA, 13 bp, Artificial Sequence
  Oligonucleotide for detection of SNP TSC0001253
attatccaatctc

SEQ ID NO: 3315 - DNA, 13 bp, Artificial Sequence
  Oligonucleotide for detection of SNP TSC0001253
gagattagataat

SEQ ID NO: 3316 - DNA, 13 bp, Artificial Sequence
  Oligonucleotide for detection of SNP TSC0001253
attatctaatctc

SEQ ID NO: 3317 - DNA, 13 bp, Artificial Sequence
  Oligonucleotide for detection of SNP TSC0001260
ttgttagtattat

SEQ ID NO: 3318 - DNA, 13 bp, Artificial Sequence
  Oligonucleotide for detection of SNP TSC0001260
ataatactaacaa

SEQ ID NO: 3319 - DNA, 13 bp, Artificial Sequence
  Oligonucleotide for detection of SNP TSC0001260
ttgttaatattat

SEQ ID NO: 3320 - DNA, 13 bp, Artificial Sequence
  Oligonucleotide for detection of SNP TSC0001260
ataatattaacaa

SEQ ID NO: 3321 - DNA, 13 bp, Artificial Sequence
  Oligonucleotide for detection of SNP TSC0001261
tattttattgaat

SEQ ID NO: 3322 - DNA, 13 bp, Artificial Sequence
  Oligonucleotide for detection of SNP TSC0001261
attcaataaaata

SEQ ID NO: 3323 - DNA, 13 bp, Artificial Sequence
  Oligonucleotide for detection of SNP TSC0001261
tattttgttgaat

SEQ ID NO: 3324 - DNA, 13 bp, Artificial Sequence
  Oligonucleotide for detection of SNP TSC0001261
attcaacaaaata

SEQ ID NO: 3325 - DNA, 13 bp, Artificial Sequence
  Oligonucleotide for detection of SNP TSC0001261
tatttcgttgaat

SEQ ID NO: 3326 - DNA, 13 bp, Artificial Sequence
  Oligonucleotide for detection of SNP TSC0001261
attcaacgaaata

SEQ ID NO: 3327 - DNA, 13 bp, Artificial Sequence
  Oligonucleotide for detection of SNP TSC0001261
atttagtggagtg

SEQ ID NO: 3328 - DNA, 13 bp, Artificial Sequence
  Oligonucleotide for detection of SNP TSC0001261
cactccactaaat

SEQ ID NO: 3329 - DNA, 13 bp, Artificial Sequence
  Oligonucleotide for detection of SNP TSC0001261
atttagcggagtg

SEQ ID NO: 3330 - DNA, 13 bp, Artificial Sequence
  Oligonucleotide for detection of SNP TSC0001261
cactccgctaaat

SEQ ID NO: 3331 - DNA, 13 bp, Artificial Sequence
  Oligonucleotide for detection of SNP TSC0001262
aaggattgttatt

SEQ ID NO: 3332 - DNA, 13 bp, Artificial Sequence
  Oligonucleotide for detection of SNP TSC0001262
aataacaatcctt

SEQ ID NO: 3333 - DNA, 13 bp, Artificial Sequence
  Oligonucleotide for detection of SNP TSC0001262
aaggatcgttatt

SEQ ID NO: 3334 - DNA, 13 bp, Artificial Sequence
  Oligonucleotide for detection of SNP TSC0001262
aataacgatcctt

SEQ ID NO: 3335 - DNA, 13 bp, Artificial Sequence
  Oligonucleotide for detection of SNP TSC0001262
agtaatggttttt

SEQ ID NO: 3336 - DNA, 13 bp, Artificial Sequence
  Oligonucleotide for detection of SNP TSC0001262
aaaaaccattact

SEQ ID NO: 3337 - DNA, 13 bp, Artificial Sequence
  Oligonucleotide for detection of SNP TSC0001262
agtaatagttttt

SEQ ID NO: 3338 - DNA, 13 bp, Artificial Sequence
  Oligonucleotide for detection of SNP TSC0001262
aaaaactattact

SEQ ID NO: 3339 - DNA, 13 bp, Artificial Sequence
  Oligonucleotide for detection of SNP TSC0001262
agtaacggttttt

SEQ ID NO: 3340 - DNA, 13 bp, Artificial Sequence
  Oligonucleotide for detection of SNP TSC0001262
aaaaaccgttact

SEQ ID NO: 3341 - DNA, 13 bp, Artificial Sequence
  Oligonucleotide for detection of SNP TSC0001263
tggaaggtatata

SEQ ID NO: 3342 - DNA, 13 bp, Artificial Sequence
  Oligonucleotide for detection of SNP TSC0001263
tatataccttcca

SEQ ID NO: 3343 - DNA, 13 bp, Artificial Sequence
  Oligonucleotide for detection of SNP TSC0001263
tggaagttatata

SEQ ID NO: 3344 - DNA, 13 bp, Artificial Sequence
  Oligonucleotide for detection of SNP TSC0001263
tatataacttcca

SEQ ID NO: 3345 - DNA, 13 bp, Artificial Sequence
  Oligonucleotide for detection of SNP TSC0001263
tgtgtgtttttta

SEQ ID NO: 3346 - DNA, 13 bp, Artificial Sequence
  Oligonucleotide for detection of SNP TSC0001263
taaaaaacacaca

SEQ ID NO: 3347 - DNA, 13 bp, Artificial Sequence
  Oligonucleotide for detection of SNP TSC0001263
tgtgtgattttta

SEQ ID NO: 3348 - DNA, 13 bp, Artificial Sequence
  Oligonucleotide for detection of SNP TSC0001263
taaaaatcacaca

SEQ ID NO: 3349 - DNA, 13 bp, Artificial Sequence
  Oligonucleotide for detection of SNP TSC0001264
tatttgtgatgta

SEQ ID NO: 3350 - DNA, 13 bp, Artificial Sequence
  Oligonucleotide for detection of SNP TSC0001264
tacatcacaaata

SEQ ID NO: 3351 - DNA, 13 bp, Artificial Sequence
  Oligonucleotide for detection of SNP TSC0001264
tatttgcgatgta

SEQ ID NO: 3352 - DNA, 13 bp, Artificial Sequence
  Oligonucleotide for detection of SNP TSC0001264
tacatcgcaaata

SEQ ID NO: 3353 - DNA, 13 bp, Artificial Sequence
  Oligonucleotide for detection of SNP TSC0001264
tatattgtagatg

SEQ ID NO: 3354 - DNA, 13 bp, Artificial Sequence
  Oligonucleotide for detection of SNP TSC0001264
catctacaatata

SEQ ID NO: 3355 - DNA, 13 bp, Artificial Sequence
  Oligonucleotide for detection of SNP TSC0001264
tatattatagatg

SEQ ID NO: 3356 - DNA, 13 bp, Artificial Sequence
  Oligonucleotide for detection of SNP TSC0001264
catctataatata

SEQ ID NO: 3357 - DNA, 13 bp, Artificial Sequence
  Oligonucleotide for detection of SNP TSC0001264
tatatcgtagatg

SEQ ID NO: 3358 - DNA, 13 bp, Artificial Sequence
  Oligonucleotide for detection of SNP TSC0001264
catctacgatata

SEQ ID NO: 3359 - DNA, 13 bp, Artificial Sequence
  Oligonucleotide for detection of SNP TSC0001265
tttgtgatgtaag

SEQ ID NO: 3360 - DNA, 13 bp, Artificial Sequence
  Oligonucleotide for detection of SNP TSC0001265
cttacatcacaaa

SEQ ID NO: 3361 - DNA, 13 bp, Artificial Sequence
  Oligonucleotide for detection of SNP TSC0001265
tttgtgttgtaag

SEQ ID NO: 3362 - DNA, 13 bp, Artificial Sequence
  Oligonucleotide for detection of SNP TSC0001265
cttacaacacaaa

SEQ ID NO: 3363 - DNA, 13 bp, Artificial Sequence
  Oligonucleotide for detection of SNP TSC0001265
tttgcgatgtaag

SEQ ID NO: 3364 - DNA, 13 bp, Artificial Sequence
  Oligonucleotide for detection of SNP TSC0001265
cttacatcgcaaa

SEQ ID NO: 3365 - DNA, 13 bp, Artificial Sequence
  Oligonucleotide for detection of SNP TSC0001265
tttgcgttgtaag

SEQ ID NO: 3366 - DNA, 13 bp, Artificial Sequence
  Oligonucleotide for detection of SNP TSC0001265
cttacaacgcaaa

SEQ ID NO: 3367 - DNA, 13 bp, Artificial Sequence
  Oligonucleotide for detection of SNP TSC0001265
tttatattgtaga

SEQ ID NO: 3368 - DNA, 13 bp, Artificial Sequence
  Oligonucleotide for detection of SNP TSC0001265
tctacaatataaa

SEQ ID NO: 3369 - DNA, 13 bp, Artificial Sequence
  Oligonucleotide for detection of SNP TSC0001265
tttatagtgtaga

SEQ ID NO: 3370 - DNA, 13 bp, Artificial Sequence
  Oligonucleotide for detection of SNP TSC0001265
tctacactataaa

SEQ ID NO: 3371 - DNA, 13 bp, Artificial Sequence
  Oligonucleotide for detection of SNP TSC0001265
tttatatcgtaga

SEQ ID NO: 3372 - DNA, 13 bp, Artificial Sequence
  Oligonucleotide for detection of SNP TSC0001265
tctacgatataaa

SEQ ID NO: 3373 - DNA, 13 bp, Artificial Sequence
  Oligonucleotide for detection of SNP TSC0001265
tttatagcgtaga

SEQ ID NO: 3374 - DNA, 13 bp, Artificial Sequence
  Oligonucleotide for detection of SNP TSC0001265
tctacgctataaa

SEQ ID NO: 3375 - DNA, 13 bp, Artificial Sequence
  Oligonucleotide for detection of SNP TSC0001272
tgttggatggtty

SEQ ID NO: 3376 - DNA, 13 bp, Artificial Sequence
  Oligonucleotide for detection of SNP TSC0001272
raaccatccaaca

SEQ ID NO: 3377 - DNA, 13 bp, Artificial Sequence
  Oligonucleotide for detection of SNP TSC0001272
tgttgggtggtty

SEQ ID NO: 3378 - DNA, 13 bp, Artificial Sequence
  Oligonucleotide for detection of SNP TSC0001272
raaccacccaaca

SEQ ID NO: 3379 - DNA, 13 bp, Artificial Sequence
  Oligonucleotide for detection of SNP TSC0001273
ttatttttataty

SEQ ID NO: 3380 - DNA, 13 bp, Artificial Sequence
  Oligonucleotide for detection of SNP TSC0001273
ratataaaaataa

SEQ ID NO: 3381 - DNA, 13 bp, Artificial Sequence
  Oligonucleotide for detection of SNP TSC0001273
ttatttgtataty

SEQ ID NO: 3382 - DNA, 13 bp, Artificial Sequence
  Oligonucleotide for detection of SNP TSC0001273
ratatacaaataa

SEQ ID NO: 3383 - DNA, 13 bp, Artificial Sequence
  Oligonucleotide for detection of SNP TSC0001273
gatatagaaatgg

SEQ ID NO: 3384 - DNA, 13 bp, Artificial Sequence
  Oligonucleotide for detection of SNP TSC0001273
ccatttctatatc

SEQ ID NO: 3385 - DNA, 13 bp, Artificial Sequence
  Oligonucleotide for detection of SNP TSC0001273
gatatataaatgg

SEQ ID NO: 3386 - DNA, 13 bp, Artificial Sequence
  Oligonucleotide for detection of SNP TSC0001273
ccatttatatatc

SEQ ID NO: 3387 - DNA, 13 bp, Artificial Sequence
  Oligonucleotide for detection of SNP TSC0001275
gtttttattattg

SEQ ID NO: 3388 - DNA, 13 bp, Artificial Sequence
  Oligonucleotide for detection of SNP TSC0001275
caataataaaaac

SEQ ID NO: 3389 - DNA, 13 bp, Artificial Sequence
  Oligonucleotide for detection of SNP TSC0001275
gtttttgttattg

SEQ ID NO: 3390 - DNA, 13 bp, Artificial Sequence
  Oligonucleotide for detection of SNP TSC0001275
caataacaaaaac

SEQ ID NO: 3391 - DNA, 13 bp, Artificial Sequence
  Oligonucleotide for detection of SNP TSC0001276
gtttttgtaaatg

SEQ ID NO: 3392 - DNA, 13 bp, Artificial Sequence
  Oligonucleotide for detection of SNP TSC0001276
catttacaaaaac

SEQ ID NO: 3393 - DNA, 13 bp, Artificial Sequence
  Oligonucleotide for detection of SNP TSC0001276
gtttttttaaatg

SEQ ID NO: 3394 - DNA, 13 bp, Artificial Sequence
  Oligonucleotide for detection of SNP TSC0001276
catttaaaaaaac

SEQ ID NO: 3395 - DNA, 13 bp, Artificial Sequence
  Oligonucleotide for detection of SNP TSC0001276
gttttcgtaaatg

SEQ ID NO: 3396 - DNA, 13 bp, Artificial Sequence
  Oligonucleotide for detection of SNP TSC0001276
catttacgaaaac

SEQ ID NO: 3397 - DNA, 13 bp, Artificial Sequence
  Oligonucleotide for detection of SNP TSC0001276
tatttatgggaay

SEQ ID NO: 3398 - DNA, 13 bp, Artificial Sequence
  Oligonucleotide for detection of SNP TSC0001276
rttcccataaata

SEQ ID NO: 3399 - DNA, 13 bp, Artificial Sequence
  Oligonucleotide for detection of SNP TSC0001276
tatttaagggaay

SEQ ID NO: 3400 - DNA, 13 bp, Artificial Sequence
  Oligonucleotide for detection of SNP TSC0001276
rttcccttaaata

SEQ ID NO: 3401 - DNA, 13 bp, Artificial Sequence
  Oligonucleotide for detection of SNP TSC0001276
tatttacgggaay

SEQ ID NO: 3402 - DNA, 13 bp, Artificial Sequence
  Oligonucleotide for detection of SNP TSC0001276
rttcccgtaaata

SEQ ID NO: 3403 - DNA, 13 bp, Artificial Sequence
  Oligonucleotide for detection of SNP TSC0001277
aaaatagaattay

SEQ ID NO: 3404 - DNA, 13 bp, Artificial Sequence
  Oligonucleotide for detection of SNP TSC0001277
rtaattctatttt

SEQ ID NO: 3405 - DNA, 13 bp, Artificial Sequence
  Oligonucleotide for detection of SNP TSC0001277
aaaataaaattay

SEQ ID NO: 3406 - DNA, 13 bp, Artificial Sequence
  Oligonucleotide for detection of SNP TSC0001277
rtaattttatttt

SEQ ID NO: 3407 - DNA, 13 bp, Artificial Sequence
  Oligonucleotide for detection of SNP TSC0001279
atgagagtgttgt

SEQ ID NO: 3408 - DNA, 13 bp, Artificial Sequence
  Oligonucleotide for detection of SNP TSC0001279
acaacactctcat

SEQ ID NO: 3409 - DNA, 13 bp, Artificial Sequence
  Oligonucleotide for detection of SNP TSC0001279
atgagaatgttgt

SEQ ID NO: 3410 - DNA, 13 bp, Artificial Sequence
  Oligonucleotide for detection of SNP TSC0001279
acaacattctcat

SEQ ID NO: 3411 - DNA, 13 bp, Artificial Sequence
  Oligonucleotide for detection of SNP TSC0001282
ttaaaggtaataa

SEQ ID NO: 3412 - DNA, 13 bp, Artificial Sequence
  Oligonucleotide for detection of SNP TSC0001282
ttattacctttaa

SEQ ID NO: 3413 - DNA, 13 bp, Artificial Sequence
  Oligonucleotide for detection of SNP TSC0001282
ttaaagataataa

SEQ ID NO: 3414 - DNA, 13 bp, Artificial Sequence
  Oligonucleotide for detection of SNP TSC0001282
ttattatctttaa

SEQ ID NO: 3415 - DNA, 13 bp, Artificial Sequence
  Oligonucleotide for detection of SNP TSC0001285
ggaagtggtaaay

SEQ ID NO: 3416 - DNA, 13 bp, Artificial Sequence
  Oligonucleotide for detection of SNP TSC0001285
rtttaccacttcc

SEQ ID NO: 3417 - DNA, 13 bp, Artificial Sequence
  Oligonucleotide for detection of SNP TSC0001285
ggaagtagtaaay

SEQ ID NO: 3418 - DNA, 13 bp, Artificial Sequence
  Oligonucleotide for detection of SNP TSC0001285
rtttactacttcc

SEQ ID NO: 3419 - DNA, 13 bp, Artificial Sequence
  Oligonucleotide for detection of SNP TSC0001286
tatattgtgttgy

SEQ ID NO: 3420 - DNA, 13 bp, Artificial Sequence
  Oligonucleotide for detection of SNP TSC0001286
rcaacacaatata

SEQ ID NO: 3421 - DNA, 13 bp, Artificial Sequence
  Oligonucleotide for detection of SNP TSC0001286
tatattttgttgy

SEQ ID NO: 3422 - DNA, 13 bp, Artificial Sequence
  Oligonucleotide for detection of SNP TSC0001286
rcaacaaaatata

SEQ ID NO: 3423 - DNA, 13 bp, Artificial Sequence
  Oligonucleotide for detection of SNP TSC0001286
gtaatataatata

SEQ ID NO: 3424 - DNA, 13 bp, Artificial Sequence
  Oligonucleotide for detection of SNP TSC0001286
tatattatattac

SEQ ID NO: 3425 - DNA, 13 bp, Artificial Sequence
  Oligonucleotide for detection of SNP TSC0001286
gtaataaaatata

SEQ ID NO: 3426 - DNA, 13 bp, Artificial Sequence
  Oligonucleotide for detection of SNP TSC0001286
tatattttattac

SEQ ID NO: 3427 - DNA, 13 bp, Artificial Sequence
  Oligonucleotide for detection of SNP TSC0001287
ttattaggaaggy

SEQ ID NO: 3428 - DNA, 13 bp, Artificial Sequence
  Oligonucleotide for detection of SNP TSC0001287
rccttcctaataa

SEQ ID NO: 3429 - DNA, 13 bp, Artificial Sequence
  Oligonucleotide for detection of SNP TSC0001287
ttattaagaaggy

SEQ ID NO: 3430 - DNA, 13 bp, Artificial Sequence
  Oligonucleotide for detection of SNP TSC0001287
rccttcttaataa

SEQ ID NO: 3431 - DNA, 13 bp, Artificial Sequence
  Oligonucleotide for detection of SNP TSC0001288
tattatatatttt

SEQ ID NO: 3432 - DNA, 13 bp, Artificial Sequence
  Oligonucleotide for detection of SNP TSC0001288
aaaatatataata

SEQ ID NO: 3433 - DNA, 13 bp, Artificial Sequence
  Oligonucleotide for detection of SNP TSC0001288
tattatgtatttt

SEQ ID NO: 3434 - DNA, 13 bp, Artificial Sequence
  Oligonucleotide for detection of SNP TSC0001288
aaaatacataata

SEQ ID NO: 3435 - DNA, 13 bp, Artificial Sequence
  Oligonucleotide for detection of SNP TSC0001289
atttgtagaaata

SEQ ID NO: 3436 - DNA, 13 bp, Artificial Sequence
  Oligonucleotide for detection of SNP TSC0001289
tatttctacaaat

SEQ ID NO: 3437 - DNA, 13 bp, Artificial Sequence
  Oligonucleotide for detection of SNP TSC0001289
atttgttgaaata

SEQ ID NO: 3438 - DNA, 13 bp, Artificial Sequence
  Oligonucleotide for detection of SNP TSC0001289
tatttcaacaaat

SEQ ID NO: 3439 - DNA, 13 bp, Artificial Sequence
  Oligonucleotide for detection of SNP TSC0001289
atttgtcgaaata

SEQ ID NO: 3440 - DNA, 13 bp, Artificial Sequence
  Oligonucleotide for detection of SNP TSC0001289
tatttcgacaaat

SEQ ID NO: 3441 - DNA, 13 bp, Artificial Sequence
  Oligonucleotide for detection of SNP TSC0001289
tatttttgtaagt

SEQ ID NO: 3442 - DNA, 13 bp, Artificial Sequence
  Oligonucleotide for detection of SNP TSC0001289
acttacaaaaata

SEQ ID NO: 3443 - DNA, 13 bp, Artificial Sequence
  Oligonucleotide for detection of SNP TSC0001289
tattttggtaagt

SEQ ID NO: 3444 - DNA, 13 bp, Artificial Sequence
  Oligonucleotide for detection of SNP TSC0001289
acttaccaaaata

SEQ ID NO: 3445 - DNA, 13 bp, Artificial Sequence
  Oligonucleotide for detection of SNP TSC0001289
tatttcggtaagt

SEQ ID NO: 3446 - DNA, 13 bp, Artificial Sequence
  Oligonucleotide for detection of SNP TSC0001289
acttaccgaaata

SEQ ID NO: 3447 - DNA, 13 bp, Artificial Sequence
  Oligonucleotide for detection of SNP TSC0001290
tatataatagtat

SEQ ID NO: 3448 - DNA, 13 bp, Artificial Sequence
  Oligonucleotide for detection of SNP TSC0001290
atactattatata

SEQ ID NO: 3449 - DNA, 13 bp, Artificial Sequence
  Oligonucleotide for detection of SNP TSC0001290
tatatagtagtat

SEQ ID NO: 3450 - DNA, 13 bp, Artificial Sequence
  Oligonucleotide for detection of SNP TSC0001290
atactactatata

SEQ ID NO: 3451 - DNA, 13 bp, Artificial Sequence
  Oligonucleotide for detection of SNP TSC0001291
aatgttgttatty

SEQ ID NO: 3452 - DNA, 13 bp, Artificial Sequence
  Oligonucleotide for detection of SNP TSC0001291
raataacaacatt

SEQ ID NO: 3453 - DNA, 13 bp, Artificial Sequence
  Oligonucleotide for detection of SNP TSC0001291
aatgttattatty

SEQ ID NO: 3454 - DNA, 13 bp, Artificial Sequence
  Oligonucleotide for detection of SNP TSC0001291
raataataacatt

SEQ ID NO: 3455 - DNA, 13 bp, Artificial Sequence
  Oligonucleotide for detection of SNP TSC0001291
aacgttgttatty

SEQ ID NO: 3456 - DNA, 13 bp, Artificial Sequence
  Oligonucleotide for detection of SNP TSC0001291
raataacaacgtt

SEQ ID NO: 3457 - DNA, 13 bp, Artificial Sequence
  Oligonucleotide for detection of SNP TSC0001291
aacgttattatty

SEQ ID NO: 3458 - DNA, 13 bp, Artificial Sequence
  Oligonucleotide for detection of SNP TSC0001291
raataataacgtt

SEQ ID NO: 3459 - DNA, 13 bp, Artificial Sequence
  Oligonucleotide for detection of SNP TSC0001294
tgtttttttttgt

SEQ ID NO: 3460 - DNA, 13 bp, Artificial Sequence
  Oligonucleotide for detection of SNP TSC0001294
acaaaaaaaaaca

SEQ ID NO: 3461 - DNA, 13 bp, Artificial Sequence
  Oligonucleotide for detection of SNP TSC0001294
tgttttgttttgt

SEQ ID NO: 3462 - DNA, 13 bp, Artificial Sequence
  Oligonucleotide for detection of SNP TSC0001294
acaaaacaaaaca

SEQ ID NO: 3463 - DNA, 13 bp, Artificial Sequence
  Oligonucleotide for detection of SNP TSC0001294
cgtttttttttgt

SEQ ID NO: 3464 - DNA, 13 bp, Artificial Sequence
  Oligonucleotide for detection of SNP TSC0001294
acaaaaaaaaacg

SEQ ID NO: 3465 - DNA, 13 bp, Artificial Sequence
  Oligonucleotide for detection of SNP TSC0001294
cgttttgttttgt

SEQ ID NO: 3466 - DNA, 13 bp, Artificial Sequence
  Oligonucleotide for detection of SNP TSC0001294
acaaaacaaaacg

SEQ ID NO: 3467 - DNA, 13 bp, Artificial Sequence
  Oligonucleotide for detection of SNP TSC0001294
ataaaagaaaatg

SEQ ID NO: 3468 - DNA, 13 bp, Artificial Sequence
  Oligonucleotide for detection of SNP TSC0001294
cattttcttttat

SEQ ID NO: 3469 - DNA, 13 bp, Artificial Sequence
  Oligonucleotide for detection of SNP TSC0001294
ataaaataaaatg

SEQ ID NO: 3470 - DNA, 13 bp, Artificial Sequence
  Oligonucleotide for detection of SNP TSC0001294
cattttattttat

SEQ ID NO: 3471 - DNA, 13 bp, Artificial Sequence
  Oligonucleotide for detection of SNP TSC0001294
ataaaagaaaacg

SEQ ID NO: 3472 - DNA, 13 bp, Artificial Sequence
  Oligonucleotide for detection of SNP TSC0001294
cgttttcttttat

SEQ ID NO: 3473 - DNA, 13 bp, Artificial Sequence
  Oligonucleotide for detection of SNP TSC0001294
ataaaataaaacg

SEQ ID NO: 3474 - DNA, 13 bp, Artificial Sequence
  Oligonucleotide for detection of SNP TSC0001294
cgttttattttat

SEQ ID NO: 3475 - DNA, 13 bp, Artificial Sequence
  Oligonucleotide for detection of SNP TSC0001295
ggtgtatgttatt

SEQ ID NO: 3476 - DNA, 13 bp, Artificial Sequence
  Oligonucleotide for detection of SNP TSC0001295
aataacatacacc

SEQ ID NO: 3477 - DNA, 13 bp, Artificial Sequence
  Oligonucleotide for detection of SNP TSC0001295
ggtgtacgttatt

SEQ ID NO: 3478 - DNA, 13 bp, Artificial Sequence
  Oligonucleotide for detection of SNP TSC0001295
aataacgtacacc

SEQ ID NO: 3479 - DNA, 13 bp, Artificial Sequence
  Oligonucleotide for detection of SNP TSC0001295
agtggtgtgtaty

SEQ ID NO: 3480 - DNA, 13 bp, Artificial Sequence
  Oligonucleotide for detection of SNP TSC0001295
ratacacaccact

SEQ ID NO: 3481 - DNA, 13 bp, Artificial Sequence
  Oligonucleotide for detection of SNP TSC0001295
agtggtatgtaty

SEQ ID NO: 3482 - DNA, 13 bp, Artificial Sequence
  Oligonucleotide for detection of SNP TSC0001295
ratacataccact

SEQ ID NO: 3483 - DNA, 13 bp, Artificial Sequence
  Oligonucleotide for detection of SNP TSC0001295
agtggcgtgtaty

SEQ ID NO: 3484 - DNA, 13 bp, Artificial Sequence
  Oligonucleotide for detection of SNP TSC0001295
ratacacgccact

SEQ ID NO: 3485 - DNA, 13 bp, Artificial Sequence
  Oligonucleotide for detection of SNP TSC0001298
agattgagaagaa

SEQ ID NO: 3486 - DNA, 13 bp, Artificial Sequence
  Oligonucleotide for detection of SNP TSC0001298
ttcttctcaatct

SEQ ID NO: 3487 - DNA, 13 bp, Artificial Sequence
  Oligonucleotide for detection of SNP TSC0001298
agattgggaagaa

SEQ ID NO: 3488 - DNA, 13 bp, Artificial Sequence
  Oligonucleotide for detection of SNP TSC0001298
ttcttcccaatct

SEQ ID NO: 3489 - DNA, 13 bp, Artificial Sequence
  Oligonucleotide for detection of SNP TSC0001298
agatcgagaagaa

SEQ ID NO: 3490 - DNA, 13 bp, Artificial Sequence
  Oligonucleotide for detection of SNP TSC0001298
ttcttctcgatct

SEQ ID NO: 3491 - DNA, 13 bp, Artificial Sequence
  Oligonucleotide for detection of SNP TSC0001298
agatcgggaagaa

SEQ ID NO: 3492 - DNA, 13 bp, Artificial Sequence
  Oligonucleotide for detection of SNP TSC0001298
ttcttcccgatct

SEQ ID NO: 3493 - DNA, 13 bp, Artificial Sequence
  Oligonucleotide for detection of SNP TSC0001299
agtataggtttag

SEQ ID NO: 3494 - DNA, 13 bp, Artificial Sequence
  Oligonucleotide for detection of SNP TSC0001299
ctaaacctatact

SEQ ID NO: 3495 - DNA, 13 bp, Artificial Sequence
  Oligonucleotide for detection of SNP TSC0001299
agtataagtttag

SEQ ID NO: 3496 - DNA, 13 bp, Artificial Sequence
  Oligonucleotide for detection of SNP TSC0001299
ctaaacttatact

SEQ ID NO: 3497 - DNA, 13 bp, Artificial Sequence
  Oligonucleotide for detection of SNP TSC0001308
aagtaaaagttta

SEQ ID NO: 3498 - DNA, 13 bp, Artificial Sequence
  Oligonucleotide for detection of SNP TSC0001308
taaacttttactt

SEQ ID NO: 3499 - DNA, 13 bp, Artificial Sequence
  Oligonucleotide for detection of SNP TSC0001308
aagtaagagttta

SEQ ID NO: 3500 - DNA, 13 bp, Artificial Sequence
  Oligonucleotide for detection of SNP TSC0001308
taaactcttactt

SEQ ID NO: 3501 - DNA, 13 bp, Artificial Sequence
  Oligonucleotide for detection of SNP TSC0001311
atttggggtaagg

SEQ ID NO: 3502 - DNA, 13 bp, Artificial Sequence
  Oligonucleotide for detection of SNP TSC0001311
ccttaccccaaat

SEQ ID NO: 3503 - DNA, 13 bp, Artificial Sequence
  Oligonucleotide for detection of SNP TSC0001311
atttggagtaagg

SEQ ID NO: 3504 - DNA, 13 bp, Artificial Sequence
  Oligonucleotide for detection of SNP TSC0001311
ccttactccaaat

SEQ ID NO: 3505 - DNA, 13 bp, Artificial Sequence
  Oligonucleotide for detection of SNP TSC0001317
ttttttgttgtty

SEQ ID NO: 3506 - DNA, 13 bp, Artificial Sequence
  Oligonucleotide for detection of SNP TSC0001317
raacaacaaaaaa

SEQ ID NO: 3507 - DNA, 13 bp, Artificial Sequence
  Oligonucleotide for detection of SNP TSC0001317
tttttttttgtty

SEQ ID NO: 3508 - DNA, 13 bp, Artificial Sequence
  Oligonucleotide for detection of SNP TSC0001317
raacaaaaaaaaa

SEQ ID NO: 3509 - DNA, 13 bp, Artificial Sequence
  Oligonucleotide for detection of SNP TSC0001317
gggtaataaaaga

SEQ ID NO: 3510 - DNA, 13 bp, Artificial Sequence
  Oligonucleotide for detection of SNP TSC0001317
tcttttattaccc

SEQ ID NO: 3511 - DNA, 13 bp, Artificial Sequence
  Oligonucleotide for detection of SNP TSC0001317
gggtaaaaaaaga

SEQ ID NO: 3512 - DNA, 13 bp, Artificial Sequence
  Oligonucleotide for detection of SNP TSC0001317
tctttttttaccc

SEQ ID NO: 3513 - DNA, 13 bp, Artificial Sequence
  Oligonucleotide for detection of SNP TSC0001319
ttttgaggaatgt

SEQ ID NO: 3514 - DNA, 13 bp, Artificial Sequence
  Oligonucleotide for detection of SNP TSC0001319
acattcctcaaaa

SEQ ID NO: 3515 - DNA, 13 bp, Artificial Sequence
  Oligonucleotide for detection of SNP TSC0001319
ttttgaagaatgt

SEQ ID NO: 3516 - DNA, 13 bp, Artificial Sequence
  Oligonucleotide for detection of SNP TSC0001319
acattcttcaaaa

SEQ ID NO: 3517 - DNA, 13 bp, Artificial Sequence
  Oligonucleotide for detection of SNP TSC0001319
ttttgaggaacgt

SEQ ID NO: 3518 - DNA, 13 bp, Artificial Sequence
  Oligonucleotide for detection of SNP TSC0001319
acgttcctcaaaa

SEQ ID NO: 3519 - DNA, 13 bp, Artificial Sequence
  Oligonucleotide for detection of SNP TSC0001319
ttttgaagaacgt

SEQ ID NO: 3520 - DNA, 13 bp, Artificial Sequence
  Oligonucleotide for detection of SNP TSC0001319
acgttcttcaaaa

SEQ ID NO: 3521 - DNA, 13 bp, Artificial Sequence
  Oligonucleotide for detection of SNP TSC0001326
gagagtaaaggaa

SEQ ID NO: 3522 - DNA, 13 bp, Artificial Sequence
  Oligonucleotide for detection of SNP TSC0001326
ttcctttactctc

SEQ ID NO: 3523 - DNA, 13 bp, Artificial Sequence
  Oligonucleotide for detection of SNP TSC0001326
gagagtgaaggaa

SEQ ID NO: 3524 - DNA, 13 bp, Artificial Sequence
  Oligonucleotide for detection of SNP TSC0001326
ttccttcactctc

SEQ ID NO: 3525 - DNA, 13 bp, Artificial Sequence
  Oligonucleotide for detection of SNP TSC0001331
aaaaatgtatata

SEQ ID NO: 3526 - DNA, 13 bp, Artificial Sequence
  Oligonucleotide for detection of SNP TSC0001331
tatatacattttt

SEQ ID NO: 3527 - DNA, 13 bp, Artificial Sequence
  Oligonucleotide for detection of SNP TSC0001331
aaaaatttatata

SEQ ID NO: 3528 - DNA, 13 bp, Artificial Sequence
  Oligonucleotide for detection of SNP TSC0001331
tatataaattttt

SEQ ID NO: 3529 - DNA, 13 bp, Artificial Sequence
  Oligonucleotide for detection of SNP TSC0001331
tatatatattttt

SEQ ID NO: 3530 - DNA, 13 bp, Artificial Sequence
  Oligonucleotide for detection of SNP TSC0001331
aaaaatatatata

SEQ ID NO: 3531 - DNA, 13 bp, Artificial Sequence
  Oligonucleotide for detection of SNP TSC0001341
aggaatgtgttay

SEQ ID NO: 3532 - DNA, 13 bp, Artificial Sequence
  Oligonucleotide for detection of SNP TSC0001341
rtaacacattcct

SEQ ID NO: 3533 - DNA, 13 bp, Artificial Sequence
  Oligonucleotide for detection of SNP TSC0001341
aggaatatgttay

SEQ ID NO: 3534 - DNA, 13 bp, Artificial Sequence
  Oligonucleotide for detection of SNP TSC0001341
rtaacatattcct

SEQ ID NO: 3535 - DNA, 13 bp, Artificial Sequence
  Oligonucleotide for detection of SNP TSC0001341
aggaatgcgttay

SEQ ID NO: 3536 - DNA, 13 bp, Artificial Sequence
  Oligonucleotide for detection of SNP TSC0001341
rtaacgcattcct

SEQ ID NO: 3537 - DNA, 13 bp, Artificial Sequence
  Oligonucleotide for detection of SNP TSC0001341
aggaatacgttay

SEQ ID NO: 3538 - DNA, 13 bp, Artificial Sequence
  Oligonucleotide for detection of SNP TSC0001341
rtaacgtattcct

SEQ ID NO: 3539 - DNA, 13 bp, Artificial Sequence
  Oligonucleotide for detection of SNP TSC0001342
gtatattgggaaa

SEQ ID NO: 3540 - DNA, 13 bp, Artificial Sequence
  Oligonucleotide for detection of SNP TSC0001342
tttcccaatatac

SEQ ID NO: 3541 - DNA, 13 bp, Artificial Sequence
  Oligonucleotide for detection of SNP TSC0001342
gtatatcgggaaa

SEQ ID NO: 3542 - DNA, 13 bp, Artificial Sequence
  Oligonucleotide for detection of SNP TSC0001342
tttcccgatatac

SEQ ID NO: 3543 - DNA, 13 bp, Artificial Sequence
  Oligonucleotide for detection of SNP TSC0001342
ttttttgatatay

SEQ ID NO: 3544 - DNA, 13 bp, Artificial Sequence
  Oligonucleotide for detection of SNP TSC0001342
rtatatcaaaaaa

SEQ ID NO: 3545 - DNA, 13 bp, Artificial Sequence
  Oligonucleotide for detection of SNP TSC0001342
ttttttaatatay

SEQ ID NO: 3546 - DNA, 13 bp, Artificial Sequence
  Oligonucleotide for detection of SNP TSC0001342
rtatattaaaaaa

SEQ ID NO: 3547 - DNA, 13 bp, Artificial Sequence
  Oligonucleotide for detection of SNP TSC0001342
tttttcgatatay

SEQ ID NO: 3548 - DNA, 13 bp, Artificial Sequence
  Oligonucleotide for detection of SNP TSC0001342
rtatatcgaaaaa

SEQ ID NO: 3549 - DNA, 13 bp, Artificial Sequence
  Oligonucleotide for detection of SNP TSC0001361
gttttaagttttt

SEQ ID NO: 3550 - DNA, 13 bp, Artificial Sequence
  Oligonucleotide for detection of SNP TSC0001361
aaaaacttaaaac

SEQ ID NO: 3551 - DNA, 13 bp, Artificial Sequence
  Oligonucleotide for detection of SNP TSC0001361
gttttatgttttt

SEQ ID NO: 3552 - DNA, 13 bp, Artificial Sequence
  Oligonucleotide for detection of SNP TSC0001361
aaaaacataaaac

SEQ ID NO: 3553 - DNA, 13 bp, Artificial Sequence
  Oligonucleotide for detection of SNP TSC0001361
aggggtttggggy

SEQ ID NO: 3554 - DNA, 13 bp, Artificial Sequence
  Oligonucleotide for detection of SNP TSC0001361
rccccaaacccct

SEQ ID NO: 3555 - DNA, 13 bp, Artificial Sequence
  Oligonucleotide for detection of SNP TSC0001361
aggggtatggggy

SEQ ID NO: 3556 - DNA, 13 bp, Artificial Sequence
  Oligonucleotide for detection of SNP TSC0001361
rccccatacccct

SEQ ID NO: 3557 - DNA, 13 bp, Artificial Sequence
  Oligonucleotide for detection of SNP TSC0001362
ttgaatattgaag

SEQ ID NO: 3558 - DNA, 13 bp, Artificial Sequence
  Oligonucleotide for detection of SNP TSC0001362
cttcaatattcaa

SEQ ID NO: 3559 - DNA, 13 bp, Artificial Sequence
  Oligonucleotide for detection of SNP TSC0001362
ttgaatgttgaag

SEQ ID NO: 3560 - DNA, 13 bp, Artificial Sequence
  Oligonucleotide for detection of SNP TSC0001362
cttcaacattcaa

SEQ ID NO: 3561 - DNA, 13 bp, Artificial Sequence
  Oligonucleotide for detection of SNP TSC0001363
agtaaaattaaaa

SEQ ID NO: 3562 - DNA, 13 bp, Artificial Sequence
  Oligonucleotide for detection of SNP TSC0001363
ttttaattttact

SEQ ID NO: 3563 - DNA, 13 bp, Artificial Sequence
  Oligonucleotide for detection of SNP TSC0001363
agtaaagttaaaa

SEQ ID NO: 3564 - DNA, 13 bp, Artificial Sequence
  Oligonucleotide for detection of SNP TSC0001363
ttttaactttact

SEQ ID NO: 3565 - DNA, 13 bp, Artificial Sequence
  Oligonucleotide for detection of SNP TSC0001376
ttttaagagttty

SEQ ID NO: 3566 - DNA, 13 bp, Artificial Sequence
  Oligonucleotide for detection of SNP TSC0001376
raaactcttaaaa

SEQ ID NO: 3567 - DNA, 13 bp, Artificial Sequence
  Oligonucleotide for detection of SNP TSC0001376
ttttaaaagttty

SEQ ID NO: 3568 - DNA, 13 bp, Artificial Sequence
  Oligonucleotide for detection of SNP TSC0001376
raaacttttaaaa

SEQ ID NO: 3569 - DNA, 13 bp, Artificial Sequence
  Oligonucleotide for detection of SNP TSC0001377
tatgtttgtttgt

SEQ ID NO: 3570 - DNA, 13 bp, Artificial Sequence
  Oligonucleotide for detection of SNP TSC0001377
acaaacaaacata

SEQ ID NO: 3571 - DNA, 13 bp, Artificial Sequence
  Oligonucleotide for detection of SNP TSC0001377
tatgttcgtttgt

SEQ ID NO: 3572 - DNA, 13 bp, Artificial Sequence
  Oligonucleotide for detection of SNP TSC0001377
acaaacgaacata

SEQ ID NO: 3573 - DNA, 13 bp, Artificial Sequence
  Oligonucleotide for detection of SNP TSC0001377
atagatgaatata

SEQ ID NO: 3574 - DNA, 13 bp, Artificial Sequence
  Oligonucleotide for detection of SNP TSC0001377
tatattcatctat

SEQ ID NO: 3575 - DNA, 13 bp, Artificial Sequence
  Oligonucleotide for detection of SNP TSC0001377
atagataaatata

SEQ ID NO: 3576 - DNA, 13 bp, Artificial Sequence
  Oligonucleotide for detection of SNP TSC0001377
tatatttatctat

SEQ ID NO: 3577 - DNA, 13 bp, Artificial Sequence
  Oligonucleotide for detection of SNP TSC0001377
atagacgaatata

SEQ ID NO: 3578 - DNA, 13 bp, Artificial Sequence
  Oligonucleotide for detection of SNP TSC0001377
tatattcgtctat

SEQ ID NO: 3579 - DNA, 13 bp, Artificial Sequence
  Oligonucleotide for detection of SNP TSC0001378
agttggtattata

SEQ ID NO: 3580 - DNA, 13 bp, Artificial Sequence
  Oligonucleotide for detection of SNP TSC0001378
tataataccaact

SEQ ID NO: 3581 - DNA, 13 bp, Artificial Sequence
  Oligonucleotide for detection of SNP TSC0001378
tgtagttttagtt

SEQ ID NO: 3582 - DNA, 13 bp, Artificial Sequence
  Oligonucleotide for detection of SNP TSC0001378
aactaaaactaca

SEQ ID NO: 3583 - DNA, 13 bp, Artificial Sequence
  Oligonucleotide for detection of SNP TSC0001378
tgtagtattagtt

SEQ ID NO: 3584 - DNA, 13 bp, Artificial Sequence
  Oligonucleotide for detection of SNP TSC0001378
aactaatactaca

SEQ ID NO: 3585 - DNA, 13 bp, Artificial Sequence
  Oligonucleotide for detection of SNP TSC0001379
agttgagttttay

SEQ ID NO: 3586 - DNA, 13 bp, Artificial Sequence
  Oligonucleotide for detection of SNP TSC0001379
rtaaaactcaact

SEQ ID NO: 3587 - DNA, 13 bp, Artificial Sequence
  Oligonucleotide for detection of SNP TSC0001379
agttgaattttay

SEQ ID NO: 3588 - DNA, 13 bp, Artificial Sequence
  Oligonucleotide for detection of SNP TSC0001379
rtaaaattcaact

SEQ ID NO: 3589 - DNA, 13 bp, Artificial Sequence
  Oligonucleotide for detection of SNP TSC0001380
taaggtggttggt

SEQ ID NO: 3590 - DNA, 13 bp, Artificial Sequence
  Oligonucleotide for detection of SNP TSC0001380
accaaccacctta

SEQ ID NO: 3591 - DNA, 13 bp, Artificial Sequence
  Oligonucleotide for detection of SNP TSC0001380
taaggttgttggt

SEQ ID NO: 3592 - DNA, 13 bp, Artificial Sequence
  Oligonucleotide for detection of SNP TSC0001380
accaacaacctta

SEQ ID NO: 3593 - DNA, 13 bp, Artificial Sequence
  Oligonucleotide for detection of SNP TSC0001380
attagttatttta

SEQ ID NO: 3594 - DNA, 13 bp, Artificial Sequence
  Oligonucleotide for detection of SNP TSC0001380
taaaataactaat

SEQ ID NO: 3595 - DNA, 13 bp, Artificial Sequence
  Oligonucleotide for detection of SNP TSC0001380
attagtaatttta

SEQ ID NO: 3596 - DNA, 13 bp, Artificial Sequence
  Oligonucleotide for detection of SNP TSC0001380
taaaattactaat

SEQ ID NO: 3597 - DNA, 13 bp, Artificial Sequence
  Oligonucleotide for detection of SNP TSC0001382
atattggtattta

SEQ ID NO: 3598 - DNA, 13 bp, Artificial Sequence
  Oligonucleotide for detection of SNP TSC0001382
taaataccaatat

SEQ ID NO: 3599 - DNA, 13 bp, Artificial Sequence
  Oligonucleotide for detection of SNP TSC0001382
atattgatattta

SEQ ID NO: 3600 - DNA, 13 bp, Artificial Sequence
  Oligonucleotide for detection of SNP TSC0001382
taaatatcaatat

SEQ ID NO: 3601 - DNA, 13 bp, Artificial Sequence
  Oligonucleotide for detection of SNP TSC0001383
aaagagaattggy

SEQ ID NO: 3602 - DNA, 13 bp, Artificial Sequence
  Oligonucleotide for detection of SNP TSC0001383
rccaattctcttt

SEQ ID NO: 3603 - DNA, 13 bp, Artificial Sequence
  Oligonucleotide for detection of SNP TSC0001383
aaagagtattggy

SEQ ID NO: 3604 - DNA, 13 bp, Artificial Sequence
  Oligonucleotide for detection of SNP TSC0001383
rccaatactcttt

SEQ ID NO: 3605 - DNA, 13 bp, Artificial Sequence
  Oligonucleotide for detection of SNP TSC0001383
gttaatttttttt

SEQ ID NO: 3606 - DNA, 13 bp, Artificial Sequence
  Oligonucleotide for detection of SNP TSC0001383
aaaaaaaattaac

SEQ ID NO: 3607 - DNA, 13 bp, Artificial Sequence
  Oligonucleotide for detection of SNP TSC0001383
gttaatatttttt

SEQ ID NO: 3608 - DNA, 13 bp, Artificial Sequence
  Oligonucleotide for detection of SNP TSC0001383
aaaaaatattaac

SEQ ID NO: 3609 - DNA, 13 bp, Artificial Sequence
  Oligonucleotide for detection of SNP TSC0001384
gttattaatataa

SEQ ID NO: 3610 - DNA, 13 bp, Artificial Sequence
  Oligonucleotide for detection of SNP TSC0001384
ttatattaataac

SEQ ID NO: 3611 - DNA, 13 bp, Artificial Sequence
  Oligonucleotide for detection of SNP TSC0001384
gttattgatataa

SEQ ID NO: 3612 - DNA, 13 bp, Artificial Sequence
  Oligonucleotide for detection of SNP TSC0001384
ttatatcaataac

SEQ ID NO: 3613 - DNA, 13 bp, Artificial Sequence
  Oligonucleotide for detection of SNP TSC0001384
gttatcgatataa

SEQ ID NO: 3614 - DNA, 13 bp, Artificial Sequence
  Oligonucleotide for detection of SNP TSC0001384
ttatatcgataac

SEQ ID NO: 3615 - DNA, 13 bp, Artificial Sequence
  Oligonucleotide for detection of SNP TSC0001384
ttatattgatgay

SEQ ID NO: 3616 - DNA, 13 bp, Artificial Sequence
  Oligonucleotide for detection of SNP TSC0001384
rtcatcaatataa

SEQ ID NO: 3617 - DNA, 13 bp, Artificial Sequence
  Oligonucleotide for detection of SNP TSC0001384
ttatatcgatgay

SEQ ID NO: 3618 - DNA, 13 bp, Artificial Sequence
  Oligonucleotide for detection of SNP TSC0001384
rtcatcgatataa

SEQ ID NO: 3619 - DNA, 13 bp, Artificial Sequence
  Oligonucleotide for detection of SNP TSC0001385
ttaatatgtgaat

SEQ ID NO: 3620 - DNA, 13 bp, Artificial Sequence
  Oligonucleotide for detection of SNP TSC0001385
attcacatattaa

SEQ ID NO: 3621 - DNA, 13 bp, Artificial Sequence
  Oligonucleotide for detection of SNP TSC0001385
ttaatacgtgaat

SEQ ID NO: 3622 - DNA, 13 bp, Artificial Sequence
  Oligonucleotide for detection of SNP TSC0001385
attcacgtattaa

SEQ ID NO: 3623 - DNA, 13 bp, Artificial Sequence
  Oligonucleotide for detection of SNP TSC0001385
atttatgtattga

SEQ ID NO: 3624 - DNA, 13 bp, Artificial Sequence
  Oligonucleotide for detection of SNP TSC0001385
tcaatacataaat

SEQ ID NO: 3625 - DNA, 13 bp, Artificial Sequence
  Oligonucleotide for detection of SNP TSC0001385
atttatatattga

SEQ ID NO: 3626 - DNA, 13 bp, Artificial Sequence
  Oligonucleotide for detection of SNP TSC0001385
tcaatatataaat

SEQ ID NO: 3627 - DNA, 13 bp, Artificial Sequence
  Oligonucleotide for detection of SNP TSC0001385
atttacgtattga

SEQ ID NO: 3628 - DNA, 13 bp, Artificial Sequence
  Oligonucleotide for detection of SNP TSC0001385
tcaatacgtaaat

SEQ ID NO: 3629 - DNA, 13 bp, Artificial Sequence
  Oligonucleotide for detection of SNP TSC0001386
tgaaagaagaaga

SEQ ID NO: 3630 - DNA, 13 bp, Artificial Sequence
  Oligonucleotide for detection of SNP TSC0001386
tcttcttctttca

SEQ ID NO: 3631 - DNA, 13 bp, Artificial Sequence
  Oligonucleotide for detection of SNP TSC0001386
tgaaaggagaaga

SEQ ID NO: 3632 - DNA, 13 bp, Artificial Sequence
  Oligonucleotide for detection of SNP TSC0001386
tcttctcctttca

SEQ ID NO: 3633 - DNA, 13 bp, Artificial Sequence
  Oligonucleotide for detection of SNP TSC0001391
tttttagtaggaa

SEQ ID NO: 3634 - DNA, 13 bp, Artificial Sequence
  Oligonucleotide for detection of SNP TSC0001391
ttcctactaaaaa

SEQ ID NO: 3635 - DNA, 13 bp, Artificial Sequence
  Oligonucleotide for detection of SNP TSC0001391
tttttaataggaa

SEQ ID NO: 3636 - DNA, 13 bp, Artificial Sequence
  Oligonucleotide for detection of SNP TSC0001391
ttcctattaaaaa

SEQ ID NO: 3637 - DNA, 13 bp, Artificial Sequence
  Oligonucleotide for detection of SNP TSC0001392
aggtgtgtgtgta

SEQ ID NO: 3638 - DNA, 13 bp, Artificial Sequence
  Oligonucleotide for detection of SNP TSC0001392
tacacacacacct

SEQ ID NO: 3639 - DNA, 13 bp, Artificial Sequence
  Oligonucleotide for detection of SNP TSC0001392
aggtgtatgtgta

SEQ ID NO: 3640 - DNA, 13 bp, Artificial Sequence
  Oligonucleotide for detection of SNP TSC0001392
tacacatacacct

SEQ ID NO: 3641 - DNA, 13 bp, Artificial Sequence
  Oligonucleotide for detection of SNP TSC0001395
aatattttttttt

SEQ ID NO: 3642 - DNA, 13 bp, Artificial Sequence
  Oligonucleotide for detection of SNP TSC0001395
aaaaaaaaatatt

SEQ ID NO: 3643 - DNA, 13 bp, Artificial Sequence
  Oligonucleotide for detection of SNP TSC0001395
aatattgtttttt

SEQ ID NO: 3644 - DNA, 13 bp, Artificial Sequence
  Oligonucleotide for detection of SNP TSC0001395
aaaaaacaatatt

SEQ ID NO: 3645 - DNA, 13 bp, Artificial Sequence
  Oligonucleotide for detection of SNP TSC0001395
aaagaagaatatt

SEQ ID NO: 3646 - DNA, 13 bp, Artificial Sequence
  Oligonucleotide for detection of SNP TSC0001395
aatattcttcttt

SEQ ID NO: 3647 - DNA, 13 bp, Artificial Sequence
  Oligonucleotide for detection of SNP TSC0001395
aaagaataatatt

SEQ ID NO: 3648 - DNA, 13 bp, Artificial Sequence
  Oligonucleotide for detection of SNP TSC0001395
aatattattcttt

SEQ ID NO: 3649 - DNA, 13 bp, Artificial Sequence
  Oligonucleotide for detection of SNP TSC0001396
attttgggtatgt

SEQ ID NO: 3650 - DNA, 13 bp, Artificial Sequence
  Oligonucleotide for detection of SNP TSC0001396
acatacccaaaat

SEQ ID NO: 3651 - DNA, 13 bp, Artificial Sequence
  Oligonucleotide for detection of SNP TSC0001396
attttgagtatgt

SEQ ID NO: 3652 - DNA, 13 bp, Artificial Sequence
  Oligonucleotide for detection of SNP TSC0001396
acatactcaaaat

SEQ ID NO: 3653 - DNA, 13 bp, Artificial Sequence
  Oligonucleotide for detection of SNP TSC0001400
tattaaattttay

SEQ ID NO: 3654 - DNA, 13 bp, Artificial Sequence
  Oligonucleotide for detection of SNP TSC0001400
rtaaaatttaata

SEQ ID NO: 3655 - DNA, 13 bp, Artificial Sequence
  Oligonucleotide for detection of SNP TSC0001400
tattaagttttay

SEQ ID NO: 3656 - DNA, 13 bp, Artificial Sequence
  Oligonucleotide for detection of SNP TSC0001400
rtaaaacttaata

SEQ ID NO: 3657 - DNA, 13 bp, Artificial Sequence
  Oligonucleotide for detection of SNP TSC0001402
tgttgaaaatata

SEQ ID NO: 3658 - DNA, 13 bp, Artificial Sequence
  Oligonucleotide for detection of SNP TSC0001402
tatattttcaaca

SEQ ID NO: 3659 - DNA, 13 bp, Artificial Sequence
  Oligonucleotide for detection of SNP TSC0001402
tgttgagaatata

SEQ ID NO: 3660 - DNA, 13 bp, Artificial Sequence
  Oligonucleotide for detection of SNP TSC0001402
tatattctcaaca

SEQ ID NO: 3661 - DNA, 13 bp, Artificial Sequence
  Oligonucleotide for detection of SNP TSC0001402
cgttgaaaatata

SEQ ID NO: 3662 - DNA, 13 bp, Artificial Sequence
  Oligonucleotide for detection of SNP TSC0001402
tatattttcaacg

SEQ ID NO: 3663 - DNA, 13 bp, Artificial Sequence
  Oligonucleotide for detection of SNP TSC0001402
cgttgagaatata

SEQ ID NO: 3664 - DNA, 13 bp, Artificial Sequence
  Oligonucleotide for detection of SNP TSC0001402
tatattctcaacg

SEQ ID NO: 3665 - DNA, 13 bp, Artificial Sequence
  Oligonucleotide for detection of SNP TSC0001403
tttgaggttttty

SEQ ID NO: 3666 - DNA, 13 bp, Artificial Sequence
  Oligonucleotide for detection of SNP TSC0001403
raaaaacctcaaa

SEQ ID NO: 3667 - DNA, 13 bp, Artificial Sequence
  Oligonucleotide for detection of SNP TSC0001403
tttgagattttty

SEQ ID NO: 3668 - DNA, 13 bp, Artificial Sequence
  Oligonucleotide for detection of SNP TSC0001403
raaaaatctcaaa

SEQ ID NO: 3669 - DNA, 13 bp, Artificial Sequence
  Oligonucleotide for detection of SNP TSC0001404
agaaaaaaggttt

SEQ ID NO: 3670 - DNA, 13 bp, Artificial Sequence
  Oligonucleotide for detection of SNP TSC0001404
aaaccttttttct

SEQ ID NO: 3671 - DNA, 13 bp, Artificial Sequence
  Oligonucleotide for detection of SNP TSC0001404
agaaaagaggttt

SEQ ID NO: 3672 - DNA, 13 bp, Artificial Sequence
  Oligonucleotide for detection of SNP TSC0001404
aaacctcttttct

SEQ ID NO: 3673 - DNA, 13 bp, Artificial Sequence
  Oligonucleotide for detection of SNP TSC0001405
taaggtaatggtt

SEQ ID NO: 3674 - DNA, 13 bp, Artificial Sequence
  Oligonucleotide for detection of SNP TSC0001405
aaccattacctta

SEQ ID NO: 3675 - DNA, 13 bp, Artificial Sequence
  Oligonucleotide for detection of SNP TSC0001405
taaggttatggtt

SEQ ID NO: 3676 - DNA, 13 bp, Artificial Sequence
  Oligonucleotide for detection of SNP TSC0001405
aaccataacctta

SEQ ID NO: 3677 - DNA, 13 bp, Artificial Sequence
  Oligonucleotide for detection of SNP TSC0001405
agttattattttg

SEQ ID NO: 3678 - DNA, 13 bp, Artificial Sequence
  Oligonucleotide for detection of SNP TSC0001405
caaaataataact

SEQ ID NO: 3679 - DNA, 13 bp, Artificial Sequence
  Oligonucleotide for detection of SNP TSC0001405
agttatgattttg

SEQ ID NO: 3680 - DNA, 13 bp, Artificial Sequence
  Oligonucleotide for detection of SNP TSC0001405
caaaatcataact

SEQ ID NO: 3681 - DNA, 13 bp, Artificial Sequence
  Oligonucleotide for detection of SNP TSC0001406
ttaaatatttttt

SEQ ID NO: 3682 - DNA, 13 bp, Artificial Sequence
  Oligonucleotide for detection of SNP TSC0001406
aaaaaatatttaa

SEQ ID NO: 3683 - DNA, 13 bp, Artificial Sequence
  Oligonucleotide for detection of SNP TSC0001406
ttaaatgtttttt

SEQ ID NO: 3684 - DNA, 13 bp, Artificial Sequence
  Oligonucleotide for detection of SNP TSC0001406
aaaaaacatttaa

SEQ ID NO: 3685 - DNA, 13 bp, Artificial Sequence
  Oligonucleotide for detection of SNP TSC0001406
ttaaacgtttttt

SEQ ID NO: 3686 - DNA, 13 bp, Artificial Sequence
  Oligonucleotide for detection of SNP TSC0001406
aaaaaacgtttaa

SEQ ID NO: 3687 - DNA, 13 bp, Artificial Sequence
  Oligonucleotide for detection of SNP TSC0001406
aaagggtgtttaa

SEQ ID NO: 3688 - DNA, 13 bp, Artificial Sequence
  Oligonucleotide for detection of SNP TSC0001406
ttaaacacccttt

SEQ ID NO: 3689 - DNA, 13 bp, Artificial Sequence
  Oligonucleotide for detection of SNP TSC0001406
aaagggcgtttaa

SEQ ID NO: 3690 - DNA, 13 bp, Artificial Sequence
  Oligonucleotide for detection of SNP TSC0001406
ttaaacgcccttt

SEQ ID NO: 3691 - DNA, 13 bp, Artificial Sequence
  Oligonucleotide for detection of SNP TSC0001407
ttattttgtttty

SEQ ID NO: 3692 - DNA, 13 bp, Artificial Sequence
  Oligonucleotide for detection of SNP TSC0001407
raaaacaaaataa

SEQ ID NO: 3693 - DNA, 13 bp, Artificial Sequence
  Oligonucleotide for detection of SNP TSC0001407
ttatttcgtttty

SEQ ID NO: 3694 - DNA, 13 bp, Artificial Sequence
  Oligonucleotide for detection of SNP TSC0001407
raaaacgaaataa

SEQ ID NO: 3695 - DNA, 13 bp, Artificial Sequence
  Oligonucleotide for detection of SNP TSC0001407
gggaatggagtaa

SEQ ID NO: 3696 - DNA, 13 bp, Artificial Sequence
  Oligonucleotide for detection of SNP TSC0001407
ttactccattccc

SEQ ID NO: 3697 - DNA, 13 bp, Artificial Sequence
  Oligonucleotide for detection of SNP TSC0001407
gggaatagagtaa

SEQ ID NO: 3698 - DNA, 13 bp, Artificial Sequence
  Oligonucleotide for detection of SNP TSC0001407
ttactctattccc

SEQ ID NO: 3699 - DNA, 13 bp, Artificial Sequence
  Oligonucleotide for detection of SNP TSC0001407
gggaacggagtaa

SEQ ID NO: 3700 - DNA, 13 bp, Artificial Sequence
  Oligonucleotide for detection of SNP TSC0001407
ttactccgttccc

SEQ ID NO: 3701 - DNA, 13 bp, Artificial Sequence
  Oligonucleotide for detection of SNP TSC0001409
taaagaatttaaa

SEQ ID NO: 3702 - DNA, 13 bp, Artificial Sequence
  Oligonucleotide for detection of SNP TSC0001409
tttaaattcttta

SEQ ID NO: 3703 - DNA, 13 bp, Artificial Sequence
  Oligonucleotide for detection of SNP TSC0001409
taaagagtttaaa

SEQ ID NO: 3704 - DNA, 13 bp, Artificial Sequence
  Oligonucleotide for detection of SNP TSC0001409
tttaaactcttta

SEQ ID NO: 3705 - DNA, 13 bp, Artificial Sequence
  Oligonucleotide for detection of SNP TSC0001410
ttggaaattttay

SEQ ID NO: 3706 - DNA, 13 bp, Artificial Sequence
  Oligonucleotide for detection of SNP TSC0001410
rtaaaatttccaa

SEQ ID NO: 3707 - DNA, 13 bp, Artificial Sequence
  Oligonucleotide for detection of SNP TSC0001410
ttggaagttttay

SEQ ID NO: 3708 - DNA, 13 bp, Artificial Sequence
  Oligonucleotide for detection of SNP TSC0001410
rtaaaacttccaa

SEQ ID NO: 3709 - DNA, 13 bp, Artificial Sequence
  Oligonucleotide for detection of SNP TSC0001411
gtaggtatattay

SEQ ID NO: 3710 - DNA, 13 bp, Artificial Sequence
  Oligonucleotide for detection of SNP TSC0001411
rtaatatacctac

SEQ ID NO: 3711 - DNA, 13 bp, Artificial Sequence
  Oligonucleotide for detection of SNP TSC0001411
gtaggtttattay

SEQ ID NO: 3712 - DNA, 13 bp, Artificial Sequence
  Oligonucleotide for detection of SNP TSC0001411
rtaataaacctac

SEQ ID NO: 3713 - DNA, 13 bp, Artificial Sequence
  Oligonucleotide for detection of SNP TSC0001411
gtgatgtgtttay

SEQ ID NO: 3714 - DNA, 13 bp, Artificial Sequence
  Oligonucleotide for detection of SNP TSC0001411
rtaaacacatcac

SEQ ID NO: 3715 - DNA, 13 bp, Artificial Sequence
  Oligonucleotide for detection of SNP TSC0001411
gtgatgggtttay

SEQ ID NO: 3716 - DNA, 13 bp, Artificial Sequence
  Oligonucleotide for detection of SNP TSC0001411
rtaaacccatcac

SEQ ID NO: 3717 - DNA, 13 bp, Artificial Sequence
  Oligonucleotide for detection of SNP TSC0001412
ttatagttttgta

SEQ ID NO: 3718 - DNA, 13 bp, Artificial Sequence
  Oligonucleotide for detection of SNP TSC0001412
tacaaaactataa

SEQ ID NO: 3719 - DNA, 13 bp, Artificial Sequence
  Oligonucleotide for detection of SNP TSC0001412
ttataggtttgta

SEQ ID NO: 3720 - DNA, 13 bp, Artificial Sequence
  Oligonucleotide for detection of SNP TSC0001412
tacaaacctataa

SEQ ID NO: 3721 - DNA, 13 bp, Artificial Sequence
  Oligonucleotide for detection of SNP TSC0001412
tgtagagttgtga

SEQ ID NO: 3722 - DNA, 13 bp, Artificial Sequence
  Oligonucleotide for detection of SNP TSC0001412
tcacaactctaca

SEQ ID NO: 3723 - DNA, 13 bp, Artificial Sequence
  Oligonucleotide for detection of SNP TSC0001412
tgtagatttgtga

SEQ ID NO: 3724 - DNA, 13 bp, Artificial Sequence
  Oligonucleotide for detection of SNP TSC0001412
tcacaaatctaca

SEQ ID NO: 3725 - DNA, 13 bp, Artificial Sequence
  Oligonucleotide for detection of SNP TSC0001413
atttaggttgatt

SEQ ID NO: 3726 - DNA, 13 bp, Artificial Sequence
  Oligonucleotide for detection of SNP TSC0001413
aatcaacctaaat

SEQ ID NO: 3727 - DNA, 13 bp, Artificial Sequence
  Oligonucleotide for detection of SNP TSC0001413
atttagattgatt

SEQ ID NO: 3728 - DNA, 13 bp, Artificial Sequence
  Oligonucleotide for detection of SNP TSC0001413
aatcaatctaaat

SEQ ID NO: 3729 - DNA, 13 bp, Artificial Sequence
  Oligonucleotide for detection of SNP TSC0001414
tatataattggtg

SEQ ID NO: 3730 - DNA, 13 bp, Artificial Sequence
  Oligonucleotide for detection of SNP TSC0001414
caccaattatata

SEQ ID NO: 3731 - DNA, 13 bp, Artificial Sequence
  Oligonucleotide for detection of SNP TSC0001414
tatatagttggtg

SEQ ID NO: 3732 - DNA, 13 bp, Artificial Sequence
  Oligonucleotide for detection of SNP TSC0001414
caccaactatata

SEQ ID NO: 3733 - DNA, 13 bp, Artificial Sequence
  Oligonucleotide for detection of SNP TSC0001416
ttgtttatttttt

SEQ ID NO: 3734 - DNA, 13 bp, Artificial Sequence
  Oligonucleotide for detection of SNP TSC0001416
aaaaaataaacaa

SEQ ID NO: 3735 - DNA, 13 bp, Artificial Sequence
  Oligonucleotide for detection of SNP TSC0001416
ttgtttttttttt

SEQ ID NO: 3736 - DNA, 13 bp, Artificial Sequence
  Oligonucleotide for detection of SNP TSC0001416
aaaaaaaaaacaa

SEQ ID NO: 3737 - DNA, 13 bp, Artificial Sequence
  Oligonucleotide for detection of SNP TSC0001416
aaagggtaagtag

SEQ ID NO: 3738 - DNA, 13 bp, Artificial Sequence
  Oligonucleotide for detection of SNP TSC0001416
ctacttacccttt

SEQ ID NO: 3739 - DNA, 13 bp, Artificial Sequence
  Oligonucleotide for detection of SNP TSC0001416
aaaggggaagtag

SEQ ID NO: 3740 - DNA, 13 bp, Artificial Sequence
  Oligonucleotide for detection of SNP TSC0001416
ctacttccccttt

SEQ ID NO: 3741 - DNA, 13 bp, Artificial Sequence
  Oligonucleotide for detection of SNP TSC0001420
aagtaggataaag

SEQ ID NO: 3742 - DNA, 13 bp, Artificial Sequence
  Oligonucleotide for detection of SNP TSC0001420
ctttatcctactt

SEQ ID NO: 3743 - DNA, 13 bp, Artificial Sequence
  Oligonucleotide for detection of SNP TSC0001420
aagtagaataaag

SEQ ID NO: 3744 - DNA, 13 bp, Artificial Sequence
  Oligonucleotide for detection of SNP TSC0001420
ctttattctactt

SEQ ID NO: 3745 - DNA, 13 bp, Artificial Sequence
  Oligonucleotide for detection of SNP TSC0001429
tttgaaattatta

SEQ ID NO: 3746 - DNA, 13 bp, Artificial Sequence
  Oligonucleotide for detection of SNP TSC0001429
taataatttcaaa

SEQ ID NO: 3747 - DNA, 13 bp, Artificial Sequence
  Oligonucleotide for detection of SNP TSC0001429
tttgaagttatta

SEQ ID NO: 3748 - DNA, 13 bp, Artificial Sequence
  Oligonucleotide for detection of SNP TSC0001429
taataacttcaaa

SEQ ID NO: 3749 - DNA, 13 bp, Artificial Sequence
  Oligonucleotide for detection of SNP TSC0001430
gaagtgaaataga

SEQ ID NO: 3750 - DNA, 13 bp, Artificial Sequence
  Oligonucleotide for detection of SNP TSC0001430
tctatttcacttc

SEQ ID NO: 3751 - DNA, 13 bp, Artificial Sequence
  Oligonucleotide for detection of SNP TSC0001430
gaagtggaataga

SEQ ID NO: 3752 - DNA, 13 bp, Artificial Sequence
  Oligonucleotide for detection of SNP TSC0001430
tctattccacttc

SEQ ID NO: 3753 - DNA, 13 bp, Artificial Sequence
  Oligonucleotide for detection of SNP TSC0001431
ttttttatttttt

SEQ ID NO: 3754 - DNA, 13 bp, Artificial Sequence
  Oligonucleotide for detection of SNP TSC0001431
aaaaaataaaaaa

SEQ ID NO: 3755 - DNA, 13 bp, Artificial Sequence
  Oligonucleotide for detection of SNP TSC0001431
ttttttgtttttt

SEQ ID NO: 3756 - DNA, 13 bp, Artificial Sequence
  Oligonucleotide for detection of SNP TSC0001431
aaaaaacaaaaaa

SEQ ID NO: 3757 - DNA, 13 bp, Artificial Sequence
  Oligonucleotide for detection of SNP TSC0001432
ttgtatatttatt

SEQ ID NO: 3758 - DNA, 13 bp, Artificial Sequence
  Oligonucleotide for detection of SNP TSC0001432
aataaatatacaa

SEQ ID NO: 3759 - DNA, 13 bp, Artificial Sequence
  Oligonucleotide for detection of SNP TSC0001432
ttgtatttttatt

SEQ ID NO: 3760 - DNA, 13 bp, Artificial Sequence
  Oligonucleotide for detection of SNP TSC0001432
aataaaaatacaa

SEQ ID NO: 3761 - DNA, 13 bp, Artificial Sequence
  Oligonucleotide for detection of SNP TSC0001432
aatggatatgtaa

SEQ ID NO: 3762 - DNA, 13 bp, Artificial Sequence
  Oligonucleotide for detection of SNP TSC0001432
ttacatatccatt

SEQ ID NO: 3763 - DNA, 13 bp, Artificial Sequence
  Oligonucleotide for detection of SNP TSC0001432
aatggagatgtaa

SEQ ID NO: 3764 - DNA, 13 bp, Artificial Sequence
  Oligonucleotide for detection of SNP TSC0001432
ttacatctccatt

SEQ ID NO: 3765 - DNA, 13 bp, Artificial Sequence
  Oligonucleotide for detection of SNP TSC0001437
gtgggaggtgatt

SEQ ID NO: 3766 - DNA, 13 bp, Artificial Sequence
  Oligonucleotide for detection of SNP TSC0001437
aatcacctcccac

SEQ ID NO: 3767 - DNA, 13 bp, Artificial Sequence
  Oligonucleotide for detection of SNP TSC0001437
gtgggaagtgatt

SEQ ID NO: 3768 - DNA, 13 bp, Artificial Sequence
  Oligonucleotide for detection of SNP TSC0001437
aatcacttcccac

SEQ ID NO: 3769 - DNA, 13 bp, Artificial Sequence
  Oligonucleotide for detection of SNP TSC0001440
tgtttggggaata

SEQ ID NO: 3770 - DNA, 13 bp, Artificial Sequence
  Oligonucleotide for detection of SNP TSC0001440
tattccccaaaca

SEQ ID NO: 3771 - DNA, 13 bp, Artificial Sequence
  Oligonucleotide for detection of SNP TSC0001440
tgtttgaggaata

SEQ ID NO: 3772 - DNA, 13 bp, Artificial Sequence
  Oligonucleotide for detection of SNP TSC0001440
tattcctcaaaca

SEQ ID NO: 3773 - DNA, 13 bp, Artificial Sequence
  Oligonucleotide for detection of SNP TSC0001444
aagaaggtgtttg

SEQ ID NO: 3774 - DNA, 13 bp, Artificial Sequence
  Oligonucleotide for detection of SNP TSC0001444
caaacaccttctt

SEQ ID NO: 3775 - DNA, 13 bp, Artificial Sequence
  Oligonucleotide for detection of SNP TSC0001444
aagaagatgtttg

SEQ ID NO: 3776 - DNA, 13 bp, Artificial Sequence
  Oligonucleotide for detection of SNP TSC0001444
caaacatcttctt

SEQ ID NO: 3777 - DNA, 13 bp, Artificial Sequence
  Oligonucleotide for detection of SNP TSC0001445
gtgttaggtttag

SEQ ID NO: 3778 - DNA, 13 bp, Artificial Sequence
  Oligonucleotide for detection of SNP TSC0001445
ctaaacctaacac

SEQ ID NO: 3779 - DNA, 13 bp, Artificial Sequence
  Oligonucleotide for detection of SNP TSC0001445
gtgttaagtttag

SEQ ID NO: 3780 - DNA, 13 bp, Artificial Sequence
  Oligonucleotide for detection of SNP TSC0001445
ctaaacttaacac

SEQ ID NO: 3781 - DNA, 13 bp, Artificial Sequence
  Oligonucleotide for detection of SNP TSC0001446
gaggttagtttag

SEQ ID NO: 3782 - DNA, 13 bp, Artificial Sequence
  Oligonucleotide for detection of SNP TSC0001446
ctaaactaacctc

SEQ ID NO: 3783 - DNA, 13 bp, Artificial Sequence
  Oligonucleotide for detection of SNP TSC0001446
gaggttggtttag

SEQ ID NO: 3784 - DNA, 13 bp, Artificial Sequence
  Oligonucleotide for detection of SNP TSC0001446
ctaaaccaacctc

SEQ ID NO: 3785 - DNA, 13 bp, Artificial Sequence
  Oligonucleotide for detection of SNP TSC0001447
agggttattatag

SEQ ID NO: 3786 - DNA, 13 bp, Artificial Sequence
  Oligonucleotide for detection of SNP TSC0001447
ctataataaccct

SEQ ID NO: 3787 - DNA, 13 bp, Artificial Sequence
  Oligonucleotide for detection of SNP TSC0001447
agggtttttatag

SEQ ID NO: 3788 - DNA, 13 bp, Artificial Sequence
  Oligonucleotide for detection of SNP TSC0001447
ctataaaaaccct

SEQ ID NO: 3789 - DNA, 13 bp, Artificial Sequence
  Oligonucleotide for detection of SNP TSC0001447
ttgtgatagtttt

SEQ ID NO: 3790 - DNA, 13 bp, Artificial Sequence
  Oligonucleotide for detection of SNP TSC0001447
aaaactatcacaa

SEQ ID NO: 3791 - DNA, 13 bp, Artificial Sequence
  Oligonucleotide for detection of SNP TSC0001447
ttgtgagagtttt

SEQ ID NO: 3792 - DNA, 13 bp, Artificial Sequence
  Oligonucleotide for detection of SNP TSC0001447
aaaactctcacaa

SEQ ID NO: 3793 - DNA, 13 bp, Artificial Sequence
  Oligonucleotide for detection of SNP TSC0001449
aagagagtgtaaa

SEQ ID NO: 3794 - DNA, 13 bp, Artificial Sequence
  Oligonucleotide for detection of SNP TSC0001449
tttacactctctt

SEQ ID NO: 3795 - DNA, 13 bp, Artificial Sequence
  Oligonucleotide for detection of SNP TSC0001449
aagagaatgtaaa

SEQ ID NO: 3796 - DNA, 13 bp, Artificial Sequence
  Oligonucleotide for detection of SNP TSC0001449
tttacattctctt

SEQ ID NO: 3797 - DNA, 13 bp, Artificial Sequence
  Oligonucleotide for detection of SNP TSC0001453
tatggaaatttag

SEQ ID NO: 3798 - DNA, 13 bp, Artificial Sequence
  Oligonucleotide for detection of SNP TSC0001453
ctaaatttccata

SEQ ID NO: 3799 - DNA, 13 bp, Artificial Sequence
  Oligonucleotide for detection of SNP TSC0001453
tatggatatttag

SEQ ID NO: 3800 - DNA, 13 bp, Artificial Sequence
  Oligonucleotide for detection of SNP TSC0001453
ctaaatatccata

SEQ ID NO: 3801 - DNA, 13 bp, Artificial Sequence
  Oligonucleotide for detection of SNP TSC0001453
ttgaatttttata

SEQ ID NO: 3802 - DNA, 13 bp, Artificial Sequence
  Oligonucleotide for detection of SNP TSC0001453
tataaaaattcaa

SEQ ID NO: 3803 - DNA, 13 bp, Artificial Sequence
  Oligonucleotide for detection of SNP TSC0001453
ttgaatatttata

SEQ ID NO: 3804 - DNA, 13 bp, Artificial Sequence
  Oligonucleotide for detection of SNP TSC0001453
tataaatattcaa

SEQ ID NO: 3805 - DNA, 13 bp, Artificial Sequence
  Oligonucleotide for detection of SNP TSC0001456
gagatagagttta

SEQ ID NO: 3806 - DNA, 13 bp, Artificial Sequence
  Oligonucleotide for detection of SNP TSC0001456
taaactctatctc

SEQ ID NO: 3807 - DNA, 13 bp, Artificial Sequence
  Oligonucleotide for detection of SNP TSC0001456
gagataaagttta

SEQ ID NO: 3808 - DNA, 13 bp, Artificial Sequence
  Oligonucleotide for detection of SNP TSC0001456
taaactttatctc

SEQ ID NO: 3809 - DNA, 13 bp, Artificial Sequence
  Oligonucleotide for detection of SNP TSC0001457
tggtttagttaag

SEQ ID NO: 3810 - DNA, 13 bp, Artificial Sequence
  Oligonucleotide for detection of SNP TSC0001457
cttaactaaacca

SEQ ID NO: 3811 - DNA, 13 bp, Artificial Sequence
  Oligonucleotide for detection of SNP TSC0001457
tggttttgttaag

SEQ ID NO: 3812 - DNA, 13 bp, Artificial Sequence
  Oligonucleotide for detection of SNP TSC0001457
cttaacaaaacca

SEQ ID NO: 3813 - DNA, 13 bp, Artificial Sequence
  Oligonucleotide for detection of SNP TSC0001457
tttgattgggtta

SEQ ID NO: 3814 - DNA, 13 bp, Artificial Sequence
  Oligonucleotide for detection of SNP TSC0001457
taacccaatcaaa

SEQ ID NO: 3815 - DNA, 13 bp, Artificial Sequence
  Oligonucleotide for detection of SNP TSC0001457
tttgatagggtta

SEQ ID NO: 3816 - DNA, 13 bp, Artificial Sequence
  Oligonucleotide for detection of SNP TSC0001457
taaccctatcaaa

SEQ ID NO: 3817 - DNA, 13 bp, Artificial Sequence
  Oligonucleotide for detection of SNP TSC0001458
gtttttatgttta

SEQ ID NO: 3818 - DNA, 13 bp, Artificial Sequence
  Oligonucleotide for detection of SNP TSC0001458
taaacataaaaac

SEQ ID NO: 3819 - DNA, 13 bp, Artificial Sequence
  Oligonucleotide for detection of SNP TSC0001458
gtttttgtgttta

SEQ ID NO: 3820 - DNA, 13 bp, Artificial Sequence
  Oligonucleotide for detection of SNP TSC0001458
taaacacaaaaac

SEQ ID NO: 3821 - DNA, 13 bp, Artificial Sequence
  Oligonucleotide for detection of SNP TSC0001459
gtttagataaggg

SEQ ID NO: 3822 - DNA, 13 bp, Artificial Sequence
  Oligonucleotide for detection of SNP TSC0001459
cccttatctaaac

SEQ ID NO: 3823 - DNA, 13 bp, Artificial Sequence
  Oligonucleotide for detection of SNP TSC0001459
gtttagttaaggg

SEQ ID NO: 3824 - DNA, 13 bp, Artificial Sequence
  Oligonucleotide for detection of SNP TSC0001459
cccttaactaaac

SEQ ID NO: 3825 - DNA, 13 bp, Artificial Sequence
  Oligonucleotide for detection of SNP TSC0001459
tttttgtttgggy

SEQ ID NO: 3826 - DNA, 13 bp, Artificial Sequence
  Oligonucleotide for detection of SNP TSC0001459
rcccaaacaaaaa

SEQ ID NO: 3827 - DNA, 13 bp, Artificial Sequence
  Oligonucleotide for detection of SNP TSC0001459
tttttgattgggy

SEQ ID NO: 3828 - DNA, 13 bp, Artificial Sequence
  Oligonucleotide for detection of SNP TSC0001459
rcccaatcaaaaa

SEQ ID NO: 3829 - DNA, 13 bp, Artificial Sequence
  Oligonucleotide for detection of SNP TSC0001460
atttttgattttt

SEQ ID NO: 3830 - DNA, 13 bp, Artificial Sequence
  Oligonucleotide for detection of SNP TSC0001460
aaaaatcaaaaat

SEQ ID NO: 3831 - DNA, 13 bp, Artificial Sequence
  Oligonucleotide for detection of SNP TSC0001460
attttttattttt

SEQ ID NO: 3832 - DNA, 13 bp, Artificial Sequence
  Oligonucleotide for detection of SNP TSC0001460
aaaaataaaaaat

SEQ ID NO: 3833 - DNA, 13 bp, Artificial Sequence
  Oligonucleotide for detection of SNP TSC0001460
aaaaattaaaggt

SEQ ID NO: 3834 - DNA, 13 bp, Artificial Sequence
  Oligonucleotide for detection of SNP TSC0001460
acctttaattttt

SEQ ID NO: 3835 - DNA, 13 bp, Artificial Sequence
  Oligonucleotide for detection of SNP TSC0001460
aaaaataaaaggt

SEQ ID NO: 3836 - DNA, 13 bp, Artificial Sequence
  Oligonucleotide for detection of SNP TSC0001460
accttttattttt

SEQ ID NO: 3837 - DNA, 13 bp, Artificial Sequence
  Oligonucleotide for detection of SNP TSC0001461
tgtaaattttttt

SEQ ID NO: 3838 - DNA, 13 bp, Artificial Sequence
  Oligonucleotide for detection of SNP TSC0001461
aaaaaaatttaca

SEQ ID NO: 3839 - DNA, 13 bp, Artificial Sequence
  Oligonucleotide for detection of SNP TSC0001461
tgtaaagtttttt

SEQ ID NO: 3840 - DNA, 13 bp, Artificial Sequence
  Oligonucleotide for detection of SNP TSC0001461
aaaaaactttaca

SEQ ID NO: 3841 - DNA, 13 bp, Artificial Sequence
  Oligonucleotide for detection of SNP TSC0001461
agaggagtttgta

SEQ ID NO: 3842 - DNA, 13 bp, Artificial Sequence
  Oligonucleotide for detection of SNP TSC0001461
tacaaactcctct

SEQ ID NO: 3843 - DNA, 13 bp, Artificial Sequence
  Oligonucleotide for detection of SNP TSC0001461
agaggattttgta

SEQ ID NO: 3844 - DNA, 13 bp, Artificial Sequence
  Oligonucleotide for detection of SNP TSC0001461
tacaaaatcctct

SEQ ID NO: 3845 - DNA, 13 bp, Artificial Sequence
  Oligonucleotide for detection of SNP TSC0001471
tttttatggttay

SEQ ID NO: 3846 - DNA, 13 bp, Artificial Sequence
  Oligonucleotide for detection of SNP TSC0001471
rtaaccataaaaa

SEQ ID NO: 3847 - DNA, 13 bp, Artificial Sequence
  Oligonucleotide for detection of SNP TSC0001471
tttttagggttay

SEQ ID NO: 3848 - DNA, 13 bp, Artificial Sequence
  Oligonucleotide for detection of SNP TSC0001471
rtaaccctaaaaa

SEQ ID NO: 3849 - DNA, 13 bp, Artificial Sequence
  Oligonucleotide for detection of SNP TSC0001471
tttttacggttay

SEQ ID NO: 3850 - DNA, 13 bp, Artificial Sequence
  Oligonucleotide for detection of SNP TSC0001471
rtaaccgtaaaaa

SEQ ID NO: 3851 - DNA, 13 bp, Artificial Sequence
  Oligonucleotide for detection of SNP TSC0001471
gtgattgtaggaa

SEQ ID NO: 3852 - DNA, 13 bp, Artificial Sequence
  Oligonucleotide for detection of SNP TSC0001471
ttcctacaatcac

SEQ ID NO: 3853 - DNA, 13 bp, Artificial Sequence
  Oligonucleotide for detection of SNP TSC0001471
gtgattttaggaa

SEQ ID NO: 3854 - DNA, 13 bp, Artificial Sequence
  Oligonucleotide for detection of SNP TSC0001471
ttcctaaaatcac

SEQ ID NO: 3855 - DNA, 13 bp, Artificial Sequence
  Oligonucleotide for detection of SNP TSC0001471
gtgatcgtaggaa

SEQ ID NO: 3856 - DNA, 13 bp, Artificial Sequence
  Oligonucleotide for detection of SNP TSC0001471
ttcctacgatcac

SEQ ID NO: 3857 - DNA, 13 bp, Artificial Sequence
  Oligonucleotide for detection of SNP TSC0001472
ttgtttaatttty

SEQ ID NO: 3858 - DNA, 13 bp, Artificial Sequence
  Oligonucleotide for detection of SNP TSC0001472
raaaattaaacaa

SEQ ID NO: 3859 - DNA, 13 bp, Artificial Sequence
  Oligonucleotide for detection of SNP TSC0001472
ttgttttatttty

SEQ ID NO: 3860 - DNA, 13 bp, Artificial Sequence
  Oligonucleotide for detection of SNP TSC0001472
raaaataaaacaa

SEQ ID NO: 3861 - DNA, 13 bp, Artificial Sequence
  Oligonucleotide for detection of SNP TSC0001472
ggaaattaagtag

SEQ ID NO: 3862 - DNA, 13 bp, Artificial Sequence
  Oligonucleotide for detection of SNP TSC0001472
ctacttaatttcc

SEQ ID NO: 3863 - DNA, 13 bp, Artificial Sequence
  Oligonucleotide for detection of SNP TSC0001472
ggaaatgaagtag

SEQ ID NO: 3864 - DNA, 13 bp, Artificial Sequence
  Oligonucleotide for detection of SNP TSC0001472
ctacttcatttcc

SEQ ID NO: 3865 - DNA, 13 bp, Artificial Sequence
  Oligonucleotide for detection of SNP TSC0001473
tttattttttatg

SEQ ID NO: 3866 - DNA, 13 bp, Artificial Sequence
  Oligonucleotide for detection of SNP TSC0001473
cataaaaaataaa

SEQ ID NO: 3867 - DNA, 13 bp, Artificial Sequence
  Oligonucleotide for detection of SNP TSC0001473
tttattgtttatg

SEQ ID NO: 3868 - DNA, 13 bp, Artificial Sequence
  Oligonucleotide for detection of SNP TSC0001473
cataaacaataaa

SEQ ID NO: 3869 - DNA, 13 bp, Artificial Sequence
  Oligonucleotide for detection of SNP TSC0001473
tatggagaatgaa

SEQ ID NO: 3870 - DNA, 13 bp, Artificial Sequence
  Oligonucleotide for detection of SNP TSC0001473
ttcattctccata

SEQ ID NO: 3871 - DNA, 13 bp, Artificial Sequence
  Oligonucleotide for detection of SNP TSC0001473
tatggataatgaa

SEQ ID NO: 3872 - DNA, 13 bp, Artificial Sequence
  Oligonucleotide for detection of SNP TSC0001473
ttcattatccata

SEQ ID NO: 3873 - DNA, 13 bp, Artificial Sequence
  Oligonucleotide for detection of SNP TSC0001492
tttaataattgga

SEQ ID NO: 3874 - DNA, 13 bp, Artificial Sequence
  Oligonucleotide for detection of SNP TSC0001492
tccaattattaaa

SEQ ID NO: 3875 - DNA, 13 bp, Artificial Sequence
  Oligonucleotide for detection of SNP TSC0001492
tttaattattgga

SEQ ID NO: 3876 - DNA, 13 bp, Artificial Sequence
  Oligonucleotide for detection of SNP TSC0001492
tccaataattaaa

SEQ ID NO: 3877 - DNA, 13 bp, Artificial Sequence
  Oligonucleotide for detection of SNP TSC0001492
tttaattattagg

SEQ ID NO: 3878 - DNA, 13 bp, Artificial Sequence
  Oligonucleotide for detection of SNP TSC0001492
cctaataattaaa

SEQ ID NO: 3879 - DNA, 13 bp, Artificial Sequence
  Oligonucleotide for detection of SNP TSC0001492
tttaatgattagg

SEQ ID NO: 3880 - DNA, 13 bp, Artificial Sequence
  Oligonucleotide for detection of SNP TSC0001492
cctaatcattaaa

SEQ ID NO: 3881 - DNA, 13 bp, Artificial Sequence
  Oligonucleotide for detection of SNP TSC0001493
gaggttatatttt

SEQ ID NO: 3882 - DNA, 13 bp, Artificial Sequence
  Oligonucleotide for detection of SNP TSC0001493
aaaatataacctc

SEQ ID NO: 3883 - DNA, 13 bp, Artificial Sequence
  Oligonucleotide for detection of SNP TSC0001493
gaggttgtatttt

SEQ ID NO: 3884 - DNA, 13 bp, Artificial Sequence
  Oligonucleotide for detection of SNP TSC0001493
aaaatacaacctc

SEQ ID NO: 3885 - DNA, 13 bp, Artificial Sequence
  Oligonucleotide for detection of SNP TSC0001494
tttagaaaagaaa

SEQ ID NO: 3886 - DNA, 13 bp, Artificial Sequence
  Oligonucleotide for detection of SNP TSC0001494
tttcttttctaaa

SEQ ID NO: 3887 - DNA, 13 bp, Artificial Sequence
  Oligonucleotide for detection of SNP TSC0001494
tttagataagaaa

SEQ ID NO: 3888 - DNA, 13 bp, Artificial Sequence
  Oligonucleotide for detection of SNP TSC0001494
tttcttatctaaa

SEQ ID NO: 3889 - DNA, 13 bp, Artificial Sequence
  Oligonucleotide for detection of SNP TSC0001494
ttttttttttgaa

SEQ ID NO: 3890 - DNA, 13 bp, Artificial Sequence
  Oligonucleotide for detection of SNP TSC0001494
ttcaaaaaaaaaa

SEQ ID NO: 3891 - DNA, 13 bp, Artificial Sequence
  Oligonucleotide for detection of SNP TSC0001494
ttttttgtttgaa

SEQ ID NO: 3892 - DNA, 13 bp, Artificial Sequence
  Oligonucleotide for detection of SNP TSC0001494
ttcaaacaaaaaa

SEQ ID NO: 3893 - DNA, 13 bp, Artificial Sequence
  Oligonucleotide for detection of SNP TSC0001495
agatttagtatgg

SEQ ID NO: 3894 - DNA, 13 bp, Artificial Sequence
  Oligonucleotide for detection of SNP TSC0001495
ccatactaaatct

SEQ ID NO: 3895 - DNA, 13 bp, Artificial Sequence
  Oligonucleotide for detection of SNP TSC0001495
agatttggtatgg

SEQ ID NO: 3896 - DNA, 13 bp, Artificial Sequence
  Oligonucleotide for detection of SNP TSC0001495
ccataccaaatct

SEQ ID NO: 3897 - DNA, 13 bp, Artificial Sequence
  Oligonucleotide for detection of SNP TSC0001496
tttgagaaaatta

SEQ ID NO: 3898 - DNA, 13 bp, Artificial Sequence
  Oligonucleotide for detection of SNP TSC0001496
taattttctcaaa

SEQ ID NO: 3899 - DNA, 13 bp, Artificial Sequence
  Oligonucleotide for detection of SNP TSC0001496
tttgagtaaatta

SEQ ID NO: 3900 - DNA, 13 bp, Artificial Sequence
  Oligonucleotide for detection of SNP TSC0001496
taatttactcaaa

SEQ ID NO: 3901 - DNA, 13 bp, Artificial Sequence
  Oligonucleotide for detection of SNP TSC0001496
tggtttttttaga

SEQ ID NO: 3902 - DNA, 13 bp, Artificial Sequence
  Oligonucleotide for detection of SNP TSC0001496
tctaaaaaaacca

SEQ ID NO: 3903 - DNA, 13 bp, Artificial Sequence
  Oligonucleotide for detection of SNP TSC0001496
tggtttatttaga

SEQ ID NO: 3904 - DNA, 13 bp, Artificial Sequence
  Oligonucleotide for detection of SNP TSC0001496
tctaaataaacca

SEQ ID NO: 3905 - DNA, 13 bp, Artificial Sequence
  Oligonucleotide for detection of SNP TSC0001497
aatgttgttttag

SEQ ID NO: 3906 - DNA, 13 bp, Artificial Sequence
  Oligonucleotide for detection of SNP TSC0001497
ctaaaacaacatt

SEQ ID NO: 3907 - DNA, 13 bp, Artificial Sequence
  Oligonucleotide for detection of SNP TSC0001497
aatgtttttttag

SEQ ID NO: 3908 - DNA, 13 bp, Artificial Sequence
  Oligonucleotide for detection of SNP TSC0001497
ctaaaaaaacatt

SEQ ID NO: 3909 - DNA, 13 bp, Artificial Sequence
  Oligonucleotide for detection of SNP TSC0001497
ttgggatagtatt

SEQ ID NO: 3910 - DNA, 13 bp, Artificial Sequence
  Oligonucleotide for detection of SNP TSC0001497
aatactatcccaa

SEQ ID NO: 3911 - DNA, 13 bp, Artificial Sequence
  Oligonucleotide for detection of SNP TSC0001498
gatgattgattay

SEQ ID NO: 3912 - DNA, 13 bp, Artificial Sequence
  Oligonucleotide for detection of SNP TSC0001498
rtaatcaatcatc

SEQ ID NO: 3913 - DNA, 13 bp, Artificial Sequence
  Oligonucleotide for detection of SNP TSC0001498
gacgattgattay

SEQ ID NO: 3914 - DNA, 13 bp, Artificial Sequence
  Oligonucleotide for detection of SNP TSC0001498
rtaatcaatcgtc

SEQ ID NO: 3915 - DNA, 13 bp, Artificial Sequence
  Oligonucleotide for detection of SNP TSC0001498
gatgatcgattay

SEQ ID NO: 3916 - DNA, 13 bp, Artificial Sequence
  Oligonucleotide for detection of SNP TSC0001498
rtaatcgatcatc

SEQ ID NO: 3917 - DNA, 13 bp, Artificial Sequence
  Oligonucleotide for detection of SNP TSC0001498
gacgatcgattay

SEQ ID NO: 3918 - DNA, 13 bp, Artificial Sequence
  Oligonucleotide for detection of SNP TSC0001498
rtaatcgatcgtc

SEQ ID NO: 3919 - DNA, 13 bp, Artificial Sequence
  Oligonucleotide for detection of SNP TSC0001498
gtaattgattgty

SEQ ID NO: 3920 - DNA, 13 bp, Artificial Sequence
  Oligonucleotide for detection of SNP TSC0001498
racaatcaattac

SEQ ID NO: 3921 - DNA, 13 bp, Artificial Sequence
  Oligonucleotide for detection of SNP TSC0001498
gtaattaattgty

SEQ ID NO: 3922 - DNA, 13 bp, Artificial Sequence
  Oligonucleotide for detection of SNP TSC0001498
racaattaattac

SEQ ID NO: 3923 - DNA, 13 bp, Artificial Sequence
  Oligonucleotide for detection of SNP TSC0001498
gtaatcgattgty

SEQ ID NO: 3924 - DNA, 13 bp, Artificial Sequence
  Oligonucleotide for detection of SNP TSC0001498
racaatcgattac

SEQ ID NO: 3925 - DNA, 13 bp, Artificial Sequence
  Oligonucleotide for detection of SNP TSC0001498
gtaattaatcgty

SEQ ID NO: 3926 - DNA, 13 bp, Artificial Sequence
  Oligonucleotide for detection of SNP TSC0001498
racgattaattac

SEQ ID NO: 3927 - DNA, 13 bp, Artificial Sequence
  Oligonucleotide for detection of SNP TSC0001498
gtaattgatcgty

SEQ ID NO: 3928 - DNA, 13 bp, Artificial Sequence
  Oligonucleotide for detection of SNP TSC0001498
racgatcaattac

SEQ ID NO: 3929 - DNA, 13 bp, Artificial Sequence
  Oligonucleotide for detection of SNP TSC0001498
gtaatcgatcgty

SEQ ID NO: 3930 - DNA, 13 bp, Artificial Sequence
  Oligonucleotide for detection of SNP TSC0001498
racgatcgattac

SEQ ID NO: 3931 - DNA, 13 bp, Artificial Sequence
  Oligonucleotide for detection of SNP TSC0001499
ttttgtgagaata

SEQ ID NO: 3932 - DNA, 13 bp, Artificial Sequence
  Oligonucleotide for detection of SNP TSC0001499
tattctcacaaaa

SEQ ID NO: 3933 - DNA, 13 bp, Artificial Sequence
  Oligonucleotide for detection of SNP TSC0001499
ttttgttagaata

SEQ ID NO: 3934 - DNA, 13 bp, Artificial Sequence
  Oligonucleotide for detection of SNP TSC0001499
tattctaacaaaa

SEQ ID NO: 3935 - DNA, 13 bp, Artificial Sequence
  Oligonucleotide for detection of SNP TSC0001499
tatttttataggg

SEQ ID NO: 3936 - DNA, 13 bp, Artificial Sequence
  Oligonucleotide for detection of SNP TSC0001499
ccctataaaaata

SEQ ID NO: 3937 - DNA, 13 bp, Artificial Sequence
  Oligonucleotide for detection of SNP TSC0001499
tattttaataggg

SEQ ID NO: 3938 - DNA, 13 bp, Artificial Sequence
  Oligonucleotide for detection of SNP TSC0001499
ccctattaaaata

SEQ ID NO: 3939 - DNA, 13 bp, Artificial Sequence
  Oligonucleotide for detection of SNP TSC0001500
agtatgaattagg

SEQ ID NO: 3940 - DNA, 13 bp, Artificial Sequence
  Oligonucleotide for detection of SNP TSC0001500
cctaattcatact

SEQ ID NO: 3941 - DNA, 13 bp, Artificial Sequence
  Oligonucleotide for detection of SNP TSC0001500
agtatggattagg

SEQ ID NO: 3942 - DNA, 13 bp, Artificial Sequence
  Oligonucleotide for detection of SNP TSC0001500
cctaatccatact

SEQ ID NO: 3943 - DNA, 13 bp, Artificial Sequence
  Oligonucleotide for detection of SNP TSC0001501
tatagtagtagtg

SEQ ID NO: 3944 - DNA, 13 bp, Artificial Sequence
  Oligonucleotide for detection of SNP TSC0001501
cactactactata

SEQ ID NO: 3945 - DNA, 13 bp, Artificial Sequence
  Oligonucleotide for detection of SNP TSC0001501
tatagtggtagtg

SEQ ID NO: 3946 - DNA, 13 bp, Artificial Sequence
  Oligonucleotide for detection of SNP TSC0001501
cactaccactata

SEQ ID NO: 3947 - DNA, 13 bp, Artificial Sequence
  Oligonucleotide for detection of SNP TSC0001501
tatagcggtagtg

SEQ ID NO: 3948 - DNA, 13 bp, Artificial Sequence
  Oligonucleotide for detection of SNP TSC0001501
cactaccgctata

SEQ ID NO: 3949 - DNA, 13 bp, Artificial Sequence
  Oligonucleotide for detection of SNP TSC0001501
tattattgttgtg

SEQ ID NO: 3950 - DNA, 13 bp, Artificial Sequence
  Oligonucleotide for detection of SNP TSC0001501
cacaacaataata

SEQ ID NO: 3951 - DNA, 13 bp, Artificial Sequence
  Oligonucleotide for detection of SNP TSC0001501
tattatcgttgtg

SEQ ID NO: 3952 - DNA, 13 bp, Artificial Sequence
  Oligonucleotide for detection of SNP TSC0001501
cacaacgataata

SEQ ID NO: 3953 - DNA, 13 bp, Artificial Sequence
  Oligonucleotide for detection of SNP TSC0001502
ttgtgattttatt

SEQ ID NO: 3954 - DNA, 13 bp, Artificial Sequence
  Oligonucleotide for detection of SNP TSC0001502
aataaaatcacaa

SEQ ID NO: 3955 - DNA, 13 bp, Artificial Sequence
  Oligonucleotide for detection of SNP TSC0001502
ttgtgagtttatt

SEQ ID NO: 3956 - DNA, 13 bp, Artificial Sequence
  Oligonucleotide for detection of SNP TSC0001502
aataaactcacaa

SEQ ID NO: 3957 - DNA, 13 bp, Artificial Sequence
  Oligonucleotide for detection of SNP TSC0001502
aatggagttataa

SEQ ID NO: 3958 - DNA, 13 bp, Artificial Sequence
  Oligonucleotide for detection of SNP TSC0001502
ttataactccatt

SEQ ID NO: 3959 - DNA, 13 bp, Artificial Sequence
  Oligonucleotide for detection of SNP TSC0001502
aatggatttataa

SEQ ID NO: 3960 - DNA, 13 bp, Artificial Sequence
  Oligonucleotide for detection of SNP TSC0001502
ttataaatccatt

SEQ ID NO: 3961 - DNA, 13 bp, Artificial Sequence
  Oligonucleotide for detection of SNP TSC0001503
taggtagaagagt

SEQ ID NO: 3962 - DNA, 13 bp, Artificial Sequence
  Oligonucleotide for detection of SNP TSC0001503
actcttctaccta

SEQ ID NO: 3963 - DNA, 13 bp, Artificial Sequence
  Oligonucleotide for detection of SNP TSC0001503
taggtaaaagagt

SEQ ID NO: 3964 - DNA, 13 bp, Artificial Sequence
  Oligonucleotide for detection of SNP TSC0001503
actcttttaccta

SEQ ID NO: 3965 - DNA, 13 bp, Artificial Sequence
  Oligonucleotide for detection of SNP TSC0001504
aagagtgtgtata

SEQ ID NO: 3966 - DNA, 13 bp, Artificial Sequence
  Oligonucleotide for detection of SNP TSC0001504
tatacacactctt

SEQ ID NO: 3967 - DNA, 13 bp, Artificial Sequence
  Oligonucleotide for detection of SNP TSC0001504
aagagtatgtata

SEQ ID NO: 3968 - DNA, 13 bp, Artificial Sequence
  Oligonucleotide for detection of SNP TSC0001504
tatacatactctt

SEQ ID NO: 3969 - DNA, 13 bp, Artificial Sequence
  Oligonucleotide for detection of SNP TSC0001505
gtagatatgaaaa

SEQ ID NO: 3970 - DNA, 13 bp, Artificial Sequence
  Oligonucleotide for detection of SNP TSC0001505
ttttcatatctac

SEQ ID NO: 3971 - DNA, 13 bp, Artificial Sequence
  Oligonucleotide for detection of SNP TSC0001505
gtagatgtgaaaa

SEQ ID NO: 3972 - DNA, 13 bp, Artificial Sequence
  Oligonucleotide for detection of SNP TSC0001505
ttttcacatctac

SEQ ID NO: 3973 - DNA, 13 bp, Artificial Sequence
  Oligonucleotide for detection of SNP TSC0001505
gtagacgtgaaaa

SEQ ID NO: 3974 - DNA, 13 bp, Artificial Sequence
  Oligonucleotide for detection of SNP TSC0001505
ttttcacgtctac

SEQ ID NO: 3975 - DNA, 13 bp, Artificial Sequence
  Oligonucleotide for detection of SNP TSC0001505
tttttatgtttgy

SEQ ID NO: 3976 - DNA, 13 bp, Artificial Sequence
  Oligonucleotide for detection of SNP TSC0001505
rcaaacataaaaa

SEQ ID NO: 3977 - DNA, 13 bp, Artificial Sequence
  Oligonucleotide for detection of SNP TSC0001505
tttttacgtttgy

SEQ ID NO: 3978 - DNA, 13 bp, Artificial Sequence
  Oligonucleotide for detection of SNP TSC0001505
rcaaacgtaaaaa

SEQ ID NO: 3979 - DNA, 13 bp, Artificial Sequence
  Oligonucleotide for detection of SNP TSC0001506
aaaattatttttt

SEQ ID NO: 3980 - DNA, 13 bp, Artificial Sequence
  Oligonucleotide for detection of SNP TSC0001506
aaaaaataatttt

SEQ ID NO: 3981 - DNA, 13 bp, Artificial Sequence
  Oligonucleotide for detection of SNP TSC0001507
aatagatggttgt

SEQ ID NO: 3982 - DNA, 13 bp, Artificial Sequence
  Oligonucleotide for detection of SNP TSC0001507
acaaccatctatt

SEQ ID NO: 3983 - DNA, 13 bp, Artificial Sequence
  Oligonucleotide for detection of SNP TSC0001507
aatagagggttgt

SEQ ID NO: 3984 - DNA, 13 bp, Artificial Sequence
  Oligonucleotide for detection of SNP TSC0001507
acaaccctctatt

SEQ ID NO: 3985 - DNA, 13 bp, Artificial Sequence
  Oligonucleotide for detection of SNP TSC0001507
aatagacggttgt

SEQ ID NO: 3986 - DNA, 13 bp, Artificial Sequence
  Oligonucleotide for detection of SNP TSC0001507
acaaccgtctatt

SEQ ID NO: 3987 - DNA, 13 bp, Artificial Sequence
  Oligonucleotide for detection of SNP TSC0001507
atagttgtttatt

SEQ ID NO: 3988 - DNA, 13 bp, Artificial Sequence
  Oligonucleotide for detection of SNP TSC0001507
aataaacaactat

SEQ ID NO: 3989 - DNA, 13 bp, Artificial Sequence
  Oligonucleotide for detection of SNP TSC0001507
atagttttttatt

SEQ ID NO: 3990 - DNA, 13 bp, Artificial Sequence
  Oligonucleotide for detection of SNP TSC0001507
aataaaaaactat

SEQ ID NO: 3991 - DNA, 13 bp, Artificial Sequence
  Oligonucleotide for detection of SNP TSC0001507
atagtcgtttatt

SEQ ID NO: 3992 - DNA, 13 bp, Artificial Sequence
  Oligonucleotide for detection of SNP TSC0001507
aataaacgactat

SEQ ID NO: 3993 - DNA, 13 bp, Artificial Sequence
  Oligonucleotide for detection of SNP TSC0001508
attttgaatattt

SEQ ID NO: 3994 - DNA, 13 bp, Artificial Sequence
  Oligonucleotide for detection of SNP TSC0001508
aaatattcaaaat

SEQ ID NO: 3995 - DNA, 13 bp, Artificial Sequence
  Oligonucleotide for detection of SNP TSC0001508
attttgtatattt

SEQ ID NO: 3996 - DNA, 13 bp, Artificial Sequence
  Oligonucleotide for detection of SNP TSC0001508
aaatatacaaaat

SEQ ID NO: 3997 - DNA, 13 bp, Artificial Sequence
  Oligonucleotide for detection of SNP TSC0001508
agatgtttaagat

SEQ ID NO: 3998 - DNA, 13 bp, Artificial Sequence
  Oligonucleotide for detection of SNP TSC0001508
atcttaaacatct

SEQ ID NO: 3999 - DNA, 13 bp, Artificial Sequence
  Oligonucleotide for detection of SNP TSC0001508
agatgtataagat

SEQ ID NO: 4000 - DNA, 13 bp, Artificial Sequence
  Oligonucleotide for detection of SNP TSC0001508
atcttatacatct

SEQ ID NO: 4001 - DNA, 13 bp, Artificial Sequence
  Oligonucleotide for detection of SNP TSC0001509
agtattggtttta

SEQ ID NO: 4002 - DNA, 13 bp, Artificial Sequence
  Oligonucleotide for detection of SNP TSC0001509
taaaaccaatact

SEQ ID NO: 4003 - DNA, 13 bp, Artificial Sequence
  Oligonucleotide for detection of SNP TSC0001509
agtatttgtttta

SEQ ID NO: 4004 - DNA, 13 bp, Artificial Sequence
  Oligonucleotide for detection of SNP TSC0001509
taaaacaaatact

SEQ ID NO: 4005 - DNA, 13 bp, Artificial Sequence
  Oligonucleotide for detection of SNP TSC0001509
tgaaattaatgtt

SEQ ID NO: 4006 - DNA, 13 bp, Artificial Sequence
  Oligonucleotide for detection of SNP TSC0001509
aacattaatttca

SEQ ID NO: 4007 - DNA, 13 bp, Artificial Sequence
  Oligonucleotide for detection of SNP TSC0001509
tgaaataaatgtt

SEQ ID NO: 4008 - DNA, 13 bp, Artificial Sequence
  Oligonucleotide for detection of SNP TSC0001509
aacatttatttca

SEQ ID NO: 4009 - DNA, 13 bp, Artificial Sequence
  Oligonucleotide for detection of SNP TSC0001511
gaggttagaggta

SEQ ID NO: 4010 - DNA, 13 bp, Artificial Sequence
  Oligonucleotide for detection of SNP TSC0001511
tacctctaacctc

SEQ ID NO: 4011 - DNA, 13 bp, Artificial Sequence
  Oligonucleotide for detection of SNP TSC0001511
gaggtttgaggta

SEQ ID NO: 4012 - DNA, 13 bp, Artificial Sequence
  Oligonucleotide for detection of SNP TSC0001511
tacctcaaacctc

SEQ ID NO: 4013 - DNA, 13 bp, Artificial Sequence
  Oligonucleotide for detection of SNP TSC0001511
gaggttcgaggta

SEQ ID NO: 4014 - DNA, 13 bp, Artificial Sequence
  Oligonucleotide for detection of SNP TSC0001511
tacctcgaacctc

SEQ ID NO: 4015 - DNA, 13 bp, Artificial Sequence
  Oligonucleotide for detection of SNP TSC0001511
tgtttttagttty

SEQ ID NO: 4016 - DNA, 13 bp, Artificial Sequence
  Oligonucleotide for detection of SNP TSC0001511
raaactaaaaaca

SEQ ID NO: 4017 - DNA, 13 bp, Artificial Sequence
  Oligonucleotide for detection of SNP TSC0001511
tgttttgagttty

SEQ ID NO: 4018 - DNA, 13 bp, Artificial Sequence
  Oligonucleotide for detection of SNP TSC0001511
raaactcaaaaca

SEQ ID NO: 4019 - DNA, 13 bp, Artificial Sequence
  Oligonucleotide for detection of SNP TSC0001511
tgtttcgagttty

SEQ ID NO: 4020 - DNA, 13 bp, Artificial Sequence
  Oligonucleotide for detection of SNP TSC0001511
raaactcgaaaca

SEQ ID NO: 4021 - DNA, 13 bp, Artificial Sequence
  Oligonucleotide for detection of SNP TSC0001512
ttaaatattttty

SEQ ID NO: 4022 - DNA, 13 bp, Artificial Sequence
  Oligonucleotide for detection of SNP TSC0001512
raaaaatatttaa

SEQ ID NO: 4023 - DNA, 13 bp, Artificial Sequence
  Oligonucleotide for detection of SNP TSC0001512
ttaaattttttty

SEQ ID NO: 4024 - DNA, 13 bp, Artificial Sequence
  Oligonucleotide for detection of SNP TSC0001512
raaaaaaatttaa

SEQ ID NO: 4025 - DNA, 13 bp, Artificial Sequence
  Oligonucleotide for detection of SNP TSC0001512
gaaagatatttaa

SEQ ID NO: 4026 - DNA, 13 bp, Artificial Sequence
  Oligonucleotide for detection of SNP TSC0001512
ttaaatatctttc

SEQ ID NO: 4027 - DNA, 13 bp, Artificial Sequence
  Oligonucleotide for detection of SNP TSC0001512
gaaagagatttaa

SEQ ID NO: 4028 - DNA, 13 bp, Artificial Sequence
  Oligonucleotide for detection of SNP TSC0001512
ttaaatctctttc

SEQ ID NO: 4029 - DNA, 13 bp, Artificial Sequence
  Oligonucleotide for detection of SNP TSC0001513
ttttgtaaatata

SEQ ID NO: 4030 - DNA, 13 bp, Artificial Sequence
  Oligonucleotide for detection of SNP TSC0001513
tatatttacaaaa

SEQ ID NO: 4031 - DNA, 13 bp, Artificial Sequence
  Oligonucleotide for detection of SNP TSC0001513
ttttgtgaatata

SEQ ID NO: 4032 - DNA, 13 bp, Artificial Sequence
  Oligonucleotide for detection of SNP TSC0001513
tatattcacaaaa

SEQ ID NO: 4033 - DNA, 13 bp, Artificial Sequence
  Oligonucleotide for detection of SNP TSC0001514
agtttttgtttta

SEQ ID NO: 4034 - DNA, 13 bp, Artificial Sequence
  Oligonucleotide for detection of SNP TSC0001514
taaaacaaaaact

SEQ ID NO: 4035 - DNA, 13 bp, Artificial Sequence
  Oligonucleotide for detection of SNP TSC0001514
agttttcgtttta

SEQ ID NO: 4036 - DNA, 13 bp, Artificial Sequence
  Oligonucleotide for detection of SNP TSC0001514
taaaacgaaaact

SEQ ID NO: 4037 - DNA, 13 bp, Artificial Sequence
  Oligonucleotide for detection of SNP TSC0001514
tgaggtgaagatt

SEQ ID NO: 4038 - DNA, 13 bp, Artificial Sequence
  Oligonucleotide for detection of SNP TSC0001514
aatcttcacctca

SEQ ID NO: 4039 - DNA, 13 bp, Artificial Sequence
  Oligonucleotide for detection of SNP TSC0001514
tgaggtaaagatt

SEQ ID NO: 4040 - DNA, 13 bp, Artificial Sequence
  Oligonucleotide for detection of SNP TSC0001514
aatctttacctca

SEQ ID NO: 4041 - DNA, 13 bp, Artificial Sequence
  Oligonucleotide for detection of SNP TSC0001514
tgaggcgaagatt

SEQ ID NO: 4042 - DNA, 13 bp, Artificial Sequence
  Oligonucleotide for detection of SNP TSC0001514
aatcttcgcctca

SEQ ID NO: 4043 - DNA, 13 bp, Artificial Sequence
  Oligonucleotide for detection of SNP TSC0001515
gtgagtgaggaaa

SEQ ID NO: 4044 - DNA, 13 bp, Artificial Sequence
  Oligonucleotide for detection of SNP TSC0001515
tttcctcactcac

SEQ ID NO: 4045 - DNA, 13 bp, Artificial Sequence
  Oligonucleotide for detection of SNP TSC0001515
gtgagtaaggaaa

SEQ ID NO: 4046 - DNA, 13 bp, Artificial Sequence
  Oligonucleotide for detection of SNP TSC0001515
tttccttactcac

SEQ ID NO: 4047 - DNA, 13 bp, Artificial Sequence
  Oligonucleotide for detection of SNP TSC0001517
aatagatggtata

SEQ ID NO: 4048 - DNA, 13 bp, Artificial Sequence
  Oligonucleotide for detection of SNP TSC0001517
tataccatctatt

SEQ ID NO: 4049 - DNA, 13 bp, Artificial Sequence
  Oligonucleotide for detection of SNP TSC0001517
aatagacggtata

SEQ ID NO: 4050 - DNA, 13 bp, Artificial Sequence
  Oligonucleotide for detection of SNP TSC0001517
tataccgtctatt

SEQ ID NO: 4051 - DNA, 13 bp, Artificial Sequence
  Oligonucleotide for detection of SNP TSC0001517
tgtattgtttatt

SEQ ID NO: 4052 - DNA, 13 bp, Artificial Sequence
  Oligonucleotide for detection of SNP TSC0001517
aataaacaataca

SEQ ID NO: 4053 - DNA, 13 bp, Artificial Sequence
  Oligonucleotide for detection of SNP TSC0001517
tgtattatttatt

SEQ ID NO: 4054 - DNA, 13 bp, Artificial Sequence
  Oligonucleotide for detection of SNP TSC0001517
aataaataataca

SEQ ID NO: 4055 - DNA, 13 bp, Artificial Sequence
  Oligonucleotide for detection of SNP TSC0001517
tgtatcgtttatt

SEQ ID NO: 4056 - DNA, 13 bp, Artificial Sequence
  Oligonucleotide for detection of SNP TSC0001517
aataaacgataca

SEQ ID NO: 4057 - DNA, 13 bp, Artificial Sequence
  Oligonucleotide for detection of SNP TSC0001523
atggagataattt

SEQ ID NO: 4058 - DNA, 13 bp, Artificial Sequence
  Oligonucleotide for detection of SNP TSC0001523
aaattatctccat

SEQ ID NO: 4059 - DNA, 13 bp, Artificial Sequence
  Oligonucleotide for detection of SNP TSC0001523
atggaggtaattt

SEQ ID NO: 4060 - DNA, 13 bp, Artificial Sequence
  Oligonucleotide for detection of SNP TSC0001523
aaattacctccat

SEQ ID NO: 4061 - DNA, 13 bp, Artificial Sequence
  Oligonucleotide for detection of SNP TSC0001524
tgtattttatggg

SEQ ID NO: 4062 - DNA, 13 bp, Artificial Sequence
  Oligonucleotide for detection of SNP TSC0001524
cccataaaataca

SEQ ID NO: 4063 - DNA, 13 bp, Artificial Sequence
  Oligonucleotide for detection of SNP TSC0001524
tgtattgtatggg

SEQ ID NO: 4064 - DNA, 13 bp, Artificial Sequence
  Oligonucleotide for detection of SNP TSC0001524
cccatacaataca

SEQ ID NO: 4065 - DNA, 13 bp, Artificial Sequence
  Oligonucleotide for detection of SNP TSC0001524
tttatagagtgta

SEQ ID NO: 4066 - DNA, 13 bp, Artificial Sequence
  Oligonucleotide for detection of SNP TSC0001524
tacactctataaa

SEQ ID NO: 4067 - DNA, 13 bp, Artificial Sequence
  Oligonucleotide for detection of SNP TSC0001524
tttatatagtgta

SEQ ID NO: 4068 - DNA, 13 bp, Artificial Sequence
  Oligonucleotide for detection of SNP TSC0001524
tacactatataaa

SEQ ID NO: 4069 - DNA, 13 bp, Artificial Sequence
  Oligonucleotide for detection of SNP TSC0001525
tgaaatgaattgy

SEQ ID NO: 4070 - DNA, 13 bp, Artificial Sequence
  Oligonucleotide for detection of SNP TSC0001525
rcaattcatttca

SEQ ID NO: 4071 - DNA, 13 bp, Artificial Sequence
  Oligonucleotide for detection of SNP TSC0001525
tgaaataaattgy

SEQ ID NO: 4072 - DNA, 13 bp, Artificial Sequence
  Oligonucleotide for detection of SNP TSC0001525
rcaatttatttca

SEQ ID NO: 4073 - DNA, 13 bp, Artificial Sequence
  Oligonucleotide for detection of SNP TSC0001536
tatttagttttag

SEQ ID NO: 4074 - DNA, 13 bp, Artificial Sequence
  Oligonucleotide for detection of SNP TSC0001536
ctaaaactaaata

SEQ ID NO: 4075 - DNA, 13 bp, Artificial Sequence
  Oligonucleotide for detection of SNP TSC0001536
tatttaattttag

SEQ ID NO: 4076 - DNA, 13 bp, Artificial Sequence
  Oligonucleotide for detection of SNP TSC0001536
ctaaaattaaata

SEQ ID NO: 4077 - DNA, 13 bp, Artificial Sequence
  Oligonucleotide for detection of SNP TSC0001537
ttatggtgaagag

SEQ ID NO: 4078 - DNA, 13 bp, Artificial Sequence
  Oligonucleotide for detection of SNP TSC0001537
ctcttcaccataa

SEQ ID NO: 4079 - DNA, 13 bp, Artificial Sequence
  Oligonucleotide for detection of SNP TSC0001537
ttatggcgaagag

SEQ ID NO: 4080 - DNA, 13 bp, Artificial Sequence
  Oligonucleotide for detection of SNP TSC0001537
ctcttcgccataa

SEQ ID NO: 4081 - DNA, 13 bp, Artificial Sequence
  Oligonucleotide for detection of SNP TSC0001537
ttttttgttatgg

SEQ ID NO: 4082 - DNA, 13 bp, Artificial Sequence
  Oligonucleotide for detection of SNP TSC0001537
ccataacaaaaaa

SEQ ID NO: 4083 - DNA, 13 bp, Artificial Sequence
  Oligonucleotide for detection of SNP TSC0001537
ttttttattatgg

SEQ ID NO: 4084 - DNA, 13 bp, Artificial Sequence
  Oligonucleotide for detection of SNP TSC0001537
ccataataaaaaa

SEQ ID NO: 4085 - DNA, 13 bp, Artificial Sequence
  Oligonucleotide for detection of SNP TSC0001537
tttttcgttatgg

SEQ ID NO: 4086 - DNA, 13 bp, Artificial Sequence
  Oligonucleotide for detection of SNP TSC0001537
ccataacgaaaaa

SEQ ID NO: 4087 - DNA, 13 bp, Artificial Sequence
  Oligonucleotide for detection of SNP TSC0001538
ggaaagtgtgggg

SEQ ID NO: 4088 - DNA, 13 bp, Artificial Sequence
  Oligonucleotide for detection of SNP TSC0001538
ccccacactttcc

SEQ ID NO: 4089 - DNA, 13 bp, Artificial Sequence
  Oligonucleotide for detection of SNP TSC0001538
ggaaagcgtgggg

SEQ ID NO: 4090 - DNA, 13 bp, Artificial Sequence
  Oligonucleotide for detection of SNP TSC0001538
ccccacgctttcc

SEQ ID NO: 4091 - DNA, 13 bp, Artificial Sequence
  Oligonucleotide for detection of SNP TSC0001538
ttttatgttttty

SEQ ID NO: 4092 - DNA, 13 bp, Artificial Sequence
  Oligonucleotide for detection of SNP TSC0001538
raaaaacataaaa

SEQ ID NO: 4093 - DNA, 13 bp, Artificial Sequence
  Oligonucleotide for detection of SNP TSC0001538
ttttatattttty

SEQ ID NO: 4094 - DNA, 13 bp, Artificial Sequence
  Oligonucleotide for detection of SNP TSC0001538
raaaaatataaaa

SEQ ID NO: 4095 - DNA, 13 bp, Artificial Sequence
  Oligonucleotide for detection of SNP TSC0001538
ttttacgttttty

SEQ ID NO: 4096 - DNA, 13 bp, Artificial Sequence
  Oligonucleotide for detection of SNP TSC0001538
raaaaacgtaaaa

SEQ ID NO: 4097 - DNA, 13 bp, Artificial Sequence
  Oligonucleotide for detection of SNP TSC0001539
tttggaatgatga

SEQ ID NO: 4098 - DNA, 13 bp, Artificial Sequence
  Oligonucleotide for detection of SNP TSC0001539
tcatcattccaaa

SEQ ID NO: 4099 - DNA, 13 bp, Artificial Sequence
  Oligonucleotide for detection of SNP TSC0001539
tttggagtgatga

SEQ ID NO: 4100 - DNA, 13 bp, Artificial Sequence
  Oligonucleotide for detection of SNP TSC0001539
tcatcactccaaa

SEQ ID NO: 4101 - DNA, 13 bp, Artificial Sequence
  Oligonucleotide for detection of SNP TSC0001539
tttggaatgacga

SEQ ID NO: 4102 - DNA, 13 bp, Artificial Sequence
  Oligonucleotide for detection of SNP TSC0001539
tcgtcattccaaa

SEQ ID NO: 4103 - DNA, 13 bp, Artificial Sequence
  Oligonucleotide for detection of SNP TSC0001539
tttggagtgacga

SEQ ID NO: 4104 - DNA, 13 bp, Artificial Sequence
  Oligonucleotide for detection of SNP TSC0001539
tcgtcactccaaa

SEQ ID NO: 4105 - DNA, 13 bp, Artificial Sequence
  Oligonucleotide for detection of SNP TSC0001540
ataggtatgatty

SEQ ID NO: 4106 - DNA, 13 bp, Artificial Sequence
  Oligonucleotide for detection of SNP TSC0001540
raatcatacctat

SEQ ID NO: 4107 - DNA, 13 bp, Artificial Sequence
  Oligonucleotide for detection of SNP TSC0001540
ataggtgtgatty

SEQ ID NO: 4108 - DNA, 13 bp, Artificial Sequence
  Oligonucleotide for detection of SNP TSC0001540
raatcacacctat

SEQ ID NO: 4109 - DNA, 13 bp, Artificial Sequence
  Oligonucleotide for detection of SNP TSC0001540
ataggcgtgatty

SEQ ID NO: 4110 - DNA, 13 bp, Artificial Sequence
  Oligonucleotide for detection of SNP TSC0001540
raatcacgcctat

SEQ ID NO: 4111 - DNA, 13 bp, Artificial Sequence
  Oligonucleotide for detection of SNP TSC0001540
gggttatgtttgt

SEQ ID NO: 4112 - DNA, 13 bp, Artificial Sequence
  Oligonucleotide for detection of SNP TSC0001540
acaaacataaccc

SEQ ID NO: 4113 - DNA, 13 bp, Artificial Sequence
  Oligonucleotide for detection of SNP TSC0001540
gggttacgtttgt

SEQ ID NO: 4114 - DNA, 13 bp, Artificial Sequence
  Oligonucleotide for detection of SNP TSC0001540
acaaacgtaaccc

SEQ ID NO: 4115 - DNA, 13 bp, Artificial Sequence
  Oligonucleotide for detection of SNP TSC0001541
tttaatagttttt

SEQ ID NO: 4116 - DNA, 13 bp, Artificial Sequence
  Oligonucleotide for detection of SNP TSC0001541
aaaaactattaaa

SEQ ID NO: 4117 - DNA, 13 bp, Artificial Sequence
  Oligonucleotide for detection of SNP TSC0001541
tttaatggttttt

SEQ ID NO: 4118 - DNA, 13 bp, Artificial Sequence
  Oligonucleotide for detection of SNP TSC0001541
aaaaaccattaaa

SEQ ID NO: 4119 - DNA, 13 bp, Artificial Sequence
  Oligonucleotide for detection of SNP TSC0001541
tttaacggttttt

SEQ ID NO: 4120 - DNA, 13 bp, Artificial Sequence
  Oligonucleotide for detection of SNP TSC0001541
aaaaaccgttaaa

SEQ ID NO: 4121 - DNA, 13 bp, Artificial Sequence
  Oligonucleotide for detection of SNP TSC0001541
aagagttgttgaa

SEQ ID NO: 4122 - DNA, 13 bp, Artificial Sequence
  Oligonucleotide for detection of SNP TSC0001541
ttcaacaactctt

SEQ ID NO: 4123 - DNA, 13 bp, Artificial Sequence
  Oligonucleotide for detection of SNP TSC0001541
aagagtcgttgaa

SEQ ID NO: 4124 - DNA, 13 bp, Artificial Sequence
  Oligonucleotide for detection of SNP TSC0001541
ttcaacgactctt

SEQ ID NO: 4125 - DNA, 13 bp, Artificial Sequence
  Oligonucleotide for detection of SNP TSC0001542
agtagtatgatga

SEQ ID NO: 4126 - DNA, 13 bp, Artificial Sequence
  Oligonucleotide for detection of SNP TSC0001542
tcatcatactact

SEQ ID NO: 4127 - DNA, 13 bp, Artificial Sequence
  Oligonucleotide for detection of SNP TSC0001542
agtagtgtgatga

SEQ ID NO: 4128 - DNA, 13 bp, Artificial Sequence
  Oligonucleotide for detection of SNP TSC0001542
tcatcacactact

SEQ ID NO: 4129 - DNA, 13 bp, Artificial Sequence
  Oligonucleotide for detection of SNP TSC0001542
agtagcgtgatga

SEQ ID NO: 4130 - DNA, 13 bp, Artificial Sequence
  Oligonucleotide for detection of SNP TSC0001542
tcatcacgctact

SEQ ID NO: 4131 - DNA, 13 bp, Artificial Sequence
  Oligonucleotide for detection of SNP TSC0001542
ttattatgttatt

SEQ ID NO: 4132 - DNA, 13 bp, Artificial Sequence
  Oligonucleotide for detection of SNP TSC0001542
aataacataataa

SEQ ID NO: 4133 - DNA, 13 bp, Artificial Sequence
  Oligonucleotide for detection of SNP TSC0001542
ttattacgttatt

SEQ ID NO: 4134 - DNA, 13 bp, Artificial Sequence
  Oligonucleotide for detection of SNP TSC0001542
aataacgtaataa

SEQ ID NO: 4135 - DNA, 13 bp, Artificial Sequence
  Oligonucleotide for detection of SNP TSC0001543
attattaaatgat

SEQ ID NO: 4136 - DNA, 13 bp, Artificial Sequence
  Oligonucleotide for detection of SNP TSC0001543
atcatttaataat

SEQ ID NO: 4137 - DNA, 13 bp, Artificial Sequence
  Oligonucleotide for detection of SNP TSC0001543
attattgaatgat

SEQ ID NO: 4138 - DNA, 13 bp, Artificial Sequence
  Oligonucleotide for detection of SNP TSC0001543
atcattcaataat

SEQ ID NO: 4139 - DNA, 13 bp, Artificial Sequence
  Oligonucleotide for detection of SNP TSC0001544
tttttataaagaa

SEQ ID NO: 4140 - DNA, 13 bp, Artificial Sequence
  Oligonucleotide for detection of SNP TSC0001544
ttctttataaaaa

SEQ ID NO: 4141 - DNA, 13 bp, Artificial Sequence
  Oligonucleotide for detection of SNP TSC0001544
tttttagaaagaa

SEQ ID NO: 4142 - DNA, 13 bp, Artificial Sequence
  Oligonucleotide for detection of SNP TSC0001544
ttctttctaaaaa

SEQ ID NO: 4143 - DNA, 13 bp, Artificial Sequence
  Oligonucleotide for detection of SNP TSC0001544
ttttttgtgaaaa

SEQ ID NO: 4144 - DNA, 13 bp, Artificial Sequence
  Oligonucleotide for detection of SNP TSC0001544
ttttcacaaaaaa

SEQ ID NO: 4145 - DNA, 13 bp, Artificial Sequence
  Oligonucleotide for detection of SNP TSC0001544
ttttttttgaaaa

SEQ ID NO: 4146 - DNA, 13 bp, Artificial Sequence
  Oligonucleotide for detection of SNP TSC0001544
ttttcaaaaaaaa

SEQ ID NO: 4147 - DNA, 13 bp, Artificial Sequence
  Oligonucleotide for detection of SNP TSC0001545
tattagaaatgay

SEQ ID NO: 4148 - DNA, 13 bp, Artificial Sequence
  Oligonucleotide for detection of SNP TSC0001545
rtcatttctaata

SEQ ID NO: 4149 - DNA, 13 bp, Artificial Sequence
  Oligonucleotide for detection of SNP TSC0001545
tattagtaatgay

SEQ ID NO: 4150 - DNA, 13 bp, Artificial Sequence
  Oligonucleotide for detection of SNP TSC0001545
rtcattactaata

SEQ ID NO: 4151 - DNA, 13 bp, Artificial Sequence
  Oligonucleotide for detection of SNP TSC0001545
gttatttttggta

SEQ ID NO: 4152 - DNA, 13 bp, Artificial Sequence
  Oligonucleotide for detection of SNP TSC0001545
taccaaaaataac

SEQ ID NO: 4153 - DNA, 13 bp, Artificial Sequence
  Oligonucleotide for detection of SNP TSC0001545
gttattattggta

SEQ ID NO: 4154 - DNA, 13 bp, Artificial Sequence
  Oligonucleotide for detection of SNP TSC0001545
taccaataataac

SEQ ID NO: 4155 - DNA, 13 bp, Artificial Sequence
  Oligonucleotide for detection of SNP TSC0001546
tattttggtattt

SEQ ID NO: 4156 - DNA, 13 bp, Artificial Sequence
  Oligonucleotide for detection of SNP TSC0001546
aaataccaaaata

SEQ ID NO: 4157 - DNA, 13 bp, Artificial Sequence
  Oligonucleotide for detection of SNP TSC0001546
tatttttgtattt

SEQ ID NO: 4158 - DNA, 13 bp, Artificial Sequence
  Oligonucleotide for detection of SNP TSC0001546
aaatacaaaaata

SEQ ID NO: 4159 - DNA, 13 bp, Artificial Sequence
  Oligonucleotide for detection of SNP TSC0001546
agatgttagggtg

SEQ ID NO: 4160 - DNA, 13 bp, Artificial Sequence
  Oligonucleotide for detection of SNP TSC0001546
caccctaacatct

SEQ ID NO: 4161 - DNA, 13 bp, Artificial Sequence
  Oligonucleotide for detection of SNP TSC0001546
agatgtaagggtg

SEQ ID NO: 4162 - DNA, 13 bp, Artificial Sequence
  Oligonucleotide for detection of SNP TSC0001546
cacccttacatct

SEQ ID NO: 4163 - DNA, 13 bp, Artificial Sequence
  Oligonucleotide for detection of SNP TSC0001548
ggtgttgggggty

SEQ ID NO: 4164 - DNA, 13 bp, Artificial Sequence
  Oligonucleotide for detection of SNP TSC0001548
racccccaacacc

SEQ ID NO: 4165 - DNA, 13 bp, Artificial Sequence
  Oligonucleotide for detection of SNP TSC0001548
ggtgttaggggty

SEQ ID NO: 4166 - DNA, 13 bp, Artificial Sequence
  Oligonucleotide for detection of SNP TSC0001548
racccctaacacc

SEQ ID NO: 4167 - DNA, 13 bp, Artificial Sequence
  Oligonucleotide for detection of SNP TSC0001552
ggttttatgattt

SEQ ID NO: 4168 - DNA, 13 bp, Artificial Sequence
  Oligonucleotide for detection of SNP TSC0001552
aaatcataaaacc

SEQ ID NO: 4169 - DNA, 13 bp, Artificial Sequence
  Oligonucleotide for detection of SNP TSC0001552
ggttttgtgattt

SEQ ID NO: 4170 - DNA, 13 bp, Artificial Sequence
  Oligonucleotide for detection of SNP TSC0001552
aaatcacaaaacc

SEQ ID NO: 4171 - DNA, 13 bp, Artificial Sequence
  Oligonucleotide for detection of SNP TSC0001553
tagggtatataaa

SEQ ID NO: 4172 - DNA, 13 bp, Artificial Sequence
  Oligonucleotide for detection of SNP TSC0001553
tttatatacccta

SEQ ID NO: 4173 - DNA, 13 bp, Artificial Sequence
  Oligonucleotide for detection of SNP TSC0001553
tagggtttataaa

SEQ ID NO: 4174 - DNA, 13 bp, Artificial Sequence
  Oligonucleotide for detection of SNP TSC0001553
tttataaacccta

SEQ ID NO: 4175 - DNA, 13 bp, Artificial Sequence
  Oligonucleotide for detection of SNP TSC0001553
tttatatattttg

SEQ ID NO: 4176 - DNA, 13 bp, Artificial Sequence
  Oligonucleotide for detection of SNP TSC0001553
caaaatatataaa

SEQ ID NO: 4177 - DNA, 13 bp, Artificial Sequence
  Oligonucleotide for detection of SNP TSC0001553
tttataaattttg

SEQ ID NO: 4178 - DNA, 13 bp, Artificial Sequence
  Oligonucleotide for detection of SNP TSC0001553
caaaatttataaa

SEQ ID NO: 4179 - DNA, 13 bp, Artificial Sequence
  Oligonucleotide for detection of SNP TSC0001555
tattgaaaatatt

SEQ ID NO: 4180 - DNA, 13 bp, Artificial Sequence
  Oligonucleotide for detection of SNP TSC0001555
aatattttcaata

SEQ ID NO: 4181 - DNA, 13 bp, Artificial Sequence
  Oligonucleotide for detection of SNP TSC0001555
tattgataatatt

SEQ ID NO: 4182 - DNA, 13 bp, Artificial Sequence
  Oligonucleotide for detection of SNP TSC0001555
aatattatcaata

SEQ ID NO: 4183 - DNA, 13 bp, Artificial Sequence
  Oligonucleotide for detection of SNP TSC0001555
aatgtttttaata

SEQ ID NO: 4184 - DNA, 13 bp, Artificial Sequence
  Oligonucleotide for detection of SNP TSC0001555
tattaaaaacatt

SEQ ID NO: 4185 - DNA, 13 bp, Artificial Sequence
  Oligonucleotide for detection of SNP TSC0001555
aatgttgttaata

SEQ ID NO: 4186 - DNA, 13 bp, Artificial Sequence
  Oligonucleotide for detection of SNP TSC0001555
tattaacaacatt

SEQ ID NO: 4187 - DNA, 13 bp, Artificial Sequence
  Oligonucleotide for detection of SNP TSC0001556
ttttttatttgty

SEQ ID NO: 4188 - DNA, 13 bp, Artificial Sequence
  Oligonucleotide for detection of SNP TSC0001556
racaaataaaaaa

SEQ ID NO: 4189 - DNA, 13 bp, Artificial Sequence
  Oligonucleotide for detection of SNP TSC0001556
ttttttttttgty

SEQ ID NO: 4190 - DNA, 13 bp, Artificial Sequence
  Oligonucleotide for detection of SNP TSC0001556
racaaaaaaaaaa

SEQ ID NO: 4191 - DNA, 13 bp, Artificial Sequence
  Oligonucleotide for detection of SNP TSC0001556
ggtaaataagaaa

SEQ ID NO: 4192 - DNA, 13 bp, Artificial Sequence
  Oligonucleotide for detection of SNP TSC0001556
tttcttatttacc

SEQ ID NO: 4193 - DNA, 13 bp, Artificial Sequence
  Oligonucleotide for detection of SNP TSC0001556
ggtaaagaagaaa

SEQ ID NO: 4194 - DNA, 13 bp, Artificial Sequence
  Oligonucleotide for detection of SNP TSC0001556
tttcttctttacc

SEQ ID NO: 4195 - DNA, 13 bp, Artificial Sequence
  Oligonucleotide for detection of SNP TSC0001564
atttatataataa

SEQ ID NO: 4196 - DNA, 13 bp, Artificial Sequence
  Oligonucleotide for detection of SNP TSC0001564
ttattatataaat

SEQ ID NO: 4197 - DNA, 13 bp, Artificial Sequence
  Oligonucleotide for detection of SNP TSC0001564
atttatgtaataa

SEQ ID NO: 4198 - DNA, 13 bp, Artificial Sequence
  Oligonucleotide for detection of SNP TSC0001564
ttattacataaat

SEQ ID NO: 4199 - DNA, 13 bp, Artificial Sequence
  Oligonucleotide for detection of SNP TSC0001570
agagggtgaaata

SEQ ID NO: 4200 - DNA, 13 bp, Artificial Sequence
  Oligonucleotide for detection of SNP TSC0001570
tatttcaccctct

SEQ ID NO: 4201 - DNA, 13 bp, Artificial Sequence
  Oligonucleotide for detection of SNP TSC0001570
agagggggaaata

SEQ ID NO: 4202 - DNA, 13 bp, Artificial Sequence
  Oligonucleotide for detection of SNP TSC0001570
tatttccccctct

SEQ ID NO: 4203 - DNA, 13 bp, Artificial Sequence
  Oligonucleotide for detection of SNP TSC0001570
agagggcgaaata

SEQ ID NO: 4204 - DNA, 13 bp, Artificial Sequence
  Oligonucleotide for detection of SNP TSC0001570
tatttcgccctct

SEQ ID NO: 4205 - DNA, 13 bp, Artificial Sequence
  Oligonucleotide for detection of SNP TSC0001570
tattttgtttttt

SEQ ID NO: 4206 - DNA, 13 bp, Artificial Sequence
  Oligonucleotide for detection of SNP TSC0001570
aaaaaacaaaata

SEQ ID NO: 4207 - DNA, 13 bp, Artificial Sequence
  Oligonucleotide for detection of SNP TSC0001570
tattttttttttt

SEQ ID NO: 4208 - DNA, 13 bp, Artificial Sequence
  Oligonucleotide for detection of SNP TSC0001570
aaaaaaaaaaata

SEQ ID NO: 4209 - DNA, 13 bp, Artificial Sequence
  Oligonucleotide for detection of SNP TSC0001570
tatttcgtttttt

SEQ ID NO: 4210 - DNA, 13 bp, Artificial Sequence
  Oligonucleotide for detection of SNP TSC0001570
aaaaaacgaaata

SEQ ID NO: 4211 - DNA, 13 bp, Artificial Sequence
  Oligonucleotide for detection of SNP TSC0001571
aattttttttgta

SEQ ID NO: 4212 - DNA, 13 bp, Artificial Sequence
  Oligonucleotide for detection of SNP TSC0001571
tacaaaaaaaatt

SEQ ID NO: 4213 - DNA, 13 bp, Artificial Sequence
  Oligonucleotide for detection of SNP TSC0001571
aattttgtttgta

SEQ ID NO: 4214 - DNA, 13 bp, Artificial Sequence
  Oligonucleotide for detection of SNP TSC0001571
tacaaacaaaatt

SEQ ID NO: 4215 - DNA, 13 bp, Artificial Sequence
  Oligonucleotide for detection of SNP TSC0001571
tatagagaagatt

SEQ ID NO: 4216 - DNA, 13 bp, Artificial Sequence
  Oligonucleotide for detection of SNP TSC0001571
aatcttctctata

SEQ ID NO: 4217 - DNA, 13 bp, Artificial Sequence
  Oligonucleotide for detection of SNP TSC0001571
tatagataagatt

SEQ ID NO: 4218 - DNA, 13 bp, Artificial Sequence
  Oligonucleotide for detection of SNP TSC0001571
aatcttatctata

SEQ ID NO: 4219 - DNA, 13 bp, Artificial Sequence
  Oligonucleotide for detection of SNP TSC0001575
gaagtaattttty

SEQ ID NO: 4220 - DNA, 13 bp, Artificial Sequence
  Oligonucleotide for detection of SNP TSC0001575
raaaaattacttc

SEQ ID NO: 4221 - DNA, 13 bp, Artificial Sequence
  Oligonucleotide for detection of SNP TSC0001575
gaagtagttttty

SEQ ID NO: 4222 - DNA, 13 bp, Artificial Sequence
  Oligonucleotide for detection of SNP TSC0001575
raaaaactacttc

SEQ ID NO: 4223 - DNA, 13 bp, Artificial Sequence
  Oligonucleotide for detection of SNP TSC0001576
ttttttattatat

SEQ ID NO: 4224 - DNA, 13 bp, Artificial Sequence
  Oligonucleotide for detection of SNP TSC0001576
atataataaaaaa

SEQ ID NO: 4225 - DNA, 13 bp, Artificial Sequence
  Oligonucleotide for detection of SNP TSC0001576
ttttttgttatat

SEQ ID NO: 4226 - DNA, 13 bp, Artificial Sequence
  Oligonucleotide for detection of SNP TSC0001576
atataacaaaaaa

SEQ ID NO: 4227 - DNA, 13 bp, Artificial Sequence
  Oligonucleotide for detection of SNP TSC0001577
ttaaaaagttaag

SEQ ID NO: 4228 - DNA, 13 bp, Artificial Sequence
  Oligonucleotide for detection of SNP TSC0001577
cttaactttttaa

SEQ ID NO: 4229 - DNA, 13 bp, Artificial Sequence
  Oligonucleotide for detection of SNP TSC0001577
ttaaaatgttaag

SEQ ID NO: 4230 - DNA, 13 bp, Artificial Sequence
  Oligonucleotide for detection of SNP TSC0001577
cttaacattttaa

SEQ ID NO: 4231 - DNA, 13 bp, Artificial Sequence
  Oligonucleotide for detection of SNP TSC0001577
tttgattttttaa

SEQ ID NO: 4232 - DNA, 13 bp, Artificial Sequence
  Oligonucleotide for detection of SNP TSC0001577
ttaaaaaatcaaa

SEQ ID NO: 4233 - DNA, 13 bp, Artificial Sequence
  Oligonucleotide for detection of SNP TSC0001577
tttgatattttaa

SEQ ID NO: 4234 - DNA, 13 bp, Artificial Sequence
  Oligonucleotide for detection of SNP TSC0001577
ttaaaatatcaaa

SEQ ID NO: 4235 - DNA, 13 bp, Artificial Sequence
  Oligonucleotide for detection of SNP TSC0001578
tagttaagtgtga

SEQ ID NO: 4236 - DNA, 13 bp, Artificial Sequence
  Oligonucleotide for detection of SNP TSC0001578
tcacacttaacta

SEQ ID NO: 4237 - DNA, 13 bp, Artificial Sequence
  Oligonucleotide for detection of SNP TSC0001578
tagttaggtgtga

SEQ ID NO: 4238 - DNA, 13 bp, Artificial Sequence
  Oligonucleotide for detection of SNP TSC0001578
tcacacctaacta

SEQ ID NO: 4239 - DNA, 13 bp, Artificial Sequence
  Oligonucleotide for detection of SNP TSC0001579
gttgagataggag

SEQ ID NO: 4240 - DNA, 13 bp, Artificial Sequence
  Oligonucleotide for detection of SNP TSC0001579
ctcctatctcaac

SEQ ID NO: 4241 - DNA, 13 bp, Artificial Sequence
  Oligonucleotide for detection of SNP TSC0001579
gttgaggtaggag

SEQ ID NO: 4242 - DNA, 13 bp, Artificial Sequence
  Oligonucleotide for detection of SNP TSC0001579
ctcctacctcaac

SEQ ID NO: 4243 - DNA, 13 bp, Artificial Sequence
  Oligonucleotide for detection of SNP TSC0001580
tatatgtttgtag

SEQ ID NO: 4244 - DNA, 13 bp, Artificial Sequence
  Oligonucleotide for detection of SNP TSC0001580
ctacaaacatata

SEQ ID NO: 4245 - DNA, 13 bp, Artificial Sequence
  Oligonucleotide for detection of SNP TSC0001580
tatatggttgtag

SEQ ID NO: 4246 - DNA, 13 bp, Artificial Sequence
  Oligonucleotide for detection of SNP TSC0001580
ctacaaccatata

SEQ ID NO: 4247 - DNA, 13 bp, Artificial Sequence
  Oligonucleotide for detection of SNP TSC0001580
ttgtaggtatgtg

SEQ ID NO: 4248 - DNA, 13 bp, Artificial Sequence
  Oligonucleotide for detection of SNP TSC0001580
cacatacctacaa

SEQ ID NO: 4249 - DNA, 13 bp, Artificial Sequence
  Oligonucleotide for detection of SNP TSC0001580
ttgtagttatgtg

SEQ ID NO: 4250 - DNA, 13 bp, Artificial Sequence
  Oligonucleotide for detection of SNP TSC0001580
cacataactacaa

SEQ ID NO: 4251 - DNA, 13 bp, Artificial Sequence
  Oligonucleotide for detection of SNP TSC0001581
agatgtgtgggtt

SEQ ID NO: 4252 - DNA, 13 bp, Artificial Sequence
  Oligonucleotide for detection of SNP TSC0001581
aacccacacatct

SEQ ID NO: 4253 - DNA, 13 bp, Artificial Sequence
  Oligonucleotide for detection of SNP TSC0001581
agatgtttgggtt

SEQ ID NO: 4254 - DNA, 13 bp, Artificial Sequence
  Oligonucleotide for detection of SNP TSC0001581
aacccaaacatct

SEQ ID NO: 4255 - DNA, 13 bp, Artificial Sequence
  Oligonucleotide for detection of SNP TSC0001581
aatttatatattt

SEQ ID NO: 4256 - DNA, 13 bp, Artificial Sequence
  Oligonucleotide for detection of SNP TSC0001581
aaatatataaatt

SEQ ID NO: 4257 - DNA, 13 bp, Artificial Sequence
  Oligonucleotide for detection of SNP TSC0001581
aatttaaatattt

SEQ ID NO: 4258 - DNA, 13 bp, Artificial Sequence
  Oligonucleotide for detection of SNP TSC0001581
aaatatttaaatt

SEQ ID NO: 4259 - DNA, 13 bp, Artificial Sequence
  Oligonucleotide for detection of SNP TSC0001582
tatataaatttta

SEQ ID NO: 4260 - DNA, 13 bp, Artificial Sequence
  Oligonucleotide for detection of SNP TSC0001582
taaaatttatata

SEQ ID NO: 4261 - DNA, 13 bp, Artificial Sequence
  Oligonucleotide for detection of SNP TSC0001582
tatatatatttta

SEQ ID NO: 4262 - DNA, 13 bp, Artificial Sequence
  Oligonucleotide for detection of SNP TSC0001582
taaaatatatata

SEQ ID NO: 4263 - DNA, 13 bp, Artificial Sequence
  Oligonucleotide for detection of SNP TSC0001582
taaaatttatgtg

SEQ ID NO: 4264 - DNA, 13 bp, Artificial Sequence
  Oligonucleotide for detection of SNP TSC0001582
cacataaatttta

SEQ ID NO: 4265 - DNA, 13 bp, Artificial Sequence
  Oligonucleotide for detection of SNP TSC0001582
taaaatgtatgtg

SEQ ID NO: 4266 - DNA, 13 bp, Artificial Sequence
  Oligonucleotide for detection of SNP TSC0001582
cacatacatttta

SEQ ID NO: 4267 - DNA, 13 bp, Artificial Sequence
  Oligonucleotide for detection of SNP TSC0001584
ttagaaattttta

SEQ ID NO: 4268 - DNA, 13 bp, Artificial Sequence
  Oligonucleotide for detection of SNP TSC0001584
taaaaatttctaa

SEQ ID NO: 4269 - DNA, 13 bp, Artificial Sequence
  Oligonucleotide for detection of SNP TSC0001584
ttagaagttttta

SEQ ID NO: 4270 - DNA, 13 bp, Artificial Sequence
  Oligonucleotide for detection of SNP TSC0001584
taaaaacttctaa

SEQ ID NO: 4271 - DNA, 13 bp, Artificial Sequence
  Oligonucleotide for detection of SNP TSC0001585
ttaaggtgttttt

SEQ ID NO: 4272 - DNA, 13 bp, Artificial Sequence
  Oligonucleotide for detection of SNP TSC0001585
aaaaacaccttaa

SEQ ID NO: 4273 - DNA, 13 bp, Artificial Sequence
  Oligonucleotide for detection of SNP TSC0001585
ttaaggcgttttt

SEQ ID NO: 4274 - DNA, 13 bp, Artificial Sequence
  Oligonucleotide for detection of SNP TSC0001585
aaaaacgccttaa

SEQ ID NO: 4275 - DNA, 13 bp, Artificial Sequence
  Oligonucleotide for detection of SNP TSC0001585
aagagtgttttgg

SEQ ID NO: 4276 - DNA, 13 bp, Artificial Sequence
  Oligonucleotide for detection of SNP TSC0001585
ccaaaacactctt

SEQ ID NO: 4277 - DNA, 13 bp, Artificial Sequence
  Oligonucleotide for detection of SNP TSC0001585
aagagtattttgg

SEQ ID NO: 4278 - DNA, 13 bp, Artificial Sequence
  Oligonucleotide for detection of SNP TSC0001585
ccaaaatactctt

SEQ ID NO: 4279 - DNA, 13 bp, Artificial Sequence
  Oligonucleotide for detection of SNP TSC0001585
aagagcgttttgg

SEQ ID NO: 4280 - DNA, 13 bp, Artificial Sequence
  Oligonucleotide for detection of SNP TSC0001585
ccaaaacgctctt

SEQ ID NO: 4281 - DNA, 13 bp, Artificial Sequence
  Oligonucleotide for detection of SNP TSC0001587
ttttttatataty

SEQ ID NO: 4282 - DNA, 13 bp, Artificial Sequence
  Oligonucleotide for detection of SNP TSC0001587
ratatataaaaaa

SEQ ID NO: 4283 - DNA, 13 bp, Artificial Sequence
  Oligonucleotide for detection of SNP TSC0001587
ttttttgtataty

SEQ ID NO: 4284 - DNA, 13 bp, Artificial Sequence
  Oligonucleotide for detection of SNP TSC0001587
ratatacaaaaaa

SEQ ID NO: 4285 - DNA, 13 bp, Artificial Sequence
  Oligonucleotide for detection of SNP TSC0001588
gtttttaattttt

SEQ ID NO: 4286 - DNA, 13 bp, Artificial Sequence
  Oligonucleotide for detection of SNP TSC0001588
aaaaattaaaaac

SEQ ID NO: 4287 - DNA, 13 bp, Artificial Sequence
  Oligonucleotide for detection of SNP TSC0001588
gtttttgattttt

SEQ ID NO: 4288 - DNA, 13 bp, Artificial Sequence
  Oligonucleotide for detection of SNP TSC0001588
aaaaatcaaaaac

SEQ ID NO: 4289 - DNA, 13 bp, Artificial Sequence
  Oligonucleotide for detection of SNP TSC0001588
gttttcgattttt

SEQ ID NO: 4290 - DNA, 13 bp, Artificial Sequence
  Oligonucleotide for detection of SNP TSC0001588
aaaaatcgaaaac

SEQ ID NO: 4291 - DNA, 13 bp, Artificial Sequence
  Oligonucleotide for detection of SNP TSC0001588
agaaattggaaay

SEQ ID NO: 4292 - DNA, 13 bp, Artificial Sequence
  Oligonucleotide for detection of SNP TSC0001588
rtttccaatttct

SEQ ID NO: 4293 - DNA, 13 bp, Artificial Sequence
  Oligonucleotide for detection of SNP TSC0001588
agaaatcggaaay

SEQ ID NO: 4294 - DNA, 13 bp, Artificial Sequence
  Oligonucleotide for detection of SNP TSC0001588
rtttccgatttct

SEQ ID NO: 4295 - DNA, 13 bp, Artificial Sequence
  Oligonucleotide for detection of SNP TSC0001591
gtgtttaggggag

SEQ ID NO: 4296 - DNA, 13 bp, Artificial Sequence
  Oligonucleotide for detection of SNP TSC0001591
ctcccctaaacac

SEQ ID NO: 4297 - DNA, 13 bp, Artificial Sequence
  Oligonucleotide for detection of SNP TSC0001591
gtgttttggggag

SEQ ID NO: 4298 - DNA, 13 bp, Artificial Sequence
  Oligonucleotide for detection of SNP TSC0001591
ctccccaaaacac

SEQ ID NO: 4299 - DNA, 13 bp, Artificial Sequence
  Oligonucleotide for detection of SNP TSC0001591
gtgtttcggggag

SEQ ID NO: 4300 - DNA, 13 bp, Artificial Sequence
  Oligonucleotide for detection of SNP TSC0001591
ctccccgaaacac

SEQ ID NO: 4301 - DNA, 13 bp, Artificial Sequence
  Oligonucleotide for detection of SNP TSC0001591
tttttttgaatay

SEQ ID NO: 4302 - DNA, 13 bp, Artificial Sequence
  Oligonucleotide for detection of SNP TSC0001591
rtattcaaaaaaa

SEQ ID NO: 4303 - DNA, 13 bp, Artificial Sequence
  Oligonucleotide for detection of SNP TSC0001591
ttttttggaatay

SEQ ID NO: 4304 - DNA, 13 bp, Artificial Sequence
  Oligonucleotide for detection of SNP TSC0001591
rtattccaaaaaa

SEQ ID NO: 4305 - DNA, 13 bp, Artificial Sequence
  Oligonucleotide for detection of SNP TSC0001591
tttttcggaatay

SEQ ID NO: 4306 - DNA, 13 bp, Artificial Sequence
  Oligonucleotide for detection of SNP TSC0001591
rtattccgaaaaa

SEQ ID NO: 4307 - DNA, 13 bp, Artificial Sequence
  Oligonucleotide for detection of SNP TSC0001592
tgggatgttttaa

SEQ ID NO: 4308 - DNA, 13 bp, Artificial Sequence
  Oligonucleotide for detection of SNP TSC0001592
ttaaaacatccca

SEQ ID NO: 4309 - DNA, 13 bp, Artificial Sequence
  Oligonucleotide for detection of SNP TSC0001592
tgggattttttaa

SEQ ID NO: 4310 - DNA, 13 bp, Artificial Sequence
  Oligonucleotide for detection of SNP TSC0001592
ttaaaaaatccca

SEQ ID NO: 4311 - DNA, 13 bp, Artificial Sequence
  Oligonucleotide for detection of SNP TSC0001592
tgggacgttttaa

SEQ ID NO: 4312 - DNA, 13 bp, Artificial Sequence
  Oligonucleotide for detection of SNP TSC0001592
ttaaaacgtccca

SEQ ID NO: 4313 - DNA, 13 bp, Artificial Sequence
  Oligonucleotide for detection of SNP TSC0001592
ttgaaatgtttta

SEQ ID NO: 4314 - DNA, 13 bp, Artificial Sequence
  Oligonucleotide for detection of SNP TSC0001592
taaaacatttcaa

SEQ ID NO: 4315 - DNA, 13 bp, Artificial Sequence
  Oligonucleotide for detection of SNP TSC0001592
ttgaaaagtttta

SEQ ID NO: 4316 - DNA, 13 bp, Artificial Sequence
  Oligonucleotide for detection of SNP TSC0001592
taaaacttttcaa

SEQ ID NO: 4317 - DNA, 13 bp, Artificial Sequence
  Oligonucleotide for detection of SNP TSC0001592
ttgaaacgtttta

SEQ ID NO: 4318 - DNA, 13 bp, Artificial Sequence
  Oligonucleotide for detection of SNP TSC0001592
taaaacgtttcaa

SEQ ID NO: 4319 - DNA, 13 bp, Artificial Sequence
  Oligonucleotide for detection of SNP TSC0001594
ttaaggtgggtag

SEQ ID NO: 4320 - DNA, 13 bp, Artificial Sequence
  Oligonucleotide for detection of SNP TSC0001594
ctacccaccttaa

SEQ ID NO: 4321 - DNA, 13 bp, Artificial Sequence
  Oligonucleotide for detection of SNP TSC0001594
ttaaggcgggtag

SEQ ID NO: 4322 - DNA, 13 bp, Artificial Sequence
  Oligonucleotide for detection of SNP TSC0001594
ctacccgccttaa

SEQ ID NO: 4323 - DNA, 13 bp, Artificial Sequence
  Oligonucleotide for detection of SNP TSC0001594
ttgtttgttttgg

SEQ ID NO: 4324 - DNA, 13 bp, Artificial Sequence
  Oligonucleotide for detection of SNP TSC0001594
ccaaaacaaacaa

SEQ ID NO: 4325 - DNA, 13 bp, Artificial Sequence
  Oligonucleotide for detection of SNP TSC0001594
ttgtttattttgg

SEQ ID NO: 4326 - DNA, 13 bp, Artificial Sequence
  Oligonucleotide for detection of SNP TSC0001594
ccaaaataaacaa

SEQ ID NO: 4327 - DNA, 13 bp, Artificial Sequence
  Oligonucleotide for detection of SNP TSC0001594
ttgttcgttttgg

SEQ ID NO: 4328 - DNA, 13 bp, Artificial Sequence
  Oligonucleotide for detection of SNP TSC0001594
ccaaaacgaacaa

SEQ ID NO: 4329 - DNA, 13 bp, Artificial Sequence
  Oligonucleotide for detection of SNP TSC0001595
aaatttattttgy

SEQ ID NO: 4330 - DNA, 13 bp, Artificial Sequence
  Oligonucleotide for detection of SNP TSC0001595
rcaaaataaattt

SEQ ID NO: 4331 - DNA, 13 bp, Artificial Sequence
  Oligonucleotide for detection of SNP TSC0001595
aaatttgttttgy

SEQ ID NO: 4332 - DNA, 13 bp, Artificial Sequence
  Oligonucleotide for detection of SNP TSC0001595
rcaaaacaaattt

SEQ ID NO: 4333 - DNA, 13 bp, Artificial Sequence
  Oligonucleotide for detection of SNP TSC0001596
tatttttttaggt

SEQ ID NO: 4334 - DNA, 13 bp, Artificial Sequence
  Oligonucleotide for detection of SNP TSC0001596
acctaaaaaaata

SEQ ID NO: 4335 - DNA, 13 bp, Artificial Sequence
  Oligonucleotide for detection of SNP TSC0001596
tattttgttaggt

SEQ ID NO: 4336 - DNA, 13 bp, Artificial Sequence
  Oligonucleotide for detection of SNP TSC0001596
acctaacaaaata

SEQ ID NO: 4337 - DNA, 13 bp, Artificial Sequence
  Oligonucleotide for detection of SNP TSC0001596
tatttcgttaggt

SEQ ID NO: 4338 - DNA, 13 bp, Artificial Sequence
  Oligonucleotide for detection of SNP TSC0001596
acctaacgaaata

SEQ ID NO: 4339 - DNA, 13 bp, Artificial Sequence
  Oligonucleotide for detection of SNP TSC0001596
atttaaggaggtg

SEQ ID NO: 4340 - DNA, 13 bp, Artificial Sequence
  Oligonucleotide for detection of SNP TSC0001596
cacctccttaaat

SEQ ID NO: 4341 - DNA, 13 bp, Artificial Sequence
  Oligonucleotide for detection of SNP TSC0001596
atttaatgaggtg

SEQ ID NO: 4342 - DNA, 13 bp, Artificial Sequence
  Oligonucleotide for detection of SNP TSC0001596
cacctcattaaat

SEQ ID NO: 4343 - DNA, 13 bp, Artificial Sequence
  Oligonucleotide for detection of SNP TSC0001596
atttaacgaggtg

SEQ ID NO: 4344 - DNA, 13 bp, Artificial Sequence
  Oligonucleotide for detection of SNP TSC0001596
cacctcgttaaat

SEQ ID NO: 4345 - DNA, 13 bp, Artificial Sequence
  Oligonucleotide for detection of SNP TSC0001597
gatagtataagay

SEQ ID NO: 4346 - DNA, 13 bp, Artificial Sequence
  Oligonucleotide for detection of SNP TSC0001597
rtcttatactatc

SEQ ID NO: 4347 - DNA, 13 bp, Artificial Sequence
  Oligonucleotide for detection of SNP TSC0001597
gatagtgtaagay

SEQ ID NO: 4348 - DNA, 13 bp, Artificial Sequence
  Oligonucleotide for detection of SNP TSC0001597
rtcttacactatc

SEQ ID NO: 4349 - DNA, 13 bp, Artificial Sequence
  Oligonucleotide for detection of SNP TSC0001597
gatagcgtaagay

SEQ ID NO: 4350 - DNA, 13 bp, Artificial Sequence
  Oligonucleotide for detection of SNP TSC0001597
rtcttacgctatc

SEQ ID NO: 4351 - DNA, 13 bp, Artificial Sequence
  Oligonucleotide for detection of SNP TSC0001597
gttttgtgttgty

SEQ ID NO: 4352 - DNA, 13 bp, Artificial Sequence
  Oligonucleotide for detection of SNP TSC0001597
racaacacaaaac

SEQ ID NO: 4353 - DNA, 13 bp, Artificial Sequence
  Oligonucleotide for detection of SNP TSC0001597
gttttgcgttgty

SEQ ID NO: 4354 - DNA, 13 bp, Artificial Sequence
  Oligonucleotide for detection of SNP TSC0001597
racaacgcaaaac

SEQ ID NO: 4355 - DNA, 13 bp, Artificial Sequence
  Oligonucleotide for detection of SNP TSC0001599
gagttgaaagata

SEQ ID NO: 4356 - DNA, 13 bp, Artificial Sequence
  Oligonucleotide for detection of SNP TSC0001599
tatctttcaactc

SEQ ID NO: 4357 - DNA, 13 bp, Artificial Sequence
  Oligonucleotide for detection of SNP TSC0001599
gagttgtaagata

SEQ ID NO: 4358 - DNA, 13 bp, Artificial Sequence
  Oligonucleotide for detection of SNP TSC0001599
tatcttacaactc

SEQ ID NO: 4359 - DNA, 13 bp, Artificial Sequence
  Oligonucleotide for detection of SNP TSC0001599
tgttttttagtty

SEQ ID NO: 4360 - DNA, 13 bp, Artificial Sequence
  Oligonucleotide for detection of SNP TSC0001599
raactaaaaaaca

SEQ ID NO: 4361 - DNA, 13 bp, Artificial Sequence
  Oligonucleotide for detection of SNP TSC0001599
tgttttgtagtty

SEQ ID NO: 4362 - DNA, 13 bp, Artificial Sequence
  Oligonucleotide for detection of SNP TSC0001599
raactacaaaaca

SEQ ID NO: 4363 - DNA, 13 bp, Artificial Sequence
  Oligonucleotide for detection of SNP TSC0001608
aggaatggtggag

SEQ ID NO: 4364 - DNA, 13 bp, Artificial Sequence
  Oligonucleotide for detection of SNP TSC0001608
ctccaccattcct

SEQ ID NO: 4365 - DNA, 13 bp, Artificial Sequence
  Oligonucleotide for detection of SNP TSC0001608
aggaattgtggag

SEQ ID NO: 4366 - DNA, 13 bp, Artificial Sequence
  Oligonucleotide for detection of SNP TSC0001608
ctccacaattcct

SEQ ID NO: 4367 - DNA, 13 bp, Artificial Sequence
  Oligonucleotide for detection of SNP TSC0001608
ttttattattttt

SEQ ID NO: 4368 - DNA, 13 bp, Artificial Sequence
  Oligonucleotide for detection of SNP TSC0001608
aaaaataataaaa

SEQ ID NO: 4369 - DNA, 13 bp, Artificial Sequence
  Oligonucleotide for detection of SNP TSC0001608
ttttataattttt

SEQ ID NO: 4370 - DNA, 13 bp, Artificial Sequence
  Oligonucleotide for detection of SNP TSC0001608
aaaaattataaaa

SEQ ID NO: 4371 - DNA, 13 bp, Artificial Sequence
  Oligonucleotide for detection of SNP TSC0001613
tgttataattaga

SEQ ID NO: 4372 - DNA, 13 bp, Artificial Sequence
  Oligonucleotide for detection of SNP TSC0001613
tctaattataaca

SEQ ID NO: 4373 - DNA, 13 bp, Artificial Sequence
  Oligonucleotide for detection of SNP TSC0001613
tgttatgattaga

SEQ ID NO: 4374 - DNA, 13 bp, Artificial Sequence
  Oligonucleotide for detection of SNP TSC0001613
tctaatcataaca

SEQ ID NO: 4375 - DNA, 13 bp, Artificial Sequence
  Oligonucleotide for detection of SNP TSC0001613
tgttacgattaga

SEQ ID NO: 4376 - DNA, 13 bp, Artificial Sequence
  Oligonucleotide for detection of SNP TSC0001613
tctaatcgtaaca

SEQ ID NO: 4377 - DNA, 13 bp, Artificial Sequence
  Oligonucleotide for detection of SNP TSC0001613
tttaattgtggta

SEQ ID NO: 4378 - DNA, 13 bp, Artificial Sequence
  Oligonucleotide for detection of SNP TSC0001613
taccacaattaaa

SEQ ID NO: 4379 - DNA, 13 bp, Artificial Sequence
  Oligonucleotide for detection of SNP TSC0001613
tttaatcgtggta

SEQ ID NO: 4380 - DNA, 13 bp, Artificial Sequence
  Oligonucleotide for detection of SNP TSC0001613
taccacgattaaa

SEQ ID NO: 4381 - DNA, 13 bp, Artificial Sequence
  Oligonucleotide for detection of SNP TSC0001614
tatggaaaagtag

SEQ ID NO: 4382 - DNA, 13 bp, Artificial Sequence
  Oligonucleotide for detection of SNP TSC0001614
ctacttttccata

SEQ ID NO: 4383 - DNA, 13 bp, Artificial Sequence
  Oligonucleotide for detection of SNP TSC0001614
tatggataagtag

SEQ ID NO: 4384 - DNA, 13 bp, Artificial Sequence
  Oligonucleotide for detection of SNP TSC0001614
ctacttatccata

SEQ ID NO: 4385 - DNA, 13 bp, Artificial Sequence
  Oligonucleotide for detection of SNP TSC0001614
ttgtttttttatg

SEQ ID NO: 4386 - DNA, 13 bp, Artificial Sequence
  Oligonucleotide for detection of SNP TSC0001614
cataaaaaaacaa

SEQ ID NO: 4387 - DNA, 13 bp, Artificial Sequence
  Oligonucleotide for detection of SNP TSC0001614
ttgtttgtttatg

SEQ ID NO: 4388 - DNA, 13 bp, Artificial Sequence
  Oligonucleotide for detection of SNP TSC0001614
cataaacaaacaa

SEQ ID NO: 4389 - DNA, 13 bp, Artificial Sequence
  Oligonucleotide for detection of SNP TSC0001615
taagaatggatta

SEQ ID NO: 4390 - DNA, 13 bp, Artificial Sequence
  Oligonucleotide for detection of SNP TSC0001615
taatccattctta

SEQ ID NO: 4391 - DNA, 13 bp, Artificial Sequence
  Oligonucleotide for detection of SNP TSC0001615
taagaacggatta

SEQ ID NO: 4392 - DNA, 13 bp, Artificial Sequence
  Oligonucleotide for detection of SNP TSC0001615
taatccgttctta

SEQ ID NO: 4393 - DNA, 13 bp, Artificial Sequence
  Oligonucleotide for detection of SNP TSC0001615
taatttgttttta

SEQ ID NO: 4394 - DNA, 13 bp, Artificial Sequence
  Oligonucleotide for detection of SNP TSC0001615
taaaaacaaatta

SEQ ID NO: 4395 - DNA, 13 bp, Artificial Sequence
  Oligonucleotide for detection of SNP TSC0001615
taatttattttta

SEQ ID NO: 4396 - DNA, 13 bp, Artificial Sequence
  Oligonucleotide for detection of SNP TSC0001615
taaaaataaatta

SEQ ID NO: 4397 - DNA, 13 bp, Artificial Sequence
  Oligonucleotide for detection of SNP TSC0001615
taattcgttttta

SEQ ID NO: 4398 - DNA, 13 bp, Artificial Sequence
  Oligonucleotide for detection of SNP TSC0001615
taaaaacgaatta

SEQ ID NO: 4399 - DNA, 13 bp, Artificial Sequence
  Oligonucleotide for detection of SNP TSC0001616
ttttttggtgttg

SEQ ID NO: 4400 - DNA, 13 bp, Artificial Sequence
  Oligonucleotide for detection of SNP TSC0001616
caacaccaaaaaa

SEQ ID NO: 4401 - DNA, 13 bp, Artificial Sequence
  Oligonucleotide for detection of SNP TSC0001616
tttttttgtgttg

SEQ ID NO: 4402 - DNA, 13 bp, Artificial Sequence
  Oligonucleotide for detection of SNP TSC0001616
caacacaaaaaaa

SEQ ID NO: 4403 - DNA, 13 bp, Artificial Sequence
  Oligonucleotide for detection of SNP TSC0001616
tttttcggtgttg

SEQ ID NO: 4404 - DNA, 13 bp, Artificial Sequence
  Oligonucleotide for detection of SNP TSC0001616
caacaccgaaaaa

SEQ ID NO: 4405 - DNA, 13 bp, Artificial Sequence
  Oligonucleotide for detection of SNP TSC0001616
tagtattggaaag

SEQ ID NO: 4406 - DNA, 13 bp, Artificial Sequence
  Oligonucleotide for detection of SNP TSC0001616
ctttccaatacta

SEQ ID NO: 4407 - DNA, 13 bp, Artificial Sequence
  Oligonucleotide for detection of SNP TSC0001616
tagtataggaaag

SEQ ID NO: 4408 - DNA, 13 bp, Artificial Sequence
  Oligonucleotide for detection of SNP TSC0001616
ctttcctatacta

SEQ ID NO: 4409 - DNA, 13 bp, Artificial Sequence
  Oligonucleotide for detection of SNP TSC0001616
tagtatcggaaag

SEQ ID NO: 4410 - DNA, 13 bp, Artificial Sequence
  Oligonucleotide for detection of SNP TSC0001616
ctttccgatacta

SEQ ID NO: 4411 - DNA, 13 bp, Artificial Sequence
  Oligonucleotide for detection of SNP TSC0001617
aggggttgggttt

SEQ ID NO: 4412 - DNA, 13 bp, Artificial Sequence
  Oligonucleotide for detection of SNP TSC0001617
aaacccaacccct

SEQ ID NO: 4413 - DNA, 13 bp, Artificial Sequence
  Oligonucleotide for detection of SNP TSC0001617
aggggtcgggttt

SEQ ID NO: 4414 - DNA, 13 bp, Artificial Sequence
  Oligonucleotide for detection of SNP TSC0001617
aaacccgacccct

SEQ ID NO: 4415 - DNA, 13 bp, Artificial Sequence
  Oligonucleotide for detection of SNP TSC0001617
agatttgattttt

SEQ ID NO: 4416 - DNA, 13 bp, Artificial Sequence
  Oligonucleotide for detection of SNP TSC0001617
aaaaatcaaatct

SEQ ID NO: 4417 - DNA, 13 bp, Artificial Sequence
  Oligonucleotide for detection of SNP TSC0001617
agatttaattttt

SEQ ID NO: 4418 - DNA, 13 bp, Artificial Sequence
  Oligonucleotide for detection of SNP TSC0001617
aaaaattaaatct

SEQ ID NO: 4419 - DNA, 13 bp, Artificial Sequence
  Oligonucleotide for detection of SNP TSC0001617
agattcgattttt

SEQ ID NO: 4420 - DNA, 13 bp, Artificial Sequence
  Oligonucleotide for detection of SNP TSC0001617
aaaaatcgaatct

SEQ ID NO: 4421 - DNA, 13 bp, Artificial Sequence
  Oligonucleotide for detection of SNP TSC0001621
taaattgtattaa

SEQ ID NO: 4422 - DNA, 13 bp, Artificial Sequence
  Oligonucleotide for detection of SNP TSC0001621
ttaatacaattta

SEQ ID NO: 4423 - DNA, 13 bp, Artificial Sequence
  Oligonucleotide for detection of SNP TSC0001621
taaattatattaa

SEQ ID NO: 4424 - DNA, 13 bp, Artificial Sequence
  Oligonucleotide for detection of SNP TSC0001621
ttaatataattta

SEQ ID NO: 4425 - DNA, 13 bp, Artificial Sequence
  Oligonucleotide for detection of SNP TSC0001622
tttaagatttatt

SEQ ID NO: 4426 - DNA, 13 bp, Artificial Sequence
  Oligonucleotide for detection of SNP TSC0001622
aataaatcttaaa

SEQ ID NO: 4427 - DNA, 13 bp, Artificial Sequence
  Oligonucleotide for detection of SNP TSC0001622
tttaagttttatt

SEQ ID NO: 4428 - DNA, 13 bp, Artificial Sequence
  Oligonucleotide for detection of SNP TSC0001622
aataaaacttaaa

SEQ ID NO: 4429 - DNA, 13 bp, Artificial Sequence
  Oligonucleotide for detection of SNP TSC0001622
aatgaattttaga

SEQ ID NO: 4430 - DNA, 13 bp, Artificial Sequence
  Oligonucleotide for detection of SNP TSC0001622
tctaaaattcatt

SEQ ID NO: 4431 - DNA, 13 bp, Artificial Sequence
  Oligonucleotide for detection of SNP TSC0001622
aatgaagtttaga

SEQ ID NO: 4432 - DNA, 13 bp, Artificial Sequence
  Oligonucleotide for detection of SNP TSC0001622
tctaaacttcatt

SEQ ID NO: 4433 - DNA, 13 bp, Artificial Sequence
  Oligonucleotide for detection of SNP TSC0001623
gatttagttattt

SEQ ID NO: 4434 - DNA, 13 bp, Artificial Sequence
  Oligonucleotide for detection of SNP TSC0001623
aaataactaaatc

SEQ ID NO: 4435 - DNA, 13 bp, Artificial Sequence
  Oligonucleotide for detection of SNP TSC0001623
gatttaattattt

SEQ ID NO: 4436 - DNA, 13 bp, Artificial Sequence
  Oligonucleotide for detection of SNP TSC0001623
aaataattaaatc

SEQ ID NO: 4437 - DNA, 13 bp, Artificial Sequence
  Oligonucleotide for detection of SNP TSC0001627
ataaatatagtta

SEQ ID NO: 4438 - DNA, 13 bp, Artificial Sequence
  Oligonucleotide for detection of SNP TSC0001627
taactatatttat

SEQ ID NO: 4439 - DNA, 13 bp, Artificial Sequence
  Oligonucleotide for detection of SNP TSC0001627
ataaatttagtta

SEQ ID NO: 4440 - DNA, 13 bp, Artificial Sequence
  Oligonucleotide for detection of SNP TSC0001627
taactaaatttat

SEQ ID NO: 4441 - DNA, 13 bp, Artificial Sequence
  Oligonucleotide for detection of SNP TSC0001627
tgattatatttat

SEQ ID NO: 4442 - DNA, 13 bp, Artificial Sequence
  Oligonucleotide for detection of SNP TSC0001627
ataaatataatca

SEQ ID NO: 4443 - DNA, 13 bp, Artificial Sequence
  Oligonucleotide for detection of SNP TSC0001627
tgattagatttat

SEQ ID NO: 4444 - DNA, 13 bp, Artificial Sequence
  Oligonucleotide for detection of SNP TSC0001627
ataaatctaatca

SEQ ID NO: 4445 - DNA, 13 bp, Artificial Sequence
  Oligonucleotide for detection of SNP TSC0001634
ttataaatttttt

SEQ ID NO: 4446 - DNA, 13 bp, Artificial Sequence
  Oligonucleotide for detection of SNP TSC0001634
aaaaaatttataa

SEQ ID NO: 4447 - DNA, 13 bp, Artificial Sequence
  Oligonucleotide for detection of SNP TSC0001634
ttataagtttttt

SEQ ID NO: 4448 - DNA, 13 bp, Artificial Sequence
  Oligonucleotide for detection of SNP TSC0001634
aaaaaacttataa

SEQ ID NO: 4449 - DNA, 13 bp, Artificial Sequence
  Oligonucleotide for detection of SNP TSC0001635
tattatagaattg

SEQ ID NO: 4450 - DNA, 13 bp, Artificial Sequence
  Oligonucleotide for detection of SNP TSC0001635
caattctataata

SEQ ID NO: 4451 - DNA, 13 bp, Artificial Sequence
  Oligonucleotide for detection of SNP TSC0001635
tattattgaattg

SEQ ID NO: 4452 - DNA, 13 bp, Artificial Sequence
  Oligonucleotide for detection of SNP TSC0001635
caattcaataata

SEQ ID NO: 4453 - DNA, 13 bp, Artificial Sequence
  Oligonucleotide for detection of SNP TSC0001635
tagttttgtggtg

SEQ ID NO: 4454 - DNA, 13 bp, Artificial Sequence
  Oligonucleotide for detection of SNP TSC0001635
caccacaaaacta

SEQ ID NO: 4455 - DNA, 13 bp, Artificial Sequence
  Oligonucleotide for detection of SNP TSC0001635
tagtttagtggtg

SEQ ID NO: 4456 - DNA, 13 bp, Artificial Sequence
  Oligonucleotide for detection of SNP TSC0001635
caccactaaacta

SEQ ID NO: 4457 - DNA, 13 bp, Artificial Sequence
  Oligonucleotide for detection of SNP TSC0001636
aaaaggatttttt

SEQ ID NO: 4458 - DNA, 13 bp, Artificial Sequence
  Oligonucleotide for detection of SNP TSC0001636
aaaaaatcctttt

SEQ ID NO: 4459 - DNA, 13 bp, Artificial Sequence
  Oligonucleotide for detection of SNP TSC0001636
aaaagggtttttt

SEQ ID NO: 4460 - DNA, 13 bp, Artificial Sequence
  Oligonucleotide for detection of SNP TSC0001636
aaaaaaccctttt

SEQ ID NO: 4461 - DNA, 13 bp, Artificial Sequence
  Oligonucleotide for detection of SNP TSC0001637
gaaaaggtaagaa

SEQ ID NO: 4462 - DNA, 13 bp, Artificial Sequence
  Oligonucleotide for detection of SNP TSC0001637
ttcttaccttttc

SEQ ID NO: 4463 - DNA, 13 bp, Artificial Sequence
  Oligonucleotide for detection of SNP TSC0001637
gaaaagttaagaa

SEQ ID NO: 4464 - DNA, 13 bp, Artificial Sequence
  Oligonucleotide for detection of SNP TSC0001637
ttcttaacttttc

SEQ ID NO: 4465 - DNA, 13 bp, Artificial Sequence
  Oligonucleotide for detection of SNP TSC0001638
ggaagttgagtat

SEQ ID NO: 4466 - DNA, 13 bp, Artificial Sequence
  Oligonucleotide for detection of SNP TSC0001638
atactcaacttcc

SEQ ID NO: 4467 - DNA, 13 bp, Artificial Sequence
  Oligonucleotide for detection of SNP TSC0001638
ggaagtcgagtat

SEQ ID NO: 4468 - DNA, 13 bp, Artificial Sequence
  Oligonucleotide for detection of SNP TSC0001638
atactcgacttcc

SEQ ID NO: 4469 - DNA, 13 bp, Artificial Sequence
  Oligonucleotide for detection of SNP TSC0001638
atgtttggtttty

SEQ ID NO: 4470 - DNA, 13 bp, Artificial Sequence
  Oligonucleotide for detection of SNP TSC0001638
raaaaccaaacat

SEQ ID NO: 4471 - DNA, 13 bp, Artificial Sequence
  Oligonucleotide for detection of SNP TSC0001638
atgtttagtttty

SEQ ID NO: 4472 - DNA, 13 bp, Artificial Sequence
  Oligonucleotide for detection of SNP TSC0001638
raaaactaaacat

SEQ ID NO: 4473 - DNA, 13 bp, Artificial Sequence
  Oligonucleotide for detection of SNP TSC0001638
atgttcggtttty

SEQ ID NO: 4474 - DNA, 13 bp, Artificial Sequence
  Oligonucleotide for detection of SNP TSC0001638
raaaaccgaacat

SEQ ID NO: 4475 - DNA, 13 bp, Artificial Sequence
  Oligonucleotide for detection of SNP TSC0001639
taaagagtttttt

SEQ ID NO: 4476 - DNA, 13 bp, Artificial Sequence
  Oligonucleotide for detection of SNP TSC0001639
aaaaaactcttta

SEQ ID NO: 4477 - DNA, 13 bp, Artificial Sequence
  Oligonucleotide for detection of SNP TSC0001639
taaagaatttttt

SEQ ID NO: 4478 - DNA, 13 bp, Artificial Sequence
  Oligonucleotide for detection of SNP TSC0001639
aaaaaattcttta

SEQ ID NO: 4479 - DNA, 13 bp, Artificial Sequence
  Oligonucleotide for detection of SNP TSC0001643
aagattgtattag

SEQ ID NO: 4480 - DNA, 13 bp, Artificial Sequence
  Oligonucleotide for detection of SNP TSC0001643
ctaatacaatctt

SEQ ID NO: 4481 - DNA, 13 bp, Artificial Sequence
  Oligonucleotide for detection of SNP TSC0001643
aagattttattag

SEQ ID NO: 4482 - DNA, 13 bp, Artificial Sequence
  Oligonucleotide for detection of SNP TSC0001643
ctaataaaatctt

SEQ ID NO: 4483 - DNA, 13 bp, Artificial Sequence
  Oligonucleotide for detection of SNP TSC0001643
ttaatataatttt

SEQ ID NO: 4484 - DNA, 13 bp, Artificial Sequence
  Oligonucleotide for detection of SNP TSC0001643
aaaattatattaa

SEQ ID NO: 4485 - DNA, 13 bp, Artificial Sequence
  Oligonucleotide for detection of SNP TSC0001643
ttaataaaatttt

SEQ ID NO: 4486 - DNA, 13 bp, Artificial Sequence
  Oligonucleotide for detection of SNP TSC0001643
aaaattttattaa

SEQ ID NO: 4487 - DNA, 13 bp, Artificial Sequence
  Oligonucleotide for detection of SNP TSC0001644
gtgtttgatttty

SEQ ID NO: 4488 - DNA, 13 bp, Artificial Sequence
  Oligonucleotide for detection of SNP TSC0001644
raaaatcaaacac

SEQ ID NO: 4489 - DNA, 13 bp, Artificial Sequence
  Oligonucleotide for detection of SNP TSC0001644
gtgttttatttty

SEQ ID NO: 4490 - DNA, 13 bp, Artificial Sequence
  Oligonucleotide for detection of SNP TSC0001644
raaaataaaacac

SEQ ID NO: 4491 - DNA, 13 bp, Artificial Sequence
  Oligonucleotide for detection of SNP TSC0001644
gtgttcgatttty

SEQ ID NO: 4492 - DNA, 13 bp, Artificial Sequence
  Oligonucleotide for detection of SNP TSC0001644
raaaatcgaacac

SEQ ID NO: 4493 - DNA, 13 bp, Artificial Sequence
  Oligonucleotide for detection of SNP TSC0001644
gagggttgagtay

SEQ ID NO: 4494 - DNA, 13 bp, Artificial Sequence
  Oligonucleotide for detection of SNP TSC0001644
rtactcaaccctc

SEQ ID NO: 4495 - DNA, 13 bp, Artificial Sequence
  Oligonucleotide for detection of SNP TSC0001644
gagggtagagtay

SEQ ID NO: 4496 - DNA, 13 bp, Artificial Sequence
  Oligonucleotide for detection of SNP TSC0001644
rtactctaccctc

SEQ ID NO: 4497 - DNA, 13 bp, Artificial Sequence
  Oligonucleotide for detection of SNP TSC0001644
gagggtcgagtay

SEQ ID NO: 4498 - DNA, 13 bp, Artificial Sequence
  Oligonucleotide for detection of SNP TSC0001644
rtactcgaccctc

SEQ ID NO: 4499 - DNA, 13 bp, Artificial Sequence
  Oligonucleotide for detection of SNP TSC0001645
tgttggttggtgt

SEQ ID NO: 4500 - DNA, 13 bp, Artificial Sequence
  Oligonucleotide for detection of SNP TSC0001645
acaccaaccaaca

SEQ ID NO: 4501 - DNA, 13 bp, Artificial Sequence
  Oligonucleotide for detection of SNP TSC0001645
tgttgggtggtgt

SEQ ID NO: 4502 - DNA, 13 bp, Artificial Sequence
  Oligonucleotide for detection of SNP TSC0001645
acaccacccaaca

SEQ ID NO: 4503 - DNA, 13 bp, Artificial Sequence
  Oligonucleotide for detection of SNP TSC0001645
atattagttagta

SEQ ID NO: 4504 - DNA, 13 bp, Artificial Sequence
  Oligonucleotide for detection of SNP TSC0001645
tactaactaatat

SEQ ID NO: 4505 - DNA, 13 bp, Artificial Sequence
  Oligonucleotide for detection of SNP TSC0001645
atattatttagta

SEQ ID NO: 4506 - DNA, 13 bp, Artificial Sequence
  Oligonucleotide for detection of SNP TSC0001645
tactaaataatat

SEQ ID NO: 4507 - DNA, 13 bp, Artificial Sequence
  Oligonucleotide for detection of SNP TSC0001646
tagttgggattay

SEQ ID NO: 4508 - DNA, 13 bp, Artificial Sequence
  Oligonucleotide for detection of SNP TSC0001646
rtaatcccaacta

SEQ ID NO: 4509 - DNA, 13 bp, Artificial Sequence
  Oligonucleotide for detection of SNP TSC0001646
tagttgagattay

SEQ ID NO: 4510 - DNA, 13 bp, Artificial Sequence
  Oligonucleotide for detection of SNP TSC0001646
rtaatctcaacta

SEQ ID NO: 4511 - DNA, 13 bp, Artificial Sequence
  Oligonucleotide for detection of SNP TSC0001647
attttttgtatta

SEQ ID NO: 4512 - DNA, 13 bp, Artificial Sequence
  Oligonucleotide for detection of SNP TSC0001647
taatacaaaaaat

SEQ ID NO: 4513 - DNA, 13 bp, Artificial Sequence
  Oligonucleotide for detection of SNP TSC0001647
atttttggtatta

SEQ ID NO: 4514 - DNA, 13 bp, Artificial Sequence
  Oligonucleotide for detection of SNP TSC0001647
taataccaaaaat

SEQ ID NO: 4515 - DNA, 13 bp, Artificial Sequence
  Oligonucleotide for detection of SNP TSC0001647
atttttcgtatta

SEQ ID NO: 4516 - DNA, 13 bp, Artificial Sequence
  Oligonucleotide for detection of SNP TSC0001647
taatacgaaaaat

SEQ ID NO: 4517 - DNA, 13 bp, Artificial Sequence
  Oligonucleotide for detection of SNP TSC0001647
tggtatgaagagt

SEQ ID NO: 4518 - DNA, 13 bp, Artificial Sequence
  Oligonucleotide for detection of SNP TSC0001647
actcttcatacca

SEQ ID NO: 4519 - DNA, 13 bp, Artificial Sequence
  Oligonucleotide for detection of SNP TSC0001647
tggtattaagagt

SEQ ID NO: 4520 - DNA, 13 bp, Artificial Sequence
  Oligonucleotide for detection of SNP TSC0001647
actcttaatacca

SEQ ID NO: 4521 - DNA, 13 bp, Artificial Sequence
  Oligonucleotide for detection of SNP TSC0001647
tggtacgaagagt

SEQ ID NO: 4522 - DNA, 13 bp, Artificial Sequence
  Oligonucleotide for detection of SNP TSC0001647
actcttcgtacca

SEQ ID NO: 4523 - DNA, 13 bp, Artificial Sequence
  Oligonucleotide for detection of SNP TSC0001650
ttttgaattgttt

SEQ ID NO: 4524 - DNA, 13 bp, Artificial Sequence
  Oligonucleotide for detection of SNP TSC0001650
aaacaattcaaaa

SEQ ID NO: 4525 - DNA, 13 bp, Artificial Sequence
  Oligonucleotide for detection of SNP TSC0001650
ttttgagttgttt

SEQ ID NO: 4526 - DNA, 13 bp, Artificial Sequence
  Oligonucleotide for detection of SNP TSC0001650
aaacaactcaaaa

SEQ ID NO: 4527 - DNA, 13 bp, Artificial Sequence
  Oligonucleotide for detection of SNP TSC0001651
tttttaatataty

SEQ ID NO: 4528 - DNA, 13 bp, Artificial Sequence
  Oligonucleotide for detection of SNP TSC0001651
ratatattaaaaa

SEQ ID NO: 4529 - DNA, 13 bp, Artificial Sequence
  Oligonucleotide for detection of SNP TSC0001651
tttttagtataty

SEQ ID NO: 4530 - DNA, 13 bp, Artificial Sequence
  Oligonucleotide for detection of SNP TSC0001651
ratatactaaaaa

SEQ ID NO: 4531 - DNA, 13 bp, Artificial Sequence
  Oligonucleotide for detection of SNP TSC0001652
taggaggtgaagy

SEQ ID NO: 4532 - DNA, 13 bp, Artificial Sequence
  Oligonucleotide for detection of SNP TSC0001652
rcttcacctccta

SEQ ID NO: 4533 - DNA, 13 bp, Artificial Sequence
  Oligonucleotide for detection of SNP TSC0001652
taggagatgaagy

SEQ ID NO: 4534 - DNA, 13 bp, Artificial Sequence
  Oligonucleotide for detection of SNP TSC0001652
rcttcatctccta

SEQ ID NO: 4535 - DNA, 13 bp, Artificial Sequence
  Oligonucleotide for detection of SNP TSC0001654
ggagattgttttt

SEQ ID NO: 4536 - DNA, 13 bp, Artificial Sequence
  Oligonucleotide for detection of SNP TSC0001654
aaaaacaatctcc

SEQ ID NO: 4537 - DNA, 13 bp, Artificial Sequence
  Oligonucleotide for detection of SNP TSC0001654
ggagatcgttttt

SEQ ID NO: 4538 - DNA, 13 bp, Artificial Sequence
  Oligonucleotide for detection of SNP TSC0001654
aaaaacgatctcc

SEQ ID NO: 4539 - DNA, 13 bp, Artificial Sequence
  Oligonucleotide for detection of SNP TSC0001654
aggagtggtttty

SEQ ID NO: 4540 - DNA, 13 bp, Artificial Sequence
  Oligonucleotide for detection of SNP TSC0001654
raaaaccactcct

SEQ ID NO: 4541 - DNA, 13 bp, Artificial Sequence
  Oligonucleotide for detection of SNP TSC0001654
aggagtagtttty

SEQ ID NO: 4542 - DNA, 13 bp, Artificial Sequence
  Oligonucleotide for detection of SNP TSC0001654
raaaactactcct

SEQ ID NO: 4543 - DNA, 13 bp, Artificial Sequence
  Oligonucleotide for detection of SNP TSC0001654
aggagcggtttty

SEQ ID NO: 4544 - DNA, 13 bp, Artificial Sequence
  Oligonucleotide for detection of SNP TSC0001654
raaaaccgctcct

SEQ ID NO: 4545 - DNA, 13 bp, Artificial Sequence
  Oligonucleotide for detection of SNP TSC0001655
agttagtggatta

SEQ ID NO: 4546 - DNA, 13 bp, Artificial Sequence
  Oligonucleotide for detection of SNP TSC0001655
taatccactaact

SEQ ID NO: 4547 - DNA, 13 bp, Artificial Sequence
  Oligonucleotide for detection of SNP TSC0001655
agttaggggatta

SEQ ID NO: 4548 - DNA, 13 bp, Artificial Sequence
  Oligonucleotide for detection of SNP TSC0001655
taatcccctaact

SEQ ID NO: 4549 - DNA, 13 bp, Artificial Sequence
  Oligonucleotide for detection of SNP TSC0001655
agttagcggatta

SEQ ID NO: 4550 - DNA, 13 bp, Artificial Sequence
  Oligonucleotide for detection of SNP TSC0001655
taatccgctaact

SEQ ID NO: 4551 - DNA, 13 bp, Artificial Sequence
  Oligonucleotide for detection of SNP TSC0001655
tggtttgttgatt

SEQ ID NO: 4552 - DNA, 13 bp, Artificial Sequence
  Oligonucleotide for detection of SNP TSC0001655
aatcaacaaacca

SEQ ID NO: 4553 - DNA, 13 bp, Artificial Sequence
  Oligonucleotide for detection of SNP TSC0001655
tggttttttgatt

SEQ ID NO: 4554 - DNA, 13 bp, Artificial Sequence
  Oligonucleotide for detection of SNP TSC0001655
aatcaaaaaacca

SEQ ID NO: 4555 - DNA, 13 bp, Artificial Sequence
  Oligonucleotide for detection of SNP TSC0001655
tggttcgttgatt

SEQ ID NO: 4556 - DNA, 13 bp, Artificial Sequence
  Oligonucleotide for detection of SNP TSC0001655
aatcaacgaacca

SEQ ID NO: 4557 - DNA, 13 bp, Artificial Sequence
  Oligonucleotide for detection of SNP TSC0001656
gtgggagggggty

SEQ ID NO: 4558 - DNA, 13 bp, Artificial Sequence
  Oligonucleotide for detection of SNP TSC0001656
raccccctcccac

SEQ ID NO: 4559 - DNA, 13 bp, Artificial Sequence
  Oligonucleotide for detection of SNP TSC0001656
gtgggaaggggty

SEQ ID NO: 4560 - DNA, 13 bp, Artificial Sequence
  Oligonucleotide for detection of SNP TSC0001656
raccccttcccac

SEQ ID NO: 4561 - DNA, 13 bp, Artificial Sequence
  Oligonucleotide for detection of SNP TSC0001656
gcgggagggggty

SEQ ID NO: 4562 - DNA, 13 bp, Artificial Sequence
  Oligonucleotide for detection of SNP TSC0001656
raccccctcccgc

SEQ ID NO: 4563 - DNA, 13 bp, Artificial Sequence
  Oligonucleotide for detection of SNP TSC0001656
gcgggaaggggty

SEQ ID NO: 4564 - DNA, 13 bp, Artificial Sequence
  Oligonucleotide for detection of SNP TSC0001656
raccccttcccgc

SEQ ID NO: 4565 - DNA, 13 bp, Artificial Sequence
  Oligonucleotide for detection of SNP TSC0001657
tggggtaaggggt

SEQ ID NO: 4566 - DNA, 13 bp, Artificial Sequence
  Oligonucleotide for detection of SNP TSC0001657
accccttacccca

SEQ ID NO: 4567 - DNA, 13 bp, Artificial Sequence
  Oligonucleotide for detection of SNP TSC0001657
tggggtgaggggt

SEQ ID NO: 4568 - DNA, 13 bp, Artificial Sequence
  Oligonucleotide for detection of SNP TSC0001657
acccctcacccca

SEQ ID NO: 4569 - DNA, 13 bp, Artificial Sequence
  Oligonucleotide for detection of SNP TSC0001657
tggggcgaggggt

SEQ ID NO: 4570 - DNA, 13 bp, Artificial Sequence
  Oligonucleotide for detection of SNP TSC0001657
acccctcgcccca

SEQ ID NO: 4571 - DNA, 13 bp, Artificial Sequence
  Oligonucleotide for detection of SNP TSC0001657
attttttgtttta

SEQ ID NO: 4572 - DNA, 13 bp, Artificial Sequence
  Oligonucleotide for detection of SNP TSC0001657
taaaacaaaaaat

SEQ ID NO: 4573 - DNA, 13 bp, Artificial Sequence
  Oligonucleotide for detection of SNP TSC0001657
atttttcgtttta

SEQ ID NO: 4574 - DNA, 13 bp, Artificial Sequence
  Oligonucleotide for detection of SNP TSC0001657
taaaacgaaaaat

SEQ ID NO: 4575 - DNA, 13 bp, Artificial Sequence
  Oligonucleotide for detection of SNP TSC0001658
tttttagagattt

SEQ ID NO: 4576 - DNA, 13 bp, Artificial Sequence
  Oligonucleotide for detection of SNP TSC0001658
aaatctctaaaaa

SEQ ID NO: 4577 - DNA, 13 bp, Artificial Sequence
  Oligonucleotide for detection of SNP TSC0001658
tttttaaagattt

SEQ ID NO: 4578 - DNA, 13 bp, Artificial Sequence
  Oligonucleotide for detection of SNP TSC0001658
aaatctttaaaaa

SEQ ID NO: 4579 - DNA, 13 bp, Artificial Sequence
  Oligonucleotide for detection of SNP TSC0001664
ttattgttttatg

SEQ ID NO: 4580 - DNA, 13 bp, Artificial Sequence
  Oligonucleotide for detection of SNP TSC0001664
cataaaacaataa

SEQ ID NO: 4581 - DNA, 13 bp, Artificial Sequence
  Oligonucleotide for detection of SNP TSC0001664
ttattggtttatg

SEQ ID NO: 4582 - DNA, 13 bp, Artificial Sequence
  Oligonucleotide for detection of SNP TSC0001664
cataaaccaataa

SEQ ID NO: 4583 - DNA, 13 bp, Artificial Sequence
  Oligonucleotide for detection of SNP TSC0001664
tatggagtaatag

SEQ ID NO: 4584 - DNA, 13 bp, Artificial Sequence
  Oligonucleotide for detection of SNP TSC0001664
ctattactccata

SEQ ID NO: 4585 - DNA, 13 bp, Artificial Sequence
  Oligonucleotide for detection of SNP TSC0001664
tatggattaatag

SEQ ID NO: 4586 - DNA, 13 bp, Artificial Sequence
  Oligonucleotide for detection of SNP TSC0001664
ctattaatccata

SEQ ID NO: 4587 - DNA, 13 bp, Artificial Sequence
  Oligonucleotide for detection of SNP TSC0001665
ggagtgggggtaa

SEQ ID NO: 4588 - DNA, 13 bp, Artificial Sequence
  Oligonucleotide for detection of SNP TSC0001665
ttacccccactcc

SEQ ID NO: 4589 - DNA, 13 bp, Artificial Sequence
  Oligonucleotide for detection of SNP TSC0001665
ggagtgtgggtaa

SEQ ID NO: 4590 - DNA, 13 bp, Artificial Sequence
  Oligonucleotide for detection of SNP TSC0001665
ttacccacactcc

SEQ ID NO: 4591 - DNA, 13 bp, Artificial Sequence
  Oligonucleotide for detection of SNP TSC0001665
ggagtgcgggtaa

SEQ ID NO: 4592 - DNA, 13 bp, Artificial Sequence
  Oligonucleotide for detection of SNP TSC0001665
ttacccgcactcc

SEQ ID NO: 4593 - DNA, 13 bp, Artificial Sequence
  Oligonucleotide for detection of SNP TSC0001666
gtagagtttttty

SEQ ID NO: 4594 - DNA, 13 bp, Artificial Sequence
  Oligonucleotide for detection of SNP TSC0001666
raaaaaactctac

SEQ ID NO: 4595 - DNA, 13 bp, Artificial Sequence
  Oligonucleotide for detection of SNP TSC0001666
gtagaggttttty

SEQ ID NO: 4596 - DNA, 13 bp, Artificial Sequence
  Oligonucleotide for detection of SNP TSC0001666
raaaaacctctac

SEQ ID NO: 4597 - DNA, 13 bp, Artificial Sequence
  Oligonucleotide for detection of SNP TSC0001666
ggaaaagttttgy

SEQ ID NO: 4598 - DNA, 13 bp, Artificial Sequence
  Oligonucleotide for detection of SNP TSC0001666
rcaaaacttttcc

SEQ ID NO: 4599 - DNA, 13 bp, Artificial Sequence
  Oligonucleotide for detection of SNP TSC0001666
ggaaaatttttgy

SEQ ID NO: 4600 - DNA, 13 bp, Artificial Sequence
  Oligonucleotide for detection of SNP TSC0001666
rcaaaaattttcc

SEQ ID NO: 4601 - DNA, 13 bp, Artificial Sequence
  Oligonucleotide for detection of SNP TSC0001667
ggttatatgataa

SEQ ID NO: 4602 - DNA, 13 bp, Artificial Sequence
  Oligonucleotide for detection of SNP TSC0001667
ttatcatataacc

SEQ ID NO: 4603 - DNA, 13 bp, Artificial Sequence
  Oligonucleotide for detection of SNP TSC0001667
ggttatgtgataa

SEQ ID NO: 4604 - DNA, 13 bp, Artificial Sequence
  Oligonucleotide for detection of SNP TSC0001667
ttatcacataacc

SEQ ID NO: 4605 - DNA, 13 bp, Artificial Sequence
  Oligonucleotide for detection of SNP TSC0001668
gtgatggtatttg

SEQ ID NO: 4606 - DNA, 13 bp, Artificial Sequence
  Oligonucleotide for detection of SNP TSC0001668
caaataccatcac

SEQ ID NO: 4607 - DNA, 13 bp, Artificial Sequence
  Oligonucleotide for detection of SNP TSC0001668
gtgatgatatttg

SEQ ID NO: 4608 - DNA, 13 bp, Artificial Sequence
  Oligonucleotide for detection of SNP TSC0001668
caaatatcatcac

SEQ ID NO: 4609 - DNA, 13 bp, Artificial Sequence
  Oligonucleotide for detection of SNP TSC0001668
gtgacggtatttg

SEQ ID NO: 4610 - DNA, 13 bp, Artificial Sequence
  Oligonucleotide for detection of SNP TSC0001668
caaataccgtcac

SEQ ID NO: 4611 - DNA, 13 bp, Artificial Sequence
  Oligonucleotide for detection of SNP TSC0001668
gtgacgatatttg

SEQ ID NO: 4612 - DNA, 13 bp, Artificial Sequence
  Oligonucleotide for detection of SNP TSC0001668
caaatatcgtcac

SEQ ID NO: 4613 - DNA, 13 bp, Artificial Sequence
  Oligonucleotide for detection of SNP TSC0001671
tggggtaagggta

SEQ ID NO: 4614 - DNA, 13 bp, Artificial Sequence
  Oligonucleotide for detection of SNP TSC0001671
tacccttacccca

SEQ ID NO: 4615 - DNA, 13 bp, Artificial Sequence
  Oligonucleotide for detection of SNP TSC0001671
tggggttagggta

SEQ ID NO: 4616 - DNA, 13 bp, Artificial Sequence
  Oligonucleotide for detection of SNP TSC0001671
taccctaacccca

SEQ ID NO: 4617 - DNA, 13 bp, Artificial Sequence
  Oligonucleotide for detection of SNP TSC0001671
tatttttatttta

SEQ ID NO: 4618 - DNA, 13 bp, Artificial Sequence
  Oligonucleotide for detection of SNP TSC0001671
taaaataaaaata

SEQ ID NO: 4619 - DNA, 13 bp, Artificial Sequence
  Oligonucleotide for detection of SNP TSC0001671
tattttgatttta

SEQ ID NO: 4620 - DNA, 13 bp, Artificial Sequence
  Oligonucleotide for detection of SNP TSC0001671
taaaatcaaaata

SEQ ID NO: 4621 - DNA, 13 bp, Artificial Sequence
  Oligonucleotide for detection of SNP TSC0001672
gagaaggagttty

SEQ ID NO: 4622 - DNA, 13 bp, Artificial Sequence
  Oligonucleotide for detection of SNP TSC0001672
raaactccttctc

SEQ ID NO: 4623 - DNA, 13 bp, Artificial Sequence
  Oligonucleotide for detection of SNP TSC0001672
gagaagtagttty

SEQ ID NO: 4624 - DNA, 13 bp, Artificial Sequence
  Oligonucleotide for detection of SNP TSC0001672
raaactacttctc

SEQ ID NO: 4625 - DNA, 13 bp, Artificial Sequence
  Oligonucleotide for detection of SNP TSC0001672
gagatttttttty

SEQ ID NO: 4626 - DNA, 13 bp, Artificial Sequence
  Oligonucleotide for detection of SNP TSC0001672
raaaaaaaatctc

SEQ ID NO: 4627 - DNA, 13 bp, Artificial Sequence
  Oligonucleotide for detection of SNP TSC0001672
gagattattttty

SEQ ID NO: 4628 - DNA, 13 bp, Artificial Sequence
  Oligonucleotide for detection of SNP TSC0001672
raaaaataatctc

SEQ ID NO: 4629 - DNA, 13 bp, Artificial Sequence
  Oligonucleotide for detection of SNP TSC0001673
ttttttgttatga

SEQ ID NO: 4630 - DNA, 13 bp, Artificial Sequence
  Oligonucleotide for detection of SNP TSC0001673
tcataacaaaaaa

SEQ ID NO: 4631 - DNA, 13 bp, Artificial Sequence
  Oligonucleotide for detection of SNP TSC0001673
ttttttattatga

SEQ ID NO: 4632 - DNA, 13 bp, Artificial Sequence
  Oligonucleotide for detection of SNP TSC0001673
tcataataaaaaa

SEQ ID NO: 4633 - DNA, 13 bp, Artificial Sequence
  Oligonucleotide for detection of SNP TSC0001674
aaataatttataa

SEQ ID NO: 4634 - DNA, 13 bp, Artificial Sequence
  Oligonucleotide for detection of SNP TSC0001674
ttataaattattt

SEQ ID NO: 4635 - DNA, 13 bp, Artificial Sequence
  Oligonucleotide for detection of SNP TSC0001674
aaataagttataa

SEQ ID NO: 4636 - DNA, 13 bp, Artificial Sequence
  Oligonucleotide for detection of SNP TSC0001674
ttataacttattt

SEQ ID NO: 4637 - DNA, 13 bp, Artificial Sequence
  Oligonucleotide for detection of SNP TSC0001674
ttataggttattt

SEQ ID NO: 4638 - DNA, 13 bp, Artificial Sequence
  Oligonucleotide for detection of SNP TSC0001674
aaataacctataa

SEQ ID NO: 4639 - DNA, 13 bp, Artificial Sequence
  Oligonucleotide for detection of SNP TSC0001674
ttatagtttattt

SEQ ID NO: 4640 - DNA, 13 bp, Artificial Sequence
  Oligonucleotide for detection of SNP TSC0001674
aaataaactataa

SEQ ID NO: 4641 - DNA, 13 bp, Artificial Sequence
  Oligonucleotide for detection of SNP TSC0001675
agaaaaaggttta

SEQ ID NO: 4642 - DNA, 13 bp, Artificial Sequence
  Oligonucleotide for detection of SNP TSC0001675
taaacctttttct

SEQ ID NO: 4643 - DNA, 13 bp, Artificial Sequence
  Oligonucleotide for detection of SNP TSC0001675
agaaaatggttta

SEQ ID NO: 4644 - DNA, 13 bp, Artificial Sequence
  Oligonucleotide for detection of SNP TSC0001675
taaaccattttct

SEQ ID NO: 4645 - DNA, 13 bp, Artificial Sequence
  Oligonucleotide for detection of SNP TSC0001675
taaattttttttt

SEQ ID NO: 4646 - DNA, 13 bp, Artificial Sequence
  Oligonucleotide for detection of SNP TSC0001675
aaaaaaaaattta

SEQ ID NO: 4647 - DNA, 13 bp, Artificial Sequence
  Oligonucleotide for detection of SNP TSC0001675
taaattatttttt

SEQ ID NO: 4648 - DNA, 13 bp, Artificial Sequence
  Oligonucleotide for detection of SNP TSC0001675
aaaaaataattta

SEQ ID NO: 4649 - DNA, 13 bp, Artificial Sequence
  Oligonucleotide for detection of SNP TSC0001676
tatatttgattgg

SEQ ID NO: 4650 - DNA, 13 bp, Artificial Sequence
  Oligonucleotide for detection of SNP TSC0001676
ccaatcaaatata

SEQ ID NO: 4651 - DNA, 13 bp, Artificial Sequence
  Oligonucleotide for detection of SNP TSC0001676
tatattcgattgg

SEQ ID NO: 4652 - DNA, 13 bp, Artificial Sequence
  Oligonucleotide for detection of SNP TSC0001676
ccaatcgaatata

SEQ ID NO: 4653 - DNA, 13 bp, Artificial Sequence
  Oligonucleotide for detection of SNP TSC0001677
agatgaaaaattt

SEQ ID NO: 4654 - DNA, 13 bp, Artificial Sequence
  Oligonucleotide for detection of SNP TSC0001677
aaatttttcatct

SEQ ID NO: 4655 - DNA, 13 bp, Artificial Sequence
  Oligonucleotide for detection of SNP TSC0001677
agatgagaaattt

SEQ ID NO: 4656 - DNA, 13 bp, Artificial Sequence
  Oligonucleotide for detection of SNP TSC0001677
aaatttctcatct

SEQ ID NO: 4657 - DNA, 13 bp, Artificial Sequence
  Oligonucleotide for detection of SNP TSC0001680
gagttaagtaaat

SEQ ID NO: 4658 - DNA, 13 bp, Artificial Sequence
  Oligonucleotide for detection of SNP TSC0001680
atttacttaactc

SEQ ID NO: 4659 - DNA, 13 bp, Artificial Sequence
  Oligonucleotide for detection of SNP TSC0001680
gagttaggtaaat

SEQ ID NO: 4660 - DNA, 13 bp, Artificial Sequence
  Oligonucleotide for detection of SNP TSC0001680
atttacctaactc

SEQ ID NO: 4661 - DNA, 13 bp, Artificial Sequence
  Oligonucleotide for detection of SNP TSC0001681
tatgaaatgaatg

SEQ ID NO: 4662 - DNA, 13 bp, Artificial Sequence
  Oligonucleotide for detection of SNP TSC0001681
cattcatttcata

SEQ ID NO: 4663 - DNA, 13 bp, Artificial Sequence
  Oligonucleotide for detection of SNP TSC0001681
tatgaagtgaatg

SEQ ID NO: 4664 - DNA, 13 bp, Artificial Sequence
  Oligonucleotide for detection of SNP TSC0001681
cattcacttcata

SEQ ID NO: 4665 - DNA, 13 bp, Artificial Sequence
  Oligonucleotide for detection of SNP TSC0001682
tagtgtgtatagg

SEQ ID NO: 4666 - DNA, 13 bp, Artificial Sequence
  Oligonucleotide for detection of SNP TSC0001682
cctatacacacta

SEQ ID NO: 4667 - DNA, 13 bp, Artificial Sequence
  Oligonucleotide for detection of SNP TSC0001682
tagtgtttatagg

SEQ ID NO: 4668 - DNA, 13 bp, Artificial Sequence
  Oligonucleotide for detection of SNP TSC0001682
cctataaacacta

SEQ ID NO: 4669 - DNA, 13 bp, Artificial Sequence
  Oligonucleotide for detection of SNP TSC0001682
tagcgtgtatagg

SEQ ID NO: 4670 - DNA, 13 bp, Artificial Sequence
  Oligonucleotide for detection of SNP TSC0001682
cctatacacgcta

SEQ ID NO: 4671 - DNA, 13 bp, Artificial Sequence
  Oligonucleotide for detection of SNP TSC0001682
tagcgtttatagg

SEQ ID NO: 4672 - DNA, 13 bp, Artificial Sequence
  Oligonucleotide for detection of SNP TSC0001682
cctataaacgcta

SEQ ID NO: 4673 - DNA, 13 bp, Artificial Sequence
  Oligonucleotide for detection of SNP TSC0001682
tagtgcgtatagg

SEQ ID NO: 4674 - DNA, 13 bp, Artificial Sequence
  Oligonucleotide for detection of SNP TSC0001682
cctatacgcacta

SEQ ID NO: 4675 - DNA, 13 bp, Artificial Sequence
  Oligonucleotide for detection of SNP TSC0001682
tagcgcgtatagg

SEQ ID NO: 4676 - DNA, 13 bp, Artificial Sequence
  Oligonucleotide for detection of SNP TSC0001682
cctatacgcgcta

SEQ ID NO: 4677 - DNA, 13 bp, Artificial Sequence
  Oligonucleotide for detection of SNP TSC0001682
tttgtgtgtgttg

SEQ ID NO: 4678 - DNA, 13 bp, Artificial Sequence
  Oligonucleotide for detection of SNP TSC0001682
caacacacacaaa

SEQ ID NO: 4679 - DNA, 13 bp, Artificial Sequence
  Oligonucleotide for detection of SNP TSC0001682
tttgtgagtgttg

SEQ ID NO: 4680 - DNA, 13 bp, Artificial Sequence
  Oligonucleotide for detection of SNP TSC0001682
caacactcacaaa

SEQ ID NO: 4681 - DNA, 13 bp, Artificial Sequence
  Oligonucleotide for detection of SNP TSC0001682
tttgtgcgtgttg

SEQ ID NO: 4682 - DNA, 13 bp, Artificial Sequence
  Oligonucleotide for detection of SNP TSC0001682
caacacgcacaaa

SEQ ID NO: 4683 - DNA, 13 bp, Artificial Sequence
  Oligonucleotide for detection of SNP TSC0001682
tttgtgagcgttg

SEQ ID NO: 4684 - DNA, 13 bp, Artificial Sequence
  Oligonucleotide for detection of SNP TSC0001682
caacgctcacaaa

SEQ ID NO: 4685 - DNA, 13 bp, Artificial Sequence
  Oligonucleotide for detection of SNP TSC0001682
tttgtgtgcgttg

SEQ ID NO: 4686 - DNA, 13 bp, Artificial Sequence
  Oligonucleotide for detection of SNP TSC0001682
caacgcacacaaa

SEQ ID NO: 4687 - DNA, 13 bp, Artificial Sequence
  Oligonucleotide for detection of SNP TSC0001682
tttgtgcgcgttg

SEQ ID NO: 4688 - DNA, 13 bp, Artificial Sequence
  Oligonucleotide for detection of SNP TSC0001682
caacgcgcacaaa

SEQ ID NO: 4689 - DNA, 13 bp, Artificial Sequence
  Oligonucleotide for detection of SNP TSC0001683
agtaatatagtaa

SEQ ID NO: 4690 - DNA, 13 bp, Artificial Sequence
  Oligonucleotide for detection of SNP TSC0001683
ttactatattact

SEQ ID NO: 4691 - DNA, 13 bp, Artificial Sequence
  Oligonucleotide for detection of SNP TSC0001683
agtaatgtagtaa

SEQ ID NO: 4692 - DNA, 13 bp, Artificial Sequence
  Oligonucleotide for detection of SNP TSC0001683
ttactacattact

SEQ ID NO: 4693 - DNA, 13 bp, Artificial Sequence
  Oligonucleotide for detection of SNP TSC0001684
agaaaaaagtaat

SEQ ID NO: 4694 - DNA, 13 bp, Artificial Sequence
  Oligonucleotide for detection of SNP TSC0001684
attacttttttct

SEQ ID NO: 4695 - DNA, 13 bp, Artificial Sequence
  Oligonucleotide for detection of SNP TSC0001684
agaaaagagtaat

SEQ ID NO: 4696 - DNA, 13 bp, Artificial Sequence
  Oligonucleotide for detection of SNP TSC0001684
attactcttttct

SEQ ID NO: 4697 - DNA, 13 bp, Artificial Sequence
  Oligonucleotide for detection of SNP TSC0001685
tttttagttagty

SEQ ID NO: 4698 - DNA, 13 bp, Artificial Sequence
  Oligonucleotide for detection of SNP TSC0001685
ractaactaaaaa

SEQ ID NO: 4699 - DNA, 13 bp, Artificial Sequence
  Oligonucleotide for detection of SNP TSC0001685
tttttaattagty

SEQ ID NO: 4700 - DNA, 13 bp, Artificial Sequence
  Oligonucleotide for detection of SNP TSC0001685
ractaattaaaaa

SEQ ID NO: 4701 - DNA, 13 bp, Artificial Sequence
  Oligonucleotide for detection of SNP TSC0001689
tattttatataay

SEQ ID NO: 4702 - DNA, 13 bp, Artificial Sequence
  Oligonucleotide for detection of SNP TSC0001689
rttatataaaata

SEQ ID NO: 4703 - DNA, 13 bp, Artificial Sequence
  Oligonucleotide for detection of SNP TSC0001689
tattttgtataay

SEQ ID NO: 4704 - DNA, 13 bp, Artificial Sequence
  Oligonucleotide for detection of SNP TSC0001689
rttatacaaaata

SEQ ID NO: 4705 - DNA, 13 bp, Artificial Sequence
  Oligonucleotide for detection of SNP TSC0001693
tttgatgtataga

SEQ ID NO: 4706 - DNA, 13 bp, Artificial Sequence
  Oligonucleotide for detection of SNP TSC0001693
tctatacatcaaa

SEQ ID NO: 4707 - DNA, 13 bp, Artificial Sequence
  Oligonucleotide for detection of SNP TSC0001693
tttgatatataga

SEQ ID NO: 4708 - DNA, 13 bp, Artificial Sequence
  Oligonucleotide for detection of SNP TSC0001693
tctatatatcaaa

SEQ ID NO: 4709 - DNA, 13 bp, Artificial Sequence
  Oligonucleotide for detection of SNP TSC0001694
gagaatgaagagy

SEQ ID NO: 4710 - DNA, 13 bp, Artificial Sequence
  Oligonucleotide for detection of SNP TSC0001694
rctcttcattctc

SEQ ID NO: 4711 - DNA, 13 bp, Artificial Sequence
  Oligonucleotide for detection of SNP TSC0001694
gagaataaagagy

SEQ ID NO: 4712 - DNA, 13 bp, Artificial Sequence
  Oligonucleotide for detection of SNP TSC0001694
rctctttattctc

SEQ ID NO: 4713 - DNA, 13 bp, Artificial Sequence
  Oligonucleotide for detection of SNP TSC0001695
gtagtgagatttt

SEQ ID NO: 4714 - DNA, 13 bp, Artificial Sequence
  Oligonucleotide for detection of SNP TSC0001695
aaaatctcactac

SEQ ID NO: 4715 - DNA, 13 bp, Artificial Sequence
  Oligonucleotide for detection of SNP TSC0001695
gtagtgtgatttt

SEQ ID NO: 4716 - DNA, 13 bp, Artificial Sequence
  Oligonucleotide for detection of SNP TSC0001695
aaaatcacactac

SEQ ID NO: 4717 - DNA, 13 bp, Artificial Sequence
  Oligonucleotide for detection of SNP TSC0001695
agggttttattay

SEQ ID NO: 4718 - DNA, 13 bp, Artificial Sequence
  Oligonucleotide for detection of SNP TSC0001695
rtaataaaaccct

SEQ ID NO: 4719 - DNA, 13 bp, Artificial Sequence
  Oligonucleotide for detection of SNP TSC0001695
agggttatattay

SEQ ID NO: 4720 - DNA, 13 bp, Artificial Sequence
  Oligonucleotide for detection of SNP TSC0001695
rtaatataaccct

SEQ ID NO: 4721 - DNA, 13 bp, Artificial Sequence
  Oligonucleotide for detection of SNP TSC0001698
ttgggaggagttt

SEQ ID NO: 4722 - DNA, 13 bp, Artificial Sequence
  Oligonucleotide for detection of SNP TSC0001698
aaactcctcccaa

SEQ ID NO: 4723 - DNA, 13 bp, Artificial Sequence
  Oligonucleotide for detection of SNP TSC0001698
ttgggaagagttt

SEQ ID NO: 4724 - DNA, 13 bp, Artificial Sequence
  Oligonucleotide for detection of SNP TSC0001698
aaactcttcccaa

SEQ ID NO: 4725 - DNA, 13 bp, Artificial Sequence
  Oligonucleotide for detection of SNP TSC0001699
ttattttgtaggy

SEQ ID NO: 4726 - DNA, 13 bp, Artificial Sequence
  Oligonucleotide for detection of SNP TSC0001699
rcctacaaaataa

SEQ ID NO: 4727 - DNA, 13 bp, Artificial Sequence
  Oligonucleotide for detection of SNP TSC0001699
ttatttcgtaggy

SEQ ID NO: 4728 - DNA, 13 bp, Artificial Sequence
  Oligonucleotide for detection of SNP TSC0001699
rcctacgaaataa

SEQ ID NO: 4729 - DNA, 13 bp, Artificial Sequence
  Oligonucleotide for detection of SNP TSC0001699
gtttgtgaagtgg

SEQ ID NO: 4730 - DNA, 13 bp, Artificial Sequence
  Oligonucleotide for detection of SNP TSC0001699
ccacttcacaaac

SEQ ID NO: 4731 - DNA, 13 bp, Artificial Sequence
  Oligonucleotide for detection of SNP TSC0001699
gtttgtaaagtgg

SEQ ID NO: 4732 - DNA, 13 bp, Artificial Sequence
  Oligonucleotide for detection of SNP TSC0001699
ccactttacaaac

SEQ ID NO: 4733 - DNA, 13 bp, Artificial Sequence
  Oligonucleotide for detection of SNP TSC0001699
gtttgcgaagtgg

SEQ ID NO: 4734 - DNA, 13 bp, Artificial Sequence
  Oligonucleotide for detection of SNP TSC0001699
ccacttcgcaaac

SEQ ID NO: 4735 - DNA, 13 bp, Artificial Sequence
  Oligonucleotide for detection of SNP TSC0001700
tataaaggttttt

SEQ ID NO: 4736 - DNA, 13 bp, Artificial Sequence
  Oligonucleotide for detection of SNP TSC0001700
aaaaacctttata

SEQ ID NO: 4737 - DNA, 13 bp, Artificial Sequence
  Oligonucleotide for detection of SNP TSC0001700
tataaaagttttt

SEQ ID NO: 4738 - DNA, 13 bp, Artificial Sequence
  Oligonucleotide for detection of SNP TSC0001700
aaaaacttttata

SEQ ID NO: 4739 - DNA, 13 bp, Artificial Sequence
  Oligonucleotide for detection of SNP TSC0001701
ttttatagtaatt

SEQ ID NO: 4740 - DNA, 13 bp, Artificial Sequence
  Oligonucleotide for detection of SNP TSC0001701
aattactataaaa

SEQ ID NO: 4741 - DNA, 13 bp, Artificial Sequence
  Oligonucleotide for detection of SNP TSC0001701
ttttatggtaatt

SEQ ID NO: 4742 - DNA, 13 bp, Artificial Sequence
  Oligonucleotide for detection of SNP TSC0001701
aattaccataaaa

SEQ ID NO: 4743 - DNA, 13 bp, Artificial Sequence
  Oligonucleotide for detection of SNP TSC0001701
ttttacggtaatt

SEQ ID NO: 4744 - DNA, 13 bp, Artificial Sequence
  Oligonucleotide for detection of SNP TSC0001701
aattaccgtaaaa

SEQ ID NO: 4745 - DNA, 13 bp, Artificial Sequence
  Oligonucleotide for detection of SNP TSC0001701
aattattgtaagg

SEQ ID NO: 4746 - DNA, 13 bp, Artificial Sequence
  Oligonucleotide for detection of SNP TSC0001701
ccttacaataatt

SEQ ID NO: 4747 - DNA, 13 bp, Artificial Sequence
  Oligonucleotide for detection of SNP TSC0001701
aattatcgtaagg

SEQ ID NO: 4748 - DNA, 13 bp, Artificial Sequence
  Oligonucleotide for detection of SNP TSC0001701
ccttacgataatt

SEQ ID NO: 4749 - DNA, 13 bp, Artificial Sequence
  Oligonucleotide for detection of SNP TSC0001702
tttaagaagatag

SEQ ID NO: 4750 - DNA, 13 bp, Artificial Sequence
  Oligonucleotide for detection of SNP TSC0001702
ctatcttcttaaa

SEQ ID NO: 4751 - DNA, 13 bp, Artificial Sequence
  Oligonucleotide for detection of SNP TSC0001702
tttaaggagatag

SEQ ID NO: 4752 - DNA, 13 bp, Artificial Sequence
  Oligonucleotide for detection of SNP TSC0001702
ctatctccttaaa

SEQ ID NO: 4753 - DNA, 13 bp, Artificial Sequence
  Oligonucleotide for detection of SNP TSC0001704
taggtgggaggaa

SEQ ID NO: 4754 - DNA, 13 bp, Artificial Sequence
  Oligonucleotide for detection of SNP TSC0001704
ttcctcccaccta

SEQ ID NO: 4755 - DNA, 13 bp, Artificial Sequence
  Oligonucleotide for detection of SNP TSC0001704
taggtgagaggaa

SEQ ID NO: 4756 - DNA, 13 bp, Artificial Sequence
  Oligonucleotide for detection of SNP TSC0001704
ttcctctcaccta

SEQ ID NO: 4757 - DNA, 13 bp, Artificial Sequence
  Oligonucleotide for detection of SNP TSC0001705
ggtattggtagay

SEQ ID NO: 4758 - DNA, 13 bp, Artificial Sequence
  Oligonucleotide for detection of SNP TSC0001705
rtctaccaatacc

SEQ ID NO: 4759 - DNA, 13 bp, Artificial Sequence
  Oligonucleotide for detection of SNP TSC0001705
ggtatttgtagay

SEQ ID NO: 4760 - DNA, 13 bp, Artificial Sequence
  Oligonucleotide for detection of SNP TSC0001705
rtctacaaatacc

SEQ ID NO: 4761 - DNA, 13 bp, Artificial Sequence
  Oligonucleotide for detection of SNP TSC0001705
ggtatcggtagay

SEQ ID NO: 4762 - DNA, 13 bp, Artificial Sequence
  Oligonucleotide for detection of SNP TSC0001705
rtctaccgatacc

SEQ ID NO: 4763 - DNA, 13 bp, Artificial Sequence
  Oligonucleotide for detection of SNP TSC0001705
gtttattggtaty

SEQ ID NO: 4764 - DNA, 13 bp, Artificial Sequence
  Oligonucleotide for detection of SNP TSC0001705
rataccaataaac

SEQ ID NO: 4765 - DNA, 13 bp, Artificial Sequence
  Oligonucleotide for detection of SNP TSC0001705
gtttataggtaty

SEQ ID NO: 4766 - DNA, 13 bp, Artificial Sequence
  Oligonucleotide for detection of SNP TSC0001705
ratacctataaac

SEQ ID NO: 4767 - DNA, 13 bp, Artificial Sequence
  Oligonucleotide for detection of SNP TSC0001705
gtttatcggtaty

SEQ ID NO: 4768 - DNA, 13 bp, Artificial Sequence
  Oligonucleotide for detection of SNP TSC0001705
rataccgataaac

SEQ ID NO: 4769 - DNA, 13 bp, Artificial Sequence
  Oligonucleotide for detection of SNP TSC0001706
agattttggaggg

SEQ ID NO: 4770 - DNA, 13 bp, Artificial Sequence
  Oligonucleotide for detection of SNP TSC0001706
ccctccaaaatct

SEQ ID NO: 4771 - DNA, 13 bp, Artificial Sequence
  Oligonucleotide for detection of SNP TSC0001706
agatttgggaggg

SEQ ID NO: 4772 - DNA, 13 bp, Artificial Sequence
  Oligonucleotide for detection of SNP TSC0001706
ccctcccaaatct

SEQ ID NO: 4773 - DNA, 13 bp, Artificial Sequence
  Oligonucleotide for detection of SNP TSC0001706
agatttcggaggg

SEQ ID NO: 4774 - DNA, 13 bp, Artificial Sequence
  Oligonucleotide for detection of SNP TSC0001706
ccctccgaaatct

SEQ ID NO: 4775 - DNA, 13 bp, Artificial Sequence
  Oligonucleotide for detection of SNP TSC0001706
ttttttgaaattt

SEQ ID NO: 4776 - DNA, 13 bp, Artificial Sequence
  Oligonucleotide for detection of SNP TSC0001706
aaatttcaaaaaa

SEQ ID NO: 4777 - DNA, 13 bp, Artificial Sequence
  Oligonucleotide for detection of SNP TSC0001706
tttttttaaattt

SEQ ID NO: 4778 - DNA, 13 bp, Artificial Sequence
  Oligonucleotide for detection of SNP TSC0001706
aaatttaaaaaaa

SEQ ID NO: 4779 - DNA, 13 bp, Artificial Sequence
  Oligonucleotide for detection of SNP TSC0001706
tttttcgaaattt

SEQ ID NO: 4780 - DNA, 13 bp, Artificial Sequence
  Oligonucleotide for detection of SNP TSC0001706
aaatttcgaaaaa

SEQ ID NO: 4781 - DNA, 13 bp, Artificial Sequence
  Oligonucleotide for detection of SNP TSC0001707
agatatttaaaaa

SEQ ID NO: 4782 - DNA, 13 bp, Artificial Sequence
  Oligonucleotide for detection of SNP TSC0001707
tttttaaatatct

SEQ ID NO: 4783 - DNA, 13 bp, Artificial Sequence
  Oligonucleotide for detection of SNP TSC0001707
agatatgtaaaaa

SEQ ID NO: 4784 - DNA, 13 bp, Artificial Sequence
  Oligonucleotide for detection of SNP TSC0001707
tttttacatatct

SEQ ID NO: 4785 - DNA, 13 bp, Artificial Sequence
  Oligonucleotide for detection of SNP TSC0001707
agatacgtaaaaa

SEQ ID NO: 4786 - DNA, 13 bp, Artificial Sequence
  Oligonucleotide for detection of SNP TSC0001707
tttttacgtatct

SEQ ID NO: 4787 - DNA, 13 bp, Artificial Sequence
  Oligonucleotide for detection of SNP TSC0001707
tttttgggtattt

SEQ ID NO: 4788 - DNA, 13 bp, Artificial Sequence
  Oligonucleotide for detection of SNP TSC0001707
aaatacccaaaaa

SEQ ID NO: 4789 - DNA, 13 bp, Artificial Sequence
  Oligonucleotide for detection of SNP TSC0001707
tttttgtgtattt

SEQ ID NO: 4790 - DNA, 13 bp, Artificial Sequence
  Oligonucleotide for detection of SNP TSC0001707
aaatacacaaaaa

SEQ ID NO: 4791 - DNA, 13 bp, Artificial Sequence
  Oligonucleotide for detection of SNP TSC0001707
tttttgcgtattt

SEQ ID NO: 4792 - DNA, 13 bp, Artificial Sequence
  Oligonucleotide for detection of SNP TSC0001707
aaatacgcaaaaa

SEQ ID NO: 4793 - DNA, 13 bp, Artificial Sequence
  Oligonucleotide for detection of SNP TSC0001708
tggggtattgttg

SEQ ID NO: 4794 - DNA, 13 bp, Artificial Sequence
  Oligonucleotide for detection of SNP TSC0001708
caacaatacccca

SEQ ID NO: 4795 - DNA, 13 bp, Artificial Sequence
  Oligonucleotide for detection of SNP TSC0001708
tggggtgttgttg

SEQ ID NO: 4796 - DNA, 13 bp, Artificial Sequence
  Oligonucleotide for detection of SNP TSC0001708
caacaacacccca

SEQ ID NO: 4797 - DNA, 13 bp, Artificial Sequence
  Oligonucleotide for detection of SNP TSC0001708
tggggcgttgttg

SEQ ID NO: 4798 - DNA, 13 bp, Artificial Sequence
  Oligonucleotide for detection of SNP TSC0001708
caacaacgcccca

SEQ ID NO: 4799 - DNA, 13 bp, Artificial Sequence
  Oligonucleotide for detection of SNP TSC0001708
tagtaatgtttta

SEQ ID NO: 4800 - DNA, 13 bp, Artificial Sequence
  Oligonucleotide for detection of SNP TSC0001708
taaaacattacta

SEQ ID NO: 4801 - DNA, 13 bp, Artificial Sequence
  Oligonucleotide for detection of SNP TSC0001708
tagtaacgtttta

SEQ ID NO: 4802 - DNA, 13 bp, Artificial Sequence
  Oligonucleotide for detection of SNP TSC0001708
taaaacgttacta

SEQ ID NO: 4803 - DNA, 13 bp, Artificial Sequence
  Oligonucleotide for detection of SNP TSC0001709
ggtagatggtaga

SEQ ID NO: 4804 - DNA, 13 bp, Artificial Sequence
  Oligonucleotide for detection of SNP TSC0001709
tctaccatctacc

SEQ ID NO: 4805 - DNA, 13 bp, Artificial Sequence
  Oligonucleotide for detection of SNP TSC0001709
ggtagacggtaga

SEQ ID NO: 4806 - DNA, 13 bp, Artificial Sequence
  Oligonucleotide for detection of SNP TSC0001709
tctaccgtctacc

SEQ ID NO: 4807 - DNA, 13 bp, Artificial Sequence
  Oligonucleotide for detection of SNP TSC0001709
tttattgtttaty

SEQ ID NO: 4808 - DNA, 13 bp, Artificial Sequence
  Oligonucleotide for detection of SNP TSC0001709
rataaacaataaa

SEQ ID NO: 4809 - DNA, 13 bp, Artificial Sequence
  Oligonucleotide for detection of SNP TSC0001709
tttattatttaty

SEQ ID NO: 4810 - DNA, 13 bp, Artificial Sequence
  Oligonucleotide for detection of SNP TSC0001709
rataaataataaa

SEQ ID NO: 4811 - DNA, 13 bp, Artificial Sequence
  Oligonucleotide for detection of SNP TSC0001709
tttatcgtttaty

SEQ ID NO: 4812 - DNA, 13 bp, Artificial Sequence
  Oligonucleotide for detection of SNP TSC0001709
rataaacgataaa

SEQ ID NO: 4813 - DNA, 13 bp, Artificial Sequence
  Oligonucleotide for detection of SNP TSC0001710
tgatagtgaatga

SEQ ID NO: 4814 - DNA, 13 bp, Artificial Sequence
  Oligonucleotide for detection of SNP TSC0001710
tcattcactatca

SEQ ID NO: 4815 - DNA, 13 bp, Artificial Sequence
  Oligonucleotide for detection of SNP TSC0001710
tgatagcgaatga

SEQ ID NO: 4816 - DNA, 13 bp, Artificial Sequence
  Oligonucleotide for detection of SNP TSC0001710
tcattcgctatca

SEQ ID NO: 4817 - DNA, 13 bp, Artificial Sequence
  Oligonucleotide for detection of SNP TSC0001710
ttatttgttatta

SEQ ID NO: 4818 - DNA, 13 bp, Artificial Sequence
  Oligonucleotide for detection of SNP TSC0001710
taataacaaataa

SEQ ID NO: 4819 - DNA, 13 bp, Artificial Sequence
  Oligonucleotide for detection of SNP TSC0001710
ttatttattatta

SEQ ID NO: 4820 - DNA, 13 bp, Artificial Sequence
  Oligonucleotide for detection of SNP TSC0001710
taataataaataa

SEQ ID NO: 4821 - DNA, 13 bp, Artificial Sequence
  Oligonucleotide for detection of SNP TSC0001710
ttattcgttatta

SEQ ID NO: 4822 - DNA, 13 bp, Artificial Sequence
  Oligonucleotide for detection of SNP TSC0001710
taataacgaataa

SEQ ID NO: 4823 - DNA, 13 bp, Artificial Sequence
  Oligonucleotide for detection of SNP TSC0001711
atatgggtgttty

SEQ ID NO: 4824 - DNA, 13 bp, Artificial Sequence
  Oligonucleotide for detection of SNP TSC0001711
raaacacccatat

SEQ ID NO: 4825 - DNA, 13 bp, Artificial Sequence
  Oligonucleotide for detection of SNP TSC0001711
atatggttgttty

SEQ ID NO: 4826 - DNA, 13 bp, Artificial Sequence
  Oligonucleotide for detection of SNP TSC0001711
raaacaaccatat

SEQ ID NO: 4827 - DNA, 13 bp, Artificial Sequence
  Oligonucleotide for detection of SNP TSC0001711
gggatatttatat

SEQ ID NO: 4828 - DNA, 13 bp, Artificial Sequence
  Oligonucleotide for detection of SNP TSC0001711
atataaatatccc

SEQ ID NO: 4829 - DNA, 13 bp, Artificial Sequence
  Oligonucleotide for detection of SNP TSC0001711
gggataattatat

SEQ ID NO: 4830 - DNA, 13 bp, Artificial Sequence
  Oligonucleotide for detection of SNP TSC0001711
atataattatccc

SEQ ID NO: 4831 - DNA, 13 bp, Artificial Sequence
  Oligonucleotide for detection of SNP TSC0001712
ttatttaggaggy

SEQ ID NO: 4832 - DNA, 13 bp, Artificial Sequence
  Oligonucleotide for detection of SNP TSC0001712
rcctcctaaataa

SEQ ID NO: 4833 - DNA, 13 bp, Artificial Sequence
  Oligonucleotide for detection of SNP TSC0001712
ttatttgggaggy

SEQ ID NO: 4834 - DNA, 13 bp, Artificial Sequence
  Oligonucleotide for detection of SNP TSC0001712
rcctcccaaataa

SEQ ID NO: 4835 - DNA, 13 bp, Artificial Sequence
  Oligonucleotide for detection of SNP TSC0001712
ttattcgggaggy

SEQ ID NO: 4836 - DNA, 13 bp, Artificial Sequence
  Oligonucleotide for detection of SNP TSC0001712
rcctcccgaataa

SEQ ID NO: 4837 - DNA, 13 bp, Artificial Sequence
  Oligonucleotide for detection of SNP TSC0001712
gttttttgaatag

SEQ ID NO: 4838 - DNA, 13 bp, Artificial Sequence
  Oligonucleotide for detection of SNP TSC0001712
ctattcaaaaaac

SEQ ID NO: 4839 - DNA, 13 bp, Artificial Sequence
  Oligonucleotide for detection of SNP TSC0001712
gtttttcgaatag

SEQ ID NO: 4840 - DNA, 13 bp, Artificial Sequence
  Oligonucleotide for detection of SNP TSC0001712
ctattcgaaaaac

SEQ ID NO: 4841 - DNA, 13 bp, Artificial Sequence
  Oligonucleotide for detection of SNP TSC0001713
gatttttgggaat

SEQ ID NO: 4842 - DNA, 13 bp, Artificial Sequence
  Oligonucleotide for detection of SNP TSC0001713
attcccaaaaatc

SEQ ID NO: 4843 - DNA, 13 bp, Artificial Sequence
  Oligonucleotide for detection of SNP TSC0001713
gattttcgggaat

SEQ ID NO: 4844 - DNA, 13 bp, Artificial Sequence
  Oligonucleotide for detection of SNP TSC0001713
attcccgaaaatc

SEQ ID NO: 4845 - DNA, 13 bp, Artificial Sequence
  Oligonucleotide for detection of SNP TSC0001713
atttttgagagty

SEQ ID NO: 4846 - DNA, 13 bp, Artificial Sequence
  Oligonucleotide for detection of SNP TSC0001713
ractctcaaaaat

SEQ ID NO: 4847 - DNA, 13 bp, Artificial Sequence
  Oligonucleotide for detection of SNP TSC0001713
atttttaagagty

SEQ ID NO: 4848 - DNA, 13 bp, Artificial Sequence
  Oligonucleotide for detection of SNP TSC0001713
ractcttaaaaat

SEQ ID NO: 4849 - DNA, 13 bp, Artificial Sequence
  Oligonucleotide for detection of SNP TSC0001713
attttcgagagty

SEQ ID NO: 4850 - DNA, 13 bp, Artificial Sequence
  Oligonucleotide for detection of SNP TSC0001713
ractctcgaaaat

SEQ ID NO: 4851 - DNA, 13 bp, Artificial Sequence
  Oligonucleotide for detection of SNP TSC0001714
tagattatgttay

SEQ ID NO: 4852 - DNA, 13 bp, Artificial Sequence
  Oligonucleotide for detection of SNP TSC0001714
rtaacataatcta

SEQ ID NO: 4853 - DNA, 13 bp, Artificial Sequence
  Oligonucleotide for detection of SNP TSC0001714
tagattttgttay

SEQ ID NO: 4854 - DNA, 13 bp, Artificial Sequence
  Oligonucleotide for detection of SNP TSC0001714
rtaacaaaatcta

SEQ ID NO: 4855 - DNA, 13 bp, Artificial Sequence
  Oligonucleotide for detection of SNP TSC0001714
tagattacgttay

SEQ ID NO: 4856 - DNA, 13 bp, Artificial Sequence
  Oligonucleotide for detection of SNP TSC0001714
rtaacgtaatcta

SEQ ID NO: 4857 - DNA, 13 bp, Artificial Sequence
  Oligonucleotide for detection of SNP TSC0001714
tagatttcgttay

SEQ ID NO: 4858 - DNA, 13 bp, Artificial Sequence
  Oligonucleotide for detection of SNP TSC0001714
rtaacgaaatcta

SEQ ID NO: 4859 - DNA, 13 bp, Artificial Sequence
  Oligonucleotide for detection of SNP TSC0001714
gtggtgtgatttg

SEQ ID NO: 4860 - DNA, 13 bp, Artificial Sequence
  Oligonucleotide for detection of SNP TSC0001714
caaatcacaccac

SEQ ID NO: 4861 - DNA, 13 bp, Artificial Sequence
  Oligonucleotide for detection of SNP TSC0001714
gtggtgggatttg

SEQ ID NO: 4862 - DNA, 13 bp, Artificial Sequence
  Oligonucleotide for detection of SNP TSC0001714
caaatcccaccac

SEQ ID NO: 4863 - DNA, 13 bp, Artificial Sequence
  Oligonucleotide for detection of SNP TSC0001714
gtggcgtgatttg

SEQ ID NO: 4864 - DNA, 13 bp, Artificial Sequence
  Oligonucleotide for detection of SNP TSC0001714
caaatcacgccac

SEQ ID NO: 4865 - DNA, 13 bp, Artificial Sequence
  Oligonucleotide for detection of SNP TSC0001714
gtggcgggatttg

SEQ ID NO: 4866 - DNA, 13 bp, Artificial Sequence
  Oligonucleotide for detection of SNP TSC0001714
caaatcccgccac

SEQ ID NO: 4867 - DNA, 13 bp, Artificial Sequence
  Oligonucleotide for detection of SNP TSC0001715
ttttgtatataga

SEQ ID NO: 4868 - DNA, 13 bp, Artificial Sequence
  Oligonucleotide for detection of SNP TSC0001715
tctatatacaaaa

SEQ ID NO: 4869 - DNA, 13 bp, Artificial Sequence
  Oligonucleotide for detection of SNP TSC0001715
ttttgtgtataga

SEQ ID NO: 4870 - DNA, 13 bp, Artificial Sequence
  Oligonucleotide for detection of SNP TSC0001715
tctatacacaaaa

SEQ ID NO: 4871 - DNA, 13 bp, Artificial Sequence
  Oligonucleotide for detection of SNP TSC0001715
ttttgcgtataga

SEQ ID NO: 4872 - DNA, 13 bp, Artificial Sequence
  Oligonucleotide for detection of SNP TSC0001715
tctatacgcaaaa

SEQ ID NO: 4873 - DNA, 13 bp, Artificial Sequence
  Oligonucleotide for detection of SNP TSC0001715
tttgtgtgtagga

SEQ ID NO: 4874 - DNA, 13 bp, Artificial Sequence
  Oligonucleotide for detection of SNP TSC0001715
tcctacacacaaa

SEQ ID NO: 4875 - DNA, 13 bp, Artificial Sequence
  Oligonucleotide for detection of SNP TSC0001715
tttgtgcgtagga

SEQ ID NO: 4876 - DNA, 13 bp, Artificial Sequence
  Oligonucleotide for detection of SNP TSC0001715
tcctacgcacaaa

SEQ ID NO: 4877 - DNA, 13 bp, Artificial Sequence
  Oligonucleotide for detection of SNP TSC0001716
tatttgatgggtt

SEQ ID NO: 4878 - DNA, 13 bp, Artificial Sequence
  Oligonucleotide for detection of SNP TSC0001716
aacccatcaaata

SEQ ID NO: 4879 - DNA, 13 bp, Artificial Sequence
  Oligonucleotide for detection of SNP TSC0001716
tatttggtgggtt

SEQ ID NO: 4880 - DNA, 13 bp, Artificial Sequence
  Oligonucleotide for detection of SNP TSC0001716
aacccaccaaata

SEQ ID NO: 4881 - DNA, 13 bp, Artificial Sequence
  Oligonucleotide for detection of SNP TSC0001716
tattcgatgggtt

SEQ ID NO: 4882 - DNA, 13 bp, Artificial Sequence
  Oligonucleotide for detection of SNP TSC0001716
aacccatcgaata

SEQ ID NO: 4883 - DNA, 13 bp, Artificial Sequence
  Oligonucleotide for detection of SNP TSC0001716
tattcggtgggtt

SEQ ID NO: 4884 - DNA, 13 bp, Artificial Sequence
  Oligonucleotide for detection of SNP TSC0001716
aacccaccgaata

SEQ ID NO: 4885 - DNA, 13 bp, Artificial Sequence
  Oligonucleotide for detection of SNP TSC0001717
taagagggataty

SEQ ID NO: 4886 - DNA, 13 bp, Artificial Sequence
  Oligonucleotide for detection of SNP TSC0001717
ratatccctctta

SEQ ID NO: 4887 - DNA, 13 bp, Artificial Sequence
  Oligonucleotide for detection of SNP TSC0001717
taagagagataty

SEQ ID NO: 4888 - DNA, 13 bp, Artificial Sequence
  Oligonucleotide for detection of SNP TSC0001717
ratatctctctta

SEQ ID NO: 4889 - DNA, 13 bp, Artificial Sequence
  Oligonucleotide for detection of SNP TSC0001718
ttttttgatttta

SEQ ID NO: 4890 - DNA, 13 bp, Artificial Sequence
  Oligonucleotide for detection of SNP TSC0001718
taaaatcaaaaaa

SEQ ID NO: 4891 - DNA, 13 bp, Artificial Sequence
  Oligonucleotide for detection of SNP TSC0001718
tttttttatttta

SEQ ID NO: 4892 - DNA, 13 bp, Artificial Sequence
  Oligonucleotide for detection of SNP TSC0001718
taaaataaaaaaa

SEQ ID NO: 4893 - DNA, 13 bp, Artificial Sequence
  Oligonucleotide for detection of SNP TSC0001718
taaggttaaaaaa

SEQ ID NO: 4894 - DNA, 13 bp, Artificial Sequence
  Oligonucleotide for detection of SNP TSC0001718
ttttttaacctta

SEQ ID NO: 4895 - DNA, 13 bp, Artificial Sequence
  Oligonucleotide for detection of SNP TSC0001718
taaggtaaaaaaa

SEQ ID NO: 4896 - DNA, 13 bp, Artificial Sequence
  Oligonucleotide for detection of SNP TSC0001718
tttttttacctta

SEQ ID NO: 4897 - DNA, 13 bp, Artificial Sequence
  Oligonucleotide for detection of SNP TSC0001720
tttgtgaaaataa

SEQ ID NO: 4898 - DNA, 13 bp, Artificial Sequence
  Oligonucleotide for detection of SNP TSC0001720
ttattttcacaaa

SEQ ID NO: 4899 - DNA, 13 bp, Artificial Sequence
  Oligonucleotide for detection of SNP TSC0001720
tttgtggaaataa

SEQ ID NO: 4900 - DNA, 13 bp, Artificial Sequence
  Oligonucleotide for detection of SNP TSC0001720
ttatttccacaaa

SEQ ID NO: 4901 - DNA, 13 bp, Artificial Sequence
  Oligonucleotide for detection of SNP TSC0001721
gttattagggaty

SEQ ID NO: 4902 - DNA, 13 bp, Artificial Sequence
  Oligonucleotide for detection of SNP TSC0001721
ratccctaataac

SEQ ID NO: 4903 - DNA, 13 bp, Artificial Sequence
  Oligonucleotide for detection of SNP TSC0001721
gttatttgggaty

SEQ ID NO: 4904 - DNA, 13 bp, Artificial Sequence
  Oligonucleotide for detection of SNP TSC0001721
ratcccaaataac

SEQ ID NO: 4905 - DNA, 13 bp, Artificial Sequence
  Oligonucleotide for detection of SNP TSC0001721
gatttttaatagy

SEQ ID NO: 4906 - DNA, 13 bp, Artificial Sequence
  Oligonucleotide for detection of SNP TSC0001721
rctattaaaaatc

SEQ ID NO: 4907 - DNA, 13 bp, Artificial Sequence
  Oligonucleotide for detection of SNP TSC0001721
gattttaaatagy

SEQ ID NO: 4908 - DNA, 13 bp, Artificial Sequence
  Oligonucleotide for detection of SNP TSC0001721
rctatttaaaatc

SEQ ID NO: 4909 - DNA, 13 bp, Artificial Sequence
  Oligonucleotide for detection of SNP TSC0001722
atgttgataattt

SEQ ID NO: 4910 - DNA, 13 bp, Artificial Sequence
  Oligonucleotide for detection of SNP TSC0001722
aaattatcaacat

SEQ ID NO: 4911 - DNA, 13 bp, Artificial Sequence
  Oligonucleotide for detection of SNP TSC0001722
atgttggtaattt

SEQ ID NO: 4912 - DNA, 13 bp, Artificial Sequence
  Oligonucleotide for detection of SNP TSC0001722
aaattaccaacat

SEQ ID NO: 4913 - DNA, 13 bp, Artificial Sequence
  Oligonucleotide for detection of SNP TSC0001722
acgttgataattt

SEQ ID NO: 4914 - DNA, 13 bp, Artificial Sequence
  Oligonucleotide for detection of SNP TSC0001722
aaattatcaacgt

SEQ ID NO: 4915 - DNA, 13 bp, Artificial Sequence
  Oligonucleotide for detection of SNP TSC0001722
acgttggtaattt

SEQ ID NO: 4916 - DNA, 13 bp, Artificial Sequence
  Oligonucleotide for detection of SNP TSC0001722
aaattaccaacgt

SEQ ID NO: 4917 - DNA, 13 bp, Artificial Sequence
  Oligonucleotide for detection of SNP TSC0001723
tttaatatgagta

SEQ ID NO: 4918 - DNA, 13 bp, Artificial Sequence
  Oligonucleotide for detection of SNP TSC0001723
tactcatattaaa

SEQ ID NO: 4919 - DNA, 13 bp, Artificial Sequence
  Oligonucleotide for detection of SNP TSC0001723
tttaatgtgagta

SEQ ID NO: 4920 - DNA, 13 bp, Artificial Sequence
  Oligonucleotide for detection of SNP TSC0001723
tactcacattaaa

SEQ ID NO: 4921 - DNA, 13 bp, Artificial Sequence
  Oligonucleotide for detection of SNP TSC0001724
tgtaatggttaaa

SEQ ID NO: 4922 - DNA, 13 bp, Artificial Sequence
  Oligonucleotide for detection of SNP TSC0001724
tttaaccattaca

SEQ ID NO: 4923 - DNA, 13 bp, Artificial Sequence
  Oligonucleotide for detection of SNP TSC0001724
tgtaatagttaaa

SEQ ID NO: 4924 - DNA, 13 bp, Artificial Sequence
  Oligonucleotide for detection of SNP TSC0001724
tttaactattaca

SEQ ID NO: 4925 - DNA, 13 bp, Artificial Sequence
  Oligonucleotide for detection of SNP TSC0001725
aagtgtggtaaat

SEQ ID NO: 4926 - DNA, 13 bp, Artificial Sequence
  Oligonucleotide for detection of SNP TSC0001725
atttaccacactt

SEQ ID NO: 4927 - DNA, 13 bp, Artificial Sequence
  Oligonucleotide for detection of SNP TSC0001725
aagtgtagtaaat

SEQ ID NO: 4928 - DNA, 13 bp, Artificial Sequence
  Oligonucleotide for detection of SNP TSC0001725
atttactacactt

SEQ ID NO: 4929 - DNA, 13 bp, Artificial Sequence
  Oligonucleotide for detection of SNP TSC0001726
gatagggttttay

SEQ ID NO: 4930 - DNA, 13 bp, Artificial Sequence
  Oligonucleotide for detection of SNP TSC0001726
rtaaaaccctatc

SEQ ID NO: 4931 - DNA, 13 bp, Artificial Sequence
  Oligonucleotide for detection of SNP TSC0001726
gataggtttttay

SEQ ID NO: 4932 - DNA, 13 bp, Artificial Sequence
  Oligonucleotide for detection of SNP TSC0001726
rtaaaaacctatc

SEQ ID NO: 4933 - DNA, 13 bp, Artificial Sequence
  Oligonucleotide for detection of SNP TSC0001726
gtgagattttgty

SEQ ID NO: 4934 - DNA, 13 bp, Artificial Sequence
  Oligonucleotide for detection of SNP TSC0001726
racaaaatctcac

SEQ ID NO: 4935 - DNA, 13 bp, Artificial Sequence
  Oligonucleotide for detection of SNP TSC0001726
gtgagaatttgty

SEQ ID NO: 4936 - DNA, 13 bp, Artificial Sequence
  Oligonucleotide for detection of SNP TSC0001726
racaaattctcac

SEQ ID NO: 4937 - DNA, 13 bp, Artificial Sequence
  Oligonucleotide for detection of SNP TSC0001727
aagataggaagat

SEQ ID NO: 4938 - DNA, 13 bp, Artificial Sequence
  Oligonucleotide for detection of SNP TSC0001727
atcttcctatctt

SEQ ID NO: 4939 - DNA, 13 bp, Artificial Sequence
  Oligonucleotide for detection of SNP TSC0001727
aagataagaagat

SEQ ID NO: 4940 - DNA, 13 bp, Artificial Sequence
  Oligonucleotide for detection of SNP TSC0001727
atcttcttatctt

SEQ ID NO: 4941 - DNA, 13 bp, Artificial Sequence
  Oligonucleotide for detection of SNP TSC0001729
tttttaggtttta

SEQ ID NO: 4942 - DNA, 13 bp, Artificial Sequence
  Oligonucleotide for detection of SNP TSC0001729
taaaacctaaaaa

SEQ ID NO: 4943 - DNA, 13 bp, Artificial Sequence
  Oligonucleotide for detection of SNP TSC0001729
tttttaagtttta

SEQ ID NO: 4944 - DNA, 13 bp, Artificial Sequence
  Oligonucleotide for detection of SNP TSC0001729
taaaacttaaaaa

SEQ ID NO: 4945 - DNA, 13 bp, Artificial Sequence
  Oligonucleotide for detection of SNP TSC0001730
gttgtaattgtag

SEQ ID NO: 4946 - DNA, 13 bp, Artificial Sequence
  Oligonucleotide for detection of SNP TSC0001730
ctacaattacaac

SEQ ID NO: 4947 - DNA, 13 bp, Artificial Sequence
  Oligonucleotide for detection of SNP TSC0001730
gttgtagttgtag

SEQ ID NO: 4948 - DNA, 13 bp, Artificial Sequence
  Oligonucleotide for detection of SNP TSC0001730
ctacaactacaac

SEQ ID NO: 4949 - DNA, 13 bp, Artificial Sequence
  Oligonucleotide for detection of SNP TSC0001731
taatttgtatgat

SEQ ID NO: 4950 - DNA, 13 bp, Artificial Sequence
  Oligonucleotide for detection of SNP TSC0001731
atcatacaaatta

SEQ ID NO: 4951 - DNA, 13 bp, Artificial Sequence
  Oligonucleotide for detection of SNP TSC0001731
taatttttatgat

SEQ ID NO: 4952 - DNA, 13 bp, Artificial Sequence
  Oligonucleotide for detection of SNP TSC0001731
atcataaaaatta

SEQ ID NO: 4953 - DNA, 13 bp, Artificial Sequence
  Oligonucleotide for detection of SNP TSC0001731
attatataaatta

SEQ ID NO: 4954 - DNA, 13 bp, Artificial Sequence
  Oligonucleotide for detection of SNP TSC0001731
taatttatataat

SEQ ID NO: 4955 - DNA, 13 bp, Artificial Sequence
  Oligonucleotide for detection of SNP TSC0001731
attataaaaatta

SEQ ID NO: 4956 - DNA, 13 bp, Artificial Sequence
  Oligonucleotide for detection of SNP TSC0001731
taatttttataat

SEQ ID NO: 4957 - DNA, 13 bp, Artificial Sequence
  Oligonucleotide for detection of SNP TSC0001732
atggttttgttty

SEQ ID NO: 4958 - DNA, 13 bp, Artificial Sequence
  Oligonucleotide for detection of SNP TSC0001732
raaacaaaaccat

SEQ ID NO: 4959 - DNA, 13 bp, Artificial Sequence
  Oligonucleotide for detection of SNP TSC0001732
atggttgtgttty

SEQ ID NO: 4960 - DNA, 13 bp, Artificial Sequence
  Oligonucleotide for detection of SNP TSC0001732
raaacacaaccat

SEQ ID NO: 4961 - DNA, 13 bp, Artificial Sequence
  Oligonucleotide for detection of SNP TSC0001732
gaagtagagttat

SEQ ID NO: 4962 - DNA, 13 bp, Artificial Sequence
  Oligonucleotide for detection of SNP TSC0001732
ataactctacttc

SEQ ID NO: 4963 - DNA, 13 bp, Artificial Sequence
  Oligonucleotide for detection of SNP TSC0001732
gaagtatagttat

SEQ ID NO: 4964 - DNA, 13 bp, Artificial Sequence
  Oligonucleotide for detection of SNP TSC0001732
ataactatacttc

SEQ ID NO: 4965 - DNA, 13 bp, Artificial Sequence
  Oligonucleotide for detection of SNP TSC0001733
tttaagatggtay

SEQ ID NO: 4966 - DNA, 13 bp, Artificial Sequence
  Oligonucleotide for detection of SNP TSC0001733
rtaccatcttaaa

SEQ ID NO: 4967 - DNA, 13 bp, Artificial Sequence
  Oligonucleotide for detection of SNP TSC0001733
tttaaggtggtay

SEQ ID NO: 4968 - DNA, 13 bp, Artificial Sequence
  Oligonucleotide for detection of SNP TSC0001733
rtaccaccttaaa

SEQ ID NO: 4969 - DNA, 13 bp, Artificial Sequence
  Oligonucleotide for detection of SNP TSC0001734
gtttttattttta

SEQ ID NO: 4970 - DNA, 13 bp, Artificial Sequence
  Oligonucleotide for detection of SNP TSC0001734
taaaaataaaaac

SEQ ID NO: 4971 - DNA, 13 bp, Artificial Sequence
  Oligonucleotide for detection of SNP TSC0001734
taagagtgaggay

SEQ ID NO: 4972 - DNA, 13 bp, Artificial Sequence
  Oligonucleotide for detection of SNP TSC0001734
rtcctcactctta

SEQ ID NO: 4973 - DNA, 13 bp, Artificial Sequence
  Oligonucleotide for detection of SNP TSC0001734
taagagggaggay

SEQ ID NO: 4974 - DNA, 13 bp, Artificial Sequence
  Oligonucleotide for detection of SNP TSC0001734
rtcctccctctta

SEQ ID NO: 4975 - DNA, 13 bp, Artificial Sequence
  Oligonucleotide for detection of SNP TSC0001735
ttattgatatatt

SEQ ID NO: 4976 - DNA, 13 bp, Artificial Sequence
  Oligonucleotide for detection of SNP TSC0001735
aatatatcaataa

SEQ ID NO: 4977 - DNA, 13 bp, Artificial Sequence
  Oligonucleotide for detection of SNP TSC0001735
ttattgttatatt

SEQ ID NO: 4978 - DNA, 13 bp, Artificial Sequence
  Oligonucleotide for detection of SNP TSC0001735
aatataacaataa

SEQ ID NO: 4979 - DNA, 13 bp, Artificial Sequence
  Oligonucleotide for detection of SNP TSC0001735
agtatattaatgg

SEQ ID NO: 4980 - DNA, 13 bp, Artificial Sequence
  Oligonucleotide for detection of SNP TSC0001735
ccattaatatact

SEQ ID NO: 4981 - DNA, 13 bp, Artificial Sequence
  Oligonucleotide for detection of SNP TSC0001735
agtataataatgg

SEQ ID NO: 4982 - DNA, 13 bp, Artificial Sequence
  Oligonucleotide for detection of SNP TSC0001735
ccattattatact

SEQ ID NO: 4983 - DNA, 13 bp, Artificial Sequence
  Oligonucleotide for detection of SNP TSC0001736
attttatatatty

SEQ ID NO: 4984 - DNA, 13 bp, Artificial Sequence
  Oligonucleotide for detection of SNP TSC0001736
raatatataaaat

SEQ ID NO: 4985 - DNA, 13 bp, Artificial Sequence
  Oligonucleotide for detection of SNP TSC0001736
attttagatatty

SEQ ID NO: 4986 - DNA, 13 bp, Artificial Sequence
  Oligonucleotide for detection of SNP TSC0001736
raatatctaaaat

SEQ ID NO: 4987 - DNA, 13 bp, Artificial Sequence
  Oligonucleotide for detection of SNP TSC0001736
ggatgtgtaagat

SEQ ID NO: 4988 - DNA, 13 bp, Artificial Sequence
  Oligonucleotide for detection of SNP TSC0001736
atcttacacatcc

SEQ ID NO: 4989 - DNA, 13 bp, Artificial Sequence
  Oligonucleotide for detection of SNP TSC0001736
ggatgtttaagat

SEQ ID NO: 4990 - DNA, 13 bp, Artificial Sequence
  Oligonucleotide for detection of SNP TSC0001736
atcttaaacatcc

SEQ ID NO: 4991 - DNA, 13 bp, Artificial Sequence
  Oligonucleotide for detection of SNP TSC0001737
aataaagtaattg

SEQ ID NO: 4992 - DNA, 13 bp, Artificial Sequence
  Oligonucleotide for detection of SNP TSC0001737
caattactttatt

SEQ ID NO: 4993 - DNA, 13 bp, Artificial Sequence
  Oligonucleotide for detection of SNP TSC0001737
aataaaataattg

SEQ ID NO: 4994 - DNA, 13 bp, Artificial Sequence
  Oligonucleotide for detection of SNP TSC0001737
caattattttatt

SEQ ID NO: 4995 - DNA, 13 bp, Artificial Sequence
  Oligonucleotide for detection of SNP TSC0001737
aataaagtaatcg

SEQ ID NO: 4996 - DNA, 13 bp, Artificial Sequence
  Oligonucleotide for detection of SNP TSC0001737
cgattactttatt

SEQ ID NO: 4997 - DNA, 13 bp, Artificial Sequence
  Oligonucleotide for detection of SNP TSC0001737
aataaaataatcg

SEQ ID NO: 4998 - DNA, 13 bp, Artificial Sequence
  Oligonucleotide for detection of SNP TSC0001737
cgattattttatt

SEQ ID NO: 4999 - DNA, 13 bp, Artificial Sequence
  Oligonucleotide for detection of SNP TSC0001738
tttttatgattay

SEQ ID NO: 5000 - DNA, 13 bp, Artificial Sequence
  Oligonucleotide for detection of SNP TSC0001738
rtaatcataaaaa

SEQ ID NO: 5001 - DNA, 13 bp, Artificial Sequence
  Oligonucleotide for detection of SNP TSC0001738
tttttacgattay

SEQ ID NO: 5002 - DNA, 13 bp, Artificial Sequence
  Oligonucleotide for detection of SNP TSC0001738
rtaatcgtaaaaa

SEQ ID NO: 5003 - DNA, 13 bp, Artificial Sequence
  Oligonucleotide for detection of SNP TSC0001738
gtaattgtagggg

SEQ ID NO: 5004 - DNA, 13 bp, Artificial Sequence
  Oligonucleotide for detection of SNP TSC0001738
cccctacaattac

SEQ ID NO: 5005 - DNA, 13 bp, Artificial Sequence
  Oligonucleotide for detection of SNP TSC0001738
gtaattatagggg

SEQ ID NO: 5006 - DNA, 13 bp, Artificial Sequence
  Oligonucleotide for detection of SNP TSC0001738
cccctataattac

SEQ ID NO: 5007 - DNA, 13 bp, Artificial Sequence
  Oligonucleotide for detection of SNP TSC0001738
gtaatcgtagggg

SEQ ID NO: 5008 - DNA, 13 bp, Artificial Sequence
  Oligonucleotide for detection of SNP TSC0001738
cccctacgattac

SEQ ID NO: 5009 - DNA, 13 bp, Artificial Sequence
  Oligonucleotide for detection of SNP TSC0001740
aggagatggagat

SEQ ID NO: 5010 - DNA, 13 bp, Artificial Sequence
  Oligonucleotide for detection of SNP TSC0001740
atctccatctcct

SEQ ID NO: 5011 - DNA, 13 bp, Artificial Sequence
  Oligonucleotide for detection of SNP TSC0001740
aggagacggagat

SEQ ID NO: 5012 - DNA, 13 bp, Artificial Sequence
  Oligonucleotide for detection of SNP TSC0001740
atctccgtctcct

SEQ ID NO: 5013 - DNA, 13 bp, Artificial Sequence
  Oligonucleotide for detection of SNP TSC0001741
aggtagttattga

SEQ ID NO: 5014 - DNA, 13 bp, Artificial Sequence
  Oligonucleotide for detection of SNP TSC0001741
tcaataactacct

SEQ ID NO: 5015 - DNA, 13 bp, Artificial Sequence
  Oligonucleotide for detection of SNP TSC0001741
aggtaggtattga

SEQ ID NO: 5016 - DNA, 13 bp, Artificial Sequence
  Oligonucleotide for detection of SNP TSC0001741
tcaatacctacct

SEQ ID NO: 5017 - DNA, 13 bp, Artificial Sequence
  Oligonucleotide for detection of SNP TSC0001741
ttagtggttgttt

SEQ ID NO: 5018 - DNA, 13 bp, Artificial Sequence
  Oligonucleotide for detection of SNP TSC0001741
aaacaaccactaa

SEQ ID NO: 5019 - DNA, 13 bp, Artificial Sequence
  Oligonucleotide for detection of SNP TSC0001741
ttagtgtttgttt

SEQ ID NO: 5020 - DNA, 13 bp, Artificial Sequence
  Oligonucleotide for detection of SNP TSC0001741
aaacaaacactaa

SEQ ID NO: 5021 - DNA, 13 bp, Artificial Sequence
  Oligonucleotide for detection of SNP TSC0001742
tttaggaaggtta

SEQ ID NO: 5022 - DNA, 13 bp, Artificial Sequence
  Oligonucleotide for detection of SNP TSC0001742
taaccttcctaaa

SEQ ID NO: 5023 - DNA, 13 bp, Artificial Sequence
  Oligonucleotide for detection of SNP TSC0001742
tttaggtaggtta

SEQ ID NO: 5024 - DNA, 13 bp, Artificial Sequence
  Oligonucleotide for detection of SNP TSC0001742
taacctacctaaa

SEQ ID NO: 5025 - DNA, 13 bp, Artificial Sequence
  Oligonucleotide for detection of SNP TSC0001742
taatttttttaga

SEQ ID NO: 5026 - DNA, 13 bp, Artificial Sequence
  Oligonucleotide for detection of SNP TSC0001742
tctaaaaaaatta

SEQ ID NO: 5027 - DNA, 13 bp, Artificial Sequence
  Oligonucleotide for detection of SNP TSC0001742
taatttgtttaga

SEQ ID NO: 5028 - DNA, 13 bp, Artificial Sequence
  Oligonucleotide for detection of SNP TSC0001742
tctaaacaaatta

SEQ ID NO: 5029 - DNA, 13 bp, Artificial Sequence
  Oligonucleotide for detection of SNP TSC0001758
tattaatatggty

SEQ ID NO: 5030 - DNA, 13 bp, Artificial Sequence
  Oligonucleotide for detection of SNP TSC0001758
raccatattaata

SEQ ID NO: 5031 - DNA, 13 bp, Artificial Sequence
  Oligonucleotide for detection of SNP TSC0001758
tattaagatggty

SEQ ID NO: 5032 - DNA, 13 bp, Artificial Sequence
  Oligonucleotide for detection of SNP TSC0001758
raccatcttaata

SEQ ID NO: 5033 - DNA, 13 bp, Artificial Sequence
  Oligonucleotide for detection of SNP TSC0001758
ggttatgttagtg

SEQ ID NO: 5034 - DNA, 13 bp, Artificial Sequence
  Oligonucleotide for detection of SNP TSC0001758
cactaacataacc

SEQ ID NO: 5035 - DNA, 13 bp, Artificial Sequence
  Oligonucleotide for detection of SNP TSC0001758
ggttattttagtg

SEQ ID NO: 5036 - DNA, 13 bp, Artificial Sequence
  Oligonucleotide for detection of SNP TSC0001758
cactaaaataacc

SEQ ID NO: 5037 - DNA, 13 bp, Artificial Sequence
  Oligonucleotide for detection of SNP TSC0001759
ggttagaaaaagy

SEQ ID NO: 5038 - DNA, 13 bp, Artificial Sequence
  Oligonucleotide for detection of SNP TSC0001759
rctttttctaacc

SEQ ID NO: 5039 - DNA, 13 bp, Artificial Sequence
  Oligonucleotide for detection of SNP TSC0001759
ggttagtaaaagy

SEQ ID NO: 5040 - DNA, 13 bp, Artificial Sequence
  Oligonucleotide for detection of SNP TSC0001759
rcttttactaacc

SEQ ID NO: 5041 - DNA, 13 bp, Artificial Sequence
  Oligonucleotide for detection of SNP TSC0001759
gttttttttgaty

SEQ ID NO: 5042 - DNA, 13 bp, Artificial Sequence
  Oligonucleotide for detection of SNP TSC0001759
ratcaaaaaaaac

SEQ ID NO: 5043 - DNA, 13 bp, Artificial Sequence
  Oligonucleotide for detection of SNP TSC0001759
gtttttgttgaty

SEQ ID NO: 5044 - DNA, 13 bp, Artificial Sequence
  Oligonucleotide for detection of SNP TSC0001759
ratcaacaaaaac

SEQ ID NO: 5045 - DNA, 13 bp, Artificial Sequence
  Oligonucleotide for detection of SNP TSC0001760
atattagtagtat

SEQ ID NO: 5046 - DNA, 13 bp, Artificial Sequence
  Oligonucleotide for detection of SNP TSC0001760
atactactaatat

SEQ ID NO: 5047 - DNA, 13 bp, Artificial Sequence
  Oligonucleotide for detection of SNP TSC0001760
atattaatagtat

SEQ ID NO: 5048 - DNA, 13 bp, Artificial Sequence
  Oligonucleotide for detection of SNP TSC0001760
atactattaatat

SEQ ID NO: 5049 - DNA, 13 bp, Artificial Sequence
  Oligonucleotide for detection of SNP TSC0001761
taaattaaataag

SEQ ID NO: 5050 - DNA, 13 bp, Artificial Sequence
  Oligonucleotide for detection of SNP TSC0001761
cttatttaattta

SEQ ID NO: 5051 - DNA, 13 bp, Artificial Sequence
  Oligonucleotide for detection of SNP TSC0001761
taaattgaataag

SEQ ID NO: 5052 - DNA, 13 bp, Artificial Sequence
  Oligonucleotide for detection of SNP TSC0001761
cttattcaattta

SEQ ID NO: 5053 - DNA, 13 bp, Artificial Sequence
  Oligonucleotide for detection of SNP TSC0001761
taaatcgaataag

SEQ ID NO: 5054 - DNA, 13 bp, Artificial Sequence
  Oligonucleotide for detection of SNP TSC0001761
cttattcgattta

SEQ ID NO: 5055 - DNA, 13 bp, Artificial Sequence
  Oligonucleotide for detection of SNP TSC0001761
tttgtttggtttg

SEQ ID NO: 5056 - DNA, 13 bp, Artificial Sequence
  Oligonucleotide for detection of SNP TSC0001761
caaaccaaacaaa

SEQ ID NO: 5057 - DNA, 13 bp, Artificial Sequence
  Oligonucleotide for detection of SNP TSC0001761
tttgttcggtttg

SEQ ID NO: 5058 - DNA, 13 bp, Artificial Sequence
  Oligonucleotide for detection of SNP TSC0001761
caaaccgaacaaa

SEQ ID NO: 5059 - DNA, 13 bp, Artificial Sequence
  Oligonucleotide for detection of SNP TSC0001762
ttatgagaagtaa

SEQ ID NO: 5060 - DNA, 13 bp, Artificial Sequence
  Oligonucleotide for detection of SNP TSC0001762
ttacttctcataa

SEQ ID NO: 5061 - DNA, 13 bp, Artificial Sequence
  Oligonucleotide for detection of SNP TSC0001762
ttatgaaaagtaa

SEQ ID NO: 5062 - DNA, 13 bp, Artificial Sequence
  Oligonucleotide for detection of SNP TSC0001762
ttacttttcataa

SEQ ID NO: 5063 - DNA, 13 bp, Artificial Sequence
  Oligonucleotide for detection of SNP TSC0001763
ggtttagtggata

SEQ ID NO: 5064 - DNA, 13 bp, Artificial Sequence
  Oligonucleotide for detection of SNP TSC0001763
tatccactaaacc

SEQ ID NO: 5065 - DNA, 13 bp, Artificial Sequence
  Oligonucleotide for detection of SNP TSC0001763
ggtttaatggata

SEQ ID NO: 5066 - DNA, 13 bp, Artificial Sequence
  Oligonucleotide for detection of SNP TSC0001763
tatccattaaacc

SEQ ID NO: 5067 - DNA, 13 bp, Artificial Sequence
  Oligonucleotide for detection of SNP TSC0001764
ttatgaattttty

SEQ ID NO: 5068 - DNA, 13 bp, Artificial Sequence
  Oligonucleotide for detection of SNP TSC0001764
raaaaattcataa

SEQ ID NO: 5069 - DNA, 13 bp, Artificial Sequence
  Oligonucleotide for detection of SNP TSC0001764
ttatgagttttty

SEQ ID NO: 5070 - DNA, 13 bp, Artificial Sequence
  Oligonucleotide for detection of SNP TSC0001764
raaaaactcataa

SEQ ID NO: 5071 - DNA, 13 bp, Artificial Sequence
  Oligonucleotide for detection of SNP TSC0001767
atgaaatgataag

SEQ ID NO: 5072 - DNA, 13 bp, Artificial Sequence
  Oligonucleotide for detection of SNP TSC0001767
cttatcatttcat

SEQ ID NO: 5073 - DNA, 13 bp, Artificial Sequence
  Oligonucleotide for detection of SNP TSC0001767
atgaaacgataag

SEQ ID NO: 5074 - DNA, 13 bp, Artificial Sequence
  Oligonucleotide for detection of SNP TSC0001767
cttatcgtttcat

SEQ ID NO: 5075 - DNA, 13 bp, Artificial Sequence
  Oligonucleotide for detection of SNP TSC0001767
tttattgttttat

SEQ ID NO: 5076 - DNA, 13 bp, Artificial Sequence
  Oligonucleotide for detection of SNP TSC0001767
ataaaacaataaa

SEQ ID NO: 5077 - DNA, 13 bp, Artificial Sequence
  Oligonucleotide for detection of SNP TSC0001767
tttattattttat

SEQ ID NO: 5078 - DNA, 13 bp, Artificial Sequence
  Oligonucleotide for detection of SNP TSC0001767
ataaaataataaa

SEQ ID NO: 5079 - DNA, 13 bp, Artificial Sequence
  Oligonucleotide for detection of SNP TSC0001767
tttatcgttttat

SEQ ID NO: 5080 - DNA, 13 bp, Artificial Sequence
  Oligonucleotide for detection of SNP TSC0001767
ataaaacgataaa

SEQ ID NO: 5081 - DNA, 13 bp, Artificial Sequence
  Oligonucleotide for detection of SNP TSC0001768
gaggataagagtg

SEQ ID NO: 5082 - DNA, 13 bp, Artificial Sequence
  Oligonucleotide for detection of SNP TSC0001768
cactcttatcctc

SEQ ID NO: 5083 - DNA, 13 bp, Artificial Sequence
  Oligonucleotide for detection of SNP TSC0001768
gaggatgagagtg

SEQ ID NO: 5084 - DNA, 13 bp, Artificial Sequence
  Oligonucleotide for detection of SNP TSC0001768
cactctcatcctc

SEQ ID NO: 5085 - DNA, 13 bp, Artificial Sequence
  Oligonucleotide for detection of SNP TSC0001768
gaggacgagagtg

SEQ ID NO: 5086 - DNA, 13 bp, Artificial Sequence
  Oligonucleotide for detection of SNP TSC0001768
cactctcgtcctc

SEQ ID NO: 5087 - DNA, 13 bp, Artificial Sequence
  Oligonucleotide for detection of SNP TSC0001768
tatttttgtttty

SEQ ID NO: 5088 - DNA, 13 bp, Artificial Sequence
  Oligonucleotide for detection of SNP TSC0001768
raaaacaaaaata

SEQ ID NO: 5089 - DNA, 13 bp, Artificial Sequence
  Oligonucleotide for detection of SNP TSC0001768
tattttcgtttty

SEQ ID NO: 5090 - DNA, 13 bp, Artificial Sequence
  Oligonucleotide for detection of SNP TSC0001768
raaaacgaaaata

SEQ ID NO: 5091 - DNA, 13 bp, Artificial Sequence
  Oligonucleotide for detection of SNP TSC0001769
gtttatattttta

SEQ ID NO: 5092 - DNA, 13 bp, Artificial Sequence
  Oligonucleotide for detection of SNP TSC0001769
taaaaatataaac

SEQ ID NO: 5093 - DNA, 13 bp, Artificial Sequence
  Oligonucleotide for detection of SNP TSC0001769
gtttatgttttta

SEQ ID NO: 5094 - DNA, 13 bp, Artificial Sequence
  Oligonucleotide for detection of SNP TSC0001769
taaaaacataaac

SEQ ID NO: 5095 - DNA, 13 bp, Artificial Sequence
  Oligonucleotide for detection of SNP TSC0001769
gtttacgttttta

SEQ ID NO: 5096 - DNA, 13 bp, Artificial Sequence
  Oligonucleotide for detection of SNP TSC0001769
taaaaacgtaaac

SEQ ID NO: 5097 - DNA, 13 bp, Artificial Sequence
  Oligonucleotide for detection of SNP TSC0001769
tagagatgtgggy

SEQ ID NO: 5098 - DNA, 13 bp, Artificial Sequence
  Oligonucleotide for detection of SNP TSC0001769
rcccacatctcta

SEQ ID NO: 5099 - DNA, 13 bp, Artificial Sequence
  Oligonucleotide for detection of SNP TSC0001769
tagagacgtgggy

SEQ ID NO: 5100 - DNA, 13 bp, Artificial Sequence
  Oligonucleotide for detection of SNP TSC0001769
rcccacgtctcta

SEQ ID NO: 5101 - DNA, 13 bp, Artificial Sequence
  Oligonucleotide for detection of SNP TSC0001770
aatttaaagtttt

SEQ ID NO: 5102 - DNA, 13 bp, Artificial Sequence
  Oligonucleotide for detection of SNP TSC0001770
aaaactttaaatt

SEQ ID NO: 5103 - DNA, 13 bp, Artificial Sequence
  Oligonucleotide for detection of SNP TSC0001770
aatttagagtttt

SEQ ID NO: 5104 - DNA, 13 bp, Artificial Sequence
  Oligonucleotide for detection of SNP TSC0001770
aaaactctaaatt

SEQ ID NO: 5105 - DNA, 13 bp, Artificial Sequence
  Oligonucleotide for detection of SNP TSC0001771
atatgtatatata

SEQ ID NO: 5106 - DNA, 13 bp, Artificial Sequence
  Oligonucleotide for detection of SNP TSC0001771
tatatatacatat

SEQ ID NO: 5107 - DNA, 13 bp, Artificial Sequence
  Oligonucleotide for detection of SNP TSC0001771
atatgtgtatata

SEQ ID NO: 5108 - DNA, 13 bp, Artificial Sequence
  Oligonucleotide for detection of SNP TSC0001771
tatatacacatat

SEQ ID NO: 5109 - DNA, 13 bp, Artificial Sequence
  Oligonucleotide for detection of SNP TSC0001771
atacgtatatata

SEQ ID NO: 5110 - DNA, 13 bp, Artificial Sequence
  Oligonucleotide for detection of SNP TSC0001771
tatatatacgtat

SEQ ID NO: 5111 - DNA, 13 bp, Artificial Sequence
  Oligonucleotide for detection of SNP TSC0001771
atacgtgtatata

SEQ ID NO: 5112 - DNA, 13 bp, Artificial Sequence
  Oligonucleotide for detection of SNP TSC0001771
tatatacacgtat

SEQ ID NO: 5113 - DNA, 13 bp, Artificial Sequence
  Oligonucleotide for detection of SNP TSC0001771
atatgcgtatata

SEQ ID NO: 5114 - DNA, 13 bp, Artificial Sequence
  Oligonucleotide for detection of SNP TSC0001771
tatatacgcatat

SEQ ID NO: 5115 - DNA, 13 bp, Artificial Sequence
  Oligonucleotide for detection of SNP TSC0001771
atacgcgtatata

SEQ ID NO: 5116 - DNA, 13 bp, Artificial Sequence
  Oligonucleotide for detection of SNP TSC0001771
tatatacgcgtat

SEQ ID NO: 5117 - DNA, 13 bp, Artificial Sequence
  Oligonucleotide for detection of SNP TSC0001771
tgtgtgtgtgtgt

SEQ ID NO: 5118 - DNA, 13 bp, Artificial Sequence
  Oligonucleotide for detection of SNP TSC0001771
acacacacacaca

SEQ ID NO: 5119 - DNA, 13 bp, Artificial Sequence
  Oligonucleotide for detection of SNP TSC0001771
tgtgtgtgcgtgt

SEQ ID NO: 5120 - DNA, 13 bp, Artificial Sequence
  Oligonucleotide for detection of SNP TSC0001771
acacgcacacaca

SEQ ID NO: 5121 - DNA, 13 bp, Artificial Sequence
  Oligonucleotide for detection of SNP TSC0001771
tgtgtgcgtgtgt

SEQ ID NO: 5122 - DNA, 13 bp, Artificial Sequence
  Oligonucleotide for detection of SNP TSC0001771
acacacgcacaca

SEQ ID NO: 5123 - DNA, 13 bp, Artificial Sequence
  Oligonucleotide for detection of SNP TSC0001771
tgtgtgcgcgtgt

SEQ ID NO: 5124 - DNA, 13 bp, Artificial Sequence
  Oligonucleotide for detection of SNP TSC0001771
acacgcgcacaca

SEQ ID NO: 5125 - DNA, 13 bp, Artificial Sequence
  Oligonucleotide for detection of SNP TSC0001772
tgtatgaatgtay

SEQ ID NO: 5126 - DNA, 13 bp, Artificial Sequence
  Oligonucleotide for detection of SNP TSC0001772
rtacattcataca

SEQ ID NO: 5127 - DNA, 13 bp, Artificial Sequence
  Oligonucleotide for detection of SNP TSC0001772
tgtatgtatgtay

SEQ ID NO: 5128 - DNA, 13 bp, Artificial Sequence
  Oligonucleotide for detection of SNP TSC0001772
rtacatacataca

SEQ ID NO: 5129 - DNA, 13 bp, Artificial Sequence
  Oligonucleotide for detection of SNP TSC0001772
gtgtatttatgta

SEQ ID NO: 5130 - DNA, 13 bp, Artificial Sequence
  Oligonucleotide for detection of SNP TSC0001772
tacataaatacac

SEQ ID NO: 5131 - DNA, 13 bp, Artificial Sequence
  Oligonucleotide for detection of SNP TSC0001772
gtgtatgtatgta

SEQ ID NO: 5132 - DNA, 13 bp, Artificial Sequence
  Oligonucleotide for detection of SNP TSC0001772
tacatacatacac

SEQ ID NO: 5133 - DNA, 13 bp, Artificial Sequence
  Oligonucleotide for detection of SNP TSC0001773
ttatagatatttt

SEQ ID NO: 5134 - DNA, 13 bp, Artificial Sequence
  Oligonucleotide for detection of SNP TSC0001773
aaaatatctataa

SEQ ID NO: 5135 - DNA, 13 bp, Artificial Sequence
  Oligonucleotide for detection of SNP TSC0001773
ttatagttatttt

SEQ ID NO: 5136 - DNA, 13 bp, Artificial Sequence
  Oligonucleotide for detection of SNP TSC0001773
aaaataactataa

SEQ ID NO: 5137 - DNA, 13 bp, Artificial Sequence
  Oligonucleotide for detection of SNP TSC0001773
aggatgtttgtaa

SEQ ID NO: 5138 - DNA, 13 bp, Artificial Sequence
  Oligonucleotide for detection of SNP TSC0001773
ttacaaacatcct

SEQ ID NO: 5139 - DNA, 13 bp, Artificial Sequence
  Oligonucleotide for detection of SNP TSC0001773
aggatggttgtaa

SEQ ID NO: 5140 - DNA, 13 bp, Artificial Sequence
  Oligonucleotide for detection of SNP TSC0001773
ttacaaccatcct

SEQ ID NO: 5141 - DNA, 13 bp, Artificial Sequence
  Oligonucleotide for detection of SNP TSC0001774
aatgtggaattaa

SEQ ID NO: 5142 - DNA, 13 bp, Artificial Sequence
  Oligonucleotide for detection of SNP TSC0001774
ttaattccacatt

SEQ ID NO: 5143 - DNA, 13 bp, Artificial Sequence
  Oligonucleotide for detection of SNP TSC0001774
aatgtgaaattaa

SEQ ID NO: 5144 - DNA, 13 bp, Artificial Sequence
  Oligonucleotide for detection of SNP TSC0001774
ttaatttcacatt

SEQ ID NO: 5145 - DNA, 13 bp, Artificial Sequence
  Oligonucleotide for detection of SNP TSC0001775
aatatggggagga

SEQ ID NO: 5146 - DNA, 13 bp, Artificial Sequence
  Oligonucleotide for detection of SNP TSC0001775
tcctccccatatt

SEQ ID NO: 5147 - DNA, 13 bp, Artificial Sequence
  Oligonucleotide for detection of SNP TSC0001775
aatatgaggagga

SEQ ID NO: 5148 - DNA, 13 bp, Artificial Sequence
  Oligonucleotide for detection of SNP TSC0001775
tcctcctcatatt

SEQ ID NO: 5149 - DNA, 13 bp, Artificial Sequence
  Oligonucleotide for detection of SNP TSC0001776
ataaaatgaagaa

SEQ ID NO: 5150 - DNA, 13 bp, Artificial Sequence
  Oligonucleotide for detection of SNP TSC0001776
ttcttcattttat

SEQ ID NO: 5151 - DNA, 13 bp, Artificial Sequence
  Oligonucleotide for detection of SNP TSC0001776
ataaaacgaagaa

SEQ ID NO: 5152 - DNA, 13 bp, Artificial Sequence
  Oligonucleotide for detection of SNP TSC0001776
ttcttcgttttat

SEQ ID NO: 5153 - DNA, 13 bp, Artificial Sequence
  Oligonucleotide for detection of SNP TSC0001776
tttttcgttttat

SEQ ID NO: 5154 - DNA, 13 bp, Artificial Sequence
  Oligonucleotide for detection of SNP TSC0001776
ataaaacgaaaaa

SEQ ID NO: 5155 - DNA, 13 bp, Artificial Sequence
  Oligonucleotide for detection of SNP TSC0001777
ataatagtattag

SEQ ID NO: 5156 - DNA, 13 bp, Artificial Sequence
  Oligonucleotide for detection of SNP TSC0001777
ctaatactattat

SEQ ID NO: 5157 - DNA, 13 bp, Artificial Sequence
  Oligonucleotide for detection of SNP TSC0001777
ataataatattag

SEQ ID NO: 5158 - DNA, 13 bp, Artificial Sequence
  Oligonucleotide for detection of SNP TSC0001777
ctaatattattat

SEQ ID NO: 5159 - DNA, 13 bp, Artificial Sequence
  Oligonucleotide for detection of SNP TSC0001778
tttgatattttta

SEQ ID NO: 5160 - DNA, 13 bp, Artificial Sequence
  Oligonucleotide for detection of SNP TSC0001778
taaaaatatcaaa

SEQ ID NO: 5161 - DNA, 13 bp, Artificial Sequence
  Oligonucleotide for detection of SNP TSC0001778
tttgatgttttta

SEQ ID NO: 5162 - DNA, 13 bp, Artificial Sequence
  Oligonucleotide for detection of SNP TSC0001778
taaaaacatcaaa

SEQ ID NO: 5163 - DNA, 13 bp, Artificial Sequence
  Oligonucleotide for detection of SNP TSC0001778
tttgacgttttta

SEQ ID NO: 5164 - DNA, 13 bp, Artificial Sequence
  Oligonucleotide for detection of SNP TSC0001778
taaaaacgtcaaa

SEQ ID NO: 5165 - DNA, 13 bp, Artificial Sequence
  Oligonucleotide for detection of SNP TSC0001778
tgagagtgttaga

SEQ ID NO: 5166 - DNA, 13 bp, Artificial Sequence
  Oligonucleotide for detection of SNP TSC0001778
tctaacactctca

SEQ ID NO: 5167 - DNA, 13 bp, Artificial Sequence
  Oligonucleotide for detection of SNP TSC0001778
tgagagcgttaga

SEQ ID NO: 5168 - DNA, 13 bp, Artificial Sequence
  Oligonucleotide for detection of SNP TSC0001778
tctaacgctctca

SEQ ID NO: 5169 - DNA, 13 bp, Artificial Sequence
  Oligonucleotide for detection of SNP TSC0001779
gatttatgtaggy

SEQ ID NO: 5170 - DNA, 13 bp, Artificial Sequence
  Oligonucleotide for detection of SNP TSC0001779
rcctacataaatc

SEQ ID NO: 5171 - DNA, 13 bp, Artificial Sequence
  Oligonucleotide for detection of SNP TSC0001779
gatttacgtaggy

SEQ ID NO: 5172 - DNA, 13 bp, Artificial Sequence
  Oligonucleotide for detection of SNP TSC0001779
rcctacgtaaatc

SEQ ID NO: 5173 - DNA, 13 bp, Artificial Sequence
  Oligonucleotide for detection of SNP TSC0001779
gtttgtgtggaty

SEQ ID NO: 5174 - DNA, 13 bp, Artificial Sequence
  Oligonucleotide for detection of SNP TSC0001779
ratccacacaaac

SEQ ID NO: 5175 - DNA, 13 bp, Artificial Sequence
  Oligonucleotide for detection of SNP TSC0001779
gtttgtatggaty

SEQ ID NO: 5176 - DNA, 13 bp, Artificial Sequence
  Oligonucleotide for detection of SNP TSC0001779
ratccatacaaac

SEQ ID NO: 5177 - DNA, 13 bp, Artificial Sequence
  Oligonucleotide for detection of SNP TSC0001779
gtttgcgtggaty

SEQ ID NO: 5178 - DNA, 13 bp, Artificial Sequence
  Oligonucleotide for detection of SNP TSC0001779
ratccacgcaaac

SEQ ID NO: 5179 - DNA, 13 bp, Artificial Sequence
  Oligonucleotide for detection of SNP TSC0001780
gagttaaaattaa

SEQ ID NO: 5180 - DNA, 13 bp, Artificial Sequence
  Oligonucleotide for detection of SNP TSC0001780
ttaattttaactc

SEQ ID NO: 5181 - DNA, 13 bp, Artificial Sequence
  Oligonucleotide for detection of SNP TSC0001780
gagttagaattaa

SEQ ID NO: 5182 - DNA, 13 bp, Artificial Sequence
  Oligonucleotide for detection of SNP TSC0001780
ttaattctaactc

SEQ ID NO: 5183 - DNA, 13 bp, Artificial Sequence
  Oligonucleotide for detection of SNP TSC0001781
aatttagtttagg

SEQ ID NO: 5184 - DNA, 13 bp, Artificial Sequence
  Oligonucleotide for detection of SNP TSC0001781
cctaaactaaatt

SEQ ID NO: 5185 - DNA, 13 bp, Artificial Sequence
  Oligonucleotide for detection of SNP TSC0001781
aatttaatttagg

SEQ ID NO: 5186 - DNA, 13 bp, Artificial Sequence
  Oligonucleotide for detection of SNP TSC0001781
cctaaattaaatt

SEQ ID NO: 5187 - DNA, 13 bp, Artificial Sequence
  Oligonucleotide for detection of SNP TSC0001782
tttatatggagaa

SEQ ID NO: 5188 - DNA, 13 bp, Artificial Sequence
  Oligonucleotide for detection of SNP TSC0001782
ttctccatataaa

SEQ ID NO: 5189 - DNA, 13 bp, Artificial Sequence
  Oligonucleotide for detection of SNP TSC0001782
tttatacggagaa

SEQ ID NO: 5190 - DNA, 13 bp, Artificial Sequence
  Oligonucleotide for detection of SNP TSC0001782
ttctccgtataaa

SEQ ID NO: 5191 - DNA, 13 bp, Artificial Sequence
  Oligonucleotide for detection of SNP TSC0001782
ttttttgtataag

SEQ ID NO: 5192 - DNA, 13 bp, Artificial Sequence
  Oligonucleotide for detection of SNP TSC0001782
cttatacaaaaaa

SEQ ID NO: 5193 - DNA, 13 bp, Artificial Sequence
  Oligonucleotide for detection of SNP TSC0001782
ttttttatataag

SEQ ID NO: 5194 - DNA, 13 bp, Artificial Sequence
  Oligonucleotide for detection of SNP TSC0001782
cttatataaaaaa

SEQ ID NO: 5195 - DNA, 13 bp, Artificial Sequence
  Oligonucleotide for detection of SNP TSC0001782
tttttcgtataag

SEQ ID NO: 5196 - DNA, 13 bp, Artificial Sequence
  Oligonucleotide for detection of SNP TSC0001782
cttatacgaaaaa

SEQ ID NO: 5197 - DNA, 13 bp, Artificial Sequence
  Oligonucleotide for detection of SNP TSC0001783
taaatgatagttt

SEQ ID NO: 5198 - DNA, 13 bp, Artificial Sequence
  Oligonucleotide for detection of SNP TSC0001783
aaactatcattta

SEQ ID NO: 5199 - DNA, 13 bp, Artificial Sequence
  Oligonucleotide for detection of SNP TSC0001783
taaatgttagttt

SEQ ID NO: 5200 - DNA, 13 bp, Artificial Sequence
  Oligonucleotide for detection of SNP TSC0001783
aaactaacattta

SEQ ID NO: 5201 - DNA, 13 bp, Artificial Sequence
  Oligonucleotide for detection of SNP TSC0001783
aaattattattta

SEQ ID NO: 5202 - DNA, 13 bp, Artificial Sequence
  Oligonucleotide for detection of SNP TSC0001783
taaataataattt

SEQ ID NO: 5203 - DNA, 13 bp, Artificial Sequence
  Oligonucleotide for detection of SNP TSC0001783
aaattaatattta

SEQ ID NO: 5204 - DNA, 13 bp, Artificial Sequence
  Oligonucleotide for detection of SNP TSC0001783
taaatattaattt

SEQ ID NO: 5205 - DNA, 13 bp, Artificial Sequence
  Oligonucleotide for detection of SNP TSC0001784
gttttagttttty

SEQ ID NO: 5206 - DNA, 13 bp, Artificial Sequence
  Oligonucleotide for detection of SNP TSC0001784
raaaaactaaaac

SEQ ID NO: 5207 - DNA, 13 bp, Artificial Sequence
  Oligonucleotide for detection of SNP TSC0001784
gttttaattttty

SEQ ID NO: 5208 - DNA, 13 bp, Artificial Sequence
  Oligonucleotide for detection of SNP TSC0001784
raaaaattaaaac

SEQ ID NO: 5209 - DNA, 13 bp, Artificial Sequence
  Oligonucleotide for detection of SNP TSC0001785
tgtatttgtttty

SEQ ID NO: 5210 - DNA, 13 bp, Artificial Sequence
  Oligonucleotide for detection of SNP TSC0001785
raaaacaaataca

SEQ ID NO: 5211 - DNA, 13 bp, Artificial Sequence
  Oligonucleotide for detection of SNP TSC0001785
tgtattcgtttty

SEQ ID NO: 5212 - DNA, 13 bp, Artificial Sequence
  Oligonucleotide for detection of SNP TSC0001785
raaaacgaataca

SEQ ID NO: 5213 - DNA, 13 bp, Artificial Sequence
  Oligonucleotide for detection of SNP TSC0001785
gaggatggatgta

SEQ ID NO: 5214 - DNA, 13 bp, Artificial Sequence
  Oligonucleotide for detection of SNP TSC0001785
tacatccatcctc

SEQ ID NO: 5215 - DNA, 13 bp, Artificial Sequence
  Oligonucleotide for detection of SNP TSC0001785
gaggatagatgta

SEQ ID NO: 5216 - DNA, 13 bp, Artificial Sequence
  Oligonucleotide for detection of SNP TSC0001785
tacatctatcctc

SEQ ID NO: 5217 - DNA, 13 bp, Artificial Sequence
  Oligonucleotide for detection of SNP TSC0001785
gaggacggatgta

SEQ ID NO: 5218 - DNA, 13 bp, Artificial Sequence
  Oligonucleotide for detection of SNP TSC0001785
tacatccgtcctc

SEQ ID NO: 5219 - DNA, 13 bp, Artificial Sequence
  Oligonucleotide for detection of SNP TSC0001786
aagtgatatgatt

SEQ ID NO: 5220 - DNA, 13 bp, Artificial Sequence
  Oligonucleotide for detection of SNP TSC0001786
aatcatatcactt

SEQ ID NO: 5221 - DNA, 13 bp, Artificial Sequence
  Oligonucleotide for detection of SNP TSC0001786
aagtgagatgatt

SEQ ID NO: 5222 - DNA, 13 bp, Artificial Sequence
  Oligonucleotide for detection of SNP TSC0001786
aatcatctcactt

SEQ ID NO: 5223 - DNA, 13 bp, Artificial Sequence
  Oligonucleotide for detection of SNP TSC0001786
agttatgttattt

SEQ ID NO: 5224 - DNA, 13 bp, Artificial Sequence
  Oligonucleotide for detection of SNP TSC0001786
aaataacataact

SEQ ID NO: 5225 - DNA, 13 bp, Artificial Sequence
  Oligonucleotide for detection of SNP TSC0001786
agttattttattt

SEQ ID NO: 5226 - DNA, 13 bp, Artificial Sequence
  Oligonucleotide for detection of SNP TSC0001786
aaataaaataact

SEQ ID NO: 5227 - DNA, 13 bp, Artificial Sequence
  Oligonucleotide for detection of SNP TSC0001787
atataagaattty

SEQ ID NO: 5228 - DNA, 13 bp, Artificial Sequence
  Oligonucleotide for detection of SNP TSC0001787
raaattcttatat

SEQ ID NO: 5229 - DNA, 13 bp, Artificial Sequence
  Oligonucleotide for detection of SNP TSC0001787
atataataattty

SEQ ID NO: 5230 - DNA, 13 bp, Artificial Sequence
  Oligonucleotide for detection of SNP TSC0001787
raaattattatat

SEQ ID NO: 5231 - DNA, 13 bp, Artificial Sequence
  Oligonucleotide for detection of SNP TSC0001787
ggagtttttgtgt

SEQ ID NO: 5232 - DNA, 13 bp, Artificial Sequence
  Oligonucleotide for detection of SNP TSC0001787
acacaaaaactcc

SEQ ID NO: 5233 - DNA, 13 bp, Artificial Sequence
  Oligonucleotide for detection of SNP TSC0001787
ggagttattgtgt

SEQ ID NO: 5234 - DNA, 13 bp, Artificial Sequence
  Oligonucleotide for detection of SNP TSC0001787
acacaataactcc

SEQ ID NO: 5235 - DNA, 13 bp, Artificial Sequence
  Oligonucleotide for detection of SNP TSC0001788
tgtaaggaggatg

SEQ ID NO: 5236 - DNA, 13 bp, Artificial Sequence
  Oligonucleotide for detection of SNP TSC0001788
catcctccttaca

SEQ ID NO: 5237 - DNA, 13 bp, Artificial Sequence
  Oligonucleotide for detection of SNP TSC0001788
tgtaagaaggatg

SEQ ID NO: 5238 - DNA, 13 bp, Artificial Sequence
  Oligonucleotide for detection of SNP TSC0001788
catccttcttaca

SEQ ID NO: 5239 - DNA, 13 bp, Artificial Sequence
  Oligonucleotide for detection of SNP TSC0001788
tgtaaggaggacg

SEQ ID NO: 5240 - DNA, 13 bp, Artificial Sequence
  Oligonucleotide for detection of SNP TSC0001788
cgtcctccttaca

SEQ ID NO: 5241 - DNA, 13 bp, Artificial Sequence
  Oligonucleotide for detection of SNP TSC0001788
tgtaagaaggacg

SEQ ID NO: 5242 - DNA, 13 bp, Artificial Sequence
  Oligonucleotide for detection of SNP TSC0001788
cgtccttcttaca

SEQ ID NO: 5243 - DNA, 13 bp, Artificial Sequence
  Oligonucleotide for detection of SNP TSC0001789
ttatgtttttata

SEQ ID NO: 5244 - DNA, 13 bp, Artificial Sequence
  Oligonucleotide for detection of SNP TSC0001789
tataaaaacataa

SEQ ID NO: 5245 - DNA, 13 bp, Artificial Sequence
  Oligonucleotide for detection of SNP TSC0001789
ttatgtgtttata

SEQ ID NO: 5246 - DNA, 13 bp, Artificial Sequence
  Oligonucleotide for detection of SNP TSC0001789
tataaacacataa

SEQ ID NO: 5247 - DNA, 13 bp, Artificial Sequence
  Oligonucleotide for detection of SNP TSC0001789
tgtgaggatatag

SEQ ID NO: 5248 - DNA, 13 bp, Artificial Sequence
  Oligonucleotide for detection of SNP TSC0001789
ctatatcctcaca

SEQ ID NO: 5249 - DNA, 13 bp, Artificial Sequence
  Oligonucleotide for detection of SNP TSC0001789
tgtgagtatatag

SEQ ID NO: 5250 - DNA, 13 bp, Artificial Sequence
  Oligonucleotide for detection of SNP TSC0001789
ctatatactcaca

SEQ ID NO: 5251 - DNA, 13 bp, Artificial Sequence
  Oligonucleotide for detection of SNP TSC0001790
gttataatggtgt

SEQ ID NO: 5252 - DNA, 13 bp, Artificial Sequence
  Oligonucleotide for detection of SNP TSC0001790
acaccattataac

SEQ ID NO: 5253 - DNA, 13 bp, Artificial Sequence
  Oligonucleotide for detection of SNP TSC0001790
gttatagtggtgt

SEQ ID NO: 5254 - DNA, 13 bp, Artificial Sequence
  Oligonucleotide for detection of SNP TSC0001790
acaccactataac

SEQ ID NO: 5255 - DNA, 13 bp, Artificial Sequence
  Oligonucleotide for detection of SNP TSC0001791
ttaaaggtaaagt

SEQ ID NO: 5256 - DNA, 13 bp, Artificial Sequence
  Oligonucleotide for detection of SNP TSC0001791
actttacctttaa

SEQ ID NO: 5257 - DNA, 13 bp, Artificial Sequence
  Oligonucleotide for detection of SNP TSC0001791
ttaaagataaagt

SEQ ID NO: 5258 - DNA, 13 bp, Artificial Sequence
  Oligonucleotide for detection of SNP TSC0001791
actttatctttaa

SEQ ID NO: 5259 - DNA, 13 bp, Artificial Sequence
  Oligonucleotide for detection of SNP TSC0001792
ggtgaggtttaag

SEQ ID NO: 5260 - DNA, 13 bp, Artificial Sequence
  Oligonucleotide for detection of SNP TSC0001792
cttaaacctcacc

SEQ ID NO: 5261 - DNA, 13 bp, Artificial Sequence
  Oligonucleotide for detection of SNP TSC0001792
ggtgagatttaag

SEQ ID NO: 5262 - DNA, 13 bp, Artificial Sequence
  Oligonucleotide for detection of SNP TSC0001792
cttaaatctcacc

SEQ ID NO: 5263 - DNA, 13 bp, Artificial Sequence
  Oligonucleotide for detection of SNP TSC0001793
ttggttaaggttg

SEQ ID NO: 5264 - DNA, 13 bp, Artificial Sequence
  Oligonucleotide for detection of SNP TSC0001793
caaccttaaccaa

SEQ ID NO: 5265 - DNA, 13 bp, Artificial Sequence
  Oligonucleotide for detection of SNP TSC0001793
ttggttgaggttg

SEQ ID NO: 5266 - DNA, 13 bp, Artificial Sequence
  Oligonucleotide for detection of SNP TSC0001793
caacctcaaccaa

SEQ ID NO: 5267 - DNA, 13 bp, Artificial Sequence
  Oligonucleotide for detection of SNP TSC0001794
taattaaaaattt

SEQ ID NO: 5268 - DNA, 13 bp, Artificial Sequence
  Oligonucleotide for detection of SNP TSC0001794
aaatttttaatta

SEQ ID NO: 5269 - DNA, 13 bp, Artificial Sequence
  Oligonucleotide for detection of SNP TSC0001794
taattagaaattt

SEQ ID NO: 5270 - DNA, 13 bp, Artificial Sequence
  Oligonucleotide for detection of SNP TSC0001794
aaatttctaatta

SEQ ID NO: 5271 - DNA, 13 bp, Artificial Sequence
  Oligonucleotide for detection of SNP TSC0001797
ggttgtaggggta

SEQ ID NO: 5272 - DNA, 13 bp, Artificial Sequence
  Oligonucleotide for detection of SNP TSC0001797
tacccctacaacc

SEQ ID NO: 5273 - DNA, 13 bp, Artificial Sequence
  Oligonucleotide for detection of SNP TSC0001797
ggttgtgggggta

SEQ ID NO: 5274 - DNA, 13 bp, Artificial Sequence
  Oligonucleotide for detection of SNP TSC0001797
tacccccacaacc

SEQ ID NO: 5275 - DNA, 13 bp, Artificial Sequence
  Oligonucleotide for detection of SNP TSC0001799
ttatgtgtggttt

SEQ ID NO: 5276 - DNA, 13 bp, Artificial Sequence
  Oligonucleotide for detection of SNP TSC0001799
aaaccacacataa

SEQ ID NO: 5277 - DNA, 13 bp, Artificial Sequence
  Oligonucleotide for detection of SNP TSC0001799
ttatgtatggttt

SEQ ID NO: 5278 - DNA, 13 bp, Artificial Sequence
  Oligonucleotide for detection of SNP TSC0001799
aaaccatacataa

SEQ ID NO: 5279 - DNA, 13 bp, Artificial Sequence
  Oligonucleotide for detection of SNP TSC0001802
taggttaatatgy

SEQ ID NO: 5280 - DNA, 13 bp, Artificial Sequence
  Oligonucleotide for detection of SNP TSC0001802
rcatattaaccta

SEQ ID NO: 5281 - DNA, 13 bp, Artificial Sequence
  Oligonucleotide for detection of SNP TSC0001802
taggttgatatgy

SEQ ID NO: 5282 - DNA, 13 bp, Artificial Sequence
  Oligonucleotide for detection of SNP TSC0001802
rcatatcaaccta

SEQ ID NO: 5283 - DNA, 13 bp, Artificial Sequence
  Oligonucleotide for detection of SNP TSC0001802
taggttaatacgy

SEQ ID NO: 5284 - DNA, 13 bp, Artificial Sequence
  Oligonucleotide for detection of SNP TSC0001802
rcgtattaaccta

SEQ ID NO: 5285 - DNA, 13 bp, Artificial Sequence
  Oligonucleotide for detection of SNP TSC0001802
taggtcgatatgy

SEQ ID NO: 5286 - DNA, 13 bp, Artificial Sequence
  Oligonucleotide for detection of SNP TSC0001802
rcatatcgaccta

SEQ ID NO: 5287 - DNA, 13 bp, Artificial Sequence
  Oligonucleotide for detection of SNP TSC0001802
taggttgatacgy

SEQ ID NO: 5288 - DNA, 13 bp, Artificial Sequence
  Oligonucleotide for detection of SNP TSC0001802
rcgtatcaaccta

SEQ ID NO: 5289 - DNA, 13 bp, Artificial Sequence
  Oligonucleotide for detection of SNP TSC0001802
taggtcgatacgy

SEQ ID NO: 5290 - DNA, 13 bp, Artificial Sequence
  Oligonucleotide for detection of SNP TSC0001802
rcgtatcgaccta

SEQ ID NO: 5291 - DNA, 13 bp, Artificial Sequence
  Oligonucleotide for detection of SNP TSC0001802
gtgtattggtttg

SEQ ID NO: 5292 - DNA, 13 bp, Artificial Sequence
  Oligonucleotide for detection of SNP TSC0001802
caaaccaatacac

SEQ ID NO: 5293 - DNA, 13 bp, Artificial Sequence
  Oligonucleotide for detection of SNP TSC0001802
gcgtattggtttg

SEQ ID NO: 5294 - DNA, 13 bp, Artificial Sequence
  Oligonucleotide for detection of SNP TSC0001802
caaaccaatacgc

SEQ ID NO: 5295 - DNA, 13 bp, Artificial Sequence
  Oligonucleotide for detection of SNP TSC0001802
gtgtatcggtttg

SEQ ID NO: 5296 - DNA, 13 bp, Artificial Sequence
  Oligonucleotide for detection of SNP TSC0001802
caaaccgatacac

SEQ ID NO: 5297 - DNA, 13 bp, Artificial Sequence
  Oligonucleotide for detection of SNP TSC0001802
gcgtatcggtttg

SEQ ID NO: 5298 - DNA, 13 bp, Artificial Sequence
  Oligonucleotide for detection of SNP TSC0001802
caaaccgatacgc

SEQ ID NO: 5299 - DNA, 13 bp, Artificial Sequence
  Oligonucleotide for detection of SNP TSC0001803
gaaggttggggag

SEQ ID NO: 5300 - DNA, 13 bp, Artificial Sequence
  Oligonucleotide for detection of SNP TSC0001803
ctccccaaccttc

SEQ ID NO: 5301 - DNA, 13 bp, Artificial Sequence
  Oligonucleotide for detection of SNP TSC0001803
gaaggtgggggag

SEQ ID NO: 5302 - DNA, 13 bp, Artificial Sequence
  Oligonucleotide for detection of SNP TSC0001803
ctcccccaccttc

SEQ ID NO: 5303 - DNA, 13 bp, Artificial Sequence
  Oligonucleotide for detection of SNP TSC0001803
ttttttaatttty

SEQ ID NO: 5304 - DNA, 13 bp, Artificial Sequence
  Oligonucleotide for detection of SNP TSC0001803
raaaattaaaaaa

SEQ ID NO: 5305 - DNA, 13 bp, Artificial Sequence
  Oligonucleotide for detection of SNP TSC0001803
tttttttatttty

SEQ ID NO: 5306 - DNA, 13 bp, Artificial Sequence
  Oligonucleotide for detection of SNP TSC0001803
raaaataaaaaaa

SEQ ID NO: 5307 - DNA, 13 bp, Artificial Sequence
  Oligonucleotide for detection of SNP TSC0001804
aattttattttta

SEQ ID NO: 5308 - DNA, 13 bp, Artificial Sequence
  Oligonucleotide for detection of SNP TSC0001804
taaaaataaaatt

SEQ ID NO: 5309 - DNA, 13 bp, Artificial Sequence
  Oligonucleotide for detection of SNP TSC0001804
aattttgttttta

SEQ ID NO: 5310 - DNA, 13 bp, Artificial Sequence
  Oligonucleotide for detection of SNP TSC0001804
taaaaacaaaatt

SEQ ID NO: 5311 - DNA, 13 bp, Artificial Sequence
  Oligonucleotide for detection of SNP TSC0001804
aatttcgttttta

SEQ ID NO: 5312 - DNA, 13 bp, Artificial Sequence
  Oligonucleotide for detection of SNP TSC0001804
taaaaacgaaatt

SEQ ID NO: 5313 - DNA, 13 bp, Artificial Sequence
  Oligonucleotide for detection of SNP TSC0001804
tggaaatggagtt

SEQ ID NO: 5314 - DNA, 13 bp, Artificial Sequence
  Oligonucleotide for detection of SNP TSC0001804
aactccatttcca

SEQ ID NO: 5315 - DNA, 13 bp, Artificial Sequence
  Oligonucleotide for detection of SNP TSC0001804
tggaaacggagtt

SEQ ID NO: 5316 - DNA, 13 bp, Artificial Sequence
  Oligonucleotide for detection of SNP TSC0001804
aactccgtttcca

SEQ ID NO: 5317 - DNA, 13 bp, Artificial Sequence
  Oligonucleotide for detection of SNP TSC0001805
tttagttgtaaay

SEQ ID NO: 5318 - DNA, 13 bp, Artificial Sequence
  Oligonucleotide for detection of SNP TSC0001805
rtttacaactaaa

SEQ ID NO: 5319 - DNA, 13 bp, Artificial Sequence
  Oligonucleotide for detection of SNP TSC0001805
tttagtcgtaaay

SEQ ID NO: 5320 - DNA, 13 bp, Artificial Sequence
  Oligonucleotide for detection of SNP TSC0001805
rtttacgactaaa

SEQ ID NO: 5321 - DNA, 13 bp, Artificial Sequence
  Oligonucleotide for detection of SNP TSC0001805
gtttatgattaag

SEQ ID NO: 5322 - DNA, 13 bp, Artificial Sequence
  Oligonucleotide for detection of SNP TSC0001805
cttaatcataaac

SEQ ID NO: 5323 - DNA, 13 bp, Artificial Sequence
  Oligonucleotide for detection of SNP TSC0001805
gtttataattaag

SEQ ID NO: 5324 - DNA, 13 bp, Artificial Sequence
  Oligonucleotide for detection of SNP TSC0001805
cttaattataaac

SEQ ID NO: 5325 - DNA, 13 bp, Artificial Sequence
  Oligonucleotide for detection of SNP TSC0001805
gtttacgattaag

SEQ ID NO: 5326 - DNA, 13 bp, Artificial Sequence
  Oligonucleotide for detection of SNP TSC0001805
cttaatcgtaaac

SEQ ID NO: 5327 - DNA, 13 bp, Artificial Sequence
  Oligonucleotide for detection of SNP TSC0001806
gagatggtaaagy

SEQ ID NO: 5328 - DNA, 13 bp, Artificial Sequence
  Oligonucleotide for detection of SNP TSC0001806
rctttaccatctc

SEQ ID NO: 5329 - DNA, 13 bp, Artificial Sequence
  Oligonucleotide for detection of SNP TSC0001806
gagatgataaagy

SEQ ID NO: 5330 - DNA, 13 bp, Artificial Sequence
  Oligonucleotide for detection of SNP TSC0001806
rctttatcatctc

SEQ ID NO: 5331 - DNA, 13 bp, Artificial Sequence
  Oligonucleotide for detection of SNP TSC0001807
taaaaatggaaay

SEQ ID NO: 5332 - DNA, 13 bp, Artificial Sequence
  Oligonucleotide for detection of SNP TSC0001807
rtttccattttta

SEQ ID NO: 5333 - DNA, 13 bp, Artificial Sequence
  Oligonucleotide for detection of SNP TSC0001807
taaaaacggaaay

SEQ ID NO: 5334 - DNA, 13 bp, Artificial Sequence
  Oligonucleotide for detection of SNP TSC0001807
rtttccgttttta

SEQ ID NO: 5335 - DNA, 13 bp, Artificial Sequence
  Oligonucleotide for detection of SNP TSC0001807
gtttttgtttttg

SEQ ID NO: 5336 - DNA, 13 bp, Artificial Sequence
  Oligonucleotide for detection of SNP TSC0001807
caaaaacaaaaac

SEQ ID NO: 5337 - DNA, 13 bp, Artificial Sequence
  Oligonucleotide for detection of SNP TSC0001807
gtttttatttttg

SEQ ID NO: 5338 - DNA, 13 bp, Artificial Sequence
  Oligonucleotide for detection of SNP TSC0001807
caaaaataaaaac

SEQ ID NO: 5339 - DNA, 13 bp, Artificial Sequence
  Oligonucleotide for detection of SNP TSC0001807
gttttcgtttttg

SEQ ID NO: 5340 - DNA, 13 bp, Artificial Sequence
  Oligonucleotide for detection of SNP TSC0001807
caaaaacgaaaac

SEQ ID NO: 5341 - DNA, 13 bp, Artificial Sequence
  Oligonucleotide for detection of SNP TSC0001808
gttagtagggaay

SEQ ID NO: 5342 - DNA, 13 bp, Artificial Sequence
  Oligonucleotide for detection of SNP TSC0001808
rttccctactaac

SEQ ID NO: 5343 - DNA, 13 bp, Artificial Sequence
  Oligonucleotide for detection of SNP TSC0001808
gttagtggggaay

SEQ ID NO: 5344 - DNA, 13 bp, Artificial Sequence
  Oligonucleotide for detection of SNP TSC0001808
rttccccactaac

SEQ ID NO: 5345 - DNA, 13 bp, Artificial Sequence
  Oligonucleotide for detection of SNP TSC0001808
gttagcggggaay

SEQ ID NO: 5346 - DNA, 13 bp, Artificial Sequence
  Oligonucleotide for detection of SNP TSC0001808
rttccccgctaac

SEQ ID NO: 5347 - DNA, 13 bp, Artificial Sequence
  Oligonucleotide for detection of SNP TSC0001808
gttttttgttggy

SEQ ID NO: 5348 - DNA, 13 bp, Artificial Sequence
  Oligonucleotide for detection of SNP TSC0001808
rccaacaaaaaac

SEQ ID NO: 5349 - DNA, 13 bp, Artificial Sequence
  Oligonucleotide for detection of SNP TSC0001808
gtttttcgttggy

SEQ ID NO: 5350 - DNA, 13 bp, Artificial Sequence
  Oligonucleotide for detection of SNP TSC0001808
rccaacgaaaaac

SEQ ID NO: 5351 - DNA, 13 bp, Artificial Sequence
  Oligonucleotide for detection of SNP TSC0001810
aaaagtatataty

SEQ ID NO: 5352 - DNA, 13 bp, Artificial Sequence
  Oligonucleotide for detection of SNP TSC0001810
ratatatactttt

SEQ ID NO: 5353 - DNA, 13 bp, Artificial Sequence
  Oligonucleotide for detection of SNP TSC0001810
aaaagtgtataty

SEQ ID NO: 5354 - DNA, 13 bp, Artificial Sequence
  Oligonucleotide for detection of SNP TSC0001810
ratatacactttt

SEQ ID NO: 5355 - DNA, 13 bp, Artificial Sequence
  Oligonucleotide for detection of SNP TSC0001811
attattatggttg

SEQ ID NO: 5356 - DNA, 13 bp, Artificial Sequence
  Oligonucleotide for detection of SNP TSC0001811
caaccataataat

SEQ ID NO: 5357 - DNA, 13 bp, Artificial Sequence
  Oligonucleotide for detection of SNP TSC0001811
attattgtggttg

SEQ ID NO: 5358 - DNA, 13 bp, Artificial Sequence
  Oligonucleotide for detection of SNP TSC0001811
caaccacaataat

SEQ ID NO: 5359 - DNA, 13 bp, Artificial Sequence
  Oligonucleotide for detection of SNP TSC0001811
attatcgtggttg

SEQ ID NO: 5360 - DNA, 13 bp, Artificial Sequence
  Oligonucleotide for detection of SNP TSC0001811
caaccacgataat

SEQ ID NO: 5361 - DNA, 13 bp, Artificial Sequence
  Oligonucleotide for detection of SNP TSC0001811
tagttatggtggt

SEQ ID NO: 5362 - DNA, 13 bp, Artificial Sequence
  Oligonucleotide for detection of SNP TSC0001811
accaccataacta

SEQ ID NO: 5363 - DNA, 13 bp, Artificial Sequence
  Oligonucleotide for detection of SNP TSC0001811
tagttacggtggt

SEQ ID NO: 5364 - DNA, 13 bp, Artificial Sequence
  Oligonucleotide for detection of SNP TSC0001811
accaccgtaacta

SEQ ID NO: 5365 - DNA, 13 bp, Artificial Sequence
  Oligonucleotide for detection of SNP TSC0001812
aattggtattagt

SEQ ID NO: 5366 - DNA, 13 bp, Artificial Sequence
  Oligonucleotide for detection of SNP TSC0001812
actaataccaatt

SEQ ID NO: 5367 - DNA, 13 bp, Artificial Sequence
  Oligonucleotide for detection of SNP TSC0001812
aattgggattagt

SEQ ID NO: 5368 - DNA, 13 bp, Artificial Sequence
  Oligonucleotide for detection of SNP TSC0001812
actaatcccaatt

SEQ ID NO: 5369 - DNA, 13 bp, Artificial Sequence
  Oligonucleotide for detection of SNP TSC0001812
attggtattagtt

SEQ ID NO: 5370 - DNA, 13 bp, Artificial Sequence
  Oligonucleotide for detection of SNP TSC0001812
aactaataccaat

SEQ ID NO: 5371 - DNA, 13 bp, Artificial Sequence
  Oligonucleotide for detection of SNP TSC0001812
attggttttagtt

SEQ ID NO: 5372 - DNA, 13 bp, Artificial Sequence
  Oligonucleotide for detection of SNP TSC0001812
aactaaaaccaat

SEQ ID NO: 5373 - DNA, 13 bp, Artificial Sequence
  Oligonucleotide for detection of SNP TSC0001813
gttaaatgatttt

SEQ ID NO: 5374 - DNA, 13 bp, Artificial Sequence
  Oligonucleotide for detection of SNP TSC0001813
aaaatcatttaac

SEQ ID NO: 5375 - DNA, 13 bp, Artificial Sequence
  Oligonucleotide for detection of SNP TSC0001813
gttaaacgatttt

SEQ ID NO: 5376 - DNA, 13 bp, Artificial Sequence
  Oligonucleotide for detection of SNP TSC0001813
aaaatcgtttaac

SEQ ID NO: 5377 - DNA, 13 bp, Artificial Sequence
  Oligonucleotide for detection of SNP TSC0001813
aggattgtttgay

SEQ ID NO: 5378 - DNA, 13 bp, Artificial Sequence
  Oligonucleotide for detection of SNP TSC0001813
rtcaaacaatcct

SEQ ID NO: 5379 - DNA, 13 bp, Artificial Sequence
  Oligonucleotide for detection of SNP TSC0001813
aggattatttgay

SEQ ID NO: 5380 - DNA, 13 bp, Artificial Sequence
  Oligonucleotide for detection of SNP TSC0001813
rtcaaataatcct

SEQ ID NO: 5381 - DNA, 13 bp, Artificial Sequence
  Oligonucleotide for detection of SNP TSC0001813
aggatcgtttgay

SEQ ID NO: 5382 - DNA, 13 bp, Artificial Sequence
  Oligonucleotide for detection of SNP TSC0001813
rtcaaacgatcct

SEQ ID NO: 5383 - DNA, 13 bp, Artificial Sequence
  Oligonucleotide for detection of SNP TSC0001814
agttatgaatata

SEQ ID NO: 5384 - DNA, 13 bp, Artificial Sequence
  Oligonucleotide for detection of SNP TSC0001814
tatattcataact

SEQ ID NO: 5385 - DNA, 13 bp, Artificial Sequence
  Oligonucleotide for detection of SNP TSC0001814
agttataaatata

SEQ ID NO: 5386 - DNA, 13 bp, Artificial Sequence
  Oligonucleotide for detection of SNP TSC0001814
tatatttataact

SEQ ID NO: 5387 - DNA, 13 bp, Artificial Sequence
  Oligonucleotide for detection of SNP TSC0001815
tattgtattgttt

SEQ ID NO: 5388 - DNA, 13 bp, Artificial Sequence
  Oligonucleotide for detection of SNP TSC0001815
aaacaatacaata

SEQ ID NO: 5389 - DNA, 13 bp, Artificial Sequence
  Oligonucleotide for detection of SNP TSC0001815
tattgtgttgttt

SEQ ID NO: 5390 - DNA, 13 bp, Artificial Sequence
  Oligonucleotide for detection of SNP TSC0001815
aaacaacacaata

SEQ ID NO: 5391 - DNA, 13 bp, Artificial Sequence
  Oligonucleotide for detection of SNP TSC0001816
gtttatatttgta

SEQ ID NO: 5392 - DNA, 13 bp, Artificial Sequence
  Oligonucleotide for detection of SNP TSC0001816
tacaaatataaac

SEQ ID NO: 5393 - DNA, 13 bp, Artificial Sequence
  Oligonucleotide for detection of SNP TSC0001816
gtttatgtttgta

SEQ ID NO: 5394 - DNA, 13 bp, Artificial Sequence
  Oligonucleotide for detection of SNP TSC0001816
tacaaacataaac

SEQ ID NO: 5395 - DNA, 13 bp, Artificial Sequence
  Oligonucleotide for detection of SNP TSC0001816
gtttacgtttgta

SEQ ID NO: 5396 - DNA, 13 bp, Artificial Sequence
  Oligonucleotide for detection of SNP TSC0001816
tacaaacgtaaac

SEQ ID NO: 5397 - DNA, 13 bp, Artificial Sequence
  Oligonucleotide for detection of SNP TSC0001816
tatagatgtgagy

SEQ ID NO: 5398 - DNA, 13 bp, Artificial Sequence
  Oligonucleotide for detection of SNP TSC0001816
rctcacatctata

SEQ ID NO: 5399 - DNA, 13 bp, Artificial Sequence
  Oligonucleotide for detection of SNP TSC0001816
tatagacgtgagy

SEQ ID NO: 5400 - DNA, 13 bp, Artificial Sequence
  Oligonucleotide for detection of SNP TSC0001816
rctcacgtctata

SEQ ID NO: 5401 - DNA, 13 bp, Artificial Sequence
  Oligonucleotide for detection of SNP TSC0001817
gtaggtgtttttt

SEQ ID NO: 5402 - DNA, 13 bp, Artificial Sequence
  Oligonucleotide for detection of SNP TSC0001817
aaaaaacacctac

SEQ ID NO: 5403 - DNA, 13 bp, Artificial Sequence
  Oligonucleotide for detection of SNP TSC0001817
gtaggtatttttt

SEQ ID NO: 5404 - DNA, 13 bp, Artificial Sequence
  Oligonucleotide for detection of SNP TSC0001817
aaaaaatacctac

SEQ ID NO: 5405 - DNA, 13 bp, Artificial Sequence
  Oligonucleotide for detection of SNP TSC0001818
atatatatatata

SEQ ID NO: 5406 - DNA, 13 bp, Artificial Sequence
  Oligonucleotide for detection of SNP TSC0001818
tatatatatatat

SEQ ID NO: 5407 - DNA, 13 bp, Artificial Sequence
  Oligonucleotide for detection of SNP TSC0001818
atatatgtatata

SEQ ID NO: 5408 - DNA, 13 bp, Artificial Sequence
  Oligonucleotide for detection of SNP TSC0001818
tatatacatatat

SEQ ID NO: 5409 - DNA, 13 bp, Artificial Sequence
  Oligonucleotide for detection of SNP TSC0001819
aatttttgggttg

SEQ ID NO: 5410 - DNA, 13 bp, Artificial Sequence
  Oligonucleotide for detection of SNP TSC0001819
caacccaaaaatt

SEQ ID NO: 5411 - DNA, 13 bp, Artificial Sequence
  Oligonucleotide for detection of SNP TSC0001819
aattttcgggttg

SEQ ID NO: 5412 - DNA, 13 bp, Artificial Sequence
  Oligonucleotide for detection of SNP TSC0001819
caacccgaaaatt

SEQ ID NO: 5413 - DNA, 13 bp, Artificial Sequence
  Oligonucleotide for detection of SNP TSC0001819
taatttggaaatt

SEQ ID NO: 5414 - DNA, 13 bp, Artificial Sequence
  Oligonucleotide for detection of SNP TSC0001819
aatttccaaatta

SEQ ID NO: 5415 - DNA, 13 bp, Artificial Sequence
  Oligonucleotide for detection of SNP TSC0001819
taatttagaaatt

SEQ ID NO: 5416 - DNA, 13 bp, Artificial Sequence
  Oligonucleotide for detection of SNP TSC0001819
aatttctaaatta

SEQ ID NO: 5417 - DNA, 13 bp, Artificial Sequence
  Oligonucleotide for detection of SNP TSC0001819
taattcggaaatt

SEQ ID NO: 5418 - DNA, 13 bp, Artificial Sequence
  Oligonucleotide for detection of SNP TSC0001819
aatttccgaatta

SEQ ID NO: 5419 - DNA, 13 bp, Artificial Sequence
  Oligonucleotide for detection of SNP TSC0001820
ttttttagaagtt

SEQ ID NO: 5420 - DNA, 13 bp, Artificial Sequence
  Oligonucleotide for detection of SNP TSC0001820
aacttctaaaaaa

SEQ ID NO: 5421 - DNA, 13 bp, Artificial Sequence
  Oligonucleotide for detection of SNP TSC0001820
ttttttggaagtt

SEQ ID NO: 5422 - DNA, 13 bp, Artificial Sequence
  Oligonucleotide for detection of SNP TSC0001820
aacttccaaaaaa

SEQ ID NO: 5423 - DNA, 13 bp, Artificial Sequence
  Oligonucleotide for detection of SNP TSC0001821
attttttggttty

SEQ ID NO: 5424 - DNA, 13 bp, Artificial Sequence
  Oligonucleotide for detection of SNP TSC0001821
raaaccaaaaaat

SEQ ID NO: 5425 - DNA, 13 bp, Artificial Sequence
  Oligonucleotide for detection of SNP TSC0001821
atttttcggttty

SEQ ID NO: 5426 - DNA, 13 bp, Artificial Sequence
  Oligonucleotide for detection of SNP TSC0001821
raaaccgaaaaat

SEQ ID NO: 5427 - DNA, 13 bp, Artificial Sequence
  Oligonucleotide for detection of SNP TSC0001821
gaggttggaggat

SEQ ID NO: 5428 - DNA, 13 bp, Artificial Sequence
  Oligonucleotide for detection of SNP TSC0001821
atcctccaacctc

SEQ ID NO: 5429 - DNA, 13 bp, Artificial Sequence
  Oligonucleotide for detection of SNP TSC0001821
gaggttagaggat

SEQ ID NO: 5430 - DNA, 13 bp, Artificial Sequence
  Oligonucleotide for detection of SNP TSC0001821
atcctctaacctc

SEQ ID NO: 5431 - DNA, 13 bp, Artificial Sequence
  Oligonucleotide for detection of SNP TSC0001821
gaggtcggaggat

SEQ ID NO: 5432 - DNA, 13 bp, Artificial Sequence
  Oligonucleotide for detection of SNP TSC0001821
atcctccgacctc

SEQ ID NO: 5433 - DNA, 13 bp, Artificial Sequence
  Oligonucleotide for detection of SNP TSC0001822
ttgttttataagg

SEQ ID NO: 5434 - DNA, 13 bp, Artificial Sequence
  Oligonucleotide for detection of SNP TSC0001822
ccttataaaacaa

SEQ ID NO: 5435 - DNA, 13 bp, Artificial Sequence
  Oligonucleotide for detection of SNP TSC0001822
ttgtttgataagg

SEQ ID NO: 5436 - DNA, 13 bp, Artificial Sequence
  Oligonucleotide for detection of SNP TSC0001822
ccttatcaaacaa

SEQ ID NO: 5437 - DNA, 13 bp, Artificial Sequence
  Oligonucleotide for detection of SNP TSC0001822
ttttataaggtaa

SEQ ID NO: 5438 - DNA, 13 bp, Artificial Sequence
  Oligonucleotide for detection of SNP TSC0001822
ttaccttataaaa

SEQ ID NO: 5439 - DNA, 13 bp, Artificial Sequence
  Oligonucleotide for detection of SNP TSC0001822
ttttattaggtaa

SEQ ID NO: 5440 - DNA, 13 bp, Artificial Sequence
  Oligonucleotide for detection of SNP TSC0001822
ttacctaataaaa

SEQ ID NO: 5441 - DNA, 13 bp, Artificial Sequence
  Oligonucleotide for detection of SNP TSC0001823
ggaaagatggatg

SEQ ID NO: 5442 - DNA, 13 bp, Artificial Sequence
  Oligonucleotide for detection of SNP TSC0001823
catccatctttcc

SEQ ID NO: 5443 - DNA, 13 bp, Artificial Sequence
  Oligonucleotide for detection of SNP TSC0001823
ggaaagttggatg

SEQ ID NO: 5444 - DNA, 13 bp, Artificial Sequence
  Oligonucleotide for detection of SNP TSC0001823
catccaactttcc

SEQ ID NO: 5445 - DNA, 13 bp, Artificial Sequence
  Oligonucleotide for detection of SNP TSC0001823
tatttatttttty

SEQ ID NO: 5446 - DNA, 13 bp, Artificial Sequence
  Oligonucleotide for detection of SNP TSC0001823
raaaaaataaata

SEQ ID NO: 5447 - DNA, 13 bp, Artificial Sequence
  Oligonucleotide for detection of SNP TSC0001823
tatttaattttty

SEQ ID NO: 5448 - DNA, 13 bp, Artificial Sequence
  Oligonucleotide for detection of SNP TSC0001823
raaaaattaaata

SEQ ID NO: 5449 - DNA, 13 bp, Artificial Sequence
  Oligonucleotide for detection of SNP TSC0001824
ttattttgggata

SEQ ID NO: 5450 - DNA, 13 bp, Artificial Sequence
  Oligonucleotide for detection of SNP TSC0001824
tatcccaaaataa

SEQ ID NO: 5451 - DNA, 13 bp, Artificial Sequence
  Oligonucleotide for detection of SNP TSC0001824
ttatttcgggata

SEQ ID NO: 5452 - DNA, 13 bp, Artificial Sequence
  Oligonucleotide for detection of SNP TSC0001824
tatcccgaaataa

SEQ ID NO: 5453 - DNA, 13 bp, Artificial Sequence
  Oligonucleotide for detection of SNP TSC0001824
tattttgaagtga

SEQ ID NO: 5454 - DNA, 13 bp, Artificial Sequence
  Oligonucleotide for detection of SNP TSC0001824
tcacttcaaaata

SEQ ID NO: 5455 - DNA, 13 bp, Artificial Sequence
  Oligonucleotide for detection of SNP TSC0001824
tattttaaagtga

SEQ ID NO: 5456 - DNA, 13 bp, Artificial Sequence
  Oligonucleotide for detection of SNP TSC0001824
tcactttaaaata

SEQ ID NO: 5457 - DNA, 13 bp, Artificial Sequence
  Oligonucleotide for detection of SNP TSC0001824
tatttcgaagtga

SEQ ID NO: 5458 - DNA, 13 bp, Artificial Sequence
  Oligonucleotide for detection of SNP TSC0001824
tcacttcgaaata

SEQ ID NO: 5459 - DNA, 13 bp, Artificial Sequence
  Oligonucleotide for detection of SNP TSC0001825
tttaagatgttty

SEQ ID NO: 5460 - DNA, 13 bp, Artificial Sequence
  Oligonucleotide for detection of SNP TSC0001825
raaacatcttaaa

SEQ ID NO: 5461 - DNA, 13 bp, Artificial Sequence
  Oligonucleotide for detection of SNP TSC0001825
tttaaggtgttty

SEQ ID NO: 5462 - DNA, 13 bp, Artificial Sequence
  Oligonucleotide for detection of SNP TSC0001825
raaacaccttaaa

SEQ ID NO: 5463 - DNA, 13 bp, Artificial Sequence
  Oligonucleotide for detection of SNP TSC0001826
gaatgtataatta

SEQ ID NO: 5464 - DNA, 13 bp, Artificial Sequence
  Oligonucleotide for detection of SNP TSC0001826
taattatacattc

SEQ ID NO: 5465 - DNA, 13 bp, Artificial Sequence
  Oligonucleotide for detection of SNP TSC0001826
gaatgtttaatta

SEQ ID NO: 5466 - DNA, 13 bp, Artificial Sequence
  Oligonucleotide for detection of SNP TSC0001826
taattaaacattc

SEQ ID NO: 5467 - DNA, 13 bp, Artificial Sequence
  Oligonucleotide for detection of SNP TSC0001826
tgattatgtatty

SEQ ID NO: 5468 - DNA, 13 bp, Artificial Sequence
  Oligonucleotide for detection of SNP TSC0001826
raatacataatca

SEQ ID NO: 5469 - DNA, 13 bp, Artificial Sequence
  Oligonucleotide for detection of SNP TSC0001826
tgattaggtatty

SEQ ID NO: 5470 - DNA, 13 bp, Artificial Sequence
  Oligonucleotide for detection of SNP TSC0001826
raatacctaatca

SEQ ID NO: 5471 - DNA, 13 bp, Artificial Sequence
  Oligonucleotide for detection of SNP TSC0001828
tatggagttaatt

SEQ ID NO: 5472 - DNA, 13 bp, Artificial Sequence
  Oligonucleotide for detection of SNP TSC0001828
aattaactccata

SEQ ID NO: 5473 - DNA, 13 bp, Artificial Sequence
  Oligonucleotide for detection of SNP TSC0001828
tatggaattaatt

SEQ ID NO: 5474 - DNA, 13 bp, Artificial Sequence
  Oligonucleotide for detection of SNP TSC0001828
aattaattccata

SEQ ID NO: 5475 - DNA, 13 bp, Artificial Sequence
  Oligonucleotide for detection of SNP TSC0001828
tacggagttaatt

SEQ ID NO: 5476 - DNA, 13 bp, Artificial Sequence
  Oligonucleotide for detection of SNP TSC0001828
aattaactccgta

SEQ ID NO: 5477 - DNA, 13 bp, Artificial Sequence
  Oligonucleotide for detection of SNP TSC0001828
tacggaattaatt

SEQ ID NO: 5478 - DNA, 13 bp, Artificial Sequence
  Oligonucleotide for detection of SNP TSC0001828
aattaattccgta

SEQ ID NO: 5479 - DNA, 13 bp, Artificial Sequence
  Oligonucleotide for detection of SNP TSC0001829
tatttattataat

SEQ ID NO: 5480 - DNA, 13 bp, Artificial Sequence
  Oligonucleotide for detection of SNP TSC0001829
attataataaata

SEQ ID NO: 5481 - DNA, 13 bp, Artificial Sequence
  Oligonucleotide for detection of SNP TSC0001829
tatttagtataat

SEQ ID NO: 5482 - DNA, 13 bp, Artificial Sequence
  Oligonucleotide for detection of SNP TSC0001829
attatactaaata

SEQ ID NO: 5483 - DNA, 13 bp, Artificial Sequence
  Oligonucleotide for detection of SNP TSC0001829
attgtagtaggta

SEQ ID NO: 5484 - DNA, 13 bp, Artificial Sequence
  Oligonucleotide for detection of SNP TSC0001829
tacctactacaat

SEQ ID NO: 5485 - DNA, 13 bp, Artificial Sequence
  Oligonucleotide for detection of SNP TSC0001829
attgtattaggta

SEQ ID NO: 5486 - DNA, 13 bp, Artificial Sequence
  Oligonucleotide for detection of SNP TSC0001829
tacctaatacaat

SEQ ID NO: 5487 - DNA, 13 bp, Artificial Sequence
  Oligonucleotide for detection of SNP TSC0001830
taattagtatgga

SEQ ID NO: 5488 - DNA, 13 bp, Artificial Sequence
  Oligonucleotide for detection of SNP TSC0001830
tccatactaatta

SEQ ID NO: 5489 - DNA, 13 bp, Artificial Sequence
  Oligonucleotide for detection of SNP TSC0001830
taattaatatgga

SEQ ID NO: 5490 - DNA, 13 bp, Artificial Sequence
  Oligonucleotide for detection of SNP TSC0001830
tccatattaatta

SEQ ID NO: 5491 - DNA, 13 bp, Artificial Sequence
  Oligonucleotide for detection of SNP TSC0001831
gggagttaagaty

SEQ ID NO: 5492 - DNA, 13 bp, Artificial Sequence
  Oligonucleotide for detection of SNP TSC0001831
ratcttaactccc

SEQ ID NO: 5493 - DNA, 13 bp, Artificial Sequence
  Oligonucleotide for detection of SNP TSC0001831
gggagtgaagaty

SEQ ID NO: 5494 - DNA, 13 bp, Artificial Sequence
  Oligonucleotide for detection of SNP TSC0001831
ratcttcactccc

SEQ ID NO: 5495 - DNA, 13 bp, Artificial Sequence
  Oligonucleotide for detection of SNP TSC0001831
gggagcgaagaty

SEQ ID NO: 5496 - DNA, 13 bp, Artificial Sequence
  Oligonucleotide for detection of SNP TSC0001831
ratcttcgctccc

SEQ ID NO: 5497 - DNA, 13 bp, Artificial Sequence
  Oligonucleotide for detection of SNP TSC0001831
ggttttggtttty

SEQ ID NO: 5498 - DNA, 13 bp, Artificial Sequence
  Oligonucleotide for detection of SNP TSC0001831
raaaaccaaaacc

SEQ ID NO: 5499 - DNA, 13 bp, Artificial Sequence
  Oligonucleotide for detection of SNP TSC0001831
ggtttttgtttty

SEQ ID NO: 5500 - DNA, 13 bp, Artificial Sequence
  Oligonucleotide for detection of SNP TSC0001831
raaaacaaaaacc

SEQ ID NO: 5501 - DNA, 13 bp, Artificial Sequence
  Oligonucleotide for detection of SNP TSC0001831
ggttttcgtttty

SEQ ID NO: 5502 - DNA, 13 bp, Artificial Sequence
  Oligonucleotide for detection of SNP TSC0001831
raaaacgaaaacc

SEQ ID NO: 5503 - DNA, 13 bp, Artificial Sequence
  Oligonucleotide for detection of SNP TSC0001832
ttaattgggtagt

SEQ ID NO: 5504 - DNA, 13 bp, Artificial Sequence
  Oligonucleotide for detection of SNP TSC0001832
actacccaattaa

SEQ ID NO: 5505 - DNA, 13 bp, Artificial Sequence
  Oligonucleotide for detection of SNP TSC0001832
ttaattaggtagt

SEQ ID NO: 5506 - DNA, 13 bp, Artificial Sequence
  Oligonucleotide for detection of SNP TSC0001832
actacctaattaa

SEQ ID NO: 5507 - DNA, 13 bp, Artificial Sequence
  Oligonucleotide for detection of SNP TSC0001833
taaatagtgagtg

SEQ ID NO: 5508 - DNA, 13 bp, Artificial Sequence
  Oligonucleotide for detection of SNP TSC0001833
cactcactattta

SEQ ID NO: 5509 - DNA, 13 bp, Artificial Sequence
  Oligonucleotide for detection of SNP TSC0001833
taaataatgagtg

SEQ ID NO: 5510 - DNA, 13 bp, Artificial Sequence
  Oligonucleotide for detection of SNP TSC0001833
cactcattattta

SEQ ID NO: 5511 - DNA, 13 bp, Artificial Sequence
  Oligonucleotide for detection of SNP TSC0001834
aaaaataataaat

SEQ ID NO: 5512 - DNA, 13 bp, Artificial Sequence
  Oligonucleotide for detection of SNP TSC0001834
atttattattttt

SEQ ID NO: 5513 - DNA, 13 bp, Artificial Sequence
  Oligonucleotide for detection of SNP TSC0001834
aaaaatgataaat

SEQ ID NO: 5514 - DNA, 13 bp, Artificial Sequence
  Oligonucleotide for detection of SNP TSC0001834
atttatcattttt

SEQ ID NO: 5515 - DNA, 13 bp, Artificial Sequence
  Oligonucleotide for detection of SNP TSC0001836
tttggattaaata

SEQ ID NO: 5516 - DNA, 13 bp, Artificial Sequence
  Oligonucleotide for detection of SNP TSC0001836
tatttaatccaaa

SEQ ID NO: 5517 - DNA, 13 bp, Artificial Sequence
  Oligonucleotide for detection of SNP TSC0001836
tttggagtaaata

SEQ ID NO: 5518 - DNA, 13 bp, Artificial Sequence
  Oligonucleotide for detection of SNP TSC0001836
tatttactccaaa

SEQ ID NO: 5519 - DNA, 13 bp, Artificial Sequence
  Oligonucleotide for detection of SNP TSC0001836
tatttaatttaaa

SEQ ID NO: 5520 - DNA, 13 bp, Artificial Sequence
  Oligonucleotide for detection of SNP TSC0001836
tttaaattaaata

SEQ ID NO: 5521 - DNA, 13 bp, Artificial Sequence
  Oligonucleotide for detection of SNP TSC0001836
tatttattttaaa

SEQ ID NO: 5522 - DNA, 13 bp, Artificial Sequence
  Oligonucleotide for detection of SNP TSC0001836
tttaaaataaata

SEQ ID NO: 5523 - DNA, 13 bp, Artificial Sequence
  Oligonucleotide for detection of SNP TSC0001837
tatattaaggtat

SEQ ID NO: 5524 - DNA, 13 bp, Artificial Sequence
  Oligonucleotide for detection of SNP TSC0001837
ataccttaatata

SEQ ID NO: 5525 - DNA, 13 bp, Artificial Sequence
  Oligonucleotide for detection of SNP TSC0001837
tatattgaggtat

SEQ ID NO: 5526 - DNA, 13 bp, Artificial Sequence
  Oligonucleotide for detection of SNP TSC0001837
atacctcaatata

SEQ ID NO: 5527 - DNA, 13 bp, Artificial Sequence
  Oligonucleotide for detection of SNP TSC0001838
ttgtagtgagttg

SEQ ID NO: 5528 - DNA, 13 bp, Artificial Sequence
  Oligonucleotide for detection of SNP TSC0001838
caactcactacaa

SEQ ID NO: 5529 - DNA, 13 bp, Artificial Sequence
  Oligonucleotide for detection of SNP TSC0001838
ttgtagcgagttg

SEQ ID NO: 5530 - DNA, 13 bp, Artificial Sequence
  Oligonucleotide for detection of SNP TSC0001838
caactcgctacaa

SEQ ID NO: 5531 - DNA, 13 bp, Artificial Sequence
  Oligonucleotide for detection of SNP TSC0001838
tagtttgttataa

SEQ ID NO: 5532 - DNA, 13 bp, Artificial Sequence
  Oligonucleotide for detection of SNP TSC0001838
ttataacaaacta

SEQ ID NO: 5533 - DNA, 13 bp, Artificial Sequence
  Oligonucleotide for detection of SNP TSC0001838
tagtttattataa

SEQ ID NO: 5534 - DNA, 13 bp, Artificial Sequence
  Oligonucleotide for detection of SNP TSC0001838
ttataataaacta

SEQ ID NO: 5535 - DNA, 13 bp, Artificial Sequence
  Oligonucleotide for detection of SNP TSC0001838
tagttcgttataa

SEQ ID NO: 5536 - DNA, 13 bp, Artificial Sequence
  Oligonucleotide for detection of SNP TSC0001838
ttataacgaacta

SEQ ID NO: 5537 - DNA, 13 bp, Artificial Sequence
  Oligonucleotide for detection of SNP TSC0001840
aaataataatttg

SEQ ID NO: 5538 - DNA, 13 bp, Artificial Sequence
  Oligonucleotide for detection of SNP TSC0001840
caaattattattt

SEQ ID NO: 5539 - DNA, 13 bp, Artificial Sequence
  Oligonucleotide for detection of SNP TSC0001840
aaataagaatttg

SEQ ID NO: 5540 - DNA, 13 bp, Artificial Sequence
  Oligonucleotide for detection of SNP TSC0001840
caaattcttattt

SEQ ID NO: 5541 - DNA, 13 bp, Artificial Sequence
  Oligonucleotide for detection of SNP TSC0001840
tagattgttattt

SEQ ID NO: 5542 - DNA, 13 bp, Artificial Sequence
  Oligonucleotide for detection of SNP TSC0001840
aaataacaatcta

SEQ ID NO: 5543 - DNA, 13 bp, Artificial Sequence
  Oligonucleotide for detection of SNP TSC0001840
tagatttttattt

SEQ ID NO: 5544 - DNA, 13 bp, Artificial Sequence
  Oligonucleotide for detection of SNP TSC0001840
aaataaaaatcta

SEQ ID NO: 5545 - DNA, 13 bp, Artificial Sequence
  Oligonucleotide for detection of SNP TSC0001841
ttaaaggagattg

SEQ ID NO: 5546 - DNA, 13 bp, Artificial Sequence
  Oligonucleotide for detection of SNP TSC0001841
caatctcctttaa

SEQ ID NO: 5547 - DNA, 13 bp, Artificial Sequence
  Oligonucleotide for detection of SNP TSC0001841
ttaaagaagattg

SEQ ID NO: 5548 - DNA, 13 bp, Artificial Sequence
  Oligonucleotide for detection of SNP TSC0001841
caatcttctttaa

SEQ ID NO: 5549 - DNA, 13 bp, Artificial Sequence
  Oligonucleotide for detection of SNP TSC0001842
gaggttaaggtgg

SEQ ID NO: 5550 - DNA, 13 bp, Artificial Sequence
  Oligonucleotide for detection of SNP TSC0001842
ccaccttaacctc

SEQ ID NO: 5551 - DNA, 13 bp, Artificial Sequence
  Oligonucleotide for detection of SNP TSC0001842
gaggttgaggtgg

SEQ ID NO: 5552 - DNA, 13 bp, Artificial Sequence
  Oligonucleotide for detection of SNP TSC0001842
ccacctcaacctc

SEQ ID NO: 5553 - DNA, 13 bp, Artificial Sequence
  Oligonucleotide for detection of SNP TSC0001842
gaggttaaggcgg

SEQ ID NO: 5554 - DNA, 13 bp, Artificial Sequence
  Oligonucleotide for detection of SNP TSC0001842
ccgccttaacctc

SEQ ID NO: 5555 - DNA, 13 bp, Artificial Sequence
  Oligonucleotide for detection of SNP TSC0001842
gaggtcgaggtgg

SEQ ID NO: 5556 - DNA, 13 bp, Artificial Sequence
  Oligonucleotide for detection of SNP TSC0001842
ccacctcgacctc

SEQ ID NO: 5557 - DNA, 13 bp, Artificial Sequence
  Oligonucleotide for detection of SNP TSC0001842
gaggttgaggcgg

SEQ ID NO: 5558 - DNA, 13 bp, Artificial Sequence
  Oligonucleotide for detection of SNP TSC0001842
ccgcctcaacctc

SEQ ID NO: 5559 - DNA, 13 bp, Artificial Sequence
  Oligonucleotide for detection of SNP TSC0001842
gaggtcgaggcgg

SEQ ID NO: 5560 - DNA, 13 bp, Artificial Sequence
  Oligonucleotide for detection of SNP TSC0001842
ccgcctcgacctc

SEQ ID NO: 5561 - DNA, 13 bp, Artificial Sequence
  Oligonucleotide for detection of SNP TSC0001842
ttgttttggttty

SEQ ID NO: 5562 - DNA, 13 bp, Artificial Sequence
  Oligonucleotide for detection of SNP TSC0001842
raaaccaaaacaa

SEQ ID NO: 5563 - DNA, 13 bp, Artificial Sequence
  Oligonucleotide for detection of SNP TSC0001842
tcgttttggttty

SEQ ID NO: 5564 - DNA, 13 bp, Artificial Sequence
  Oligonucleotide for detection of SNP TSC0001842
raaaccaaaacga

SEQ ID NO: 5565 - DNA, 13 bp, Artificial Sequence
  Oligonucleotide for detection of SNP TSC0001842
ttgtttcggttty

SEQ ID NO: 5566 - DNA, 13 bp, Artificial Sequence
  Oligonucleotide for detection of SNP TSC0001842
raaaccgaaacaa

SEQ ID NO: 5567 - DNA, 13 bp, Artificial Sequence
  Oligonucleotide for detection of SNP TSC0001842
tcgtttcggttty

SEQ ID NO: 5568 - DNA, 13 bp, Artificial Sequence
  Oligonucleotide for detection of SNP TSC0001842
raaaccgaaacga

SEQ ID NO: 5569 - DNA, 13 bp, Artificial Sequence
  Oligonucleotide for detection of SNP TSC0001843
atgtgaattataa

SEQ ID NO: 5570 - DNA, 13 bp, Artificial Sequence
  Oligonucleotide for detection of SNP TSC0001843
ttataattcacat

SEQ ID NO: 5571 - DNA, 13 bp, Artificial Sequence
  Oligonucleotide for detection of SNP TSC0001843
atgtgagttataa

SEQ ID NO: 5572 - DNA, 13 bp, Artificial Sequence
  Oligonucleotide for detection of SNP TSC0001843
ttataactcacat

SEQ ID NO: 5573 - DNA, 13 bp, Artificial Sequence
  Oligonucleotide for detection of SNP TSC0001844
aatgttttaataa

SEQ ID NO: 5574 - DNA, 13 bp, Artificial Sequence
  Oligonucleotide for detection of SNP TSC0001844
ttattaaaacatt

SEQ ID NO: 5575 - DNA, 13 bp, Artificial Sequence
  Oligonucleotide for detection of SNP TSC0001844
aatgttgtaataa

SEQ ID NO: 5576 - DNA, 13 bp, Artificial Sequence
  Oligonucleotide for detection of SNP TSC0001844
ttattacaacatt

SEQ ID NO: 5577 - DNA, 13 bp, Artificial Sequence
  Oligonucleotide for detection of SNP TSC0001844
ttattgaagtatt

SEQ ID NO: 5578 - DNA, 13 bp, Artificial Sequence
  Oligonucleotide for detection of SNP TSC0001844
aatacttcaataa

SEQ ID NO: 5579 - DNA, 13 bp, Artificial Sequence
  Oligonucleotide for detection of SNP TSC0001844
ttattgtagtatt

SEQ ID NO: 5580 - DNA, 13 bp, Artificial Sequence
  Oligonucleotide for detection of SNP TSC0001844
aatactacaataa

SEQ ID NO: 5581 - DNA, 13 bp, Artificial Sequence
  Oligonucleotide for detection of SNP TSC0001845
atatttaagaatg

SEQ ID NO: 5582 - DNA, 13 bp, Artificial Sequence
  Oligonucleotide for detection of SNP TSC0001845
cattcttaaatat

SEQ ID NO: 5583 - DNA, 13 bp, Artificial Sequence
  Oligonucleotide for detection of SNP TSC0001845
atatttgagaatg

SEQ ID NO: 5584 - DNA, 13 bp, Artificial Sequence
  Oligonucleotide for detection of SNP TSC0001845
cattctcaaatat

SEQ ID NO: 5585 - DNA, 13 bp, Artificial Sequence
  Oligonucleotide for detection of SNP TSC0001845
atattcgagaatg

SEQ ID NO: 5586 - DNA, 13 bp, Artificial Sequence
  Oligonucleotide for detection of SNP TSC0001845
cattctcgaatat

SEQ ID NO: 5587 - DNA, 13 bp, Artificial Sequence
  Oligonucleotide for detection of SNP TSC0001845
tatttttgaatat

SEQ ID NO: 5588 - DNA, 13 bp, Artificial Sequence
  Oligonucleotide for detection of SNP TSC0001845
atattcaaaaata

SEQ ID NO: 5589 - DNA, 13 bp, Artificial Sequence
  Oligonucleotide for detection of SNP TSC0001845
tattttcgaatat

SEQ ID NO: 5590 - DNA, 13 bp, Artificial Sequence
  Oligonucleotide for detection of SNP TSC0001845
atattcgaaaata

SEQ ID NO: 5591 - DNA, 13 bp, Artificial Sequence
  Oligonucleotide for detection of SNP TSC0001846
tgggaagttttta

SEQ ID NO: 5592 - DNA, 13 bp, Artificial Sequence
  Oligonucleotide for detection of SNP TSC0001846
taaaaacttccca

SEQ ID NO: 5593 - DNA, 13 bp, Artificial Sequence
  Oligonucleotide for detection of SNP TSC0001846
tgggaaattttta

SEQ ID NO: 5594 - DNA, 13 bp, Artificial Sequence
  Oligonucleotide for detection of SNP TSC0001846
taaaaatttccca

SEQ ID NO: 5595 - DNA, 13 bp, Artificial Sequence
  Oligonucleotide for detection of SNP TSC0001847
agtttttgttaaa

SEQ ID NO: 5596 - DNA, 13 bp, Artificial Sequence
  Oligonucleotide for detection of SNP TSC0001847
tttaacaaaaact

SEQ ID NO: 5597 - DNA, 13 bp, Artificial Sequence
  Oligonucleotide for detection of SNP TSC0001847
agttttggttaaa

SEQ ID NO: 5598 - DNA, 13 bp, Artificial Sequence
  Oligonucleotide for detection of SNP TSC0001847
tttaaccaaaact

SEQ ID NO: 5599 - DNA, 13 bp, Artificial Sequence
  Oligonucleotide for detection of SNP TSC0001847
tttgataagaatt

SEQ ID NO: 5600 - DNA, 13 bp, Artificial Sequence
  Oligonucleotide for detection of SNP TSC0001847
aattcttatcaaa

SEQ ID NO: 5601 - DNA, 13 bp, Artificial Sequence
  Oligonucleotide for detection of SNP TSC0001847
tttgattagaatt

SEQ ID NO: 5602 - DNA, 13 bp, Artificial Sequence
  Oligonucleotide for detection of SNP TSC0001847
aattctaatcaaa

SEQ ID NO: 5603 - DNA, 13 bp, Artificial Sequence
  Oligonucleotide for detection of SNP TSC0001848
aatgagttattat

SEQ ID NO: 5604 - DNA, 13 bp, Artificial Sequence
  Oligonucleotide for detection of SNP TSC0001848
ataataactcatt

SEQ ID NO: 5605 - DNA, 13 bp, Artificial Sequence
  Oligonucleotide for detection of SNP TSC0001848
aatgaggtattat

SEQ ID NO: 5606 - DNA, 13 bp, Artificial Sequence
  Oligonucleotide for detection of SNP TSC0001848
ataatacctcatt

SEQ ID NO: 5607 - DNA, 13 bp, Artificial Sequence
  Oligonucleotide for detection of SNP TSC0001848
atagtaatttatt

SEQ ID NO: 5608 - DNA, 13 bp, Artificial Sequence
  Oligonucleotide for detection of SNP TSC0001848
aataaattactat

SEQ ID NO: 5609 - DNA, 13 bp, Artificial Sequence
  Oligonucleotide for detection of SNP TSC0001848
atagtattttatt

SEQ ID NO: 5610 - DNA, 13 bp, Artificial Sequence
  Oligonucleotide for detection of SNP TSC0001848
aataaaatactat

SEQ ID NO: 5611 - DNA, 13 bp, Artificial Sequence
  Oligonucleotide for detection of SNP TSC0001849
tttaggatatatg

SEQ ID NO: 5612 - DNA, 13 bp, Artificial Sequence
  Oligonucleotide for detection of SNP TSC0001849
catatatcctaaa

SEQ ID NO: 5613 - DNA, 13 bp, Artificial Sequence
  Oligonucleotide for detection of SNP TSC0001849
tttaggttatatg

SEQ ID NO: 5614 - DNA, 13 bp, Artificial Sequence
  Oligonucleotide for detection of SNP TSC0001849
catataacctaaa

SEQ ID NO: 5615 - DNA, 13 bp, Artificial Sequence
  Oligonucleotide for detection of SNP TSC0001849
tatatgttttgaa

SEQ ID NO: 5616 - DNA, 13 bp, Artificial Sequence
  Oligonucleotide for detection of SNP TSC0001849
ttcaaaacatata

SEQ ID NO: 5617 - DNA, 13 bp, Artificial Sequence
  Oligonucleotide for detection of SNP TSC0001849
tatatggtttgaa

SEQ ID NO: 5618 - DNA, 13 bp, Artificial Sequence
  Oligonucleotide for detection of SNP TSC0001849
ttcaaaccatata

SEQ ID NO: 5619 - DNA, 13 bp, Artificial Sequence
  Oligonucleotide for detection of SNP TSC0001850
ttagattgagatt

SEQ ID NO: 5620 - DNA, 13 bp, Artificial Sequence
  Oligonucleotide for detection of SNP TSC0001850
aatctcaatctaa

SEQ ID NO: 5621 - DNA, 13 bp, Artificial Sequence
  Oligonucleotide for detection of SNP TSC0001850
ttagatcgagatt

SEQ ID NO: 5622 - DNA, 13 bp, Artificial Sequence
  Oligonucleotide for detection of SNP TSC0001850
aatctcgatctaa

SEQ ID NO: 5623 - DNA, 13 bp, Artificial Sequence
  Oligonucleotide for detection of SNP TSC0001850
agttttggtttaa

SEQ ID NO: 5624 - DNA, 13 bp, Artificial Sequence
  Oligonucleotide for detection of SNP TSC0001850
ttaaaccaaaact

SEQ ID NO: 5625 - DNA, 13 bp, Artificial Sequence
  Oligonucleotide for detection of SNP TSC0001850
agttttagtttaa

SEQ ID NO: 5626 - DNA, 13 bp, Artificial Sequence
  Oligonucleotide for detection of SNP TSC0001850
ttaaactaaaact

SEQ ID NO: 5627 - DNA, 13 bp, Artificial Sequence
  Oligonucleotide for detection of SNP TSC0001850
agtttcggtttaa

SEQ ID NO: 5628 - DNA, 13 bp, Artificial Sequence
  Oligonucleotide for detection of SNP TSC0001850
ttaaaccgaaact

SEQ ID NO: 5629 - DNA, 13 bp, Artificial Sequence
  Oligonucleotide for detection of SNP TSC0001851
ttataagtatttt

SEQ ID NO: 5630 - DNA, 13 bp, Artificial Sequence
  Oligonucleotide for detection of SNP TSC0001851
aaaatacttataa

SEQ ID NO: 5631 - DNA, 13 bp, Artificial Sequence
  Oligonucleotide for detection of SNP TSC0001851
ttataaatatttt

SEQ ID NO: 5632 - DNA, 13 bp, Artificial Sequence
  Oligonucleotide for detection of SNP TSC0001851
aaaatatttataa

SEQ ID NO: 5633 - DNA, 13 bp, Artificial Sequence
  Oligonucleotide for detection of SNP TSC0001852
agagtagggatty

SEQ ID NO: 5634 - DNA, 13 bp, Artificial Sequence
  Oligonucleotide for detection of SNP TSC0001852
raatccctactct

SEQ ID NO: 5635 - DNA, 13 bp, Artificial Sequence
  Oligonucleotide for detection of SNP TSC0001852
agagtaaggatty

SEQ ID NO: 5636 - DNA, 13 bp, Artificial Sequence
  Oligonucleotide for detection of SNP TSC0001852
raatccttactct

SEQ ID NO: 5637 - DNA, 13 bp, Artificial Sequence
  Oligonucleotide for detection of SNP TSC0001853
attatgtgtagta

SEQ ID NO: 5638 - DNA, 13 bp, Artificial Sequence
  Oligonucleotide for detection of SNP TSC0001853
tactacacataat

SEQ ID NO: 5639 - DNA, 13 bp, Artificial Sequence
  Oligonucleotide for detection of SNP TSC0001853
attatgggtagta

SEQ ID NO: 5640 - DNA, 13 bp, Artificial Sequence
  Oligonucleotide for detection of SNP TSC0001853
tactacccataat

SEQ ID NO: 5641 - DNA, 13 bp, Artificial Sequence
  Oligonucleotide for detection of SNP TSC0001853
attacgtgtagta

SEQ ID NO: 5642 - DNA, 13 bp, Artificial Sequence
  Oligonucleotide for detection of SNP TSC0001853
tactacacgtaat

SEQ ID NO: 5643 - DNA, 13 bp, Artificial Sequence
  Oligonucleotide for detection of SNP TSC0001853
attacgggtagta

SEQ ID NO: 5644 - DNA, 13 bp, Artificial Sequence
  Oligonucleotide for detection of SNP TSC0001853
tactacccgtaat

SEQ ID NO: 5645 - DNA, 13 bp, Artificial Sequence
  Oligonucleotide for detection of SNP TSC0001853
tattgtatgtgat

SEQ ID NO: 5646 - DNA, 13 bp, Artificial Sequence
  Oligonucleotide for detection of SNP TSC0001853
atcacatacaata

SEQ ID NO: 5647 - DNA, 13 bp, Artificial Sequence
  Oligonucleotide for detection of SNP TSC0001853
tattgtttgtgat

SEQ ID NO: 5648 - DNA, 13 bp, Artificial Sequence
  Oligonucleotide for detection of SNP TSC0001853
atcacaaacaata

SEQ ID NO: 5649 - DNA, 13 bp, Artificial Sequence
  Oligonucleotide for detection of SNP TSC0001853
tattgtacgtgat

SEQ ID NO: 5650 - DNA, 13 bp, Artificial Sequence
  Oligonucleotide for detection of SNP TSC0001853
atcacgtacaata

SEQ ID NO: 5651 - DNA, 13 bp, Artificial Sequence
  Oligonucleotide for detection of SNP TSC0001853
tattgttcgtgat

SEQ ID NO: 5652 - DNA, 13 bp, Artificial Sequence
  Oligonucleotide for detection of SNP TSC0001853
atcacgaacaata

SEQ ID NO: 5653 - DNA, 13 bp, Artificial Sequence
  Oligonucleotide for detection of SNP TSC0001856
aatggtggtaagg

SEQ ID NO: 5654 - DNA, 13 bp, Artificial Sequence
  Oligonucleotide for detection of SNP TSC0001856
ccttaccaccatt

SEQ ID NO: 5655 - DNA, 13 bp, Artificial Sequence
  Oligonucleotide for detection of SNP TSC0001856
aatggtagtaagg

SEQ ID NO: 5656 - DNA, 13 bp, Artificial Sequence
  Oligonucleotide for detection of SNP TSC0001856
ccttactaccatt

SEQ ID NO: 5657 - DNA, 13 bp, Artificial Sequence
  Oligonucleotide for detection of SNP TSC0001857
tttttgatttttg

SEQ ID NO: 5658 - DNA, 13 bp, Artificial Sequence
  Oligonucleotide for detection of SNP TSC0001857
caaaaatcaaaaa

SEQ ID NO: 5659 - DNA, 13 bp, Artificial Sequence
  Oligonucleotide for detection of SNP TSC0001857
tttttgttttttg

SEQ ID NO: 5660 - DNA, 13 bp, Artificial Sequence
  Oligonucleotide for detection of SNP TSC0001857
caaaaaacaaaaa

SEQ ID NO: 5661 - DNA, 13 bp, Artificial Sequence
  Oligonucleotide for detection of SNP TSC0001857
taaaaattaaaaa

SEQ ID NO: 5662 - DNA, 13 bp, Artificial Sequence
  Oligonucleotide for detection of SNP TSC0001857
tttttaattttta

SEQ ID NO: 5663 - DNA, 13 bp, Artificial Sequence
  Oligonucleotide for detection of SNP TSC0001857
taaaaaataaaaa

SEQ ID NO: 5664 - DNA, 13 bp, Artificial Sequence
  Oligonucleotide for detection of SNP TSC0001857
tttttatttttta

SEQ ID NO: 5665 - DNA, 13 bp, Artificial Sequence
  Oligonucleotide for detection of SNP TSC0001858
gtagtaatattty

SEQ ID NO: 5666 - DNA, 13 bp, Artificial Sequence
  Oligonucleotide for detection of SNP TSC0001858
raaatattactac

SEQ ID NO: 5667 - DNA, 13 bp, Artificial Sequence
  Oligonucleotide for detection of SNP TSC0001858
gtagtagtattty

SEQ ID NO: 5668 - DNA, 13 bp, Artificial Sequence
  Oligonucleotide for detection of SNP TSC0001858
raaatactactac

SEQ ID NO: 5669 - DNA, 13 bp, Artificial Sequence
  Oligonucleotide for detection of SNP TSC0001859
aattaagaggtat

SEQ ID NO: 5670 - DNA, 13 bp, Artificial Sequence
  Oligonucleotide for detection of SNP TSC0001859
atacctcttaatt

SEQ ID NO: 5671 - DNA, 13 bp, Artificial Sequence
  Oligonucleotide for detection of SNP TSC0001859
aattaaaaggtat

SEQ ID NO: 5672 - DNA, 13 bp, Artificial Sequence
  Oligonucleotide for detection of SNP TSC0001859
ataccttttaatt

SEQ ID NO: 5673 - DNA, 13 bp, Artificial Sequence
  Oligonucleotide for detection of SNP TSC0001860
ttagtatggtgga

SEQ ID NO: 5674 - DNA, 13 bp, Artificial Sequence
  Oligonucleotide for detection of SNP TSC0001860
tccaccatactaa

SEQ ID NO: 5675 - DNA, 13 bp, Artificial Sequence
  Oligonucleotide for detection of SNP TSC0001860
ttagtagggtgga

SEQ ID NO: 5676 - DNA, 13 bp, Artificial Sequence
  Oligonucleotide for detection of SNP TSC0001860
tccaccctactaa

SEQ ID NO: 5677 - DNA, 13 bp, Artificial Sequence
  Oligonucleotide for detection of SNP TSC0001860
ttagtacggtgga

SEQ ID NO: 5678 - DNA, 13 bp, Artificial Sequence
  Oligonucleotide for detection of SNP TSC0001860
tccaccgtactaa

SEQ ID NO: 5679 - DNA, 13 bp, Artificial Sequence
  Oligonucleotide for detection of SNP TSC0001860
tttattgtgttga

SEQ ID NO: 5680 - DNA, 13 bp, Artificial Sequence
  Oligonucleotide for detection of SNP TSC0001860
tcaacacaataaa

SEQ ID NO: 5681 - DNA, 13 bp, Artificial Sequence
  Oligonucleotide for detection of SNP TSC0001860
tttattttgttga

SEQ ID NO: 5682 - DNA, 13 bp, Artificial Sequence
  Oligonucleotide for detection of SNP TSC0001860
tcaacaaaataaa

SEQ ID NO: 5683 - DNA, 13 bp, Artificial Sequence
  Oligonucleotide for detection of SNP TSC0001860
tttatcgtgttga

SEQ ID NO: 5684 - DNA, 13 bp, Artificial Sequence
  Oligonucleotide for detection of SNP TSC0001860
tcaacacgataaa

SEQ ID NO: 5685 - DNA, 13 bp, Artificial Sequence
  Oligonucleotide for detection of SNP TSC0001861
ttggatattatgy

SEQ ID NO: 5686 - DNA, 13 bp, Artificial Sequence
  Oligonucleotide for detection of SNP TSC0001861
rcataatatccaa

SEQ ID NO: 5687 - DNA, 13 bp, Artificial Sequence
  Oligonucleotide for detection of SNP TSC0001861
ttggatgttatgy

SEQ ID NO: 5688 - DNA, 13 bp, Artificial Sequence
  Oligonucleotide for detection of SNP TSC0001861
rcataacatccaa

SEQ ID NO: 5689 - DNA, 13 bp, Artificial Sequence
  Oligonucleotide for detection of SNP TSC0001862
taaaaggaagaty

SEQ ID NO: 5690 - DNA, 13 bp, Artificial Sequence
  Oligonucleotide for detection of SNP TSC0001862
ratcttcctttta

SEQ ID NO: 5691 - DNA, 13 bp, Artificial Sequence
  Oligonucleotide for detection of SNP TSC0001862
taaaagaaagaty

SEQ ID NO: 5692 - DNA, 13 bp, Artificial Sequence
  Oligonucleotide for detection of SNP TSC0001862
ratctttctttta

SEQ ID NO: 5693 - DNA, 13 bp, Artificial Sequence
  Oligonucleotide for detection of SNP TSC0001864
gatattaggaagg

SEQ ID NO: 5694 - DNA, 13 bp, Artificial Sequence
  Oligonucleotide for detection of SNP TSC0001864
ccttcctaatatc

SEQ ID NO: 5695 - DNA, 13 bp, Artificial Sequence
  Oligonucleotide for detection of SNP TSC0001864
gatattgggaagg

SEQ ID NO: 5696 - DNA, 13 bp, Artificial Sequence
  Oligonucleotide for detection of SNP TSC0001864
ccttcccaatatc

SEQ ID NO: 5697 - DNA, 13 bp, Artificial Sequence
  Oligonucleotide for detection of SNP TSC0001864
gatatcgggaagg

SEQ ID NO: 5698 - DNA, 13 bp, Artificial Sequence
  Oligonucleotide for detection of SNP TSC0001864
ccttcccgatatc

SEQ ID NO: 5699 - DNA, 13 bp, Artificial Sequence
  Oligonucleotide for detection of SNP TSC0001864
tttttttggtaty

SEQ ID NO: 5700 - DNA, 13 bp, Artificial Sequence
  Oligonucleotide for detection of SNP TSC0001864
rataccaaaaaaa

SEQ ID NO: 5701 - DNA, 13 bp, Artificial Sequence
  Oligonucleotide for detection of SNP TSC0001864
ttttttcggtaty

SEQ ID NO: 5702 - DNA, 13 bp, Artificial Sequence
  Oligonucleotide for detection of SNP TSC0001864
rataccgaaaaaa

SEQ ID NO: 5703 - DNA, 13 bp, Artificial Sequence
  Oligonucleotide for detection of SNP TSC0001865
aatgagtagttta

SEQ ID NO: 5704 - DNA, 13 bp, Artificial Sequence
  Oligonucleotide for detection of SNP TSC0001865
taaactactcatt

SEQ ID NO: 5705 - DNA, 13 bp, Artificial Sequence
  Oligonucleotide for detection of SNP TSC0001865
aatgaggagttta

SEQ ID NO: 5706 - DNA, 13 bp, Artificial Sequence
  Oligonucleotide for detection of SNP TSC0001865
taaactcctcatt

SEQ ID NO: 5707 - DNA, 13 bp, Artificial Sequence
  Oligonucleotide for detection of SNP TSC0001865
tgaattgtttatt

SEQ ID NO: 5708 - DNA, 13 bp, Artificial Sequence
  Oligonucleotide for detection of SNP TSC0001865
aataaacaattca

SEQ ID NO: 5709 - DNA, 13 bp, Artificial Sequence
  Oligonucleotide for detection of SNP TSC0001865
tgaattttttatt

SEQ ID NO: 5710 - DNA, 13 bp, Artificial Sequence
  Oligonucleotide for detection of SNP TSC0001865
aataaaaaattca

SEQ ID NO: 5711 - DNA, 13 bp, Artificial Sequence
  Oligonucleotide for detection of SNP TSC0001866
tttttatgagtay

SEQ ID NO: 5712 - DNA, 13 bp, Artificial Sequence
  Oligonucleotide for detection of SNP TSC0001866
rtactcataaaaa

SEQ ID NO: 5713 - DNA, 13 bp, Artificial Sequence
  Oligonucleotide for detection of SNP TSC0001866
tttttacgagtay

SEQ ID NO: 5714 - DNA, 13 bp, Artificial Sequence
  Oligonucleotide for detection of SNP TSC0001866
rtactcgtaaaaa

SEQ ID NO: 5715 - DNA, 13 bp, Artificial Sequence
  Oligonucleotide for detection of SNP TSC0001866
gtgtttgtgaagg

SEQ ID NO: 5716 - DNA, 13 bp, Artificial Sequence
  Oligonucleotide for detection of SNP TSC0001866
ccttcacaaacac

SEQ ID NO: 5717 - DNA, 13 bp, Artificial Sequence
  Oligonucleotide for detection of SNP TSC0001866
gtgtttatgaagg

SEQ ID NO: 5718 - DNA, 13 bp, Artificial Sequence
  Oligonucleotide for detection of SNP TSC0001866
ccttcataaacac

SEQ ID NO: 5719 - DNA, 13 bp, Artificial Sequence
  Oligonucleotide for detection of SNP TSC0001866
gtgttcgtgaagg

SEQ ID NO: 5720 - DNA, 13 bp, Artificial Sequence
  Oligonucleotide for detection of SNP TSC0001866
ccttcacgaacac

SEQ ID NO: 5721 - DNA, 13 bp, Artificial Sequence
  Oligonucleotide for detection of SNP TSC0001868
ttagtgattttta

SEQ ID NO: 5722 - DNA, 13 bp, Artificial Sequence
  Oligonucleotide for detection of SNP TSC0001868
taaaaatcactaa

SEQ ID NO: 5723 - DNA, 13 bp, Artificial Sequence
  Oligonucleotide for detection of SNP TSC0001868
ttagtgtttttta

SEQ ID NO: 5724 - DNA, 13 bp, Artificial Sequence
  Oligonucleotide for detection of SNP TSC0001868
taaaaaacactaa

SEQ ID NO: 5725 - DNA, 13 bp, Artificial Sequence
  Oligonucleotide for detection of SNP TSC0001868
tgaaaattattga

SEQ ID NO: 5726 - DNA, 13 bp, Artificial Sequence
  Oligonucleotide for detection of SNP TSC0001868
tcaataattttca

SEQ ID NO: 5727 - DNA, 13 bp, Artificial Sequence
  Oligonucleotide for detection of SNP TSC0001868
tgaaaaatattga

SEQ ID NO: 5728 - DNA, 13 bp, Artificial Sequence
  Oligonucleotide for detection of SNP TSC0001868
tcaatatttttca

SEQ ID NO: 5729 - DNA, 13 bp, Artificial Sequence
  Oligonucleotide for detection of SNP TSC0001869
ggtgatgagtttg

SEQ ID NO: 5730 - DNA, 13 bp, Artificial Sequence
  Oligonucleotide for detection of SNP TSC0001869
caaactcatcacc

SEQ ID NO: 5731 - DNA, 13 bp, Artificial Sequence
  Oligonucleotide for detection of SNP TSC0001869
ggtgataagtttg

SEQ ID NO: 5732 - DNA, 13 bp, Artificial Sequence
  Oligonucleotide for detection of SNP TSC0001869
caaacttatcacc

SEQ ID NO: 5733 - DNA, 13 bp, Artificial Sequence
  Oligonucleotide for detection of SNP TSC0001871
gttttttggatay

SEQ ID NO: 5734 - DNA, 13 bp, Artificial Sequence
  Oligonucleotide for detection of SNP TSC0001871
rtatccaaaaaac

SEQ ID NO: 5735 - DNA, 13 bp, Artificial Sequence
  Oligonucleotide for detection of SNP TSC0001871
gtttttcggatay

SEQ ID NO: 5736 - DNA, 13 bp, Artificial Sequence
  Oligonucleotide for detection of SNP TSC0001871
rtatccgaaaaac

SEQ ID NO: 5737 - DNA, 13 bp, Artificial Sequence
  Oligonucleotide for detection of SNP TSC0001871
gtatttgaggagy

SEQ ID NO: 5738 - DNA, 13 bp, Artificial Sequence
  Oligonucleotide for detection of SNP TSC0001871
rctcctcaaatac

SEQ ID NO: 5739 - DNA, 13 bp, Artificial Sequence
  Oligonucleotide for detection of SNP TSC0001871
gtatttaaggagy

SEQ ID NO: 5740 - DNA, 13 bp, Artificial Sequence
  Oligonucleotide for detection of SNP TSC0001871
rctccttaaatac

SEQ ID NO: 5741 - DNA, 13 bp, Artificial Sequence
  Oligonucleotide for detection of SNP TSC0001871
gtattcgaggagy

SEQ ID NO: 5742 - DNA, 13 bp, Artificial Sequence
  Oligonucleotide for detection of SNP TSC0001871
rctcctcgaatac

SEQ ID NO: 5743 - DNA, 13 bp, Artificial Sequence
  Oligonucleotide for detection of SNP TSC0001873
aaaattgtattay

SEQ ID NO: 5744 - DNA, 13 bp, Artificial Sequence
  Oligonucleotide for detection of SNP TSC0001873
rtaatacaatttt

SEQ ID NO: 5745 - DNA, 13 bp, Artificial Sequence
  Oligonucleotide for detection of SNP TSC0001873
aaaattatattay

SEQ ID NO: 5746 - DNA, 13 bp, Artificial Sequence
  Oligonucleotide for detection of SNP TSC0001873
rtaatataatttt

SEQ ID NO: 5747 - DNA, 13 bp, Artificial Sequence
  Oligonucleotide for detection of SNP TSC0001874
agaataataataa

SEQ ID NO: 5748 - DNA, 13 bp, Artificial Sequence
  Oligonucleotide for detection of SNP TSC0001874
ttattattattct

SEQ ID NO: 5749 - DNA, 13 bp, Artificial Sequence
  Oligonucleotide for detection of SNP TSC0001874
agaatattaataa

SEQ ID NO: 5750 - DNA, 13 bp, Artificial Sequence
  Oligonucleotide for detection of SNP TSC0001874
ttattaatattct

SEQ ID NO: 5751 - DNA, 13 bp, Artificial Sequence
  Oligonucleotide for detection of SNP TSC0001874
ttgttattatttt

SEQ ID NO: 5752 - DNA, 13 bp, Artificial Sequence
  Oligonucleotide for detection of SNP TSC0001874
aaaataataacaa

SEQ ID NO: 5753 - DNA, 13 bp, Artificial Sequence
  Oligonucleotide for detection of SNP TSC0001874
ttgttagtatttt

SEQ ID NO: 5754 - DNA, 13 bp, Artificial Sequence
  Oligonucleotide for detection of SNP TSC0001874
aaaatactaacaa

SEQ ID NO: 5755 - DNA, 13 bp, Artificial Sequence
  Oligonucleotide for detection of SNP TSC0001875
tatgttgtattty

SEQ ID NO: 5756 - DNA, 13 bp, Artificial Sequence
  Oligonucleotide for detection of SNP TSC0001875
raaatacaacata

SEQ ID NO: 5757 - DNA, 13 bp, Artificial Sequence
  Oligonucleotide for detection of SNP TSC0001875
tatgttatattty

SEQ ID NO: 5758 - DNA, 13 bp, Artificial Sequence
  Oligonucleotide for detection of SNP TSC0001875
raaatataacata

SEQ ID NO: 5759 - DNA, 13 bp, Artificial Sequence
  Oligonucleotide for detection of SNP TSC0001875
tacgttgtattty

SEQ ID NO: 5760 - DNA, 13 bp, Artificial Sequence
  Oligonucleotide for detection of SNP TSC0001875
raaatacaacgta

SEQ ID NO: 5761 - DNA, 13 bp, Artificial Sequence
  Oligonucleotide for detection of SNP TSC0001875
tacgttatattty

SEQ ID NO: 5762 - DNA, 13 bp, Artificial Sequence
  Oligonucleotide for detection of SNP TSC0001875
raaatataacgta

SEQ ID NO: 5763 - DNA, 13 bp, Artificial Sequence
  Oligonucleotide for detection of SNP TSC0001876
aattaaagtatty

SEQ ID NO: 5764 - DNA, 13 bp, Artificial Sequence
  Oligonucleotide for detection of SNP TSC0001876
raatactttaatt

SEQ ID NO: 5765 - DNA, 13 bp, Artificial Sequence
  Oligonucleotide for detection of SNP TSC0001876
aattaaggtatty

SEQ ID NO: 5766 - DNA, 13 bp, Artificial Sequence
  Oligonucleotide for detection of SNP TSC0001876
raataccttaatt

SEQ ID NO: 5767 - DNA, 13 bp, Artificial Sequence
  Oligonucleotide for detection of SNP TSC0001877
ttttaaattgggg

SEQ ID NO: 5768 - DNA, 13 bp, Artificial Sequence
  Oligonucleotide for detection of SNP TSC0001877
ccccaatttaaaa

SEQ ID NO: 5769 - DNA, 13 bp, Artificial Sequence
  Oligonucleotide for detection of SNP TSC0001877
ttttaatttgggg

SEQ ID NO: 5770 - DNA, 13 bp, Artificial Sequence
  Oligonucleotide for detection of SNP TSC0001877
ccccaaattaaaa

SEQ ID NO: 5771 - DNA, 13 bp, Artificial Sequence
  Oligonucleotide for detection of SNP TSC0001877
ttttagtttaaga

SEQ ID NO: 5772 - DNA, 13 bp, Artificial Sequence
  Oligonucleotide for detection of SNP TSC0001877
tcttaaactaaaa

SEQ ID NO: 5773 - DNA, 13 bp, Artificial Sequence
  Oligonucleotide for detection of SNP TSC0001877
ttttaggttaaga

SEQ ID NO: 5774 - DNA, 13 bp, Artificial Sequence
  Oligonucleotide for detection of SNP TSC0001877
tcttaacctaaaa

SEQ ID NO: 5775 - DNA, 13 bp, Artificial Sequence
  Oligonucleotide for detection of SNP TSC0001878
ttttatttttttt

SEQ ID NO: 5776 - DNA, 13 bp, Artificial Sequence
  Oligonucleotide for detection of SNP TSC0001878
aaaaaaaataaaa

SEQ ID NO: 5777 - DNA, 13 bp, Artificial Sequence
  Oligonucleotide for detection of SNP TSC0001878
aggaaatataagg

SEQ ID NO: 5778 - DNA, 13 bp, Artificial Sequence
  Oligonucleotide for detection of SNP TSC0001878
ccttatatttcct

SEQ ID NO: 5779 - DNA, 13 bp, Artificial Sequence
  Oligonucleotide for detection of SNP TSC0001878
aggaaaaataagg

SEQ ID NO: 5780 - DNA, 13 bp, Artificial Sequence
  Oligonucleotide for detection of SNP TSC0001878
ccttatttttcct

SEQ ID NO: 5781 - DNA, 13 bp, Artificial Sequence
  Oligonucleotide for detection of SNP TSC0001879
gtttaattgattt

SEQ ID NO: 5782 - DNA, 13 bp, Artificial Sequence
  Oligonucleotide for detection of SNP TSC0001879
aaatcaattaaac

SEQ ID NO: 5783 - DNA, 13 bp, Artificial Sequence
  Oligonucleotide for detection of SNP TSC0001879
gtttaagtgattt

SEQ ID NO: 5784 - DNA, 13 bp, Artificial Sequence
  Oligonucleotide for detection of SNP TSC0001879
aaatcacttaaac

SEQ ID NO: 5785 - DNA, 13 bp, Artificial Sequence
  Oligonucleotide for detection of SNP TSC0001879
aaattagttgggy

SEQ ID NO: 5786 - DNA, 13 bp, Artificial Sequence
  Oligonucleotide for detection of SNP TSC0001879
rcccaactaattt

SEQ ID NO: 5787 - DNA, 13 bp, Artificial Sequence
  Oligonucleotide for detection of SNP TSC0001879
aaattatttgggy

SEQ ID NO: 5788 - DNA, 13 bp, Artificial Sequence
  Oligonucleotide for detection of SNP TSC0001879
rcccaaataattt

SEQ ID NO: 5789 - DNA, 13 bp, Artificial Sequence
  Oligonucleotide for detection of SNP TSC0001880
gtattgatagggy

SEQ ID NO: 5790 - DNA, 13 bp, Artificial Sequence
  Oligonucleotide for detection of SNP TSC0001880
rccctatcaatac

SEQ ID NO: 5791 - DNA, 13 bp, Artificial Sequence
  Oligonucleotide for detection of SNP TSC0001880
gtattggtagggy

SEQ ID NO: 5792 - DNA, 13 bp, Artificial Sequence
  Oligonucleotide for detection of SNP TSC0001880
rccctaccaatac

SEQ ID NO: 5793 - DNA, 13 bp, Artificial Sequence
  Oligonucleotide for detection of SNP TSC0001881
taaaatatgttty

SEQ ID NO: 5794 - DNA, 13 bp, Artificial Sequence
  Oligonucleotide for detection of SNP TSC0001881
raaacatatttta

SEQ ID NO: 5795 - DNA, 13 bp, Artificial Sequence
  Oligonucleotide for detection of SNP TSC0001881
taaaatgtgttty

SEQ ID NO: 5796 - DNA, 13 bp, Artificial Sequence
  Oligonucleotide for detection of SNP TSC0001881
raaacacatttta

SEQ ID NO: 5797 - DNA, 13 bp, Artificial Sequence
  Oligonucleotide for detection of SNP TSC0001882
aggtataatgagg

SEQ ID NO: 5798 - DNA, 13 bp, Artificial Sequence
  Oligonucleotide for detection of SNP TSC0001882
cctcattatacct

SEQ ID NO: 5799 - DNA, 13 bp, Artificial Sequence
  Oligonucleotide for detection of SNP TSC0001882
aggtatgatgagg

SEQ ID NO: 5800 - DNA, 13 bp, Artificial Sequence
  Oligonucleotide for detection of SNP TSC0001882
cctcatcatacct

SEQ ID NO: 5801 - DNA, 13 bp, Artificial Sequence
  Oligonucleotide for detection of SNP TSC0001882
aggtacgatgagg

SEQ ID NO: 5802 - DNA, 13 bp, Artificial Sequence
  Oligonucleotide for detection of SNP TSC0001882
cctcatcgtacct

SEQ ID NO: 5803 - DNA, 13 bp, Artificial Sequence
  Oligonucleotide for detection of SNP TSC0001882
ttttattgtgttt

SEQ ID NO: 5804 - DNA, 13 bp, Artificial Sequence
  Oligonucleotide for detection of SNP TSC0001882
aaacacaataaaa

SEQ ID NO: 5805 - DNA, 13 bp, Artificial Sequence
  Oligonucleotide for detection of SNP TSC0001882
ttttatcgtgttt

SEQ ID NO: 5806 - DNA, 13 bp, Artificial Sequence
  Oligonucleotide for detection of SNP TSC0001882
aaacacgataaaa

SEQ ID NO: 5807 - DNA, 13 bp, Artificial Sequence
  Oligonucleotide for detection of SNP TSC0001883
tattggtggtagg

SEQ ID NO: 5808 - DNA, 13 bp, Artificial Sequence
  Oligonucleotide for detection of SNP TSC0001883
cctaccaccaata

SEQ ID NO: 5809 - DNA, 13 bp, Artificial Sequence
  Oligonucleotide for detection of SNP TSC0001883
tatcggtggtagg

SEQ ID NO: 5810 - DNA, 13 bp, Artificial Sequence
  Oligonucleotide for detection of SNP TSC0001883
cctaccaccgata

SEQ ID NO: 5811 - DNA, 13 bp, Artificial Sequence
  Oligonucleotide for detection of SNP TSC0001883
tattggcggtagg

SEQ ID NO: 5812 - DNA, 13 bp, Artificial Sequence
  Oligonucleotide for detection of SNP TSC0001883
cctaccgccaata

SEQ ID NO: 5813 - DNA, 13 bp, Artificial Sequence
  Oligonucleotide for detection of SNP TSC0001883
tatcggcggtagg

SEQ ID NO: 5814 - DNA, 13 bp, Artificial Sequence
  Oligonucleotide for detection of SNP TSC0001883
cctaccgccgata

SEQ ID NO: 5815 - DNA, 13 bp, Artificial Sequence
  Oligonucleotide for detection of SNP TSC0001883
tttgttgttggta

SEQ ID NO: 5816 - DNA, 13 bp, Artificial Sequence
  Oligonucleotide for detection of SNP TSC0001883
taccaacaacaaa

SEQ ID NO: 5817 - DNA, 13 bp, Artificial Sequence
  Oligonucleotide for detection of SNP TSC0001883
tttgttattggta

SEQ ID NO: 5818 - DNA, 13 bp, Artificial Sequence
  Oligonucleotide for detection of SNP TSC0001883
taccaataacaaa

SEQ ID NO: 5819 - DNA, 13 bp, Artificial Sequence
  Oligonucleotide for detection of SNP TSC0001883
tttgtcgttggta

SEQ ID NO: 5820 - DNA, 13 bp, Artificial Sequence
  Oligonucleotide for detection of SNP TSC0001883
taccaacgacaaa

SEQ ID NO: 5821 - DNA, 13 bp, Artificial Sequence
  Oligonucleotide for detection of SNP TSC0001883
tttgttatcggta

SEQ ID NO: 5822 - DNA, 13 bp, Artificial Sequence
  Oligonucleotide for detection of SNP TSC0001883
taccgataacaaa

SEQ ID NO: 5823 - DNA, 13 bp, Artificial Sequence
  Oligonucleotide for detection of SNP TSC0001883
tttgttgtcggta

SEQ ID NO: 5824 - DNA, 13 bp, Artificial Sequence
  Oligonucleotide for detection of SNP TSC0001883
taccgacaacaaa

SEQ ID NO: 5825 - DNA, 13 bp, Artificial Sequence
  Oligonucleotide for detection of SNP TSC0001883
tttgtcgtcggta

SEQ ID NO: 5826 - DNA, 13 bp, Artificial Sequence
  Oligonucleotide for detection of SNP TSC0001883
taccgacgacaaa

SEQ ID NO: 5827 - DNA, 13 bp, Artificial Sequence
  Oligonucleotide for detection of SNP TSC0001884
ggttttagtgttt

SEQ ID NO: 5828 - DNA, 13 bp, Artificial Sequence
  Oligonucleotide for detection of SNP TSC0001884
aaacactaaaacc

SEQ ID NO: 5829 - DNA, 13 bp, Artificial Sequence
  Oligonucleotide for detection of SNP TSC0001884
ggttttggtgttt

SEQ ID NO: 5830 - DNA, 13 bp, Artificial Sequence
  Oligonucleotide for detection of SNP TSC0001884
aaacaccaaaacc

SEQ ID NO: 5831 - DNA, 13 bp, Artificial Sequence
  Oligonucleotide for detection of SNP TSC0001884
ggtttcggtgttt

SEQ ID NO: 5832 - DNA, 13 bp, Artificial Sequence
  Oligonucleotide for detection of SNP TSC0001884
aaacaccgaaacc

SEQ ID NO: 5833 - DNA, 13 bp, Artificial Sequence
  Oligonucleotide for detection of SNP TSC0001884
agatattggagty

SEQ ID NO: 5834 - DNA, 13 bp, Artificial Sequence
  Oligonucleotide for detection of SNP TSC0001884
ractccaatatct

SEQ ID NO: 5835 - DNA, 13 bp, Artificial Sequence
  Oligonucleotide for detection of SNP TSC0001884
agatatcggagty

SEQ ID NO: 5836 - DNA, 13 bp, Artificial Sequence
  Oligonucleotide for detection of SNP TSC0001884
ractccgatatct

SEQ ID NO: 5837 - DNA, 13 bp, Artificial Sequence
  Oligonucleotide for detection of SNP TSC0001885
tttgtagaagttt

SEQ ID NO: 5838 - DNA, 13 bp, Artificial Sequence
  Oligonucleotide for detection of SNP TSC0001885
aaacttctacaaa

SEQ ID NO: 5839 - DNA, 13 bp, Artificial Sequence
  Oligonucleotide for detection of SNP TSC0001885
tttgtaaaagttt

SEQ ID NO: 5840 - DNA, 13 bp, Artificial Sequence
  Oligonucleotide for detection of SNP TSC0001885
aaacttttacaaa

SEQ ID NO: 5841 - DNA, 13 bp, Artificial Sequence
  Oligonucleotide for detection of SNP TSC0001886
taaagttttggga

SEQ ID NO: 5842 - DNA, 13 bp, Artificial Sequence
  Oligonucleotide for detection of SNP TSC0001886
tcccaaaacttta

SEQ ID NO: 5843 - DNA, 13 bp, Artificial Sequence
  Oligonucleotide for detection of SNP TSC0001886
taaagtgttggga

SEQ ID NO: 5844 - DNA, 13 bp, Artificial Sequence
  Oligonucleotide for detection of SNP TSC0001886
tcccaacacttta

SEQ ID NO: 5845 - DNA, 13 bp, Artificial Sequence
  Oligonucleotide for detection of SNP TSC0001886
ttttaggattttg

SEQ ID NO: 5846 - DNA, 13 bp, Artificial Sequence
  Oligonucleotide for detection of SNP TSC0001886
caaaatcctaaaa

SEQ ID NO: 5847 - DNA, 13 bp, Artificial Sequence
  Oligonucleotide for detection of SNP TSC0001886
ttttagtattttg

SEQ ID NO: 5848 - DNA, 13 bp, Artificial Sequence
  Oligonucleotide for detection of SNP TSC0001886
caaaatactaaaa

SEQ ID NO: 5849 - DNA, 13 bp, Artificial Sequence
  Oligonucleotide for detection of SNP TSC0001887
ttataaaataata

SEQ ID NO: 5850 - DNA, 13 bp, Artificial Sequence
  Oligonucleotide for detection of SNP TSC0001887
tattattttataa

SEQ ID NO: 5851 - DNA, 13 bp, Artificial Sequence
  Oligonucleotide for detection of SNP TSC0001887
ttataatataata

SEQ ID NO: 5852 - DNA, 13 bp, Artificial Sequence
  Oligonucleotide for detection of SNP TSC0001887
tattatattataa

SEQ ID NO: 5853 - DNA, 13 bp, Artificial Sequence
  Oligonucleotide for detection of SNP TSC0001887
tgttgttttgtaa

SEQ ID NO: 5854 - DNA, 13 bp, Artificial Sequence
  Oligonucleotide for detection of SNP TSC0001887
ttacaaaacaaca

SEQ ID NO: 5855 - DNA, 13 bp, Artificial Sequence
  Oligonucleotide for detection of SNP TSC0001887
tgttgtgttgtaa

SEQ ID NO: 5856 - DNA, 13 bp, Artificial Sequence
  Oligonucleotide for detection of SNP TSC0001887
ttacaacacaaca

SEQ ID NO: 5857 - DNA, 13 bp, Artificial Sequence
  Oligonucleotide for detection of SNP TSC0001888
ggtagtgtattta

SEQ ID NO: 5858 - DNA, 13 bp, Artificial Sequence
  Oligonucleotide for detection of SNP TSC0001888
taaatacactacc

SEQ ID NO: 5859 - DNA, 13 bp, Artificial Sequence
  Oligonucleotide for detection of SNP TSC0001888
ggtagtatattta

SEQ ID NO: 5860 - DNA, 13 bp, Artificial Sequence
  Oligonucleotide for detection of SNP TSC0001888
taaatatactacc

SEQ ID NO: 5861 - DNA, 13 bp, Artificial Sequence
  Oligonucleotide for detection of SNP TSC0001889
atatatttaattg

SEQ ID NO: 5862 - DNA, 13 bp, Artificial Sequence
  Oligonucleotide for detection of SNP TSC0001889
caattaaatatat

SEQ ID NO: 5863 - DNA, 13 bp, Artificial Sequence
  Oligonucleotide for detection of SNP TSC0001889
atatatgtaattg

SEQ ID NO: 5864 - DNA, 13 bp, Artificial Sequence
  Oligonucleotide for detection of SNP TSC0001889
caattacatatat

SEQ ID NO: 5865 - DNA, 13 bp, Artificial Sequence
  Oligonucleotide for detection of SNP TSC0001889
taattagatatgt

SEQ ID NO: 5866 - DNA, 13 bp, Artificial Sequence
  Oligonucleotide for detection of SNP TSC0001889
acatatctaatta

SEQ ID NO: 5867 - DNA, 13 bp, Artificial Sequence
  Oligonucleotide for detection of SNP TSC0001889
taattatatatgt

SEQ ID NO: 5868 - DNA, 13 bp, Artificial Sequence
  Oligonucleotide for detection of SNP TSC0001889
acatatataatta

SEQ ID NO: 5869 - DNA, 13 bp, Artificial Sequence
  Oligonucleotide for detection of SNP TSC0001890
tgtattaggttgy

SEQ ID NO: 5870 - DNA, 13 bp, Artificial Sequence
  Oligonucleotide for detection of SNP TSC0001890
rcaacctaataca

SEQ ID NO: 5871 - DNA, 13 bp, Artificial Sequence
  Oligonucleotide for detection of SNP TSC0001890
tgtatttggttgy

SEQ ID NO: 5872 - DNA, 13 bp, Artificial Sequence
  Oligonucleotide for detection of SNP TSC0001890
rcaaccaaataca

SEQ ID NO: 5873 - DNA, 13 bp, Artificial Sequence
  Oligonucleotide for detection of SNP TSC0001890
tgtattaggtcgy

SEQ ID NO: 5874 - DNA, 13 bp, Artificial Sequence
  Oligonucleotide for detection of SNP TSC0001890
rcgacctaataca

SEQ ID NO: 5875 - DNA, 13 bp, Artificial Sequence
  Oligonucleotide for detection of SNP TSC0001890
tgtatttggtcgy

SEQ ID NO: 5876 - DNA, 13 bp, Artificial Sequence
  Oligonucleotide for detection of SNP TSC0001890
rcgaccaaataca

SEQ ID NO: 5877 - DNA, 13 bp, Artificial Sequence
  Oligonucleotide for detection of SNP TSC0001890
gtgatttggtgta

SEQ ID NO: 5878 - DNA, 13 bp, Artificial Sequence
  Oligonucleotide for detection of SNP TSC0001890
tacaccaaatcac

SEQ ID NO: 5879 - DNA, 13 bp, Artificial Sequence
  Oligonucleotide for detection of SNP TSC0001890
gtgattaggtgta

SEQ ID NO: 5880 - DNA, 13 bp, Artificial Sequence
  Oligonucleotide for detection of SNP TSC0001890
tacacctaatcac

SEQ ID NO: 5881 - DNA, 13 bp, Artificial Sequence
  Oligonucleotide for detection of SNP TSC0001890
gcgatttggtgta

SEQ ID NO: 5882 - DNA, 13 bp, Artificial Sequence
  Oligonucleotide for detection of SNP TSC0001890
tacaccaaatcgc

SEQ ID NO: 5883 - DNA, 13 bp, Artificial Sequence
  Oligonucleotide for detection of SNP TSC0001890
gcgattaggtgta

SEQ ID NO: 5884 - DNA, 13 bp, Artificial Sequence
  Oligonucleotide for detection of SNP TSC0001890
tacacctaatcgc

SEQ ID NO: 5885 - DNA, 13 bp, Artificial Sequence
  Oligonucleotide for detection of SNP TSC0001891
atgtgtataattt

SEQ ID NO: 5886 - DNA, 13 bp, Artificial Sequence
  Oligonucleotide for detection of SNP TSC0001891
aaattatacacat

SEQ ID NO: 5887 - DNA, 13 bp, Artificial Sequence
  Oligonucleotide for detection of SNP TSC0001891
atgtgtttaattt

SEQ ID NO: 5888 - DNA, 13 bp, Artificial Sequence
  Oligonucleotide for detection of SNP TSC0001891
aaattaaacacat

SEQ ID NO: 5889 - DNA, 13 bp, Artificial Sequence
  Oligonucleotide for detection of SNP TSC0001891
acgtgtataattt

SEQ ID NO: 5890 - DNA, 13 bp, Artificial Sequence
  Oligonucleotide for detection of SNP TSC0001891
aaattatacacgt

SEQ ID NO: 5891 - DNA, 13 bp, Artificial Sequence
  Oligonucleotide for detection of SNP TSC0001891
acgtgtttaattt

SEQ ID NO: 5892 - DNA, 13 bp, Artificial Sequence
  Oligonucleotide for detection of SNP TSC0001891
aaattaaacacgt

SEQ ID NO: 5893 - DNA, 13 bp, Artificial Sequence
  Oligonucleotide for detection of SNP TSC0001891
agattatgtatgt

SEQ ID NO: 5894 - DNA, 13 bp, Artificial Sequence
  Oligonucleotide for detection of SNP TSC0001891
acatacataatct

SEQ ID NO: 5895 - DNA, 13 bp, Artificial Sequence
  Oligonucleotide for detection of SNP TSC0001891
agattaagtatgt

SEQ ID NO: 5896 - DNA, 13 bp, Artificial Sequence
  Oligonucleotide for detection of SNP TSC0001891
acatacttaatct

SEQ ID NO: 5897 - DNA, 13 bp, Artificial Sequence
  Oligonucleotide for detection of SNP TSC0001891
agattatgtacgt

SEQ ID NO: 5898 - DNA, 13 bp, Artificial Sequence
  Oligonucleotide for detection of SNP TSC0001891
acgtacataatct

SEQ ID NO: 5899 - DNA, 13 bp, Artificial Sequence
  Oligonucleotide for detection of SNP TSC0001891
agattaagtacgt

SEQ ID NO: 5900 - DNA, 13 bp, Artificial Sequence
  Oligonucleotide for detection of SNP TSC0001891
acgtacttaatct

SEQ ID NO: 5901 - DNA, 13 bp, Artificial Sequence
  Oligonucleotide for detection of SNP TSC0001892
attaggaagttgy

SEQ ID NO: 5902 - DNA, 13 bp, Artificial Sequence
  Oligonucleotide for detection of SNP TSC0001892
rcaacttcctaat

SEQ ID NO: 5903 - DNA, 13 bp, Artificial Sequence
  Oligonucleotide for detection of SNP TSC0001892
attaggtagttgy

SEQ ID NO: 5904 - DNA, 13 bp, Artificial Sequence
  Oligonucleotide for detection of SNP TSC0001892
rcaactacctaat

SEQ ID NO: 5905 - DNA, 13 bp, Artificial Sequence
  Oligonucleotide for detection of SNP TSC0001892
gtaattttttagt

SEQ ID NO: 5906 - DNA, 13 bp, Artificial Sequence
  Oligonucleotide for detection of SNP TSC0001892
actaaaaaattac

SEQ ID NO: 5907 - DNA, 13 bp, Artificial Sequence
  Oligonucleotide for detection of SNP TSC0001892
gtaattgtttagt

SEQ ID NO: 5908 - DNA, 13 bp, Artificial Sequence
  Oligonucleotide for detection of SNP TSC0001892
actaaacaattac

SEQ ID NO: 5909 - DNA, 13 bp, Artificial Sequence
  Oligonucleotide for detection of SNP TSC0001893
tatagtgttatgt

SEQ ID NO: 5910 - DNA, 13 bp, Artificial Sequence
  Oligonucleotide for detection of SNP TSC0001893
acataacactata

SEQ ID NO: 5911 - DNA, 13 bp, Artificial Sequence
  Oligonucleotide for detection of SNP TSC0001893
tatagtattatgt

SEQ ID NO: 5912 - DNA, 13 bp, Artificial Sequence
  Oligonucleotide for detection of SNP TSC0001893
acataatactata

SEQ ID NO: 5913 - DNA, 13 bp, Artificial Sequence
  Oligonucleotide for detection of SNP TSC0001894
gtaattaggagaa

SEQ ID NO: 5914 - DNA, 13 bp, Artificial Sequence
  Oligonucleotide for detection of SNP TSC0001894
ttctcctaattac

SEQ ID NO: 5915 - DNA, 13 bp, Artificial Sequence
  Oligonucleotide for detection of SNP TSC0001894
gtaattgggagaa

SEQ ID NO: 5916 - DNA, 13 bp, Artificial Sequence
  Oligonucleotide for detection of SNP TSC0001894
ttctcccaattac

SEQ ID NO: 5917 - DNA, 13 bp, Artificial Sequence
  Oligonucleotide for detection of SNP TSC0001894
gtaatcgggagaa

SEQ ID NO: 5918 - DNA, 13 bp, Artificial Sequence
  Oligonucleotide for detection of SNP TSC0001894
ttctcccgattac

SEQ ID NO: 5919 - DNA, 13 bp, Artificial Sequence
  Oligonucleotide for detection of SNP TSC0001894
tttttttgattgy

SEQ ID NO: 5920 - DNA, 13 bp, Artificial Sequence
  Oligonucleotide for detection of SNP TSC0001894
rcaatcaaaaaaa

SEQ ID NO: 5921 - DNA, 13 bp, Artificial Sequence
  Oligonucleotide for detection of SNP TSC0001894
ttttttcgattgy

SEQ ID NO: 5922 - DNA, 13 bp, Artificial Sequence
  Oligonucleotide for detection of SNP TSC0001894
rcaatcgaaaaaa

SEQ ID NO: 5923 - DNA, 13 bp, Artificial Sequence
  Oligonucleotide for detection of SNP TSC0001895
tttattattattt

SEQ ID NO: 5924 - DNA, 13 bp, Artificial Sequence
  Oligonucleotide for detection of SNP TSC0001895
aaataataataaa

SEQ ID NO: 5925 - DNA, 13 bp, Artificial Sequence
  Oligonucleotide for detection of SNP TSC0001895
tttattgttattt

SEQ ID NO: 5926 - DNA, 13 bp, Artificial Sequence
  Oligonucleotide for detection of SNP TSC0001895
aaataacaataaa

SEQ ID NO: 5927 - DNA, 13 bp, Artificial Sequence
  Oligonucleotide for detection of SNP TSC0001896
tgtgtaaattaaa

SEQ ID NO: 5928 - DNA, 13 bp, Artificial Sequence
  Oligonucleotide for detection of SNP TSC0001896
tttaatttacaca

SEQ ID NO: 5929 - DNA, 13 bp, Artificial Sequence
  Oligonucleotide for detection of SNP TSC0001896
tgtgtagattaaa

SEQ ID NO: 5930 - DNA, 13 bp, Artificial Sequence
  Oligonucleotide for detection of SNP TSC0001896
tttaatctacaca

SEQ ID NO: 5931 - DNA, 13 bp, Artificial Sequence
  Oligonucleotide for detection of SNP TSC0001897
gtatttaatatty

SEQ ID NO: 5932 - DNA, 13 bp, Artificial Sequence
  Oligonucleotide for detection of SNP TSC0001897
raatattaaatac

SEQ ID NO: 5933 - DNA, 13 bp, Artificial Sequence
  Oligonucleotide for detection of SNP TSC0001897
gtatttgatatty

SEQ ID NO: 5934 - DNA, 13 bp, Artificial Sequence
  Oligonucleotide for detection of SNP TSC0001897
raatatcaaatac

SEQ ID NO: 5935 - DNA, 13 bp, Artificial Sequence
  Oligonucleotide for detection of SNP TSC0001897
gtattcgatatty

SEQ ID NO: 5936 - DNA, 13 bp, Artificial Sequence
  Oligonucleotide for detection of SNP TSC0001897
raatatcgaatac

SEQ ID NO: 5937 - DNA, 13 bp, Artificial Sequence
  Oligonucleotide for detection of SNP TSC0001897
gggtattgggtay

SEQ ID NO: 5938 - DNA, 13 bp, Artificial Sequence
  Oligonucleotide for detection of SNP TSC0001897
rtacccaataccc

SEQ ID NO: 5939 - DNA, 13 bp, Artificial Sequence
  Oligonucleotide for detection of SNP TSC0001897
gggtatcgggtay

SEQ ID NO: 5940 - DNA, 13 bp, Artificial Sequence
  Oligonucleotide for detection of SNP TSC0001897
rtacccgataccc

SEQ ID NO: 5941 - DNA, 13 bp, Artificial Sequence
  Oligonucleotide for detection of SNP TSC0001898
attttttaggata

SEQ ID NO: 5942 - DNA, 13 bp, Artificial Sequence
  Oligonucleotide for detection of SNP TSC0001898
tatcctaaaaaat

SEQ ID NO: 5943 - DNA, 13 bp, Artificial Sequence
  Oligonucleotide for detection of SNP TSC0001898
atttttgaggata

SEQ ID NO: 5944 - DNA, 13 bp, Artificial Sequence
  Oligonucleotide for detection of SNP TSC0001898
tatcctcaaaaat

SEQ ID NO: 5945 - DNA, 13 bp, Artificial Sequence
  Oligonucleotide for detection of SNP TSC0001898
tattttgaggaat

SEQ ID NO: 5946 - DNA, 13 bp, Artificial Sequence
  Oligonucleotide for detection of SNP TSC0001898
attcctcaaaata

SEQ ID NO: 5947 - DNA, 13 bp, Artificial Sequence
  Oligonucleotide for detection of SNP TSC0001898
tatttttaggaat

SEQ ID NO: 5948 - DNA, 13 bp, Artificial Sequence
  Oligonucleotide for detection of SNP TSC0001898
attcctaaaaata

SEQ ID NO: 5949 - DNA, 13 bp, Artificial Sequence
  Oligonucleotide for detection of SNP TSC0001899
atatagataatay

SEQ ID NO: 5950 - DNA, 13 bp, Artificial Sequence
  Oligonucleotide for detection of SNP TSC0001899
rtattatctatat

SEQ ID NO: 5951 - DNA, 13 bp, Artificial Sequence
  Oligonucleotide for detection of SNP TSC0001899
atataggtaatay

SEQ ID NO: 5952 - DNA, 13 bp, Artificial Sequence
  Oligonucleotide for detection of SNP TSC0001899
rtattacctatat

SEQ ID NO: 5953 - DNA, 13 bp, Artificial Sequence
  Oligonucleotide for detection of SNP TSC0001900
gtgtatgtattay

SEQ ID NO: 5954 - DNA, 13 bp, Artificial Sequence
  Oligonucleotide for detection of SNP TSC0001900
rtaatacatacac

SEQ ID NO: 5955 - DNA, 13 bp, Artificial Sequence
  Oligonucleotide for detection of SNP TSC0001900
gtgtatatattay

SEQ ID NO: 5956 - DNA, 13 bp, Artificial Sequence
  Oligonucleotide for detection of SNP TSC0001900
rtaatatatacac

SEQ ID NO: 5957 - DNA, 13 bp, Artificial Sequence
  Oligonucleotide for detection of SNP TSC0001903
tgatattaatatt

SEQ ID NO: 5958 - DNA, 13 bp, Artificial Sequence
  Oligonucleotide for detection of SNP TSC0001903
aatattaatatca

SEQ ID NO: 5959 - DNA, 13 bp, Artificial Sequence
  Oligonucleotide for detection of SNP TSC0001903
tgatatgaatatt

SEQ ID NO: 5960 - DNA, 13 bp, Artificial Sequence
  Oligonucleotide for detection of SNP TSC0001903
aatattcatatca

SEQ ID NO: 5961 - DNA, 13 bp, Artificial Sequence
  Oligonucleotide for detection of SNP TSC0001903
aatattaatgtta

SEQ ID NO: 5962 - DNA, 13 bp, Artificial Sequence
  Oligonucleotide for detection of SNP TSC0001903
taacattaatatt

SEQ ID NO: 5963 - DNA, 13 bp, Artificial Sequence
  Oligonucleotide for detection of SNP TSC0001903
aatatttatgtta

SEQ ID NO: 5964 - DNA, 13 bp, Artificial Sequence
  Oligonucleotide for detection of SNP TSC0001903
taacataaatatt

SEQ ID NO: 5965 - DNA, 13 bp, Artificial Sequence
  Oligonucleotide for detection of SNP TSC0001904
tttgtaaattttg

SEQ ID NO: 5966 - DNA, 13 bp, Artificial Sequence
  Oligonucleotide for detection of SNP TSC0001904
caaaatttacaaa

SEQ ID NO: 5967 - DNA, 13 bp, Artificial Sequence
  Oligonucleotide for detection of SNP TSC0001904
tttgtagattttg

SEQ ID NO: 5968 - DNA, 13 bp, Artificial Sequence
  Oligonucleotide for detection of SNP TSC0001904
caaaatctacaaa

SEQ ID NO: 5969 - DNA, 13 bp, Artificial Sequence
  Oligonucleotide for detection of SNP TSC0001907
tgttttatttttt

SEQ ID NO: 5970 - DNA, 13 bp, Artificial Sequence
  Oligonucleotide for detection of SNP TSC0001907
aaaaaataaaaca

SEQ ID NO: 5971 - DNA, 13 bp, Artificial Sequence
  Oligonucleotide for detection of SNP TSC0001907
tgttttttttttt

SEQ ID NO: 5972 - DNA, 13 bp, Artificial Sequence
  Oligonucleotide for detection of SNP TSC0001907
aaaaaaaaaaaca

SEQ ID NO: 5973 - DNA, 13 bp, Artificial Sequence
  Oligonucleotide for detection of SNP TSC0001907
aaaaaataaaata

SEQ ID NO: 5974 - DNA, 13 bp, Artificial Sequence
  Oligonucleotide for detection of SNP TSC0001907
tattttatttttt

SEQ ID NO: 5975 - DNA, 13 bp, Artificial Sequence
  Oligonucleotide for detection of SNP TSC0001908
ttagtgaaggttg

SEQ ID NO: 5976 - DNA, 13 bp, Artificial Sequence
  Oligonucleotide for detection of SNP TSC0001908
caaccttcactaa

SEQ ID NO: 5977 - DNA, 13 bp, Artificial Sequence
  Oligonucleotide for detection of SNP TSC0001908
ttagtggaggttg

SEQ ID NO: 5978 - DNA, 13 bp, Artificial Sequence
  Oligonucleotide for detection of SNP TSC0001908
caacctccactaa

SEQ ID NO: 5979 - DNA, 13 bp, Artificial Sequence
  Oligonucleotide for detection of SNP TSC0001909
attattgttttty

SEQ ID NO: 5980 - DNA, 13 bp, Artificial Sequence
  Oligonucleotide for detection of SNP TSC0001909
raaaaacaataat

SEQ ID NO: 5981 - DNA, 13 bp, Artificial Sequence
  Oligonucleotide for detection of SNP TSC0001909
attattattttty

SEQ ID NO: 5982 - DNA, 13 bp, Artificial Sequence
  Oligonucleotide for detection of SNP TSC0001909
raaaaataataat

SEQ ID NO: 5983 - DNA, 13 bp, Artificial Sequence
  Oligonucleotide for detection of SNP TSC0001910
gtattaaatttty

SEQ ID NO: 5984 - DNA, 13 bp, Artificial Sequence
  Oligonucleotide for detection of SNP TSC0001910
raaaatttaatac

SEQ ID NO: 5985 - DNA, 13 bp, Artificial Sequence
  Oligonucleotide for detection of SNP TSC0001910
gtattatatttty

SEQ ID NO: 5986 - DNA, 13 bp, Artificial Sequence
  Oligonucleotide for detection of SNP TSC0001910
raaaatataatac

SEQ ID NO: 5987 - DNA, 13 bp, Artificial Sequence
  Oligonucleotide for detection of SNP TSC0001910
ggagatttaatgy

SEQ ID NO: 5988 - DNA, 13 bp, Artificial Sequence
  Oligonucleotide for detection of SNP TSC0001910
rcattaaatctcc

SEQ ID NO: 5989 - DNA, 13 bp, Artificial Sequence
  Oligonucleotide for detection of SNP TSC0001910
ggagatgtaatgy

SEQ ID NO: 5990 - DNA, 13 bp, Artificial Sequence
  Oligonucleotide for detection of SNP TSC0001910
rcattacatctcc

SEQ ID NO: 5991 - DNA, 13 bp, Artificial Sequence
  Oligonucleotide for detection of SNP TSC0001911
gaatgtattataa

SEQ ID NO: 5992 - DNA, 13 bp, Artificial Sequence
  Oligonucleotide for detection of SNP TSC0001911
ttataatacattc

SEQ ID NO: 5993 - DNA, 13 bp, Artificial Sequence
  Oligonucleotide for detection of SNP TSC0001911
gaatgttttataa

SEQ ID NO: 5994 - DNA, 13 bp, Artificial Sequence
  Oligonucleotide for detection of SNP TSC0001911
ttataaaacattc

SEQ ID NO: 5995 - DNA, 13 bp, Artificial Sequence
  Oligonucleotide for detection of SNP TSC0001911
ttataatatatty

SEQ ID NO: 5996 - DNA, 13 bp, Artificial Sequence
  Oligonucleotide for detection of SNP TSC0001911
raatatattataa

SEQ ID NO: 5997 - DNA, 13 bp, Artificial Sequence
  Oligonucleotide for detection of SNP TSC0001911
ttataaaatatty

SEQ ID NO: 5998 - DNA, 13 bp, Artificial Sequence
  Oligonucleotide for detection of SNP TSC0001911
raatattttataa

SEQ ID NO: 5999 - DNA, 13 bp, Artificial Sequence
  Oligonucleotide for detection of SNP TSC0001912
ttaaatttgataa

SEQ ID NO: 6000 - DNA, 13 bp, Artificial Sequence
  Oligonucleotide for detection of SNP TSC0001912
ttatcaaatttaa

SEQ ID NO: 6001 - DNA, 13 bp, Artificial Sequence
  Oligonucleotide for detection of SNP TSC0001912
ttaaatgtgataa

SEQ ID NO: 6002 - DNA, 13 bp, Artificial Sequence
  Oligonucleotide for detection of SNP TSC0001912
ttatcacatttaa

SEQ ID NO: 6003 - DNA, 13 bp, Artificial Sequence
  Oligonucleotide for detection of SNP TSC0001912
ttattaaatttga

SEQ ID NO: 6004 - DNA, 13 bp, Artificial Sequence
  Oligonucleotide for detection of SNP TSC0001912
tcaaatttaataa

SEQ ID NO: 6005 - DNA, 13 bp, Artificial Sequence
  Oligonucleotide for detection of SNP TSC0001912
ttattatatttga

SEQ ID NO: 6006 - DNA, 13 bp, Artificial Sequence
  Oligonucleotide for detection of SNP TSC0001912
tcaaatataataa

SEQ ID NO: 6007 - DNA, 13 bp, Artificial Sequence
  Oligonucleotide for detection of SNP TSC0001913
ttgtttaaaaaaa

SEQ ID NO: 6008 - DNA, 13 bp, Artificial Sequence
  Oligonucleotide for detection of SNP TSC0001913
tttttttaaacaa

SEQ ID NO: 6009 - DNA, 13 bp, Artificial Sequence
  Oligonucleotide for detection of SNP TSC0001913
ttgttttaaaaaa

SEQ ID NO: 6010 - DNA, 13 bp, Artificial Sequence
  Oligonucleotide for detection of SNP TSC0001913
ttttttaaaacaa

SEQ ID NO: 6011 - DNA, 13 bp, Artificial Sequence
  Oligonucleotide for detection of SNP TSC0001913
tttttttgggtag

SEQ ID NO: 6012 - DNA, 13 bp, Artificial Sequence
  Oligonucleotide for detection of SNP TSC0001913
ctacccaaaaaaa

SEQ ID NO: 6013 - DNA, 13 bp, Artificial Sequence
  Oligonucleotide for detection of SNP TSC0001913
ttttttggggtag

SEQ ID NO: 6014 - DNA, 13 bp, Artificial Sequence
  Oligonucleotide for detection of SNP TSC0001913
ctaccccaaaaaa

SEQ ID NO: 6015 - DNA, 13 bp, Artificial Sequence
  Oligonucleotide for detection of SNP TSC0001914
gagaatatatatt

SEQ ID NO: 6016 - DNA, 13 bp, Artificial Sequence
  Oligonucleotide for detection of SNP TSC0001914
aatatatattctc

SEQ ID NO: 6017 - DNA, 13 bp, Artificial Sequence
  Oligonucleotide for detection of SNP TSC0001914
gagaatgtatatt

SEQ ID NO: 6018 - DNA, 13 bp, Artificial Sequence
  Oligonucleotide for detection of SNP TSC0001914
aatatacattctc

SEQ ID NO: 6019 - DNA, 13 bp, Artificial Sequence
  Oligonucleotide for detection of SNP TSC0001915
tatatttttataa

SEQ ID NO: 6020 - DNA, 13 bp, Artificial Sequence
  Oligonucleotide for detection of SNP TSC0001915
ttataaaaatata

SEQ ID NO: 6021 - DNA, 13 bp, Artificial Sequence
  Oligonucleotide for detection of SNP TSC0001915
tatattgttataa

SEQ ID NO: 6022 - DNA, 13 bp, Artificial Sequence
  Oligonucleotide for detection of SNP TSC0001915
ttataacaatata

SEQ ID NO: 6023 - DNA, 13 bp, Artificial Sequence
  Oligonucleotide for detection of SNP TSC0001915
tatatcgttataa

SEQ ID NO: 6024 - DNA, 13 bp, Artificial Sequence
  Oligonucleotide for detection of SNP TSC0001915
ttataacgatata

SEQ ID NO: 6025 - DNA, 13 bp, Artificial Sequence
  Oligonucleotide for detection of SNP TSC0001915
ttatgaagatgta

SEQ ID NO: 6026 - DNA, 13 bp, Artificial Sequence
  Oligonucleotide for detection of SNP TSC0001915
tacatcttcataa

SEQ ID NO: 6027 - DNA, 13 bp, Artificial Sequence
  Oligonucleotide for detection of SNP TSC0001915
ttatgatgatgta

SEQ ID NO: 6028 - DNA, 13 bp, Artificial Sequence
  Oligonucleotide for detection of SNP TSC0001915
tacatcatcataa

SEQ ID NO: 6029 - DNA, 13 bp, Artificial Sequence
  Oligonucleotide for detection of SNP TSC0001915
ttatgacgatgta

SEQ ID NO: 6030 - DNA, 13 bp, Artificial Sequence
  Oligonucleotide for detection of SNP TSC0001915
tacatcgtcataa

SEQ ID NO: 6031 - DNA, 13 bp, Artificial Sequence
  Oligonucleotide for detection of SNP TSC0001916
gttagttgttatt

SEQ ID NO: 6032 - DNA, 13 bp, Artificial Sequence
  Oligonucleotide for detection of SNP TSC0001916
aataacaactaac

SEQ ID NO: 6033 - DNA, 13 bp, Artificial Sequence
  Oligonucleotide for detection of SNP TSC0001916
gttagtcgttatt

SEQ ID NO: 6034 - DNA, 13 bp, Artificial Sequence
  Oligonucleotide for detection of SNP TSC0001916
aataacgactaac

SEQ ID NO: 6035 - DNA, 13 bp, Artificial Sequence
  Oligonucleotide for detection of SNP TSC0001916
aatgatgattaay

SEQ ID NO: 6036 - DNA, 13 bp, Artificial Sequence
  Oligonucleotide for detection of SNP TSC0001916
rttaatcatcatt

SEQ ID NO: 6037 - DNA, 13 bp, Artificial Sequence
  Oligonucleotide for detection of SNP TSC0001916
aatgataattaay

SEQ ID NO: 6038 - DNA, 13 bp, Artificial Sequence
  Oligonucleotide for detection of SNP TSC0001916
rttaattatcatt

SEQ ID NO: 6039 - DNA, 13 bp, Artificial Sequence
  Oligonucleotide for detection of SNP TSC0001916
aatgacgattaay

SEQ ID NO: 6040 - DNA, 13 bp, Artificial Sequence
  Oligonucleotide for detection of SNP TSC0001916
rttaatcgtcatt

SEQ ID NO: 6041 - DNA, 13 bp, Artificial Sequence
  Oligonucleotide for detection of SNP TSC0001917
agtattaaggtta

SEQ ID NO: 6042 - DNA, 13 bp, Artificial Sequence
  Oligonucleotide for detection of SNP TSC0001917
taaccttaatact

SEQ ID NO: 6043 - DNA, 13 bp, Artificial Sequence
  Oligonucleotide for detection of SNP TSC0001917
agtatttaggtta

SEQ ID NO: 6044 - DNA, 13 bp, Artificial Sequence
  Oligonucleotide for detection of SNP TSC0001917
taacctaaatact

SEQ ID NO: 6045 - DNA, 13 bp, Artificial Sequence
  Oligonucleotide for detection of SNP TSC0001917
taattttaatgtt

SEQ ID NO: 6046 - DNA, 13 bp, Artificial Sequence
  Oligonucleotide for detection of SNP TSC0001917
aacattaaaatta

SEQ ID NO: 6047 - DNA, 13 bp, Artificial Sequence
  Oligonucleotide for detection of SNP TSC0001917
taatttaaatgtt

SEQ ID NO: 6048 - DNA, 13 bp, Artificial Sequence
  Oligonucleotide for detection of SNP TSC0001917
aacatttaaatta

SEQ ID NO: 6049 - DNA, 13 bp, Artificial Sequence
  Oligonucleotide for detection of SNP TSC0001919
aaagaaataaaag

SEQ ID NO: 6050 - DNA, 13 bp, Artificial Sequence
  Oligonucleotide for detection of SNP TSC0001919
cttttatttcttt

SEQ ID NO: 6051 - DNA, 13 bp, Artificial Sequence
  Oligonucleotide for detection of SNP TSC0001919
aaagaagtaaaag

SEQ ID NO: 6052 - DNA, 13 bp, Artificial Sequence
  Oligonucleotide for detection of SNP TSC0001919
cttttacttcttt

SEQ ID NO: 6053 - DNA, 13 bp, Artificial Sequence
  Oligonucleotide for detection of SNP TSC0001920
ttttgtttgttgy

SEQ ID NO: 6054 - DNA, 13 bp, Artificial Sequence
  Oligonucleotide for detection of SNP TSC0001920
rcaacaaacaaaa

SEQ ID NO: 6055 - DNA, 13 bp, Artificial Sequence
  Oligonucleotide for detection of SNP TSC0001920
ttttgtgtgttgy

SEQ ID NO: 6056 - DNA, 13 bp, Artificial Sequence
  Oligonucleotide for detection of SNP TSC0001920
rcaacacacaaaa

SEQ ID NO: 6057 - DNA, 13 bp, Artificial Sequence
  Oligonucleotide for detection of SNP TSC0001920
ttttgttcgttgy

SEQ ID NO: 6058 - DNA, 13 bp, Artificial Sequence
  Oligonucleotide for detection of SNP TSC0001920
rcaacgaacaaaa

SEQ ID NO: 6059 - DNA, 13 bp, Artificial Sequence
  Oligonucleotide for detection of SNP TSC0001920
ttttgcgtgttgy

SEQ ID NO: 6060 - DNA, 13 bp, Artificial Sequence
  Oligonucleotide for detection of SNP TSC0001920
rcaacacgcaaaa

SEQ ID NO: 6061 - DNA, 13 bp, Artificial Sequence
  Oligonucleotide for detection of SNP TSC0001920
ttttgtgcgttgy

SEQ ID NO: 6062 - DNA, 13 bp, Artificial Sequence
  Oligonucleotide for detection of SNP TSC0001920
rcaacgcacaaaa

SEQ ID NO: 6063 - DNA, 13 bp, Artificial Sequence
  Oligonucleotide for detection of SNP TSC0001920
ttttgcgcgttgy

SEQ ID NO: 6064 - DNA, 13 bp, Artificial Sequence
  Oligonucleotide for detection of SNP TSC0001920
rcaacgcgcaaaa

SEQ ID NO: 6065 - DNA, 13 bp, Artificial Sequence
  Oligonucleotide for detection of SNP TSC0001920
gtagtgagtagag

SEQ ID NO: 6066 - DNA, 13 bp, Artificial Sequence
  Oligonucleotide for detection of SNP TSC0001920
ctctactcactac

SEQ ID NO: 6067 - DNA, 13 bp, Artificial Sequence
  Oligonucleotide for detection of SNP TSC0001920
gtagtgtgtagag

SEQ ID NO: 6068 - DNA, 13 bp, Artificial Sequence
  Oligonucleotide for detection of SNP TSC0001920
ctctacacactac

SEQ ID NO: 6069 - DNA, 13 bp, Artificial Sequence
  Oligonucleotide for detection of SNP TSC0001920
gtagcgagtagag

SEQ ID NO: 6070 - DNA, 13 bp, Artificial Sequence
  Oligonucleotide for detection of SNP TSC0001920
ctctactcgctac

SEQ ID NO: 6071 - DNA, 13 bp, Artificial Sequence
  Oligonucleotide for detection of SNP TSC0001920
gtagcgtgtagag

SEQ ID NO: 6072 - DNA, 13 bp, Artificial Sequence
  Oligonucleotide for detection of SNP TSC0001920
ctctacacgctac

SEQ ID NO: 6073 - DNA, 13 bp, Artificial Sequence
  Oligonucleotide for detection of SNP TSC0001920
gtagtgcgtagag

SEQ ID NO: 6074 - DNA, 13 bp, Artificial Sequence
  Oligonucleotide for detection of SNP TSC0001920
ctctacgcactac

SEQ ID NO: 6075 - DNA, 13 bp, Artificial Sequence
  Oligonucleotide for detection of SNP TSC0001920
gtagcgcgtagag

SEQ ID NO: 6076 - DNA, 13 bp, Artificial Sequence
  Oligonucleotide for detection of SNP TSC0001920
ctctacgcgctac

SEQ ID NO: 6077 - DNA, 13 bp, Artificial Sequence
  Oligonucleotide for detection of SNP TSC0001921
atatgtgttgttt

SEQ ID NO: 6078 - DNA, 13 bp, Artificial Sequence
  Oligonucleotide for detection of SNP TSC0001921
aaacaacacatat

SEQ ID NO: 6079 - DNA, 13 bp, Artificial Sequence
  Oligonucleotide for detection of SNP TSC0001921
atatgtattgttt

SEQ ID NO: 6080 - DNA, 13 bp, Artificial Sequence
  Oligonucleotide for detection of SNP TSC0001921
aaacaatacatat

SEQ ID NO: 6081 - DNA, 13 bp, Artificial Sequence
  Oligonucleotide for detection of SNP TSC0001921
atatgtgtcgttt

SEQ ID NO: 6082 - DNA, 13 bp, Artificial Sequence
  Oligonucleotide for detection of SNP TSC0001921
aaacgacacatat

SEQ ID NO: 6083 - DNA, 13 bp, Artificial Sequence
  Oligonucleotide for detection of SNP TSC0001921
atatgtatcgttt

SEQ ID NO: 6084 - DNA, 13 bp, Artificial Sequence
  Oligonucleotide for detection of SNP TSC0001921
aaacgatacatat

SEQ ID NO: 6085 - DNA, 13 bp, Artificial Sequence
  Oligonucleotide for detection of SNP TSC0001922
ggtgtgttgtggg

SEQ ID NO: 6086 - DNA, 13 bp, Artificial Sequence
  Oligonucleotide for detection of SNP TSC0001922
cccacaacacacc

SEQ ID NO: 6087 - DNA, 13 bp, Artificial Sequence
  Oligonucleotide for detection of SNP TSC0001922
ggtgtggtgtggg

SEQ ID NO: 6088 - DNA, 13 bp, Artificial Sequence
  Oligonucleotide for detection of SNP TSC0001922
cccacaccacacc

SEQ ID NO: 6089 - DNA, 13 bp, Artificial Sequence
  Oligonucleotide for detection of SNP TSC0001922
ggcgtgttgtggg

SEQ ID NO: 6090 - DNA, 13 bp, Artificial Sequence
  Oligonucleotide for detection of SNP TSC0001922
cccacaacacgcc

SEQ ID NO: 6091 - DNA, 13 bp, Artificial Sequence
  Oligonucleotide for detection of SNP TSC0001922
ggcgtggtgtggg

SEQ ID NO: 6092 - DNA, 13 bp, Artificial Sequence
  Oligonucleotide for detection of SNP TSC0001922
cccacaccacgcc

SEQ ID NO: 6093 - DNA, 13 bp, Artificial Sequence
  Oligonucleotide for detection of SNP TSC0001922
tttataatatgty

SEQ ID NO: 6094 - DNA, 13 bp, Artificial Sequence
  Oligonucleotide for detection of SNP TSC0001922
racatattataaa

SEQ ID NO: 6095 - DNA, 13 bp, Artificial Sequence
  Oligonucleotide for detection of SNP TSC0001922
tttatattatgty

SEQ ID NO: 6096 - DNA, 13 bp, Artificial Sequence
  Oligonucleotide for detection of SNP TSC0001922
racataatataaa

SEQ ID NO: 6097 - DNA, 13 bp, Artificial Sequence
  Oligonucleotide for detection of SNP TSC0001922
tttataatacgty

SEQ ID NO: 6098 - DNA, 13 bp, Artificial Sequence
  Oligonucleotide for detection of SNP TSC0001922
racgtattataaa

SEQ ID NO: 6099 - DNA, 13 bp, Artificial Sequence
  Oligonucleotide for detection of SNP TSC0001922
tttatattacgty

SEQ ID NO: 6100 - DNA, 13 bp, Artificial Sequence
  Oligonucleotide for detection of SNP TSC0001922
racgtaatataaa

SEQ ID NO: 6101 - DNA, 13 bp, Artificial Sequence
  Oligonucleotide for detection of SNP TSC0001923
taagtagttttty

SEQ ID NO: 6102 - DNA, 13 bp, Artificial Sequence
  Oligonucleotide for detection of SNP TSC0001923
raaaaactactta

SEQ ID NO: 6103 - DNA, 13 bp, Artificial Sequence
  Oligonucleotide for detection of SNP TSC0001923
taagtaattttty

SEQ ID NO: 6104 - DNA, 13 bp, Artificial Sequence
  Oligonucleotide for detection of SNP TSC0001923
raaaaattactta

SEQ ID NO: 6105 - DNA, 13 bp, Artificial Sequence
  Oligonucleotide for detection of SNP TSC0001924
ttatgtgtttttt

SEQ ID NO: 6106 - DNA, 13 bp, Artificial Sequence
  Oligonucleotide for detection of SNP TSC0001924
aaaaaacacataa

SEQ ID NO: 6107 - DNA, 13 bp, Artificial Sequence
  Oligonucleotide for detection of SNP TSC0001924
ttatgtatttttt

SEQ ID NO: 6108 - DNA, 13 bp, Artificial Sequence
  Oligonucleotide for detection of SNP TSC0001924
aaaaaatacataa

SEQ ID NO: 6109 - DNA, 13 bp, Artificial Sequence
  Oligonucleotide for detection of SNP TSC0001925
tagaatagtatta

SEQ ID NO: 6110 - DNA, 13 bp, Artificial Sequence
  Oligonucleotide for detection of SNP TSC0001925
taatactattcta

SEQ ID NO: 6111 - DNA, 13 bp, Artificial Sequence
  Oligonucleotide for detection of SNP TSC0001925
tagaattgtatta

SEQ ID NO: 6112 - DNA, 13 bp, Artificial Sequence
  Oligonucleotide for detection of SNP TSC0001925
taatacaattcta

SEQ ID NO: 6113 - DNA, 13 bp, Artificial Sequence
  Oligonucleotide for detection of SNP TSC0001925
tgatgttattttg

SEQ ID NO: 6114 - DNA, 13 bp, Artificial Sequence
  Oligonucleotide for detection of SNP TSC0001925
caaaataacatca

SEQ ID NO: 6115 - DNA, 13 bp, Artificial Sequence
  Oligonucleotide for detection of SNP TSC0001925
tgatgtaattttg

SEQ ID NO: 6116 - DNA, 13 bp, Artificial Sequence
  Oligonucleotide for detection of SNP TSC0001925
caaaattacatca

SEQ ID NO: 6117 - DNA, 13 bp, Artificial Sequence
  Oligonucleotide for detection of SNP TSC0001926
aggttagtgtaat

SEQ ID NO: 6118 - DNA, 13 bp, Artificial Sequence
  Oligonucleotide for detection of SNP TSC0001926
attacactaacct

SEQ ID NO: 6119 - DNA, 13 bp, Artificial Sequence
  Oligonucleotide for detection of SNP TSC0001926
aggttaatgtaat

SEQ ID NO: 6120 - DNA, 13 bp, Artificial Sequence
  Oligonucleotide for detection of SNP TSC0001926
attacattaacct

SEQ ID NO: 6121 - DNA, 13 bp, Artificial Sequence
  Oligonucleotide for detection of SNP TSC0001928
ttaaaatatttta

SEQ ID NO: 6122 - DNA, 13 bp, Artificial Sequence
  Oligonucleotide for detection of SNP TSC0001928
taaaatattttaa

SEQ ID NO: 6123 - DNA, 13 bp, Artificial Sequence
  Oligonucleotide for detection of SNP TSC0001928
ttaaaagatttta

SEQ ID NO: 6124 - DNA, 13 bp, Artificial Sequence
  Oligonucleotide for detection of SNP TSC0001928
taaaatcttttaa

SEQ ID NO: 6125 - DNA, 13 bp, Artificial Sequence
  Oligonucleotide for detection of SNP TSC0001928
taaaattttttaa

SEQ ID NO: 6126 - DNA, 13 bp, Artificial Sequence
  Oligonucleotide for detection of SNP TSC0001928
ttaaaaaatttta

SEQ ID NO: 6127 - DNA, 13 bp, Artificial Sequence
  Oligonucleotide for detection of SNP TSC0001929
ttgtggatggatt

SEQ ID NO: 6128 - DNA, 13 bp, Artificial Sequence
  Oligonucleotide for detection of SNP TSC0001929
aatccatccacaa

SEQ ID NO: 6129 - DNA, 13 bp, Artificial Sequence
  Oligonucleotide for detection of SNP TSC0001929
ttgtggttggatt

SEQ ID NO: 6130 - DNA, 13 bp, Artificial Sequence
  Oligonucleotide for detection of SNP TSC0001929
aatccaaccacaa

SEQ ID NO: 6131 - DNA, 13 bp, Artificial Sequence
  Oligonucleotide for detection of SNP TSC0001929
agtttatttatag

SEQ ID NO: 6132 - DNA, 13 bp, Artificial Sequence
  Oligonucleotide for detection of SNP TSC0001929
ctataaataaact

SEQ ID NO: 6133 - DNA, 13 bp, Artificial Sequence
  Oligonucleotide for detection of SNP TSC0001929
agtttaattatag

SEQ ID NO: 6134 - DNA, 13 bp, Artificial Sequence
  Oligonucleotide for detection of SNP TSC0001929
ctataattaaact

SEQ ID NO: 6135 - DNA, 13 bp, Artificial Sequence
  Oligonucleotide for detection of SNP TSC0001930
agatgtgtgttay

SEQ ID NO: 6136 - DNA, 13 bp, Artificial Sequence
  Oligonucleotide for detection of SNP TSC0001930
rtaacacacatct

SEQ ID NO: 6137 - DNA, 13 bp, Artificial Sequence
  Oligonucleotide for detection of SNP TSC0001930
agatgtatgttay

SEQ ID NO: 6138 - DNA, 13 bp, Artificial Sequence
  Oligonucleotide for detection of SNP TSC0001930
rtaacatacatct

SEQ ID NO: 6139 - DNA, 13 bp, Artificial Sequence
  Oligonucleotide for detection of SNP TSC0001931
aggaatatggtaa

SEQ ID NO: 6140 - DNA, 13 bp, Artificial Sequence
  Oligonucleotide for detection of SNP TSC0001931
ttaccatattcct

SEQ ID NO: 6141 - DNA, 13 bp, Artificial Sequence
  Oligonucleotide for detection of SNP TSC0001931
aggaatgtggtaa

SEQ ID NO: 6142 - DNA, 13 bp, Artificial Sequence
  Oligonucleotide for detection of SNP TSC0001931
ttaccacattcct

SEQ ID NO: 6143 - DNA, 13 bp, Artificial Sequence
  Oligonucleotide for detection of SNP TSC0001931
aggaacgtggtaa

SEQ ID NO: 6144 - DNA, 13 bp, Artificial Sequence
  Oligonucleotide for detection of SNP TSC0001931
ttaccacgttcct

SEQ ID NO: 6145 - DNA, 13 bp, Artificial Sequence
  Oligonucleotide for detection of SNP TSC0001931
ttgttatgttttt

SEQ ID NO: 6146 - DNA, 13 bp, Artificial Sequence
  Oligonucleotide for detection of SNP TSC0001931
aaaaacataacaa

SEQ ID NO: 6147 - DNA, 13 bp, Artificial Sequence
  Oligonucleotide for detection of SNP TSC0001931
ttgttacgttttt

SEQ ID NO: 6148 - DNA, 13 bp, Artificial Sequence
  Oligonucleotide for detection of SNP TSC0001931
aaaaacgtaacaa

SEQ ID NO: 6149 - DNA, 13 bp, Artificial Sequence
  Oligonucleotide for detection of SNP TSC0001934
gtgtatatagttg

SEQ ID NO: 6150 - DNA, 13 bp, Artificial Sequence
  Oligonucleotide for detection of SNP TSC0001934
caactatatacac

SEQ ID NO: 6151 - DNA, 13 bp, Artificial Sequence
  Oligonucleotide for detection of SNP TSC0001934
gtgtatgtagttg

SEQ ID NO: 6152 - DNA, 13 bp, Artificial Sequence
  Oligonucleotide for detection of SNP TSC0001934
caactacatacac

SEQ ID NO: 6153 - DNA, 13 bp, Artificial Sequence
  Oligonucleotide for detection of SNP TSC0001934
gtgtacgtagttg

SEQ ID NO: 6154 - DNA, 13 bp, Artificial Sequence
  Oligonucleotide for detection of SNP TSC0001934
caactacgtacac

SEQ ID NO: 6155 - DNA, 13 bp, Artificial Sequence
  Oligonucleotide for detection of SNP TSC0001934
tagttatgtatay

SEQ ID NO: 6156 - DNA, 13 bp, Artificial Sequence
  Oligonucleotide for detection of SNP TSC0001934
rtatacataacta

SEQ ID NO: 6157 - DNA, 13 bp, Artificial Sequence
  Oligonucleotide for detection of SNP TSC0001934
tagttacgtatay

SEQ ID NO: 6158 - DNA, 13 bp, Artificial Sequence
  Oligonucleotide for detection of SNP TSC0001934
rtatacgtaacta

SEQ ID NO: 6159 - DNA, 13 bp, Artificial Sequence
  Oligonucleotide for detection of SNP TSC0001935
ttttaggaggatg

SEQ ID NO: 6160 - DNA, 13 bp, Artificial Sequence
  Oligonucleotide for detection of SNP TSC0001935
catcctcctaaaa

SEQ ID NO: 6161 - DNA, 13 bp, Artificial Sequence
  Oligonucleotide for detection of SNP TSC0001935
ttttagaaggatg

SEQ ID NO: 6162 - DNA, 13 bp, Artificial Sequence
  Oligonucleotide for detection of SNP TSC0001935
catccttctaaaa

SEQ ID NO: 6163 - DNA, 13 bp, Artificial Sequence
  Oligonucleotide for detection of SNP TSC0001938
aggtattgaggty

SEQ ID NO: 6164 - DNA, 13 bp, Artificial Sequence
  Oligonucleotide for detection of SNP TSC0001938
racctcaatacct

SEQ ID NO: 6165 - DNA, 13 bp, Artificial Sequence
  Oligonucleotide for detection of SNP TSC0001938
aggtatcgaggty

SEQ ID NO: 6166 - DNA, 13 bp, Artificial Sequence
  Oligonucleotide for detection of SNP TSC0001938
racctcgatacct

SEQ ID NO: 6167 - DNA, 13 bp, Artificial Sequence
  Oligonucleotide for detection of SNP TSC0001938
gattttgatgttt

SEQ ID NO: 6168 - DNA, 13 bp, Artificial Sequence
  Oligonucleotide for detection of SNP TSC0001938
aaacatcaaaatc

SEQ ID NO: 6169 - DNA, 13 bp, Artificial Sequence
  Oligonucleotide for detection of SNP TSC0001938
gattttaatgttt

SEQ ID NO: 6170 - DNA, 13 bp, Artificial Sequence
  Oligonucleotide for detection of SNP TSC0001938
aaacattaaaatc

SEQ ID NO: 6171 - DNA, 13 bp, Artificial Sequence
  Oligonucleotide for detection of SNP TSC0001938
gatttcgatgttt

SEQ ID NO: 6172 - DNA, 13 bp, Artificial Sequence
  Oligonucleotide for detection of SNP TSC0001938
aaacatcgaaatc

SEQ ID NO: 6173 - DNA, 13 bp, Artificial Sequence
  Oligonucleotide for detection of SNP TSC0001939
tttgtgatagagt

SEQ ID NO: 6174 - DNA, 13 bp, Artificial Sequence
  Oligonucleotide for detection of SNP TSC0001939
actctatcacaaa

SEQ ID NO: 6175 - DNA, 13 bp, Artificial Sequence
  Oligonucleotide for detection of SNP TSC0001939
tttgtggtagagt

SEQ ID NO: 6176 - DNA, 13 bp, Artificial Sequence
  Oligonucleotide for detection of SNP TSC0001939
actctaccacaaa

SEQ ID NO: 6177 - DNA, 13 bp, Artificial Sequence
  Oligonucleotide for detection of SNP TSC0001940
attaattttttag

SEQ ID NO: 6178 - DNA, 13 bp, Artificial Sequence
  Oligonucleotide for detection of SNP TSC0001940
ctaaaaaattaat

SEQ ID NO: 6179 - DNA, 13 bp, Artificial Sequence
  Oligonucleotide for detection of SNP TSC0001940
attaatgttttag

SEQ ID NO: 6180 - DNA, 13 bp, Artificial Sequence
  Oligonucleotide for detection of SNP TSC0001940
ctaaaacattaat

SEQ ID NO: 6181 - DNA, 13 bp, Artificial Sequence
  Oligonucleotide for detection of SNP TSC0001940
attaacgttttag

SEQ ID NO: 6182 - DNA, 13 bp, Artificial Sequence
  Oligonucleotide for detection of SNP TSC0001940
ctaaaacgttaat

SEQ ID NO: 6183 - DNA, 13 bp, Artificial Sequence
  Oligonucleotide for detection of SNP TSC0001940
ttgaagagttgat

SEQ ID NO: 6184 - DNA, 13 bp, Artificial Sequence
  Oligonucleotide for detection of SNP TSC0001940
atcaactcttcaa

SEQ ID NO: 6185 - DNA, 13 bp, Artificial Sequence
  Oligonucleotide for detection of SNP TSC0001940
ttgaagtgttgat

SEQ ID NO: 6186 - DNA, 13 bp, Artificial Sequence
  Oligonucleotide for detection of SNP TSC0001940
atcaacacttcaa

SEQ ID NO: 6187 - DNA, 13 bp, Artificial Sequence
  Oligonucleotide for detection of SNP TSC0001940
ttgaagcgttgat

SEQ ID NO: 6188 - DNA, 13 bp, Artificial Sequence
  Oligonucleotide for detection of SNP TSC0001940
atcaacgcttcaa

SEQ ID NO: 6189 - DNA, 13 bp, Artificial Sequence
  Oligonucleotide for detection of SNP TSC0001941
gattttatggtag

SEQ ID NO: 6190 - DNA, 13 bp, Artificial Sequence
  Oligonucleotide for detection of SNP TSC0001941
ctaccataaaatc

SEQ ID NO: 6191 - DNA, 13 bp, Artificial Sequence
  Oligonucleotide for detection of SNP TSC0001941
gattttgtggtag

SEQ ID NO: 6192 - DNA, 13 bp, Artificial Sequence
  Oligonucleotide for detection of SNP TSC0001941
ctaccacaaaatc

SEQ ID NO: 6193 - DNA, 13 bp, Artificial Sequence
  Oligonucleotide for detection of SNP TSC0001942
tatttattgtttt

SEQ ID NO: 6194 - DNA, 13 bp, Artificial Sequence
  Oligonucleotide for detection of SNP TSC0001942
aaaacaataaata

SEQ ID NO: 6195 - DNA, 13 bp, Artificial Sequence
  Oligonucleotide for detection of SNP TSC0001942
tatttagtgtttt

SEQ ID NO: 6196 - DNA, 13 bp, Artificial Sequence
  Oligonucleotide for detection of SNP TSC0001942
aaaacactaaata

SEQ ID NO: 6197 - DNA, 13 bp, Artificial Sequence
  Oligonucleotide for detection of SNP TSC0001942
aaaataataaata

SEQ ID NO: 6198 - DNA, 13 bp, Artificial Sequence
  Oligonucleotide for detection of SNP TSC0001942
tatttattatttt

SEQ ID NO: 6199 - DNA, 13 bp, Artificial Sequence
  Oligonucleotide for detection of SNP TSC0001942
aaaatattaaata

SEQ ID NO: 6200 - DNA, 13 bp, Artificial Sequence
  Oligonucleotide for detection of SNP TSC0001942
tatttaatatttt

SEQ ID NO: 6201 - DNA, 13 bp, Artificial Sequence
  Oligonucleotide for detection of SNP TSC0001944
tatttagttatta

SEQ ID NO: 6202 - DNA, 13 bp, Artificial Sequence
  Oligonucleotide for detection of SNP TSC0001944
taataactaaata

SEQ ID NO: 6203 - DNA, 13 bp, Artificial Sequence
  Oligonucleotide for detection of SNP TSC0001944
tatttaattatta

SEQ ID NO: 6204 - DNA, 13 bp, Artificial Sequence
  Oligonucleotide for detection of SNP TSC0001944
taataattaaata

SEQ ID NO: 6205 - DNA, 13 bp, Artificial Sequence
  Oligonucleotide for detection of SNP TSC0001945
ttttttattttty

SEQ ID NO: 6206 - DNA, 13 bp, Artificial Sequence
  Oligonucleotide for detection of SNP TSC0001945
raaaaataaaaaa

SEQ ID NO: 6207 - DNA, 13 bp, Artificial Sequence
  Oligonucleotide for detection of SNP TSC0001945
ttttttgttttty

SEQ ID NO: 6208 - DNA, 13 bp, Artificial Sequence
  Oligonucleotide for detection of SNP TSC0001945
raaaaacaaaaaa

SEQ ID NO: 6209 - DNA, 13 bp, Artificial Sequence
  Oligonucleotide for detection of SNP TSC0001946
aaatgtaaattaa

SEQ ID NO: 6210 - DNA, 13 bp, Artificial Sequence
  Oligonucleotide for detection of SNP TSC0001946
ttaatttacattt

SEQ ID NO: 6211 - DNA, 13 bp, Artificial Sequence
  Oligonucleotide for detection of SNP TSC0001946
aaatgtgaattaa

SEQ ID NO: 6212 - DNA, 13 bp, Artificial Sequence
  Oligonucleotide for detection of SNP TSC0001946
ttaattcacattt

SEQ ID NO: 6213 - DNA, 13 bp, Artificial Sequence
  Oligonucleotide for detection of SNP TSC0001947
gttttatttttgt

SEQ ID NO: 6214 - DNA, 13 bp, Artificial Sequence
  Oligonucleotide for detection of SNP TSC0001947
acaaaaataaaac

SEQ ID NO: 6215 - DNA, 13 bp, Artificial Sequence
  Oligonucleotide for detection of SNP TSC0001947
gttttagttttgt

SEQ ID NO: 6216 - DNA, 13 bp, Artificial Sequence
  Oligonucleotide for detection of SNP TSC0001947
acaaaactaaaac

SEQ ID NO: 6217 - DNA, 13 bp, Artificial Sequence
  Oligonucleotide for detection of SNP TSC0001947
ataaaagtagaay

SEQ ID NO: 6218 - DNA, 13 bp, Artificial Sequence
  Oligonucleotide for detection of SNP TSC0001947
rttctacttttat

SEQ ID NO: 6219 - DNA, 13 bp, Artificial Sequence
  Oligonucleotide for detection of SNP TSC0001947
ataaaattagaay

SEQ ID NO: 6220 - DNA, 13 bp, Artificial Sequence
  Oligonucleotide for detection of SNP TSC0001947
rttctaattttat

SEQ ID NO: 6221 - DNA, 13 bp, Artificial Sequence
  Oligonucleotide for detection of SNP TSC0001948
atagtaaaagttg

SEQ ID NO: 6222 - DNA, 13 bp, Artificial Sequence
  Oligonucleotide for detection of SNP TSC0001948
caacttttactat

SEQ ID NO: 6223 - DNA, 13 bp, Artificial Sequence
  Oligonucleotide for detection of SNP TSC0001948
atagtagaagttg

SEQ ID NO: 6224 - DNA, 13 bp, Artificial Sequence
  Oligonucleotide for detection of SNP TSC0001948
caacttctactat

SEQ ID NO: 6225 - DNA, 13 bp, Artificial Sequence
  Oligonucleotide for detection of SNP TSC0001949
aaaaataatggga

SEQ ID NO: 6226 - DNA, 13 bp, Artificial Sequence
  Oligonucleotide for detection of SNP TSC0001949
tcccattattttt

SEQ ID NO: 6227 - DNA, 13 bp, Artificial Sequence
  Oligonucleotide for detection of SNP TSC0001949
aaaaattatggga

SEQ ID NO: 6228 - DNA, 13 bp, Artificial Sequence
  Oligonucleotide for detection of SNP TSC0001949
tcccataattttt

SEQ ID NO: 6229 - DNA, 13 bp, Artificial Sequence
  Oligonucleotide for detection of SNP TSC0001949
ttttattgttttt

SEQ ID NO: 6230 - DNA, 13 bp, Artificial Sequence
  Oligonucleotide for detection of SNP TSC0001949
aaaaacaataaaa

SEQ ID NO: 6231 - DNA, 13 bp, Artificial Sequence
  Oligonucleotide for detection of SNP TSC0001949
ttttatagttttt

SEQ ID NO: 6232 - DNA, 13 bp, Artificial Sequence
  Oligonucleotide for detection of SNP TSC0001949
aaaaactataaaa

SEQ ID NO: 6233 - DNA, 13 bp, Artificial Sequence
  Oligonucleotide for detection of SNP TSC0001951
ttttgtatttggg

SEQ ID NO: 6234 - DNA, 13 bp, Artificial Sequence
  Oligonucleotide for detection of SNP TSC0001951
cccaaatacaaaa

SEQ ID NO: 6235 - DNA, 13 bp, Artificial Sequence
  Oligonucleotide for detection of SNP TSC0001951
ttttgtttttggg

SEQ ID NO: 6236 - DNA, 13 bp, Artificial Sequence
  Oligonucleotide for detection of SNP TSC0001951
cccaaaaacaaaa

SEQ ID NO: 6237 - DNA, 13 bp, Artificial Sequence
  Oligonucleotide for detection of SNP TSC0001951
tttcgtatttggg

SEQ ID NO: 6238 - DNA, 13 bp, Artificial Sequence
  Oligonucleotide for detection of SNP TSC0001951
cccaaatacgaaa

SEQ ID NO: 6239 - DNA, 13 bp, Artificial Sequence
  Oligonucleotide for detection of SNP TSC0001951
tttcgtttttggg

SEQ ID NO: 6240 - DNA, 13 bp, Artificial Sequence
  Oligonucleotide for detection of SNP TSC0001951
cccaaaaacgaaa

SEQ ID NO: 6241 - DNA, 13 bp, Artificial Sequence
  Oligonucleotide for detection of SNP TSC0001951
tttagatgtggag

SEQ ID NO: 6242 - DNA, 13 bp, Artificial Sequence
  Oligonucleotide for detection of SNP TSC0001951
ctccacatctaaa

SEQ ID NO: 6243 - DNA, 13 bp, Artificial Sequence
  Oligonucleotide for detection of SNP TSC0001951
tttagaggtggag

SEQ ID NO: 6244 - DNA, 13 bp, Artificial Sequence
  Oligonucleotide for detection of SNP TSC0001951
ctccacctctaaa

SEQ ID NO: 6245 - DNA, 13 bp, Artificial Sequence
  Oligonucleotide for detection of SNP TSC0001951
tttagatgcggag

SEQ ID NO: 6246 - DNA, 13 bp, Artificial Sequence
  Oligonucleotide for detection of SNP TSC0001951
ctccgcatctaaa

SEQ ID NO: 6247 - DNA, 13 bp, Artificial Sequence
  Oligonucleotide for detection of SNP TSC0001951
tttagaggcggag

SEQ ID NO: 6248 - DNA, 13 bp, Artificial Sequence
  Oligonucleotide for detection of SNP TSC0001951
ctccgcctctaaa

SEQ ID NO: 6249 - DNA, 13 bp, Artificial Sequence
  Oligonucleotide for detection of SNP TSC0001952
ttatttaaatttg

SEQ ID NO: 6250 - DNA, 13 bp, Artificial Sequence
  Oligonucleotide for detection of SNP TSC0001952
caaatttaaataa

SEQ ID NO: 6251 - DNA, 13 bp, Artificial Sequence
  Oligonucleotide for detection of SNP TSC0001952
ttatttgaatttg

SEQ ID NO: 6252 - DNA, 13 bp, Artificial Sequence
  Oligonucleotide for detection of SNP TSC0001952
caaattcaaataa

SEQ ID NO: 6253 - DNA, 13 bp, Artificial Sequence
  Oligonucleotide for detection of SNP TSC0001952
ttattcgaatttg

SEQ ID NO: 6254 - DNA, 13 bp, Artificial Sequence
  Oligonucleotide for detection of SNP TSC0001952
caaattcgaataa

SEQ ID NO: 6255 - DNA, 13 bp, Artificial Sequence
  Oligonucleotide for detection of SNP TSC0001952
tagatttggatga

SEQ ID NO: 6256 - DNA, 13 bp, Artificial Sequence
  Oligonucleotide for detection of SNP TSC0001952
tcatccaaatcta

SEQ ID NO: 6257 - DNA, 13 bp, Artificial Sequence
  Oligonucleotide for detection of SNP TSC0001952
tagattcggatga

SEQ ID NO: 6258 - DNA, 13 bp, Artificial Sequence
  Oligonucleotide for detection of SNP TSC0001952
tcatccgaatcta

SEQ ID NO: 6259 - DNA, 13 bp, Artificial Sequence
  Oligonucleotide for detection of SNP TSC0001954
ttggtgtgtagtg

SEQ ID NO: 6260 - DNA, 13 bp, Artificial Sequence
  Oligonucleotide for detection of SNP TSC0001954
cactacacaccaa

SEQ ID NO: 6261 - DNA, 13 bp, Artificial Sequence
  Oligonucleotide for detection of SNP TSC0001954
ttggcgtgtagtg

SEQ ID NO: 6262 - DNA, 13 bp, Artificial Sequence
  Oligonucleotide for detection of SNP TSC0001954
cactacacgccaa

SEQ ID NO: 6263 - DNA, 13 bp, Artificial Sequence
  Oligonucleotide for detection of SNP TSC0001954
ttggtgcgtagtg

SEQ ID NO: 6264 - DNA, 13 bp, Artificial Sequence
  Oligonucleotide for detection of SNP TSC0001954
cactacgcaccaa

SEQ ID NO: 6265 - DNA, 13 bp, Artificial Sequence
  Oligonucleotide for detection of SNP TSC0001954
ttggcgcgtagtg

SEQ ID NO: 6266 - DNA, 13 bp, Artificial Sequence
  Oligonucleotide for detection of SNP TSC0001954
cactacgcgccaa

SEQ ID NO: 6267 - DNA, 13 bp, Artificial Sequence
  Oligonucleotide for detection of SNP TSC0001954
tattgtgtgttag

SEQ ID NO: 6268 - DNA, 13 bp, Artificial Sequence
  Oligonucleotide for detection of SNP TSC0001954
ctaacacacaata

SEQ ID NO: 6269 - DNA, 13 bp, Artificial Sequence
  Oligonucleotide for detection of SNP TSC0001954
tattgtatgttag

SEQ ID NO: 6270 - DNA, 13 bp, Artificial Sequence
  Oligonucleotide for detection of SNP TSC0001954
ctaacatacaata

SEQ ID NO: 6271 - DNA, 13 bp, Artificial Sequence
  Oligonucleotide for detection of SNP TSC0001954
tattgcgtgttag

SEQ ID NO: 6272 - DNA, 13 bp, Artificial Sequence
  Oligonucleotide for detection of SNP TSC0001954
ctaacacgcaata

SEQ ID NO: 6273 - DNA, 13 bp, Artificial Sequence
  Oligonucleotide for detection of SNP TSC0001954
tattgtacgttag

SEQ ID NO: 6274 - DNA, 13 bp, Artificial Sequence
  Oligonucleotide for detection of SNP TSC0001954
ctaacgtacaata

SEQ ID NO: 6275 - DNA, 13 bp, Artificial Sequence
  Oligonucleotide for detection of SNP TSC0001954
tattgtgcgttag

SEQ ID NO: 6276 - DNA, 13 bp, Artificial Sequence
  Oligonucleotide for detection of SNP TSC0001954
ctaacgcacaata

SEQ ID NO: 6277 - DNA, 13 bp, Artificial Sequence
  Oligonucleotide for detection of SNP TSC0001954
tattgcgcgttag

SEQ ID NO: 6278 - DNA, 13 bp, Artificial Sequence
  Oligonucleotide for detection of SNP TSC0001954
ctaacgcgcaata

SEQ ID NO: 6279 - DNA, 13 bp, Artificial Sequence
  Oligonucleotide for detection of SNP TSC0001955
tgttgtattatta

SEQ ID NO: 6280 - DNA, 13 bp, Artificial Sequence
  Oligonucleotide for detection of SNP TSC0001955
taataatacaaca

SEQ ID NO: 6281 - DNA, 13 bp, Artificial Sequence
  Oligonucleotide for detection of SNP TSC0001955
tgttgtgttatta

SEQ ID NO: 6282 - DNA, 13 bp, Artificial Sequence
  Oligonucleotide for detection of SNP TSC0001955
taataacacaaca

SEQ ID NO: 6283 - DNA, 13 bp, Artificial Sequence
  Oligonucleotide for detection of SNP TSC0001955
tgttgcgttatta

SEQ ID NO: 6284 - DNA, 13 bp, Artificial Sequence
  Oligonucleotide for detection of SNP TSC0001955
taataacgcaaca

SEQ ID NO: 6285 - DNA, 13 bp, Artificial Sequence
  Oligonucleotide for detection of SNP TSC0001955
tagtgatgtagta

SEQ ID NO: 6286 - DNA, 13 bp, Artificial Sequence
  Oligonucleotide for detection of SNP TSC0001955
tactacatcacta

SEQ ID NO: 6287 - DNA, 13 bp, Artificial Sequence
  Oligonucleotide for detection of SNP TSC0001955
tagtgacgtagta

SEQ ID NO: 6288 - DNA, 13 bp, Artificial Sequence
  Oligonucleotide for detection of SNP TSC0001955
tactacgtcacta

SEQ ID NO: 6289 - DNA, 13 bp, Artificial Sequence
  Oligonucleotide for detection of SNP TSC0001956
tatataatatttt

SEQ ID NO: 6290 - DNA, 13 bp, Artificial Sequence
  Oligonucleotide for detection of SNP TSC0001956
aaaatattatata

SEQ ID NO: 6291 - DNA, 13 bp, Artificial Sequence
  Oligonucleotide for detection of SNP TSC0001956
tatatagtatttt

SEQ ID NO: 6292 - DNA, 13 bp, Artificial Sequence
  Oligonucleotide for detection of SNP TSC0001956
aaaatactatata

SEQ ID NO: 6293 - DNA, 13 bp, Artificial Sequence
  Oligonucleotide for detection of SNP TSC0001957
taaataattattt

SEQ ID NO: 6294 - DNA, 13 bp, Artificial Sequence
  Oligonucleotide for detection of SNP TSC0001957
aaataattattta

SEQ ID NO: 6295 - DNA, 13 bp, Artificial Sequence
  Oligonucleotide for detection of SNP TSC0001957
taaatagttattt

SEQ ID NO: 6296 - DNA, 13 bp, Artificial Sequence
  Oligonucleotide for detection of SNP TSC0001957
aaataactattta

SEQ ID NO: 6297 - DNA, 13 bp, Artificial Sequence
  Oligonucleotide for detection of SNP TSC0001958
ttaataagtttag

SEQ ID NO: 6298 - DNA, 13 bp, Artificial Sequence
  Oligonucleotide for detection of SNP TSC0001958
ctaaacttattaa

SEQ ID NO: 6299 - DNA, 13 bp, Artificial Sequence
  Oligonucleotide for detection of SNP TSC0001958
ttaatatgtttag

SEQ ID NO: 6300 - DNA, 13 bp, Artificial Sequence
  Oligonucleotide for detection of SNP TSC0001958
ctaaacatattaa

SEQ ID NO: 6301 - DNA, 13 bp, Artificial Sequence
  Oligonucleotide for detection of SNP TSC0001958
ttaatacgtttag

SEQ ID NO: 6302 - DNA, 13 bp, Artificial Sequence
  Oligonucleotide for detection of SNP TSC0001958
ctaaacgtattaa

SEQ ID NO: 6303 - DNA, 13 bp, Artificial Sequence
  Oligonucleotide for detection of SNP TSC0001958
ttgggtttattgg

SEQ ID NO: 6304 - DNA, 13 bp, Artificial Sequence
  Oligonucleotide for detection of SNP TSC0001958
ccaataaacccaa

SEQ ID NO: 6305 - DNA, 13 bp, Artificial Sequence
  Oligonucleotide for detection of SNP TSC0001958
ttgggtgtattgg

SEQ ID NO: 6306 - DNA, 13 bp, Artificial Sequence
  Oligonucleotide for detection of SNP TSC0001958
ccaatacacccaa

SEQ ID NO: 6307 - DNA, 13 bp, Artificial Sequence
  Oligonucleotide for detection of SNP TSC0001958
ttgggcgtattgg

SEQ ID NO: 6308 - DNA, 13 bp, Artificial Sequence
  Oligonucleotide for detection of SNP TSC0001958
ccaatacgcccaa

SEQ ID NO: 6309 - DNA, 13 bp, Artificial Sequence
  Oligonucleotide for detection of SNP TSC0001959
aaaatgttttgaa

SEQ ID NO: 6310 - DNA, 13 bp, Artificial Sequence
  Oligonucleotide for detection of SNP TSC0001959
ttcaaaacatttt

SEQ ID NO: 6311 - DNA, 13 bp, Artificial Sequence
  Oligonucleotide for detection of SNP TSC0001959
aaaatggtttgaa

SEQ ID NO: 6312 - DNA, 13 bp, Artificial Sequence
  Oligonucleotide for detection of SNP TSC0001959
ttcaaaccatttt

SEQ ID NO: 6313 - DNA, 13 bp, Artificial Sequence
  Oligonucleotide for detection of SNP TSC0001959
tttaaagtatttt

SEQ ID NO: 6314 - DNA, 13 bp, Artificial Sequence
  Oligonucleotide for detection of SNP TSC0001959
aaaatactttaaa

SEQ ID NO: 6315 - DNA, 13 bp, Artificial Sequence
  Oligonucleotide for detection of SNP TSC0001959
tttaaattatttt

SEQ ID NO: 6316 - DNA, 13 bp, Artificial Sequence
  Oligonucleotide for detection of SNP TSC0001959
aaaataatttaaa

SEQ ID NO: 6317 - DNA, 13 bp, Artificial Sequence
  Oligonucleotide for detection of SNP TSC0001960
gattttagattga

SEQ ID NO: 6318 - DNA, 13 bp, Artificial Sequence
  Oligonucleotide for detection of SNP TSC0001960
tcaatctaaaatc

SEQ ID NO: 6319 - DNA, 13 bp, Artificial Sequence
  Oligonucleotide for detection of SNP TSC0001960
gattttggattga

SEQ ID NO: 6320 - DNA, 13 bp, Artificial Sequence
  Oligonucleotide for detection of SNP TSC0001960
tcaatccaaaatc

SEQ ID NO: 6321 - DNA, 13 bp, Artificial Sequence
  Oligonucleotide for detection of SNP TSC0001960
gatttcggattga

SEQ ID NO: 6322 - DNA, 13 bp, Artificial Sequence
  Oligonucleotide for detection of SNP TSC0001960
tcaatccgaaatc

SEQ ID NO: 6323 - DNA, 13 bp, Artificial Sequence
  Oligonucleotide for detection of SNP TSC0001960
ttaatttgaagty

SEQ ID NO: 6324 - DNA, 13 bp, Artificial Sequence
  Oligonucleotide for detection of SNP TSC0001960
racttcaaattaa

SEQ ID NO: 6325 - DNA, 13 bp, Artificial Sequence
  Oligonucleotide for detection of SNP TSC0001960
ttaattcgaagty

SEQ ID NO: 6326 - DNA, 13 bp, Artificial Sequence
  Oligonucleotide for detection of SNP TSC0001960
racttcgaattaa

SEQ ID NO: 6327 - DNA, 13 bp, Artificial Sequence
  Oligonucleotide for detection of SNP TSC0001961
atgagtattgaty

SEQ ID NO: 6328 - DNA, 13 bp, Artificial Sequence
  Oligonucleotide for detection of SNP TSC0001961
ratcaatactcat

SEQ ID NO: 6329 - DNA, 13 bp, Artificial Sequence
  Oligonucleotide for detection of SNP TSC0001961
atgagttttgaty

SEQ ID NO: 6330 - DNA, 13 bp, Artificial Sequence
  Oligonucleotide for detection of SNP TSC0001961
ratcaaaactcat

SEQ ID NO: 6331 - DNA, 13 bp, Artificial Sequence
  Oligonucleotide for detection of SNP TSC0001961
gattagtgtttat

SEQ ID NO: 6332 - DNA, 13 bp, Artificial Sequence
  Oligonucleotide for detection of SNP TSC0001961
ataaacactaatc

SEQ ID NO: 6333 - DNA, 13 bp, Artificial Sequence
  Oligonucleotide for detection of SNP TSC0001961
gattagggtttat

SEQ ID NO: 6334 - DNA, 13 bp, Artificial Sequence
  Oligonucleotide for detection of SNP TSC0001961
ataaaccctaatc

SEQ ID NO: 6335 - DNA, 13 bp, Artificial Sequence
  Oligonucleotide for detection of SNP TSC0001962
ttttttttttggg

SEQ ID NO: 6336 - DNA, 13 bp, Artificial Sequence
  Oligonucleotide for detection of SNP TSC0001962
cccaaaaaaaaaa

SEQ ID NO: 6337 - DNA, 13 bp, Artificial Sequence
  Oligonucleotide for detection of SNP TSC0001962
ttttttgtttggg

SEQ ID NO: 6338 - DNA, 13 bp, Artificial Sequence
  Oligonucleotide for detection of SNP TSC0001962
cccaaacaaaaaa

SEQ ID NO: 6339 - DNA, 13 bp, Artificial Sequence
  Oligonucleotide for detection of SNP TSC0001962
tttttcgtttggg

SEQ ID NO: 6340 - DNA, 13 bp, Artificial Sequence
  Oligonucleotide for detection of SNP TSC0001962
cccaaacgaaaaa

SEQ ID NO: 6341 - DNA, 13 bp, Artificial Sequence
  Oligonucleotide for detection of SNP TSC0001962
tttaggagggaga

SEQ ID NO: 6342 - DNA, 13 bp, Artificial Sequence
  Oligonucleotide for detection of SNP TSC0001962
tctccctcctaaa

SEQ ID NO: 6343 - DNA, 13 bp, Artificial Sequence
  Oligonucleotide for detection of SNP TSC0001962
tttaggtgggaga

SEQ ID NO: 6344 - DNA, 13 bp, Artificial Sequence
  Oligonucleotide for detection of SNP TSC0001962
tctcccacctaaa

SEQ ID NO: 6345 - DNA, 13 bp, Artificial Sequence
  Oligonucleotide for detection of SNP TSC0001962
tttaggcgggaga

SEQ ID NO: 6346 - DNA, 13 bp, Artificial Sequence
  Oligonucleotide for detection of SNP TSC0001962
tctcccgcctaaa

SEQ ID NO: 6347 - DNA, 13 bp, Artificial Sequence
  Oligonucleotide for detection of SNP TSC0001963
agaagtagttttg

SEQ ID NO: 6348 - DNA, 13 bp, Artificial Sequence
  Oligonucleotide for detection of SNP TSC0001963
caaaactacttct

SEQ ID NO: 6349 - DNA, 13 bp, Artificial Sequence
  Oligonucleotide for detection of SNP TSC0001963
agaagttgttttg

SEQ ID NO: 6350 - DNA, 13 bp, Artificial Sequence
  Oligonucleotide for detection of SNP TSC0001963
caaaacaacttct

SEQ ID NO: 6351 - DNA, 13 bp, Artificial Sequence
  Oligonucleotide for detection of SNP TSC0001963
agaagtcgttttg

SEQ ID NO: 6352 - DNA, 13 bp, Artificial Sequence
  Oligonucleotide for detection of SNP TSC0001963
caaaacgacttct

SEQ ID NO: 6353 - DNA, 13 bp, Artificial Sequence
  Oligonucleotide for detection of SNP TSC0001963
tagggttgttttt

SEQ ID NO: 6354 - DNA, 13 bp, Artificial Sequence
  Oligonucleotide for detection of SNP TSC0001963
aaaaacaacccta

SEQ ID NO: 6355 - DNA, 13 bp, Artificial Sequence
  Oligonucleotide for detection of SNP TSC0001963
tagggtggttttt

SEQ ID NO: 6356 - DNA, 13 bp, Artificial Sequence
  Oligonucleotide for detection of SNP TSC0001963
aaaaaccacccta

SEQ ID NO: 6357 - DNA, 13 bp, Artificial Sequence
  Oligonucleotide for detection of SNP TSC0001963
tagggcggttttt

SEQ ID NO: 6358 - DNA, 13 bp, Artificial Sequence
  Oligonucleotide for detection of SNP TSC0001963
aaaaaccgcccta

SEQ ID NO: 6359 - DNA, 13 bp, Artificial Sequence
  Oligonucleotide for detection of SNP TSC0001964
tataattttagta

SEQ ID NO: 6360 - DNA, 13 bp, Artificial Sequence
  Oligonucleotide for detection of SNP TSC0001964
tactaaaattata

SEQ ID NO: 6361 - DNA, 13 bp, Artificial Sequence
  Oligonucleotide for detection of SNP TSC0001964
tataatgttagta

SEQ ID NO: 6362 - DNA, 13 bp, Artificial Sequence
  Oligonucleotide for detection of SNP TSC0001964
tactaacattata

SEQ ID NO: 6363 - DNA, 13 bp, Artificial Sequence
  Oligonucleotide for detection of SNP TSC0001964
tataacgttagta

SEQ ID NO: 6364 - DNA, 13 bp, Artificial Sequence
  Oligonucleotide for detection of SNP TSC0001964
tactaacgttata

SEQ ID NO: 6365 - DNA, 13 bp, Artificial Sequence
  Oligonucleotide for detection of SNP TSC0001964
tgttggggttatg

SEQ ID NO: 6366 - DNA, 13 bp, Artificial Sequence
  Oligonucleotide for detection of SNP TSC0001964
cataaccccaaca

SEQ ID NO: 6367 - DNA, 13 bp, Artificial Sequence
  Oligonucleotide for detection of SNP TSC0001964
tgttggtgttatg

SEQ ID NO: 6368 - DNA, 13 bp, Artificial Sequence
  Oligonucleotide for detection of SNP TSC0001964
cataacaccaaca

SEQ ID NO: 6369 - DNA, 13 bp, Artificial Sequence
  Oligonucleotide for detection of SNP TSC0001964
tgttggcgttatg

SEQ ID NO: 6370 - DNA, 13 bp, Artificial Sequence
  Oligonucleotide for detection of SNP TSC0001964
cataacgccaaca

SEQ ID NO: 6371 - DNA, 13 bp, Artificial Sequence
  Oligonucleotide for detection of SNP TSC0001966
tagatggagaata

SEQ ID NO: 6372 - DNA, 13 bp, Artificial Sequence
  Oligonucleotide for detection of SNP TSC0001966
tattctccatcta

SEQ ID NO: 6373 - DNA, 13 bp, Artificial Sequence
  Oligonucleotide for detection of SNP TSC0001966
tagatgaagaata

SEQ ID NO: 6374 - DNA, 13 bp, Artificial Sequence
  Oligonucleotide for detection of SNP TSC0001966
tattcttcatcta

SEQ ID NO: 6375 - DNA, 13 bp, Artificial Sequence
  Oligonucleotide for detection of SNP TSC0001969
taagtttaaaata

SEQ ID NO: 6376 - DNA, 13 bp, Artificial Sequence
  Oligonucleotide for detection of SNP TSC0001969
tattttaaactta

SEQ ID NO: 6377 - DNA, 13 bp, Artificial Sequence
  Oligonucleotide for detection of SNP TSC0001969
taagttgaaaata

SEQ ID NO: 6378 - DNA, 13 bp, Artificial Sequence
  Oligonucleotide for detection of SNP TSC0001969
tattttcaactta

SEQ ID NO: 6379 - DNA, 13 bp, Artificial Sequence
  Oligonucleotide for detection of SNP TSC0001969
tgttttgagttta

SEQ ID NO: 6380 - DNA, 13 bp, Artificial Sequence
  Oligonucleotide for detection of SNP TSC0001969
taaactcaaaaca

SEQ ID NO: 6381 - DNA, 13 bp, Artificial Sequence
  Oligonucleotide for detection of SNP TSC0001969
tgtttttagttta

SEQ ID NO: 6382 - DNA, 13 bp, Artificial Sequence
  Oligonucleotide for detection of SNP TSC0001969
taaactaaaaaca

SEQ ID NO: 6383 - DNA, 13 bp, Artificial Sequence
  Oligonucleotide for detection of SNP TSC0001972
gaaattttgggaa

SEQ ID NO: 6384 - DNA, 13 bp, Artificial Sequence
  Oligonucleotide for detection of SNP TSC0001972
ttcccaaaatttc

SEQ ID NO: 6385 - DNA, 13 bp, Artificial Sequence
  Oligonucleotide for detection of SNP TSC0001972
gaaattgtgggaa

SEQ ID NO: 6386 - DNA, 13 bp, Artificial Sequence
  Oligonucleotide for detection of SNP TSC0001972
ttcccacaatttc

SEQ ID NO: 6387 - DNA, 13 bp, Artificial Sequence
  Oligonucleotide for detection of SNP TSC0001972
tttttagagttty

SEQ ID NO: 6388 - DNA, 13 bp, Artificial Sequence
  Oligonucleotide for detection of SNP TSC0001972
raaactctaaaaa

SEQ ID NO: 6389 - DNA, 13 bp, Artificial Sequence
  Oligonucleotide for detection of SNP TSC0001972
tttttatagttty

SEQ ID NO: 6390 - DNA, 13 bp, Artificial Sequence
  Oligonucleotide for detection of SNP TSC0001972
raaactataaaaa

SEQ ID NO: 6391 - DNA, 13 bp, Artificial Sequence
  Oligonucleotide for detection of SNP TSC0001974
gaatataaggtta

SEQ ID NO: 6392 - DNA, 13 bp, Artificial Sequence
  Oligonucleotide for detection of SNP TSC0001974
taaccttatattc

SEQ ID NO: 6393 - DNA, 13 bp, Artificial Sequence
  Oligonucleotide for detection of SNP TSC0001974
gaatatgaggtta

SEQ ID NO: 6394 - DNA, 13 bp, Artificial Sequence
  Oligonucleotide for detection of SNP TSC0001974
taacctcatattc

SEQ ID NO: 6395 - DNA, 13 bp, Artificial Sequence
  Oligonucleotide for detection of SNP TSC0001975
tttttttttaaaa

SEQ ID NO: 6396 - DNA, 13 bp, Artificial Sequence
  Oligonucleotide for detection of SNP TSC0001975
ttttaaaaaaaaa

SEQ ID NO: 6397 - DNA, 13 bp, Artificial Sequence
  Oligonucleotide for detection of SNP TSC0001975
ttttttgttaaaa

SEQ ID NO: 6398 - DNA, 13 bp, Artificial Sequence
  Oligonucleotide for detection of SNP TSC0001975
ttttaacaaaaaa

SEQ ID NO: 6399 - DNA, 13 bp, Artificial Sequence
  Oligonucleotide for detection of SNP TSC0001975
tttttcgttaaaa

SEQ ID NO: 6400 - DNA, 13 bp, Artificial Sequence
  Oligonucleotide for detection of SNP TSC0001975
ttttaacgaaaaa

SEQ ID NO: 6401 - DNA, 13 bp, Artificial Sequence
  Oligonucleotide for detection of SNP TSC0001975
ttttgggggggag

SEQ ID NO: 6402 - DNA, 13 bp, Artificial Sequence
  Oligonucleotide for detection of SNP TSC0001975
ctcccccccaaaa

SEQ ID NO: 6403 - DNA, 13 bp, Artificial Sequence
  Oligonucleotide for detection of SNP TSC0001975
ttttggtggggag

SEQ ID NO: 6404 - DNA, 13 bp, Artificial Sequence
  Oligonucleotide for detection of SNP TSC0001975
ctccccaccaaaa

SEQ ID NO: 6405 - DNA, 13 bp, Artificial Sequence
  Oligonucleotide for detection of SNP TSC0001975
ttttggcggggag

SEQ ID NO: 6406 - DNA, 13 bp, Artificial Sequence
  Oligonucleotide for detection of SNP TSC0001975
ctccccgccaaaa

SEQ ID NO: 6407 - DNA, 13 bp, Artificial Sequence
  Oligonucleotide for detection of SNP TSC0001976
tatttgtaagatt

SEQ ID NO: 6408 - DNA, 13 bp, Artificial Sequence
  Oligonucleotide for detection of SNP TSC0001976
aatcttacaaata

SEQ ID NO: 6409 - DNA, 13 bp, Artificial Sequence
  Oligonucleotide for detection of SNP TSC0001976
tatttggaagatt

SEQ ID NO: 6410 - DNA, 13 bp, Artificial Sequence
  Oligonucleotide for detection of SNP TSC0001976
aatcttccaaata

SEQ ID NO: 6411 - DNA, 13 bp, Artificial Sequence
  Oligonucleotide for detection of SNP TSC0001976
agttttataaatg

SEQ ID NO: 6412 - DNA, 13 bp, Artificial Sequence
  Oligonucleotide for detection of SNP TSC0001976
catttataaaact

SEQ ID NO: 6413 - DNA, 13 bp, Artificial Sequence
  Oligonucleotide for detection of SNP TSC0001976
agttttttaaatg

SEQ ID NO: 6414 - DNA, 13 bp, Artificial Sequence
  Oligonucleotide for detection of SNP TSC0001976
catttaaaaaact

SEQ ID NO: 6415 - DNA, 13 bp, Artificial Sequence
  Oligonucleotide for detection of SNP TSC0001977
tttagttgttgtt

SEQ ID NO: 6416 - DNA, 13 bp, Artificial Sequence
  Oligonucleotide for detection of SNP TSC0001977
aacaacaactaaa

SEQ ID NO: 6417 - DNA, 13 bp, Artificial Sequence
  Oligonucleotide for detection of SNP TSC0001977
tttagtcgttgtt

SEQ ID NO: 6418 - DNA, 13 bp, Artificial Sequence
  Oligonucleotide for detection of SNP TSC0001977
aacaacgactaaa

SEQ ID NO: 6419 - DNA, 13 bp, Artificial Sequence
  Oligonucleotide for detection of SNP TSC0001977
aatagtgattgaa

SEQ ID NO: 6420 - DNA, 13 bp, Artificial Sequence
  Oligonucleotide for detection of SNP TSC0001977
ttcaatcactatt

SEQ ID NO: 6421 - DNA, 13 bp, Artificial Sequence
  Oligonucleotide for detection of SNP TSC0001977
aatagtaattgaa

SEQ ID NO: 6422 - DNA, 13 bp, Artificial Sequence
  Oligonucleotide for detection of SNP TSC0001977
ttcaattactatt

SEQ ID NO: 6423 - DNA, 13 bp, Artificial Sequence
  Oligonucleotide for detection of SNP TSC0001977
aatagcgattgaa

SEQ ID NO: 6424 - DNA, 13 bp, Artificial Sequence
  Oligonucleotide for detection of SNP TSC0001977
ttcaatcgctatt

SEQ ID NO: 6425 - DNA, 13 bp, Artificial Sequence
  Oligonucleotide for detection of SNP TSC0001980
aggagattaggty

SEQ ID NO: 6426 - DNA, 13 bp, Artificial Sequence
  Oligonucleotide for detection of SNP TSC0001980
racctaatctcct

SEQ ID NO: 6427 - DNA, 13 bp, Artificial Sequence
  Oligonucleotide for detection of SNP TSC0001980
aggagagtaggty

SEQ ID NO: 6428 - DNA, 13 bp, Artificial Sequence
  Oligonucleotide for detection of SNP TSC0001980
racctactctcct

SEQ ID NO: 6429 - DNA, 13 bp, Artificial Sequence
  Oligonucleotide for detection of SNP TSC0001980
gatttaatttttt

SEQ ID NO: 6430 - DNA, 13 bp, Artificial Sequence
  Oligonucleotide for detection of SNP TSC0001980
aaaaaattaaatc

SEQ ID NO: 6431 - DNA, 13 bp, Artificial Sequence
  Oligonucleotide for detection of SNP TSC0001980
gatttattttttt

SEQ ID NO: 6432 - DNA, 13 bp, Artificial Sequence
  Oligonucleotide for detection of SNP TSC0001980
aaaaaaataaatc

SEQ ID NO: 6433 - DNA, 13 bp, Artificial Sequence
  Oligonucleotide for detection of SNP TSC0001981
taaaagagaggag

SEQ ID NO: 6434 - DNA, 13 bp, Artificial Sequence
  Oligonucleotide for detection of SNP TSC0001981
ctcctctctttta

SEQ ID NO: 6435 - DNA, 13 bp, Artificial Sequence
  Oligonucleotide for detection of SNP TSC0001981
taaaagggaggag

SEQ ID NO: 6436 - DNA, 13 bp, Artificial Sequence
  Oligonucleotide for detection of SNP TSC0001981
ctcctccctttta

SEQ ID NO: 6437 - DNA, 13 bp, Artificial Sequence
  Oligonucleotide for detection of SNP TSC0001982
gatgaagtgttta

SEQ ID NO: 6438 - DNA, 13 bp, Artificial Sequence
  Oligonucleotide for detection of SNP TSC0001982
taaacacttcatc

SEQ ID NO: 6439 - DNA, 13 bp, Artificial Sequence
  Oligonucleotide for detection of SNP TSC0001982
gatgaaatgttta

SEQ ID NO: 6440 - DNA, 13 bp, Artificial Sequence
  Oligonucleotide for detection of SNP TSC0001982
taaacatttcatc

SEQ ID NO: 6441 - DNA, 13 bp, Artificial Sequence
  Oligonucleotide for detection of SNP TSC0001983
aaaaaaaagaata

SEQ ID NO: 6442 - DNA, 13 bp, Artificial Sequence
  Oligonucleotide for detection of SNP TSC0001983
tattctttttttt

SEQ ID NO: 6443 - DNA, 13 bp, Artificial Sequence
  Oligonucleotide for detection of SNP TSC0001983
aaaaaatagaata

SEQ ID NO: 6444 - DNA, 13 bp, Artificial Sequence
  Oligonucleotide for detection of SNP TSC0001983
tattctatttttt

SEQ ID NO: 6445 - DNA, 13 bp, Artificial Sequence
  Oligonucleotide for detection of SNP TSC0001984
tatttagaagttt

SEQ ID NO: 6446 - DNA, 13 bp, Artificial Sequence
  Oligonucleotide for detection of SNP TSC0001984
aaacttctaaata

SEQ ID NO: 6447 - DNA, 13 bp, Artificial Sequence
  Oligonucleotide for detection of SNP TSC0001984
tatttaaaagttt

SEQ ID NO: 6448 - DNA, 13 bp, Artificial Sequence
  Oligonucleotide for detection of SNP TSC0001984
aaacttttaaata

SEQ ID NO: 6449 - DNA, 13 bp, Artificial Sequence
  Oligonucleotide for detection of SNP TSC0001985
tttttagtgtagy

SEQ ID NO: 6450 - DNA, 13 bp, Artificial Sequence
  Oligonucleotide for detection of SNP TSC0001985
rctacactaaaaa

SEQ ID NO: 6451 - DNA, 13 bp, Artificial Sequence
  Oligonucleotide for detection of SNP TSC0001985
tttttaatgtagy

SEQ ID NO: 6452 - DNA, 13 bp, Artificial Sequence
  Oligonucleotide for detection of SNP TSC0001985
rctacattaaaaa

SEQ ID NO: 6453 - DNA, 13 bp, Artificial Sequence
  Oligonucleotide for detection of SNP TSC0001986
ttttgaataatat

SEQ ID NO: 6454 - DNA, 13 bp, Artificial Sequence
  Oligonucleotide for detection of SNP TSC0001986
atattattcaaaa

SEQ ID NO: 6455 - DNA, 13 bp, Artificial Sequence
  Oligonucleotide for detection of SNP TSC0001986
ttttgagtaatat

SEQ ID NO: 6456 - DNA, 13 bp, Artificial Sequence
  Oligonucleotide for detection of SNP TSC0001986
atattactcaaaa

SEQ ID NO: 6457 - DNA, 13 bp, Artificial Sequence
  Oligonucleotide for detection of SNP TSC0001987
tgatttaatttty

SEQ ID NO: 6458 - DNA, 13 bp, Artificial Sequence
  Oligonucleotide for detection of SNP TSC0001987
raaaattaaatca

SEQ ID NO: 6459 - DNA, 13 bp, Artificial Sequence
  Oligonucleotide for detection of SNP TSC0001987
tgattttatttty

SEQ ID NO: 6460 - DNA, 13 bp, Artificial Sequence
  Oligonucleotide for detection of SNP TSC0001987
raaaataaaatca

SEQ ID NO: 6461 - DNA, 13 bp, Artificial Sequence
  Oligonucleotide for detection of SNP TSC0001987
ggagattaggtta

SEQ ID NO: 6462 - DNA, 13 bp, Artificial Sequence
  Oligonucleotide for detection of SNP TSC0001987
taacctaatctcc

SEQ ID NO: 6463 - DNA, 13 bp, Artificial Sequence
  Oligonucleotide for detection of SNP TSC0001987
ggagataaggtta

SEQ ID NO: 6464 - DNA, 13 bp, Artificial Sequence
  Oligonucleotide for detection of SNP TSC0001987
taaccttatctcc

SEQ ID NO: 6465 - DNA, 13 bp, Artificial Sequence
  Oligonucleotide for detection of SNP TSC0001988
gtatatattatay

SEQ ID NO: 6466 - DNA, 13 bp, Artificial Sequence
  Oligonucleotide for detection of SNP TSC0001988
rtataatatatac

SEQ ID NO: 6467 - DNA, 13 bp, Artificial Sequence
  Oligonucleotide for detection of SNP TSC0001988
gtatattttatay

SEQ ID NO: 6468 - DNA, 13 bp, Artificial Sequence
  Oligonucleotide for detection of SNP TSC0001988
rtataaaatatac

SEQ ID NO: 6469 - DNA, 13 bp, Artificial Sequence
  Oligonucleotide for detection of SNP TSC0001988
gtataatatatay

SEQ ID NO: 6470 - DNA, 13 bp, Artificial Sequence
  Oligonucleotide for detection of SNP TSC0001988
rtatatattatac

SEQ ID NO: 6471 - DNA, 13 bp, Artificial Sequence
  Oligonucleotide for detection of SNP TSC0001988
gtataagatatay

SEQ ID NO: 6472 - DNA, 13 bp, Artificial Sequence
  Oligonucleotide for detection of SNP TSC0001988
rtatatcttatac

SEQ ID NO: 6473 - DNA, 13 bp, Artificial Sequence
  Oligonucleotide for detection of SNP TSC0001989
taatgaggtgtat

SEQ ID NO: 6474 - DNA, 13 bp, Artificial Sequence
  Oligonucleotide for detection of SNP TSC0001989
atacacctcatta

SEQ ID NO: 6475 - DNA, 13 bp, Artificial Sequence
  Oligonucleotide for detection of SNP TSC0001989
taatgaagtgtat

SEQ ID NO: 6476 - DNA, 13 bp, Artificial Sequence
  Oligonucleotide for detection of SNP TSC0001989
atacacttcatta

SEQ ID NO: 6477 - DNA, 13 bp, Artificial Sequence
  Oligonucleotide for detection of SNP TSC0001990
attgttgtgggta

SEQ ID NO: 6478 - DNA, 13 bp, Artificial Sequence
  Oligonucleotide for detection of SNP TSC0001990
tacccacaacaat

SEQ ID NO: 6479 - DNA, 13 bp, Artificial Sequence
  Oligonucleotide for detection of SNP TSC0001990
attgttatgggta

SEQ ID NO: 6480 - DNA, 13 bp, Artificial Sequence
  Oligonucleotide for detection of SNP TSC0001990
tacccataacaat

SEQ ID NO: 6481 - DNA, 13 bp, Artificial Sequence
  Oligonucleotide for detection of SNP TSC0001990
atcgttgtgggta

SEQ ID NO: 6482 - DNA, 13 bp, Artificial Sequence
  Oligonucleotide for detection of SNP TSC0001990
tacccacaacgat

SEQ ID NO: 6483 - DNA, 13 bp, Artificial Sequence
  Oligonucleotide for detection of SNP TSC0001990
atcgttatgggta

SEQ ID NO: 6484 - DNA, 13 bp, Artificial Sequence
  Oligonucleotide for detection of SNP TSC0001990
tacccataacgat

SEQ ID NO: 6485 - DNA, 13 bp, Artificial Sequence
  Oligonucleotide for detection of SNP TSC0001994
atttgtgggggtg

SEQ ID NO: 6486 - DNA, 13 bp, Artificial Sequence
  Oligonucleotide for detection of SNP TSC0001994
cacccccacaaat

SEQ ID NO: 6487 - DNA, 13 bp, Artificial Sequence
  Oligonucleotide for detection of SNP TSC0001994
atttgtaggggtg

SEQ ID NO: 6488 - DNA, 13 bp, Artificial Sequence
  Oligonucleotide for detection of SNP TSC0001994
cacccctacaaat

SEQ ID NO: 6489 - DNA, 13 bp, Artificial Sequence
  Oligonucleotide for detection of SNP TSC0001995
ttgagatagtgta

SEQ ID NO: 6490 - DNA, 13 bp, Artificial Sequence
  Oligonucleotide for detection of SNP TSC0001995
tacactatctcaa

SEQ ID NO: 6491 - DNA, 13 bp, Artificial Sequence
  Oligonucleotide for detection of SNP TSC0001995
ttgagagagtgta

SEQ ID NO: 6492 - DNA, 13 bp, Artificial Sequence
  Oligonucleotide for detection of SNP TSC0001995
tacactctctcaa

SEQ ID NO: 6493 - DNA, 13 bp, Artificial Sequence
  Oligonucleotide for detection of SNP TSC0001995
tgtattattttaa

SEQ ID NO: 6494 - DNA, 13 bp, Artificial Sequence
  Oligonucleotide for detection of SNP TSC0001995
ttaaaataataca

SEQ ID NO: 6495 - DNA, 13 bp, Artificial Sequence
  Oligonucleotide for detection of SNP TSC0001995
tgtatttttttaa

SEQ ID NO: 6496 - DNA, 13 bp, Artificial Sequence
  Oligonucleotide for detection of SNP TSC0001995
ttaaaaaaataca

SEQ ID NO: 6497 - DNA, 13 bp, Artificial Sequence
  Oligonucleotide for detection of SNP TSC0001996
atgaattgtagty

SEQ ID NO: 6498 - DNA, 13 bp, Artificial Sequence
  Oligonucleotide for detection of SNP TSC0001996
ractacaattcat

SEQ ID NO: 6499 - DNA, 13 bp, Artificial Sequence
  Oligonucleotide for detection of SNP TSC0001996
atgaatcgtagty

SEQ ID NO: 6500 - DNA, 13 bp, Artificial Sequence
  Oligonucleotide for detection of SNP TSC0001996
ractacgattcat

SEQ ID NO: 6501 - DNA, 13 bp, Artificial Sequence
  Oligonucleotide for detection of SNP TSC0001996
ggttgtggtttat

SEQ ID NO: 6502 - DNA, 13 bp, Artificial Sequence
  Oligonucleotide for detection of SNP TSC0001996
ataaaccacaacc

SEQ ID NO: 6503 - DNA, 13 bp, Artificial Sequence
  Oligonucleotide for detection of SNP TSC0001996
ggttgtagtttat

SEQ ID NO: 6504 - DNA, 13 bp, Artificial Sequence
  Oligonucleotide for detection of SNP TSC0001996
ataaactacaacc

SEQ ID NO: 6505 - DNA, 13 bp, Artificial Sequence
  Oligonucleotide for detection of SNP TSC0001996
ggttgcggtttat

SEQ ID NO: 6506 - DNA, 13 bp, Artificial Sequence
  Oligonucleotide for detection of SNP TSC0001996
ataaaccgcaacc

SEQ ID NO: 6507 - DNA, 13 bp, Artificial Sequence
  Oligonucleotide for detection of SNP TSC0001999
agtatagtggaty

SEQ ID NO: 6508 - DNA, 13 bp, Artificial Sequence
  Oligonucleotide for detection of SNP TSC0001999
ratccactatact

SEQ ID NO: 6509 - DNA, 13 bp, Artificial Sequence
  Oligonucleotide for detection of SNP TSC0001999
agtataatggaty

SEQ ID NO: 6510 - DNA, 13 bp, Artificial Sequence
  Oligonucleotide for detection of SNP TSC0001999
ratccattatact

SEQ ID NO: 6511 - DNA, 13 bp, Artificial Sequence
  Oligonucleotide for detection of SNP TSC0002000
tggttaattttat

SEQ ID NO: 6512 - DNA, 13 bp, Artificial Sequence
  Oligonucleotide for detection of SNP TSC0002000
ataaaattaacca

SEQ ID NO: 6513 - DNA, 13 bp, Artificial Sequence
  Oligonucleotide for detection of SNP TSC0002000
tggttatttttat

SEQ ID NO: 6514 - DNA, 13 bp, Artificial Sequence
  Oligonucleotide for detection of SNP TSC0002000
ataaaaataacca

SEQ ID NO: 6515 - DNA, 13 bp, Artificial Sequence
  Oligonucleotide for detection of SNP TSC0002000
atgggattggtta

SEQ ID NO: 6516 - DNA, 13 bp, Artificial Sequence
  Oligonucleotide for detection of SNP TSC0002000
taaccaatcccat

SEQ ID NO: 6517 - DNA, 13 bp, Artificial Sequence
  Oligonucleotide for detection of SNP TSC0002000
atgggaatggtta

SEQ ID NO: 6518 - DNA, 13 bp, Artificial Sequence
  Oligonucleotide for detection of SNP TSC0002000
taaccattcccat

SEQ ID NO: 6519 - DNA, 13 bp, Artificial Sequence
  Oligonucleotide for detection of SNP TSC0002001
tgatagatgttgg

SEQ ID NO: 6520 - DNA, 13 bp, Artificial Sequence
  Oligonucleotide for detection of SNP TSC0002001
ccaacatctatca

SEQ ID NO: 6521 - DNA, 13 bp, Artificial Sequence
  Oligonucleotide for detection of SNP TSC0002001
tgataggtgttgg

SEQ ID NO: 6522 - DNA, 13 bp, Artificial Sequence
  Oligonucleotide for detection of SNP TSC0002001
ccaacacctatca

SEQ ID NO: 6523 - DNA, 13 bp, Artificial Sequence
  Oligonucleotide for detection of SNP TSC0002002
attaaaaatagaa

SEQ ID NO: 6524 - DNA, 13 bp, Artificial Sequence
  Oligonucleotide for detection of SNP TSC0002002
ttctatttttaat

SEQ ID NO: 6525 - DNA, 13 bp, Artificial Sequence
  Oligonucleotide for detection of SNP TSC0002002
attaaatatagaa

SEQ ID NO: 6526 - DNA, 13 bp, Artificial Sequence
  Oligonucleotide for detection of SNP TSC0002002
ttctatatttaat

SEQ ID NO: 6527 - DNA, 13 bp, Artificial Sequence
  Oligonucleotide for detection of SNP TSC0002002
ttttgtttttgat

SEQ ID NO: 6528 - DNA, 13 bp, Artificial Sequence
  Oligonucleotide for detection of SNP TSC0002002
atcaaaaacaaaa

SEQ ID NO: 6529 - DNA, 13 bp, Artificial Sequence
  Oligonucleotide for detection of SNP TSC0002002
ttttgtatttgat

SEQ ID NO: 6530 - DNA, 13 bp, Artificial Sequence
  Oligonucleotide for detection of SNP TSC0002002
atcaaatacaaaa

SEQ ID NO: 6531 - DNA, 13 bp, Artificial Sequence
  Oligonucleotide for detection of SNP TSC0002003
gtaaaataaatta

SEQ ID NO: 6532 - DNA, 13 bp, Artificial Sequence
  Oligonucleotide for detection of SNP TSC0002003
taatttattttac

SEQ ID NO: 6533 - DNA, 13 bp, Artificial Sequence
  Oligonucleotide for detection of SNP TSC0002003
gtaaaagaaatta

SEQ ID NO: 6534 - DNA, 13 bp, Artificial Sequence
  Oligonucleotide for detection of SNP TSC0002003
taatttcttttac

SEQ ID NO: 6535 - DNA, 13 bp, Artificial Sequence
  Oligonucleotide for detection of SNP TSC0002003
tagtttattttgy

SEQ ID NO: 6536 - DNA, 13 bp, Artificial Sequence
  Oligonucleotide for detection of SNP TSC0002003
rcaaaataaacta

SEQ ID NO: 6537 - DNA, 13 bp, Artificial Sequence
  Oligonucleotide for detection of SNP TSC0002003
tagttttttttgy

SEQ ID NO: 6538 - DNA, 13 bp, Artificial Sequence
  Oligonucleotide for detection of SNP TSC0002003
rcaaaaaaaacta

SEQ ID NO: 6539 - DNA, 13 bp, Artificial Sequence
  Oligonucleotide for detection of SNP TSC0002004
aaattttattaaa

SEQ ID NO: 6540 - DNA, 13 bp, Artificial Sequence
  Oligonucleotide for detection of SNP TSC0002004
tttaataaaattt

SEQ ID NO: 6541 - DNA, 13 bp, Artificial Sequence
  Oligonucleotide for detection of SNP TSC0002004
aaatttgattaaa

SEQ ID NO: 6542 - DNA, 13 bp, Artificial Sequence
  Oligonucleotide for detection of SNP TSC0002004
tttaatcaaattt

SEQ ID NO: 6543 - DNA, 13 bp, Artificial Sequence
  Oligonucleotide for detection of SNP TSC0002004
aaattcgattaaa

SEQ ID NO: 6544 - DNA, 13 bp, Artificial Sequence
  Oligonucleotide for detection of SNP TSC0002004
tttaatcgaattt

SEQ ID NO: 6545 - DNA, 13 bp, Artificial Sequence
  Oligonucleotide for detection of SNP TSC0002004
tttgatggggttt

SEQ ID NO: 6546 - DNA, 13 bp, Artificial Sequence
  Oligonucleotide for detection of SNP TSC0002004
aaaccccatcaaa

SEQ ID NO: 6547 - DNA, 13 bp, Artificial Sequence
  Oligonucleotide for detection of SNP TSC0002004
tttgattgggttt

SEQ ID NO: 6548 - DNA, 13 bp, Artificial Sequence
  Oligonucleotide for detection of SNP TSC0002004
aaacccaatcaaa

SEQ ID NO: 6549 - DNA, 13 bp, Artificial Sequence
  Oligonucleotide for detection of SNP TSC0002004
tttgatcgggttt

SEQ ID NO: 6550 - DNA, 13 bp, Artificial Sequence
  Oligonucleotide for detection of SNP TSC0002004
aaacccgatcaaa

SEQ ID NO: 6551 - DNA, 13 bp, Artificial Sequence
  Oligonucleotide for detection of SNP TSC0002005
tttttagataaga

SEQ ID NO: 6552 - DNA, 13 bp, Artificial Sequence
  Oligonucleotide for detection of SNP TSC0002005
tcttatctaaaaa

SEQ ID NO: 6553 - DNA, 13 bp, Artificial Sequence
  Oligonucleotide for detection of SNP TSC0002005
tttttaaataaga

SEQ ID NO: 6554 - DNA, 13 bp, Artificial Sequence
  Oligonucleotide for detection of SNP TSC0002005
tcttatttaaaaa

SEQ ID NO: 6555 - DNA, 13 bp, Artificial Sequence
  Oligonucleotide for detection of SNP TSC0002006
tgggaaaataatt

SEQ ID NO: 6556 - DNA, 13 bp, Artificial Sequence
  Oligonucleotide for detection of SNP TSC0002006
aattattttccca

SEQ ID NO: 6557 - DNA, 13 bp, Artificial Sequence
  Oligonucleotide for detection of SNP TSC0002006
tgggaagataatt

SEQ ID NO: 6558 - DNA, 13 bp, Artificial Sequence
  Oligonucleotide for detection of SNP TSC0002006
aattatcttccca

SEQ ID NO: 6559 - DNA, 13 bp, Artificial Sequence
  Oligonucleotide for detection of SNP TSC0002007
attgttatatata

SEQ ID NO: 6560 - DNA, 13 bp, Artificial Sequence
  Oligonucleotide for detection of SNP TSC0002007
tatatataacaat

SEQ ID NO: 6561 - DNA, 13 bp, Artificial Sequence
  Oligonucleotide for detection of SNP TSC0002007
attgttgtatata

SEQ ID NO: 6562 - DNA, 13 bp, Artificial Sequence
  Oligonucleotide for detection of SNP TSC0002007
tatatacaacaat

SEQ ID NO: 6563 - DNA, 13 bp, Artificial Sequence
  Oligonucleotide for detection of SNP TSC0002008
aaaaaaaaaagaa

SEQ ID NO: 6564 - DNA, 13 bp, Artificial Sequence
  Oligonucleotide for detection of SNP TSC0002008
ttctttttttttt

SEQ ID NO: 6565 - DNA, 13 bp, Artificial Sequence
  Oligonucleotide for detection of SNP TSC0002008
aaaaaagaaagaa

SEQ ID NO: 6566 - DNA, 13 bp, Artificial Sequence
  Oligonucleotide for detection of SNP TSC0002008
ttctttctttttt

SEQ ID NO: 6567 - DNA, 13 bp, Artificial Sequence
  Oligonucleotide for detection of SNP TSC0002009
tagtaaaatagaa

SEQ ID NO: 6568 - DNA, 13 bp, Artificial Sequence
  Oligonucleotide for detection of SNP TSC0002009
ttctattttacta

SEQ ID NO: 6569 - DNA, 13 bp, Artificial Sequence
  Oligonucleotide for detection of SNP TSC0002009
tagtaatatagaa

SEQ ID NO: 6570 - DNA, 13 bp, Artificial Sequence
  Oligonucleotide for detection of SNP TSC0002009
ttctatattacta

SEQ ID NO: 6571 - DNA, 13 bp, Artificial Sequence
  Oligonucleotide for detection of SNP TSC0002009
ttttgttttgtta

SEQ ID NO: 6572 - DNA, 13 bp, Artificial Sequence
  Oligonucleotide for detection of SNP TSC0002009
taacaaaacaaaa

SEQ ID NO: 6573 - DNA, 13 bp, Artificial Sequence
  Oligonucleotide for detection of SNP TSC0002009
ttttgtgttgtta

SEQ ID NO: 6574 - DNA, 13 bp, Artificial Sequence
  Oligonucleotide for detection of SNP TSC0002009
taacaacacaaaa

SEQ ID NO: 6575 - DNA, 13 bp, Artificial Sequence
  Oligonucleotide for detection of SNP TSC0002010
aaggagagattty

SEQ ID NO: 6576 - DNA, 13 bp, Artificial Sequence
  Oligonucleotide for detection of SNP TSC0002010
raaatctctcctt

SEQ ID NO: 6577 - DNA, 13 bp, Artificial Sequence
  Oligonucleotide for detection of SNP TSC0002010
aaggagggattty

SEQ ID NO: 6578 - DNA, 13 bp, Artificial Sequence
  Oligonucleotide for detection of SNP TSC0002010
raaatccctcctt

SEQ ID NO: 6579 - DNA, 13 bp, Artificial Sequence
  Oligonucleotide for detection of SNP TSC0002011
tttagtattgtat

SEQ ID NO: 6580 - DNA, 13 bp, Artificial Sequence
  Oligonucleotide for detection of SNP TSC0002011
atacaatactaaa

SEQ ID NO: 6581 - DNA, 13 bp, Artificial Sequence
  Oligonucleotide for detection of SNP TSC0002011
tttagtgttgtat

SEQ ID NO: 6582 - DNA, 13 bp, Artificial Sequence
  Oligonucleotide for detection of SNP TSC0002011
atacaacactaaa

SEQ ID NO: 6583 - DNA, 13 bp, Artificial Sequence
  Oligonucleotide for detection of SNP TSC0002012
gattaggttttay

SEQ ID NO: 6584 - DNA, 13 bp, Artificial Sequence
  Oligonucleotide for detection of SNP TSC0002012
rtaaaacctaatc

SEQ ID NO: 6585 - DNA, 13 bp, Artificial Sequence
  Oligonucleotide for detection of SNP TSC0002012
gattagattttay

SEQ ID NO: 6586 - DNA, 13 bp, Artificial Sequence
  Oligonucleotide for detection of SNP TSC0002012
rtaaaatctaatc

SEQ ID NO: 6587 - DNA, 13 bp, Artificial Sequence
  Oligonucleotide for detection of SNP TSC0002014
gtgtattgtttag

SEQ ID NO: 6588 - DNA, 13 bp, Artificial Sequence
  Oligonucleotide for detection of SNP TSC0002014
ctaaacaatacac

SEQ ID NO: 6589 - DNA, 13 bp, Artificial Sequence
  Oligonucleotide for detection of SNP TSC0002014
gtgtatcgtttag

SEQ ID NO: 6590 - DNA, 13 bp, Artificial Sequence
  Oligonucleotide for detection of SNP TSC0002014
ctaaacgatacac

SEQ ID NO: 6591 - DNA, 13 bp, Artificial Sequence
  Oligonucleotide for detection of SNP TSC0002014
ttgggtgatatay

SEQ ID NO: 6592 - DNA, 13 bp, Artificial Sequence
  Oligonucleotide for detection of SNP TSC0002014
rtatatcacccaa

SEQ ID NO: 6593 - DNA, 13 bp, Artificial Sequence
  Oligonucleotide for detection of SNP TSC0002014
ttgggtaatatay

SEQ ID NO: 6594 - DNA, 13 bp, Artificial Sequence
  Oligonucleotide for detection of SNP TSC0002014
rtatattacccaa

SEQ ID NO: 6595 - DNA, 13 bp, Artificial Sequence
  Oligonucleotide for detection of SNP TSC0002014
ttgggcgatatay

SEQ ID NO: 6596 - DNA, 13 bp, Artificial Sequence
  Oligonucleotide for detection of SNP TSC0002014
rtatatcgcccaa

SEQ ID NO: 6597 - DNA, 13 bp, Artificial Sequence
  Oligonucleotide for detection of SNP TSC0002015
tgtttatgtttag

SEQ ID NO: 6598 - DNA, 13 bp, Artificial Sequence
  Oligonucleotide for detection of SNP TSC0002015
ctaaacataaaca

SEQ ID NO: 6599 - DNA, 13 bp, Artificial Sequence
  Oligonucleotide for detection of SNP TSC0002015
tgtttacgtttag

SEQ ID NO: 6600 - DNA, 13 bp, Artificial Sequence
  Oligonucleotide for detection of SNP TSC0002015
ctaaacgtaaaca

SEQ ID NO: 6601 - DNA, 13 bp, Artificial Sequence
  Oligonucleotide for detection of SNP TSC0002015
ttggatgtaaata

SEQ ID NO: 6602 - DNA, 13 bp, Artificial Sequence
  Oligonucleotide for detection of SNP TSC0002015
tatttacatccaa

SEQ ID NO: 6603 - DNA, 13 bp, Artificial Sequence
  Oligonucleotide for detection of SNP TSC0002015
ttggatataaata

SEQ ID NO: 6604 - DNA, 13 bp, Artificial Sequence
  Oligonucleotide for detection of SNP TSC0002015
tatttatatccaa

SEQ ID NO: 6605 - DNA, 13 bp, Artificial Sequence
  Oligonucleotide for detection of SNP TSC0002015
ttggacgtaaata

SEQ ID NO: 6606 - DNA, 13 bp, Artificial Sequence
  Oligonucleotide for detection of SNP TSC0002015
tatttacgtccaa

SEQ ID NO: 6607 - DNA, 13 bp, Artificial Sequence
  Oligonucleotide for detection of SNP TSC0002016
taaataaggtatt

SEQ ID NO: 6608 - DNA, 13 bp, Artificial Sequence
  Oligonucleotide for detection of SNP TSC0002016
aataccttattta

SEQ ID NO: 6609 - DNA, 13 bp, Artificial Sequence
  Oligonucleotide for detection of SNP TSC0002016
taaatagggtatt

SEQ ID NO: 6610 - DNA, 13 bp, Artificial Sequence
  Oligonucleotide for detection of SNP TSC0002016
aataccctattta

SEQ ID NO: 6611 - DNA, 13 bp, Artificial Sequence
  Oligonucleotide for detection of SNP TSC0002017
ggaaaaataaaat

SEQ ID NO: 6612 - DNA, 13 bp, Artificial Sequence
  Oligonucleotide for detection of SNP TSC0002017
attttatttttcc

SEQ ID NO: 6613 - DNA, 13 bp, Artificial Sequence
  Oligonucleotide for detection of SNP TSC0002017
ggaaaagtaaaat

SEQ ID NO: 6614 - DNA, 13 bp, Artificial Sequence
  Oligonucleotide for detection of SNP TSC0002017
attttacttttcc

SEQ ID NO: 6615 - DNA, 13 bp, Artificial Sequence
  Oligonucleotide for detection of SNP TSC0002019
taattatggtaga

SEQ ID NO: 6616 - DNA, 13 bp, Artificial Sequence
  Oligonucleotide for detection of SNP TSC0002019
tctaccataatta

SEQ ID NO: 6617 - DNA, 13 bp, Artificial Sequence
  Oligonucleotide for detection of SNP TSC0002019
taattacggtaga

SEQ ID NO: 6618 - DNA, 13 bp, Artificial Sequence
  Oligonucleotide for detection of SNP TSC0002019
tctaccgtaatta

SEQ ID NO: 6619 - DNA, 13 bp, Artificial Sequence
  Oligonucleotide for detection of SNP TSC0002019
tttattgtggttg

SEQ ID NO: 6620 - DNA, 13 bp, Artificial Sequence
  Oligonucleotide for detection of SNP TSC0002019
caaccacaataaa

SEQ ID NO: 6621 - DNA, 13 bp, Artificial Sequence
  Oligonucleotide for detection of SNP TSC0002019
tttattatggttg

SEQ ID NO: 6622 - DNA, 13 bp, Artificial Sequence
  Oligonucleotide for detection of SNP TSC0002019
caaccataataaa

SEQ ID NO: 6623 - DNA, 13 bp, Artificial Sequence
  Oligonucleotide for detection of SNP TSC0002019
tttatcgtggttg

SEQ ID NO: 6624 - DNA, 13 bp, Artificial Sequence
  Oligonucleotide for detection of SNP TSC0002019
caaccacgataaa

SEQ ID NO: 6625 - DNA, 13 bp, Artificial Sequence
  Oligonucleotide for detection of SNP TSC0002020
atatttttaggta

SEQ ID NO: 6626 - DNA, 13 bp, Artificial Sequence
  Oligonucleotide for detection of SNP TSC0002020
tacctaaaaatat

SEQ ID NO: 6627 - DNA, 13 bp, Artificial Sequence
  Oligonucleotide for detection of SNP TSC0002020
atatttgtaggta

SEQ ID NO: 6628 - DNA, 13 bp, Artificial Sequence
  Oligonucleotide for detection of SNP TSC0002020
tacctacaaatat

SEQ ID NO: 6629 - DNA, 13 bp, Artificial Sequence
  Oligonucleotide for detection of SNP TSC0002020
tgtttgaagatgt

SEQ ID NO: 6630 - DNA, 13 bp, Artificial Sequence
  Oligonucleotide for detection of SNP TSC0002020
acatcttcaaaca

SEQ ID NO: 6631 - DNA, 13 bp, Artificial Sequence
  Oligonucleotide for detection of SNP TSC0002020
tgtttgtagatgt

SEQ ID NO: 6632 - DNA, 13 bp, Artificial Sequence
  Oligonucleotide for detection of SNP TSC0002020
acatctacaaaca

SEQ ID NO: 6633 - DNA, 13 bp, Artificial Sequence
  Oligonucleotide for detection of SNP TSC0002021
gaggtatgtaaat

SEQ ID NO: 6634 - DNA, 13 bp, Artificial Sequence
  Oligonucleotide for detection of SNP TSC0002021
atttacatacctc

SEQ ID NO: 6635 - DNA, 13 bp, Artificial Sequence
  Oligonucleotide for detection of SNP TSC0002021
gaggtacgtaaat

SEQ ID NO: 6636 - DNA, 13 bp, Artificial Sequence
  Oligonucleotide for detection of SNP TSC0002021
atttacgtacctc

SEQ ID NO: 6637 - DNA, 13 bp, Artificial Sequence
  Oligonucleotide for detection of SNP TSC0002021
atttatgtattty

SEQ ID NO: 6638 - DNA, 13 bp, Artificial Sequence
  Oligonucleotide for detection of SNP TSC0002021
raaatacataaat

SEQ ID NO: 6639 - DNA, 13 bp, Artificial Sequence
  Oligonucleotide for detection of SNP TSC0002021
atttatatattty

SEQ ID NO: 6640 - DNA, 13 bp, Artificial Sequence
  Oligonucleotide for detection of SNP TSC0002021
raaatatataaat

SEQ ID NO: 6641 - DNA, 13 bp, Artificial Sequence
  Oligonucleotide for detection of SNP TSC0002021
atttacgtattty

SEQ ID NO: 6642 - DNA, 13 bp, Artificial Sequence
  Oligonucleotide for detection of SNP TSC0002021
raaatacgtaaat

SEQ ID NO: 6643 - DNA, 13 bp, Artificial Sequence
  Oligonucleotide for detection of SNP TSC0002022
taatagtagagty

SEQ ID NO: 6644 - DNA, 13 bp, Artificial Sequence
  Oligonucleotide for detection of SNP TSC0002022
ractctactatta

SEQ ID NO: 6645 - DNA, 13 bp, Artificial Sequence
  Oligonucleotide for detection of SNP TSC0002022
taataggagagty

SEQ ID NO: 6646 - DNA, 13 bp, Artificial Sequence
  Oligonucleotide for detection of SNP TSC0002022
ractctcctatta

SEQ ID NO: 6647 - DNA, 13 bp, Artificial Sequence
  Oligonucleotide for detection of SNP TSC0002022
ggttttgttattg

SEQ ID NO: 6648 - DNA, 13 bp, Artificial Sequence
  Oligonucleotide for detection of SNP TSC0002022
caataacaaaacc

SEQ ID NO: 6649 - DNA, 13 bp, Artificial Sequence
  Oligonucleotide for detection of SNP TSC0002022
ggtttttttattg

SEQ ID NO: 6650 - DNA, 13 bp, Artificial Sequence
  Oligonucleotide for detection of SNP TSC0002022
caataaaaaaacc

SEQ ID NO: 6651 - DNA, 13 bp, Artificial Sequence
  Oligonucleotide for detection of SNP TSC0002023
tgataaaagagta

SEQ ID NO: 6652 - DNA, 13 bp, Artificial Sequence
  Oligonucleotide for detection of SNP TSC0002023
tactcttttatca

SEQ ID NO: 6653 - DNA, 13 bp, Artificial Sequence
  Oligonucleotide for detection of SNP TSC0002023
tgataatagagta

SEQ ID NO: 6654 - DNA, 13 bp, Artificial Sequence
  Oligonucleotide for detection of SNP TSC0002023
tactctattatca

SEQ ID NO: 6655 - DNA, 13 bp, Artificial Sequence
  Oligonucleotide for detection of SNP TSC0002023
tatttttttatta

SEQ ID NO: 6656 - DNA, 13 bp, Artificial Sequence
  Oligonucleotide for detection of SNP TSC0002023
taataaaaaaata

SEQ ID NO: 6657 - DNA, 13 bp, Artificial Sequence
  Oligonucleotide for detection of SNP TSC0002023
tattttgttatta

SEQ ID NO: 6658 - DNA, 13 bp, Artificial Sequence
  Oligonucleotide for detection of SNP TSC0002023
taataacaaaata

SEQ ID NO: 6659 - DNA, 13 bp, Artificial Sequence
  Oligonucleotide for detection of SNP TSC0002026
tggttgtttttat

SEQ ID NO: 6660 - DNA, 13 bp, Artificial Sequence
  Oligonucleotide for detection of SNP TSC0002026
ataaaaacaacca

SEQ ID NO: 6661 - DNA, 13 bp, Artificial Sequence
  Oligonucleotide for detection of SNP TSC0002026
tggttggttttat

SEQ ID NO: 6662 - DNA, 13 bp, Artificial Sequence
  Oligonucleotide for detection of SNP TSC0002026
ataaaaccaacca

SEQ ID NO: 6663 - DNA, 13 bp, Artificial Sequence
  Oligonucleotide for detection of SNP TSC0002026
atgagaataatta

SEQ ID NO: 6664 - DNA, 13 bp, Artificial Sequence
  Oligonucleotide for detection of SNP TSC0002026
taattattctcat

SEQ ID NO: 6665 - DNA, 13 bp, Artificial Sequence
  Oligonucleotide for detection of SNP TSC0002026
atgagattaatta

SEQ ID NO: 6666 - DNA, 13 bp, Artificial Sequence
  Oligonucleotide for detection of SNP TSC0002026
taattaatctcat

SEQ ID NO: 6667 - DNA, 13 bp, Artificial Sequence
  Oligonucleotide for detection of SNP TSC0002027
tttagtattttaa

SEQ ID NO: 6668 - DNA, 13 bp, Artificial Sequence
  Oligonucleotide for detection of SNP TSC0002027
ttaaaatactaaa

SEQ ID NO: 6669 - DNA, 13 bp, Artificial Sequence
  Oligonucleotide for detection of SNP TSC0002027
tttagtgttttaa

SEQ ID NO: 6670 - DNA, 13 bp, Artificial Sequence
  Oligonucleotide for detection of SNP TSC0002027
ttaaaacactaaa

SEQ ID NO: 6671 - DNA, 13 bp, Artificial Sequence
  Oligonucleotide for detection of SNP TSC0002027
tttagcgttttaa

SEQ ID NO: 6672 - DNA, 13 bp, Artificial Sequence
  Oligonucleotide for detection of SNP TSC0002027
ttaaaacgctaaa

SEQ ID NO: 6673 - DNA, 13 bp, Artificial Sequence
  Oligonucleotide for detection of SNP TSC0002027
ttaaggtgttgaa

SEQ ID NO: 6674 - DNA, 13 bp, Artificial Sequence
  Oligonucleotide for detection of SNP TSC0002027
ttcaacaccttaa

SEQ ID NO: 6675 - DNA, 13 bp, Artificial Sequence
  Oligonucleotide for detection of SNP TSC0002027
ttaaggcgttgaa

SEQ ID NO: 6676 - DNA, 13 bp, Artificial Sequence
  Oligonucleotide for detection of SNP TSC0002027
ttcaacgccttaa

SEQ ID NO: 6677 - DNA, 13 bp, Artificial Sequence
  Oligonucleotide for detection of SNP TSC0002028
ggattttaaatat

SEQ ID NO: 6678 - DNA, 13 bp, Artificial Sequence
  Oligonucleotide for detection of SNP TSC0002028
atatttaaaatcc

SEQ ID NO: 6679 - DNA, 13 bp, Artificial Sequence
  Oligonucleotide for detection of SNP TSC0002028
ggatttgaaatat

SEQ ID NO: 6680 - DNA, 13 bp, Artificial Sequence
  Oligonucleotide for detection of SNP TSC0002028
atatttcaaatcc

SEQ ID NO: 6681 - DNA, 13 bp, Artificial Sequence
  Oligonucleotide for detection of SNP TSC0002028
atgtttgaaatty

SEQ ID NO: 6682 - DNA, 13 bp, Artificial Sequence
  Oligonucleotide for detection of SNP TSC0002028
raatttcaaacat

SEQ ID NO: 6683 - DNA, 13 bp, Artificial Sequence
  Oligonucleotide for detection of SNP TSC0002028
atgttttaaatty

SEQ ID NO: 6684 - DNA, 13 bp, Artificial Sequence
  Oligonucleotide for detection of SNP TSC0002028
raatttaaaacat

SEQ ID NO: 6685 - DNA, 13 bp, Artificial Sequence
  Oligonucleotide for detection of SNP TSC0002029
ttagaaatatagg

SEQ ID NO: 6686 - DNA, 13 bp, Artificial Sequence
  Oligonucleotide for detection of SNP TSC0002029
cctatatttctaa

SEQ ID NO: 6687 - DNA, 13 bp, Artificial Sequence
  Oligonucleotide for detection of SNP TSC0002029
ttagaagtatagg

SEQ ID NO: 6688 - DNA, 13 bp, Artificial Sequence
  Oligonucleotide for detection of SNP TSC0002029
cctatacttctaa

SEQ ID NO: 6689 - DNA, 13 bp, Artificial Sequence
  Oligonucleotide for detection of SNP TSC0002030
tatattttttttt

SEQ ID NO: 6690 - DNA, 13 bp, Artificial Sequence
  Oligonucleotide for detection of SNP TSC0002030
aaaaaaaaatata

SEQ ID NO: 6691 - DNA, 13 bp, Artificial Sequence
  Oligonucleotide for detection of SNP TSC0002030
tatattgtttttt

SEQ ID NO: 6692 - DNA, 13 bp, Artificial Sequence
  Oligonucleotide for detection of SNP TSC0002030
aaaaaacaatata

SEQ ID NO: 6693 - DNA, 13 bp, Artificial Sequence
  Oligonucleotide for detection of SNP TSC0002030
agaagagaatgta

SEQ ID NO: 6694 - DNA, 13 bp, Artificial Sequence
  Oligonucleotide for detection of SNP TSC0002030
tacattctcttct

SEQ ID NO: 6695 - DNA, 13 bp, Artificial Sequence
  Oligonucleotide for detection of SNP TSC0002030
agaagataatgta

SEQ ID NO: 6696 - DNA, 13 bp, Artificial Sequence
  Oligonucleotide for detection of SNP TSC0002030
tacattatcttct

SEQ ID NO: 6697 - DNA, 13 bp, Artificial Sequence
  Oligonucleotide for detection of SNP TSC0002033
aagtttattttgy

SEQ ID NO: 6698 - DNA, 13 bp, Artificial Sequence
  Oligonucleotide for detection of SNP TSC0002033
rcaaaataaactt

SEQ ID NO: 6699 - DNA, 13 bp, Artificial Sequence
  Oligonucleotide for detection of SNP TSC0002033
aagttttttttgy

SEQ ID NO: 6700 - DNA, 13 bp, Artificial Sequence
  Oligonucleotide for detection of SNP TSC0002033
rcaaaaaaaactt

SEQ ID NO: 6701 - DNA, 13 bp, Artificial Sequence
  Oligonucleotide for detection of SNP TSC0002033
gtaaagtaaattt

SEQ ID NO: 6702 - DNA, 13 bp, Artificial Sequence
  Oligonucleotide for detection of SNP TSC0002033
aaatttactttac

SEQ ID NO: 6703 - DNA, 13 bp, Artificial Sequence
  Oligonucleotide for detection of SNP TSC0002033
gtaaagaaaattt

SEQ ID NO: 6704 - DNA, 13 bp, Artificial Sequence
  Oligonucleotide for detection of SNP TSC0002033
aaattttctttac

SEQ ID NO: 6705 - DNA, 13 bp, Artificial Sequence
  Oligonucleotide for detection of SNP TSC0002034
attttttaaagag

SEQ ID NO: 6706 - DNA, 13 bp, Artificial Sequence
  Oligonucleotide for detection of SNP TSC0002034
ctctttaaaaaat

SEQ ID NO: 6707 - DNA, 13 bp, Artificial Sequence
  Oligonucleotide for detection of SNP TSC0002034
atttttgaaagag

SEQ ID NO: 6708 - DNA, 13 bp, Artificial Sequence
  Oligonucleotide for detection of SNP TSC0002034
ctctttcaaaaat

SEQ ID NO: 6709 - DNA, 13 bp, Artificial Sequence
  Oligonucleotide for detection of SNP TSC0002034
attttcgaaagag

SEQ ID NO: 6710 - DNA, 13 bp, Artificial Sequence
  Oligonucleotide for detection of SNP TSC0002034
ctctttcgaaaat

SEQ ID NO: 6711 - DNA, 13 bp, Artificial Sequence
  Oligonucleotide for detection of SNP TSC0002034
ttttttggaaaat

SEQ ID NO: 6712 - DNA, 13 bp, Artificial Sequence
  Oligonucleotide for detection of SNP TSC0002034
attttccaaaaaa

SEQ ID NO: 6713 - DNA, 13 bp, Artificial Sequence
  Oligonucleotide for detection of SNP TSC0002034
tttttttgaaaat

SEQ ID NO: 6714 - DNA, 13 bp, Artificial Sequence
  Oligonucleotide for detection of SNP TSC0002034
attttcaaaaaaa

SEQ ID NO: 6715 - DNA, 13 bp, Artificial Sequence
  Oligonucleotide for detection of SNP TSC0002034
ttttttcgaaaat

SEQ ID NO: 6716 - DNA, 13 bp, Artificial Sequence
  Oligonucleotide for detection of SNP TSC0002034
attttcgaaaaaa

SEQ ID NO: 6717 - DNA, 13 bp, Artificial Sequence
  Oligonucleotide for detection of SNP TSC0002035
gattgagtggagy

SEQ ID NO: 6718 - DNA, 13 bp, Artificial Sequence
  Oligonucleotide for detection of SNP TSC0002035
rctccactcaatc

SEQ ID NO: 6719 - DNA, 13 bp, Artificial Sequence
  Oligonucleotide for detection of SNP TSC0002035
gattgaatggagy

SEQ ID NO: 6720 - DNA, 13 bp, Artificial Sequence
  Oligonucleotide for detection of SNP TSC0002035
rctccattcaatc

SEQ ID NO: 6721 - DNA, 13 bp, Artificial Sequence
  Oligonucleotide for detection of SNP TSC0002036
tattaaataagta

SEQ ID NO: 6722 - DNA, 13 bp, Artificial Sequence
  Oligonucleotide for detection of SNP TSC0002036
tacttatttaata

SEQ ID NO: 6723 - DNA, 13 bp, Artificial Sequence
  Oligonucleotide for detection of SNP TSC0002036
tattaagtaagta

SEQ ID NO: 6724 - DNA, 13 bp, Artificial Sequence
  Oligonucleotide for detection of SNP TSC0002036
tacttacttaata

SEQ ID NO: 6725 - DNA, 13 bp, Artificial Sequence
  Oligonucleotide for detection of SNP TSC0002037
ttgtggatttgaa

SEQ ID NO: 6726 - DNA, 13 bp, Artificial Sequence
  Oligonucleotide for detection of SNP TSC0002037
ttcaaatccacaa

SEQ ID NO: 6727 - DNA, 13 bp, Artificial Sequence
  Oligonucleotide for detection of SNP TSC0002037
ttgtggttttgaa

SEQ ID NO: 6728 - DNA, 13 bp, Artificial Sequence
  Oligonucleotide for detection of SNP TSC0002037
ttcaaaaccacaa

SEQ ID NO: 6729 - DNA, 13 bp, Artificial Sequence
  Oligonucleotide for detection of SNP TSC0002037
tttaaatttataa

SEQ ID NO: 6730 - DNA, 13 bp, Artificial Sequence
  Oligonucleotide for detection of SNP TSC0002037
ttataaatttaaa

SEQ ID NO: 6731 - DNA, 13 bp, Artificial Sequence
  Oligonucleotide for detection of SNP TSC0002037
tttaaaattataa

SEQ ID NO: 6732 - DNA, 13 bp, Artificial Sequence
  Oligonucleotide for detection of SNP TSC0002037
ttataattttaaa

SEQ ID NO: 6733 - DNA, 13 bp, Artificial Sequence
  Oligonucleotide for detection of SNP TSC0002038
ttgtttattaaaa

SEQ ID NO: 6734 - DNA, 13 bp, Artificial Sequence
  Oligonucleotide for detection of SNP TSC0002038
ttttaataaacaa

SEQ ID NO: 6735 - DNA, 13 bp, Artificial Sequence
  Oligonucleotide for detection of SNP TSC0002038
ttgttttttaaaa

SEQ ID NO: 6736 - DNA, 13 bp, Artificial Sequence
  Oligonucleotide for detection of SNP TSC0002038
ttttaaaaaacaa

SEQ ID NO: 6737 - DNA, 13 bp, Artificial Sequence
  Oligonucleotide for detection of SNP TSC0002038
ttttaatagatag

SEQ ID NO: 6738 - DNA, 13 bp, Artificial Sequence
  Oligonucleotide for detection of SNP TSC0002038
ctatctattaaaa

SEQ ID NO: 6739 - DNA, 13 bp, Artificial Sequence
  Oligonucleotide for detection of SNP TSC0002038
ttttaagagatag

SEQ ID NO: 6740 - DNA, 13 bp, Artificial Sequence
  Oligonucleotide for detection of SNP TSC0002038
ctatctcttaaaa

SEQ ID NO: 6741 - DNA, 13 bp, Artificial Sequence
  Oligonucleotide for detection of SNP TSC0002039
atttaatggggty

SEQ ID NO: 6742 - DNA, 13 bp, Artificial Sequence
  Oligonucleotide for detection of SNP TSC0002039
raccccattaaat

SEQ ID NO: 6743 - DNA, 13 bp, Artificial Sequence
  Oligonucleotide for detection of SNP TSC0002039
atttaacggggty

SEQ ID NO: 6744 - DNA, 13 bp, Artificial Sequence
  Oligonucleotide for detection of SNP TSC0002039
raccccgttaaat

SEQ ID NO: 6745 - DNA, 13 bp, Artificial Sequence
  Oligonucleotide for detection of SNP TSC0002039
ggttttgttagat

SEQ ID NO: 6746 - DNA, 13 bp, Artificial Sequence
  Oligonucleotide for detection of SNP TSC0002039
atctaacaaaacc

SEQ ID NO: 6747 - DNA, 13 bp, Artificial Sequence
  Oligonucleotide for detection of SNP TSC0002039
ggttttattagat

SEQ ID NO: 6748 - DNA, 13 bp, Artificial Sequence
  Oligonucleotide for detection of SNP TSC0002039
atctaataaaacc

SEQ ID NO: 6749 - DNA, 13 bp, Artificial Sequence
  Oligonucleotide for detection of SNP TSC0002039
ggtttcgttagat

SEQ ID NO: 6750 - DNA, 13 bp, Artificial Sequence
  Oligonucleotide for detection of SNP TSC0002039
atctaacgaaacc

SEQ ID NO: 6751 - DNA, 13 bp, Artificial Sequence
  Oligonucleotide for detection of SNP TSC0002041
aaatgattttttt

SEQ ID NO: 6752 - DNA, 13 bp, Artificial Sequence
  Oligonucleotide for detection of SNP TSC0002041
aaaaaaatcattt

SEQ ID NO: 6753 - DNA, 13 bp, Artificial Sequence
  Oligonucleotide for detection of SNP TSC0002041
aaatgagtttttt

SEQ ID NO: 6754 - DNA, 13 bp, Artificial Sequence
  Oligonucleotide for detection of SNP TSC0002041
aaaaaactcattt

SEQ ID NO: 6755 - DNA, 13 bp, Artificial Sequence
  Oligonucleotide for detection of SNP TSC0002041
aaaaaaattattt

SEQ ID NO: 6756 - DNA, 13 bp, Artificial Sequence
  Oligonucleotide for detection of SNP TSC0002041
aaataattttttt

SEQ ID NO: 6757 - DNA, 13 bp, Artificial Sequence
  Oligonucleotide for detection of SNP TSC0002041
aaaaaatttattt

SEQ ID NO: 6758 - DNA, 13 bp, Artificial Sequence
  Oligonucleotide for detection of SNP TSC0002041
aaataaatttttt

SEQ ID NO: 6759 - DNA, 13 bp, Artificial Sequence
  Oligonucleotide for detection of SNP TSC0002044
atttatataatgt

SEQ ID NO: 6760 - DNA, 13 bp, Artificial Sequence
  Oligonucleotide for detection of SNP TSC0002044
acattatataaat

SEQ ID NO: 6761 - DNA, 13 bp, Artificial Sequence
  Oligonucleotide for detection of SNP TSC0002044
atttatgtaatgt

SEQ ID NO: 6762 - DNA, 13 bp, Artificial Sequence
  Oligonucleotide for detection of SNP TSC0002044
acattacataaat

SEQ ID NO: 6763 - DNA, 13 bp, Artificial Sequence
  Oligonucleotide for detection of SNP TSC0002044
atttacgtaatgt

SEQ ID NO: 6764 - DNA, 13 bp, Artificial Sequence
  Oligonucleotide for detection of SNP TSC0002044
acattacgtaaat

SEQ ID NO: 6765 - DNA, 13 bp, Artificial Sequence
  Oligonucleotide for detection of SNP TSC0002044
atattgtgtaaat

SEQ ID NO: 6766 - DNA, 13 bp, Artificial Sequence
  Oligonucleotide for detection of SNP TSC0002044
atttacacaatat

SEQ ID NO: 6767 - DNA, 13 bp, Artificial Sequence
  Oligonucleotide for detection of SNP TSC0002044
atattgcgtaaat

SEQ ID NO: 6768 - DNA, 13 bp, Artificial Sequence
  Oligonucleotide for detection of SNP TSC0002044
atttacgcaatat

SEQ ID NO: 6769 - DNA, 13 bp, Artificial Sequence
  Oligonucleotide for detection of SNP TSC0002046
tttagaatagtag

SEQ ID NO: 6770 - DNA, 13 bp, Artificial Sequence
  Oligonucleotide for detection of SNP TSC0002046
ctactattctaaa

SEQ ID NO: 6771 - DNA, 13 bp, Artificial Sequence
  Oligonucleotide for detection of SNP TSC0002046
tttagagtagtag

SEQ ID NO: 6772 - DNA, 13 bp, Artificial Sequence
  Oligonucleotide for detection of SNP TSC0002046
ctactactctaaa

SEQ ID NO: 6773 - DNA, 13 bp, Artificial Sequence
  Oligonucleotide for detection of SNP TSC0002047
tgttatatggtgy

SEQ ID NO: 6774 - DNA, 13 bp, Artificial Sequence
  Oligonucleotide for detection of SNP TSC0002047
rcaccatataaca

SEQ ID NO: 6775 - DNA, 13 bp, Artificial Sequence
  Oligonucleotide for detection of SNP TSC0002047
tgttatgtggtgy

SEQ ID NO: 6776 - DNA, 13 bp, Artificial Sequence
  Oligonucleotide for detection of SNP TSC0002047
rcaccacataaca

SEQ ID NO: 6777 - DNA, 13 bp, Artificial Sequence
  Oligonucleotide for detection of SNP TSC0002047
tgttacgtggtgy

SEQ ID NO: 6778 - DNA, 13 bp, Artificial Sequence
  Oligonucleotide for detection of SNP TSC0002047
rcaccacgtaaca

SEQ ID NO: 6779 - DNA, 13 bp, Artificial Sequence
  Oligonucleotide for detection of SNP TSC0002047
gtattatgtgata

SEQ ID NO: 6780 - DNA, 13 bp, Artificial Sequence
  Oligonucleotide for detection of SNP TSC0002047
tatcacataatac

SEQ ID NO: 6781 - DNA, 13 bp, Artificial Sequence
  Oligonucleotide for detection of SNP TSC0002047
gtattacgtgata

SEQ ID NO: 6782 - DNA, 13 bp, Artificial Sequence
  Oligonucleotide for detection of SNP TSC0002047
tatcacgtaatac

SEQ ID NO: 6783 - DNA, 13 bp, Artificial Sequence
  Oligonucleotide for detection of SNP TSC0002048
atgtttgtattaa

SEQ ID NO: 6784 - DNA, 13 bp, Artificial Sequence
  Oligonucleotide for detection of SNP TSC0002048
ttaatacaaacat

SEQ ID NO: 6785 - DNA, 13 bp, Artificial Sequence
  Oligonucleotide for detection of SNP TSC0002048
atgtttatattaa

SEQ ID NO: 6786 - DNA, 13 bp, Artificial Sequence
  Oligonucleotide for detection of SNP TSC0002048
ttaatataaacat

SEQ ID NO: 6787 - DNA, 13 bp, Artificial Sequence
  Oligonucleotide for detection of SNP TSC0002049
agatggtgtttta

SEQ ID NO: 6788 - DNA, 13 bp, Artificial Sequence
  Oligonucleotide for detection of SNP TSC0002049
taaaacaccatct

SEQ ID NO: 6789 - DNA, 13 bp, Artificial Sequence
  Oligonucleotide for detection of SNP TSC0002049
agatggcgtttta

SEQ ID NO: 6790 - DNA, 13 bp, Artificial Sequence
  Oligonucleotide for detection of SNP TSC0002049
taaaacgccatct

SEQ ID NO: 6791 - DNA, 13 bp, Artificial Sequence
  Oligonucleotide for detection of SNP TSC0002049
taaaatgttattt

SEQ ID NO: 6792 - DNA, 13 bp, Artificial Sequence
  Oligonucleotide for detection of SNP TSC0002049
aaataacatttta

SEQ ID NO: 6793 - DNA, 13 bp, Artificial Sequence
  Oligonucleotide for detection of SNP TSC0002049
taaaatattattt

SEQ ID NO: 6794 - DNA, 13 bp, Artificial Sequence
  Oligonucleotide for detection of SNP TSC0002049
aaataatatttta

SEQ ID NO: 6795 - DNA, 13 bp, Artificial Sequence
  Oligonucleotide for detection of SNP TSC0002049
taaaacgttattt

SEQ ID NO: 6796 - DNA, 13 bp, Artificial Sequence
  Oligonucleotide for detection of SNP TSC0002049
aaataacgtttta

SEQ ID NO: 6797 - DNA, 13 bp, Artificial Sequence
  Oligonucleotide for detection of SNP TSC0002050
gaattatatattt

SEQ ID NO: 6798 - DNA, 13 bp, Artificial Sequence
  Oligonucleotide for detection of SNP TSC0002050
aaatatataattc

SEQ ID NO: 6799 - DNA, 13 bp, Artificial Sequence
  Oligonucleotide for detection of SNP TSC0002050
gaattagatattt

SEQ ID NO: 6800 - DNA, 13 bp, Artificial Sequence
  Oligonucleotide for detection of SNP TSC0002050
aaatatctaattc

SEQ ID NO: 6801 - DNA, 13 bp, Artificial Sequence
  Oligonucleotide for detection of SNP TSC0002050
aggtatgtaatty

SEQ ID NO: 6802 - DNA, 13 bp, Artificial Sequence
  Oligonucleotide for detection of SNP TSC0002050
raattacatacct

SEQ ID NO: 6803 - DNA, 13 bp, Artificial Sequence
  Oligonucleotide for detection of SNP TSC0002050
aggtatttaatty

SEQ ID NO: 6804 - DNA, 13 bp, Artificial Sequence
  Oligonucleotide for detection of SNP TSC0002050
raattaaatacct

SEQ ID NO: 6805 - DNA, 13 bp, Artificial Sequence
  Oligonucleotide for detection of SNP TSC0002051
tagaatatttgta

SEQ ID NO: 6806 - DNA, 13 bp, Artificial Sequence
  Oligonucleotide for detection of SNP TSC0002051
tacaaatattcta

SEQ ID NO: 6807 - DNA, 13 bp, Artificial Sequence
  Oligonucleotide for detection of SNP TSC0002051
tagaatgtttgta

SEQ ID NO: 6808 - DNA, 13 bp, Artificial Sequence
  Oligonucleotide for detection of SNP TSC0002051
tacaaacattcta

SEQ ID NO: 6809 - DNA, 13 bp, Artificial Sequence
  Oligonucleotide for detection of SNP TSC0002052
gtattttgaattt

SEQ ID NO: 6810 - DNA, 13 bp, Artificial Sequence
  Oligonucleotide for detection of SNP TSC0002052
aaattcaaaatac

SEQ ID NO: 6811 - DNA, 13 bp, Artificial Sequence
  Oligonucleotide for detection of SNP TSC0002052
gtatttcgaattt

SEQ ID NO: 6812 - DNA, 13 bp, Artificial Sequence
  Oligonucleotide for detection of SNP TSC0002052
aaattcgaaatac

SEQ ID NO: 6813 - DNA, 13 bp, Artificial Sequence
  Oligonucleotide for detection of SNP TSC0002052
aagtttggggtay

SEQ ID NO: 6814 - DNA, 13 bp, Artificial Sequence
  Oligonucleotide for detection of SNP TSC0002052
rtaccccaaactt

SEQ ID NO: 6815 - DNA, 13 bp, Artificial Sequence
  Oligonucleotide for detection of SNP TSC0002052
aagtttagggtay

SEQ ID NO: 6816 - DNA, 13 bp, Artificial Sequence
  Oligonucleotide for detection of SNP TSC0002052
rtaccctaaactt

SEQ ID NO: 6817 - DNA, 13 bp, Artificial Sequence
  Oligonucleotide for detection of SNP TSC0002052
aagttcggggtay

SEQ ID NO: 6818 - DNA, 13 bp, Artificial Sequence
  Oligonucleotide for detection of SNP TSC0002052
rtaccccgaactt

SEQ ID NO: 6819 - DNA, 13 bp, Artificial Sequence
  Oligonucleotide for detection of SNP TSC0002054
agatagaattttt

SEQ ID NO: 6820 - DNA, 13 bp, Artificial Sequence
  Oligonucleotide for detection of SNP TSC0002054
aaaaattctatct

SEQ ID NO: 6821 - DNA, 13 bp, Artificial Sequence
  Oligonucleotide for detection of SNP TSC0002054
agataggattttt

SEQ ID NO: 6822 - DNA, 13 bp, Artificial Sequence
  Oligonucleotide for detection of SNP TSC0002054
aaaaatcctatct

SEQ ID NO: 6823 - DNA, 13 bp, Artificial Sequence
  Oligonucleotide for detection of SNP TSC0002055
ttttaaaagatta

SEQ ID NO: 6824 - DNA, 13 bp, Artificial Sequence
  Oligonucleotide for detection of SNP TSC0002055
taatcttttaaaa

SEQ ID NO: 6825 - DNA, 13 bp, Artificial Sequence
  Oligonucleotide for detection of SNP TSC0002055
ttttaagagatta

SEQ ID NO: 6826 - DNA, 13 bp, Artificial Sequence
  Oligonucleotide for detection of SNP TSC0002055
taatctcttaaaa

SEQ ID NO: 6827 - DNA, 13 bp, Artificial Sequence
  Oligonucleotide for detection of SNP TSC0002056
agagatgggattt

SEQ ID NO: 6828 - DNA, 13 bp, Artificial Sequence
  Oligonucleotide for detection of SNP TSC0002056
aaatcccatctct

SEQ ID NO: 6829 - DNA, 13 bp, Artificial Sequence
  Oligonucleotide for detection of SNP TSC0002056
agagataggattt

SEQ ID NO: 6830 - DNA, 13 bp, Artificial Sequence
  Oligonucleotide for detection of SNP TSC0002056
aaatcctatctct

SEQ ID NO: 6831 - DNA, 13 bp, Artificial Sequence
  Oligonucleotide for detection of SNP TSC0002058
taggaaatttagt

SEQ ID NO: 6832 - DNA, 13 bp, Artificial Sequence
  Oligonucleotide for detection of SNP TSC0002058
actaaatttccta

SEQ ID NO: 6833 - DNA, 13 bp, Artificial Sequence
  Oligonucleotide for detection of SNP TSC0002058
taggaattttagt

SEQ ID NO: 6834 - DNA, 13 bp, Artificial Sequence
  Oligonucleotide for detection of SNP TSC0002058
actaaaattccta

SEQ ID NO: 6835 - DNA, 13 bp, Artificial Sequence
  Oligonucleotide for detection of SNP TSC0002058
attaagtttttta

SEQ ID NO: 6836 - DNA, 13 bp, Artificial Sequence
  Oligonucleotide for detection of SNP TSC0002058
taaaaaacttaat

SEQ ID NO: 6837 - DNA, 13 bp, Artificial Sequence
  Oligonucleotide for detection of SNP TSC0002058
attaaggttttta

SEQ ID NO: 6838 - DNA, 13 bp, Artificial Sequence
  Oligonucleotide for detection of SNP TSC0002058
taaaaaccttaat

SEQ ID NO: 6839 - DNA, 13 bp, Artificial Sequence
  Oligonucleotide for detection of SNP TSC0002059
agatatatgttty

SEQ ID NO: 6840 - DNA, 13 bp, Artificial Sequence
  Oligonucleotide for detection of SNP TSC0002059
raaacatatatct

SEQ ID NO: 6841 - DNA, 13 bp, Artificial Sequence
  Oligonucleotide for detection of SNP TSC0002059
agatatgtgttty

SEQ ID NO: 6842 - DNA, 13 bp, Artificial Sequence
  Oligonucleotide for detection of SNP TSC0002059
raaacacatatct

SEQ ID NO: 6843 - DNA, 13 bp, Artificial Sequence
  Oligonucleotide for detection of SNP TSC0002059
agatacgtgttty

SEQ ID NO: 6844 - DNA, 13 bp, Artificial Sequence
  Oligonucleotide for detection of SNP TSC0002059
raaacacgtatct

SEQ ID NO: 6845 - DNA, 13 bp, Artificial Sequence
  Oligonucleotide for detection of SNP TSC0002059
gaaatatgtgttt

SEQ ID NO: 6846 - DNA, 13 bp, Artificial Sequence
  Oligonucleotide for detection of SNP TSC0002059
aaacacatatttc

SEQ ID NO: 6847 - DNA, 13 bp, Artificial Sequence
  Oligonucleotide for detection of SNP TSC0002059
gaaatacgtgttt

SEQ ID NO: 6848 - DNA, 13 bp, Artificial Sequence
  Oligonucleotide for detection of SNP TSC0002059
aaacacgtatttc

SEQ ID NO: 6849 - DNA, 13 bp, Artificial Sequence
  Oligonucleotide for detection of SNP TSC0002060
ttttatatagtag

SEQ ID NO: 6850 - DNA, 13 bp, Artificial Sequence
  Oligonucleotide for detection of SNP TSC0002060
ctactatataaaa

SEQ ID NO: 6851 - DNA, 13 bp, Artificial Sequence
  Oligonucleotide for detection of SNP TSC0002060
ttttatttagtag

SEQ ID NO: 6852 - DNA, 13 bp, Artificial Sequence
  Oligonucleotide for detection of SNP TSC0002060
ctactaaataaaa

SEQ ID NO: 6853 - DNA, 13 bp, Artificial Sequence
  Oligonucleotide for detection of SNP TSC0002060
ttgttatgtgaag

SEQ ID NO: 6854 - DNA, 13 bp, Artificial Sequence
  Oligonucleotide for detection of SNP TSC0002060
cttcacataacaa

SEQ ID NO: 6855 - DNA, 13 bp, Artificial Sequence
  Oligonucleotide for detection of SNP TSC0002060
ttgttaagtgaag

SEQ ID NO: 6856 - DNA, 13 bp, Artificial Sequence
  Oligonucleotide for detection of SNP TSC0002060
cttcacttaacaa

SEQ ID NO: 6857 - DNA, 13 bp, Artificial Sequence
  Oligonucleotide for detection of SNP TSC0002061
tgatgagtaatta

SEQ ID NO: 6858 - DNA, 13 bp, Artificial Sequence
  Oligonucleotide for detection of SNP TSC0002061
taattactcatca

SEQ ID NO: 6859 - DNA, 13 bp, Artificial Sequence
  Oligonucleotide for detection of SNP TSC0002061
tgatgaataatta

SEQ ID NO: 6860 - DNA, 13 bp, Artificial Sequence
  Oligonucleotide for detection of SNP TSC0002061
taattattcatca

SEQ ID NO: 6861 - DNA, 13 bp, Artificial Sequence
  Oligonucleotide for detection of SNP TSC0002064
agttattgtgtty

SEQ ID NO: 6862 - DNA, 13 bp, Artificial Sequence
  Oligonucleotide for detection of SNP TSC0002064
raacacaataact

SEQ ID NO: 6863 - DNA, 13 bp, Artificial Sequence
  Oligonucleotide for detection of SNP TSC0002064
agttatcgtgtty

SEQ ID NO: 6864 - DNA, 13 bp, Artificial Sequence
  Oligonucleotide for detection of SNP TSC0002064
raacacgataact

SEQ ID NO: 6865 - DNA, 13 bp, Artificial Sequence
  Oligonucleotide for detection of SNP TSC0002064
agttattgcgtty

SEQ ID NO: 6866 - DNA, 13 bp, Artificial Sequence
  Oligonucleotide for detection of SNP TSC0002064
raacgcaataact

SEQ ID NO: 6867 - DNA, 13 bp, Artificial Sequence
  Oligonucleotide for detection of SNP TSC0002064
agttatcgcgtty

SEQ ID NO: 6868 - DNA, 13 bp, Artificial Sequence
  Oligonucleotide for detection of SNP TSC0002064
raacgcgataact

SEQ ID NO: 6869 - DNA, 13 bp, Artificial Sequence
  Oligonucleotide for detection of SNP TSC0002064
gggtgtggtggtt

SEQ ID NO: 6870 - DNA, 13 bp, Artificial Sequence
  Oligonucleotide for detection of SNP TSC0002064
aaccaccacaccc

SEQ ID NO: 6871 - DNA, 13 bp, Artificial Sequence
  Oligonucleotide for detection of SNP TSC0002064
gggtgtagtggtt

SEQ ID NO: 6872 - DNA, 13 bp, Artificial Sequence
  Oligonucleotide for detection of SNP TSC0002064
aaccactacaccc

SEQ ID NO: 6873 - DNA, 13 bp, Artificial Sequence
  Oligonucleotide for detection of SNP TSC0002064
gggcgtggtggtt

SEQ ID NO: 6874 - DNA, 13 bp, Artificial Sequence
  Oligonucleotide for detection of SNP TSC0002064
aaccaccacgccc

SEQ ID NO: 6875 - DNA, 13 bp, Artificial Sequence
  Oligonucleotide for detection of SNP TSC0002064
gggcgtagtggtt

SEQ ID NO: 6876 - DNA, 13 bp, Artificial Sequence
  Oligonucleotide for detection of SNP TSC0002064
aaccactacgccc

SEQ ID NO: 6877 - DNA, 13 bp, Artificial Sequence
  Oligonucleotide for detection of SNP TSC0002064
gggtgcggtggtt

SEQ ID NO: 6878 - DNA, 13 bp, Artificial Sequence
  Oligonucleotide for detection of SNP TSC0002064
aaccaccgcaccc

SEQ ID NO: 6879 - DNA, 13 bp, Artificial Sequence
  Oligonucleotide for detection of SNP TSC0002064
gggcgcggtggtt

SEQ ID NO: 6880 - DNA, 13 bp, Artificial Sequence
  Oligonucleotide for detection of SNP TSC0002064
aaccaccgcgccc

SEQ ID NO: 6881 - DNA, 13 bp, Artificial Sequence
  Oligonucleotide for detection of SNP TSC0002065
taatttttatatt

SEQ ID NO: 6882 - DNA, 13 bp, Artificial Sequence
  Oligonucleotide for detection of SNP TSC0002065
aatataaaaatta

SEQ ID NO: 6883 - DNA, 13 bp, Artificial Sequence
  Oligonucleotide for detection of SNP TSC0002065
taatttgtatatt

SEQ ID NO: 6884 - DNA, 13 bp, Artificial Sequence
  Oligonucleotide for detection of SNP TSC0002065
aatatacaaatta

SEQ ID NO: 6885 - DNA, 13 bp, Artificial Sequence
  Oligonucleotide for detection of SNP TSC0002065
aatataaaaattg

SEQ ID NO: 6886 - DNA, 13 bp, Artificial Sequence
  Oligonucleotide for detection of SNP TSC0002065
caatttttatatt

SEQ ID NO: 6887 - DNA, 13 bp, Artificial Sequence
  Oligonucleotide for detection of SNP TSC0002065
aatatataaattg

SEQ ID NO: 6888 - DNA, 13 bp, Artificial Sequence
  Oligonucleotide for detection of SNP TSC0002065
caatttatatatt

SEQ ID NO: 6889 - DNA, 13 bp, Artificial Sequence
  Oligonucleotide for detection of SNP TSC0002067
tatggaagaaata

SEQ ID NO: 6890 - DNA, 13 bp, Artificial Sequence
  Oligonucleotide for detection of SNP TSC0002067
tatttcttccata

SEQ ID NO: 6891 - DNA, 13 bp, Artificial Sequence
  Oligonucleotide for detection of SNP TSC0002067
tatggatgaaata

SEQ ID NO: 6892 - DNA, 13 bp, Artificial Sequence
  Oligonucleotide for detection of SNP TSC0002067
tatttcatccata

SEQ ID NO: 6893 - DNA, 13 bp, Artificial Sequence
  Oligonucleotide for detection of SNP TSC0002067
tattttttttata

SEQ ID NO: 6894 - DNA, 13 bp, Artificial Sequence
  Oligonucleotide for detection of SNP TSC0002067
tataaaaaaaata

SEQ ID NO: 6895 - DNA, 13 bp, Artificial Sequence
  Oligonucleotide for detection of SNP TSC0002067
tattttatttata

SEQ ID NO: 6896 - DNA, 13 bp, Artificial Sequence
  Oligonucleotide for detection of SNP TSC0002067
tataaataaaata

SEQ ID NO: 6897 - DNA, 13 bp, Artificial Sequence
  Oligonucleotide for detection of SNP TSC0002068
attttgattttty

SEQ ID NO: 6898 - DNA, 13 bp, Artificial Sequence
  Oligonucleotide for detection of SNP TSC0002068
raaaaatcaaaat

SEQ ID NO: 6899 - DNA, 13 bp, Artificial Sequence
  Oligonucleotide for detection of SNP TSC0002068
attttgtttttty

SEQ ID NO: 6900 - DNA, 13 bp, Artificial Sequence
  Oligonucleotide for detection of SNP TSC0002068
raaaaaacaaaat

SEQ ID NO: 6901 - DNA, 13 bp, Artificial Sequence
  Oligonucleotide for detection of SNP TSC0002068
ggggagttaaaat

SEQ ID NO: 6902 - DNA, 13 bp, Artificial Sequence
  Oligonucleotide for detection of SNP TSC0002068
attttaactcccc

SEQ ID NO: 6903 - DNA, 13 bp, Artificial Sequence
  Oligonucleotide for detection of SNP TSC0002068
ggggagataaaat

SEQ ID NO: 6904 - DNA, 13 bp, Artificial Sequence
  Oligonucleotide for detection of SNP TSC0002068
attttatctcccc

SEQ ID NO: 6905 - DNA, 13 bp, Artificial Sequence
  Oligonucleotide for detection of SNP TSC0002069
ttttttatagttg

SEQ ID NO: 6906 - DNA, 13 bp, Artificial Sequence
  Oligonucleotide for detection of SNP TSC0002069
caactataaaaaa

SEQ ID NO: 6907 - DNA, 13 bp, Artificial Sequence
  Oligonucleotide for detection of SNP TSC0002069
ttttttgtagttg

SEQ ID NO: 6908 - DNA, 13 bp, Artificial Sequence
  Oligonucleotide for detection of SNP TSC0002069
caactacaaaaaa

SEQ ID NO: 6909 - DNA, 13 bp, Artificial Sequence
  Oligonucleotide for detection of SNP TSC0002069
tttttcgtagttg

SEQ ID NO: 6910 - DNA, 13 bp, Artificial Sequence
  Oligonucleotide for detection of SNP TSC0002069
caactacgaaaaa

SEQ ID NO: 6911 - DNA, 13 bp, Artificial Sequence
  Oligonucleotide for detection of SNP TSC0002069
tagttatgaagag

SEQ ID NO: 6912 - DNA, 13 bp, Artificial Sequence
  Oligonucleotide for detection of SNP TSC0002069
ctcttcataacta

SEQ ID NO: 6913 - DNA, 13 bp, Artificial Sequence
  Oligonucleotide for detection of SNP TSC0002069
tagttacgaagag

SEQ ID NO: 6914 - DNA, 13 bp, Artificial Sequence
  Oligonucleotide for detection of SNP TSC0002069
ctcttcgtaacta

SEQ ID NO: 6915 - DNA, 13 bp, Artificial Sequence
  Oligonucleotide for detection of SNP TSC0002071
agtaattattttt

SEQ ID NO: 6916 - DNA, 13 bp, Artificial Sequence
  Oligonucleotide for detection of SNP TSC0002071
aaaaataattact

SEQ ID NO: 6917 - DNA, 13 bp, Artificial Sequence
  Oligonucleotide for detection of SNP TSC0002071
agtaatgattttt

SEQ ID NO: 6918 - DNA, 13 bp, Artificial Sequence
  Oligonucleotide for detection of SNP TSC0002071
aaaaatcattact

SEQ ID NO: 6919 - DNA, 13 bp, Artificial Sequence
  Oligonucleotide for detection of SNP TSC0002071
agtaacgattttt

SEQ ID NO: 6920 - DNA, 13 bp, Artificial Sequence
  Oligonucleotide for detection of SNP TSC0002071
aaaaatcgttact

SEQ ID NO: 6921 - DNA, 13 bp, Artificial Sequence
  Oligonucleotide for detection of SNP TSC0002071
aaaaatggttatt

SEQ ID NO: 6922 - DNA, 13 bp, Artificial Sequence
  Oligonucleotide for detection of SNP TSC0002071
aataaccattttt

SEQ ID NO: 6923 - DNA, 13 bp, Artificial Sequence
  Oligonucleotide for detection of SNP TSC0002071
aaaaattgttatt

SEQ ID NO: 6924 - DNA, 13 bp, Artificial Sequence
  Oligonucleotide for detection of SNP TSC0002071
aataacaattttt

SEQ ID NO: 6925 - DNA, 13 bp, Artificial Sequence
  Oligonucleotide for detection of SNP TSC0002071
aaaaatcgttatt

SEQ ID NO: 6926 - DNA, 13 bp, Artificial Sequence
  Oligonucleotide for detection of SNP TSC0002071
aataacgattttt

SEQ ID NO: 6927 - DNA, 13 bp, Artificial Sequence
  Oligonucleotide for detection of SNP TSC0002072
tgaagtatagatg

SEQ ID NO: 6928 - DNA, 13 bp, Artificial Sequence
  Oligonucleotide for detection of SNP TSC0002072
catctatacttca

SEQ ID NO: 6929 - DNA, 13 bp, Artificial Sequence
  Oligonucleotide for detection of SNP TSC0002072
tgaagtgtagatg

SEQ ID NO: 6930 - DNA, 13 bp, Artificial Sequence
  Oligonucleotide for detection of SNP TSC0002072
catctacacttca

SEQ ID NO: 6931 - DNA, 13 bp, Artificial Sequence
  Oligonucleotide for detection of SNP TSC0002073
taaaaagtattat

SEQ ID NO: 6932 - DNA, 13 bp, Artificial Sequence
  Oligonucleotide for detection of SNP TSC0002073
ataatacttttta

SEQ ID NO: 6933 - DNA, 13 bp, Artificial Sequence
  Oligonucleotide for detection of SNP TSC0002073
taaaaaatattat

SEQ ID NO: 6934 - DNA, 13 bp, Artificial Sequence
  Oligonucleotide for detection of SNP TSC0002073
ataatatttttta

SEQ ID NO: 6935 - DNA, 13 bp, Artificial Sequence
  Oligonucleotide for detection of SNP TSC0002075
aatttaatttttt

SEQ ID NO: 6936 - DNA, 13 bp, Artificial Sequence
  Oligonucleotide for detection of SNP TSC0002075
aaaaaattaaatt

SEQ ID NO: 6937 - DNA, 13 bp, Artificial Sequence
  Oligonucleotide for detection of SNP TSC0002075
aagaagttgagtt

SEQ ID NO: 6938 - DNA, 13 bp, Artificial Sequence
  Oligonucleotide for detection of SNP TSC0002075
aactcaacttctt

SEQ ID NO: 6939 - DNA, 13 bp, Artificial Sequence
  Oligonucleotide for detection of SNP TSC0002075
aagaaggtgagtt

SEQ ID NO: 6940 - DNA, 13 bp, Artificial Sequence
  Oligonucleotide for detection of SNP TSC0002075
aactcaccttctt

SEQ ID NO: 6941 - DNA, 13 bp, Artificial Sequence
  Oligonucleotide for detection of SNP TSC0002076
tggtggtgtgaty

SEQ ID NO: 6942 - DNA, 13 bp, Artificial Sequence
  Oligonucleotide for detection of SNP TSC0002076
ratcacaccacca

SEQ ID NO: 6943 - DNA, 13 bp, Artificial Sequence
  Oligonucleotide for detection of SNP TSC0002076
cggtggtgtgaty

SEQ ID NO: 6944 - DNA, 13 bp, Artificial Sequence
  Oligonucleotide for detection of SNP TSC0002076
ratcacaccaccg

SEQ ID NO: 6945 - DNA, 13 bp, Artificial Sequence
  Oligonucleotide for detection of SNP TSC0002076
tggtggcgtgaty

SEQ ID NO: 6946 - DNA, 13 bp, Artificial Sequence
  Oligonucleotide for detection of SNP TSC0002076
ratcacgccacca

SEQ ID NO: 6947 - DNA, 13 bp, Artificial Sequence
  Oligonucleotide for detection of SNP TSC0002076
cggtggcgtgaty

SEQ ID NO: 6948 - DNA, 13 bp, Artificial Sequence
  Oligonucleotide for detection of SNP TSC0002076
ratcacgccaccg

SEQ ID NO: 6949 - DNA, 13 bp, Artificial Sequence
  Oligonucleotide for detection of SNP TSC0002076
gattatgttattg

SEQ ID NO: 6950 - DNA, 13 bp, Artificial Sequence
  Oligonucleotide for detection of SNP TSC0002076
caataacataatc

SEQ ID NO: 6951 - DNA, 13 bp, Artificial Sequence
  Oligonucleotide for detection of SNP TSC0002076
gattatattattg

SEQ ID NO: 6952 - DNA, 13 bp, Artificial Sequence
  Oligonucleotide for detection of SNP TSC0002076
caataatataatc

SEQ ID NO: 6953 - DNA, 13 bp, Artificial Sequence
  Oligonucleotide for detection of SNP TSC0002076
gattacgttattg

SEQ ID NO: 6954 - DNA, 13 bp, Artificial Sequence
  Oligonucleotide for detection of SNP TSC0002076
caataacgtaatc

SEQ ID NO: 6955 - DNA, 13 bp, Artificial Sequence
  Oligonucleotide for detection of SNP TSC0002076
gattatattatcg

SEQ ID NO: 6956 - DNA, 13 bp, Artificial Sequence
  Oligonucleotide for detection of SNP TSC0002076
cgataatataatc

SEQ ID NO: 6957 - DNA, 13 bp, Artificial Sequence
  Oligonucleotide for detection of SNP TSC0002076
gattatgttatcg

SEQ ID NO: 6958 - DNA, 13 bp, Artificial Sequence
  Oligonucleotide for detection of SNP TSC0002076
cgataacataatc

SEQ ID NO: 6959 - DNA, 13 bp, Artificial Sequence
  Oligonucleotide for detection of SNP TSC0002076
gattacgttatcg

SEQ ID NO: 6960 - DNA, 13 bp, Artificial Sequence
  Oligonucleotide for detection of SNP TSC0002076
cgataacgtaatc

SEQ ID NO: 6961 - DNA, 13 bp, Artificial Sequence
  Oligonucleotide for detection of SNP TSC0002077
tttaattttttty

SEQ ID NO: 6962 - DNA, 13 bp, Artificial Sequence
  Oligonucleotide for detection of SNP TSC0002077
raaaaaaattaaa

SEQ ID NO: 6963 - DNA, 13 bp, Artificial Sequence
  Oligonucleotide for detection of SNP TSC0002077
tttaatgttttty

SEQ ID NO: 6964 - DNA, 13 bp, Artificial Sequence
  Oligonucleotide for detection of SNP TSC0002077
raaaaacattaaa

SEQ ID NO: 6965 - DNA, 13 bp, Artificial Sequence
  Oligonucleotide for detection of SNP TSC0002077
ggaagagattagg

SEQ ID NO: 6966 - DNA, 13 bp, Artificial Sequence
  Oligonucleotide for detection of SNP TSC0002077
cctaatctcttcc

SEQ ID NO: 6967 - DNA, 13 bp, Artificial Sequence
  Oligonucleotide for detection of SNP TSC0002077
ggaagatattagg

SEQ ID NO: 6968 - DNA, 13 bp, Artificial Sequence
  Oligonucleotide for detection of SNP TSC0002077
cctaatatcttcc

SEQ ID NO: 6969 - DNA, 13 bp, Artificial Sequence
  Oligonucleotide for detection of SNP TSC0002079
tataggatttgtg

SEQ ID NO: 6970 - DNA, 13 bp, Artificial Sequence
  Oligonucleotide for detection of SNP TSC0002079
cacaaatcctata

SEQ ID NO: 6971 - DNA, 13 bp, Artificial Sequence
  Oligonucleotide for detection of SNP TSC0002079
tatagggtttgtg

SEQ ID NO: 6972 - DNA, 13 bp, Artificial Sequence
  Oligonucleotide for detection of SNP TSC0002079
cacaaaccctata

SEQ ID NO: 6973 - DNA, 13 bp, Artificial Sequence
  Oligonucleotide for detection of SNP TSC0002080
tatgtaattttay

SEQ ID NO: 6974 - DNA, 13 bp, Artificial Sequence
  Oligonucleotide for detection of SNP TSC0002080
rtaaaattacata

SEQ ID NO: 6975 - DNA, 13 bp, Artificial Sequence
  Oligonucleotide for detection of SNP TSC0002080
tatgtagttttay

SEQ ID NO: 6976 - DNA, 13 bp, Artificial Sequence
  Oligonucleotide for detection of SNP TSC0002080
rtaaaactacata

SEQ ID NO: 6977 - DNA, 13 bp, Artificial Sequence
  Oligonucleotide for detection of SNP TSC0002082
atatttagttttg

SEQ ID NO: 6978 - DNA, 13 bp, Artificial Sequence
  Oligonucleotide for detection of SNP TSC0002082
caaaactaaatat

SEQ ID NO: 6979 - DNA, 13 bp, Artificial Sequence
  Oligonucleotide for detection of SNP TSC0002082
atatttggttttg

SEQ ID NO: 6980 - DNA, 13 bp, Artificial Sequence
  Oligonucleotide for detection of SNP TSC0002082
caaaaccaaatat

SEQ ID NO: 6981 - DNA, 13 bp, Artificial Sequence
  Oligonucleotide for detection of SNP TSC0002082
atattcggttttg

SEQ ID NO: 6982 - DNA, 13 bp, Artificial Sequence
  Oligonucleotide for detection of SNP TSC0002082
caaaaccgaatat

SEQ ID NO: 6983 - DNA, 13 bp, Artificial Sequence
  Oligonucleotide for detection of SNP TSC0002082
taggattgaatgt

SEQ ID NO: 6984 - DNA, 13 bp, Artificial Sequence
  Oligonucleotide for detection of SNP TSC0002082
acattcaatccta

SEQ ID NO: 6985 - DNA, 13 bp, Artificial Sequence
  Oligonucleotide for detection of SNP TSC0002082
taggatcgaatgt

SEQ ID NO: 6986 - DNA, 13 bp, Artificial Sequence
  Oligonucleotide for detection of SNP TSC0002082
acattcgatccta

SEQ ID NO: 6987 - DNA, 13 bp, Artificial Sequence
  Oligonucleotide for detection of SNP TSC0002083
gttttttgttttt

SEQ ID NO: 6988 - DNA, 13 bp, Artificial Sequence
  Oligonucleotide for detection of SNP TSC0002083
aaaaacaaaaaac

SEQ ID NO: 6989 - DNA, 13 bp, Artificial Sequence
  Oligonucleotide for detection of SNP TSC0002083
gtttttggttttt

SEQ ID NO: 6990 - DNA, 13 bp, Artificial Sequence
  Oligonucleotide for detection of SNP TSC0002083
aaaaaccaaaaac

SEQ ID NO: 6991 - DNA, 13 bp, Artificial Sequence
  Oligonucleotide for detection of SNP TSC0002083
aaaaataaaaaay

SEQ ID NO: 6992 - DNA, 13 bp, Artificial Sequence
  Oligonucleotide for detection of SNP TSC0002083
rttttttattttt

SEQ ID NO: 6993 - DNA, 13 bp, Artificial Sequence
  Oligonucleotide for detection of SNP TSC0002083
aaaaattaaaaay

SEQ ID NO: 6994 - DNA, 13 bp, Artificial Sequence
  Oligonucleotide for detection of SNP TSC0002083
rtttttaattttt

SEQ ID NO: 6995 - DNA, 13 bp, Artificial Sequence
  Oligonucleotide for detection of SNP TSC0002084
ttttttttttttt

SEQ ID NO: 6996 - DNA, 13 bp, Artificial Sequence
  Oligonucleotide for detection of SNP TSC0002084
aaaaaaaaaaaaa

SEQ ID NO: 6997 - DNA, 13 bp, Artificial Sequence
  Oligonucleotide for detection of SNP TSC0002085
tattttagaaaat

SEQ ID NO: 6998 - DNA, 13 bp, Artificial Sequence
  Oligonucleotide for detection of SNP TSC0002085
attttctaaaata

SEQ ID NO: 6999 - DNA, 13 bp, Artificial Sequence
  Oligonucleotide for detection of SNP TSC0002085
tattttggaaaat

SEQ ID NO: 7000 - DNA, 13 bp, Artificial Sequence
  Oligonucleotide for detection of SNP TSC0002085
attttccaaaata

SEQ ID NO: 7001 - DNA, 13 bp, Artificial Sequence
  Oligonucleotide for detection of SNP TSC0002086
gagttagtagtta

SEQ ID NO: 7002 - DNA, 13 bp, Artificial Sequence
  Oligonucleotide for detection of SNP TSC0002086
taactactaactc

SEQ ID NO: 7003 - DNA, 13 bp, Artificial Sequence
  Oligonucleotide for detection of SNP TSC0002086
gagttaatagtta

SEQ ID NO: 7004 - DNA, 13 bp, Artificial Sequence
  Oligonucleotide for detection of SNP TSC0002086
taactattaactc

SEQ ID NO: 7005 - DNA, 13 bp, Artificial Sequence
  Oligonucleotide for detection of SNP TSC0002087
atttgtaattgta

SEQ ID NO: 7006 - DNA, 13 bp, Artificial Sequence
  Oligonucleotide for detection of SNP TSC0002087
tacaattacaaat

SEQ ID NO: 7007 - DNA, 13 bp, Artificial Sequence
  Oligonucleotide for detection of SNP TSC0002087
atttgttattgta

SEQ ID NO: 7008 - DNA, 13 bp, Artificial Sequence
  Oligonucleotide for detection of SNP TSC0002087
tacaataacaaat

SEQ ID NO: 7009 - DNA, 13 bp, Artificial Sequence
  Oligonucleotide for detection of SNP TSC0002087
tatagttgtaaat

SEQ ID NO: 7010 - DNA, 13 bp, Artificial Sequence
  Oligonucleotide for detection of SNP TSC0002087
atttacaactata

SEQ ID NO: 7011 - DNA, 13 bp, Artificial Sequence
  Oligonucleotide for detection of SNP TSC0002087
tatagtagtaaat

SEQ ID NO: 7012 - DNA, 13 bp, Artificial Sequence
  Oligonucleotide for detection of SNP TSC0002087
atttactactata

SEQ ID NO: 7013 - DNA, 13 bp, Artificial Sequence
  Oligonucleotide for detection of SNP TSC0002088
tttttatgtagay

SEQ ID NO: 7014 - DNA, 13 bp, Artificial Sequence
  Oligonucleotide for detection of SNP TSC0002088
rtctacataaaaa

SEQ ID NO: 7015 - DNA, 13 bp, Artificial Sequence
  Oligonucleotide for detection of SNP TSC0002088
tttttacgtagay

SEQ ID NO: 7016 - DNA, 13 bp, Artificial Sequence
  Oligonucleotide for detection of SNP TSC0002088
rtctacgtaaaaa

SEQ ID NO: 7017 - DNA, 13 bp, Artificial Sequence
  Oligonucleotide for detection of SNP TSC0002088
gtttgtgtaaagg

SEQ ID NO: 7018 - DNA, 13 bp, Artificial Sequence
  Oligonucleotide for detection of SNP TSC0002088
cctttacacaaac

SEQ ID NO: 7019 - DNA, 13 bp, Artificial Sequence
  Oligonucleotide for detection of SNP TSC0002088
gtttgtataaagg

SEQ ID NO: 7020 - DNA, 13 bp, Artificial Sequence
  Oligonucleotide for detection of SNP TSC0002088
cctttatacaaac

SEQ ID NO: 7021 - DNA, 13 bp, Artificial Sequence
  Oligonucleotide for detection of SNP TSC0002088
gtttgcgtaaagg

SEQ ID NO: 7022 - DNA, 13 bp, Artificial Sequence
  Oligonucleotide for detection of SNP TSC0002088
cctttacgcaaac

SEQ ID NO: 7023 - DNA, 13 bp, Artificial Sequence
  Oligonucleotide for detection of SNP TSC0002089
aaatattgttgaa

SEQ ID NO: 7024 - DNA, 13 bp, Artificial Sequence
  Oligonucleotide for detection of SNP TSC0002089
ttcaacaatattt

SEQ ID NO: 7025 - DNA, 13 bp, Artificial Sequence
  Oligonucleotide for detection of SNP TSC0002089
aaatatcgttgaa

SEQ ID NO: 7026 - DNA, 13 bp, Artificial Sequence
  Oligonucleotide for detection of SNP TSC0002089
ttcaacgatattt

SEQ ID NO: 7027 - DNA, 13 bp, Artificial Sequence
  Oligonucleotide for detection of SNP TSC0002089
tttaatggtgttt

SEQ ID NO: 7028 - DNA, 13 bp, Artificial Sequence
  Oligonucleotide for detection of SNP TSC0002089
aaacaccattaaa

SEQ ID NO: 7029 - DNA, 13 bp, Artificial Sequence
  Oligonucleotide for detection of SNP TSC0002089
tttaatagtgttt

SEQ ID NO: 7030 - DNA, 13 bp, Artificial Sequence
  Oligonucleotide for detection of SNP TSC0002089
aaacactattaaa

SEQ ID NO: 7031 - DNA, 13 bp, Artificial Sequence
  Oligonucleotide for detection of SNP TSC0002089
tttaacggtgttt

SEQ ID NO: 7032 - DNA, 13 bp, Artificial Sequence
  Oligonucleotide for detection of SNP TSC0002089
aaacaccgttaaa

SEQ ID NO: 7033 - DNA, 13 bp, Artificial Sequence
  Oligonucleotide for detection of SNP TSC0002090
ttggttgttgggy

SEQ ID NO: 7034 - DNA, 13 bp, Artificial Sequence
  Oligonucleotide for detection of SNP TSC0002090
rcccaacaaccaa

SEQ ID NO: 7035 - DNA, 13 bp, Artificial Sequence
  Oligonucleotide for detection of SNP TSC0002090
ttggttattgggy

SEQ ID NO: 7036 - DNA, 13 bp, Artificial Sequence
  Oligonucleotide for detection of SNP TSC0002090
rcccaataaccaa

SEQ ID NO: 7037 - DNA, 13 bp, Artificial Sequence
  Oligonucleotide for detection of SNP TSC0002091
tggggagggtatt

SEQ ID NO: 7038 - DNA, 13 bp, Artificial Sequence
  Oligonucleotide for detection of SNP TSC0002091
aataccctcccca

SEQ ID NO: 7039 - DNA, 13 bp, Artificial Sequence
  Oligonucleotide for detection of SNP TSC0002091
tggggaaggtatt

SEQ ID NO: 7040 - DNA, 13 bp, Artificial Sequence
  Oligonucleotide for detection of SNP TSC0002091
aataccttcccca

SEQ ID NO: 7041 - DNA, 13 bp, Artificial Sequence
  Oligonucleotide for detection of SNP TSC0002092
ttgtagtgtaagg

SEQ ID NO: 7042 - DNA, 13 bp, Artificial Sequence
  Oligonucleotide for detection of SNP TSC0002092
ccttacactacaa

SEQ ID NO: 7043 - DNA, 13 bp, Artificial Sequence
  Oligonucleotide for detection of SNP TSC0002092
ttgtagcgtaagg

SEQ ID NO: 7044 - DNA, 13 bp, Artificial Sequence
  Oligonucleotide for detection of SNP TSC0002092
ccttacgctacaa

SEQ ID NO: 7045 - DNA, 13 bp, Artificial Sequence
  Oligonucleotide for detection of SNP TSC0002092
ttttgtgttataa

SEQ ID NO: 7046 - DNA, 13 bp, Artificial Sequence
  Oligonucleotide for detection of SNP TSC0002092
ttataacacaaaa

SEQ ID NO: 7047 - DNA, 13 bp, Artificial Sequence
  Oligonucleotide for detection of SNP TSC0002092
ttttgtattataa

SEQ ID NO: 7048 - DNA, 13 bp, Artificial Sequence
  Oligonucleotide for detection of SNP TSC0002092
ttataatacaaaa

SEQ ID NO: 7049 - DNA, 13 bp, Artificial Sequence
  Oligonucleotide for detection of SNP TSC0002092
ttttgcgttataa

SEQ ID NO: 7050 - DNA, 13 bp, Artificial Sequence
  Oligonucleotide for detection of SNP TSC0002092
ttataacgcaaaa

SEQ ID NO: 7051 - DNA, 13 bp, Artificial Sequence
  Oligonucleotide for detection of SNP TSC0002093
aaggtgtgtagga

SEQ ID NO: 7052 - DNA, 13 bp, Artificial Sequence
  Oligonucleotide for detection of SNP TSC0002093
tcctacacacctt

SEQ ID NO: 7053 - DNA, 13 bp, Artificial Sequence
  Oligonucleotide for detection of SNP TSC0002093
aaggtgcgtagga

SEQ ID NO: 7054 - DNA, 13 bp, Artificial Sequence
  Oligonucleotide for detection of SNP TSC0002093
tcctacgcacctt

SEQ ID NO: 7055 - DNA, 13 bp, Artificial Sequence
  Oligonucleotide for detection of SNP TSC0002093
ttttatgtatttt

SEQ ID NO: 7056 - DNA, 13 bp, Artificial Sequence
  Oligonucleotide for detection of SNP TSC0002093
aaaatacataaaa

SEQ ID NO: 7057 - DNA, 13 bp, Artificial Sequence
  Oligonucleotide for detection of SNP TSC0002093
ttttatatatttt

SEQ ID NO: 7058 - DNA, 13 bp, Artificial Sequence
  Oligonucleotide for detection of SNP TSC0002093
aaaatatataaaa

SEQ ID NO: 7059 - DNA, 13 bp, Artificial Sequence
  Oligonucleotide for detection of SNP TSC0002093
ttttacgtatttt

SEQ ID NO: 7060 - DNA, 13 bp, Artificial Sequence
  Oligonucleotide for detection of SNP TSC0002093
aaaatacgtaaaa

SEQ ID NO: 7061 - DNA, 13 bp, Artificial Sequence
  Oligonucleotide for detection of SNP TSC0002094
aagatgtaggtag

SEQ ID NO: 7062 - DNA, 13 bp, Artificial Sequence
  Oligonucleotide for detection of SNP TSC0002094
ctacctacatctt

SEQ ID NO: 7063 - DNA, 13 bp, Artificial Sequence
  Oligonucleotide for detection of SNP TSC0002094
aagatggaggtag

SEQ ID NO: 7064 - DNA, 13 bp, Artificial Sequence
  Oligonucleotide for detection of SNP TSC0002094
ctacctccatctt

SEQ ID NO: 7065 - DNA, 13 bp, Artificial Sequence
  Oligonucleotide for detection of SNP TSC0002094
ttgtttatatttt

SEQ ID NO: 7066 - DNA, 13 bp, Artificial Sequence
  Oligonucleotide for detection of SNP TSC0002094
aaaatataaacaa

SEQ ID NO: 7067 - DNA, 13 bp, Artificial Sequence
  Oligonucleotide for detection of SNP TSC0002094
ttgtttttatttt

SEQ ID NO: 7068 - DNA, 13 bp, Artificial Sequence
  Oligonucleotide for detection of SNP TSC0002094
aaaataaaaacaa

SEQ ID NO: 7069 - DNA, 13 bp, Artificial Sequence
  Oligonucleotide for detection of SNP TSC0002095
aaatttatttttg

SEQ ID NO: 7070 - DNA, 13 bp, Artificial Sequence
  Oligonucleotide for detection of SNP TSC0002095
caaaaataaattt

SEQ ID NO: 7071 - DNA, 13 bp, Artificial Sequence
  Oligonucleotide for detection of SNP TSC0002095
aaatttttttttg

SEQ ID NO: 7072 - DNA, 13 bp, Artificial Sequence
  Oligonucleotide for detection of SNP TSC0002095
caaaaaaaaattt

SEQ ID NO: 7073 - DNA, 13 bp, Artificial Sequence
  Oligonucleotide for detection of SNP TSC0002095
taaaagtaaattt

SEQ ID NO: 7074 - DNA, 13 bp, Artificial Sequence
  Oligonucleotide for detection of SNP TSC0002095
aaatttactttta

SEQ ID NO: 7075 - DNA, 13 bp, Artificial Sequence
  Oligonucleotide for detection of SNP TSC0002095
taaaagaaaattt

SEQ ID NO: 7076 - DNA, 13 bp, Artificial Sequence
  Oligonucleotide for detection of SNP TSC0002095
aaattttctttta

SEQ ID NO: 7077 - DNA, 13 bp, Artificial Sequence
  Oligonucleotide for detection of SNP TSC0002096
attaaaaatgtga

SEQ ID NO: 7078 - DNA, 13 bp, Artificial Sequence
  Oligonucleotide for detection of SNP TSC0002096
tcacatttttaat

SEQ ID NO: 7079 - DNA, 13 bp, Artificial Sequence
  Oligonucleotide for detection of SNP TSC0002096
attaaatatgtga

SEQ ID NO: 7080 - DNA, 13 bp, Artificial Sequence
  Oligonucleotide for detection of SNP TSC0002096
tcacatatttaat

SEQ ID NO: 7081 - DNA, 13 bp, Artificial Sequence
  Oligonucleotide for detection of SNP TSC0002096
ttatatttttaat

SEQ ID NO: 7082 - DNA, 13 bp, Artificial Sequence
  Oligonucleotide for detection of SNP TSC0002096
attaaaaatataa

SEQ ID NO: 7083 - DNA, 13 bp, Artificial Sequence
  Oligonucleotide for detection of SNP TSC0002096
ttatatgtttaat

SEQ ID NO: 7084 - DNA, 13 bp, Artificial Sequence
  Oligonucleotide for detection of SNP TSC0002096
attaaacatataa

SEQ ID NO: 7085 - DNA, 13 bp, Artificial Sequence
  Oligonucleotide for detection of SNP TSC0002097
agtaaaagagaag

SEQ ID NO: 7086 - DNA, 13 bp, Artificial Sequence
  Oligonucleotide for detection of SNP TSC0002097
cttctcttttact

SEQ ID NO: 7087 - DNA, 13 bp, Artificial Sequence
  Oligonucleotide for detection of SNP TSC0002097
agtaaaggagaag

SEQ ID NO: 7088 - DNA, 13 bp, Artificial Sequence
  Oligonucleotide for detection of SNP TSC0002097
cttctcctttact

SEQ ID NO: 7089 - DNA, 13 bp, Artificial Sequence
  Oligonucleotide for detection of SNP TSC0002098
tatagaaggaata

SEQ ID NO: 7090 - DNA, 13 bp, Artificial Sequence
  Oligonucleotide for detection of SNP TSC0002098
tattccttctata

SEQ ID NO: 7091 - DNA, 13 bp, Artificial Sequence
  Oligonucleotide for detection of SNP TSC0002098
tatagagggaata

SEQ ID NO: 7092 - DNA, 13 bp, Artificial Sequence
  Oligonucleotide for detection of SNP TSC0002098
tattccctctata

SEQ ID NO: 7093 - DNA, 13 bp, Artificial Sequence
  Oligonucleotide for detection of SNP TSC0002099
atattttgattaa

SEQ ID NO: 7094 - DNA, 13 bp, Artificial Sequence
  Oligonucleotide for detection of SNP TSC0002099
ttaatcaaaatat

SEQ ID NO: 7095 - DNA, 13 bp, Artificial Sequence
  Oligonucleotide for detection of SNP TSC0002099
atatttggattaa

SEQ ID NO: 7096 - DNA, 13 bp, Artificial Sequence
  Oligonucleotide for detection of SNP TSC0002099
ttaatccaaatat

SEQ ID NO: 7097 - DNA, 13 bp, Artificial Sequence
  Oligonucleotide for detection of SNP TSC0002099
ttgattaaaatat

SEQ ID NO: 7098 - DNA, 13 bp, Artificial Sequence
  Oligonucleotide for detection of SNP TSC0002099
atattttaatcaa

SEQ ID NO: 7099 - DNA, 13 bp, Artificial Sequence
  Oligonucleotide for detection of SNP TSC0002099
ttgatttaaatat

SEQ ID NO: 7100 - DNA, 13 bp, Artificial Sequence
  Oligonucleotide for detection of SNP TSC0002099
atatttaaatcaa

SEQ ID NO: 7101 - DNA, 13 bp, Artificial Sequence
  Oligonucleotide for detection of SNP TSC0002100
tgaaaagtgttgg

SEQ ID NO: 7102 - DNA, 13 bp, Artificial Sequence
  Oligonucleotide for detection of SNP TSC0002100
ccaacacttttca

SEQ ID NO: 7103 - DNA, 13 bp, Artificial Sequence
  Oligonucleotide for detection of SNP TSC0002100
tgaaaaatgttgg

SEQ ID NO: 7104 - DNA, 13 bp, Artificial Sequence
  Oligonucleotide for detection of SNP TSC0002100
ccaacatttttca

SEQ ID NO: 7105 - DNA, 13 bp, Artificial Sequence
  Oligonucleotide for detection of SNP TSC0002101
ttgtttttatgty

SEQ ID NO: 7106 - DNA, 13 bp, Artificial Sequence
  Oligonucleotide for detection of SNP TSC0002101
racataaaaacaa

SEQ ID NO: 7107 - DNA, 13 bp, Artificial Sequence
  Oligonucleotide for detection of SNP TSC0002101
ttgtttgtatgty

SEQ ID NO: 7108 - DNA, 13 bp, Artificial Sequence
  Oligonucleotide for detection of SNP TSC0002101
racatacaaacaa

SEQ ID NO: 7109 - DNA, 13 bp, Artificial Sequence
  Oligonucleotide for detection of SNP TSC0002101
ggtatgaaaataa

SEQ ID NO: 7110 - DNA, 13 bp, Artificial Sequence
  Oligonucleotide for detection of SNP TSC0002101
ttattttcatacc

SEQ ID NO: 7111 - DNA, 13 bp, Artificial Sequence
  Oligonucleotide for detection of SNP TSC0002101
ggtatgtaaataa

SEQ ID NO: 7112 - DNA, 13 bp, Artificial Sequence
  Oligonucleotide for detection of SNP TSC0002101
ttatttacatacc

SEQ ID NO: 7113 - DNA, 13 bp, Artificial Sequence
  Oligonucleotide for detection of SNP TSC0002102
ttgttaagtttty

SEQ ID NO: 7114 - DNA, 13 bp, Artificial Sequence
  Oligonucleotide for detection of SNP TSC0002102
raaaacttaacaa

SEQ ID NO: 7115 - DNA, 13 bp, Artificial Sequence
  Oligonucleotide for detection of SNP TSC0002102
ttgttatgtttty

SEQ ID NO: 7116 - DNA, 13 bp, Artificial Sequence
  Oligonucleotide for detection of SNP TSC0002102
raaaacataacaa

SEQ ID NO: 7117 - DNA, 13 bp, Artificial Sequence
  Oligonucleotide for detection of SNP TSC0002102
ttgttacgtttty

SEQ ID NO: 7118 - DNA, 13 bp, Artificial Sequence
  Oligonucleotide for detection of SNP TSC0002102
raaaacgtaacaa

SEQ ID NO: 7119 - DNA, 13 bp, Artificial Sequence
  Oligonucleotide for detection of SNP TSC0002102
gaaaatttaataa

SEQ ID NO: 7120 - DNA, 13 bp, Artificial Sequence
  Oligonucleotide for detection of SNP TSC0002102
ttattaaattttc

SEQ ID NO: 7121 - DNA, 13 bp, Artificial Sequence
  Oligonucleotide for detection of SNP TSC0002102
gaaaatgtaataa

SEQ ID NO: 7122 - DNA, 13 bp, Artificial Sequence
  Oligonucleotide for detection of SNP TSC0002102
ttattacattttc

SEQ ID NO: 7123 - DNA, 13 bp, Artificial Sequence
  Oligonucleotide for detection of SNP TSC0002102
gaaaacgtaataa

SEQ ID NO: 7124 - DNA, 13 bp, Artificial Sequence
  Oligonucleotide for detection of SNP TSC0002102
ttattacgttttc

SEQ ID NO: 7125 - DNA, 13 bp, Artificial Sequence
  Oligonucleotide for detection of SNP TSC0002103
ttgtatatttagy

SEQ ID NO: 7126 - DNA, 13 bp, Artificial Sequence
  Oligonucleotide for detection of SNP TSC0002103
rctaaatatacaa

SEQ ID NO: 7127 - DNA, 13 bp, Artificial Sequence
  Oligonucleotide for detection of SNP TSC0002103
ttgtatgtttagy

SEQ ID NO: 7128 - DNA, 13 bp, Artificial Sequence
  Oligonucleotide for detection of SNP TSC0002103
rctaaacatacaa

SEQ ID NO: 7129 - DNA, 13 bp, Artificial Sequence
  Oligonucleotide for detection of SNP TSC0002104
ttaaaagagagtt

SEQ ID NO: 7130 - DNA, 13 bp, Artificial Sequence
  Oligonucleotide for detection of SNP TSC0002104
aactctcttttaa

SEQ ID NO: 7131 - DNA, 13 bp, Artificial Sequence
  Oligonucleotide for detection of SNP TSC0002104
ttaaaaaagagtt

SEQ ID NO: 7132 - DNA, 13 bp, Artificial Sequence
  Oligonucleotide for detection of SNP TSC0002104
aactcttttttaa

SEQ ID NO: 7133 - DNA, 13 bp, Artificial Sequence
  Oligonucleotide for detection of SNP TSC0002106
gtaaaaagaaagg

SEQ ID NO: 7134 - DNA, 13 bp, Artificial Sequence
  Oligonucleotide for detection of SNP TSC0002106
cctttctttttac

SEQ ID NO: 7135 - DNA, 13 bp, Artificial Sequence
  Oligonucleotide for detection of SNP TSC0002106
gtaaaatgaaagg

SEQ ID NO: 7136 - DNA, 13 bp, Artificial Sequence
  Oligonucleotide for detection of SNP TSC0002106
cctttcattttac

SEQ ID NO: 7137 - DNA, 13 bp, Artificial Sequence
  Oligonucleotide for detection of SNP TSC0002106
tttttttttttay

SEQ ID NO: 7138 - DNA, 13 bp, Artificial Sequence
  Oligonucleotide for detection of SNP TSC0002106
rtaaaaaaaaaaa

SEQ ID NO: 7139 - DNA, 13 bp, Artificial Sequence
  Oligonucleotide for detection of SNP TSC0002106
ttttttattttay

SEQ ID NO: 7140 - DNA, 13 bp, Artificial Sequence
  Oligonucleotide for detection of SNP TSC0002106
rtaaaataaaaaa

SEQ ID NO: 7141 - DNA, 13 bp, Artificial Sequence
  Oligonucleotide for detection of SNP TSC0002107
gaagtggtgtttt

SEQ ID NO: 7142 - DNA, 13 bp, Artificial Sequence
  Oligonucleotide for detection of SNP TSC0002107
aaaacaccacttc

SEQ ID NO: 7143 - DNA, 13 bp, Artificial Sequence
  Oligonucleotide for detection of SNP TSC0002107
gaagtgatgtttt

SEQ ID NO: 7144 - DNA, 13 bp, Artificial Sequence
  Oligonucleotide for detection of SNP TSC0002107
aaaacatcacttc

SEQ ID NO: 7145 - DNA, 13 bp, Artificial Sequence
  Oligonucleotide for detection of SNP TSC0002107
gaagcggtgtttt

SEQ ID NO: 7146 - DNA, 13 bp, Artificial Sequence
  Oligonucleotide for detection of SNP TSC0002107
aaaacaccgcttc

SEQ ID NO: 7147 - DNA, 13 bp, Artificial Sequence
  Oligonucleotide for detection of SNP TSC0002107
gaagcgatgtttt

SEQ ID NO: 7148 - DNA, 13 bp, Artificial Sequence
  Oligonucleotide for detection of SNP TSC0002107
aaaacatcgcttc

SEQ ID NO: 7149 - DNA, 13 bp, Artificial Sequence
  Oligonucleotide for detection of SNP TSC0002108
taatgataggtat

SEQ ID NO: 7150 - DNA, 13 bp, Artificial Sequence
  Oligonucleotide for detection of SNP TSC0002108
atacctatcatta

SEQ ID NO: 7151 - DNA, 13 bp, Artificial Sequence
  Oligonucleotide for detection of SNP TSC0002108
taatgagaggtat

SEQ ID NO: 7152 - DNA, 13 bp, Artificial Sequence
  Oligonucleotide for detection of SNP TSC0002108
atacctctcatta

SEQ ID NO: 7153 - DNA, 13 bp, Artificial Sequence
  Oligonucleotide for detection of SNP TSC0002108
atgtttgttattg

SEQ ID NO: 7154 - DNA, 13 bp, Artificial Sequence
  Oligonucleotide for detection of SNP TSC0002108
caataacaaacat

SEQ ID NO: 7155 - DNA, 13 bp, Artificial Sequence
  Oligonucleotide for detection of SNP TSC0002108
atgttttttattg

SEQ ID NO: 7156 - DNA, 13 bp, Artificial Sequence
  Oligonucleotide for detection of SNP TSC0002108
caataaaaaacat

SEQ ID NO: 7157 - DNA, 13 bp, Artificial Sequence
  Oligonucleotide for detection of SNP TSC0002109
aaaaaaatagtgg

SEQ ID NO: 7158 - DNA, 13 bp, Artificial Sequence
  Oligonucleotide for detection of SNP TSC0002109
ccactattttttt

SEQ ID NO: 7159 - DNA, 13 bp, Artificial Sequence
  Oligonucleotide for detection of SNP TSC0002109
aaaaaagtagtgg

SEQ ID NO: 7160 - DNA, 13 bp, Artificial Sequence
  Oligonucleotide for detection of SNP TSC0002109
ccactactttttt

SEQ ID NO: 7161 - DNA, 13 bp, Artificial Sequence
  Oligonucleotide for detection of SNP TSC0002110
taattttgtgtat

SEQ ID NO: 7162 - DNA, 13 bp, Artificial Sequence
  Oligonucleotide for detection of SNP TSC0002110
atacacaaaatta

SEQ ID NO: 7163 - DNA, 13 bp, Artificial Sequence
  Oligonucleotide for detection of SNP TSC0002110
taatttcgtgtat

SEQ ID NO: 7164 - DNA, 13 bp, Artificial Sequence
  Oligonucleotide for detection of SNP TSC0002110
atacacgaaatta

SEQ ID NO: 7165 - DNA, 13 bp, Artificial Sequence
  Oligonucleotide for detection of SNP TSC0002110
atgtatggggttg

SEQ ID NO: 7166 - DNA, 13 bp, Artificial Sequence
  Oligonucleotide for detection of SNP TSC0002110
caaccccatacat

SEQ ID NO: 7167 - DNA, 13 bp, Artificial Sequence
  Oligonucleotide for detection of SNP TSC0002110
atgtatagggttg

SEQ ID NO: 7168 - DNA, 13 bp, Artificial Sequence
  Oligonucleotide for detection of SNP TSC0002110
caaccctatacat

SEQ ID NO: 7169 - DNA, 13 bp, Artificial Sequence
  Oligonucleotide for detection of SNP TSC0002110
atgtacggggttg

SEQ ID NO: 7170 - DNA, 13 bp, Artificial Sequence
  Oligonucleotide for detection of SNP TSC0002110
caaccccgtacat

SEQ ID NO: 7171 - DNA, 13 bp, Artificial Sequence
  Oligonucleotide for detection of SNP TSC0002111
ttaatatgattaa

SEQ ID NO: 7172 - DNA, 13 bp, Artificial Sequence
  Oligonucleotide for detection of SNP TSC0002111
ttaatcatattaa

SEQ ID NO: 7173 - DNA, 13 bp, Artificial Sequence
  Oligonucleotide for detection of SNP TSC0002111
ttaatacgattaa

SEQ ID NO: 7174 - DNA, 13 bp, Artificial Sequence
  Oligonucleotide for detection of SNP TSC0002111
ttaatcgtattaa

SEQ ID NO: 7175 - DNA, 13 bp, Artificial Sequence
  Oligonucleotide for detection of SNP TSC0002111
ttaattgtattaa

SEQ ID NO: 7176 - DNA, 13 bp, Artificial Sequence
  Oligonucleotide for detection of SNP TSC0002111
ttaatacaattaa

SEQ ID NO: 7177 - DNA, 13 bp, Artificial Sequence
  Oligonucleotide for detection of SNP TSC0002111
ttaattatattaa

SEQ ID NO: 7178 - DNA, 13 bp, Artificial Sequence
  Oligonucleotide for detection of SNP TSC0002111
ttaatataattaa

SEQ ID NO: 7179 - DNA, 13 bp, Artificial Sequence
  Oligonucleotide for detection of SNP TSC0002112
taaagaatgaaga

SEQ ID NO: 7180 - DNA, 13 bp, Artificial Sequence
  Oligonucleotide for detection of SNP TSC0002112
tcttcattcttta

SEQ ID NO: 7181 - DNA, 13 bp, Artificial Sequence
  Oligonucleotide for detection of SNP TSC0002112
taaagagtgaaga

SEQ ID NO: 7182 - DNA, 13 bp, Artificial Sequence
  Oligonucleotide for detection of SNP TSC0002112
tcttcactcttta

SEQ ID NO: 7183 - DNA, 13 bp, Artificial Sequence
  Oligonucleotide for detection of SNP TSC0002113
gatttatttataa

SEQ ID NO: 7184 - DNA, 13 bp, Artificial Sequence
  Oligonucleotide for detection of SNP TSC0002113
ttataaataaatc

SEQ ID NO: 7185 - DNA, 13 bp, Artificial Sequence
  Oligonucleotide for detection of SNP TSC0002113
gatttagttataa

SEQ ID NO: 7186 - DNA, 13 bp, Artificial Sequence
  Oligonucleotide for detection of SNP TSC0002113
ttataactaaatc

SEQ ID NO: 7187 - DNA, 13 bp, Artificial Sequence
  Oligonucleotide for detection of SNP TSC0002113
ttataagtagaty

SEQ ID NO: 7188 - DNA, 13 bp, Artificial Sequence
  Oligonucleotide for detection of SNP TSC0002113
ratctacttataa

SEQ ID NO: 7189 - DNA, 13 bp, Artificial Sequence
  Oligonucleotide for detection of SNP TSC0002113
ttataattagaty

SEQ ID NO: 7190 - DNA, 13 bp, Artificial Sequence
  Oligonucleotide for detection of SNP TSC0002113
ratctaattataa

SEQ ID NO: 7191 - DNA, 13 bp, Artificial Sequence
  Oligonucleotide for detection of SNP TSC0002114
gagttaatatttt

SEQ ID NO: 7192 - DNA, 13 bp, Artificial Sequence
  Oligonucleotide for detection of SNP TSC0002114
aaaatattaactc

SEQ ID NO: 7193 - DNA, 13 bp, Artificial Sequence
  Oligonucleotide for detection of SNP TSC0002114
gagttagtatttt

SEQ ID NO: 7194 - DNA, 13 bp, Artificial Sequence
  Oligonucleotide for detection of SNP TSC0002114
aaaatactaactc

SEQ ID NO: 7195 - DNA, 13 bp, Artificial Sequence
  Oligonucleotide for detection of SNP TSC0002115
taaaaatggttat

SEQ ID NO: 7196 - DNA, 13 bp, Artificial Sequence
  Oligonucleotide for detection of SNP TSC0002115
ataaccattttta

SEQ ID NO: 7197 - DNA, 13 bp, Artificial Sequence
  Oligonucleotide for detection of SNP TSC0002115
taaaaacggttat

SEQ ID NO: 7198 - DNA, 13 bp, Artificial Sequence
  Oligonucleotide for detection of SNP TSC0002115
ataaccgttttta

SEQ ID NO: 7199 - DNA, 13 bp, Artificial Sequence
  Oligonucleotide for detection of SNP TSC0002115
atagttgtttttg

SEQ ID NO: 7200 - DNA, 13 bp, Artificial Sequence
  Oligonucleotide for detection of SNP TSC0002115
caaaaacaactat

SEQ ID NO: 7201 - DNA, 13 bp, Artificial Sequence
  Oligonucleotide for detection of SNP TSC0002115
atagttatttttg

SEQ ID NO: 7202 - DNA, 13 bp, Artificial Sequence
  Oligonucleotide for detection of SNP TSC0002115
caaaaataactat

SEQ ID NO: 7203 - DNA, 13 bp, Artificial Sequence
  Oligonucleotide for detection of SNP TSC0002115
atagtcgtttttg

SEQ ID NO: 7204 - DNA, 13 bp, Artificial Sequence
  Oligonucleotide for detection of SNP TSC0002115
caaaaacgactat

SEQ ID NO: 7205 - DNA, 13 bp, Artificial Sequence
  Oligonucleotide for detection of SNP TSC0002116
ttttaagtttaat

SEQ ID NO: 7206 - DNA, 13 bp, Artificial Sequence
  Oligonucleotide for detection of SNP TSC0002116
attaaacttaaaa

SEQ ID NO: 7207 - DNA, 13 bp, Artificial Sequence
  Oligonucleotide for detection of SNP TSC0002116
ttttaaatttaat

SEQ ID NO: 7208 - DNA, 13 bp, Artificial Sequence
  Oligonucleotide for detection of SNP TSC0002116
attaaatttaaaa

SEQ ID NO: 7209 - DNA, 13 bp, Artificial Sequence
  Oligonucleotide for detection of SNP TSC0002117
tttttagaggagt

SEQ ID NO: 7210 - DNA, 13 bp, Artificial Sequence
  Oligonucleotide for detection of SNP TSC0002117
actcctctaaaaa

SEQ ID NO: 7211 - DNA, 13 bp, Artificial Sequence
  Oligonucleotide for detection of SNP TSC0002117
tttttaaaggagt

SEQ ID NO: 7212 - DNA, 13 bp, Artificial Sequence
  Oligonucleotide for detection of SNP TSC0002117
actcctttaaaaa

SEQ ID NO: 7213 - DNA, 13 bp, Artificial Sequence
  Oligonucleotide for detection of SNP TSC0002118
ttttaatgtttty

SEQ ID NO: 7214 - DNA, 13 bp, Artificial Sequence
  Oligonucleotide for detection of SNP TSC0002118
raaaacattaaaa

SEQ ID NO: 7215 - DNA, 13 bp, Artificial Sequence
  Oligonucleotide for detection of SNP TSC0002118
ttttaaggtttty

SEQ ID NO: 7216 - DNA, 13 bp, Artificial Sequence
  Oligonucleotide for detection of SNP TSC0002118
raaaaccttaaaa

SEQ ID NO: 7217 - DNA, 13 bp, Artificial Sequence
  Oligonucleotide for detection of SNP TSC0002118
ttttaacgtttty

SEQ ID NO: 7218 - DNA, 13 bp, Artificial Sequence
  Oligonucleotide for detection of SNP TSC0002118
raaaacgttaaaa

SEQ ID NO: 7219 - DNA, 13 bp, Artificial Sequence
  Oligonucleotide for detection of SNP TSC0002118
ggaggtgttgaag

SEQ ID NO: 7220 - DNA, 13 bp, Artificial Sequence
  Oligonucleotide for detection of SNP TSC0002118
cttcaacacctcc

SEQ ID NO: 7221 - DNA, 13 bp, Artificial Sequence
  Oligonucleotide for detection of SNP TSC0002118
ggaggttttgaag

SEQ ID NO: 7222 - DNA, 13 bp, Artificial Sequence
  Oligonucleotide for detection of SNP TSC0002118
cttcaaaacctcc

SEQ ID NO: 7223 - DNA, 13 bp, Artificial Sequence
  Oligonucleotide for detection of SNP TSC0002118
ggaggcgttgaag

SEQ ID NO: 7224 - DNA, 13 bp, Artificial Sequence
  Oligonucleotide for detection of SNP TSC0002118
cttcaacgcctcc

SEQ ID NO: 7225 - DNA, 13 bp, Artificial Sequence
  Oligonucleotide for detection of SNP TSC0002119
gaggttaaggtag

SEQ ID NO: 7226 - DNA, 13 bp, Artificial Sequence
  Oligonucleotide for detection of SNP TSC0002119
ctaccttaacctc

SEQ ID NO: 7227 - DNA, 13 bp, Artificial Sequence
  Oligonucleotide for detection of SNP TSC0002119
gaggttgaggtag

SEQ ID NO: 7228 - DNA, 13 bp, Artificial Sequence
  Oligonucleotide for detection of SNP TSC0002119
ctacctcaacctc

SEQ ID NO: 7229 - DNA, 13 bp, Artificial Sequence
  Oligonucleotide for detection of SNP TSC0002119
gaggtcgaggtag

SEQ ID NO: 7230 - DNA, 13 bp, Artificial Sequence
  Oligonucleotide for detection of SNP TSC0002119
ctacctcgacctc

SEQ ID NO: 7231 - DNA, 13 bp, Artificial Sequence
  Oligonucleotide for detection of SNP TSC0002122
atttatagtagay

SEQ ID NO: 7232 - DNA, 13 bp, Artificial Sequence
  Oligonucleotide for detection of SNP TSC0002122
rtctactataaat

SEQ ID NO: 7233 - DNA, 13 bp, Artificial Sequence
  Oligonucleotide for detection of SNP TSC0002122
atttatggtagay

SEQ ID NO: 7234 - DNA, 13 bp, Artificial Sequence
  Oligonucleotide for detection of SNP TSC0002122
rtctaccataaat

SEQ ID NO: 7235 - DNA, 13 bp, Artificial Sequence
  Oligonucleotide for detection of SNP TSC0002122
atttacggtagay

SEQ ID NO: 7236 - DNA, 13 bp, Artificial Sequence
  Oligonucleotide for detection of SNP TSC0002122
rtctaccgtaaat

SEQ ID NO: 7237 - DNA, 13 bp, Artificial Sequence
  Oligonucleotide for detection of SNP TSC0002122
gtttattgtggat

SEQ ID NO: 7238 - DNA, 13 bp, Artificial Sequence
  Oligonucleotide for detection of SNP TSC0002122
atccacaataaac

SEQ ID NO: 7239 - DNA, 13 bp, Artificial Sequence
  Oligonucleotide for detection of SNP TSC0002122
gtttatcgtggat

SEQ ID NO: 7240 - DNA, 13 bp, Artificial Sequence
  Oligonucleotide for detection of SNP TSC0002122
atccacgataaac

SEQ ID NO: 7241 - DNA, 13 bp, Artificial Sequence
  Oligonucleotide for detection of SNP TSC0002123
tattgatagatat

SEQ ID NO: 7242 - DNA, 13 bp, Artificial Sequence
  Oligonucleotide for detection of SNP TSC0002123
atatctatcaata

SEQ ID NO: 7243 - DNA, 13 bp, Artificial Sequence
  Oligonucleotide for detection of SNP TSC0002123
tattgagagatat

SEQ ID NO: 7244 - DNA, 13 bp, Artificial Sequence
  Oligonucleotide for detection of SNP TSC0002123
atatctctcaata

SEQ ID NO: 7245 - DNA, 13 bp, Artificial Sequence
  Oligonucleotide for detection of SNP TSC0002123
atgtttgttagtg

SEQ ID NO: 7246 - DNA, 13 bp, Artificial Sequence
  Oligonucleotide for detection of SNP TSC0002123
cactaacaaacat

SEQ ID NO: 7247 - DNA, 13 bp, Artificial Sequence
  Oligonucleotide for detection of SNP TSC0002123
atgttttttagtg

SEQ ID NO: 7248 - DNA, 13 bp, Artificial Sequence
  Oligonucleotide for detection of SNP TSC0002123
cactaaaaaacat

SEQ ID NO: 7249 - DNA, 13 bp, Artificial Sequence
  Oligonucleotide for detection of SNP TSC0002124
gggtttaattttg

SEQ ID NO: 7250 - DNA, 13 bp, Artificial Sequence
  Oligonucleotide for detection of SNP TSC0002124
caaaattaaaccc

SEQ ID NO: 7251 - DNA, 13 bp, Artificial Sequence
  Oligonucleotide for detection of SNP TSC0002124
gggttttattttg

SEQ ID NO: 7252 - DNA, 13 bp, Artificial Sequence
  Oligonucleotide for detection of SNP TSC0002124
caaaataaaaccc

SEQ ID NO: 7253 - DNA, 13 bp, Artificial Sequence
  Oligonucleotide for detection of SNP TSC0002124
taaaattaaatty

SEQ ID NO: 7254 - DNA, 13 bp, Artificial Sequence
  Oligonucleotide for detection of SNP TSC0002124
raatttaatttta

SEQ ID NO: 7255 - DNA, 13 bp, Artificial Sequence
  Oligonucleotide for detection of SNP TSC0002124
taaaataaaatty

SEQ ID NO: 7256 - DNA, 13 bp, Artificial Sequence
  Oligonucleotide for detection of SNP TSC0002124
raattttatttta

SEQ ID NO: 7257 - DNA, 13 bp, Artificial Sequence
  Oligonucleotide for detection of SNP TSC0002125
ttttgtgatgata

SEQ ID NO: 7258 - DNA, 13 bp, Artificial Sequence
  Oligonucleotide for detection of SNP TSC0002125
tatcatcacaaaa

SEQ ID NO: 7259 - DNA, 13 bp, Artificial Sequence
  Oligonucleotide for detection of SNP TSC0002125
ttttgtaatgata

SEQ ID NO: 7260 - DNA, 13 bp, Artificial Sequence
  Oligonucleotide for detection of SNP TSC0002125
tatcattacaaaa

SEQ ID NO: 7261 - DNA, 13 bp, Artificial Sequence
  Oligonucleotide for detection of SNP TSC0002126
tagtatattggta

SEQ ID NO: 7262 - DNA, 13 bp, Artificial Sequence
  Oligonucleotide for detection of SNP TSC0002126
taccaatatacta

SEQ ID NO: 7263 - DNA, 13 bp, Artificial Sequence
  Oligonucleotide for detection of SNP TSC0002126
tagtatgttggta

SEQ ID NO: 7264 - DNA, 13 bp, Artificial Sequence
  Oligonucleotide for detection of SNP TSC0002126
taccaacatacta

SEQ ID NO: 7265 - DNA, 13 bp, Artificial Sequence
  Oligonucleotide for detection of SNP TSC0002126
tagtacgttggta

SEQ ID NO: 7266 - DNA, 13 bp, Artificial Sequence
  Oligonucleotide for detection of SNP TSC0002126
taccaacgtacta

SEQ ID NO: 7267 - DNA, 13 bp, Artificial Sequence
  Oligonucleotide for detection of SNP TSC0002126
tgttagtgtgtta

SEQ ID NO: 7268 - DNA, 13 bp, Artificial Sequence
  Oligonucleotide for detection of SNP TSC0002126
taacacactaaca

SEQ ID NO: 7269 - DNA, 13 bp, Artificial Sequence
  Oligonucleotide for detection of SNP TSC0002126
tgttagcgtgtta

SEQ ID NO: 7270 - DNA, 13 bp, Artificial Sequence
  Oligonucleotide for detection of SNP TSC0002126
taacacgctaaca

SEQ ID NO: 7271 - DNA, 13 bp, Artificial Sequence
  Oligonucleotide for detection of SNP TSC0002127
tgatattggtttt

SEQ ID NO: 7272 - DNA, 13 bp, Artificial Sequence
  Oligonucleotide for detection of SNP TSC0002127
aaaaccaatatca

SEQ ID NO: 7273 - DNA, 13 bp, Artificial Sequence
  Oligonucleotide for detection of SNP TSC0002127
tgatatcggtttt

SEQ ID NO: 7274 - DNA, 13 bp, Artificial Sequence
  Oligonucleotide for detection of SNP TSC0002127
aaaaccgatatca

SEQ ID NO: 7275 - DNA, 13 bp, Artificial Sequence
  Oligonucleotide for detection of SNP TSC0002127
aaagttggtgtta

SEQ ID NO: 7276 - DNA, 13 bp, Artificial Sequence
  Oligonucleotide for detection of SNP TSC0002127
taacaccaacttt

SEQ ID NO: 7277 - DNA, 13 bp, Artificial Sequence
  Oligonucleotide for detection of SNP TSC0002127
aaagttagtgtta

SEQ ID NO: 7278 - DNA, 13 bp, Artificial Sequence
  Oligonucleotide for detection of SNP TSC0002127
taacactaacttt

SEQ ID NO: 7279 - DNA, 13 bp, Artificial Sequence
  Oligonucleotide for detection of SNP TSC0002127
aaagtcggtgtta

SEQ ID NO: 7280 - DNA, 13 bp, Artificial Sequence
  Oligonucleotide for detection of SNP TSC0002127
taacaccgacttt

SEQ ID NO: 7281 - DNA, 13 bp, Artificial Sequence
  Oligonucleotide for detection of SNP TSC0002130
ttgagggagatag

SEQ ID NO: 7282 - DNA, 13 bp, Artificial Sequence
  Oligonucleotide for detection of SNP TSC0002130
ctatctccctcaa

SEQ ID NO: 7283 - DNA, 13 bp, Artificial Sequence
  Oligonucleotide for detection of SNP TSC0002130
ttgaggaagatag

SEQ ID NO: 7284 - DNA, 13 bp, Artificial Sequence
  Oligonucleotide for detection of SNP TSC0002130
ctatcttcctcaa

SEQ ID NO: 7285 - DNA, 13 bp, Artificial Sequence
  Oligonucleotide for detection of SNP TSC0002132
gtatgtattttgt

SEQ ID NO: 7286 - DNA, 13 bp, Artificial Sequence
  Oligonucleotide for detection of SNP TSC0002132
acaaaatacatac

SEQ ID NO: 7287 - DNA, 13 bp, Artificial Sequence
  Oligonucleotide for detection of SNP TSC0002132
gtatgtgttttgt

SEQ ID NO: 7288 - DNA, 13 bp, Artificial Sequence
  Oligonucleotide for detection of SNP TSC0002132
acaaaacacatac

SEQ ID NO: 7289 - DNA, 13 bp, Artificial Sequence
  Oligonucleotide for detection of SNP TSC0002133
tgaagggatattt

SEQ ID NO: 7290 - DNA, 13 bp, Artificial Sequence
  Oligonucleotide for detection of SNP TSC0002133
aaatatcccttca

SEQ ID NO: 7291 - DNA, 13 bp, Artificial Sequence
  Oligonucleotide for detection of SNP TSC0002133
tgaaggaatattt

SEQ ID NO: 7292 - DNA, 13 bp, Artificial Sequence
  Oligonucleotide for detection of SNP TSC0002133
aaatattccttca

SEQ ID NO: 7293 - DNA, 13 bp, Artificial Sequence
  Oligonucleotide for detection of SNP TSC0002134
tgttttgtttttt

SEQ ID NO: 7294 - DNA, 13 bp, Artificial Sequence
  Oligonucleotide for detection of SNP TSC0002134
aaaaaacaaaaca

SEQ ID NO: 7295 - DNA, 13 bp, Artificial Sequence
  Oligonucleotide for detection of SNP TSC0002135
ttatggtttggga

SEQ ID NO: 7296 - DNA, 13 bp, Artificial Sequence
  Oligonucleotide for detection of SNP TSC0002135
tcccaaaccataa

SEQ ID NO: 7297 - DNA, 13 bp, Artificial Sequence
  Oligonucleotide for detection of SNP TSC0002135
ttatgggttggga

SEQ ID NO: 7298 - DNA, 13 bp, Artificial Sequence
  Oligonucleotide for detection of SNP TSC0002135
tcccaacccataa

SEQ ID NO: 7299 - DNA, 13 bp, Artificial Sequence
  Oligonucleotide for detection of SNP TSC0002135
ttttaagttatga

SEQ ID NO: 7300 - DNA, 13 bp, Artificial Sequence
  Oligonucleotide for detection of SNP TSC0002135
tcataacttaaaa

SEQ ID NO: 7301 - DNA, 13 bp, Artificial Sequence
  Oligonucleotide for detection of SNP TSC0002135
ttttaatttatga

SEQ ID NO: 7302 - DNA, 13 bp, Artificial Sequence
  Oligonucleotide for detection of SNP TSC0002135
tcataaattaaaa

SEQ ID NO: 7303 - DNA, 13 bp, Artificial Sequence
  Oligonucleotide for detection of SNP TSC0002136
aaattaatttttg

SEQ ID NO: 7304 - DNA, 13 bp, Artificial Sequence
  Oligonucleotide for detection of SNP TSC0002136
caaaaattaattt

SEQ ID NO: 7305 - DNA, 13 bp, Artificial Sequence
  Oligonucleotide for detection of SNP TSC0002136
aaattattttttg

SEQ ID NO: 7306 - DNA, 13 bp, Artificial Sequence
  Oligonucleotide for detection of SNP TSC0002136
caaaaaataattt

SEQ ID NO: 7307 - DNA, 13 bp, Artificial Sequence
  Oligonucleotide for detection of SNP TSC0002136
tagaaattgattt

SEQ ID NO: 7308 - DNA, 13 bp, Artificial Sequence
  Oligonucleotide for detection of SNP TSC0002136
aaatcaatttcta

SEQ ID NO: 7309 - DNA, 13 bp, Artificial Sequence
  Oligonucleotide for detection of SNP TSC0002136
tagaaaatgattt

SEQ ID NO: 7310 - DNA, 13 bp, Artificial Sequence
  Oligonucleotide for detection of SNP TSC0002136
aaatcattttcta

SEQ ID NO: 7311 - DNA, 13 bp, Artificial Sequence
  Oligonucleotide for detection of SNP TSC0002137
gaaaagatgatag

SEQ ID NO: 7312 - DNA, 13 bp, Artificial Sequence
  Oligonucleotide for detection of SNP TSC0002137
ctatcatcttttc

SEQ ID NO: 7313 - DNA, 13 bp, Artificial Sequence
  Oligonucleotide for detection of SNP TSC0002137
gaaaaggtgatag

SEQ ID NO: 7314 - DNA, 13 bp, Artificial Sequence
  Oligonucleotide for detection of SNP TSC0002137
ctatcaccttttc

SEQ ID NO: 7315 - DNA, 13 bp, Artificial Sequence
  Oligonucleotide for detection of SNP TSC0002138
aatttaaggagtt

SEQ ID NO: 7316 - DNA, 13 bp, Artificial Sequence
  Oligonucleotide for detection of SNP TSC0002138
aactccttaaatt

SEQ ID NO: 7317 - DNA, 13 bp, Artificial Sequence
  Oligonucleotide for detection of SNP TSC0002138
aatttagggagtt

SEQ ID NO: 7318 - DNA, 13 bp, Artificial Sequence
  Oligonucleotide for detection of SNP TSC0002138
aactccctaaatt

SEQ ID NO: 7319 - DNA, 13 bp, Artificial Sequence
  Oligonucleotide for detection of SNP TSC0002141
ggattaaggagty

SEQ ID NO: 7320 - DNA, 13 bp, Artificial Sequence
  Oligonucleotide for detection of SNP TSC0002141
ractccttaatcc

SEQ ID NO: 7321 - DNA, 13 bp, Artificial Sequence
  Oligonucleotide for detection of SNP TSC0002141
ggattagggagty

SEQ ID NO: 7322 - DNA, 13 bp, Artificial Sequence
  Oligonucleotide for detection of SNP TSC0002141
ractccctaatcc

SEQ ID NO: 7323 - DNA, 13 bp, Artificial Sequence
  Oligonucleotide for detection of SNP TSC0002142
tttaaagagataa

SEQ ID NO: 7324 - DNA, 13 bp, Artificial Sequence
  Oligonucleotide for detection of SNP TSC0002142
ttatctctttaaa

SEQ ID NO: 7325 - DNA, 13 bp, Artificial Sequence
  Oligonucleotide for detection of SNP TSC0002142
tttaaaaagataa

SEQ ID NO: 7326 - DNA, 13 bp, Artificial Sequence
  Oligonucleotide for detection of SNP TSC0002142
ttatctttttaaa

SEQ ID NO: 7327 - DNA, 13 bp, Artificial Sequence
  Oligonucleotide for detection of SNP TSC0002143
ttgataagaaaaa

SEQ ID NO: 7328 - DNA, 13 bp, Artificial Sequence
  Oligonucleotide for detection of SNP TSC0002143
tttttcttatcaa

SEQ ID NO: 7329 - DNA, 13 bp, Artificial Sequence
  Oligonucleotide for detection of SNP TSC0002143
ttgataggaaaaa

SEQ ID NO: 7330 - DNA, 13 bp, Artificial Sequence
  Oligonucleotide for detection of SNP TSC0002143
tttttcctatcaa

SEQ ID NO: 7331 - DNA, 13 bp, Artificial Sequence
  Oligonucleotide for detection of SNP TSC0002144
gtatgtagtttty

SEQ ID NO: 7332 - DNA, 13 bp, Artificial Sequence
  Oligonucleotide for detection of SNP TSC0002144
raaaactacatac

SEQ ID NO: 7333 - DNA, 13 bp, Artificial Sequence
  Oligonucleotide for detection of SNP TSC0002144
gtatgttgtttty

SEQ ID NO: 7334 - DNA, 13 bp, Artificial Sequence
  Oligonucleotide for detection of SNP TSC0002144
raaaacaacatac

SEQ ID NO: 7335 - DNA, 13 bp, Artificial Sequence
  Oligonucleotide for detection of SNP TSC0002144
gtatgtcgtttty

SEQ ID NO: 7336 - DNA, 13 bp, Artificial Sequence
  Oligonucleotide for detection of SNP TSC0002144
raaaacgacatac

SEQ ID NO: 7337 - DNA, 13 bp, Artificial Sequence
  Oligonucleotide for detection of SNP TSC0002144
ggaaattgtatay

SEQ ID NO: 7338 - DNA, 13 bp, Artificial Sequence
  Oligonucleotide for detection of SNP TSC0002144
rtatacaatttcc

SEQ ID NO: 7339 - DNA, 13 bp, Artificial Sequence
  Oligonucleotide for detection of SNP TSC0002144
ggaaatggtatay

SEQ ID NO: 7340 - DNA, 13 bp, Artificial Sequence
  Oligonucleotide for detection of SNP TSC0002144
rtataccatttcc

SEQ ID NO: 7341 - DNA, 13 bp, Artificial Sequence
  Oligonucleotide for detection of SNP TSC0002144
ggaaacggtatay

SEQ ID NO: 7342 - DNA, 13 bp, Artificial Sequence
  Oligonucleotide for detection of SNP TSC0002144
rtataccgtttcc

SEQ ID NO: 7343 - DNA, 13 bp, Artificial Sequence
  Oligonucleotide for detection of SNP TSC0002145
ttgaatatatttt

SEQ ID NO: 7344 - DNA, 13 bp, Artificial Sequence
  Oligonucleotide for detection of SNP TSC0002145
aaaatatattcaa

SEQ ID NO: 7345 - DNA, 13 bp, Artificial Sequence
  Oligonucleotide for detection of SNP TSC0002145
ttgaatgtatttt

SEQ ID NO: 7346 - DNA, 13 bp, Artificial Sequence
  Oligonucleotide for detection of SNP TSC0002145
aaaatacattcaa

SEQ ID NO: 7347 - DNA, 13 bp, Artificial Sequence
  Oligonucleotide for detection of SNP TSC0002145
tcgaatatatttt

SEQ ID NO: 7348 - DNA, 13 bp, Artificial Sequence
  Oligonucleotide for detection of SNP TSC0002145
aaaatatattcga

SEQ ID NO: 7349 - DNA, 13 bp, Artificial Sequence
  Oligonucleotide for detection of SNP TSC0002145
tcgaatgtatttt

SEQ ID NO: 7350 - DNA, 13 bp, Artificial Sequence
  Oligonucleotide for detection of SNP TSC0002145
aaaatacattcga

SEQ ID NO: 7351 - DNA, 13 bp, Artificial Sequence
  Oligonucleotide for detection of SNP TSC0002146
gaaaattggttgt

SEQ ID NO: 7352 - DNA, 13 bp, Artificial Sequence
  Oligonucleotide for detection of SNP TSC0002146
acaaccaattttc

SEQ ID NO: 7353 - DNA, 13 bp, Artificial Sequence
  Oligonucleotide for detection of SNP TSC0002146
gaaaatcggttgt

SEQ ID NO: 7354 - DNA, 13 bp, Artificial Sequence
  Oligonucleotide for detection of SNP TSC0002146
acaaccgattttc

SEQ ID NO: 7355 - DNA, 13 bp, Artificial Sequence
  Oligonucleotide for detection of SNP TSC0002146
ataattgatttty

SEQ ID NO: 7356 - DNA, 13 bp, Artificial Sequence
  Oligonucleotide for detection of SNP TSC0002146
raaaatcaattat

SEQ ID NO: 7357 - DNA, 13 bp, Artificial Sequence
  Oligonucleotide for detection of SNP TSC0002146
ataattaatttty

SEQ ID NO: 7358 - DNA, 13 bp, Artificial Sequence
  Oligonucleotide for detection of SNP TSC0002146
raaaattaattat

SEQ ID NO: 7359 - DNA, 13 bp, Artificial Sequence
  Oligonucleotide for detection of SNP TSC0002146
ataatcgatttty

SEQ ID NO: 7360 - DNA, 13 bp, Artificial Sequence
  Oligonucleotide for detection of SNP TSC0002146
raaaatcgattat

SEQ ID NO: 7361 - DNA, 13 bp, Artificial Sequence
  Oligonucleotide for detection of SNP TSC0002147
tttttatgtattt

SEQ ID NO: 7362 - DNA, 13 bp, Artificial Sequence
  Oligonucleotide for detection of SNP TSC0002147
aaatacataaaaa

SEQ ID NO: 7363 - DNA, 13 bp, Artificial Sequence
  Oligonucleotide for detection of SNP TSC0002147
tttttacgtattt

SEQ ID NO: 7364 - DNA, 13 bp, Artificial Sequence
  Oligonucleotide for detection of SNP TSC0002147
aaatacgtaaaaa

SEQ ID NO: 7365 - DNA, 13 bp, Artificial Sequence
  Oligonucleotide for detection of SNP TSC0002147
aaatatgtaaggg

SEQ ID NO: 7366 - DNA, 13 bp, Artificial Sequence
  Oligonucleotide for detection of SNP TSC0002147
cccttacatattt

SEQ ID NO: 7367 - DNA, 13 bp, Artificial Sequence
  Oligonucleotide for detection of SNP TSC0002147
aaatatataaggg

SEQ ID NO: 7368 - DNA, 13 bp, Artificial Sequence
  Oligonucleotide for detection of SNP TSC0002147
cccttatatattt

SEQ ID NO: 7369 - DNA, 13 bp, Artificial Sequence
  Oligonucleotide for detection of SNP TSC0002147
aaatacgtaaggg

SEQ ID NO: 7370 - DNA, 13 bp, Artificial Sequence
  Oligonucleotide for detection of SNP TSC0002147
cccttacgtattt

SEQ ID NO: 7371 - DNA, 13 bp, Artificial Sequence
  Oligonucleotide for detection of SNP TSC0002148
tatttgggaggtt

SEQ ID NO: 7372 - DNA, 13 bp, Artificial Sequence
  Oligonucleotide for detection of SNP TSC0002148
aacctcccaaata

SEQ ID NO: 7373 - DNA, 13 bp, Artificial Sequence
  Oligonucleotide for detection of SNP TSC0002148
tatttgagaggtt

SEQ ID NO: 7374 - DNA, 13 bp, Artificial Sequence
  Oligonucleotide for detection of SNP TSC0002148
aacctctcaaata

SEQ ID NO: 7375 - DNA, 13 bp, Artificial Sequence
  Oligonucleotide for detection of SNP TSC0002149
ttaattatttttt

SEQ ID NO: 7376 - DNA, 13 bp, Artificial Sequence
  Oligonucleotide for detection of SNP TSC0002149
aaaaaataattaa

SEQ ID NO: 7377 - DNA, 13 bp, Artificial Sequence
  Oligonucleotide for detection of SNP TSC0002149
ttaattgtttttt

SEQ ID NO: 7378 - DNA, 13 bp, Artificial Sequence
  Oligonucleotide for detection of SNP TSC0002149
aaaaaacaattaa

SEQ ID NO: 7379 - DNA, 13 bp, Artificial Sequence
  Oligonucleotide for detection of SNP TSC0002149
ttaatcgtttttt

SEQ ID NO: 7380 - DNA, 13 bp, Artificial Sequence
  Oligonucleotide for detection of SNP TSC0002149
aaaaaacgattaa

SEQ ID NO: 7381 - DNA, 13 bp, Artificial Sequence
  Oligonucleotide for detection of SNP TSC0002149
aaaaagtgattaa

SEQ ID NO: 7382 - DNA, 13 bp, Artificial Sequence
  Oligonucleotide for detection of SNP TSC0002149
ttaatcacttttt

SEQ ID NO: 7383 - DNA, 13 bp, Artificial Sequence
  Oligonucleotide for detection of SNP TSC0002149
aaaaagcgattaa

SEQ ID NO: 7384 - DNA, 13 bp, Artificial Sequence
  Oligonucleotide for detection of SNP TSC0002149
ttaatcgcttttt

SEQ ID NO: 7385 - DNA, 13 bp, Artificial Sequence
  Oligonucleotide for detection of SNP TSC0002150
gtattaaatgtty

SEQ ID NO: 7386 - DNA, 13 bp, Artificial Sequence
  Oligonucleotide for detection of SNP TSC0002150
raacatttaatac

SEQ ID NO: 7387 - DNA, 13 bp, Artificial Sequence
  Oligonucleotide for detection of SNP TSC0002150
gtattagatgtty

SEQ ID NO: 7388 - DNA, 13 bp, Artificial Sequence
  Oligonucleotide for detection of SNP TSC0002150
raacatctaatac

SEQ ID NO: 7389 - DNA, 13 bp, Artificial Sequence
  Oligonucleotide for detection of SNP TSC0002151
ttttttatttttg

SEQ ID NO: 7390 - DNA, 13 bp, Artificial Sequence
  Oligonucleotide for detection of SNP TSC0002151
caaaaataaaaaa

SEQ ID NO: 7391 - DNA, 13 bp, Artificial Sequence
  Oligonucleotide for detection of SNP TSC0002151
ttttttttttttg

SEQ ID NO: 7392 - DNA, 13 bp, Artificial Sequence
  Oligonucleotide for detection of SNP TSC0002151
caaaaaaaaaaaa

SEQ ID NO: 7393 - DNA, 13 bp, Artificial Sequence
  Oligonucleotide for detection of SNP TSC0002151
ttttttattttcg

SEQ ID NO: 7394 - DNA, 13 bp, Artificial Sequence
  Oligonucleotide for detection of SNP TSC0002151
cgaaaataaaaaa

SEQ ID NO: 7395 - DNA, 13 bp, Artificial Sequence
  Oligonucleotide for detection of SNP TSC0002151
tttttttttttcg

SEQ ID NO: 7396 - DNA, 13 bp, Artificial Sequence
  Oligonucleotide for detection of SNP TSC0002151
cgaaaaaaaaaaa

SEQ ID NO: 7397 - DNA, 13 bp, Artificial Sequence
  Oligonucleotide for detection of SNP TSC0002151
tgaggatgaggga

SEQ ID NO: 7398 - DNA, 13 bp, Artificial Sequence
  Oligonucleotide for detection of SNP TSC0002151
tccctcatcctca

SEQ ID NO: 7399 - DNA, 13 bp, Artificial Sequence
  Oligonucleotide for detection of SNP TSC0002151
tgaggaagaggga

SEQ ID NO: 7400 - DNA, 13 bp, Artificial Sequence
  Oligonucleotide for detection of SNP TSC0002151
tccctcttcctca

SEQ ID NO: 7401 - DNA, 13 bp, Artificial Sequence
  Oligonucleotide for detection of SNP TSC0002151
cgaggatgaggga

SEQ ID NO: 7402 - DNA, 13 bp, Artificial Sequence
  Oligonucleotide for detection of SNP TSC0002151
tccctcatcctcg

SEQ ID NO: 7403 - DNA, 13 bp, Artificial Sequence
  Oligonucleotide for detection of SNP TSC0002151
cgaggaagaggga

SEQ ID NO: 7404 - DNA, 13 bp, Artificial Sequence
  Oligonucleotide for detection of SNP TSC0002151
tccctcttcctcg

SEQ ID NO: 7405 - DNA, 13 bp, Artificial Sequence
  Oligonucleotide for detection of SNP TSC0002152
gaattataaggay

SEQ ID NO: 7406 - DNA, 13 bp, Artificial Sequence
  Oligonucleotide for detection of SNP TSC0002152
rtccttataattc

SEQ ID NO: 7407 - DNA, 13 bp, Artificial Sequence
  Oligonucleotide for detection of SNP TSC0002152
gaattagaaggay

SEQ ID NO: 7408 - DNA, 13 bp, Artificial Sequence
  Oligonucleotide for detection of SNP TSC0002152
rtccttctaattc

SEQ ID NO: 7409 - DNA, 13 bp, Artificial Sequence
  Oligonucleotide for detection of SNP TSC0002152
gtttttatagtty

SEQ ID NO: 7410 - DNA, 13 bp, Artificial Sequence
  Oligonucleotide for detection of SNP TSC0002152
raactataaaaac

SEQ ID NO: 7411 - DNA, 13 bp, Artificial Sequence
  Oligonucleotide for detection of SNP TSC0002152
gtttttttagtty

SEQ ID NO: 7412 - DNA, 13 bp, Artificial Sequence
  Oligonucleotide for detection of SNP TSC0002152
raactaaaaaaac

SEQ ID NO: 7413 - DNA, 13 bp, Artificial Sequence
  Oligonucleotide for detection of SNP TSC0002154
tatttaaatagty

SEQ ID NO: 7414 - DNA, 13 bp, Artificial Sequence
  Oligonucleotide for detection of SNP TSC0002154
ractatttaaata

SEQ ID NO: 7415 - DNA, 13 bp, Artificial Sequence
  Oligonucleotide for detection of SNP TSC0002154
tatttagatagty

SEQ ID NO: 7416 - DNA, 13 bp, Artificial Sequence
  Oligonucleotide for detection of SNP TSC0002154
ractatctaaata

SEQ ID NO: 7417 - DNA, 13 bp, Artificial Sequence
  Oligonucleotide for detection of SNP TSC0002155
gtgagtgaagtta

SEQ ID NO: 7418 - DNA, 13 bp, Artificial Sequence
  Oligonucleotide for detection of SNP TSC0002155
taacttcactcac

SEQ ID NO: 7419 - DNA, 13 bp, Artificial Sequence
  Oligonucleotide for detection of SNP TSC0002155
gtgagtaaagtta

SEQ ID NO: 7420 - DNA, 13 bp, Artificial Sequence
  Oligonucleotide for detection of SNP TSC0002155
taactttactcac

SEQ ID NO: 7421 - DNA, 13 bp, Artificial Sequence
  Oligonucleotide for detection of SNP TSC0002156
atttaaaaataty

SEQ ID NO: 7422 - DNA, 13 bp, Artificial Sequence
  Oligonucleotide for detection of SNP TSC0002156
ratatttttaaat

SEQ ID NO: 7423 - DNA, 13 bp, Artificial Sequence
  Oligonucleotide for detection of SNP TSC0002156
atttaataataty

SEQ ID NO: 7424 - DNA, 13 bp, Artificial Sequence
  Oligonucleotide for detection of SNP TSC0002156
ratattattaaat

SEQ ID NO: 7425 - DNA, 13 bp, Artificial Sequence
  Oligonucleotide for detection of SNP TSC0002156
ggtatttttagat

SEQ ID NO: 7426 - DNA, 13 bp, Artificial Sequence
  Oligonucleotide for detection of SNP TSC0002156
atctaaaaatacc

SEQ ID NO: 7427 - DNA, 13 bp, Artificial Sequence
  Oligonucleotide for detection of SNP TSC0002156
ggtattgttagat

SEQ ID NO: 7428 - DNA, 13 bp, Artificial Sequence
  Oligonucleotide for detection of SNP TSC0002156
atctaacaatacc

SEQ ID NO: 7429 - DNA, 13 bp, Artificial Sequence
  Oligonucleotide for detection of SNP TSC0002158
gaaagaaaatatg

SEQ ID NO: 7430 - DNA, 13 bp, Artificial Sequence
  Oligonucleotide for detection of SNP TSC0002158
catattttctttc

SEQ ID NO: 7431 - DNA, 13 bp, Artificial Sequence
  Oligonucleotide for detection of SNP TSC0002158
gaaagataatatg

SEQ ID NO: 7432 - DNA, 13 bp, Artificial Sequence
  Oligonucleotide for detection of SNP TSC0002158
catattatctttc

SEQ ID NO: 7433 - DNA, 13 bp, Artificial Sequence
  Oligonucleotide for detection of SNP TSC0002158
tatgtttttttty

SEQ ID NO: 7434 - DNA, 13 bp, Artificial Sequence
  Oligonucleotide for detection of SNP TSC0002158
raaaaaaaacata

SEQ ID NO: 7435 - DNA, 13 bp, Artificial Sequence
  Oligonucleotide for detection of SNP TSC0002159
gtattgaatgtta

SEQ ID NO: 7436 - DNA, 13 bp, Artificial Sequence
  Oligonucleotide for detection of SNP TSC0002159
taacattcaatac

SEQ ID NO: 7437 - DNA, 13 bp, Artificial Sequence
  Oligonucleotide for detection of SNP TSC0002159
gtattggatgtta

SEQ ID NO: 7438 - DNA, 13 bp, Artificial Sequence
  Oligonucleotide for detection of SNP TSC0002159
taacatccaatac

SEQ ID NO: 7439 - DNA, 13 bp, Artificial Sequence
  Oligonucleotide for detection of SNP TSC0002160
gtgtttaatgagg

SEQ ID NO: 7440 - DNA, 13 bp, Artificial Sequence
  Oligonucleotide for detection of SNP TSC0002160
cctcattaaacac

SEQ ID NO: 7441 - DNA, 13 bp, Artificial Sequence
  Oligonucleotide for detection of SNP TSC0002160
gtgttttatgagg

SEQ ID NO: 7442 - DNA, 13 bp, Artificial Sequence
  Oligonucleotide for detection of SNP TSC0002160
cctcataaaacac

SEQ ID NO: 7443 - DNA, 13 bp, Artificial Sequence
  Oligonucleotide for detection of SNP TSC0002160
ttttattagatay

SEQ ID NO: 7444 - DNA, 13 bp, Artificial Sequence
  Oligonucleotide for detection of SNP TSC0002160
rtatctaataaaa

SEQ ID NO: 7445 - DNA, 13 bp, Artificial Sequence
  Oligonucleotide for detection of SNP TSC0002160
ttttatgagatay

SEQ ID NO: 7446 - DNA, 13 bp, Artificial Sequence
  Oligonucleotide for detection of SNP TSC0002160
rtatctcataaaa

SEQ ID NO: 7447 - DNA, 13 bp, Artificial Sequence
  Oligonucleotide for detection of SNP TSC0002161
gaggttattagay

SEQ ID NO: 7448 - DNA, 13 bp, Artificial Sequence
  Oligonucleotide for detection of SNP TSC0002161
rtctaataacctc

SEQ ID NO: 7449 - DNA, 13 bp, Artificial Sequence
  Oligonucleotide for detection of SNP TSC0002161
gaggttgttagay

SEQ ID NO: 7450 - DNA, 13 bp, Artificial Sequence
  Oligonucleotide for detection of SNP TSC0002161
rtctaacaacctc

SEQ ID NO: 7451 - DNA, 13 bp, Artificial Sequence
  Oligonucleotide for detection of SNP TSC0002161
gaggtcgttagay

SEQ ID NO: 7452 - DNA, 13 bp, Artificial Sequence
  Oligonucleotide for detection of SNP TSC0002161
rtctaacgacctc

SEQ ID NO: 7453 - DNA, 13 bp, Artificial Sequence
  Oligonucleotide for detection of SNP TSC0002161
gtttaatgattty

SEQ ID NO: 7454 - DNA, 13 bp, Artificial Sequence
  Oligonucleotide for detection of SNP TSC0002161
raaatcattaaac

SEQ ID NO: 7455 - DNA, 13 bp, Artificial Sequence
  Oligonucleotide for detection of SNP TSC0002161
gtttaacgattty

SEQ ID NO: 7456 - DNA, 13 bp, Artificial Sequence
  Oligonucleotide for detection of SNP TSC0002161
raaatcgttaaac

SEQ ID NO: 7457 - DNA, 13 bp, Artificial Sequence
  Oligonucleotide for detection of SNP TSC0002164
gagagaaaaaaaa

SEQ ID NO: 7458 - DNA, 13 bp, Artificial Sequence
  Oligonucleotide for detection of SNP TSC0002164
ttttttttctctc

SEQ ID NO: 7459 - DNA, 13 bp, Artificial Sequence
  Oligonucleotide for detection of SNP TSC0002164
gagagagaaaaaa

SEQ ID NO: 7460 - DNA, 13 bp, Artificial Sequence
  Oligonucleotide for detection of SNP TSC0002164
ttttttctctctc

SEQ ID NO: 7461 - DNA, 13 bp, Artificial Sequence
  Oligonucleotide for detection of SNP TSC0002165
tatatgatatata

SEQ ID NO: 7462 - DNA, 13 bp, Artificial Sequence
  Oligonucleotide for detection of SNP TSC0002165
tatatatcatata

SEQ ID NO: 7463 - DNA, 13 bp, Artificial Sequence
  Oligonucleotide for detection of SNP TSC0002165
tatatgttatata

SEQ ID NO: 7464 - DNA, 13 bp, Artificial Sequence
  Oligonucleotide for detection of SNP TSC0002165
tatataacatata

SEQ ID NO: 7465 - DNA, 13 bp, Artificial Sequence
  Oligonucleotide for detection of SNP TSC0002165
tatatattatata

SEQ ID NO: 7466 - DNA, 13 bp, Artificial Sequence
  Oligonucleotide for detection of SNP TSC0002165
tatataatatata

SEQ ID NO: 7467 - DNA, 13 bp, Artificial Sequence
  Oligonucleotide for detection of SNP TSC0002166
agaaatataaaag

SEQ ID NO: 7468 - DNA, 13 bp, Artificial Sequence
  Oligonucleotide for detection of SNP TSC0002166
cttttatatttct

SEQ ID NO: 7469 - DNA, 13 bp, Artificial Sequence
  Oligonucleotide for detection of SNP TSC0002166
agaaatttaaaag

SEQ ID NO: 7470 - DNA, 13 bp, Artificial Sequence
  Oligonucleotide for detection of SNP TSC0002166
cttttaaatttct

SEQ ID NO: 7471 - DNA, 13 bp, Artificial Sequence
  Oligonucleotide for detection of SNP TSC0002166
tttttatgttttt

SEQ ID NO: 7472 - DNA, 13 bp, Artificial Sequence
  Oligonucleotide for detection of SNP TSC0002166
aaaaacataaaaa

SEQ ID NO: 7473 - DNA, 13 bp, Artificial Sequence
  Oligonucleotide for detection of SNP TSC0002166
tttttaggttttt

SEQ ID NO: 7474 - DNA, 13 bp, Artificial Sequence
  Oligonucleotide for detection of SNP TSC0002166
aaaaacctaaaaa

SEQ ID NO: 7475 - DNA, 13 bp, Artificial Sequence
  Oligonucleotide for detection of SNP TSC0002167
aaatttattatty

SEQ ID NO: 7476 - DNA, 13 bp, Artificial Sequence
  Oligonucleotide for detection of SNP TSC0002167
raataataaattt

SEQ ID NO: 7477 - DNA, 13 bp, Artificial Sequence
  Oligonucleotide for detection of SNP TSC0002167
aaatttgttatty

SEQ ID NO: 7478 - DNA, 13 bp, Artificial Sequence
  Oligonucleotide for detection of SNP TSC0002167
raataacaaattt

SEQ ID NO: 7479 - DNA, 13 bp, Artificial Sequence
  Oligonucleotide for detection of SNP TSC0002168
tagttaaaattty

SEQ ID NO: 7480 - DNA, 13 bp, Artificial Sequence
  Oligonucleotide for detection of SNP TSC0002168
raaattttaacta

SEQ ID NO: 7481 - DNA, 13 bp, Artificial Sequence
  Oligonucleotide for detection of SNP TSC0002168
tagttagaattty

SEQ ID NO: 7482 - DNA, 13 bp, Artificial Sequence
  Oligonucleotide for detection of SNP TSC0002168
raaattctaacta

SEQ ID NO: 7483 - DNA, 13 bp, Artificial Sequence
  Oligonucleotide for detection of SNP TSC0002169
atggtagttttay

SEQ ID NO: 7484 - DNA, 13 bp, Artificial Sequence
  Oligonucleotide for detection of SNP TSC0002169
rtaaaactaccat

SEQ ID NO: 7485 - DNA, 13 bp, Artificial Sequence
  Oligonucleotide for detection of SNP TSC0002169
atggtaattttay

SEQ ID NO: 7486 - DNA, 13 bp, Artificial Sequence
  Oligonucleotide for detection of SNP TSC0002169
rtaaaattaccat

SEQ ID NO: 7487 - DNA, 13 bp, Artificial Sequence
  Oligonucleotide for detection of SNP TSC0002169
acggtagttttay

SEQ ID NO: 7488 - DNA, 13 bp, Artificial Sequence
  Oligonucleotide for detection of SNP TSC0002169
rtaaaactaccgt

SEQ ID NO: 7489 - DNA, 13 bp, Artificial Sequence
  Oligonucleotide for detection of SNP TSC0002169
acggtaattttay

SEQ ID NO: 7490 - DNA, 13 bp, Artificial Sequence
  Oligonucleotide for detection of SNP TSC0002169
rtaaaattaccgt

SEQ ID NO: 7491 - DNA, 13 bp, Artificial Sequence
  Oligonucleotide for detection of SNP TSC0002170
ttataaattgtay

SEQ ID NO: 7492 - DNA, 13 bp, Artificial Sequence
  Oligonucleotide for detection of SNP TSC0002170
rtacaatttataa

SEQ ID NO: 7493 - DNA, 13 bp, Artificial Sequence
  Oligonucleotide for detection of SNP TSC0002170
ttataatttgtay

SEQ ID NO: 7494 - DNA, 13 bp, Artificial Sequence
  Oligonucleotide for detection of SNP TSC0002170
rtacaaattataa

SEQ ID NO: 7495 - DNA, 13 bp, Artificial Sequence
  Oligonucleotide for detection of SNP TSC0002170
gtgtagtttatga

SEQ ID NO: 7496 - DNA, 13 bp, Artificial Sequence
  Oligonucleotide for detection of SNP TSC0002170
tcataaactacac

SEQ ID NO: 7497 - DNA, 13 bp, Artificial Sequence
  Oligonucleotide for detection of SNP TSC0002170
gtgtaggttatga

SEQ ID NO: 7498 - DNA, 13 bp, Artificial Sequence
  Oligonucleotide for detection of SNP TSC0002170
tcataacctacac

SEQ ID NO: 7499 - DNA, 13 bp, Artificial Sequence
  Oligonucleotide for detection of SNP TSC0002171
aaataaaatttta

SEQ ID NO: 7500 - DNA, 13 bp, Artificial Sequence
  Oligonucleotide for detection of SNP TSC0002171
taaaattttattt

SEQ ID NO: 7501 - DNA, 13 bp, Artificial Sequence
  Oligonucleotide for detection of SNP TSC0002172
tttggataaatta

SEQ ID NO: 7502 - DNA, 13 bp, Artificial Sequence
  Oligonucleotide for detection of SNP TSC0002172
taatttatccaaa

SEQ ID NO: 7503 - DNA, 13 bp, Artificial Sequence
  Oligonucleotide for detection of SNP TSC0002172
tttggagaaatta

SEQ ID NO: 7504 - DNA, 13 bp, Artificial Sequence
  Oligonucleotide for detection of SNP TSC0002172
taatttctccaaa

SEQ ID NO: 7505 - DNA, 13 bp, Artificial Sequence
  Oligonucleotide for detection of SNP TSC0002172
tagtttgtttaaa

SEQ ID NO: 7506 - DNA, 13 bp, Artificial Sequence
  Oligonucleotide for detection of SNP TSC0002172
tttaaacaaacta

SEQ ID NO: 7507 - DNA, 13 bp, Artificial Sequence
  Oligonucleotide for detection of SNP TSC0002172
tagtttttttaaa

SEQ ID NO: 7508 - DNA, 13 bp, Artificial Sequence
  Oligonucleotide for detection of SNP TSC0002172
tttaaaaaaacta

SEQ ID NO: 7509 - DNA, 13 bp, Artificial Sequence
  Oligonucleotide for detection of SNP TSC0002173
atttgtgttttty

SEQ ID NO: 7510 - DNA, 13 bp, Artificial Sequence
  Oligonucleotide for detection of SNP TSC0002173
raaaaacacaaat

SEQ ID NO: 7511 - DNA, 13 bp, Artificial Sequence
  Oligonucleotide for detection of SNP TSC0002173
atttgtattttty

SEQ ID NO: 7512 - DNA, 13 bp, Artificial Sequence
  Oligonucleotide for detection of SNP TSC0002173
raaaaatacaaat

SEQ ID NO: 7513 - DNA, 13 bp, Artificial Sequence
  Oligonucleotide for detection of SNP TSC0002174
ttatatattgttt

SEQ ID NO: 7514 - DNA, 13 bp, Artificial Sequence
  Oligonucleotide for detection of SNP TSC0002174
aaacaatatataa

SEQ ID NO: 7515 - DNA, 13 bp, Artificial Sequence
  Oligonucleotide for detection of SNP TSC0002174
ttatatgttgttt

SEQ ID NO: 7516 - DNA, 13 bp, Artificial Sequence
  Oligonucleotide for detection of SNP TSC0002174
aaacaacatataa

SEQ ID NO: 7517 - DNA, 13 bp, Artificial Sequence
  Oligonucleotide for detection of SNP TSC0002174
ttatacgttgttt

SEQ ID NO: 7518 - DNA, 13 bp, Artificial Sequence
  Oligonucleotide for detection of SNP TSC0002174
aaacaacgtataa

SEQ ID NO: 7519 - DNA, 13 bp, Artificial Sequence
  Oligonucleotide for detection of SNP TSC0002174
agatagtgtatag

SEQ ID NO: 7520 - DNA, 13 bp, Artificial Sequence
  Oligonucleotide for detection of SNP TSC0002174
ctatacactatct

SEQ ID NO: 7521 - DNA, 13 bp, Artificial Sequence
  Oligonucleotide for detection of SNP TSC0002174
agatagcgtatag

SEQ ID NO: 7522 - DNA, 13 bp, Artificial Sequence
  Oligonucleotide for detection of SNP TSC0002174
ctatacgctatct

SEQ ID NO: 7523 - DNA, 13 bp, Artificial Sequence
  Oligonucleotide for detection of SNP TSC0002175
gaaatagagttat

SEQ ID NO: 7524 - DNA, 13 bp, Artificial Sequence
  Oligonucleotide for detection of SNP TSC0002175
ataactctatttc

SEQ ID NO: 7525 - DNA, 13 bp, Artificial Sequence
  Oligonucleotide for detection of SNP TSC0002175
gaaatatagttat

SEQ ID NO: 7526 - DNA, 13 bp, Artificial Sequence
  Oligonucleotide for detection of SNP TSC0002175
ataactatatttc

SEQ ID NO: 7527 - DNA, 13 bp, Artificial Sequence
  Oligonucleotide for detection of SNP TSC0002176
ttttataaatttt

SEQ ID NO: 7528 - DNA, 13 bp, Artificial Sequence
  Oligonucleotide for detection of SNP TSC0002176
aaaatttataaaa

SEQ ID NO: 7529 - DNA, 13 bp, Artificial Sequence
  Oligonucleotide for detection of SNP TSC0002176
ttttatgaatttt

SEQ ID NO: 7530 - DNA, 13 bp, Artificial Sequence
  Oligonucleotide for detection of SNP TSC0002176
aaaattcataaaa

SEQ ID NO: 7531 - DNA, 13 bp, Artificial Sequence
  Oligonucleotide for detection of SNP TSC0002176
ttttacgaatttt

SEQ ID NO: 7532 - DNA, 13 bp, Artificial Sequence
  Oligonucleotide for detection of SNP TSC0002176
aaaattcgtaaaa

SEQ ID NO: 7533 - DNA, 13 bp, Artificial Sequence
  Oligonucleotide for detection of SNP TSC0002176
agaatttgtggag

SEQ ID NO: 7534 - DNA, 13 bp, Artificial Sequence
  Oligonucleotide for detection of SNP TSC0002176
ctccacaaattct

SEQ ID NO: 7535 - DNA, 13 bp, Artificial Sequence
  Oligonucleotide for detection of SNP TSC0002176
agaattcgtggag

SEQ ID NO: 7536 - DNA, 13 bp, Artificial Sequence
  Oligonucleotide for detection of SNP TSC0002176
ctccacgaattct

SEQ ID NO: 7537 - DNA, 13 bp, Artificial Sequence
  Oligonucleotide for detection of SNP TSC0002177
gtttgtggtgaga

SEQ ID NO: 7538 - DNA, 13 bp, Artificial Sequence
  Oligonucleotide for detection of SNP TSC0002177
tctcaccacaaac

SEQ ID NO: 7539 - DNA, 13 bp, Artificial Sequence
  Oligonucleotide for detection of SNP TSC0002177
gtttgtagtgaga

SEQ ID NO: 7540 - DNA, 13 bp, Artificial Sequence
  Oligonucleotide for detection of SNP TSC0002177
tctcactacaaac

SEQ ID NO: 7541 - DNA, 13 bp, Artificial Sequence
  Oligonucleotide for detection of SNP TSC0002177
gttcgtggtgaga

SEQ ID NO: 7542 - DNA, 13 bp, Artificial Sequence
  Oligonucleotide for detection of SNP TSC0002177
tctcaccacgaac

SEQ ID NO: 7543 - DNA, 13 bp, Artificial Sequence
  Oligonucleotide for detection of SNP TSC0002177
gttcgtagtgaga

SEQ ID NO: 7544 - DNA, 13 bp, Artificial Sequence
  Oligonucleotide for detection of SNP TSC0002177
tctcactacgaac

SEQ ID NO: 7545 - DNA, 13 bp, Artificial Sequence
  Oligonucleotide for detection of SNP TSC0002177
gtttgtggcgaga

SEQ ID NO: 7546 - DNA, 13 bp, Artificial Sequence
  Oligonucleotide for detection of SNP TSC0002177
tctcgccacaaac

SEQ ID NO: 7547 - DNA, 13 bp, Artificial Sequence
  Oligonucleotide for detection of SNP TSC0002177
gtttgtagcgaga

SEQ ID NO: 7548 - DNA, 13 bp, Artificial Sequence
  Oligonucleotide for detection of SNP TSC0002177
tctcgctacaaac

SEQ ID NO: 7549 - DNA, 13 bp, Artificial Sequence
  Oligonucleotide for detection of SNP TSC0002177
gttcgtggcgaga

SEQ ID NO: 7550 - DNA, 13 bp, Artificial Sequence
  Oligonucleotide for detection of SNP TSC0002177
tctcgccacgaac

SEQ ID NO: 7551 - DNA, 13 bp, Artificial Sequence
  Oligonucleotide for detection of SNP TSC0002177
gttcgtagcgaga

SEQ ID NO: 7552 - DNA, 13 bp, Artificial Sequence
  Oligonucleotide for detection of SNP TSC0002177
tctcgctacgaac

SEQ ID NO: 7553 - DNA, 13 bp, Artificial Sequence
  Oligonucleotide for detection of SNP TSC0002178
agtaggtgggagy

SEQ ID NO: 7554 - DNA, 13 bp, Artificial Sequence
  Oligonucleotide for detection of SNP TSC0002178
rctcccacctact

SEQ ID NO: 7555 - DNA, 13 bp, Artificial Sequence
  Oligonucleotide for detection of SNP TSC0002178
agtaggggggagy

SEQ ID NO: 7556 - DNA, 13 bp, Artificial Sequence
  Oligonucleotide for detection of SNP TSC0002178
rctcccccctact

SEQ ID NO: 7557 - DNA, 13 bp, Artificial Sequence
  Oligonucleotide for detection of SNP TSC0002178
agtaggcgggagy

SEQ ID NO: 7558 - DNA, 13 bp, Artificial Sequence
  Oligonucleotide for detection of SNP TSC0002178
rctcccgcctact

SEQ ID NO: 7559 - DNA, 13 bp, Artificial Sequence
  Oligonucleotide for detection of SNP TSC0002178
gtttttgtttgtt

SEQ ID NO: 7560 - DNA, 13 bp, Artificial Sequence
  Oligonucleotide for detection of SNP TSC0002178
aacaaacaaaaac

SEQ ID NO: 7561 - DNA, 13 bp, Artificial Sequence
  Oligonucleotide for detection of SNP TSC0002178
gtttttttttgtt

SEQ ID NO: 7562 - DNA, 13 bp, Artificial Sequence
  Oligonucleotide for detection of SNP TSC0002178
aacaaaaaaaaac

SEQ ID NO: 7563 - DNA, 13 bp, Artificial Sequence
  Oligonucleotide for detection of SNP TSC0002178
gttttcgtttgtt

SEQ ID NO: 7564 - DNA, 13 bp, Artificial Sequence
  Oligonucleotide for detection of SNP TSC0002178
aacaaacgaaaac

SEQ ID NO: 7565 - DNA, 13 bp, Artificial Sequence
  Oligonucleotide for detection of SNP TSC0002179
ttatggaaatgtt

SEQ ID NO: 7566 - DNA, 13 bp, Artificial Sequence
  Oligonucleotide for detection of SNP TSC0002179
aacatttccataa

SEQ ID NO: 7567 - DNA, 13 bp, Artificial Sequence
  Oligonucleotide for detection of SNP TSC0002179
ttatggtaatgtt

SEQ ID NO: 7568 - DNA, 13 bp, Artificial Sequence
  Oligonucleotide for detection of SNP TSC0002179
aacattaccataa

SEQ ID NO: 7569 - DNA, 13 bp, Artificial Sequence
  Oligonucleotide for detection of SNP TSC0002179
aatatttttataa

SEQ ID NO: 7570 - DNA, 13 bp, Artificial Sequence
  Oligonucleotide for detection of SNP TSC0002179
ttataaaaatatt

SEQ ID NO: 7571 - DNA, 13 bp, Artificial Sequence
  Oligonucleotide for detection of SNP TSC0002179
aatattgttataa

SEQ ID NO: 7572 - DNA, 13 bp, Artificial Sequence
  Oligonucleotide for detection of SNP TSC0002179
ttataacaatatt

SEQ ID NO: 7573 - DNA, 13 bp, Artificial Sequence
  Oligonucleotide for detection of SNP TSC0002180
atataaataaaag

SEQ ID NO: 7574 - DNA, 13 bp, Artificial Sequence
  Oligonucleotide for detection of SNP TSC0002180
cttttatttatat

SEQ ID NO: 7575 - DNA, 13 bp, Artificial Sequence
  Oligonucleotide for detection of SNP TSC0002180
atataagtaaaag

SEQ ID NO: 7576 - DNA, 13 bp, Artificial Sequence
  Oligonucleotide for detection of SNP TSC0002180
cttttacttatat

SEQ ID NO: 7577 - DNA, 13 bp, Artificial Sequence
  Oligonucleotide for detection of SNP TSC0002181
atattaatgtaat

SEQ ID NO: 7578 - DNA, 13 bp, Artificial Sequence
  Oligonucleotide for detection of SNP TSC0002181
attacattaatat

SEQ ID NO: 7579 - DNA, 13 bp, Artificial Sequence
  Oligonucleotide for detection of SNP TSC0002181
atattagtgtaat

SEQ ID NO: 7580 - DNA, 13 bp, Artificial Sequence
  Oligonucleotide for detection of SNP TSC0002181
attacactaatat

SEQ ID NO: 7581 - DNA, 13 bp, Artificial Sequence
  Oligonucleotide for detection of SNP TSC0002183
tattataaaatat

SEQ ID NO: 7582 - DNA, 13 bp, Artificial Sequence
  Oligonucleotide for detection of SNP TSC0002183
atattttataata

SEQ ID NO: 7583 - DNA, 13 bp, Artificial Sequence
  Oligonucleotide for detection of SNP TSC0002183
tattatgaaatat

SEQ ID NO: 7584 - DNA, 13 bp, Artificial Sequence
  Oligonucleotide for detection of SNP TSC0002183
atatttcataata

SEQ ID NO: 7585 - DNA, 13 bp, Artificial Sequence
  Oligonucleotide for detection of SNP TSC0002184
tttaagttgatty

SEQ ID NO: 7586 - DNA, 13 bp, Artificial Sequence
  Oligonucleotide for detection of SNP TSC0002184
raatcaacttaaa

SEQ ID NO: 7587 - DNA, 13 bp, Artificial Sequence
  Oligonucleotide for detection of SNP TSC0002184
tttaaggtgatty

SEQ ID NO: 7588 - DNA, 13 bp, Artificial Sequence
  Oligonucleotide for detection of SNP TSC0002184
raatcaccttaaa

SEQ ID NO: 7589 - DNA, 13 bp, Artificial Sequence
  Oligonucleotide for detection of SNP TSC0002184
gggttaatttgag

SEQ ID NO: 7590 - DNA, 13 bp, Artificial Sequence
  Oligonucleotide for detection of SNP TSC0002184
ctcaaattaaccc

SEQ ID NO: 7591 - DNA, 13 bp, Artificial Sequence
  Oligonucleotide for detection of SNP TSC0002184
gggttattttgag

SEQ ID NO: 7592 - DNA, 13 bp, Artificial Sequence
  Oligonucleotide for detection of SNP TSC0002184
ctcaaaataaccc

SEQ ID NO: 7593 - DNA, 13 bp, Artificial Sequence
  Oligonucleotide for detection of SNP TSC0002185
gggggatgtgtgt

SEQ ID NO: 7594 - DNA, 13 bp, Artificial Sequence
  Oligonucleotide for detection of SNP TSC0002185
acacacatccccc

SEQ ID NO: 7595 - DNA, 13 bp, Artificial Sequence
  Oligonucleotide for detection of SNP TSC0002185
gggggacgtgtgt

SEQ ID NO: 7596 - DNA, 13 bp, Artificial Sequence
  Oligonucleotide for detection of SNP TSC0002185
acacacgtccccc

SEQ ID NO: 7597 - DNA, 13 bp, Artificial Sequence
  Oligonucleotide for detection of SNP TSC0002185
gggggatgcgtgt

SEQ ID NO: 7598 - DNA, 13 bp, Artificial Sequence
  Oligonucleotide for detection of SNP TSC0002185
acacgcatccccc

SEQ ID NO: 7599 - DNA, 13 bp, Artificial Sequence
  Oligonucleotide for detection of SNP TSC0002185
gggggacgcgtgt

SEQ ID NO: 7600 - DNA, 13 bp, Artificial Sequence
  Oligonucleotide for detection of SNP TSC0002185
acacgcgtccccc

SEQ ID NO: 7601 - DNA, 13 bp, Artificial Sequence
  Oligonucleotide for detection of SNP TSC0002185
atatgtgttttty

SEQ ID NO: 7602 - DNA, 13 bp, Artificial Sequence
  Oligonucleotide for detection of SNP TSC0002185
raaaaacacatat

SEQ ID NO: 7603 - DNA, 13 bp, Artificial Sequence
  Oligonucleotide for detection of SNP TSC0002185
atatgtattttty

SEQ ID NO: 7604 - DNA, 13 bp, Artificial Sequence
  Oligonucleotide for detection of SNP TSC0002185
raaaaatacatat

SEQ ID NO: 7605 - DNA, 13 bp, Artificial Sequence
  Oligonucleotide for detection of SNP TSC0002185
atacgtgttttty

SEQ ID NO: 7606 - DNA, 13 bp, Artificial Sequence
  Oligonucleotide for detection of SNP TSC0002185
raaaaacacgtat

SEQ ID NO: 7607 - DNA, 13 bp, Artificial Sequence
  Oligonucleotide for detection of SNP TSC0002185
atacgtattttty

SEQ ID NO: 7608 - DNA, 13 bp, Artificial Sequence
  Oligonucleotide for detection of SNP TSC0002185
raaaaatacgtat

SEQ ID NO: 7609 - DNA, 13 bp, Artificial Sequence
  Oligonucleotide for detection of SNP TSC0002185
atatgcgttttty

SEQ ID NO: 7610 - DNA, 13 bp, Artificial Sequence
  Oligonucleotide for detection of SNP TSC0002185
raaaaacgcatat

SEQ ID NO: 7611 - DNA, 13 bp, Artificial Sequence
  Oligonucleotide for detection of SNP TSC0002185
atacgcgttttty

SEQ ID NO: 7612 - DNA, 13 bp, Artificial Sequence
  Oligonucleotide for detection of SNP TSC0002185
raaaaacgcgtat

SEQ ID NO: 7613 - DNA, 13 bp, Artificial Sequence
  Oligonucleotide for detection of SNP TSC0002186
tgagtgattttty

SEQ ID NO: 7614 - DNA, 13 bp, Artificial Sequence
  Oligonucleotide for detection of SNP TSC0002186
raaaaatcactca

SEQ ID NO: 7615 - DNA, 13 bp, Artificial Sequence
  Oligonucleotide for detection of SNP TSC0002186
tgagtggttttty

SEQ ID NO: 7616 - DNA, 13 bp, Artificial Sequence
  Oligonucleotide for detection of SNP TSC0002186
raaaaaccactca

SEQ ID NO: 7617 - DNA, 13 bp, Artificial Sequence
  Oligonucleotide for detection of SNP TSC0002188
tataagatatgty

SEQ ID NO: 7618 - DNA, 13 bp, Artificial Sequence
  Oligonucleotide for detection of SNP TSC0002188
racatatcttata

SEQ ID NO: 7619 - DNA, 13 bp, Artificial Sequence
  Oligonucleotide for detection of SNP TSC0002188
tataaggtatgty

SEQ ID NO: 7620 - DNA, 13 bp, Artificial Sequence
  Oligonucleotide for detection of SNP TSC0002188
racataccttata

SEQ ID NO: 7621 - DNA, 13 bp, Artificial Sequence
  Oligonucleotide for detection of SNP TSC0002188
tataagatacgty

SEQ ID NO: 7622 - DNA, 13 bp, Artificial Sequence
  Oligonucleotide for detection of SNP TSC0002188
racgtatcttata

SEQ ID NO: 7623 - DNA, 13 bp, Artificial Sequence
  Oligonucleotide for detection of SNP TSC0002188
tataaggtacgty

SEQ ID NO: 7624 - DNA, 13 bp, Artificial Sequence
  Oligonucleotide for detection of SNP TSC0002188
racgtaccttata

SEQ ID NO: 7625 - DNA, 13 bp, Artificial Sequence
  Oligonucleotide for detection of SNP TSC0002190
gagatttttaggg

SEQ ID NO: 7626 - DNA, 13 bp, Artificial Sequence
  Oligonucleotide for detection of SNP TSC0002190
ccctaaaaatctc

SEQ ID NO: 7627 - DNA, 13 bp, Artificial Sequence
  Oligonucleotide for detection of SNP TSC0002190
gagattgttaggg

SEQ ID NO: 7628 - DNA, 13 bp, Artificial Sequence
  Oligonucleotide for detection of SNP TSC0002190
ccctaacaatctc

SEQ ID NO: 7629 - DNA, 13 bp, Artificial Sequence
  Oligonucleotide for detection of SNP TSC0002190
ttttgaaaattty

SEQ ID NO: 7630 - DNA, 13 bp, Artificial Sequence
  Oligonucleotide for detection of SNP TSC0002190
raaattttcaaaa

SEQ ID NO: 7631 - DNA, 13 bp, Artificial Sequence
  Oligonucleotide for detection of SNP TSC0002190
ttttgataattty

SEQ ID NO: 7632 - DNA, 13 bp, Artificial Sequence
  Oligonucleotide for detection of SNP TSC0002190
raaattatcaaaa

SEQ ID NO: 7633 - DNA, 13 bp, Artificial Sequence
  Oligonucleotide for detection of SNP TSC0002191
aagtataagtgag

SEQ ID NO: 7634 - DNA, 13 bp, Artificial Sequence
  Oligonucleotide for detection of SNP TSC0002191
ctcacttatactt

SEQ ID NO: 7635 - DNA, 13 bp, Artificial Sequence
  Oligonucleotide for detection of SNP TSC0002191
aagtatgagtgag

SEQ ID NO: 7636 - DNA, 13 bp, Artificial Sequence
  Oligonucleotide for detection of SNP TSC0002191
ctcactcatactt

SEQ ID NO: 7637 - DNA, 13 bp, Artificial Sequence
  Oligonucleotide for detection of SNP TSC0002192
gttatagtttgta

SEQ ID NO: 7638 - DNA, 13 bp, Artificial Sequence
  Oligonucleotide for detection of SNP TSC0002192
tacaaactataac

SEQ ID NO: 7639 - DNA, 13 bp, Artificial Sequence
  Oligonucleotide for detection of SNP TSC0002192
gttataatttgta

SEQ ID NO: 7640 - DNA, 13 bp, Artificial Sequence
  Oligonucleotide for detection of SNP TSC0002192
tacaaattataac

SEQ ID NO: 7641 - DNA, 13 bp, Artificial Sequence
  Oligonucleotide for detection of SNP TSC0002193
atttttttgttta

SEQ ID NO: 7642 - DNA, 13 bp, Artificial Sequence
  Oligonucleotide for detection of SNP TSC0002193
taaacaaaaaaat

SEQ ID NO: 7643 - DNA, 13 bp, Artificial Sequence
  Oligonucleotide for detection of SNP TSC0002193
atttttgtgttta

SEQ ID NO: 7644 - DNA, 13 bp, Artificial Sequence
  Oligonucleotide for detection of SNP TSC0002193
taaacacaaaaat

SEQ ID NO: 7645 - DNA, 13 bp, Artificial Sequence
  Oligonucleotide for detection of SNP TSC0002193
attttttcgttta

SEQ ID NO: 7646 - DNA, 13 bp, Artificial Sequence
  Oligonucleotide for detection of SNP TSC0002193
taaacgaaaaaat

SEQ ID NO: 7647 - DNA, 13 bp, Artificial Sequence
  Oligonucleotide for detection of SNP TSC0002193
atttttgcgttta

SEQ ID NO: 7648 - DNA, 13 bp, Artificial Sequence
  Oligonucleotide for detection of SNP TSC0002193
taaacgcaaaaat

SEQ ID NO: 7649 - DNA, 13 bp, Artificial Sequence
  Oligonucleotide for detection of SNP TSC0002193
tggatgaaaaggt

SEQ ID NO: 7650 - DNA, 13 bp, Artificial Sequence
  Oligonucleotide for detection of SNP TSC0002193
accttttcatcca

SEQ ID NO: 7651 - DNA, 13 bp, Artificial Sequence
  Oligonucleotide for detection of SNP TSC0002193
tggatgtaaaggt

SEQ ID NO: 7652 - DNA, 13 bp, Artificial Sequence
  Oligonucleotide for detection of SNP TSC0002193
acctttacatcca

SEQ ID NO: 7653 - DNA, 13 bp, Artificial Sequence
  Oligonucleotide for detection of SNP TSC0002193
tggacgaaaaggt

SEQ ID NO: 7654 - DNA, 13 bp, Artificial Sequence
  Oligonucleotide for detection of SNP TSC0002193
accttttcgtcca

SEQ ID NO: 7655 - DNA, 13 bp, Artificial Sequence
  Oligonucleotide for detection of SNP TSC0002193
tggacgtaaaggt

SEQ ID NO: 7656 - DNA, 13 bp, Artificial Sequence
  Oligonucleotide for detection of SNP TSC0002193
acctttacgtcca

SEQ ID NO: 7657 - DNA, 13 bp, Artificial Sequence
  Oligonucleotide for detection of SNP TSC0002194
tatttagaaaata

SEQ ID NO: 7658 - DNA, 13 bp, Artificial Sequence
  Oligonucleotide for detection of SNP TSC0002194
tattttctaaata

SEQ ID NO: 7659 - DNA, 13 bp, Artificial Sequence
  Oligonucleotide for detection of SNP TSC0002194
tatttaaaaaata

SEQ ID NO: 7660 - DNA, 13 bp, Artificial Sequence
  Oligonucleotide for detection of SNP TSC0002194
tattttttaaata

SEQ ID NO: 7661 - DNA, 13 bp, Artificial Sequence
  Oligonucleotide for detection of SNP TSC0002195
aaaaatgaaagga

SEQ ID NO: 7662 - DNA, 13 bp, Artificial Sequence
  Oligonucleotide for detection of SNP TSC0002195
tcctttcattttt

SEQ ID NO: 7663 - DNA, 13 bp, Artificial Sequence
  Oligonucleotide for detection of SNP TSC0002195
aaaaataaaagga

SEQ ID NO: 7664 - DNA, 13 bp, Artificial Sequence
  Oligonucleotide for detection of SNP TSC0002195
tccttttattttt

SEQ ID NO: 7665 - DNA, 13 bp, Artificial Sequence
  Oligonucleotide for detection of SNP TSC0002196
gtaagatatttgt

SEQ ID NO: 7666 - DNA, 13 bp, Artificial Sequence
  Oligonucleotide for detection of SNP TSC0002196
acaaatatcttac

SEQ ID NO: 7667 - DNA, 13 bp, Artificial Sequence
  Oligonucleotide for detection of SNP TSC0002196
gtaagagatttgt

SEQ ID NO: 7668 - DNA, 13 bp, Artificial Sequence
  Oligonucleotide for detection of SNP TSC0002196
acaaatctcttac

SEQ ID NO: 7669 - DNA, 13 bp, Artificial Sequence
  Oligonucleotide for detection of SNP TSC0002196
ataaatgttttay

SEQ ID NO: 7670 - DNA, 13 bp, Artificial Sequence
  Oligonucleotide for detection of SNP TSC0002196
rtaaaacatttat

SEQ ID NO: 7671 - DNA, 13 bp, Artificial Sequence
  Oligonucleotide for detection of SNP TSC0002196
ataaattttttay

SEQ ID NO: 7672 - DNA, 13 bp, Artificial Sequence
  Oligonucleotide for detection of SNP TSC0002196
rtaaaaaatttat

SEQ ID NO: 7673 - DNA, 13 bp, Artificial Sequence
  Oligonucleotide for detection of SNP TSC0002197
tttattgattaaa

SEQ ID NO: 7674 - DNA, 13 bp, Artificial Sequence
  Oligonucleotide for detection of SNP TSC0002197
tttaatcaataaa

SEQ ID NO: 7675 - DNA, 13 bp, Artificial Sequence
  Oligonucleotide for detection of SNP TSC0002197
tttattaattaaa

SEQ ID NO: 7676 - DNA, 13 bp, Artificial Sequence
  Oligonucleotide for detection of SNP TSC0002197
tttaattaataaa

SEQ ID NO: 7677 - DNA, 13 bp, Artificial Sequence
  Oligonucleotide for detection of SNP TSC0002198
aatattaggttay

SEQ ID NO: 7678 - DNA, 13 bp, Artificial Sequence
  Oligonucleotide for detection of SNP TSC0002198
rtaacctaatatt

SEQ ID NO: 7679 - DNA, 13 bp, Artificial Sequence
  Oligonucleotide for detection of SNP TSC0002198
aatattgggttay

SEQ ID NO: 7680 - DNA, 13 bp, Artificial Sequence
  Oligonucleotide for detection of SNP TSC0002198
rtaacccaatatt

SEQ ID NO: 7681 - DNA, 13 bp, Artificial Sequence
  Oligonucleotide for detection of SNP TSC0002198
aatatcgggttay

SEQ ID NO: 7682 - DNA, 13 bp, Artificial Sequence
  Oligonucleotide for detection of SNP TSC0002198
rtaacccgatatt

SEQ ID NO: 7683 - DNA, 13 bp, Artificial Sequence
  Oligonucleotide for detection of SNP TSC0002198
gtgatttgatatt

SEQ ID NO: 7684 - DNA, 13 bp, Artificial Sequence
  Oligonucleotide for detection of SNP TSC0002198
aatatcaaatcac

SEQ ID NO: 7685 - DNA, 13 bp, Artificial Sequence
  Oligonucleotide for detection of SNP TSC0002198
gtgattcgatatt

SEQ ID NO: 7686 - DNA, 13 bp, Artificial Sequence
  Oligonucleotide for detection of SNP TSC0002198
aatatcgaatcac

SEQ ID NO: 7687 - DNA, 13 bp, Artificial Sequence
  Oligonucleotide for detection of SNP TSC0002199
ttgggaaatagty

SEQ ID NO: 7688 - DNA, 13 bp, Artificial Sequence
  Oligonucleotide for detection of SNP TSC0002199
ractatttcccaa

SEQ ID NO: 7689 - DNA, 13 bp, Artificial Sequence
  Oligonucleotide for detection of SNP TSC0002199
ttgggagatagty

SEQ ID NO: 7690 - DNA, 13 bp, Artificial Sequence
  Oligonucleotide for detection of SNP TSC0002199
ractatctcccaa

SEQ ID NO: 7691 - DNA, 13 bp, Artificial Sequence
  Oligonucleotide for detection of SNP TSC0002200
ggtaatatagtgt

SEQ ID NO: 7692 - DNA, 13 bp, Artificial Sequence
  Oligonucleotide for detection of SNP TSC0002200
acactatattacc

SEQ ID NO: 7693 - DNA, 13 bp, Artificial Sequence
  Oligonucleotide for detection of SNP TSC0002200
ggtaatgtagtgt

SEQ ID NO: 7694 - DNA, 13 bp, Artificial Sequence
  Oligonucleotide for detection of SNP TSC0002200
acactacattacc

SEQ ID NO: 7695 - DNA, 13 bp, Artificial Sequence
  Oligonucleotide for detection of SNP TSC0002200
ggtaacgtagtgt

SEQ ID NO: 7696 - DNA, 13 bp, Artificial Sequence
  Oligonucleotide for detection of SNP TSC0002200
acactacgttacc

SEQ ID NO: 7697 - DNA, 13 bp, Artificial Sequence
  Oligonucleotide for detection of SNP TSC0002200
atattatgttgty

SEQ ID NO: 7698 - DNA, 13 bp, Artificial Sequence
  Oligonucleotide for detection of SNP TSC0002200
racaacataatat

SEQ ID NO: 7699 - DNA, 13 bp, Artificial Sequence
  Oligonucleotide for detection of SNP TSC0002200
atattacgttgty

SEQ ID NO: 7700 - DNA, 13 bp, Artificial Sequence
  Oligonucleotide for detection of SNP TSC0002200
racaacgtaatat

SEQ ID NO: 7701 - DNA, 13 bp, Artificial Sequence
  Oligonucleotide for detection of SNP TSC0002201
ggattagtttttt

SEQ ID NO: 7702 - DNA, 13 bp, Artificial Sequence
  Oligonucleotide for detection of SNP TSC0002201
aaaaaactaatcc

SEQ ID NO: 7703 - DNA, 13 bp, Artificial Sequence
  Oligonucleotide for detection of SNP TSC0002201
ggattaatttttt

SEQ ID NO: 7704 - DNA, 13 bp, Artificial Sequence
  Oligonucleotide for detection of SNP TSC0002201
aaaaaattaatcc

SEQ ID NO: 7705 - DNA, 13 bp, Artificial Sequence
  Oligonucleotide for detection of SNP TSC0002202
gatagtatttgaa

SEQ ID NO: 7706 - DNA, 13 bp, Artificial Sequence
  Oligonucleotide for detection of SNP TSC0002202
ttcaaatactatc

SEQ ID NO: 7707 - DNA, 13 bp, Artificial Sequence
  Oligonucleotide for detection of SNP TSC0002202
gatagtgtttgaa

SEQ ID NO: 7708 - DNA, 13 bp, Artificial Sequence
  Oligonucleotide for detection of SNP TSC0002202
ttcaaacactatc

SEQ ID NO: 7709 - DNA, 13 bp, Artificial Sequence
  Oligonucleotide for detection of SNP TSC0002203
tatagtgattaag

SEQ ID NO: 7710 - DNA, 13 bp, Artificial Sequence
  Oligonucleotide for detection of SNP TSC0002203
cttaatcactata

SEQ ID NO: 7711 - DNA, 13 bp, Artificial Sequence
  Oligonucleotide for detection of SNP TSC0002203
tatagtaattaag

SEQ ID NO: 7712 - DNA, 13 bp, Artificial Sequence
  Oligonucleotide for detection of SNP TSC0002203
cttaattactata

SEQ ID NO: 7713 - DNA, 13 bp, Artificial Sequence
  Oligonucleotide for detection of SNP TSC0002204
gagtaaatgtgaa

SEQ ID NO: 7714 - DNA, 13 bp, Artificial Sequence
  Oligonucleotide for detection of SNP TSC0002204
ttcacatttactc

SEQ ID NO: 7715 - DNA, 13 bp, Artificial Sequence
  Oligonucleotide for detection of SNP TSC0002204
gagtaagtgtgaa

SEQ ID NO: 7716 - DNA, 13 bp, Artificial Sequence
  Oligonucleotide for detection of SNP TSC0002204
ttcacacttactc

SEQ ID NO: 7717 - DNA, 13 bp, Artificial Sequence
  Oligonucleotide for detection of SNP TSC0002205
gaagttatattta

SEQ ID NO: 7718 - DNA, 13 bp, Artificial Sequence
  Oligonucleotide for detection of SNP TSC0002205
taaatataacttc

SEQ ID NO: 7719 - DNA, 13 bp, Artificial Sequence
  Oligonucleotide for detection of SNP TSC0002205
gaagttgtattta

SEQ ID NO: 7720 - DNA, 13 bp, Artificial Sequence
  Oligonucleotide for detection of SNP TSC0002205
taaatacaacttc

SEQ ID NO: 7721 - DNA, 13 bp, Artificial Sequence
  Oligonucleotide for detection of SNP TSC0002205
gaagtcgtattta

SEQ ID NO: 7722 - DNA, 13 bp, Artificial Sequence
  Oligonucleotide for detection of SNP TSC0002205
taaatacgacttc

SEQ ID NO: 7723 - DNA, 13 bp, Artificial Sequence
  Oligonucleotide for detection of SNP TSC0002205
tgaatatgattty

SEQ ID NO: 7724 - DNA, 13 bp, Artificial Sequence
  Oligonucleotide for detection of SNP TSC0002205
raaatcatattca

SEQ ID NO: 7725 - DNA, 13 bp, Artificial Sequence
  Oligonucleotide for detection of SNP TSC0002205
tgaatacgattty

SEQ ID NO: 7726 - DNA, 13 bp, Artificial Sequence
  Oligonucleotide for detection of SNP TSC0002205
raaatcgtattca

SEQ ID NO: 7727 - DNA, 13 bp, Artificial Sequence
  Oligonucleotide for detection of SNP TSC0002206
ggaaagatttgtt

SEQ ID NO: 7728 - DNA, 13 bp, Artificial Sequence
  Oligonucleotide for detection of SNP TSC0002206
aacaaatctttcc

SEQ ID NO: 7729 - DNA, 13 bp, Artificial Sequence
  Oligonucleotide for detection of SNP TSC0002206
ggaaaggtttgtt

SEQ ID NO: 7730 - DNA, 13 bp, Artificial Sequence
  Oligonucleotide for detection of SNP TSC0002206
aacaaacctttcc

SEQ ID NO: 7731 - DNA, 13 bp, Artificial Sequence
  Oligonucleotide for detection of SNP TSC0002206
ggaaagattcgtt

SEQ ID NO: 7732 - DNA, 13 bp, Artificial Sequence
  Oligonucleotide for detection of SNP TSC0002206
aacgaatctttcc

SEQ ID NO: 7733 - DNA, 13 bp, Artificial Sequence
  Oligonucleotide for detection of SNP TSC0002206
ggaaaggttcgtt

SEQ ID NO: 7734 - DNA, 13 bp, Artificial Sequence
  Oligonucleotide for detection of SNP TSC0002206
aacgaacctttcc

SEQ ID NO: 7735 - DNA, 13 bp, Artificial Sequence
  Oligonucleotide for detection of SNP TSC0002207
tattgagggttta

SEQ ID NO: 7736 - DNA, 13 bp, Artificial Sequence
  Oligonucleotide for detection of SNP TSC0002207
taaaccctcaata

SEQ ID NO: 7737 - DNA, 13 bp, Artificial Sequence
  Oligonucleotide for detection of SNP TSC0002207
tattgaaggttta

SEQ ID NO: 7738 - DNA, 13 bp, Artificial Sequence
  Oligonucleotide for detection of SNP TSC0002207
taaaccttcaata

SEQ ID NO: 7739 - DNA, 13 bp, Artificial Sequence
  Oligonucleotide for detection of SNP TSC0002208
tgtttgttataay

SEQ ID NO: 7740 - DNA, 13 bp, Artificial Sequence
  Oligonucleotide for detection of SNP TSC0002208
rttataacaaaca

SEQ ID NO: 7741 - DNA, 13 bp, Artificial Sequence
  Oligonucleotide for detection of SNP TSC0002208
tgtttggtataay

SEQ ID NO: 7742 - DNA, 13 bp, Artificial Sequence
  Oligonucleotide for detection of SNP TSC0002208
rttataccaaaca

SEQ ID NO: 7743 - DNA, 13 bp, Artificial Sequence
  Oligonucleotide for detection of SNP TSC0002208
gttataataagta

SEQ ID NO: 7744 - DNA, 13 bp, Artificial Sequence
  Oligonucleotide for detection of SNP TSC0002208
tacttattataac

SEQ ID NO: 7745 - DNA, 13 bp, Artificial Sequence
  Oligonucleotide for detection of SNP TSC0002208
gttatattaagta

SEQ ID NO: 7746 - DNA, 13 bp, Artificial Sequence
  Oligonucleotide for detection of SNP TSC0002208
tacttaatataac

SEQ ID NO: 7747 - DNA, 13 bp, Artificial Sequence
  Oligonucleotide for detection of SNP TSC0002209
atatgtgaaattt

SEQ ID NO: 7748 - DNA, 13 bp, Artificial Sequence
  Oligonucleotide for detection of SNP TSC0002209
aaatttcacatat

SEQ ID NO: 7749 - DNA, 13 bp, Artificial Sequence
  Oligonucleotide for detection of SNP TSC0002209
atatgtaaaattt

SEQ ID NO: 7750 - DNA, 13 bp, Artificial Sequence
  Oligonucleotide for detection of SNP TSC0002209
aaattttacatat

SEQ ID NO: 7751 - DNA, 13 bp, Artificial Sequence
  Oligonucleotide for detection of SNP TSC0002210
ttatatgaaattt

SEQ ID NO: 7752 - DNA, 13 bp, Artificial Sequence
  Oligonucleotide for detection of SNP TSC0002210
aaatttcatataa

SEQ ID NO: 7753 - DNA, 13 bp, Artificial Sequence
  Oligonucleotide for detection of SNP TSC0002210
ttatataaaattt

SEQ ID NO: 7754 - DNA, 13 bp, Artificial Sequence
  Oligonucleotide for detection of SNP TSC0002210
aaattttatataa

SEQ ID NO: 7755 - DNA, 13 bp, Artificial Sequence
  Oligonucleotide for detection of SNP TSC0002211
tttttttagtttt

SEQ ID NO: 7756 - DNA, 13 bp, Artificial Sequence
  Oligonucleotide for detection of SNP TSC0002211
aaaactaaaaaaa

SEQ ID NO: 7757 - DNA, 13 bp, Artificial Sequence
  Oligonucleotide for detection of SNP TSC0002211
ttttttgagtttt

SEQ ID NO: 7758 - DNA, 13 bp, Artificial Sequence
  Oligonucleotide for detection of SNP TSC0002211
aaaactcaaaaaa

SEQ ID NO: 7759 - DNA, 13 bp, Artificial Sequence
  Oligonucleotide for detection of SNP TSC0002211
aaaattaaaaaaa

SEQ ID NO: 7760 - DNA, 13 bp, Artificial Sequence
  Oligonucleotide for detection of SNP TSC0002211
tttttttaatttt

SEQ ID NO: 7761 - DNA, 13 bp, Artificial Sequence
  Oligonucleotide for detection of SNP TSC0002211
aaaatttaaaaaa

SEQ ID NO: 7762 - DNA, 13 bp, Artificial Sequence
  Oligonucleotide for detection of SNP TSC0002211
ttttttaaatttt

SEQ ID NO: 7763 - DNA, 13 bp, Artificial Sequence
  Oligonucleotide for detection of SNP TSC0002212
gaataaaaaatgg

SEQ ID NO: 7764 - DNA, 13 bp, Artificial Sequence
  Oligonucleotide for detection of SNP TSC0002212
ccattttttattc

SEQ ID NO: 7765 - DNA, 13 bp, Artificial Sequence
  Oligonucleotide for detection of SNP TSC0002212
gaataagaaatgg

SEQ ID NO: 7766 - DNA, 13 bp, Artificial Sequence
  Oligonucleotide for detection of SNP TSC0002212
ccatttcttattc

SEQ ID NO: 7767 - DNA, 13 bp, Artificial Sequence
  Oligonucleotide for detection of SNP TSC0002213
tttataattttta

SEQ ID NO: 7768 - DNA, 13 bp, Artificial Sequence
  Oligonucleotide for detection of SNP TSC0002213
taaaaattataaa

SEQ ID NO: 7769 - DNA, 13 bp, Artificial Sequence
  Oligonucleotide for detection of SNP TSC0002213
tttatagttttta

SEQ ID NO: 7770 - DNA, 13 bp, Artificial Sequence
  Oligonucleotide for detection of SNP TSC0002213
taaaaactataaa

SEQ ID NO: 7771 - DNA, 13 bp, Artificial Sequence
  Oligonucleotide for detection of SNP TSC0002214
ataatatgaaggy

SEQ ID NO: 7772 - DNA, 13 bp, Artificial Sequence
  Oligonucleotide for detection of SNP TSC0002214
rccttcatattat

SEQ ID NO: 7773 - DNA, 13 bp, Artificial Sequence
  Oligonucleotide for detection of SNP TSC0002214
ataataggaaggy

SEQ ID NO: 7774 - DNA, 13 bp, Artificial Sequence
  Oligonucleotide for detection of SNP TSC0002214
rccttcctattat

SEQ ID NO: 7775 - DNA, 13 bp, Artificial Sequence
  Oligonucleotide for detection of SNP TSC0002214
gtttttatattat

SEQ ID NO: 7776 - DNA, 13 bp, Artificial Sequence
  Oligonucleotide for detection of SNP TSC0002214
ataatataaaaac

SEQ ID NO: 7777 - DNA, 13 bp, Artificial Sequence
  Oligonucleotide for detection of SNP TSC0002214
gtttttttattat

SEQ ID NO: 7778 - DNA, 13 bp, Artificial Sequence
  Oligonucleotide for detection of SNP TSC0002214
ataataaaaaaac

SEQ ID NO: 7779 - DNA, 13 bp, Artificial Sequence
  Oligonucleotide for detection of SNP TSC0002216
ttttttatttaty

SEQ ID NO: 7780 - DNA, 13 bp, Artificial Sequence
  Oligonucleotide for detection of SNP TSC0002216
rataaataaaaaa

SEQ ID NO: 7781 - DNA, 13 bp, Artificial Sequence
  Oligonucleotide for detection of SNP TSC0002216
ttttttttttaty

SEQ ID NO: 7782 - DNA, 13 bp, Artificial Sequence
  Oligonucleotide for detection of SNP TSC0002216
rataaaaaaaaaa

SEQ ID NO: 7783 - DNA, 13 bp, Artificial Sequence
  Oligonucleotide for detection of SNP TSC0002216
gatgaatgaggag

SEQ ID NO: 7784 - DNA, 13 bp, Artificial Sequence
  Oligonucleotide for detection of SNP TSC0002216
ctcctcattcatc

SEQ ID NO: 7785 - DNA, 13 bp, Artificial Sequence
  Oligonucleotide for detection of SNP TSC0002216
gatgaaagaggag

SEQ ID NO: 7786 - DNA, 13 bp, Artificial Sequence
  Oligonucleotide for detection of SNP TSC0002216
ctcctctttcatc

SEQ ID NO: 7787 - DNA, 13 bp, Artificial Sequence
  Oligonucleotide for detection of SNP TSC0002217
ggggtgtgggata

SEQ ID NO: 7788 - DNA, 13 bp, Artificial Sequence
  Oligonucleotide for detection of SNP TSC0002217
tatcccacacccc

SEQ ID NO: 7789 - DNA, 13 bp, Artificial Sequence
  Oligonucleotide for detection of SNP TSC0002217
ggggtgcgggata

SEQ ID NO: 7790 - DNA, 13 bp, Artificial Sequence
  Oligonucleotide for detection of SNP TSC0002217
tatcccgcacccc

SEQ ID NO: 7791 - DNA, 13 bp, Artificial Sequence
  Oligonucleotide for detection of SNP TSC0002217
tgttttgtattty

SEQ ID NO: 7792 - DNA, 13 bp, Artificial Sequence
  Oligonucleotide for detection of SNP TSC0002217
raaatacaaaaca

SEQ ID NO: 7793 - DNA, 13 bp, Artificial Sequence
  Oligonucleotide for detection of SNP TSC0002217
tgttttatattty

SEQ ID NO: 7794 - DNA, 13 bp, Artificial Sequence
  Oligonucleotide for detection of SNP TSC0002217
raaatataaaaca

SEQ ID NO: 7795 - DNA, 13 bp, Artificial Sequence
  Oligonucleotide for detection of SNP TSC0002217
tgtttcgtattty

SEQ ID NO: 7796 - DNA, 13 bp, Artificial Sequence
  Oligonucleotide for detection of SNP TSC0002217
raaatacgaaaca

SEQ ID NO: 7797 - DNA, 13 bp, Artificial Sequence
  Oligonucleotide for detection of SNP TSC0002218
aattgtatattta

SEQ ID NO: 7798 - DNA, 13 bp, Artificial Sequence
  Oligonucleotide for detection of SNP TSC0002218
taaatatacaatt

SEQ ID NO: 7799 - DNA, 13 bp, Artificial Sequence
  Oligonucleotide for detection of SNP TSC0002218
aattgtttattta

SEQ ID NO: 7800 - DNA, 13 bp, Artificial Sequence
  Oligonucleotide for detection of SNP TSC0002218
taaataaacaatt

SEQ ID NO: 7801 - DNA, 13 bp, Artificial Sequence
  Oligonucleotide for detection of SNP TSC0002218
taggtatgtaatt

SEQ ID NO: 7802 - DNA, 13 bp, Artificial Sequence
  Oligonucleotide for detection of SNP TSC0002218
aattacataccta

SEQ ID NO: 7803 - DNA, 13 bp, Artificial Sequence
  Oligonucleotide for detection of SNP TSC0002218
taggtaagtaatt

SEQ ID NO: 7804 - DNA, 13 bp, Artificial Sequence
  Oligonucleotide for detection of SNP TSC0002218
aattacttaccta

SEQ ID NO: 7805 - DNA, 13 bp, Artificial Sequence
  Oligonucleotide for detection of SNP TSC0002219
tgggaagtaatat

SEQ ID NO: 7806 - DNA, 13 bp, Artificial Sequence
  Oligonucleotide for detection of SNP TSC0002219
atattacttccca

SEQ ID NO: 7807 - DNA, 13 bp, Artificial Sequence
  Oligonucleotide for detection of SNP TSC0002219
tgggaaataatat

SEQ ID NO: 7808 - DNA, 13 bp, Artificial Sequence
  Oligonucleotide for detection of SNP TSC0002219
atattatttccca

SEQ ID NO: 7809 - DNA, 13 bp, Artificial Sequence
  Oligonucleotide for detection of SNP TSC0002221
tttaaagttagaa

SEQ ID NO: 7810 - DNA, 13 bp, Artificial Sequence
  Oligonucleotide for detection of SNP TSC0002221
ttctaactttaaa

SEQ ID NO: 7811 - DNA, 13 bp, Artificial Sequence
  Oligonucleotide for detection of SNP TSC0002221
tttaaaattagaa

SEQ ID NO: 7812 - DNA, 13 bp, Artificial Sequence
  Oligonucleotide for detection of SNP TSC0002221
ttctaattttaaa

SEQ ID NO: 7813 - DNA, 13 bp, Artificial Sequence
  Oligonucleotide for detection of SNP TSC0002222
attatgatttttt

SEQ ID NO: 7814 - DNA, 13 bp, Artificial Sequence
  Oligonucleotide for detection of SNP TSC0002222
aaaaaatcataat

SEQ ID NO: 7815 - DNA, 13 bp, Artificial Sequence
  Oligonucleotide for detection of SNP TSC0002222
attatggtttttt

SEQ ID NO: 7816 - DNA, 13 bp, Artificial Sequence
  Oligonucleotide for detection of SNP TSC0002222
aaaaaaccataat

SEQ ID NO: 7817 - DNA, 13 bp, Artificial Sequence
  Oligonucleotide for detection of SNP TSC0002223
aggtattgagatg

SEQ ID NO: 7818 - DNA, 13 bp, Artificial Sequence
  Oligonucleotide for detection of SNP TSC0002223
catctcaatacct

SEQ ID NO: 7819 - DNA, 13 bp, Artificial Sequence
  Oligonucleotide for detection of SNP TSC0002223
aggtatcgagatg

SEQ ID NO: 7820 - DNA, 13 bp, Artificial Sequence
  Oligonucleotide for detection of SNP TSC0002223
catctcgatacct

SEQ ID NO: 7821 - DNA, 13 bp, Artificial Sequence
  Oligonucleotide for detection of SNP TSC0002223
tattttggtgttt

SEQ ID NO: 7822 - DNA, 13 bp, Artificial Sequence
  Oligonucleotide for detection of SNP TSC0002223
aaacaccaaaata

SEQ ID NO: 7823 - DNA, 13 bp, Artificial Sequence
  Oligonucleotide for detection of SNP TSC0002223
tattttagtgttt

SEQ ID NO: 7824 - DNA, 13 bp, Artificial Sequence
  Oligonucleotide for detection of SNP TSC0002223
aaacactaaaata

SEQ ID NO: 7825 - DNA, 13 bp, Artificial Sequence
  Oligonucleotide for detection of SNP TSC0002223
tatttcggtgttt

SEQ ID NO: 7826 - DNA, 13 bp, Artificial Sequence
  Oligonucleotide for detection of SNP TSC0002223
aaacaccgaaata

SEQ ID NO: 7827 - DNA, 13 bp, Artificial Sequence
  Oligonucleotide for detection of SNP TSC0002225
gaaaataatatgy

SEQ ID NO: 7828 - DNA, 13 bp, Artificial Sequence
  Oligonucleotide for detection of SNP TSC0002225
rcatattattttc

SEQ ID NO: 7829 - DNA, 13 bp, Artificial Sequence
  Oligonucleotide for detection of SNP TSC0002225
gaaaatgatatgy

SEQ ID NO: 7830 - DNA, 13 bp, Artificial Sequence
  Oligonucleotide for detection of SNP TSC0002225
rcatatcattttc

SEQ ID NO: 7831 - DNA, 13 bp, Artificial Sequence
  Oligonucleotide for detection of SNP TSC0002225
gaaaacgatatgy

SEQ ID NO: 7832 - DNA, 13 bp, Artificial Sequence
  Oligonucleotide for detection of SNP TSC0002225
rcatatcgttttc

SEQ ID NO: 7833 - DNA, 13 bp, Artificial Sequence
  Oligonucleotide for detection of SNP TSC0002226
ttgtttaaagatt

SEQ ID NO: 7834 - DNA, 13 bp, Artificial Sequence
  Oligonucleotide for detection of SNP TSC0002226
aatctttaaacaa

SEQ ID NO: 7835 - DNA, 13 bp, Artificial Sequence
  Oligonucleotide for detection of SNP TSC0002226
ttgttttaagatt

SEQ ID NO: 7836 - DNA, 13 bp, Artificial Sequence
  Oligonucleotide for detection of SNP TSC0002226
aatcttaaaacaa

SEQ ID NO: 7837 - DNA, 13 bp, Artificial Sequence
  Oligonucleotide for detection of SNP TSC0002226
aatttttgaataa

SEQ ID NO: 7838 - DNA, 13 bp, Artificial Sequence
  Oligonucleotide for detection of SNP TSC0002226
ttattcaaaaatt

SEQ ID NO: 7839 - DNA, 13 bp, Artificial Sequence
  Oligonucleotide for detection of SNP TSC0002226
aattttggaataa

SEQ ID NO: 7840 - DNA, 13 bp, Artificial Sequence
  Oligonucleotide for detection of SNP TSC0002226
ttattccaaaatt

SEQ ID NO: 7841 - DNA, 13 bp, Artificial Sequence
  Oligonucleotide for detection of SNP TSC0002227
tgataaaaagata

SEQ ID NO: 7842 - DNA, 13 bp, Artificial Sequence
  Oligonucleotide for detection of SNP TSC0002227
tatctttttatca

SEQ ID NO: 7843 - DNA, 13 bp, Artificial Sequence
  Oligonucleotide for detection of SNP TSC0002227
tgataataagata

SEQ ID NO: 7844 - DNA, 13 bp, Artificial Sequence
  Oligonucleotide for detection of SNP TSC0002227
tatcttattatca

SEQ ID NO: 7845 - DNA, 13 bp, Artificial Sequence
  Oligonucleotide for detection of SNP TSC0002227
cgataaaaagata

SEQ ID NO: 7846 - DNA, 13 bp, Artificial Sequence
  Oligonucleotide for detection of SNP TSC0002227
tatctttttatcg

SEQ ID NO: 7847 - DNA, 13 bp, Artificial Sequence
  Oligonucleotide for detection of SNP TSC0002227
cgataataagata

SEQ ID NO: 7848 - DNA, 13 bp, Artificial Sequence
  Oligonucleotide for detection of SNP TSC0002227
tatcttattatcg

SEQ ID NO: 7849 - DNA, 13 bp, Artificial Sequence
  Oligonucleotide for detection of SNP TSC0002227
tgtttttttattg

SEQ ID NO: 7850 - DNA, 13 bp, Artificial Sequence
  Oligonucleotide for detection of SNP TSC0002227
caataaaaaaaca

SEQ ID NO: 7851 - DNA, 13 bp, Artificial Sequence
  Oligonucleotide for detection of SNP TSC0002227
tgttttattattg

SEQ ID NO: 7852 - DNA, 13 bp, Artificial Sequence
  Oligonucleotide for detection of SNP TSC0002227
caataataaaaca

SEQ ID NO: 7853 - DNA, 13 bp, Artificial Sequence
  Oligonucleotide for detection of SNP TSC0002227
tgtttttttatcg

SEQ ID NO: 7854 - DNA, 13 bp, Artificial Sequence
  Oligonucleotide for detection of SNP TSC0002227
cgataaaaaaaca

SEQ ID NO: 7855 - DNA, 13 bp, Artificial Sequence
  Oligonucleotide for detection of SNP TSC0002227
tgttttattatcg

SEQ ID NO: 7856 - DNA, 13 bp, Artificial Sequence
  Oligonucleotide for detection of SNP TSC0002227
cgataataaaaca

SEQ ID NO: 7857 - DNA, 13 bp, Artificial Sequence
  Oligonucleotide for detection of SNP TSC0002228
ttatttgaagttt

SEQ ID NO: 7858 - DNA, 13 bp, Artificial Sequence
  Oligonucleotide for detection of SNP TSC0002228
aaacttcaaataa

SEQ ID NO: 7859 - DNA, 13 bp, Artificial Sequence
  Oligonucleotide for detection of SNP TSC0002228
ttatttaaagttt

SEQ ID NO: 7860 - DNA, 13 bp, Artificial Sequence
  Oligonucleotide for detection of SNP TSC0002228
aaactttaaataa

SEQ ID NO: 7861 - DNA, 13 bp, Artificial Sequence
  Oligonucleotide for detection of SNP TSC0002230
ttttatatagatg

SEQ ID NO: 7862 - DNA, 13 bp, Artificial Sequence
  Oligonucleotide for detection of SNP TSC0002230
catctatataaaa

SEQ ID NO: 7863 - DNA, 13 bp, Artificial Sequence
  Oligonucleotide for detection of SNP TSC0002230
ttttatgtagatg

SEQ ID NO: 7864 - DNA, 13 bp, Artificial Sequence
  Oligonucleotide for detection of SNP TSC0002230
catctacataaaa

SEQ ID NO: 7865 - DNA, 13 bp, Artificial Sequence
  Oligonucleotide for detection of SNP TSC0002231
taaattggagagt

SEQ ID NO: 7866 - DNA, 13 bp, Artificial Sequence
  Oligonucleotide for detection of SNP TSC0002231
actctccaattta

SEQ ID NO: 7867 - DNA, 13 bp, Artificial Sequence
  Oligonucleotide for detection of SNP TSC0002231
taaattagagagt

SEQ ID NO: 7868 - DNA, 13 bp, Artificial Sequence
  Oligonucleotide for detection of SNP TSC0002231
actctctaattta

SEQ ID NO: 7869 - DNA, 13 bp, Artificial Sequence
  Oligonucleotide for detection of SNP TSC0002232
taaagtgtataaa

SEQ ID NO: 7870 - DNA, 13 bp, Artificial Sequence
  Oligonucleotide for detection of SNP TSC0002232
tttatacacttta

SEQ ID NO: 7871 - DNA, 13 bp, Artificial Sequence
  Oligonucleotide for detection of SNP TSC0002232
taaagtatataaa

SEQ ID NO: 7872 - DNA, 13 bp, Artificial Sequence
  Oligonucleotide for detection of SNP TSC0002232
tttatatacttta

SEQ ID NO: 7873 - DNA, 13 bp, Artificial Sequence
  Oligonucleotide for detection of SNP TSC0002233
tatatatgtgtta

SEQ ID NO: 7874 - DNA, 13 bp, Artificial Sequence
  Oligonucleotide for detection of SNP TSC0002233
taacacatatata

SEQ ID NO: 7875 - DNA, 13 bp, Artificial Sequence
  Oligonucleotide for detection of SNP TSC0002233
tatatacgtgtta

SEQ ID NO: 7876 - DNA, 13 bp, Artificial Sequence
  Oligonucleotide for detection of SNP TSC0002233
taacacgtatata

SEQ ID NO: 7877 - DNA, 13 bp, Artificial Sequence
  Oligonucleotide for detection of SNP TSC0002233
tggtatgtgtata

SEQ ID NO: 7878 - DNA, 13 bp, Artificial Sequence
  Oligonucleotide for detection of SNP TSC0002233
tatacacatacca

SEQ ID NO: 7879 - DNA, 13 bp, Artificial Sequence
  Oligonucleotide for detection of SNP TSC0002233
tggtatatgtata

SEQ ID NO: 7880 - DNA, 13 bp, Artificial Sequence
  Oligonucleotide for detection of SNP TSC0002233
tatacatatacca

SEQ ID NO: 7881 - DNA, 13 bp, Artificial Sequence
  Oligonucleotide for detection of SNP TSC0002233
tggtacgtgtata

SEQ ID NO: 7882 - DNA, 13 bp, Artificial Sequence
  Oligonucleotide for detection of SNP TSC0002233
tatacacgtacca

SEQ ID NO: 7883 - DNA, 13 bp, Artificial Sequence
  Oligonucleotide for detection of SNP TSC0002234
tgaggaatttagg

SEQ ID NO: 7884 - DNA, 13 bp, Artificial Sequence
  Oligonucleotide for detection of SNP TSC0002234
cctaaattcctca

SEQ ID NO: 7885 - DNA, 13 bp, Artificial Sequence
  Oligonucleotide for detection of SNP TSC0002234
tgaggagtttagg

SEQ ID NO: 7886 - DNA, 13 bp, Artificial Sequence
  Oligonucleotide for detection of SNP TSC0002234
cctaaactcctca

SEQ ID NO: 7887 - DNA, 13 bp, Artificial Sequence
  Oligonucleotide for detection of SNP TSC0002236
ttagaggagtttt

SEQ ID NO: 7888 - DNA, 13 bp, Artificial Sequence
  Oligonucleotide for detection of SNP TSC0002236
aaaactcctctaa

SEQ ID NO: 7889 - DNA, 13 bp, Artificial Sequence
  Oligonucleotide for detection of SNP TSC0002236
ttagagaagtttt

SEQ ID NO: 7890 - DNA, 13 bp, Artificial Sequence
  Oligonucleotide for detection of SNP TSC0002236
aaaacttctctaa

SEQ ID NO: 7891 - DNA, 13 bp, Artificial Sequence
  Oligonucleotide for detection of SNP TSC0002237
ttatattgtgttt

SEQ ID NO: 7892 - DNA, 13 bp, Artificial Sequence
  Oligonucleotide for detection of SNP TSC0002237
aaacacaatataa

SEQ ID NO: 7893 - DNA, 13 bp, Artificial Sequence
  Oligonucleotide for detection of SNP TSC0002237
ttatatcgtgttt

SEQ ID NO: 7894 - DNA, 13 bp, Artificial Sequence
  Oligonucleotide for detection of SNP TSC0002237
aaacacgatataa

SEQ ID NO: 7895 - DNA, 13 bp, Artificial Sequence
  Oligonucleotide for detection of SNP TSC0002237
aggtatgatgtga

SEQ ID NO: 7896 - DNA, 13 bp, Artificial Sequence
  Oligonucleotide for detection of SNP TSC0002237
tcacatcatacct

SEQ ID NO: 7897 - DNA, 13 bp, Artificial Sequence
  Oligonucleotide for detection of SNP TSC0002237
aggtataatgtga

SEQ ID NO: 7898 - DNA, 13 bp, Artificial Sequence
  Oligonucleotide for detection of SNP TSC0002237
tcacattatacct

SEQ ID NO: 7899 - DNA, 13 bp, Artificial Sequence
  Oligonucleotide for detection of SNP TSC0002237
aggtacgatgtga

SEQ ID NO: 7900 - DNA, 13 bp, Artificial Sequence
  Oligonucleotide for detection of SNP TSC0002237
tcacatcgtacct

SEQ ID NO: 7901 - DNA, 13 bp, Artificial Sequence
  Oligonucleotide for detection of SNP TSC0002239
aatatagagtttt

SEQ ID NO: 7902 - DNA, 13 bp, Artificial Sequence
  Oligonucleotide for detection of SNP TSC0002239
aaaactctatatt

SEQ ID NO: 7903 - DNA, 13 bp, Artificial Sequence
  Oligonucleotide for detection of SNP TSC0002239
aatataaagtttt

SEQ ID NO: 7904 - DNA, 13 bp, Artificial Sequence
  Oligonucleotide for detection of SNP TSC0002239
aaaactttatatt

SEQ ID NO: 7905 - DNA, 13 bp, Artificial Sequence
  Oligonucleotide for detection of SNP TSC0002240
tatgtaatagaty

SEQ ID NO: 7906 - DNA, 13 bp, Artificial Sequence
  Oligonucleotide for detection of SNP TSC0002240
ratctattacata

SEQ ID NO: 7907 - DNA, 13 bp, Artificial Sequence
  Oligonucleotide for detection of SNP TSC0002240
tatgtattagaty

SEQ ID NO: 7908 - DNA, 13 bp, Artificial Sequence
  Oligonucleotide for detection of SNP TSC0002240
ratctaatacata

SEQ ID NO: 7909 - DNA, 13 bp, Artificial Sequence
  Oligonucleotide for detection of SNP TSC0002240
gatttattatata

SEQ ID NO: 7910 - DNA, 13 bp, Artificial Sequence
  Oligonucleotide for detection of SNP TSC0002240
tatataataaatc

SEQ ID NO: 7911 - DNA, 13 bp, Artificial Sequence
  Oligonucleotide for detection of SNP TSC0002240
gatttaatatata

SEQ ID NO: 7912 - DNA, 13 bp, Artificial Sequence
  Oligonucleotide for detection of SNP TSC0002240
tatatattaaatc

SEQ ID NO: 7913 - DNA, 13 bp, Artificial Sequence
  Oligonucleotide for detection of SNP TSC0002241
tatgatattttta

SEQ ID NO: 7914 - DNA, 13 bp, Artificial Sequence
  Oligonucleotide for detection of SNP TSC0002241
taaaaatatcata

SEQ ID NO: 7915 - DNA, 13 bp, Artificial Sequence
  Oligonucleotide for detection of SNP TSC0002241
tatgattttttta

SEQ ID NO: 7916 - DNA, 13 bp, Artificial Sequence
  Oligonucleotide for detection of SNP TSC0002241
taaaaaaatcata

SEQ ID NO: 7917 - DNA, 13 bp, Artificial Sequence
  Oligonucleotide for detection of SNP TSC0002241
taaaaatgttatg

SEQ ID NO: 7918 - DNA, 13 bp, Artificial Sequence
  Oligonucleotide for detection of SNP TSC0002241
cataacattttta

SEQ ID NO: 7919 - DNA, 13 bp, Artificial Sequence
  Oligonucleotide for detection of SNP TSC0002241
taaaaaagttatg

SEQ ID NO: 7920 - DNA, 13 bp, Artificial Sequence
  Oligonucleotide for detection of SNP TSC0002241
cataactttttta

SEQ ID NO: 7921 - DNA, 13 bp, Artificial Sequence
  Oligonucleotide for detection of SNP TSC0002243
atttgttgggagt

SEQ ID NO: 7922 - DNA, 13 bp, Artificial Sequence
  Oligonucleotide for detection of SNP TSC0002243
actcccaacaaat

SEQ ID NO: 7923 - DNA, 13 bp, Artificial Sequence
  Oligonucleotide for detection of SNP TSC0002243
atttgtggggagt

SEQ ID NO: 7924 - DNA, 13 bp, Artificial Sequence
  Oligonucleotide for detection of SNP TSC0002243
actccccacaaat

SEQ ID NO: 7925 - DNA, 13 bp, Artificial Sequence
  Oligonucleotide for detection of SNP TSC0002243
atttttaataaat

SEQ ID NO: 7926 - DNA, 13 bp, Artificial Sequence
  Oligonucleotide for detection of SNP TSC0002243
atttattaaaaat

SEQ ID NO: 7927 - DNA, 13 bp, Artificial Sequence
  Oligonucleotide for detection of SNP TSC0002243
attttttataaat

SEQ ID NO: 7928 - DNA, 13 bp, Artificial Sequence
  Oligonucleotide for detection of SNP TSC0002243
atttataaaaaat

SEQ ID NO: 7929 - DNA, 13 bp, Artificial Sequence
  Oligonucleotide for detection of SNP TSC0002244
tgtattaaagttg

SEQ ID NO: 7930 - DNA, 13 bp, Artificial Sequence
  Oligonucleotide for detection of SNP TSC0002244
caactttaataca

SEQ ID NO: 7931 - DNA, 13 bp, Artificial Sequence
  Oligonucleotide for detection of SNP TSC0002244
tgtattgaagttg

SEQ ID NO: 7932 - DNA, 13 bp, Artificial Sequence
  Oligonucleotide for detection of SNP TSC0002244
caacttcaataca

SEQ ID NO: 7933 - DNA, 13 bp, Artificial Sequence
  Oligonucleotide for detection of SNP TSC0002244
tgtatcgaagttg

SEQ ID NO: 7934 - DNA, 13 bp, Artificial Sequence
  Oligonucleotide for detection of SNP TSC0002244
caacttcgataca

SEQ ID NO: 7935 - DNA, 13 bp, Artificial Sequence
  Oligonucleotide for detection of SNP TSC0002244
taattttggtata

SEQ ID NO: 7936 - DNA, 13 bp, Artificial Sequence
  Oligonucleotide for detection of SNP TSC0002244
tataccaaaatta

SEQ ID NO: 7937 - DNA, 13 bp, Artificial Sequence
  Oligonucleotide for detection of SNP TSC0002244
taatttcggtata

SEQ ID NO: 7938 - DNA, 13 bp, Artificial Sequence
  Oligonucleotide for detection of SNP TSC0002244
tataccgaaatta

SEQ ID NO: 7939 - DNA, 13 bp, Artificial Sequence
  Oligonucleotide for detection of SNP TSC0002245
taattatggggta

SEQ ID NO: 7940 - DNA, 13 bp, Artificial Sequence
  Oligonucleotide for detection of SNP TSC0002245
taccccataatta

SEQ ID NO: 7941 - DNA, 13 bp, Artificial Sequence
  Oligonucleotide for detection of SNP TSC0002245
taattacggggta

SEQ ID NO: 7942 - DNA, 13 bp, Artificial Sequence
  Oligonucleotide for detection of SNP TSC0002245
taccccgtaatta

SEQ ID NO: 7943 - DNA, 13 bp, Artificial Sequence
  Oligonucleotide for detection of SNP TSC0002245
tgttttgtaatta

SEQ ID NO: 7944 - DNA, 13 bp, Artificial Sequence
  Oligonucleotide for detection of SNP TSC0002245
taattacaaaaca

SEQ ID NO: 7945 - DNA, 13 bp, Artificial Sequence
  Oligonucleotide for detection of SNP TSC0002245
tgttttataatta

SEQ ID NO: 7946 - DNA, 13 bp, Artificial Sequence
  Oligonucleotide for detection of SNP TSC0002245
taattataaaaca

SEQ ID NO: 7947 - DNA, 13 bp, Artificial Sequence
  Oligonucleotide for detection of SNP TSC0002245
tgtttcgtaatta

SEQ ID NO: 7948 - DNA, 13 bp, Artificial Sequence
  Oligonucleotide for detection of SNP TSC0002245
taattacgaaaca

SEQ ID NO: 7949 - DNA, 13 bp, Artificial Sequence
  Oligonucleotide for detection of SNP TSC0002247
gattttagaattt

SEQ ID NO: 7950 - DNA, 13 bp, Artificial Sequence
  Oligonucleotide for detection of SNP TSC0002247
aaattctaaaatc

SEQ ID NO: 7951 - DNA, 13 bp, Artificial Sequence
  Oligonucleotide for detection of SNP TSC0002247
gattttggaattt

SEQ ID NO: 7952 - DNA, 13 bp, Artificial Sequence
  Oligonucleotide for detection of SNP TSC0002247
aaattccaaaatc

SEQ ID NO: 7953 - DNA, 13 bp, Artificial Sequence
  Oligonucleotide for detection of SNP TSC0002247
gatttcggaattt

SEQ ID NO: 7954 - DNA, 13 bp, Artificial Sequence
  Oligonucleotide for detection of SNP TSC0002247
aaattccgaaatc

SEQ ID NO: 7955 - DNA, 13 bp, Artificial Sequence
  Oligonucleotide for detection of SNP TSC0002247
agattttgagaty

SEQ ID NO: 7956 - DNA, 13 bp, Artificial Sequence
  Oligonucleotide for detection of SNP TSC0002247
ratctcaaaatct

SEQ ID NO: 7957 - DNA, 13 bp, Artificial Sequence
  Oligonucleotide for detection of SNP TSC0002247
agatttcgagaty

SEQ ID NO: 7958 - DNA, 13 bp, Artificial Sequence
  Oligonucleotide for detection of SNP TSC0002247
ratctcgaaatct

SEQ ID NO: 7959 - DNA, 13 bp, Artificial Sequence
  Oligonucleotide for detection of SNP TSC0002248
taattagtaagay

SEQ ID NO: 7960 - DNA, 13 bp, Artificial Sequence
  Oligonucleotide for detection of SNP TSC0002248
rtcttactaatta

SEQ ID NO: 7961 - DNA, 13 bp, Artificial Sequence
  Oligonucleotide for detection of SNP TSC0002248
taattaataagay

SEQ ID NO: 7962 - DNA, 13 bp, Artificial Sequence
  Oligonucleotide for detection of SNP TSC0002248
rtcttattaatta

SEQ ID NO: 7963 - DNA, 13 bp, Artificial Sequence
  Oligonucleotide for detection of SNP TSC0002249
ttgggtgtggtgg

SEQ ID NO: 7964 - DNA, 13 bp, Artificial Sequence
  Oligonucleotide for detection of SNP TSC0002249
ccaccacacccaa

SEQ ID NO: 7965 - DNA, 13 bp, Artificial Sequence
  Oligonucleotide for detection of SNP TSC0002249
ttgggtatggtgg

SEQ ID NO: 7966 - DNA, 13 bp, Artificial Sequence
  Oligonucleotide for detection of SNP TSC0002249
ccaccatacccaa

SEQ ID NO: 7967 - DNA, 13 bp, Artificial Sequence
  Oligonucleotide for detection of SNP TSC0002251
atattatgtattg

SEQ ID NO: 7968 - DNA, 13 bp, Artificial Sequence
  Oligonucleotide for detection of SNP TSC0002251
caatacataatat

SEQ ID NO: 7969 - DNA, 13 bp, Artificial Sequence
  Oligonucleotide for detection of SNP TSC0002251
atattacgtattg

SEQ ID NO: 7970 - DNA, 13 bp, Artificial Sequence
  Oligonucleotide for detection of SNP TSC0002251
caatacgtaatat

SEQ ID NO: 7971 - DNA, 13 bp, Artificial Sequence
  Oligonucleotide for detection of SNP TSC0002251
taatgtgtagtgt

SEQ ID NO: 7972 - DNA, 13 bp, Artificial Sequence
  Oligonucleotide for detection of SNP TSC0002251
acactacacatta

SEQ ID NO: 7973 - DNA, 13 bp, Artificial Sequence
  Oligonucleotide for detection of SNP TSC0002251
taatgtatagtgt

SEQ ID NO: 7974 - DNA, 13 bp, Artificial Sequence
  Oligonucleotide for detection of SNP TSC0002251
acactatacatta

SEQ ID NO: 7975 - DNA, 13 bp, Artificial Sequence
  Oligonucleotide for detection of SNP TSC0002251
taatgcgtagtgt

SEQ ID NO: 7976 - DNA, 13 bp, Artificial Sequence
  Oligonucleotide for detection of SNP TSC0002251
acactacgcatta

SEQ ID NO: 7977 - DNA, 13 bp, Artificial Sequence
  Oligonucleotide for detection of SNP TSC0002252
tgttttaggtagg

SEQ ID NO: 7978 - DNA, 13 bp, Artificial Sequence
  Oligonucleotide for detection of SNP TSC0002252
cctacctaaaaca

SEQ ID NO: 7979 - DNA, 13 bp, Artificial Sequence
  Oligonucleotide for detection of SNP TSC0002252
tgttttgggtagg

SEQ ID NO: 7980 - DNA, 13 bp, Artificial Sequence
  Oligonucleotide for detection of SNP TSC0002252
cctacccaaaaca

SEQ ID NO: 7981 - DNA, 13 bp, Artificial Sequence
  Oligonucleotide for detection of SNP TSC0002253
agaaattattagg

SEQ ID NO: 7982 - DNA, 13 bp, Artificial Sequence
  Oligonucleotide for detection of SNP TSC0002253
cctaataatttct

SEQ ID NO: 7983 - DNA, 13 bp, Artificial Sequence
  Oligonucleotide for detection of SNP TSC0002253
agaaatgattagg

SEQ ID NO: 7984 - DNA, 13 bp, Artificial Sequence
  Oligonucleotide for detection of SNP TSC0002253
cctaatcatttct

SEQ ID NO: 7985 - DNA, 13 bp, Artificial Sequence
  Oligonucleotide for detection of SNP TSC0002253
tttagtaattttt

SEQ ID NO: 7986 - DNA, 13 bp, Artificial Sequence
  Oligonucleotide for detection of SNP TSC0002253
aaaaattactaaa

SEQ ID NO: 7987 - DNA, 13 bp, Artificial Sequence
  Oligonucleotide for detection of SNP TSC0002253
tttagttattttt

SEQ ID NO: 7988 - DNA, 13 bp, Artificial Sequence
  Oligonucleotide for detection of SNP TSC0002253
aaaaataactaaa

SEQ ID NO: 7989 - DNA, 13 bp, Artificial Sequence
  Oligonucleotide for detection of SNP TSC0002255
tttatgtaaattg

SEQ ID NO: 7990 - DNA, 13 bp, Artificial Sequence
  Oligonucleotide for detection of SNP TSC0002255
caatttacataaa

SEQ ID NO: 7991 - DNA, 13 bp, Artificial Sequence
  Oligonucleotide for detection of SNP TSC0002255
tttatggaaattg

SEQ ID NO: 7992 - DNA, 13 bp, Artificial Sequence
  Oligonucleotide for detection of SNP TSC0002255
caatttccataaa

SEQ ID NO: 7993 - DNA, 13 bp, Artificial Sequence
  Oligonucleotide for detection of SNP TSC0002255
tagtttgtataaa

SEQ ID NO: 7994 - DNA, 13 bp, Artificial Sequence
  Oligonucleotide for detection of SNP TSC0002255
tttatacaaacta

SEQ ID NO: 7995 - DNA, 13 bp, Artificial Sequence
  Oligonucleotide for detection of SNP TSC0002255
tagtttttataaa

SEQ ID NO: 7996 - DNA, 13 bp, Artificial Sequence
  Oligonucleotide for detection of SNP TSC0002255
tttataaaaacta

SEQ ID NO: 7997 - DNA, 13 bp, Artificial Sequence
  Oligonucleotide for detection of SNP TSC0002256
tttattatataaa

SEQ ID NO: 7998 - DNA, 13 bp, Artificial Sequence
  Oligonucleotide for detection of SNP TSC0002256
tttatataataaa

SEQ ID NO: 7999 - DNA, 13 bp, Artificial Sequence
  Oligonucleotide for detection of SNP TSC0002256
tttattgtataaa

SEQ ID NO: 8000 - DNA, 13 bp, Artificial Sequence
  Oligonucleotide for detection of SNP TSC0002256
tttatacaataaa

SEQ ID NO: 8001 - DNA, 13 bp, Artificial Sequence
  Oligonucleotide for detection of SNP TSC0002257
atttttattgatt

SEQ ID NO: 8002 - DNA, 13 bp, Artificial Sequence
  Oligonucleotide for detection of SNP TSC0002257
aatcaataaaaat

SEQ ID NO: 8003 - DNA, 13 bp, Artificial Sequence
  Oligonucleotide for detection of SNP TSC0002257
atttttgttgatt

SEQ ID NO: 8004 - DNA, 13 bp, Artificial Sequence
  Oligonucleotide for detection of SNP TSC0002257
aatcaacaaaaat

SEQ ID NO: 8005 - DNA, 13 bp, Artificial Sequence
  Oligonucleotide for detection of SNP TSC0002257
attttcgttgatt

SEQ ID NO: 8006 - DNA, 13 bp, Artificial Sequence
  Oligonucleotide for detection of SNP TSC0002257
aatcaacgaaaat

SEQ ID NO: 8007 - DNA, 13 bp, Artificial Sequence
  Oligonucleotide for detection of SNP TSC0002257
agttagtgaaagt

SEQ ID NO: 8008 - DNA, 13 bp, Artificial Sequence
  Oligonucleotide for detection of SNP TSC0002257
actttcactaact

SEQ ID NO: 8009 - DNA, 13 bp, Artificial Sequence
  Oligonucleotide for detection of SNP TSC0002257
agttagcgaaagt

SEQ ID NO: 8010 - DNA, 13 bp, Artificial Sequence
  Oligonucleotide for detection of SNP TSC0002257
actttcgctaact

SEQ ID NO: 8011 - DNA, 13 bp, Artificial Sequence
  Oligonucleotide for detection of SNP TSC0002258
atttgttttaaay

SEQ ID NO: 8012 - DNA, 13 bp, Artificial Sequence
  Oligonucleotide for detection of SNP TSC0002258
rtttaaaacaaat

SEQ ID NO: 8013 - DNA, 13 bp, Artificial Sequence
  Oligonucleotide for detection of SNP TSC0002258
atttgtgttaaay

SEQ ID NO: 8014 - DNA, 13 bp, Artificial Sequence
  Oligonucleotide for detection of SNP TSC0002258
rtttaacacaaat

SEQ ID NO: 8015 - DNA, 13 bp, Artificial Sequence
  Oligonucleotide for detection of SNP TSC0002258
atttgcgttaaay

SEQ ID NO: 8016 - DNA, 13 bp, Artificial Sequence
  Oligonucleotide for detection of SNP TSC0002258
rtttaacgcaaat

SEQ ID NO: 8017 - DNA, 13 bp, Artificial Sequence
  Oligonucleotide for detection of SNP TSC0002258
gtttgaggtaaat

SEQ ID NO: 8018 - DNA, 13 bp, Artificial Sequence
  Oligonucleotide for detection of SNP TSC0002258
atttacctcaaac

SEQ ID NO: 8019 - DNA, 13 bp, Artificial Sequence
  Oligonucleotide for detection of SNP TSC0002258
gtttgatgtaaat

SEQ ID NO: 8020 - DNA, 13 bp, Artificial Sequence
  Oligonucleotide for detection of SNP TSC0002258
atttacatcaaac

SEQ ID NO: 8021 - DNA, 13 bp, Artificial Sequence
  Oligonucleotide for detection of SNP TSC0002258
gtttgacgtaaat

SEQ ID NO: 8022 - DNA, 13 bp, Artificial Sequence
  Oligonucleotide for detection of SNP TSC0002258
atttacgtcaaac

SEQ ID NO: 8023 - DNA, 13 bp, Artificial Sequence
  Oligonucleotide for detection of SNP TSC0002259
tttgttagtatty

SEQ ID NO: 8024 - DNA, 13 bp, Artificial Sequence
  Oligonucleotide for detection of SNP TSC0002259
raatactaacaaa

SEQ ID NO: 8025 - DNA, 13 bp, Artificial Sequence
  Oligonucleotide for detection of SNP TSC0002259
tttgtttgtatty

SEQ ID NO: 8026 - DNA, 13 bp, Artificial Sequence
  Oligonucleotide for detection of SNP TSC0002259
raatacaaacaaa

SEQ ID NO: 8027 - DNA, 13 bp, Artificial Sequence
  Oligonucleotide for detection of SNP TSC0002259
gagtgttggtaga

SEQ ID NO: 8028 - DNA, 13 bp, Artificial Sequence
  Oligonucleotide for detection of SNP TSC0002259
tctaccaacactc

SEQ ID NO: 8029 - DNA, 13 bp, Artificial Sequence
  Oligonucleotide for detection of SNP TSC0002259
gagtgtaggtaga

SEQ ID NO: 8030 - DNA, 13 bp, Artificial Sequence
  Oligonucleotide for detection of SNP TSC0002259
tctacctacactc

SEQ ID NO: 8031 - DNA, 13 bp, Artificial Sequence
  Oligonucleotide for detection of SNP TSC0002260
taaagggaattgg

SEQ ID NO: 8032 - DNA, 13 bp, Artificial Sequence
  Oligonucleotide for detection of SNP TSC0002260
ccaattcccttta

SEQ ID NO: 8033 - DNA, 13 bp, Artificial Sequence
  Oligonucleotide for detection of SNP TSC0002260
taaaggaaattgg

SEQ ID NO: 8034 - DNA, 13 bp, Artificial Sequence
  Oligonucleotide for detection of SNP TSC0002260
ccaatttccttta

SEQ ID NO: 8035 - DNA, 13 bp, Artificial Sequence
  Oligonucleotide for detection of SNP TSC0002260
taaagggaatcgg

SEQ ID NO: 8036 - DNA, 13 bp, Artificial Sequence
  Oligonucleotide for detection of SNP TSC0002260
ccgattcccttta

SEQ ID NO: 8037 - DNA, 13 bp, Artificial Sequence
  Oligonucleotide for detection of SNP TSC0002260
taaaggaaatcgg

SEQ ID NO: 8038 - DNA, 13 bp, Artificial Sequence
  Oligonucleotide for detection of SNP TSC0002260
ccgatttccttta

SEQ ID NO: 8039 - DNA, 13 bp, Artificial Sequence
  Oligonucleotide for detection of SNP TSC0002262
aagtgaatttagt

SEQ ID NO: 8040 - DNA, 13 bp, Artificial Sequence
  Oligonucleotide for detection of SNP TSC0002262
actaaattcactt

SEQ ID NO: 8041 - DNA, 13 bp, Artificial Sequence
  Oligonucleotide for detection of SNP TSC0002262
aagtgattttagt

SEQ ID NO: 8042 - DNA, 13 bp, Artificial Sequence
  Oligonucleotide for detection of SNP TSC0002262
actaaaatcactt

SEQ ID NO: 8043 - DNA, 13 bp, Artificial Sequence
  Oligonucleotide for detection of SNP TSC0002262
attaaatttattt

SEQ ID NO: 8044 - DNA, 13 bp, Artificial Sequence
  Oligonucleotide for detection of SNP TSC0002262
aaataaatttaat

SEQ ID NO: 8045 - DNA, 13 bp, Artificial Sequence
  Oligonucleotide for detection of SNP TSC0002262
attaaaattattt

SEQ ID NO: 8046 - DNA, 13 bp, Artificial Sequence
  Oligonucleotide for detection of SNP TSC0002262
aaataattttaat

SEQ ID NO: 8047 - DNA, 13 bp, Artificial Sequence
  Oligonucleotide for detection of SNP TSC0002263
aatttggaaatty

SEQ ID NO: 8048 - DNA, 13 bp, Artificial Sequence
  Oligonucleotide for detection of SNP TSC0002263
raatttccaaatt

SEQ ID NO: 8049 - DNA, 13 bp, Artificial Sequence
  Oligonucleotide for detection of SNP TSC0002263
aatttgaaaatty

SEQ ID NO: 8050 - DNA, 13 bp, Artificial Sequence
  Oligonucleotide for detection of SNP TSC0002263
raattttcaaatt

SEQ ID NO: 8051 - DNA, 13 bp, Artificial Sequence
  Oligonucleotide for detection of SNP TSC0002263
aattcggaaatty

SEQ ID NO: 8052 - DNA, 13 bp, Artificial Sequence
  Oligonucleotide for detection of SNP TSC0002263
raatttccgaatt

SEQ ID NO: 8053 - DNA, 13 bp, Artificial Sequence
  Oligonucleotide for detection of SNP TSC0002263
aattcgaaaatty

SEQ ID NO: 8054 - DNA, 13 bp, Artificial Sequence
  Oligonucleotide for detection of SNP TSC0002263
raattttcgaatt

SEQ ID NO: 8055 - DNA, 13 bp, Artificial Sequence
  Oligonucleotide for detection of SNP TSC0002264
aatattttgtggy

SEQ ID NO: 8056 - DNA, 13 bp, Artificial Sequence
  Oligonucleotide for detection of SNP TSC0002264
rccacaaaatatt

SEQ ID NO: 8057 - DNA, 13 bp, Artificial Sequence
  Oligonucleotide for detection of SNP TSC0002264
aatattgtgtggy

SEQ ID NO: 8058 - DNA, 13 bp, Artificial Sequence
  Oligonucleotide for detection of SNP TSC0002264
rccacacaatatt

SEQ ID NO: 8059 - DNA, 13 bp, Artificial Sequence
  Oligonucleotide for detection of SNP TSC0002264
gttataaaatgtt

SEQ ID NO: 8060 - DNA, 13 bp, Artificial Sequence
  Oligonucleotide for detection of SNP TSC0002264
aacattttataac

SEQ ID NO: 8061 - DNA, 13 bp, Artificial Sequence
  Oligonucleotide for detection of SNP TSC0002264
gttatataatgtt

SEQ ID NO: 8062 - DNA, 13 bp, Artificial Sequence
  Oligonucleotide for detection of SNP TSC0002264
aacattatataac

SEQ ID NO: 8063 - DNA, 13 bp, Artificial Sequence
  Oligonucleotide for detection of SNP TSC0002266
attaaggaagtgt

SEQ ID NO: 8064 - DNA, 13 bp, Artificial Sequence
  Oligonucleotide for detection of SNP TSC0002266
acacttccttaat

SEQ ID NO: 8065 - DNA, 13 bp, Artificial Sequence
  Oligonucleotide for detection of SNP TSC0002266
attaagaaagtgt

SEQ ID NO: 8066 - DNA, 13 bp, Artificial Sequence
  Oligonucleotide for detection of SNP TSC0002266
acactttcttaat

SEQ ID NO: 8067 - DNA, 13 bp, Artificial Sequence
  Oligonucleotide for detection of SNP TSC0002267
ttgaggttaaagg

SEQ ID NO: 8068 - DNA, 13 bp, Artificial Sequence
  Oligonucleotide for detection of SNP TSC0002267
cctttaacctcaa

SEQ ID NO: 8069 - DNA, 13 bp, Artificial Sequence
  Oligonucleotide for detection of SNP TSC0002267
ttgagggtaaagg

SEQ ID NO: 8070 - DNA, 13 bp, Artificial Sequence
  Oligonucleotide for detection of SNP TSC0002267
cctttaccctcaa

SEQ ID NO: 8071 - DNA, 13 bp, Artificial Sequence
  Oligonucleotide for detection of SNP TSC0002267
tttttaattttaa

SEQ ID NO: 8072 - DNA, 13 bp, Artificial Sequence
  Oligonucleotide for detection of SNP TSC0002267
ttaaaattaaaaa

SEQ ID NO: 8073 - DNA, 13 bp, Artificial Sequence
  Oligonucleotide for detection of SNP TSC0002267
tttttatttttaa

SEQ ID NO: 8074 - DNA, 13 bp, Artificial Sequence
  Oligonucleotide for detection of SNP TSC0002267
ttaaaaataaaaa

SEQ ID NO: 8075 - DNA, 13 bp, Artificial Sequence
  Oligonucleotide for detection of SNP TSC0002268
tttttaagttgga

SEQ ID NO: 8076 - DNA, 13 bp, Artificial Sequence
  Oligonucleotide for detection of SNP TSC0002268
tccaacttaaaaa

SEQ ID NO: 8077 - DNA, 13 bp, Artificial Sequence
  Oligonucleotide for detection of SNP TSC0002268
tttttaggttgga

SEQ ID NO: 8078 - DNA, 13 bp, Artificial Sequence
  Oligonucleotide for detection of SNP TSC0002268
tccaacctaaaaa

SEQ ID NO: 8079 - DNA, 13 bp, Artificial Sequence
  Oligonucleotide for detection of SNP TSC0002269
gtagggatggggt

SEQ ID NO: 8080 - DNA, 13 bp, Artificial Sequence
  Oligonucleotide for detection of SNP TSC0002269
accccatccctac

SEQ ID NO: 8081 - DNA, 13 bp, Artificial Sequence
  Oligonucleotide for detection of SNP TSC0002269
gtaggggtggggt

SEQ ID NO: 8082 - DNA, 13 bp, Artificial Sequence
  Oligonucleotide for detection of SNP TSC0002269
accccacccctac

SEQ ID NO: 8083 - DNA, 13 bp, Artificial Sequence
  Oligonucleotide for detection of SNP TSC0002270
gttttaaataaat

SEQ ID NO: 8084 - DNA, 13 bp, Artificial Sequence
  Oligonucleotide for detection of SNP TSC0002270
atttatttaaaac

SEQ ID NO: 8085 - DNA, 13 bp, Artificial Sequence
  Oligonucleotide for detection of SNP TSC0002270
gttttatataaat

SEQ ID NO: 8086 - DNA, 13 bp, Artificial Sequence
  Oligonucleotide for detection of SNP TSC0002270
atttatataaaac

SEQ ID NO: 8087 - DNA, 13 bp, Artificial Sequence
  Oligonucleotide for detection of SNP TSC0002270
atttatttgaagy

SEQ ID NO: 8088 - DNA, 13 bp, Artificial Sequence
  Oligonucleotide for detection of SNP TSC0002270
rcttcaaataaat

SEQ ID NO: 8089 - DNA, 13 bp, Artificial Sequence
  Oligonucleotide for detection of SNP TSC0002270
atttatgtgaagy

SEQ ID NO: 8090 - DNA, 13 bp, Artificial Sequence
  Oligonucleotide for detection of SNP TSC0002270
rcttcacataaat

SEQ ID NO: 8091 - DNA, 13 bp, Artificial Sequence
  Oligonucleotide for detection of SNP TSC0002271
agtttaatggtay

SEQ ID NO: 8092 - DNA, 13 bp, Artificial Sequence
  Oligonucleotide for detection of SNP TSC0002271
rtaccattaaact

SEQ ID NO: 8093 - DNA, 13 bp, Artificial Sequence
  Oligonucleotide for detection of SNP TSC0002271
agtttagtggtay

SEQ ID NO: 8094 - DNA, 13 bp, Artificial Sequence
  Oligonucleotide for detection of SNP TSC0002271
rtaccactaaact

SEQ ID NO: 8095 - DNA, 13 bp, Artificial Sequence
  Oligonucleotide for detection of SNP TSC0002271
agtttaacggtay

SEQ ID NO: 8096 - DNA, 13 bp, Artificial Sequence
  Oligonucleotide for detection of SNP TSC0002271
rtaccgttaaact

SEQ ID NO: 8097 - DNA, 13 bp, Artificial Sequence
  Oligonucleotide for detection of SNP TSC0002271
agtttagcggtay

SEQ ID NO: 8098 - DNA, 13 bp, Artificial Sequence
  Oligonucleotide for detection of SNP TSC0002271
rtaccgctaaact

SEQ ID NO: 8099 - DNA, 13 bp, Artificial Sequence
  Oligonucleotide for detection of SNP TSC0002272
tatttagtttata

SEQ ID NO: 8100 - DNA, 13 bp, Artificial Sequence
  Oligonucleotide for detection of SNP TSC0002272
tataaactaaata

SEQ ID NO: 8101 - DNA, 13 bp, Artificial Sequence
  Oligonucleotide for detection of SNP TSC0002272
tatttaatttata

SEQ ID NO: 8102 - DNA, 13 bp, Artificial Sequence
  Oligonucleotide for detection of SNP TSC0002272
tataaattaaata

SEQ ID NO: 8103 - DNA, 13 bp, Artificial Sequence
  Oligonucleotide for detection of SNP TSC0002273
ttagttatttttt

SEQ ID NO: 8104 - DNA, 13 bp, Artificial Sequence
  Oligonucleotide for detection of SNP TSC0002273
aaaaaataactaa

SEQ ID NO: 8105 - DNA, 13 bp, Artificial Sequence
  Oligonucleotide for detection of SNP TSC0002273
ttagttgtttttt

SEQ ID NO: 8106 - DNA, 13 bp, Artificial Sequence
  Oligonucleotide for detection of SNP TSC0002273
aaaaaacaactaa

SEQ ID NO: 8107 - DNA, 13 bp, Artificial Sequence
  Oligonucleotide for detection of SNP TSC0002273
ttagtcgtttttt

SEQ ID NO: 8108 - DNA, 13 bp, Artificial Sequence
  Oligonucleotide for detection of SNP TSC0002273
aaaaaacgactaa

SEQ ID NO: 8109 - DNA, 13 bp, Artificial Sequence
  Oligonucleotide for detection of SNP TSC0002273
agggaatggttgg

SEQ ID NO: 8110 - DNA, 13 bp, Artificial Sequence
  Oligonucleotide for detection of SNP TSC0002273
ccaaccattccct

SEQ ID NO: 8111 - DNA, 13 bp, Artificial Sequence
  Oligonucleotide for detection of SNP TSC0002273
agggaacggttgg

SEQ ID NO: 8112 - DNA, 13 bp, Artificial Sequence
  Oligonucleotide for detection of SNP TSC0002273
ccaaccgttccct

SEQ ID NO: 8113 - DNA, 13 bp, Artificial Sequence
  Oligonucleotide for detection of SNP TSC0002274
tttttaatgaaat

SEQ ID NO: 8114 - DNA, 13 bp, Artificial Sequence
  Oligonucleotide for detection of SNP TSC0002274
atttcattaaaaa

SEQ ID NO: 8115 - DNA, 13 bp, Artificial Sequence
  Oligonucleotide for detection of SNP TSC0002274
tttttagtgaaat

SEQ ID NO: 8116 - DNA, 13 bp, Artificial Sequence
  Oligonucleotide for detection of SNP TSC0002274
atttcactaaaaa

SEQ ID NO: 8117 - DNA, 13 bp, Artificial Sequence
  Oligonucleotide for detection of SNP TSC0002276
ttttatatataga

SEQ ID NO: 8118 - DNA, 13 bp, Artificial Sequence
  Oligonucleotide for detection of SNP TSC0002276
tctatatataaaa

SEQ ID NO: 8119 - DNA, 13 bp, Artificial Sequence
  Oligonucleotide for detection of SNP TSC0002276
ttttatgtataga

SEQ ID NO: 8120 - DNA, 13 bp, Artificial Sequence
  Oligonucleotide for detection of SNP TSC0002276
tctatacataaaa

SEQ ID NO: 8121 - DNA, 13 bp, Artificial Sequence
  Oligonucleotide for detection of SNP TSC0002277
aaaagtagtagta

SEQ ID NO: 8122 - DNA, 13 bp, Artificial Sequence
  Oligonucleotide for detection of SNP TSC0002277
tactactactttt

SEQ ID NO: 8123 - DNA, 13 bp, Artificial Sequence
  Oligonucleotide for detection of SNP TSC0002277
aaaagttgtagta

SEQ ID NO: 8124 - DNA, 13 bp, Artificial Sequence
  Oligonucleotide for detection of SNP TSC0002277
tactacaactttt

SEQ ID NO: 8125 - DNA, 13 bp, Artificial Sequence
  Oligonucleotide for detection of SNP TSC0002277
aaaagtcgtagta

SEQ ID NO: 8126 - DNA, 13 bp, Artificial Sequence
  Oligonucleotide for detection of SNP TSC0002277
tactacgactttt

SEQ ID NO: 8127 - DNA, 13 bp, Artificial Sequence
  Oligonucleotide for detection of SNP TSC0002277
tattgttgttttt

SEQ ID NO: 8128 - DNA, 13 bp, Artificial Sequence
  Oligonucleotide for detection of SNP TSC0002277
aaaaacaacaata

SEQ ID NO: 8129 - DNA, 13 bp, Artificial Sequence
  Oligonucleotide for detection of SNP TSC0002277
tattgtggttttt

SEQ ID NO: 8130 - DNA, 13 bp, Artificial Sequence
  Oligonucleotide for detection of SNP TSC0002277
aaaaaccacaata

SEQ ID NO: 8131 - DNA, 13 bp, Artificial Sequence
  Oligonucleotide for detection of SNP TSC0002277
tattgcggttttt

SEQ ID NO: 8132 - DNA, 13 bp, Artificial Sequence
  Oligonucleotide for detection of SNP TSC0002277
aaaaaccgcaata

SEQ ID NO: 8133 - DNA, 13 bp, Artificial Sequence
  Oligonucleotide for detection of SNP TSC0002278
ggtatagaagata

SEQ ID NO: 8134 - DNA, 13 bp, Artificial Sequence
  Oligonucleotide for detection of SNP TSC0002278
tatcttctatacc

SEQ ID NO: 8135 - DNA, 13 bp, Artificial Sequence
  Oligonucleotide for detection of SNP TSC0002278
ggtataaaagata

SEQ ID NO: 8136 - DNA, 13 bp, Artificial Sequence
  Oligonucleotide for detection of SNP TSC0002278
tatcttttatacc

SEQ ID NO: 8137 - DNA, 13 bp, Artificial Sequence
  Oligonucleotide for detection of SNP TSC0002279
ttatgggattata

SEQ ID NO: 8138 - DNA, 13 bp, Artificial Sequence
  Oligonucleotide for detection of SNP TSC0002279
tataatcccataa

SEQ ID NO: 8139 - DNA, 13 bp, Artificial Sequence
  Oligonucleotide for detection of SNP TSC0002279
ttatggaattata

SEQ ID NO: 8140 - DNA, 13 bp, Artificial Sequence
  Oligonucleotide for detection of SNP TSC0002279
tataattccataa

SEQ ID NO: 8141 - DNA, 13 bp, Artificial Sequence
  Oligonucleotide for detection of SNP TSC0002280
atgttgaaggttg

SEQ ID NO: 8142 - DNA, 13 bp, Artificial Sequence
  Oligonucleotide for detection of SNP TSC0002280
caaccttcaacat

SEQ ID NO: 8143 - DNA, 13 bp, Artificial Sequence
  Oligonucleotide for detection of SNP TSC0002280
atgttggaggttg

SEQ ID NO: 8144 - DNA, 13 bp, Artificial Sequence
  Oligonucleotide for detection of SNP TSC0002280
caacctccaacat

SEQ ID NO: 8145 - DNA, 13 bp, Artificial Sequence
  Oligonucleotide for detection of SNP TSC0002280
acgttgaaggttg

SEQ ID NO: 8146 - DNA, 13 bp, Artificial Sequence
  Oligonucleotide for detection of SNP TSC0002280
caaccttcaacgt

SEQ ID NO: 8147 - DNA, 13 bp, Artificial Sequence
  Oligonucleotide for detection of SNP TSC0002280
acgttggaggttg

SEQ ID NO: 8148 - DNA, 13 bp, Artificial Sequence
  Oligonucleotide for detection of SNP TSC0002280
caacctccaacgt

SEQ ID NO: 8149 - DNA, 13 bp, Artificial Sequence
  Oligonucleotide for detection of SNP TSC0002281
tgttttaaaaaaa

SEQ ID NO: 8150 - DNA, 13 bp, Artificial Sequence
  Oligonucleotide for detection of SNP TSC0002281
tttttttaaaaca

SEQ ID NO: 8151 - DNA, 13 bp, Artificial Sequence
  Oligonucleotide for detection of SNP TSC0002281
tgtttttaaaaaa

SEQ ID NO: 8152 - DNA, 13 bp, Artificial Sequence
  Oligonucleotide for detection of SNP TSC0002281
ttttttaaaaaca

SEQ ID NO: 8153 - DNA, 13 bp, Artificial Sequence
  Oligonucleotide for detection of SNP TSC0002281
tttttttaaaata

SEQ ID NO: 8154 - DNA, 13 bp, Artificial Sequence
  Oligonucleotide for detection of SNP TSC0002281
tattttaaaaaaa

SEQ ID NO: 8155 - DNA, 13 bp, Artificial Sequence
  Oligonucleotide for detection of SNP TSC0002281
ttttttaaaaata

SEQ ID NO: 8156 - DNA, 13 bp, Artificial Sequence
  Oligonucleotide for detection of SNP TSC0002281
tatttttaaaaaa

SEQ ID NO: 8157 - DNA, 13 bp, Artificial Sequence
  Oligonucleotide for detection of SNP TSC0002282
atttttaatagag

SEQ ID NO: 8158 - DNA, 13 bp, Artificial Sequence
  Oligonucleotide for detection of SNP TSC0002282
ctctattaaaaat

SEQ ID NO: 8159 - DNA, 13 bp, Artificial Sequence
  Oligonucleotide for detection of SNP TSC0002282
atttttgatagag

SEQ ID NO: 8160 - DNA, 13 bp, Artificial Sequence
  Oligonucleotide for detection of SNP TSC0002282
ctctatcaaaaat

SEQ ID NO: 8161 - DNA, 13 bp, Artificial Sequence
  Oligonucleotide for detection of SNP TSC0002284
taaatatttagta

SEQ ID NO: 8162 - DNA, 13 bp, Artificial Sequence
  Oligonucleotide for detection of SNP TSC0002284
tactaaatattta

SEQ ID NO: 8163 - DNA, 13 bp, Artificial Sequence
  Oligonucleotide for detection of SNP TSC0002284
taaatagttagta

SEQ ID NO: 8164 - DNA, 13 bp, Artificial Sequence
  Oligonucleotide for detection of SNP TSC0002284
tactaactattta

SEQ ID NO: 8165 - DNA, 13 bp, Artificial Sequence
  Oligonucleotide for detection of SNP TSC0002284
tgttggatattta

SEQ ID NO: 8166 - DNA, 13 bp, Artificial Sequence
  Oligonucleotide for detection of SNP TSC0002284
taaatatccaaca

SEQ ID NO: 8167 - DNA, 13 bp, Artificial Sequence
  Oligonucleotide for detection of SNP TSC0002284
tgttggttattta

SEQ ID NO: 8168 - DNA, 13 bp, Artificial Sequence
  Oligonucleotide for detection of SNP TSC0002284
taaataaccaaca

SEQ ID NO: 8169 - DNA, 13 bp, Artificial Sequence
  Oligonucleotide for detection of SNP TSC0002286
tatttaaaaaaat

SEQ ID NO: 8170 - DNA, 13 bp, Artificial Sequence
  Oligonucleotide for detection of SNP TSC0002286
atttttttaaata

SEQ ID NO: 8171 - DNA, 13 bp, Artificial Sequence
  Oligonucleotide for detection of SNP TSC0002286
tatttagaaaaat

SEQ ID NO: 8172 - DNA, 13 bp, Artificial Sequence
  Oligonucleotide for detection of SNP TSC0002286
atttttctaaata

SEQ ID NO: 8173 - DNA, 13 bp, Artificial Sequence
  Oligonucleotide for detection of SNP TSC0002287
agatatgatgtty

SEQ ID NO: 8174 - DNA, 13 bp, Artificial Sequence
  Oligonucleotide for detection of SNP TSC0002287
raacatcatatct

SEQ ID NO: 8175 - DNA, 13 bp, Artificial Sequence
  Oligonucleotide for detection of SNP TSC0002287
agatataatgtty

SEQ ID NO: 8176 - DNA, 13 bp, Artificial Sequence
  Oligonucleotide for detection of SNP TSC0002287
raacattatatct

SEQ ID NO: 8177 - DNA, 13 bp, Artificial Sequence
  Oligonucleotide for detection of SNP TSC0002287
agatatgacgtty

SEQ ID NO: 8178 - DNA, 13 bp, Artificial Sequence
  Oligonucleotide for detection of SNP TSC0002287
raacgtcatatct

SEQ ID NO: 8179 - DNA, 13 bp, Artificial Sequence
  Oligonucleotide for detection of SNP TSC0002287
agatataacgtty

SEQ ID NO: 8180 - DNA, 13 bp, Artificial Sequence
  Oligonucleotide for detection of SNP TSC0002287
raacgttatatct

SEQ ID NO: 8181 - DNA, 13 bp, Artificial Sequence
  Oligonucleotide for detection of SNP TSC0002288
tgtaagatattta

SEQ ID NO: 8182 - DNA, 13 bp, Artificial Sequence
  Oligonucleotide for detection of SNP TSC0002288
taaatatcttaca

SEQ ID NO: 8183 - DNA, 13 bp, Artificial Sequence
  Oligonucleotide for detection of SNP TSC0002288
tgtaaggtattta

SEQ ID NO: 8184 - DNA, 13 bp, Artificial Sequence
  Oligonucleotide for detection of SNP TSC0002288
taaataccttaca

SEQ ID NO: 8185 - DNA, 13 bp, Artificial Sequence
  Oligonucleotide for detection of SNP TSC0002289
taaatttggttta

SEQ ID NO: 8186 - DNA, 13 bp, Artificial Sequence
  Oligonucleotide for detection of SNP TSC0002289
taaaccaaattta

SEQ ID NO: 8187 - DNA, 13 bp, Artificial Sequence
  Oligonucleotide for detection of SNP TSC0002289
taaattcggttta

SEQ ID NO: 8188 - DNA, 13 bp, Artificial Sequence
  Oligonucleotide for detection of SNP TSC0002289
taaaccgaattta

SEQ ID NO: 8189 - DNA, 13 bp, Artificial Sequence
  Oligonucleotide for detection of SNP TSC0002289
taaattgagttta

SEQ ID NO: 8190 - DNA, 13 bp, Artificial Sequence
  Oligonucleotide for detection of SNP TSC0002289
taaactcaattta

SEQ ID NO: 8191 - DNA, 13 bp, Artificial Sequence
  Oligonucleotide for detection of SNP TSC0002289
taaattaagttta

SEQ ID NO: 8192 - DNA, 13 bp, Artificial Sequence
  Oligonucleotide for detection of SNP TSC0002289
taaacttaattta

SEQ ID NO: 8193 - DNA, 13 bp, Artificial Sequence
  Oligonucleotide for detection of SNP TSC0002289
taaatcgagttta

SEQ ID NO: 8194 - DNA, 13 bp, Artificial Sequence
  Oligonucleotide for detection of SNP TSC0002289
taaactcgattta

SEQ ID NO: 8195 - DNA, 13 bp, Artificial Sequence
  Oligonucleotide for detection of SNP TSC0002290
gtatattgagggt

SEQ ID NO: 8196 - DNA, 13 bp, Artificial Sequence
  Oligonucleotide for detection of SNP TSC0002290
accctcaatatac

SEQ ID NO: 8197 - DNA, 13 bp, Artificial Sequence
  Oligonucleotide for detection of SNP TSC0002290
gtatatcgagggt

SEQ ID NO: 8198 - DNA, 13 bp, Artificial Sequence
  Oligonucleotide for detection of SNP TSC0002290
accctcgatatac

SEQ ID NO: 8199 - DNA, 13 bp, Artificial Sequence
  Oligonucleotide for detection of SNP TSC0002290
atttttggtgtgy

SEQ ID NO: 8200 - DNA, 13 bp, Artificial Sequence
  Oligonucleotide for detection of SNP TSC0002290
rcacaccaaaaat

SEQ ID NO: 8201 - DNA, 13 bp, Artificial Sequence
  Oligonucleotide for detection of SNP TSC0002290
atttttagtgtgy

SEQ ID NO: 8202 - DNA, 13 bp, Artificial Sequence
  Oligonucleotide for detection of SNP TSC0002290
rcacactaaaaat

SEQ ID NO: 8203 - DNA, 13 bp, Artificial Sequence
  Oligonucleotide for detection of SNP TSC0002290
attttcggtgtgy

SEQ ID NO: 8204 - DNA, 13 bp, Artificial Sequence
  Oligonucleotide for detection of SNP TSC0002290
rcacaccgaaaat

SEQ ID NO: 8205 - DNA, 13 bp, Artificial Sequence
  Oligonucleotide for detection of SNP TSC0002291
agaaatattttga

SEQ ID NO: 8206 - DNA, 13 bp, Artificial Sequence
  Oligonucleotide for detection of SNP TSC0002291
tcaaaatatttct

SEQ ID NO: 8207 - DNA, 13 bp, Artificial Sequence
  Oligonucleotide for detection of SNP TSC0002291
agaaattttttga

SEQ ID NO: 8208 - DNA, 13 bp, Artificial Sequence
  Oligonucleotide for detection of SNP TSC0002291
tcaaaaaatttct

SEQ ID NO: 8209 - DNA, 13 bp, Artificial Sequence
  Oligonucleotide for detection of SNP TSC0002291
ttagaatgttttt

SEQ ID NO: 8210 - DNA, 13 bp, Artificial Sequence
  Oligonucleotide for detection of SNP TSC0002291
aaaaacattctaa

SEQ ID NO: 8211 - DNA, 13 bp, Artificial Sequence
  Oligonucleotide for detection of SNP TSC0002291
ttagaaagttttt

SEQ ID NO: 8212 - DNA, 13 bp, Artificial Sequence
  Oligonucleotide for detection of SNP TSC0002291
aaaaactttctaa

SEQ ID NO: 8213 - DNA, 13 bp, Artificial Sequence
  Oligonucleotide for detection of SNP TSC0002292
atagagttaaatg

SEQ ID NO: 8214 - DNA, 13 bp, Artificial Sequence
  Oligonucleotide for detection of SNP TSC0002292
catttaactctat

SEQ ID NO: 8215 - DNA, 13 bp, Artificial Sequence
  Oligonucleotide for detection of SNP TSC0002292
atagaggtaaatg

SEQ ID NO: 8216 - DNA, 13 bp, Artificial Sequence
  Oligonucleotide for detection of SNP TSC0002292
catttacctctat

SEQ ID NO: 8217 - DNA, 13 bp, Artificial Sequence
  Oligonucleotide for detection of SNP TSC0002292
atagagttaaacg

SEQ ID NO: 8218 - DNA, 13 bp, Artificial Sequence
  Oligonucleotide for detection of SNP TSC0002292
cgtttaactctat

SEQ ID NO: 8219 - DNA, 13 bp, Artificial Sequence
  Oligonucleotide for detection of SNP TSC0002292
atagaggtaaacg

SEQ ID NO: 8220 - DNA, 13 bp, Artificial Sequence
  Oligonucleotide for detection of SNP TSC0002292
cgtttacctctat

SEQ ID NO: 8221 - DNA, 13 bp, Artificial Sequence
  Oligonucleotide for detection of SNP TSC0002292
tgtttaattttgt

SEQ ID NO: 8222 - DNA, 13 bp, Artificial Sequence
  Oligonucleotide for detection of SNP TSC0002292
acaaaattaaaca

SEQ ID NO: 8223 - DNA, 13 bp, Artificial Sequence
  Oligonucleotide for detection of SNP TSC0002292
tgtttatttttgt

SEQ ID NO: 8224 - DNA, 13 bp, Artificial Sequence
  Oligonucleotide for detection of SNP TSC0002292
acaaaaataaaca

SEQ ID NO: 8225 - DNA, 13 bp, Artificial Sequence
  Oligonucleotide for detection of SNP TSC0002292
cgtttaattttgt

SEQ ID NO: 8226 - DNA, 13 bp, Artificial Sequence
  Oligonucleotide for detection of SNP TSC0002292
acaaaattaaacg

SEQ ID NO: 8227 - DNA, 13 bp, Artificial Sequence
  Oligonucleotide for detection of SNP TSC0002292
cgtttatttttgt

SEQ ID NO: 8228 - DNA, 13 bp, Artificial Sequence
  Oligonucleotide for detection of SNP TSC0002292
acaaaaataaacg

SEQ ID NO: 8229 - DNA, 13 bp, Artificial Sequence
  Oligonucleotide for detection of SNP TSC0002293
tttgttgttttag

SEQ ID NO: 8230 - DNA, 13 bp, Artificial Sequence
  Oligonucleotide for detection of SNP TSC0002293
ctaaaacaacaaa

SEQ ID NO: 8231 - DNA, 13 bp, Artificial Sequence
  Oligonucleotide for detection of SNP TSC0002293
tttgttattttag

SEQ ID NO: 8232 - DNA, 13 bp, Artificial Sequence
  Oligonucleotide for detection of SNP TSC0002293
ctaaaataacaaa

SEQ ID NO: 8233 - DNA, 13 bp, Artificial Sequence
  Oligonucleotide for detection of SNP TSC0002295
tattttatgatat

SEQ ID NO: 8234 - DNA, 13 bp, Artificial Sequence
  Oligonucleotide for detection of SNP TSC0002295
atatcataaaata

SEQ ID NO: 8235 - DNA, 13 bp, Artificial Sequence
  Oligonucleotide for detection of SNP TSC0002295
tattttgtgatat

SEQ ID NO: 8236 - DNA, 13 bp, Artificial Sequence
  Oligonucleotide for detection of SNP TSC0002295
atatcacaaaata

SEQ ID NO: 8237 - DNA, 13 bp, Artificial Sequence
  Oligonucleotide for detection of SNP TSC0002295
tatttcgtgatat

SEQ ID NO: 8238 - DNA, 13 bp, Artificial Sequence
  Oligonucleotide for detection of SNP TSC0002295
atatcacgaaata

SEQ ID NO: 8239 - DNA, 13 bp, Artificial Sequence
  Oligonucleotide for detection of SNP TSC0002295
atattatggagta

SEQ ID NO: 8240 - DNA, 13 bp, Artificial Sequence
  Oligonucleotide for detection of SNP TSC0002295
tactccataatat

SEQ ID NO: 8241 - DNA, 13 bp, Artificial Sequence
  Oligonucleotide for detection of SNP TSC0002295
atattacggagta

SEQ ID NO: 8242 - DNA, 13 bp, Artificial Sequence
  Oligonucleotide for detection of SNP TSC0002295
tactccgtaatat

SEQ ID NO: 8243 - DNA, 13 bp, Artificial Sequence
  Oligonucleotide for detection of SNP TSC0002296
ttgaatgaaatty

SEQ ID NO: 8244 - DNA, 13 bp, Artificial Sequence
  Oligonucleotide for detection of SNP TSC0002296
raatttcattcaa

SEQ ID NO: 8245 - DNA, 13 bp, Artificial Sequence
  Oligonucleotide for detection of SNP TSC0002296
ttgaataaaatty

SEQ ID NO: 8246 - DNA, 13 bp, Artificial Sequence
  Oligonucleotide for detection of SNP TSC0002296
raattttattcaa

SEQ ID NO: 8247 - DNA, 13 bp, Artificial Sequence
  Oligonucleotide for detection of SNP TSC0002297
ggatatgttgtag

SEQ ID NO: 8248 - DNA, 13 bp, Artificial Sequence
  Oligonucleotide for detection of SNP TSC0002297
ctacaacatatcc

SEQ ID NO: 8249 - DNA, 13 bp, Artificial Sequence
  Oligonucleotide for detection of SNP TSC0002297
ggatatattgtag

SEQ ID NO: 8250 - DNA, 13 bp, Artificial Sequence
  Oligonucleotide for detection of SNP TSC0002297
ctacaatatatcc

SEQ ID NO: 8251 - DNA, 13 bp, Artificial Sequence
  Oligonucleotide for detection of SNP TSC0002297
ggatatgtcgtag

SEQ ID NO: 8252 - DNA, 13 bp, Artificial Sequence
  Oligonucleotide for detection of SNP TSC0002297
ctacgacatatcc

SEQ ID NO: 8253 - DNA, 13 bp, Artificial Sequence
  Oligonucleotide for detection of SNP TSC0002297
ggatatatcgtag

SEQ ID NO: 8254 - DNA, 13 bp, Artificial Sequence
  Oligonucleotide for detection of SNP TSC0002297
ctacgatatatcc

SEQ ID NO: 8255 - DNA, 13 bp, Artificial Sequence
  Oligonucleotide for detection of SNP TSC0002298
tgaatgaattttt

SEQ ID NO: 8256 - DNA, 13 bp, Artificial Sequence
  Oligonucleotide for detection of SNP TSC0002298
aaaaattcattca

SEQ ID NO: 8257 - DNA, 13 bp, Artificial Sequence
  Oligonucleotide for detection of SNP TSC0002298
tgaatgtattttt

SEQ ID NO: 8258 - DNA, 13 bp, Artificial Sequence
  Oligonucleotide for detection of SNP TSC0002298
aaaaatacattca

SEQ ID NO: 8259 - DNA, 13 bp, Artificial Sequence
  Oligonucleotide for detection of SNP TSC0002298
aaagatttattta

SEQ ID NO: 8260 - DNA, 13 bp, Artificial Sequence
  Oligonucleotide for detection of SNP TSC0002298
taaataaatcttt

SEQ ID NO: 8261 - DNA, 13 bp, Artificial Sequence
  Oligonucleotide for detection of SNP TSC0002298
aaagatgtattta

SEQ ID NO: 8262 - DNA, 13 bp, Artificial Sequence
  Oligonucleotide for detection of SNP TSC0002298
taaatacatcttt

SEQ ID NO: 8263 - DNA, 13 bp, Artificial Sequence
  Oligonucleotide for detection of SNP TSC0002299
tttttaaattaty

SEQ ID NO: 8264 - DNA, 13 bp, Artificial Sequence
  Oligonucleotide for detection of SNP TSC0002299
rataatttaaaaa

SEQ ID NO: 8265 - DNA, 13 bp, Artificial Sequence
  Oligonucleotide for detection of SNP TSC0002299
tttttagattaty

SEQ ID NO: 8266 - DNA, 13 bp, Artificial Sequence
  Oligonucleotide for detection of SNP TSC0002299
rataatctaaaaa

SEQ ID NO: 8267 - DNA, 13 bp, Artificial Sequence
  Oligonucleotide for detection of SNP TSC0002300
tatattataaaty

SEQ ID NO: 8268 - DNA, 13 bp, Artificial Sequence
  Oligonucleotide for detection of SNP TSC0002300
ratttataatata

SEQ ID NO: 8269 - DNA, 13 bp, Artificial Sequence
  Oligonucleotide for detection of SNP TSC0002300
tatattttaaaty

SEQ ID NO: 8270 - DNA, 13 bp, Artificial Sequence
  Oligonucleotide for detection of SNP TSC0002300
ratttaaaatata

SEQ ID NO: 8271 - DNA, 13 bp, Artificial Sequence
  Oligonucleotide for detection of SNP TSC0002300
gatttatggtata

SEQ ID NO: 8272 - DNA, 13 bp, Artificial Sequence
  Oligonucleotide for detection of SNP TSC0002300
tataccataaatc

SEQ ID NO: 8273 - DNA, 13 bp, Artificial Sequence
  Oligonucleotide for detection of SNP TSC0002300
gatttaaggtata

SEQ ID NO: 8274 - DNA, 13 bp, Artificial Sequence
  Oligonucleotide for detection of SNP TSC0002300
tataccttaaatc

SEQ ID NO: 8275 - DNA, 13 bp, Artificial Sequence
  Oligonucleotide for detection of SNP TSC0002301
gttagagagattg

SEQ ID NO: 8276 - DNA, 13 bp, Artificial Sequence
  Oligonucleotide for detection of SNP TSC0002301
caatctctctaac

SEQ ID NO: 8277 - DNA, 13 bp, Artificial Sequence
  Oligonucleotide for detection of SNP TSC0002301
gttagaaagattg

SEQ ID NO: 8278 - DNA, 13 bp, Artificial Sequence
  Oligonucleotide for detection of SNP TSC0002301
caatctttctaac

SEQ ID NO: 8279 - DNA, 13 bp, Artificial Sequence
  Oligonucleotide for detection of SNP TSC0002302
tttttcgttttty

SEQ ID NO: 8280 - DNA, 13 bp, Artificial Sequence
  Oligonucleotide for detection of SNP TSC0002302
raaaaacgaaaaa

SEQ ID NO: 8281 - DNA, 13 bp, Artificial Sequence
  Oligonucleotide for detection of SNP TSC0002302
gagaagtgaaggg

SEQ ID NO: 8282 - DNA, 13 bp, Artificial Sequence
  Oligonucleotide for detection of SNP TSC0002302
cccttcacttctc

SEQ ID NO: 8283 - DNA, 13 bp, Artificial Sequence
  Oligonucleotide for detection of SNP TSC0002302
gagaagcgaaggg

SEQ ID NO: 8284 - DNA, 13 bp, Artificial Sequence
  Oligonucleotide for detection of SNP TSC0002302
cccttcgcttctc

SEQ ID NO: 8285 - DNA, 13 bp, Artificial Sequence
  Oligonucleotide for detection of SNP TSC0002303
ataaatattaata

SEQ ID NO: 8286 - DNA, 13 bp, Artificial Sequence
  Oligonucleotide for detection of SNP TSC0002303
tattaatatttat

SEQ ID NO: 8287 - DNA, 13 bp, Artificial Sequence
  Oligonucleotide for detection of SNP TSC0002303
ataaatgttaata

SEQ ID NO: 8288 - DNA, 13 bp, Artificial Sequence
  Oligonucleotide for detection of SNP TSC0002303
tattaacatttat

SEQ ID NO: 8289 - DNA, 13 bp, Artificial Sequence
  Oligonucleotide for detection of SNP TSC0002303
ataaacgttaata

SEQ ID NO: 8290 - DNA, 13 bp, Artificial Sequence
  Oligonucleotide for detection of SNP TSC0002303
tattaacgtttat

SEQ ID NO: 8291 - DNA, 13 bp, Artificial Sequence
  Oligonucleotide for detection of SNP TSC0002303
tattggtgtttgt

SEQ ID NO: 8292 - DNA, 13 bp, Artificial Sequence
  Oligonucleotide for detection of SNP TSC0002303
acaaacaccaata

SEQ ID NO: 8293 - DNA, 13 bp, Artificial Sequence
  Oligonucleotide for detection of SNP TSC0002303
tattggcgtttgt

SEQ ID NO: 8294 - DNA, 13 bp, Artificial Sequence
  Oligonucleotide for detection of SNP TSC0002303
acaaacgccaata

SEQ ID NO: 8295 - DNA, 13 bp, Artificial Sequence
  Oligonucleotide for detection of SNP TSC0002305
aatttttgttgta

SEQ ID NO: 8296 - DNA, 13 bp, Artificial Sequence
  Oligonucleotide for detection of SNP TSC0002305
tacaacaaaaatt

SEQ ID NO: 8297 - DNA, 13 bp, Artificial Sequence
  Oligonucleotide for detection of SNP TSC0002305
aattttcgttgta

SEQ ID NO: 8298 - DNA, 13 bp, Artificial Sequence
  Oligonucleotide for detection of SNP TSC0002305
tacaacgaaaatt

SEQ ID NO: 8299 - DNA, 13 bp, Artificial Sequence
  Oligonucleotide for detection of SNP TSC0002305
tataatggaagtt

SEQ ID NO: 8300 - DNA, 13 bp, Artificial Sequence
  Oligonucleotide for detection of SNP TSC0002305
aacttccattata

SEQ ID NO: 8301 - DNA, 13 bp, Artificial Sequence
  Oligonucleotide for detection of SNP TSC0002305
tataatagaagtt

SEQ ID NO: 8302 - DNA, 13 bp, Artificial Sequence
  Oligonucleotide for detection of SNP TSC0002305
aacttctattata

SEQ ID NO: 8303 - DNA, 13 bp, Artificial Sequence
  Oligonucleotide for detection of SNP TSC0002305
tataacggaagtt

SEQ ID NO: 8304 - DNA, 13 bp, Artificial Sequence
  Oligonucleotide for detection of SNP TSC0002305
aacttccgttata

SEQ ID NO: 8305 - DNA, 13 bp, Artificial Sequence
  Oligonucleotide for detection of SNP TSC0002306
tttatagaatttt

SEQ ID NO: 8306 - DNA, 13 bp, Artificial Sequence
  Oligonucleotide for detection of SNP TSC0002306
aaaattctataaa

SEQ ID NO: 8307 - DNA, 13 bp, Artificial Sequence
  Oligonucleotide for detection of SNP TSC0002306
tttataaaatttt

SEQ ID NO: 8308 - DNA, 13 bp, Artificial Sequence
  Oligonucleotide for detection of SNP TSC0002306
aaaattttataaa

SEQ ID NO: 8309 - DNA, 13 bp, Artificial Sequence
  Oligonucleotide for detection of SNP TSC0002307
ttataaggaagtt

SEQ ID NO: 8310 - DNA, 13 bp, Artificial Sequence
  Oligonucleotide for detection of SNP TSC0002307
aacttccttataa

SEQ ID NO: 8311 - DNA, 13 bp, Artificial Sequence
  Oligonucleotide for detection of SNP TSC0002307
ttataaagaagtt

SEQ ID NO: 8312 - DNA, 13 bp, Artificial Sequence
  Oligonucleotide for detection of SNP TSC0002307
aacttctttataa

SEQ ID NO: 8313 - DNA, 13 bp, Artificial Sequence
  Oligonucleotide for detection of SNP TSC0002308
aggaaaaaaatta

SEQ ID NO: 8314 - DNA, 13 bp, Artificial Sequence
  Oligonucleotide for detection of SNP TSC0002308
taatttttttcct

SEQ ID NO: 8315 - DNA, 13 bp, Artificial Sequence
  Oligonucleotide for detection of SNP TSC0002308
aggaaagaaatta

SEQ ID NO: 8316 - DNA, 13 bp, Artificial Sequence
  Oligonucleotide for detection of SNP TSC0002308
taatttctttcct

SEQ ID NO: 8317 - DNA, 13 bp, Artificial Sequence
  Oligonucleotide for detection of SNP TSC0002309
tttgttgtaaaaa

SEQ ID NO: 8318 - DNA, 13 bp, Artificial Sequence
  Oligonucleotide for detection of SNP TSC0002309
tttttacaacaaa

SEQ ID NO: 8319 - DNA, 13 bp, Artificial Sequence
  Oligonucleotide for detection of SNP TSC0002309
tttgttataaaaa

SEQ ID NO: 8320 - DNA, 13 bp, Artificial Sequence
  Oligonucleotide for detection of SNP TSC0002309
tttttataacaaa

SEQ ID NO: 8321 - DNA, 13 bp, Artificial Sequence
  Oligonucleotide for detection of SNP TSC0002310
ttatatagaatat

SEQ ID NO: 8322 - DNA, 13 bp, Artificial Sequence
  Oligonucleotide for detection of SNP TSC0002310
atattctatataa

SEQ ID NO: 8323 - DNA, 13 bp, Artificial Sequence
  Oligonucleotide for detection of SNP TSC0002310
ttatatggaatat

SEQ ID NO: 8324 - DNA, 13 bp, Artificial Sequence
  Oligonucleotide for detection of SNP TSC0002310
atattccatataa

SEQ ID NO: 8325 - DNA, 13 bp, Artificial Sequence
  Oligonucleotide for detection of SNP TSC0002311
attataaatattt

SEQ ID NO: 8326 - DNA, 13 bp, Artificial Sequence
  Oligonucleotide for detection of SNP TSC0002311
aaatatttataat

SEQ ID NO: 8327 - DNA, 13 bp, Artificial Sequence
  Oligonucleotide for detection of SNP TSC0002311
attatagatattt

SEQ ID NO: 8328 - DNA, 13 bp, Artificial Sequence
  Oligonucleotide for detection of SNP TSC0002311
aaatatctataat

SEQ ID NO: 8329 - DNA, 13 bp, Artificial Sequence
  Oligonucleotide for detection of SNP TSC0002312
attgtattatgtg

SEQ ID NO: 8330 - DNA, 13 bp, Artificial Sequence
  Oligonucleotide for detection of SNP TSC0002312
cacataatacaat

SEQ ID NO: 8331 - DNA, 13 bp, Artificial Sequence
  Oligonucleotide for detection of SNP TSC0002312
attgtagtatgtg

SEQ ID NO: 8332 - DNA, 13 bp, Artificial Sequence
  Oligonucleotide for detection of SNP TSC0002312
cacatactacaat

SEQ ID NO: 8333 - DNA, 13 bp, Artificial Sequence
  Oligonucleotide for detection of SNP TSC0002312
tatatgatataat

SEQ ID NO: 8334 - DNA, 13 bp, Artificial Sequence
  Oligonucleotide for detection of SNP TSC0002312
attatatcatata

SEQ ID NO: 8335 - DNA, 13 bp, Artificial Sequence
  Oligonucleotide for detection of SNP TSC0002312
tatatgttataat

SEQ ID NO: 8336 - DNA, 13 bp, Artificial Sequence
  Oligonucleotide for detection of SNP TSC0002312
attataacatata

SEQ ID NO: 8337 - DNA, 13 bp, Artificial Sequence
  Oligonucleotide for detection of SNP TSC0002313
tttaaaatttagt

SEQ ID NO: 8338 - DNA, 13 bp, Artificial Sequence
  Oligonucleotide for detection of SNP TSC0002313
actaaattttaaa

SEQ ID NO: 8339 - DNA, 13 bp, Artificial Sequence
  Oligonucleotide for detection of SNP TSC0002313
tttaaagtttagt

SEQ ID NO: 8340 - DNA, 13 bp, Artificial Sequence
  Oligonucleotide for detection of SNP TSC0002313
actaaactttaaa

SEQ ID NO: 8341 - DNA, 13 bp, Artificial Sequence
  Oligonucleotide for detection of SNP TSC0002314
tagaatgtgtggt

SEQ ID NO: 8342 - DNA, 13 bp, Artificial Sequence
  Oligonucleotide for detection of SNP TSC0002314
accacacattcta

SEQ ID NO: 8343 - DNA, 13 bp, Artificial Sequence
  Oligonucleotide for detection of SNP TSC0002314
tagaatatgtggt

SEQ ID NO: 8344 - DNA, 13 bp, Artificial Sequence
  Oligonucleotide for detection of SNP TSC0002314
accacatattcta

SEQ ID NO: 8345 - DNA, 13 bp, Artificial Sequence
  Oligonucleotide for detection of SNP TSC0002315
tgattagtattay

SEQ ID NO: 8346 - DNA, 13 bp, Artificial Sequence
  Oligonucleotide for detection of SNP TSC0002315
rtaatactaatca

SEQ ID NO: 8347 - DNA, 13 bp, Artificial Sequence
  Oligonucleotide for detection of SNP TSC0002315
tgattaatattay

SEQ ID NO: 8348 - DNA, 13 bp, Artificial Sequence
  Oligonucleotide for detection of SNP TSC0002315
rtaatattaatca

SEQ ID NO: 8349 - DNA, 13 bp, Artificial Sequence
  Oligonucleotide for detection of SNP TSC0002316
gtgtagaggttaa

SEQ ID NO: 8350 - DNA, 13 bp, Artificial Sequence
  Oligonucleotide for detection of SNP TSC0002316
ttaacctctacac

SEQ ID NO: 8351 - DNA, 13 bp, Artificial Sequence
  Oligonucleotide for detection of SNP TSC0002316
gtgtaggggttaa

SEQ ID NO: 8352 - DNA, 13 bp, Artificial Sequence
  Oligonucleotide for detection of SNP TSC0002316
ttaacccctacac

SEQ ID NO: 8353 - DNA, 13 bp, Artificial Sequence
  Oligonucleotide for detection of SNP TSC0002317
ttatatgtttatt

SEQ ID NO: 8354 - DNA, 13 bp, Artificial Sequence
  Oligonucleotide for detection of SNP TSC0002317
aataaacatataa

SEQ ID NO: 8355 - DNA, 13 bp, Artificial Sequence
  Oligonucleotide for detection of SNP TSC0002317
ttatacgtttatt

SEQ ID NO: 8356 - DNA, 13 bp, Artificial Sequence
  Oligonucleotide for detection of SNP TSC0002317
aataaacgtataa

SEQ ID NO: 8357 - DNA, 13 bp, Artificial Sequence
  Oligonucleotide for detection of SNP TSC0002317
aataaaagtgtgg

SEQ ID NO: 8358 - DNA, 13 bp, Artificial Sequence
  Oligonucleotide for detection of SNP TSC0002317
ccacacttttatt

SEQ ID NO: 8359 - DNA, 13 bp, Artificial Sequence
  Oligonucleotide for detection of SNP TSC0002317
aataaatgtgtgg

SEQ ID NO: 8360 - DNA, 13 bp, Artificial Sequence
  Oligonucleotide for detection of SNP TSC0002317
ccacacatttatt

SEQ ID NO: 8361 - DNA, 13 bp, Artificial Sequence
  Oligonucleotide for detection of SNP TSC0002317
aataaacgtgtgg

SEQ ID NO: 8362 - DNA, 13 bp, Artificial Sequence
  Oligonucleotide for detection of SNP TSC0002317
ccacacgtttatt

SEQ ID NO: 8363 - DNA, 13 bp, Artificial Sequence
  Oligonucleotide for detection of SNP TSC0002318
gatttttagtgga

SEQ ID NO: 8364 - DNA, 13 bp, Artificial Sequence
  Oligonucleotide for detection of SNP TSC0002318
tccactaaaaatc

SEQ ID NO: 8365 - DNA, 13 bp, Artificial Sequence
  Oligonucleotide for detection of SNP TSC0002318
gattttgagtgga

SEQ ID NO: 8366 - DNA, 13 bp, Artificial Sequence
  Oligonucleotide for detection of SNP TSC0002318
tccactcaaaatc

SEQ ID NO: 8367 - DNA, 13 bp, Artificial Sequence
  Oligonucleotide for detection of SNP TSC0002318
tttattgaaggty

SEQ ID NO: 8368 - DNA, 13 bp, Artificial Sequence
  Oligonucleotide for detection of SNP TSC0002318
raccttcaataaa

SEQ ID NO: 8369 - DNA, 13 bp, Artificial Sequence
  Oligonucleotide for detection of SNP TSC0002318
tttatttaaggty

SEQ ID NO: 8370 - DNA, 13 bp, Artificial Sequence
  Oligonucleotide for detection of SNP TSC0002318
raccttaaataaa

SEQ ID NO: 8371 - DNA, 13 bp, Artificial Sequence
  Oligonucleotide for detection of SNP TSC0002319
ttgtgttgggggg

SEQ ID NO: 8372 - DNA, 13 bp, Artificial Sequence
  Oligonucleotide for detection of SNP TSC0002319
ccccccaacacaa

SEQ ID NO: 8373 - DNA, 13 bp, Artificial Sequence
  Oligonucleotide for detection of SNP TSC0002319
ttgtgtggggggg

SEQ ID NO: 8374 - DNA, 13 bp, Artificial Sequence
  Oligonucleotide for detection of SNP TSC0002319
cccccccacacaa

SEQ ID NO: 8375 - DNA, 13 bp, Artificial Sequence
  Oligonucleotide for detection of SNP TSC0002319
ttgtgtcgggggg

SEQ ID NO: 8376 - DNA, 13 bp, Artificial Sequence
  Oligonucleotide for detection of SNP TSC0002319
ccccccgacacaa

SEQ ID NO: 8377 - DNA, 13 bp, Artificial Sequence
  Oligonucleotide for detection of SNP TSC0002319
ttttttgatatag

SEQ ID NO: 8378 - DNA, 13 bp, Artificial Sequence
  Oligonucleotide for detection of SNP TSC0002319
ctatatcaaaaaa

SEQ ID NO: 8379 - DNA, 13 bp, Artificial Sequence
  Oligonucleotide for detection of SNP TSC0002319
tttttttatatag

SEQ ID NO: 8380 - DNA, 13 bp, Artificial Sequence
  Oligonucleotide for detection of SNP TSC0002319
ctatataaaaaaa

SEQ ID NO: 8381 - DNA, 13 bp, Artificial Sequence
  Oligonucleotide for detection of SNP TSC0002319
tttttcgatatag

SEQ ID NO: 8382 - DNA, 13 bp, Artificial Sequence
  Oligonucleotide for detection of SNP TSC0002319
ctatatcgaaaaa

SEQ ID NO: 8383 - DNA, 13 bp, Artificial Sequence
  Oligonucleotide for detection of SNP TSC0002320
tttttaattgaty

SEQ ID NO: 8384 - DNA, 13 bp, Artificial Sequence
  Oligonucleotide for detection of SNP TSC0002320
ratcaattaaaaa

SEQ ID NO: 8385 - DNA, 13 bp, Artificial Sequence
  Oligonucleotide for detection of SNP TSC0002320
tttttatttgaty

SEQ ID NO: 8386 - DNA, 13 bp, Artificial Sequence
  Oligonucleotide for detection of SNP TSC0002320
ratcaaataaaaa

SEQ ID NO: 8387 - DNA, 13 bp, Artificial Sequence
  Oligonucleotide for detection of SNP TSC0002320
gattagttggaaa

SEQ ID NO: 8388 - DNA, 13 bp, Artificial Sequence
  Oligonucleotide for detection of SNP TSC0002320
tttccaactaatc

SEQ ID NO: 8389 - DNA, 13 bp, Artificial Sequence
  Oligonucleotide for detection of SNP TSC0002320
gattaggtggaaa

SEQ ID NO: 8390 - DNA, 13 bp, Artificial Sequence
  Oligonucleotide for detection of SNP TSC0002320
tttccacctaatc

SEQ ID NO: 8391 - DNA, 13 bp, Artificial Sequence
  Oligonucleotide for detection of SNP TSC0002321
ttaataatatatt

SEQ ID NO: 8392 - DNA, 13 bp, Artificial Sequence
  Oligonucleotide for detection of SNP TSC0002321
aatatattattaa

SEQ ID NO: 8393 - DNA, 13 bp, Artificial Sequence
  Oligonucleotide for detection of SNP TSC0002321
ttaatagtatatt

SEQ ID NO: 8394 - DNA, 13 bp, Artificial Sequence
  Oligonucleotide for detection of SNP TSC0002321
aatatactattaa

SEQ ID NO: 8395 - DNA, 13 bp, Artificial Sequence
  Oligonucleotide for detection of SNP TSC0002323
tggtaatgttatt

SEQ ID NO: 8396 - DNA, 13 bp, Artificial Sequence
  Oligonucleotide for detection of SNP TSC0002323
aataacattacca

SEQ ID NO: 8397 - DNA, 13 bp, Artificial Sequence
  Oligonucleotide for detection of SNP TSC0002323
tggtaacgttatt

SEQ ID NO: 8398 - DNA, 13 bp, Artificial Sequence
  Oligonucleotide for detection of SNP TSC0002323
aataacgttacca

SEQ ID NO: 8399 - DNA, 13 bp, Artificial Sequence
  Oligonucleotide for detection of SNP TSC0002323
aataatgttgtta

SEQ ID NO: 8400 - DNA, 13 bp, Artificial Sequence
  Oligonucleotide for detection of SNP TSC0002323
taacaacattatt

SEQ ID NO: 8401 - DNA, 13 bp, Artificial Sequence
  Oligonucleotide for detection of SNP TSC0002323
aataatattgtta

SEQ ID NO: 8402 - DNA, 13 bp, Artificial Sequence
  Oligonucleotide for detection of SNP TSC0002323
taacaatattatt

SEQ ID NO: 8403 - DNA, 13 bp, Artificial Sequence
  Oligonucleotide for detection of SNP TSC0002323
aataacgttgtta

SEQ ID NO: 8404 - DNA, 13 bp, Artificial Sequence
  Oligonucleotide for detection of SNP TSC0002323
taacaacgttatt

SEQ ID NO: 8405 - DNA, 13 bp, Artificial Sequence
  Oligonucleotide for detection of SNP TSC0002324
ttttgtatttagt

SEQ ID NO: 8406 - DNA, 13 bp, Artificial Sequence
  Oligonucleotide for detection of SNP TSC0002324
actaaatacaaaa

SEQ ID NO: 8407 - DNA, 13 bp, Artificial Sequence
  Oligonucleotide for detection of SNP TSC0002324
ttttgtttttagt

SEQ ID NO: 8408 - DNA, 13 bp, Artificial Sequence
  Oligonucleotide for detection of SNP TSC0002324
actaaaaacaaaa

SEQ ID NO: 8409 - DNA, 13 bp, Artificial Sequence
  Oligonucleotide for detection of SNP TSC0002324
attgaatatagaa

SEQ ID NO: 8410 - DNA, 13 bp, Artificial Sequence
  Oligonucleotide for detection of SNP TSC0002324
ttctatattcaat

SEQ ID NO: 8411 - DNA, 13 bp, Artificial Sequence
  Oligonucleotide for detection of SNP TSC0002324
attgaaaatagaa

SEQ ID NO: 8412 - DNA, 13 bp, Artificial Sequence
  Oligonucleotide for detection of SNP TSC0002324
ttctattttcaat

SEQ ID NO: 8413 - DNA, 13 bp, Artificial Sequence
  Oligonucleotide for detection of SNP TSC0002325
taagtaaatataa

SEQ ID NO: 8414 - DNA, 13 bp, Artificial Sequence
  Oligonucleotide for detection of SNP TSC0002325
ttatatttactta

SEQ ID NO: 8415 - DNA, 13 bp, Artificial Sequence
  Oligonucleotide for detection of SNP TSC0002325
taagtatatataa

SEQ ID NO: 8416 - DNA, 13 bp, Artificial Sequence
  Oligonucleotide for detection of SNP TSC0002325
ttatatatactta

SEQ ID NO: 8417 - DNA, 13 bp, Artificial Sequence
  Oligonucleotide for detection of SNP TSC0002325
ttgtgtttgttta

SEQ ID NO: 8418 - DNA, 13 bp, Artificial Sequence
  Oligonucleotide for detection of SNP TSC0002325
taaacaaacacaa

SEQ ID NO: 8419 - DNA, 13 bp, Artificial Sequence
  Oligonucleotide for detection of SNP TSC0002325
ttgtgtatgttta

SEQ ID NO: 8420 - DNA, 13 bp, Artificial Sequence
  Oligonucleotide for detection of SNP TSC0002325
taaacatacacaa

SEQ ID NO: 8421 - DNA, 13 bp, Artificial Sequence
  Oligonucleotide for detection of SNP TSC0002326
tattttatgaatt

SEQ ID NO: 8422 - DNA, 13 bp, Artificial Sequence
  Oligonucleotide for detection of SNP TSC0002326
aattcataaaata

SEQ ID NO: 8423 - DNA, 13 bp, Artificial Sequence
  Oligonucleotide for detection of SNP TSC0002326
tattttgtgaatt

SEQ ID NO: 8424 - DNA, 13 bp, Artificial Sequence
  Oligonucleotide for detection of SNP TSC0002326
aattcacaaaata

SEQ ID NO: 8425 - DNA, 13 bp, Artificial Sequence
  Oligonucleotide for detection of SNP TSC0002327
ttagatgtgtggt

SEQ ID NO: 8426 - DNA, 13 bp, Artificial Sequence
  Oligonucleotide for detection of SNP TSC0002327
accacacatctaa

SEQ ID NO: 8427 - DNA, 13 bp, Artificial Sequence
  Oligonucleotide for detection of SNP TSC0002327
ttagatatgtggt

SEQ ID NO: 8428 - DNA, 13 bp, Artificial Sequence
  Oligonucleotide for detection of SNP TSC0002327
accacatatctaa

SEQ ID NO: 8429 - DNA, 13 bp, Artificial Sequence
  Oligonucleotide for detection of SNP TSC0002328
tataatttattgt

SEQ ID NO: 8430 - DNA, 13 bp, Artificial Sequence
  Oligonucleotide for detection of SNP TSC0002328
acaataaattata

SEQ ID NO: 8431 - DNA, 13 bp, Artificial Sequence
  Oligonucleotide for detection of SNP TSC0002328
tataatgtattgt

SEQ ID NO: 8432 - DNA, 13 bp, Artificial Sequence
  Oligonucleotide for detection of SNP TSC0002328
acaatacattata

SEQ ID NO: 8433 - DNA, 13 bp, Artificial Sequence
  Oligonucleotide for detection of SNP TSC0002328
ataataaattatg

SEQ ID NO: 8434 - DNA, 13 bp, Artificial Sequence
  Oligonucleotide for detection of SNP TSC0002328
cataatttattat

SEQ ID NO: 8435 - DNA, 13 bp, Artificial Sequence
  Oligonucleotide for detection of SNP TSC0002328
ataatatattatg

SEQ ID NO: 8436 - DNA, 13 bp, Artificial Sequence
  Oligonucleotide for detection of SNP TSC0002328
cataatatattat

SEQ ID NO: 8437 - DNA, 13 bp, Artificial Sequence
  Oligonucleotide for detection of SNP TSC0002329
tttaggatatgga

SEQ ID NO: 8438 - DNA, 13 bp, Artificial Sequence
  Oligonucleotide for detection of SNP TSC0002329
tccatatcctaaa

SEQ ID NO: 8439 - DNA, 13 bp, Artificial Sequence
  Oligonucleotide for detection of SNP TSC0002329
tttagggtatgga

SEQ ID NO: 8440 - DNA, 13 bp, Artificial Sequence
  Oligonucleotide for detection of SNP TSC0002329
tccataccctaaa

SEQ ID NO: 8441 - DNA, 13 bp, Artificial Sequence
  Oligonucleotide for detection of SNP TSC0002330
atagtgttatata

SEQ ID NO: 8442 - DNA, 13 bp, Artificial Sequence
  Oligonucleotide for detection of SNP TSC0002330
tatataacactat

SEQ ID NO: 8443 - DNA, 13 bp, Artificial Sequence
  Oligonucleotide for detection of SNP TSC0002330
atagtggtatata

SEQ ID NO: 8444 - DNA, 13 bp, Artificial Sequence
  Oligonucleotide for detection of SNP TSC0002330
tatataccactat

SEQ ID NO: 8445 - DNA, 13 bp, Artificial Sequence
  Oligonucleotide for detection of SNP TSC0002330
tgtatgatattat

SEQ ID NO: 8446 - DNA, 13 bp, Artificial Sequence
  Oligonucleotide for detection of SNP TSC0002330
ataatatcataca

SEQ ID NO: 8447 - DNA, 13 bp, Artificial Sequence
  Oligonucleotide for detection of SNP TSC0002330
tgtatgttattat

SEQ ID NO: 8448 - DNA, 13 bp, Artificial Sequence
  Oligonucleotide for detection of SNP TSC0002330
ataataacataca

SEQ ID NO: 8449 - DNA, 13 bp, Artificial Sequence
  Oligonucleotide for detection of SNP TSC0002331
gattttaggtatt

SEQ ID NO: 8450 - DNA, 13 bp, Artificial Sequence
  Oligonucleotide for detection of SNP TSC0002331
aatacctaaaatc

SEQ ID NO: 8451 - DNA, 13 bp, Artificial Sequence
  Oligonucleotide for detection of SNP TSC0002331
gatttttggtatt

SEQ ID NO: 8452 - DNA, 13 bp, Artificial Sequence
  Oligonucleotide for detection of SNP TSC0002331
aataccaaaaatc

SEQ ID NO: 8453 - DNA, 13 bp, Artificial Sequence
  Oligonucleotide for detection of SNP TSC0002331
gattttcggtatt

SEQ ID NO: 8454 - DNA, 13 bp, Artificial Sequence
  Oligonucleotide for detection of SNP TSC0002331
aataccgaaaatc

SEQ ID NO: 8455 - DNA, 13 bp, Artificial Sequence
  Oligonucleotide for detection of SNP TSC0002331
aatgtttggaaty

SEQ ID NO: 8456 - DNA, 13 bp, Artificial Sequence
  Oligonucleotide for detection of SNP TSC0002331
rattccaaacatt

SEQ ID NO: 8457 - DNA, 13 bp, Artificial Sequence
  Oligonucleotide for detection of SNP TSC0002331
aatgttgggaaty

SEQ ID NO: 8458 - DNA, 13 bp, Artificial Sequence
  Oligonucleotide for detection of SNP TSC0002331
rattcccaacatt

SEQ ID NO: 8459 - DNA, 13 bp, Artificial Sequence
  Oligonucleotide for detection of SNP TSC0002331
aatgtcgggaaty

SEQ ID NO: 8460 - DNA, 13 bp, Artificial Sequence
  Oligonucleotide for detection of SNP TSC0002331
rattcccgacatt

SEQ ID NO: 8461 - DNA, 13 bp, Artificial Sequence
  Oligonucleotide for detection of SNP TSC0002332
ataggtaggatgg

SEQ ID NO: 8462 - DNA, 13 bp, Artificial Sequence
  Oligonucleotide for detection of SNP TSC0002332
ccatcctacctat

SEQ ID NO: 8463 - DNA, 13 bp, Artificial Sequence
  Oligonucleotide for detection of SNP TSC0002332
ataggtgggatgg

SEQ ID NO: 8464 - DNA, 13 bp, Artificial Sequence
  Oligonucleotide for detection of SNP TSC0002332
ccatcccacctat

SEQ ID NO: 8465 - DNA, 13 bp, Artificial Sequence
  Oligonucleotide for detection of SNP TSC0002332
ataggcgggatgg

SEQ ID NO: 8466 - DNA, 13 bp, Artificial Sequence
  Oligonucleotide for detection of SNP TSC0002332
ccatcccgcctat

SEQ ID NO: 8467 - DNA, 13 bp, Artificial Sequence
  Oligonucleotide for detection of SNP TSC0002332
ttattttgtttat

SEQ ID NO: 8468 - DNA, 13 bp, Artificial Sequence
  Oligonucleotide for detection of SNP TSC0002332
ataaacaaaataa

SEQ ID NO: 8469 - DNA, 13 bp, Artificial Sequence
  Oligonucleotide for detection of SNP TSC0002332
ttatttcgtttat

SEQ ID NO: 8470 - DNA, 13 bp, Artificial Sequence
  Oligonucleotide for detection of SNP TSC0002332
ataaacgaaataa

SEQ ID NO: 8471 - DNA, 13 bp, Artificial Sequence
  Oligonucleotide for detection of SNP TSC0002333
gtagtaatgtgag

SEQ ID NO: 8472 - DNA, 13 bp, Artificial Sequence
  Oligonucleotide for detection of SNP TSC0002333
ctcacattactac

SEQ ID NO: 8473 - DNA, 13 bp, Artificial Sequence
  Oligonucleotide for detection of SNP TSC0002333
gtagtagtgtgag

SEQ ID NO: 8474 - DNA, 13 bp, Artificial Sequence
  Oligonucleotide for detection of SNP TSC0002333
ctcacactactac

SEQ ID NO: 8475 - DNA, 13 bp, Artificial Sequence
  Oligonucleotide for detection of SNP TSC0002334
agttatggtgtty

SEQ ID NO: 8476 - DNA, 13 bp, Artificial Sequence
  Oligonucleotide for detection of SNP TSC0002334
raacaccataact

SEQ ID NO: 8477 - DNA, 13 bp, Artificial Sequence
  Oligonucleotide for detection of SNP TSC0002334
agttacggtgtty

SEQ ID NO: 8478 - DNA, 13 bp, Artificial Sequence
  Oligonucleotide for detection of SNP TSC0002334
raacaccgtaact

SEQ ID NO: 8479 - DNA, 13 bp, Artificial Sequence
  Oligonucleotide for detection of SNP TSC0002334
gggtattgtggtt

SEQ ID NO: 8480 - DNA, 13 bp, Artificial Sequence
  Oligonucleotide for detection of SNP TSC0002334
aaccacaataccc

SEQ ID NO: 8481 - DNA, 13 bp, Artificial Sequence
  Oligonucleotide for detection of SNP TSC0002334
gggtatggtggtt

SEQ ID NO: 8482 - DNA, 13 bp, Artificial Sequence
  Oligonucleotide for detection of SNP TSC0002334
aaccaccataccc

SEQ ID NO: 8483 - DNA, 13 bp, Artificial Sequence
  Oligonucleotide for detection of SNP TSC0002334
gggtatcgtggtt

SEQ ID NO: 8484 - DNA, 13 bp, Artificial Sequence
  Oligonucleotide for detection of SNP TSC0002334
aaccacgataccc

SEQ ID NO: 8485 - DNA, 13 bp, Artificial Sequence
  Oligonucleotide for detection of SNP TSC0002334
gggtacggtggtt

SEQ ID NO: 8486 - DNA, 13 bp, Artificial Sequence
  Oligonucleotide for detection of SNP TSC0002334
aaccaccgtaccc

SEQ ID NO: 8487 - DNA, 13 bp, Artificial Sequence
  Oligonucleotide for detection of SNP TSC0002335
tgttgagtttaty

SEQ ID NO: 8488 - DNA, 13 bp, Artificial Sequence
  Oligonucleotide for detection of SNP TSC0002335
rataaactcaaca

SEQ ID NO: 8489 - DNA, 13 bp, Artificial Sequence
  Oligonucleotide for detection of SNP TSC0002335
tgttgaatttaty

SEQ ID NO: 8490 - DNA, 13 bp, Artificial Sequence
  Oligonucleotide for detection of SNP TSC0002335
rataaattcaaca

SEQ ID NO: 8491 - DNA, 13 bp, Artificial Sequence
  Oligonucleotide for detection of SNP TSC0002335
tgtcgagtttaty

SEQ ID NO: 8492 - DNA, 13 bp, Artificial Sequence
  Oligonucleotide for detection of SNP TSC0002335
rataaactcgaca

SEQ ID NO: 8493 - DNA, 13 bp, Artificial Sequence
  Oligonucleotide for detection of SNP TSC0002335
tgtcgaatttaty

SEQ ID NO: 8494 - DNA, 13 bp, Artificial Sequence
  Oligonucleotide for detection of SNP TSC0002335
rataaattcgaca

SEQ ID NO: 8495 - DNA, 13 bp, Artificial Sequence
  Oligonucleotide for detection of SNP TSC0002337
agatataatagta

SEQ ID NO: 8496 - DNA, 13 bp, Artificial Sequence
  Oligonucleotide for detection of SNP TSC0002337
tactattatatct

SEQ ID NO: 8497 - DNA, 13 bp, Artificial Sequence
  Oligonucleotide for detection of SNP TSC0002337
agatatgatagta

SEQ ID NO: 8498 - DNA, 13 bp, Artificial Sequence
  Oligonucleotide for detection of SNP TSC0002337
tactatcatatct

SEQ ID NO: 8499 - DNA, 13 bp, Artificial Sequence
  Oligonucleotide for detection of SNP TSC0002338
tttagtttttttt

SEQ ID NO: 8500 - DNA, 13 bp, Artificial Sequence
  Oligonucleotide for detection of SNP TSC0002338
aaaaaaaactaaa

SEQ ID NO: 8501 - DNA, 13 bp, Artificial Sequence
  Oligonucleotide for detection of SNP TSC0002338
tttagtatttttt

SEQ ID NO: 8502 - DNA, 13 bp, Artificial Sequence
  Oligonucleotide for detection of SNP TSC0002338
aaaaaatactaaa

SEQ ID NO: 8503 - DNA, 13 bp, Artificial Sequence
  Oligonucleotide for detection of SNP TSC0002338
aaaaaggattggg

SEQ ID NO: 8504 - DNA, 13 bp, Artificial Sequence
  Oligonucleotide for detection of SNP TSC0002338
cccaatccttttt

SEQ ID NO: 8505 - DNA, 13 bp, Artificial Sequence
  Oligonucleotide for detection of SNP TSC0002338
aaaaagtattggg

SEQ ID NO: 8506 - DNA, 13 bp, Artificial Sequence
  Oligonucleotide for detection of SNP TSC0002338
cccaatacttttt

SEQ ID NO: 8507 - DNA, 13 bp, Artificial Sequence
  Oligonucleotide for detection of SNP TSC0002339
atagggtgatgta

SEQ ID NO: 8508 - DNA, 13 bp, Artificial Sequence
  Oligonucleotide for detection of SNP TSC0002339
tacatcaccctat

SEQ ID NO: 8509 - DNA, 13 bp, Artificial Sequence
  Oligonucleotide for detection of SNP TSC0002339
atagggcgatgta

SEQ ID NO: 8510 - DNA, 13 bp, Artificial Sequence
  Oligonucleotide for detection of SNP TSC0002339
tacatcgccctat

SEQ ID NO: 8511 - DNA, 13 bp, Artificial Sequence
  Oligonucleotide for detection of SNP TSC0002339
tatattgttttgt

SEQ ID NO: 8512 - DNA, 13 bp, Artificial Sequence
  Oligonucleotide for detection of SNP TSC0002339
acaaaacaatata

SEQ ID NO: 8513 - DNA, 13 bp, Artificial Sequence
  Oligonucleotide for detection of SNP TSC0002339
tatattattttgt

SEQ ID NO: 8514 - DNA, 13 bp, Artificial Sequence
  Oligonucleotide for detection of SNP TSC0002339
acaaaataatata

SEQ ID NO: 8515 - DNA, 13 bp, Artificial Sequence
  Oligonucleotide for detection of SNP TSC0002339
tatatcgttttgt

SEQ ID NO: 8516 - DNA, 13 bp, Artificial Sequence
  Oligonucleotide for detection of SNP TSC0002339
acaaaacgatata

SEQ ID NO: 8517 - DNA, 13 bp, Artificial Sequence
  Oligonucleotide for detection of SNP TSC0002340
ttgttttgaggty

SEQ ID NO: 8518 - DNA, 13 bp, Artificial Sequence
  Oligonucleotide for detection of SNP TSC0002340
racctcaaaacaa

SEQ ID NO: 8519 - DNA, 13 bp, Artificial Sequence
  Oligonucleotide for detection of SNP TSC0002340
ttgtttcgaggty

SEQ ID NO: 8520 - DNA, 13 bp, Artificial Sequence
  Oligonucleotide for detection of SNP TSC0002340
racctcgaaacaa

SEQ ID NO: 8521 - DNA, 13 bp, Artificial Sequence
  Oligonucleotide for detection of SNP TSC0002340
ggttttgaggtag

SEQ ID NO: 8522 - DNA, 13 bp, Artificial Sequence
  Oligonucleotide for detection of SNP TSC0002340
ctacctcaaaacc

SEQ ID NO: 8523 - DNA, 13 bp, Artificial Sequence
  Oligonucleotide for detection of SNP TSC0002340
ggttttaaggtag

SEQ ID NO: 8524 - DNA, 13 bp, Artificial Sequence
  Oligonucleotide for detection of SNP TSC0002340
ctaccttaaaacc

SEQ ID NO: 8525 - DNA, 13 bp, Artificial Sequence
  Oligonucleotide for detection of SNP TSC0002340
ggtttcgaggtag

SEQ ID NO: 8526 - DNA, 13 bp, Artificial Sequence
  Oligonucleotide for detection of SNP TSC0002340
ctacctcgaaacc

SEQ ID NO: 8527 - DNA, 13 bp, Artificial Sequence
  Oligonucleotide for detection of SNP TSC0002341
ttttttgatttay

SEQ ID NO: 8528 - DNA, 13 bp, Artificial Sequence
  Oligonucleotide for detection of SNP TSC0002341
rtaaatcaaaaaa

SEQ ID NO: 8529 - DNA, 13 bp, Artificial Sequence
  Oligonucleotide for detection of SNP TSC0002341
ttttttaatttay

SEQ ID NO: 8530 - DNA, 13 bp, Artificial Sequence
  Oligonucleotide for detection of SNP TSC0002341
rtaaattaaaaaa

SEQ ID NO: 8531 - DNA, 13 bp, Artificial Sequence
  Oligonucleotide for detection of SNP TSC0002341
tttttcgatttay

SEQ ID NO: 8532 - DNA, 13 bp, Artificial Sequence
  Oligonucleotide for detection of SNP TSC0002341
rtaaatcgaaaaa

SEQ ID NO: 8533 - DNA, 13 bp, Artificial Sequence
  Oligonucleotide for detection of SNP TSC0002341
gtgggttggaggg

SEQ ID NO: 8534 - DNA, 13 bp, Artificial Sequence
  Oligonucleotide for detection of SNP TSC0002341
ccctccaacccac

SEQ ID NO: 8535 - DNA, 13 bp, Artificial Sequence
  Oligonucleotide for detection of SNP TSC0002341
gtgggtcggaggg

SEQ ID NO: 8536 - DNA, 13 bp, Artificial Sequence
  Oligonucleotide for detection of SNP TSC0002341
ccctccgacccac

SEQ ID NO: 8537 - DNA, 13 bp, Artificial Sequence
  Oligonucleotide for detection of SNP TSC0002342
tattatataatag

SEQ ID NO: 8538 - DNA, 13 bp, Artificial Sequence
  Oligonucleotide for detection of SNP TSC0002342
ctattatataata

SEQ ID NO: 8539 - DNA, 13 bp, Artificial Sequence
  Oligonucleotide for detection of SNP TSC0002342
tattatgtaatag

SEQ ID NO: 8540 - DNA, 13 bp, Artificial Sequence
  Oligonucleotide for detection of SNP TSC0002342
ctattacataata

SEQ ID NO: 8541 - DNA, 13 bp, Artificial Sequence
  Oligonucleotide for detection of SNP TSC0002343
tgtaaaatataty

SEQ ID NO: 8542 - DNA, 13 bp, Artificial Sequence
  Oligonucleotide for detection of SNP TSC0002343
ratatattttaca

SEQ ID NO: 8543 - DNA, 13 bp, Artificial Sequence
  Oligonucleotide for detection of SNP TSC0002343
tgtaaagtataty

SEQ ID NO: 8544 - DNA, 13 bp, Artificial Sequence
  Oligonucleotide for detection of SNP TSC0002343
ratatactttaca

SEQ ID NO: 8545 - DNA, 13 bp, Artificial Sequence
  Oligonucleotide for detection of SNP TSC0002344
gagagtgtattaa

SEQ ID NO: 8546 - DNA, 13 bp, Artificial Sequence
  Oligonucleotide for detection of SNP TSC0002344
ttaatacactctc

SEQ ID NO: 8547 - DNA, 13 bp, Artificial Sequence
  Oligonucleotide for detection of SNP TSC0002344
gagagtatattaa

SEQ ID NO: 8548 - DNA, 13 bp, Artificial Sequence
  Oligonucleotide for detection of SNP TSC0002344
ttaatatactctc

SEQ ID NO: 8549 - DNA, 13 bp, Artificial Sequence
  Oligonucleotide for detection of SNP TSC0002345
agggggatttgty

SEQ ID NO: 8550 - DNA, 13 bp, Artificial Sequence
  Oligonucleotide for detection of SNP TSC0002345
racaaatccccct

SEQ ID NO: 8551 - DNA, 13 bp, Artificial Sequence
  Oligonucleotide for detection of SNP TSC0002345
aggggggtttgty

SEQ ID NO: 8552 - DNA, 13 bp, Artificial Sequence
  Oligonucleotide for detection of SNP TSC0002345
racaaacccccct

SEQ ID NO: 8553 - DNA, 13 bp, Artificial Sequence
  Oligonucleotide for detection of SNP TSC0002345
agggggattcgty

SEQ ID NO: 8554 - DNA, 13 bp, Artificial Sequence
  Oligonucleotide for detection of SNP TSC0002345
racgaatccccct

SEQ ID NO: 8555 - DNA, 13 bp, Artificial Sequence
  Oligonucleotide for detection of SNP TSC0002345
aggggggttcgty

SEQ ID NO: 8556 - DNA, 13 bp, Artificial Sequence
  Oligonucleotide for detection of SNP TSC0002345
racgaacccccct

SEQ ID NO: 8557 - DNA, 13 bp, Artificial Sequence
  Oligonucleotide for detection of SNP TSC0002346
gttttaaataatt

SEQ ID NO: 8558 - DNA, 13 bp, Artificial Sequence
  Oligonucleotide for detection of SNP TSC0002346
aattatttaaaac

SEQ ID NO: 8559 - DNA, 13 bp, Artificial Sequence
  Oligonucleotide for detection of SNP TSC0002346
gttttagataatt

SEQ ID NO: 8560 - DNA, 13 bp, Artificial Sequence
  Oligonucleotide for detection of SNP TSC0002346
aattatctaaaac

SEQ ID NO: 8561 - DNA, 13 bp, Artificial Sequence
  Oligonucleotide for detection of SNP TSC0002347
aaattgtggttty

SEQ ID NO: 8562 - DNA, 13 bp, Artificial Sequence
  Oligonucleotide for detection of SNP TSC0002347
raaaccacaattt

SEQ ID NO: 8563 - DNA, 13 bp, Artificial Sequence
  Oligonucleotide for detection of SNP TSC0002347
aaattggggttty

SEQ ID NO: 8564 - DNA, 13 bp, Artificial Sequence
  Oligonucleotide for detection of SNP TSC0002347
raaaccccaattt

SEQ ID NO: 8565 - DNA, 13 bp, Artificial Sequence
  Oligonucleotide for detection of SNP TSC0002347
gaaattatagttt

SEQ ID NO: 8566 - DNA, 13 bp, Artificial Sequence
  Oligonucleotide for detection of SNP TSC0002347
aaactataatttc

SEQ ID NO: 8567 - DNA, 13 bp, Artificial Sequence
  Oligonucleotide for detection of SNP TSC0002347
gaaattttagttt

SEQ ID NO: 8568 - DNA, 13 bp, Artificial Sequence
  Oligonucleotide for detection of SNP TSC0002347
aaactaaaatttc

SEQ ID NO: 8569 - DNA, 13 bp, Artificial Sequence
  Oligonucleotide for detection of SNP TSC0002349
aaagagtgatatt

SEQ ID NO: 8570 - DNA, 13 bp, Artificial Sequence
  Oligonucleotide for detection of SNP TSC0002349
aatatcactcttt

SEQ ID NO: 8571 - DNA, 13 bp, Artificial Sequence
  Oligonucleotide for detection of SNP TSC0002349
aaagagcgatatt

SEQ ID NO: 8572 - DNA, 13 bp, Artificial Sequence
  Oligonucleotide for detection of SNP TSC0002349
aatatcgctcttt

SEQ ID NO: 8573 - DNA, 13 bp, Artificial Sequence
  Oligonucleotide for detection of SNP TSC0002349
aatattatttttt

SEQ ID NO: 8574 - DNA, 13 bp, Artificial Sequence
  Oligonucleotide for detection of SNP TSC0002349
aaaaaataatatt

SEQ ID NO: 8575 - DNA, 13 bp, Artificial Sequence
  Oligonucleotide for detection of SNP TSC0002349
aatatcgtttttt

SEQ ID NO: 8576 - DNA, 13 bp, Artificial Sequence
  Oligonucleotide for detection of SNP TSC0002349
aaaaaacgatatt

SEQ ID NO: 8577 - DNA, 13 bp, Artificial Sequence
  Oligonucleotide for detection of SNP TSC0002351
tagtattgttttg

SEQ ID NO: 8578 - DNA, 13 bp, Artificial Sequence
  Oligonucleotide for detection of SNP TSC0002351
caaaacaatacta

SEQ ID NO: 8579 - DNA, 13 bp, Artificial Sequence
  Oligonucleotide for detection of SNP TSC0002351
tagtatcgttttg

SEQ ID NO: 8580 - DNA, 13 bp, Artificial Sequence
  Oligonucleotide for detection of SNP TSC0002351
caaaacgatacta

SEQ ID NO: 8581 - DNA, 13 bp, Artificial Sequence
  Oligonucleotide for detection of SNP TSC0002351
taaagtggtgtta

SEQ ID NO: 8582 - DNA, 13 bp, Artificial Sequence
  Oligonucleotide for detection of SNP TSC0002351
taacaccacttta

SEQ ID NO: 8583 - DNA, 13 bp, Artificial Sequence
  Oligonucleotide for detection of SNP TSC0002351
taaagtagtgtta

SEQ ID NO: 8584 - DNA, 13 bp, Artificial Sequence
  Oligonucleotide for detection of SNP TSC0002351
taacactacttta

SEQ ID NO: 8585 - DNA, 13 bp, Artificial Sequence
  Oligonucleotide for detection of SNP TSC0002351
taaagcggtgtta

SEQ ID NO: 8586 - DNA, 13 bp, Artificial Sequence
  Oligonucleotide for detection of SNP TSC0002351
taacaccgcttta

SEQ ID NO: 8587 - DNA, 13 bp, Artificial Sequence
  Oligonucleotide for detection of SNP TSC0002353
ttgattgtgtagy

SEQ ID NO: 8588 - DNA, 13 bp, Artificial Sequence
  Oligonucleotide for detection of SNP TSC0002353
rctacacaatcaa

SEQ ID NO: 8589 - DNA, 13 bp, Artificial Sequence
  Oligonucleotide for detection of SNP TSC0002353
ttgattatgtagy

SEQ ID NO: 8590 - DNA, 13 bp, Artificial Sequence
  Oligonucleotide for detection of SNP TSC0002353
rctacataatcaa

SEQ ID NO: 8591 - DNA, 13 bp, Artificial Sequence
  Oligonucleotide for detection of SNP TSC0002353
ttgatcgtgtagy

SEQ ID NO: 8592 - DNA, 13 bp, Artificial Sequence
  Oligonucleotide for detection of SNP TSC0002353
rctacacgatcaa

SEQ ID NO: 8593 - DNA, 13 bp, Artificial Sequence
  Oligonucleotide for detection of SNP TSC0002353
gttgtatgattag

SEQ ID NO: 8594 - DNA, 13 bp, Artificial Sequence
  Oligonucleotide for detection of SNP TSC0002353
ctaatcatacaac

SEQ ID NO: 8595 - DNA, 13 bp, Artificial Sequence
  Oligonucleotide for detection of SNP TSC0002353
gttgtacgattag

SEQ ID NO: 8596 - DNA, 13 bp, Artificial Sequence
  Oligonucleotide for detection of SNP TSC0002353
ctaatcgtacaac

SEQ ID NO: 8597 - DNA, 13 bp, Artificial Sequence
  Oligonucleotide for detection of SNP TSC0002355
tgtgatgggggag

SEQ ID NO: 8598 - DNA, 13 bp, Artificial Sequence
  Oligonucleotide for detection of SNP TSC0002355
ctcccccatcaca

SEQ ID NO: 8599 - DNA, 13 bp, Artificial Sequence
  Oligonucleotide for detection of SNP TSC0002355
tgtgataggggag

SEQ ID NO: 8600 - DNA, 13 bp, Artificial Sequence
  Oligonucleotide for detection of SNP TSC0002355
ctcccctatcaca

SEQ ID NO: 8601 - DNA, 13 bp, Artificial Sequence
  Oligonucleotide for detection of SNP TSC0002355
tgcgatgggggag

SEQ ID NO: 8602 - DNA, 13 bp, Artificial Sequence
  Oligonucleotide for detection of SNP TSC0002355
ctcccccatcgca

SEQ ID NO: 8603 - DNA, 13 bp, Artificial Sequence
  Oligonucleotide for detection of SNP TSC0002355
tgcgataggggag

SEQ ID NO: 8604 - DNA, 13 bp, Artificial Sequence
  Oligonucleotide for detection of SNP TSC0002355
ctcccctatcgca

SEQ ID NO: 8605 - DNA, 13 bp, Artificial Sequence
  Oligonucleotide for detection of SNP TSC0002357
ggtgaaaggtttt

SEQ ID NO: 8606 - DNA, 13 bp, Artificial Sequence
  Oligonucleotide for detection of SNP TSC0002357
aaaacctttcacc

SEQ ID NO: 8607 - DNA, 13 bp, Artificial Sequence
  Oligonucleotide for detection of SNP TSC0002357
ggtgaagggtttt

SEQ ID NO: 8608 - DNA, 13 bp, Artificial Sequence
  Oligonucleotide for detection of SNP TSC0002357
aaaacccttcacc

SEQ ID NO: 8609 - DNA, 13 bp, Artificial Sequence
  Oligonucleotide for detection of SNP TSC0002359
tagattatttttt

SEQ ID NO: 8610 - DNA, 13 bp, Artificial Sequence
  Oligonucleotide for detection of SNP TSC0002359
aaaaaataatcta

SEQ ID NO: 8611 - DNA, 13 bp, Artificial Sequence
  Oligonucleotide for detection of SNP TSC0002359
tagattgtttttt

SEQ ID NO: 8612 - DNA, 13 bp, Artificial Sequence
  Oligonucleotide for detection of SNP TSC0002359
aaaaaacaatcta

SEQ ID NO: 8613 - DNA, 13 bp, Artificial Sequence
  Oligonucleotide for detection of SNP TSC0002361
tgaattgtattta

SEQ ID NO: 8614 - DNA, 13 bp, Artificial Sequence
  Oligonucleotide for detection of SNP TSC0002361
taaatacaattca

SEQ ID NO: 8615 - DNA, 13 bp, Artificial Sequence
  Oligonucleotide for detection of SNP TSC0002361
tgaattatattta

SEQ ID NO: 8616 - DNA, 13 bp, Artificial Sequence
  Oligonucleotide for detection of SNP TSC0002361
taaatataattca

SEQ ID NO: 8617 - DNA, 13 bp, Artificial Sequence
  Oligonucleotide for detection of SNP TSC0002362
ttggtgatgagty

SEQ ID NO: 8618 - DNA, 13 bp, Artificial Sequence
  Oligonucleotide for detection of SNP TSC0002362
ractcatcaccaa

SEQ ID NO: 8619 - DNA, 13 bp, Artificial Sequence
  Oligonucleotide for detection of SNP TSC0002362
ttggtggtgagty

SEQ ID NO: 8620 - DNA, 13 bp, Artificial Sequence
  Oligonucleotide for detection of SNP TSC0002362
ractcaccaccaa

SEQ ID NO: 8621 - DNA, 13 bp, Artificial Sequence
  Oligonucleotide for detection of SNP TSC0002362
tcggtgatgagty

SEQ ID NO: 8622 - DNA, 13 bp, Artificial Sequence
  Oligonucleotide for detection of SNP TSC0002362
ractcatcaccga

SEQ ID NO: 8623 - DNA, 13 bp, Artificial Sequence
  Oligonucleotide for detection of SNP TSC0002362
tcggtggtgagty

SEQ ID NO: 8624 - DNA, 13 bp, Artificial Sequence
  Oligonucleotide for detection of SNP TSC0002362
ractcaccaccga

SEQ ID NO: 8625 - DNA, 13 bp, Artificial Sequence
  Oligonucleotide for detection of SNP TSC0002364
tttgggttttata

SEQ ID NO: 8626 - DNA, 13 bp, Artificial Sequence
  Oligonucleotide for detection of SNP TSC0002364
tataaaacccaaa

SEQ ID NO: 8627 - DNA, 13 bp, Artificial Sequence
  Oligonucleotide for detection of SNP TSC0002364
tttggggtttata

SEQ ID NO: 8628 - DNA, 13 bp, Artificial Sequence
  Oligonucleotide for detection of SNP TSC0002364
tataaaccccaaa

SEQ ID NO: 8629 - DNA, 13 bp, Artificial Sequence
  Oligonucleotide for detection of SNP TSC0002364
tgtggggtttagg

SEQ ID NO: 8630 - DNA, 13 bp, Artificial Sequence
  Oligonucleotide for detection of SNP TSC0002364
cctaaaccccaca

SEQ ID NO: 8631 - DNA, 13 bp, Artificial Sequence
  Oligonucleotide for detection of SNP TSC0002364
tgtgggttttagg

SEQ ID NO: 8632 - DNA, 13 bp, Artificial Sequence
  Oligonucleotide for detection of SNP TSC0002364
cctaaaacccaca

SEQ ID NO: 8633 - DNA, 13 bp, Artificial Sequence
  Oligonucleotide for detection of SNP TSC0002366
tatttgaaatttt

SEQ ID NO: 8634 - DNA, 13 bp, Artificial Sequence
  Oligonucleotide for detection of SNP TSC0002366
aaaatttcaaata

SEQ ID NO: 8635 - DNA, 13 bp, Artificial Sequence
  Oligonucleotide for detection of SNP TSC0002366
tatttggaatttt

SEQ ID NO: 8636 - DNA, 13 bp, Artificial Sequence
  Oligonucleotide for detection of SNP TSC0002366
aaaattccaaata

SEQ ID NO: 8637 - DNA, 13 bp, Artificial Sequence
  Oligonucleotide for detection of SNP TSC0002367
gtttttgttttga

SEQ ID NO: 8638 - DNA, 13 bp, Artificial Sequence
  Oligonucleotide for detection of SNP TSC0002367
tcaaaacaaaaac

SEQ ID NO: 8639 - DNA, 13 bp, Artificial Sequence
  Oligonucleotide for detection of SNP TSC0002367
gttttttttttga

SEQ ID NO: 8640 - DNA, 13 bp, Artificial Sequence
  Oligonucleotide for detection of SNP TSC0002367
tcaaaaaaaaaac

SEQ ID NO: 8641 - DNA, 13 bp, Artificial Sequence
  Oligonucleotide for detection of SNP TSC0002367
ttagggtaggggy

SEQ ID NO: 8642 - DNA, 13 bp, Artificial Sequence
  Oligonucleotide for detection of SNP TSC0002367
rcccctaccctaa

SEQ ID NO: 8643 - DNA, 13 bp, Artificial Sequence
  Oligonucleotide for detection of SNP TSC0002367
ttagggaaggggy

SEQ ID NO: 8644 - DNA, 13 bp, Artificial Sequence
  Oligonucleotide for detection of SNP TSC0002367
rccccttccctaa

SEQ ID NO: 8645 - DNA, 13 bp, Artificial Sequence
  Oligonucleotide for detection of SNP TSC0002368
ttgtttgtttatt

SEQ ID NO: 8646 - DNA, 13 bp, Artificial Sequence
  Oligonucleotide for detection of SNP TSC0002368
aataaacaaacaa

SEQ ID NO: 8647 - DNA, 13 bp, Artificial Sequence
  Oligonucleotide for detection of SNP TSC0002368
ttgtttatttatt

SEQ ID NO: 8648 - DNA, 13 bp, Artificial Sequence
  Oligonucleotide for detection of SNP TSC0002368
aataaataaacaa

SEQ ID NO: 8649 - DNA, 13 bp, Artificial Sequence
  Oligonucleotide for detection of SNP TSC0002370
tttgtatgttaag

SEQ ID NO: 8650 - DNA, 13 bp, Artificial Sequence
  Oligonucleotide for detection of SNP TSC0002370
cttaacatacaaa

SEQ ID NO: 8651 - DNA, 13 bp, Artificial Sequence
  Oligonucleotide for detection of SNP TSC0002370
ttcgtatgttaag

SEQ ID NO: 8652 - DNA, 13 bp, Artificial Sequence
  Oligonucleotide for detection of SNP TSC0002370
cttaacatacgaa

SEQ ID NO: 8653 - DNA, 13 bp, Artificial Sequence
  Oligonucleotide for detection of SNP TSC0002370
tttgtacgttaag

SEQ ID NO: 8654 - DNA, 13 bp, Artificial Sequence
  Oligonucleotide for detection of SNP TSC0002370
cttaacgtacaaa

SEQ ID NO: 8655 - DNA, 13 bp, Artificial Sequence
  Oligonucleotide for detection of SNP TSC0002370
ttcgtacgttaag

SEQ ID NO: 8656 - DNA, 13 bp, Artificial Sequence
  Oligonucleotide for detection of SNP TSC0002370
cttaacgtacgaa

SEQ ID NO: 8657 - DNA, 13 bp, Artificial Sequence
  Oligonucleotide for detection of SNP TSC0002370
tttagtatatgag

SEQ ID NO: 8658 - DNA, 13 bp, Artificial Sequence
  Oligonucleotide for detection of SNP TSC0002370
ctcatatactaaa

SEQ ID NO: 8659 - DNA, 13 bp, Artificial Sequence
  Oligonucleotide for detection of SNP TSC0002370
tttagtgtatgag

SEQ ID NO: 8660 - DNA, 13 bp, Artificial Sequence
  Oligonucleotide for detection of SNP TSC0002370
ctcatacactaaa

SEQ ID NO: 8661 - DNA, 13 bp, Artificial Sequence
  Oligonucleotide for detection of SNP TSC0002370
tttagtatacgag

SEQ ID NO: 8662 - DNA, 13 bp, Artificial Sequence
  Oligonucleotide for detection of SNP TSC0002370
ctcgtatactaaa

SEQ ID NO: 8663 - DNA, 13 bp, Artificial Sequence
  Oligonucleotide for detection of SNP TSC0002370
tttagcgtatgag

SEQ ID NO: 8664 - DNA, 13 bp, Artificial Sequence
  Oligonucleotide for detection of SNP TSC0002370
ctcatacgctaaa

SEQ ID NO: 8665 - DNA, 13 bp, Artificial Sequence
  Oligonucleotide for detection of SNP TSC0002370
tttagtgtacgag

SEQ ID NO: 8666 - DNA, 13 bp, Artificial Sequence
  Oligonucleotide for detection of SNP TSC0002370
ctcgtacactaaa

SEQ ID NO: 8667 - DNA, 13 bp, Artificial Sequence
  Oligonucleotide for detection of SNP TSC0002370
tttagcgtacgag

SEQ ID NO: 8668 - DNA, 13 bp, Artificial Sequence
  Oligonucleotide for detection of SNP TSC0002370
ctcgtacgctaaa

SEQ ID NO: 8669 - DNA, 13 bp, Artificial Sequence
  Oligonucleotide for detection of SNP TSC0002371
atggtgattgatg

SEQ ID NO: 8670 - DNA, 13 bp, Artificial Sequence
  Oligonucleotide for detection of SNP TSC0002371
catcaatcaccat

SEQ ID NO: 8671 - DNA, 13 bp, Artificial Sequence
  Oligonucleotide for detection of SNP TSC0002371
atggtggttgatg

SEQ ID NO: 8672 - DNA, 13 bp, Artificial Sequence
  Oligonucleotide for detection of SNP TSC0002371
catcaaccaccat

SEQ ID NO: 8673 - DNA, 13 bp, Artificial Sequence
  Oligonucleotide for detection of SNP TSC0002371
atggtgattgacg

SEQ ID NO: 8674 - DNA, 13 bp, Artificial Sequence
  Oligonucleotide for detection of SNP TSC0002371
cgtcaatcaccat

SEQ ID NO: 8675 - DNA, 13 bp, Artificial Sequence
  Oligonucleotide for detection of SNP TSC0002371
atggtggttgacg

SEQ ID NO: 8676 - DNA, 13 bp, Artificial Sequence
  Oligonucleotide for detection of SNP TSC0002371
cgtcaaccaccat

SEQ ID NO: 8677 - DNA, 13 bp, Artificial Sequence
  Oligonucleotide for detection of SNP TSC0002372
tttttaatttttg

SEQ ID NO: 8678 - DNA, 13 bp, Artificial Sequence
  Oligonucleotide for detection of SNP TSC0002372
caaaaattaaaaa

SEQ ID NO: 8679 - DNA, 13 bp, Artificial Sequence
  Oligonucleotide for detection of SNP TSC0002372
tttttagtttttg

SEQ ID NO: 8680 - DNA, 13 bp, Artificial Sequence
  Oligonucleotide for detection of SNP TSC0002372
caaaaactaaaaa

SEQ ID NO: 8681 - DNA, 13 bp, Artificial Sequence
  Oligonucleotide for detection of SNP TSC0002373
ttttttgtggaay

SEQ ID NO: 8682 - DNA, 13 bp, Artificial Sequence
  Oligonucleotide for detection of SNP TSC0002373
rttccacaaaaaa

SEQ ID NO: 8683 - DNA, 13 bp, Artificial Sequence
  Oligonucleotide for detection of SNP TSC0002373
ttttttatggaay

SEQ ID NO: 8684 - DNA, 13 bp, Artificial Sequence
  Oligonucleotide for detection of SNP TSC0002373
rttccataaaaaa

SEQ ID NO: 8685 - DNA, 13 bp, Artificial Sequence
  Oligonucleotide for detection of SNP TSC0002374
aaataagaggatt

SEQ ID NO: 8686 - DNA, 13 bp, Artificial Sequence
  Oligonucleotide for detection of SNP TSC0002374
aatcctcttattt

SEQ ID NO: 8687 - DNA, 13 bp, Artificial Sequence
  Oligonucleotide for detection of SNP TSC0002374
aaataaaaggatt

SEQ ID NO: 8688 - DNA, 13 bp, Artificial Sequence
  Oligonucleotide for detection of SNP TSC0002374
aatccttttattt

SEQ ID NO: 8689 - DNA, 13 bp, Artificial Sequence
  Oligonucleotide for detection of SNP TSC0002375
ggttttgtaagaa

SEQ ID NO: 8690 - DNA, 13 bp, Artificial Sequence
  Oligonucleotide for detection of SNP TSC0002375
ttcttacaaaacc

SEQ ID NO: 8691 - DNA, 13 bp, Artificial Sequence
  Oligonucleotide for detection of SNP TSC0002375
ggttttataagaa

SEQ ID NO: 8692 - DNA, 13 bp, Artificial Sequence
  Oligonucleotide for detection of SNP TSC0002375
ttcttataaaacc

SEQ ID NO: 8693 - DNA, 13 bp, Artificial Sequence
  Oligonucleotide for detection of SNP TSC0002376
aggtgtggtggtt

SEQ ID NO: 8694 - DNA, 13 bp, Artificial Sequence
  Oligonucleotide for detection of SNP TSC0002376
aaccaccacacct

SEQ ID NO: 8695 - DNA, 13 bp, Artificial Sequence
  Oligonucleotide for detection of SNP TSC0002376
aggtgtagtggtt

SEQ ID NO: 8696 - DNA, 13 bp, Artificial Sequence
  Oligonucleotide for detection of SNP TSC0002376
aaccactacacct

SEQ ID NO: 8697 - DNA, 13 bp, Artificial Sequence
  Oligonucleotide for detection of SNP TSC0002376
aggtgcggtggtt

SEQ ID NO: 8698 - DNA, 13 bp, Artificial Sequence
  Oligonucleotide for detection of SNP TSC0002376
aaccaccgcacct

SEQ ID NO: 8699 - DNA, 13 bp, Artificial Sequence
  Oligonucleotide for detection of SNP TSC0002376
agttattgtattt

SEQ ID NO: 8700 - DNA, 13 bp, Artificial Sequence
  Oligonucleotide for detection of SNP TSC0002376
aaatacaataact

SEQ ID NO: 8701 - DNA, 13 bp, Artificial Sequence
  Oligonucleotide for detection of SNP TSC0002376
agttatcgtattt

SEQ ID NO: 8702 - DNA, 13 bp, Artificial Sequence
  Oligonucleotide for detection of SNP TSC0002376
aaatacgataact

SEQ ID NO: 8703 - DNA, 13 bp, Artificial Sequence
  Oligonucleotide for detection of SNP TSC0002377
gtgtaaatgttta

SEQ ID NO: 8704 - DNA, 13 bp, Artificial Sequence
  Oligonucleotide for detection of SNP TSC0002377
taaacatttacac

SEQ ID NO: 8705 - DNA, 13 bp, Artificial Sequence
  Oligonucleotide for detection of SNP TSC0002377
gtgtaagtgttta

SEQ ID NO: 8706 - DNA, 13 bp, Artificial Sequence
  Oligonucleotide for detection of SNP TSC0002377
taaacacttacac

SEQ ID NO: 8707 - DNA, 13 bp, Artificial Sequence
  Oligonucleotide for detection of SNP TSC0002378
gatagtgtatatg

SEQ ID NO: 8708 - DNA, 13 bp, Artificial Sequence
  Oligonucleotide for detection of SNP TSC0002378
catatacactatc

SEQ ID NO: 8709 - DNA, 13 bp, Artificial Sequence
  Oligonucleotide for detection of SNP TSC0002378
gatagtatatatg

SEQ ID NO: 8710 - DNA, 13 bp, Artificial Sequence
  Oligonucleotide for detection of SNP TSC0002378
catatatactatc

SEQ ID NO: 8711 - DNA, 13 bp, Artificial Sequence
  Oligonucleotide for detection of SNP TSC0002378
gatagcgtatatg

SEQ ID NO: 8712 - DNA, 13 bp, Artificial Sequence
  Oligonucleotide for detection of SNP TSC0002378
catatacgctatc

SEQ ID NO: 8713 - DNA, 13 bp, Artificial Sequence
  Oligonucleotide for detection of SNP TSC0002378
tatatgtgttaty

SEQ ID NO: 8714 - DNA, 13 bp, Artificial Sequence
  Oligonucleotide for detection of SNP TSC0002378
rataacacatata

SEQ ID NO: 8715 - DNA, 13 bp, Artificial Sequence
  Oligonucleotide for detection of SNP TSC0002378
tatatgcgttaty

SEQ ID NO: 8716 - DNA, 13 bp, Artificial Sequence
  Oligonucleotide for detection of SNP TSC0002378
rataacgcatata

SEQ ID NO: 8717 - DNA, 13 bp, Artificial Sequence
  Oligonucleotide for detection of SNP TSC0002379
taaagggttatty

SEQ ID NO: 8718 - DNA, 13 bp, Artificial Sequence
  Oligonucleotide for detection of SNP TSC0002379
raataacccttta

SEQ ID NO: 8719 - DNA, 13 bp, Artificial Sequence
  Oligonucleotide for detection of SNP TSC0002379
taaaggattatty

SEQ ID NO: 8720 - DNA, 13 bp, Artificial Sequence
  Oligonucleotide for detection of SNP TSC0002379
raataatccttta

SEQ ID NO: 8721 - DNA, 13 bp, Artificial Sequence
  Oligonucleotide for detection of SNP TSC0002381
ggaggtggaaatt

SEQ ID NO: 8722 - DNA, 13 bp, Artificial Sequence
  Oligonucleotide for detection of SNP TSC0002381
aatttccacctcc

SEQ ID NO: 8723 - DNA, 13 bp, Artificial Sequence
  Oligonucleotide for detection of SNP TSC0002381
ggaggtagaaatt

SEQ ID NO: 8724 - DNA, 13 bp, Artificial Sequence
  Oligonucleotide for detection of SNP TSC0002381
aatttctacctcc

SEQ ID NO: 8725 - DNA, 13 bp, Artificial Sequence
  Oligonucleotide for detection of SNP TSC0002382
ttagtatagaatt

SEQ ID NO: 8726 - DNA, 13 bp, Artificial Sequence
  Oligonucleotide for detection of SNP TSC0002382
aattctatactaa

SEQ ID NO: 8727 - DNA, 13 bp, Artificial Sequence
  Oligonucleotide for detection of SNP TSC0002382
ttagtagagaatt

SEQ ID NO: 8728 - DNA, 13 bp, Artificial Sequence
  Oligonucleotide for detection of SNP TSC0002382
aattctctactaa

SEQ ID NO: 8729 - DNA, 13 bp, Artificial Sequence
  Oligonucleotide for detection of SNP TSC0002382
agttttgtgttga

SEQ ID NO: 8730 - DNA, 13 bp, Artificial Sequence
  Oligonucleotide for detection of SNP TSC0002382
tcaacacaaaact

SEQ ID NO: 8731 - DNA, 13 bp, Artificial Sequence
  Oligonucleotide for detection of SNP TSC0002382
agttttttgttga

SEQ ID NO: 8732 - DNA, 13 bp, Artificial Sequence
  Oligonucleotide for detection of SNP TSC0002382
tcaacaaaaaact

SEQ ID NO: 8733 - DNA, 13 bp, Artificial Sequence
  Oligonucleotide for detection of SNP TSC0002383
gagaaagattttt

SEQ ID NO: 8734 - DNA, 13 bp, Artificial Sequence
  Oligonucleotide for detection of SNP TSC0002383
aaaaatctttctc

SEQ ID NO: 8735 - DNA, 13 bp, Artificial Sequence
  Oligonucleotide for detection of SNP TSC0002383
gagaaaaattttt

SEQ ID NO: 8736 - DNA, 13 bp, Artificial Sequence
  Oligonucleotide for detection of SNP TSC0002383
aaaaatttttctc

SEQ ID NO: 8737 - DNA, 13 bp, Artificial Sequence
  Oligonucleotide for detection of SNP TSC0002384
aatttaaatagty

SEQ ID NO: 8738 - DNA, 13 bp, Artificial Sequence
  Oligonucleotide for detection of SNP TSC0002384
ractatttaaatt

SEQ ID NO: 8739 - DNA, 13 bp, Artificial Sequence
  Oligonucleotide for detection of SNP TSC0002384
aatttagatagty

SEQ ID NO: 8740 - DNA, 13 bp, Artificial Sequence
  Oligonucleotide for detection of SNP TSC0002384
ractatctaaatt

SEQ ID NO: 8741 - DNA, 13 bp, Artificial Sequence
  Oligonucleotide for detection of SNP TSC0002385
gtagtatggtgta

SEQ ID NO: 8742 - DNA, 13 bp, Artificial Sequence
  Oligonucleotide for detection of SNP TSC0002385
tacaccatactac

SEQ ID NO: 8743 - DNA, 13 bp, Artificial Sequence
  Oligonucleotide for detection of SNP TSC0002385
gtagtacggtgta

SEQ ID NO: 8744 - DNA, 13 bp, Artificial Sequence
  Oligonucleotide for detection of SNP TSC0002385
tacaccgtactac

SEQ ID NO: 8745 - DNA, 13 bp, Artificial Sequence
  Oligonucleotide for detection of SNP TSC0002385
tgtattgtgttgy

SEQ ID NO: 8746 - DNA, 13 bp, Artificial Sequence
  Oligonucleotide for detection of SNP TSC0002385
rcaacacaataca

SEQ ID NO: 8747 - DNA, 13 bp, Artificial Sequence
  Oligonucleotide for detection of SNP TSC0002385
tgtattatgttgy

SEQ ID NO: 8748 - DNA, 13 bp, Artificial Sequence
  Oligonucleotide for detection of SNP TSC0002385
rcaacataataca

SEQ ID NO: 8749 - DNA, 13 bp, Artificial Sequence
  Oligonucleotide for detection of SNP TSC0002385
tgtatcgtgttgy

SEQ ID NO: 8750 - DNA, 13 bp, Artificial Sequence
  Oligonucleotide for detection of SNP TSC0002385
rcaacacgataca

SEQ ID NO: 8751 - DNA, 13 bp, Artificial Sequence
  Oligonucleotide for detection of SNP TSC0002386
ttattaattttat

SEQ ID NO: 8752 - DNA, 13 bp, Artificial Sequence
  Oligonucleotide for detection of SNP TSC0002386
ataaaattaataa

SEQ ID NO: 8753 - DNA, 13 bp, Artificial Sequence
  Oligonucleotide for detection of SNP TSC0002386
ttattagttttat

SEQ ID NO: 8754 - DNA, 13 bp, Artificial Sequence
  Oligonucleotide for detection of SNP TSC0002386
ataaaactaataa

SEQ ID NO: 8755 - DNA, 13 bp, Artificial Sequence
  Oligonucleotide for detection of SNP TSC0002387
ttggatgggagtt

SEQ ID NO: 8756 - DNA, 13 bp, Artificial Sequence
  Oligonucleotide for detection of SNP TSC0002387
aactcccatccaa

SEQ ID NO: 8757 - DNA, 13 bp, Artificial Sequence
  Oligonucleotide for detection of SNP TSC0002387
ttggataggagtt

SEQ ID NO: 8758 - DNA, 13 bp, Artificial Sequence
  Oligonucleotide for detection of SNP TSC0002387
aactcctatccaa

SEQ ID NO: 8759 - DNA, 13 bp, Artificial Sequence
  Oligonucleotide for detection of SNP TSC0002387
ttggacgggagtt

SEQ ID NO: 8760 - DNA, 13 bp, Artificial Sequence
  Oligonucleotide for detection of SNP TSC0002387
aactcccgtccaa

SEQ ID NO: 8761 - DNA, 13 bp, Artificial Sequence
  Oligonucleotide for detection of SNP TSC0002387
agtttttgtttag

SEQ ID NO: 8762 - DNA, 13 bp, Artificial Sequence
  Oligonucleotide for detection of SNP TSC0002387
ctaaacaaaaact

SEQ ID NO: 8763 - DNA, 13 bp, Artificial Sequence
  Oligonucleotide for detection of SNP TSC0002387
agttttcgtttag

SEQ ID NO: 8764 - DNA, 13 bp, Artificial Sequence
  Oligonucleotide for detection of SNP TSC0002387
ctaaacgaaaact

SEQ ID NO: 8765 - DNA, 13 bp, Artificial Sequence
  Oligonucleotide for detection of SNP TSC0002388
tttgttgtttttt

SEQ ID NO: 8766 - DNA, 13 bp, Artificial Sequence
  Oligonucleotide for detection of SNP TSC0002388
aaaaaacaacaaa

SEQ ID NO: 8767 - DNA, 13 bp, Artificial Sequence
  Oligonucleotide for detection of SNP TSC0002388
tttgttatttttt

SEQ ID NO: 8768 - DNA, 13 bp, Artificial Sequence
  Oligonucleotide for detection of SNP TSC0002388
aaaaaataacaaa

SEQ ID NO: 8769 - DNA, 13 bp, Artificial Sequence
  Oligonucleotide for detection of SNP TSC0002388
tttgtcgtttttt

SEQ ID NO: 8770 - DNA, 13 bp, Artificial Sequence
  Oligonucleotide for detection of SNP TSC0002388
aaaaaacgacaaa

SEQ ID NO: 8771 - DNA, 13 bp, Artificial Sequence
  Oligonucleotide for detection of SNP TSC0002388
aagggatggtaag

SEQ ID NO: 8772 - DNA, 13 bp, Artificial Sequence
  Oligonucleotide for detection of SNP TSC0002388
cttaccatccctt

SEQ ID NO: 8773 - DNA, 13 bp, Artificial Sequence
  Oligonucleotide for detection of SNP TSC0002388
aagggacggtaag

SEQ ID NO: 8774 - DNA, 13 bp, Artificial Sequence
  Oligonucleotide for detection of SNP TSC0002388
cttaccgtccctt

SEQ ID NO: 8775 - DNA, 13 bp, Artificial Sequence
  Oligonucleotide for detection of SNP TSC0002389
taaatggagatag

SEQ ID NO: 8776 - DNA, 13 bp, Artificial Sequence
  Oligonucleotide for detection of SNP TSC0002389
ctatctccattta

SEQ ID NO: 8777 - DNA, 13 bp, Artificial Sequence
  Oligonucleotide for detection of SNP TSC0002389
taaatgaagatag

SEQ ID NO: 8778 - DNA, 13 bp, Artificial Sequence
  Oligonucleotide for detection of SNP TSC0002389
ctatcttcattta

SEQ ID NO: 8779 - DNA, 13 bp, Artificial Sequence
  Oligonucleotide for detection of SNP TSC0002391
ttaagtttgatta

SEQ ID NO: 8780 - DNA, 13 bp, Artificial Sequence
  Oligonucleotide for detection of SNP TSC0002391
taatcaaacttaa

SEQ ID NO: 8781 - DNA, 13 bp, Artificial Sequence
  Oligonucleotide for detection of SNP TSC0002391
ttaagtgtgatta

SEQ ID NO: 8782 - DNA, 13 bp, Artificial Sequence
  Oligonucleotide for detection of SNP TSC0002391
taatcacacttaa

SEQ ID NO: 8783 - DNA, 13 bp, Artificial Sequence
  Oligonucleotide for detection of SNP TSC0002391
tggttaaatttgg

SEQ ID NO: 8784 - DNA, 13 bp, Artificial Sequence
  Oligonucleotide for detection of SNP TSC0002391
ccaaatttaacca

SEQ ID NO: 8785 - DNA, 13 bp, Artificial Sequence
  Oligonucleotide for detection of SNP TSC0002391
tggttatatttgg

SEQ ID NO: 8786 - DNA, 13 bp, Artificial Sequence
  Oligonucleotide for detection of SNP TSC0002391
ccaaatataacca

SEQ ID NO: 8787 - DNA, 13 bp, Artificial Sequence
  Oligonucleotide for detection of SNP TSC0002392
gttttaattttgy

SEQ ID NO: 8788 - DNA, 13 bp, Artificial Sequence
  Oligonucleotide for detection of SNP TSC0002392
rcaaaattaaaac

SEQ ID NO: 8789 - DNA, 13 bp, Artificial Sequence
  Oligonucleotide for detection of SNP TSC0002392
gttttagttttgy

SEQ ID NO: 8790 - DNA, 13 bp, Artificial Sequence
  Oligonucleotide for detection of SNP TSC0002392
rcaaaactaaaac

SEQ ID NO: 8791 - DNA, 13 bp, Artificial Sequence
  Oligonucleotide for detection of SNP TSC0002392
gttttaatttcgy

SEQ ID NO: 8792 - DNA, 13 bp, Artificial Sequence
  Oligonucleotide for detection of SNP TSC0002392
rcgaaattaaaac

SEQ ID NO: 8793 - DNA, 13 bp, Artificial Sequence
  Oligonucleotide for detection of SNP TSC0002392
gttttagtttcgy

SEQ ID NO: 8794 - DNA, 13 bp, Artificial Sequence
  Oligonucleotide for detection of SNP TSC0002392
rcgaaactaaaac

SEQ ID NO: 8795 - DNA, 13 bp, Artificial Sequence
  Oligonucleotide for detection of SNP TSC0002393
gtgggtatttgta

SEQ ID NO: 8796 - DNA, 13 bp, Artificial Sequence
  Oligonucleotide for detection of SNP TSC0002393
tacaaatacccac

SEQ ID NO: 8797 - DNA, 13 bp, Artificial Sequence
  Oligonucleotide for detection of SNP TSC0002393
gtgggtgtttgta

SEQ ID NO: 8798 - DNA, 13 bp, Artificial Sequence
  Oligonucleotide for detection of SNP TSC0002393
tacaaacacccac

SEQ ID NO: 8799 - DNA, 13 bp, Artificial Sequence
  Oligonucleotide for detection of SNP TSC0002393
gcgggtatttgta

SEQ ID NO: 8800 - DNA, 13 bp, Artificial Sequence
  Oligonucleotide for detection of SNP TSC0002393
tacaaatacccgc

SEQ ID NO: 8801 - DNA, 13 bp, Artificial Sequence
  Oligonucleotide for detection of SNP TSC0002393
gcgggtgtttgta

SEQ ID NO: 8802 - DNA, 13 bp, Artificial Sequence
  Oligonucleotide for detection of SNP TSC0002393
tacaaacacccgc

SEQ ID NO: 8803 - DNA, 13 bp, Artificial Sequence
  Oligonucleotide for detection of SNP TSC0002393
gtgggcgtttgta

SEQ ID NO: 8804 - DNA, 13 bp, Artificial Sequence
  Oligonucleotide for detection of SNP TSC0002393
tacaaacgcccac

SEQ ID NO: 8805 - DNA, 13 bp, Artificial Sequence
  Oligonucleotide for detection of SNP TSC0002393
gcgggcgtttgta

SEQ ID NO: 8806 - DNA, 13 bp, Artificial Sequence
  Oligonucleotide for detection of SNP TSC0002393
tacaaacgcccgc

SEQ ID NO: 8807 - DNA, 13 bp, Artificial Sequence
  Oligonucleotide for detection of SNP TSC0002393
tataggtgtttgy

SEQ ID NO: 8808 - DNA, 13 bp, Artificial Sequence
  Oligonucleotide for detection of SNP TSC0002393
rcaaacacctata

SEQ ID NO: 8809 - DNA, 13 bp, Artificial Sequence
  Oligonucleotide for detection of SNP TSC0002393
tataggtgttcgy

SEQ ID NO: 8810 - DNA, 13 bp, Artificial Sequence
  Oligonucleotide for detection of SNP TSC0002393
rcgaacacctata

SEQ ID NO: 8811 - DNA, 13 bp, Artificial Sequence
  Oligonucleotide for detection of SNP TSC0002393
tataggcgtttgy

SEQ ID NO: 8812 - DNA, 13 bp, Artificial Sequence
  Oligonucleotide for detection of SNP TSC0002393
rcaaacgcctata

SEQ ID NO: 8813 - DNA, 13 bp, Artificial Sequence
  Oligonucleotide for detection of SNP TSC0002393
tataggcgttcgy

SEQ ID NO: 8814 - DNA, 13 bp, Artificial Sequence
  Oligonucleotide for detection of SNP TSC0002393
rcgaacgcctata

SEQ ID NO: 8815 - DNA, 13 bp, Artificial Sequence
  Oligonucleotide for detection of SNP TSC0002394
tttgtttgttttg

SEQ ID NO: 8816 - DNA, 13 bp, Artificial Sequence
  Oligonucleotide for detection of SNP TSC0002394
caaaacaaacaaa

SEQ ID NO: 8817 - DNA, 13 bp, Artificial Sequence
  Oligonucleotide for detection of SNP TSC0002394
tttgttcgttttg

SEQ ID NO: 8818 - DNA, 13 bp, Artificial Sequence
  Oligonucleotide for detection of SNP TSC0002394
caaaacgaacaaa

SEQ ID NO: 8819 - DNA, 13 bp, Artificial Sequence
  Oligonucleotide for detection of SNP TSC0002394
tagggtaggtaga

SEQ ID NO: 8820 - DNA, 13 bp, Artificial Sequence
  Oligonucleotide for detection of SNP TSC0002394
tctacctacccta

SEQ ID NO: 8821 - DNA, 13 bp, Artificial Sequence
  Oligonucleotide for detection of SNP TSC0002394
tagggtgggtaga

SEQ ID NO: 8822 - DNA, 13 bp, Artificial Sequence
  Oligonucleotide for detection of SNP TSC0002394
tctacccacccta

SEQ ID NO: 8823 - DNA, 13 bp, Artificial Sequence
  Oligonucleotide for detection of SNP TSC0002394
tagggcgggtaga

SEQ ID NO: 8824 - DNA, 13 bp, Artificial Sequence
  Oligonucleotide for detection of SNP TSC0002394
tctacccgcccta

SEQ ID NO: 8825 - DNA, 13 bp, Artificial Sequence
  Oligonucleotide for detection of SNP TSC0002395
aatattgattgaa

SEQ ID NO: 8826 - DNA, 13 bp, Artificial Sequence
  Oligonucleotide for detection of SNP TSC0002395
ttcaatcaatatt

SEQ ID NO: 8827 - DNA, 13 bp, Artificial Sequence
  Oligonucleotide for detection of SNP TSC0002395
aatattaattgaa

SEQ ID NO: 8828 - DNA, 13 bp, Artificial Sequence
  Oligonucleotide for detection of SNP TSC0002395
ttcaattaatatt

SEQ ID NO: 8829 - DNA, 13 bp, Artificial Sequence
  Oligonucleotide for detection of SNP TSC0002395
aatatcgattgaa

SEQ ID NO: 8830 - DNA, 13 bp, Artificial Sequence
  Oligonucleotide for detection of SNP TSC0002395
ttcaatcgatatt

SEQ ID NO: 8831 - DNA, 13 bp, Artificial Sequence
  Oligonucleotide for detection of SNP TSC0002395
aatattaatcgaa

SEQ ID NO: 8832 - DNA, 13 bp, Artificial Sequence
  Oligonucleotide for detection of SNP TSC0002395
ttcgattaatatt

SEQ ID NO: 8833 - DNA, 13 bp, Artificial Sequence
  Oligonucleotide for detection of SNP TSC0002395
aatattgatcgaa

SEQ ID NO: 8834 - DNA, 13 bp, Artificial Sequence
  Oligonucleotide for detection of SNP TSC0002395
ttcgatcaatatt

SEQ ID NO: 8835 - DNA, 13 bp, Artificial Sequence
  Oligonucleotide for detection of SNP TSC0002395
aatatcgatcgaa

SEQ ID NO: 8836 - DNA, 13 bp, Artificial Sequence
  Oligonucleotide for detection of SNP TSC0002395
ttcgatcgatatt

SEQ ID NO: 8837 - DNA, 13 bp, Artificial Sequence
  Oligonucleotide for detection of SNP TSC0002395
tttggttgatatt

SEQ ID NO: 8838 - DNA, 13 bp, Artificial Sequence
  Oligonucleotide for detection of SNP TSC0002395
aatatcaaccaaa

SEQ ID NO: 8839 - DNA, 13 bp, Artificial Sequence
  Oligonucleotide for detection of SNP TSC0002395
ttcggttgatatt

SEQ ID NO: 8840 - DNA, 13 bp, Artificial Sequence
  Oligonucleotide for detection of SNP TSC0002395
aatatcaaccgaa

SEQ ID NO: 8841 - DNA, 13 bp, Artificial Sequence
  Oligonucleotide for detection of SNP TSC0002395
tttggtcgatatt

SEQ ID NO: 8842 - DNA, 13 bp, Artificial Sequence
  Oligonucleotide for detection of SNP TSC0002395
aatatcgaccaaa

SEQ ID NO: 8843 - DNA, 13 bp, Artificial Sequence
  Oligonucleotide for detection of SNP TSC0002395
ttcggtcgatatt

SEQ ID NO: 8844 - DNA, 13 bp, Artificial Sequence
  Oligonucleotide for detection of SNP TSC0002395
aatatcgaccgaa

SEQ ID NO: 8845 - DNA, 13 bp, Artificial Sequence
  Oligonucleotide for detection of SNP TSC0002396
gtttatttttgty

SEQ ID NO: 8846 - DNA, 13 bp, Artificial Sequence
  Oligonucleotide for detection of SNP TSC0002396
racaaaaataaac

SEQ ID NO: 8847 - DNA, 13 bp, Artificial Sequence
  Oligonucleotide for detection of SNP TSC0002396
gtttatgtttgty

SEQ ID NO: 8848 - DNA, 13 bp, Artificial Sequence
  Oligonucleotide for detection of SNP TSC0002396
racaaacataaac

SEQ ID NO: 8849 - DNA, 13 bp, Artificial Sequence
  Oligonucleotide for detection of SNP TSC0002396
gtttacgtttgty

SEQ ID NO: 8850 - DNA, 13 bp, Artificial Sequence
  Oligonucleotide for detection of SNP TSC0002396
racaaacgtaaac

SEQ ID NO: 8851 - DNA, 13 bp, Artificial Sequence
  Oligonucleotide for detection of SNP TSC0002396
ggtaagagtagay

SEQ ID NO: 8852 - DNA, 13 bp, Artificial Sequence
  Oligonucleotide for detection of SNP TSC0002396
rtctactcttacc

SEQ ID NO: 8853 - DNA, 13 bp, Artificial Sequence
  Oligonucleotide for detection of SNP TSC0002396
ggtaagtgtagay

SEQ ID NO: 8854 - DNA, 13 bp, Artificial Sequence
  Oligonucleotide for detection of SNP TSC0002396
rtctacacttacc

SEQ ID NO: 8855 - DNA, 13 bp, Artificial Sequence
  Oligonucleotide for detection of SNP TSC0002396
ggtaagcgtagay

SEQ ID NO: 8856 - DNA, 13 bp, Artificial Sequence
  Oligonucleotide for detection of SNP TSC0002396
rtctacgcttacc

SEQ ID NO: 8857 - DNA, 13 bp, Artificial Sequence
  Oligonucleotide for detection of SNP TSC0002397
attttaggtttty

SEQ ID NO: 8858 - DNA, 13 bp, Artificial Sequence
  Oligonucleotide for detection of SNP TSC0002397
raaaacctaaaat

SEQ ID NO: 8859 - DNA, 13 bp, Artificial Sequence
  Oligonucleotide for detection of SNP TSC0002397
attttaagtttty

SEQ ID NO: 8860 - DNA, 13 bp, Artificial Sequence
  Oligonucleotide for detection of SNP TSC0002397
raaaacttaaaat

SEQ ID NO: 8861 - DNA, 13 bp, Artificial Sequence
  Oligonucleotide for detection of SNP TSC0002400
ataggtatgattg

SEQ ID NO: 8862 - DNA, 13 bp, Artificial Sequence
  Oligonucleotide for detection of SNP TSC0002400
caatcatacctat

SEQ ID NO: 8863 - DNA, 13 bp, Artificial Sequence
  Oligonucleotide for detection of SNP TSC0002400
ataggtgtgattg

SEQ ID NO: 8864 - DNA, 13 bp, Artificial Sequence
  Oligonucleotide for detection of SNP TSC0002400
caatcacacctat

SEQ ID NO: 8865 - DNA, 13 bp, Artificial Sequence
  Oligonucleotide for detection of SNP TSC0002400
ataggcgtgattg

SEQ ID NO: 8866 - DNA, 13 bp, Artificial Sequence
  Oligonucleotide for detection of SNP TSC0002400
caatcacgcctat

SEQ ID NO: 8867 - DNA, 13 bp, Artificial Sequence
  Oligonucleotide for detection of SNP TSC0002400
taattatgtttgt

SEQ ID NO: 8868 - DNA, 13 bp, Artificial Sequence
  Oligonucleotide for detection of SNP TSC0002400
acaaacataatta

SEQ ID NO: 8869 - DNA, 13 bp, Artificial Sequence
  Oligonucleotide for detection of SNP TSC0002400
taattacgtttgt

SEQ ID NO: 8870 - DNA, 13 bp, Artificial Sequence
  Oligonucleotide for detection of SNP TSC0002400
acaaacgtaatta

SEQ ID NO: 8871 - DNA, 13 bp, Artificial Sequence
  Oligonucleotide for detection of SNP TSC0002401
ggagatgaaagga

SEQ ID NO: 8872 - DNA, 13 bp, Artificial Sequence
  Oligonucleotide for detection of SNP TSC0002401
tcctttcatctcc

SEQ ID NO: 8873 - DNA, 13 bp, Artificial Sequence
  Oligonucleotide for detection of SNP TSC0002401
ggagataaaagga

SEQ ID NO: 8874 - DNA, 13 bp, Artificial Sequence
  Oligonucleotide for detection of SNP TSC0002401
tccttttatctcc

SEQ ID NO: 8875 - DNA, 13 bp, Artificial Sequence
  Oligonucleotide for detection of SNP TSC0002402
tttttgttgtggg

SEQ ID NO: 8876 - DNA, 13 bp, Artificial Sequence
  Oligonucleotide for detection of SNP TSC0002402
cccacaacaaaaa

SEQ ID NO: 8877 - DNA, 13 bp, Artificial Sequence
  Oligonucleotide for detection of SNP TSC0002402
tttttgatgtggg

SEQ ID NO: 8878 - DNA, 13 bp, Artificial Sequence
  Oligonucleotide for detection of SNP TSC0002402
cccacatcaaaaa

SEQ ID NO: 8879 - DNA, 13 bp, Artificial Sequence
  Oligonucleotide for detection of SNP TSC0002402
tttataataggaa

SEQ ID NO: 8880 - DNA, 13 bp, Artificial Sequence
  Oligonucleotide for detection of SNP TSC0002402
ttcctattataaa

SEQ ID NO: 8881 - DNA, 13 bp, Artificial Sequence
  Oligonucleotide for detection of SNP TSC0002402
tttatattaggaa

SEQ ID NO: 8882 - DNA, 13 bp, Artificial Sequence
  Oligonucleotide for detection of SNP TSC0002402
ttcctaatataaa

SEQ ID NO: 8883 - DNA, 13 bp, Artificial Sequence
  Oligonucleotide for detection of SNP TSC0002403
ggatgtggttgtt

SEQ ID NO: 8884 - DNA, 13 bp, Artificial Sequence
  Oligonucleotide for detection of SNP TSC0002403
aacaaccacatcc

SEQ ID NO: 8885 - DNA, 13 bp, Artificial Sequence
  Oligonucleotide for detection of SNP TSC0002403
ggatgtagttgtt

SEQ ID NO: 8886 - DNA, 13 bp, Artificial Sequence
  Oligonucleotide for detection of SNP TSC0002403
aacaactacatcc

SEQ ID NO: 8887 - DNA, 13 bp, Artificial Sequence
  Oligonucleotide for detection of SNP TSC0002403
ggacgtggttgtt

SEQ ID NO: 8888 - DNA, 13 bp, Artificial Sequence
  Oligonucleotide for detection of SNP TSC0002403
aacaaccacgtcc

SEQ ID NO: 8889 - DNA, 13 bp, Artificial Sequence
  Oligonucleotide for detection of SNP TSC0002403
ggacgtagttgtt

SEQ ID NO: 8890 - DNA, 13 bp, Artificial Sequence
  Oligonucleotide for detection of SNP TSC0002403
aacaactacgtcc

SEQ ID NO: 8891 - DNA, 13 bp, Artificial Sequence
  Oligonucleotide for detection of SNP TSC0002403
ggatgcggttgtt

SEQ ID NO: 8892 - DNA, 13 bp, Artificial Sequence
  Oligonucleotide for detection of SNP TSC0002403
aacaaccgcatcc

SEQ ID NO: 8893 - DNA, 13 bp, Artificial Sequence
  Oligonucleotide for detection of SNP TSC0002403
ggacgcggttgtt

SEQ ID NO: 8894 - DNA, 13 bp, Artificial Sequence
  Oligonucleotide for detection of SNP TSC0002403
aacaaccgcgtcc

SEQ ID NO: 8895 - DNA, 13 bp, Artificial Sequence
  Oligonucleotide for detection of SNP TSC0002403
agtagttgtgtty

SEQ ID NO: 8896 - DNA, 13 bp, Artificial Sequence
  Oligonucleotide for detection of SNP TSC0002403
raacacaactact

SEQ ID NO: 8897 - DNA, 13 bp, Artificial Sequence
  Oligonucleotide for detection of SNP TSC0002403
agtagtcgtgtty

SEQ ID NO: 8898 - DNA, 13 bp, Artificial Sequence
  Oligonucleotide for detection of SNP TSC0002403
raacacgactact

SEQ ID NO: 8899 - DNA, 13 bp, Artificial Sequence
  Oligonucleotide for detection of SNP TSC0002403
agtagttgcgtty

SEQ ID NO: 8900 - DNA, 13 bp, Artificial Sequence
  Oligonucleotide for detection of SNP TSC0002403
raacgcaactact

SEQ ID NO: 8901 - DNA, 13 bp, Artificial Sequence
  Oligonucleotide for detection of SNP TSC0002403
agtagtcgcgtty

SEQ ID NO: 8902 - DNA, 13 bp, Artificial Sequence
  Oligonucleotide for detection of SNP TSC0002403
raacgcgactact

SEQ ID NO: 8903 - DNA, 13 bp, Artificial Sequence
  Oligonucleotide for detection of SNP TSC0002404
attttagagtgay

SEQ ID NO: 8904 - DNA, 13 bp, Artificial Sequence
  Oligonucleotide for detection of SNP TSC0002404
rtcactctaaaat

SEQ ID NO: 8905 - DNA, 13 bp, Artificial Sequence
  Oligonucleotide for detection of SNP TSC0002404
attttatagtgay

SEQ ID NO: 8906 - DNA, 13 bp, Artificial Sequence
  Oligonucleotide for detection of SNP TSC0002404
rtcactataaaat

SEQ ID NO: 8907 - DNA, 13 bp, Artificial Sequence
  Oligonucleotide for detection of SNP TSC0002404
attttagagcgay

SEQ ID NO: 8908 - DNA, 13 bp, Artificial Sequence
  Oligonucleotide for detection of SNP TSC0002404
rtcgctctaaaat

SEQ ID NO: 8909 - DNA, 13 bp, Artificial Sequence
  Oligonucleotide for detection of SNP TSC0002404
attttatagcgay

SEQ ID NO: 8910 - DNA, 13 bp, Artificial Sequence
  Oligonucleotide for detection of SNP TSC0002404
rtcgctataaaat

SEQ ID NO: 8911 - DNA, 13 bp, Artificial Sequence
  Oligonucleotide for detection of SNP TSC0002404
gttgttttgaaat

SEQ ID NO: 8912 - DNA, 13 bp, Artificial Sequence
  Oligonucleotide for detection of SNP TSC0002404
atttcaaaacaac

SEQ ID NO: 8913 - DNA, 13 bp, Artificial Sequence
  Oligonucleotide for detection of SNP TSC0002404
gttgttgtgaaat

SEQ ID NO: 8914 - DNA, 13 bp, Artificial Sequence
  Oligonucleotide for detection of SNP TSC0002404
atttcacaacaac

SEQ ID NO: 8915 - DNA, 13 bp, Artificial Sequence
  Oligonucleotide for detection of SNP TSC0002404
gtcgttttgaaat

SEQ ID NO: 8916 - DNA, 13 bp, Artificial Sequence
  Oligonucleotide for detection of SNP TSC0002404
atttcaaaacgac

SEQ ID NO: 8917 - DNA, 13 bp, Artificial Sequence
  Oligonucleotide for detection of SNP TSC0002404
gtcgttgtgaaat

SEQ ID NO: 8918 - DNA, 13 bp, Artificial Sequence
  Oligonucleotide for detection of SNP TSC0002404
atttcacaacgac

SEQ ID NO: 8919 - DNA, 13 bp, Artificial Sequence
  Oligonucleotide for detection of SNP TSC0002405
ttttaattttttg

SEQ ID NO: 8920 - DNA, 13 bp, Artificial Sequence
  Oligonucleotide for detection of SNP TSC0002405
caaaaaattaaaa

SEQ ID NO: 8921 - DNA, 13 bp, Artificial Sequence
  Oligonucleotide for detection of SNP TSC0002405
ttttaaatttttg

SEQ ID NO: 8922 - DNA, 13 bp, Artificial Sequence
  Oligonucleotide for detection of SNP TSC0002405
caaaaatttaaaa

SEQ ID NO: 8923 - DNA, 13 bp, Artificial Sequence
  Oligonucleotide for detection of SNP TSC0002405
taggagattgaga

SEQ ID NO: 8924 - DNA, 13 bp, Artificial Sequence
  Oligonucleotide for detection of SNP TSC0002405
tctcaatctccta

SEQ ID NO: 8925 - DNA, 13 bp, Artificial Sequence
  Oligonucleotide for detection of SNP TSC0002405
taggagtttgaga

SEQ ID NO: 8926 - DNA, 13 bp, Artificial Sequence
  Oligonucleotide for detection of SNP TSC0002405
tctcaaactccta

SEQ ID NO: 8927 - DNA, 13 bp, Artificial Sequence
  Oligonucleotide for detection of SNP TSC0002406
ttagatgagttag

SEQ ID NO: 8928 - DNA, 13 bp, Artificial Sequence
  Oligonucleotide for detection of SNP TSC0002406
ctaactcatctaa

SEQ ID NO: 8929 - DNA, 13 bp, Artificial Sequence
  Oligonucleotide for detection of SNP TSC0002406
ttagataagttag

SEQ ID NO: 8930 - DNA, 13 bp, Artificial Sequence
  Oligonucleotide for detection of SNP TSC0002406
ctaacttatctaa

SEQ ID NO: 8931 - DNA, 13 bp, Artificial Sequence
  Oligonucleotide for detection of SNP TSC0002407
tagtttgggtaaa

SEQ ID NO: 8932 - DNA, 13 bp, Artificial Sequence
  Oligonucleotide for detection of SNP TSC0002407
tttacccaaacta

SEQ ID NO: 8933 - DNA, 13 bp, Artificial Sequence
  Oligonucleotide for detection of SNP TSC0002407
tagttttggtaaa

SEQ ID NO: 8934 - DNA, 13 bp, Artificial Sequence
  Oligonucleotide for detection of SNP TSC0002407
tttaccaaaacta

SEQ ID NO: 8935 - DNA, 13 bp, Artificial Sequence
  Oligonucleotide for detection of SNP TSC0002407
tagtttcggtaaa

SEQ ID NO: 8936 - DNA, 13 bp, Artificial Sequence
  Oligonucleotide for detection of SNP TSC0002407
tttaccgaaacta

SEQ ID NO: 8937 - DNA, 13 bp, Artificial Sequence
  Oligonucleotide for detection of SNP TSC0002407
tttatttaggttg

SEQ ID NO: 8938 - DNA, 13 bp, Artificial Sequence
  Oligonucleotide for detection of SNP TSC0002407
caacctaaataaa

SEQ ID NO: 8939 - DNA, 13 bp, Artificial Sequence
  Oligonucleotide for detection of SNP TSC0002407
tttattgaggttg

SEQ ID NO: 8940 - DNA, 13 bp, Artificial Sequence
  Oligonucleotide for detection of SNP TSC0002407
caacctcaataaa

SEQ ID NO: 8941 - DNA, 13 bp, Artificial Sequence
  Oligonucleotide for detection of SNP TSC0002407
tttatcgaggttg

SEQ ID NO: 8942 - DNA, 13 bp, Artificial Sequence
  Oligonucleotide for detection of SNP TSC0002407
caacctcgataaa

SEQ ID NO: 8943 - DNA, 13 bp, Artificial Sequence
  Oligonucleotide for detection of SNP TSC0002409
ttttaggtgtgtg

SEQ ID NO: 8944 - DNA, 13 bp, Artificial Sequence
  Oligonucleotide for detection of SNP TSC0002409
cacacacctaaaa

SEQ ID NO: 8945 - DNA, 13 bp, Artificial Sequence
  Oligonucleotide for detection of SNP TSC0002409
ttttagttgtgtg

SEQ ID NO: 8946 - DNA, 13 bp, Artificial Sequence
  Oligonucleotide for detection of SNP TSC0002409
cacacaactaaaa

SEQ ID NO: 8947 - DNA, 13 bp, Artificial Sequence
  Oligonucleotide for detection of SNP TSC0002409
ttttaggcgtgtg

SEQ ID NO: 8948 - DNA, 13 bp, Artificial Sequence
  Oligonucleotide for detection of SNP TSC0002409
cacacgcctaaaa

SEQ ID NO: 8949 - DNA, 13 bp, Artificial Sequence
  Oligonucleotide for detection of SNP TSC0002409
ttttagtcgtgtg

SEQ ID NO: 8950 - DNA, 13 bp, Artificial Sequence
  Oligonucleotide for detection of SNP TSC0002409
cacacgactaaaa

SEQ ID NO: 8951 - DNA, 13 bp, Artificial Sequence
  Oligonucleotide for detection of SNP TSC0002409
tatatgtttggag

SEQ ID NO: 8952 - DNA, 13 bp, Artificial Sequence
  Oligonucleotide for detection of SNP TSC0002409
ctccaaacatata

SEQ ID NO: 8953 - DNA, 13 bp, Artificial Sequence
  Oligonucleotide for detection of SNP TSC0002409
tatatggttggag

SEQ ID NO: 8954 - DNA, 13 bp, Artificial Sequence
  Oligonucleotide for detection of SNP TSC0002409
ctccaaccatata

SEQ ID NO: 8955 - DNA, 13 bp, Artificial Sequence
  Oligonucleotide for detection of SNP TSC0002409
tatacgtttggag

SEQ ID NO: 8956 - DNA, 13 bp, Artificial Sequence
  Oligonucleotide for detection of SNP TSC0002409
ctccaaacgtata

SEQ ID NO: 8957 - DNA, 13 bp, Artificial Sequence
  Oligonucleotide for detection of SNP TSC0002409
tatacggttggag

SEQ ID NO: 8958 - DNA, 13 bp, Artificial Sequence
  Oligonucleotide for detection of SNP TSC0002409
ctccaaccgtata

SEQ ID NO: 8959 - DNA, 13 bp, Artificial Sequence
  Oligonucleotide for detection of SNP TSC0002410
tatattgtgttag

SEQ ID NO: 8960 - DNA, 13 bp, Artificial Sequence
  Oligonucleotide for detection of SNP TSC0002410
ctaacacaatata

SEQ ID NO: 8961 - DNA, 13 bp, Artificial Sequence
  Oligonucleotide for detection of SNP TSC0002410
tatattttgttag

SEQ ID NO: 8962 - DNA, 13 bp, Artificial Sequence
  Oligonucleotide for detection of SNP TSC0002410
ctaacaaaatata

SEQ ID NO: 8963 - DNA, 13 bp, Artificial Sequence
  Oligonucleotide for detection of SNP TSC0002410
tatatcgtgttag

SEQ ID NO: 8964 - DNA, 13 bp, Artificial Sequence
  Oligonucleotide for detection of SNP TSC0002410
ctaacacgatata

SEQ ID NO: 8965 - DNA, 13 bp, Artificial Sequence
  Oligonucleotide for detection of SNP TSC0002410
ttggtatggtgtg

SEQ ID NO: 8966 - DNA, 13 bp, Artificial Sequence
  Oligonucleotide for detection of SNP TSC0002410
cacaccataccaa

SEQ ID NO: 8967 - DNA, 13 bp, Artificial Sequence
  Oligonucleotide for detection of SNP TSC0002410
ttggtagggtgtg

SEQ ID NO: 8968 - DNA, 13 bp, Artificial Sequence
  Oligonucleotide for detection of SNP TSC0002410
cacaccctaccaa

SEQ ID NO: 8969 - DNA, 13 bp, Artificial Sequence
  Oligonucleotide for detection of SNP TSC0002410
ttggtacggtgtg

SEQ ID NO: 8970 - DNA, 13 bp, Artificial Sequence
  Oligonucleotide for detection of SNP TSC0002410
cacaccgtaccaa

SEQ ID NO: 8971 - DNA, 13 bp, Artificial Sequence
  Oligonucleotide for detection of SNP TSC0002413
tggtttgttttaa

SEQ ID NO: 8972 - DNA, 13 bp, Artificial Sequence
  Oligonucleotide for detection of SNP TSC0002413
ttaaaacaaacca

SEQ ID NO: 8973 - DNA, 13 bp, Artificial Sequence
  Oligonucleotide for detection of SNP TSC0002413
tggttttttttaa

SEQ ID NO: 8974 - DNA, 13 bp, Artificial Sequence
  Oligonucleotide for detection of SNP TSC0002413
ttaaaaaaaacca

SEQ ID NO: 8975 - DNA, 13 bp, Artificial Sequence
  Oligonucleotide for detection of SNP TSC0002413
ttgagataggtta

SEQ ID NO: 8976 - DNA, 13 bp, Artificial Sequence
  Oligonucleotide for detection of SNP TSC0002413
taacctatctcaa

SEQ ID NO: 8977 - DNA, 13 bp, Artificial Sequence
  Oligonucleotide for detection of SNP TSC0002413
ttgagaaaggtta

SEQ ID NO: 8978 - DNA, 13 bp, Artificial Sequence
  Oligonucleotide for detection of SNP TSC0002413
taacctttctcaa

SEQ ID NO: 8979 - DNA, 13 bp, Artificial Sequence
  Oligonucleotide for detection of SNP TSC0002414
gtgtttagtattt

SEQ ID NO: 8980 - DNA, 13 bp, Artificial Sequence
  Oligonucleotide for detection of SNP TSC0002414
aaatactaaacac

SEQ ID NO: 8981 - DNA, 13 bp, Artificial Sequence
  Oligonucleotide for detection of SNP TSC0002414
gtgtttggtattt

SEQ ID NO: 8982 - DNA, 13 bp, Artificial Sequence
  Oligonucleotide for detection of SNP TSC0002414
aaataccaaacac

SEQ ID NO: 8983 - DNA, 13 bp, Artificial Sequence
  Oligonucleotide for detection of SNP TSC0002414
gtgttcggtattt

SEQ ID NO: 8984 - DNA, 13 bp, Artificial Sequence
  Oligonucleotide for detection of SNP TSC0002414
aaataccgaacac

SEQ ID NO: 8985 - DNA, 13 bp, Artificial Sequence
  Oligonucleotide for detection of SNP TSC0002414
aagtgttgggtay

SEQ ID NO: 8986 - DNA, 13 bp, Artificial Sequence
  Oligonucleotide for detection of SNP TSC0002414
rtacccaacactt

SEQ ID NO: 8987 - DNA, 13 bp, Artificial Sequence
  Oligonucleotide for detection of SNP TSC0002414
aagtgtcgggtay

SEQ ID NO: 8988 - DNA, 13 bp, Artificial Sequence
  Oligonucleotide for detection of SNP TSC0002414
rtacccgacactt

SEQ ID NO: 8989 - DNA, 13 bp, Artificial Sequence
  Oligonucleotide for detection of SNP TSC0002415
atgtttgggtttt

SEQ ID NO: 8990 - DNA, 13 bp, Artificial Sequence
  Oligonucleotide for detection of SNP TSC0002415
aaaacccaaacat

SEQ ID NO: 8991 - DNA, 13 bp, Artificial Sequence
  Oligonucleotide for detection of SNP TSC0002415
atgtttaggtttt

SEQ ID NO: 8992 - DNA, 13 bp, Artificial Sequence
  Oligonucleotide for detection of SNP TSC0002415
aaaacctaaacat

SEQ ID NO: 8993 - DNA, 13 bp, Artificial Sequence
  Oligonucleotide for detection of SNP TSC0002415
atgttcgggtttt

SEQ ID NO: 8994 - DNA, 13 bp, Artificial Sequence
  Oligonucleotide for detection of SNP TSC0002415
aaaacccgaacat

SEQ ID NO: 8995 - DNA, 13 bp, Artificial Sequence
  Oligonucleotide for detection of SNP TSC0002415
agggtttgggtat

SEQ ID NO: 8996 - DNA, 13 bp, Artificial Sequence
  Oligonucleotide for detection of SNP TSC0002415
atacccaaaccct

SEQ ID NO: 8997 - DNA, 13 bp, Artificial Sequence
  Oligonucleotide for detection of SNP TSC0002415
agggttcgggtat

SEQ ID NO: 8998 - DNA, 13 bp, Artificial Sequence
  Oligonucleotide for detection of SNP TSC0002415
atacccgaaccct

SEQ ID NO: 8999 - DNA, 13 bp, Artificial Sequence
  Oligonucleotide for detection of SNP TSC0002416
gttgttgttagta

SEQ ID NO: 9000 - DNA, 13 bp, Artificial Sequence
  Oligonucleotide for detection of SNP TSC0002416
tactaacaacaac

SEQ ID NO: 9001 - DNA, 13 bp, Artificial Sequence
  Oligonucleotide for detection of SNP TSC0002416
gttgttattagta

SEQ ID NO: 9002 - DNA, 13 bp, Artificial Sequence
  Oligonucleotide for detection of SNP TSC0002416
tactaataacaac

SEQ ID NO: 9003 - DNA, 13 bp, Artificial Sequence
  Oligonucleotide for detection of SNP TSC0002417
gtgttagaggaaa

SEQ ID NO: 9004 - DNA, 13 bp, Artificial Sequence
  Oligonucleotide for detection of SNP TSC0002417
tttcctctaacac

SEQ ID NO: 9005 - DNA, 13 bp, Artificial Sequence
  Oligonucleotide for detection of SNP TSC0002417
gtgttaaaggaaa

SEQ ID NO: 9006 - DNA, 13 bp, Artificial Sequence
  Oligonucleotide for detection of SNP TSC0002417
tttcctttaacac

SEQ ID NO: 9007 - DNA, 13 bp, Artificial Sequence
  Oligonucleotide for detection of SNP TSC0002418
tttatattgttaa

SEQ ID NO: 9008 - DNA, 13 bp, Artificial Sequence
  Oligonucleotide for detection of SNP TSC0002418
ttaacaatataaa

SEQ ID NO: 9009 - DNA, 13 bp, Artificial Sequence
  Oligonucleotide for detection of SNP TSC0002418
tttatagtgttaa

SEQ ID NO: 9010 - DNA, 13 bp, Artificial Sequence
  Oligonucleotide for detection of SNP TSC0002418
ttaacactataaa

SEQ ID NO: 9011 - DNA, 13 bp, Artificial Sequence
  Oligonucleotide for detection of SNP TSC0002418
ttagtaatatgag

SEQ ID NO: 9012 - DNA, 13 bp, Artificial Sequence
  Oligonucleotide for detection of SNP TSC0002418
ctcatattactaa

SEQ ID NO: 9013 - DNA, 13 bp, Artificial Sequence
  Oligonucleotide for detection of SNP TSC0002418
ttagtattatgag

SEQ ID NO: 9014 - DNA, 13 bp, Artificial Sequence
  Oligonucleotide for detection of SNP TSC0002418
ctcataatactaa

SEQ ID NO: 9015 - DNA, 13 bp, Artificial Sequence
  Oligonucleotide for detection of SNP TSC0002419
aatgagtggatta

SEQ ID NO: 9016 - DNA, 13 bp, Artificial Sequence
  Oligonucleotide for detection of SNP TSC0002419
taatccactcatt

SEQ ID NO: 9017 - DNA, 13 bp, Artificial Sequence
  Oligonucleotide for detection of SNP TSC0002419
aatgagcggatta

SEQ ID NO: 9018 - DNA, 13 bp, Artificial Sequence
  Oligonucleotide for detection of SNP TSC0002419
taatccgctcatt

SEQ ID NO: 9019 - DNA, 13 bp, Artificial Sequence
  Oligonucleotide for detection of SNP TSC0002419
tggtttgtttatt

SEQ ID NO: 9020 - DNA, 13 bp, Artificial Sequence
  Oligonucleotide for detection of SNP TSC0002419
aataaacaaacca

SEQ ID NO: 9021 - DNA, 13 bp, Artificial Sequence
  Oligonucleotide for detection of SNP TSC0002419
tggtttatttatt

SEQ ID NO: 9022 - DNA, 13 bp, Artificial Sequence
  Oligonucleotide for detection of SNP TSC0002419
aataaataaacca

SEQ ID NO: 9023 - DNA, 13 bp, Artificial Sequence
  Oligonucleotide for detection of SNP TSC0002419
tggttcgtttatt

SEQ ID NO: 9024 - DNA, 13 bp, Artificial Sequence
  Oligonucleotide for detection of SNP TSC0002419
aataaacgaacca

SEQ ID NO: 9025 - DNA, 13 bp, Artificial Sequence
  Oligonucleotide for detection of SNP TSC0002420
aaaatagtataty

SEQ ID NO: 9026 - DNA, 13 bp, Artificial Sequence
  Oligonucleotide for detection of SNP TSC0002420
ratatactatttt

SEQ ID NO: 9027 - DNA, 13 bp, Artificial Sequence
  Oligonucleotide for detection of SNP TSC0002420
aaaataatataty

SEQ ID NO: 9028 - DNA, 13 bp, Artificial Sequence
  Oligonucleotide for detection of SNP TSC0002420
ratatattatttt

SEQ ID NO: 9029 - DNA, 13 bp, Artificial Sequence
  Oligonucleotide for detection of SNP TSC0002421
ggtttatagattt

SEQ ID NO: 9030 - DNA, 13 bp, Artificial Sequence
  Oligonucleotide for detection of SNP TSC0002421
aaatctataaacc

SEQ ID NO: 9031 - DNA, 13 bp, Artificial Sequence
  Oligonucleotide for detection of SNP TSC0002421
ggtttagagattt

SEQ ID NO: 9032 - DNA, 13 bp, Artificial Sequence
  Oligonucleotide for detection of SNP TSC0002421
aaatctctaaacc

SEQ ID NO: 9033 - DNA, 13 bp, Artificial Sequence
  Oligonucleotide for detection of SNP TSC0002421
aggtttgtaagty

SEQ ID NO: 9034 - DNA, 13 bp, Artificial Sequence
  Oligonucleotide for detection of SNP TSC0002421
racttacaaacct

SEQ ID NO: 9035 - DNA, 13 bp, Artificial Sequence
  Oligonucleotide for detection of SNP TSC0002421
aggtttttaagty

SEQ ID NO: 9036 - DNA, 13 bp, Artificial Sequence
  Oligonucleotide for detection of SNP TSC0002421
racttaaaaacct

SEQ ID NO: 9037 - DNA, 13 bp, Artificial Sequence
  Oligonucleotide for detection of SNP TSC0002422
atatgtgaaaatt

SEQ ID NO: 9038 - DNA, 13 bp, Artificial Sequence
  Oligonucleotide for detection of SNP TSC0002422
aattttcacatat

SEQ ID NO: 9039 - DNA, 13 bp, Artificial Sequence
  Oligonucleotide for detection of SNP TSC0002422
atatgttaaaatt

SEQ ID NO: 9040 - DNA, 13 bp, Artificial Sequence
  Oligonucleotide for detection of SNP TSC0002422
aattttaacatat

SEQ ID NO: 9041 - DNA, 13 bp, Artificial Sequence
  Oligonucleotide for detection of SNP TSC0002422
agtttttatatgt

SEQ ID NO: 9042 - DNA, 13 bp, Artificial Sequence
  Oligonucleotide for detection of SNP TSC0002422
acatataaaaact

SEQ ID NO: 9043 - DNA, 13 bp, Artificial Sequence
  Oligonucleotide for detection of SNP TSC0002422
agttttaatatgt

SEQ ID NO: 9044 - DNA, 13 bp, Artificial Sequence
  Oligonucleotide for detection of SNP TSC0002422
acatattaaaact

SEQ ID NO: 9045 - DNA, 13 bp, Artificial Sequence
  Oligonucleotide for detection of SNP TSC0002423
atggtgttatatg

SEQ ID NO: 9046 - DNA, 13 bp, Artificial Sequence
  Oligonucleotide for detection of SNP TSC0002423
catataacaccat

SEQ ID NO: 9047 - DNA, 13 bp, Artificial Sequence
  Oligonucleotide for detection of SNP TSC0002423
atggtggtatatg

SEQ ID NO: 9048 - DNA, 13 bp, Artificial Sequence
  Oligonucleotide for detection of SNP TSC0002423
catataccaccat

SEQ ID NO: 9049 - DNA, 13 bp, Artificial Sequence
  Oligonucleotide for detection of SNP TSC0002423
tatgtgatattat

SEQ ID NO: 9050 - DNA, 13 bp, Artificial Sequence
  Oligonucleotide for detection of SNP TSC0002423
ataatatcacata

SEQ ID NO: 9051 - DNA, 13 bp, Artificial Sequence
  Oligonucleotide for detection of SNP TSC0002423
tatgtgttattat

SEQ ID NO: 9052 - DNA, 13 bp, Artificial Sequence
  Oligonucleotide for detection of SNP TSC0002423
ataataacacata

SEQ ID NO: 9053 - DNA, 13 bp, Artificial Sequence
  Oligonucleotide for detection of SNP TSC0002424
tttattatgtgtt

SEQ ID NO: 9054 - DNA, 13 bp, Artificial Sequence
  Oligonucleotide for detection of SNP TSC0002424
aacacataataaa

SEQ ID NO: 9055 - DNA, 13 bp, Artificial Sequence
  Oligonucleotide for detection of SNP TSC0002424
tttattgtgtgtt

SEQ ID NO: 9056 - DNA, 13 bp, Artificial Sequence
  Oligonucleotide for detection of SNP TSC0002424
aacacacaataaa

SEQ ID NO: 9057 - DNA, 13 bp, Artificial Sequence
  Oligonucleotide for detection of SNP TSC0002425
aaatgatgaatay

SEQ ID NO: 9058 - DNA, 13 bp, Artificial Sequence
  Oligonucleotide for detection of SNP TSC0002425
rtattcatcattt

SEQ ID NO: 9059 - DNA, 13 bp, Artificial Sequence
  Oligonucleotide for detection of SNP TSC0002425
aaatgaagaatay

SEQ ID NO: 9060 - DNA, 13 bp, Artificial Sequence
  Oligonucleotide for detection of SNP TSC0002425
rtattcttcattt

SEQ ID NO: 9061 - DNA, 13 bp, Artificial Sequence
  Oligonucleotide for detection of SNP TSC0002425
gtgtttattattt

SEQ ID NO: 9062 - DNA, 13 bp, Artificial Sequence
  Oligonucleotide for detection of SNP TSC0002425
aaataataaacac

SEQ ID NO: 9063 - DNA, 13 bp, Artificial Sequence
  Oligonucleotide for detection of SNP TSC0002425
gtgttttttattt

SEQ ID NO: 9064 - DNA, 13 bp, Artificial Sequence
  Oligonucleotide for detection of SNP TSC0002425
aaataaaaaacac

SEQ ID NO: 9065 - DNA, 13 bp, Artificial Sequence
  Oligonucleotide for detection of SNP TSC0002427
gttatttgaaaaa

SEQ ID NO: 9066 - DNA, 13 bp, Artificial Sequence
  Oligonucleotide for detection of SNP TSC0002427
tttttcaaataac

SEQ ID NO: 9067 - DNA, 13 bp, Artificial Sequence
  Oligonucleotide for detection of SNP TSC0002427
gttattcgaaaaa

SEQ ID NO: 9068 - DNA, 13 bp, Artificial Sequence
  Oligonucleotide for detection of SNP TSC0002427
tttttcgaataac

SEQ ID NO: 9069 - DNA, 13 bp, Artificial Sequence
  Oligonucleotide for detection of SNP TSC0002427
ttttttaggtgay

SEQ ID NO: 9070 - DNA, 13 bp, Artificial Sequence
  Oligonucleotide for detection of SNP TSC0002427
rtcacctaaaaaa

SEQ ID NO: 9071 - DNA, 13 bp, Artificial Sequence
  Oligonucleotide for detection of SNP TSC0002427
ttttttgggtgay

SEQ ID NO: 9072 - DNA, 13 bp, Artificial Sequence
  Oligonucleotide for detection of SNP TSC0002427
rtcacccaaaaaa

SEQ ID NO: 9073 - DNA, 13 bp, Artificial Sequence
  Oligonucleotide for detection of SNP TSC0002427
tttttcgggtgay

SEQ ID NO: 9074 - DNA, 13 bp, Artificial Sequence
  Oligonucleotide for detection of SNP TSC0002427
rtcacccgaaaaa

SEQ ID NO: 9075 - DNA, 13 bp, Artificial Sequence
  Oligonucleotide for detection of SNP TSC0002428
attttttgtttgg

SEQ ID NO: 9076 - DNA, 13 bp, Artificial Sequence
  Oligonucleotide for detection of SNP TSC0002428
ccaaacaaaaaat

SEQ ID NO: 9077 - DNA, 13 bp, Artificial Sequence
  Oligonucleotide for detection of SNP TSC0002428
atttttcgtttgg

SEQ ID NO: 9078 - DNA, 13 bp, Artificial Sequence
  Oligonucleotide for detection of SNP TSC0002428
ccaaacgaaaaat

SEQ ID NO: 9079 - DNA, 13 bp, Artificial Sequence
  Oligonucleotide for detection of SNP TSC0002428
ttaaatgaaagat

SEQ ID NO: 9080 - DNA, 13 bp, Artificial Sequence
  Oligonucleotide for detection of SNP TSC0002428
atctttcatttaa

SEQ ID NO: 9081 - DNA, 13 bp, Artificial Sequence
  Oligonucleotide for detection of SNP TSC0002428
ttaaataaaagat

SEQ ID NO: 9082 - DNA, 13 bp, Artificial Sequence
  Oligonucleotide for detection of SNP TSC0002428
atcttttatttaa

SEQ ID NO: 9083 - DNA, 13 bp, Artificial Sequence
  Oligonucleotide for detection of SNP TSC0002428
ttaaacgaaagat

SEQ ID NO: 9084 - DNA, 13 bp, Artificial Sequence
  Oligonucleotide for detection of SNP TSC0002428
atctttcgtttaa

SEQ ID NO: 9085 - DNA, 13 bp, Artificial Sequence
  Oligonucleotide for detection of SNP TSC0002429
tatatgtgtttat

SEQ ID NO: 9086 - DNA, 13 bp, Artificial Sequence
  Oligonucleotide for detection of SNP TSC0002429
ataaacacatata

SEQ ID NO: 9087 - DNA, 13 bp, Artificial Sequence
  Oligonucleotide for detection of SNP TSC0002429
tatatgcgtttat

SEQ ID NO: 9088 - DNA, 13 bp, Artificial Sequence
  Oligonucleotide for detection of SNP TSC0002429
ataaacgcatata

SEQ ID NO: 9089 - DNA, 13 bp, Artificial Sequence
  Oligonucleotide for detection of SNP TSC0002429
atagatatatatg

SEQ ID NO: 9090 - DNA, 13 bp, Artificial Sequence
  Oligonucleotide for detection of SNP TSC0002429
catatatatctat

SEQ ID NO: 9091 - DNA, 13 bp, Artificial Sequence
  Oligonucleotide for detection of SNP TSC0002429
atagatgtatatg

SEQ ID NO: 9092 - DNA, 13 bp, Artificial Sequence
  Oligonucleotide for detection of SNP TSC0002429
catatacatctat

SEQ ID NO: 9093 - DNA, 13 bp, Artificial Sequence
  Oligonucleotide for detection of SNP TSC0002429
atagacgtatatg

SEQ ID NO: 9094 - DNA, 13 bp, Artificial Sequence
  Oligonucleotide for detection of SNP TSC0002429
catatacgtctat

SEQ ID NO: 9095 - DNA, 13 bp, Artificial Sequence
  Oligonucleotide for detection of SNP TSC0002431
aaggttgtattgg

SEQ ID NO: 9096 - DNA, 13 bp, Artificial Sequence
  Oligonucleotide for detection of SNP TSC0002431
ccaatacaacctt

SEQ ID NO: 9097 - DNA, 13 bp, Artificial Sequence
  Oligonucleotide for detection of SNP TSC0002431
aaggttatattgg

SEQ ID NO: 9098 - DNA, 13 bp, Artificial Sequence
  Oligonucleotide for detection of SNP TSC0002431
ccaatataacctt

SEQ ID NO: 9099 - DNA, 13 bp, Artificial Sequence
  Oligonucleotide for detection of SNP TSC0002431
aaggtcgtattgg

SEQ ID NO: 9100 - DNA, 13 bp, Artificial Sequence
  Oligonucleotide for detection of SNP TSC0002431
ccaatacgacctt

SEQ ID NO: 9101 - DNA, 13 bp, Artificial Sequence
  Oligonucleotide for detection of SNP TSC0002431
ttagtatgatttt

SEQ ID NO: 9102 - DNA, 13 bp, Artificial Sequence
  Oligonucleotide for detection of SNP TSC0002431
aaaatcatactaa

SEQ ID NO: 9103 - DNA, 13 bp, Artificial Sequence
  Oligonucleotide for detection of SNP TSC0002431
ttagtacgatttt

SEQ ID NO: 9104 - DNA, 13 bp, Artificial Sequence
  Oligonucleotide for detection of SNP TSC0002431
aaaatcgtactaa

SEQ ID NO: 9105 - DNA, 13 bp, Artificial Sequence
  Oligonucleotide for detection of SNP TSC0002432
tttaaataaaaaa

SEQ ID NO: 9106 - DNA, 13 bp, Artificial Sequence
  Oligonucleotide for detection of SNP TSC0002432
ttttttatttaaa

SEQ ID NO: 9107 - DNA, 13 bp, Artificial Sequence
  Oligonucleotide for detection of SNP TSC0002432
tttaaaaaaaaaa

SEQ ID NO: 9108 - DNA, 13 bp, Artificial Sequence
  Oligonucleotide for detection of SNP TSC0002432
ttttttttttaaa

SEQ ID NO: 9109 - DNA, 13 bp, Artificial Sequence
  Oligonucleotide for detection of SNP TSC0002433
gtttgtgtttgtg

SEQ ID NO: 9110 - DNA, 13 bp, Artificial Sequence
  Oligonucleotide for detection of SNP TSC0002433
cacaaacacaaac

SEQ ID NO: 9111 - DNA, 13 bp, Artificial Sequence
  Oligonucleotide for detection of SNP TSC0002433
gtttgtatttgtg

SEQ ID NO: 9112 - DNA, 13 bp, Artificial Sequence
  Oligonucleotide for detection of SNP TSC0002433
cacaaatacaaac

SEQ ID NO: 9113 - DNA, 13 bp, Artificial Sequence
  Oligonucleotide for detection of SNP TSC0002433
gtttgcgtttgtg

SEQ ID NO: 9114 - DNA, 13 bp, Artificial Sequence
  Oligonucleotide for detection of SNP TSC0002433
cacaaacgcaaac

SEQ ID NO: 9115 - DNA, 13 bp, Artificial Sequence
  Oligonucleotide for detection of SNP TSC0002433
tataggtgtaaay

SEQ ID NO: 9116 - DNA, 13 bp, Artificial Sequence
  Oligonucleotide for detection of SNP TSC0002433
rtttacacctata

SEQ ID NO: 9117 - DNA, 13 bp, Artificial Sequence
  Oligonucleotide for detection of SNP TSC0002433
tataggcgtaaay

SEQ ID NO: 9118 - DNA, 13 bp, Artificial Sequence
  Oligonucleotide for detection of SNP TSC0002433
rtttacgcctata

SEQ ID NO: 9119 - DNA, 13 bp, Artificial Sequence
  Oligonucleotide for detection of SNP TSC0002434
ttgtggatttgag

SEQ ID NO: 9120 - DNA, 13 bp, Artificial Sequence
  Oligonucleotide for detection of SNP TSC0002434
ctcaaatccacaa

SEQ ID NO: 9121 - DNA, 13 bp, Artificial Sequence
  Oligonucleotide for detection of SNP TSC0002434
ttgtgggtttgag

SEQ ID NO: 9122 - DNA, 13 bp, Artificial Sequence
  Oligonucleotide for detection of SNP TSC0002434
ctcaaacccacaa

SEQ ID NO: 9123 - DNA, 13 bp, Artificial Sequence
  Oligonucleotide for detection of SNP TSC0002434
ttgtggattcgag

SEQ ID NO: 9124 - DNA, 13 bp, Artificial Sequence
  Oligonucleotide for detection of SNP TSC0002434
ctcgaatccacaa

SEQ ID NO: 9125 - DNA, 13 bp, Artificial Sequence
  Oligonucleotide for detection of SNP TSC0002434
ttgtgggttcgag

SEQ ID NO: 9126 - DNA, 13 bp, Artificial Sequence
  Oligonucleotide for detection of SNP TSC0002434
ctcgaacccacaa

SEQ ID NO: 9127 - DNA, 13 bp, Artificial Sequence
  Oligonucleotide for detection of SNP TSC0002435
atattgatgtatg

SEQ ID NO: 9128 - DNA, 13 bp, Artificial Sequence
  Oligonucleotide for detection of SNP TSC0002435
catacatcaatat

SEQ ID NO: 9129 - DNA, 13 bp, Artificial Sequence
  Oligonucleotide for detection of SNP TSC0002435
atattggtgtatg

SEQ ID NO: 9130 - DNA, 13 bp, Artificial Sequence
  Oligonucleotide for detection of SNP TSC0002435
catacaccaatat

SEQ ID NO: 9131 - DNA, 13 bp, Artificial Sequence
  Oligonucleotide for detection of SNP TSC0002435
atattgacgtatg

SEQ ID NO: 9132 - DNA, 13 bp, Artificial Sequence
  Oligonucleotide for detection of SNP TSC0002435
catacgtcaatat

SEQ ID NO: 9133 - DNA, 13 bp, Artificial Sequence
  Oligonucleotide for detection of SNP TSC0002435
atattggcgtatg

SEQ ID NO: 9134 - DNA, 13 bp, Artificial Sequence
  Oligonucleotide for detection of SNP TSC0002435
catacgccaatat

SEQ ID NO: 9135 - DNA, 13 bp, Artificial Sequence
  Oligonucleotide for detection of SNP TSC0002435
atattgatgtacg

SEQ ID NO: 9136 - DNA, 13 bp, Artificial Sequence
  Oligonucleotide for detection of SNP TSC0002435
cgtacatcaatat

SEQ ID NO: 9137 - DNA, 13 bp, Artificial Sequence
  Oligonucleotide for detection of SNP TSC0002435
atattggtgtacg

SEQ ID NO: 9138 - DNA, 13 bp, Artificial Sequence
  Oligonucleotide for detection of SNP TSC0002435
cgtacaccaatat

SEQ ID NO: 9139 - DNA, 13 bp, Artificial Sequence
  Oligonucleotide for detection of SNP TSC0002435
atattgacgtacg

SEQ ID NO: 9140 - DNA, 13 bp, Artificial Sequence
  Oligonucleotide for detection of SNP TSC0002435
cgtacgtcaatat

SEQ ID NO: 9141 - DNA, 13 bp, Artificial Sequence
  Oligonucleotide for detection of SNP TSC0002435
atattggcgtacg

SEQ ID NO: 9142 - DNA, 13 bp, Artificial Sequence
  Oligonucleotide for detection of SNP TSC0002435
cgtacgccaatat

SEQ ID NO: 9143 - DNA, 13 bp, Artificial Sequence
  Oligonucleotide for detection of SNP TSC0002436
tttagatttattt

SEQ ID NO: 9144 - DNA, 13 bp, Artificial Sequence
  Oligonucleotide for detection of SNP TSC0002436
aaataaatctaaa

SEQ ID NO: 9145 - DNA, 13 bp, Artificial Sequence
  Oligonucleotide for detection of SNP TSC0002436
tttagagttattt

SEQ ID NO: 9146 - DNA, 13 bp, Artificial Sequence
  Oligonucleotide for detection of SNP TSC0002436
aaataactctaaa

SEQ ID NO: 9147 - DNA, 13 bp, Artificial Sequence
  Oligonucleotide for detection of SNP TSC0002436
aaatggatttaag

SEQ ID NO: 9148 - DNA, 13 bp, Artificial Sequence
  Oligonucleotide for detection of SNP TSC0002436
cttaaatccattt

SEQ ID NO: 9149 - DNA, 13 bp, Artificial Sequence
  Oligonucleotide for detection of SNP TSC0002436
aaatggttttaag

SEQ ID NO: 9150 - DNA, 13 bp, Artificial Sequence
  Oligonucleotide for detection of SNP TSC0002436
cttaaaaccattt

SEQ ID NO: 9151 - DNA, 13 bp, Artificial Sequence
  Oligonucleotide for detection of SNP TSC0002437
tggtagattttty

SEQ ID NO: 9152 - DNA, 13 bp, Artificial Sequence
  Oligonucleotide for detection of SNP TSC0002437
raaaaatctacca

SEQ ID NO: 9153 - DNA, 13 bp, Artificial Sequence
  Oligonucleotide for detection of SNP TSC0002437
tggtaggttttty

SEQ ID NO: 9154 - DNA, 13 bp, Artificial Sequence
  Oligonucleotide for detection of SNP TSC0002437
raaaaacctacca

SEQ ID NO: 9155 - DNA, 13 bp, Artificial Sequence
  Oligonucleotide for detection of SNP TSC0002439
gtttgggttgtgg

SEQ ID NO: 9156 - DNA, 13 bp, Artificial Sequence
  Oligonucleotide for detection of SNP TSC0002439
ccacaacccaaac

SEQ ID NO: 9157 - DNA, 13 bp, Artificial Sequence
  Oligonucleotide for detection of SNP TSC0002439
gtttggattgtgg

SEQ ID NO: 9158 - DNA, 13 bp, Artificial Sequence
  Oligonucleotide for detection of SNP TSC0002439
ccacaatccaaac

SEQ ID NO: 9159 - DNA, 13 bp, Artificial Sequence
  Oligonucleotide for detection of SNP TSC0002439
gttcgggttgtgg

SEQ ID NO: 9160 - DNA, 13 bp, Artificial Sequence
  Oligonucleotide for detection of SNP TSC0002439
ccacaacccgaac

SEQ ID NO: 9161 - DNA, 13 bp, Artificial Sequence
  Oligonucleotide for detection of SNP TSC0002439
gttcggattgtgg

SEQ ID NO: 9162 - DNA, 13 bp, Artificial Sequence
  Oligonucleotide for detection of SNP TSC0002439
ccacaatccgaac

SEQ ID NO: 9163 - DNA, 13 bp, Artificial Sequence
  Oligonucleotide for detection of SNP TSC0002439
gtttgggttgcgg

SEQ ID NO: 9164 - DNA, 13 bp, Artificial Sequence
  Oligonucleotide for detection of SNP TSC0002439
ccgcaacccaaac

SEQ ID NO: 9165 - DNA, 13 bp, Artificial Sequence
  Oligonucleotide for detection of SNP TSC0002439
gtttggattgcgg

SEQ ID NO: 9166 - DNA, 13 bp, Artificial Sequence
  Oligonucleotide for detection of SNP TSC0002439
ccgcaatccaaac

SEQ ID NO: 9167 - DNA, 13 bp, Artificial Sequence
  Oligonucleotide for detection of SNP TSC0002439
gttcgggttgcgg

SEQ ID NO: 9168 - DNA, 13 bp, Artificial Sequence
  Oligonucleotide for detection of SNP TSC0002439
ccgcaacccgaac

SEQ ID NO: 9169 - DNA, 13 bp, Artificial Sequence
  Oligonucleotide for detection of SNP TSC0002439
gttcggattgcgg

SEQ ID NO: 9170 - DNA, 13 bp, Artificial Sequence
  Oligonucleotide for detection of SNP TSC0002439
ccgcaatccgaac

SEQ ID NO: 9171 - DNA, 13 bp, Artificial Sequence
  Oligonucleotide for detection of SNP TSC0002440
agtatatgtgagg

SEQ ID NO: 9172 - DNA, 13 bp, Artificial Sequence
  Oligonucleotide for detection of SNP TSC0002440
cctcacatatact

SEQ ID NO: 9173 - DNA, 13 bp, Artificial Sequence
  Oligonucleotide for detection of SNP TSC0002440
agtatacgtgagg

SEQ ID NO: 9174 - DNA, 13 bp, Artificial Sequence
  Oligonucleotide for detection of SNP TSC0002440
cctcacgtatact

SEQ ID NO: 9175 - DNA, 13 bp, Artificial Sequence
  Oligonucleotide for detection of SNP TSC0002440
ttttatatgtgtt

SEQ ID NO: 9176 - DNA, 13 bp, Artificial Sequence
  Oligonucleotide for detection of SNP TSC0002440
aacacatataaaa

SEQ ID NO: 9177 - DNA, 13 bp, Artificial Sequence
  Oligonucleotide for detection of SNP TSC0002440
ttttatgtgtgtt

SEQ ID NO: 9178 - DNA, 13 bp, Artificial Sequence
  Oligonucleotide for detection of SNP TSC0002440
aacacacataaaa

SEQ ID NO: 9179 - DNA, 13 bp, Artificial Sequence
  Oligonucleotide for detection of SNP TSC0002440
ttttacgtgtgtt

SEQ ID NO: 9180 - DNA, 13 bp, Artificial Sequence
  Oligonucleotide for detection of SNP TSC0002440
aacacacgtaaaa

SEQ ID NO: 9181 - DNA, 13 bp, Artificial Sequence
  Oligonucleotide for detection of SNP TSC0002442
gattatatggtty

SEQ ID NO: 9182 - DNA, 13 bp, Artificial Sequence
  Oligonucleotide for detection of SNP TSC0002442
raaccatataatc

SEQ ID NO: 9183 - DNA, 13 bp, Artificial Sequence
  Oligonucleotide for detection of SNP TSC0002442
gattatttggtty

SEQ ID NO: 9184 - DNA, 13 bp, Artificial Sequence
  Oligonucleotide for detection of SNP TSC0002442
raaccaaataatc

SEQ ID NO: 9185 - DNA, 13 bp, Artificial Sequence
  Oligonucleotide for detection of SNP TSC0002442
ggattatgtggty

SEQ ID NO: 9186 - DNA, 13 bp, Artificial Sequence
  Oligonucleotide for detection of SNP TSC0002442
raccacataatcc

SEQ ID NO: 9187 - DNA, 13 bp, Artificial Sequence
  Oligonucleotide for detection of SNP TSC0002442
ggattaggtggty

SEQ ID NO: 9188 - DNA, 13 bp, Artificial Sequence
  Oligonucleotide for detection of SNP TSC0002442
raccacctaatcc

SEQ ID NO: 9189 - DNA, 13 bp, Artificial Sequence
  Oligonucleotide for detection of SNP TSC0002443
tgttgtgttgtty

SEQ ID NO: 9190 - DNA, 13 bp, Artificial Sequence
  Oligonucleotide for detection of SNP TSC0002443
raacaacacaaca

SEQ ID NO: 9191 - DNA, 13 bp, Artificial Sequence
  Oligonucleotide for detection of SNP TSC0002443
tgttgtattgtty

SEQ ID NO: 9192 - DNA, 13 bp, Artificial Sequence
  Oligonucleotide for detection of SNP TSC0002443
raacaatacaaca

SEQ ID NO: 9193 - DNA, 13 bp, Artificial Sequence
  Oligonucleotide for detection of SNP TSC0002444
gattttagaaata

SEQ ID NO: 9194 - DNA, 13 bp, Artificial Sequence
  Oligonucleotide for detection of SNP TSC0002444
tatttctaaaatc

SEQ ID NO: 9195 - DNA, 13 bp, Artificial Sequence
  Oligonucleotide for detection of SNP TSC0002444
gattttggaaata

SEQ ID NO: 9196 - DNA, 13 bp, Artificial Sequence
  Oligonucleotide for detection of SNP TSC0002444
tatttccaaaatc

SEQ ID NO: 9197 - DNA, 13 bp, Artificial Sequence
  Oligonucleotide for detection of SNP TSC0002446
aaagttgtttaty

SEQ ID NO: 9198 - DNA, 13 bp, Artificial Sequence
  Oligonucleotide for detection of SNP TSC0002446
rataaacaacttt

SEQ ID NO: 9199 - DNA, 13 bp, Artificial Sequence
  Oligonucleotide for detection of SNP TSC0002446
aaagttatttaty

SEQ ID NO: 9200 - DNA, 13 bp, Artificial Sequence
  Oligonucleotide for detection of SNP TSC0002446
rataaataacttt

SEQ ID NO: 9201 - DNA, 13 bp, Artificial Sequence
  Oligonucleotide for detection of SNP TSC0002447
atattaagtttgg

SEQ ID NO: 9202 - DNA, 13 bp, Artificial Sequence
  Oligonucleotide for detection of SNP TSC0002447
ccaaacttaatat

SEQ ID NO: 9203 - DNA, 13 bp, Artificial Sequence
  Oligonucleotide for detection of SNP TSC0002447
atattaggtttgg

SEQ ID NO: 9204 - DNA, 13 bp, Artificial Sequence
  Oligonucleotide for detection of SNP TSC0002447
ccaaacctaatat

SEQ ID NO: 9205 - DNA, 13 bp, Artificial Sequence
  Oligonucleotide for detection of SNP TSC0002447
atattaagttcgg

SEQ ID NO: 9206 - DNA, 13 bp, Artificial Sequence
  Oligonucleotide for detection of SNP TSC0002447
ccgaacttaatat

SEQ ID NO: 9207 - DNA, 13 bp, Artificial Sequence
  Oligonucleotide for detection of SNP TSC0002447
atattaggttcgg

SEQ ID NO: 9208 - DNA, 13 bp, Artificial Sequence
  Oligonucleotide for detection of SNP TSC0002447
ccgaacctaatat

SEQ ID NO: 9209 - DNA, 13 bp, Artificial Sequence
  Oligonucleotide for detection of SNP TSC0002449
gaattgtgtattt

SEQ ID NO: 9210 - DNA, 13 bp, Artificial Sequence
  Oligonucleotide for detection of SNP TSC0002449
aaatacacaattc

SEQ ID NO: 9211 - DNA, 13 bp, Artificial Sequence
  Oligonucleotide for detection of SNP TSC0002449
gaattgagtattt

SEQ ID NO: 9212 - DNA, 13 bp, Artificial Sequence
  Oligonucleotide for detection of SNP TSC0002449
aaatactcaattc

SEQ ID NO: 9213 - DNA, 13 bp, Artificial Sequence
  Oligonucleotide for detection of SNP TSC0002449
gaattgcgtattt

SEQ ID NO: 9214 - DNA, 13 bp, Artificial Sequence
  Oligonucleotide for detection of SNP TSC0002449
aaatacgcaattc

SEQ ID NO: 9215 - DNA, 13 bp, Artificial Sequence
  Oligonucleotide for detection of SNP TSC0002449
aaatgtgtagtty

SEQ ID NO: 9216 - DNA, 13 bp, Artificial Sequence
  Oligonucleotide for detection of SNP TSC0002449
raactacacattt

SEQ ID NO: 9217 - DNA, 13 bp, Artificial Sequence
  Oligonucleotide for detection of SNP TSC0002449
aaatgtttagtty

SEQ ID NO: 9218 - DNA, 13 bp, Artificial Sequence
  Oligonucleotide for detection of SNP TSC0002449
raactaaacattt

SEQ ID NO: 9219 - DNA, 13 bp, Artificial Sequence
  Oligonucleotide for detection of SNP TSC0002449
aaatgcgtagtty

SEQ ID NO: 9220 - DNA, 13 bp, Artificial Sequence
  Oligonucleotide for detection of SNP TSC0002449
raactacgcattt

SEQ ID NO: 9221 - DNA, 13 bp, Artificial Sequence
  Oligonucleotide for detection of SNP TSC0002450
gtgtatgtgtaty

SEQ ID NO: 9222 - DNA, 13 bp, Artificial Sequence
  Oligonucleotide for detection of SNP TSC0002450
ratacacatacac

SEQ ID NO: 9223 - DNA, 13 bp, Artificial Sequence
  Oligonucleotide for detection of SNP TSC0002450
gtgtatatgtaty

SEQ ID NO: 9224 - DNA, 13 bp, Artificial Sequence
  Oligonucleotide for detection of SNP TSC0002450
ratacatatacac

SEQ ID NO: 9225 - DNA, 13 bp, Artificial Sequence
  Oligonucleotide for detection of SNP TSC0002450
gtgtacgtgtaty

SEQ ID NO: 9226 - DNA, 13 bp, Artificial Sequence
  Oligonucleotide for detection of SNP TSC0002450
ratacacgtacac

SEQ ID NO: 9227 - DNA, 13 bp, Artificial Sequence
  Oligonucleotide for detection of SNP TSC0002450
gatgtatgtgtay

SEQ ID NO: 9228 - DNA, 13 bp, Artificial Sequence
  Oligonucleotide for detection of SNP TSC0002450
rtacacatacatc

SEQ ID NO: 9229 - DNA, 13 bp, Artificial Sequence
  Oligonucleotide for detection of SNP TSC0002450
gatgtacgtgtay

SEQ ID NO: 9230 - DNA, 13 bp, Artificial Sequence
  Oligonucleotide for detection of SNP TSC0002450
rtacacgtacatc

SEQ ID NO: 9231 - DNA, 13 bp, Artificial Sequence
  Oligonucleotide for detection of SNP TSC0002451
ttaatggtattaa

SEQ ID NO: 9232 - DNA, 13 bp, Artificial Sequence
  Oligonucleotide for detection of SNP TSC0002451
ttaataccattaa

SEQ ID NO: 9233 - DNA, 13 bp, Artificial Sequence
  Oligonucleotide for detection of SNP TSC0002451
ttaatgatattaa

SEQ ID NO: 9234 - DNA, 13 bp, Artificial Sequence
  Oligonucleotide for detection of SNP TSC0002451
ttaatatcattaa

SEQ ID NO: 9235 - DNA, 13 bp, Artificial Sequence
  Oligonucleotide for detection of SNP TSC0002452
tttttgtgagggt

SEQ ID NO: 9236 - DNA, 13 bp, Artificial Sequence
  Oligonucleotide for detection of SNP TSC0002452
accctcacaaaaa

SEQ ID NO: 9237 - DNA, 13 bp, Artificial Sequence
  Oligonucleotide for detection of SNP TSC0002452
tttttgagagggt

SEQ ID NO: 9238 - DNA, 13 bp, Artificial Sequence
  Oligonucleotide for detection of SNP TSC0002452
accctctcaaaaa

SEQ ID NO: 9239 - DNA, 13 bp, Artificial Sequence
  Oligonucleotide for detection of SNP TSC0002452
atttttatagagg

SEQ ID NO: 9240 - DNA, 13 bp, Artificial Sequence
  Oligonucleotide for detection of SNP TSC0002452
cctctataaaaat

SEQ ID NO: 9241 - DNA, 13 bp, Artificial Sequence
  Oligonucleotide for detection of SNP TSC0002452
atttttttagagg

SEQ ID NO: 9242 - DNA, 13 bp, Artificial Sequence
  Oligonucleotide for detection of SNP TSC0002452
cctctaaaaaaat

SEQ ID NO: 9243 - DNA, 13 bp, Artificial Sequence
  Oligonucleotide for detection of SNP TSC0002453
tgtttttttaagg

SEQ ID NO: 9244 - DNA, 13 bp, Artificial Sequence
  Oligonucleotide for detection of SNP TSC0002453
ccttaaaaaaaca

SEQ ID NO: 9245 - DNA, 13 bp, Artificial Sequence
  Oligonucleotide for detection of SNP TSC0002453
tgttttgttaagg

SEQ ID NO: 9246 - DNA, 13 bp, Artificial Sequence
  Oligonucleotide for detection of SNP TSC0002453
ccttaacaaaaca

SEQ ID NO: 9247 - DNA, 13 bp, Artificial Sequence
  Oligonucleotide for detection of SNP TSC0002453
ttttgagaggata

SEQ ID NO: 9248 - DNA, 13 bp, Artificial Sequence
  Oligonucleotide for detection of SNP TSC0002453
tatcctctcaaaa

SEQ ID NO: 9249 - DNA, 13 bp, Artificial Sequence
  Oligonucleotide for detection of SNP TSC0002453
ttttgataggata

SEQ ID NO: 9250 - DNA, 13 bp, Artificial Sequence
  Oligonucleotide for detection of SNP TSC0002453
tatcctatcaaaa

SEQ ID NO: 9251 - DNA, 13 bp, Artificial Sequence
  Oligonucleotide for detection of SNP TSC0002454
taagttgtagaaa

SEQ ID NO: 9252 - DNA, 13 bp, Artificial Sequence
  Oligonucleotide for detection of SNP TSC0002454
tttctacaactta

SEQ ID NO: 9253 - DNA, 13 bp, Artificial Sequence
  Oligonucleotide for detection of SNP TSC0002454
taagttatagaaa

SEQ ID NO: 9254 - DNA, 13 bp, Artificial Sequence
  Oligonucleotide for detection of SNP TSC0002454
tttctataactta

SEQ ID NO: 9255 - DNA, 13 bp, Artificial Sequence
  Oligonucleotide for detection of SNP TSC0002455
tgggagagagaaa

SEQ ID NO: 9256 - DNA, 13 bp, Artificial Sequence
  Oligonucleotide for detection of SNP TSC0002455
tttctctctccca

SEQ ID NO: 9257 - DNA, 13 bp, Artificial Sequence
  Oligonucleotide for detection of SNP TSC0002455
tgggagggagaaa

SEQ ID NO: 9258 - DNA, 13 bp, Artificial Sequence
  Oligonucleotide for detection of SNP TSC0002455
tttctccctccca

SEQ ID NO: 9259 - DNA, 13 bp, Artificial Sequence
  Oligonucleotide for detection of SNP TSC0002456
aattggaaggaag

SEQ ID NO: 9260 - DNA, 13 bp, Artificial Sequence
  Oligonucleotide for detection of SNP TSC0002456
cttccttccaatt

SEQ ID NO: 9261 - DNA, 13 bp, Artificial Sequence
  Oligonucleotide for detection of SNP TSC0002456
aattgggaggaag

SEQ ID NO: 9262 - DNA, 13 bp, Artificial Sequence
  Oligonucleotide for detection of SNP TSC0002456
cttcctcccaatt

SEQ ID NO: 9263 - DNA, 13 bp, Artificial Sequence
  Oligonucleotide for detection of SNP TSC0002457
tttgttaatattg

SEQ ID NO: 9264 - DNA, 13 bp, Artificial Sequence
  Oligonucleotide for detection of SNP TSC0002457
caatattaacaaa

SEQ ID NO: 9265 - DNA, 13 bp, Artificial Sequence
  Oligonucleotide for detection of SNP TSC0002457
tttgtttatattg

SEQ ID NO: 9266 - DNA, 13 bp, Artificial Sequence
  Oligonucleotide for detection of SNP TSC0002457
caatataaacaaa

SEQ ID NO: 9267 - DNA, 13 bp, Artificial Sequence
  Oligonucleotide for detection of SNP TSC0002457
tttgttaatatcg

SEQ ID NO: 9268 - DNA, 13 bp, Artificial Sequence
  Oligonucleotide for detection of SNP TSC0002457
cgatattaacaaa

SEQ ID NO: 9269 - DNA, 13 bp, Artificial Sequence
  Oligonucleotide for detection of SNP TSC0002457
tttgtttatatcg

SEQ ID NO: 9270 - DNA, 13 bp, Artificial Sequence
  Oligonucleotide for detection of SNP TSC0002457
cgatataaacaaa

SEQ ID NO: 9271 - DNA, 13 bp, Artificial Sequence
  Oligonucleotide for detection of SNP TSC0002457
tgatattagtaag

SEQ ID NO: 9272 - DNA, 13 bp, Artificial Sequence
  Oligonucleotide for detection of SNP TSC0002457
cttactaatatca

SEQ ID NO: 9273 - DNA, 13 bp, Artificial Sequence
  Oligonucleotide for detection of SNP TSC0002457
tgatataagtaag

SEQ ID NO: 9274 - DNA, 13 bp, Artificial Sequence
  Oligonucleotide for detection of SNP TSC0002457
cttacttatatca

SEQ ID NO: 9275 - DNA, 13 bp, Artificial Sequence
  Oligonucleotide for detection of SNP TSC0002457
cgatattagtaag

SEQ ID NO: 9276 - DNA, 13 bp, Artificial Sequence
  Oligonucleotide for detection of SNP TSC0002457
cttactaatatcg

SEQ ID NO: 9277 - DNA, 13 bp, Artificial Sequence
  Oligonucleotide for detection of SNP TSC0002457
cgatataagtaag

SEQ ID NO: 9278 - DNA, 13 bp, Artificial Sequence
  Oligonucleotide for detection of SNP TSC0002457
cttacttatatcg

SEQ ID NO: 9279 - DNA, 13 bp, Artificial Sequence
  Oligonucleotide for detection of SNP TSC0002458
ttgatatgaattg

SEQ ID NO: 9280 - DNA, 13 bp, Artificial Sequence
  Oligonucleotide for detection of SNP TSC0002458
caattcatatcaa

SEQ ID NO: 9281 - DNA, 13 bp, Artificial Sequence
  Oligonucleotide for detection of SNP TSC0002458
ttgatacgaattg

SEQ ID NO: 9282 - DNA, 13 bp, Artificial Sequence
  Oligonucleotide for detection of SNP TSC0002458
caattcgtatcaa

SEQ ID NO: 9283 - DNA, 13 bp, Artificial Sequence
  Oligonucleotide for detection of SNP TSC0002458
tagtttgtgttag

SEQ ID NO: 9284 - DNA, 13 bp, Artificial Sequence
  Oligonucleotide for detection of SNP TSC0002458
ctaacacaaacta

SEQ ID NO: 9285 - DNA, 13 bp, Artificial Sequence
  Oligonucleotide for detection of SNP TSC0002458
tagtttatgttag

SEQ ID NO: 9286 - DNA, 13 bp, Artificial Sequence
  Oligonucleotide for detection of SNP TSC0002458
ctaacataaacta

SEQ ID NO: 9287 - DNA, 13 bp, Artificial Sequence
  Oligonucleotide for detection of SNP TSC0002458
tagttcgtgttag

SEQ ID NO: 9288 - DNA, 13 bp, Artificial Sequence
  Oligonucleotide for detection of SNP TSC0002458
ctaacacgaacta

SEQ ID NO: 9289 - DNA, 13 bp, Artificial Sequence
  Oligonucleotide for detection of SNP TSC0002459
ggttttgtgtttg

SEQ ID NO: 9290 - DNA, 13 bp, Artificial Sequence
  Oligonucleotide for detection of SNP TSC0002459
caaacacaaaacc

SEQ ID NO: 9291 - DNA, 13 bp, Artificial Sequence
  Oligonucleotide for detection of SNP TSC0002459
ggttttatgtttg

SEQ ID NO: 9292 - DNA, 13 bp, Artificial Sequence
  Oligonucleotide for detection of SNP TSC0002459
caaacataaaacc

SEQ ID NO: 9293 - DNA, 13 bp, Artificial Sequence
  Oligonucleotide for detection of SNP TSC0002460
agtgatagaagty

SEQ ID NO: 9294 - DNA, 13 bp, Artificial Sequence
  Oligonucleotide for detection of SNP TSC0002460
racttctatcact

SEQ ID NO: 9295 - DNA, 13 bp, Artificial Sequence
  Oligonucleotide for detection of SNP TSC0002460
agtgatggaagty

SEQ ID NO: 9296 - DNA, 13 bp, Artificial Sequence
  Oligonucleotide for detection of SNP TSC0002460
racttccatcact

SEQ ID NO: 9297 - DNA, 13 bp, Artificial Sequence
  Oligonucleotide for detection of SNP TSC0002461
agttattttttta

SEQ ID NO: 9298 - DNA, 13 bp, Artificial Sequence
  Oligonucleotide for detection of SNP TSC0002461
taaaaaaataact

SEQ ID NO: 9299 - DNA, 13 bp, Artificial Sequence
  Oligonucleotide for detection of SNP TSC0002461
agttatattttta

SEQ ID NO: 9300 - DNA, 13 bp, Artificial Sequence
  Oligonucleotide for detection of SNP TSC0002461
taaaaatataact

SEQ ID NO: 9301 - DNA, 13 bp, Artificial Sequence
  Oligonucleotide for detection of SNP TSC0002461
tgaaggggtaatt

SEQ ID NO: 9302 - DNA, 13 bp, Artificial Sequence
  Oligonucleotide for detection of SNP TSC0002461
aattaccccttca

SEQ ID NO: 9303 - DNA, 13 bp, Artificial Sequence
  Oligonucleotide for detection of SNP TSC0002461
tgaaggtgtaatt

SEQ ID NO: 9304 - DNA, 13 bp, Artificial Sequence
  Oligonucleotide for detection of SNP TSC0002461
aattacaccttca

SEQ ID NO: 9305 - DNA, 13 bp, Artificial Sequence
  Oligonucleotide for detection of SNP TSC0002464
aggttttggattt

SEQ ID NO: 9306 - DNA, 13 bp, Artificial Sequence
  Oligonucleotide for detection of SNP TSC0002464
aaatccaaaacct

SEQ ID NO: 9307 - DNA, 13 bp, Artificial Sequence
  Oligonucleotide for detection of SNP TSC0002464
aggtttcggattt

SEQ ID NO: 9308 - DNA, 13 bp, Artificial Sequence
  Oligonucleotide for detection of SNP TSC0002464
aaatccgaaacct

SEQ ID NO: 9309 - DNA, 13 bp, Artificial Sequence
  Oligonucleotide for detection of SNP TSC0002464
agatttagggttt

SEQ ID NO: 9310 - DNA, 13 bp, Artificial Sequence
  Oligonucleotide for detection of SNP TSC0002464
aaaccctaaatct

SEQ ID NO: 9311 - DNA, 13 bp, Artificial Sequence
  Oligonucleotide for detection of SNP TSC0002464
agatttggggttt

SEQ ID NO: 9312 - DNA, 13 bp, Artificial Sequence
  Oligonucleotide for detection of SNP TSC0002464
aaaccccaaatct

SEQ ID NO: 9313 - DNA, 13 bp, Artificial Sequence
  Oligonucleotide for detection of SNP TSC0002464
agattcggggttt

SEQ ID NO: 9314 - DNA, 13 bp, Artificial Sequence
  Oligonucleotide for detection of SNP TSC0002464
aaaccccgaatct

SEQ ID NO: 9315 - DNA, 13 bp, Artificial Sequence
  Oligonucleotide for detection of SNP TSC0002468
aggattatgagty

SEQ ID NO: 9316 - DNA, 13 bp, Artificial Sequence
  Oligonucleotide for detection of SNP TSC0002468
ractcataatcct

SEQ ID NO: 9317 - DNA, 13 bp, Artificial Sequence
  Oligonucleotide for detection of SNP TSC0002468
aggattgtgagty

SEQ ID NO: 9318 - DNA, 13 bp, Artificial Sequence
  Oligonucleotide for detection of SNP TSC0002468
ractcacaatcct

SEQ ID NO: 9319 - DNA, 13 bp, Artificial Sequence
  Oligonucleotide for detection of SNP TSC0002468
aggatcgtgagty

SEQ ID NO: 9320 - DNA, 13 bp, Artificial Sequence
  Oligonucleotide for detection of SNP TSC0002468
ractcacgatcct

SEQ ID NO: 9321 - DNA, 13 bp, Artificial Sequence
  Oligonucleotide for detection of SNP TSC0002468
ggtttatggtttt

SEQ ID NO: 9322 - DNA, 13 bp, Artificial Sequence
  Oligonucleotide for detection of SNP TSC0002468
aaaaccataaacc

SEQ ID NO: 9323 - DNA, 13 bp, Artificial Sequence
  Oligonucleotide for detection of SNP TSC0002468
ggtttacggtttt

SEQ ID NO: 9324 - DNA, 13 bp, Artificial Sequence
  Oligonucleotide for detection of SNP TSC0002468
aaaaccgtaaacc

SEQ ID NO: 9325 - DNA, 13 bp, Artificial Sequence
  Oligonucleotide for detection of SNP TSC0002469
gtatatagtggtg

SEQ ID NO: 9326 - DNA, 13 bp, Artificial Sequence
  Oligonucleotide for detection of SNP TSC0002469
caccactatatac

SEQ ID NO: 9327 - DNA, 13 bp, Artificial Sequence
  Oligonucleotide for detection of SNP TSC0002469
gtatatggtggtg

SEQ ID NO: 9328 - DNA, 13 bp, Artificial Sequence
  Oligonucleotide for detection of SNP TSC0002469
caccaccatatac

SEQ ID NO: 9329 - DNA, 13 bp, Artificial Sequence
  Oligonucleotide for detection of SNP TSC0002470
atattaggtagtt

SEQ ID NO: 9330 - DNA, 13 bp, Artificial Sequence
  Oligonucleotide for detection of SNP TSC0002470
aactacctaatat

SEQ ID NO: 9331 - DNA, 13 bp, Artificial Sequence
  Oligonucleotide for detection of SNP TSC0002470
atattaagtagtt

SEQ ID NO: 9332 - DNA, 13 bp, Artificial Sequence
  Oligonucleotide for detection of SNP TSC0002470
aactacttaatat

SEQ ID NO: 9333 - DNA, 13 bp, Artificial Sequence
  Oligonucleotide for detection of SNP TSC0002471
aggggagtgtgag

SEQ ID NO: 9334 - DNA, 13 bp, Artificial Sequence
  Oligonucleotide for detection of SNP TSC0002471
ctcacactcccct

SEQ ID NO: 9335 - DNA, 13 bp, Artificial Sequence
  Oligonucleotide for detection of SNP TSC0002471
aggggaatgtgag

SEQ ID NO: 9336 - DNA, 13 bp, Artificial Sequence
  Oligonucleotide for detection of SNP TSC0002471
ctcacattcccct

SEQ ID NO: 9337 - DNA, 13 bp, Artificial Sequence
  Oligonucleotide for detection of SNP TSC0002472
gtttgtttaggtg

SEQ ID NO: 9338 - DNA, 13 bp, Artificial Sequence
  Oligonucleotide for detection of SNP TSC0002472
cacctaaacaaac

SEQ ID NO: 9339 - DNA, 13 bp, Artificial Sequence
  Oligonucleotide for detection of SNP TSC0002472
gtttgtgtaggtg

SEQ ID NO: 9340 - DNA, 13 bp, Artificial Sequence
  Oligonucleotide for detection of SNP TSC0002472
cacctacacaaac

SEQ ID NO: 9341 - DNA, 13 bp, Artificial Sequence
  Oligonucleotide for detection of SNP TSC0002472
gtttgcgtaggtg

SEQ ID NO: 9342 - DNA, 13 bp, Artificial Sequence
  Oligonucleotide for detection of SNP TSC0002472
cacctacgcaaac

SEQ ID NO: 9343 - DNA, 13 bp, Artificial Sequence
  Oligonucleotide for detection of SNP TSC0002472
tatttaagtaagy

SEQ ID NO: 9344 - DNA, 13 bp, Artificial Sequence
  Oligonucleotide for detection of SNP TSC0002472
rcttacttaaata

SEQ ID NO: 9345 - DNA, 13 bp, Artificial Sequence
  Oligonucleotide for detection of SNP TSC0002472
tatttatgtaagy

SEQ ID NO: 9346 - DNA, 13 bp, Artificial Sequence
  Oligonucleotide for detection of SNP TSC0002472
rcttacataaata

SEQ ID NO: 9347 - DNA, 13 bp, Artificial Sequence
  Oligonucleotide for detection of SNP TSC0002472
tatttacgtaagy

SEQ ID NO: 9348 - DNA, 13 bp, Artificial Sequence
  Oligonucleotide for detection of SNP TSC0002472
rcttacgtaaata

SEQ ID NO: 9349 - DNA, 13 bp, Artificial Sequence
  Oligonucleotide for detection of SNP TSC0002474
ataagtaggttat

SEQ ID NO: 9350 - DNA, 13 bp, Artificial Sequence
  Oligonucleotide for detection of SNP TSC0002474
ataacctacttat

SEQ ID NO: 9351 - DNA, 13 bp, Artificial Sequence
  Oligonucleotide for detection of SNP TSC0002474
ataagtgggttat

SEQ ID NO: 9352 - DNA, 13 bp, Artificial Sequence
  Oligonucleotide for detection of SNP TSC0002474
ataacccacttat

SEQ ID NO: 9353 - DNA, 13 bp, Artificial Sequence
  Oligonucleotide for detection of SNP TSC0002474
ataagcgggttat

SEQ ID NO: 9354 - DNA, 13 bp, Artificial Sequence
  Oligonucleotide for detection of SNP TSC0002474
ataacccgcttat

SEQ ID NO: 9355 - DNA, 13 bp, Artificial Sequence
  Oligonucleotide for detection of SNP TSC0002474
atgatttgtttat

SEQ ID NO: 9356 - DNA, 13 bp, Artificial Sequence
  Oligonucleotide for detection of SNP TSC0002474
ataaacaaatcat

SEQ ID NO: 9357 - DNA, 13 bp, Artificial Sequence
  Oligonucleotide for detection of SNP TSC0002474
atgattcgtttat

SEQ ID NO: 9358 - DNA, 13 bp, Artificial Sequence
  Oligonucleotide for detection of SNP TSC0002474
ataaacgaatcat

SEQ ID NO: 9359 - DNA, 13 bp, Artificial Sequence
  Oligonucleotide for detection of SNP TSC0002475
tatgttgatagat

SEQ ID NO: 9360 - DNA, 13 bp, Artificial Sequence
  Oligonucleotide for detection of SNP TSC0002475
atctatcaacata

SEQ ID NO: 9361 - DNA, 13 bp, Artificial Sequence
  Oligonucleotide for detection of SNP TSC0002475
tatgttaatagat

SEQ ID NO: 9362 - DNA, 13 bp, Artificial Sequence
  Oligonucleotide for detection of SNP TSC0002475
atctattaacata

SEQ ID NO: 9363 - DNA, 13 bp, Artificial Sequence
  Oligonucleotide for detection of SNP TSC0002475
tatgtcgatagat

SEQ ID NO: 9364 - DNA, 13 bp, Artificial Sequence
  Oligonucleotide for detection of SNP TSC0002475
atctatcgacata

SEQ ID NO: 9365 - DNA, 13 bp, Artificial Sequence
  Oligonucleotide for detection of SNP TSC0002475
atttgttggtatg

SEQ ID NO: 9366 - DNA, 13 bp, Artificial Sequence
  Oligonucleotide for detection of SNP TSC0002475
cataccaacaaat

SEQ ID NO: 9367 - DNA, 13 bp, Artificial Sequence
  Oligonucleotide for detection of SNP TSC0002475
atttgtcggtatg

SEQ ID NO: 9368 - DNA, 13 bp, Artificial Sequence
  Oligonucleotide for detection of SNP TSC0002475
cataccgacaaat

SEQ ID NO: 9369 - DNA, 13 bp, Artificial Sequence
  Oligonucleotide for detection of SNP TSC0002476
agtgtagagtgta

SEQ ID NO: 9370 - DNA, 13 bp, Artificial Sequence
  Oligonucleotide for detection of SNP TSC0002476
tacactctacact

SEQ ID NO: 9371 - DNA, 13 bp, Artificial Sequence
  Oligonucleotide for detection of SNP TSC0002476
agtgtaaagtgta

SEQ ID NO: 9372 - DNA, 13 bp, Artificial Sequence
  Oligonucleotide for detection of SNP TSC0002476
tacactttacact

SEQ ID NO: 9373 - DNA, 13 bp, Artificial Sequence
  Oligonucleotide for detection of SNP TSC0002478
tgtatggtataaa

SEQ ID NO: 9374 - DNA, 13 bp, Artificial Sequence
  Oligonucleotide for detection of SNP TSC0002478
tttataccataca

SEQ ID NO: 9375 - DNA, 13 bp, Artificial Sequence
  Oligonucleotide for detection of SNP TSC0002478
tgtatgatataaa

SEQ ID NO: 9376 - DNA, 13 bp, Artificial Sequence
  Oligonucleotide for detection of SNP TSC0002478
tttatatcataca

SEQ ID NO: 9377 - DNA, 13 bp, Artificial Sequence
  Oligonucleotide for detection of SNP TSC0002479
tttatagaagtta

SEQ ID NO: 9378 - DNA, 13 bp, Artificial Sequence
  Oligonucleotide for detection of SNP TSC0002479
taacttctataaa

SEQ ID NO: 9379 - DNA, 13 bp, Artificial Sequence
  Oligonucleotide for detection of SNP TSC0002479
tttataaaagtta

SEQ ID NO: 9380 - DNA, 13 bp, Artificial Sequence
  Oligonucleotide for detection of SNP TSC0002479
taacttttataaa

SEQ ID NO: 9381 - DNA, 13 bp, Artificial Sequence
  Oligonucleotide for detection of SNP TSC0002480
gagggttggtttt

SEQ ID NO: 9382 - DNA, 13 bp, Artificial Sequence
  Oligonucleotide for detection of SNP TSC0002480
aaaaccaaccctc

SEQ ID NO: 9383 - DNA, 13 bp, Artificial Sequence
  Oligonucleotide for detection of SNP TSC0002480
gagggtgggtttt

SEQ ID NO: 9384 - DNA, 13 bp, Artificial Sequence
  Oligonucleotide for detection of SNP TSC0002480
aaaacccaccctc

SEQ ID NO: 9385 - DNA, 13 bp, Artificial Sequence
  Oligonucleotide for detection of SNP TSC0002480
aaagttaatttty

SEQ ID NO: 9386 - DNA, 13 bp, Artificial Sequence
  Oligonucleotide for detection of SNP TSC0002480
raaaattaacttt

SEQ ID NO: 9387 - DNA, 13 bp, Artificial Sequence
  Oligonucleotide for detection of SNP TSC0002480
aaagtttatttty

SEQ ID NO: 9388 - DNA, 13 bp, Artificial Sequence
  Oligonucleotide for detection of SNP TSC0002480
raaaataaacttt

SEQ ID NO: 9389 - DNA, 13 bp, Artificial Sequence
  Oligonucleotide for detection of SNP TSC0002482
aaaatatgtatta

SEQ ID NO: 9390 - DNA, 13 bp, Artificial Sequence
  Oligonucleotide for detection of SNP TSC0002482
taatacatatttt

SEQ ID NO: 9391 - DNA, 13 bp, Artificial Sequence
  Oligonucleotide for detection of SNP TSC0002482
aaaatacgtatta

SEQ ID NO: 9392 - DNA, 13 bp, Artificial Sequence
  Oligonucleotide for detection of SNP TSC0002482
taatacgtatttt

SEQ ID NO: 9393 - DNA, 13 bp, Artificial Sequence
  Oligonucleotide for detection of SNP TSC0002482
tgatgtgtatttt

SEQ ID NO: 9394 - DNA, 13 bp, Artificial Sequence
  Oligonucleotide for detection of SNP TSC0002482
aaaatacacatca

SEQ ID NO: 9395 - DNA, 13 bp, Artificial Sequence
  Oligonucleotide for detection of SNP TSC0002482
tgatgtatatttt

SEQ ID NO: 9396 - DNA, 13 bp, Artificial Sequence
  Oligonucleotide for detection of SNP TSC0002482
aaaatatacatca

SEQ ID NO: 9397 - DNA, 13 bp, Artificial Sequence
  Oligonucleotide for detection of SNP TSC0002482
tgatgcgtatttt

SEQ ID NO: 9398 - DNA, 13 bp, Artificial Sequence
  Oligonucleotide for detection of SNP TSC0002482
aaaatacgcatca

SEQ ID NO: 9399 - DNA, 13 bp, Artificial Sequence
  Oligonucleotide for detection of SNP TSC0002483
ttataagtaatat

SEQ ID NO: 9400 - DNA, 13 bp, Artificial Sequence
  Oligonucleotide for detection of SNP TSC0002483
atattacttataa

SEQ ID NO: 9401 - DNA, 13 bp, Artificial Sequence
  Oligonucleotide for detection of SNP TSC0002483
ttataaataatat

SEQ ID NO: 9402 - DNA, 13 bp, Artificial Sequence
  Oligonucleotide for detection of SNP TSC0002483
atattatttataa

SEQ ID NO: 9403 - DNA, 13 bp, Artificial Sequence
  Oligonucleotide for detection of SNP TSC0002484
tttttttgtttta

SEQ ID NO: 9404 - DNA, 13 bp, Artificial Sequence
  Oligonucleotide for detection of SNP TSC0002484
taaaacaaaaaaa

SEQ ID NO: 9405 - DNA, 13 bp, Artificial Sequence
  Oligonucleotide for detection of SNP TSC0002484
ttttttcgtttta

SEQ ID NO: 9406 - DNA, 13 bp, Artificial Sequence
  Oligonucleotide for detection of SNP TSC0002484
taaaacgaaaaaa

SEQ ID NO: 9407 - DNA, 13 bp, Artificial Sequence
  Oligonucleotide for detection of SNP TSC0002484
taaaatgaaaaga

SEQ ID NO: 9408 - DNA, 13 bp, Artificial Sequence
  Oligonucleotide for detection of SNP TSC0002484
tcttttcatttta

SEQ ID NO: 9409 - DNA, 13 bp, Artificial Sequence
  Oligonucleotide for detection of SNP TSC0002484
taaaataaaaaga

SEQ ID NO: 9410 - DNA, 13 bp, Artificial Sequence
  Oligonucleotide for detection of SNP TSC0002484
tctttttatttta

SEQ ID NO: 9411 - DNA, 13 bp, Artificial Sequence
  Oligonucleotide for detection of SNP TSC0002484
taaaacgaaaaga

SEQ ID NO: 9412 - DNA, 13 bp, Artificial Sequence
  Oligonucleotide for detection of SNP TSC0002484
tcttttcgtttta

SEQ ID NO: 9413 - DNA, 13 bp, Artificial Sequence
  Oligonucleotide for detection of SNP TSC0002485
gtagagtgaagaa

SEQ ID NO: 9414 - DNA, 13 bp, Artificial Sequence
  Oligonucleotide for detection of SNP TSC0002485
ttcttcactctac

SEQ ID NO: 9415 - DNA, 13 bp, Artificial Sequence
  Oligonucleotide for detection of SNP TSC0002485
gtagagagaagaa

SEQ ID NO: 9416 - DNA, 13 bp, Artificial Sequence
  Oligonucleotide for detection of SNP TSC0002485
ttcttctctctac

SEQ ID NO: 9417 - DNA, 13 bp, Artificial Sequence
  Oligonucleotide for detection of SNP TSC0002486
attgagttgtgtt

SEQ ID NO: 9418 - DNA, 13 bp, Artificial Sequence
  Oligonucleotide for detection of SNP TSC0002486
aacacaactcaat

SEQ ID NO: 9419 - DNA, 13 bp, Artificial Sequence
  Oligonucleotide for detection of SNP TSC0002486
attgagatgtgtt

SEQ ID NO: 9420 - DNA, 13 bp, Artificial Sequence
  Oligonucleotide for detection of SNP TSC0002486
aacacatctcaat

SEQ ID NO: 9421 - DNA, 13 bp, Artificial Sequence
  Oligonucleotide for detection of SNP TSC0002486
aatataatttagt

SEQ ID NO: 9422 - DNA, 13 bp, Artificial Sequence
  Oligonucleotide for detection of SNP TSC0002486
actaaattatatt

SEQ ID NO: 9423 - DNA, 13 bp, Artificial Sequence
  Oligonucleotide for detection of SNP TSC0002486
aatatattttagt

SEQ ID NO: 9424 - DNA, 13 bp, Artificial Sequence
  Oligonucleotide for detection of SNP TSC0002486
actaaaatatatt

SEQ ID NO: 9425 - DNA, 13 bp, Artificial Sequence
  Oligonucleotide for detection of SNP TSC0002487
ggtatatagagga

SEQ ID NO: 9426 - DNA, 13 bp, Artificial Sequence
  Oligonucleotide for detection of SNP TSC0002487
tcctctatatacc

SEQ ID NO: 9427 - DNA, 13 bp, Artificial Sequence
  Oligonucleotide for detection of SNP TSC0002487
ggtatagagagga

SEQ ID NO: 9428 - DNA, 13 bp, Artificial Sequence
  Oligonucleotide for detection of SNP TSC0002487
tcctctctatacc

SEQ ID NO: 9429 - DNA, 13 bp, Artificial Sequence
  Oligonucleotide for detection of SNP TSC0002487
ttttttgtgtgty

SEQ ID NO: 9430 - DNA, 13 bp, Artificial Sequence
  Oligonucleotide for detection of SNP TSC0002487
racacacaaaaaa

SEQ ID NO: 9431 - DNA, 13 bp, Artificial Sequence
  Oligonucleotide for detection of SNP TSC0002487
ttttttttgtgty

SEQ ID NO: 9432 - DNA, 13 bp, Artificial Sequence
  Oligonucleotide for detection of SNP TSC0002487
racacaaaaaaaa

SEQ ID NO: 9433 - DNA, 13 bp, Artificial Sequence
  Oligonucleotide for detection of SNP TSC0002489
gtttgagtaaaga

SEQ ID NO: 9434 - DNA, 13 bp, Artificial Sequence
  Oligonucleotide for detection of SNP TSC0002489
tctttactcaaac

SEQ ID NO: 9435 - DNA, 13 bp, Artificial Sequence
  Oligonucleotide for detection of SNP TSC0002489
gtttgaataaaga

SEQ ID NO: 9436 - DNA, 13 bp, Artificial Sequence
  Oligonucleotide for detection of SNP TSC0002489
tctttattcaaac

SEQ ID NO: 9437 - DNA, 13 bp, Artificial Sequence
  Oligonucleotide for detection of SNP TSC0002492
tgtaattttagta

SEQ ID NO: 9438 - DNA, 13 bp, Artificial Sequence
  Oligonucleotide for detection of SNP TSC0002492
tactaaaattaca

SEQ ID NO: 9439 - DNA, 13 bp, Artificial Sequence
  Oligonucleotide for detection of SNP TSC0002492
tgtaatattagta

SEQ ID NO: 9440 - DNA, 13 bp, Artificial Sequence
  Oligonucleotide for detection of SNP TSC0002492
tactaatattaca

SEQ ID NO: 9441 - DNA, 13 bp, Artificial Sequence
  Oligonucleotide for detection of SNP TSC0002492
tgttgggattata

SEQ ID NO: 9442 - DNA, 13 bp, Artificial Sequence
  Oligonucleotide for detection of SNP TSC0002492
tataatcccaaca

SEQ ID NO: 9443 - DNA, 13 bp, Artificial Sequence
  Oligonucleotide for detection of SNP TSC0002492
tgttggtattata

SEQ ID NO: 9444 - DNA, 13 bp, Artificial Sequence
  Oligonucleotide for detection of SNP TSC0002492
tataataccaaca

SEQ ID NO: 9445 - DNA, 13 bp, Artificial Sequence
  Oligonucleotide for detection of SNP TSC0002493
gagtatgattaty

SEQ ID NO: 9446 - DNA, 13 bp, Artificial Sequence
  Oligonucleotide for detection of SNP TSC0002493
rataatcatactc

SEQ ID NO: 9447 - DNA, 13 bp, Artificial Sequence
  Oligonucleotide for detection of SNP TSC0002493
gagtataattaty

SEQ ID NO: 9448 - DNA, 13 bp, Artificial Sequence
  Oligonucleotide for detection of SNP TSC0002493
rataattatactc

SEQ ID NO: 9449 - DNA, 13 bp, Artificial Sequence
  Oligonucleotide for detection of SNP TSC0002495
gaaaataagatga

SEQ ID NO: 9450 - DNA, 13 bp, Artificial Sequence
  Oligonucleotide for detection of SNP TSC0002495
tcatcttattttc

SEQ ID NO: 9451 - DNA, 13 bp, Artificial Sequence
  Oligonucleotide for detection of SNP TSC0002495
gaaaatgagatga

SEQ ID NO: 9452 - DNA, 13 bp, Artificial Sequence
  Oligonucleotide for detection of SNP TSC0002495
tcatctcattttc

SEQ ID NO: 9453 - DNA, 13 bp, Artificial Sequence
  Oligonucleotide for detection of SNP TSC0002495
gaaaacgagatga

SEQ ID NO: 9454 - DNA, 13 bp, Artificial Sequence
  Oligonucleotide for detection of SNP TSC0002495
tcatctcgttttc

SEQ ID NO: 9455 - DNA, 13 bp, Artificial Sequence
  Oligonucleotide for detection of SNP TSC0002496
gagagatggaata

SEQ ID NO: 9456 - DNA, 13 bp, Artificial Sequence
  Oligonucleotide for detection of SNP TSC0002496
tattccatctctc

SEQ ID NO: 9457 - DNA, 13 bp, Artificial Sequence
  Oligonucleotide for detection of SNP TSC0002496
gagagagggaata

SEQ ID NO: 9458 - DNA, 13 bp, Artificial Sequence
  Oligonucleotide for detection of SNP TSC0002496
tattccctctctc

SEQ ID NO: 9459 - DNA, 13 bp, Artificial Sequence
  Oligonucleotide for detection of SNP TSC0002496
tgttttattttty

SEQ ID NO: 9460 - DNA, 13 bp, Artificial Sequence
  Oligonucleotide for detection of SNP TSC0002496
raaaaataaaaca

SEQ ID NO: 9461 - DNA, 13 bp, Artificial Sequence
  Oligonucleotide for detection of SNP TSC0002496
tgtttttttttty

SEQ ID NO: 9462 - DNA, 13 bp, Artificial Sequence
  Oligonucleotide for detection of SNP TSC0002496
raaaaaaaaaaca

SEQ ID NO: 9463 - DNA, 13 bp, Artificial Sequence
  Oligonucleotide for detection of SNP TSC0002497
taggggtaaaagg

SEQ ID NO: 9464 - DNA, 13 bp, Artificial Sequence
  Oligonucleotide for detection of SNP TSC0002497
ccttttaccccta

SEQ ID NO: 9465 - DNA, 13 bp, Artificial Sequence
  Oligonucleotide for detection of SNP TSC0002497
tagggggaaaagg

SEQ ID NO: 9466 - DNA, 13 bp, Artificial Sequence
  Oligonucleotide for detection of SNP TSC0002497
ccttttcccccta

SEQ ID NO: 9467 - DNA, 13 bp, Artificial Sequence
  Oligonucleotide for detection of SNP TSC0002497
ttttttgtttttg

SEQ ID NO: 9468 - DNA, 13 bp, Artificial Sequence
  Oligonucleotide for detection of SNP TSC0002497
caaaaacaaaaaa

SEQ ID NO: 9469 - DNA, 13 bp, Artificial Sequence
  Oligonucleotide for detection of SNP TSC0002498
gattgtattattg

SEQ ID NO: 9470 - DNA, 13 bp, Artificial Sequence
  Oligonucleotide for detection of SNP TSC0002498
caataatacaatc

SEQ ID NO: 9471 - DNA, 13 bp, Artificial Sequence
  Oligonucleotide for detection of SNP TSC0002498
gattgtgttattg

SEQ ID NO: 9472 - DNA, 13 bp, Artificial Sequence
  Oligonucleotide for detection of SNP TSC0002498
caataacacaatc

SEQ ID NO: 9473 - DNA, 13 bp, Artificial Sequence
  Oligonucleotide for detection of SNP TSC0002498
gatcgtattattg

SEQ ID NO: 9474 - DNA, 13 bp, Artificial Sequence
  Oligonucleotide for detection of SNP TSC0002498
caataatacgatc

SEQ ID NO: 9475 - DNA, 13 bp, Artificial Sequence
  Oligonucleotide for detection of SNP TSC0002498
gatcgtgttattg

SEQ ID NO: 9476 - DNA, 13 bp, Artificial Sequence
  Oligonucleotide for detection of SNP TSC0002498
caataacacgatc

SEQ ID NO: 9477 - DNA, 13 bp, Artificial Sequence
  Oligonucleotide for detection of SNP TSC0002498
gattgcgttattg

SEQ ID NO: 9478 - DNA, 13 bp, Artificial Sequence
  Oligonucleotide for detection of SNP TSC0002498
caataacgcaatc

SEQ ID NO: 9479 - DNA, 13 bp, Artificial Sequence
  Oligonucleotide for detection of SNP TSC0002498
gatcgcgttattg

SEQ ID NO: 9480 - DNA, 13 bp, Artificial Sequence
  Oligonucleotide for detection of SNP TSC0002498
caataacgcgatc

SEQ ID NO: 9481 - DNA, 13 bp, Artificial Sequence
  Oligonucleotide for detection of SNP TSC0002498
tagtggtgtgaty

SEQ ID NO: 9482 - DNA, 13 bp, Artificial Sequence
  Oligonucleotide for detection of SNP TSC0002498
ratcacaccacta

SEQ ID NO: 9483 - DNA, 13 bp, Artificial Sequence
  Oligonucleotide for detection of SNP TSC0002498
tagtggtgcgaty

SEQ ID NO: 9484 - DNA, 13 bp, Artificial Sequence
  Oligonucleotide for detection of SNP TSC0002498
ratcgcaccacta

SEQ ID NO: 9485 - DNA, 13 bp, Artificial Sequence
  Oligonucleotide for detection of SNP TSC0002498
tagtggcgtgaty

SEQ ID NO: 9486 - DNA, 13 bp, Artificial Sequence
  Oligonucleotide for detection of SNP TSC0002498
ratcacgccacta

SEQ ID NO: 9487 - DNA, 13 bp, Artificial Sequence
  Oligonucleotide for detection of SNP TSC0002498
tagtggcgcgaty

SEQ ID NO: 9488 - DNA, 13 bp, Artificial Sequence
  Oligonucleotide for detection of SNP TSC0002498
ratcgcgccacta

SEQ ID NO: 9489 - DNA, 13 bp, Artificial Sequence
  Oligonucleotide for detection of SNP TSC0002499
ttaatgtgagaga

SEQ ID NO: 9490 - DNA, 13 bp, Artificial Sequence
  Oligonucleotide for detection of SNP TSC0002499
tctctcacattaa

SEQ ID NO: 9491 - DNA, 13 bp, Artificial Sequence
  Oligonucleotide for detection of SNP TSC0002499
ttaatgggagaga

SEQ ID NO: 9492 - DNA, 13 bp, Artificial Sequence
  Oligonucleotide for detection of SNP TSC0002499
tctctcccattaa

SEQ ID NO: 9493 - DNA, 13 bp, Artificial Sequence
  Oligonucleotide for detection of SNP TSC0002499
ttttttatattaa

SEQ ID NO: 9494 - DNA, 13 bp, Artificial Sequence
  Oligonucleotide for detection of SNP TSC0002499
ttaatataaaaaa

SEQ ID NO: 9495 - DNA, 13 bp, Artificial Sequence
  Oligonucleotide for detection of SNP TSC0002499
ttttttttattaa

SEQ ID NO: 9496 - DNA, 13 bp, Artificial Sequence
  Oligonucleotide for detection of SNP TSC0002499
ttaataaaaaaaa

SEQ ID NO: 9497 - DNA, 13 bp, Artificial Sequence
  Oligonucleotide for detection of SNP TSC0002500
gaaggtggatata

SEQ ID NO: 9498 - DNA, 13 bp, Artificial Sequence
  Oligonucleotide for detection of SNP TSC0002500
tatatccaccttc

SEQ ID NO: 9499 - DNA, 13 bp, Artificial Sequence
  Oligonucleotide for detection of SNP TSC0002500
gaaggtagatata

SEQ ID NO: 9500 - DNA, 13 bp, Artificial Sequence
  Oligonucleotide for detection of SNP TSC0002500
tatatctaccttc

SEQ ID NO: 9501 - DNA, 13 bp, Artificial Sequence
  Oligonucleotide for detection of SNP TSC0002500
gaaggcggatata

SEQ ID NO: 9502 - DNA, 13 bp, Artificial Sequence
  Oligonucleotide for detection of SNP TSC0002500
tatatccgccttc

SEQ ID NO: 9503 - DNA, 13 bp, Artificial Sequence
  Oligonucleotide for detection of SNP TSC0002500
tgtgtttgtttty

SEQ ID NO: 9504 - DNA, 13 bp, Artificial Sequence
  Oligonucleotide for detection of SNP TSC0002500
raaaacaaacaca

SEQ ID NO: 9505 - DNA, 13 bp, Artificial Sequence
  Oligonucleotide for detection of SNP TSC0002500
tgtgttcgtttty

SEQ ID NO: 9506 - DNA, 13 bp, Artificial Sequence
  Oligonucleotide for detection of SNP TSC0002500
raaaacgaacaca

SEQ ID NO: 9507 - DNA, 13 bp, Artificial Sequence
  Oligonucleotide for detection of SNP TSC0002501
atttattagtatg

SEQ ID NO: 9508 - DNA, 13 bp, Artificial Sequence
  Oligonucleotide for detection of SNP TSC0002501
catactaataaat

SEQ ID NO: 9509 - DNA, 13 bp, Artificial Sequence
  Oligonucleotide for detection of SNP TSC0002501
atttataagtatg

SEQ ID NO: 9510 - DNA, 13 bp, Artificial Sequence
  Oligonucleotide for detection of SNP TSC0002501
catacttataaat

SEQ ID NO: 9511 - DNA, 13 bp, Artificial Sequence
  Oligonucleotide for detection of SNP TSC0002501
tatgttagtgaat

SEQ ID NO: 9512 - DNA, 13 bp, Artificial Sequence
  Oligonucleotide for detection of SNP TSC0002501
attcactaacata

SEQ ID NO: 9513 - DNA, 13 bp, Artificial Sequence
  Oligonucleotide for detection of SNP TSC0002501
tatgtttgtgaat

SEQ ID NO: 9514 - DNA, 13 bp, Artificial Sequence
  Oligonucleotide for detection of SNP TSC0002501
attcacaaacata

SEQ ID NO: 9515 - DNA, 13 bp, Artificial Sequence
  Oligonucleotide for detection of SNP TSC0002503
tgtgagaggattg

SEQ ID NO: 9516 - DNA, 13 bp, Artificial Sequence
  Oligonucleotide for detection of SNP TSC0002503
caatcctctcaca

SEQ ID NO: 9517 - DNA, 13 bp, Artificial Sequence
  Oligonucleotide for detection of SNP TSC0002503
tgtgagtggattg

SEQ ID NO: 9518 - DNA, 13 bp, Artificial Sequence
  Oligonucleotide for detection of SNP TSC0002503
caatccactcaca

SEQ ID NO: 9519 - DNA, 13 bp, Artificial Sequence
  Oligonucleotide for detection of SNP TSC0002503
tagtttttttata

SEQ ID NO: 9520 - DNA, 13 bp, Artificial Sequence
  Oligonucleotide for detection of SNP TSC0002503
tataaaaaaacta

SEQ ID NO: 9521 - DNA, 13 bp, Artificial Sequence
  Oligonucleotide for detection of SNP TSC0002503
tagtttatttata

SEQ ID NO: 9522 - DNA, 13 bp, Artificial Sequence
  Oligonucleotide for detection of SNP TSC0002503
tataaataaacta

SEQ ID NO: 9523 - DNA, 13 bp, Artificial Sequence
  Oligonucleotide for detection of SNP TSC0002504
tgtataaattaag

SEQ ID NO: 9524 - DNA, 13 bp, Artificial Sequence
  Oligonucleotide for detection of SNP TSC0002504
cttaatttataca

SEQ ID NO: 9525 - DNA, 13 bp, Artificial Sequence
  Oligonucleotide for detection of SNP TSC0002504
tgtatagattaag

SEQ ID NO: 9526 - DNA, 13 bp, Artificial Sequence
  Oligonucleotide for detection of SNP TSC0002504
cttaatctataca

SEQ ID NO: 9527 - DNA, 13 bp, Artificial Sequence
  Oligonucleotide for detection of SNP TSC0002506
aatgttataagty

SEQ ID NO: 9528 - DNA, 13 bp, Artificial Sequence
  Oligonucleotide for detection of SNP TSC0002506
racttataacatt

SEQ ID NO: 9529 - DNA, 13 bp, Artificial Sequence
  Oligonucleotide for detection of SNP TSC0002506
aatgttgtaagty

SEQ ID NO: 9530 - DNA, 13 bp, Artificial Sequence
  Oligonucleotide for detection of SNP TSC0002506
racttacaacatt

SEQ ID NO: 9531 - DNA, 13 bp, Artificial Sequence
  Oligonucleotide for detection of SNP TSC0002506
aatgtcgtaagty

SEQ ID NO: 9532 - DNA, 13 bp, Artificial Sequence
  Oligonucleotide for detection of SNP TSC0002506
racttacgacatt

SEQ ID NO: 9533 - DNA, 13 bp, Artificial Sequence
  Oligonucleotide for detection of SNP TSC0002506
gatttgtggtatt

SEQ ID NO: 9534 - DNA, 13 bp, Artificial Sequence
  Oligonucleotide for detection of SNP TSC0002506
aataccacaaatc

SEQ ID NO: 9535 - DNA, 13 bp, Artificial Sequence
  Oligonucleotide for detection of SNP TSC0002506
gatttgcggtatt

SEQ ID NO: 9536 - DNA, 13 bp, Artificial Sequence
  Oligonucleotide for detection of SNP TSC0002506
aataccgcaaatc

SEQ ID NO: 9537 - DNA, 13 bp, Artificial Sequence
  Oligonucleotide for detection of SNP TSC0002507
tagaagtggatat

SEQ ID NO: 9538 - DNA, 13 bp, Artificial Sequence
  Oligonucleotide for detection of SNP TSC0002507
atatccacttcta

SEQ ID NO: 9539 - DNA, 13 bp, Artificial Sequence
  Oligonucleotide for detection of SNP TSC0002507
tagaagcggatat

SEQ ID NO: 9540 - DNA, 13 bp, Artificial Sequence
  Oligonucleotide for detection of SNP TSC0002507
atatccgcttcta

SEQ ID NO: 9541 - DNA, 13 bp, Artificial Sequence
  Oligonucleotide for detection of SNP TSC0002507
atgtttgtttttg

SEQ ID NO: 9542 - DNA, 13 bp, Artificial Sequence
  Oligonucleotide for detection of SNP TSC0002507
caaaaacaaacat

SEQ ID NO: 9543 - DNA, 13 bp, Artificial Sequence
  Oligonucleotide for detection of SNP TSC0002507
atgtttatttttg

SEQ ID NO: 9544 - DNA, 13 bp, Artificial Sequence
  Oligonucleotide for detection of SNP TSC0002507
caaaaataaacat

SEQ ID NO: 9545 - DNA, 13 bp, Artificial Sequence
  Oligonucleotide for detection of SNP TSC0002507
atgttcgtttttg

SEQ ID NO: 9546 - DNA, 13 bp, Artificial Sequence
  Oligonucleotide for detection of SNP TSC0002507
caaaaacgaacat

SEQ ID NO: 9547 - DNA, 13 bp, Artificial Sequence
  Oligonucleotide for detection of SNP TSC0002508
aattgaggatttt

SEQ ID NO: 9548 - DNA, 13 bp, Artificial Sequence
  Oligonucleotide for detection of SNP TSC0002508
aaaatcctcaatt

SEQ ID NO: 9549 - DNA, 13 bp, Artificial Sequence
  Oligonucleotide for detection of SNP TSC0002508
aattgaagatttt

SEQ ID NO: 9550 - DNA, 13 bp, Artificial Sequence
  Oligonucleotide for detection of SNP TSC0002508
aaaatcttcaatt

SEQ ID NO: 9551 - DNA, 13 bp, Artificial Sequence
  Oligonucleotide for detection of SNP TSC0002510
tgttagtgggtty

SEQ ID NO: 9552 - DNA, 13 bp, Artificial Sequence
  Oligonucleotide for detection of SNP TSC0002510
raacccactaaca

SEQ ID NO: 9553 - DNA, 13 bp, Artificial Sequence
  Oligonucleotide for detection of SNP TSC0002510
cgttagtgggtty

SEQ ID NO: 9554 - DNA, 13 bp, Artificial Sequence
  Oligonucleotide for detection of SNP TSC0002510
raacccactaacg

SEQ ID NO: 9555 - DNA, 13 bp, Artificial Sequence
  Oligonucleotide for detection of SNP TSC0002510
tgttagcgggtty

SEQ ID NO: 9556 - DNA, 13 bp, Artificial Sequence
  Oligonucleotide for detection of SNP TSC0002510
raacccgctaaca

SEQ ID NO: 9557 - DNA, 13 bp, Artificial Sequence
  Oligonucleotide for detection of SNP TSC0002510
cgttagcgggtty

SEQ ID NO: 9558 - DNA, 13 bp, Artificial Sequence
  Oligonucleotide for detection of SNP TSC0002510
raacccgctaacg

SEQ ID NO: 9559 - DNA, 13 bp, Artificial Sequence
  Oligonucleotide for detection of SNP TSC0002510
ggatttgttggtg

SEQ ID NO: 9560 - DNA, 13 bp, Artificial Sequence
  Oligonucleotide for detection of SNP TSC0002510
caccaacaaatcc

SEQ ID NO: 9561 - DNA, 13 bp, Artificial Sequence
  Oligonucleotide for detection of SNP TSC0002510
ggatttattggtg

SEQ ID NO: 9562 - DNA, 13 bp, Artificial Sequence
  Oligonucleotide for detection of SNP TSC0002510
caccaataaatcc

SEQ ID NO: 9563 - DNA, 13 bp, Artificial Sequence
  Oligonucleotide for detection of SNP TSC0002510
ggattcgttggtg

SEQ ID NO: 9564 - DNA, 13 bp, Artificial Sequence
  Oligonucleotide for detection of SNP TSC0002510
caccaacgaatcc

SEQ ID NO: 9565 - DNA, 13 bp, Artificial Sequence
  Oligonucleotide for detection of SNP TSC0002510
ggatttattggcg

SEQ ID NO: 9566 - DNA, 13 bp, Artificial Sequence
  Oligonucleotide for detection of SNP TSC0002510
cgccaataaatcc

SEQ ID NO: 9567 - DNA, 13 bp, Artificial Sequence
  Oligonucleotide for detection of SNP TSC0002510
ggatttgttggcg

SEQ ID NO: 9568 - DNA, 13 bp, Artificial Sequence
  Oligonucleotide for detection of SNP TSC0002510
cgccaacaaatcc

SEQ ID NO: 9569 - DNA, 13 bp, Artificial Sequence
  Oligonucleotide for detection of SNP TSC0002510
ggattcgttggcg

SEQ ID NO: 9570 - DNA, 13 bp, Artificial Sequence
  Oligonucleotide for detection of SNP TSC0002510
cgccaacgaatcc

SEQ ID NO: 9571 - DNA, 13 bp, Artificial Sequence
  Oligonucleotide for detection of SNP TSC0002511
tgatttttattty

SEQ ID NO: 9572 - DNA, 13 bp, Artificial Sequence
  Oligonucleotide for detection of SNP TSC0002511
raaataaaaatca

SEQ ID NO: 9573 - DNA, 13 bp, Artificial Sequence
  Oligonucleotide for detection of SNP TSC0002511
tgatttgtattty

SEQ ID NO: 9574 - DNA, 13 bp, Artificial Sequence
  Oligonucleotide for detection of SNP TSC0002511
raaatacaaatca

SEQ ID NO: 9575 - DNA, 13 bp, Artificial Sequence
  Oligonucleotide for detection of SNP TSC0002511
tgattcgtattty

SEQ ID NO: 9576 - DNA, 13 bp, Artificial Sequence
  Oligonucleotide for detection of SNP TSC0002511
raaatacgaatca

SEQ ID NO: 9577 - DNA, 13 bp, Artificial Sequence
  Oligonucleotide for detection of SNP TSC0002511
gggatgagggtta

SEQ ID NO: 9578 - DNA, 13 bp, Artificial Sequence
  Oligonucleotide for detection of SNP TSC0002511
taaccctcatccc

SEQ ID NO: 9579 - DNA, 13 bp, Artificial Sequence
  Oligonucleotide for detection of SNP TSC0002511
gggatgtgggtta

SEQ ID NO: 9580 - DNA, 13 bp, Artificial Sequence
  Oligonucleotide for detection of SNP TSC0002511
taacccacatccc

SEQ ID NO: 9581 - DNA, 13 bp, Artificial Sequence
  Oligonucleotide for detection of SNP TSC0002511
gggatgcgggtta

SEQ ID NO: 9582 - DNA, 13 bp, Artificial Sequence
  Oligonucleotide for detection of SNP TSC0002511
taacccgcatccc

SEQ ID NO: 9583 - DNA, 13 bp, Artificial Sequence
  Oligonucleotide for detection of SNP TSC0002512
tgtatttttattt

SEQ ID NO: 9584 - DNA, 13 bp, Artificial Sequence
  Oligonucleotide for detection of SNP TSC0002512
aaataaaaataca

SEQ ID NO: 9585 - DNA, 13 bp, Artificial Sequence
  Oligonucleotide for detection of SNP TSC0002512
tgtattgttattt

SEQ ID NO: 9586 - DNA, 13 bp, Artificial Sequence
  Oligonucleotide for detection of SNP TSC0002512
aaataacaataca

SEQ ID NO: 9587 - DNA, 13 bp, Artificial Sequence
  Oligonucleotide for detection of SNP TSC0002512
tgtatcgttattt

SEQ ID NO: 9588 - DNA, 13 bp, Artificial Sequence
  Oligonucleotide for detection of SNP TSC0002512
aaataacgataca

SEQ ID NO: 9589 - DNA, 13 bp, Artificial Sequence
  Oligonucleotide for detection of SNP TSC0002512
aggtgaagatata

SEQ ID NO: 9590 - DNA, 13 bp, Artificial Sequence
  Oligonucleotide for detection of SNP TSC0002512
tatatcttcacct

SEQ ID NO: 9591 - DNA, 13 bp, Artificial Sequence
  Oligonucleotide for detection of SNP TSC0002512
aggtgatgatata

SEQ ID NO: 9592 - DNA, 13 bp, Artificial Sequence
  Oligonucleotide for detection of SNP TSC0002512
tatatcatcacct

SEQ ID NO: 9593 - DNA, 13 bp, Artificial Sequence
  Oligonucleotide for detection of SNP TSC0002512
aggtgacgatata

SEQ ID NO: 9594 - DNA, 13 bp, Artificial Sequence
  Oligonucleotide for detection of SNP TSC0002512
tatatcgtcacct

SEQ ID NO: 9595 - DNA, 13 bp, Artificial Sequence
  Oligonucleotide for detection of SNP TSC0002513
attatgtggttta

SEQ ID NO: 9596 - DNA, 13 bp, Artificial Sequence
  Oligonucleotide for detection of SNP TSC0002513
taaaccacataat

SEQ ID NO: 9597 - DNA, 13 bp, Artificial Sequence
  Oligonucleotide for detection of SNP TSC0002513
attacgtggttta

SEQ ID NO: 9598 - DNA, 13 bp, Artificial Sequence
  Oligonucleotide for detection of SNP TSC0002513
taaaccacgtaat

SEQ ID NO: 9599 - DNA, 13 bp, Artificial Sequence
  Oligonucleotide for detection of SNP TSC0002513
attatgcggttta

SEQ ID NO: 9600 - DNA, 13 bp, Artificial Sequence
  Oligonucleotide for detection of SNP TSC0002513
taaaccgcataat

SEQ ID NO: 9601 - DNA, 13 bp, Artificial Sequence
  Oligonucleotide for detection of SNP TSC0002513
attacgcggttta

SEQ ID NO: 9602 - DNA, 13 bp, Artificial Sequence
  Oligonucleotide for detection of SNP TSC0002513
taaaccgcgtaat

SEQ ID NO: 9603 - DNA, 13 bp, Artificial Sequence
  Oligonucleotide for detection of SNP TSC0002513
tgaattatgtagt

SEQ ID NO: 9604 - DNA, 13 bp, Artificial Sequence
  Oligonucleotide for detection of SNP TSC0002513
actacataattca

SEQ ID NO: 9605 - DNA, 13 bp, Artificial Sequence
  Oligonucleotide for detection of SNP TSC0002513
tgaattgtgtagt

SEQ ID NO: 9606 - DNA, 13 bp, Artificial Sequence
  Oligonucleotide for detection of SNP TSC0002513
actacacaattca

SEQ ID NO: 9607 - DNA, 13 bp, Artificial Sequence
  Oligonucleotide for detection of SNP TSC0002513
tgaattacgtagt

SEQ ID NO: 9608 - DNA, 13 bp, Artificial Sequence
  Oligonucleotide for detection of SNP TSC0002513
actacgtaattca

SEQ ID NO: 9609 - DNA, 13 bp, Artificial Sequence
  Oligonucleotide for detection of SNP TSC0002513
tgaatcgtgtagt

SEQ ID NO: 9610 - DNA, 13 bp, Artificial Sequence
  Oligonucleotide for detection of SNP TSC0002513
actacacgattca

SEQ ID NO: 9611 - DNA, 13 bp, Artificial Sequence
  Oligonucleotide for detection of SNP TSC0002513
tgaattgcgtagt

SEQ ID NO: 9612 - DNA, 13 bp, Artificial Sequence
  Oligonucleotide for detection of SNP TSC0002513
actacgcaattca

SEQ ID NO: 9613 - DNA, 13 bp, Artificial Sequence
  Oligonucleotide for detection of SNP TSC0002513
tgaatcgcgtagt

SEQ ID NO: 9614 - DNA, 13 bp, Artificial Sequence
  Oligonucleotide for detection of SNP TSC0002513
actacgcgattca

SEQ ID NO: 9615 - DNA, 13 bp, Artificial Sequence
  Oligonucleotide for detection of SNP TSC0002514
tttgaggggaggg

SEQ ID NO: 9616 - DNA, 13 bp, Artificial Sequence
  Oligonucleotide for detection of SNP TSC0002514
ccctcccctcaaa

SEQ ID NO: 9617 - DNA, 13 bp, Artificial Sequence
  Oligonucleotide for detection of SNP TSC0002514
tttgagaggaggg

SEQ ID NO: 9618 - DNA, 13 bp, Artificial Sequence
  Oligonucleotide for detection of SNP TSC0002514
ccctcctctcaaa

SEQ ID NO: 9619 - DNA, 13 bp, Artificial Sequence
  Oligonucleotide for detection of SNP TSC0002515
aagtgtatgtttt

SEQ ID NO: 9620 - DNA, 13 bp, Artificial Sequence
  Oligonucleotide for detection of SNP TSC0002515
aaaacatacactt

SEQ ID NO: 9621 - DNA, 13 bp, Artificial Sequence
  Oligonucleotide for detection of SNP TSC0002515
aagtgtgtgtttt

SEQ ID NO: 9622 - DNA, 13 bp, Artificial Sequence
  Oligonucleotide for detection of SNP TSC0002515
aaaacacacactt

SEQ ID NO: 9623 - DNA, 13 bp, Artificial Sequence
  Oligonucleotide for detection of SNP TSC0002515
aagtgcgtgtttt

SEQ ID NO: 9624 - DNA, 13 bp, Artificial Sequence
  Oligonucleotide for detection of SNP TSC0002515
aaaacacgcactt

SEQ ID NO: 9625 - DNA, 13 bp, Artificial Sequence
  Oligonucleotide for detection of SNP TSC0002515
agaatatgtattt

SEQ ID NO: 9626 - DNA, 13 bp, Artificial Sequence
  Oligonucleotide for detection of SNP TSC0002515
aaatacatattct

SEQ ID NO: 9627 - DNA, 13 bp, Artificial Sequence
  Oligonucleotide for detection of SNP TSC0002515
agaatacgtattt

SEQ ID NO: 9628 - DNA, 13 bp, Artificial Sequence
  Oligonucleotide for detection of SNP TSC0002515
aaatacgtattct

SEQ ID NO: 9629 - DNA, 13 bp, Artificial Sequence
  Oligonucleotide for detection of SNP TSC0002516
ttttataaagtty

SEQ ID NO: 9630 - DNA, 13 bp, Artificial Sequence
  Oligonucleotide for detection of SNP TSC0002516
raactttataaaa

SEQ ID NO: 9631 - DNA, 13 bp, Artificial Sequence
  Oligonucleotide for detection of SNP TSC0002516
ttttattaagtty

SEQ ID NO: 9632 - DNA, 13 bp, Artificial Sequence
  Oligonucleotide for detection of SNP TSC0002516
raacttaataaaa

SEQ ID NO: 9633 - DNA, 13 bp, Artificial Sequence
  Oligonucleotide for detection of SNP TSC0002516
gaattttatagaa

SEQ ID NO: 9634 - DNA, 13 bp, Artificial Sequence
  Oligonucleotide for detection of SNP TSC0002516
ttctataaaattc

SEQ ID NO: 9635 - DNA, 13 bp, Artificial Sequence
  Oligonucleotide for detection of SNP TSC0002516
gaatttgatagaa

SEQ ID NO: 9636 - DNA, 13 bp, Artificial Sequence
  Oligonucleotide for detection of SNP TSC0002516
ttctatcaaattc

SEQ ID NO: 9637 - DNA, 13 bp, Artificial Sequence
  Oligonucleotide for detection of SNP TSC0002517
aggatgagtgggg

SEQ ID NO: 9638 - DNA, 13 bp, Artificial Sequence
  Oligonucleotide for detection of SNP TSC0002517
ccccactcatcct

SEQ ID NO: 9639 - DNA, 13 bp, Artificial Sequence
  Oligonucleotide for detection of SNP TSC0002517
aggatgggtgggg

SEQ ID NO: 9640 - DNA, 13 bp, Artificial Sequence
  Oligonucleotide for detection of SNP TSC0002517
ccccacccatcct

SEQ ID NO: 9641 - DNA, 13 bp, Artificial Sequence
  Oligonucleotide for detection of SNP TSC0002518
gttgtagtaaata

SEQ ID NO: 9642 - DNA, 13 bp, Artificial Sequence
  Oligonucleotide for detection of SNP TSC0002518
tatttactacaac

SEQ ID NO: 9643 - DNA, 13 bp, Artificial Sequence
  Oligonucleotide for detection of SNP TSC0002518
gttgtaataaata

SEQ ID NO: 9644 - DNA, 13 bp, Artificial Sequence
  Oligonucleotide for detection of SNP TSC0002518
tatttattacaac

SEQ ID NO: 9645 - DNA, 13 bp, Artificial Sequence
  Oligonucleotide for detection of SNP TSC0002518
gtcgtagtaaata

SEQ ID NO: 9646 - DNA, 13 bp, Artificial Sequence
  Oligonucleotide for detection of SNP TSC0002518
tatttactacgac

SEQ ID NO: 9647 - DNA, 13 bp, Artificial Sequence
  Oligonucleotide for detection of SNP TSC0002518
gtcgtaataaata

SEQ ID NO: 9648 - DNA, 13 bp, Artificial Sequence
  Oligonucleotide for detection of SNP TSC0002518
tatttattacgac

SEQ ID NO: 9649 - DNA, 13 bp, Artificial Sequence
  Oligonucleotide for detection of SNP TSC0002519
aatgtgggataaa

SEQ ID NO: 9650 - DNA, 13 bp, Artificial Sequence
  Oligonucleotide for detection of SNP TSC0002519
tttatcccacatt

SEQ ID NO: 9651 - DNA, 13 bp, Artificial Sequence
  Oligonucleotide for detection of SNP TSC0002519
aatgtgtgataaa

SEQ ID NO: 9652 - DNA, 13 bp, Artificial Sequence
  Oligonucleotide for detection of SNP TSC0002519
tttatcacacatt

SEQ ID NO: 9653 - DNA, 13 bp, Artificial Sequence
  Oligonucleotide for detection of SNP TSC0002519
tttgttttatatt

SEQ ID NO: 9654 - DNA, 13 bp, Artificial Sequence
  Oligonucleotide for detection of SNP TSC0002519
aatataaaacaaa

SEQ ID NO: 9655 - DNA, 13 bp, Artificial Sequence
  Oligonucleotide for detection of SNP TSC0002519
tttgttatatatt

SEQ ID NO: 9656 - DNA, 13 bp, Artificial Sequence
  Oligonucleotide for detection of SNP TSC0002519
aatatataacaaa

SEQ ID NO: 9657 - DNA, 13 bp, Artificial Sequence
  Oligonucleotide for detection of SNP TSC0002521
tttttaagttttt

SEQ ID NO: 9658 - DNA, 13 bp, Artificial Sequence
  Oligonucleotide for detection of SNP TSC0002521
aaaaacttaaaaa

SEQ ID NO: 9659 - DNA, 13 bp, Artificial Sequence
  Oligonucleotide for detection of SNP TSC0002522
ttattggttatag

SEQ ID NO: 9660 - DNA, 13 bp, Artificial Sequence
  Oligonucleotide for detection of SNP TSC0002522
ctataaccaataa

SEQ ID NO: 9661 - DNA, 13 bp, Artificial Sequence
  Oligonucleotide for detection of SNP TSC0002522
ttattgattatag

SEQ ID NO: 9662 - DNA, 13 bp, Artificial Sequence
  Oligonucleotide for detection of SNP TSC0002522
ctataatcaataa

SEQ ID NO: 9663 - DNA, 13 bp, Artificial Sequence
  Oligonucleotide for detection of SNP TSC0002522
ttatcggttatag

SEQ ID NO: 9664 - DNA, 13 bp, Artificial Sequence
  Oligonucleotide for detection of SNP TSC0002522
ctataaccgataa

SEQ ID NO: 9665 - DNA, 13 bp, Artificial Sequence
  Oligonucleotide for detection of SNP TSC0002522
ttatcgattatag

SEQ ID NO: 9666 - DNA, 13 bp, Artificial Sequence
  Oligonucleotide for detection of SNP TSC0002522
ctataatcgataa

SEQ ID NO: 9667 - DNA, 13 bp, Artificial Sequence
  Oligonucleotide for detection of SNP TSC0002524
gttattggttgta

SEQ ID NO: 9668 - DNA, 13 bp, Artificial Sequence
  Oligonucleotide for detection of SNP TSC0002524
tacaaccaataac

SEQ ID NO: 9669 - DNA, 13 bp, Artificial Sequence
  Oligonucleotide for detection of SNP TSC0002524
gttattagttgta

SEQ ID NO: 9670 - DNA, 13 bp, Artificial Sequence
  Oligonucleotide for detection of SNP TSC0002524
tacaactaataac

SEQ ID NO: 9671 - DNA, 13 bp, Artificial Sequence
  Oligonucleotide for detection of SNP TSC0002525
gggaagggaggtg

SEQ ID NO: 9672 - DNA, 13 bp, Artificial Sequence
  Oligonucleotide for detection of SNP TSC0002525
cacctcccttccc

SEQ ID NO: 9673 - DNA, 13 bp, Artificial Sequence
  Oligonucleotide for detection of SNP TSC0002525
gggaagagaggtg

SEQ ID NO: 9674 - DNA, 13 bp, Artificial Sequence
  Oligonucleotide for detection of SNP TSC0002525
cacctctcttccc

SEQ ID NO: 9675 - DNA, 13 bp, Artificial Sequence
  Oligonucleotide for detection of SNP TSC0002525
gggaagggaggcg

SEQ ID NO: 9676 - DNA, 13 bp, Artificial Sequence
  Oligonucleotide for detection of SNP TSC0002525
cgcctcccttccc

SEQ ID NO: 9677 - DNA, 13 bp, Artificial Sequence
  Oligonucleotide for detection of SNP TSC0002525
gggaagagaggcg

SEQ ID NO: 9678 - DNA, 13 bp, Artificial Sequence
  Oligonucleotide for detection of SNP TSC0002525
cgcctctcttccc

SEQ ID NO: 9679 - DNA, 13 bp, Artificial Sequence
  Oligonucleotide for detection of SNP TSC0002526
ttatatgtggaty

SEQ ID NO: 9680 - DNA, 13 bp, Artificial Sequence
  Oligonucleotide for detection of SNP TSC0002526
ratccacatataa

SEQ ID NO: 9681 - DNA, 13 bp, Artificial Sequence
  Oligonucleotide for detection of SNP TSC0002526
ttatatttggaty

SEQ ID NO: 9682 - DNA, 13 bp, Artificial Sequence
  Oligonucleotide for detection of SNP TSC0002526
ratccaaatataa

SEQ ID NO: 9683 - DNA, 13 bp, Artificial Sequence
  Oligonucleotide for detection of SNP TSC0002526
ggtttatatgtga

SEQ ID NO: 9684 - DNA, 13 bp, Artificial Sequence
  Oligonucleotide for detection of SNP TSC0002526
tcacatataaacc

SEQ ID NO: 9685 - DNA, 13 bp, Artificial Sequence
  Oligonucleotide for detection of SNP TSC0002526
ggtttagatgtga

SEQ ID NO: 9686 - DNA, 13 bp, Artificial Sequence
  Oligonucleotide for detection of SNP TSC0002526
tcacatctaaacc

SEQ ID NO: 9687 - DNA, 13 bp, Artificial Sequence
  Oligonucleotide for detection of SNP TSC0002527
ttgagagtgaggg

SEQ ID NO: 9688 - DNA, 13 bp, Artificial Sequence
  Oligonucleotide for detection of SNP TSC0002527
ccctcactctcaa

SEQ ID NO: 9689 - DNA, 13 bp, Artificial Sequence
  Oligonucleotide for detection of SNP TSC0002527
ttgagattgaggg

SEQ ID NO: 9690 - DNA, 13 bp, Artificial Sequence
  Oligonucleotide for detection of SNP TSC0002527
ccctcaatctcaa

SEQ ID NO: 9691 - DNA, 13 bp, Artificial Sequence
  Oligonucleotide for detection of SNP TSC0002527
tttttatttttag

SEQ ID NO: 9692 - DNA, 13 bp, Artificial Sequence
  Oligonucleotide for detection of SNP TSC0002527
ctaaaaataaaaa

SEQ ID NO: 9693 - DNA, 13 bp, Artificial Sequence
  Oligonucleotide for detection of SNP TSC0002527
tttttaattttag

SEQ ID NO: 9694 - DNA, 13 bp, Artificial Sequence
  Oligonucleotide for detection of SNP TSC0002527
ctaaaattaaaaa

SEQ ID NO: 9695 - DNA, 13 bp, Artificial Sequence
  Oligonucleotide for detection of SNP TSC0002528
ttttgtaaatttg

SEQ ID NO: 9696 - DNA, 13 bp, Artificial Sequence
  Oligonucleotide for detection of SNP TSC0002528
caaatttacaaaa

SEQ ID NO: 9697 - DNA, 13 bp, Artificial Sequence
  Oligonucleotide for detection of SNP TSC0002528
ttttgtgaatttg

SEQ ID NO: 9698 - DNA, 13 bp, Artificial Sequence
  Oligonucleotide for detection of SNP TSC0002528
caaattcacaaaa

SEQ ID NO: 9699 - DNA, 13 bp, Artificial Sequence
  Oligonucleotide for detection of SNP TSC0002528
ttttgcgaatttg

SEQ ID NO: 9700 - DNA, 13 bp, Artificial Sequence
  Oligonucleotide for detection of SNP TSC0002528
caaattcgcaaaa

SEQ ID NO: 9701 - DNA, 13 bp, Artificial Sequence
  Oligonucleotide for detection of SNP TSC0002528
taaatttgtaaaa

SEQ ID NO: 9702 - DNA, 13 bp, Artificial Sequence
  Oligonucleotide for detection of SNP TSC0002528
ttttacaaattta

SEQ ID NO: 9703 - DNA, 13 bp, Artificial Sequence
  Oligonucleotide for detection of SNP TSC0002528
taaattcgtaaaa

SEQ ID NO: 9704 - DNA, 13 bp, Artificial Sequence
  Oligonucleotide for detection of SNP TSC0002528
ttttacgaattta

SEQ ID NO: 9705 - DNA, 13 bp, Artificial Sequence
  Oligonucleotide for detection of SNP TSC0002529
aaatatgatttgg

SEQ ID NO: 9706 - DNA, 13 bp, Artificial Sequence
  Oligonucleotide for detection of SNP TSC0002529
ccaaatcatattt

SEQ ID NO: 9707 - DNA, 13 bp, Artificial Sequence
  Oligonucleotide for detection of SNP TSC0002529
aaatataatttgg

SEQ ID NO: 9708 - DNA, 13 bp, Artificial Sequence
  Oligonucleotide for detection of SNP TSC0002529
ccaaattatattt

SEQ ID NO: 9709 - DNA, 13 bp, Artificial Sequence
  Oligonucleotide for detection of SNP TSC0002531
gatttggttttty

SEQ ID NO: 9710 - DNA, 13 bp, Artificial Sequence
  Oligonucleotide for detection of SNP TSC0002531
raaaaaccaaatc

SEQ ID NO: 9711 - DNA, 13 bp, Artificial Sequence
  Oligonucleotide for detection of SNP TSC0002531
gatttgattttty

SEQ ID NO: 9712 - DNA, 13 bp, Artificial Sequence
  Oligonucleotide for detection of SNP TSC0002531
raaaaatcaaatc

SEQ ID NO: 9713 - DNA, 13 bp, Artificial Sequence
  Oligonucleotide for detection of SNP TSC0002531
gattcggttttty

SEQ ID NO: 9714 - DNA, 13 bp, Artificial Sequence
  Oligonucleotide for detection of SNP TSC0002531
raaaaaccgaatc

SEQ ID NO: 9715 - DNA, 13 bp, Artificial Sequence
  Oligonucleotide for detection of SNP TSC0002531
gattcgattttty

SEQ ID NO: 9716 - DNA, 13 bp, Artificial Sequence
  Oligonucleotide for detection of SNP TSC0002531
raaaaatcgaatc

SEQ ID NO: 9717 - DNA, 13 bp, Artificial Sequence
  Oligonucleotide for detection of SNP TSC0002532
ttttaaatttttt

SEQ ID NO: 9718 - DNA, 13 bp, Artificial Sequence
  Oligonucleotide for detection of SNP TSC0002532
aaaaaatttaaaa

SEQ ID NO: 9719 - DNA, 13 bp, Artificial Sequence
  Oligonucleotide for detection of SNP TSC0002532
ttttaagtttttt

SEQ ID NO: 9720 - DNA, 13 bp, Artificial Sequence
  Oligonucleotide for detection of SNP TSC0002532
aaaaaacttaaaa

SEQ ID NO: 9721 - DNA, 13 bp, Artificial Sequence
  Oligonucleotide for detection of SNP TSC0002533
tatgttatggatt

SEQ ID NO: 9722 - DNA, 13 bp, Artificial Sequence
  Oligonucleotide for detection of SNP TSC0002533
aatccataacata

SEQ ID NO: 9723 - DNA, 13 bp, Artificial Sequence
  Oligonucleotide for detection of SNP TSC0002533
tatgttgtggatt

SEQ ID NO: 9724 - DNA, 13 bp, Artificial Sequence
  Oligonucleotide for detection of SNP TSC0002533
aatccacaacata

SEQ ID NO: 9725 - DNA, 13 bp, Artificial Sequence
  Oligonucleotide for detection of SNP TSC0002534
ttgttaatttttt

SEQ ID NO: 9726 - DNA, 13 bp, Artificial Sequence
  Oligonucleotide for detection of SNP TSC0002534
aaaaaattaacaa

SEQ ID NO: 9727 - DNA, 13 bp, Artificial Sequence
  Oligonucleotide for detection of SNP TSC0002534
ttgttagtttttt

SEQ ID NO: 9728 - DNA, 13 bp, Artificial Sequence
  Oligonucleotide for detection of SNP TSC0002534
aaaaaactaacaa

SEQ ID NO: 9729 - DNA, 13 bp, Artificial Sequence
  Oligonucleotide for detection of SNP TSC0002536
tggttagtattat

SEQ ID NO: 9730 - DNA, 13 bp, Artificial Sequence
  Oligonucleotide for detection of SNP TSC0002536
ataatactaacca

SEQ ID NO: 9731 - DNA, 13 bp, Artificial Sequence
  Oligonucleotide for detection of SNP TSC0002536
tggttaatattat

SEQ ID NO: 9732 - DNA, 13 bp, Artificial Sequence
  Oligonucleotide for detection of SNP TSC0002536
ataatattaacca

SEQ ID NO: 9733 - DNA, 13 bp, Artificial Sequence
  Oligonucleotide for detection of SNP TSC0002537
ggggatatttttg

SEQ ID NO: 9734 - DNA, 13 bp, Artificial Sequence
  Oligonucleotide for detection of SNP TSC0002537
caaaaatatcccc

SEQ ID NO: 9735 - DNA, 13 bp, Artificial Sequence
  Oligonucleotide for detection of SNP TSC0002537
ggggatgtttttg

SEQ ID NO: 9736 - DNA, 13 bp, Artificial Sequence
  Oligonucleotide for detection of SNP TSC0002537
caaaaacatcccc

SEQ ID NO: 9737 - DNA, 13 bp, Artificial Sequence
  Oligonucleotide for detection of SNP TSC0002538
gagagtgattagy

SEQ ID NO: 9738 - DNA, 13 bp, Artificial Sequence
  Oligonucleotide for detection of SNP TSC0002538
rctaatcactctc

SEQ ID NO: 9739 - DNA, 13 bp, Artificial Sequence
  Oligonucleotide for detection of SNP TSC0002538
gagagttattagy

SEQ ID NO: 9740 - DNA, 13 bp, Artificial Sequence
  Oligonucleotide for detection of SNP TSC0002538
rctaataactctc

SEQ ID NO: 9741 - DNA, 13 bp, Artificial Sequence
  Oligonucleotide for detection of SNP TSC0002538
gttagttatttty

SEQ ID NO: 9742 - DNA, 13 bp, Artificial Sequence
  Oligonucleotide for detection of SNP TSC0002538
raaaataactaac

SEQ ID NO: 9743 - DNA, 13 bp, Artificial Sequence
  Oligonucleotide for detection of SNP TSC0002538
gttagtgatttty

SEQ ID NO: 9744 - DNA, 13 bp, Artificial Sequence
  Oligonucleotide for detection of SNP TSC0002538
raaaatcactaac

SEQ ID NO: 9745 - DNA, 13 bp, Artificial Sequence
  Oligonucleotide for detection of SNP TSC0002539
ttttaattataaa

SEQ ID NO: 9746 - DNA, 13 bp, Artificial Sequence
  Oligonucleotide for detection of SNP TSC0002539
tttataattaaaa

SEQ ID NO: 9747 - DNA, 13 bp, Artificial Sequence
  Oligonucleotide for detection of SNP TSC0002539
ttttaagtataaa

SEQ ID NO: 9748 - DNA, 13 bp, Artificial Sequence
  Oligonucleotide for detection of SNP TSC0002539
tttatacttaaaa

SEQ ID NO: 9749 - DNA, 13 bp, Artificial Sequence
  Oligonucleotide for detection of SNP TSC0002539
tttgtaattagaa

SEQ ID NO: 9750 - DNA, 13 bp, Artificial Sequence
  Oligonucleotide for detection of SNP TSC0002539
ttctaattacaaa

SEQ ID NO: 9751 - DNA, 13 bp, Artificial Sequence
  Oligonucleotide for detection of SNP TSC0002539
tttgtatttagaa

SEQ ID NO: 9752 - DNA, 13 bp, Artificial Sequence
  Oligonucleotide for detection of SNP TSC0002539
ttctaaatacaaa

SEQ ID NO: 9753 - DNA, 13 bp, Artificial Sequence
  Oligonucleotide for detection of SNP TSC0002540
ttttggaaggttg

SEQ ID NO: 9754 - DNA, 13 bp, Artificial Sequence
  Oligonucleotide for detection of SNP TSC0002540
caaccttccaaaa

SEQ ID NO: 9755 - DNA, 13 bp, Artificial Sequence
  Oligonucleotide for detection of SNP TSC0002540
ttttgggaggttg

SEQ ID NO: 9756 - DNA, 13 bp, Artificial Sequence
  Oligonucleotide for detection of SNP TSC0002540
caacctcccaaaa

SEQ ID NO: 9757 - DNA, 13 bp, Artificial Sequence
  Oligonucleotide for detection of SNP TSC0002540
ttttggaaggtcg

SEQ ID NO: 9758 - DNA, 13 bp, Artificial Sequence
  Oligonucleotide for detection of SNP TSC0002540
cgaccttccaaaa

SEQ ID NO: 9759 - DNA, 13 bp, Artificial Sequence
  Oligonucleotide for detection of SNP TSC0002540
ttttgggaggtcg

SEQ ID NO: 9760 - DNA, 13 bp, Artificial Sequence
  Oligonucleotide for detection of SNP TSC0002540
cgacctcccaaaa

SEQ ID NO: 9761 - DNA, 13 bp, Artificial Sequence
  Oligonucleotide for detection of SNP TSC0002541
agtttggaattag

SEQ ID NO: 9762 - DNA, 13 bp, Artificial Sequence
  Oligonucleotide for detection of SNP TSC0002541
ctaattccaaact

SEQ ID NO: 9763 - DNA, 13 bp, Artificial Sequence
  Oligonucleotide for detection of SNP TSC0002541
agtttgtaattag

SEQ ID NO: 9764 - DNA, 13 bp, Artificial Sequence
  Oligonucleotide for detection of SNP TSC0002541
ctaattacaaact

SEQ ID NO: 9765 - DNA, 13 bp, Artificial Sequence
  Oligonucleotide for detection of SNP TSC0002541
ttgattttaaatt

SEQ ID NO: 9766 - DNA, 13 bp, Artificial Sequence
  Oligonucleotide for detection of SNP TSC0002541
aatttaaaatcaa

SEQ ID NO: 9767 - DNA, 13 bp, Artificial Sequence
  Oligonucleotide for detection of SNP TSC0002541
ttgattgtaaatt

SEQ ID NO: 9768 - DNA, 13 bp, Artificial Sequence
  Oligonucleotide for detection of SNP TSC0002541
aatttacaatcaa

SEQ ID NO: 9769 - DNA, 13 bp, Artificial Sequence
  Oligonucleotide for detection of SNP TSC0002542
attattgaaaaga

SEQ ID NO: 9770 - DNA, 13 bp, Artificial Sequence
  Oligonucleotide for detection of SNP TSC0002542
tcttttcaataat

SEQ ID NO: 9771 - DNA, 13 bp, Artificial Sequence
  Oligonucleotide for detection of SNP TSC0002542
attattaaaaaga

SEQ ID NO: 9772 - DNA, 13 bp, Artificial Sequence
  Oligonucleotide for detection of SNP TSC0002542
tctttttaataat

SEQ ID NO: 9773 - DNA, 13 bp, Artificial Sequence
  Oligonucleotide for detection of SNP TSC0002542
attatcgaaaaga

SEQ ID NO: 9774 - DNA, 13 bp, Artificial Sequence
  Oligonucleotide for detection of SNP TSC0002542
tcttttcgataat

SEQ ID NO: 9775 - DNA, 13 bp, Artificial Sequence
  Oligonucleotide for detection of SNP TSC0002542
tttttttgataat

SEQ ID NO: 9776 - DNA, 13 bp, Artificial Sequence
  Oligonucleotide for detection of SNP TSC0002542
attatcaaaaaaa

SEQ ID NO: 9777 - DNA, 13 bp, Artificial Sequence
  Oligonucleotide for detection of SNP TSC0002542
ttttttcgataat

SEQ ID NO: 9778 - DNA, 13 bp, Artificial Sequence
  Oligonucleotide for detection of SNP TSC0002542
attatcgaaaaaa

SEQ ID NO: 9779 - DNA, 13 bp, Artificial Sequence
  Oligonucleotide for detection of SNP TSC0002545
ggatttagagaga

SEQ ID NO: 9780 - DNA, 13 bp, Artificial Sequence
  Oligonucleotide for detection of SNP TSC0002545
tctctctaaatcc

SEQ ID NO: 9781 - DNA, 13 bp, Artificial Sequence
  Oligonucleotide for detection of SNP TSC0002545
ggattttgagaga

SEQ ID NO: 9782 - DNA, 13 bp, Artificial Sequence
  Oligonucleotide for detection of SNP TSC0002545
tctctcaaaatcc

SEQ ID NO: 9783 - DNA, 13 bp, Artificial Sequence
  Oligonucleotide for detection of SNP TSC0002545
tttttttgggtty

SEQ ID NO: 9784 - DNA, 13 bp, Artificial Sequence
  Oligonucleotide for detection of SNP TSC0002545
raacccaaaaaaa

SEQ ID NO: 9785 - DNA, 13 bp, Artificial Sequence
  Oligonucleotide for detection of SNP TSC0002545
ttttttagggtty

SEQ ID NO: 9786 - DNA, 13 bp, Artificial Sequence
  Oligonucleotide for detection of SNP TSC0002545
raaccctaaaaaa

SEQ ID NO: 9787 - DNA, 13 bp, Artificial Sequence
  Oligonucleotide for detection of SNP TSC0002546
agttgtagtttat

SEQ ID NO: 9788 - DNA, 13 bp, Artificial Sequence
  Oligonucleotide for detection of SNP TSC0002546
ataaactacaact

SEQ ID NO: 9789 - DNA, 13 bp, Artificial Sequence
  Oligonucleotide for detection of SNP TSC0002546
agttgtggtttat

SEQ ID NO: 9790 - DNA, 13 bp, Artificial Sequence
  Oligonucleotide for detection of SNP TSC0002546
ataaaccacaact

SEQ ID NO: 9791 - DNA, 13 bp, Artificial Sequence
  Oligonucleotide for detection of SNP TSC0002547
gttagtgggggty

SEQ ID NO: 9792 - DNA, 13 bp, Artificial Sequence
  Oligonucleotide for detection of SNP TSC0002547
racccccactaac

SEQ ID NO: 9793 - DNA, 13 bp, Artificial Sequence
  Oligonucleotide for detection of SNP TSC0002547
gttagtaggggty

SEQ ID NO: 9794 - DNA, 13 bp, Artificial Sequence
  Oligonucleotide for detection of SNP TSC0002547
racccctactaac

SEQ ID NO: 9795 - DNA, 13 bp, Artificial Sequence
  Oligonucleotide for detection of SNP TSC0002548
gaggttgtagtga

SEQ ID NO: 9796 - DNA, 13 bp, Artificial Sequence
  Oligonucleotide for detection of SNP TSC0002548
tcactacaacctc

SEQ ID NO: 9797 - DNA, 13 bp, Artificial Sequence
  Oligonucleotide for detection of SNP TSC0002548
gaggttttagtga

SEQ ID NO: 9798 - DNA, 13 bp, Artificial Sequence
  Oligonucleotide for detection of SNP TSC0002548
tcactaaaacctc

SEQ ID NO: 9799 - DNA, 13 bp, Artificial Sequence
  Oligonucleotide for detection of SNP TSC0002548
ttattgtaattty

SEQ ID NO: 9800 - DNA, 13 bp, Artificial Sequence
  Oligonucleotide for detection of SNP TSC0002548
raaattacaataa

SEQ ID NO: 9801 - DNA, 13 bp, Artificial Sequence
  Oligonucleotide for detection of SNP TSC0002548
ttattgaaattty

SEQ ID NO: 9802 - DNA, 13 bp, Artificial Sequence
  Oligonucleotide for detection of SNP TSC0002548
raaatttcaataa

SEQ ID NO: 9803 - DNA, 13 bp, Artificial Sequence
  Oligonucleotide for detection of SNP TSC0002549
gtttttgttttty

SEQ ID NO: 9804 - DNA, 13 bp, Artificial Sequence
  Oligonucleotide for detection of SNP TSC0002549
raaaaacaaaaac

SEQ ID NO: 9805 - DNA, 13 bp, Artificial Sequence
  Oligonucleotide for detection of SNP TSC0002549
gttttttttttty

SEQ ID NO: 9806 - DNA, 13 bp, Artificial Sequence
  Oligonucleotide for detection of SNP TSC0002549
raaaaaaaaaaac

SEQ ID NO: 9807 - DNA, 13 bp, Artificial Sequence
  Oligonucleotide for detection of SNP TSC0002549
gggaggtagaggy

SEQ ID NO: 9808 - DNA, 13 bp, Artificial Sequence
  Oligonucleotide for detection of SNP TSC0002549
rcctctacctccc

SEQ ID NO: 9809 - DNA, 13 bp, Artificial Sequence
  Oligonucleotide for detection of SNP TSC0002549
gggaggaagaggy

SEQ ID NO: 9810 - DNA, 13 bp, Artificial Sequence
  Oligonucleotide for detection of SNP TSC0002549
rcctcttcctccc

SEQ ID NO: 9811 - DNA, 13 bp, Artificial Sequence
  Oligonucleotide for detection of SNP TSC0002550
ttgtaattttttt

SEQ ID NO: 9812 - DNA, 13 bp, Artificial Sequence
  Oligonucleotide for detection of SNP TSC0002550
aaaaaaattacaa

SEQ ID NO: 9813 - DNA, 13 bp, Artificial Sequence
  Oligonucleotide for detection of SNP TSC0002550
ttgtaagtttttt

SEQ ID NO: 9814 - DNA, 13 bp, Artificial Sequence
  Oligonucleotide for detection of SNP TSC0002550
aaaaaacttacaa

SEQ ID NO: 9815 - DNA, 13 bp, Artificial Sequence
  Oligonucleotide for detection of SNP TSC0002550
aggggagttatag

SEQ ID NO: 9816 - DNA, 13 bp, Artificial Sequence
  Oligonucleotide for detection of SNP TSC0002550
ctataactcccct

SEQ ID NO: 9817 - DNA, 13 bp, Artificial Sequence
  Oligonucleotide for detection of SNP TSC0002550
aggggatttatag

SEQ ID NO: 9818 - DNA, 13 bp, Artificial Sequence
  Oligonucleotide for detection of SNP TSC0002550
ctataaatcccct

SEQ ID NO: 9819 - DNA, 13 bp, Artificial Sequence
  Oligonucleotide for detection of SNP TSC0002552
agtatttattggt

SEQ ID NO: 9820 - DNA, 13 bp, Artificial Sequence
  Oligonucleotide for detection of SNP TSC0002552
accaataaatact

SEQ ID NO: 9821 - DNA, 13 bp, Artificial Sequence
  Oligonucleotide for detection of SNP TSC0002552
agtattaattggt

SEQ ID NO: 9822 - DNA, 13 bp, Artificial Sequence
  Oligonucleotide for detection of SNP TSC0002552
accaattaatact

SEQ ID NO: 9823 - DNA, 13 bp, Artificial Sequence
  Oligonucleotide for detection of SNP TSC0002552
attagtgaatgtt

SEQ ID NO: 9824 - DNA, 13 bp, Artificial Sequence
  Oligonucleotide for detection of SNP TSC0002552
aacattcactaat

SEQ ID NO: 9825 - DNA, 13 bp, Artificial Sequence
  Oligonucleotide for detection of SNP TSC0002552
attagttaatgtt

SEQ ID NO: 9826 - DNA, 13 bp, Artificial Sequence
  Oligonucleotide for detection of SNP TSC0002552
aacattaactaat

SEQ ID NO: 9827 - DNA, 13 bp, Artificial Sequence
  Oligonucleotide for detection of SNP TSC0002553
tgagttgagatta

SEQ ID NO: 9828 - DNA, 13 bp, Artificial Sequence
  Oligonucleotide for detection of SNP TSC0002553
taatctcaactca

SEQ ID NO: 9829 - DNA, 13 bp, Artificial Sequence
  Oligonucleotide for detection of SNP TSC0002553
tgagttaagatta

SEQ ID NO: 9830 - DNA, 13 bp, Artificial Sequence
  Oligonucleotide for detection of SNP TSC0002553
taatcttaactca

SEQ ID NO: 9831 - DNA, 13 bp, Artificial Sequence
  Oligonucleotide for detection of SNP TSC0002553
tgagtcgagatta

SEQ ID NO: 9832 - DNA, 13 bp, Artificial Sequence
  Oligonucleotide for detection of SNP TSC0002553
taatctcgactca

SEQ ID NO: 9833 - DNA, 13 bp, Artificial Sequence
  Oligonucleotide for detection of SNP TSC0002553
tgattttggttta

SEQ ID NO: 9834 - DNA, 13 bp, Artificial Sequence
  Oligonucleotide for detection of SNP TSC0002553
taaaccaaaatca

SEQ ID NO: 9835 - DNA, 13 bp, Artificial Sequence
  Oligonucleotide for detection of SNP TSC0002553
tgatttcggttta

SEQ ID NO: 9836 - DNA, 13 bp, Artificial Sequence
  Oligonucleotide for detection of SNP TSC0002553
taaaccgaaatca

SEQ ID NO: 9837 - DNA, 13 bp, Artificial Sequence
  Oligonucleotide for detection of SNP TSC0002554
tttggtattggtt

SEQ ID NO: 9838 - DNA, 13 bp, Artificial Sequence
  Oligonucleotide for detection of SNP TSC0002554
aaccaataccaaa

SEQ ID NO: 9839 - DNA, 13 bp, Artificial Sequence
  Oligonucleotide for detection of SNP TSC0002554
tttggtgttggtt

SEQ ID NO: 9840 - DNA, 13 bp, Artificial Sequence
  Oligonucleotide for detection of SNP TSC0002554
aaccaacaccaaa

SEQ ID NO: 9841 - DNA, 13 bp, Artificial Sequence
  Oligonucleotide for detection of SNP TSC0002555
gattttggttgtg

SEQ ID NO: 9842 - DNA, 13 bp, Artificial Sequence
  Oligonucleotide for detection of SNP TSC0002555
cacaaccaaaatc

SEQ ID NO: 9843 - DNA, 13 bp, Artificial Sequence
  Oligonucleotide for detection of SNP TSC0002555
gattttagttgtg

SEQ ID NO: 9844 - DNA, 13 bp, Artificial Sequence
  Oligonucleotide for detection of SNP TSC0002555
cacaactaaaatc

SEQ ID NO: 9845 - DNA, 13 bp, Artificial Sequence
  Oligonucleotide for detection of SNP TSC0002555
gatttcggttgtg

SEQ ID NO: 9846 - DNA, 13 bp, Artificial Sequence
  Oligonucleotide for detection of SNP TSC0002555
cacaaccgaaatc

SEQ ID NO: 9847 - DNA, 13 bp, Artificial Sequence
  Oligonucleotide for detection of SNP TSC0002555
tataattggaaty

SEQ ID NO: 9848 - DNA, 13 bp, Artificial Sequence
  Oligonucleotide for detection of SNP TSC0002555
rattccaattata

SEQ ID NO: 9849 - DNA, 13 bp, Artificial Sequence
  Oligonucleotide for detection of SNP TSC0002555
tataatcggaaty

SEQ ID NO: 9850 - DNA, 13 bp, Artificial Sequence
  Oligonucleotide for detection of SNP TSC0002555
rattccgattata

SEQ ID NO: 9851 - DNA, 13 bp, Artificial Sequence
  Oligonucleotide for detection of SNP TSC0002556
aaagttgataaat

SEQ ID NO: 9852 - DNA, 13 bp, Artificial Sequence
  Oligonucleotide for detection of SNP TSC0002556
atttatcaacttt

SEQ ID NO: 9853 - DNA, 13 bp, Artificial Sequence
  Oligonucleotide for detection of SNP TSC0002556
aaagttaataaat

SEQ ID NO: 9854 - DNA, 13 bp, Artificial Sequence
  Oligonucleotide for detection of SNP TSC0002556
atttattaacttt

SEQ ID NO: 9855 - DNA, 13 bp, Artificial Sequence
  Oligonucleotide for detection of SNP TSC0002556
aaagtcgataaat

SEQ ID NO: 9856 - DNA, 13 bp, Artificial Sequence
  Oligonucleotide for detection of SNP TSC0002556
atttatcgacttt

SEQ ID NO: 9857 - DNA, 13 bp, Artificial Sequence
  Oligonucleotide for detection of SNP TSC0002556
atttattgatttt

SEQ ID NO: 9858 - DNA, 13 bp, Artificial Sequence
  Oligonucleotide for detection of SNP TSC0002556
aaaatcaataaat

SEQ ID NO: 9859 - DNA, 13 bp, Artificial Sequence
  Oligonucleotide for detection of SNP TSC0002556
atttatcgatttt

SEQ ID NO: 9860 - DNA, 13 bp, Artificial Sequence
  Oligonucleotide for detection of SNP TSC0002556
aaaatcgataaat

SEQ ID NO: 9861 - DNA, 13 bp, Artificial Sequence
  Oligonucleotide for detection of SNP TSC0002557
ttaggaagtttgy

SEQ ID NO: 9862 - DNA, 13 bp, Artificial Sequence
  Oligonucleotide for detection of SNP TSC0002557
rcaaacttcctaa

SEQ ID NO: 9863 - DNA, 13 bp, Artificial Sequence
  Oligonucleotide for detection of SNP TSC0002557
ttaggaggtttgy

SEQ ID NO: 9864 - DNA, 13 bp, Artificial Sequence
  Oligonucleotide for detection of SNP TSC0002557
rcaaacctcctaa

SEQ ID NO: 9865 - DNA, 13 bp, Artificial Sequence
  Oligonucleotide for detection of SNP TSC0002559
gttattgagttta

SEQ ID NO: 9866 - DNA, 13 bp, Artificial Sequence
  Oligonucleotide for detection of SNP TSC0002559
taaactcaataac

SEQ ID NO: 9867 - DNA, 13 bp, Artificial Sequence
  Oligonucleotide for detection of SNP TSC0002559
gttattaagttta

SEQ ID NO: 9868 - DNA, 13 bp, Artificial Sequence
  Oligonucleotide for detection of SNP TSC0002559
taaacttaataac

SEQ ID NO: 9869 - DNA, 13 bp, Artificial Sequence
  Oligonucleotide for detection of SNP TSC0002560
ttttaggaattty

SEQ ID NO: 9870 - DNA, 13 bp, Artificial Sequence
  Oligonucleotide for detection of SNP TSC0002560
raaattcctaaaa

SEQ ID NO: 9871 - DNA, 13 bp, Artificial Sequence
  Oligonucleotide for detection of SNP TSC0002560
ttttagaaattty

SEQ ID NO: 9872 - DNA, 13 bp, Artificial Sequence
  Oligonucleotide for detection of SNP TSC0002560
raaatttctaaaa

SEQ ID NO: 9873 - DNA, 13 bp, Artificial Sequence
  Oligonucleotide for detection of SNP TSC0002561
tttgggagtaggy

SEQ ID NO: 9874 - DNA, 13 bp, Artificial Sequence
  Oligonucleotide for detection of SNP TSC0002561
rcctactcccaaa

SEQ ID NO: 9875 - DNA, 13 bp, Artificial Sequence
  Oligonucleotide for detection of SNP TSC0002561
tttgggtgtaggy

SEQ ID NO: 9876 - DNA, 13 bp, Artificial Sequence
  Oligonucleotide for detection of SNP TSC0002561
rcctacacccaaa

SEQ ID NO: 9877 - DNA, 13 bp, Artificial Sequence
  Oligonucleotide for detection of SNP TSC0002561
ttcgggagtaggy

SEQ ID NO: 9878 - DNA, 13 bp, Artificial Sequence
  Oligonucleotide for detection of SNP TSC0002561
rcctactcccgaa

SEQ ID NO: 9879 - DNA, 13 bp, Artificial Sequence
  Oligonucleotide for detection of SNP TSC0002561
ttcgggtgtaggy

SEQ ID NO: 9880 - DNA, 13 bp, Artificial Sequence
  Oligonucleotide for detection of SNP TSC0002561
rcctacacccgaa

SEQ ID NO: 9881 - DNA, 13 bp, Artificial Sequence
  Oligonucleotide for detection of SNP TSC0002561
gtttgtttttggg

SEQ ID NO: 9882 - DNA, 13 bp, Artificial Sequence
  Oligonucleotide for detection of SNP TSC0002561
cccaaaaacaaac

SEQ ID NO: 9883 - DNA, 13 bp, Artificial Sequence
  Oligonucleotide for detection of SNP TSC0002561
gtttgtatttggg

SEQ ID NO: 9884 - DNA, 13 bp, Artificial Sequence
  Oligonucleotide for detection of SNP TSC0002561
cccaaatacaaac

SEQ ID NO: 9885 - DNA, 13 bp, Artificial Sequence
  Oligonucleotide for detection of SNP TSC0002561
gtttgttttcggg

SEQ ID NO: 9886 - DNA, 13 bp, Artificial Sequence
  Oligonucleotide for detection of SNP TSC0002561
cccgaaaacaaac

SEQ ID NO: 9887 - DNA, 13 bp, Artificial Sequence
  Oligonucleotide for detection of SNP TSC0002561
gtttgtattcggg

SEQ ID NO: 9888 - DNA, 13 bp, Artificial Sequence
  Oligonucleotide for detection of SNP TSC0002561
cccgaatacaaac

SEQ ID NO: 9889 - DNA, 13 bp, Artificial Sequence
  Oligonucleotide for detection of SNP TSC0002562
tttgtgattatta

SEQ ID NO: 9890 - DNA, 13 bp, Artificial Sequence
  Oligonucleotide for detection of SNP TSC0002562
taataatcacaaa

SEQ ID NO: 9891 - DNA, 13 bp, Artificial Sequence
  Oligonucleotide for detection of SNP TSC0002562
tttgtggttatta

SEQ ID NO: 9892 - DNA, 13 bp, Artificial Sequence
  Oligonucleotide for detection of SNP TSC0002562
taataaccacaaa

SEQ ID NO: 9893 - DNA, 13 bp, Artificial Sequence
  Oligonucleotide for detection of SNP TSC0002562
ttcgtgattatta

SEQ ID NO: 9894 - DNA, 13 bp, Artificial Sequence
  Oligonucleotide for detection of SNP TSC0002562
taataatcacgaa

SEQ ID NO: 9895 - DNA, 13 bp, Artificial Sequence
  Oligonucleotide for detection of SNP TSC0002562
ttcgtggttatta

SEQ ID NO: 9896 - DNA, 13 bp, Artificial Sequence
  Oligonucleotide for detection of SNP TSC0002562
taataaccacgaa

SEQ ID NO: 9897 - DNA, 13 bp, Artificial Sequence
  Oligonucleotide for detection of SNP TSC0002563
ttggaagattgag

SEQ ID NO: 9898 - DNA, 13 bp, Artificial Sequence
  Oligonucleotide for detection of SNP TSC0002563
ctcaatcttccaa

SEQ ID NO: 9899 - DNA, 13 bp, Artificial Sequence
  Oligonucleotide for detection of SNP TSC0002563
ttggaatattgag

SEQ ID NO: 9900 - DNA, 13 bp, Artificial Sequence
  Oligonucleotide for detection of SNP TSC0002563
ctcaatattccaa

SEQ ID NO: 9901 - DNA, 13 bp, Artificial Sequence
  Oligonucleotide for detection of SNP TSC0002563
tttagttttttag

SEQ ID NO: 9902 - DNA, 13 bp, Artificial Sequence
  Oligonucleotide for detection of SNP TSC0002563
ctaaaaaactaaa

SEQ ID NO: 9903 - DNA, 13 bp, Artificial Sequence
  Oligonucleotide for detection of SNP TSC0002563
tttagtgttttag

SEQ ID NO: 9904 - DNA, 13 bp, Artificial Sequence
  Oligonucleotide for detection of SNP TSC0002563
ctaaaacactaaa

SEQ ID NO: 9905 - DNA, 13 bp, Artificial Sequence
  Oligonucleotide for detection of SNP TSC0002564
attaaggtttttt

SEQ ID NO: 9906 - DNA, 13 bp, Artificial Sequence
  Oligonucleotide for detection of SNP TSC0002564
aaaaaaccttaat

SEQ ID NO: 9907 - DNA, 13 bp, Artificial Sequence
  Oligonucleotide for detection of SNP TSC0002564
attaagttttttt

SEQ ID NO: 9908 - DNA, 13 bp, Artificial Sequence
  Oligonucleotide for detection of SNP TSC0002564
aaaaaaacttaat

SEQ ID NO: 9909 - DNA, 13 bp, Artificial Sequence
  Oligonucleotide for detection of SNP TSC0002564
agagaattttgat

SEQ ID NO: 9910 - DNA, 13 bp, Artificial Sequence
  Oligonucleotide for detection of SNP TSC0002564
atcaaaattctct

SEQ ID NO: 9911 - DNA, 13 bp, Artificial Sequence
  Oligonucleotide for detection of SNP TSC0002564
agagaaatttgat

SEQ ID NO: 9912 - DNA, 13 bp, Artificial Sequence
  Oligonucleotide for detection of SNP TSC0002564
atcaaatttctct

SEQ ID NO: 9913 - DNA, 13 bp, Artificial Sequence
  Oligonucleotide for detection of SNP TSC0002566
tttgggtggttga

SEQ ID NO: 9914 - DNA, 13 bp, Artificial Sequence
  Oligonucleotide for detection of SNP TSC0002566
tcaaccacccaaa

SEQ ID NO: 9915 - DNA, 13 bp, Artificial Sequence
  Oligonucleotide for detection of SNP TSC0002566
tttgggaggttga

SEQ ID NO: 9916 - DNA, 13 bp, Artificial Sequence
  Oligonucleotide for detection of SNP TSC0002566
tcaacctcccaaa

SEQ ID NO: 9917 - DNA, 13 bp, Artificial Sequence
  Oligonucleotide for detection of SNP TSC0002566
ttcgggtggttga

SEQ ID NO: 9918 - DNA, 13 bp, Artificial Sequence
  Oligonucleotide for detection of SNP TSC0002566
tcaaccacccgaa

SEQ ID NO: 9919 - DNA, 13 bp, Artificial Sequence
  Oligonucleotide for detection of SNP TSC0002566
ttcgggaggttga

SEQ ID NO: 9920 - DNA, 13 bp, Artificial Sequence
  Oligonucleotide for detection of SNP TSC0002566
tcaacctcccgaa

SEQ ID NO: 9921 - DNA, 13 bp, Artificial Sequence
  Oligonucleotide for detection of SNP TSC0002566
ttagttatttgag

SEQ ID NO: 9922 - DNA, 13 bp, Artificial Sequence
  Oligonucleotide for detection of SNP TSC0002566
ctcaaataactaa

SEQ ID NO: 9923 - DNA, 13 bp, Artificial Sequence
  Oligonucleotide for detection of SNP TSC0002566
ttagttttttgag

SEQ ID NO: 9924 - DNA, 13 bp, Artificial Sequence
  Oligonucleotide for detection of SNP TSC0002566
ctcaaaaaactaa

SEQ ID NO: 9925 - DNA, 13 bp, Artificial Sequence
  Oligonucleotide for detection of SNP TSC0002566
ttagttattcgag

SEQ ID NO: 9926 - DNA, 13 bp, Artificial Sequence
  Oligonucleotide for detection of SNP TSC0002566
ctcgaataactaa

SEQ ID NO: 9927 - DNA, 13 bp, Artificial Sequence
  Oligonucleotide for detection of SNP TSC0002566
ttagtttttcgag

SEQ ID NO: 9928 - DNA, 13 bp, Artificial Sequence
  Oligonucleotide for detection of SNP TSC0002566
ctcgaaaaactaa

SEQ ID NO: 9929 - DNA, 13 bp, Artificial Sequence
  Oligonucleotide for detection of SNP TSC0002568
taatttaatttta

SEQ ID NO: 9930 - DNA, 13 bp, Artificial Sequence
  Oligonucleotide for detection of SNP TSC0002568
taaaattaaatta

SEQ ID NO: 9931 - DNA, 13 bp, Artificial Sequence
  Oligonucleotide for detection of SNP TSC0002568
taattttatttta

SEQ ID NO: 9932 - DNA, 13 bp, Artificial Sequence
  Oligonucleotide for detection of SNP TSC0002568
taaaataaaatta

SEQ ID NO: 9933 - DNA, 13 bp, Artificial Sequence
  Oligonucleotide for detection of SNP TSC0002568
taaagttaggttg

SEQ ID NO: 9934 - DNA, 13 bp, Artificial Sequence
  Oligonucleotide for detection of SNP TSC0002568
caacctaacttta

SEQ ID NO: 9935 - DNA, 13 bp, Artificial Sequence
  Oligonucleotide for detection of SNP TSC0002568
taaagtgaggttg

SEQ ID NO: 9936 - DNA, 13 bp, Artificial Sequence
  Oligonucleotide for detection of SNP TSC0002568
caacctcacttta

SEQ ID NO: 9937 - DNA, 13 bp, Artificial Sequence
  Oligonucleotide for detection of SNP TSC0002570
atgtaagaattaa

SEQ ID NO: 9938 - DNA, 13 bp, Artificial Sequence
  Oligonucleotide for detection of SNP TSC0002570
ttaattcttacat

SEQ ID NO: 9939 - DNA, 13 bp, Artificial Sequence
  Oligonucleotide for detection of SNP TSC0002570
atgtaataattaa

SEQ ID NO: 9940 - DNA, 13 bp, Artificial Sequence
  Oligonucleotide for detection of SNP TSC0002570
ttaattattacat

SEQ ID NO: 9941 - DNA, 13 bp, Artificial Sequence
  Oligonucleotide for detection of SNP TSC0002570
ttggtttttatat

SEQ ID NO: 9942 - DNA, 13 bp, Artificial Sequence
  Oligonucleotide for detection of SNP TSC0002570
atataaaaaccaa

SEQ ID NO: 9943 - DNA, 13 bp, Artificial Sequence
  Oligonucleotide for detection of SNP TSC0002570
ttggttgttatat

SEQ ID NO: 9944 - DNA, 13 bp, Artificial Sequence
  Oligonucleotide for detection of SNP TSC0002570
atataacaaccaa

SEQ ID NO: 9945 - DNA, 13 bp, Artificial Sequence
  Oligonucleotide for detection of SNP TSC0002571
attattattggtt

SEQ ID NO: 9946 - DNA, 13 bp, Artificial Sequence
  Oligonucleotide for detection of SNP TSC0002571
aaccaataataat

SEQ ID NO: 9947 - DNA, 13 bp, Artificial Sequence
  Oligonucleotide for detection of SNP TSC0002571
attatttttggtt

SEQ ID NO: 9948 - DNA, 13 bp, Artificial Sequence
  Oligonucleotide for detection of SNP TSC0002571
aaccaaaaataat

SEQ ID NO: 9949 - DNA, 13 bp, Artificial Sequence
  Oligonucleotide for detection of SNP TSC0002571
aattagtaatagt

SEQ ID NO: 9950 - DNA, 13 bp, Artificial Sequence
  Oligonucleotide for detection of SNP TSC0002571
actattactaatt

SEQ ID NO: 9951 - DNA, 13 bp, Artificial Sequence
  Oligonucleotide for detection of SNP TSC0002571
aattaggaatagt

SEQ ID NO: 9952 - DNA, 13 bp, Artificial Sequence
  Oligonucleotide for detection of SNP TSC0002571
actattcctaatt

SEQ ID NO: 9953 - DNA, 13 bp, Artificial Sequence
  Oligonucleotide for detection of SNP TSC0002572
ttttaggttttta

SEQ ID NO: 9954 - DNA, 13 bp, Artificial Sequence
  Oligonucleotide for detection of SNP TSC0002572
taaaaacctaaaa

SEQ ID NO: 9955 - DNA, 13 bp, Artificial Sequence
  Oligonucleotide for detection of SNP TSC0002572
ttttagattttta

SEQ ID NO: 9956 - DNA, 13 bp, Artificial Sequence
  Oligonucleotide for detection of SNP TSC0002572
taaaaatctaaaa

SEQ ID NO: 9957 - DNA, 13 bp, Artificial Sequence
  Oligonucleotide for detection of SNP TSC0002573
gggaggattgggt

SEQ ID NO: 9958 - DNA, 13 bp, Artificial Sequence
  Oligonucleotide for detection of SNP TSC0002573
acccaatcctccc

SEQ ID NO: 9959 - DNA, 13 bp, Artificial Sequence
  Oligonucleotide for detection of SNP TSC0002573
gggagggttgggt

SEQ ID NO: 9960 - DNA, 13 bp, Artificial Sequence
  Oligonucleotide for detection of SNP TSC0002573
acccaaccctccc

SEQ ID NO: 9961 - DNA, 13 bp, Artificial Sequence
  Oligonucleotide for detection of SNP TSC0002574
tggattattttaa

SEQ ID NO: 9962 - DNA, 13 bp, Artificial Sequence
  Oligonucleotide for detection of SNP TSC0002574
ttaaaataatcca

SEQ ID NO: 9963 - DNA, 13 bp, Artificial Sequence
  Oligonucleotide for detection of SNP TSC0002574
tggatttttttaa

SEQ ID NO: 9964 - DNA, 13 bp, Artificial Sequence
  Oligonucleotide for detection of SNP TSC0002574
ttaaaaaaatcca

SEQ ID NO: 9965 - DNA, 13 bp, Artificial Sequence
  Oligonucleotide for detection of SNP TSC0002574
cggattattttaa

SEQ ID NO: 9966 - DNA, 13 bp, Artificial Sequence
  Oligonucleotide for detection of SNP TSC0002574
ttaaaataatccg

SEQ ID NO: 9967 - DNA, 13 bp, Artificial Sequence
  Oligonucleotide for detection of SNP TSC0002574
cggatttttttaa

SEQ ID NO: 9968 - DNA, 13 bp, Artificial Sequence
  Oligonucleotide for detection of SNP TSC0002574
ttaaaaaaatccg

SEQ ID NO: 9969 - DNA, 13 bp, Artificial Sequence
  Oligonucleotide for detection of SNP TSC0002574
ttaagataatttg

SEQ ID NO: 9970 - DNA, 13 bp, Artificial Sequence
  Oligonucleotide for detection of SNP TSC0002574
caaattatcttaa

SEQ ID NO: 9971 - DNA, 13 bp, Artificial Sequence
  Oligonucleotide for detection of SNP TSC0002574
ttaagagaatttg

SEQ ID NO: 9972 - DNA, 13 bp, Artificial Sequence
  Oligonucleotide for detection of SNP TSC0002574
caaattctcttaa

SEQ ID NO: 9973 - DNA, 13 bp, Artificial Sequence
  Oligonucleotide for detection of SNP TSC0002574
ttaagataattcg

SEQ ID NO: 9974 - DNA, 13 bp, Artificial Sequence
  Oligonucleotide for detection of SNP TSC0002574
cgaattatcttaa

SEQ ID NO: 9975 - DNA, 13 bp, Artificial Sequence
  Oligonucleotide for detection of SNP TSC0002574
ttaagagaattcg

SEQ ID NO: 9976 - DNA, 13 bp, Artificial Sequence
  Oligonucleotide for detection of SNP TSC0002574
cgaattctcttaa

SEQ ID NO: 9977 - DNA, 13 bp, Artificial Sequence
  Oligonucleotide for detection of SNP TSC0002575
ttagggtggaggt

SEQ ID NO: 9978 - DNA, 13 bp, Artificial Sequence
  Oligonucleotide for detection of SNP TSC0002575
acctccaccctaa

SEQ ID NO: 9979 - DNA, 13 bp, Artificial Sequence
  Oligonucleotide for detection of SNP TSC0002575
ttagggaggaggt

SEQ ID NO: 9980 - DNA, 13 bp, Artificial Sequence
  Oligonucleotide for detection of SNP TSC0002575
acctcctccctaa

SEQ ID NO: 9981 - DNA, 13 bp, Artificial Sequence
  Oligonucleotide for detection of SNP TSC0002575
atttttattttag

SEQ ID NO: 9982 - DNA, 13 bp, Artificial Sequence
  Oligonucleotide for detection of SNP TSC0002575
ctaaaataaaaat

SEQ ID NO: 9983 - DNA, 13 bp, Artificial Sequence
  Oligonucleotide for detection of SNP TSC0002575
attttttttttag

SEQ ID NO: 9984 - DNA, 13 bp, Artificial Sequence
  Oligonucleotide for detection of SNP TSC0002575
ctaaaaaaaaaat

SEQ ID NO: 9985 - DNA, 13 bp, Artificial Sequence
  Oligonucleotide for detection of SNP TSC0002576
atttttgtattag

SEQ ID NO: 9986 - DNA, 13 bp, Artificial Sequence
  Oligonucleotide for detection of SNP TSC0002576
ctaatacaaaaat

SEQ ID NO: 9987 - DNA, 13 bp, Artificial Sequence
  Oligonucleotide for detection of SNP TSC0002576
atttttttattag

SEQ ID NO: 9988 - DNA, 13 bp, Artificial Sequence
  Oligonucleotide for detection of SNP TSC0002576
ctaataaaaaaat

SEQ ID NO: 9989 - DNA, 13 bp, Artificial Sequence
  Oligonucleotide for detection of SNP TSC0002576
ttggtgtaaggat

SEQ ID NO: 9990 - DNA, 13 bp, Artificial Sequence
  Oligonucleotide for detection of SNP TSC0002576
atccttacaccaa

SEQ ID NO: 9991 - DNA, 13 bp, Artificial Sequence
  Oligonucleotide for detection of SNP TSC0002576
ttggtgaaaggat

SEQ ID NO: 9992 - DNA, 13 bp, Artificial Sequence
  Oligonucleotide for detection of SNP TSC0002576
atcctttcaccaa

SEQ ID NO: 9993 - DNA, 13 bp, Artificial Sequence
  Oligonucleotide for detection of SNP TSC0002577
ttattaattatta

SEQ ID NO: 9994 - DNA, 13 bp, Artificial Sequence
  Oligonucleotide for detection of SNP TSC0002577
taataattaataa

SEQ ID NO: 9995 - DNA, 13 bp, Artificial Sequence
  Oligonucleotide for detection of SNP TSC0002577
ttattagttatta

SEQ ID NO: 9996 - DNA, 13 bp, Artificial Sequence
  Oligonucleotide for detection of SNP TSC0002577
taataactaataa

SEQ ID NO: 9997 - DNA, 13 bp, Artificial Sequence
  Oligonucleotide for detection of SNP TSC0002579
tatggtagtatgt

SEQ ID NO: 9998 - DNA, 13 bp, Artificial Sequence
  Oligonucleotide for detection of SNP TSC0002579
acatactaccata

SEQ ID NO: 9999 - DNA, 13 bp, Artificial Sequence
  Oligonucleotide for detection of SNP TSC0002579
tatggtggtatgt

SEQ ID NO: 10000 - DNA, 13 bp, Artificial Sequence
  Oligonucleotide for detection of SNP TSC0002579
acataccaccata

SEQ ID NO: 10001 - DNA, 13 bp, Artificial Sequence
  Oligonucleotide for detection of SNP TSC0002580
gattttgttttaa

SEQ ID NO: 10002 - DNA, 13 bp, Artificial Sequence
  Oligonucleotide for detection of SNP TSC0002580
ttaaaacaaaatc

SEQ ID NO: 10003 - DNA, 13 bp, Artificial Sequence
  Oligonucleotide for detection of SNP TSC0002580
gattttattttaa

SEQ ID NO: 10004 - DNA, 13 bp, Artificial Sequence
  Oligonucleotide for detection of SNP TSC0002580
ttaaaataaaatc

SEQ ID NO: 10005 - DNA, 13 bp, Artificial Sequence
  Oligonucleotide for detection of SNP TSC0002580
gatttcgttttaa

SEQ ID NO: 10006 - DNA, 13 bp, Artificial Sequence
  Oligonucleotide for detection of SNP TSC0002580
ttaaaacgaaatc

SEQ ID NO: 10007 - DNA, 13 bp, Artificial Sequence
  Oligonucleotide for detection of SNP TSC0002580
ttgagatgaagty

SEQ ID NO: 10008 - DNA, 13 bp, Artificial Sequence
  Oligonucleotide for detection of SNP TSC0002580
racttcatctcaa

SEQ ID NO: 10009 - DNA, 13 bp, Artificial Sequence
  Oligonucleotide for detection of SNP TSC0002580
ttgagacgaagty

SEQ ID NO: 10010 - DNA, 13 bp, Artificial Sequence
  Oligonucleotide for detection of SNP TSC0002580
racttcgtctcaa

SEQ ID NO: 10011 - DNA, 13 bp, Artificial Sequence
  Oligonucleotide for detection of SNP TSC0002583
tttttgattttag

SEQ ID NO: 10012 - DNA, 13 bp, Artificial Sequence
  Oligonucleotide for detection of SNP TSC0002583
ctaaaatcaaaaa

SEQ ID NO: 10013 - DNA, 13 bp, Artificial Sequence
  Oligonucleotide for detection of SNP TSC0002583
tttttggttttag

SEQ ID NO: 10014 - DNA, 13 bp, Artificial Sequence
  Oligonucleotide for detection of SNP TSC0002583
ctaaaaccaaaaa

SEQ ID NO: 10015 - DNA, 13 bp, Artificial Sequence
  Oligonucleotide for detection of SNP TSC0002584
gatttttagtaag

SEQ ID NO: 10016 - DNA, 13 bp, Artificial Sequence
  Oligonucleotide for detection of SNP TSC0002584
cttactaaaaatc

SEQ ID NO: 10017 - DNA, 13 bp, Artificial Sequence
  Oligonucleotide for detection of SNP TSC0002584
gattttgagtaag

SEQ ID NO: 10018 - DNA, 13 bp, Artificial Sequence
  Oligonucleotide for detection of SNP TSC0002584
cttactcaaaatc

SEQ ID NO: 10019 - DNA, 13 bp, Artificial Sequence
  Oligonucleotide for detection of SNP TSC0002584
tttgttgaaggty

SEQ ID NO: 10020 - DNA, 13 bp, Artificial Sequence
  Oligonucleotide for detection of SNP TSC0002584
raccttcaacaaa

SEQ ID NO: 10021 - DNA, 13 bp, Artificial Sequence
  Oligonucleotide for detection of SNP TSC0002584
tttgtttaaggty

SEQ ID NO: 10022 - DNA, 13 bp, Artificial Sequence
  Oligonucleotide for detection of SNP TSC0002584
raccttaaacaaa

SEQ ID NO: 10023 - DNA, 13 bp, Artificial Sequence
  Oligonucleotide for detection of SNP TSC0002585
gtgtttgggggga

SEQ ID NO: 10024 - DNA, 13 bp, Artificial Sequence
  Oligonucleotide for detection of SNP TSC0002585
tccccccaaacac

SEQ ID NO: 10025 - DNA, 13 bp, Artificial Sequence
  Oligonucleotide for detection of SNP TSC0002585
gtgtttaggggga

SEQ ID NO: 10026 - DNA, 13 bp, Artificial Sequence
  Oligonucleotide for detection of SNP TSC0002585
tccccctaaacac

SEQ ID NO: 10027 - DNA, 13 bp, Artificial Sequence
  Oligonucleotide for detection of SNP TSC0002586
atattgtttttgy

SEQ ID NO: 10028 - DNA, 13 bp, Artificial Sequence
  Oligonucleotide for detection of SNP TSC0002586
rcaaaaacaatat

SEQ ID NO: 10029 - DNA, 13 bp, Artificial Sequence
  Oligonucleotide for detection of SNP TSC0002586
atattggttttgy

SEQ ID NO: 10030 - DNA, 13 bp, Artificial Sequence
  Oligonucleotide for detection of SNP TSC0002586
rcaaaaccaatat

SEQ ID NO: 10031 - DNA, 13 bp, Artificial Sequence
  Oligonucleotide for detection of SNP TSC0002586
gtagagatagtat

SEQ ID NO: 10032 - DNA, 13 bp, Artificial Sequence
  Oligonucleotide for detection of SNP TSC0002586
atactatctctac

SEQ ID NO: 10033 - DNA, 13 bp, Artificial Sequence
  Oligonucleotide for detection of SNP TSC0002586
gtagagttagtat

SEQ ID NO: 10034 - DNA, 13 bp, Artificial Sequence
  Oligonucleotide for detection of SNP TSC0002586
atactaactctac

SEQ ID NO: 10035 - DNA, 13 bp, Artificial Sequence
  Oligonucleotide for detection of SNP TSC0002587
atttggtggatay

SEQ ID NO: 10036 - DNA, 13 bp, Artificial Sequence
  Oligonucleotide for detection of SNP TSC0002587
rtatccaccaaat

SEQ ID NO: 10037 - DNA, 13 bp, Artificial Sequence
  Oligonucleotide for detection of SNP TSC0002587
atttgggggatay

SEQ ID NO: 10038 - DNA, 13 bp, Artificial Sequence
  Oligonucleotide for detection of SNP TSC0002587
rtatcccccaaat

SEQ ID NO: 10039 - DNA, 13 bp, Artificial Sequence
  Oligonucleotide for detection of SNP TSC0002587
gtatttattagat

SEQ ID NO: 10040 - DNA, 13 bp, Artificial Sequence
  Oligonucleotide for detection of SNP TSC0002587
atctaataaatac

SEQ ID NO: 10041 - DNA, 13 bp, Artificial Sequence
  Oligonucleotide for detection of SNP TSC0002587
gtattttttagat

SEQ ID NO: 10042 - DNA, 13 bp, Artificial Sequence
  Oligonucleotide for detection of SNP TSC0002587
atctaaaaaatac

SEQ ID NO: 10043 - DNA, 13 bp, Artificial Sequence
  Oligonucleotide for detection of SNP TSC0002588
tattttgtaatag

SEQ ID NO: 10044 - DNA, 13 bp, Artificial Sequence
  Oligonucleotide for detection of SNP TSC0002588
ctattacaaaata

SEQ ID NO: 10045 - DNA, 13 bp, Artificial Sequence
  Oligonucleotide for detection of SNP TSC0002588
tattttataatag

SEQ ID NO: 10046 - DNA, 13 bp, Artificial Sequence
  Oligonucleotide for detection of SNP TSC0002588
ctattataaaata

SEQ ID NO: 10047 - DNA, 13 bp, Artificial Sequence
  Oligonucleotide for detection of SNP TSC0002589
ttttgttgagata

SEQ ID NO: 10048 - DNA, 13 bp, Artificial Sequence
  Oligonucleotide for detection of SNP TSC0002589
tatctcaacaaaa

SEQ ID NO: 10049 - DNA, 13 bp, Artificial Sequence
  Oligonucleotide for detection of SNP TSC0002589
ttttgtcgagata

SEQ ID NO: 10050 - DNA, 13 bp, Artificial Sequence
  Oligonucleotide for detection of SNP TSC0002589
tatctcgacaaaa

SEQ ID NO: 10051 - DNA, 13 bp, Artificial Sequence
  Oligonucleotide for detection of SNP TSC0002589
tgttttagtaaaa

SEQ ID NO: 10052 - DNA, 13 bp, Artificial Sequence
  Oligonucleotide for detection of SNP TSC0002589
ttttactaaaaca

SEQ ID NO: 10053 - DNA, 13 bp, Artificial Sequence
  Oligonucleotide for detection of SNP TSC0002589
tgttttggtaaaa

SEQ ID NO: 10054 - DNA, 13 bp, Artificial Sequence
  Oligonucleotide for detection of SNP TSC0002589
ttttaccaaaaca

SEQ ID NO: 10055 - DNA, 13 bp, Artificial Sequence
  Oligonucleotide for detection of SNP TSC0002589
tgtttcggtaaaa

SEQ ID NO: 10056 - DNA, 13 bp, Artificial Sequence
  Oligonucleotide for detection of SNP TSC0002589
ttttaccgaaaca

SEQ ID NO: 10057 - DNA, 13 bp, Artificial Sequence
  Oligonucleotide for detection of SNP TSC0002590
gaaattgttattt

SEQ ID NO: 10058 - DNA, 13 bp, Artificial Sequence
  Oligonucleotide for detection of SNP TSC0002590
aaataacaatttc

SEQ ID NO: 10059 - DNA, 13 bp, Artificial Sequence
  Oligonucleotide for detection of SNP TSC0002590
gaaatttttattt

SEQ ID NO: 10060 - DNA, 13 bp, Artificial Sequence
  Oligonucleotide for detection of SNP TSC0002590
aaataaaaatttc

SEQ ID NO: 10061 - DNA, 13 bp, Artificial Sequence
  Oligonucleotide for detection of SNP TSC0002590
agatgatagttty

SEQ ID NO: 10062 - DNA, 13 bp, Artificial Sequence
  Oligonucleotide for detection of SNP TSC0002590
raaactatcatct

SEQ ID NO: 10063 - DNA, 13 bp, Artificial Sequence
  Oligonucleotide for detection of SNP TSC0002590
agatgagagttty

SEQ ID NO: 10064 - DNA, 13 bp, Artificial Sequence
  Oligonucleotide for detection of SNP TSC0002590
raaactctcatct

SEQ ID NO: 10065 - DNA, 13 bp, Artificial Sequence
  Oligonucleotide for detection of SNP TSC0002591
tagtagttattta

SEQ ID NO: 10066 - DNA, 13 bp, Artificial Sequence
  Oligonucleotide for detection of SNP TSC0002591
taaataactacta

SEQ ID NO: 10067 - DNA, 13 bp, Artificial Sequence
  Oligonucleotide for detection of SNP TSC0002591
tagtagatattta

SEQ ID NO: 10068 - DNA, 13 bp, Artificial Sequence
  Oligonucleotide for detection of SNP TSC0002591
taaatatctacta

SEQ ID NO: 10069 - DNA, 13 bp, Artificial Sequence
  Oligonucleotide for detection of SNP TSC0002591
tgagtggttattg

SEQ ID NO: 10070 - DNA, 13 bp, Artificial Sequence
  Oligonucleotide for detection of SNP TSC0002591
caataaccactca

SEQ ID NO: 10071 - DNA, 13 bp, Artificial Sequence
  Oligonucleotide for detection of SNP TSC0002591
tgagtgtttattg

SEQ ID NO: 10072 - DNA, 13 bp, Artificial Sequence
  Oligonucleotide for detection of SNP TSC0002591
caataaacactca

SEQ ID NO: 10073 - DNA, 13 bp, Artificial Sequence
  Oligonucleotide for detection of SNP TSC0002592
tttagtgtgaggg

SEQ ID NO: 10074 - DNA, 13 bp, Artificial Sequence
  Oligonucleotide for detection of SNP TSC0002592
ccctcacactaaa

SEQ ID NO: 10075 - DNA, 13 bp, Artificial Sequence
  Oligonucleotide for detection of SNP TSC0002592
tttagtatgaggg

SEQ ID NO: 10076 - DNA, 13 bp, Artificial Sequence
  Oligonucleotide for detection of SNP TSC0002592
ccctcatactaaa

SEQ ID NO: 10077 - DNA, 13 bp, Artificial Sequence
  Oligonucleotide for detection of SNP TSC0002592
tttagcgtgaggg

SEQ ID NO: 10078 - DNA, 13 bp, Artificial Sequence
  Oligonucleotide for detection of SNP TSC0002592
ccctcacgctaaa

SEQ ID NO: 10079 - DNA, 13 bp, Artificial Sequence
  Oligonucleotide for detection of SNP TSC0002592
tttttatgttggg

SEQ ID NO: 10080 - DNA, 13 bp, Artificial Sequence
  Oligonucleotide for detection of SNP TSC0002592
cccaacataaaaa

SEQ ID NO: 10081 - DNA, 13 bp, Artificial Sequence
  Oligonucleotide for detection of SNP TSC0002592
tttttacgttggg

SEQ ID NO: 10082 - DNA, 13 bp, Artificial Sequence
  Oligonucleotide for detection of SNP TSC0002592
cccaacgtaaaaa

SEQ ID NO: 10083 - DNA, 13 bp, Artificial Sequence
  Oligonucleotide for detection of SNP TSC0002593
ggaagttgaaaay

SEQ ID NO: 10084 - DNA, 13 bp, Artificial Sequence
  Oligonucleotide for detection of SNP TSC0002593
rttttcaacttcc

SEQ ID NO: 10085 - DNA, 13 bp, Artificial Sequence
  Oligonucleotide for detection of SNP TSC0002593
ggaagtcgaaaay

SEQ ID NO: 10086 - DNA, 13 bp, Artificial Sequence
  Oligonucleotide for detection of SNP TSC0002593
rttttcgacttcc

SEQ ID NO: 10087 - DNA, 13 bp, Artificial Sequence
  Oligonucleotide for detection of SNP TSC0002593
gtttttagtttty

SEQ ID NO: 10088 - DNA, 13 bp, Artificial Sequence
  Oligonucleotide for detection of SNP TSC0002593
raaaactaaaaac

SEQ ID NO: 10089 - DNA, 13 bp, Artificial Sequence
  Oligonucleotide for detection of SNP TSC0002593
gtttttggtttty

SEQ ID NO: 10090 - DNA, 13 bp, Artificial Sequence
  Oligonucleotide for detection of SNP TSC0002593
raaaaccaaaaac

SEQ ID NO: 10091 - DNA, 13 bp, Artificial Sequence
  Oligonucleotide for detection of SNP TSC0002593
gttttcggtttty

SEQ ID NO: 10092 - DNA, 13 bp, Artificial Sequence
  Oligonucleotide for detection of SNP TSC0002593
raaaaccgaaaac

SEQ ID NO: 10093 - DNA, 13 bp, Artificial Sequence
  Oligonucleotide for detection of SNP TSC0002595
gttattattttty

SEQ ID NO: 10094 - DNA, 13 bp, Artificial Sequence
  Oligonucleotide for detection of SNP TSC0002595
raaaaataataac

SEQ ID NO: 10095 - DNA, 13 bp, Artificial Sequence
  Oligonucleotide for detection of SNP TSC0002595
gttatttttttty

SEQ ID NO: 10096 - DNA, 13 bp, Artificial Sequence
  Oligonucleotide for detection of SNP TSC0002595
raaaaaaaataac

SEQ ID NO: 10097 - DNA, 13 bp, Artificial Sequence
  Oligonucleotide for detection of SNP TSC0002595
ggagagtgatggy

SEQ ID NO: 10098 - DNA, 13 bp, Artificial Sequence
  Oligonucleotide for detection of SNP TSC0002595
rccatcactctcc

SEQ ID NO: 10099 - DNA, 13 bp, Artificial Sequence
  Oligonucleotide for detection of SNP TSC0002595
ggagagggatggy

SEQ ID NO: 10100 - DNA, 13 bp, Artificial Sequence
  Oligonucleotide for detection of SNP TSC0002595
rccatccctctcc

SEQ ID NO: 10101 - DNA, 13 bp, Artificial Sequence
  Oligonucleotide for detection of SNP TSC0002597
gttttggtaaata

SEQ ID NO: 10102 - DNA, 13 bp, Artificial Sequence
  Oligonucleotide for detection of SNP TSC0002597
tatttaccaaaac

SEQ ID NO: 10103 - DNA, 13 bp, Artificial Sequence
  Oligonucleotide for detection of SNP TSC0002597
gttttgttaaata

SEQ ID NO: 10104 - DNA, 13 bp, Artificial Sequence
  Oligonucleotide for detection of SNP TSC0002597
tatttaacaaaac

SEQ ID NO: 10105 - DNA, 13 bp, Artificial Sequence
  Oligonucleotide for detection of SNP TSC0002597
tgtttgttaaagy

SEQ ID NO: 10106 - DNA, 13 bp, Artificial Sequence
  Oligonucleotide for detection of SNP TSC0002597
rctttaacaaaca

SEQ ID NO: 10107 - DNA, 13 bp, Artificial Sequence
  Oligonucleotide for detection of SNP TSC0002597
tgtttgataaagy

SEQ ID NO: 10108 - DNA, 13 bp, Artificial Sequence
  Oligonucleotide for detection of SNP TSC0002597
rctttatcaaaca

SEQ ID NO: 10109 - DNA, 13 bp, Artificial Sequence
  Oligonucleotide for detection of SNP TSC0002598
tttggtaaataay

SEQ ID NO: 10110 - DNA, 13 bp, Artificial Sequence
  Oligonucleotide for detection of SNP TSC0002598
rttatttaccaaa

SEQ ID NO: 10111 - DNA, 13 bp, Artificial Sequence
  Oligonucleotide for detection of SNP TSC0002598
tttggttaataay

SEQ ID NO: 10112 - DNA, 13 bp, Artificial Sequence
  Oligonucleotide for detection of SNP TSC0002598
rttattaaccaaa

SEQ ID NO: 10113 - DNA, 13 bp, Artificial Sequence
  Oligonucleotide for detection of SNP TSC0002598
gttgtttgttaaa

SEQ ID NO: 10114 - DNA, 13 bp, Artificial Sequence
  Oligonucleotide for detection of SNP TSC0002598
tttaacaaacaac

SEQ ID NO: 10115 - DNA, 13 bp, Artificial Sequence
  Oligonucleotide for detection of SNP TSC0002598
gttgttagttaaa

SEQ ID NO: 10116 - DNA, 13 bp, Artificial Sequence
  Oligonucleotide for detection of SNP TSC0002598
tttaactaacaac

SEQ ID NO: 10117 - DNA, 13 bp, Artificial Sequence
  Oligonucleotide for detection of SNP TSC0002600
gaatagggtgatt

SEQ ID NO: 10118 - DNA, 13 bp, Artificial Sequence
  Oligonucleotide for detection of SNP TSC0002600
aatcaccctattc

SEQ ID NO: 10119 - DNA, 13 bp, Artificial Sequence
  Oligonucleotide for detection of SNP TSC0002600
gaatagagtgatt

SEQ ID NO: 10120 - DNA, 13 bp, Artificial Sequence
  Oligonucleotide for detection of SNP TSC0002600
aatcactctattc

SEQ ID NO: 10121 - DNA, 13 bp, Artificial Sequence
  Oligonucleotide for detection of SNP TSC0002601
atggatgtgtatg

SEQ ID NO: 10122 - DNA, 13 bp, Artificial Sequence
  Oligonucleotide for detection of SNP TSC0002601
catacacatccat

SEQ ID NO: 10123 - DNA, 13 bp, Artificial Sequence
  Oligonucleotide for detection of SNP TSC0002601
atggatttgtatg

SEQ ID NO: 10124 - DNA, 13 bp, Artificial Sequence
  Oligonucleotide for detection of SNP TSC0002601
catacaaatccat

SEQ ID NO: 10125 - DNA, 13 bp, Artificial Sequence
  Oligonucleotide for detection of SNP TSC0002601
acggatgtgtatg

SEQ ID NO: 10126 - DNA, 13 bp, Artificial Sequence
  Oligonucleotide for detection of SNP TSC0002601
catacacatccgt

SEQ ID NO: 10127 - DNA, 13 bp, Artificial Sequence
  Oligonucleotide for detection of SNP TSC0002601
acggatttgtatg

SEQ ID NO: 10128 - DNA, 13 bp, Artificial Sequence
  Oligonucleotide for detection of SNP TSC0002601
catacaaatccgt

SEQ ID NO: 10129 - DNA, 13 bp, Artificial Sequence
  Oligonucleotide for detection of SNP TSC0002601
atggacgtgtatg

SEQ ID NO: 10130 - DNA, 13 bp, Artificial Sequence
  Oligonucleotide for detection of SNP TSC0002601
catacacgtccat

SEQ ID NO: 10131 - DNA, 13 bp, Artificial Sequence
  Oligonucleotide for detection of SNP TSC0002601
atggattcgtatg

SEQ ID NO: 10132 - DNA, 13 bp, Artificial Sequence
  Oligonucleotide for detection of SNP TSC0002601
catacgaatccat

SEQ ID NO: 10133 - DNA, 13 bp, Artificial Sequence
  Oligonucleotide for detection of SNP TSC0002601
atggatgcgtatg

SEQ ID NO: 10134 - DNA, 13 bp, Artificial Sequence
  Oligonucleotide for detection of SNP TSC0002601
catacgcatccat

SEQ ID NO: 10135 - DNA, 13 bp, Artificial Sequence
  Oligonucleotide for detection of SNP TSC0002601
acggattcgtatg

SEQ ID NO: 10136 - DNA, 13 bp, Artificial Sequence
  Oligonucleotide for detection of SNP TSC0002601
catacgaatccgt

SEQ ID NO: 10137 - DNA, 13 bp, Artificial Sequence
  Oligonucleotide for detection of SNP TSC0002601
acggacgtgtatg

SEQ ID NO: 10138 - DNA, 13 bp, Artificial Sequence
  Oligonucleotide for detection of SNP TSC0002601
catacacgtccgt

SEQ ID NO: 10139 - DNA, 13 bp, Artificial Sequence
  Oligonucleotide for detection of SNP TSC0002601
acggatgcgtatg

SEQ ID NO: 10140 - DNA, 13 bp, Artificial Sequence
  Oligonucleotide for detection of SNP TSC0002601
catacgcatccgt

SEQ ID NO: 10141 - DNA, 13 bp, Artificial Sequence
  Oligonucleotide for detection of SNP TSC0002601
atggacgcgtatg

SEQ ID NO: 10142 - DNA, 13 bp, Artificial Sequence
  Oligonucleotide for detection of SNP TSC0002601
catacgcgtccat

SEQ ID NO: 10143 - DNA, 13 bp, Artificial Sequence
  Oligonucleotide for detection of SNP TSC0002601
acggacgcgtatg

SEQ ID NO: 10144 - DNA, 13 bp, Artificial Sequence
  Oligonucleotide for detection of SNP TSC0002601
catacgcgtccgt

SEQ ID NO: 10145 - DNA, 13 bp, Artificial Sequence
  Oligonucleotide for detection of SNP TSC0002601
tatgtgtgtttgt

SEQ ID NO: 10146 - DNA, 13 bp, Artificial Sequence
  Oligonucleotide for detection of SNP TSC0002601
acaaacacacata

SEQ ID NO: 10147 - DNA, 13 bp, Artificial Sequence
  Oligonucleotide for detection of SNP TSC0002601
tatgtgggtttgt

SEQ ID NO: 10148 - DNA, 13 bp, Artificial Sequence
  Oligonucleotide for detection of SNP TSC0002601
acaaacccacata

SEQ ID NO: 10149 - DNA, 13 bp, Artificial Sequence
  Oligonucleotide for detection of SNP TSC0002601
tatgcgtgtttgt

SEQ ID NO: 10150 - DNA, 13 bp, Artificial Sequence
  Oligonucleotide for detection of SNP TSC0002601
acaaacacgcata

SEQ ID NO: 10151 - DNA, 13 bp, Artificial Sequence
  Oligonucleotide for detection of SNP TSC0002601
tatgcgggtttgt

SEQ ID NO: 10152 - DNA, 13 bp, Artificial Sequence
  Oligonucleotide for detection of SNP TSC0002601
acaaacccgcata

SEQ ID NO: 10153 - DNA, 13 bp, Artificial Sequence
  Oligonucleotide for detection of SNP TSC0002601
tatgtgcgtttgt

SEQ ID NO: 10154 - DNA, 13 bp, Artificial Sequence
  Oligonucleotide for detection of SNP TSC0002601
acaaacgcacata

SEQ ID NO: 10155 - DNA, 13 bp, Artificial Sequence
  Oligonucleotide for detection of SNP TSC0002601
tatgtgggttcgt

SEQ ID NO: 10156 - DNA, 13 bp, Artificial Sequence
  Oligonucleotide for detection of SNP TSC0002601
acgaacccacata

SEQ ID NO: 10157 - DNA, 13 bp, Artificial Sequence
  Oligonucleotide for detection of SNP TSC0002601
tatgtgtgttcgt

SEQ ID NO: 10158 - DNA, 13 bp, Artificial Sequence
  Oligonucleotide for detection of SNP TSC0002601
acgaacacacata

SEQ ID NO: 10159 - DNA, 13 bp, Artificial Sequence
  Oligonucleotide for detection of SNP TSC0002601
tatgcgggttcgt

SEQ ID NO: 10160 - DNA, 13 bp, Artificial Sequence
  Oligonucleotide for detection of SNP TSC0002601
acgaacccgcata

SEQ ID NO: 10161 - DNA, 13 bp, Artificial Sequence
  Oligonucleotide for detection of SNP TSC0002601
tatgcgcgtttgt

SEQ ID NO: 10162 - DNA, 13 bp, Artificial Sequence
  Oligonucleotide for detection of SNP TSC0002601
acaaacgcgcata

SEQ ID NO: 10163 - DNA, 13 bp, Artificial Sequence
  Oligonucleotide for detection of SNP TSC0002601
tatgcgtgttcgt

SEQ ID NO: 10164 - DNA, 13 bp, Artificial Sequence
  Oligonucleotide for detection of SNP TSC0002601
acgaacacgcata

SEQ ID NO: 10165 - DNA, 13 bp, Artificial Sequence
  Oligonucleotide for detection of SNP TSC0002601
tatgtgcgttcgt

SEQ ID NO: 10166 - DNA, 13 bp, Artificial Sequence
  Oligonucleotide for detection of SNP TSC0002601
acgaacgcacata

SEQ ID NO: 10167 - DNA, 13 bp, Artificial Sequence
  Oligonucleotide for detection of SNP TSC0002601
tatgcgcgttcgt

SEQ ID NO: 10168 - DNA, 13 bp, Artificial Sequence
  Oligonucleotide for detection of SNP TSC0002601
acgaacgcgcata

SEQ ID NO: 10169 - DNA, 13 bp, Artificial Sequence
  Oligonucleotide for detection of SNP TSC0002602
atttggagagagg

SEQ ID NO: 10170 - DNA, 13 bp, Artificial Sequence
  Oligonucleotide for detection of SNP TSC0002602
cctctctccaaat

SEQ ID NO: 10171 - DNA, 13 bp, Artificial Sequence
  Oligonucleotide for detection of SNP TSC0002602
atttggggagagg

SEQ ID NO: 10172 - DNA, 13 bp, Artificial Sequence
  Oligonucleotide for detection of SNP TSC0002602
cctctccccaaat

SEQ ID NO: 10173 - DNA, 13 bp, Artificial Sequence
  Oligonucleotide for detection of SNP TSC0002603
ggatgtgtatgaa

SEQ ID NO: 10174 - DNA, 13 bp, Artificial Sequence
  Oligonucleotide for detection of SNP TSC0002603
ttcatacacatcc

SEQ ID NO: 10175 - DNA, 13 bp, Artificial Sequence
  Oligonucleotide for detection of SNP TSC0002603
ggatgtttatgaa

SEQ ID NO: 10176 - DNA, 13 bp, Artificial Sequence
  Oligonucleotide for detection of SNP TSC0002603
ttcataaacatcc

SEQ ID NO: 10177 - DNA, 13 bp, Artificial Sequence
  Oligonucleotide for detection of SNP TSC0002603
ggacgtgtatgaa

SEQ ID NO: 10178 - DNA, 13 bp, Artificial Sequence
  Oligonucleotide for detection of SNP TSC0002603
ttcatacacgtcc

SEQ ID NO: 10179 - DNA, 13 bp, Artificial Sequence
  Oligonucleotide for detection of SNP TSC0002603
ggacgtttatgaa

SEQ ID NO: 10180 - DNA, 13 bp, Artificial Sequence
  Oligonucleotide for detection of SNP TSC0002603
ttcataaacgtcc

SEQ ID NO: 10181 - DNA, 13 bp, Artificial Sequence
  Oligonucleotide for detection of SNP TSC0002603
ggatgcgtatgaa

SEQ ID NO: 10182 - DNA, 13 bp, Artificial Sequence
  Oligonucleotide for detection of SNP TSC0002603
ttcatacgcatcc

SEQ ID NO: 10183 - DNA, 13 bp, Artificial Sequence
  Oligonucleotide for detection of SNP TSC0002603
ggacgcgtatgaa

SEQ ID NO: 10184 - DNA, 13 bp, Artificial Sequence
  Oligonucleotide for detection of SNP TSC0002603
ttcatacgcgtcc

SEQ ID NO: 10185 - DNA, 13 bp, Artificial Sequence
  Oligonucleotide for detection of SNP TSC0002603
tttatgtgtgtty

SEQ ID NO: 10186 - DNA, 13 bp, Artificial Sequence
  Oligonucleotide for detection of SNP TSC0002603
raacacacataaa

SEQ ID NO: 10187 - DNA, 13 bp, Artificial Sequence
  Oligonucleotide for detection of SNP TSC0002603
tttatgggtgtty

SEQ ID NO: 10188 - DNA, 13 bp, Artificial Sequence
  Oligonucleotide for detection of SNP TSC0002603
raacacccataaa

SEQ ID NO: 10189 - DNA, 13 bp, Artificial Sequence
  Oligonucleotide for detection of SNP TSC0002603
tttatgcgtgtty

SEQ ID NO: 10190 - DNA, 13 bp, Artificial Sequence
  Oligonucleotide for detection of SNP TSC0002603
raacacgcataaa

SEQ ID NO: 10191 - DNA, 13 bp, Artificial Sequence
  Oligonucleotide for detection of SNP TSC0002603
tttatgggcgtty

SEQ ID NO: 10192 - DNA, 13 bp, Artificial Sequence
  Oligonucleotide for detection of SNP TSC0002603
raacgcccataaa

SEQ ID NO: 10193 - DNA, 13 bp, Artificial Sequence
  Oligonucleotide for detection of SNP TSC0002603
tttatgtgcgtty

SEQ ID NO: 10194 - DNA, 13 bp, Artificial Sequence
  Oligonucleotide for detection of SNP TSC0002603
raacgcacataaa

SEQ ID NO: 10195 - DNA, 13 bp, Artificial Sequence
  Oligonucleotide for detection of SNP TSC0002603
tttatgcgcgtty

SEQ ID NO: 10196 - DNA, 13 bp, Artificial Sequence
  Oligonucleotide for detection of SNP TSC0002603
raacgcgcataaa

SEQ ID NO: 10197 - DNA, 13 bp, Artificial Sequence
  Oligonucleotide for detection of SNP TSC0002604
ttatgtattgtat

SEQ ID NO: 10198 - DNA, 13 bp, Artificial Sequence
  Oligonucleotide for detection of SNP TSC0002604
atacaatacataa

SEQ ID NO: 10199 - DNA, 13 bp, Artificial Sequence
  Oligonucleotide for detection of SNP TSC0002604
ttatgtgttgtat

SEQ ID NO: 10200 - DNA, 13 bp, Artificial Sequence
  Oligonucleotide for detection of SNP TSC0002604
atacaacacataa

SEQ ID NO: 10201 - DNA, 13 bp, Artificial Sequence
  Oligonucleotide for detection of SNP TSC0002605
aaggaaataaaga

SEQ ID NO: 10202 - DNA, 13 bp, Artificial Sequence
  Oligonucleotide for detection of SNP TSC0002605
tctttatttcctt

SEQ ID NO: 10203 - DNA, 13 bp, Artificial Sequence
  Oligonucleotide for detection of SNP TSC0002605
aaggaagtaaaga

SEQ ID NO: 10204 - DNA, 13 bp, Artificial Sequence
  Oligonucleotide for detection of SNP TSC0002605
tctttacttcctt

SEQ ID NO: 10205 - DNA, 13 bp, Artificial Sequence
  Oligonucleotide for detection of SNP TSC0002606
tgaaagtttgata

SEQ ID NO: 10206 - DNA, 13 bp, Artificial Sequence
  Oligonucleotide for detection of SNP TSC0002606
tatcaaactttca

SEQ ID NO: 10207 - DNA, 13 bp, Artificial Sequence
  Oligonucleotide for detection of SNP TSC0002606
tgaaagattgata

SEQ ID NO: 10208 - DNA, 13 bp, Artificial Sequence
  Oligonucleotide for detection of SNP TSC0002606
tatcaatctttca

SEQ ID NO: 10209 - DNA, 13 bp, Artificial Sequence
  Oligonucleotide for detection of SNP TSC0002606
tgttagattttta

SEQ ID NO: 10210 - DNA, 13 bp, Artificial Sequence
  Oligonucleotide for detection of SNP TSC0002606
taaaaatctaaca

SEQ ID NO: 10211 - DNA, 13 bp, Artificial Sequence
  Oligonucleotide for detection of SNP TSC0002606
tgttagtttttta

SEQ ID NO: 10212 - DNA, 13 bp, Artificial Sequence
  Oligonucleotide for detection of SNP TSC0002606
taaaaaactaaca

SEQ ID NO: 10213 - DNA, 13 bp, Artificial Sequence
  Oligonucleotide for detection of SNP TSC0002608
gggtaggtgggag

SEQ ID NO: 10214 - DNA, 13 bp, Artificial Sequence
  Oligonucleotide for detection of SNP TSC0002608
ctcccacctaccc

SEQ ID NO: 10215 - DNA, 13 bp, Artificial Sequence
  Oligonucleotide for detection of SNP TSC0002608
gggtagatgggag

SEQ ID NO: 10216 - DNA, 13 bp, Artificial Sequence
  Oligonucleotide for detection of SNP TSC0002608
ctcccatctaccc

SEQ ID NO: 10217 - DNA, 13 bp, Artificial Sequence
  Oligonucleotide for detection of SNP TSC0002611
ttttgtgtattty

SEQ ID NO: 10218 - DNA, 13 bp, Artificial Sequence
  Oligonucleotide for detection of SNP TSC0002611
raaatacacaaaa

SEQ ID NO: 10219 - DNA, 13 bp, Artificial Sequence
  Oligonucleotide for detection of SNP TSC0002611
ttttgtatattty

SEQ ID NO: 10220 - DNA, 13 bp, Artificial Sequence
  Oligonucleotide for detection of SNP TSC0002611
raaatatacaaaa

SEQ ID NO: 10221 - DNA, 13 bp, Artificial Sequence
  Oligonucleotide for detection of SNP TSC0002612
atttatgagaaaa

SEQ ID NO: 10222 - DNA, 13 bp, Artificial Sequence
  Oligonucleotide for detection of SNP TSC0002612
ttttctcataaat

SEQ ID NO: 10223 - DNA, 13 bp, Artificial Sequence
  Oligonucleotide for detection of SNP TSC0002612
atttataagaaaa

SEQ ID NO: 10224 - DNA, 13 bp, Artificial Sequence
  Oligonucleotide for detection of SNP TSC0002612
ttttcttataaat

SEQ ID NO: 10225 - DNA, 13 bp, Artificial Sequence
  Oligonucleotide for detection of SNP TSC0002613
taatttaaaagtt

SEQ ID NO: 10226 - DNA, 13 bp, Artificial Sequence
  Oligonucleotide for detection of SNP TSC0002613
aacttttaaatta

SEQ ID NO: 10227 - DNA, 13 bp, Artificial Sequence
  Oligonucleotide for detection of SNP TSC0002613
taatttgaaagtt

SEQ ID NO: 10228 - DNA, 13 bp, Artificial Sequence
  Oligonucleotide for detection of SNP TSC0002613
aactttcaaatta

SEQ ID NO: 10229 - DNA, 13 bp, Artificial Sequence
  Oligonucleotide for detection of SNP TSC0002613
taattcgaaagtt

SEQ ID NO: 10230 - DNA, 13 bp, Artificial Sequence
  Oligonucleotide for detection of SNP TSC0002613
aactttcgaatta

SEQ ID NO: 10231 - DNA, 13 bp, Artificial Sequence
  Oligonucleotide for detection of SNP TSC0002613
agtttttggattg

SEQ ID NO: 10232 - DNA, 13 bp, Artificial Sequence
  Oligonucleotide for detection of SNP TSC0002613
caatccaaaaact

SEQ ID NO: 10233 - DNA, 13 bp, Artificial Sequence
  Oligonucleotide for detection of SNP TSC0002613
agttttcggattg

SEQ ID NO: 10234 - DNA, 13 bp, Artificial Sequence
  Oligonucleotide for detection of SNP TSC0002613
caatccgaaaact

SEQ ID NO: 10235 - DNA, 13 bp, Artificial Sequence
  Oligonucleotide for detection of SNP TSC0002614
gtatttatagggy

SEQ ID NO: 10236 - DNA, 13 bp, Artificial Sequence
  Oligonucleotide for detection of SNP TSC0002614
rccctataaatac

SEQ ID NO: 10237 - DNA, 13 bp, Artificial Sequence
  Oligonucleotide for detection of SNP TSC0002614
gtatttgtagggy

SEQ ID NO: 10238 - DNA, 13 bp, Artificial Sequence
  Oligonucleotide for detection of SNP TSC0002614
rccctacaaatac

SEQ ID NO: 10239 - DNA, 13 bp, Artificial Sequence
  Oligonucleotide for detection of SNP TSC0002616
ggtttttggtatg

SEQ ID NO: 10240 - DNA, 13 bp, Artificial Sequence
  Oligonucleotide for detection of SNP TSC0002616
cataccaaaaacc

SEQ ID NO: 10241 - DNA, 13 bp, Artificial Sequence
  Oligonucleotide for detection of SNP TSC0002616
ggttttcggtatg

SEQ ID NO: 10242 - DNA, 13 bp, Artificial Sequence
  Oligonucleotide for detection of SNP TSC0002616
cataccgaaaacc

SEQ ID NO: 10243 - DNA, 13 bp, Artificial Sequence
  Oligonucleotide for detection of SNP TSC0002616
tatgttagagaty

SEQ ID NO: 10244 - DNA, 13 bp, Artificial Sequence
  Oligonucleotide for detection of SNP TSC0002616
ratctctaacata

SEQ ID NO: 10245 - DNA, 13 bp, Artificial Sequence
  Oligonucleotide for detection of SNP TSC0002616
tatgttggagaty

SEQ ID NO: 10246 - DNA, 13 bp, Artificial Sequence
  Oligonucleotide for detection of SNP TSC0002616
ratctccaacata

SEQ ID NO: 10247 - DNA, 13 bp, Artificial Sequence
  Oligonucleotide for detection of SNP TSC0002616
tatgtcggagaty

SEQ ID NO: 10248 - DNA, 13 bp, Artificial Sequence
  Oligonucleotide for detection of SNP TSC0002616
ratctccgacata

SEQ ID NO: 10249 - DNA, 13 bp, Artificial Sequence
  Oligonucleotide for detection of SNP TSC0002617
ttttaatatggtg

SEQ ID NO: 10250 - DNA, 13 bp, Artificial Sequence
  Oligonucleotide for detection of SNP TSC0002617
caccatattaaaa

SEQ ID NO: 10251 - DNA, 13 bp, Artificial Sequence
  Oligonucleotide for detection of SNP TSC0002617
ttttaaaatggtg

SEQ ID NO: 10252 - DNA, 13 bp, Artificial Sequence
  Oligonucleotide for detection of SNP TSC0002617
caccattttaaaa

SEQ ID NO: 10253 - DNA, 13 bp, Artificial Sequence
  Oligonucleotide for detection of SNP TSC0002617
tattatgttggag

SEQ ID NO: 10254 - DNA, 13 bp, Artificial Sequence
  Oligonucleotide for detection of SNP TSC0002617
ctccaacataata

SEQ ID NO: 10255 - DNA, 13 bp, Artificial Sequence
  Oligonucleotide for detection of SNP TSC0002617
tattattttggag

SEQ ID NO: 10256 - DNA, 13 bp, Artificial Sequence
  Oligonucleotide for detection of SNP TSC0002617
ctccaaaataata

SEQ ID NO: 10257 - DNA, 13 bp, Artificial Sequence
  Oligonucleotide for detection of SNP TSC0002618
gttattttgatag

SEQ ID NO: 10258 - DNA, 13 bp, Artificial Sequence
  Oligonucleotide for detection of SNP TSC0002618
ctatcaaaataac

SEQ ID NO: 10259 - DNA, 13 bp, Artificial Sequence
  Oligonucleotide for detection of SNP TSC0002618
gttattatgatag

SEQ ID NO: 10260 - DNA, 13 bp, Artificial Sequence
  Oligonucleotide for detection of SNP TSC0002618
ctatcataataac

SEQ ID NO: 10261 - DNA, 13 bp, Artificial Sequence
  Oligonucleotide for detection of SNP TSC0002618
gttatttcgatag

SEQ ID NO: 10262 - DNA, 13 bp, Artificial Sequence
  Oligonucleotide for detection of SNP TSC0002618
ctatcgaaataac

SEQ ID NO: 10263 - DNA, 13 bp, Artificial Sequence
  Oligonucleotide for detection of SNP TSC0002618
gttattacgatag

SEQ ID NO: 10264 - DNA, 13 bp, Artificial Sequence
  Oligonucleotide for detection of SNP TSC0002618
ctatcgtaataac

SEQ ID NO: 10265 - DNA, 13 bp, Artificial Sequence
  Oligonucleotide for detection of SNP TSC0002618
ttattggaataay

SEQ ID NO: 10266 - DNA, 13 bp, Artificial Sequence
  Oligonucleotide for detection of SNP TSC0002618
rttattccaataa

SEQ ID NO: 10267 - DNA, 13 bp, Artificial Sequence
  Oligonucleotide for detection of SNP TSC0002618
ttattgtaataay

SEQ ID NO: 10268 - DNA, 13 bp, Artificial Sequence
  Oligonucleotide for detection of SNP TSC0002618
rttattacaataa

SEQ ID NO: 10269 - DNA, 13 bp, Artificial Sequence
  Oligonucleotide for detection of SNP TSC0002618
ttatcggaataay

SEQ ID NO: 10270 - DNA, 13 bp, Artificial Sequence
  Oligonucleotide for detection of SNP TSC0002618
rttattccgataa

SEQ ID NO: 10271 - DNA, 13 bp, Artificial Sequence
  Oligonucleotide for detection of SNP TSC0002618
ttatcgtaataay

SEQ ID NO: 10272 - DNA, 13 bp, Artificial Sequence
  Oligonucleotide for detection of SNP TSC0002618
rttattacgataa

SEQ ID NO: 10273 - DNA, 13 bp, Artificial Sequence
  Oligonucleotide for detection of SNP TSC0002619
gagatagtaaatg

SEQ ID NO: 10274 - DNA, 13 bp, Artificial Sequence
  Oligonucleotide for detection of SNP TSC0002619
catttactatctc

SEQ ID NO: 10275 - DNA, 13 bp, Artificial Sequence
  Oligonucleotide for detection of SNP TSC0002619
gagataataaatg

SEQ ID NO: 10276 - DNA, 13 bp, Artificial Sequence
  Oligonucleotide for detection of SNP TSC0002619
catttattatctc

SEQ ID NO: 10277 - DNA, 13 bp, Artificial Sequence
  Oligonucleotide for detection of SNP TSC0002620
gaatattgaagty

SEQ ID NO: 10278 - DNA, 13 bp, Artificial Sequence
  Oligonucleotide for detection of SNP TSC0002620
racttcaatattc

SEQ ID NO: 10279 - DNA, 13 bp, Artificial Sequence
  Oligonucleotide for detection of SNP TSC0002620
gaatatcgaagty

SEQ ID NO: 10280 - DNA, 13 bp, Artificial Sequence
  Oligonucleotide for detection of SNP TSC0002620
racttcgatattc

SEQ ID NO: 10281 - DNA, 13 bp, Artificial Sequence
  Oligonucleotide for detection of SNP TSC0002620
gattttagtatty

SEQ ID NO: 10282 - DNA, 13 bp, Artificial Sequence
  Oligonucleotide for detection of SNP TSC0002620
raatactaaaatc

SEQ ID NO: 10283 - DNA, 13 bp, Artificial Sequence
  Oligonucleotide for detection of SNP TSC0002620
gattttggtatty

SEQ ID NO: 10284 - DNA, 13 bp, Artificial Sequence
  Oligonucleotide for detection of SNP TSC0002620
raataccaaaatc

SEQ ID NO: 10285 - DNA, 13 bp, Artificial Sequence
  Oligonucleotide for detection of SNP TSC0002620
gatttcggtatty

SEQ ID NO: 10286 - DNA, 13 bp, Artificial Sequence
  Oligonucleotide for detection of SNP TSC0002620
raataccgaaatc

SEQ ID NO: 10287 - DNA, 13 bp, Artificial Sequence
  Oligonucleotide for detection of SNP TSC0002621
tattgagtaagtg

SEQ ID NO: 10288 - DNA, 13 bp, Artificial Sequence
  Oligonucleotide for detection of SNP TSC0002621
cacttactcaata

SEQ ID NO: 10289 - DNA, 13 bp, Artificial Sequence
  Oligonucleotide for detection of SNP TSC0002621
tattgattaagtg

SEQ ID NO: 10290 - DNA, 13 bp, Artificial Sequence
  Oligonucleotide for detection of SNP TSC0002621
cacttaatcaata

SEQ ID NO: 10291 - DNA, 13 bp, Artificial Sequence
  Oligonucleotide for detection of SNP TSC0002621
tatttgtttagtg

SEQ ID NO: 10292 - DNA, 13 bp, Artificial Sequence
  Oligonucleotide for detection of SNP TSC0002621
cactaaacaaata

SEQ ID NO: 10293 - DNA, 13 bp, Artificial Sequence
  Oligonucleotide for detection of SNP TSC0002621
tatttggttagtg

SEQ ID NO: 10294 - DNA, 13 bp, Artificial Sequence
  Oligonucleotide for detection of SNP TSC0002621
cactaaccaaata

SEQ ID NO: 10295 - DNA, 13 bp, Artificial Sequence
  Oligonucleotide for detection of SNP TSC0002622
gtatgtgttaaga

SEQ ID NO: 10296 - DNA, 13 bp, Artificial Sequence
  Oligonucleotide for detection of SNP TSC0002622
tcttaacacatac

SEQ ID NO: 10297 - DNA, 13 bp, Artificial Sequence
  Oligonucleotide for detection of SNP TSC0002622
gtatgttttaaga

SEQ ID NO: 10298 - DNA, 13 bp, Artificial Sequence
  Oligonucleotide for detection of SNP TSC0002622
tcttaaaacatac

SEQ ID NO: 10299 - DNA, 13 bp, Artificial Sequence
  Oligonucleotide for detection of SNP TSC0002622
ttttggtatatgy

SEQ ID NO: 10300 - DNA, 13 bp, Artificial Sequence
  Oligonucleotide for detection of SNP TSC0002622
rcatataccaaaa

SEQ ID NO: 10301 - DNA, 13 bp, Artificial Sequence
  Oligonucleotide for detection of SNP TSC0002622
ttttgggatatgy

SEQ ID NO: 10302 - DNA, 13 bp, Artificial Sequence
  Oligonucleotide for detection of SNP TSC0002622
rcatatcccaaaa

SEQ ID NO: 10303 - DNA, 13 bp, Artificial Sequence
  Oligonucleotide for detection of SNP TSC0002623
tgatatttttgaa

SEQ ID NO: 10304 - DNA, 13 bp, Artificial Sequence
  Oligonucleotide for detection of SNP TSC0002623
ttcaaaaatatca

SEQ ID NO: 10305 - DNA, 13 bp, Artificial Sequence
  Oligonucleotide for detection of SNP TSC0002623
tgatatatttgaa

SEQ ID NO: 10306 - DNA, 13 bp, Artificial Sequence
  Oligonucleotide for detection of SNP TSC0002623
ttcaaatatatca

SEQ ID NO: 10307 - DNA, 13 bp, Artificial Sequence
  Oligonucleotide for detection of SNP TSC0002623
tgatattttcgaa

SEQ ID NO: 10308 - DNA, 13 bp, Artificial Sequence
  Oligonucleotide for detection of SNP TSC0002623
ttcgaaaatatca

SEQ ID NO: 10309 - DNA, 13 bp, Artificial Sequence
  Oligonucleotide for detection of SNP TSC0002623
tgatatattcgaa

SEQ ID NO: 10310 - DNA, 13 bp, Artificial Sequence
  Oligonucleotide for detection of SNP TSC0002623
ttcgaatatatca

SEQ ID NO: 10311 - DNA, 13 bp, Artificial Sequence
  Oligonucleotide for detection of SNP TSC0002623
tttgagaatgtta

SEQ ID NO: 10312 - DNA, 13 bp, Artificial Sequence
  Oligonucleotide for detection of SNP TSC0002623
taacattctcaaa

SEQ ID NO: 10313 - DNA, 13 bp, Artificial Sequence
  Oligonucleotide for detection of SNP TSC0002623
tttgagtatgtta

SEQ ID NO: 10314 - DNA, 13 bp, Artificial Sequence
  Oligonucleotide for detection of SNP TSC0002623
taacatactcaaa

SEQ ID NO: 10315 - DNA, 13 bp, Artificial Sequence
  Oligonucleotide for detection of SNP TSC0002623
ttcgagaatgtta

SEQ ID NO: 10316 - DNA, 13 bp, Artificial Sequence
  Oligonucleotide for detection of SNP TSC0002623
taacattctcgaa

SEQ ID NO: 10317 - DNA, 13 bp, Artificial Sequence
  Oligonucleotide for detection of SNP TSC0002623
ttcgagtatgtta

SEQ ID NO: 10318 - DNA, 13 bp, Artificial Sequence
  Oligonucleotide for detection of SNP TSC0002623
taacatactcgaa

SEQ ID NO: 10319 - DNA, 13 bp, Artificial Sequence
  Oligonucleotide for detection of SNP TSC0002624
ttaatattgttaa

SEQ ID NO: 10320 - DNA, 13 bp, Artificial Sequence
  Oligonucleotide for detection of SNP TSC0002624
ttaacaatattaa

SEQ ID NO: 10321 - DNA, 13 bp, Artificial Sequence
  Oligonucleotide for detection of SNP TSC0002624
ttaatagtgttaa

SEQ ID NO: 10322 - DNA, 13 bp, Artificial Sequence
  Oligonucleotide for detection of SNP TSC0002624
ttaacactattaa

SEQ ID NO: 10323 - DNA, 13 bp, Artificial Sequence
  Oligonucleotide for detection of SNP TSC0002624
ttaatatcgttaa

SEQ ID NO: 10324 - DNA, 13 bp, Artificial Sequence
  Oligonucleotide for detection of SNP TSC0002624
ttaacgatattaa

SEQ ID NO: 10325 - DNA, 13 bp, Artificial Sequence
  Oligonucleotide for detection of SNP TSC0002624
ttaatagcgttaa

SEQ ID NO: 10326 - DNA, 13 bp, Artificial Sequence
  Oligonucleotide for detection of SNP TSC0002624
ttaacgctattaa

SEQ ID NO: 10327 - DNA, 13 bp, Artificial Sequence
  Oligonucleotide for detection of SNP TSC0002624
ttggtggtgttga

SEQ ID NO: 10328 - DNA, 13 bp, Artificial Sequence
  Oligonucleotide for detection of SNP TSC0002624
tcaacaccaccaa

SEQ ID NO: 10329 - DNA, 13 bp, Artificial Sequence
  Oligonucleotide for detection of SNP TSC0002624
ttggtgttgttga

SEQ ID NO: 10330 - DNA, 13 bp, Artificial Sequence
  Oligonucleotide for detection of SNP TSC0002624
tcaacaacaccaa

SEQ ID NO: 10331 - DNA, 13 bp, Artificial Sequence
  Oligonucleotide for detection of SNP TSC0002624
ttggcggtgttga

SEQ ID NO: 10332 - DNA, 13 bp, Artificial Sequence
  Oligonucleotide for detection of SNP TSC0002624
tcaacaccgccaa

SEQ ID NO: 10333 - DNA, 13 bp, Artificial Sequence
  Oligonucleotide for detection of SNP TSC0002624
ttggcgttgttga

SEQ ID NO: 10334 - DNA, 13 bp, Artificial Sequence
  Oligonucleotide for detection of SNP TSC0002624
tcaacaacgccaa

SEQ ID NO: 10335 - DNA, 13 bp, Artificial Sequence
  Oligonucleotide for detection of SNP TSC0002625
gttaatatagtga

SEQ ID NO: 10336 - DNA, 13 bp, Artificial Sequence
  Oligonucleotide for detection of SNP TSC0002625
tcactatattaac

SEQ ID NO: 10337 - DNA, 13 bp, Artificial Sequence
  Oligonucleotide for detection of SNP TSC0002625
gttaatttagtga

SEQ ID NO: 10338 - DNA, 13 bp, Artificial Sequence
  Oligonucleotide for detection of SNP TSC0002625
tcactaaattaac

SEQ ID NO: 10339 - DNA, 13 bp, Artificial Sequence
  Oligonucleotide for detection of SNP TSC0002625
ttattatgttggy

SEQ ID NO: 10340 - DNA, 13 bp, Artificial Sequence
  Oligonucleotide for detection of SNP TSC0002625
rccaacataataa

SEQ ID NO: 10341 - DNA, 13 bp, Artificial Sequence
  Oligonucleotide for detection of SNP TSC0002625
ttattaagttggy

SEQ ID NO: 10342 - DNA, 13 bp, Artificial Sequence
  Oligonucleotide for detection of SNP TSC0002625
rccaacttaataa

SEQ ID NO: 10343 - DNA, 13 bp, Artificial Sequence
  Oligonucleotide for detection of SNP TSC0002626
aattgatggaata

SEQ ID NO: 10344 - DNA, 13 bp, Artificial Sequence
  Oligonucleotide for detection of SNP TSC0002626
tattccatcaatt

SEQ ID NO: 10345 - DNA, 13 bp, Artificial Sequence
  Oligonucleotide for detection of SNP TSC0002626
aattgacggaata

SEQ ID NO: 10346 - DNA, 13 bp, Artificial Sequence
  Oligonucleotide for detection of SNP TSC0002626
tattccgtcaatt

SEQ ID NO: 10347 - DNA, 13 bp, Artificial Sequence
  Oligonucleotide for detection of SNP TSC0002626
tgttttgttagtt

SEQ ID NO: 10348 - DNA, 13 bp, Artificial Sequence
  Oligonucleotide for detection of SNP TSC0002626
aactaacaaaaca

SEQ ID NO: 10349 - DNA, 13 bp, Artificial Sequence
  Oligonucleotide for detection of SNP TSC0002626
tgttttattagtt

SEQ ID NO: 10350 - DNA, 13 bp, Artificial Sequence
  Oligonucleotide for detection of SNP TSC0002626
aactaataaaaca

SEQ ID NO: 10351 - DNA, 13 bp, Artificial Sequence
  Oligonucleotide for detection of SNP TSC0002626
tgtttcgttagtt

SEQ ID NO: 10352 - DNA, 13 bp, Artificial Sequence
  Oligonucleotide for detection of SNP TSC0002626
aactaacgaaaca

SEQ ID NO: 10353 - DNA, 13 bp, Artificial Sequence
  Oligonucleotide for detection of SNP TSC0002627
tgtgggagttgaa

SEQ ID NO: 10354 - DNA, 13 bp, Artificial Sequence
  Oligonucleotide for detection of SNP TSC0002627
ttcaactcccaca

SEQ ID NO: 10355 - DNA, 13 bp, Artificial Sequence
  Oligonucleotide for detection of SNP TSC0002627
tgtgggggttgaa

SEQ ID NO: 10356 - DNA, 13 bp, Artificial Sequence
  Oligonucleotide for detection of SNP TSC0002627
ttcaacccccaca

SEQ ID NO: 10357 - DNA, 13 bp, Artificial Sequence
  Oligonucleotide for detection of SNP TSC0002629
agagttttaaggy

SEQ ID NO: 10358 - DNA, 13 bp, Artificial Sequence
  Oligonucleotide for detection of SNP TSC0002629
rccttaaaactct

SEQ ID NO: 10359 - DNA, 13 bp, Artificial Sequence
  Oligonucleotide for detection of SNP TSC0002629
agagttgtaaggy

SEQ ID NO: 10360 - DNA, 13 bp, Artificial Sequence
  Oligonucleotide for detection of SNP TSC0002629
rccttacaactct

SEQ ID NO: 10361 - DNA, 13 bp, Artificial Sequence
  Oligonucleotide for detection of SNP TSC0002629
gttttaaaatttt

SEQ ID NO: 10362 - DNA, 13 bp, Artificial Sequence
  Oligonucleotide for detection of SNP TSC0002629
aaaattttaaaac

SEQ ID NO: 10363 - DNA, 13 bp, Artificial Sequence
  Oligonucleotide for detection of SNP TSC0002629
gttttataatttt

SEQ ID NO: 10364 - DNA, 13 bp, Artificial Sequence
  Oligonucleotide for detection of SNP TSC0002629
aaaattataaaac

SEQ ID NO: 10365 - DNA, 13 bp, Artificial Sequence
  Oligonucleotide for detection of SNP TSC0002630
ttggtagtggtta

SEQ ID NO: 10366 - DNA, 13 bp, Artificial Sequence
  Oligonucleotide for detection of SNP TSC0002630
taaccactaccaa

SEQ ID NO: 10367 - DNA, 13 bp, Artificial Sequence
  Oligonucleotide for detection of SNP TSC0002630
ttggtaatggtta

SEQ ID NO: 10368 - DNA, 13 bp, Artificial Sequence
  Oligonucleotide for detection of SNP TSC0002630
taaccattaccaa

SEQ ID NO: 10369 - DNA, 13 bp, Artificial Sequence
  Oligonucleotide for detection of SNP TSC0002630
ttggtagcggtta

SEQ ID NO: 10370 - DNA, 13 bp, Artificial Sequence
  Oligonucleotide for detection of SNP TSC0002630
taaccgctaccaa

SEQ ID NO: 10371 - DNA, 13 bp, Artificial Sequence
  Oligonucleotide for detection of SNP TSC0002630
ttggtaacggtta

SEQ ID NO: 10372 - DNA, 13 bp, Artificial Sequence
  Oligonucleotide for detection of SNP TSC0002630
taaccgttaccaa

SEQ ID NO: 10373 - DNA, 13 bp, Artificial Sequence
  Oligonucleotide for detection of SNP TSC0002631
taaggtaatttay

SEQ ID NO: 10374 - DNA, 13 bp, Artificial Sequence
  Oligonucleotide for detection of SNP TSC0002631
rtaaattacctta

SEQ ID NO: 10375 - DNA, 13 bp, Artificial Sequence
  Oligonucleotide for detection of SNP TSC0002631
taaggttatttay

SEQ ID NO: 10376 - DNA, 13 bp, Artificial Sequence
  Oligonucleotide for detection of SNP TSC0002631
rtaaataacctta

SEQ ID NO: 10377 - DNA, 13 bp, Artificial Sequence
  Oligonucleotide for detection of SNP TSC0002631
gtggattgttttg

SEQ ID NO: 10378 - DNA, 13 bp, Artificial Sequence
  Oligonucleotide for detection of SNP TSC0002631
caaaacaatccac

SEQ ID NO: 10379 - DNA, 13 bp, Artificial Sequence
  Oligonucleotide for detection of SNP TSC0002631
gtggatggttttg

SEQ ID NO: 10380 - DNA, 13 bp, Artificial Sequence
  Oligonucleotide for detection of SNP TSC0002631
caaaaccatccac

SEQ ID NO: 10381 - DNA, 13 bp, Artificial Sequence
  Oligonucleotide for detection of SNP TSC0002632
taaaataaggagt

SEQ ID NO: 10382 - DNA, 13 bp, Artificial Sequence
  Oligonucleotide for detection of SNP TSC0002632
actccttatttta

SEQ ID NO: 10383 - DNA, 13 bp, Artificial Sequence
  Oligonucleotide for detection of SNP TSC0002632
taaaatgaggagt

SEQ ID NO: 10384 - DNA, 13 bp, Artificial Sequence
  Oligonucleotide for detection of SNP TSC0002632
actcctcatttta

SEQ ID NO: 10385 - DNA, 13 bp, Artificial Sequence
  Oligonucleotide for detection of SNP TSC0002632
taaaacgaggagt

SEQ ID NO: 10386 - DNA, 13 bp, Artificial Sequence
  Oligonucleotide for detection of SNP TSC0002632
actcctcgtttta

SEQ ID NO: 10387 - DNA, 13 bp, Artificial Sequence
  Oligonucleotide for detection of SNP TSC0002632
attttttgttttg

SEQ ID NO: 10388 - DNA, 13 bp, Artificial Sequence
  Oligonucleotide for detection of SNP TSC0002632
caaaacaaaaaat

SEQ ID NO: 10389 - DNA, 13 bp, Artificial Sequence
  Oligonucleotide for detection of SNP TSC0002632
atttttcgttttg

SEQ ID NO: 10390 - DNA, 13 bp, Artificial Sequence
  Oligonucleotide for detection of SNP TSC0002632
caaaacgaaaaat

SEQ ID NO: 10391 - DNA, 13 bp, Artificial Sequence
  Oligonucleotide for detection of SNP TSC0002633
atgtaagtttatt

SEQ ID NO: 10392 - DNA, 13 bp, Artificial Sequence
  Oligonucleotide for detection of SNP TSC0002633
aataaacttacat

SEQ ID NO: 10393 - DNA, 13 bp, Artificial Sequence
  Oligonucleotide for detection of SNP TSC0002633
atgtaattttatt

SEQ ID NO: 10394 - DNA, 13 bp, Artificial Sequence
  Oligonucleotide for detection of SNP TSC0002633
aataaaattacat

SEQ ID NO: 10395 - DNA, 13 bp, Artificial Sequence
  Oligonucleotide for detection of SNP TSC0002633
aataagtttgtat

SEQ ID NO: 10396 - DNA, 13 bp, Artificial Sequence
  Oligonucleotide for detection of SNP TSC0002633
atacaaacttatt

SEQ ID NO: 10397 - DNA, 13 bp, Artificial Sequence
  Oligonucleotide for detection of SNP TSC0002633
aataagattgtat

SEQ ID NO: 10398 - DNA, 13 bp, Artificial Sequence
  Oligonucleotide for detection of SNP TSC0002633
atacaatcttatt

SEQ ID NO: 10399 - DNA, 13 bp, Artificial Sequence
  Oligonucleotide for detection of SNP TSC0002634
aaaaaattttttt

SEQ ID NO: 10400 - DNA, 13 bp, Artificial Sequence
  Oligonucleotide for detection of SNP TSC0002634
aaaaaaatttttt

SEQ ID NO: 10401 - DNA, 13 bp, Artificial Sequence
  Oligonucleotide for detection of SNP TSC0002635
tgtaagttttaag

SEQ ID NO: 10402 - DNA, 13 bp, Artificial Sequence
  Oligonucleotide for detection of SNP TSC0002635
cttaaaacttaca

SEQ ID NO: 10403 - DNA, 13 bp, Artificial Sequence
  Oligonucleotide for detection of SNP TSC0002635
tgtaaggtttaag

SEQ ID NO: 10404 - DNA, 13 bp, Artificial Sequence
  Oligonucleotide for detection of SNP TSC0002635
cttaaaccttaca

SEQ ID NO: 10405 - DNA, 13 bp, Artificial Sequence
  Oligonucleotide for detection of SNP TSC0002635
tttgaagtttgta

SEQ ID NO: 10406 - DNA, 13 bp, Artificial Sequence
  Oligonucleotide for detection of SNP TSC0002635
tacaaacttcaaa

SEQ ID NO: 10407 - DNA, 13 bp, Artificial Sequence
  Oligonucleotide for detection of SNP TSC0002635
tttgaattttgta

SEQ ID NO: 10408 - DNA, 13 bp, Artificial Sequence
  Oligonucleotide for detection of SNP TSC0002635
tacaaaattcaaa

SEQ ID NO: 10409 - DNA, 13 bp, Artificial Sequence
  Oligonucleotide for detection of SNP TSC0002636
aggggaggggtat

SEQ ID NO: 10410 - DNA, 13 bp, Artificial Sequence
  Oligonucleotide for detection of SNP TSC0002636
atacccctcccct

SEQ ID NO: 10411 - DNA, 13 bp, Artificial Sequence
  Oligonucleotide for detection of SNP TSC0002636
aggggatgggtat

SEQ ID NO: 10412 - DNA, 13 bp, Artificial Sequence
  Oligonucleotide for detection of SNP TSC0002636
atacccatcccct

SEQ ID NO: 10413 - DNA, 13 bp, Artificial Sequence
  Oligonucleotide for detection of SNP TSC0002636
atgtttttttttt

SEQ ID NO: 10414 - DNA, 13 bp, Artificial Sequence
  Oligonucleotide for detection of SNP TSC0002636
aaaaaaaaaacat

SEQ ID NO: 10415 - DNA, 13 bp, Artificial Sequence
  Oligonucleotide for detection of SNP TSC0002636
atgtttatttttt

SEQ ID NO: 10416 - DNA, 13 bp, Artificial Sequence
  Oligonucleotide for detection of SNP TSC0002636
aaaaaataaacat

SEQ ID NO: 10417 - DNA, 13 bp, Artificial Sequence
  Oligonucleotide for detection of SNP TSC0002637
gtttttttaatty

SEQ ID NO: 10418 - DNA, 13 bp, Artificial Sequence
  Oligonucleotide for detection of SNP TSC0002637
raattaaaaaaac

SEQ ID NO: 10419 - DNA, 13 bp, Artificial Sequence
  Oligonucleotide for detection of SNP TSC0002637
gtttttataatty

SEQ ID NO: 10420 - DNA, 13 bp, Artificial Sequence
  Oligonucleotide for detection of SNP TSC0002637
raattataaaaac

SEQ ID NO: 10421 - DNA, 13 bp, Artificial Sequence
  Oligonucleotide for detection of SNP TSC0002637
gggttgggggaay

SEQ ID NO: 10422 - DNA, 13 bp, Artificial Sequence
  Oligonucleotide for detection of SNP TSC0002637
rttcccccaaccc

SEQ ID NO: 10423 - DNA, 13 bp, Artificial Sequence
  Oligonucleotide for detection of SNP TSC0002637
gggttgtgggaay

SEQ ID NO: 10424 - DNA, 13 bp, Artificial Sequence
  Oligonucleotide for detection of SNP TSC0002637
rttcccacaaccc

SEQ ID NO: 10425 - DNA, 13 bp, Artificial Sequence
  Oligonucleotide for detection of SNP TSC0002638
ttgagtttttgtt

SEQ ID NO: 10426 - DNA, 13 bp, Artificial Sequence
  Oligonucleotide for detection of SNP TSC0002638
aacaaaaactcaa

SEQ ID NO: 10427 - DNA, 13 bp, Artificial Sequence
  Oligonucleotide for detection of SNP TSC0002638
ttgagtatttgtt

SEQ ID NO: 10428 - DNA, 13 bp, Artificial Sequence
  Oligonucleotide for detection of SNP TSC0002638
aacaaatactcaa

SEQ ID NO: 10429 - DNA, 13 bp, Artificial Sequence
  Oligonucleotide for detection of SNP TSC0002638
agtaggggtttaa

SEQ ID NO: 10430 - DNA, 13 bp, Artificial Sequence
  Oligonucleotide for detection of SNP TSC0002638
ttaaacccctact

SEQ ID NO: 10431 - DNA, 13 bp, Artificial Sequence
  Oligonucleotide for detection of SNP TSC0002638
agtaggtgtttaa

SEQ ID NO: 10432 - DNA, 13 bp, Artificial Sequence
  Oligonucleotide for detection of SNP TSC0002638
ttaaacacctact

SEQ ID NO: 10433 - DNA, 13 bp, Artificial Sequence
  Oligonucleotide for detection of SNP TSC0002639
atgtgagtatgtt

SEQ ID NO: 10434 - DNA, 13 bp, Artificial Sequence
  Oligonucleotide for detection of SNP TSC0002639
aacatactcacat

SEQ ID NO: 10435 - DNA, 13 bp, Artificial Sequence
  Oligonucleotide for detection of SNP TSC0002639
atgtgaatatgtt

SEQ ID NO: 10436 - DNA, 13 bp, Artificial Sequence
  Oligonucleotide for detection of SNP TSC0002639
aacatattcacat

SEQ ID NO: 10437 - DNA, 13 bp, Artificial Sequence
  Oligonucleotide for detection of SNP TSC0002640
attataggaatta

SEQ ID NO: 10438 - DNA, 13 bp, Artificial Sequence
  Oligonucleotide for detection of SNP TSC0002640
taattcctataat

SEQ ID NO: 10439 - DNA, 13 bp, Artificial Sequence
  Oligonucleotide for detection of SNP TSC0002640
attatatgaatta

SEQ ID NO: 10440 - DNA, 13 bp, Artificial Sequence
  Oligonucleotide for detection of SNP TSC0002640
taattcatataat

SEQ ID NO: 10441 - DNA, 13 bp, Artificial Sequence
  Oligonucleotide for detection of SNP TSC0002640
tgatttttgtaat

SEQ ID NO: 10442 - DNA, 13 bp, Artificial Sequence
  Oligonucleotide for detection of SNP TSC0002640
attacaaaaatca

SEQ ID NO: 10443 - DNA, 13 bp, Artificial Sequence
  Oligonucleotide for detection of SNP TSC0002640
tgatttatgtaat

SEQ ID NO: 10444 - DNA, 13 bp, Artificial Sequence
  Oligonucleotide for detection of SNP TSC0002640
attacataaatca

SEQ ID NO: 10445 - DNA, 13 bp, Artificial Sequence
  Oligonucleotide for detection of SNP TSC0002641
tgttatggtttgg

SEQ ID NO: 10446 - DNA, 13 bp, Artificial Sequence
  Oligonucleotide for detection of SNP TSC0002641
ccaaaccataaca

SEQ ID NO: 10447 - DNA, 13 bp, Artificial Sequence
  Oligonucleotide for detection of SNP TSC0002641
tgttatagtttgg

SEQ ID NO: 10448 - DNA, 13 bp, Artificial Sequence
  Oligonucleotide for detection of SNP TSC0002641
ccaaactataaca

SEQ ID NO: 10449 - DNA, 13 bp, Artificial Sequence
  Oligonucleotide for detection of SNP TSC0002642
gtgattatttagt

SEQ ID NO: 10450 - DNA, 13 bp, Artificial Sequence
  Oligonucleotide for detection of SNP TSC0002642
actaaataatcac

SEQ ID NO: 10451 - DNA, 13 bp, Artificial Sequence
  Oligonucleotide for detection of SNP TSC0002642
gtgattgtttagt

SEQ ID NO: 10452 - DNA, 13 bp, Artificial Sequence
  Oligonucleotide for detection of SNP TSC0002642
actaaacaatcac

SEQ ID NO: 10453 - DNA, 13 bp, Artificial Sequence
  Oligonucleotide for detection of SNP TSC0002642
gcgattatttagt

SEQ ID NO: 10454 - DNA, 13 bp, Artificial Sequence
  Oligonucleotide for detection of SNP TSC0002642
actaaataatcgc

SEQ ID NO: 10455 - DNA, 13 bp, Artificial Sequence
  Oligonucleotide for detection of SNP TSC0002642
gcgattgtttagt

SEQ ID NO: 10456 - DNA, 13 bp, Artificial Sequence
  Oligonucleotide for detection of SNP TSC0002642
actaaacaatcgc

SEQ ID NO: 10457 - DNA, 13 bp, Artificial Sequence
  Oligonucleotide for detection of SNP TSC0002643
gttttttaaaaat

SEQ ID NO: 10458 - DNA, 13 bp, Artificial Sequence
  Oligonucleotide for detection of SNP TSC0002643
atttttaaaaaac

SEQ ID NO: 10459 - DNA, 13 bp, Artificial Sequence
  Oligonucleotide for detection of SNP TSC0002643
gtttttaaaaaat

SEQ ID NO: 10460 - DNA, 13 bp, Artificial Sequence
  Oligonucleotide for detection of SNP TSC0002643
attttttaaaaac

SEQ ID NO: 10461 - DNA, 13 bp, Artificial Sequence
  Oligonucleotide for detection of SNP TSC0002643
atttttaaaaagy

SEQ ID NO: 10462 - DNA, 13 bp, Artificial Sequence
  Oligonucleotide for detection of SNP TSC0002643
rctttttaaaaat

SEQ ID NO: 10463 - DNA, 13 bp, Artificial Sequence
  Oligonucleotide for detection of SNP TSC0002643
attttttaaaagy

SEQ ID NO: 10464 - DNA, 13 bp, Artificial Sequence
  Oligonucleotide for detection of SNP TSC0002643
rcttttaaaaaat

SEQ ID NO: 10465 - DNA, 13 bp, Artificial Sequence
  Oligonucleotide for detection of SNP TSC0002644
agatatggaaata

SEQ ID NO: 10466 - DNA, 13 bp, Artificial Sequence
  Oligonucleotide for detection of SNP TSC0002644
tatttccatatct

SEQ ID NO: 10467 - DNA, 13 bp, Artificial Sequence
  Oligonucleotide for detection of SNP TSC0002644
agatatagaaata

SEQ ID NO: 10468 - DNA, 13 bp, Artificial Sequence
  Oligonucleotide for detection of SNP TSC0002644
tatttctatatct

SEQ ID NO: 10469 - DNA, 13 bp, Artificial Sequence
  Oligonucleotide for detection of SNP TSC0002644
agatacggaaata

SEQ ID NO: 10470 - DNA, 13 bp, Artificial Sequence
  Oligonucleotide for detection of SNP TSC0002644
tatttccgtatct

SEQ ID NO: 10471 - DNA, 13 bp, Artificial Sequence
  Oligonucleotide for detection of SNP TSC0002644
tattttcgtattt

SEQ ID NO: 10472 - DNA, 13 bp, Artificial Sequence
  Oligonucleotide for detection of SNP TSC0002644
aaatacgaaaata

SEQ ID NO: 10473 - DNA, 13 bp, Artificial Sequence
  Oligonucleotide for detection of SNP TSC0002645
tgtgaatgtggga

SEQ ID NO: 10474 - DNA, 13 bp, Artificial Sequence
  Oligonucleotide for detection of SNP TSC0002645
tcccacattcaca

SEQ ID NO: 10475 - DNA, 13 bp, Artificial Sequence
  Oligonucleotide for detection of SNP TSC0002645
tgtgaaagtggga

SEQ ID NO: 10476 - DNA, 13 bp, Artificial Sequence
  Oligonucleotide for detection of SNP TSC0002645
tcccactttcaca

SEQ ID NO: 10477 - DNA, 13 bp, Artificial Sequence
  Oligonucleotide for detection of SNP TSC0002645
ttttatatttata

SEQ ID NO: 10478 - DNA, 13 bp, Artificial Sequence
  Oligonucleotide for detection of SNP TSC0002645
tataaatataaaa

SEQ ID NO: 10479 - DNA, 13 bp, Artificial Sequence
  Oligonucleotide for detection of SNP TSC0002645
ttttatttttata

SEQ ID NO: 10480 - DNA, 13 bp, Artificial Sequence
  Oligonucleotide for detection of SNP TSC0002645
tataaaaataaaa

SEQ ID NO: 10481 - DNA, 13 bp, Artificial Sequence
  Oligonucleotide for detection of SNP TSC0002646
gggtttgtttttt

SEQ ID NO: 10482 - DNA, 13 bp, Artificial Sequence
  Oligonucleotide for detection of SNP TSC0002646
aaaaaacaaaccc

SEQ ID NO: 10483 - DNA, 13 bp, Artificial Sequence
  Oligonucleotide for detection of SNP TSC0002646
gggtttatttttt

SEQ ID NO: 10484 - DNA, 13 bp, Artificial Sequence
  Oligonucleotide for detection of SNP TSC0002646
aaaaaataaaccc

SEQ ID NO: 10485 - DNA, 13 bp, Artificial Sequence
  Oligonucleotide for detection of SNP TSC0002647
tttattatttttt

SEQ ID NO: 10486 - DNA, 13 bp, Artificial Sequence
  Oligonucleotide for detection of SNP TSC0002647
aaaaaataataaa

SEQ ID NO: 10487 - DNA, 13 bp, Artificial Sequence
  Oligonucleotide for detection of SNP TSC0002647
tttattttttttt

SEQ ID NO: 10488 - DNA, 13 bp, Artificial Sequence
  Oligonucleotide for detection of SNP TSC0002647
aaaaaaaaataaa

SEQ ID NO: 10489 - DNA, 13 bp, Artificial Sequence
  Oligonucleotide for detection of SNP TSC0002647
aaaaaatgataaa

SEQ ID NO: 10490 - DNA, 13 bp, Artificial Sequence
  Oligonucleotide for detection of SNP TSC0002647
tttatcatttttt

SEQ ID NO: 10491 - DNA, 13 bp, Artificial Sequence
  Oligonucleotide for detection of SNP TSC0002647
aaaaaaagataaa

SEQ ID NO: 10492 - DNA, 13 bp, Artificial Sequence
  Oligonucleotide for detection of SNP TSC0002647
tttatcttttttt

SEQ ID NO: 10493 - DNA, 13 bp, Artificial Sequence
  Oligonucleotide for detection of SNP TSC0002648
gtgtggaaatata

SEQ ID NO: 10494 - DNA, 13 bp, Artificial Sequence
  Oligonucleotide for detection of SNP TSC0002648
tatatttccacac

SEQ ID NO: 10495 - DNA, 13 bp, Artificial Sequence
  Oligonucleotide for detection of SNP TSC0002648
gtgtggtaatata

SEQ ID NO: 10496 - DNA, 13 bp, Artificial Sequence
  Oligonucleotide for detection of SNP TSC0002648
tatattaccacac

SEQ ID NO: 10497 - DNA, 13 bp, Artificial Sequence
  Oligonucleotide for detection of SNP TSC0002648
tgtgtttttatay

SEQ ID NO: 10498 - DNA, 13 bp, Artificial Sequence
  Oligonucleotide for detection of SNP TSC0002648
rtataaaaacaca

SEQ ID NO: 10499 - DNA, 13 bp, Artificial Sequence
  Oligonucleotide for detection of SNP TSC0002648
tgtgttattatay

SEQ ID NO: 10500 - DNA, 13 bp, Artificial Sequence
  Oligonucleotide for detection of SNP TSC0002648
rtataataacaca

SEQ ID NO: 10501 - DNA, 13 bp, Artificial Sequence
  Oligonucleotide for detection of SNP TSC0002650
gtgaatgtgggay

SEQ ID NO: 10502 - DNA, 13 bp, Artificial Sequence
  Oligonucleotide for detection of SNP TSC0002650
rtcccacattcac

SEQ ID NO: 10503 - DNA, 13 bp, Artificial Sequence
  Oligonucleotide for detection of SNP TSC0002650
gtgaatttgggay

SEQ ID NO: 10504 - DNA, 13 bp, Artificial Sequence
  Oligonucleotide for detection of SNP TSC0002650
rtcccaaattcac

SEQ ID NO: 10505 - DNA, 13 bp, Artificial Sequence
  Oligonucleotide for detection of SNP TSC0002650
gttttatatttay

SEQ ID NO: 10506 - DNA, 13 bp, Artificial Sequence
  Oligonucleotide for detection of SNP TSC0002650
rtaaatataaaac

SEQ ID NO: 10507 - DNA, 13 bp, Artificial Sequence
  Oligonucleotide for detection of SNP TSC0002650
gttttaaatttay

SEQ ID NO: 10508 - DNA, 13 bp, Artificial Sequence
  Oligonucleotide for detection of SNP TSC0002650
rtaaatttaaaac

SEQ ID NO: 10509 - DNA, 13 bp, Artificial Sequence
  Oligonucleotide for detection of SNP TSC0002651
ttttttttaagag

SEQ ID NO: 10510 - DNA, 13 bp, Artificial Sequence
  Oligonucleotide for detection of SNP TSC0002651
ctcttaaaaaaaa

SEQ ID NO: 10511 - DNA, 13 bp, Artificial Sequence
  Oligonucleotide for detection of SNP TSC0002651
ttttttataagag

SEQ ID NO: 10512 - DNA, 13 bp, Artificial Sequence
  Oligonucleotide for detection of SNP TSC0002651
ctcttataaaaaa

SEQ ID NO: 10513 - DNA, 13 bp, Artificial Sequence
  Oligonucleotide for detection of SNP TSC0002651
tttttgagagaaa

SEQ ID NO: 10514 - DNA, 13 bp, Artificial Sequence
  Oligonucleotide for detection of SNP TSC0002651
tttctctcaaaaa

SEQ ID NO: 10515 - DNA, 13 bp, Artificial Sequence
  Oligonucleotide for detection of SNP TSC0002651
tttttgtgagaaa

SEQ ID NO: 10516 - DNA, 13 bp, Artificial Sequence
  Oligonucleotide for detection of SNP TSC0002651
tttctcacaaaaa

SEQ ID NO: 10517 - DNA, 13 bp, Artificial Sequence
  Oligonucleotide for detection of SNP TSC0002652
ggtggaaatagaa

SEQ ID NO: 10518 - DNA, 13 bp, Artificial Sequence
  Oligonucleotide for detection of SNP TSC0002652
ttctatttccacc

SEQ ID NO: 10519 - DNA, 13 bp, Artificial Sequence
  Oligonucleotide for detection of SNP TSC0002652
ggtggatatagaa

SEQ ID NO: 10520 - DNA, 13 bp, Artificial Sequence
  Oligonucleotide for detection of SNP TSC0002652
ttctatatccacc

SEQ ID NO: 10521 - DNA, 13 bp, Artificial Sequence
  Oligonucleotide for detection of SNP TSC0002652
ttttgtttttaty

SEQ ID NO: 10522 - DNA, 13 bp, Artificial Sequence
  Oligonucleotide for detection of SNP TSC0002652
rataaaaacaaaa

SEQ ID NO: 10523 - DNA, 13 bp, Artificial Sequence
  Oligonucleotide for detection of SNP TSC0002652
ttttgtgtttaty

SEQ ID NO: 10524 - DNA, 13 bp, Artificial Sequence
  Oligonucleotide for detection of SNP TSC0002652
rataaacacaaaa

SEQ ID NO: 10525 - DNA, 13 bp, Artificial Sequence
  Oligonucleotide for detection of SNP TSC0002653
tttttttaagagg

SEQ ID NO: 10526 - DNA, 13 bp, Artificial Sequence
  Oligonucleotide for detection of SNP TSC0002653
cctcttaaaaaaa

SEQ ID NO: 10527 - DNA, 13 bp, Artificial Sequence
  Oligonucleotide for detection of SNP TSC0002653
ttttttaaagagg

SEQ ID NO: 10528 - DNA, 13 bp, Artificial Sequence
  Oligonucleotide for detection of SNP TSC0002653
cctctttaaaaaa

SEQ ID NO: 10529 - DNA, 13 bp, Artificial Sequence
  Oligonucleotide for detection of SNP TSC0002653
ttttttgagagaa

SEQ ID NO: 10530 - DNA, 13 bp, Artificial Sequence
  Oligonucleotide for detection of SNP TSC0002653
ttctctcaaaaaa

SEQ ID NO: 10531 - DNA, 13 bp, Artificial Sequence
  Oligonucleotide for detection of SNP TSC0002653
tttttttagagaa

SEQ ID NO: 10532 - DNA, 13 bp, Artificial Sequence
  Oligonucleotide for detection of SNP TSC0002653
ttctctaaaaaaa

SEQ ID NO: 10533 - DNA, 13 bp, Artificial Sequence
  Oligonucleotide for detection of SNP TSC0002657
aaaaaagaaaaaa

SEQ ID NO: 10534 - DNA, 13 bp, Artificial Sequence
  Oligonucleotide for detection of SNP TSC0002657
ttttttctttttt

SEQ ID NO: 10535 - DNA, 13 bp, Artificial Sequence
  Oligonucleotide for detection of SNP TSC0002658
agatgtttttttt

SEQ ID NO: 10536 - DNA, 13 bp, Artificial Sequence
  Oligonucleotide for detection of SNP TSC0002658
aaaaaaaacatct

SEQ ID NO: 10537 - DNA, 13 bp, Artificial Sequence
  Oligonucleotide for detection of SNP TSC0002658
agatgtgtttttt

SEQ ID NO: 10538 - DNA, 13 bp, Artificial Sequence
  Oligonucleotide for detection of SNP TSC0002658
aaaaaacacatct

SEQ ID NO: 10539 - DNA, 13 bp, Artificial Sequence
  Oligonucleotide for detection of SNP TSC0002658
aagaagaatattt

SEQ ID NO: 10540 - DNA, 13 bp, Artificial Sequence
  Oligonucleotide for detection of SNP TSC0002658
aaatattcttctt

SEQ ID NO: 10541 - DNA, 13 bp, Artificial Sequence
  Oligonucleotide for detection of SNP TSC0002658
aagaagtatattt

SEQ ID NO: 10542 - DNA, 13 bp, Artificial Sequence
  Oligonucleotide for detection of SNP TSC0002658
aaatatacttctt

SEQ ID NO: 10543 - DNA, 13 bp, Artificial Sequence
  Oligonucleotide for detection of SNP TSC0002659
tatgttttttttg

SEQ ID NO: 10544 - DNA, 13 bp, Artificial Sequence
  Oligonucleotide for detection of SNP TSC0002659
caaaaaaaacata

SEQ ID NO: 10545 - DNA, 13 bp, Artificial Sequence
  Oligonucleotide for detection of SNP TSC0002659
tatgttgtttttg

SEQ ID NO: 10546 - DNA, 13 bp, Artificial Sequence
  Oligonucleotide for detection of SNP TSC0002659
caaaaacaacata

SEQ ID NO: 10547 - DNA, 13 bp, Artificial Sequence
  Oligonucleotide for detection of SNP TSC0002659
taagaagaatatg

SEQ ID NO: 10548 - DNA, 13 bp, Artificial Sequence
  Oligonucleotide for detection of SNP TSC0002659
catattcttctta

SEQ ID NO: 10549 - DNA, 13 bp, Artificial Sequence
  Oligonucleotide for detection of SNP TSC0002659
taagaataatatg

SEQ ID NO: 10550 - DNA, 13 bp, Artificial Sequence
  Oligonucleotide for detection of SNP TSC0002659
catattattctta

SEQ ID NO: 10551 - DNA, 13 bp, Artificial Sequence
  Oligonucleotide for detection of SNP TSC0002660
tggtattgatttt

SEQ ID NO: 10552 - DNA, 13 bp, Artificial Sequence
  Oligonucleotide for detection of SNP TSC0002660
aaaatcaatacca

SEQ ID NO: 10553 - DNA, 13 bp, Artificial Sequence
  Oligonucleotide for detection of SNP TSC0002660
tggtatcgatttt

SEQ ID NO: 10554 - DNA, 13 bp, Artificial Sequence
  Oligonucleotide for detection of SNP TSC0002660
aaaatcgatacca

SEQ ID NO: 10555 - DNA, 13 bp, Artificial Sequence
  Oligonucleotide for detection of SNP TSC0002660
agggttagtgtta

SEQ ID NO: 10556 - DNA, 13 bp, Artificial Sequence
  Oligonucleotide for detection of SNP TSC0002660
taacactaaccct

SEQ ID NO: 10557 - DNA, 13 bp, Artificial Sequence
  Oligonucleotide for detection of SNP TSC0002660
agggttggtgtta

SEQ ID NO: 10558 - DNA, 13 bp, Artificial Sequence
  Oligonucleotide for detection of SNP TSC0002660
taacaccaaccct

SEQ ID NO: 10559 - DNA, 13 bp, Artificial Sequence
  Oligonucleotide for detection of SNP TSC0002660
agggtcggtgtta

SEQ ID NO: 10560 - DNA, 13 bp, Artificial Sequence
  Oligonucleotide for detection of SNP TSC0002660
taacaccgaccct

SEQ ID NO: 10561 - DNA, 13 bp, Artificial Sequence
  Oligonucleotide for detection of SNP TSC0002661
tagtatatttgaa

SEQ ID NO: 10562 - DNA, 13 bp, Artificial Sequence
  Oligonucleotide for detection of SNP TSC0002661
ttcaaatatacta

SEQ ID NO: 10563 - DNA, 13 bp, Artificial Sequence
  Oligonucleotide for detection of SNP TSC0002661
tagtatttttgaa

SEQ ID NO: 10564 - DNA, 13 bp, Artificial Sequence
  Oligonucleotide for detection of SNP TSC0002661
ttcaaaaatacta

SEQ ID NO: 10565 - DNA, 13 bp, Artificial Sequence
  Oligonucleotide for detection of SNP TSC0002661
tttagatgtatta

SEQ ID NO: 10566 - DNA, 13 bp, Artificial Sequence
  Oligonucleotide for detection of SNP TSC0002661
taatacatctaaa

SEQ ID NO: 10567 - DNA, 13 bp, Artificial Sequence
  Oligonucleotide for detection of SNP TSC0002661
tttagaggtatta

SEQ ID NO: 10568 - DNA, 13 bp, Artificial Sequence
  Oligonucleotide for detection of SNP TSC0002661
taatacctctaaa

SEQ ID NO: 10569 - DNA, 13 bp, Artificial Sequence
  Oligonucleotide for detection of SNP TSC0002662
gagagagaaagaa

SEQ ID NO: 10570 - DNA, 13 bp, Artificial Sequence
  Oligonucleotide for detection of SNP TSC0002662
ttctttctctctc

SEQ ID NO: 10571 - DNA, 13 bp, Artificial Sequence
  Oligonucleotide for detection of SNP TSC0002662
gagagaaaaagaa

SEQ ID NO: 10572 - DNA, 13 bp, Artificial Sequence
  Oligonucleotide for detection of SNP TSC0002662
ttctttttctctc

SEQ ID NO: 10573 - DNA, 13 bp, Artificial Sequence
  Oligonucleotide for detection of SNP TSC0002663
tttagaggattty

SEQ ID NO: 10574 - DNA, 13 bp, Artificial Sequence
  Oligonucleotide for detection of SNP TSC0002663
raaatcctctaaa

SEQ ID NO: 10575 - DNA, 13 bp, Artificial Sequence
  Oligonucleotide for detection of SNP TSC0002663
tttagaagattty

SEQ ID NO: 10576 - DNA, 13 bp, Artificial Sequence
  Oligonucleotide for detection of SNP TSC0002663
raaatcttctaaa

SEQ ID NO: 10577 - DNA, 13 bp, Artificial Sequence
  Oligonucleotide for detection of SNP TSC0002664
atatatattttgt

SEQ ID NO: 10578 - DNA, 13 bp, Artificial Sequence
  Oligonucleotide for detection of SNP TSC0002664
acaaaatatatat

SEQ ID NO: 10579 - DNA, 13 bp, Artificial Sequence
  Oligonucleotide for detection of SNP TSC0002664
atatatgttttgt

SEQ ID NO: 10580 - DNA, 13 bp, Artificial Sequence
  Oligonucleotide for detection of SNP TSC0002664
acaaaacatatat

SEQ ID NO: 10581 - DNA, 13 bp, Artificial Sequence
  Oligonucleotide for detection of SNP TSC0002664
atatacgttttgt

SEQ ID NO: 10582 - DNA, 13 bp, Artificial Sequence
  Oligonucleotide for detection of SNP TSC0002664
acaaaacgtatat

SEQ ID NO: 10583 - DNA, 13 bp, Artificial Sequence
  Oligonucleotide for detection of SNP TSC0002664
ataggatgtatgt

SEQ ID NO: 10584 - DNA, 13 bp, Artificial Sequence
  Oligonucleotide for detection of SNP TSC0002664
acatacatcctat

SEQ ID NO: 10585 - DNA, 13 bp, Artificial Sequence
  Oligonucleotide for detection of SNP TSC0002664
ataggacgtatgt

SEQ ID NO: 10586 - DNA, 13 bp, Artificial Sequence
  Oligonucleotide for detection of SNP TSC0002664
acatacgtcctat

SEQ ID NO: 10587 - DNA, 13 bp, Artificial Sequence
  Oligonucleotide for detection of SNP TSC0002665
gtatatttgaatt

SEQ ID NO: 10588 - DNA, 13 bp, Artificial Sequence
  Oligonucleotide for detection of SNP TSC0002665
aattcaaatatac

SEQ ID NO: 10589 - DNA, 13 bp, Artificial Sequence
  Oligonucleotide for detection of SNP TSC0002665
gtatatgtgaatt

SEQ ID NO: 10590 - DNA, 13 bp, Artificial Sequence
  Oligonucleotide for detection of SNP TSC0002665
aattcacatatac

SEQ ID NO: 10591 - DNA, 13 bp, Artificial Sequence
  Oligonucleotide for detection of SNP TSC0002665
aatttagatgtay

SEQ ID NO: 10592 - DNA, 13 bp, Artificial Sequence
  Oligonucleotide for detection of SNP TSC0002665
rtacatctaaatt

SEQ ID NO: 10593 - DNA, 13 bp, Artificial Sequence
  Oligonucleotide for detection of SNP TSC0002665
aatttatatgtay

SEQ ID NO: 10594 - DNA, 13 bp, Artificial Sequence
  Oligonucleotide for detection of SNP TSC0002665
rtacatataaatt

SEQ ID NO: 10595 - DNA, 13 bp, Artificial Sequence
  Oligonucleotide for detection of SNP TSC0002666
ttgtataattttt

SEQ ID NO: 10596 - DNA, 13 bp, Artificial Sequence
  Oligonucleotide for detection of SNP TSC0002666
aaaaattatacaa

SEQ ID NO: 10597 - DNA, 13 bp, Artificial Sequence
  Oligonucleotide for detection of SNP TSC0002666
ttgtatgattttt

SEQ ID NO: 10598 - DNA, 13 bp, Artificial Sequence
  Oligonucleotide for detection of SNP TSC0002666
aaaaatcatacaa

SEQ ID NO: 10599 - DNA, 13 bp, Artificial Sequence
  Oligonucleotide for detection of SNP TSC0002667
ttaaattggttta

SEQ ID NO: 10600 - DNA, 13 bp, Artificial Sequence
  Oligonucleotide for detection of SNP TSC0002667
taaaccaatttaa

SEQ ID NO: 10601 - DNA, 13 bp, Artificial Sequence
  Oligonucleotide for detection of SNP TSC0002667
ttaaatcggttta

SEQ ID NO: 10602 - DNA, 13 bp, Artificial Sequence
  Oligonucleotide for detection of SNP TSC0002667
taaaccgatttaa

SEQ ID NO: 10603 - DNA, 13 bp, Artificial Sequence
  Oligonucleotide for detection of SNP TSC0002667
tggattaatttaa

SEQ ID NO: 10604 - DNA, 13 bp, Artificial Sequence
  Oligonucleotide for detection of SNP TSC0002667
ttaaattaatcca

SEQ ID NO: 10605 - DNA, 13 bp, Artificial Sequence
  Oligonucleotide for detection of SNP TSC0002667
tggattgatttaa

SEQ ID NO: 10606 - DNA, 13 bp, Artificial Sequence
  Oligonucleotide for detection of SNP TSC0002667
ttaaatcaatcca

SEQ ID NO: 10607 - DNA, 13 bp, Artificial Sequence
  Oligonucleotide for detection of SNP TSC0002667
tggatcgatttaa

SEQ ID NO: 10608 - DNA, 13 bp, Artificial Sequence
  Oligonucleotide for detection of SNP TSC0002667
ttaaatcgatcca

SEQ ID NO: 10609 - DNA, 13 bp, Artificial Sequence
  Oligonucleotide for detection of SNP TSC0002668
ttaaaattataat

SEQ ID NO: 10610 - DNA, 13 bp, Artificial Sequence
  Oligonucleotide for detection of SNP TSC0002668
attataattttaa

SEQ ID NO: 10611 - DNA, 13 bp, Artificial Sequence
  Oligonucleotide for detection of SNP TSC0002668
ttaaaagtataat

SEQ ID NO: 10612 - DNA, 13 bp, Artificial Sequence
  Oligonucleotide for detection of SNP TSC0002668
attatacttttaa

SEQ ID NO: 10613 - DNA, 13 bp, Artificial Sequence
  Oligonucleotide for detection of SNP TSC0002668
attatgattttaa

SEQ ID NO: 10614 - DNA, 13 bp, Artificial Sequence
  Oligonucleotide for detection of SNP TSC0002668
ttaaaatcataat

SEQ ID NO: 10615 - DNA, 13 bp, Artificial Sequence
  Oligonucleotide for detection of SNP TSC0002668
attatgtttttaa

SEQ ID NO: 10616 - DNA, 13 bp, Artificial Sequence
  Oligonucleotide for detection of SNP TSC0002668
ttaaaaacataat

SEQ ID NO: 10617 - DNA, 13 bp, Artificial Sequence
  Oligonucleotide for detection of SNP TSC0002669
tgtaagtttttay

SEQ ID NO: 10618 - DNA, 13 bp, Artificial Sequence
  Oligonucleotide for detection of SNP TSC0002669
rtaaaaacttaca

SEQ ID NO: 10619 - DNA, 13 bp, Artificial Sequence
  Oligonucleotide for detection of SNP TSC0002669
tgtaaggttttay

SEQ ID NO: 10620 - DNA, 13 bp, Artificial Sequence
  Oligonucleotide for detection of SNP TSC0002669
rtaaaaccttaca

SEQ ID NO: 10621 - DNA, 13 bp, Artificial Sequence
  Oligonucleotide for detection of SNP TSC0002669
gtgaaagtttgta

SEQ ID NO: 10622 - DNA, 13 bp, Artificial Sequence
  Oligonucleotide for detection of SNP TSC0002669
tacaaactttcac

SEQ ID NO: 10623 - DNA, 13 bp, Artificial Sequence
  Oligonucleotide for detection of SNP TSC0002669
gtgaaattttgta

SEQ ID NO: 10624 - DNA, 13 bp, Artificial Sequence
  Oligonucleotide for detection of SNP TSC0002669
tacaaaatttcac

SEQ ID NO: 10625 - DNA, 13 bp, Artificial Sequence
  Oligonucleotide for detection of SNP TSC0002670
taaattggtttag

SEQ ID NO: 10626 - DNA, 13 bp, Artificial Sequence
  Oligonucleotide for detection of SNP TSC0002670
ctaaaccaattta

SEQ ID NO: 10627 - DNA, 13 bp, Artificial Sequence
  Oligonucleotide for detection of SNP TSC0002670
taaattagtttag

SEQ ID NO: 10628 - DNA, 13 bp, Artificial Sequence
  Oligonucleotide for detection of SNP TSC0002670
ctaaactaattta

SEQ ID NO: 10629 - DNA, 13 bp, Artificial Sequence
  Oligonucleotide for detection of SNP TSC0002671
gtgggttttttat

SEQ ID NO: 10630 - DNA, 13 bp, Artificial Sequence
  Oligonucleotide for detection of SNP TSC0002671
ataaaaaacccac

SEQ ID NO: 10631 - DNA, 13 bp, Artificial Sequence
  Oligonucleotide for detection of SNP TSC0002671
gtgggtattttat

SEQ ID NO: 10632 - DNA, 13 bp, Artificial Sequence
  Oligonucleotide for detection of SNP TSC0002671
ataaaatacccac

SEQ ID NO: 10633 - DNA, 13 bp, Artificial Sequence
  Oligonucleotide for detection of SNP TSC0002671
gcgggttttttat

SEQ ID NO: 10634 - DNA, 13 bp, Artificial Sequence
  Oligonucleotide for detection of SNP TSC0002671
ataaaaaacccgc

SEQ ID NO: 10635 - DNA, 13 bp, Artificial Sequence
  Oligonucleotide for detection of SNP TSC0002671
gcgggtattttat

SEQ ID NO: 10636 - DNA, 13 bp, Artificial Sequence
  Oligonucleotide for detection of SNP TSC0002671
ataaaatacccgc

SEQ ID NO: 10637 - DNA, 13 bp, Artificial Sequence
  Oligonucleotide for detection of SNP TSC0002671
ataagaaatttgy

SEQ ID NO: 10638 - DNA, 13 bp, Artificial Sequence
  Oligonucleotide for detection of SNP TSC0002671
rcaaatttcttat

SEQ ID NO: 10639 - DNA, 13 bp, Artificial Sequence
  Oligonucleotide for detection of SNP TSC0002671
ataagatatttgy

SEQ ID NO: 10640 - DNA, 13 bp, Artificial Sequence
  Oligonucleotide for detection of SNP TSC0002671
rcaaatatcttat

SEQ ID NO: 10641 - DNA, 13 bp, Artificial Sequence
  Oligonucleotide for detection of SNP TSC0002671
ataagaaattcgy

SEQ ID NO: 10642 - DNA, 13 bp, Artificial Sequence
  Oligonucleotide for detection of SNP TSC0002671
rcgaatttcttat

SEQ ID NO: 10643 - DNA, 13 bp, Artificial Sequence
  Oligonucleotide for detection of SNP TSC0002671
ataagatattcgy

SEQ ID NO: 10644 - DNA, 13 bp, Artificial Sequence
  Oligonucleotide for detection of SNP TSC0002671
rcgaatatcttat

SEQ ID NO: 10645 - DNA, 13 bp, Artificial Sequence
  Oligonucleotide for detection of SNP TSC0002672
agtgaaagtttgy

SEQ ID NO: 10646 - DNA, 13 bp, Artificial Sequence
  Oligonucleotide for detection of SNP TSC0002672
rcaaactttcact

SEQ ID NO: 10647 - DNA, 13 bp, Artificial Sequence
  Oligonucleotide for detection of SNP TSC0002672
agtgaaggtttgy

SEQ ID NO: 10648 - DNA, 13 bp, Artificial Sequence
  Oligonucleotide for detection of SNP TSC0002672
rcaaaccttcact

SEQ ID NO: 10649 - DNA, 13 bp, Artificial Sequence
  Oligonucleotide for detection of SNP TSC0002673
gggttttttatgy

SEQ ID NO: 10650 - DNA, 13 bp, Artificial Sequence
  Oligonucleotide for detection of SNP TSC0002673
rcataaaaaaccc

SEQ ID NO: 10651 - DNA, 13 bp, Artificial Sequence
  Oligonucleotide for detection of SNP TSC0002673
gggtttgttatgy

SEQ ID NO: 10652 - DNA, 13 bp, Artificial Sequence
  Oligonucleotide for detection of SNP TSC0002673
rcataacaaaccc

SEQ ID NO: 10653 - DNA, 13 bp, Artificial Sequence
  Oligonucleotide for detection of SNP TSC0002673
gtataagaaatty

SEQ ID NO: 10654 - DNA, 13 bp, Artificial Sequence
  Oligonucleotide for detection of SNP TSC0002673
raatttcttatac

SEQ ID NO: 10655 - DNA, 13 bp, Artificial Sequence
  Oligonucleotide for detection of SNP TSC0002673
gtataataaatty

SEQ ID NO: 10656 - DNA, 13 bp, Artificial Sequence
  Oligonucleotide for detection of SNP TSC0002673
raatttattatac

SEQ ID NO: 10657 - DNA, 13 bp, Artificial Sequence
  Oligonucleotide for detection of SNP TSC0002674
taagttttagaga

SEQ ID NO: 10658 - DNA, 13 bp, Artificial Sequence
  Oligonucleotide for detection of SNP TSC0002674
tctctaaaactta

SEQ ID NO: 10659 - DNA, 13 bp, Artificial Sequence
  Oligonucleotide for detection of SNP TSC0002674
taagttgtagaga

SEQ ID NO: 10660 - DNA, 13 bp, Artificial Sequence
  Oligonucleotide for detection of SNP TSC0002674
tctctacaactta

SEQ ID NO: 10661 - DNA, 13 bp, Artificial Sequence
  Oligonucleotide for detection of SNP TSC0002674
tttttaaagtttg

SEQ ID NO: 10662 - DNA, 13 bp, Artificial Sequence
  Oligonucleotide for detection of SNP TSC0002674
caaactttaaaaa

SEQ ID NO: 10663 - DNA, 13 bp, Artificial Sequence
  Oligonucleotide for detection of SNP TSC0002674
tttttatagtttg

SEQ ID NO: 10664 - DNA, 13 bp, Artificial Sequence
  Oligonucleotide for detection of SNP TSC0002674
caaactataaaaa

SEQ ID NO: 10665 - DNA, 13 bp, Artificial Sequence
  Oligonucleotide for detection of SNP TSC0002675
gaaatagattttg

SEQ ID NO: 10666 - DNA, 13 bp, Artificial Sequence
  Oligonucleotide for detection of SNP TSC0002675
caaaatctatttc

SEQ ID NO: 10667 - DNA, 13 bp, Artificial Sequence
  Oligonucleotide for detection of SNP TSC0002675
gaaataaattttg

SEQ ID NO: 10668 - DNA, 13 bp, Artificial Sequence
  Oligonucleotide for detection of SNP TSC0002675
caaaatttatttc

SEQ ID NO: 10669 - DNA, 13 bp, Artificial Sequence
  Oligonucleotide for detection of SNP TSC0002676
taggatagttgty

SEQ ID NO: 10670 - DNA, 13 bp, Artificial Sequence
  Oligonucleotide for detection of SNP TSC0002676
racaactatccta

SEQ ID NO: 10671 - DNA, 13 bp, Artificial Sequence
  Oligonucleotide for detection of SNP TSC0002676
taggatggttgty

SEQ ID NO: 10672 - DNA, 13 bp, Artificial Sequence
  Oligonucleotide for detection of SNP TSC0002676
racaaccatccta

SEQ ID NO: 10673 - DNA, 13 bp, Artificial Sequence
  Oligonucleotide for detection of SNP TSC0002677
aggtagtggggtg

SEQ ID NO: 10674 - DNA, 13 bp, Artificial Sequence
  Oligonucleotide for detection of SNP TSC0002677
caccccactacct

SEQ ID NO: 10675 - DNA, 13 bp, Artificial Sequence
  Oligonucleotide for detection of SNP TSC0002677
aggtagtggggcg

SEQ ID NO: 10676 - DNA, 13 bp, Artificial Sequence
  Oligonucleotide for detection of SNP TSC0002677
cgccccactacct

SEQ ID NO: 10677 - DNA, 13 bp, Artificial Sequence
  Oligonucleotide for detection of SNP TSC0002677
aggtagcggggtg

SEQ ID NO: 10678 - DNA, 13 bp, Artificial Sequence
  Oligonucleotide for detection of SNP TSC0002677
caccccgctacct

SEQ ID NO: 10679 - DNA, 13 bp, Artificial Sequence
  Oligonucleotide for detection of SNP TSC0002677
aggtagcggggcg

SEQ ID NO: 10680 - DNA, 13 bp, Artificial Sequence
  Oligonucleotide for detection of SNP TSC0002677
cgccccgctacct

SEQ ID NO: 10681 - DNA, 13 bp, Artificial Sequence
  Oligonucleotide for detection of SNP TSC0002677
tgttttattgttt

SEQ ID NO: 10682 - DNA, 13 bp, Artificial Sequence
  Oligonucleotide for detection of SNP TSC0002677
aaacaataaaaca

SEQ ID NO: 10683 - DNA, 13 bp, Artificial Sequence
  Oligonucleotide for detection of SNP TSC0002677
tgttttgttgttt

SEQ ID NO: 10684 - DNA, 13 bp, Artificial Sequence
  Oligonucleotide for detection of SNP TSC0002677
aaacaacaaaaca

SEQ ID NO: 10685 - DNA, 13 bp, Artificial Sequence
  Oligonucleotide for detection of SNP TSC0002677
cgttttattgttt

SEQ ID NO: 10686 - DNA, 13 bp, Artificial Sequence
  Oligonucleotide for detection of SNP TSC0002677
aaacaataaaacg

SEQ ID NO: 10687 - DNA, 13 bp, Artificial Sequence
  Oligonucleotide for detection of SNP TSC0002677
cgttttgttgttt

SEQ ID NO: 10688 - DNA, 13 bp, Artificial Sequence
  Oligonucleotide for detection of SNP TSC0002677
aaacaacaaaacg

SEQ ID NO: 10689 - DNA, 13 bp, Artificial Sequence
  Oligonucleotide for detection of SNP TSC0002677
tgtttcgttgttt

SEQ ID NO: 10690 - DNA, 13 bp, Artificial Sequence
  Oligonucleotide for detection of SNP TSC0002677
aaacaacgaaaca

SEQ ID NO: 10691 - DNA, 13 bp, Artificial Sequence
  Oligonucleotide for detection of SNP TSC0002677
cgtttcgttgttt

SEQ ID NO: 10692 - DNA, 13 bp, Artificial Sequence
  Oligonucleotide for detection of SNP TSC0002677
aaacaacgaaacg

SEQ ID NO: 10693 - DNA, 13 bp, Artificial Sequence
  Oligonucleotide for detection of SNP TSC0002679
tgtaagttttatt

SEQ ID NO: 10694 - DNA, 13 bp, Artificial Sequence
  Oligonucleotide for detection of SNP TSC0002679
aataaaacttaca

SEQ ID NO: 10695 - DNA, 13 bp, Artificial Sequence
  Oligonucleotide for detection of SNP TSC0002679
tgtaaggtttatt

SEQ ID NO: 10696 - DNA, 13 bp, Artificial Sequence
  Oligonucleotide for detection of SNP TSC0002679
aataaaccttaca

SEQ ID NO: 10697 - DNA, 13 bp, Artificial Sequence
  Oligonucleotide for detection of SNP TSC0002679
aatgaagtttgta

SEQ ID NO: 10698 - DNA, 13 bp, Artificial Sequence
  Oligonucleotide for detection of SNP TSC0002679
tacaaacttcatt

SEQ ID NO: 10699 - DNA, 13 bp, Artificial Sequence
  Oligonucleotide for detection of SNP TSC0002679
aatgaattttgta

SEQ ID NO: 10700 - DNA, 13 bp, Artificial Sequence
  Oligonucleotide for detection of SNP TSC0002679
tacaaaattcatt

SEQ ID NO: 10701 - DNA, 13 bp, Artificial Sequence
  Oligonucleotide for detection of SNP TSC0002680
gatatttgtttty

SEQ ID NO: 10702 - DNA, 13 bp, Artificial Sequence
  Oligonucleotide for detection of SNP TSC0002680
raaaacaaatatc

SEQ ID NO: 10703 - DNA, 13 bp, Artificial Sequence
  Oligonucleotide for detection of SNP TSC0002680
gatattcgtttty

SEQ ID NO: 10704 - DNA, 13 bp, Artificial Sequence
  Oligonucleotide for detection of SNP TSC0002680
raaaacgaatatc

SEQ ID NO: 10705 - DNA, 13 bp, Artificial Sequence
  Oligonucleotide for detection of SNP TSC0002680
gagggtgagtgty

SEQ ID NO: 10706 - DNA, 13 bp, Artificial Sequence
  Oligonucleotide for detection of SNP TSC0002680
racactcaccctc

SEQ ID NO: 10707 - DNA, 13 bp, Artificial Sequence
  Oligonucleotide for detection of SNP TSC0002680
gagggtaagtgty

SEQ ID NO: 10708 - DNA, 13 bp, Artificial Sequence
  Oligonucleotide for detection of SNP TSC0002680
racacttaccctc

SEQ ID NO: 10709 - DNA, 13 bp, Artificial Sequence
  Oligonucleotide for detection of SNP TSC0002680
gagggcgagtgty

SEQ ID NO: 10710 - DNA, 13 bp, Artificial Sequence
  Oligonucleotide for detection of SNP TSC0002680
racactcgccctc

SEQ ID NO: 10711 - DNA, 13 bp, Artificial Sequence
  Oligonucleotide for detection of SNP TSC0002681
gtttattaaatty

SEQ ID NO: 10712 - DNA, 13 bp, Artificial Sequence
  Oligonucleotide for detection of SNP TSC0002681
raatttaataaac

SEQ ID NO: 10713 - DNA, 13 bp, Artificial Sequence
  Oligonucleotide for detection of SNP TSC0002681
gtttataaaatty

SEQ ID NO: 10714 - DNA, 13 bp, Artificial Sequence
  Oligonucleotide for detection of SNP TSC0002681
raattttataaac

SEQ ID NO: 10715 - DNA, 13 bp, Artificial Sequence
  Oligonucleotide for detection of SNP TSC0002681
gaatttaataagy

SEQ ID NO: 10716 - DNA, 13 bp, Artificial Sequence
  Oligonucleotide for detection of SNP TSC0002681
rcttattaaattc

SEQ ID NO: 10717 - DNA, 13 bp, Artificial Sequence
  Oligonucleotide for detection of SNP TSC0002681
gaattttataagy

SEQ ID NO: 10718 - DNA, 13 bp, Artificial Sequence
  Oligonucleotide for detection of SNP TSC0002681
rcttataaaattc

SEQ ID NO: 10719 - DNA, 13 bp, Artificial Sequence
  Oligonucleotide for detection of SNP TSC0002682
ggtattggtatga

SEQ ID NO: 10720 - DNA, 13 bp, Artificial Sequence
  Oligonucleotide for detection of SNP TSC0002682
tcataccaatacc

SEQ ID NO: 10721 - DNA, 13 bp, Artificial Sequence
  Oligonucleotide for detection of SNP TSC0002682
ggtattagtatga

SEQ ID NO: 10722 - DNA, 13 bp, Artificial Sequence
  Oligonucleotide for detection of SNP TSC0002682
tcatactaatacc

SEQ ID NO: 10723 - DNA, 13 bp, Artificial Sequence
  Oligonucleotide for detection of SNP TSC0002683
ataaagaagaaat

SEQ ID NO: 10724 - DNA, 13 bp, Artificial Sequence
  Oligonucleotide for detection of SNP TSC0002683
atttcttctttat

SEQ ID NO: 10725 - DNA, 13 bp, Artificial Sequence
  Oligonucleotide for detection of SNP TSC0002683
ataaaggagaaat

SEQ ID NO: 10726 - DNA, 13 bp, Artificial Sequence
  Oligonucleotide for detection of SNP TSC0002683
atttctcctttat

SEQ ID NO: 10727 - DNA, 13 bp, Artificial Sequence
  Oligonucleotide for detection of SNP TSC0002684
gtttttaaagttt

SEQ ID NO: 10728 - DNA, 13 bp, Artificial Sequence
  Oligonucleotide for detection of SNP TSC0002684
aaactttaaaaac

SEQ ID NO: 10729 - DNA, 13 bp, Artificial Sequence
  Oligonucleotide for detection of SNP TSC0002684
gtttttgaagttt

SEQ ID NO: 10730 - DNA, 13 bp, Artificial Sequence
  Oligonucleotide for detection of SNP TSC0002684
aaacttcaaaaac

SEQ ID NO: 10731 - DNA, 13 bp, Artificial Sequence
  Oligonucleotide for detection of SNP TSC0002685
agttttagagaty

SEQ ID NO: 10732 - DNA, 13 bp, Artificial Sequence
  Oligonucleotide for detection of SNP TSC0002685
ratctctaaaact

SEQ ID NO: 10733 - DNA, 13 bp, Artificial Sequence
  Oligonucleotide for detection of SNP TSC0002685
agtttttgagaty

SEQ ID NO: 10734 - DNA, 13 bp, Artificial Sequence
  Oligonucleotide for detection of SNP TSC0002685
ratctcaaaaact

SEQ ID NO: 10735 - DNA, 13 bp, Artificial Sequence
  Oligonucleotide for detection of SNP TSC0002685
ggtttttaaagtt

SEQ ID NO: 10736 - DNA, 13 bp, Artificial Sequence
  Oligonucleotide for detection of SNP TSC0002685
aactttaaaaacc

SEQ ID NO: 10737 - DNA, 13 bp, Artificial Sequence
  Oligonucleotide for detection of SNP TSC0002685
ggttttaaaagtt

SEQ ID NO: 10738 - DNA, 13 bp, Artificial Sequence
  Oligonucleotide for detection of SNP TSC0002685
aacttttaaaacc

SEQ ID NO: 10739 - DNA, 13 bp, Artificial Sequence
  Oligonucleotide for detection of SNP TSC0002686
gtaaatgttttty

SEQ ID NO: 10740 - DNA, 13 bp, Artificial Sequence
  Oligonucleotide for detection of SNP TSC0002686
raaaaacatttac

SEQ ID NO: 10741 - DNA, 13 bp, Artificial Sequence
  Oligonucleotide for detection of SNP TSC0002686
gtaaatattttty

SEQ ID NO: 10742 - DNA, 13 bp, Artificial Sequence
  Oligonucleotide for detection of SNP TSC0002686
raaaaatatttac

SEQ ID NO: 10743 - DNA, 13 bp, Artificial Sequence
  Oligonucleotide for detection of SNP TSC0002687
aaatgatgttggy

SEQ ID NO: 10744 - DNA, 13 bp, Artificial Sequence
  Oligonucleotide for detection of SNP TSC0002687
rccaacatcattt

SEQ ID NO: 10745 - DNA, 13 bp, Artificial Sequence
  Oligonucleotide for detection of SNP TSC0002687
aaatgacgttggy

SEQ ID NO: 10746 - DNA, 13 bp, Artificial Sequence
  Oligonucleotide for detection of SNP TSC0002687
rccaacgtcattt

SEQ ID NO: 10747 - DNA, 13 bp, Artificial Sequence
  Oligonucleotide for detection of SNP TSC0002687
gttagtgttattt

SEQ ID NO: 10748 - DNA, 13 bp, Artificial Sequence
  Oligonucleotide for detection of SNP TSC0002687
aaataacactaac

SEQ ID NO: 10749 - DNA, 13 bp, Artificial Sequence
  Oligonucleotide for detection of SNP TSC0002687
gttagtattattt

SEQ ID NO: 10750 - DNA, 13 bp, Artificial Sequence
  Oligonucleotide for detection of SNP TSC0002687
aaataatactaac

SEQ ID NO: 10751 - DNA, 13 bp, Artificial Sequence
  Oligonucleotide for detection of SNP TSC0002687
gttagcgttattt

SEQ ID NO: 10752 - DNA, 13 bp, Artificial Sequence
  Oligonucleotide for detection of SNP TSC0002687
aaataacgctaac

SEQ ID NO: 10753 - DNA, 13 bp, Artificial Sequence
  Oligonucleotide for detection of SNP TSC0002688
tgtaagttttaga

SEQ ID NO: 10754 - DNA, 13 bp, Artificial Sequence
  Oligonucleotide for detection of SNP TSC0002688
tctaaaacttaca

SEQ ID NO: 10755 - DNA, 13 bp, Artificial Sequence
  Oligonucleotide for detection of SNP TSC0002688
tgtaaggtttaga

SEQ ID NO: 10756 - DNA, 13 bp, Artificial Sequence
  Oligonucleotide for detection of SNP TSC0002688
tctaaaccttaca

SEQ ID NO: 10757 - DNA, 13 bp, Artificial Sequence
  Oligonucleotide for detection of SNP TSC0002689
tgtaagtttgtta

SEQ ID NO: 10758 - DNA, 13 bp, Artificial Sequence
  Oligonucleotide for detection of SNP TSC0002689
taacaaacttaca

SEQ ID NO: 10759 - DNA, 13 bp, Artificial Sequence
  Oligonucleotide for detection of SNP TSC0002689
tgtaaggttgtta

SEQ ID NO: 10760 - DNA, 13 bp, Artificial Sequence
  Oligonucleotide for detection of SNP TSC0002689
taacaaccttaca

SEQ ID NO: 10761 - DNA, 13 bp, Artificial Sequence
  Oligonucleotide for detection of SNP TSC0002689
tggtaagtttgta

SEQ ID NO: 10762 - DNA, 13 bp, Artificial Sequence
  Oligonucleotide for detection of SNP TSC0002689
tacaaacttacca

SEQ ID NO: 10763 - DNA, 13 bp, Artificial Sequence
  Oligonucleotide for detection of SNP TSC0002689
tggtaattttgta

SEQ ID NO: 10764 - DNA, 13 bp, Artificial Sequence
  Oligonucleotide for detection of SNP TSC0002689
tacaaaattacca

SEQ ID NO: 10765 - DNA, 13 bp, Artificial Sequence
  Oligonucleotide for detection of SNP TSC0002690
ttttgaagtttgy

SEQ ID NO: 10766 - DNA, 13 bp, Artificial Sequence
  Oligonucleotide for detection of SNP TSC0002690
rcaaacttcaaaa

SEQ ID NO: 10767 - DNA, 13 bp, Artificial Sequence
  Oligonucleotide for detection of SNP TSC0002690
ttttgaggtttgy

SEQ ID NO: 10768 - DNA, 13 bp, Artificial Sequence
  Oligonucleotide for detection of SNP TSC0002690
rcaaacctcaaaa

SEQ ID NO: 10769 - DNA, 13 bp, Artificial Sequence
  Oligonucleotide for detection of SNP TSC0002691
ttggtaagtttgy

SEQ ID NO: 10770 - DNA, 13 bp, Artificial Sequence
  Oligonucleotide for detection of SNP TSC0002691
rcaaacttaccaa

SEQ ID NO: 10771 - DNA, 13 bp, Artificial Sequence
  Oligonucleotide for detection of SNP TSC0002691
ttggtaggtttgy

SEQ ID NO: 10772 - DNA, 13 bp, Artificial Sequence
  Oligonucleotide for detection of SNP TSC0002691
rcaaacctaccaa

SEQ ID NO: 10773 - DNA, 13 bp, Artificial Sequence
  Oligonucleotide for detection of SNP TSC0002692
taaggaaaaaatg

SEQ ID NO: 10774 - DNA, 13 bp, Artificial Sequence
  Oligonucleotide for detection of SNP TSC0002692
cattttttcctta

SEQ ID NO: 10775 - DNA, 13 bp, Artificial Sequence
  Oligonucleotide for detection of SNP TSC0002692
taaggagaaaatg

SEQ ID NO: 10776 - DNA, 13 bp, Artificial Sequence
  Oligonucleotide for detection of SNP TSC0002692
cattttctcctta

SEQ ID NO: 10777 - DNA, 13 bp, Artificial Sequence
  Oligonucleotide for detection of SNP TSC0002693
gagtaagattttg

SEQ ID NO: 10778 - DNA, 13 bp, Artificial Sequence
  Oligonucleotide for detection of SNP TSC0002693
caaaatcttactc

SEQ ID NO: 10779 - DNA, 13 bp, Artificial Sequence
  Oligonucleotide for detection of SNP TSC0002693
gagtaaaattttg

SEQ ID NO: 10780 - DNA, 13 bp, Artificial Sequence
  Oligonucleotide for detection of SNP TSC0002693
caaaattttactc

SEQ ID NO: 10781 - DNA, 13 bp, Artificial Sequence
  Oligonucleotide for detection of SNP TSC0002694
aattttgttttgt

SEQ ID NO: 10782 - DNA, 13 bp, Artificial Sequence
  Oligonucleotide for detection of SNP TSC0002694
acaaaacaaaatt

SEQ ID NO: 10783 - DNA, 13 bp, Artificial Sequence
  Oligonucleotide for detection of SNP TSC0002694
aatttttttttgt

SEQ ID NO: 10784 - DNA, 13 bp, Artificial Sequence
  Oligonucleotide for detection of SNP TSC0002694
acaaaaaaaaatt

SEQ ID NO: 10785 - DNA, 13 bp, Artificial Sequence
  Oligonucleotide for detection of SNP TSC0002694
atagagtaagatt

SEQ ID NO: 10786 - DNA, 13 bp, Artificial Sequence
  Oligonucleotide for detection of SNP TSC0002694
aatcttactctat

SEQ ID NO: 10787 - DNA, 13 bp, Artificial Sequence
  Oligonucleotide for detection of SNP TSC0002694
atagagaaagatt

SEQ ID NO: 10788 - DNA, 13 bp, Artificial Sequence
  Oligonucleotide for detection of SNP TSC0002694
aatctttctctat

SEQ ID NO: 10789 - DNA, 13 bp, Artificial Sequence
  Oligonucleotide for detection of SNP TSC0002695
aaatgaagtttgy

SEQ ID NO: 10790 - DNA, 13 bp, Artificial Sequence
  Oligonucleotide for detection of SNP TSC0002695
rcaaacttcattt

SEQ ID NO: 10791 - DNA, 13 bp, Artificial Sequence
  Oligonucleotide for detection of SNP TSC0002695
aaatgaggtttgy

SEQ ID NO: 10792 - DNA, 13 bp, Artificial Sequence
  Oligonucleotide for detection of SNP TSC0002695
rcaaacctcattt

SEQ ID NO: 10793 - DNA, 13 bp, Artificial Sequence
  Oligonucleotide for detection of SNP TSC0002696
gatagagtaagat

SEQ ID NO: 10794 - DNA, 13 bp, Artificial Sequence
  Oligonucleotide for detection of SNP TSC0002696
atcttactctatc

SEQ ID NO: 10795 - DNA, 13 bp, Artificial Sequence
  Oligonucleotide for detection of SNP TSC0002696
gatagaataagat

SEQ ID NO: 10796 - DNA, 13 bp, Artificial Sequence
  Oligonucleotide for detection of SNP TSC0002696
atcttattctatc

SEQ ID NO: 10797 - DNA, 13 bp, Artificial Sequence
  Oligonucleotide for detection of SNP TSC0002697
gaaagtggattta

SEQ ID NO: 10798 - DNA, 13 bp, Artificial Sequence
  Oligonucleotide for detection of SNP TSC0002697
taaatccactttc

SEQ ID NO: 10799 - DNA, 13 bp, Artificial Sequence
  Oligonucleotide for detection of SNP TSC0002697
gaaagtagattta

SEQ ID NO: 10800 - DNA, 13 bp, Artificial Sequence
  Oligonucleotide for detection of SNP TSC0002697
taaatctactttc

SEQ ID NO: 10801 - DNA, 13 bp, Artificial Sequence
  Oligonucleotide for detection of SNP TSC0002698
gtgatagagtaag

SEQ ID NO: 10802 - DNA, 13 bp, Artificial Sequence
  Oligonucleotide for detection of SNP TSC0002698
cttactctatcac

SEQ ID NO: 10803 - DNA, 13 bp, Artificial Sequence
  Oligonucleotide for detection of SNP TSC0002698
gtgataaagtaag

SEQ ID NO: 10804 - DNA, 13 bp, Artificial Sequence
  Oligonucleotide for detection of SNP TSC0002698
cttactttatcac

SEQ ID NO: 10805 - DNA, 13 bp, Artificial Sequence
  Oligonucleotide for detection of SNP TSC0002698
gcgatagagtaag

SEQ ID NO: 10806 - DNA, 13 bp, Artificial Sequence
  Oligonucleotide for detection of SNP TSC0002698
cttactctatcgc

SEQ ID NO: 10807 - DNA, 13 bp, Artificial Sequence
  Oligonucleotide for detection of SNP TSC0002698
gcgataaagtaag

SEQ ID NO: 10808 - DNA, 13 bp, Artificial Sequence
  Oligonucleotide for detection of SNP TSC0002698
cttactttatcgc

SEQ ID NO: 10809 - DNA, 13 bp, Artificial Sequence
  Oligonucleotide for detection of SNP TSC0002699
ttagttgttgtaa

SEQ ID NO: 10810 - DNA, 13 bp, Artificial Sequence
  Oligonucleotide for detection of SNP TSC0002699
ttacaacaactaa

SEQ ID NO: 10811 - DNA, 13 bp, Artificial Sequence
  Oligonucleotide for detection of SNP TSC0002699
ttagtttttgtaa

SEQ ID NO: 10812 - DNA, 13 bp, Artificial Sequence
  Oligonucleotide for detection of SNP TSC0002699
ttacaaaaactaa

SEQ ID NO: 10813 - DNA, 13 bp, Artificial Sequence
  Oligonucleotide for detection of SNP TSC0002699
ttagtcgttgtaa

SEQ ID NO: 10814 - DNA, 13 bp, Artificial Sequence
  Oligonucleotide for detection of SNP TSC0002699
ttacaacgactaa

SEQ ID NO: 10815 - DNA, 13 bp, Artificial Sequence
  Oligonucleotide for detection of SNP TSC0002699
ttgtagtggttgg

SEQ ID NO: 10816 - DNA, 13 bp, Artificial Sequence
  Oligonucleotide for detection of SNP TSC0002699
ccaaccactacaa

SEQ ID NO: 10817 - DNA, 13 bp, Artificial Sequence
  Oligonucleotide for detection of SNP TSC0002699
ttgtaggggttgg

SEQ ID NO: 10818 - DNA, 13 bp, Artificial Sequence
  Oligonucleotide for detection of SNP TSC0002699
ccaacccctacaa

SEQ ID NO: 10819 - DNA, 13 bp, Artificial Sequence
  Oligonucleotide for detection of SNP TSC0002699
ttgtagcggttgg

SEQ ID NO: 10820 - DNA, 13 bp, Artificial Sequence
  Oligonucleotide for detection of SNP TSC0002699
ccaaccgctacaa

SEQ ID NO: 10821 - DNA, 13 bp, Artificial Sequence
  Oligonucleotide for detection of SNP TSC0002700
gataattataagg

SEQ ID NO: 10822 - DNA, 13 bp, Artificial Sequence
  Oligonucleotide for detection of SNP TSC0002700
ccttataattatc

SEQ ID NO: 10823 - DNA, 13 bp, Artificial Sequence
  Oligonucleotide for detection of SNP TSC0002700
gataataataagg

SEQ ID NO: 10824 - DNA, 13 bp, Artificial Sequence
  Oligonucleotide for detection of SNP TSC0002700
ccttattattatc

SEQ ID NO: 10825 - DNA, 13 bp, Artificial Sequence
  Oligonucleotide for detection of SNP TSC0002700
ttttgtgattgty

SEQ ID NO: 10826 - DNA, 13 bp, Artificial Sequence
  Oligonucleotide for detection of SNP TSC0002700
racaatcacaaaa

SEQ ID NO: 10827 - DNA, 13 bp, Artificial Sequence
  Oligonucleotide for detection of SNP TSC0002700
ttttgttattgty

SEQ ID NO: 10828 - DNA, 13 bp, Artificial Sequence
  Oligonucleotide for detection of SNP TSC0002700
racaataacaaaa

SEQ ID NO: 10829 - DNA, 13 bp, Artificial Sequence
  Oligonucleotide for detection of SNP TSC0002701
tttttaggtgtty

SEQ ID NO: 10830 - DNA, 13 bp, Artificial Sequence
  Oligonucleotide for detection of SNP TSC0002701
raacacctaaaaa

SEQ ID NO: 10831 - DNA, 13 bp, Artificial Sequence
  Oligonucleotide for detection of SNP TSC0002701
tttttaagtgtty

SEQ ID NO: 10832 - DNA, 13 bp, Artificial Sequence
  Oligonucleotide for detection of SNP TSC0002701
raacacttaaaaa

SEQ ID NO: 10833 - DNA, 13 bp, Artificial Sequence
  Oligonucleotide for detection of SNP TSC0002702
gggaggagaggtt

SEQ ID NO: 10834 - DNA, 13 bp, Artificial Sequence
  Oligonucleotide for detection of SNP TSC0002702
aacctctcctccc

SEQ ID NO: 10835 - DNA, 13 bp, Artificial Sequence
  Oligonucleotide for detection of SNP TSC0002702
gggaggtgaggtt

SEQ ID NO: 10836 - DNA, 13 bp, Artificial Sequence
  Oligonucleotide for detection of SNP TSC0002702
aacctcacctccc

SEQ ID NO: 10837 - DNA, 13 bp, Artificial Sequence
  Oligonucleotide for detection of SNP TSC0002702
gggaggcgaggtt

SEQ ID NO: 10838 - DNA, 13 bp, Artificial Sequence
  Oligonucleotide for detection of SNP TSC0002702
aacctcgcctccc

SEQ ID NO: 10839 - DNA, 13 bp, Artificial Sequence
  Oligonucleotide for detection of SNP TSC0002702
agtttttttttty

SEQ ID NO: 10840 - DNA, 13 bp, Artificial Sequence
  Oligonucleotide for detection of SNP TSC0002702
raaaaaaaaaact

SEQ ID NO: 10841 - DNA, 13 bp, Artificial Sequence
  Oligonucleotide for detection of SNP TSC0002702
agttttgttttty

SEQ ID NO: 10842 - DNA, 13 bp, Artificial Sequence
  Oligonucleotide for detection of SNP TSC0002702
raaaaacaaaact

SEQ ID NO: 10843 - DNA, 13 bp, Artificial Sequence
  Oligonucleotide for detection of SNP TSC0002702
agtttcgttttty

SEQ ID NO: 10844 - DNA, 13 bp, Artificial Sequence
  Oligonucleotide for detection of SNP TSC0002702
raaaaacgaaact

SEQ ID NO: 10845 - DNA, 13 bp, Artificial Sequence
  Oligonucleotide for detection of SNP TSC0002703
ttttaattttttt

SEQ ID NO: 10846 - DNA, 13 bp, Artificial Sequence
  Oligonucleotide for detection of SNP TSC0002703
aaaaaaattaaaa

SEQ ID NO: 10847 - DNA, 13 bp, Artificial Sequence
  Oligonucleotide for detection of SNP TSC0002703
aaaaaatttgaaa

SEQ ID NO: 10848 - DNA, 13 bp, Artificial Sequence
  Oligonucleotide for detection of SNP TSC0002703
tttcaaatttttt

SEQ ID NO: 10849 - DNA, 13 bp, Artificial Sequence
  Oligonucleotide for detection of SNP TSC0002703
aaaaaaattgaaa

SEQ ID NO: 10850 - DNA, 13 bp, Artificial Sequence
  Oligonucleotide for detection of SNP TSC0002703
tttcaattttttt

SEQ ID NO: 10851 - DNA, 13 bp, Artificial Sequence
  Oligonucleotide for detection of SNP TSC0002704
ggaggagaggttg

SEQ ID NO: 10852 - DNA, 13 bp, Artificial Sequence
  Oligonucleotide for detection of SNP TSC0002704
caacctctcctcc

SEQ ID NO: 10853 - DNA, 13 bp, Artificial Sequence
  Oligonucleotide for detection of SNP TSC0002704
ggaggaaaggttg

SEQ ID NO: 10854 - DNA, 13 bp, Artificial Sequence
  Oligonucleotide for detection of SNP TSC0002704
caacctttcctcc

SEQ ID NO: 10855 - DNA, 13 bp, Artificial Sequence
  Oligonucleotide for detection of SNP TSC0002705
ggttttattttat

SEQ ID NO: 10856 - DNA, 13 bp, Artificial Sequence
  Oligonucleotide for detection of SNP TSC0002705
ataaaataaaacc

SEQ ID NO: 10857 - DNA, 13 bp, Artificial Sequence
  Oligonucleotide for detection of SNP TSC0002705
ggttttgttttat

SEQ ID NO: 10858 - DNA, 13 bp, Artificial Sequence
  Oligonucleotide for detection of SNP TSC0002705
ataaaacaaaacc

SEQ ID NO: 10859 - DNA, 13 bp, Artificial Sequence
  Oligonucleotide for detection of SNP TSC0002705
ggtttcgttttat

SEQ ID NO: 10860 - DNA, 13 bp, Artificial Sequence
  Oligonucleotide for detection of SNP TSC0002705
ataaaacgaaacc

SEQ ID NO: 10861 - DNA, 13 bp, Artificial Sequence
  Oligonucleotide for detection of SNP TSC0002705
atgggatgagaty

SEQ ID NO: 10862 - DNA, 13 bp, Artificial Sequence
  Oligonucleotide for detection of SNP TSC0002705
ratctcatcccat

SEQ ID NO: 10863 - DNA, 13 bp, Artificial Sequence
  Oligonucleotide for detection of SNP TSC0002705
atgggacgagaty

SEQ ID NO: 10864 - DNA, 13 bp, Artificial Sequence
  Oligonucleotide for detection of SNP TSC0002705
ratctcgtcccat

SEQ ID NO: 10865 - DNA, 13 bp, Artificial Sequence
  Oligonucleotide for detection of SNP TSC0002706
gtgggatttatay

SEQ ID NO: 10866 - DNA, 13 bp, Artificial Sequence
  Oligonucleotide for detection of SNP TSC0002706
rtataaatcccac

SEQ ID NO: 10867 - DNA, 13 bp, Artificial Sequence
  Oligonucleotide for detection of SNP TSC0002706
gtgggaattatay

SEQ ID NO: 10868 - DNA, 13 bp, Artificial Sequence
  Oligonucleotide for detection of SNP TSC0002706
rtataattcccac

SEQ ID NO: 10869 - DNA, 13 bp, Artificial Sequence
  Oligonucleotide for detection of SNP TSC0002706
gtgtgagttttay

SEQ ID NO: 10870 - DNA, 13 bp, Artificial Sequence
  Oligonucleotide for detection of SNP TSC0002706
rtaaaactcacac

SEQ ID NO: 10871 - DNA, 13 bp, Artificial Sequence
  Oligonucleotide for detection of SNP TSC0002706
gtgtgatttttay

SEQ ID NO: 10872 - DNA, 13 bp, Artificial Sequence
  Oligonucleotide for detection of SNP TSC0002706
rtaaaaatcacac

SEQ ID NO: 10873 - DNA, 13 bp, Artificial Sequence
  Oligonucleotide for detection of SNP TSC0002707
gagagagagagag

SEQ ID NO: 10874 - DNA, 13 bp, Artificial Sequence
  Oligonucleotide for detection of SNP TSC0002707
ctctctctctctc

SEQ ID NO: 10875 - DNA, 13 bp, Artificial Sequence
  Oligonucleotide for detection of SNP TSC0002707
gagagaaagagag

SEQ ID NO: 10876 - DNA, 13 bp, Artificial Sequence
  Oligonucleotide for detection of SNP TSC0002707
ctctctttctctc

SEQ ID NO: 10877 - DNA, 13 bp, Artificial Sequence
  Oligonucleotide for detection of SNP TSC0002708
tttgttatttttg

SEQ ID NO: 10878 - DNA, 13 bp, Artificial Sequence
  Oligonucleotide for detection of SNP TSC0002708
caaaaataacaaa

SEQ ID NO: 10879 - DNA, 13 bp, Artificial Sequence
  Oligonucleotide for detection of SNP TSC0002708
tttgttgtttttg

SEQ ID NO: 10880 - DNA, 13 bp, Artificial Sequence
  Oligonucleotide for detection of SNP TSC0002708
caaaaacaacaaa

SEQ ID NO: 10881 - DNA, 13 bp, Artificial Sequence
  Oligonucleotide for detection of SNP TSC0002709
ggaaagtatgaga

SEQ ID NO: 10882 - DNA, 13 bp, Artificial Sequence
  Oligonucleotide for detection of SNP TSC0002709
tctcatactttcc

SEQ ID NO: 10883 - DNA, 13 bp, Artificial Sequence
  Oligonucleotide for detection of SNP TSC0002709
ggaaagaatgaga

SEQ ID NO: 10884 - DNA, 13 bp, Artificial Sequence
  Oligonucleotide for detection of SNP TSC0002709
tctcattctttcc

SEQ ID NO: 10885 - DNA, 13 bp, Artificial Sequence
  Oligonucleotide for detection of SNP TSC0002709
ttttattttttty

SEQ ID NO: 10886 - DNA, 13 bp, Artificial Sequence
  Oligonucleotide for detection of SNP TSC0002709
raaaaaaataaaa

SEQ ID NO: 10887 - DNA, 13 bp, Artificial Sequence
  Oligonucleotide for detection of SNP TSC0002710
attatatggttat

SEQ ID NO: 10888 - DNA, 13 bp, Artificial Sequence
  Oligonucleotide for detection of SNP TSC0002710
ataaccatataat

SEQ ID NO: 10889 - DNA, 13 bp, Artificial Sequence
  Oligonucleotide for detection of SNP TSC0002710
attatacggttat

SEQ ID NO: 10890 - DNA, 13 bp, Artificial Sequence
  Oligonucleotide for detection of SNP TSC0002710
ataaccgtataat

SEQ ID NO: 10891 - DNA, 13 bp, Artificial Sequence
  Oligonucleotide for detection of SNP TSC0002710
atagttatatagt

SEQ ID NO: 10892 - DNA, 13 bp, Artificial Sequence
  Oligonucleotide for detection of SNP TSC0002710
actatataactat

SEQ ID NO: 10893 - DNA, 13 bp, Artificial Sequence
  Oligonucleotide for detection of SNP TSC0002710
atagttgtatagt

SEQ ID NO: 10894 - DNA, 13 bp, Artificial Sequence
  Oligonucleotide for detection of SNP TSC0002710
actatacaactat

SEQ ID NO: 10895 - DNA, 13 bp, Artificial Sequence
  Oligonucleotide for detection of SNP TSC0002710
atagtcgtatagt

SEQ ID NO: 10896 - DNA, 13 bp, Artificial Sequence
  Oligonucleotide for detection of SNP TSC0002710
actatacgactat

SEQ ID NO: 10897 - DNA, 13 bp, Artificial Sequence
  Oligonucleotide for detection of SNP TSC0002711
aatgagggtatga

SEQ ID NO: 10898 - DNA, 13 bp, Artificial Sequence
  Oligonucleotide for detection of SNP TSC0002711
tcataccctcatt

SEQ ID NO: 10899 - DNA, 13 bp, Artificial Sequence
  Oligonucleotide for detection of SNP TSC0002711
aatgagtgtatga

SEQ ID NO: 10900 - DNA, 13 bp, Artificial Sequence
  Oligonucleotide for detection of SNP TSC0002711
tcatacactcatt

SEQ ID NO: 10901 - DNA, 13 bp, Artificial Sequence
  Oligonucleotide for detection of SNP TSC0002711
aacgagggtatga

SEQ ID NO: 10902 - DNA, 13 bp, Artificial Sequence
  Oligonucleotide for detection of SNP TSC0002711
tcataccctcgtt

SEQ ID NO: 10903 - DNA, 13 bp, Artificial Sequence
  Oligonucleotide for detection of SNP TSC0002711
aacgagtgtatga

SEQ ID NO: 10904 - DNA, 13 bp, Artificial Sequence
  Oligonucleotide for detection of SNP TSC0002711
tcatacactcgtt

SEQ ID NO: 10905 - DNA, 13 bp, Artificial Sequence
  Oligonucleotide for detection of SNP TSC0002711
ttatatttttgtt

SEQ ID NO: 10906 - DNA, 13 bp, Artificial Sequence
  Oligonucleotide for detection of SNP TSC0002711
aacaaaaatataa

SEQ ID NO: 10907 - DNA, 13 bp, Artificial Sequence
  Oligonucleotide for detection of SNP TSC0002711
ttatatatttgtt

SEQ ID NO: 10908 - DNA, 13 bp, Artificial Sequence
  Oligonucleotide for detection of SNP TSC0002711
aacaaatatataa

SEQ ID NO: 10909 - DNA, 13 bp, Artificial Sequence
  Oligonucleotide for detection of SNP TSC0002711
ttatattttcgtt

SEQ ID NO: 10910 - DNA, 13 bp, Artificial Sequence
  Oligonucleotide for detection of SNP TSC0002711
aacgaaaatataa

SEQ ID NO: 10911 - DNA, 13 bp, Artificial Sequence
  Oligonucleotide for detection of SNP TSC0002711
ttatatattcgtt

SEQ ID NO: 10912 - DNA, 13 bp, Artificial Sequence
  Oligonucleotide for detection of SNP TSC0002711
aacgaatatataa

SEQ ID NO: 10913 - DNA, 13 bp, Artificial Sequence
  Oligonucleotide for detection of SNP TSC0002712
tagggtttgagtt

SEQ ID NO: 10914 - DNA, 13 bp, Artificial Sequence
  Oligonucleotide for detection of SNP TSC0002712
aactcaaacccta

SEQ ID NO: 10915 - DNA, 13 bp, Artificial Sequence
  Oligonucleotide for detection of SNP TSC0002712
tagggtgtgagtt

SEQ ID NO: 10916 - DNA, 13 bp, Artificial Sequence
  Oligonucleotide for detection of SNP TSC0002712
aactcacacccta

SEQ ID NO: 10917 - DNA, 13 bp, Artificial Sequence
  Oligonucleotide for detection of SNP TSC0002712
tagggcgtgagtt

SEQ ID NO: 10918 - DNA, 13 bp, Artificial Sequence
  Oligonucleotide for detection of SNP TSC0002712
aactcacgcccta

SEQ ID NO: 10919 - DNA, 13 bp, Artificial Sequence
  Oligonucleotide for detection of SNP TSC0002712
agtttaagttttg

SEQ ID NO: 10920 - DNA, 13 bp, Artificial Sequence
  Oligonucleotide for detection of SNP TSC0002712
caaaacttaaact

SEQ ID NO: 10921 - DNA, 13 bp, Artificial Sequence
  Oligonucleotide for detection of SNP TSC0002712
agtttatgttttg

SEQ ID NO: 10922 - DNA, 13 bp, Artificial Sequence
  Oligonucleotide for detection of SNP TSC0002712
caaaacataaact

SEQ ID NO: 10923 - DNA, 13 bp, Artificial Sequence
  Oligonucleotide for detection of SNP TSC0002712
agtttacgttttg

SEQ ID NO: 10924 - DNA, 13 bp, Artificial Sequence
  Oligonucleotide for detection of SNP TSC0002712
caaaacgtaaact

SEQ ID NO: 10925 - DNA, 13 bp, Artificial Sequence
  Oligonucleotide for detection of SNP TSC0002713
tatgtaagtttat

SEQ ID NO: 10926 - DNA, 13 bp, Artificial Sequence
  Oligonucleotide for detection of SNP TSC0002713
ataaacttacata

SEQ ID NO: 10927 - DNA, 13 bp, Artificial Sequence
  Oligonucleotide for detection of SNP TSC0002713
tatgtaggtttat

SEQ ID NO: 10928 - DNA, 13 bp, Artificial Sequence
  Oligonucleotide for detection of SNP TSC0002713
ataaacctacata

SEQ ID NO: 10929 - DNA, 13 bp, Artificial Sequence
  Oligonucleotide for detection of SNP TSC0002714
gggtttgagttta

SEQ ID NO: 10930 - DNA, 13 bp, Artificial Sequence
  Oligonucleotide for detection of SNP TSC0002714
taaactcaaaccc

SEQ ID NO: 10931 - DNA, 13 bp, Artificial Sequence
  Oligonucleotide for detection of SNP TSC0002714
gggtttaagttta

SEQ ID NO: 10932 - DNA, 13 bp, Artificial Sequence
  Oligonucleotide for detection of SNP TSC0002714
taaacttaaaccc

SEQ ID NO: 10933 - DNA, 13 bp, Artificial Sequence
  Oligonucleotide for detection of SNP TSC0002715
atgtaagtttata

SEQ ID NO: 10934 - DNA, 13 bp, Artificial Sequence
  Oligonucleotide for detection of SNP TSC0002715
tataaacttacat

SEQ ID NO: 10935 - DNA, 13 bp, Artificial Sequence
  Oligonucleotide for detection of SNP TSC0002715
atgtaattttata

SEQ ID NO: 10936 - DNA, 13 bp, Artificial Sequence
  Oligonucleotide for detection of SNP TSC0002715
tataaaattacat

SEQ ID NO: 10937 - DNA, 13 bp, Artificial Sequence
  Oligonucleotide for detection of SNP TSC0002715
tataagtttgtat

SEQ ID NO: 10938 - DNA, 13 bp, Artificial Sequence
  Oligonucleotide for detection of SNP TSC0002715
atacaaacttata

SEQ ID NO: 10939 - DNA, 13 bp, Artificial Sequence
  Oligonucleotide for detection of SNP TSC0002715
tataaggttgtat

SEQ ID NO: 10940 - DNA, 13 bp, Artificial Sequence
  Oligonucleotide for detection of SNP TSC0002715
atacaaccttata

SEQ ID NO: 10941 - DNA, 13 bp, Artificial Sequence
  Oligonucleotide for detection of SNP TSC0002716
atttgagtttaat

SEQ ID NO: 10942 - DNA, 13 bp, Artificial Sequence
  Oligonucleotide for detection of SNP TSC0002716
attaaactcaaat

SEQ ID NO: 10943 - DNA, 13 bp, Artificial Sequence
  Oligonucleotide for detection of SNP TSC0002716
atttgattttaat

SEQ ID NO: 10944 - DNA, 13 bp, Artificial Sequence
  Oligonucleotide for detection of SNP TSC0002716
attaaaatcaaat

SEQ ID NO: 10945 - DNA, 13 bp, Artificial Sequence
  Oligonucleotide for detection of SNP TSC0002716
attgaatttaggt

SEQ ID NO: 10946 - DNA, 13 bp, Artificial Sequence
  Oligonucleotide for detection of SNP TSC0002716
acctaaattcaat

SEQ ID NO: 10947 - DNA, 13 bp, Artificial Sequence
  Oligonucleotide for detection of SNP TSC0002716
attgaagttaggt

SEQ ID NO: 10948 - DNA, 13 bp, Artificial Sequence
  Oligonucleotide for detection of SNP TSC0002716
acctaacttcaat

SEQ ID NO: 10949 - DNA, 13 bp, Artificial Sequence
  Oligonucleotide for detection of SNP TSC0002717
attattggatgga

SEQ ID NO: 10950 - DNA, 13 bp, Artificial Sequence
  Oligonucleotide for detection of SNP TSC0002717
tccatccaataat

SEQ ID NO: 10951 - DNA, 13 bp, Artificial Sequence
  Oligonucleotide for detection of SNP TSC0002717
attattagatgga

SEQ ID NO: 10952 - DNA, 13 bp, Artificial Sequence
  Oligonucleotide for detection of SNP TSC0002717
tccatctaataat

SEQ ID NO: 10953 - DNA, 13 bp, Artificial Sequence
  Oligonucleotide for detection of SNP TSC0002717
attatcggatgga

SEQ ID NO: 10954 - DNA, 13 bp, Artificial Sequence
  Oligonucleotide for detection of SNP TSC0002717
tccatccgataat

SEQ ID NO: 10955 - DNA, 13 bp, Artificial Sequence
  Oligonucleotide for detection of SNP TSC0002717
tttatttggtaat

SEQ ID NO: 10956 - DNA, 13 bp, Artificial Sequence
  Oligonucleotide for detection of SNP TSC0002717
attaccaaataaa

SEQ ID NO: 10957 - DNA, 13 bp, Artificial Sequence
  Oligonucleotide for detection of SNP TSC0002717
tttattcggtaat

SEQ ID NO: 10958 - DNA, 13 bp, Artificial Sequence
  Oligonucleotide for detection of SNP TSC0002717
attaccgaataaa

SEQ ID NO: 10959 - DNA, 13 bp, Artificial Sequence
  Oligonucleotide for detection of SNP TSC0002718
gtataagtttgta

SEQ ID NO: 10960 - DNA, 13 bp, Artificial Sequence
  Oligonucleotide for detection of SNP TSC0002718
tacaaacttatac

SEQ ID NO: 10961 - DNA, 13 bp, Artificial Sequence
  Oligonucleotide for detection of SNP TSC0002718
gtataaatttgta

SEQ ID NO: 10962 - DNA, 13 bp, Artificial Sequence
  Oligonucleotide for detection of SNP TSC0002718
tacaaatttatac

SEQ ID NO: 10963 - DNA, 13 bp, Artificial Sequence
  Oligonucleotide for detection of SNP TSC0002719
tattatttgatgg

SEQ ID NO: 10964 - DNA, 13 bp, Artificial Sequence
  Oligonucleotide for detection of SNP TSC0002719
ccatcaaataata

SEQ ID NO: 10965 - DNA, 13 bp, Artificial Sequence
  Oligonucleotide for detection of SNP TSC0002719
tattatgtgatgg

SEQ ID NO: 10966 - DNA, 13 bp, Artificial Sequence
  Oligonucleotide for detection of SNP TSC0002719
ccatcacataata

SEQ ID NO: 10967 - DNA, 13 bp, Artificial Sequence
  Oligonucleotide for detection of SNP TSC0002719
tattacgtgatgg

SEQ ID NO: 10968 - DNA, 13 bp, Artificial Sequence
  Oligonucleotide for detection of SNP TSC0002719
ccatcacgtaata

SEQ ID NO: 10969 - DNA, 13 bp, Artificial Sequence
  Oligonucleotide for detection of SNP TSC0002719
ttattaagtaatg

SEQ ID NO: 10970 - DNA, 13 bp, Artificial Sequence
  Oligonucleotide for detection of SNP TSC0002719
cattacttaataa

SEQ ID NO: 10971 - DNA, 13 bp, Artificial Sequence
  Oligonucleotide for detection of SNP TSC0002719
ttattatgtaatg

SEQ ID NO: 10972 - DNA, 13 bp, Artificial Sequence
  Oligonucleotide for detection of SNP TSC0002719
cattacataataa

SEQ ID NO: 10973 - DNA, 13 bp, Artificial Sequence
  Oligonucleotide for detection of SNP TSC0002719
ttattacgtaatg

SEQ ID NO: 10974 - DNA, 13 bp, Artificial Sequence
  Oligonucleotide for detection of SNP TSC0002719
cattacgtaataa

SEQ ID NO: 10975 - DNA, 13 bp, Artificial Sequence
  Oligonucleotide for detection of SNP TSC0002720
agaagtttttata

SEQ ID NO: 10976 - DNA, 13 bp, Artificial Sequence
  Oligonucleotide for detection of SNP TSC0002720
tataaaaacttct

SEQ ID NO: 10977 - DNA, 13 bp, Artificial Sequence
  Oligonucleotide for detection of SNP TSC0002720
agaagtgtttata

SEQ ID NO: 10978 - DNA, 13 bp, Artificial Sequence
  Oligonucleotide for detection of SNP TSC0002720
tataaacacttct

SEQ ID NO: 10979 - DNA, 13 bp, Artificial Sequence
  Oligonucleotide for detection of SNP TSC0002720
agaagcgtttata

SEQ ID NO: 10980 - DNA, 13 bp, Artificial Sequence
  Oligonucleotide for detection of SNP TSC0002720
tataaacgcttct

SEQ ID NO: 10981 - DNA, 13 bp, Artificial Sequence
  Oligonucleotide for detection of SNP TSC0002720
tgtgggagttttt

SEQ ID NO: 10982 - DNA, 13 bp, Artificial Sequence
  Oligonucleotide for detection of SNP TSC0002720
aaaaactcccaca

SEQ ID NO: 10983 - DNA, 13 bp, Artificial Sequence
  Oligonucleotide for detection of SNP TSC0002720
tgtgggtgttttt

SEQ ID NO: 10984 - DNA, 13 bp, Artificial Sequence
  Oligonucleotide for detection of SNP TSC0002720
aaaaacacccaca

SEQ ID NO: 10985 - DNA, 13 bp, Artificial Sequence
  Oligonucleotide for detection of SNP TSC0002720
tgtgggcgttttt

SEQ ID NO: 10986 - DNA, 13 bp, Artificial Sequence
  Oligonucleotide for detection of SNP TSC0002720
aaaaacgcccaca

SEQ ID NO: 10987 - DNA, 13 bp, Artificial Sequence
  Oligonucleotide for detection of SNP TSC0002721
ttataatttatay

SEQ ID NO: 10988 - DNA, 13 bp, Artificial Sequence
  Oligonucleotide for detection of SNP TSC0002721
rtataaattataa

SEQ ID NO: 10989 - DNA, 13 bp, Artificial Sequence
  Oligonucleotide for detection of SNP TSC0002721
ttataaattatay

SEQ ID NO: 10990 - DNA, 13 bp, Artificial Sequence
  Oligonucleotide for detection of SNP TSC0002721
rtataatttataa

SEQ ID NO: 10991 - DNA, 13 bp, Artificial Sequence
  Oligonucleotide for detection of SNP TSC0002721
gtgtgaattgtaa

SEQ ID NO: 10992 - DNA, 13 bp, Artificial Sequence
  Oligonucleotide for detection of SNP TSC0002721
ttacaattcacac

SEQ ID NO: 10993 - DNA, 13 bp, Artificial Sequence
  Oligonucleotide for detection of SNP TSC0002721
gtgtgatttgtaa

SEQ ID NO: 10994 - DNA, 13 bp, Artificial Sequence
  Oligonucleotide for detection of SNP TSC0002721
ttacaaatcacac

SEQ ID NO: 10995 - DNA, 13 bp, Artificial Sequence
  Oligonucleotide for detection of SNP TSC0002722
ttttagatttatt

SEQ ID NO: 10996 - DNA, 13 bp, Artificial Sequence
  Oligonucleotide for detection of SNP TSC0002722
aataaatctaaaa

SEQ ID NO: 10997 - DNA, 13 bp, Artificial Sequence
  Oligonucleotide for detection of SNP TSC0002722
ttttaggtttatt

SEQ ID NO: 10998 - DNA, 13 bp, Artificial Sequence
  Oligonucleotide for detection of SNP TSC0002722
aataaacctaaaa

SEQ ID NO: 10999 - DNA, 13 bp, Artificial Sequence
  Oligonucleotide for detection of SNP TSC0002723
atttatttttaty

SEQ ID NO: 11000 - DNA, 13 bp, Artificial Sequence
  Oligonucleotide for detection of SNP TSC0002723
rataaaaataaat

SEQ ID NO: 11001 - DNA, 13 bp, Artificial Sequence
  Oligonucleotide for detection of SNP TSC0002723
ggtaaatatgagt

SEQ ID NO: 11002 - DNA, 13 bp, Artificial Sequence
  Oligonucleotide for detection of SNP TSC0002723
actcatatttacc

SEQ ID NO: 11003 - DNA, 13 bp, Artificial Sequence
  Oligonucleotide for detection of SNP TSC0002723
ggtaaaaatgagt

SEQ ID NO: 11004 - DNA, 13 bp, Artificial Sequence
  Oligonucleotide for detection of SNP TSC0002723
actcatttttacc

SEQ ID NO: 11005 - DNA, 13 bp, Artificial Sequence
  Oligonucleotide for detection of SNP TSC0002724
gatagaagggaaa

SEQ ID NO: 11006 - DNA, 13 bp, Artificial Sequence
  Oligonucleotide for detection of SNP TSC0002724
tttcccttctatc

SEQ ID NO: 11007 - DNA, 13 bp, Artificial Sequence
  Oligonucleotide for detection of SNP TSC0002724
gatagaggggaaa

SEQ ID NO: 11008 - DNA, 13 bp, Artificial Sequence
  Oligonucleotide for detection of SNP TSC0002724
tttcccctctatc

SEQ ID NO: 11009 - DNA, 13 bp, Artificial Sequence
  Oligonucleotide for detection of SNP TSC0002725
tttggtgtaagga

SEQ ID NO: 11010 - DNA, 13 bp, Artificial Sequence
  Oligonucleotide for detection of SNP TSC0002725
tccttacaccaaa

SEQ ID NO: 11011 - DNA, 13 bp, Artificial Sequence
  Oligonucleotide for detection of SNP TSC0002725
tttggtataagga

SEQ ID NO: 11012 - DNA, 13 bp, Artificial Sequence
  Oligonucleotide for detection of SNP TSC0002725
tccttataccaaa

SEQ ID NO: 11013 - DNA, 13 bp, Artificial Sequence
  Oligonucleotide for detection of SNP TSC0002726
ttttgtattaggy

SEQ ID NO: 11014 - DNA, 13 bp, Artificial Sequence
  Oligonucleotide for detection of SNP TSC0002726
rcctaatacaaaa

SEQ ID NO: 11015 - DNA, 13 bp, Artificial Sequence
  Oligonucleotide for detection of SNP TSC0002726
ttttgcgttaggy

SEQ ID NO: 11016 - DNA, 13 bp, Artificial Sequence
  Oligonucleotide for detection of SNP TSC0002726
rcctaacgcaaaa

SEQ ID NO: 11017 - DNA, 13 bp, Artificial Sequence
  Oligonucleotide for detection of SNP TSC0002726
gtttggtgtaagg

SEQ ID NO: 11018 - DNA, 13 bp, Artificial Sequence
  Oligonucleotide for detection of SNP TSC0002726
ccttacaccaaac

SEQ ID NO: 11019 - DNA, 13 bp, Artificial Sequence
  Oligonucleotide for detection of SNP TSC0002726
gtttggcgtaagg

SEQ ID NO: 11020 - DNA, 13 bp, Artificial Sequence
  Oligonucleotide for detection of SNP TSC0002726
ccttacgccaaac

SEQ ID NO: 11021 - DNA, 13 bp, Artificial Sequence
  Oligonucleotide for detection of SNP TSC0002727
agttggaagttat

SEQ ID NO: 11022 - DNA, 13 bp, Artificial Sequence
  Oligonucleotide for detection of SNP TSC0002727
ataacttccaact

SEQ ID NO: 11023 - DNA, 13 bp, Artificial Sequence
  Oligonucleotide for detection of SNP TSC0002727
agttgggagttat

SEQ ID NO: 11024 - DNA, 13 bp, Artificial Sequence
  Oligonucleotide for detection of SNP TSC0002727
ataactcccaact

SEQ ID NO: 11025 - DNA, 13 bp, Artificial Sequence
  Oligonucleotide for detection of SNP TSC0002728
ttttttttaaaaa

SEQ ID NO: 11026 - DNA, 13 bp, Artificial Sequence
  Oligonucleotide for detection of SNP TSC0002728
tttttaaaaaaaa

SEQ ID NO: 11027 - DNA, 13 bp, Artificial Sequence
  Oligonucleotide for detection of SNP TSC0002728
ttttttataaaaa

SEQ ID NO: 11028 - DNA, 13 bp, Artificial Sequence
  Oligonucleotide for detection of SNP TSC0002728
tttttataaaaaa

SEQ ID NO: 11029 - DNA, 13 bp, Artificial Sequence
  Oligonucleotide for detection of SNP TSC0002730
tttagttattgtg

SEQ ID NO: 11030 - DNA, 13 bp, Artificial Sequence
  Oligonucleotide for detection of SNP TSC0002730
cacaataactaaa

SEQ ID NO: 11031 - DNA, 13 bp, Artificial Sequence
  Oligonucleotide for detection of SNP TSC0002730
tttagtgattgtg

SEQ ID NO: 11032 - DNA, 13 bp, Artificial Sequence
  Oligonucleotide for detection of SNP TSC0002730
cacaatcactaaa

SEQ ID NO: 11033 - DNA, 13 bp, Artificial Sequence
  Oligonucleotide for detection of SNP TSC0002730
tttagttatcgtg

SEQ ID NO: 11034 - DNA, 13 bp, Artificial Sequence
  Oligonucleotide for detection of SNP TSC0002730
cacgataactaaa

SEQ ID NO: 11035 - DNA, 13 bp, Artificial Sequence
  Oligonucleotide for detection of SNP TSC0002730
tttagtgatcgtg

SEQ ID NO: 11036 - DNA, 13 bp, Artificial Sequence
  Oligonucleotide for detection of SNP TSC0002730
cacgatcactaaa

SEQ ID NO: 11037 - DNA, 13 bp, Artificial Sequence
  Oligonucleotide for detection of SNP TSC0002730
tatggtaattagg

SEQ ID NO: 11038 - DNA, 13 bp, Artificial Sequence
  Oligonucleotide for detection of SNP TSC0002730
cctaattaccata

SEQ ID NO: 11039 - DNA, 13 bp, Artificial Sequence
  Oligonucleotide for detection of SNP TSC0002730
tatggttattagg

SEQ ID NO: 11040 - DNA, 13 bp, Artificial Sequence
  Oligonucleotide for detection of SNP TSC0002730
cctaataaccata

SEQ ID NO: 11041 - DNA, 13 bp, Artificial Sequence
  Oligonucleotide for detection of SNP TSC0002730
tacggtaattagg

SEQ ID NO: 11042 - DNA, 13 bp, Artificial Sequence
  Oligonucleotide for detection of SNP TSC0002730
cctaattaccgta

SEQ ID NO: 11043 - DNA, 13 bp, Artificial Sequence
  Oligonucleotide for detection of SNP TSC0002730
tacggttattagg

SEQ ID NO: 11044 - DNA, 13 bp, Artificial Sequence
  Oligonucleotide for detection of SNP TSC0002730
cctaataaccgta

SEQ ID NO: 11045 - DNA, 13 bp, Artificial Sequence
  Oligonucleotide for detection of SNP TSC0002731
tatttttgaaaty

SEQ ID NO: 11046 - DNA, 13 bp, Artificial Sequence
  Oligonucleotide for detection of SNP TSC0002731
ratttcaaaaata

SEQ ID NO: 11047 - DNA, 13 bp, Artificial Sequence
  Oligonucleotide for detection of SNP TSC0002731
tattttggaaaty

SEQ ID NO: 11048 - DNA, 13 bp, Artificial Sequence
  Oligonucleotide for detection of SNP TSC0002731
ratttccaaaata

SEQ ID NO: 11049 - DNA, 13 bp, Artificial Sequence
  Oligonucleotide for detection of SNP TSC0002731
tattttcgaaaty

SEQ ID NO: 11050 - DNA, 13 bp, Artificial Sequence
  Oligonucleotide for detection of SNP TSC0002731
ratttcgaaaata

SEQ ID NO: 11051 - DNA, 13 bp, Artificial Sequence
  Oligonucleotide for detection of SNP TSC0002731
ggttttgagaatg

SEQ ID NO: 11052 - DNA, 13 bp, Artificial Sequence
  Oligonucleotide for detection of SNP TSC0002731
cattctcaaaacc

SEQ ID NO: 11053 - DNA, 13 bp, Artificial Sequence
  Oligonucleotide for detection of SNP TSC0002731
ggtttttagaatg

SEQ ID NO: 11054 - DNA, 13 bp, Artificial Sequence
  Oligonucleotide for detection of SNP TSC0002731
cattctaaaaacc

SEQ ID NO: 11055 - DNA, 13 bp, Artificial Sequence
  Oligonucleotide for detection of SNP TSC0002731
ggtttcgagaatg

SEQ ID NO: 11056 - DNA, 13 bp, Artificial Sequence
  Oligonucleotide for detection of SNP TSC0002731
cattctcgaaacc

SEQ ID NO: 11057 - DNA, 13 bp, Artificial Sequence
  Oligonucleotide for detection of SNP TSC0002732
ttagttattgtgt

SEQ ID NO: 11058 - DNA, 13 bp, Artificial Sequence
  Oligonucleotide for detection of SNP TSC0002732
acacaataactaa

SEQ ID NO: 11059 - DNA, 13 bp, Artificial Sequence
  Oligonucleotide for detection of SNP TSC0002732
ttagtttttgtgt

SEQ ID NO: 11060 - DNA, 13 bp, Artificial Sequence
  Oligonucleotide for detection of SNP TSC0002732
acacaaaaactaa

SEQ ID NO: 11061 - DNA, 13 bp, Artificial Sequence
  Oligonucleotide for detection of SNP TSC0002732
ttagttatcgtgt

SEQ ID NO: 11062 - DNA, 13 bp, Artificial Sequence
  Oligonucleotide for detection of SNP TSC0002732
acacgataactaa

SEQ ID NO: 11063 - DNA, 13 bp, Artificial Sequence
  Oligonucleotide for detection of SNP TSC0002732
ttagttttcgtgt

SEQ ID NO: 11064 - DNA, 13 bp, Artificial Sequence
  Oligonucleotide for detection of SNP TSC0002732
acacgaaaactaa

SEQ ID NO: 11065 - DNA, 13 bp, Artificial Sequence
  Oligonucleotide for detection of SNP TSC0002732
atatggtaattag

SEQ ID NO: 11066 - DNA, 13 bp, Artificial Sequence
  Oligonucleotide for detection of SNP TSC0002732
ctaattaccatat

SEQ ID NO: 11067 - DNA, 13 bp, Artificial Sequence
  Oligonucleotide for detection of SNP TSC0002732
atatggaaattag

SEQ ID NO: 11068 - DNA, 13 bp, Artificial Sequence
  Oligonucleotide for detection of SNP TSC0002732
ctaatttccatat

SEQ ID NO: 11069 - DNA, 13 bp, Artificial Sequence
  Oligonucleotide for detection of SNP TSC0002732
atacggtaattag

SEQ ID NO: 11070 - DNA, 13 bp, Artificial Sequence
  Oligonucleotide for detection of SNP TSC0002732
ctaattaccgtat

SEQ ID NO: 11071 - DNA, 13 bp, Artificial Sequence
  Oligonucleotide for detection of SNP TSC0002732
atacggaaattag

SEQ ID NO: 11072 - DNA, 13 bp, Artificial Sequence
  Oligonucleotide for detection of SNP TSC0002732
ctaatttccgtat

SEQ ID NO: 11073 - DNA, 13 bp, Artificial Sequence
  Oligonucleotide for detection of SNP TSC0002733
atttttgaaattt

SEQ ID NO: 11074 - DNA, 13 bp, Artificial Sequence
  Oligonucleotide for detection of SNP TSC0002733
aaatttcaaaaat

SEQ ID NO: 11075 - DNA, 13 bp, Artificial Sequence
  Oligonucleotide for detection of SNP TSC0002733
atttttaaaattt

SEQ ID NO: 11076 - DNA, 13 bp, Artificial Sequence
  Oligonucleotide for detection of SNP TSC0002733
aaattttaaaaat

SEQ ID NO: 11077 - DNA, 13 bp, Artificial Sequence
  Oligonucleotide for detection of SNP TSC0002733
attttcgaaattt

SEQ ID NO: 11078 - DNA, 13 bp, Artificial Sequence
  Oligonucleotide for detection of SNP TSC0002733
aaatttcgaaaat

SEQ ID NO: 11079 - DNA, 13 bp, Artificial Sequence
  Oligonucleotide for detection of SNP TSC0002733
aggttttgagaat

SEQ ID NO: 11080 - DNA, 13 bp, Artificial Sequence
  Oligonucleotide for detection of SNP TSC0002733
attctcaaaacct

SEQ ID NO: 11081 - DNA, 13 bp, Artificial Sequence
  Oligonucleotide for detection of SNP TSC0002733
aggtttcgagaat

SEQ ID NO: 11082 - DNA, 13 bp, Artificial Sequence
  Oligonucleotide for detection of SNP TSC0002733
attctcgaaacct

SEQ ID NO: 11083 - DNA, 13 bp, Artificial Sequence
  Oligonucleotide for detection of SNP TSC0002734
tttttttttaaga

SEQ ID NO: 11084 - DNA, 13 bp, Artificial Sequence
  Oligonucleotide for detection of SNP TSC0002734
tcttaaaaaaaaa

SEQ ID NO: 11085 - DNA, 13 bp, Artificial Sequence
  Oligonucleotide for detection of SNP TSC0002734
ttttttattaaga

SEQ ID NO: 11086 - DNA, 13 bp, Artificial Sequence
  Oligonucleotide for detection of SNP TSC0002734
tcttaataaaaaa

SEQ ID NO: 11087 - DNA, 13 bp, Artificial Sequence
  Oligonucleotide for detection of SNP TSC0002734
ttttgagagaaaa

SEQ ID NO: 11088 - DNA, 13 bp, Artificial Sequence
  Oligonucleotide for detection of SNP TSC0002734
ttttctctcaaaa

SEQ ID NO: 11089 - DNA, 13 bp, Artificial Sequence
  Oligonucleotide for detection of SNP TSC0002734
ttttgatagaaaa

SEQ ID NO: 11090 - DNA, 13 bp, Artificial Sequence
  Oligonucleotide for detection of SNP TSC0002734
ttttctatcaaaa

SEQ ID NO: 11091 - DNA, 13 bp, Artificial Sequence
  Oligonucleotide for detection of SNP TSC0002735
tagttattgtgtg

SEQ ID NO: 11092 - DNA, 13 bp, Artificial Sequence
  Oligonucleotide for detection of SNP TSC0002735
cacacaataacta

SEQ ID NO: 11093 - DNA, 13 bp, Artificial Sequence
  Oligonucleotide for detection of SNP TSC0002735
tagttagtgtgtg

SEQ ID NO: 11094 - DNA, 13 bp, Artificial Sequence
  Oligonucleotide for detection of SNP TSC0002735
cacacactaacta

SEQ ID NO: 11095 - DNA, 13 bp, Artificial Sequence
  Oligonucleotide for detection of SNP TSC0002735
tagttatcgtgtg

SEQ ID NO: 11096 - DNA, 13 bp, Artificial Sequence
  Oligonucleotide for detection of SNP TSC0002735
cacacgataacta

SEQ ID NO: 11097 - DNA, 13 bp, Artificial Sequence
  Oligonucleotide for detection of SNP TSC0002735
tagttagcgtgtg

SEQ ID NO: 11098 - DNA, 13 bp, Artificial Sequence
  Oligonucleotide for detection of SNP TSC0002735
cacacgctaacta

SEQ ID NO: 11099 - DNA, 13 bp, Artificial Sequence
  Oligonucleotide for detection of SNP TSC0002735
tatatggtaatta

SEQ ID NO: 11100 - DNA, 13 bp, Artificial Sequence
  Oligonucleotide for detection of SNP TSC0002735
taattaccatata

SEQ ID NO: 11101 - DNA, 13 bp, Artificial Sequence
  Oligonucleotide for detection of SNP TSC0002735
tatatgttaatta

SEQ ID NO: 11102 - DNA, 13 bp, Artificial Sequence
  Oligonucleotide for detection of SNP TSC0002735
taattaacatata

SEQ ID NO: 11103 - DNA, 13 bp, Artificial Sequence
  Oligonucleotide for detection of SNP TSC0002735
tatacggtaatta

SEQ ID NO: 11104 - DNA, 13 bp, Artificial Sequence
  Oligonucleotide for detection of SNP TSC0002735
taattaccgtata

SEQ ID NO: 11105 - DNA, 13 bp, Artificial Sequence
  Oligonucleotide for detection of SNP TSC0002735
tatacgttaatta

SEQ ID NO: 11106 - DNA, 13 bp, Artificial Sequence
  Oligonucleotide for detection of SNP TSC0002735
taattaacgtata

SEQ ID NO: 11107 - DNA, 13 bp, Artificial Sequence
  Oligonucleotide for detection of SNP TSC0002736
agttattgtgtgt

SEQ ID NO: 11108 - DNA, 13 bp, Artificial Sequence
  Oligonucleotide for detection of SNP TSC0002736
acacacaataact

SEQ ID NO: 11109 - DNA, 13 bp, Artificial Sequence
  Oligonucleotide for detection of SNP TSC0002736
agttatcgtgtgt

SEQ ID NO: 11110 - DNA, 13 bp, Artificial Sequence
  Oligonucleotide for detection of SNP TSC0002736
acacacgataact

SEQ ID NO: 11111 - DNA, 13 bp, Artificial Sequence
  Oligonucleotide for detection of SNP TSC0002736
atatatggtaatt

SEQ ID NO: 11112 - DNA, 13 bp, Artificial Sequence
  Oligonucleotide for detection of SNP TSC0002736
aattaccatatat

SEQ ID NO: 11113 - DNA, 13 bp, Artificial Sequence
  Oligonucleotide for detection of SNP TSC0002736
atatatagtaatt

SEQ ID NO: 11114 - DNA, 13 bp, Artificial Sequence
  Oligonucleotide for detection of SNP TSC0002736
aattactatatat

SEQ ID NO: 11115 - DNA, 13 bp, Artificial Sequence
  Oligonucleotide for detection of SNP TSC0002736
atatacggtaatt

SEQ ID NO: 11116 - DNA, 13 bp, Artificial Sequence
  Oligonucleotide for detection of SNP TSC0002736
aattaccgtatat

SEQ ID NO: 11117 - DNA, 13 bp, Artificial Sequence
  Oligonucleotide for detection of SNP TSC0002737
ggtgtgggaatty

SEQ ID NO: 11118 - DNA, 13 bp, Artificial Sequence
  Oligonucleotide for detection of SNP TSC0002737
raattcccacacc

SEQ ID NO: 11119 - DNA, 13 bp, Artificial Sequence
  Oligonucleotide for detection of SNP TSC0002737
ggtgtgagaatty

SEQ ID NO: 11120 - DNA, 13 bp, Artificial Sequence
  Oligonucleotide for detection of SNP TSC0002737
raattctcacacc

SEQ ID NO: 11121 - DNA, 13 bp, Artificial Sequence
  Oligonucleotide for detection of SNP TSC0002738
tttatgtttattg

SEQ ID NO: 11122 - DNA, 13 bp, Artificial Sequence
  Oligonucleotide for detection of SNP TSC0002738
caataaacataaa

SEQ ID NO: 11123 - DNA, 13 bp, Artificial Sequence
  Oligonucleotide for detection of SNP TSC0002738
tttatggttattg

SEQ ID NO: 11124 - DNA, 13 bp, Artificial Sequence
  Oligonucleotide for detection of SNP TSC0002738
caataaccataaa

SEQ ID NO: 11125 - DNA, 13 bp, Artificial Sequence
  Oligonucleotide for detection of SNP TSC0002738
tttatgtttatcg

SEQ ID NO: 11126 - DNA, 13 bp, Artificial Sequence
  Oligonucleotide for detection of SNP TSC0002738
cgataaacataaa

SEQ ID NO: 11127 - DNA, 13 bp, Artificial Sequence
  Oligonucleotide for detection of SNP TSC0002738
tttatggttatcg

SEQ ID NO: 11128 - DNA, 13 bp, Artificial Sequence
  Oligonucleotide for detection of SNP TSC0002738
cgataaccataaa

SEQ ID NO: 11129 - DNA, 13 bp, Artificial Sequence
  Oligonucleotide for detection of SNP TSC0002738
tggtaaatatgag

SEQ ID NO: 11130 - DNA, 13 bp, Artificial Sequence
  Oligonucleotide for detection of SNP TSC0002738
ctcatatttacca

SEQ ID NO: 11131 - DNA, 13 bp, Artificial Sequence
  Oligonucleotide for detection of SNP TSC0002738
tggtaattatgag

SEQ ID NO: 11132 - DNA, 13 bp, Artificial Sequence
  Oligonucleotide for detection of SNP TSC0002738
ctcataattacca

SEQ ID NO: 11133 - DNA, 13 bp, Artificial Sequence
  Oligonucleotide for detection of SNP TSC0002738
cggtaaatatgag

SEQ ID NO: 11134 - DNA, 13 bp, Artificial Sequence
  Oligonucleotide for detection of SNP TSC0002738
ctcatatttaccg

SEQ ID NO: 11135 - DNA, 13 bp, Artificial Sequence
  Oligonucleotide for detection of SNP TSC0002738
cggtaattatgag

SEQ ID NO: 11136 - DNA, 13 bp, Artificial Sequence
  Oligonucleotide for detection of SNP TSC0002738
ctcataattaccg

SEQ ID NO: 11137 - DNA, 13 bp, Artificial Sequence
  Oligonucleotide for detection of SNP TSC0002739
gggttaattgtta

SEQ ID NO: 11138 - DNA, 13 bp, Artificial Sequence
  Oligonucleotide for detection of SNP TSC0002739
taacaattaaccc

SEQ ID NO: 11139 - DNA, 13 bp, Artificial Sequence
  Oligonucleotide for detection of SNP TSC0002739
gggttagttgtta

SEQ ID NO: 11140 - DNA, 13 bp, Artificial Sequence
  Oligonucleotide for detection of SNP TSC0002739
taacaactaaccc

SEQ ID NO: 11141 - DNA, 13 bp, Artificial Sequence
  Oligonucleotide for detection of SNP TSC0002740
gttttgttagtty

SEQ ID NO: 11142 - DNA, 13 bp, Artificial Sequence
  Oligonucleotide for detection of SNP TSC0002740
raactaacaaaac

SEQ ID NO: 11143 - DNA, 13 bp, Artificial Sequence
  Oligonucleotide for detection of SNP TSC0002740
gttttggtagtty

SEQ ID NO: 11144 - DNA, 13 bp, Artificial Sequence
  Oligonucleotide for detection of SNP TSC0002740
raactaccaaaac

SEQ ID NO: 11145 - DNA, 13 bp, Artificial Sequence
  Oligonucleotide for detection of SNP TSC0002740
gggttggtagagy

SEQ ID NO: 11146 - DNA, 13 bp, Artificial Sequence
  Oligonucleotide for detection of SNP TSC0002740
rctctaccaaccc

SEQ ID NO: 11147 - DNA, 13 bp, Artificial Sequence
  Oligonucleotide for detection of SNP TSC0002740
gggttgttagagy

SEQ ID NO: 11148 - DNA, 13 bp, Artificial Sequence
  Oligonucleotide for detection of SNP TSC0002740
rctctaacaaccc

SEQ ID NO: 11149 - DNA, 13 bp, Artificial Sequence
  Oligonucleotide for detection of SNP TSC0002741
ttgtttgtttttt

SEQ ID NO: 11150 - DNA, 13 bp, Artificial Sequence
  Oligonucleotide for detection of SNP TSC0002741
aaaaaacaaacaa

SEQ ID NO: 11151 - DNA, 13 bp, Artificial Sequence
  Oligonucleotide for detection of SNP TSC0002742
aagtgggggaaat

SEQ ID NO: 11152 - DNA, 13 bp, Artificial Sequence
  Oligonucleotide for detection of SNP TSC0002742
atttcccccactt

SEQ ID NO: 11153 - DNA, 13 bp, Artificial Sequence
  Oligonucleotide for detection of SNP TSC0002742
aagtggtggaaat

SEQ ID NO: 11154 - DNA, 13 bp, Artificial Sequence
  Oligonucleotide for detection of SNP TSC0002742
atttccaccactt

SEQ ID NO: 11155 - DNA, 13 bp, Artificial Sequence
  Oligonucleotide for detection of SNP TSC0002742
attttttttattt

SEQ ID NO: 11156 - DNA, 13 bp, Artificial Sequence
  Oligonucleotide for detection of SNP TSC0002742
aaataaaaaaaat

SEQ ID NO: 11157 - DNA, 13 bp, Artificial Sequence
  Oligonucleotide for detection of SNP TSC0002742
atttttattattt

SEQ ID NO: 11158 - DNA, 13 bp, Artificial Sequence
  Oligonucleotide for detection of SNP TSC0002742
aaataataaaaat

SEQ ID NO: 11159 - DNA, 13 bp, Artificial Sequence
  Oligonucleotide for detection of SNP TSC0002743
agttttttaaaaa

SEQ ID NO: 11160 - DNA, 13 bp, Artificial Sequence
  Oligonucleotide for detection of SNP TSC0002743
tttttaaaaaact

SEQ ID NO: 11161 - DNA, 13 bp, Artificial Sequence
  Oligonucleotide for detection of SNP TSC0002743
agttttgtaaaaa

SEQ ID NO: 11162 - DNA, 13 bp, Artificial Sequence
  Oligonucleotide for detection of SNP TSC0002743
tttttacaaaact

SEQ ID NO: 11163 - DNA, 13 bp, Artificial Sequence
  Oligonucleotide for detection of SNP TSC0002743
tttttaaaaagtt

SEQ ID NO: 11164 - DNA, 13 bp, Artificial Sequence
  Oligonucleotide for detection of SNP TSC0002743
aactttttaaaaa

SEQ ID NO: 11165 - DNA, 13 bp, Artificial Sequence
  Oligonucleotide for detection of SNP TSC0002743
tttttataaagtt

SEQ ID NO: 11166 - DNA, 13 bp, Artificial Sequence
  Oligonucleotide for detection of SNP TSC0002743
aactttataaaaa

SEQ ID NO: 11167 - DNA, 13 bp, Artificial Sequence
  Oligonucleotide for detection of SNP TSC0002744
tggtatgtatgtg

SEQ ID NO: 11168 - DNA, 13 bp, Artificial Sequence
  Oligonucleotide for detection of SNP TSC0002744
cacatacatacca

SEQ ID NO: 11169 - DNA, 13 bp, Artificial Sequence
  Oligonucleotide for detection of SNP TSC0002744
tggtatatatgtg

SEQ ID NO: 11170 - DNA, 13 bp, Artificial Sequence
  Oligonucleotide for detection of SNP TSC0002744
cacatatatacca

SEQ ID NO: 11171 - DNA, 13 bp, Artificial Sequence
  Oligonucleotide for detection of SNP TSC0002745
gtgttatattaty

SEQ ID NO: 11172 - DNA, 13 bp, Artificial Sequence
  Oligonucleotide for detection of SNP TSC0002745
rataatataacac

SEQ ID NO: 11173 - DNA, 13 bp, Artificial Sequence
  Oligonucleotide for detection of SNP TSC0002745
gtgttagattaty

SEQ ID NO: 11174 - DNA, 13 bp, Artificial Sequence
  Oligonucleotide for detection of SNP TSC0002745
rataatctaacac

SEQ ID NO: 11175 - DNA, 13 bp, Artificial Sequence
  Oligonucleotide for detection of SNP TSC0002745
ggtgatgtagtay

SEQ ID NO: 11176 - DNA, 13 bp, Artificial Sequence
  Oligonucleotide for detection of SNP TSC0002745
rtactacatcacc

SEQ ID NO: 11177 - DNA, 13 bp, Artificial Sequence
  Oligonucleotide for detection of SNP TSC0002745
ggtgatttagtay

SEQ ID NO: 11178 - DNA, 13 bp, Artificial Sequence
  Oligonucleotide for detection of SNP TSC0002745
rtactaaatcacc

SEQ ID NO: 11179 - DNA, 13 bp, Artificial Sequence
  Oligonucleotide for detection of SNP TSC0002747
gattttgtatagt

SEQ ID NO: 11180 - DNA, 13 bp, Artificial Sequence
  Oligonucleotide for detection of SNP TSC0002747
actatacaaaatc

SEQ ID NO: 11181 - DNA, 13 bp, Artificial Sequence
  Oligonucleotide for detection of SNP TSC0002747
gattttatatagt

SEQ ID NO: 11182 - DNA, 13 bp, Artificial Sequence
  Oligonucleotide for detection of SNP TSC0002747
actatataaaatc

SEQ ID NO: 11183 - DNA, 13 bp, Artificial Sequence
  Oligonucleotide for detection of SNP TSC0002747
gatttcgtatagt

SEQ ID NO: 11184 - DNA, 13 bp, Artificial Sequence
  Oligonucleotide for detection of SNP TSC0002747
actatacgaaatc

SEQ ID NO: 11185 - DNA, 13 bp, Artificial Sequence
  Oligonucleotide for detection of SNP TSC0002747
attgtgtggagty

SEQ ID NO: 11186 - DNA, 13 bp, Artificial Sequence
  Oligonucleotide for detection of SNP TSC0002747
ractccacacaat

SEQ ID NO: 11187 - DNA, 13 bp, Artificial Sequence
  Oligonucleotide for detection of SNP TSC0002747
attgtgcggagty

SEQ ID NO: 11188 - DNA, 13 bp, Artificial Sequence
  Oligonucleotide for detection of SNP TSC0002747
ractccgcacaat

SEQ ID NO: 11189 - DNA, 13 bp, Artificial Sequence
  Oligonucleotide for detection of SNP TSC0002748
ttttttgggtaty

SEQ ID NO: 11190 - DNA, 13 bp, Artificial Sequence
  Oligonucleotide for detection of SNP TSC0002748
ratacccaaaaaa

SEQ ID NO: 11191 - DNA, 13 bp, Artificial Sequence
  Oligonucleotide for detection of SNP TSC0002748
tttttcgggtaty

SEQ ID NO: 11192 - DNA, 13 bp, Artificial Sequence
  Oligonucleotide for detection of SNP TSC0002748
ratacccgaaaaa

SEQ ID NO: 11193 - DNA, 13 bp, Artificial Sequence
  Oligonucleotide for detection of SNP TSC0002748
gatgttaggagaa

SEQ ID NO: 11194 - DNA, 13 bp, Artificial Sequence
  Oligonucleotide for detection of SNP TSC0002748
ttctcctaacatc

SEQ ID NO: 11195 - DNA, 13 bp, Artificial Sequence
  Oligonucleotide for detection of SNP TSC0002748
gatgtttggagaa

SEQ ID NO: 11196 - DNA, 13 bp, Artificial Sequence
  Oligonucleotide for detection of SNP TSC0002748
ttctccaaacatc

SEQ ID NO: 11197 - DNA, 13 bp, Artificial Sequence
  Oligonucleotide for detection of SNP TSC0002748
gatgttcggagaa

SEQ ID NO: 11198 - DNA, 13 bp, Artificial Sequence
  Oligonucleotide for detection of SNP TSC0002748
ttctccgaacatc

SEQ ID NO: 11199 - DNA, 13 bp, Artificial Sequence
  Oligonucleotide for detection of SNP TSC0002751
gtaaagtaaagga

SEQ ID NO: 11200 - DNA, 13 bp, Artificial Sequence
  Oligonucleotide for detection of SNP TSC0002751
tcctttactttac

SEQ ID NO: 11201 - DNA, 13 bp, Artificial Sequence
  Oligonucleotide for detection of SNP TSC0002751
gtaaagaaaagga

SEQ ID NO: 11202 - DNA, 13 bp, Artificial Sequence
  Oligonucleotide for detection of SNP TSC0002751
tccttttctttac

SEQ ID NO: 11203 - DNA, 13 bp, Artificial Sequence
  Oligonucleotide for detection of SNP TSC0002752
aaatggaaagttg

SEQ ID NO: 11204 - DNA, 13 bp, Artificial Sequence
  Oligonucleotide for detection of SNP TSC0002752
caactttccattt

SEQ ID NO: 11205 - DNA, 13 bp, Artificial Sequence
  Oligonucleotide for detection of SNP TSC0002752
aaatgggaagttg

SEQ ID NO: 11206 - DNA, 13 bp, Artificial Sequence
  Oligonucleotide for detection of SNP TSC0002752
caacttcccattt

SEQ ID NO: 11207 - DNA, 13 bp, Artificial Sequence
  Oligonucleotide for detection of SNP TSC0002753
gtattagaattga

SEQ ID NO: 11208 - DNA, 13 bp, Artificial Sequence
  Oligonucleotide for detection of SNP TSC0002753
tcaattctaatac

SEQ ID NO: 11209 - DNA, 13 bp, Artificial Sequence
  Oligonucleotide for detection of SNP TSC0002753
gtattaaaattga

SEQ ID NO: 11210 - DNA, 13 bp, Artificial Sequence
  Oligonucleotide for detection of SNP TSC0002753
tcaattttaatac

SEQ ID NO: 11211 - DNA, 13 bp, Artificial Sequence
  Oligonucleotide for detection of SNP TSC0002753
gtattagaatcga

SEQ ID NO: 11212 - DNA, 13 bp, Artificial Sequence
  Oligonucleotide for detection of SNP TSC0002753
tcgattctaatac

SEQ ID NO: 11213 - DNA, 13 bp, Artificial Sequence
  Oligonucleotide for detection of SNP TSC0002753
gtattaaaatcga

SEQ ID NO: 11214 - DNA, 13 bp, Artificial Sequence
  Oligonucleotide for detection of SNP TSC0002753
tcgattttaatac

SEQ ID NO: 11215 - DNA, 13 bp, Artificial Sequence
  Oligonucleotide for detection of SNP TSC0002754
ttggagattattt

SEQ ID NO: 11216 - DNA, 13 bp, Artificial Sequence
  Oligonucleotide for detection of SNP TSC0002754
aaataatctccaa

SEQ ID NO: 11217 - DNA, 13 bp, Artificial Sequence
  Oligonucleotide for detection of SNP TSC0002754
ttggagtttattt

SEQ ID NO: 11218 - DNA, 13 bp, Artificial Sequence
  Oligonucleotide for detection of SNP TSC0002754
aaataaactccaa

SEQ ID NO: 11219 - DNA, 13 bp, Artificial Sequence
  Oligonucleotide for detection of SNP TSC0002754
tcggagattattt

SEQ ID NO: 11220 - DNA, 13 bp, Artificial Sequence
  Oligonucleotide for detection of SNP TSC0002754
aaataatctccga

SEQ ID NO: 11221 - DNA, 13 bp, Artificial Sequence
  Oligonucleotide for detection of SNP TSC0002754
tcggagtttattt

SEQ ID NO: 11222 - DNA, 13 bp, Artificial Sequence
  Oligonucleotide for detection of SNP TSC0002754
aaataaactccga

SEQ ID NO: 11223 - DNA, 13 bp, Artificial Sequence
  Oligonucleotide for detection of SNP TSC0002754
aaatagtttttgg

SEQ ID NO: 11224 - DNA, 13 bp, Artificial Sequence
  Oligonucleotide for detection of SNP TSC0002754
ccaaaaactattt

SEQ ID NO: 11225 - DNA, 13 bp, Artificial Sequence
  Oligonucleotide for detection of SNP TSC0002754
aaatagattttgg

SEQ ID NO: 11226 - DNA, 13 bp, Artificial Sequence
  Oligonucleotide for detection of SNP TSC0002754
ccaaaatctattt

SEQ ID NO: 11227 - DNA, 13 bp, Artificial Sequence
  Oligonucleotide for detection of SNP TSC0002754
aaatagttttcgg

SEQ ID NO: 11228 - DNA, 13 bp, Artificial Sequence
  Oligonucleotide for detection of SNP TSC0002754
ccgaaaactattt

SEQ ID NO: 11229 - DNA, 13 bp, Artificial Sequence
  Oligonucleotide for detection of SNP TSC0002754
aaatagatttcgg

SEQ ID NO: 11230 - DNA, 13 bp, Artificial Sequence
  Oligonucleotide for detection of SNP TSC0002754
ccgaaatctattt

SEQ ID NO: 11231 - DNA, 13 bp, Artificial Sequence
  Oligonucleotide for detection of SNP TSC0002755
gtagtggaaatay

SEQ ID NO: 11232 - DNA, 13 bp, Artificial Sequence
  Oligonucleotide for detection of SNP TSC0002755
rtatttccactac

SEQ ID NO: 11233 - DNA, 13 bp, Artificial Sequence
  Oligonucleotide for detection of SNP TSC0002755
gtagtgaaaatay

SEQ ID NO: 11234 - DNA, 13 bp, Artificial Sequence
  Oligonucleotide for detection of SNP TSC0002755
rtattttcactac

SEQ ID NO: 11235 - DNA, 13 bp, Artificial Sequence
  Oligonucleotide for detection of SNP TSC0002757
tagaatggattty

SEQ ID NO: 11236 - DNA, 13 bp, Artificial Sequence
  Oligonucleotide for detection of SNP TSC0002757
raaatccattcta

SEQ ID NO: 11237 - DNA, 13 bp, Artificial Sequence
  Oligonucleotide for detection of SNP TSC0002757
tagaattgattty

SEQ ID NO: 11238 - DNA, 13 bp, Artificial Sequence
  Oligonucleotide for detection of SNP TSC0002757
raaatcaattcta

SEQ ID NO: 11239 - DNA, 13 bp, Artificial Sequence
  Oligonucleotide for detection of SNP TSC0002757
gaggtttattttg

SEQ ID NO: 11240 - DNA, 13 bp, Artificial Sequence
  Oligonucleotide for detection of SNP TSC0002757
caaaataaacctc

SEQ ID NO: 11241 - DNA, 13 bp, Artificial Sequence
  Oligonucleotide for detection of SNP TSC0002757
gaggttaattttg

SEQ ID NO: 11242 - DNA, 13 bp, Artificial Sequence
  Oligonucleotide for detection of SNP TSC0002757
caaaattaacctc

SEQ ID NO: 11243 - DNA, 13 bp, Artificial Sequence
  Oligonucleotide for detection of SNP TSC0002758
agaatggattttt

SEQ ID NO: 11244 - DNA, 13 bp, Artificial Sequence
  Oligonucleotide for detection of SNP TSC0002758
aaaaatccattct

SEQ ID NO: 11245 - DNA, 13 bp, Artificial Sequence
  Oligonucleotide for detection of SNP TSC0002758
agaatgtattttt

SEQ ID NO: 11246 - DNA, 13 bp, Artificial Sequence
  Oligonucleotide for detection of SNP TSC0002758
aaaaatacattct

SEQ ID NO: 11247 - DNA, 13 bp, Artificial Sequence
  Oligonucleotide for detection of SNP TSC0002758
agaggtttatttt

SEQ ID NO: 11248 - DNA, 13 bp, Artificial Sequence
  Oligonucleotide for detection of SNP TSC0002758
aaaataaacctct

SEQ ID NO: 11249 - DNA, 13 bp, Artificial Sequence
  Oligonucleotide for detection of SNP TSC0002758
agaggtgtatttt

SEQ ID NO: 11250 - DNA, 13 bp, Artificial Sequence
  Oligonucleotide for detection of SNP TSC0002758
aaaatacacctct

SEQ ID NO: 11251 - DNA, 13 bp, Artificial Sequence
  Oligonucleotide for detection of SNP TSC0002760
ttatagagattgy

SEQ ID NO: 11252 - DNA, 13 bp, Artificial Sequence
  Oligonucleotide for detection of SNP TSC0002760
rcaatctctataa

SEQ ID NO: 11253 - DNA, 13 bp, Artificial Sequence
  Oligonucleotide for detection of SNP TSC0002760
ttatagggattgy

SEQ ID NO: 11254 - DNA, 13 bp, Artificial Sequence
  Oligonucleotide for detection of SNP TSC0002760
rcaatccctataa

SEQ ID NO: 11255 - DNA, 13 bp, Artificial Sequence
  Oligonucleotide for detection of SNP TSC0002761
attttagtatgaa

SEQ ID NO: 11256 - DNA, 13 bp, Artificial Sequence
  Oligonucleotide for detection of SNP TSC0002761
ttcatactaaaat

SEQ ID NO: 11257 - DNA, 13 bp, Artificial Sequence
  Oligonucleotide for detection of SNP TSC0002761
attttaatatgaa

SEQ ID NO: 11258 - DNA, 13 bp, Artificial Sequence
  Oligonucleotide for detection of SNP TSC0002761
ttcatattaaaat

SEQ ID NO: 11259 - DNA, 13 bp, Artificial Sequence
  Oligonucleotide for detection of SNP TSC0002761
attttagtacgaa

SEQ ID NO: 11260 - DNA, 13 bp, Artificial Sequence
  Oligonucleotide for detection of SNP TSC0002761
ttcgtactaaaat

SEQ ID NO: 11261 - DNA, 13 bp, Artificial Sequence
  Oligonucleotide for detection of SNP TSC0002761
attttaatacgaa

SEQ ID NO: 11262 - DNA, 13 bp, Artificial Sequence
  Oligonucleotide for detection of SNP TSC0002761
ttcgtattaaaat

SEQ ID NO: 11263 - DNA, 13 bp, Artificial Sequence
  Oligonucleotide for detection of SNP TSC0002763
agttgagattgtg

SEQ ID NO: 11264 - DNA, 13 bp, Artificial Sequence
  Oligonucleotide for detection of SNP TSC0002763
cacaatctcaact

SEQ ID NO: 11265 - DNA, 13 bp, Artificial Sequence
  Oligonucleotide for detection of SNP TSC0002763
agttgatattgtg

SEQ ID NO: 11266 - DNA, 13 bp, Artificial Sequence
  Oligonucleotide for detection of SNP TSC0002763
cacaatatcaact

SEQ ID NO: 11267 - DNA, 13 bp, Artificial Sequence
  Oligonucleotide for detection of SNP TSC0002763
agttgagatcgtg

SEQ ID NO: 11268 - DNA, 13 bp, Artificial Sequence
  Oligonucleotide for detection of SNP TSC0002763
cacgatctcaact

SEQ ID NO: 11269 - DNA, 13 bp, Artificial Sequence
  Oligonucleotide for detection of SNP TSC0002763
agttgatatcgtg

SEQ ID NO: 11270 - DNA, 13 bp, Artificial Sequence
  Oligonucleotide for detection of SNP TSC0002763
cacgatatcaact

SEQ ID NO: 11271 - DNA, 13 bp, Artificial Sequence
  Oligonucleotide for detection of SNP TSC0002763
agttgagattgcg

SEQ ID NO: 11272 - DNA, 13 bp, Artificial Sequence
  Oligonucleotide for detection of SNP TSC0002763
cgcaatctcaact

SEQ ID NO: 11273 - DNA, 13 bp, Artificial Sequence
  Oligonucleotide for detection of SNP TSC0002763
agttgatattgcg

SEQ ID NO: 11274 - DNA, 13 bp, Artificial Sequence
  Oligonucleotide for detection of SNP TSC0002763
cgcaatatcaact

SEQ ID NO: 11275 - DNA, 13 bp, Artificial Sequence
  Oligonucleotide for detection of SNP TSC0002763
agttgagatcgcg

SEQ ID NO: 11276 - DNA, 13 bp, Artificial Sequence
  Oligonucleotide for detection of SNP TSC0002763
cgcgatctcaact

SEQ ID NO: 11277 - DNA, 13 bp, Artificial Sequence
  Oligonucleotide for detection of SNP TSC0002763
agttgatatcgcg

SEQ ID NO: 11278 - DNA, 13 bp, Artificial Sequence
  Oligonucleotide for detection of SNP TSC0002763
cgcgatatcaact

SEQ ID NO: 11279 - DNA, 13 bp, Artificial Sequence
  Oligonucleotide for detection of SNP TSC0002763
tgtgattttagtt

SEQ ID NO: 11280 - DNA, 13 bp, Artificial Sequence
  Oligonucleotide for detection of SNP TSC0002763
aactaaaatcaca

SEQ ID NO: 11281 - DNA, 13 bp, Artificial Sequence
  Oligonucleotide for detection of SNP TSC0002763
tgtgatattagtt

SEQ ID NO: 11282 - DNA, 13 bp, Artificial Sequence
  Oligonucleotide for detection of SNP TSC0002763
aactaatatcaca

SEQ ID NO: 11283 - DNA, 13 bp, Artificial Sequence
  Oligonucleotide for detection of SNP TSC0002763
cgtgattttagtt

SEQ ID NO: 11284 - DNA, 13 bp, Artificial Sequence
  Oligonucleotide for detection of SNP TSC0002763
aactaaaatcacg

SEQ ID NO: 11285 - DNA, 13 bp, Artificial Sequence
  Oligonucleotide for detection of SNP TSC0002763
cgtgatattagtt

SEQ ID NO: 11286 - DNA, 13 bp, Artificial Sequence
  Oligonucleotide for detection of SNP TSC0002763
aactaatatcacg

SEQ ID NO: 11287 - DNA, 13 bp, Artificial Sequence
  Oligonucleotide for detection of SNP TSC0002763
tgcgattttagtt

SEQ ID NO: 11288 - DNA, 13 bp, Artificial Sequence
  Oligonucleotide for detection of SNP TSC0002763
aactaaaatcgca

SEQ ID NO: 11289 - DNA, 13 bp, Artificial Sequence
  Oligonucleotide for detection of SNP TSC0002763
tgcgatattagtt

SEQ ID NO: 11290 - DNA, 13 bp, Artificial Sequence
  Oligonucleotide for detection of SNP TSC0002763
aactaatatcgca

SEQ ID NO: 11291 - DNA, 13 bp, Artificial Sequence
  Oligonucleotide for detection of SNP TSC0002763
cgcgattttagtt

SEQ ID NO: 11292 - DNA, 13 bp, Artificial Sequence
  Oligonucleotide for detection of SNP TSC0002763
aactaaaatcgcg

SEQ ID NO: 11293 - DNA, 13 bp, Artificial Sequence
  Oligonucleotide for detection of SNP TSC0002763
cgcgatattagtt

SEQ ID NO: 11294 - DNA, 13 bp, Artificial Sequence
  Oligonucleotide for detection of SNP TSC0002763
aactaatatcgcg

SEQ ID NO: 11295 - DNA, 13 bp, Artificial Sequence
  Oligonucleotide for detection of SNP TSC0002764
tgagtagatgtta

SEQ ID NO: 11296 - DNA, 13 bp, Artificial Sequence
  Oligonucleotide for detection of SNP TSC0002764
taacatctactca

SEQ ID NO: 11297 - DNA, 13 bp, Artificial Sequence
  Oligonucleotide for detection of SNP TSC0002764
tgagtaaatgtta

SEQ ID NO: 11298 - DNA, 13 bp, Artificial Sequence
  Oligonucleotide for detection of SNP TSC0002764
taacatttactca

SEQ ID NO: 11299 - DNA, 13 bp, Artificial Sequence
  Oligonucleotide for detection of SNP TSC0002765
aaatgggattttt

SEQ ID NO: 11300 - DNA, 13 bp, Artificial Sequence
  Oligonucleotide for detection of SNP TSC0002765
aaaaatcccattt

SEQ ID NO: 11301 - DNA, 13 bp, Artificial Sequence
  Oligonucleotide for detection of SNP TSC0002765
aaatggaattttt

SEQ ID NO: 11302 - DNA, 13 bp, Artificial Sequence
  Oligonucleotide for detection of SNP TSC0002765
aaaaattccattt

SEQ ID NO: 11303 - DNA, 13 bp, Artificial Sequence
  Oligonucleotide for detection of SNP TSC0002767
ttgaagttattty

SEQ ID NO: 11304 - DNA, 13 bp, Artificial Sequence
  Oligonucleotide for detection of SNP TSC0002767
raaataacttcaa

SEQ ID NO: 11305 - DNA, 13 bp, Artificial Sequence
  Oligonucleotide for detection of SNP TSC0002767
ttgaagatattty

SEQ ID NO: 11306 - DNA, 13 bp, Artificial Sequence
  Oligonucleotide for detection of SNP TSC0002767
raaatatcttcaa

SEQ ID NO: 11307 - DNA, 13 bp, Artificial Sequence
  Oligonucleotide for detection of SNP TSC0002767
gaagtaattttaa

SEQ ID NO: 11308 - DNA, 13 bp, Artificial Sequence
  Oligonucleotide for detection of SNP TSC0002767
ttaaaattacttc

SEQ ID NO: 11309 - DNA, 13 bp, Artificial Sequence
  Oligonucleotide for detection of SNP TSC0002767
gaagtatttttaa

SEQ ID NO: 11310 - DNA, 13 bp, Artificial Sequence
  Oligonucleotide for detection of SNP TSC0002767
ttaaaaatacttc

SEQ ID NO: 11311 - DNA, 13 bp, Artificial Sequence
  Oligonucleotide for detection of SNP TSC0002768
tattatatgatgg

SEQ ID NO: 11312 - DNA, 13 bp, Artificial Sequence
  Oligonucleotide for detection of SNP TSC0002768
ccatcatataata

SEQ ID NO: 11313 - DNA, 13 bp, Artificial Sequence
  Oligonucleotide for detection of SNP TSC0002768
ttattatatagta

SEQ ID NO: 11314 - DNA, 13 bp, Artificial Sequence
  Oligonucleotide for detection of SNP TSC0002768
tactatataataa

SEQ ID NO: 11315 - DNA, 13 bp, Artificial Sequence
  Oligonucleotide for detection of SNP TSC0002768
ttattaaatagta

SEQ ID NO: 11316 - DNA, 13 bp, Artificial Sequence
  Oligonucleotide for detection of SNP TSC0002768
tactatttaataa

SEQ ID NO: 11317 - DNA, 13 bp, Artificial Sequence
  Oligonucleotide for detection of SNP TSC0002769
atatgtttgtagt

SEQ ID NO: 11318 - DNA, 13 bp, Artificial Sequence
  Oligonucleotide for detection of SNP TSC0002769
actacaaacatat

SEQ ID NO: 11319 - DNA, 13 bp, Artificial Sequence
  Oligonucleotide for detection of SNP TSC0002769
atatgtgtgtagt

SEQ ID NO: 11320 - DNA, 13 bp, Artificial Sequence
  Oligonucleotide for detection of SNP TSC0002769
actacacacatat

SEQ ID NO: 11321 - DNA, 13 bp, Artificial Sequence
  Oligonucleotide for detection of SNP TSC0002769
atacgtttgtagt

SEQ ID NO: 11322 - DNA, 13 bp, Artificial Sequence
  Oligonucleotide for detection of SNP TSC0002769
actacaaacgtat

SEQ ID NO: 11323 - DNA, 13 bp, Artificial Sequence
  Oligonucleotide for detection of SNP TSC0002769
atacgtgtgtagt

SEQ ID NO: 11324 - DNA, 13 bp, Artificial Sequence
  Oligonucleotide for detection of SNP TSC0002769
actacacacgtat

SEQ ID NO: 11325 - DNA, 13 bp, Artificial Sequence
  Oligonucleotide for detection of SNP TSC0002769
attatagatgtat

SEQ ID NO: 11326 - DNA, 13 bp, Artificial Sequence
  Oligonucleotide for detection of SNP TSC0002769
atacatctataat

SEQ ID NO: 11327 - DNA, 13 bp, Artificial Sequence
  Oligonucleotide for detection of SNP TSC0002769
attatatatgtat

SEQ ID NO: 11328 - DNA, 13 bp, Artificial Sequence
  Oligonucleotide for detection of SNP TSC0002769
atacatatataat

SEQ ID NO: 11329 - DNA, 13 bp, Artificial Sequence
  Oligonucleotide for detection of SNP TSC0002769
attatagacgtat

SEQ ID NO: 11330 - DNA, 13 bp, Artificial Sequence
  Oligonucleotide for detection of SNP TSC0002769
atacgtctataat

SEQ ID NO: 11331 - DNA, 13 bp, Artificial Sequence
  Oligonucleotide for detection of SNP TSC0002769
attatatacgtat

SEQ ID NO: 11332 - DNA, 13 bp, Artificial Sequence
  Oligonucleotide for detection of SNP TSC0002769
atacgtatataat

SEQ ID NO: 11333 - DNA, 13 bp, Artificial Sequence
  Oligonucleotide for detection of SNP TSC0002770
taggtgatatata

SEQ ID NO: 11334 - DNA, 13 bp, Artificial Sequence
  Oligonucleotide for detection of SNP TSC0002770
tatatatcaccta

SEQ ID NO: 11335 - DNA, 13 bp, Artificial Sequence
  Oligonucleotide for detection of SNP TSC0002770
taggtggtatata

SEQ ID NO: 11336 - DNA, 13 bp, Artificial Sequence
  Oligonucleotide for detection of SNP TSC0002770
tatataccaccta

SEQ ID NO: 11337 - DNA, 13 bp, Artificial Sequence
  Oligonucleotide for detection of SNP TSC0002772
attgatataatga

SEQ ID NO: 11338 - DNA, 13 bp, Artificial Sequence
  Oligonucleotide for detection of SNP TSC0002772
tcattatatcaat

SEQ ID NO: 11339 - DNA, 13 bp, Artificial Sequence
  Oligonucleotide for detection of SNP TSC0002772
attgatgtaatga

SEQ ID NO: 11340 - DNA, 13 bp, Artificial Sequence
  Oligonucleotide for detection of SNP TSC0002772
tcattacatcaat

SEQ ID NO: 11341 - DNA, 13 bp, Artificial Sequence
  Oligonucleotide for detection of SNP TSC0002774
gattttttggtty

SEQ ID NO: 11342 - DNA, 13 bp, Artificial Sequence
  Oligonucleotide for detection of SNP TSC0002774
raaccaaaaaatc

SEQ ID NO: 11343 - DNA, 13 bp, Artificial Sequence
  Oligonucleotide for detection of SNP TSC0002774
gattttgtggtty

SEQ ID NO: 11344 - DNA, 13 bp, Artificial Sequence
  Oligonucleotide for detection of SNP TSC0002774
raaccacaaaatc

SEQ ID NO: 11345 - DNA, 13 bp, Artificial Sequence
  Oligonucleotide for detection of SNP TSC0002774
gaattagaagaty

SEQ ID NO: 11346 - DNA, 13 bp, Artificial Sequence
  Oligonucleotide for detection of SNP TSC0002774
ratcttctaattc

SEQ ID NO: 11347 - DNA, 13 bp, Artificial Sequence
  Oligonucleotide for detection of SNP TSC0002774
gaattataagaty

SEQ ID NO: 11348 - DNA, 13 bp, Artificial Sequence
  Oligonucleotide for detection of SNP TSC0002774
ratcttataattc

SEQ ID NO: 11349 - DNA, 13 bp, Artificial Sequence
  Oligonucleotide for detection of SNP TSC0002775
atttttattgtgg

SEQ ID NO: 11350 - DNA, 13 bp, Artificial Sequence
  Oligonucleotide for detection of SNP TSC0002775
ccacaataaaaat

SEQ ID NO: 11351 - DNA, 13 bp, Artificial Sequence
  Oligonucleotide for detection of SNP TSC0002775
atttttgttgtgg

SEQ ID NO: 11352 - DNA, 13 bp, Artificial Sequence
  Oligonucleotide for detection of SNP TSC0002775
ccacaacaaaaat

SEQ ID NO: 11353 - DNA, 13 bp, Artificial Sequence
  Oligonucleotide for detection of SNP TSC0002777
tggttaggttggt

SEQ ID NO: 11354 - DNA, 13 bp, Artificial Sequence
  Oligonucleotide for detection of SNP TSC0002777
accaacctaacca

SEQ ID NO: 11355 - DNA, 13 bp, Artificial Sequence
  Oligonucleotide for detection of SNP TSC0002777
tggttaagttggt

SEQ ID NO: 11356 - DNA, 13 bp, Artificial Sequence
  Oligonucleotide for detection of SNP TSC0002777
accaacttaacca

SEQ ID NO: 11357 - DNA, 13 bp, Artificial Sequence
  Oligonucleotide for detection of SNP TSC0002778
tttttttgtttty

SEQ ID NO: 11358 - DNA, 13 bp, Artificial Sequence
  Oligonucleotide for detection of SNP TSC0002778
raaaacaaaaaaa

SEQ ID NO: 11359 - DNA, 13 bp, Artificial Sequence
  Oligonucleotide for detection of SNP TSC0002778
ttttttagtttty

SEQ ID NO: 11360 - DNA, 13 bp, Artificial Sequence
  Oligonucleotide for detection of SNP TSC0002778
raaaactaaaaaa

SEQ ID NO: 11361 - DNA, 13 bp, Artificial Sequence
  Oligonucleotide for detection of SNP TSC0002778
ttttttcgtttty

SEQ ID NO: 11362 - DNA, 13 bp, Artificial Sequence
  Oligonucleotide for detection of SNP TSC0002778
raaaacgaaaaaa

SEQ ID NO: 11363 - DNA, 13 bp, Artificial Sequence
  Oligonucleotide for detection of SNP TSC0002778
gggaatggaagga

SEQ ID NO: 11364 - DNA, 13 bp, Artificial Sequence
  Oligonucleotide for detection of SNP TSC0002778
tccttccattccc

SEQ ID NO: 11365 - DNA, 13 bp, Artificial Sequence
  Oligonucleotide for detection of SNP TSC0002778
gggaattgaagga

SEQ ID NO: 11366 - DNA, 13 bp, Artificial Sequence
  Oligonucleotide for detection of SNP TSC0002778
tccttcaattccc

SEQ ID NO: 11367 - DNA, 13 bp, Artificial Sequence
  Oligonucleotide for detection of SNP TSC0002778
gggaacggaagga

SEQ ID NO: 11368 - DNA, 13 bp, Artificial Sequence
  Oligonucleotide for detection of SNP TSC0002778
tccttccgttccc

SEQ ID NO: 11369-11376 - skipped (8 entries)

SEQ ID NO: 11377 - DNA, 13 bp, Artificial Sequence
  Oligonucleotide for detection of SNP TSC0002780
tatttggtggtta

SEQ ID NO: 11378 - DNA, 13 bp, Artificial Sequence
  Oligonucleotide for detection of SNP TSC0002780
taaccaccaaata

SEQ ID NO: 11379 - DNA, 13 bp, Artificial Sequence
  Oligonucleotide for detection of SNP TSC0002780
tatttgttggtta

SEQ ID NO: 11380 - DNA, 13 bp, Artificial Sequence
  Oligonucleotide for detection of SNP TSC0002780
taaccaacaaata

SEQ ID NO: 11381 - DNA, 13 bp, Artificial Sequence
  Oligonucleotide for detection of SNP TSC0002780
tggttattaggtg

SEQ ID NO: 11382 - DNA, 13 bp, Artificial Sequence
  Oligonucleotide for detection of SNP TSC0002780
cacctaataacca

SEQ ID NO: 11383 - DNA, 13 bp, Artificial Sequence
  Oligonucleotide for detection of SNP TSC0002780
tggttagtaggtg

SEQ ID NO: 11384 - DNA, 13 bp, Artificial Sequence
  Oligonucleotide for detection of SNP TSC0002780
cacctactaacca

SEQ ID NO: 11385 - DNA, 13 bp, Artificial Sequence
  Oligonucleotide for detection of SNP TSC0002782
gtgtgtgtgtaaa

SEQ ID NO: 11386 - DNA, 13 bp, Artificial Sequence
  Oligonucleotide for detection of SNP TSC0002782
tttacacacacac

SEQ ID NO: 11387 - DNA, 13 bp, Artificial Sequence
  Oligonucleotide for detection of SNP TSC0002782
gtgtgtatgtaaa

SEQ ID NO: 11388 - DNA, 13 bp, Artificial Sequence
  Oligonucleotide for detection of SNP TSC0002782
tttacatacacac

SEQ ID NO: 11389 - DNA, 13 bp, Artificial Sequence
  Oligonucleotide for detection of SNP TSC0002783
tgttggaattata

SEQ ID NO: 11390 - DNA, 13 bp, Artificial Sequence
  Oligonucleotide for detection of SNP TSC0002783
tataattccaaca

SEQ ID NO: 11391 - DNA, 13 bp, Artificial Sequence
  Oligonucleotide for detection of SNP TSC0002784
tatttagtaaata

SEQ ID NO: 11392 - DNA, 13 bp, Artificial Sequence
  Oligonucleotide for detection of SNP TSC0002784
tatttactaaata

SEQ ID NO: 11393 - DNA, 13 bp, Artificial Sequence
  Oligonucleotide for detection of SNP TSC0002784
tatttaataaata

SEQ ID NO: 11394 - DNA, 13 bp, Artificial Sequence
  Oligonucleotide for detection of SNP TSC0002784
tatttattaaata

SEQ ID NO: 11395 - DNA, 13 bp, Artificial Sequence
  Oligonucleotide for detection of SNP TSC0002787
tttgtaatatata

SEQ ID NO: 11396 - DNA, 13 bp, Artificial Sequence
  Oligonucleotide for detection of SNP TSC0002787
tatatattacaaa

SEQ ID NO: 11397 - DNA, 13 bp, Artificial Sequence
  Oligonucleotide for detection of SNP TSC0002787
tttgtagtatata

SEQ ID NO: 11398 - DNA, 13 bp, Artificial Sequence
  Oligonucleotide for detection of SNP TSC0002787
tatatactacaaa

SEQ ID NO: 11399 - DNA, 13 bp, Artificial Sequence
  Oligonucleotide for detection of SNP TSC0002788
gggtaggaggtgt

SEQ ID NO: 11400 - DNA, 13 bp, Artificial Sequence
  Oligonucleotide for detection of SNP TSC0002788
acacctcctaccc

SEQ ID NO: 11401 - DNA, 13 bp, Artificial Sequence
  Oligonucleotide for detection of SNP TSC0002788
gggtagaaggtgt

SEQ ID NO: 11402 - DNA, 13 bp, Artificial Sequence
  Oligonucleotide for detection of SNP TSC0002788
acaccttctaccc

SEQ ID NO: 11403 - DNA, 13 bp, Artificial Sequence
  Oligonucleotide for detection of SNP TSC0002790
agtttatatttta

SEQ ID NO: 11404 - DNA, 13 bp, Artificial Sequence
  Oligonucleotide for detection of SNP TSC0002790
taaaatataaact

SEQ ID NO: 11405 - DNA, 13 bp, Artificial Sequence
  Oligonucleotide for detection of SNP TSC0002790
agtttaaatttta

SEQ ID NO: 11406 - DNA, 13 bp, Artificial Sequence
  Oligonucleotide for detection of SNP TSC0002790
taaaatttaaact

SEQ ID NO: 11407 - DNA, 13 bp, Artificial Sequence
  Oligonucleotide for detection of SNP TSC0002790
tgaaatgtaaatt

SEQ ID NO: 11408 - DNA, 13 bp, Artificial Sequence
  Oligonucleotide for detection of SNP TSC0002790
aatttacatttca

SEQ ID NO: 11409 - DNA, 13 bp, Artificial Sequence
  Oligonucleotide for detection of SNP TSC0002790
tgaaatttaaatt

SEQ ID NO: 11410 - DNA, 13 bp, Artificial Sequence
  Oligonucleotide for detection of SNP TSC0002790
aatttaaatttca

SEQ ID NO: 11411 - DNA, 13 bp, Artificial Sequence
  Oligonucleotide for detection of SNP TSC0002791
atatgaattgtta

SEQ ID NO: 11412 - DNA, 13 bp, Artificial Sequence
  Oligonucleotide for detection of SNP TSC0002791
taacaattcatat

SEQ ID NO: 11413 - DNA, 13 bp, Artificial Sequence
  Oligonucleotide for detection of SNP TSC0002791
atatgagttgtta

SEQ ID NO: 11414 - DNA, 13 bp, Artificial Sequence
  Oligonucleotide for detection of SNP TSC0002791
taacaactcatat

SEQ ID NO: 11415 - DNA, 13 bp, Artificial Sequence
  Oligonucleotide for detection of SNP TSC0002792
tatgagggttaag

SEQ ID NO: 11416 - DNA, 13 bp, Artificial Sequence
  Oligonucleotide for detection of SNP TSC0002792
cttaaccctcata

SEQ ID NO: 11417 - DNA, 13 bp, Artificial Sequence
  Oligonucleotide for detection of SNP TSC0002792
tatgagagttaag

SEQ ID NO: 11418 - DNA, 13 bp, Artificial Sequence
  Oligonucleotide for detection of SNP TSC0002792
cttaactctcata

SEQ ID NO: 11419 - DNA, 13 bp, Artificial Sequence
  Oligonucleotide for detection of SNP TSC0002793
gatattggttgtt

SEQ ID NO: 11420 - DNA, 13 bp, Artificial Sequence
  Oligonucleotide for detection of SNP TSC0002793
aacaaccaatatc

SEQ ID NO: 11421 - DNA, 13 bp, Artificial Sequence
  Oligonucleotide for detection of SNP TSC0002793
gatattagttgtt

SEQ ID NO: 11422 - DNA, 13 bp, Artificial Sequence
  Oligonucleotide for detection of SNP TSC0002793
aacaactaatatc

SEQ ID NO: 11423 - DNA, 13 bp, Artificial Sequence
  Oligonucleotide for detection of SNP TSC0002793
gatatcggttgtt

SEQ ID NO: 11424 - DNA, 13 bp, Artificial Sequence
  Oligonucleotide for detection of SNP TSC0002793
aacaaccgatatc

SEQ ID NO: 11425 - DNA, 13 bp, Artificial Sequence
  Oligonucleotide for detection of SNP TSC0002793
agtagttggtgty

SEQ ID NO: 11426 - DNA, 13 bp, Artificial Sequence
  Oligonucleotide for detection of SNP TSC0002793
racaccaactact

SEQ ID NO: 11427 - DNA, 13 bp, Artificial Sequence
  Oligonucleotide for detection of SNP TSC0002793
agtagtcggtgty

SEQ ID NO: 11428 - DNA, 13 bp, Artificial Sequence
  Oligonucleotide for detection of SNP TSC0002793
racaccgactact

SEQ ID NO: 11429 - DNA, 13 bp, Artificial Sequence
  Oligonucleotide for detection of SNP TSC0002794
tggtaggaatagg

SEQ ID NO: 11430 - DNA, 13 bp, Artificial Sequence
  Oligonucleotide for detection of SNP TSC0002794
cctattcctacca

SEQ ID NO: 11431 - DNA, 13 bp, Artificial Sequence
  Oligonucleotide for detection of SNP TSC0002794
tggtagtaatagg

SEQ ID NO: 11432 - DNA, 13 bp, Artificial Sequence
  Oligonucleotide for detection of SNP TSC0002794
cctattactacca

SEQ ID NO: 11433 - DNA, 13 bp, Artificial Sequence
  Oligonucleotide for detection of SNP TSC0002794
cggtaggaatagg

SEQ ID NO: 11434 - DNA, 13 bp, Artificial Sequence
  Oligonucleotide for detection of SNP TSC0002794
cctattcctaccg

SEQ ID NO: 11435 - DNA, 13 bp, Artificial Sequence
  Oligonucleotide for detection of SNP TSC0002794
cggtagtaatagg

SEQ ID NO: 11436 - DNA, 13 bp, Artificial Sequence
  Oligonucleotide for detection of SNP TSC0002794
cctattactaccg

SEQ ID NO: 11437 - DNA, 13 bp, Artificial Sequence
  Oligonucleotide for detection of SNP TSC0002794
tttgtttttgttg

SEQ ID NO: 11438 - DNA, 13 bp, Artificial Sequence
  Oligonucleotide for detection of SNP TSC0002794
caacaaaaacaaa

SEQ ID NO: 11439 - DNA, 13 bp, Artificial Sequence
  Oligonucleotide for detection of SNP TSC0002794
tttgttgttgttg

SEQ ID NO: 11440 - DNA, 13 bp, Artificial Sequence
  Oligonucleotide for detection of SNP TSC0002794
caacaacaacaaa

SEQ ID NO: 11441 - DNA, 13 bp, Artificial Sequence
  Oligonucleotide for detection of SNP TSC0002794
tttgtttttgtcg

SEQ ID NO: 11442 - DNA, 13 bp, Artificial Sequence
  Oligonucleotide for detection of SNP TSC0002794
cgacaaaaacaaa

SEQ ID NO: 11443 - DNA, 13 bp, Artificial Sequence
  Oligonucleotide for detection of SNP TSC0002794
tttgttgttgtcg

SEQ ID NO: 11444 - DNA, 13 bp, Artificial Sequence
  Oligonucleotide for detection of SNP TSC0002794
cgacaacaacaaa

SEQ ID NO: 11445 - DNA, 13 bp, Artificial Sequence
  Oligonucleotide for detection of SNP TSC0002795
tttaaaattgtta

SEQ ID NO: 11446 - DNA, 13 bp, Artificial Sequence
  Oligonucleotide for detection of SNP TSC0002795
taacaattttaaa

SEQ ID NO: 11447 - DNA, 13 bp, Artificial Sequence
  Oligonucleotide for detection of SNP TSC0002795
tttaaagttgtta

SEQ ID NO: 11448 - DNA, 13 bp, Artificial Sequence
  Oligonucleotide for detection of SNP TSC0002795
taacaactttaaa

SEQ ID NO: 11449 - DNA, 13 bp, Artificial Sequence
  Oligonucleotide for detection of SNP TSC0002796
atatagtggtgtt

SEQ ID NO: 11450 - DNA, 13 bp, Artificial Sequence
  Oligonucleotide for detection of SNP TSC0002796
aacaccactatat

SEQ ID NO: 11451 - DNA, 13 bp, Artificial Sequence
  Oligonucleotide for detection of SNP TSC0002796
atatagtggcgtt

SEQ ID NO: 11452 - DNA, 13 bp, Artificial Sequence
  Oligonucleotide for detection of SNP TSC0002796
aacgccactatat

SEQ ID NO: 11453 - DNA, 13 bp, Artificial Sequence
  Oligonucleotide for detection of SNP TSC0002796
atatagcggtgtt

SEQ ID NO: 11454 - DNA, 13 bp, Artificial Sequence
  Oligonucleotide for detection of SNP TSC0002796
aacaccgctatat

SEQ ID NO: 11455 - DNA, 13 bp, Artificial Sequence
  Oligonucleotide for detection of SNP TSC0002796
atatagcggcgtt

SEQ ID NO: 11456 - DNA, 13 bp, Artificial Sequence
  Oligonucleotide for detection of SNP TSC0002796
aacgccgctatat

SEQ ID NO: 11457 - DNA, 13 bp, Artificial Sequence
  Oligonucleotide for detection of SNP TSC0002796
aatgttattgtat

SEQ ID NO: 11458 - DNA, 13 bp, Artificial Sequence
  Oligonucleotide for detection of SNP TSC0002796
atacaataacatt

SEQ ID NO: 11459 - DNA, 13 bp, Artificial Sequence
  Oligonucleotide for detection of SNP TSC0002796
aatgttgttgtat

SEQ ID NO: 11460 - DNA, 13 bp, Artificial Sequence
  Oligonucleotide for detection of SNP TSC0002796
atacaacaacatt

SEQ ID NO: 11461 - DNA, 13 bp, Artificial Sequence
  Oligonucleotide for detection of SNP TSC0002796
aacgttattgtat

SEQ ID NO: 11462 - DNA, 13 bp, Artificial Sequence
  Oligonucleotide for detection of SNP TSC0002796
atacaataacgtt

SEQ ID NO: 11463 - DNA, 13 bp, Artificial Sequence
  Oligonucleotide for detection of SNP TSC0002796
aacgttgttgtat

SEQ ID NO: 11464 - DNA, 13 bp, Artificial Sequence
  Oligonucleotide for detection of SNP TSC0002796
atacaacaacgtt

SEQ ID NO: 11465 - DNA, 13 bp, Artificial Sequence
  Oligonucleotide for detection of SNP TSC0002796
aatgtcgttgtat

SEQ ID NO: 11466 - DNA, 13 bp, Artificial Sequence
  Oligonucleotide for detection of SNP TSC0002796
atacaacgacatt

SEQ ID NO: 11467 - DNA, 13 bp, Artificial Sequence
  Oligonucleotide for detection of SNP TSC0002796
aacgtcgttgtat

SEQ ID NO: 11468 - DNA, 13 bp, Artificial Sequence
  Oligonucleotide for detection of SNP TSC0002796
atacaacgacgtt

SEQ ID NO: 11469 - DNA, 13 bp, Artificial Sequence
  Oligonucleotide for detection of SNP TSC0002797
gtgatgaagtgtt

SEQ ID NO: 11470 - DNA, 13 bp, Artificial Sequence
  Oligonucleotide for detection of SNP TSC0002797
aacacttcatcac

SEQ ID NO: 11471 - DNA, 13 bp, Artificial Sequence
  Oligonucleotide for detection of SNP TSC0002797
gtgatggagtgtt

SEQ ID NO: 11472 - DNA, 13 bp, Artificial Sequence
  Oligonucleotide for detection of SNP TSC0002797
aacactccatcac

SEQ ID NO: 11473 - DNA, 13 bp, Artificial Sequence
  Oligonucleotide for detection of SNP TSC0002797
gcgatgaagtgtt

SEQ ID NO: 11474 - DNA, 13 bp, Artificial Sequence
  Oligonucleotide for detection of SNP TSC0002797
aacacttcatcgc

SEQ ID NO: 11475 - DNA, 13 bp, Artificial Sequence
  Oligonucleotide for detection of SNP TSC0002797
gcgatggagtgtt

SEQ ID NO: 11476 - DNA, 13 bp, Artificial Sequence
  Oligonucleotide for detection of SNP TSC0002797
aacactccatcgc

SEQ ID NO: 11477 - DNA, 13 bp, Artificial Sequence
  Oligonucleotide for detection of SNP TSC0002798
tattgtgtttagy

SEQ ID NO: 11478 - DNA, 13 bp, Artificial Sequence
  Oligonucleotide for detection of SNP TSC0002798
rctaaacacaata

SEQ ID NO: 11479 - DNA, 13 bp, Artificial Sequence
  Oligonucleotide for detection of SNP TSC0002798
tattgtatttagy

SEQ ID NO: 11480 - DNA, 13 bp, Artificial Sequence
  Oligonucleotide for detection of SNP TSC0002798
rctaaatacaata

SEQ ID NO: 11481 - DNA, 13 bp, Artificial Sequence
  Oligonucleotide for detection of SNP TSC0002798
tattgcgtttagy

SEQ ID NO: 11482 - DNA, 13 bp, Artificial Sequence
  Oligonucleotide for detection of SNP TSC0002798
rctaaacgcaata

SEQ ID NO: 11483 - DNA, 13 bp, Artificial Sequence
  Oligonucleotide for detection of SNP TSC0002798
gttgggtgtagtg

SEQ ID NO: 11484 - DNA, 13 bp, Artificial Sequence
  Oligonucleotide for detection of SNP TSC0002798
cactacacccaac

SEQ ID NO: 11485 - DNA, 13 bp, Artificial Sequence
  Oligonucleotide for detection of SNP TSC0002798
gttgggcgtagtg

SEQ ID NO: 11486 - DNA, 13 bp, Artificial Sequence
  Oligonucleotide for detection of SNP TSC0002798
cactacgcccaac

SEQ ID NO: 11487 - DNA, 13 bp, Artificial Sequence
  Oligonucleotide for detection of SNP TSC0002799
tttattgattttt

SEQ ID NO: 11488 - DNA, 13 bp, Artificial Sequence
  Oligonucleotide for detection of SNP TSC0002799
aaaaatcaataaa

SEQ ID NO: 11489 - DNA, 13 bp, Artificial Sequence
  Oligonucleotide for detection of SNP TSC0002799
tttattaattttt

SEQ ID NO: 11490 - DNA, 13 bp, Artificial Sequence
  Oligonucleotide for detection of SNP TSC0002799
aaaaattaataaa

SEQ ID NO: 11491 - DNA, 13 bp, Artificial Sequence
  Oligonucleotide for detection of SNP TSC0002800
tggtgggggttgg

SEQ ID NO: 11492 - DNA, 13 bp, Artificial Sequence
  Oligonucleotide for detection of SNP TSC0002800
ccaacccccacca

SEQ ID NO: 11493 - DNA, 13 bp, Artificial Sequence
  Oligonucleotide for detection of SNP TSC0002800
tggtggtggttgg

SEQ ID NO: 11494 - DNA, 13 bp, Artificial Sequence
  Oligonucleotide for detection of SNP TSC0002800
ccaaccaccacca

SEQ ID NO: 11495 - DNA, 13 bp, Artificial Sequence
  Oligonucleotide for detection of SNP TSC0002800
cggtgggggttgg

SEQ ID NO: 11496 - DNA, 13 bp, Artificial Sequence
  Oligonucleotide for detection of SNP TSC0002800
ccaacccccaccg

SEQ ID NO: 11497 - DNA, 13 bp, Artificial Sequence
  Oligonucleotide for detection of SNP TSC0002800
cggtggtggttgg

SEQ ID NO: 11498 - DNA, 13 bp, Artificial Sequence
  Oligonucleotide for detection of SNP TSC0002800
ccaaccaccaccg

SEQ ID NO: 11499 - DNA, 13 bp, Artificial Sequence
  Oligonucleotide for detection of SNP TSC0002800
tggcgggggttgg

SEQ ID NO: 11500 - DNA, 13 bp, Artificial Sequence
  Oligonucleotide for detection of SNP TSC0002800
ccaacccccgcca

SEQ ID NO: 11501 - DNA, 13 bp, Artificial Sequence
  Oligonucleotide for detection of SNP TSC0002800
tggcggtggttgg

SEQ ID NO: 11502 - DNA, 13 bp, Artificial Sequence
  Oligonucleotide for detection of SNP TSC0002800
ccaaccaccgcca

SEQ ID NO: 11503 - DNA, 13 bp, Artificial Sequence
  Oligonucleotide for detection of SNP TSC0002800
cggcgggggttgg

SEQ ID NO: 11504 - DNA, 13 bp, Artificial Sequence
  Oligonucleotide for detection of SNP TSC0002800
ccaacccccgccg

SEQ ID NO: 11505 - DNA, 13 bp, Artificial Sequence
  Oligonucleotide for detection of SNP TSC0002800
cggcggtggttgg

SEQ ID NO: 11506 - DNA, 13 bp, Artificial Sequence
  Oligonucleotide for detection of SNP TSC0002800
ccaaccaccgccg

SEQ ID NO: 11507 - DNA, 13 bp, Artificial Sequence
  Oligonucleotide for detection of SNP TSC0002800
ttaatttttgttg

SEQ ID NO: 11508 - DNA, 13 bp, Artificial Sequence
  Oligonucleotide for detection of SNP TSC0002800
caacaaaaattaa

SEQ ID NO: 11509 - DNA, 13 bp, Artificial Sequence
  Oligonucleotide for detection of SNP TSC0002800
ttaattattgttg

SEQ ID NO: 11510 - DNA, 13 bp, Artificial Sequence
  Oligonucleotide for detection of SNP TSC0002800
caacaataattaa

SEQ ID NO: 11511 - DNA, 13 bp, Artificial Sequence
  Oligonucleotide for detection of SNP TSC0002800
ttaattttcgttg

SEQ ID NO: 11512 - DNA, 13 bp, Artificial Sequence
  Oligonucleotide for detection of SNP TSC0002800
caacgaaaattaa

SEQ ID NO: 11513 - DNA, 13 bp, Artificial Sequence
  Oligonucleotide for detection of SNP TSC0002800
ttaattatcgttg

SEQ ID NO: 11514 - DNA, 13 bp, Artificial Sequence
  Oligonucleotide for detection of SNP TSC0002800
caacgataattaa

SEQ ID NO: 11515 - DNA, 13 bp, Artificial Sequence
  Oligonucleotide for detection of SNP TSC0002800
ttaatttttgtcg

SEQ ID NO: 11516 - DNA, 13 bp, Artificial Sequence
  Oligonucleotide for detection of SNP TSC0002800
cgacaaaaattaa

SEQ ID NO: 11517 - DNA, 13 bp, Artificial Sequence
  Oligonucleotide for detection of SNP TSC0002800
ttaattattgtcg

SEQ ID NO: 11518 - DNA, 13 bp, Artificial Sequence
  Oligonucleotide for detection of SNP TSC0002800
cgacaataattaa

SEQ ID NO: 11519 - DNA, 13 bp, Artificial Sequence
  Oligonucleotide for detection of SNP TSC0002800
ttaattttcgtcg

SEQ ID NO: 11520 - DNA, 13 bp, Artificial Sequence
  Oligonucleotide for detection of SNP TSC0002800
cgacgaaaattaa

SEQ ID NO: 11521 - DNA, 13 bp, Artificial Sequence
  Oligonucleotide for detection of SNP TSC0002800
ttaattatcgtcg

SEQ ID NO: 11522 - DNA, 13 bp, Artificial Sequence
  Oligonucleotide for detection of SNP TSC0002800
cgacgataattaa

SEQ ID NO: 11523 - DNA, 13 bp, Artificial Sequence
  Oligonucleotide for detection of SNP TSC0002801
attggattgggaa

SEQ ID NO: 11524 - DNA, 13 bp, Artificial Sequence
  Oligonucleotide for detection of SNP TSC0002801
ttcccaatccaat

SEQ ID NO: 11525 - DNA, 13 bp, Artificial Sequence
  Oligonucleotide for detection of SNP TSC0002801
attggagtgggaa

SEQ ID NO: 11526 - DNA, 13 bp, Artificial Sequence
  Oligonucleotide for detection of SNP TSC0002801
ttcccactccaat

SEQ ID NO: 11527 - DNA, 13 bp, Artificial Sequence
  Oligonucleotide for detection of SNP TSC0002801
atcggattgggaa

SEQ ID NO: 11528 - DNA, 13 bp, Artificial Sequence
  Oligonucleotide for detection of SNP TSC0002801
ttcccaatccgat

SEQ ID NO: 11529 - DNA, 13 bp, Artificial Sequence
  Oligonucleotide for detection of SNP TSC0002801
atcggagtgggaa

SEQ ID NO: 11530 - DNA, 13 bp, Artificial Sequence
  Oligonucleotide for detection of SNP TSC0002801
ttcccactccgat

SEQ ID NO: 11531 - DNA, 13 bp, Artificial Sequence
  Oligonucleotide for detection of SNP TSC0002801
tttttaatttggt

SEQ ID NO: 11532 - DNA, 13 bp, Artificial Sequence
  Oligonucleotide for detection of SNP TSC0002801
accaaattaaaaa

SEQ ID NO: 11533 - DNA, 13 bp, Artificial Sequence
  Oligonucleotide for detection of SNP TSC0002801
tttttattttggt

SEQ ID NO: 11534 - DNA, 13 bp, Artificial Sequence
  Oligonucleotide for detection of SNP TSC0002801
accaaaataaaaa

SEQ ID NO: 11535 - DNA, 13 bp, Artificial Sequence
  Oligonucleotide for detection of SNP TSC0002801
tttttaattcggt

SEQ ID NO: 11536 - DNA, 13 bp, Artificial Sequence
  Oligonucleotide for detection of SNP TSC0002801
accgaattaaaaa

SEQ ID NO: 11537 - DNA, 13 bp, Artificial Sequence
  Oligonucleotide for detection of SNP TSC0002801
tttttatttcggt

SEQ ID NO: 11538 - DNA, 13 bp, Artificial Sequence
  Oligonucleotide for detection of SNP TSC0002801
accgaaataaaaa

SEQ ID NO: 11539 - DNA, 13 bp, Artificial Sequence
  Oligonucleotide for detection of SNP TSC0002802
tggtatttttttt

SEQ ID NO: 11540 - DNA, 13 bp, Artificial Sequence
  Oligonucleotide for detection of SNP TSC0002802
aaaaaaaatacca

SEQ ID NO: 11541 - DNA, 13 bp, Artificial Sequence
  Oligonucleotide for detection of SNP TSC0002802
tggtatatttttt

SEQ ID NO: 11542 - DNA, 13 bp, Artificial Sequence
  Oligonucleotide for detection of SNP TSC0002802
aaaaaatatacca

SEQ ID NO: 11543 - DNA, 13 bp, Artificial Sequence
  Oligonucleotide for detection of SNP TSC0002802
aaaaggggtatta

SEQ ID NO: 11544 - DNA, 13 bp, Artificial Sequence
  Oligonucleotide for detection of SNP TSC0002802
taatacccctttt

SEQ ID NO: 11545 - DNA, 13 bp, Artificial Sequence
  Oligonucleotide for detection of SNP TSC0002802
aaaaggtgtatta

SEQ ID NO: 11546 - DNA, 13 bp, Artificial Sequence
  Oligonucleotide for detection of SNP TSC0002802
taatacacctttt

SEQ ID NO: 11547 - DNA, 13 bp, Artificial Sequence
  Oligonucleotide for detection of SNP TSC0002804
aaatgtaaaatgt

SEQ ID NO: 11548 - DNA, 13 bp, Artificial Sequence
  Oligonucleotide for detection of SNP TSC0002804
acattttacattt

SEQ ID NO: 11549 - DNA, 13 bp, Artificial Sequence
  Oligonucleotide for detection of SNP TSC0002804
aaatgttaaatgt

SEQ ID NO: 11550 - DNA, 13 bp, Artificial Sequence
  Oligonucleotide for detection of SNP TSC0002804
acatttaacattt

SEQ ID NO: 11551 - DNA, 13 bp, Artificial Sequence
  Oligonucleotide for detection of SNP TSC0002804
atattttgtattt

SEQ ID NO: 11552 - DNA, 13 bp, Artificial Sequence
  Oligonucleotide for detection of SNP TSC0002804
aaatacaaaatat

SEQ ID NO: 11553 - DNA, 13 bp, Artificial Sequence
  Oligonucleotide for detection of SNP TSC0002804
atatttggtattt

SEQ ID NO: 11554 - DNA, 13 bp, Artificial Sequence
  Oligonucleotide for detection of SNP TSC0002804
aaataccaaatat

SEQ ID NO: 11555-11562 - skipped (8 entries)

SEQ ID NO: 11563 - DNA, 13 bp, Artificial Sequence
  Oligonucleotide for detection of SNP TSC0002806
agtgtaggagttt

SEQ ID NO: 11564 - DNA, 13 bp, Artificial Sequence
  Oligonucleotide for detection of SNP TSC0002806
aaactcctacact

SEQ ID NO: 11565 - DNA, 13 bp, Artificial Sequence
  Oligonucleotide for detection of SNP TSC0002806
agtgtatgagttt

SEQ ID NO: 11566 - DNA, 13 bp, Artificial Sequence
  Oligonucleotide for detection of SNP TSC0002806
aaactcatacact

SEQ ID NO: 11567 - DNA, 13 bp, Artificial Sequence
  Oligonucleotide for detection of SNP TSC0002806
aagtttttatatt

SEQ ID NO: 11568 - DNA, 13 bp, Artificial Sequence
  Oligonucleotide for detection of SNP TSC0002806
aatataaaaactt

SEQ ID NO: 11569 - DNA, 13 bp, Artificial Sequence
  Oligonucleotide for detection of SNP TSC0002806
aagtttatatatt

SEQ ID NO: 11570 - DNA, 13 bp, Artificial Sequence
  Oligonucleotide for detection of SNP TSC0002806
aatatataaactt

SEQ ID NO: 11571 - DNA, 13 bp, Artificial Sequence
  Oligonucleotide for detection of SNP TSC0002808
ttgttttgggtty

SEQ ID NO: 11572 - DNA, 13 bp, Artificial Sequence
  Oligonucleotide for detection of SNP TSC0002808
raacccaaaacaa

SEQ ID NO: 11573 - DNA, 13 bp, Artificial Sequence
  Oligonucleotide for detection of SNP TSC0002808
ttgtttcgggtty

SEQ ID NO: 11574 - DNA, 13 bp, Artificial Sequence
  Oligonucleotide for detection of SNP TSC0002808
raacccgaaacaa

SEQ ID NO: 11575 - DNA, 13 bp, Artificial Sequence
  Oligonucleotide for detection of SNP TSC0002808
gagtttggagtag

SEQ ID NO: 11576 - DNA, 13 bp, Artificial Sequence
  Oligonucleotide for detection of SNP TSC0002808
ctactccaaactc

SEQ ID NO: 11577 - DNA, 13 bp, Artificial Sequence
  Oligonucleotide for detection of SNP TSC0002808
gagtttagagtag

SEQ ID NO: 11578 - DNA, 13 bp, Artificial Sequence
  Oligonucleotide for detection of SNP TSC0002808
ctactctaaactc

SEQ ID NO: 11579 - DNA, 13 bp, Artificial Sequence
  Oligonucleotide for detection of SNP TSC0002808
gagttcggagtag

SEQ ID NO: 11580 - DNA, 13 bp, Artificial Sequence
  Oligonucleotide for detection of SNP TSC0002808
ctactccgaactc

SEQ ID NO: 11581 - DNA, 13 bp, Artificial Sequence
  Oligonucleotide for detection of SNP TSC0002811
gagtatttttggy

SEQ ID NO: 11582 - DNA, 13 bp, Artificial Sequence
  Oligonucleotide for detection of SNP TSC0002811
rccaaaaatactc

SEQ ID NO: 11583 - DNA, 13 bp, Artificial Sequence
  Oligonucleotide for detection of SNP TSC0002811
gagtatatttggy

SEQ ID NO: 11584 - DNA, 13 bp, Artificial Sequence
  Oligonucleotide for detection of SNP TSC0002811
rccaaatatactc

SEQ ID NO: 11585 - DNA, 13 bp, Artificial Sequence
  Oligonucleotide for detection of SNP TSC0002811
gttagaggtgtty

SEQ ID NO: 11586 - DNA, 13 bp, Artificial Sequence
  Oligonucleotide for detection of SNP TSC0002811
raacacctctaac

SEQ ID NO: 11587 - DNA, 13 bp, Artificial Sequence
  Oligonucleotide for detection of SNP TSC0002811
gttagatgtgtty

SEQ ID NO: 11588 - DNA, 13 bp, Artificial Sequence
  Oligonucleotide for detection of SNP TSC0002811
raacacatctaac

SEQ ID NO: 11589 - DNA, 13 bp, Artificial Sequence
  Oligonucleotide for detection of SNP TSC0002812
ggtaggaatagga

SEQ ID NO: 11590 - DNA, 13 bp, Artificial Sequence
  Oligonucleotide for detection of SNP TSC0002812
tcctattcctacc

SEQ ID NO: 11591 - DNA, 13 bp, Artificial Sequence
  Oligonucleotide for detection of SNP TSC0002812
ggtaggtatagga

SEQ ID NO: 11592 - DNA, 13 bp, Artificial Sequence
  Oligonucleotide for detection of SNP TSC0002812
tcctatacctacc

SEQ ID NO: 11593 - DNA, 13 bp, Artificial Sequence
  Oligonucleotide for detection of SNP TSC0002812
ttttgtttttgty

SEQ ID NO: 11594 - DNA, 13 bp, Artificial Sequence
  Oligonucleotide for detection of SNP TSC0002812
racaaaaacaaaa

SEQ ID NO: 11595 - DNA, 13 bp, Artificial Sequence
  Oligonucleotide for detection of SNP TSC0002812
ttttgtatttgty

SEQ ID NO: 11596 - DNA, 13 bp, Artificial Sequence
  Oligonucleotide for detection of SNP TSC0002812
racaaatacaaaa

SEQ ID NO: 11597 - DNA, 13 bp, Artificial Sequence
  Oligonucleotide for detection of SNP TSC0002813
atgttttgttgtg

SEQ ID NO: 11598 - DNA, 13 bp, Artificial Sequence
  Oligonucleotide for detection of SNP TSC0002813
cacaacaaaacat

SEQ ID NO: 11599 - DNA, 13 bp, Artificial Sequence
  Oligonucleotide for detection of SNP TSC0002813
atgtttggttgtg

SEQ ID NO: 11600 - DNA, 13 bp, Artificial Sequence
  Oligonucleotide for detection of SNP TSC0002813
cacaaccaaacat

SEQ ID NO: 11601 - DNA, 13 bp, Artificial Sequence
  Oligonucleotide for detection of SNP TSC0002813
tataataaaatat

SEQ ID NO: 11602 - DNA, 13 bp, Artificial Sequence
  Oligonucleotide for detection of SNP TSC0002813
atattttattata

SEQ ID NO: 11603 - DNA, 13 bp, Artificial Sequence
  Oligonucleotide for detection of SNP TSC0002813
tataattaaatat

SEQ ID NO: 11604 - DNA, 13 bp, Artificial Sequence
  Oligonucleotide for detection of SNP TSC0002813
atatttaattata

SEQ ID NO: 11605 - DNA, 13 bp, Artificial Sequence
  Oligonucleotide for detection of SNP TSC0002816
tatataaagtagg

SEQ ID NO: 11606 - DNA, 13 bp, Artificial Sequence
  Oligonucleotide for detection of SNP TSC0002816
cctactttatata

SEQ ID NO: 11607 - DNA, 13 bp, Artificial Sequence
  Oligonucleotide for detection of SNP TSC0002816
tatatatagtagg

SEQ ID NO: 11608 - DNA, 13 bp, Artificial Sequence
  Oligonucleotide for detection of SNP TSC0002816
cctactatatata

SEQ ID NO: 11609 - DNA, 13 bp, Artificial Sequence
  Oligonucleotide for detection of SNP TSC0002816
tttgttttgtata

SEQ ID NO: 11610 - DNA, 13 bp, Artificial Sequence
  Oligonucleotide for detection of SNP TSC0002816
tatacaaaacaaa

SEQ ID NO: 11611 - DNA, 13 bp, Artificial Sequence
  Oligonucleotide for detection of SNP TSC0002816
tttgttatgtata

SEQ ID NO: 11612 - DNA, 13 bp, Artificial Sequence
  Oligonucleotide for detection of SNP TSC0002816
tatacataacaaa

SEQ ID NO: 11613 - DNA, 13 bp, Artificial Sequence
  Oligonucleotide for detection of SNP TSC0002817
ttttaaagaatty

SEQ ID NO: 11614 - DNA, 13 bp, Artificial Sequence
  Oligonucleotide for detection of SNP TSC0002817
raattctttaaaa

SEQ ID NO: 11615 - DNA, 13 bp, Artificial Sequence
  Oligonucleotide for detection of SNP TSC0002817
ttttaatgaatty

SEQ ID NO: 11616 - DNA, 13 bp, Artificial Sequence
  Oligonucleotide for detection of SNP TSC0002817
raattcattaaaa

SEQ ID NO: 11617 - DNA, 13 bp, Artificial Sequence
  Oligonucleotide for detection of SNP TSC0002817
ttttaacgaatty

SEQ ID NO: 11618 - DNA, 13 bp, Artificial Sequence
  Oligonucleotide for detection of SNP TSC0002817
raattcgttaaaa

SEQ ID NO: 11619 - DNA, 13 bp, Artificial Sequence
  Oligonucleotide for detection of SNP TSC0002817
gaattttttgaga

SEQ ID NO: 11620 - DNA, 13 bp, Artificial Sequence
  Oligonucleotide for detection of SNP TSC0002817
tctcaaaaaattc

SEQ ID NO: 11621 - DNA, 13 bp, Artificial Sequence
  Oligonucleotide for detection of SNP TSC0002817
gaatttgttgaga

SEQ ID NO: 11622 - DNA, 13 bp, Artificial Sequence
  Oligonucleotide for detection of SNP TSC0002817
tctcaacaaattc

SEQ ID NO: 11623 - DNA, 13 bp, Artificial Sequence
  Oligonucleotide for detection of SNP TSC0002817
gaattcgttgaga

SEQ ID NO: 11624 - DNA, 13 bp, Artificial Sequence
  Oligonucleotide for detection of SNP TSC0002817
tctcaacgaattc

SEQ ID NO: 11625 - DNA, 13 bp, Artificial Sequence
  Oligonucleotide for detection of SNP TSC0002818
gggggtgatgaag

SEQ ID NO: 11626 - DNA, 13 bp, Artificial Sequence
  Oligonucleotide for detection of SNP TSC0002818
cttcatcaccccc

SEQ ID NO: 11627 - DNA, 13 bp, Artificial Sequence
  Oligonucleotide for detection of SNP TSC0002818
gggggtaatgaag

SEQ ID NO: 11628 - DNA, 13 bp, Artificial Sequence
  Oligonucleotide for detection of SNP TSC0002818
cttcattaccccc

SEQ ID NO: 11629 - DNA, 13 bp, Artificial Sequence
  Oligonucleotide for detection of SNP TSC0002818
gggggcgatgaag

SEQ ID NO: 11630 - DNA, 13 bp, Artificial Sequence
  Oligonucleotide for detection of SNP TSC0002818
cttcatcgccccc

SEQ ID NO: 11631 - DNA, 13 bp, Artificial Sequence
  Oligonucleotide for detection of SNP TSC0002818
gggggtaacgaag

SEQ ID NO: 11632 - DNA, 13 bp, Artificial Sequence
  Oligonucleotide for detection of SNP TSC0002818
cttcgttaccccc

SEQ ID NO: 11633 - DNA, 13 bp, Artificial Sequence
  Oligonucleotide for detection of SNP TSC0002818
gggggtgacgaag

SEQ ID NO: 11634 - DNA, 13 bp, Artificial Sequence
  Oligonucleotide for detection of SNP TSC0002818
cttcgtcaccccc

SEQ ID NO: 11635 - DNA, 13 bp, Artificial Sequence
  Oligonucleotide for detection of SNP TSC0002818
gggggcgacgaag

SEQ ID NO: 11636 - DNA, 13 bp, Artificial Sequence
  Oligonucleotide for detection of SNP TSC0002818
cttcgtcgccccc

SEQ ID NO: 11637 - DNA, 13 bp, Artificial Sequence
  Oligonucleotide for detection of SNP TSC0002818
ttttgttgtttty

SEQ ID NO: 11638 - DNA, 13 bp, Artificial Sequence
  Oligonucleotide for detection of SNP TSC0002818
raaaacaacaaaa

SEQ ID NO: 11639 - DNA, 13 bp, Artificial Sequence
  Oligonucleotide for detection of SNP TSC0002818
tttcgttgtttty

SEQ ID NO: 11640 - DNA, 13 bp, Artificial Sequence
  Oligonucleotide for detection of SNP TSC0002818
raaaacaacgaaa

SEQ ID NO: 11641 - DNA, 13 bp, Artificial Sequence
  Oligonucleotide for detection of SNP TSC0002818
ttttgtcgtttty

SEQ ID NO: 11642 - DNA, 13 bp, Artificial Sequence
  Oligonucleotide for detection of SNP TSC0002818
raaaacgacaaaa

SEQ ID NO: 11643 - DNA, 13 bp, Artificial Sequence
  Oligonucleotide for detection of SNP TSC0002818
tttcgtcgtttty

SEQ ID NO: 11644 - DNA, 13 bp, Artificial Sequence
  Oligonucleotide for detection of SNP TSC0002818
raaaacgacgaaa

SEQ ID NO: 11645 - DNA, 13 bp, Artificial Sequence
  Oligonucleotide for detection of SNP TSC0002819
tgtttaaatttay

SEQ ID NO: 11646 - DNA, 13 bp, Artificial Sequence
  Oligonucleotide for detection of SNP TSC0002819
rtaaatttaaaca

SEQ ID NO: 11647 - DNA, 13 bp, Artificial Sequence
  Oligonucleotide for detection of SNP TSC0002819
tgtttagatttay

SEQ ID NO: 11648 - DNA, 13 bp, Artificial Sequence
  Oligonucleotide for detection of SNP TSC0002819
rtaaatctaaaca

SEQ ID NO: 11649 - DNA, 13 bp, Artificial Sequence
  Oligonucleotide for detection of SNP TSC0002820
gtaaagggttggg

SEQ ID NO: 11650 - DNA, 13 bp, Artificial Sequence
  Oligonucleotide for detection of SNP TSC0002820
cccaaccctttac

SEQ ID NO: 11651 - DNA, 13 bp, Artificial Sequence
  Oligonucleotide for detection of SNP TSC0002820
gtaaagagttggg

SEQ ID NO: 11652 - DNA, 13 bp, Artificial Sequence
  Oligonucleotide for detection of SNP TSC0002820
cccaactctttac

SEQ ID NO: 11653 - DNA, 13 bp, Artificial Sequence
  Oligonucleotide for detection of SNP TSC0002822
ttattagatttta

SEQ ID NO: 11654 - DNA, 13 bp, Artificial Sequence
  Oligonucleotide for detection of SNP TSC0002822
taaaatctaataa

SEQ ID NO: 11655 - DNA, 13 bp, Artificial Sequence
  Oligonucleotide for detection of SNP TSC0002822
ttattatatttta

SEQ ID NO: 11656 - DNA, 13 bp, Artificial Sequence
  Oligonucleotide for detection of SNP TSC0002822
taaaatataataa

SEQ ID NO: 11657 - DNA, 13 bp, Artificial Sequence
  Oligonucleotide for detection of SNP TSC0002822
tggggtttggtgg

SEQ ID NO: 11658 - DNA, 13 bp, Artificial Sequence
  Oligonucleotide for detection of SNP TSC0002822
ccaccaaacccca

SEQ ID NO: 11659 - DNA, 13 bp, Artificial Sequence
  Oligonucleotide for detection of SNP TSC0002822
tggggtatggtgg

SEQ ID NO: 11660 - DNA, 13 bp, Artificial Sequence
  Oligonucleotide for detection of SNP TSC0002822
ccaccatacccca

SEQ ID NO: 11661 - DNA, 13 bp, Artificial Sequence
  Oligonucleotide for detection of SNP TSC0002823
tttttttataggy

SEQ ID NO: 11662 - DNA, 13 bp, Artificial Sequence
  Oligonucleotide for detection of SNP TSC0002823
rcctataaaaaaa

SEQ ID NO: 11663 - DNA, 13 bp, Artificial Sequence
  Oligonucleotide for detection of SNP TSC0002823
ttttttgataggy

SEQ ID NO: 11664 - DNA, 13 bp, Artificial Sequence
  Oligonucleotide for detection of SNP TSC0002823
rcctatcaaaaaa

SEQ ID NO: 11665 - DNA, 13 bp, Artificial Sequence
  Oligonucleotide for detection of SNP TSC0002823
gtttatgaaaaga

SEQ ID NO: 11666 - DNA, 13 bp, Artificial Sequence
  Oligonucleotide for detection of SNP TSC0002823
tcttttcataaac

SEQ ID NO: 11667 - DNA, 13 bp, Artificial Sequence
  Oligonucleotide for detection of SNP TSC0002823
gtttattaaaaga

SEQ ID NO: 11668 - DNA, 13 bp, Artificial Sequence
  Oligonucleotide for detection of SNP TSC0002823
tcttttaataaac

SEQ ID NO: 11669 - DNA, 13 bp, Artificial Sequence
  Oligonucleotide for detection of SNP TSC0002824
tgtatagtaaata

SEQ ID NO: 11670 - DNA, 13 bp, Artificial Sequence
  Oligonucleotide for detection of SNP TSC0002824
tatttactataca

SEQ ID NO: 11671 - DNA, 13 bp, Artificial Sequence
  Oligonucleotide for detection of SNP TSC0002824
tgtataataaata

SEQ ID NO: 11672 - DNA, 13 bp, Artificial Sequence
  Oligonucleotide for detection of SNP TSC0002824
tatttattataca

SEQ ID NO: 11673 - DNA, 13 bp, Artificial Sequence
  Oligonucleotide for detection of SNP TSC0002825
aaatagatatatg

SEQ ID NO: 11674 - DNA, 13 bp, Artificial Sequence
  Oligonucleotide for detection of SNP TSC0002825
catatatctattt

SEQ ID NO: 11675 - DNA, 13 bp, Artificial Sequence
  Oligonucleotide for detection of SNP TSC0002825
aaataggtatatg

SEQ ID NO: 11676 - DNA, 13 bp, Artificial Sequence
  Oligonucleotide for detection of SNP TSC0002825
catatacctattt

SEQ ID NO: 11677 - DNA, 13 bp, Artificial Sequence
  Oligonucleotide for detection of SNP TSC0002826
ggttgtagagtty

SEQ ID NO: 11678 - DNA, 13 bp, Artificial Sequence
  Oligonucleotide for detection of SNP TSC0002826
raactctacaacc

SEQ ID NO: 11679 - DNA, 13 bp, Artificial Sequence
  Oligonucleotide for detection of SNP TSC0002826
ggttgtggagtty

SEQ ID NO: 11680 - DNA, 13 bp, Artificial Sequence
  Oligonucleotide for detection of SNP TSC0002826
raactccacaacc

SEQ ID NO: 11681 - DNA, 13 bp, Artificial Sequence
  Oligonucleotide for detection of SNP TSC0002826
ggttgcggagtty

SEQ ID NO: 11682 - DNA, 13 bp, Artificial Sequence
  Oligonucleotide for detection of SNP TSC0002826
raactccgcaacc

SEQ ID NO: 11683 - DNA, 13 bp, Artificial Sequence
  Oligonucleotide for detection of SNP TSC0002826
gagttttgtaaty

SEQ ID NO: 11684 - DNA, 13 bp, Artificial Sequence
  Oligonucleotide for detection of SNP TSC0002826
rattacaaaactc

SEQ ID NO: 11685 - DNA, 13 bp, Artificial Sequence
  Oligonucleotide for detection of SNP TSC0002826
gagtttcgtaaty

SEQ ID NO: 11686 - DNA, 13 bp, Artificial Sequence
  Oligonucleotide for detection of SNP TSC0002826
rattacgaaactc

SEQ ID NO: 11687 - DNA, 13 bp, Artificial Sequence
  Oligonucleotide for detection of SNP TSC0002827
ggttgtagtagga

SEQ ID NO: 11688 - DNA, 13 bp, Artificial Sequence
  Oligonucleotide for detection of SNP TSC0002827
tcctactacaacc

SEQ ID NO: 11689 - DNA, 13 bp, Artificial Sequence
  Oligonucleotide for detection of SNP TSC0002827
ggttgtggtagga

SEQ ID NO: 11690 - DNA, 13 bp, Artificial Sequence
  Oligonucleotide for detection of SNP TSC0002827
tcctaccacaacc

SEQ ID NO: 11691 - DNA, 13 bp, Artificial Sequence
  Oligonucleotide for detection of SNP TSC0002828
ttttttattttgt

SEQ ID NO: 11692 - DNA, 13 bp, Artificial Sequence
  Oligonucleotide for detection of SNP TSC0002828
acaaaataaaaaa

SEQ ID NO: 11693 - DNA, 13 bp, Artificial Sequence
  Oligonucleotide for detection of SNP TSC0002828
ataaaataaaagg

SEQ ID NO: 11694 - DNA, 13 bp, Artificial Sequence
  Oligonucleotide for detection of SNP TSC0002828
ccttttattttat

SEQ ID NO: 11695 - DNA, 13 bp, Artificial Sequence
  Oligonucleotide for detection of SNP TSC0002828
ataaaaaaaaagg

SEQ ID NO: 11696 - DNA, 13 bp, Artificial Sequence
  Oligonucleotide for detection of SNP TSC0002828
cctttttttttat

SEQ ID NO: 11697 - DNA, 13 bp, Artificial Sequence
  Oligonucleotide for detection of SNP TSC0002829
tgaaggttttggg

SEQ ID NO: 11698 - DNA, 13 bp, Artificial Sequence
  Oligonucleotide for detection of SNP TSC0002829
cccaaaaccttca

SEQ ID NO: 11699 - DNA, 13 bp, Artificial Sequence
  Oligonucleotide for detection of SNP TSC0002829
tgaagggtttggg

SEQ ID NO: 11700 - DNA, 13 bp, Artificial Sequence
  Oligonucleotide for detection of SNP TSC0002829
cccaaacccttca

SEQ ID NO: 11701 - DNA, 13 bp, Artificial Sequence
  Oligonucleotide for detection of SNP TSC0002829
tttaaaattttta

SEQ ID NO: 11702 - DNA, 13 bp, Artificial Sequence
  Oligonucleotide for detection of SNP TSC0002829
taaaaattttaaa

SEQ ID NO: 11703 - DNA, 13 bp, Artificial Sequence
  Oligonucleotide for detection of SNP TSC0002829
tttaaatttttta

SEQ ID NO: 11704 - DNA, 13 bp, Artificial Sequence
  Oligonucleotide for detection of SNP TSC0002829
taaaaaatttaaa

SEQ ID NO: 11705 - DNA, 13 bp, Artificial Sequence
  Oligonucleotide for detection of SNP TSC0002830
gagtatataattt

SEQ ID NO: 11706 - DNA, 13 bp, Artificial Sequence
  Oligonucleotide for detection of SNP TSC0002830
aaattatatactc

SEQ ID NO: 11707 - DNA, 13 bp, Artificial Sequence
  Oligonucleotide for detection of SNP TSC0002830
gagtatgtaattt

SEQ ID NO: 11708 - DNA, 13 bp, Artificial Sequence
  Oligonucleotide for detection of SNP TSC0002830
aaattacatactc

SEQ ID NO: 11709 - DNA, 13 bp, Artificial Sequence
  Oligonucleotide for detection of SNP TSC0002831
aggggatgttaga

SEQ ID NO: 11710 - DNA, 13 bp, Artificial Sequence
  Oligonucleotide for detection of SNP TSC0002831
tctaacatcccct

SEQ ID NO: 11711 - DNA, 13 bp, Artificial Sequence
  Oligonucleotide for detection of SNP TSC0002831
aggggaggttaga

SEQ ID NO: 11712 - DNA, 13 bp, Artificial Sequence
  Oligonucleotide for detection of SNP TSC0002831
tctaacctcccct

SEQ ID NO: 11713 - DNA, 13 bp, Artificial Sequence
  Oligonucleotide for detection of SNP TSC0002831
aggggacgttaga

SEQ ID NO: 11714 - DNA, 13 bp, Artificial Sequence
  Oligonucleotide for detection of SNP TSC0002831
tctaacgtcccct

SEQ ID NO: 11715 - DNA, 13 bp, Artificial Sequence
  Oligonucleotide for detection of SNP TSC0002831
tttggtgtttttt

SEQ ID NO: 11716 - DNA, 13 bp, Artificial Sequence
  Oligonucleotide for detection of SNP TSC0002831
aaaaaacaccaaa

SEQ ID NO: 11717 - DNA, 13 bp, Artificial Sequence
  Oligonucleotide for detection of SNP TSC0002831
tttggtttttttt

SEQ ID NO: 11718 - DNA, 13 bp, Artificial Sequence
  Oligonucleotide for detection of SNP TSC0002831
aaaaaaaaccaaa

SEQ ID NO: 11719 - DNA, 13 bp, Artificial Sequence
  Oligonucleotide for detection of SNP TSC0002831
tttggcgtttttt

SEQ ID NO: 11720 - DNA, 13 bp, Artificial Sequence
  Oligonucleotide for detection of SNP TSC0002831
aaaaaacgccaaa

SEQ ID NO: 11721 - DNA, 13 bp, Artificial Sequence
  Oligonucleotide for detection of SNP TSC0002832
agttgggtttggg

SEQ ID NO: 11722 - DNA, 13 bp, Artificial Sequence
  Oligonucleotide for detection of SNP TSC0002832
cccaaacccaact

SEQ ID NO: 11723 - DNA, 13 bp, Artificial Sequence
  Oligonucleotide for detection of SNP TSC0002832
agttggatttggg

SEQ ID NO: 11724 - DNA, 13 bp, Artificial Sequence
  Oligonucleotide for detection of SNP TSC0002832
cccaaatccaact

SEQ ID NO: 11725 - DNA, 13 bp, Artificial Sequence
  Oligonucleotide for detection of SNP TSC0002833
gagttagaaggat

SEQ ID NO: 11726 - DNA, 13 bp, Artificial Sequence
  Oligonucleotide for detection of SNP TSC0002833
atccttctaactc

SEQ ID NO: 11727 - DNA, 13 bp, Artificial Sequence
  Oligonucleotide for detection of SNP TSC0002833
gagttaaaaggat

SEQ ID NO: 11728 - DNA, 13 bp, Artificial Sequence
  Oligonucleotide for detection of SNP TSC0002833
atccttttaactc

SEQ ID NO: 11729 - DNA, 13 bp, Artificial Sequence
  Oligonucleotide for detection of SNP TSC0002834
tatataagattag

SEQ ID NO: 11730 - DNA, 13 bp, Artificial Sequence
  Oligonucleotide for detection of SNP TSC0002834
ctaatcttatata

SEQ ID NO: 11731 - DNA, 13 bp, Artificial Sequence
  Oligonucleotide for detection of SNP TSC0002834
tatataggattag

SEQ ID NO: 11732 - DNA, 13 bp, Artificial Sequence
  Oligonucleotide for detection of SNP TSC0002834
ctaatcctatata

SEQ ID NO: 11733 - DNA, 13 bp, Artificial Sequence
  Oligonucleotide for detection of SNP TSC0002835
tttttgttagtag

SEQ ID NO: 11734 - DNA, 13 bp, Artificial Sequence
  Oligonucleotide for detection of SNP TSC0002835
ctactaacaaaaa

SEQ ID NO: 11735 - DNA, 13 bp, Artificial Sequence
  Oligonucleotide for detection of SNP TSC0002835
tttttggtagtag

SEQ ID NO: 11736 - DNA, 13 bp, Artificial Sequence
  Oligonucleotide for detection of SNP TSC0002835
ctactaccaaaaa

SEQ ID NO: 11737 - DNA, 13 bp, Artificial Sequence
  Oligonucleotide for detection of SNP TSC0002835
ttattgatagaaa

SEQ ID NO: 11738 - DNA, 13 bp, Artificial Sequence
  Oligonucleotide for detection of SNP TSC0002835
tttctatcaataa

SEQ ID NO: 11739 - DNA, 13 bp, Artificial Sequence
  Oligonucleotide for detection of SNP TSC0002835
ttattgttagaaa

SEQ ID NO: 11740 - DNA, 13 bp, Artificial Sequence
  Oligonucleotide for detection of SNP TSC0002835
tttctaacaataa

SEQ ID NO: 11741 - DNA, 13 bp, Artificial Sequence
  Oligonucleotide for detection of SNP TSC0002836
agtagaattatat

SEQ ID NO: 11742 - DNA, 13 bp, Artificial Sequence
  Oligonucleotide for detection of SNP TSC0002836
atataattctact

SEQ ID NO: 11743 - DNA, 13 bp, Artificial Sequence
  Oligonucleotide for detection of SNP TSC0002836
agtagagttatat

SEQ ID NO: 11744 - DNA, 13 bp, Artificial Sequence
  Oligonucleotide for detection of SNP TSC0002836
atataactctact

SEQ ID NO: 11745 - DNA, 13 bp, Artificial Sequence
  Oligonucleotide for detection of SNP TSC0002837
gagaagtattgty

SEQ ID NO: 11746 - DNA, 13 bp, Artificial Sequence
  Oligonucleotide for detection of SNP TSC0002837
racaatacttctc

SEQ ID NO: 11747 - DNA, 13 bp, Artificial Sequence
  Oligonucleotide for detection of SNP TSC0002837
gagaaggattgty

SEQ ID NO: 11748 - DNA, 13 bp, Artificial Sequence
  Oligonucleotide for detection of SNP TSC0002837
racaatccttctc

SEQ ID NO: 11749 - DNA, 13 bp, Artificial Sequence
  Oligonucleotide for detection of SNP TSC0002837
gataatgttttty

SEQ ID NO: 11750 - DNA, 13 bp, Artificial Sequence
  Oligonucleotide for detection of SNP TSC0002837
raaaaacattatc

SEQ ID NO: 11751 - DNA, 13 bp, Artificial Sequence
  Oligonucleotide for detection of SNP TSC0002837
gataattttttty

SEQ ID NO: 11752 - DNA, 13 bp, Artificial Sequence
  Oligonucleotide for detection of SNP TSC0002837
raaaaaaattatc

SEQ ID NO: 11753 - DNA, 13 bp, Artificial Sequence
  Oligonucleotide for detection of SNP TSC0002838
tttgggtgataga

SEQ ID NO: 11754 - DNA, 13 bp, Artificial Sequence
  Oligonucleotide for detection of SNP TSC0002838
tctatcacccaaa

SEQ ID NO: 11755 - DNA, 13 bp, Artificial Sequence
  Oligonucleotide for detection of SNP TSC0002838
tttgggcgataga

SEQ ID NO: 11756 - DNA, 13 bp, Artificial Sequence
  Oligonucleotide for detection of SNP TSC0002838
tctatcgcccaaa

SEQ ID NO: 11757 - DNA, 13 bp, Artificial Sequence
  Oligonucleotide for detection of SNP TSC0002838
tttgttgtttagg

SEQ ID NO: 11758 - DNA, 13 bp, Artificial Sequence
  Oligonucleotide for detection of SNP TSC0002838
cctaaacaacaaa

SEQ ID NO: 11759 - DNA, 13 bp, Artificial Sequence
  Oligonucleotide for detection of SNP TSC0002838
tttgttatttagg

SEQ ID NO: 11760 - DNA, 13 bp, Artificial Sequence
  Oligonucleotide for detection of SNP TSC0002838
cctaaataacaaa

SEQ ID NO: 11761 - DNA, 13 bp, Artificial Sequence
  Oligonucleotide for detection of SNP TSC0002838
tttgtcgtttagg

SEQ ID NO: 11762 - DNA, 13 bp, Artificial Sequence
  Oligonucleotide for detection of SNP TSC0002838
cctaaacgacaaa

SEQ ID NO: 11763 - DNA, 13 bp, Artificial Sequence
  Oligonucleotide for detection of SNP TSC0002839
tattgtagagttg

SEQ ID NO: 11764 - DNA, 13 bp, Artificial Sequence
  Oligonucleotide for detection of SNP TSC0002839
caactctacaata

SEQ ID NO: 11765 - DNA, 13 bp, Artificial Sequence
  Oligonucleotide for detection of SNP TSC0002839
tattgtggagttg

SEQ ID NO: 11766 - DNA, 13 bp, Artificial Sequence
  Oligonucleotide for detection of SNP TSC0002839
caactccacaata

SEQ ID NO: 11767 - DNA, 13 bp, Artificial Sequence
  Oligonucleotide for detection of SNP TSC0002839
tattgcggagttg

SEQ ID NO: 11768 - DNA, 13 bp, Artificial Sequence
  Oligonucleotide for detection of SNP TSC0002839
caactccgcaata

SEQ ID NO: 11769 - DNA, 13 bp, Artificial Sequence
  Oligonucleotide for detection of SNP TSC0002839
tagttttgtagta

SEQ ID NO: 11770 - DNA, 13 bp, Artificial Sequence
  Oligonucleotide for detection of SNP TSC0002839
tactacaaaacta

SEQ ID NO: 11771 - DNA, 13 bp, Artificial Sequence
  Oligonucleotide for detection of SNP TSC0002839
tagtttcgtagta

SEQ ID NO: 11772 - DNA, 13 bp, Artificial Sequence
  Oligonucleotide for detection of SNP TSC0002839
tactacgaaacta

SEQ ID NO: 11773 - DNA, 13 bp, Artificial Sequence
  Oligonucleotide for detection of SNP TSC0002840
ttttaaattaata

SEQ ID NO: 11774 - DNA, 13 bp, Artificial Sequence
  Oligonucleotide for detection of SNP TSC0002840
tattaatttaaaa

SEQ ID NO: 11775 - DNA, 13 bp, Artificial Sequence
  Oligonucleotide for detection of SNP TSC0002840
ttttaagttaata

SEQ ID NO: 11776 - DNA, 13 bp, Artificial Sequence
  Oligonucleotide for detection of SNP TSC0002840
tattaacttaaaa

SEQ ID NO: 11777 - DNA, 13 bp, Artificial Sequence
  Oligonucleotide for detection of SNP TSC0002841
gaatgtgttattt

SEQ ID NO: 11778 - DNA, 13 bp, Artificial Sequence
  Oligonucleotide for detection of SNP TSC0002841
aaataacacattc

SEQ ID NO: 11779 - DNA, 13 bp, Artificial Sequence
  Oligonucleotide for detection of SNP TSC0002841
gaatgtattattt

SEQ ID NO: 11780 - DNA, 13 bp, Artificial Sequence
  Oligonucleotide for detection of SNP TSC0002841
aaataatacattc

SEQ ID NO: 11781 - DNA, 13 bp, Artificial Sequence
  Oligonucleotide for detection of SNP TSC0002842
aatagaagatatt

SEQ ID NO: 11782 - DNA, 13 bp, Artificial Sequence
  Oligonucleotide for detection of SNP TSC0002842
aatatcttctatt

SEQ ID NO: 11783 - DNA, 13 bp, Artificial Sequence
  Oligonucleotide for detection of SNP TSC0002842
aatagaggatatt

SEQ ID NO: 11784 - DNA, 13 bp, Artificial Sequence
  Oligonucleotide for detection of SNP TSC0002842
aatatcctctatt

SEQ ID NO: 11785 - DNA, 13 bp, Artificial Sequence
  Oligonucleotide for detection of SNP TSC0002843
ttaaggatttatt

SEQ ID NO: 11786 - DNA, 13 bp, Artificial Sequence
  Oligonucleotide for detection of SNP TSC0002843
aataaatccttaa

SEQ ID NO: 11787 - DNA, 13 bp, Artificial Sequence
  Oligonucleotide for detection of SNP TSC0002843
ttaagggtttatt

SEQ ID NO: 11788 - DNA, 13 bp, Artificial Sequence
  Oligonucleotide for detection of SNP TSC0002843
aataaacccttaa

SEQ ID NO: 11789 - DNA, 13 bp, Artificial Sequence
  Oligonucleotide for detection of SNP TSC0002844
gttggaatttttt

SEQ ID NO: 11790 - DNA, 13 bp, Artificial Sequence
  Oligonucleotide for detection of SNP TSC0002844
aaaaaattccaac

SEQ ID NO: 11791 - DNA, 13 bp, Artificial Sequence
  Oligonucleotide for detection of SNP TSC0002844
gttggattttttt

SEQ ID NO: 11792 - DNA, 13 bp, Artificial Sequence
  Oligonucleotide for detection of SNP TSC0002844
aaaaaaatccaac

SEQ ID NO: 11793 - DNA, 13 bp, Artificial Sequence
  Oligonucleotide for detection of SNP TSC0002844
aaaagattttaay

SEQ ID NO: 11794 - DNA, 13 bp, Artificial Sequence
  Oligonucleotide for detection of SNP TSC0002844
rttaaaatctttt

SEQ ID NO: 11795 - DNA, 13 bp, Artificial Sequence
  Oligonucleotide for detection of SNP TSC0002844
aaaagagtttaay

SEQ ID NO: 11796 - DNA, 13 bp, Artificial Sequence
  Oligonucleotide for detection of SNP TSC0002844
rttaaactctttt

SEQ ID NO: 11797 - DNA, 13 bp, Artificial Sequence
  Oligonucleotide for detection of SNP TSC0002845
atggaaatttggg

SEQ ID NO: 11798 - DNA, 13 bp, Artificial Sequence
  Oligonucleotide for detection of SNP TSC0002845
cccaaatttccat

SEQ ID NO: 11799 - DNA, 13 bp, Artificial Sequence
  Oligonucleotide for detection of SNP TSC0002845
atggaagtttggg

SEQ ID NO: 11800 - DNA, 13 bp, Artificial Sequence
  Oligonucleotide for detection of SNP TSC0002845
cccaaacttccat

SEQ ID NO: 11801 - DNA, 13 bp, Artificial Sequence
  Oligonucleotide for detection of SNP TSC0002846
atttgaatgtaty

SEQ ID NO: 11802 - DNA, 13 bp, Artificial Sequence
  Oligonucleotide for detection of SNP TSC0002846
ratacattcaaat

SEQ ID NO: 11803 - DNA, 13 bp, Artificial Sequence
  Oligonucleotide for detection of SNP TSC0002846
atttgagtgtaty

SEQ ID NO: 11804 - DNA, 13 bp, Artificial Sequence
  Oligonucleotide for detection of SNP TSC0002846
ratacactcaaat

SEQ ID NO: 11805 - DNA, 13 bp, Artificial Sequence
  Oligonucleotide for detection of SNP TSC0002846
atttgaacgtaty

SEQ ID NO: 11806 - DNA, 13 bp, Artificial Sequence
  Oligonucleotide for detection of SNP TSC0002846
ratacgttcaaat

SEQ ID NO: 11807 - DNA, 13 bp, Artificial Sequence
  Oligonucleotide for detection of SNP TSC0002846
atttgagcgtaty

SEQ ID NO: 11808 - DNA, 13 bp, Artificial Sequence
  Oligonucleotide for detection of SNP TSC0002846
ratacgctcaaat

SEQ ID NO: 11809 - DNA, 13 bp, Artificial Sequence
  Oligonucleotide for detection of SNP TSC0002847
ttttagatgttty

SEQ ID NO: 11810 - DNA, 13 bp, Artificial Sequence
  Oligonucleotide for detection of SNP TSC0002847
raaacatctaaaa

SEQ ID NO: 11811 - DNA, 13 bp, Artificial Sequence
  Oligonucleotide for detection of SNP TSC0002847
ttttagttgttty

SEQ ID NO: 11812 - DNA, 13 bp, Artificial Sequence
  Oligonucleotide for detection of SNP TSC0002847
raaacaactaaaa

SEQ ID NO: 11813 - DNA, 13 bp, Artificial Sequence
  Oligonucleotide for detection of SNP TSC0002847
gaagtatttgaga

SEQ ID NO: 11814 - DNA, 13 bp, Artificial Sequence
  Oligonucleotide for detection of SNP TSC0002847
tctcaaatacttc

SEQ ID NO: 11815 - DNA, 13 bp, Artificial Sequence
  Oligonucleotide for detection of SNP TSC0002847
gaagtagttgaga

SEQ ID NO: 11816 - DNA, 13 bp, Artificial Sequence
  Oligonucleotide for detection of SNP TSC0002847
tctcaactacttc

SEQ ID NO: 11817 - DNA, 13 bp, Artificial Sequence
  Oligonucleotide for detection of SNP TSC0002848
agttattgggttt

SEQ ID NO: 11818 - DNA, 13 bp, Artificial Sequence
  Oligonucleotide for detection of SNP TSC0002848
aaacccaataact

SEQ ID NO: 11819 - DNA, 13 bp, Artificial Sequence
  Oligonucleotide for detection of SNP TSC0002848
agttatcgggttt

SEQ ID NO: 11820 - DNA, 13 bp, Artificial Sequence
  Oligonucleotide for detection of SNP TSC0002848
aaacccgataact

SEQ ID NO: 11821 - DNA, 13 bp, Artificial Sequence
  Oligonucleotide for detection of SNP TSC0002848
aggtttggtggtt

SEQ ID NO: 11822 - DNA, 13 bp, Artificial Sequence
  Oligonucleotide for detection of SNP TSC0002848
aaccaccaaacct

SEQ ID NO: 11823 - DNA, 13 bp, Artificial Sequence
  Oligonucleotide for detection of SNP TSC0002848
aggtttagtggtt

SEQ ID NO: 11824 - DNA, 13 bp, Artificial Sequence
  Oligonucleotide for detection of SNP TSC0002848
aaccactaaacct

SEQ ID NO: 11825 - DNA, 13 bp, Artificial Sequence
  Oligonucleotide for detection of SNP TSC0002848
aggttcggtggtt

SEQ ID NO: 11826 - DNA, 13 bp, Artificial Sequence
  Oligonucleotide for detection of SNP TSC0002848
aaccaccgaacct

SEQ ID NO: 11827 - DNA, 13 bp, Artificial Sequence
  Oligonucleotide for detection of SNP TSC0002849
aagaggagttttt

SEQ ID NO: 11828 - DNA, 13 bp, Artificial Sequence
  Oligonucleotide for detection of SNP TSC0002849
aaaaactcctctt

SEQ ID NO: 11829 - DNA, 13 bp, Artificial Sequence
  Oligonucleotide for detection of SNP TSC0002849
aagaggtgttttt

SEQ ID NO: 11830 - DNA, 13 bp, Artificial Sequence
  Oligonucleotide for detection of SNP TSC0002849
aaaaacacctctt

SEQ ID NO: 11831 - DNA, 13 bp, Artificial Sequence
  Oligonucleotide for detection of SNP TSC0002849
aagaggcgttttt

SEQ ID NO: 11832 - DNA, 13 bp, Artificial Sequence
  Oligonucleotide for detection of SNP TSC0002849
aaaaacgcctctt

SEQ ID NO: 11833 - DNA, 13 bp, Artificial Sequence
  Oligonucleotide for detection of SNP TSC0002849
agaaatttttttt

SEQ ID NO: 11834 - DNA, 13 bp, Artificial Sequence
  Oligonucleotide for detection of SNP TSC0002849
aaaaaaaatttct

SEQ ID NO: 11835 - DNA, 13 bp, Artificial Sequence
  Oligonucleotide for detection of SNP TSC0002849
agaaatgtttttt

SEQ ID NO: 11836 - DNA, 13 bp, Artificial Sequence
  Oligonucleotide for detection of SNP TSC0002849
aaaaaacatttct

SEQ ID NO: 11837 - DNA, 13 bp, Artificial Sequence
  Oligonucleotide for detection of SNP TSC0002849
agaaacgtttttt

SEQ ID NO: 11838 - DNA, 13 bp, Artificial Sequence
  Oligonucleotide for detection of SNP TSC0002849
aaaaaacgtttct

SEQ ID NO: 11839 - DNA, 13 bp, Artificial Sequence
  Oligonucleotide for detection of SNP TSC0002850
tggagaaaaatty

SEQ ID NO: 11840 - DNA, 13 bp, Artificial Sequence
  Oligonucleotide for detection of SNP TSC0002850
raatttttctcca

SEQ ID NO: 11841 - DNA, 13 bp, Artificial Sequence
  Oligonucleotide for detection of SNP TSC0002850
tggagagaaatty

SEQ ID NO: 11842 - DNA, 13 bp, Artificial Sequence
  Oligonucleotide for detection of SNP TSC0002850
raatttctctcca

SEQ ID NO: 11843 - DNA, 13 bp, Artificial Sequence
  Oligonucleotide for detection of SNP TSC0002851
tagtataaggtay

SEQ ID NO: 11844 - DNA, 13 bp, Artificial Sequence
  Oligonucleotide for detection of SNP TSC0002851
rtaccttatacta

SEQ ID NO: 11845 - DNA, 13 bp, Artificial Sequence
  Oligonucleotide for detection of SNP TSC0002851
tagtatgaggtay

SEQ ID NO: 11846 - DNA, 13 bp, Artificial Sequence
  Oligonucleotide for detection of SNP TSC0002851
rtacctcatacta

SEQ ID NO: 11847 - DNA, 13 bp, Artificial Sequence
  Oligonucleotide for detection of SNP TSC0002851
tagtacgaggtay

SEQ ID NO: 11848 - DNA, 13 bp, Artificial Sequence
  Oligonucleotide for detection of SNP TSC0002851
rtacctcgtacta

SEQ ID NO: 11849 - DNA, 13 bp, Artificial Sequence
  Oligonucleotide for detection of SNP TSC0002851
gtattttgtgttg

SEQ ID NO: 11850 - DNA, 13 bp, Artificial Sequence
  Oligonucleotide for detection of SNP TSC0002851
caacacaaaatac

SEQ ID NO: 11851 - DNA, 13 bp, Artificial Sequence
  Oligonucleotide for detection of SNP TSC0002851
gtatttcgtgttg

SEQ ID NO: 11852 - DNA, 13 bp, Artificial Sequence
  Oligonucleotide for detection of SNP TSC0002851
caacacgaaatac

SEQ ID NO: 11853 - DNA, 13 bp, Artificial Sequence
  Oligonucleotide for detection of SNP TSC0002852
gatattagtatgy

SEQ ID NO: 11854 - DNA, 13 bp, Artificial Sequence
  Oligonucleotide for detection of SNP TSC0002852
rcatactaatatc

SEQ ID NO: 11855 - DNA, 13 bp, Artificial Sequence
  Oligonucleotide for detection of SNP TSC0002852
gatattggtatgy

SEQ ID NO: 11856 - DNA, 13 bp, Artificial Sequence
  Oligonucleotide for detection of SNP TSC0002852
rcataccaatatc

SEQ ID NO: 11857 - DNA, 13 bp, Artificial Sequence
  Oligonucleotide for detection of SNP TSC0002852
gatatcggtatgy

SEQ ID NO: 11858 - DNA, 13 bp, Artificial Sequence
  Oligonucleotide for detection of SNP TSC0002852
rcataccgatatc

SEQ ID NO: 11859 - DNA, 13 bp, Artificial Sequence
  Oligonucleotide for detection of SNP TSC0002852
gtatgttggtaty

SEQ ID NO: 11860 - DNA, 13 bp, Artificial Sequence
  Oligonucleotide for detection of SNP TSC0002852
rataccaacatac

SEQ ID NO: 11861 - DNA, 13 bp, Artificial Sequence
  Oligonucleotide for detection of SNP TSC0002852
gtatgtcggtaty

SEQ ID NO: 11862 - DNA, 13 bp, Artificial Sequence
  Oligonucleotide for detection of SNP TSC0002852
rataccgacatac

SEQ ID NO: 11863 - DNA, 13 bp, Artificial Sequence
  Oligonucleotide for detection of SNP TSC0002853
ttttttgtttggt

SEQ ID NO: 11864 - DNA, 13 bp, Artificial Sequence
  Oligonucleotide for detection of SNP TSC0002853
accaaacaaaaaa

SEQ ID NO: 11865 - DNA, 13 bp, Artificial Sequence
  Oligonucleotide for detection of SNP TSC0002853
ttttttatttggt

SEQ ID NO: 11866 - DNA, 13 bp, Artificial Sequence
  Oligonucleotide for detection of SNP TSC0002853
accaaataaaaaa

SEQ ID NO: 11867 - DNA, 13 bp, Artificial Sequence
  Oligonucleotide for detection of SNP TSC0002853
ttttttgttcggt

SEQ ID NO: 11868 - DNA, 13 bp, Artificial Sequence
  Oligonucleotide for detection of SNP TSC0002853
accgaacaaaaaa

SEQ ID NO: 11869 - DNA, 13 bp, Artificial Sequence
  Oligonucleotide for detection of SNP TSC0002853
ttttttattcggt

SEQ ID NO: 11870 - DNA, 13 bp, Artificial Sequence
  Oligonucleotide for detection of SNP TSC0002853
accgaataaaaaa

SEQ ID NO: 11871 - DNA, 13 bp, Artificial Sequence
  Oligonucleotide for detection of SNP TSC0002855
gtatgtattttta

SEQ ID NO: 11872 - DNA, 13 bp, Artificial Sequence
  Oligonucleotide for detection of SNP TSC0002855
taaaaatacatac

SEQ ID NO: 11873 - DNA, 13 bp, Artificial Sequence
  Oligonucleotide for detection of SNP TSC0002855
gtatgtgttttta

SEQ ID NO: 11874 - DNA, 13 bp, Artificial Sequence
  Oligonucleotide for detection of SNP TSC0002855
taaaaacacatac

SEQ ID NO: 11875 - DNA, 13 bp, Artificial Sequence
  Oligonucleotide for detection of SNP TSC0002856
gtttagaatgaaa

SEQ ID NO: 11876 - DNA, 13 bp, Artificial Sequence
  Oligonucleotide for detection of SNP TSC0002856
tttcattctaaac

SEQ ID NO: 11877 - DNA, 13 bp, Artificial Sequence
  Oligonucleotide for detection of SNP TSC0002856
gtttagtatgaaa

SEQ ID NO: 11878 - DNA, 13 bp, Artificial Sequence
  Oligonucleotide for detection of SNP TSC0002856
tttcatactaaac

SEQ ID NO: 11879 - DNA, 13 bp, Artificial Sequence
  Oligonucleotide for detection of SNP TSC0002856
ttttattttgggy

SEQ ID NO: 11880 - DNA, 13 bp, Artificial Sequence
  Oligonucleotide for detection of SNP TSC0002856
rcccaaaataaaa

SEQ ID NO: 11881 - DNA, 13 bp, Artificial Sequence
  Oligonucleotide for detection of SNP TSC0002856
ttttatgttgggy

SEQ ID NO: 11882 - DNA, 13 bp, Artificial Sequence
  Oligonucleotide for detection of SNP TSC0002856
rcccaacataaaa

SEQ ID NO: 11883 - DNA, 13 bp, Artificial Sequence
  Oligonucleotide for detection of SNP TSC0002857
tatttagtgagta

SEQ ID NO: 11884 - DNA, 13 bp, Artificial Sequence
  Oligonucleotide for detection of SNP TSC0002857
tactcactaaata

SEQ ID NO: 11885 - DNA, 13 bp, Artificial Sequence
  Oligonucleotide for detection of SNP TSC0002857
tatttaatgagta

SEQ ID NO: 11886 - DNA, 13 bp, Artificial Sequence
  Oligonucleotide for detection of SNP TSC0002857
tactcattaaata

SEQ ID NO: 11887 - DNA, 13 bp, Artificial Sequence
  Oligonucleotide for detection of SNP TSC0002858
tattattgtagtt

SEQ ID NO: 11888 - DNA, 13 bp, Artificial Sequence
  Oligonucleotide for detection of SNP TSC0002858
aactacaataata

SEQ ID NO: 11889 - DNA, 13 bp, Artificial Sequence
  Oligonucleotide for detection of SNP TSC0002858
tattatcgtagtt

SEQ ID NO: 11890 - DNA, 13 bp, Artificial Sequence
  Oligonucleotide for detection of SNP TSC0002858
aactacgataata

SEQ ID NO: 11891 - DNA, 13 bp, Artificial Sequence
  Oligonucleotide for detection of SNP TSC0002858
aattatggtgatg

SEQ ID NO: 11892 - DNA, 13 bp, Artificial Sequence
  Oligonucleotide for detection of SNP TSC0002858
catcaccataatt

SEQ ID NO: 11893 - DNA, 13 bp, Artificial Sequence
  Oligonucleotide for detection of SNP TSC0002858
aattatagtgatg

SEQ ID NO: 11894 - DNA, 13 bp, Artificial Sequence
  Oligonucleotide for detection of SNP TSC0002858
catcactataatt

SEQ ID NO: 11895 - DNA, 13 bp, Artificial Sequence
  Oligonucleotide for detection of SNP TSC0002858
aattacggtgatg

SEQ ID NO: 11896 - DNA, 13 bp, Artificial Sequence
  Oligonucleotide for detection of SNP TSC0002858
catcaccgtaatt

SEQ ID NO: 11897 - DNA, 13 bp, Artificial Sequence
  Oligonucleotide for detection of SNP TSC0002859
agtattgggattt

SEQ ID NO: 11898 - DNA, 13 bp, Artificial Sequence
  Oligonucleotide for detection of SNP TSC0002859
aaatcccaatact

SEQ ID NO: 11899 - DNA, 13 bp, Artificial Sequence
  Oligonucleotide for detection of SNP TSC0002859
agtattaggattt

SEQ ID NO: 11900 - DNA, 13 bp, Artificial Sequence
  Oligonucleotide for detection of SNP TSC0002859
aaatcctaatact

SEQ ID NO: 11901 - DNA, 13 bp, Artificial Sequence
  Oligonucleotide for detection of SNP TSC0002860
aaagtagtgtatt

SEQ ID NO: 11902 - DNA, 13 bp, Artificial Sequence
  Oligonucleotide for detection of SNP TSC0002860
aatacactacttt

SEQ ID NO: 11903 - DNA, 13 bp, Artificial Sequence
  Oligonucleotide for detection of SNP TSC0002860
aaagtaatgtatt

SEQ ID NO: 11904 - DNA, 13 bp, Artificial Sequence
  Oligonucleotide for detection of SNP TSC0002860
aatacattacttt

SEQ ID NO: 11905 - DNA, 13 bp, Artificial Sequence
  Oligonucleotide for detection of SNP TSC0002861
ttgttttgttgty

SEQ ID NO: 11906 - DNA, 13 bp, Artificial Sequence
  Oligonucleotide for detection of SNP TSC0002861
racaacaaaacaa

SEQ ID NO: 11907 - DNA, 13 bp, Artificial Sequence
  Oligonucleotide for detection of SNP TSC0002861
ttgtttcgttgty

SEQ ID NO: 11908 - DNA, 13 bp, Artificial Sequence
  Oligonucleotide for detection of SNP TSC0002861
racaacgaaacaa

SEQ ID NO: 11909 - DNA, 13 bp, Artificial Sequence
  Oligonucleotide for detection of SNP TSC0002861
ttgttttgtcgty

SEQ ID NO: 11910 - DNA, 13 bp, Artificial Sequence
  Oligonucleotide for detection of SNP TSC0002861
racgacaaaacaa

SEQ ID NO: 11911 - DNA, 13 bp, Artificial Sequence
  Oligonucleotide for detection of SNP TSC0002861
ttgtttcgtcgty

SEQ ID NO: 11912 - DNA, 13 bp, Artificial Sequence
  Oligonucleotide for detection of SNP TSC0002861
racgacgaaacaa

SEQ ID NO: 11913 - DNA, 13 bp, Artificial Sequence
  Oligonucleotide for detection of SNP TSC0002861
ggtgatggagtaa

SEQ ID NO: 11914 - DNA, 13 bp, Artificial Sequence
  Oligonucleotide for detection of SNP TSC0002861
ttactccatcacc

SEQ ID NO: 11915 - DNA, 13 bp, Artificial Sequence
  Oligonucleotide for detection of SNP TSC0002861
ggtgatagagtaa

SEQ ID NO: 11916 - DNA, 13 bp, Artificial Sequence
  Oligonucleotide for detection of SNP TSC0002861
ttactctatcacc

SEQ ID NO: 11917 - DNA, 13 bp, Artificial Sequence
  Oligonucleotide for detection of SNP TSC0002861
ggcgatggagtaa

SEQ ID NO: 11918 - DNA, 13 bp, Artificial Sequence
  Oligonucleotide for detection of SNP TSC0002861
ttactccatcgcc

SEQ ID NO: 11919 - DNA, 13 bp, Artificial Sequence
  Oligonucleotide for detection of SNP TSC0002861
ggcgatagagtaa

SEQ ID NO: 11920 - DNA, 13 bp, Artificial Sequence
  Oligonucleotide for detection of SNP TSC0002861
ttactctatcgcc

SEQ ID NO: 11921 - DNA, 13 bp, Artificial Sequence
  Oligonucleotide for detection of SNP TSC0002861
ggtgacggagtaa

SEQ ID NO: 11922 - DNA, 13 bp, Artificial Sequence
  Oligonucleotide for detection of SNP TSC0002861
ttactccgtcacc

SEQ ID NO: 11923 - DNA, 13 bp, Artificial Sequence
  Oligonucleotide for detection of SNP TSC0002861
ggcgacggagtaa

SEQ ID NO: 11924 - DNA, 13 bp, Artificial Sequence
  Oligonucleotide for detection of SNP TSC0002861
ttactccgtcgcc

SEQ ID NO: 11925 - DNA, 13 bp, Artificial Sequence
  Oligonucleotide for detection of SNP TSC0002862
gagatgaggttgt

SEQ ID NO: 11926 - DNA, 13 bp, Artificial Sequence
  Oligonucleotide for detection of SNP TSC0002862
acaacctcatctc

SEQ ID NO: 11927 - DNA, 13 bp, Artificial Sequence
  Oligonucleotide for detection of SNP TSC0002862
gagatggggttgt

SEQ ID NO: 11928 - DNA, 13 bp, Artificial Sequence
  Oligonucleotide for detection of SNP TSC0002862
acaaccccatctc

SEQ ID NO: 11929 - DNA, 13 bp, Artificial Sequence
  Oligonucleotide for detection of SNP TSC0002862
gagacgaggttgt

SEQ ID NO: 11930 - DNA, 13 bp, Artificial Sequence
  Oligonucleotide for detection of SNP TSC0002862
acaacctcgtctc

SEQ ID NO: 11931 - DNA, 13 bp, Artificial Sequence
  Oligonucleotide for detection of SNP TSC0002862
gagacggggttgt

SEQ ID NO: 11932 - DNA, 13 bp, Artificial Sequence
  Oligonucleotide for detection of SNP TSC0002862
acaaccccgtctc

SEQ ID NO: 11933 - DNA, 13 bp, Artificial Sequence
  Oligonucleotide for detection of SNP TSC0002863
ttaaaaaaaaaaa

SEQ ID NO: 11934 - DNA, 13 bp, Artificial Sequence
  Oligonucleotide for detection of SNP TSC0002863
tttttttttttaa

SEQ ID NO: 11935 - DNA, 13 bp, Artificial Sequence
  Oligonucleotide for detection of SNP TSC0002863
ttaaaataaaaaa

SEQ ID NO: 11936 - DNA, 13 bp, Artificial Sequence
  Oligonucleotide for detection of SNP TSC0002863
ttttttattttaa

SEQ ID NO: 11937 - DNA, 13 bp, Artificial Sequence
  Oligonucleotide for detection of SNP TSC0002863
tttttttttttgg

SEQ ID NO: 11938 - DNA, 13 bp, Artificial Sequence
  Oligonucleotide for detection of SNP TSC0002863
ccaaaaaaaaaaa

SEQ ID NO: 11939 - DNA, 13 bp, Artificial Sequence
  Oligonucleotide for detection of SNP TSC0002863
ttttttgttttgg

SEQ ID NO: 11940 - DNA, 13 bp, Artificial Sequence
  Oligonucleotide for detection of SNP TSC0002863
ccaaaacaaaaaa

SEQ ID NO: 11941 - DNA, 13 bp, Artificial Sequence
  Oligonucleotide for detection of SNP TSC0002865
taataagataatt

SEQ ID NO: 11942 - DNA, 13 bp, Artificial Sequence
  Oligonucleotide for detection of SNP TSC0002865
aattatcttatta

SEQ ID NO: 11943 - DNA, 13 bp, Artificial Sequence
  Oligonucleotide for detection of SNP TSC0002865
taataaaataatt

SEQ ID NO: 11944 - DNA, 13 bp, Artificial Sequence
  Oligonucleotide for detection of SNP TSC0002865
aattattttatta

SEQ ID NO: 11945 - DNA, 13 bp, Artificial Sequence
  Oligonucleotide for detection of SNP TSC0002866
aattttattttat

SEQ ID NO: 11946 - DNA, 13 bp, Artificial Sequence
  Oligonucleotide for detection of SNP TSC0002866
ataaaataaaatt

SEQ ID NO: 11947 - DNA, 13 bp, Artificial Sequence
  Oligonucleotide for detection of SNP TSC0002866
aattttgttttat

SEQ ID NO: 11948 - DNA, 13 bp, Artificial Sequence
  Oligonucleotide for detection of SNP TSC0002866
ataaaacaaaatt

SEQ ID NO: 11949 - DNA, 13 bp, Artificial Sequence
  Oligonucleotide for detection of SNP TSC0002866
aatttcgttttat

SEQ ID NO: 11950 - DNA, 13 bp, Artificial Sequence
  Oligonucleotide for detection of SNP TSC0002866
ataaaacgaaatt

SEQ ID NO: 11951 - DNA, 13 bp, Artificial Sequence
  Oligonucleotide for detection of SNP TSC0002866
atggaatgaaatt

SEQ ID NO: 11952 - DNA, 13 bp, Artificial Sequence
  Oligonucleotide for detection of SNP TSC0002866
aatttcattccat

SEQ ID NO: 11953 - DNA, 13 bp, Artificial Sequence
  Oligonucleotide for detection of SNP TSC0002866
atggaacgaaatt

SEQ ID NO: 11954 - DNA, 13 bp, Artificial Sequence
  Oligonucleotide for detection of SNP TSC0002866
aatttcgttccat

SEQ ID NO: 11955 - DNA, 13 bp, Artificial Sequence
  Oligonucleotide for detection of SNP TSC0002867
aattttagtttay

SEQ ID NO: 11956 - DNA, 13 bp, Artificial Sequence
  Oligonucleotide for detection of SNP TSC0002867
rtaaactaaaatt

SEQ ID NO: 11957 - DNA, 13 bp, Artificial Sequence
  Oligonucleotide for detection of SNP TSC0002867
aattttggtttay

SEQ ID NO: 11958 - DNA, 13 bp, Artificial Sequence
  Oligonucleotide for detection of SNP TSC0002867
rtaaaccaaaatt

SEQ ID NO: 11959 - DNA, 13 bp, Artificial Sequence
  Oligonucleotide for detection of SNP TSC0002867
aatttcggtttay

SEQ ID NO: 11960 - DNA, 13 bp, Artificial Sequence
  Oligonucleotide for detection of SNP TSC0002867
rtaaaccgaaatt

SEQ ID NO: 11961 - DNA, 13 bp, Artificial Sequence
  Oligonucleotide for detection of SNP TSC0002867
gtgagttgagatt

SEQ ID NO: 11962 - DNA, 13 bp, Artificial Sequence
  Oligonucleotide for detection of SNP TSC0002867
aatctcaactcac

SEQ ID NO: 11963 - DNA, 13 bp, Artificial Sequence
  Oligonucleotide for detection of SNP TSC0002867
gtgagtcgagatt

SEQ ID NO: 11964 - DNA, 13 bp, Artificial Sequence
  Oligonucleotide for detection of SNP TSC0002867
aatctcgactcac

SEQ ID NO: 11965 - DNA, 13 bp, Artificial Sequence
  Oligonucleotide for detection of SNP TSC0002868
tttttaaagtgtt

SEQ ID NO: 11966 - DNA, 13 bp, Artificial Sequence
  Oligonucleotide for detection of SNP TSC0002868
aacactttaaaaa

SEQ ID NO: 11967 - DNA, 13 bp, Artificial Sequence
  Oligonucleotide for detection of SNP TSC0002868
tttttagagtgtt

SEQ ID NO: 11968 - DNA, 13 bp, Artificial Sequence
  Oligonucleotide for detection of SNP TSC0002868
aacactctaaaaa

SEQ ID NO: 11969 - DNA, 13 bp, Artificial Sequence
  Oligonucleotide for detection of SNP TSC0002869
gtaggaaaaagag

SEQ ID NO: 11970 - DNA, 13 bp, Artificial Sequence
  Oligonucleotide for detection of SNP TSC0002869
ctctttttcctac

SEQ ID NO: 11971 - DNA, 13 bp, Artificial Sequence
  Oligonucleotide for detection of SNP TSC0002869
gtaggagaaagag

SEQ ID NO: 11972 - DNA, 13 bp, Artificial Sequence
  Oligonucleotide for detection of SNP TSC0002869
ctctttctcctac

SEQ ID NO: 11973 - DNA, 13 bp, Artificial Sequence
  Oligonucleotide for detection of SNP TSC0002870
atgaaggtggtag

SEQ ID NO: 11974 - DNA, 13 bp, Artificial Sequence
  Oligonucleotide for detection of SNP TSC0002870
ctaccaccttcat

SEQ ID NO: 11975 - DNA, 13 bp, Artificial Sequence
  Oligonucleotide for detection of SNP TSC0002870
atgaagatggtag

SEQ ID NO: 11976 - DNA, 13 bp, Artificial Sequence
  Oligonucleotide for detection of SNP TSC0002870
ctaccatcttcat

SEQ ID NO: 11977 - DNA, 13 bp, Artificial Sequence
  Oligonucleotide for detection of SNP TSC0002871
aagggagtgtagg

SEQ ID NO: 11978 - DNA, 13 bp, Artificial Sequence
  Oligonucleotide for detection of SNP TSC0002871
cctacactccctt

SEQ ID NO: 11979 - DNA, 13 bp, Artificial Sequence
  Oligonucleotide for detection of SNP TSC0002871
aagggaatgtagg

SEQ ID NO: 11980 - DNA, 13 bp, Artificial Sequence
  Oligonucleotide for detection of SNP TSC0002871
cctacattccctt

SEQ ID NO: 11981 - DNA, 13 bp, Artificial Sequence
  Oligonucleotide for detection of SNP TSC0002872
tagaaaatatgta

SEQ ID NO: 11982 - DNA, 13 bp, Artificial Sequence
  Oligonucleotide for detection of SNP TSC0002872
tacatattttcta

SEQ ID NO: 11983 - DNA, 13 bp, Artificial Sequence
  Oligonucleotide for detection of SNP TSC0002872
tagaaagtatgta

SEQ ID NO: 11984 - DNA, 13 bp, Artificial Sequence
  Oligonucleotide for detection of SNP TSC0002872
tacatactttcta

SEQ ID NO: 11985 - DNA, 13 bp, Artificial Sequence
  Oligonucleotide for detection of SNP TSC0002872
tagaaaatacgta

SEQ ID NO: 11986 - DNA, 13 bp, Artificial Sequence
  Oligonucleotide for detection of SNP TSC0002872
tacgtattttcta

SEQ ID NO: 11987 - DNA, 13 bp, Artificial Sequence
  Oligonucleotide for detection of SNP TSC0002872
tagaaagtacgta

SEQ ID NO: 11988 - DNA, 13 bp, Artificial Sequence
  Oligonucleotide for detection of SNP TSC0002872
tacgtactttcta

SEQ ID NO: 11989 - DNA, 13 bp, Artificial Sequence
  Oligonucleotide for detection of SNP TSC0002873
atagattgtttgy

SEQ ID NO: 11990 - DNA, 13 bp, Artificial Sequence
  Oligonucleotide for detection of SNP TSC0002873
rcaaacaatctat

SEQ ID NO: 11991 - DNA, 13 bp, Artificial Sequence
  Oligonucleotide for detection of SNP TSC0002873
atagatcgtttgy

SEQ ID NO: 11992 - DNA, 13 bp, Artificial Sequence
  Oligonucleotide for detection of SNP TSC0002873
rcaaacgatctat

SEQ ID NO: 11993 - DNA, 13 bp, Artificial Sequence
  Oligonucleotide for detection of SNP TSC0002873
gtaaatgatttgt

SEQ ID NO: 11994 - DNA, 13 bp, Artificial Sequence
  Oligonucleotide for detection of SNP TSC0002873
acaaatcatttac

SEQ ID NO: 11995 - DNA, 13 bp, Artificial Sequence
  Oligonucleotide for detection of SNP TSC0002873
gtaaataatttgt

SEQ ID NO: 11996 - DNA, 13 bp, Artificial Sequence
  Oligonucleotide for detection of SNP TSC0002873
acaaattatttac

SEQ ID NO: 11997 - DNA, 13 bp, Artificial Sequence
  Oligonucleotide for detection of SNP TSC0002873
gtaaacgatttgt

SEQ ID NO: 11998 - DNA, 13 bp, Artificial Sequence
  Oligonucleotide for detection of SNP TSC0002873
acaaatcgtttac

SEQ ID NO: 11999 - DNA, 13 bp, Artificial Sequence
  Oligonucleotide for detection of SNP TSC0002874
gtagggatgttga

SEQ ID NO: 12000 - DNA, 13 bp, Artificial Sequence
  Oligonucleotide for detection of SNP TSC0002874
tcaacatccctac

SEQ ID NO: 12001 - DNA, 13 bp, Artificial Sequence
  Oligonucleotide for detection of SNP TSC0002874
gtagggttgttga

SEQ ID NO: 12002 - DNA, 13 bp, Artificial Sequence
  Oligonucleotide for detection of SNP TSC0002874
tcaacaaccctac

SEQ ID NO: 12003 - DNA, 13 bp, Artificial Sequence
  Oligonucleotide for detection of SNP TSC0002874
ttaatatttttgy

SEQ ID NO: 12004 - DNA, 13 bp, Artificial Sequence
  Oligonucleotide for detection of SNP TSC0002874
rcaaaaatattaa

SEQ ID NO: 12005 - DNA, 13 bp, Artificial Sequence
  Oligonucleotide for detection of SNP TSC0002874
ttaatagttttgy

SEQ ID NO: 12006 - DNA, 13 bp, Artificial Sequence
  Oligonucleotide for detection of SNP TSC0002874
rcaaaactattaa

SEQ ID NO: 12007 - DNA, 13 bp, Artificial Sequence
  Oligonucleotide for detection of SNP TSC0002875
taattagggtttt

SEQ ID NO: 12008 - DNA, 13 bp, Artificial Sequence
  Oligonucleotide for detection of SNP TSC0002875
aaaaccctaatta

SEQ ID NO: 12009 - DNA, 13 bp, Artificial Sequence
  Oligonucleotide for detection of SNP TSC0002875
taattaaggtttt

SEQ ID NO: 12010 - DNA, 13 bp, Artificial Sequence
  Oligonucleotide for detection of SNP TSC0002875
aaaaccttaatta

SEQ ID NO: 12011 - DNA, 13 bp, Artificial Sequence
  Oligonucleotide for detection of SNP TSC0002876
aaaggagaggtag

SEQ ID NO: 12012 - DNA, 13 bp, Artificial Sequence
  Oligonucleotide for detection of SNP TSC0002876
ctacctctccttt

SEQ ID NO: 12013 - DNA, 13 bp, Artificial Sequence
  Oligonucleotide for detection of SNP TSC0002876
aaaggaaaggtag

SEQ ID NO: 12014 - DNA, 13 bp, Artificial Sequence
  Oligonucleotide for detection of SNP TSC0002876
ctacctttccttt

SEQ ID NO: 12015 - DNA, 13 bp, Artificial Sequence
  Oligonucleotide for detection of SNP TSC0002877
aagtttaagtttt

SEQ ID NO: 12016 - DNA, 13 bp, Artificial Sequence
  Oligonucleotide for detection of SNP TSC0002877
aaaacttaaactt

SEQ ID NO: 12017 - DNA, 13 bp, Artificial Sequence
  Oligonucleotide for detection of SNP TSC0002877
aagttttagtttt

SEQ ID NO: 12018 - DNA, 13 bp, Artificial Sequence
  Oligonucleotide for detection of SNP TSC0002877
aaaactaaaactt

SEQ ID NO: 12019 - DNA, 13 bp, Artificial Sequence
  Oligonucleotide for detection of SNP TSC0002877
agagtttaggttt

SEQ ID NO: 12020 - DNA, 13 bp, Artificial Sequence
  Oligonucleotide for detection of SNP TSC0002877
aaacctaaactct

SEQ ID NO: 12021 - DNA, 13 bp, Artificial Sequence
  Oligonucleotide for detection of SNP TSC0002877
agagttgaggttt

SEQ ID NO: 12022 - DNA, 13 bp, Artificial Sequence
  Oligonucleotide for detection of SNP TSC0002877
aaacctcaactct

SEQ ID NO: 12023 - DNA, 13 bp, Artificial Sequence
  Oligonucleotide for detection of SNP TSC0002880
atattaggagatt

SEQ ID NO: 12024 - DNA, 13 bp, Artificial Sequence
  Oligonucleotide for detection of SNP TSC0002880
aatctcctaatat

SEQ ID NO: 12025 - DNA, 13 bp, Artificial Sequence
  Oligonucleotide for detection of SNP TSC0002880
atattaagagatt

SEQ ID NO: 12026 - DNA, 13 bp, Artificial Sequence
  Oligonucleotide for detection of SNP TSC0002880
aatctcttaatat

SEQ ID NO: 12027 - DNA, 13 bp, Artificial Sequence
  Oligonucleotide for detection of SNP TSC0002881
taatgtgttttat

SEQ ID NO: 12028 - DNA, 13 bp, Artificial Sequence
  Oligonucleotide for detection of SNP TSC0002881
ataaaacacatta

SEQ ID NO: 12029 - DNA, 13 bp, Artificial Sequence
  Oligonucleotide for detection of SNP TSC0002881
taatgtattttat

SEQ ID NO: 12030 - DNA, 13 bp, Artificial Sequence
  Oligonucleotide for detection of SNP TSC0002881
ataaaatacatta

SEQ ID NO: 12031 - DNA, 13 bp, Artificial Sequence
  Oligonucleotide for detection of SNP TSC0002882
attgattttaaga

SEQ ID NO: 12032 - DNA, 13 bp, Artificial Sequence
  Oligonucleotide for detection of SNP TSC0002882
tcttaaaatcaat

SEQ ID NO: 12033 - DNA, 13 bp, Artificial Sequence
  Oligonucleotide for detection of SNP TSC0002882
attgatgttaaga

SEQ ID NO: 12034 - DNA, 13 bp, Artificial Sequence
  Oligonucleotide for detection of SNP TSC0002882
tcttaacatcaat

SEQ ID NO: 12035 - DNA, 13 bp, Artificial Sequence
  Oligonucleotide for detection of SNP TSC0002882
atcgattttaaga

SEQ ID NO: 12036 - DNA, 13 bp, Artificial Sequence
  Oligonucleotide for detection of SNP TSC0002882
tcttaaaatcgat

SEQ ID NO: 12037 - DNA, 13 bp, Artificial Sequence
  Oligonucleotide for detection of SNP TSC0002882
atcgatgttaaga

SEQ ID NO: 12038 - DNA, 13 bp, Artificial Sequence
  Oligonucleotide for detection of SNP TSC0002882
tcttaacatcgat

SEQ ID NO: 12039 - DNA, 13 bp, Artificial Sequence
  Oligonucleotide for detection of SNP TSC0002882
attgacgttaaga

SEQ ID NO: 12040 - DNA, 13 bp, Artificial Sequence
  Oligonucleotide for detection of SNP TSC0002882
tcttaacgtcaat

SEQ ID NO: 12041 - DNA, 13 bp, Artificial Sequence
  Oligonucleotide for detection of SNP TSC0002882
atcgacgttaaga

SEQ ID NO: 12042 - DNA, 13 bp, Artificial Sequence
  Oligonucleotide for detection of SNP TSC0002882
tcttaacgtcgat

SEQ ID NO: 12043 - DNA, 13 bp, Artificial Sequence
  Oligonucleotide for detection of SNP TSC0002882
ttttgaagttgat

SEQ ID NO: 12044 - DNA, 13 bp, Artificial Sequence
  Oligonucleotide for detection of SNP TSC0002882
atcaacttcaaaa

SEQ ID NO: 12045 - DNA, 13 bp, Artificial Sequence
  Oligonucleotide for detection of SNP TSC0002882
ttttgatgttgat

SEQ ID NO: 12046 - DNA, 13 bp, Artificial Sequence
  Oligonucleotide for detection of SNP TSC0002882
atcaacatcaaaa

SEQ ID NO: 12047 - DNA, 13 bp, Artificial Sequence
  Oligonucleotide for detection of SNP TSC0002882
ttttgaagtcgat

SEQ ID NO: 12048 - DNA, 13 bp, Artificial Sequence
  Oligonucleotide for detection of SNP TSC0002882
atcgacttcaaaa

SEQ ID NO: 12049 - DNA, 13 bp, Artificial Sequence
  Oligonucleotide for detection of SNP TSC0002882
ttttgacgttgat

SEQ ID NO: 12050 - DNA, 13 bp, Artificial Sequence
  Oligonucleotide for detection of SNP TSC0002882
atcaacgtcaaaa

SEQ ID NO: 12051 - DNA, 13 bp, Artificial Sequence
  Oligonucleotide for detection of SNP TSC0002882
ttttgatgtcgat

SEQ ID NO: 12052 - DNA, 13 bp, Artificial Sequence
  Oligonucleotide for detection of SNP TSC0002882
atcgacatcaaaa

SEQ ID NO: 12053 - DNA, 13 bp, Artificial Sequence
  Oligonucleotide for detection of SNP TSC0002882
ttttgacgtcgat

SEQ ID NO: 12054 - DNA, 13 bp, Artificial Sequence
  Oligonucleotide for detection of SNP TSC0002882
atcgacgtcaaaa

SEQ ID NO: 12055 - DNA, 13 bp, Artificial Sequence
  Oligonucleotide for detection of SNP TSC0002883
tgaatagagtagt

SEQ ID NO: 12056 - DNA, 13 bp, Artificial Sequence
  Oligonucleotide for detection of SNP TSC0002883
actactctattca

SEQ ID NO: 12057 - DNA, 13 bp, Artificial Sequence
  Oligonucleotide for detection of SNP TSC0002883
tgaataaagtagt

SEQ ID NO: 12058 - DNA, 13 bp, Artificial Sequence
  Oligonucleotide for detection of SNP TSC0002883
actactttattca

SEQ ID NO: 12059 - DNA, 13 bp, Artificial Sequence
  Oligonucleotide for detection of SNP TSC0002884
aatttaattgtat

SEQ ID NO: 12060 - DNA, 13 bp, Artificial Sequence
  Oligonucleotide for detection of SNP TSC0002884
atacaattaaatt

SEQ ID NO: 12061 - DNA, 13 bp, Artificial Sequence
  Oligonucleotide for detection of SNP TSC0002884
aatttagttgtat

SEQ ID NO: 12062 - DNA, 13 bp, Artificial Sequence
  Oligonucleotide for detection of SNP TSC0002884
atacaactaaatt

SEQ ID NO: 12063 - DNA, 13 bp, Artificial Sequence
  Oligonucleotide for detection of SNP TSC0002885
ttattttgttttt

SEQ ID NO: 12064 - DNA, 13 bp, Artificial Sequence
  Oligonucleotide for detection of SNP TSC0002885
aaaaacaaaataa

SEQ ID NO: 12065 - DNA, 13 bp, Artificial Sequence
  Oligonucleotide for detection of SNP TSC0002885
ttatttcgttttt

SEQ ID NO: 12066 - DNA, 13 bp, Artificial Sequence
  Oligonucleotide for detection of SNP TSC0002885
aaaaacgaaataa

SEQ ID NO: 12067 - DNA, 13 bp, Artificial Sequence
  Oligonucleotide for detection of SNP TSC0002885
aggagtggaataa

SEQ ID NO: 12068 - DNA, 13 bp, Artificial Sequence
  Oligonucleotide for detection of SNP TSC0002885
ttattccactcct

SEQ ID NO: 12069 - DNA, 13 bp, Artificial Sequence
  Oligonucleotide for detection of SNP TSC0002885
aggagtagaataa

SEQ ID NO: 12070 - DNA, 13 bp, Artificial Sequence
  Oligonucleotide for detection of SNP TSC0002885
ttattctactcct

SEQ ID NO: 12071 - DNA, 13 bp, Artificial Sequence
  Oligonucleotide for detection of SNP TSC0002885
aggagcggaataa

SEQ ID NO: 12072 - DNA, 13 bp, Artificial Sequence
  Oligonucleotide for detection of SNP TSC0002885
ttattccgctcct

SEQ ID NO: 12073 - DNA, 13 bp, Artificial Sequence
  Oligonucleotide for detection of SNP TSC0002886
tggtttgtggaty

SEQ ID NO: 12074 - DNA, 13 bp, Artificial Sequence
  Oligonucleotide for detection of SNP TSC0002886
ratccacaaacca

SEQ ID NO: 12075 - DNA, 13 bp, Artificial Sequence
  Oligonucleotide for detection of SNP TSC0002886
tggtttatggaty

SEQ ID NO: 12076 - DNA, 13 bp, Artificial Sequence
  Oligonucleotide for detection of SNP TSC0002886
ratccataaacca

SEQ ID NO: 12077 - DNA, 13 bp, Artificial Sequence
  Oligonucleotide for detection of SNP TSC0002886
cggtttgtggaty

SEQ ID NO: 12078 - DNA, 13 bp, Artificial Sequence
  Oligonucleotide for detection of SNP TSC0002886
ratccacaaaccg

SEQ ID NO: 12079 - DNA, 13 bp, Artificial Sequence
  Oligonucleotide for detection of SNP TSC0002886
cggtttatggaty

SEQ ID NO: 12080 - DNA, 13 bp, Artificial Sequence
  Oligonucleotide for detection of SNP TSC0002886
ratccataaaccg

SEQ ID NO: 12081 - DNA, 13 bp, Artificial Sequence
  Oligonucleotide for detection of SNP TSC0002887
tgttaggtattgt

SEQ ID NO: 12082 - DNA, 13 bp, Artificial Sequence
  Oligonucleotide for detection of SNP TSC0002887
acaatacctaaca

SEQ ID NO: 12083 - DNA, 13 bp, Artificial Sequence
  Oligonucleotide for detection of SNP TSC0002887
tgttagatattgt

SEQ ID NO: 12084 - DNA, 13 bp, Artificial Sequence
  Oligonucleotide for detection of SNP TSC0002887
acaatatctaaca

SEQ ID NO: 12085 - DNA, 13 bp, Artificial Sequence
  Oligonucleotide for detection of SNP TSC0002887
cgttaggtattgt

SEQ ID NO: 12086 - DNA, 13 bp, Artificial Sequence
  Oligonucleotide for detection of SNP TSC0002887
acaatacctaacg

SEQ ID NO: 12087 - DNA, 13 bp, Artificial Sequence
  Oligonucleotide for detection of SNP TSC0002887
cgttagatattgt

SEQ ID NO: 12088 - DNA, 13 bp, Artificial Sequence
  Oligonucleotide for detection of SNP TSC0002887
acaatatctaacg

SEQ ID NO: 12089 - DNA, 13 bp, Artificial Sequence
  Oligonucleotide for detection of SNP TSC0002888
ggtttttttggtt

SEQ ID NO: 12090 - DNA, 13 bp, Artificial Sequence
  Oligonucleotide for detection of SNP TSC0002888
aaccaaaaaaacc

SEQ ID NO: 12091 - DNA, 13 bp, Artificial Sequence
  Oligonucleotide for detection of SNP TSC0002888
ggttttgttggtt

SEQ ID NO: 12092 - DNA, 13 bp, Artificial Sequence
  Oligonucleotide for detection of SNP TSC0002888
aaccaacaaaacc

SEQ ID NO: 12093 - DNA, 13 bp, Artificial Sequence
  Oligonucleotide for detection of SNP TSC0002888
ggtttcgttggtt

SEQ ID NO: 12094 - DNA, 13 bp, Artificial Sequence
  Oligonucleotide for detection of SNP TSC0002888
aaccaacgaaacc

SEQ ID NO: 12095 - DNA, 13 bp, Artificial Sequence
  Oligonucleotide for detection of SNP TSC0002888
agttagggagaty

SEQ ID NO: 12096 - DNA, 13 bp, Artificial Sequence
  Oligonucleotide for detection of SNP TSC0002888
ratctccctaact

SEQ ID NO: 12097 - DNA, 13 bp, Artificial Sequence
  Oligonucleotide for detection of SNP TSC0002888
agttagtgagaty

SEQ ID NO: 12098 - DNA, 13 bp, Artificial Sequence
  Oligonucleotide for detection of SNP TSC0002888
ratctcactaact

SEQ ID NO: 12099 - DNA, 13 bp, Artificial Sequence
  Oligonucleotide for detection of SNP TSC0002888
agttagcgagaty

SEQ ID NO: 12100 - DNA, 13 bp, Artificial Sequence
  Oligonucleotide for detection of SNP TSC0002888
ratctcgctaact

SEQ ID NO: 12101 - DNA, 13 bp, Artificial Sequence
  Oligonucleotide for detection of SNP TSC0002889
gtggtgtgtttgg

SEQ ID NO: 12102 - DNA, 13 bp, Artificial Sequence
  Oligonucleotide for detection of SNP TSC0002889
ccaaacacaccac

SEQ ID NO: 12103 - DNA, 13 bp, Artificial Sequence
  Oligonucleotide for detection of SNP TSC0002889
gtggcgtgtttgg

SEQ ID NO: 12104 - DNA, 13 bp, Artificial Sequence
  Oligonucleotide for detection of SNP TSC0002889
ccaaacacgccac

SEQ ID NO: 12105 - DNA, 13 bp, Artificial Sequence
  Oligonucleotide for detection of SNP TSC0002889
gtggtgcgtttgg

SEQ ID NO: 12106 - DNA, 13 bp, Artificial Sequence
  Oligonucleotide for detection of SNP TSC0002889
ccaaacgcaccac

SEQ ID NO: 12107 - DNA, 13 bp, Artificial Sequence
  Oligonucleotide for detection of SNP TSC0002889
gtggcgcgtttgg

SEQ ID NO: 12108 - DNA, 13 bp, Artificial Sequence
  Oligonucleotide for detection of SNP TSC0002889
ccaaacgcgccac

SEQ ID NO: 12109 - DNA, 13 bp, Artificial Sequence
  Oligonucleotide for detection of SNP TSC0002889
ttaggtgtgttay

SEQ ID NO: 12110 - DNA, 13 bp, Artificial Sequence
  Oligonucleotide for detection of SNP TSC0002889
rtaacacacctaa

SEQ ID NO: 12111 - DNA, 13 bp, Artificial Sequence
  Oligonucleotide for detection of SNP TSC0002889
ttaggtatgttay

SEQ ID NO: 12112 - DNA, 13 bp, Artificial Sequence
  Oligonucleotide for detection of SNP TSC0002889
rtaacatacctaa

SEQ ID NO: 12113 - DNA, 13 bp, Artificial Sequence
  Oligonucleotide for detection of SNP TSC0002889
ttaggcgtgttay

SEQ ID NO: 12114 - DNA, 13 bp, Artificial Sequence
  Oligonucleotide for detection of SNP TSC0002889
rtaacacgcctaa

SEQ ID NO: 12115 - DNA, 13 bp, Artificial Sequence
  Oligonucleotide for detection of SNP TSC0002889
ttaggtacgttay

SEQ ID NO: 12116 - DNA, 13 bp, Artificial Sequence
  Oligonucleotide for detection of SNP TSC0002889
rtaacgtacctaa

SEQ ID NO: 12117 - DNA, 13 bp, Artificial Sequence
  Oligonucleotide for detection of SNP TSC0002889
ttaggtgcgttay

SEQ ID NO: 12118 - DNA, 13 bp, Artificial Sequence
  Oligonucleotide for detection of SNP TSC0002889
rtaacgcacctaa

SEQ ID NO: 12119 - DNA, 13 bp, Artificial Sequence
  Oligonucleotide for detection of SNP TSC0002889
ttaggcgcgttay

SEQ ID NO: 12120 - DNA, 13 bp, Artificial Sequence
  Oligonucleotide for detection of SNP TSC0002889
rtaacgcgcctaa

SEQ ID NO: 12121 - DNA, 13 bp, Artificial Sequence
  Oligonucleotide for detection of SNP TSC0002891
tttagtagagata

SEQ ID NO: 12122 - DNA, 13 bp, Artificial Sequence
  Oligonucleotide for detection of SNP TSC0002891
tatctctactaaa

SEQ ID NO: 12123 - DNA, 13 bp, Artificial Sequence
  Oligonucleotide for detection of SNP TSC0002891
tttagtggagata

SEQ ID NO: 12124 - DNA, 13 bp, Artificial Sequence
  Oligonucleotide for detection of SNP TSC0002891
tatctccactaaa

SEQ ID NO: 12125 - DNA, 13 bp, Artificial Sequence
  Oligonucleotide for detection of SNP TSC0002892
taggtaattttag

SEQ ID NO: 12126 - DNA, 13 bp, Artificial Sequence
  Oligonucleotide for detection of SNP TSC0002892
ctaaaattaccta

SEQ ID NO: 12127 - DNA, 13 bp, Artificial Sequence
  Oligonucleotide for detection of SNP TSC0002892
taggtagttttag

SEQ ID NO: 12128 - DNA, 13 bp, Artificial Sequence
  Oligonucleotide for detection of SNP TSC0002892
ctaaaactaccta

SEQ ID NO: 12129 - DNA, 13 bp, Artificial Sequence
  Oligonucleotide for detection of SNP TSC0002893
ttttttaaaaatg

SEQ ID NO: 12130 - DNA, 13 bp, Artificial Sequence
  Oligonucleotide for detection of SNP TSC0002893
catttttaaaaaa

SEQ ID NO: 12131 - DNA, 13 bp, Artificial Sequence
  Oligonucleotide for detection of SNP TSC0002893
ttttttgaaaatg

SEQ ID NO: 12132 - DNA, 13 bp, Artificial Sequence
  Oligonucleotide for detection of SNP TSC0002893
cattttcaaaaaa

SEQ ID NO: 12133 - DNA, 13 bp, Artificial Sequence
  Oligonucleotide for detection of SNP TSC0002894
tatggaaattatt

SEQ ID NO: 12134 - DNA, 13 bp, Artificial Sequence
  Oligonucleotide for detection of SNP TSC0002894
aataatttccata

SEQ ID NO: 12135 - DNA, 13 bp, Artificial Sequence
  Oligonucleotide for detection of SNP TSC0002894
tatggatattatt

SEQ ID NO: 12136 - DNA, 13 bp, Artificial Sequence
  Oligonucleotide for detection of SNP TSC0002894
aataatatccata

SEQ ID NO: 12137 - DNA, 13 bp, Artificial Sequence
  Oligonucleotide for detection of SNP TSC0002894
aatgatttttatg

SEQ ID NO: 12138 - DNA, 13 bp, Artificial Sequence
  Oligonucleotide for detection of SNP TSC0002894
cataaaaatcatt

SEQ ID NO: 12139 - DNA, 13 bp, Artificial Sequence
  Oligonucleotide for detection of SNP TSC0002894
aatgatgtttatg

SEQ ID NO: 12140 - DNA, 13 bp, Artificial Sequence
  Oligonucleotide for detection of SNP TSC0002894
cataaacatcatt

SEQ ID NO: 12141 - DNA, 13 bp, Artificial Sequence
  Oligonucleotide for detection of SNP TSC0002895
tggttatggtttt

SEQ ID NO: 12142 - DNA, 13 bp, Artificial Sequence
  Oligonucleotide for detection of SNP TSC0002895
aaaaccataacca

SEQ ID NO: 12143 - DNA, 13 bp, Artificial Sequence
  Oligonucleotide for detection of SNP TSC0002895
tggttacggtttt

SEQ ID NO: 12144 - DNA, 13 bp, Artificial Sequence
  Oligonucleotide for detection of SNP TSC0002895
aaaaccgtaacca

SEQ ID NO: 12145 - DNA, 13 bp, Artificial Sequence
  Oligonucleotide for detection of SNP TSC0002895
agaattgtggtta

SEQ ID NO: 12146 - DNA, 13 bp, Artificial Sequence
  Oligonucleotide for detection of SNP TSC0002895
taaccacaattct

SEQ ID NO: 12147 - DNA, 13 bp, Artificial Sequence
  Oligonucleotide for detection of SNP TSC0002895
agaattatggtta

SEQ ID NO: 12148 - DNA, 13 bp, Artificial Sequence
  Oligonucleotide for detection of SNP TSC0002895
taaccataattct

SEQ ID NO: 12149 - DNA, 13 bp, Artificial Sequence
  Oligonucleotide for detection of SNP TSC0002895
agaatcgtggtta

SEQ ID NO: 12150 - DNA, 13 bp, Artificial Sequence
  Oligonucleotide for detection of SNP TSC0002895
taaccacgattct

SEQ ID NO: 12151 - DNA, 13 bp, Artificial Sequence
  Oligonucleotide for detection of SNP TSC0002896
ttattatgaatty

SEQ ID NO: 12152 - DNA, 13 bp, Artificial Sequence
  Oligonucleotide for detection of SNP TSC0002896
raattcataataa

SEQ ID NO: 12153 - DNA, 13 bp, Artificial Sequence
  Oligonucleotide for detection of SNP TSC0002896
ttattacgaatty

SEQ ID NO: 12154 - DNA, 13 bp, Artificial Sequence
  Oligonucleotide for detection of SNP TSC0002896
raattcgtaataa

SEQ ID NO: 12155 - DNA, 13 bp, Artificial Sequence
  Oligonucleotide for detection of SNP TSC0002896
gaatttgtgataa

SEQ ID NO: 12156 - DNA, 13 bp, Artificial Sequence
  Oligonucleotide for detection of SNP TSC0002896
ttatcacaaattc

SEQ ID NO: 12157 - DNA, 13 bp, Artificial Sequence
  Oligonucleotide for detection of SNP TSC0002896
gaatttatgataa

SEQ ID NO: 12158 - DNA, 13 bp, Artificial Sequence
  Oligonucleotide for detection of SNP TSC0002896
ttatcataaattc

SEQ ID NO: 12159 - DNA, 13 bp, Artificial Sequence
  Oligonucleotide for detection of SNP TSC0002896
gaattcgtgataa

SEQ ID NO: 12160 - DNA, 13 bp, Artificial Sequence
  Oligonucleotide for detection of SNP TSC0002896
ttatcacgaattc

SEQ ID NO: 12161 - DNA, 13 bp, Artificial Sequence
  Oligonucleotide for detection of SNP TSC0002897
tggtgggattttt

SEQ ID NO: 12162 - DNA, 13 bp, Artificial Sequence
  Oligonucleotide for detection of SNP TSC0002897
aaaaatcccacca

SEQ ID NO: 12163 - DNA, 13 bp, Artificial Sequence
  Oligonucleotide for detection of SNP TSC0002897
tggtggaattttt

SEQ ID NO: 12164 - DNA, 13 bp, Artificial Sequence
  Oligonucleotide for detection of SNP TSC0002897
aaaaattccacca

SEQ ID NO: 12165 - DNA, 13 bp, Artificial Sequence
  Oligonucleotide for detection of SNP TSC0002897
cggtgggattttt

SEQ ID NO: 12166 - DNA, 13 bp, Artificial Sequence
  Oligonucleotide for detection of SNP TSC0002897
aaaaatcccaccg

SEQ ID NO: 12167 - DNA, 13 bp, Artificial Sequence
  Oligonucleotide for detection of SNP TSC0002897
cggtggaattttt

SEQ ID NO: 12168 - DNA, 13 bp, Artificial Sequence
  Oligonucleotide for detection of SNP TSC0002897
aaaaattccaccg

SEQ ID NO: 12169 - DNA, 13 bp, Artificial Sequence
  Oligonucleotide for detection of SNP TSC0002898
gtagatattttta

SEQ ID NO: 12170 - DNA, 13 bp, Artificial Sequence
  Oligonucleotide for detection of SNP TSC0002898
taaaaatatctac

SEQ ID NO: 12171 - DNA, 13 bp, Artificial Sequence
  Oligonucleotide for detection of SNP TSC0002898
gtagattttttta

SEQ ID NO: 12172 - DNA, 13 bp, Artificial Sequence
  Oligonucleotide for detection of SNP TSC0002898
taaaaaaatctac

SEQ ID NO: 12173 - DNA, 13 bp, Artificial Sequence
  Oligonucleotide for detection of SNP TSC0002898
tagaagtatttay

SEQ ID NO: 12174 - DNA, 13 bp, Artificial Sequence
  Oligonucleotide for detection of SNP TSC0002898
rtaaatacttcta

SEQ ID NO: 12175 - DNA, 13 bp, Artificial Sequence
  Oligonucleotide for detection of SNP TSC0002898
tagaaggatttay

SEQ ID NO: 12176 - DNA, 13 bp, Artificial Sequence
  Oligonucleotide for detection of SNP TSC0002898
rtaaatccttcta

SEQ ID NO: 12177 - DNA, 13 bp, Artificial Sequence
  Oligonucleotide for detection of SNP TSC0002899
atttgaggagtgg

SEQ ID NO: 12178 - DNA, 13 bp, Artificial Sequence
  Oligonucleotide for detection of SNP TSC0002899
ccactcctcaaat

SEQ ID NO: 12179 - DNA, 13 bp, Artificial Sequence
  Oligonucleotide for detection of SNP TSC0002899
atttgaagagtgg

SEQ ID NO: 12180 - DNA, 13 bp, Artificial Sequence
  Oligonucleotide for detection of SNP TSC0002899
ccactcttcaaat

SEQ ID NO: 12181 - DNA, 13 bp, Artificial Sequence
  Oligonucleotide for detection of SNP TSC0002900
atattagtttatt

SEQ ID NO: 12182 - DNA, 13 bp, Artificial Sequence
  Oligonucleotide for detection of SNP TSC0002900
aataaactaatat

SEQ ID NO: 12183 - DNA, 13 bp, Artificial Sequence
  Oligonucleotide for detection of SNP TSC0002900
atattaatttatt

SEQ ID NO: 12184 - DNA, 13 bp, Artificial Sequence
  Oligonucleotide for detection of SNP TSC0002900
aataaattaatat

SEQ ID NO: 12185 - DNA, 13 bp, Artificial Sequence
  Oligonucleotide for detection of SNP TSC0002901
gaaaaatgaattg

SEQ ID NO: 12186 - DNA, 13 bp, Artificial Sequence
  Oligonucleotide for detection of SNP TSC0002901
caattcatttttc

SEQ ID NO: 12187 - DNA, 13 bp, Artificial Sequence
  Oligonucleotide for detection of SNP TSC0002901
gaaaaacgaattg

SEQ ID NO: 12188 - DNA, 13 bp, Artificial Sequence
  Oligonucleotide for detection of SNP TSC0002901
caattcgtttttc

SEQ ID NO: 12189 - DNA, 13 bp, Artificial Sequence
  Oligonucleotide for detection of SNP TSC0002901
tagtttgttttty

SEQ ID NO: 12190 - DNA, 13 bp, Artificial Sequence
  Oligonucleotide for detection of SNP TSC0002901
raaaaacaaacta

SEQ ID NO: 12191 - DNA, 13 bp, Artificial Sequence
  Oligonucleotide for detection of SNP TSC0002901
tagtttattttty

SEQ ID NO: 12192 - DNA, 13 bp, Artificial Sequence
  Oligonucleotide for detection of SNP TSC0002901
raaaaataaacta

SEQ ID NO: 12193 - DNA, 13 bp, Artificial Sequence
  Oligonucleotide for detection of SNP TSC0002901
tagttcgttttty

SEQ ID NO: 12194 - DNA, 13 bp, Artificial Sequence
  Oligonucleotide for detection of SNP TSC0002901
raaaaacgaacta

SEQ ID NO: 12195 - DNA, 13 bp, Artificial Sequence
  Oligonucleotide for detection of SNP TSC0002906
ttatattgtgtaa

SEQ ID NO: 12196 - DNA, 13 bp, Artificial Sequence
  Oligonucleotide for detection of SNP TSC0002906
ttacacaatataa

SEQ ID NO: 12197 - DNA, 13 bp, Artificial Sequence
  Oligonucleotide for detection of SNP TSC0002906
ttatatcgtgtaa

SEQ ID NO: 12198 - DNA, 13 bp, Artificial Sequence
  Oligonucleotide for detection of SNP TSC0002906
ttacacgatataa

SEQ ID NO: 12199 - DNA, 13 bp, Artificial Sequence
  Oligonucleotide for detection of SNP TSC0002906
ttgtatgatatga

SEQ ID NO: 12200 - DNA, 13 bp, Artificial Sequence
  Oligonucleotide for detection of SNP TSC0002906
tcatatcatacaa

SEQ ID NO: 12201 - DNA, 13 bp, Artificial Sequence
  Oligonucleotide for detection of SNP TSC0002906
ttgtataatatga

SEQ ID NO: 12202 - DNA, 13 bp, Artificial Sequence
  Oligonucleotide for detection of SNP TSC0002906
tcatattatacaa

SEQ ID NO: 12203 - DNA, 13 bp, Artificial Sequence
  Oligonucleotide for detection of SNP TSC0002906
ttgtacgatatga

SEQ ID NO: 12204 - DNA, 13 bp, Artificial Sequence
  Oligonucleotide for detection of SNP TSC0002906
tcatatcgtacaa

SEQ ID NO: 12205 - DNA, 13 bp, Artificial Sequence
  Oligonucleotide for detection of SNP TSC0002907
gtttagtaaagag

SEQ ID NO: 12206 - DNA, 13 bp, Artificial Sequence
  Oligonucleotide for detection of SNP TSC0002907
ctctttactaaac

SEQ ID NO: 12207 - DNA, 13 bp, Artificial Sequence
  Oligonucleotide for detection of SNP TSC0002907
gtttaggaaagag

SEQ ID NO: 12208 - DNA, 13 bp, Artificial Sequence
  Oligonucleotide for detection of SNP TSC0002907
ctctttcctaaac

SEQ ID NO: 12209 - DNA, 13 bp, Artificial Sequence
  Oligonucleotide for detection of SNP TSC0002907
ttttttattgaay

SEQ ID NO: 12210 - DNA, 13 bp, Artificial Sequence
  Oligonucleotide for detection of SNP TSC0002907
rttcaataaaaaa

SEQ ID NO: 12211 - DNA, 13 bp, Artificial Sequence
  Oligonucleotide for detection of SNP TSC0002907
tttttttttgaay

SEQ ID NO: 12212 - DNA, 13 bp, Artificial Sequence
  Oligonucleotide for detection of SNP TSC0002907
rttcaaaaaaaaa

SEQ ID NO: 12213 - DNA, 13 bp, Artificial Sequence
  Oligonucleotide for detection of SNP TSC0002908
tagatttgttaaa

SEQ ID NO: 12214 - DNA, 13 bp, Artificial Sequence
  Oligonucleotide for detection of SNP TSC0002908
tttaacaaatcta

SEQ ID NO: 12215 - DNA, 13 bp, Artificial Sequence
  Oligonucleotide for detection of SNP TSC0002908
tagattggttaaa

SEQ ID NO: 12216 - DNA, 13 bp, Artificial Sequence
  Oligonucleotide for detection of SNP TSC0002908
tttaaccaatcta

SEQ ID NO: 12217 - DNA, 13 bp, Artificial Sequence
  Oligonucleotide for detection of SNP TSC0002908
tagattcgttaaa

SEQ ID NO: 12218 - DNA, 13 bp, Artificial Sequence
  Oligonucleotide for detection of SNP TSC0002908
tttaacgaatcta

SEQ ID NO: 12219 - DNA, 13 bp, Artificial Sequence
  Oligonucleotide for detection of SNP TSC0002908
tttaatgagttta

SEQ ID NO: 12220 - DNA, 13 bp, Artificial Sequence
  Oligonucleotide for detection of SNP TSC0002908
taaactcattaaa

SEQ ID NO: 12221 - DNA, 13 bp, Artificial Sequence
  Oligonucleotide for detection of SNP TSC0002908
tttaattagttta

SEQ ID NO: 12222 - DNA, 13 bp, Artificial Sequence
  Oligonucleotide for detection of SNP TSC0002908
taaactaattaaa

SEQ ID NO: 12223 - DNA, 13 bp, Artificial Sequence
  Oligonucleotide for detection of SNP TSC0002908
tttaacgagttta

SEQ ID NO: 12224 - DNA, 13 bp, Artificial Sequence
  Oligonucleotide for detection of SNP TSC0002908
taaactcgttaaa

SEQ ID NO: 12225 - DNA, 13 bp, Artificial Sequence
  Oligonucleotide for detection of SNP TSC0002909
attttgattatgg

SEQ ID NO: 12226 - DNA, 13 bp, Artificial Sequence
  Oligonucleotide for detection of SNP TSC0002909
ccataatcaaaat

SEQ ID NO: 12227 - DNA, 13 bp, Artificial Sequence
  Oligonucleotide for detection of SNP TSC0002909
attttggttatgg

SEQ ID NO: 12228 - DNA, 13 bp, Artificial Sequence
  Oligonucleotide for detection of SNP TSC0002909
ccataaccaaaat

SEQ ID NO: 12229 - DNA, 13 bp, Artificial Sequence
  Oligonucleotide for detection of SNP TSC0002910
gtttgatgtatta

SEQ ID NO: 12230 - DNA, 13 bp, Artificial Sequence
  Oligonucleotide for detection of SNP TSC0002910
taatacatcaaac

SEQ ID NO: 12231 - DNA, 13 bp, Artificial Sequence
  Oligonucleotide for detection of SNP TSC0002910
gtttgacgtatta

SEQ ID NO: 12232 - DNA, 13 bp, Artificial Sequence
  Oligonucleotide for detection of SNP TSC0002910
taatacgtcaaac

SEQ ID NO: 12233 - DNA, 13 bp, Artificial Sequence
  Oligonucleotide for detection of SNP TSC0002910
tgatgtgttaggy

SEQ ID NO: 12234 - DNA, 13 bp, Artificial Sequence
  Oligonucleotide for detection of SNP TSC0002910
rcctaacacatca

SEQ ID NO: 12235 - DNA, 13 bp, Artificial Sequence
  Oligonucleotide for detection of SNP TSC0002910
tgatgtattaggy

SEQ ID NO: 12236 - DNA, 13 bp, Artificial Sequence
  Oligonucleotide for detection of SNP TSC0002910
rcctaatacatca

SEQ ID NO: 12237 - DNA, 13 bp, Artificial Sequence
  Oligonucleotide for detection of SNP TSC0002910
tgatgcgttaggy

SEQ ID NO: 12238 - DNA, 13 bp, Artificial Sequence
  Oligonucleotide for detection of SNP TSC0002910
rcctaacgcatca

SEQ ID NO: 12239 - DNA, 13 bp, Artificial Sequence
  Oligonucleotide for detection of SNP TSC0002911
aatgttgtataag

SEQ ID NO: 12240 - DNA, 13 bp, Artificial Sequence
  Oligonucleotide for detection of SNP TSC0002911
cttatacaacatt

SEQ ID NO: 12241 - DNA, 13 bp, Artificial Sequence
  Oligonucleotide for detection of SNP TSC0002911
aatgttatataag

SEQ ID NO: 12242 - DNA, 13 bp, Artificial Sequence
  Oligonucleotide for detection of SNP TSC0002911
cttatataacatt

SEQ ID NO: 12243 - DNA, 13 bp, Artificial Sequence
  Oligonucleotide for detection of SNP TSC0002913
atttaatgtttay

SEQ ID NO: 12244 - DNA, 13 bp, Artificial Sequence
  Oligonucleotide for detection of SNP TSC0002913
rtaaacattaaat

SEQ ID NO: 12245 - DNA, 13 bp, Artificial Sequence
  Oligonucleotide for detection of SNP TSC0002913
atttaacgtttay

SEQ ID NO: 12246 - DNA, 13 bp, Artificial Sequence
  Oligonucleotide for detection of SNP TSC0002913
rtaaacgttaaat

SEQ ID NO: 12247 - DNA, 13 bp, Artificial Sequence
  Oligonucleotide for detection of SNP TSC0002913
gtgggtgttaggt

SEQ ID NO: 12248 - DNA, 13 bp, Artificial Sequence
  Oligonucleotide for detection of SNP TSC0002913
acctaacacccac

SEQ ID NO: 12249 - DNA, 13 bp, Artificial Sequence
  Oligonucleotide for detection of SNP TSC0002913
gtgggtattaggt

SEQ ID NO: 12250 - DNA, 13 bp, Artificial Sequence
  Oligonucleotide for detection of SNP TSC0002913
acctaatacccac

SEQ ID NO: 12251 - DNA, 13 bp, Artificial Sequence
  Oligonucleotide for detection of SNP TSC0002913
gtgggcgttaggt

SEQ ID NO: 12252 - DNA, 13 bp, Artificial Sequence
  Oligonucleotide for detection of SNP TSC0002913
acctaacgcccac

SEQ ID NO: 12253 - DNA, 13 bp, Artificial Sequence
  Oligonucleotide for detection of SNP TSC0002914
atatataaataty

SEQ ID NO: 12254 - DNA, 13 bp, Artificial Sequence
  Oligonucleotide for detection of SNP TSC0002914
ratatttatatat

SEQ ID NO: 12255 - DNA, 13 bp, Artificial Sequence
  Oligonucleotide for detection of SNP TSC0002914
atatattaataty

SEQ ID NO: 12256 - DNA, 13 bp, Artificial Sequence
  Oligonucleotide for detection of SNP TSC0002914
ratattaatatat

SEQ ID NO: 12257 - DNA, 13 bp, Artificial Sequence
  Oligonucleotide for detection of SNP TSC0002914
gatatttgtatat

SEQ ID NO: 12258 - DNA, 13 bp, Artificial Sequence
  Oligonucleotide for detection of SNP TSC0002914
atatacaaatatc

SEQ ID NO: 12259 - DNA, 13 bp, Artificial Sequence
  Oligonucleotide for detection of SNP TSC0002914
gatattggtatat

SEQ ID NO: 12260 - DNA, 13 bp, Artificial Sequence
  Oligonucleotide for detection of SNP TSC0002914
atataccaatatc

SEQ ID NO: 12261 - DNA, 13 bp, Artificial Sequence
  Oligonucleotide for detection of SNP TSC0002915
tatataaatattt

SEQ ID NO: 12262 - DNA, 13 bp, Artificial Sequence
  Oligonucleotide for detection of SNP TSC0002915
aaatatttatata

SEQ ID NO: 12263 - DNA, 13 bp, Artificial Sequence
  Oligonucleotide for detection of SNP TSC0002915
tatatatatattt

SEQ ID NO: 12264 - DNA, 13 bp, Artificial Sequence
  Oligonucleotide for detection of SNP TSC0002915
aaatatatatata

SEQ ID NO: 12265 - DNA, 13 bp, Artificial Sequence
  Oligonucleotide for detection of SNP TSC0002915
agatatttgtata

SEQ ID NO: 12266 - DNA, 13 bp, Artificial Sequence
  Oligonucleotide for detection of SNP TSC0002915
tatacaaatatct

SEQ ID NO: 12267 - DNA, 13 bp, Artificial Sequence
  Oligonucleotide for detection of SNP TSC0002915
agatatgtgtata

SEQ ID NO: 12268 - DNA, 13 bp, Artificial Sequence
  Oligonucleotide for detection of SNP TSC0002915
tatacacatatct

SEQ ID NO: 12269 - DNA, 13 bp, Artificial Sequence
  Oligonucleotide for detection of SNP TSC0002916
gagaaaaagagag

SEQ ID NO: 12270 - DNA, 13 bp, Artificial Sequence
  Oligonucleotide for detection of SNP TSC0002916
ctctctttttctc

SEQ ID NO: 12271 - DNA, 13 bp, Artificial Sequence
  Oligonucleotide for detection of SNP TSC0002916
gagaaagagagag

SEQ ID NO: 12272 - DNA, 13 bp, Artificial Sequence
  Oligonucleotide for detection of SNP TSC0002916
ctctctctttctc

SEQ ID NO: 12273 - DNA, 13 bp, Artificial Sequence
  Oligonucleotide for detection of SNP TSC0002917
atatgatagttgt

SEQ ID NO: 12274 - DNA, 13 bp, Artificial Sequence
  Oligonucleotide for detection of SNP TSC0002917
acaactatcatat

SEQ ID NO: 12275 - DNA, 13 bp, Artificial Sequence
  Oligonucleotide for detection of SNP TSC0002917
atatgagagttgt

SEQ ID NO: 12276 - DNA, 13 bp, Artificial Sequence
  Oligonucleotide for detection of SNP TSC0002917
acaactctcatat

SEQ ID NO: 12277 - DNA, 13 bp, Artificial Sequence
  Oligonucleotide for detection of SNP TSC0002917
ataattgttatgt

SEQ ID NO: 12278 - DNA, 13 bp, Artificial Sequence
  Oligonucleotide for detection of SNP TSC0002917
acataacaattat

SEQ ID NO: 12279 - DNA, 13 bp, Artificial Sequence
  Oligonucleotide for detection of SNP TSC0002917
ataatttttatgt

SEQ ID NO: 12280 - DNA, 13 bp, Artificial Sequence
  Oligonucleotide for detection of SNP TSC0002917
acataaaaattat

SEQ ID NO: 12281 - DNA, 13 bp, Artificial Sequence
  Oligonucleotide for detection of SNP TSC0002918
agaggtgtagtag

SEQ ID NO: 12282 - DNA, 13 bp, Artificial Sequence
  Oligonucleotide for detection of SNP TSC0002918
ctactacacctct

SEQ ID NO: 12283 - DNA, 13 bp, Artificial Sequence
  Oligonucleotide for detection of SNP TSC0002918
agaggtatagtag

SEQ ID NO: 12284 - DNA, 13 bp, Artificial Sequence
  Oligonucleotide for detection of SNP TSC0002918
ctactatacctct

SEQ ID NO: 12285 - DNA, 13 bp, Artificial Sequence
  Oligonucleotide for detection of SNP TSC0002919
ttggtaagggtgt

SEQ ID NO: 12286 - DNA, 13 bp, Artificial Sequence
  Oligonucleotide for detection of SNP TSC0002919
acacccttaccaa

SEQ ID NO: 12287 - DNA, 13 bp, Artificial Sequence
  Oligonucleotide for detection of SNP TSC0002919
ttggtaggggtgt

SEQ ID NO: 12288 - DNA, 13 bp, Artificial Sequence
  Oligonucleotide for detection of SNP TSC0002919
acacccctaccaa

SEQ ID NO: 12289 - DNA, 13 bp, Artificial Sequence
  Oligonucleotide for detection of SNP TSC0002919
tcggtaagggtgt

SEQ ID NO: 12290 - DNA, 13 bp, Artificial Sequence
  Oligonucleotide for detection of SNP TSC0002919
acacccttaccga

SEQ ID NO: 12291 - DNA, 13 bp, Artificial Sequence
  Oligonucleotide for detection of SNP TSC0002919
tcggtaggggtgt

SEQ ID NO: 12292 - DNA, 13 bp, Artificial Sequence
  Oligonucleotide for detection of SNP TSC0002919
acacccctaccga

SEQ ID NO: 12293 - DNA, 13 bp, Artificial Sequence
  Oligonucleotide for detection of SNP TSC0002920
atgattgtatgta

SEQ ID NO: 12294 - DNA, 13 bp, Artificial Sequence
  Oligonucleotide for detection of SNP TSC0002920
tacatacaatcat

SEQ ID NO: 12295 - DNA, 13 bp, Artificial Sequence
  Oligonucleotide for detection of SNP TSC0002920
atgattatatgta

SEQ ID NO: 12296 - DNA, 13 bp, Artificial Sequence
  Oligonucleotide for detection of SNP TSC0002920
tacatataatcat

SEQ ID NO: 12297 - DNA, 13 bp, Artificial Sequence
  Oligonucleotide for detection of SNP TSC0002921
ttttaagtgaaat

SEQ ID NO: 12298 - DNA, 13 bp, Artificial Sequence
  Oligonucleotide for detection of SNP TSC0002921
atttcacttaaaa

SEQ ID NO: 12299 - DNA, 13 bp, Artificial Sequence
  Oligonucleotide for detection of SNP TSC0002921
ttttaaatgaaat

SEQ ID NO: 12300 - DNA, 13 bp, Artificial Sequence
  Oligonucleotide for detection of SNP TSC0002921
atttcatttaaaa

SEQ ID NO: 12301 - DNA, 13 bp, Artificial Sequence
  Oligonucleotide for detection of SNP TSC0002923
agttataaattta

SEQ ID NO: 12302 - DNA, 13 bp, Artificial Sequence
  Oligonucleotide for detection of SNP TSC0002923
taaatttataact

SEQ ID NO: 12303 - DNA, 13 bp, Artificial Sequence
  Oligonucleotide for detection of SNP TSC0002923
agttatgaattta

SEQ ID NO: 12304 - DNA, 13 bp, Artificial Sequence
  Oligonucleotide for detection of SNP TSC0002923
taaattcataact

SEQ ID NO: 12305 - DNA, 13 bp, Artificial Sequence
  Oligonucleotide for detection of SNP TSC0002923
agttacgaattta

SEQ ID NO: 12306 - DNA, 13 bp, Artificial Sequence
  Oligonucleotide for detection of SNP TSC0002923
taaattcgtaact

SEQ ID NO: 12307 - DNA, 13 bp, Artificial Sequence
  Oligonucleotide for detection of SNP TSC0002923
tgagtttgtgatt

SEQ ID NO: 12308 - DNA, 13 bp, Artificial Sequence
  Oligonucleotide for detection of SNP TSC0002923
aatcacaaactca

SEQ ID NO: 12309 - DNA, 13 bp, Artificial Sequence
  Oligonucleotide for detection of SNP TSC0002923
tgagttcgtgatt

SEQ ID NO: 12310 - DNA, 13 bp, Artificial Sequence
  Oligonucleotide for detection of SNP TSC0002923
aatcacgaactca

SEQ ID NO: 12311 - DNA, 13 bp, Artificial Sequence
  Oligonucleotide for detection of SNP TSC0002924
gaaaaaattaaga

SEQ ID NO: 12312 - DNA, 13 bp, Artificial Sequence
  Oligonucleotide for detection of SNP TSC0002924
tcttaattttttc

SEQ ID NO: 12313 - DNA, 13 bp, Artificial Sequence
  Oligonucleotide for detection of SNP TSC0002924
gaaaaagttaaga

SEQ ID NO: 12314 - DNA, 13 bp, Artificial Sequence
  Oligonucleotide for detection of SNP TSC0002924
tcttaactttttc

SEQ ID NO: 12315 - DNA, 13 bp, Artificial Sequence
  Oligonucleotide for detection of SNP TSC0002925
aaaaaattaagaa

SEQ ID NO: 12316 - DNA, 13 bp, Artificial Sequence
  Oligonucleotide for detection of SNP TSC0002925
ttcttaatttttt

SEQ ID NO: 12317 - DNA, 13 bp, Artificial Sequence
  Oligonucleotide for detection of SNP TSC0002925
aaaaaaataagaa

SEQ ID NO: 12318 - DNA, 13 bp, Artificial Sequence
  Oligonucleotide for detection of SNP TSC0002925
ttcttattttttt

SEQ ID NO: 12319 - DNA, 13 bp, Artificial Sequence
  Oligonucleotide for detection of SNP TSC0002926
ggtgtaaaaaggt

SEQ ID NO: 12320 - DNA, 13 bp, Artificial Sequence
  Oligonucleotide for detection of SNP TSC0002926
acctttttacacc

SEQ ID NO: 12321 - DNA, 13 bp, Artificial Sequence
  Oligonucleotide for detection of SNP TSC0002926
ggtgtagaaaggt

SEQ ID NO: 12322 - DNA, 13 bp, Artificial Sequence
  Oligonucleotide for detection of SNP TSC0002926
acctttctacacc

SEQ ID NO: 12323 - DNA, 13 bp, Artificial Sequence
  Oligonucleotide for detection of SNP TSC0002927
attaatttttatt

SEQ ID NO: 12324 - DNA, 13 bp, Artificial Sequence
  Oligonucleotide for detection of SNP TSC0002927
aataaaaattaat

SEQ ID NO: 12325 - DNA, 13 bp, Artificial Sequence
  Oligonucleotide for detection of SNP TSC0002927
attaatgtttatt

SEQ ID NO: 12326 - DNA, 13 bp, Artificial Sequence
  Oligonucleotide for detection of SNP TSC0002927
aataaacattaat

SEQ ID NO: 12327 - DNA, 13 bp, Artificial Sequence
  Oligonucleotide for detection of SNP TSC0002927
aatagaaattaat

SEQ ID NO: 12328 - DNA, 13 bp, Artificial Sequence
  Oligonucleotide for detection of SNP TSC0002927
attaatttctatt

SEQ ID NO: 12329 - DNA, 13 bp, Artificial Sequence
  Oligonucleotide for detection of SNP TSC0002927
aatagatattaat

SEQ ID NO: 12330 - DNA, 13 bp, Artificial Sequence
  Oligonucleotide for detection of SNP TSC0002927
attaatatctatt

SEQ ID NO: 12331 - DNA, 13 bp, Artificial Sequence
  Oligonucleotide for detection of SNP TSC0002928
ttttataattgtt

SEQ ID NO: 12332 - DNA, 13 bp, Artificial Sequence
  Oligonucleotide for detection of SNP TSC0002928
aacaattataaaa

SEQ ID NO: 12333 - DNA, 13 bp, Artificial Sequence
  Oligonucleotide for detection of SNP TSC0002928
ttttattattgtt

SEQ ID NO: 12334 - DNA, 13 bp, Artificial Sequence
  Oligonucleotide for detection of SNP TSC0002928
aacaataataaaa

SEQ ID NO: 12335 - DNA, 13 bp, Artificial Sequence
  Oligonucleotide for detection of SNP TSC0002928
aataattataaaa

SEQ ID NO: 12336 - DNA, 13 bp, Artificial Sequence
  Oligonucleotide for detection of SNP TSC0002928
ttttataattatt

SEQ ID NO: 12337 - DNA, 13 bp, Artificial Sequence
  Oligonucleotide for detection of SNP TSC0002928
aataatgataaaa

SEQ ID NO: 12338 - DNA, 13 bp, Artificial Sequence
  Oligonucleotide for detection of SNP TSC0002928
ttttatcattatt

SEQ ID NO: 12339 - DNA, 13 bp, Artificial Sequence
  Oligonucleotide for detection of SNP TSC0002929
aaatgtagttgag

SEQ ID NO: 12340 - DNA, 13 bp, Artificial Sequence
  Oligonucleotide for detection of SNP TSC0002929
ctcaactacattt

SEQ ID NO: 12341 - DNA, 13 bp, Artificial Sequence
  Oligonucleotide for detection of SNP TSC0002929
aaatgttgttgag

SEQ ID NO: 12342 - DNA, 13 bp, Artificial Sequence
  Oligonucleotide for detection of SNP TSC0002929
ctcaacaacattt

SEQ ID NO: 12343 - DNA, 13 bp, Artificial Sequence
  Oligonucleotide for detection of SNP TSC0002929
aaatgtcgttgag

SEQ ID NO: 12344 - DNA, 13 bp, Artificial Sequence
  Oligonucleotide for detection of SNP TSC0002929
ctcaacgacattt

SEQ ID NO: 12345 - DNA, 13 bp, Artificial Sequence
  Oligonucleotide for detection of SNP TSC0002929
tttaattgtattt

SEQ ID NO: 12346 - DNA, 13 bp, Artificial Sequence
  Oligonucleotide for detection of SNP TSC0002929
aaatacaattaaa

SEQ ID NO: 12347 - DNA, 13 bp, Artificial Sequence
  Oligonucleotide for detection of SNP TSC0002929
tttaatggtattt

SEQ ID NO: 12348 - DNA, 13 bp, Artificial Sequence
  Oligonucleotide for detection of SNP TSC0002929
aaataccattaaa

SEQ ID NO: 12349 - DNA, 13 bp, Artificial Sequence
  Oligonucleotide for detection of SNP TSC0002929
tttaacggtattt

SEQ ID NO: 12350 - DNA, 13 bp, Artificial Sequence
  Oligonucleotide for detection of SNP TSC0002929
aaataccgttaaa

SEQ ID NO: 12351 - DNA, 13 bp, Artificial Sequence
  Oligonucleotide for detection of SNP TSC0002930
tttatttggaatg

SEQ ID NO: 12352 - DNA, 13 bp, Artificial Sequence
  Oligonucleotide for detection of SNP TSC0002930
cattccaaataaa

SEQ ID NO: 12353 - DNA, 13 bp, Artificial Sequence
  Oligonucleotide for detection of SNP TSC0002930
tttattcggaatg

SEQ ID NO: 12354 - DNA, 13 bp, Artificial Sequence
  Oligonucleotide for detection of SNP TSC0002930
cattccgaataaa

SEQ ID NO: 12355 - DNA, 13 bp, Artificial Sequence
  Oligonucleotide for detection of SNP TSC0002930
tattttgaataaa

SEQ ID NO: 12356 - DNA, 13 bp, Artificial Sequence
  Oligonucleotide for detection of SNP TSC0002930
tttattcaaaata

SEQ ID NO: 12357 - DNA, 13 bp, Artificial Sequence
  Oligonucleotide for detection of SNP TSC0002930
tattttaaataaa

SEQ ID NO: 12358 - DNA, 13 bp, Artificial Sequence
  Oligonucleotide for detection of SNP TSC0002930
tttatttaaaata

SEQ ID NO: 12359 - DNA, 13 bp, Artificial Sequence
  Oligonucleotide for detection of SNP TSC0002930
tatttcgaataaa

SEQ ID NO: 12360 - DNA, 13 bp, Artificial Sequence
  Oligonucleotide for detection of SNP TSC0002930
tttattcgaaata

SEQ ID NO: 12361 - DNA, 13 bp, Artificial Sequence
  Oligonucleotide for detection of SNP TSC0002931
aataagattagta

SEQ ID NO: 12362 - DNA, 13 bp, Artificial Sequence
  Oligonucleotide for detection of SNP TSC0002931
tactaatcttatt

SEQ ID NO: 12363 - DNA, 13 bp, Artificial Sequence
  Oligonucleotide for detection of SNP TSC0002931
aataagtttagta

SEQ ID NO: 12364 - DNA, 13 bp, Artificial Sequence
  Oligonucleotide for detection of SNP TSC0002931
tactaaacttatt

SEQ ID NO: 12365 - DNA, 13 bp, Artificial Sequence
  Oligonucleotide for detection of SNP TSC0002931
tattagttttatt

SEQ ID NO: 12366 - DNA, 13 bp, Artificial Sequence
  Oligonucleotide for detection of SNP TSC0002931
aataaaactaata

SEQ ID NO: 12367 - DNA, 13 bp, Artificial Sequence
  Oligonucleotide for detection of SNP TSC0002931
tattagatttatt

SEQ ID NO: 12368 - DNA, 13 bp, Artificial Sequence
  Oligonucleotide for detection of SNP TSC0002931
aataaatctaata

SEQ ID NO: 12369 - DNA, 13 bp, Artificial Sequence
  Oligonucleotide for detection of SNP TSC0002932
agaaagaaagaaa

SEQ ID NO: 12370 - DNA, 13 bp, Artificial Sequence
  Oligonucleotide for detection of SNP TSC0002932
tttctttctttct

SEQ ID NO: 12371 - DNA, 13 bp, Artificial Sequence
  Oligonucleotide for detection of SNP TSC0002932
agaaaggaagaaa

SEQ ID NO: 12372 - DNA, 13 bp, Artificial Sequence
  Oligonucleotide for detection of SNP TSC0002932
tttcttcctttct

SEQ ID NO: 12373 - DNA, 13 bp, Artificial Sequence
  Oligonucleotide for detection of SNP TSC0002933
ttttgtgagaaaa

SEQ ID NO: 12374 - DNA, 13 bp, Artificial Sequence
  Oligonucleotide for detection of SNP TSC0002933
ttttctcacaaaa

SEQ ID NO: 12375 - DNA, 13 bp, Artificial Sequence
  Oligonucleotide for detection of SNP TSC0002933
ttttgtaagaaaa

SEQ ID NO: 12376 - DNA, 13 bp, Artificial Sequence
  Oligonucleotide for detection of SNP TSC0002933
ttttcttacaaaa

SEQ ID NO: 12377 - DNA, 13 bp, Artificial Sequence
  Oligonucleotide for detection of SNP TSC0002935
gaatttttttaty

SEQ ID NO: 12378 - DNA, 13 bp, Artificial Sequence
  Oligonucleotide for detection of SNP TSC0002935
rataaaaaaattc

SEQ ID NO: 12379 - DNA, 13 bp, Artificial Sequence
  Oligonucleotide for detection of SNP TSC0002935
gaatttgtttaty

SEQ ID NO: 12380 - DNA, 13 bp, Artificial Sequence
  Oligonucleotide for detection of SNP TSC0002935
rataaacaaattc

SEQ ID NO: 12381 - DNA, 13 bp, Artificial Sequence
  Oligonucleotide for detection of SNP TSC0002935
gataaggaagtty

SEQ ID NO: 12382 - DNA, 13 bp, Artificial Sequence
  Oligonucleotide for detection of SNP TSC0002935
raacttccttatc

SEQ ID NO: 12383 - DNA, 13 bp, Artificial Sequence
  Oligonucleotide for detection of SNP TSC0002935
gataagtaagtty

SEQ ID NO: 12384 - DNA, 13 bp, Artificial Sequence
  Oligonucleotide for detection of SNP TSC0002935
raacttacttatc

SEQ ID NO: 12385 - DNA, 13 bp, Artificial Sequence
  Oligonucleotide for detection of SNP TSC0002936
ttattttggttaa

SEQ ID NO: 12386 - DNA, 13 bp, Artificial Sequence
  Oligonucleotide for detection of SNP TSC0002936
ttaaccaaaataa

SEQ ID NO: 12387 - DNA, 13 bp, Artificial Sequence
  Oligonucleotide for detection of SNP TSC0002936
ttatttcggttaa

SEQ ID NO: 12388 - DNA, 13 bp, Artificial Sequence
  Oligonucleotide for detection of SNP TSC0002936
ttaaccgaaataa

SEQ ID NO: 12389 - DNA, 13 bp, Artificial Sequence
  Oligonucleotide for detection of SNP TSC0002936
ttagttggaatga

SEQ ID NO: 12390 - DNA, 13 bp, Artificial Sequence
  Oligonucleotide for detection of SNP TSC0002936
tcattccaactaa

SEQ ID NO: 12391 - DNA, 13 bp, Artificial Sequence
  Oligonucleotide for detection of SNP TSC0002936
ttagttagaatga

SEQ ID NO: 12392 - DNA, 13 bp, Artificial Sequence
  Oligonucleotide for detection of SNP TSC0002936
tcattctaactaa

SEQ ID NO: 12393 - DNA, 13 bp, Artificial Sequence
  Oligonucleotide for detection of SNP TSC0002936
ttagtcggaatga

SEQ ID NO: 12394 - DNA, 13 bp, Artificial Sequence
  Oligonucleotide for detection of SNP TSC0002936
tcattccgactaa

SEQ ID NO: 12395 - DNA, 13 bp, Artificial Sequence
  Oligonucleotide for detection of SNP TSC0002937
tttttttgttttt

SEQ ID NO: 12396 - DNA, 13 bp, Artificial Sequence
  Oligonucleotide for detection of SNP TSC0002937
aaaaacaaaaaaa

SEQ ID NO: 12397 - DNA, 13 bp, Artificial Sequence
  Oligonucleotide for detection of SNP TSC0002937
ttttttggttttt

SEQ ID NO: 12398 - DNA, 13 bp, Artificial Sequence
  Oligonucleotide for detection of SNP TSC0002937
aaaaaccaaaaaa

SEQ ID NO: 12399 - DNA, 13 bp, Artificial Sequence
  Oligonucleotide for detection of SNP TSC0002937
tttttcggttttt

SEQ ID NO: 12400 - DNA, 13 bp, Artificial Sequence
  Oligonucleotide for detection of SNP TSC0002937
aaaaaccgaaaaa

SEQ ID NO: 12401 - DNA, 13 bp, Artificial Sequence
  Oligonucleotide for detection of SNP TSC0002937
agaaatagaggaa

SEQ ID NO: 12402 - DNA, 13 bp, Artificial Sequence
  Oligonucleotide for detection of SNP TSC0002937
ttcctctatttct

SEQ ID NO: 12403 - DNA, 13 bp, Artificial Sequence
  Oligonucleotide for detection of SNP TSC0002937
agaaattgaggaa

SEQ ID NO: 12404 - DNA, 13 bp, Artificial Sequence
  Oligonucleotide for detection of SNP TSC0002937
ttcctcaatttct

SEQ ID NO: 12405 - DNA, 13 bp, Artificial Sequence
  Oligonucleotide for detection of SNP TSC0002937
agaaatcgaggaa

SEQ ID NO: 12406 - DNA, 13 bp, Artificial Sequence
  Oligonucleotide for detection of SNP TSC0002937
ttcctcgatttct

SEQ ID NO: 12407 - DNA, 13 bp, Artificial Sequence
  Oligonucleotide for detection of SNP TSC0002938
tttataaaaataa

SEQ ID NO: 12408 - DNA, 13 bp, Artificial Sequence
  Oligonucleotide for detection of SNP TSC0002938
ttatttttataaa

SEQ ID NO: 12409 - DNA, 13 bp, Artificial Sequence
  Oligonucleotide for detection of SNP TSC0002938
tttatagaaataa

SEQ ID NO: 12410 - DNA, 13 bp, Artificial Sequence
  Oligonucleotide for detection of SNP TSC0002938
ttatttctataaa

SEQ ID NO: 12411 - DNA, 13 bp, Artificial Sequence
  Oligonucleotide for detection of SNP TSC0002939
atttgaataataa

SEQ ID NO: 12412 - DNA, 13 bp, Artificial Sequence
  Oligonucleotide for detection of SNP TSC0002939
ttattattcaaat

SEQ ID NO: 12413 - DNA, 13 bp, Artificial Sequence
  Oligonucleotide for detection of SNP TSC0002939
atttgagtaataa

SEQ ID NO: 12414 - DNA, 13 bp, Artificial Sequence
  Oligonucleotide for detection of SNP TSC0002939
ttattactcaaat

SEQ ID NO: 12415 - DNA, 13 bp, Artificial Sequence
  Oligonucleotide for detection of SNP TSC0002940
ttgatatttattt

SEQ ID NO: 12416 - DNA, 13 bp, Artificial Sequence
  Oligonucleotide for detection of SNP TSC0002940
aaataaatatcaa

SEQ ID NO: 12417 - DNA, 13 bp, Artificial Sequence
  Oligonucleotide for detection of SNP TSC0002940
ttgatagttattt

SEQ ID NO: 12418 - DNA, 13 bp, Artificial Sequence
  Oligonucleotide for detection of SNP TSC0002940
aaataactatcaa

SEQ ID NO: 12419 - DNA, 13 bp, Artificial Sequence
  Oligonucleotide for detection of SNP TSC0002940
aaatgaatgttaa

SEQ ID NO: 12420 - DNA, 13 bp, Artificial Sequence
  Oligonucleotide for detection of SNP TSC0002940
ttaacattcattt

SEQ ID NO: 12421 - DNA, 13 bp, Artificial Sequence
  Oligonucleotide for detection of SNP TSC0002940
aaatgattgttaa

SEQ ID NO: 12422 - DNA, 13 bp, Artificial Sequence
  Oligonucleotide for detection of SNP TSC0002940
ttaacaatcattt

SEQ ID NO: 12423 - DNA, 13 bp, Artificial Sequence
  Oligonucleotide for detection of SNP TSC0002942
tttagtgtgttty

SEQ ID NO: 12424 - DNA, 13 bp, Artificial Sequence
  Oligonucleotide for detection of SNP TSC0002942
raaacacactaaa

SEQ ID NO: 12425 - DNA, 13 bp, Artificial Sequence
  Oligonucleotide for detection of SNP TSC0002942
tttagtatgttty

SEQ ID NO: 12426 - DNA, 13 bp, Artificial Sequence
  Oligonucleotide for detection of SNP TSC0002942
raaacatactaaa

SEQ ID NO: 12427 - DNA, 13 bp, Artificial Sequence
  Oligonucleotide for detection of SNP TSC0002943
ttttattagtaty

SEQ ID NO: 12428 - DNA, 13 bp, Artificial Sequence
  Oligonucleotide for detection of SNP TSC0002943
ratactaataaaa

SEQ ID NO: 12429 - DNA, 13 bp, Artificial Sequence
  Oligonucleotide for detection of SNP TSC0002943
ttttatgagtaty

SEQ ID NO: 12430 - DNA, 13 bp, Artificial Sequence
  Oligonucleotide for detection of SNP TSC0002943
ratactcataaaa

SEQ ID NO: 12431 - DNA, 13 bp, Artificial Sequence
  Oligonucleotide for detection of SNP TSC0002943
gatgttgatggaa

SEQ ID NO: 12432 - DNA, 13 bp, Artificial Sequence
  Oligonucleotide for detection of SNP TSC0002943
ttccatcaacatc

SEQ ID NO: 12433 - DNA, 13 bp, Artificial Sequence
  Oligonucleotide for detection of SNP TSC0002943
gatgtttatggaa

SEQ ID NO: 12434 - DNA, 13 bp, Artificial Sequence
  Oligonucleotide for detection of SNP TSC0002943
ttccataaacatc

SEQ ID NO: 12435 - DNA, 13 bp, Artificial Sequence
  Oligonucleotide for detection of SNP TSC0002944
tggtagataatgt

SEQ ID NO: 12436 - DNA, 13 bp, Artificial Sequence
  Oligonucleotide for detection of SNP TSC0002944
acattatctacca

SEQ ID NO: 12437 - DNA, 13 bp, Artificial Sequence
  Oligonucleotide for detection of SNP TSC0002944
tggtaggtaatgt

SEQ ID NO: 12438 - DNA, 13 bp, Artificial Sequence
  Oligonucleotide for detection of SNP TSC0002944
acattacctacca

SEQ ID NO: 12439 - DNA, 13 bp, Artificial Sequence
  Oligonucleotide for detection of SNP TSC0002945
ggtgattgagagg

SEQ ID NO: 12440 - DNA, 13 bp, Artificial Sequence
  Oligonucleotide for detection of SNP TSC0002945
cctctcaatcacc

SEQ ID NO: 12441 - DNA, 13 bp, Artificial Sequence
  Oligonucleotide for detection of SNP TSC0002945
ggtgatcgagagg

SEQ ID NO: 12442 - DNA, 13 bp, Artificial Sequence
  Oligonucleotide for detection of SNP TSC0002945
cctctcgatcacc

SEQ ID NO: 12443 - DNA, 13 bp, Artificial Sequence
  Oligonucleotide for detection of SNP TSC0002945
ttttttgattaty

SEQ ID NO: 12444 - DNA, 13 bp, Artificial Sequence
  Oligonucleotide for detection of SNP TSC0002945
rataatcaaaaaa

SEQ ID NO: 12445 - DNA, 13 bp, Artificial Sequence
  Oligonucleotide for detection of SNP TSC0002945
ttttttaattaty

SEQ ID NO: 12446 - DNA, 13 bp, Artificial Sequence
  Oligonucleotide for detection of SNP TSC0002945
rataattaaaaaa

SEQ ID NO: 12447 - DNA, 13 bp, Artificial Sequence
  Oligonucleotide for detection of SNP TSC0002945
tttttcgattaty

SEQ ID NO: 12448 - DNA, 13 bp, Artificial Sequence
  Oligonucleotide for detection of SNP TSC0002945
rataatcgaaaaa

SEQ ID NO: 12449 - DNA, 13 bp, Artificial Sequence
  Oligonucleotide for detection of SNP TSC0002946
tggaggggtagga

SEQ ID NO: 12450 - DNA, 13 bp, Artificial Sequence
  Oligonucleotide for detection of SNP TSC0002946
tcctacccctcca

SEQ ID NO: 12451 - DNA, 13 bp, Artificial Sequence
  Oligonucleotide for detection of SNP TSC0002946
tggaggagtagga

SEQ ID NO: 12452 - DNA, 13 bp, Artificial Sequence
  Oligonucleotide for detection of SNP TSC0002946
tcctactcctcca

SEQ ID NO: 12453 - DNA, 13 bp, Artificial Sequence
  Oligonucleotide for detection of SNP TSC0002947
attgtaagatata

SEQ ID NO: 12454 - DNA, 13 bp, Artificial Sequence
  Oligonucleotide for detection of SNP TSC0002947
tatatcttacaat

SEQ ID NO: 12455 - DNA, 13 bp, Artificial Sequence
  Oligonucleotide for detection of SNP TSC0002947
attgtatgatata

SEQ ID NO: 12456 - DNA, 13 bp, Artificial Sequence
  Oligonucleotide for detection of SNP TSC0002947
tatatcatacaat

SEQ ID NO: 12457 - DNA, 13 bp, Artificial Sequence
  Oligonucleotide for detection of SNP TSC0002947
attgtacgatata

SEQ ID NO: 12458 - DNA, 13 bp, Artificial Sequence
  Oligonucleotide for detection of SNP TSC0002947
tatatcgtacaat

SEQ ID NO: 12459 - DNA, 13 bp, Artificial Sequence
  Oligonucleotide for detection of SNP TSC0002947
tatattttgtaat

SEQ ID NO: 12460 - DNA, 13 bp, Artificial Sequence
  Oligonucleotide for detection of SNP TSC0002947
attacaaaatata

SEQ ID NO: 12461 - DNA, 13 bp, Artificial Sequence
  Oligonucleotide for detection of SNP TSC0002947
tatattgtgtaat

SEQ ID NO: 12462 - DNA, 13 bp, Artificial Sequence
  Oligonucleotide for detection of SNP TSC0002947
attacacaatata

SEQ ID NO: 12463 - DNA, 13 bp, Artificial Sequence
  Oligonucleotide for detection of SNP TSC0002947
tatatcgtgtaat

SEQ ID NO: 12464 - DNA, 13 bp, Artificial Sequence
  Oligonucleotide for detection of SNP TSC0002947
attacacgatata

SEQ ID NO: 12465 - DNA, 13 bp, Artificial Sequence
  Oligonucleotide for detection of SNP TSC0002948
ttttatgtgtaty

SEQ ID NO: 12466 - DNA, 13 bp, Artificial Sequence
  Oligonucleotide for detection of SNP TSC0002948
ratacacataaaa

SEQ ID NO: 12467 - DNA, 13 bp, Artificial Sequence
  Oligonucleotide for detection of SNP TSC0002948
ttttatatgtaty

SEQ ID NO: 12468 - DNA, 13 bp, Artificial Sequence
  Oligonucleotide for detection of SNP TSC0002948
ratacatataaaa

SEQ ID NO: 12469 - DNA, 13 bp, Artificial Sequence
  Oligonucleotide for detection of SNP TSC0002949
aaaaagtataaag

SEQ ID NO: 12470 - DNA, 13 bp, Artificial Sequence
  Oligonucleotide for detection of SNP TSC0002949
ctttatacttttt

SEQ ID NO: 12471 - DNA, 13 bp, Artificial Sequence
  Oligonucleotide for detection of SNP TSC0002949
aaaaagaataaag

SEQ ID NO: 12472 - DNA, 13 bp, Artificial Sequence
  Oligonucleotide for detection of SNP TSC0002949
ctttattcttttt

SEQ ID NO: 12473 - DNA, 13 bp, Artificial Sequence
  Oligonucleotide for detection of SNP TSC0002950
taatgtatattag

SEQ ID NO: 12474 - DNA, 13 bp, Artificial Sequence
  Oligonucleotide for detection of SNP TSC0002950
ctaatatacatta

SEQ ID NO: 12475 - DNA, 13 bp, Artificial Sequence
  Oligonucleotide for detection of SNP TSC0002950
taatgtgtattag

SEQ ID NO: 12476 - DNA, 13 bp, Artificial Sequence
  Oligonucleotide for detection of SNP TSC0002950
ctaatacacatta

SEQ ID NO: 12477 - DNA, 13 bp, Artificial Sequence
  Oligonucleotide for detection of SNP TSC0002950
taatgcgtattag

SEQ ID NO: 12478 - DNA, 13 bp, Artificial Sequence
  Oligonucleotide for detection of SNP TSC0002950
ctaatacgcatta

SEQ ID NO: 12479 - DNA, 13 bp, Artificial Sequence
  Oligonucleotide for detection of SNP TSC0002950
ttgatatgtattg

SEQ ID NO: 12480 - DNA, 13 bp, Artificial Sequence
  Oligonucleotide for detection of SNP TSC0002950
caatacatatcaa

SEQ ID NO: 12481 - DNA, 13 bp, Artificial Sequence
  Oligonucleotide for detection of SNP TSC0002950
ttgatacgtattg

SEQ ID NO: 12482 - DNA, 13 bp, Artificial Sequence
  Oligonucleotide for detection of SNP TSC0002950
caatacgtatcaa

SEQ ID NO: 12483 - DNA, 13 bp, Artificial Sequence
  Oligonucleotide for detection of SNP TSC0002951
ttgagtgtttgtt

SEQ ID NO: 12484 - DNA, 13 bp, Artificial Sequence
  Oligonucleotide for detection of SNP TSC0002951
aacaaacactcaa

SEQ ID NO: 12485 - DNA, 13 bp, Artificial Sequence
  Oligonucleotide for detection of SNP TSC0002951
ttgagcgtttgtt

SEQ ID NO: 12486 - DNA, 13 bp, Artificial Sequence
  Oligonucleotide for detection of SNP TSC0002951
aacaaacgctcaa

SEQ ID NO: 12487 - DNA, 13 bp, Artificial Sequence
  Oligonucleotide for detection of SNP TSC0002951
agtaagtgtttag

SEQ ID NO: 12488 - DNA, 13 bp, Artificial Sequence
  Oligonucleotide for detection of SNP TSC0002951
ctaaacacttact

SEQ ID NO: 12489 - DNA, 13 bp, Artificial Sequence
  Oligonucleotide for detection of SNP TSC0002951
agtaagcgtttag

SEQ ID NO: 12490 - DNA, 13 bp, Artificial Sequence
  Oligonucleotide for detection of SNP TSC0002951
ctaaacgcttact

SEQ ID NO: 12491 - DNA, 13 bp, Artificial Sequence
  Oligonucleotide for detection of SNP TSC0002952
ttatttattttay

SEQ ID NO: 12492 - DNA, 13 bp, Artificial Sequence
  Oligonucleotide for detection of SNP TSC0002952
rtaaaataaataa

SEQ ID NO: 12493 - DNA, 13 bp, Artificial Sequence
  Oligonucleotide for detection of SNP TSC0002952
ttatttgttttay

SEQ ID NO: 12494 - DNA, 13 bp, Artificial Sequence
  Oligonucleotide for detection of SNP TSC0002952
rtaaaacaaataa

SEQ ID NO: 12495 - DNA, 13 bp, Artificial Sequence
  Oligonucleotide for detection of SNP TSC0002952
ttattcgttttay

SEQ ID NO: 12496 - DNA, 13 bp, Artificial Sequence
  Oligonucleotide for detection of SNP TSC0002952
rtaaaacgaataa

SEQ ID NO: 12497 - DNA, 13 bp, Artificial Sequence
  Oligonucleotide for detection of SNP TSC0002952
gtaaaatgagtaa

SEQ ID NO: 12498 - DNA, 13 bp, Artificial Sequence
  Oligonucleotide for detection of SNP TSC0002952
ttactcattttac

SEQ ID NO: 12499 - DNA, 13 bp, Artificial Sequence
  Oligonucleotide for detection of SNP TSC0002952
gtaaaacgagtaa

SEQ ID NO: 12500 - DNA, 13 bp, Artificial Sequence
  Oligonucleotide for detection of SNP TSC0002952
ttactcgttttac

SEQ ID NO: 12501 - DNA, 13 bp, Artificial Sequence
  Oligonucleotide for detection of SNP TSC0002953
gaagaaattatta

SEQ ID NO: 12502 - DNA, 13 bp, Artificial Sequence
  Oligonucleotide for detection of SNP TSC0002953
taataatttcttc

SEQ ID NO: 12503 - DNA, 13 bp, Artificial Sequence
  Oligonucleotide for detection of SNP TSC0002953
gaagaagttatta

SEQ ID NO: 12504 - DNA, 13 bp, Artificial Sequence
  Oligonucleotide for detection of SNP TSC0002953
taataacttcttc

SEQ ID NO: 12505 - DNA, 13 bp, Artificial Sequence
  Oligonucleotide for detection of SNP TSC0002954
ttgatttaatatg

SEQ ID NO: 12506 - DNA, 13 bp, Artificial Sequence
  Oligonucleotide for detection of SNP TSC0002954
catattaaatcaa

SEQ ID NO: 12507 - DNA, 13 bp, Artificial Sequence
  Oligonucleotide for detection of SNP TSC0002954
ttgattgaatatg

SEQ ID NO: 12508 - DNA, 13 bp, Artificial Sequence
  Oligonucleotide for detection of SNP TSC0002954
catattcaatcaa

SEQ ID NO: 12509 - DNA, 13 bp, Artificial Sequence
  Oligonucleotide for detection of SNP TSC0002954
ttgatcgaatatg

SEQ ID NO: 12510 - DNA, 13 bp, Artificial Sequence
  Oligonucleotide for detection of SNP TSC0002954
catattcgatcaa

SEQ ID NO: 12511 - DNA, 13 bp, Artificial Sequence
  Oligonucleotide for detection of SNP TSC0002954
tatattaggttag

SEQ ID NO: 12512 - DNA, 13 bp, Artificial Sequence
  Oligonucleotide for detection of SNP TSC0002954
ctaacctaatata

SEQ ID NO: 12513 - DNA, 13 bp, Artificial Sequence
  Oligonucleotide for detection of SNP TSC0002954
tatatttggttag

SEQ ID NO: 12514 - DNA, 13 bp, Artificial Sequence
  Oligonucleotide for detection of SNP TSC0002954
ctaaccaaatata

SEQ ID NO: 12515 - DNA, 13 bp, Artificial Sequence
  Oligonucleotide for detection of SNP TSC0002954
tatattcggttag

SEQ ID NO: 12516 - DNA, 13 bp, Artificial Sequence
  Oligonucleotide for detection of SNP TSC0002954
ctaaccgaatata

SEQ ID NO: 12517 - DNA, 13 bp, Artificial Sequence
  Oligonucleotide for detection of SNP TSC0002955
attattagggtgt

SEQ ID NO: 12518 - DNA, 13 bp, Artificial Sequence
  Oligonucleotide for detection of SNP TSC0002955
acaccctaataat

SEQ ID NO: 12519 - DNA, 13 bp, Artificial Sequence
  Oligonucleotide for detection of SNP TSC0002955
attattggggtgt

SEQ ID NO: 12520 - DNA, 13 bp, Artificial Sequence
  Oligonucleotide for detection of SNP TSC0002955
acaccccaataat

SEQ ID NO: 12521 - DNA, 13 bp, Artificial Sequence
  Oligonucleotide for detection of SNP TSC0002955
attatcggggtgt

SEQ ID NO: 12522 - DNA, 13 bp, Artificial Sequence
  Oligonucleotide for detection of SNP TSC0002955
acaccccgataat

SEQ ID NO: 12523 - DNA, 13 bp, Artificial Sequence
  Oligonucleotide for detection of SNP TSC0002955
atattttggtgat

SEQ ID NO: 12524 - DNA, 13 bp, Artificial Sequence
  Oligonucleotide for detection of SNP TSC0002955
atcaccaaaatat

SEQ ID NO: 12525 - DNA, 13 bp, Artificial Sequence
  Oligonucleotide for detection of SNP TSC0002955
atatttcggtgat

SEQ ID NO: 12526 - DNA, 13 bp, Artificial Sequence
  Oligonucleotide for detection of SNP TSC0002955
atcaccgaaatat

SEQ ID NO: 12527 - DNA, 13 bp, Artificial Sequence
  Oligonucleotide for detection of SNP TSC0002956
ttttttattgtty

SEQ ID NO: 12528 - DNA, 13 bp, Artificial Sequence
  Oligonucleotide for detection of SNP TSC0002956
raacaataaaaaa

SEQ ID NO: 12529 - DNA, 13 bp, Artificial Sequence
  Oligonucleotide for detection of SNP TSC0002956
gggtagtgaagag

SEQ ID NO: 12530 - DNA, 13 bp, Artificial Sequence
  Oligonucleotide for detection of SNP TSC0002956
ctcttcactaccc

SEQ ID NO: 12531 - DNA, 13 bp, Artificial Sequence
  Oligonucleotide for detection of SNP TSC0002956
gggtagggaagag

SEQ ID NO: 12532 - DNA, 13 bp, Artificial Sequence
  Oligonucleotide for detection of SNP TSC0002956
ctcttccctaccc

SEQ ID NO: 12533 - DNA, 13 bp, Artificial Sequence
  Oligonucleotide for detection of SNP TSC0002957
tttgagaaattty

SEQ ID NO: 12534 - DNA, 13 bp, Artificial Sequence
  Oligonucleotide for detection of SNP TSC0002957
raaatttctcaaa

SEQ ID NO: 12535 - DNA, 13 bp, Artificial Sequence
  Oligonucleotide for detection of SNP TSC0002957
tttgagtaattty

SEQ ID NO: 12536 - DNA, 13 bp, Artificial Sequence
  Oligonucleotide for detection of SNP TSC0002957
raaattactcaaa

SEQ ID NO: 12537 - DNA, 13 bp, Artificial Sequence
  Oligonucleotide for detection of SNP TSC0002957
ttcgagaaattty

SEQ ID NO: 12538 - DNA, 13 bp, Artificial Sequence
  Oligonucleotide for detection of SNP TSC0002957
raaatttctcgaa

SEQ ID NO: 12539 - DNA, 13 bp, Artificial Sequence
  Oligonucleotide for detection of SNP TSC0002957
ttcgagtaattty

SEQ ID NO: 12540 - DNA, 13 bp, Artificial Sequence
  Oligonucleotide for detection of SNP TSC0002957
raaattactcgaa

SEQ ID NO: 12541 - DNA, 13 bp, Artificial Sequence
  Oligonucleotide for detection of SNP TSC0002957
ggaattttttgaa

SEQ ID NO: 12542 - DNA, 13 bp, Artificial Sequence
  Oligonucleotide for detection of SNP TSC0002957
ttcaaaaaattcc

SEQ ID NO: 12543 - DNA, 13 bp, Artificial Sequence
  Oligonucleotide for detection of SNP TSC0002957
ggaattatttgaa

SEQ ID NO: 12544 - DNA, 13 bp, Artificial Sequence
  Oligonucleotide for detection of SNP TSC0002957
ttcaaataattcc

SEQ ID NO: 12545 - DNA, 13 bp, Artificial Sequence
  Oligonucleotide for detection of SNP TSC0002957
ggaatttttcgaa

SEQ ID NO: 12546 - DNA, 13 bp, Artificial Sequence
  Oligonucleotide for detection of SNP TSC0002957
ttcgaaaaattcc

SEQ ID NO: 12547 - DNA, 13 bp, Artificial Sequence
  Oligonucleotide for detection of SNP TSC0002957
ggaattattcgaa

SEQ ID NO: 12548 - DNA, 13 bp, Artificial Sequence
  Oligonucleotide for detection of SNP TSC0002957
ttcgaataattcc

SEQ ID NO: 12549 - DNA, 13 bp, Artificial Sequence
  Oligonucleotide for detection of SNP TSC0002958
tgattttggtatg

SEQ ID NO: 12550 - DNA, 13 bp, Artificial Sequence
  Oligonucleotide for detection of SNP TSC0002958
cataccaaaatca

SEQ ID NO: 12551 - DNA, 13 bp, Artificial Sequence
  Oligonucleotide for detection of SNP TSC0002958
tgatttcggtatg

SEQ ID NO: 12552 - DNA, 13 bp, Artificial Sequence
  Oligonucleotide for detection of SNP TSC0002958
cataccgaaatca

SEQ ID NO: 12553 - DNA, 13 bp, Artificial Sequence
  Oligonucleotide for detection of SNP TSC0002958
tatattgaaatta

SEQ ID NO: 12554 - DNA, 13 bp, Artificial Sequence
  Oligonucleotide for detection of SNP TSC0002958
taatttcaatata

SEQ ID NO: 12555 - DNA, 13 bp, Artificial Sequence
  Oligonucleotide for detection of SNP TSC0002958
tatattaaaatta

SEQ ID NO: 12556 - DNA, 13 bp, Artificial Sequence
  Oligonucleotide for detection of SNP TSC0002958
taattttaatata

SEQ ID NO: 12557 - DNA, 13 bp, Artificial Sequence
  Oligonucleotide for detection of SNP TSC0002958
tatatcgaaatta

SEQ ID NO: 12558 - DNA, 13 bp, Artificial Sequence
  Oligonucleotide for detection of SNP TSC0002958
taatttcgatata

SEQ ID NO: 12559 - DNA, 13 bp, Artificial Sequence
  Oligonucleotide for detection of SNP TSC0002959
tttattaagtggg

SEQ ID NO: 12560 - DNA, 13 bp, Artificial Sequence
  Oligonucleotide for detection of SNP TSC0002959
cccacttaataaa

SEQ ID NO: 12561 - DNA, 13 bp, Artificial Sequence
  Oligonucleotide for detection of SNP TSC0002959
tttatttagtggg

SEQ ID NO: 12562 - DNA, 13 bp, Artificial Sequence
  Oligonucleotide for detection of SNP TSC0002959
cccactaaataaa

SEQ ID NO: 12563 - DNA, 13 bp, Artificial Sequence
  Oligonucleotide for detection of SNP TSC0002959
tttatttgataaa

SEQ ID NO: 12564 - DNA, 13 bp, Artificial Sequence
  Oligonucleotide for detection of SNP TSC0002959
tttatcaaataaa

SEQ ID NO: 12565 - DNA, 13 bp, Artificial Sequence
  Oligonucleotide for detection of SNP TSC0002959
tttattggataaa

SEQ ID NO: 12566 - DNA, 13 bp, Artificial Sequence
  Oligonucleotide for detection of SNP TSC0002959
tttatccaataaa

SEQ ID NO: 12567 - DNA, 13 bp, Artificial Sequence
  Oligonucleotide for detection of SNP TSC0002960
gggttataagggt

SEQ ID NO: 12568 - DNA, 13 bp, Artificial Sequence
  Oligonucleotide for detection of SNP TSC0002960
acccttataaccc

SEQ ID NO: 12569 - DNA, 13 bp, Artificial Sequence
  Oligonucleotide for detection of SNP TSC0002960
gggttagaagggt

SEQ ID NO: 12570 - DNA, 13 bp, Artificial Sequence
  Oligonucleotide for detection of SNP TSC0002960
acccttctaaccc

SEQ ID NO: 12571 - DNA, 13 bp, Artificial Sequence
  Oligonucleotide for detection of SNP TSC0002960
atttttgtaatty

SEQ ID NO: 12572 - DNA, 13 bp, Artificial Sequence
  Oligonucleotide for detection of SNP TSC0002960
raattacaaaaat

SEQ ID NO: 12573 - DNA, 13 bp, Artificial Sequence
  Oligonucleotide for detection of SNP TSC0002960
atttttttaatty

SEQ ID NO: 12574 - DNA, 13 bp, Artificial Sequence
  Oligonucleotide for detection of SNP TSC0002960
raattaaaaaaat

SEQ ID NO: 12575 - DNA, 13 bp, Artificial Sequence
  Oligonucleotide for detection of SNP TSC0002961
ttattatgttttt

SEQ ID NO: 12576 - DNA, 13 bp, Artificial Sequence
  Oligonucleotide for detection of SNP TSC0002961
aaaaacataataa

SEQ ID NO: 12577 - DNA, 13 bp, Artificial Sequence
  Oligonucleotide for detection of SNP TSC0002961
ttattacgttttt

SEQ ID NO: 12578 - DNA, 13 bp, Artificial Sequence
  Oligonucleotide for detection of SNP TSC0002961
aaaaacgtaataa

SEQ ID NO: 12579 - DNA, 13 bp, Artificial Sequence
  Oligonucleotide for detection of SNP TSC0002961
aaggatgtaataa

SEQ ID NO: 12580 - DNA, 13 bp, Artificial Sequence
  Oligonucleotide for detection of SNP TSC0002961
ttattacatcctt

SEQ ID NO: 12581 - DNA, 13 bp, Artificial Sequence
  Oligonucleotide for detection of SNP TSC0002961
aaggatataataa

SEQ ID NO: 12582 - DNA, 13 bp, Artificial Sequence
  Oligonucleotide for detection of SNP TSC0002961
ttattatatcctt

SEQ ID NO: 12583 - DNA, 13 bp, Artificial Sequence
  Oligonucleotide for detection of SNP TSC0002961
aaggacgtaataa

SEQ ID NO: 12584 - DNA, 13 bp, Artificial Sequence
  Oligonucleotide for detection of SNP TSC0002961
ttattacgtcctt

SEQ ID NO: 12585 - DNA, 13 bp, Artificial Sequence
  Oligonucleotide for detection of SNP TSC0002962
tattttgagttgg

SEQ ID NO: 12586 - DNA, 13 bp, Artificial Sequence
  Oligonucleotide for detection of SNP TSC0002962
ccaactcaaaata

SEQ ID NO: 12587 - DNA, 13 bp, Artificial Sequence
  Oligonucleotide for detection of SNP TSC0002962
tattttaagttgg

SEQ ID NO: 12588 - DNA, 13 bp, Artificial Sequence
  Oligonucleotide for detection of SNP TSC0002962
ccaacttaaaata

SEQ ID NO: 12589 - DNA, 13 bp, Artificial Sequence
  Oligonucleotide for detection of SNP TSC0002963
gtgaaatggaaay

SEQ ID NO: 12590 - DNA, 13 bp, Artificial Sequence
  Oligonucleotide for detection of SNP TSC0002963
rtttccatttcac

SEQ ID NO: 12591 - DNA, 13 bp, Artificial Sequence
  Oligonucleotide for detection of SNP TSC0002963
gtgaaagggaaay

SEQ ID NO: 12592 - DNA, 13 bp, Artificial Sequence
  Oligonucleotide for detection of SNP TSC0002963
rtttccctttcac

SEQ ID NO: 12593 - DNA, 13 bp, Artificial Sequence
  Oligonucleotide for detection of SNP TSC0002963
gtgaaacggaaay

SEQ ID NO: 12594 - DNA, 13 bp, Artificial Sequence
  Oligonucleotide for detection of SNP TSC0002963
rtttccgtttcac

SEQ ID NO: 12595 - DNA, 13 bp, Artificial Sequence
  Oligonucleotide for detection of SNP TSC0002963
gtttttgttttay

SEQ ID NO: 12596 - DNA, 13 bp, Artificial Sequence
  Oligonucleotide for detection of SNP TSC0002963
rtaaaacaaaaac

SEQ ID NO: 12597 - DNA, 13 bp, Artificial Sequence
  Oligonucleotide for detection of SNP TSC0002963
gttttttttttay

SEQ ID NO: 12598 - DNA, 13 bp, Artificial Sequence
  Oligonucleotide for detection of SNP TSC0002963
rtaaaaaaaaaac

SEQ ID NO: 12599 - DNA, 13 bp, Artificial Sequence
  Oligonucleotide for detection of SNP TSC0002963
gttttcgttttay

SEQ ID NO: 12600 - DNA, 13 bp, Artificial Sequence
  Oligonucleotide for detection of SNP TSC0002963
rtaaaacgaaaac

SEQ ID NO: 12601 - DNA, 13 bp, Artificial Sequence
  Oligonucleotide for detection of SNP TSC0002964
gtagagatatagg

SEQ ID NO: 12602 - DNA, 13 bp, Artificial Sequence
  Oligonucleotide for detection of SNP TSC0002964
cctatatctctac

SEQ ID NO: 12603 - DNA, 13 bp, Artificial Sequence
  Oligonucleotide for detection of SNP TSC0002964
gtagagttatagg

SEQ ID NO: 12604 - DNA, 13 bp, Artificial Sequence
  Oligonucleotide for detection of SNP TSC0002964
cctataactctac

SEQ ID NO: 12605 - DNA, 13 bp, Artificial Sequence
  Oligonucleotide for detection of SNP TSC0002964
tttgtgtttttay

SEQ ID NO: 12606 - DNA, 13 bp, Artificial Sequence
  Oligonucleotide for detection of SNP TSC0002964
rtaaaaacacaaa

SEQ ID NO: 12607 - DNA, 13 bp, Artificial Sequence
  Oligonucleotide for detection of SNP TSC0002964
tttgtggttttay

SEQ ID NO: 12608 - DNA, 13 bp, Artificial Sequence
  Oligonucleotide for detection of SNP TSC0002964
rtaaaaccacaaa

SEQ ID NO: 12609 - DNA, 13 bp, Artificial Sequence
  Oligonucleotide for detection of SNP TSC0002965
agaggggagaagt

SEQ ID NO: 12610 - DNA, 13 bp, Artificial Sequence
  Oligonucleotide for detection of SNP TSC0002965
acttctcccctct

SEQ ID NO: 12611 - DNA, 13 bp, Artificial Sequence
  Oligonucleotide for detection of SNP TSC0002965
agagggaagaagt

SEQ ID NO: 12612 - DNA, 13 bp, Artificial Sequence
  Oligonucleotide for detection of SNP TSC0002965
acttcttccctct

SEQ ID NO: 12613 - DNA, 13 bp, Artificial Sequence
  Oligonucleotide for detection of SNP TSC0002966
taattatggatta

SEQ ID NO: 12614 - DNA, 13 bp, Artificial Sequence
  Oligonucleotide for detection of SNP TSC0002966
taatccataatta

SEQ ID NO: 12615 - DNA, 13 bp, Artificial Sequence
  Oligonucleotide for detection of SNP TSC0002966
taattacggatta

SEQ ID NO: 12616 - DNA, 13 bp, Artificial Sequence
  Oligonucleotide for detection of SNP TSC0002966
taatccgtaatta

SEQ ID NO: 12617 - DNA, 13 bp, Artificial Sequence
  Oligonucleotide for detection of SNP TSC0002966
taatttgtaattg

SEQ ID NO: 12618 - DNA, 13 bp, Artificial Sequence
  Oligonucleotide for detection of SNP TSC0002966
caattacaaatta

SEQ ID NO: 12619 - DNA, 13 bp, Artificial Sequence
  Oligonucleotide for detection of SNP TSC0002966
taatttataattg

SEQ ID NO: 12620 - DNA, 13 bp, Artificial Sequence
  Oligonucleotide for detection of SNP TSC0002966
caattataaatta

SEQ ID NO: 12621 - DNA, 13 bp, Artificial Sequence
  Oligonucleotide for detection of SNP TSC0002966
taattcgtaattg

SEQ ID NO: 12622 - DNA, 13 bp, Artificial Sequence
  Oligonucleotide for detection of SNP TSC0002966
caattacgaatta

SEQ ID NO: 12623 - DNA, 13 bp, Artificial Sequence
  Oligonucleotide for detection of SNP TSC0002968
ataataatagtta

SEQ ID NO: 12624 - DNA, 13 bp, Artificial Sequence
  Oligonucleotide for detection of SNP TSC0002968
taactattattat

SEQ ID NO: 12625 - DNA, 13 bp, Artificial Sequence
  Oligonucleotide for detection of SNP TSC0002968
ataatattagtta

SEQ ID NO: 12626 - DNA, 13 bp, Artificial Sequence
  Oligonucleotide for detection of SNP TSC0002968
taactaatattat

SEQ ID NO: 12627 - DNA, 13 bp, Artificial Sequence
  Oligonucleotide for detection of SNP TSC0002968
tagttgttgttgt

SEQ ID NO: 12628 - DNA, 13 bp, Artificial Sequence
  Oligonucleotide for detection of SNP TSC0002968
acaacaacaacta

SEQ ID NO: 12629 - DNA, 13 bp, Artificial Sequence
  Oligonucleotide for detection of SNP TSC0002968
tagttgatgttgt

SEQ ID NO: 12630 - DNA, 13 bp, Artificial Sequence
  Oligonucleotide for detection of SNP TSC0002968
acaacatcaacta

SEQ ID NO: 12631 - DNA, 13 bp, Artificial Sequence
  Oligonucleotide for detection of SNP TSC0002969
ttaatggtatgty

SEQ ID NO: 12632 - DNA, 13 bp, Artificial Sequence
  Oligonucleotide for detection of SNP TSC0002969
racataccattaa

SEQ ID NO: 12633 - DNA, 13 bp, Artificial Sequence
  Oligonucleotide for detection of SNP TSC0002969
ttaatgatatgty

SEQ ID NO: 12634 - DNA, 13 bp, Artificial Sequence
  Oligonucleotide for detection of SNP TSC0002969
racatatcattaa

SEQ ID NO: 12635 - DNA, 13 bp, Artificial Sequence
  Oligonucleotide for detection of SNP TSC0002970
aaagataggtgta

SEQ ID NO: 12636 - DNA, 13 bp, Artificial Sequence
  Oligonucleotide for detection of SNP TSC0002970
tacacctatcttt

SEQ ID NO: 12637 - DNA, 13 bp, Artificial Sequence
  Oligonucleotide for detection of SNP TSC0002970
aaagatgggtgta

SEQ ID NO: 12638 - DNA, 13 bp, Artificial Sequence
  Oligonucleotide for detection of SNP TSC0002970
tacacccatcttt

SEQ ID NO: 12639 - DNA, 13 bp, Artificial Sequence
  Oligonucleotide for detection of SNP TSC0002970
aaagacgggtgta

SEQ ID NO: 12640 - DNA, 13 bp, Artificial Sequence
  Oligonucleotide for detection of SNP TSC0002970
tacacccgtcttt

SEQ ID NO: 12641 - DNA, 13 bp, Artificial Sequence
  Oligonucleotide for detection of SNP TSC0002970
tgtatttgttttt

SEQ ID NO: 12642 - DNA, 13 bp, Artificial Sequence
  Oligonucleotide for detection of SNP TSC0002970
aaaaacaaataca

SEQ ID NO: 12643 - DNA, 13 bp, Artificial Sequence
  Oligonucleotide for detection of SNP TSC0002970
tgtattcgttttt

SEQ ID NO: 12644 - DNA, 13 bp, Artificial Sequence
  Oligonucleotide for detection of SNP TSC0002970
aaaaacgaataca

SEQ ID NO: 12645 - DNA, 13 bp, Artificial Sequence
  Oligonucleotide for detection of SNP TSC0002971
taaatttgaagtg

SEQ ID NO: 12646 - DNA, 13 bp, Artificial Sequence
  Oligonucleotide for detection of SNP TSC0002971
cacttcaaattta

SEQ ID NO: 12647 - DNA, 13 bp, Artificial Sequence
  Oligonucleotide for detection of SNP TSC0002971
taaattcgaagtg

SEQ ID NO: 12648 - DNA, 13 bp, Artificial Sequence
  Oligonucleotide for detection of SNP TSC0002971
cacttcgaattta

SEQ ID NO: 12649 - DNA, 13 bp, Artificial Sequence
  Oligonucleotide for detection of SNP TSC0002971
tattttgagtttg

SEQ ID NO: 12650 - DNA, 13 bp, Artificial Sequence
  Oligonucleotide for detection of SNP TSC0002971
caaactcaaaata

SEQ ID NO: 12651 - DNA, 13 bp, Artificial Sequence
  Oligonucleotide for detection of SNP TSC0002971
tattttaagtttg

SEQ ID NO: 12652 - DNA, 13 bp, Artificial Sequence
  Oligonucleotide for detection of SNP TSC0002971
caaacttaaaata

SEQ ID NO: 12653 - DNA, 13 bp, Artificial Sequence
  Oligonucleotide for detection of SNP TSC0002971
tatttcgagtttg

SEQ ID NO: 12654 - DNA, 13 bp, Artificial Sequence
  Oligonucleotide for detection of SNP TSC0002971
caaactcgaaata

SEQ ID NO: 12655 - DNA, 13 bp, Artificial Sequence
  Oligonucleotide for detection of SNP TSC0002972
tttgggtgtggtg

SEQ ID NO: 12656 - DNA, 13 bp, Artificial Sequence
  Oligonucleotide for detection of SNP TSC0002972
caccacacccaaa

SEQ ID NO: 12657 - DNA, 13 bp, Artificial Sequence
  Oligonucleotide for detection of SNP TSC0002972
tttgggcgtggtg

SEQ ID NO: 12658 - DNA, 13 bp, Artificial Sequence
  Oligonucleotide for detection of SNP TSC0002972
caccacgcccaaa

SEQ ID NO: 12659 - DNA, 13 bp, Artificial Sequence
  Oligonucleotide for detection of SNP TSC0002972
tttgggtgcggtg

SEQ ID NO: 12660 - DNA, 13 bp, Artificial Sequence
  Oligonucleotide for detection of SNP TSC0002972
caccgcacccaaa

SEQ ID NO: 12661 - DNA, 13 bp, Artificial Sequence
  Oligonucleotide for detection of SNP TSC0002972
tttgggcgcggtg

SEQ ID NO: 12662 - DNA, 13 bp, Artificial Sequence
  Oligonucleotide for detection of SNP TSC0002972
caccgcgcccaaa

SEQ ID NO: 12663 - DNA, 13 bp, Artificial Sequence
  Oligonucleotide for detection of SNP TSC0002972
tattgtgtttaga

SEQ ID NO: 12664 - DNA, 13 bp, Artificial Sequence
  Oligonucleotide for detection of SNP TSC0002972
tctaaacacaata

SEQ ID NO: 12665 - DNA, 13 bp, Artificial Sequence
  Oligonucleotide for detection of SNP TSC0002972
tattgtatttaga

SEQ ID NO: 12666 - DNA, 13 bp, Artificial Sequence
  Oligonucleotide for detection of SNP TSC0002972
tctaaatacaata

SEQ ID NO: 12667 - DNA, 13 bp, Artificial Sequence
  Oligonucleotide for detection of SNP TSC0002972
tatcgtgtttaga

SEQ ID NO: 12668 - DNA, 13 bp, Artificial Sequence
  Oligonucleotide for detection of SNP TSC0002972
tctaaacacgata

SEQ ID NO: 12669 - DNA, 13 bp, Artificial Sequence
  Oligonucleotide for detection of SNP TSC0002972
tatcgtatttaga

SEQ ID NO: 12670 - DNA, 13 bp, Artificial Sequence
  Oligonucleotide for detection of SNP TSC0002972
tctaaatacgata

SEQ ID NO: 12671 - DNA, 13 bp, Artificial Sequence
  Oligonucleotide for detection of SNP TSC0002972
tattgcgtttaga

SEQ ID NO: 12672 - DNA, 13 bp, Artificial Sequence
  Oligonucleotide for detection of SNP TSC0002972
tctaaacgcaata

SEQ ID NO: 12673 - DNA, 13 bp, Artificial Sequence
  Oligonucleotide for detection of SNP TSC0002972
tatcgcgtttaga

SEQ ID NO: 12674 - DNA, 13 bp, Artificial Sequence
  Oligonucleotide for detection of SNP TSC0002972
tctaaacgcgata

SEQ ID NO: 12675 - DNA, 13 bp, Artificial Sequence
  Oligonucleotide for detection of SNP TSC0002974
attttagtttttt

SEQ ID NO: 12676 - DNA, 13 bp, Artificial Sequence
  Oligonucleotide for detection of SNP TSC0002974
aaaaaactaaaat

SEQ ID NO: 12677 - DNA, 13 bp, Artificial Sequence
  Oligonucleotide for detection of SNP TSC0002974
attttattttttt

SEQ ID NO: 12678 - DNA, 13 bp, Artificial Sequence
  Oligonucleotide for detection of SNP TSC0002974
aaaaaaataaaat

SEQ ID NO: 12679 - DNA, 13 bp, Artificial Sequence
  Oligonucleotide for detection of SNP TSC0002974
aagaaattaaaat

SEQ ID NO: 12680 - DNA, 13 bp, Artificial Sequence
  Oligonucleotide for detection of SNP TSC0002974
attttaatttctt

SEQ ID NO: 12681 - DNA, 13 bp, Artificial Sequence
  Oligonucleotide for detection of SNP TSC0002974
aagaaagtaaaat

SEQ ID NO: 12682 - DNA, 13 bp, Artificial Sequence
  Oligonucleotide for detection of SNP TSC0002974
attttactttctt

SEQ ID NO: 12683 - DNA, 13 bp, Artificial Sequence
  Oligonucleotide for detection of SNP TSC0002975
tttaaatgtttty

SEQ ID NO: 12684 - DNA, 13 bp, Artificial Sequence
  Oligonucleotide for detection of SNP TSC0002975
raaaacatttaaa

SEQ ID NO: 12685 - DNA, 13 bp, Artificial Sequence
  Oligonucleotide for detection of SNP TSC0002975
tttaaacgtttty

SEQ ID NO: 12686 - DNA, 13 bp, Artificial Sequence
  Oligonucleotide for detection of SNP TSC0002975
raaaacgtttaaa

SEQ ID NO: 12687 - DNA, 13 bp, Artificial Sequence
  Oligonucleotide for detection of SNP TSC0002975
ggaaatgtttaag

SEQ ID NO: 12688 - DNA, 13 bp, Artificial Sequence
  Oligonucleotide for detection of SNP TSC0002975
cttaaacatttcc

SEQ ID NO: 12689 - DNA, 13 bp, Artificial Sequence
  Oligonucleotide for detection of SNP TSC0002975
ggaaatatttaag

SEQ ID NO: 12690 - DNA, 13 bp, Artificial Sequence
  Oligonucleotide for detection of SNP TSC0002975
cttaaatatttcc

SEQ ID NO: 12691 - DNA, 13 bp, Artificial Sequence
  Oligonucleotide for detection of SNP TSC0002975
ggaaacgtttaag

SEQ ID NO: 12692 - DNA, 13 bp, Artificial Sequence
  Oligonucleotide for detection of SNP TSC0002975
cttaaacgtttcc

SEQ ID NO: 12693 - DNA, 13 bp, Artificial Sequence
  Oligonucleotide for detection of SNP TSC0002976
ttttagagttaty

SEQ ID NO: 12694 - DNA, 13 bp, Artificial Sequence
  Oligonucleotide for detection of SNP TSC0002976
rataactctaaaa

SEQ ID NO: 12695 - DNA, 13 bp, Artificial Sequence
  Oligonucleotide for detection of SNP TSC0002976
ttttagtgttaty

SEQ ID NO: 12696 - DNA, 13 bp, Artificial Sequence
  Oligonucleotide for detection of SNP TSC0002976
rataacactaaaa

SEQ ID NO: 12697 - DNA, 13 bp, Artificial Sequence
  Oligonucleotide for detection of SNP TSC0002976
ttttagcgttaty

SEQ ID NO: 12698 - DNA, 13 bp, Artificial Sequence
  Oligonucleotide for detection of SNP TSC0002976
rataacgctaaaa

SEQ ID NO: 12699 - DNA, 13 bp, Artificial Sequence
  Oligonucleotide for detection of SNP TSC0002976
gataattttgaga

SEQ ID NO: 12700 - DNA, 13 bp, Artificial Sequence
  Oligonucleotide for detection of SNP TSC0002976
tctcaaaattatc

SEQ ID NO: 12701 - DNA, 13 bp, Artificial Sequence
  Oligonucleotide for detection of SNP TSC0002976
gataatgttgaga

SEQ ID NO: 12702 - DNA, 13 bp, Artificial Sequence
  Oligonucleotide for detection of SNP TSC0002976
tctcaacattatc

SEQ ID NO: 12703 - DNA, 13 bp, Artificial Sequence
  Oligonucleotide for detection of SNP TSC0002976
gataacgttgaga

SEQ ID NO: 12704 - DNA, 13 bp, Artificial Sequence
  Oligonucleotide for detection of SNP TSC0002976
tctcaacgttatc

SEQ ID NO: 12705 - DNA, 13 bp, Artificial Sequence
  Oligonucleotide for detection of SNP TSC0002978
tttgatataatta

SEQ ID NO: 12706 - DNA, 13 bp, Artificial Sequence
  Oligonucleotide for detection of SNP TSC0002978
taattatatcaaa

SEQ ID NO: 12707 - DNA, 13 bp, Artificial Sequence
  Oligonucleotide for detection of SNP TSC0002978
tttgatgtaatta

SEQ ID NO: 12708 - DNA, 13 bp, Artificial Sequence
  Oligonucleotide for detection of SNP TSC0002978
taattacatcaaa

SEQ ID NO: 12709 - DNA, 13 bp, Artificial Sequence
  Oligonucleotide for detection of SNP TSC0002980
taagagttaaaaa

SEQ ID NO: 12710 - DNA, 13 bp, Artificial Sequence
  Oligonucleotide for detection of SNP TSC0002980
tttttaactctta

SEQ ID NO: 12711 - DNA, 13 bp, Artificial Sequence
  Oligonucleotide for detection of SNP TSC0002980
taagaggtaaaaa

SEQ ID NO: 12712 - DNA, 13 bp, Artificial Sequence
  Oligonucleotide for detection of SNP TSC0002980
tttttacctctta

SEQ ID NO: 12713 - DNA, 13 bp, Artificial Sequence
  Oligonucleotide for detection of SNP TSC0002981
gagatgatgtttt

SEQ ID NO: 12714 - DNA, 13 bp, Artificial Sequence
  Oligonucleotide for detection of SNP TSC0002981
aaaacatcatctc

SEQ ID NO: 12715 - DNA, 13 bp, Artificial Sequence
  Oligonucleotide for detection of SNP TSC0002981
gagatggtgtttt

SEQ ID NO: 12716 - DNA, 13 bp, Artificial Sequence
  Oligonucleotide for detection of SNP TSC0002981
aaaacaccatctc

SEQ ID NO: 12717 - DNA, 13 bp, Artificial Sequence
  Oligonucleotide for detection of SNP TSC0002982
tgtagggaggaaa

SEQ ID NO: 12718 - DNA, 13 bp, Artificial Sequence
  Oligonucleotide for detection of SNP TSC0002982
tttcctccctaca

SEQ ID NO: 12719 - DNA, 13 bp, Artificial Sequence
  Oligonucleotide for detection of SNP TSC0002982
tgtaggaaggaaa

SEQ ID NO: 12720 - DNA, 13 bp, Artificial Sequence
  Oligonucleotide for detection of SNP TSC0002982
tttccttcctaca

SEQ ID NO: 12721 - DNA, 13 bp, Artificial Sequence
  Oligonucleotide for detection of SNP TSC0002983
tatttaaggttay

SEQ ID NO: 12722 - DNA, 13 bp, Artificial Sequence
  Oligonucleotide for detection of SNP TSC0002983
rtaaccttaaata

SEQ ID NO: 12723 - DNA, 13 bp, Artificial Sequence
  Oligonucleotide for detection of SNP TSC0002983
tatttagggttay

SEQ ID NO: 12724 - DNA, 13 bp, Artificial Sequence
  Oligonucleotide for detection of SNP TSC0002983
rtaaccctaaata

SEQ ID NO: 12725 - DNA, 13 bp, Artificial Sequence
  Oligonucleotide for detection of SNP TSC0002984
tgaatatgttgtt

SEQ ID NO: 12726 - DNA, 13 bp, Artificial Sequence
  Oligonucleotide for detection of SNP TSC0002984
aacaacatattca

SEQ ID NO: 12727 - DNA, 13 bp, Artificial Sequence
  Oligonucleotide for detection of SNP TSC0002984
tgaatacgttgtt

SEQ ID NO: 12728 - DNA, 13 bp, Artificial Sequence
  Oligonucleotide for detection of SNP TSC0002984
aacaacgtattca

SEQ ID NO: 12729 - DNA, 13 bp, Artificial Sequence
  Oligonucleotide for detection of SNP TSC0002984
agtagtgtgttta

SEQ ID NO: 12730 - DNA, 13 bp, Artificial Sequence
  Oligonucleotide for detection of SNP TSC0002984
taaacacactact

SEQ ID NO: 12731 - DNA, 13 bp, Artificial Sequence
  Oligonucleotide for detection of SNP TSC0002984
agtagtatgttta

SEQ ID NO: 12732 - DNA, 13 bp, Artificial Sequence
  Oligonucleotide for detection of SNP TSC0002984
taaacatactact

SEQ ID NO: 12733 - DNA, 13 bp, Artificial Sequence
  Oligonucleotide for detection of SNP TSC0002984
agtagcgtgttta

SEQ ID NO: 12734 - DNA, 13 bp, Artificial Sequence
  Oligonucleotide for detection of SNP TSC0002984
taaacacgctact

SEQ ID NO: 12735 - DNA, 13 bp, Artificial Sequence
  Oligonucleotide for detection of SNP TSC0002985
tattttgttggta

SEQ ID NO: 12736 - DNA, 13 bp, Artificial Sequence
  Oligonucleotide for detection of SNP TSC0002985
taccaacaaaata

SEQ ID NO: 12737 - DNA, 13 bp, Artificial Sequence
  Oligonucleotide for detection of SNP TSC0002985
tattttattggta

SEQ ID NO: 12738 - DNA, 13 bp, Artificial Sequence
  Oligonucleotide for detection of SNP TSC0002985
taccaataaaata

SEQ ID NO: 12739 - DNA, 13 bp, Artificial Sequence
  Oligonucleotide for detection of SNP TSC0002986
gagagaggaatay

SEQ ID NO: 12740 - DNA, 13 bp, Artificial Sequence
  Oligonucleotide for detection of SNP TSC0002986
rtattcctctctc

SEQ ID NO: 12741 - DNA, 13 bp, Artificial Sequence
  Oligonucleotide for detection of SNP TSC0002986
gagagaagaatay

SEQ ID NO: 12742 - DNA, 13 bp, Artificial Sequence
  Oligonucleotide for detection of SNP TSC0002986
rtattcttctctc

SEQ ID NO: 12743 - DNA, 13 bp, Artificial Sequence
  Oligonucleotide for detection of SNP TSC0002987
atagaaaaattat

SEQ ID NO: 12744 - DNA, 13 bp, Artificial Sequence
  Oligonucleotide for detection of SNP TSC0002987
ataatttttctat

SEQ ID NO: 12745 - DNA, 13 bp, Artificial Sequence
  Oligonucleotide for detection of SNP TSC0002987
atagaagaattat

SEQ ID NO: 12746 - DNA, 13 bp, Artificial Sequence
  Oligonucleotide for detection of SNP TSC0002987
ataattcttctat

SEQ ID NO: 12747 - DNA, 13 bp, Artificial Sequence
  Oligonucleotide for detection of SNP TSC0002988
aaattttgttttt

SEQ ID NO: 12748 - DNA, 13 bp, Artificial Sequence
  Oligonucleotide for detection of SNP TSC0002988
aaaaacaaaattt

SEQ ID NO: 12749 - DNA, 13 bp, Artificial Sequence
  Oligonucleotide for detection of SNP TSC0002988
aaatttcgttttt

SEQ ID NO: 12750 - DNA, 13 bp, Artificial Sequence
  Oligonucleotide for detection of SNP TSC0002988
aaaaacgaaattt

SEQ ID NO: 12751 - DNA, 13 bp, Artificial Sequence
  Oligonucleotide for detection of SNP TSC0002988
agagatggggttt

SEQ ID NO: 12752 - DNA, 13 bp, Artificial Sequence
  Oligonucleotide for detection of SNP TSC0002988
aaaccccatctct

SEQ ID NO: 12753 - DNA, 13 bp, Artificial Sequence
  Oligonucleotide for detection of SNP TSC0002988
agagatagggttt

SEQ ID NO: 12754 - DNA, 13 bp, Artificial Sequence
  Oligonucleotide for detection of SNP TSC0002988
aaaccctatctct

SEQ ID NO: 12755 - DNA, 13 bp, Artificial Sequence
  Oligonucleotide for detection of SNP TSC0002988
agagacggggttt

SEQ ID NO: 12756 - DNA, 13 bp, Artificial Sequence
  Oligonucleotide for detection of SNP TSC0002988
aaaccccgtctct

SEQ ID NO: 12757 - DNA, 13 bp, Artificial Sequence
  Oligonucleotide for detection of SNP TSC0002989
ttgagatggagty

SEQ ID NO: 12758 - DNA, 13 bp, Artificial Sequence
  Oligonucleotide for detection of SNP TSC0002989
ractccatctcaa

SEQ ID NO: 12759 - DNA, 13 bp, Artificial Sequence
  Oligonucleotide for detection of SNP TSC0002989
ttgagacggagty

SEQ ID NO: 12760 - DNA, 13 bp, Artificial Sequence
  Oligonucleotide for detection of SNP TSC0002989
ractccgtctcaa

SEQ ID NO: 12761 - DNA, 13 bp, Artificial Sequence
  Oligonucleotide for detection of SNP TSC0002990
gagaattggggga

SEQ ID NO: 12762 - DNA, 13 bp, Artificial Sequence
  Oligonucleotide for detection of SNP TSC0002990
tcccccaattctc

SEQ ID NO: 12763 - DNA, 13 bp, Artificial Sequence
  Oligonucleotide for detection of SNP TSC0002990
gagaatcggggga

SEQ ID NO: 12764 - DNA, 13 bp, Artificial Sequence
  Oligonucleotide for detection of SNP TSC0002990
tcccccgattctc

SEQ ID NO: 12765 - DNA, 13 bp, Artificial Sequence
  Oligonucleotide for detection of SNP TSC0002990
ttttttggtttty

SEQ ID NO: 12766 - DNA, 13 bp, Artificial Sequence
  Oligonucleotide for detection of SNP TSC0002990
raaaaccaaaaaa

SEQ ID NO: 12767 - DNA, 13 bp, Artificial Sequence
  Oligonucleotide for detection of SNP TSC0002990
tttttcggtttty

SEQ ID NO: 12768 - DNA, 13 bp, Artificial Sequence
  Oligonucleotide for detection of SNP TSC0002990
raaaaccgaaaaa

SEQ ID NO: 12769 - DNA, 13 bp, Artificial Sequence
  Oligonucleotide for detection of SNP TSC0002991
aaattttaataay

SEQ ID NO: 12770 - DNA, 13 bp, Artificial Sequence
  Oligonucleotide for detection of SNP TSC0002991
rttattaaaattt

SEQ ID NO: 12771 - DNA, 13 bp, Artificial Sequence
  Oligonucleotide for detection of SNP TSC0002991
aaatttgaataay

SEQ ID NO: 12772 - DNA, 13 bp, Artificial Sequence
  Oligonucleotide for detection of SNP TSC0002991
rttattcaaattt

SEQ ID NO: 12773 - DNA, 13 bp, Artificial Sequence
  Oligonucleotide for detection of SNP TSC0002991
gttattgaagttt

SEQ ID NO: 12774 - DNA, 13 bp, Artificial Sequence
  Oligonucleotide for detection of SNP TSC0002991
aaacttcaataac

SEQ ID NO: 12775 - DNA, 13 bp, Artificial Sequence
  Oligonucleotide for detection of SNP TSC0002991
gttatttaagttt

SEQ ID NO: 12776 - DNA, 13 bp, Artificial Sequence
  Oligonucleotide for detection of SNP TSC0002991
aaacttaaataac

SEQ ID NO: 12777 - DNA, 13 bp, Artificial Sequence
  Oligonucleotide for detection of SNP TSC0002992
gtagtgatgttta

SEQ ID NO: 12778 - DNA, 13 bp, Artificial Sequence
  Oligonucleotide for detection of SNP TSC0002992
taaacatcactac

SEQ ID NO: 12779 - DNA, 13 bp, Artificial Sequence
  Oligonucleotide for detection of SNP TSC0002992
gtagtgttgttta

SEQ ID NO: 12780 - DNA, 13 bp, Artificial Sequence
  Oligonucleotide for detection of SNP TSC0002992
taaacaacactac

SEQ ID NO: 12781 - DNA, 13 bp, Artificial Sequence
  Oligonucleotide for detection of SNP TSC0002992
taggtattattay

SEQ ID NO: 12782 - DNA, 13 bp, Artificial Sequence
  Oligonucleotide for detection of SNP TSC0002992
rtaataataccta

SEQ ID NO: 12783 - DNA, 13 bp, Artificial Sequence
  Oligonucleotide for detection of SNP TSC0002992
taggtaatattay

SEQ ID NO: 12784 - DNA, 13 bp, Artificial Sequence
  Oligonucleotide for detection of SNP TSC0002992
rtaatattaccta

SEQ ID NO: 12785 - DNA, 13 bp, Artificial Sequence
  Oligonucleotide for detection of SNP TSC0002993
tagttttttaaag

SEQ ID NO: 12786 - DNA, 13 bp, Artificial Sequence
  Oligonucleotide for detection of SNP TSC0002993
ctttaaaaaacta

SEQ ID NO: 12787 - DNA, 13 bp, Artificial Sequence
  Oligonucleotide for detection of SNP TSC0002993
tagtttgttaaag

SEQ ID NO: 12788 - DNA, 13 bp, Artificial Sequence
  Oligonucleotide for detection of SNP TSC0002993
ctttaacaaacta

SEQ ID NO: 12789 - DNA, 13 bp, Artificial Sequence
  Oligonucleotide for detection of SNP TSC0002993
ttttaggagattg

SEQ ID NO: 12790 - DNA, 13 bp, Artificial Sequence
  Oligonucleotide for detection of SNP TSC0002993
caatctcctaaaa

SEQ ID NO: 12791 - DNA, 13 bp, Artificial Sequence
  Oligonucleotide for detection of SNP TSC0002993
ttttagtagattg

SEQ ID NO: 12792 - DNA, 13 bp, Artificial Sequence
  Oligonucleotide for detection of SNP TSC0002993
caatctactaaaa

SEQ ID NO: 12793 - DNA, 13 bp, Artificial Sequence
  Oligonucleotide for detection of SNP TSC0002994
agagttaggaaga

SEQ ID NO: 12794 - DNA, 13 bp, Artificial Sequence
  Oligonucleotide for detection of SNP TSC0002994
tcttcctaactct

SEQ ID NO: 12795 - DNA, 13 bp, Artificial Sequence
  Oligonucleotide for detection of SNP TSC0002994
agagttgggaaga

SEQ ID NO: 12796 - DNA, 13 bp, Artificial Sequence
  Oligonucleotide for detection of SNP TSC0002994
tcttcccaactct

SEQ ID NO: 12797 - DNA, 13 bp, Artificial Sequence
  Oligonucleotide for detection of SNP TSC0002995
atttaaattttgg

SEQ ID NO: 12798 - DNA, 13 bp, Artificial Sequence
  Oligonucleotide for detection of SNP TSC0002995
ccaaaatttaaat

SEQ ID NO: 12799 - DNA, 13 bp, Artificial Sequence
  Oligonucleotide for detection of SNP TSC0002995
atttaatttttgg

SEQ ID NO: 12800 - DNA, 13 bp, Artificial Sequence
  Oligonucleotide for detection of SNP TSC0002995
ccaaaaattaaat

SEQ ID NO: 12801 - DNA, 13 bp, Artificial Sequence
  Oligonucleotide for detection of SNP TSC0002995
ttaaagtttagat

SEQ ID NO: 12802 - DNA, 13 bp, Artificial Sequence
  Oligonucleotide for detection of SNP TSC0002995
atctaaactttaa

SEQ ID NO: 12803 - DNA, 13 bp, Artificial Sequence
  Oligonucleotide for detection of SNP TSC0002995
ttaaaggttagat

SEQ ID NO: 12804 - DNA, 13 bp, Artificial Sequence
  Oligonucleotide for detection of SNP TSC0002995
atctaacctttaa

SEQ ID NO: 12805 - DNA, 13 bp, Artificial Sequence
  Oligonucleotide for detection of SNP TSC0002996
atgattagaaata

SEQ ID NO: 12806 - DNA, 13 bp, Artificial Sequence
  Oligonucleotide for detection of SNP TSC0002996
tatttctaatcat

SEQ ID NO: 12807 - DNA, 13 bp, Artificial Sequence
  Oligonucleotide for detection of SNP TSC0002996
atgattggaaata

SEQ ID NO: 12808 - DNA, 13 bp, Artificial Sequence
  Oligonucleotide for detection of SNP TSC0002996
tatttccaatcat

SEQ ID NO: 12809 - DNA, 13 bp, Artificial Sequence
  Oligonucleotide for detection of SNP TSC0002996
atgatcggaaata

SEQ ID NO: 12810 - DNA, 13 bp, Artificial Sequence
  Oligonucleotide for detection of SNP TSC0002996
tatttccgatcat

SEQ ID NO: 12811 - DNA, 13 bp, Artificial Sequence
  Oligonucleotide for detection of SNP TSC0002996
tgtttttggttat

SEQ ID NO: 12812 - DNA, 13 bp, Artificial Sequence
  Oligonucleotide for detection of SNP TSC0002996
ataaccaaaaaca

SEQ ID NO: 12813 - DNA, 13 bp, Artificial Sequence
  Oligonucleotide for detection of SNP TSC0002996
tgttttcggttat

SEQ ID NO: 12814 - DNA, 13 bp, Artificial Sequence
  Oligonucleotide for detection of SNP TSC0002996
ataaccgaaaaca

SEQ ID NO: 12815 - DNA, 13 bp, Artificial Sequence
  Oligonucleotide for detection of SNP TSC0002997
tgtattgtggtgt

SEQ ID NO: 12816 - DNA, 13 bp, Artificial Sequence
  Oligonucleotide for detection of SNP TSC0002997
acaccacaataca

SEQ ID NO: 12817 - DNA, 13 bp, Artificial Sequence
  Oligonucleotide for detection of SNP TSC0002997
tgtattatggtgt

SEQ ID NO: 12818 - DNA, 13 bp, Artificial Sequence
  Oligonucleotide for detection of SNP TSC0002997
acaccataataca

SEQ ID NO: 12819 - DNA, 13 bp, Artificial Sequence
  Oligonucleotide for detection of SNP TSC0002997
tgtattgtggcgt

SEQ ID NO: 12820 - DNA, 13 bp, Artificial Sequence
  Oligonucleotide for detection of SNP TSC0002997
acgccacaataca

SEQ ID NO: 12821 - DNA, 13 bp, Artificial Sequence
  Oligonucleotide for detection of SNP TSC0002997
tgtattatggcgt

SEQ ID NO: 12822 - DNA, 13 bp, Artificial Sequence
  Oligonucleotide for detection of SNP TSC0002997
acgccataataca

SEQ ID NO: 12823 - DNA, 13 bp, Artificial Sequence
  Oligonucleotide for detection of SNP TSC0002998
gttattatttggt

SEQ ID NO: 12824 - DNA, 13 bp, Artificial Sequence
  Oligonucleotide for detection of SNP TSC0002998
accaaataataac

SEQ ID NO: 12825 - DNA, 13 bp, Artificial Sequence
  Oligonucleotide for detection of SNP TSC0002998
gttattgtttggt

SEQ ID NO: 12826 - DNA, 13 bp, Artificial Sequence
  Oligonucleotide for detection of SNP TSC0002998
accaaacaataac

SEQ ID NO: 12827 - DNA, 13 bp, Artificial Sequence
  Oligonucleotide for detection of SNP TSC0002998
gttatcgtttggt

SEQ ID NO: 12828 - DNA, 13 bp, Artificial Sequence
  Oligonucleotide for detection of SNP TSC0002998
accaaacgataac

SEQ ID NO: 12829 - DNA, 13 bp, Artificial Sequence
  Oligonucleotide for detection of SNP TSC0002998
attagatggtgay

SEQ ID NO: 12830 - DNA, 13 bp, Artificial Sequence
  Oligonucleotide for detection of SNP TSC0002998
rtcaccatctaat

SEQ ID NO: 12831 - DNA, 13 bp, Artificial Sequence
  Oligonucleotide for detection of SNP TSC0002998
attagacggtgay

SEQ ID NO: 12832 - DNA, 13 bp, Artificial Sequence
  Oligonucleotide for detection of SNP TSC0002998
rtcaccgtctaat

SEQ ID NO: 12833 - DNA, 13 bp, Artificial Sequence
  Oligonucleotide for detection of SNP TSC0002999
gttattattaaat

SEQ ID NO: 12834 - DNA, 13 bp, Artificial Sequence
  Oligonucleotide for detection of SNP TSC0002999
atttaataataac

SEQ ID NO: 12835 - DNA, 13 bp, Artificial Sequence
  Oligonucleotide for detection of SNP TSC0002999
gttattgttaaat

SEQ ID NO: 12836 - DNA, 13 bp, Artificial Sequence
  Oligonucleotide for detection of SNP TSC0002999
atttaacaataac

SEQ ID NO: 12837 - DNA, 13 bp, Artificial Sequence
  Oligonucleotide for detection of SNP TSC0003000
atatttattagtg

SEQ ID NO: 12838 - DNA, 13 bp, Artificial Sequence
  Oligonucleotide for detection of SNP TSC0003000
cactaataaatat

SEQ ID NO: 12839 - DNA, 13 bp, Artificial Sequence
  Oligonucleotide for detection of SNP TSC0003000
atatttgttagtg

SEQ ID NO: 12840 - DNA, 13 bp, Artificial Sequence
  Oligonucleotide for detection of SNP TSC0003000
cactaacaaatat

SEQ ID NO: 12841 - DNA, 13 bp, Artificial Sequence
  Oligonucleotide for detection of SNP TSC0003001
ttagatgttggtt

SEQ ID NO: 12842 - DNA, 13 bp, Artificial Sequence
  Oligonucleotide for detection of SNP TSC0003001
aaccaacatctaa

SEQ ID NO: 12843 - DNA, 13 bp, Artificial Sequence
  Oligonucleotide for detection of SNP TSC0003001
ttagatattggtt

SEQ ID NO: 12844 - DNA, 13 bp, Artificial Sequence
  Oligonucleotide for detection of SNP TSC0003001
aaccaatatctaa

SEQ ID NO: 12845 - DNA, 13 bp, Artificial Sequence
  Oligonucleotide for detection of SNP TSC0003002
agtattgatttta

SEQ ID NO: 12846 - DNA, 13 bp, Artificial Sequence
  Oligonucleotide for detection of SNP TSC0003002
taaaatcaatact

SEQ ID NO: 12847 - DNA, 13 bp, Artificial Sequence
  Oligonucleotide for detection of SNP TSC0003002
agtattaatttta

SEQ ID NO: 12848 - DNA, 13 bp, Artificial Sequence
  Oligonucleotide for detection of SNP TSC0003002
taaaattaatact

SEQ ID NO: 12849 - DNA, 13 bp, Artificial Sequence
  Oligonucleotide for detection of SNP TSC0003003
gttttagatttgy

SEQ ID NO: 12850 - DNA, 13 bp, Artificial Sequence
  Oligonucleotide for detection of SNP TSC0003003
rcaaatctaaaac

SEQ ID NO: 12851 - DNA, 13 bp, Artificial Sequence
  Oligonucleotide for detection of SNP TSC0003003
gttttaaatttgy

SEQ ID NO: 12852 - DNA, 13 bp, Artificial Sequence
  Oligonucleotide for detection of SNP TSC0003003
rcaaatttaaaac

SEQ ID NO: 12853 - DNA, 13 bp, Artificial Sequence
  Oligonucleotide for detection of SNP TSC0003004
atattaaattaty

SEQ ID NO: 12854 - DNA, 13 bp, Artificial Sequence
  Oligonucleotide for detection of SNP TSC0003004
rataatttaatat

SEQ ID NO: 12855 - DNA, 13 bp, Artificial Sequence
  Oligonucleotide for detection of SNP TSC0003004
atattatattaty

SEQ ID NO: 12856 - DNA, 13 bp, Artificial Sequence
  Oligonucleotide for detection of SNP TSC0003004
rataatataatat

SEQ ID NO: 12857 - DNA, 13 bp, Artificial Sequence
  Oligonucleotide for detection of SNP TSC0003004
ggtggtttgatat

SEQ ID NO: 12858 - DNA, 13 bp, Artificial Sequence
  Oligonucleotide for detection of SNP TSC0003004
atatcaaaccacc

SEQ ID NO: 12859 - DNA, 13 bp, Artificial Sequence
  Oligonucleotide for detection of SNP TSC0003004
ggtggtatgatat

SEQ ID NO: 12860 - DNA, 13 bp, Artificial Sequence
  Oligonucleotide for detection of SNP TSC0003004
atatcataccacc

SEQ ID NO: 12861 - DNA, 13 bp, Artificial Sequence
  Oligonucleotide for detection of SNP TSC0003005
aaatttattttay

SEQ ID NO: 12862 - DNA, 13 bp, Artificial Sequence
  Oligonucleotide for detection of SNP TSC0003005
rtaaaataaattt

SEQ ID NO: 12863 - DNA, 13 bp, Artificial Sequence
  Oligonucleotide for detection of SNP TSC0003005
aaatttgttttay

SEQ ID NO: 12864 - DNA, 13 bp, Artificial Sequence
  Oligonucleotide for detection of SNP TSC0003005
rtaaaacaaattt

SEQ ID NO: 12865 - DNA, 13 bp, Artificial Sequence
  Oligonucleotide for detection of SNP TSC0003005
aaattcgttttay

SEQ ID NO: 12866 - DNA, 13 bp, Artificial Sequence
  Oligonucleotide for detection of SNP TSC0003005
rtaaaacgaattt

SEQ ID NO: 12867 - DNA, 13 bp, Artificial Sequence
  Oligonucleotide for detection of SNP TSC0003005
gtgaaatggattt

SEQ ID NO: 12868 - DNA, 13 bp, Artificial Sequence
  Oligonucleotide for detection of SNP TSC0003005
aaatccatttcac

SEQ ID NO: 12869 - DNA, 13 bp, Artificial Sequence
  Oligonucleotide for detection of SNP TSC0003005
gtgaaacggattt

SEQ ID NO: 12870 - DNA, 13 bp, Artificial Sequence
  Oligonucleotide for detection of SNP TSC0003005
aaatccgtttcac

SEQ ID NO: 12871 - DNA, 13 bp, Artificial Sequence
  Oligonucleotide for detection of SNP TSC0003006
ttttagatttgga

SEQ ID NO: 12872 - DNA, 13 bp, Artificial Sequence
  Oligonucleotide for detection of SNP TSC0003006
tccaaatctaaaa

SEQ ID NO: 12873 - DNA, 13 bp, Artificial Sequence
  Oligonucleotide for detection of SNP TSC0003006
ttttagttttgga

SEQ ID NO: 12874 - DNA, 13 bp, Artificial Sequence
  Oligonucleotide for detection of SNP TSC0003006
tccaaaactaaaa

SEQ ID NO: 12875 - DNA, 13 bp, Artificial Sequence
  Oligonucleotide for detection of SNP TSC0003006
tttaaatttagaa

SEQ ID NO: 12876 - DNA, 13 bp, Artificial Sequence
  Oligonucleotide for detection of SNP TSC0003006
ttctaaatttaaa

SEQ ID NO: 12877 - DNA, 13 bp, Artificial Sequence
  Oligonucleotide for detection of SNP TSC0003007
tttggaatagtta

SEQ ID NO: 12878 - DNA, 13 bp, Artificial Sequence
  Oligonucleotide for detection of SNP TSC0003007
taactattccaaa

SEQ ID NO: 12879 - DNA, 13 bp, Artificial Sequence
  Oligonucleotide for detection of SNP TSC0003007
tttggattagtta

SEQ ID NO: 12880 - DNA, 13 bp, Artificial Sequence
  Oligonucleotide for detection of SNP TSC0003007
taactaatccaaa

SEQ ID NO: 12881 - DNA, 13 bp, Artificial Sequence
  Oligonucleotide for detection of SNP TSC0003007
taattgttttaag

SEQ ID NO: 12882 - DNA, 13 bp, Artificial Sequence
  Oligonucleotide for detection of SNP TSC0003007
cttaaaacaatta

SEQ ID NO: 12883 - DNA, 13 bp, Artificial Sequence
  Oligonucleotide for detection of SNP TSC0003007
taattgatttaag

SEQ ID NO: 12884 - DNA, 13 bp, Artificial Sequence
  Oligonucleotide for detection of SNP TSC0003007
cttaaatcaatta

SEQ ID NO: 12885 - DNA, 13 bp, Artificial Sequence
  Oligonucleotide for detection of SNP TSC0003008
aatataaaaatty

SEQ ID NO: 12886 - DNA, 13 bp, Artificial Sequence
  Oligonucleotide for detection of SNP TSC0003008
raatttttatatt

SEQ ID NO: 12887 - DNA, 13 bp, Artificial Sequence
  Oligonucleotide for detection of SNP TSC0003008
aatatataaatty

SEQ ID NO: 12888 - DNA, 13 bp, Artificial Sequence
  Oligonucleotide for detection of SNP TSC0003008
raatttatatatt

SEQ ID NO: 12889 - DNA, 13 bp, Artificial Sequence
  Oligonucleotide for detection of SNP TSC0003008
gagtttttatatt

SEQ ID NO: 12890 - DNA, 13 bp, Artificial Sequence
  Oligonucleotide for detection of SNP TSC0003008
aatataaaaactc

SEQ ID NO: 12891 - DNA, 13 bp, Artificial Sequence
  Oligonucleotide for detection of SNP TSC0003008
gagtttgtatatt

SEQ ID NO: 12892 - DNA, 13 bp, Artificial Sequence
  Oligonucleotide for detection of SNP TSC0003008
aatatacaaactc

SEQ ID NO: 12893 - DNA, 13 bp, Artificial Sequence
  Oligonucleotide for detection of SNP TSC0003009
tttttaagtttty

SEQ ID NO: 12894 - DNA, 13 bp, Artificial Sequence
  Oligonucleotide for detection of SNP TSC0003009
raaaacttaaaaa

SEQ ID NO: 12895 - DNA, 13 bp, Artificial Sequence
  Oligonucleotide for detection of SNP TSC0003009
tttttatgtttty

SEQ ID NO: 12896 - DNA, 13 bp, Artificial Sequence
  Oligonucleotide for detection of SNP TSC0003009
raaaacataaaaa

SEQ ID NO: 12897 - DNA, 13 bp, Artificial Sequence
  Oligonucleotide for detection of SNP TSC0003009
gaggatttggaaa

SEQ ID NO: 12898 - DNA, 13 bp, Artificial Sequence
  Oligonucleotide for detection of SNP TSC0003009
tttccaaatcctc

SEQ ID NO: 12899 - DNA, 13 bp, Artificial Sequence
  Oligonucleotide for detection of SNP TSC0003009
gaggatatggaaa

SEQ ID NO: 12900 - DNA, 13 bp, Artificial Sequence
  Oligonucleotide for detection of SNP TSC0003009
tttccatatcctc

SEQ ID NO: 12901 - DNA, 13 bp, Artificial Sequence
  Oligonucleotide for detection of SNP TSC0003010
aaatttatagaat

SEQ ID NO: 12902 - DNA, 13 bp, Artificial Sequence
  Oligonucleotide for detection of SNP TSC0003010
attctataaattt

SEQ ID NO: 12903 - DNA, 13 bp, Artificial Sequence
  Oligonucleotide for detection of SNP TSC0003010
aaatttgtagaat

SEQ ID NO: 12904 - DNA, 13 bp, Artificial Sequence
  Oligonucleotide for detection of SNP TSC0003010
attctacaaattt

SEQ ID NO: 12905 - DNA, 13 bp, Artificial Sequence
  Oligonucleotide for detection of SNP TSC0003011
atatatgtttaay

SEQ ID NO: 12906 - DNA, 13 bp, Artificial Sequence
  Oligonucleotide for detection of SNP TSC0003011
rttaaacatatat

SEQ ID NO: 12907 - DNA, 13 bp, Artificial Sequence
  Oligonucleotide for detection of SNP TSC0003011
atatatatttaay

SEQ ID NO: 12908 - DNA, 13 bp, Artificial Sequence
  Oligonucleotide for detection of SNP TSC0003011
rttaaatatatat

SEQ ID NO: 12909 - DNA, 13 bp, Artificial Sequence
  Oligonucleotide for detection of SNP TSC0003013
tatttatgtataa

SEQ ID NO: 12910 - DNA, 13 bp, Artificial Sequence
  Oligonucleotide for detection of SNP TSC0003013
ttatacataaata

SEQ ID NO: 12911 - DNA, 13 bp, Artificial Sequence
  Oligonucleotide for detection of SNP TSC0003013
tatttacgtataa

SEQ ID NO: 12912 - DNA, 13 bp, Artificial Sequence
  Oligonucleotide for detection of SNP TSC0003013
ttatacgtaaata

SEQ ID NO: 12913 - DNA, 13 bp, Artificial Sequence
  Oligonucleotide for detection of SNP TSC0003013
ttgtatgtgaata

SEQ ID NO: 12914 - DNA, 13 bp, Artificial Sequence
  Oligonucleotide for detection of SNP TSC0003013
tattcacatacaa

SEQ ID NO: 12915 - DNA, 13 bp, Artificial Sequence
  Oligonucleotide for detection of SNP TSC0003013
ttgtatatgaata

SEQ ID NO: 12916 - DNA, 13 bp, Artificial Sequence
  Oligonucleotide for detection of SNP TSC0003013
tattcatatacaa

SEQ ID NO: 12917 - DNA, 13 bp, Artificial Sequence
  Oligonucleotide for detection of SNP TSC0003013
ttgtacgtgaata

SEQ ID NO: 12918 - DNA, 13 bp, Artificial Sequence
  Oligonucleotide for detection of SNP TSC0003013
tattcacgtacaa

SEQ ID NO: 12919 - DNA, 13 bp, Artificial Sequence
  Oligonucleotide for detection of SNP TSC0003014
aaatataaaaata

SEQ ID NO: 12920 - DNA, 13 bp, Artificial Sequence
  Oligonucleotide for detection of SNP TSC0003014
tatttttatattt

SEQ ID NO: 12921 - DNA, 13 bp, Artificial Sequence
  Oligonucleotide for detection of SNP TSC0003014
aaatattaaaata

SEQ ID NO: 12922 - DNA, 13 bp, Artificial Sequence
  Oligonucleotide for detection of SNP TSC0003014
tattttaatattt

SEQ ID NO: 12923 - DNA, 13 bp, Artificial Sequence
  Oligonucleotide for detection of SNP TSC0003014
tatttttatgttt

SEQ ID NO: 12924 - DNA, 13 bp, Artificial Sequence
  Oligonucleotide for detection of SNP TSC0003014
aaacataaaaata

SEQ ID NO: 12925 - DNA, 13 bp, Artificial Sequence
  Oligonucleotide for detection of SNP TSC0003014
tattttaatgttt

SEQ ID NO: 12926 - DNA, 13 bp, Artificial Sequence
  Oligonucleotide for detection of SNP TSC0003014
aaacattaaaata

SEQ ID NO: 12927 - DNA, 13 bp, Artificial Sequence
  Oligonucleotide for detection of SNP TSC0003015
ggtttagttaaaa

SEQ ID NO: 12928 - DNA, 13 bp, Artificial Sequence
  Oligonucleotide for detection of SNP TSC0003015
ttttaactaaacc

SEQ ID NO: 12929 - DNA, 13 bp, Artificial Sequence
  Oligonucleotide for detection of SNP TSC0003015
ggtttaattaaaa

SEQ ID NO: 12930 - DNA, 13 bp, Artificial Sequence
  Oligonucleotide for detection of SNP TSC0003015
ttttaattaaacc

SEQ ID NO: 12931 - DNA, 13 bp, Artificial Sequence
  Oligonucleotide for detection of SNP TSC0003016
aagatagataaaa

SEQ ID NO: 12932 - DNA, 13 bp, Artificial Sequence
  Oligonucleotide for detection of SNP TSC0003016
ttttatctatctt

SEQ ID NO: 12933 - DNA, 13 bp, Artificial Sequence
  Oligonucleotide for detection of SNP TSC0003016
aagataaataaaa

SEQ ID NO: 12934 - DNA, 13 bp, Artificial Sequence
  Oligonucleotide for detection of SNP TSC0003016
ttttatttatctt

SEQ ID NO: 12935 - DNA, 13 bp, Artificial Sequence
  Oligonucleotide for detection of SNP TSC0003017
tgtaaagtaatat

SEQ ID NO: 12936 - DNA, 13 bp, Artificial Sequence
  Oligonucleotide for detection of SNP TSC0003017
atattactttaca

SEQ ID NO: 12937 - DNA, 13 bp, Artificial Sequence
  Oligonucleotide for detection of SNP TSC0003017
tgtaaaataatat

SEQ ID NO: 12938 - DNA, 13 bp, Artificial Sequence
  Oligonucleotide for detection of SNP TSC0003017
atattattttaca

SEQ ID NO: 12939 - DNA, 13 bp, Artificial Sequence
  Oligonucleotide for detection of SNP TSC0003018
gtatatatatata

SEQ ID NO: 12940 - DNA, 13 bp, Artificial Sequence
  Oligonucleotide for detection of SNP TSC0003018
tatatatatatac

SEQ ID NO: 12941 - DNA, 13 bp, Artificial Sequence
  Oligonucleotide for detection of SNP TSC0003018
gtatatgtatata

SEQ ID NO: 12942 - DNA, 13 bp, Artificial Sequence
  Oligonucleotide for detection of SNP TSC0003018
tatatacatatac

SEQ ID NO: 12943 - DNA, 13 bp, Artificial Sequence
  Oligonucleotide for detection of SNP TSC0003019
atgttagtttatt

SEQ ID NO: 12944 - DNA, 13 bp, Artificial Sequence
  Oligonucleotide for detection of SNP TSC0003019
aataaactaacat

SEQ ID NO: 12945 - DNA, 13 bp, Artificial Sequence
  Oligonucleotide for detection of SNP TSC0003019
atgttaatttatt

SEQ ID NO: 12946 - DNA, 13 bp, Artificial Sequence
  Oligonucleotide for detection of SNP TSC0003019
aataaattaacat

SEQ ID NO: 12947 - DNA, 13 bp, Artificial Sequence
  Oligonucleotide for detection of SNP TSC0003020
gttttaatattta

SEQ ID NO: 12948 - DNA, 13 bp, Artificial Sequence
  Oligonucleotide for detection of SNP TSC0003020
taaatattaaaac

SEQ ID NO: 12949 - DNA, 13 bp, Artificial Sequence
  Oligonucleotide for detection of SNP TSC0003020
gttttagtattta

SEQ ID NO: 12950 - DNA, 13 bp, Artificial Sequence
  Oligonucleotide for detection of SNP TSC0003020
taaatactaaaac

SEQ ID NO: 12951 - DNA, 13 bp, Artificial Sequence
  Oligonucleotide for detection of SNP TSC0003021
ttagaagttgtta

SEQ ID NO: 12952 - DNA, 13 bp, Artificial Sequence
  Oligonucleotide for detection of SNP TSC0003021
taacaacttctaa

SEQ ID NO: 12953 - DNA, 13 bp, Artificial Sequence
  Oligonucleotide for detection of SNP TSC0003021
ttagaaattgtta

SEQ ID NO: 12954 - DNA, 13 bp, Artificial Sequence
  Oligonucleotide for detection of SNP TSC0003021
taacaatttctaa

SEQ ID NO: 12955 - DNA, 13 bp, Artificial Sequence
  Oligonucleotide for detection of SNP TSC0003022
taatatataatat

SEQ ID NO: 12956 - DNA, 13 bp, Artificial Sequence
  Oligonucleotide for detection of SNP TSC0003022
atattatatatta

SEQ ID NO: 12957 - DNA, 13 bp, Artificial Sequence
  Oligonucleotide for detection of SNP TSC0003022
taatatttaatat

SEQ ID NO: 12958 - DNA, 13 bp, Artificial Sequence
  Oligonucleotide for detection of SNP TSC0003022
atattaaatatta

SEQ ID NO: 12959 - DNA, 13 bp, Artificial Sequence
  Oligonucleotide for detection of SNP TSC0003022
atattatgtatta

SEQ ID NO: 12960 - DNA, 13 bp, Artificial Sequence
  Oligonucleotide for detection of SNP TSC0003022
taatacataatat

SEQ ID NO: 12961 - DNA, 13 bp, Artificial Sequence
  Oligonucleotide for detection of SNP TSC0003022
atattaggtatta

SEQ ID NO: 12962 - DNA, 13 bp, Artificial Sequence
  Oligonucleotide for detection of SNP TSC0003022
taatacctaatat

SEQ ID NO: 12963 - DNA, 13 bp, Artificial Sequence
  Oligonucleotide for detection of SNP TSC0003023
ttgggaatggtgy

SEQ ID NO: 12964 - DNA, 13 bp, Artificial Sequence
  Oligonucleotide for detection of SNP TSC0003023
rcaccattcccaa

SEQ ID NO: 12965 - DNA, 13 bp, Artificial Sequence
  Oligonucleotide for detection of SNP TSC0003023
ttgggagtggtgy

SEQ ID NO: 12966 - DNA, 13 bp, Artificial Sequence
  Oligonucleotide for detection of SNP TSC0003023
rcaccactcccaa

SEQ ID NO: 12967 - DNA, 13 bp, Artificial Sequence
  Oligonucleotide for detection of SNP TSC0003024
tataatattatay

SEQ ID NO: 12968 - DNA, 13 bp, Artificial Sequence
  Oligonucleotide for detection of SNP TSC0003024
rtataatattata

SEQ ID NO: 12969 - DNA, 13 bp, Artificial Sequence
  Oligonucleotide for detection of SNP TSC0003024
tataatgttatay

SEQ ID NO: 12970 - DNA, 13 bp, Artificial Sequence
  Oligonucleotide for detection of SNP TSC0003024
rtataacattata

SEQ ID NO: 12971 - DNA, 13 bp, Artificial Sequence
  Oligonucleotide for detection of SNP TSC0003024
tataacgttatay

SEQ ID NO: 12972 - DNA, 13 bp, Artificial Sequence
  Oligonucleotide for detection of SNP TSC0003024
rtataacgttata

SEQ ID NO: 12973 - DNA, 13 bp, Artificial Sequence
  Oligonucleotide for detection of SNP TSC0003024
gtgtaatgttata

SEQ ID NO: 12974 - DNA, 13 bp, Artificial Sequence
  Oligonucleotide for detection of SNP TSC0003024
tataacattacac

SEQ ID NO: 12975 - DNA, 13 bp, Artificial Sequence
  Oligonucleotide for detection of SNP TSC0003024
gtgtaacgttata

SEQ ID NO: 12976 - DNA, 13 bp, Artificial Sequence
  Oligonucleotide for detection of SNP TSC0003024
tataacgttacac

SEQ ID NO: 12977 - DNA, 13 bp, Artificial Sequence
  Oligonucleotide for detection of SNP TSC0003025
aagtaatgtggta

SEQ ID NO: 12978 - DNA, 13 bp, Artificial Sequence
  Oligonucleotide for detection of SNP TSC0003025
taccacattactt

SEQ ID NO: 12979 - DNA, 13 bp, Artificial Sequence
  Oligonucleotide for detection of SNP TSC0003025
aagtaacgtggta

SEQ ID NO: 12980 - DNA, 13 bp, Artificial Sequence
  Oligonucleotide for detection of SNP TSC0003025
taccacgttactt

SEQ ID NO: 12981 - DNA, 13 bp, Artificial Sequence
  Oligonucleotide for detection of SNP TSC0003025
tattatgttgttt

SEQ ID NO: 12982 - DNA, 13 bp, Artificial Sequence
  Oligonucleotide for detection of SNP TSC0003025
aaacaacataata

SEQ ID NO: 12983 - DNA, 13 bp, Artificial Sequence
  Oligonucleotide for detection of SNP TSC0003025
tattatattgttt

SEQ ID NO: 12984 - DNA, 13 bp, Artificial Sequence
  Oligonucleotide for detection of SNP TSC0003025
aaacaatataata

SEQ ID NO: 12985 - DNA, 13 bp, Artificial Sequence
  Oligonucleotide for detection of SNP TSC0003025
tattacgttgttt

SEQ ID NO: 12986 - DNA, 13 bp, Artificial Sequence
  Oligonucleotide for detection of SNP TSC0003025
aaacaacgtaata

SEQ ID NO: 12987 - DNA, 13 bp, Artificial Sequence
  Oligonucleotide for detection of SNP TSC0003028
gtttatatattat

SEQ ID NO: 12988 - DNA, 13 bp, Artificial Sequence
  Oligonucleotide for detection of SNP TSC0003028
ataatatataaac

SEQ ID NO: 12989 - DNA, 13 bp, Artificial Sequence
  Oligonucleotide for detection of SNP TSC0003028
gtttatgtattat

SEQ ID NO: 12990 - DNA, 13 bp, Artificial Sequence
  Oligonucleotide for detection of SNP TSC0003028
ataatacataaac

SEQ ID NO: 12991 - DNA, 13 bp, Artificial Sequence
  Oligonucleotide for detection of SNP TSC0003029
atatttaaagagt

SEQ ID NO: 12992 - DNA, 13 bp, Artificial Sequence
  Oligonucleotide for detection of SNP TSC0003029
actctttaaatat

SEQ ID NO: 12993 - DNA, 13 bp, Artificial Sequence
  Oligonucleotide for detection of SNP TSC0003029
atatttgaagagt

SEQ ID NO: 12994 - DNA, 13 bp, Artificial Sequence
  Oligonucleotide for detection of SNP TSC0003029
actcttcaaatat

SEQ ID NO: 12995 - DNA, 13 bp, Artificial Sequence
  Oligonucleotide for detection of SNP TSC0003029
atattcgaagagt

SEQ ID NO: 12996 - DNA, 13 bp, Artificial Sequence
  Oligonucleotide for detection of SNP TSC0003029
actcttcgaatat

SEQ ID NO: 12997 - DNA, 13 bp, Artificial Sequence
  Oligonucleotide for detection of SNP TSC0003029
attttttgaatat

SEQ ID NO: 12998 - DNA, 13 bp, Artificial Sequence
  Oligonucleotide for detection of SNP TSC0003029
atattcaaaaaat

SEQ ID NO: 12999 - DNA, 13 bp, Artificial Sequence
  Oligonucleotide for detection of SNP TSC0003029
atttttcgaatat

SEQ ID NO: 13000 - DNA, 13 bp, Artificial Sequence
  Oligonucleotide for detection of SNP TSC0003029
atattcgaaaaat

SEQ ID NO: 13001 - DNA, 13 bp, Artificial Sequence
  Oligonucleotide for detection of SNP TSC0003030
gagaaagttttaa

SEQ ID NO: 13002 - DNA, 13 bp, Artificial Sequence
  Oligonucleotide for detection of SNP TSC0003030
ttaaaactttctc

SEQ ID NO: 13003 - DNA, 13 bp, Artificial Sequence
  Oligonucleotide for detection of SNP TSC0003030
gagaaaattttaa

SEQ ID NO: 13004 - DNA, 13 bp, Artificial Sequence
  Oligonucleotide for detection of SNP TSC0003030
ttaaaattttctc

SEQ ID NO: 13005 - DNA, 13 bp, Artificial Sequence
  Oligonucleotide for detection of SNP TSC0003031
aaatgtatttaaa

SEQ ID NO: 13006 - DNA, 13 bp, Artificial Sequence
  Oligonucleotide for detection of SNP TSC0003031
tttaaatacattt

SEQ ID NO: 13007 - DNA, 13 bp, Artificial Sequence
  Oligonucleotide for detection of SNP TSC0003031
aaatgtttttaaa

SEQ ID NO: 13008 - DNA, 13 bp, Artificial Sequence
  Oligonucleotide for detection of SNP TSC0003031
tttaaaaacattt

SEQ ID NO: 13009 - DNA, 13 bp, Artificial Sequence
  Oligonucleotide for detection of SNP TSC0003031
tttaaatatattt

SEQ ID NO: 13010 - DNA, 13 bp, Artificial Sequence
  Oligonucleotide for detection of SNP TSC0003031
aaatatatttaaa

SEQ ID NO: 13011 - DNA, 13 bp, Artificial Sequence
  Oligonucleotide for detection of SNP TSC0003031
tttaaagatattt

SEQ ID NO: 13012 - DNA, 13 bp, Artificial Sequence
  Oligonucleotide for detection of SNP TSC0003031
aaatatctttaaa

SEQ ID NO: 13013 - DNA, 13 bp, Artificial Sequence
  Oligonucleotide for detection of SNP TSC0003032
atgaaatgggaag

SEQ ID NO: 13014 - DNA, 13 bp, Artificial Sequence
  Oligonucleotide for detection of SNP TSC0003032
cttcccatttcat

SEQ ID NO: 13015 - DNA, 13 bp, Artificial Sequence
  Oligonucleotide for detection of SNP TSC0003032
atgaaacgggaag

SEQ ID NO: 13016 - DNA, 13 bp, Artificial Sequence
  Oligonucleotide for detection of SNP TSC0003032
cttcccgtttcat

SEQ ID NO: 13017 - DNA, 13 bp, Artificial Sequence
  Oligonucleotide for detection of SNP TSC0003033
aagaatatgatay

SEQ ID NO: 13018 - DNA, 13 bp, Artificial Sequence
  Oligonucleotide for detection of SNP TSC0003033
rtatcatattctt

SEQ ID NO: 13019 - DNA, 13 bp, Artificial Sequence
  Oligonucleotide for detection of SNP TSC0003033
aagaatgtgatay

SEQ ID NO: 13020 - DNA, 13 bp, Artificial Sequence
  Oligonucleotide for detection of SNP TSC0003033
rtatcacattctt

SEQ ID NO: 13021 - DNA, 13 bp, Artificial Sequence
  Oligonucleotide for detection of SNP TSC0003033
aagaatacgatay

SEQ ID NO: 13022 - DNA, 13 bp, Artificial Sequence
  Oligonucleotide for detection of SNP TSC0003033
rtatcgtattctt

SEQ ID NO: 13023 - DNA, 13 bp, Artificial Sequence
  Oligonucleotide for detection of SNP TSC0003033
aagaacgtgatay

SEQ ID NO: 13024 - DNA, 13 bp, Artificial Sequence
  Oligonucleotide for detection of SNP TSC0003033
rtatcacgttctt

SEQ ID NO: 13025 - DNA, 13 bp, Artificial Sequence
  Oligonucleotide for detection of SNP TSC0003033
aagaatgcgatay

SEQ ID NO: 13026 - DNA, 13 bp, Artificial Sequence
  Oligonucleotide for detection of SNP TSC0003033
rtatcgcattctt

SEQ ID NO: 13027 - DNA, 13 bp, Artificial Sequence
  Oligonucleotide for detection of SNP TSC0003033
aagaacgcgatay

SEQ ID NO: 13028 - DNA, 13 bp, Artificial Sequence
  Oligonucleotide for detection of SNP TSC0003033
rtatcgcgttctt

SEQ ID NO: 13029 - DNA, 13 bp, Artificial Sequence
  Oligonucleotide for detection of SNP TSC0003033
gtattgtgttttt

SEQ ID NO: 13030 - DNA, 13 bp, Artificial Sequence
  Oligonucleotide for detection of SNP TSC0003033
aaaaacacaatac

SEQ ID NO: 13031 - DNA, 13 bp, Artificial Sequence
  Oligonucleotide for detection of SNP TSC0003033
gtatcgtgttttt

SEQ ID NO: 13032 - DNA, 13 bp, Artificial Sequence
  Oligonucleotide for detection of SNP TSC0003033
aaaaacacgatac

SEQ ID NO: 13033 - DNA, 13 bp, Artificial Sequence
  Oligonucleotide for detection of SNP TSC0003033
gtattgcgttttt

SEQ ID NO: 13034 - DNA, 13 bp, Artificial Sequence
  Oligonucleotide for detection of SNP TSC0003033
aaaaacgcaatac

SEQ ID NO: 13035 - DNA, 13 bp, Artificial Sequence
  Oligonucleotide for detection of SNP TSC0003033
gtatcgcgttttt

SEQ ID NO: 13036 - DNA, 13 bp, Artificial Sequence
  Oligonucleotide for detection of SNP TSC0003033
aaaaacgcgatac

SEQ ID NO: 13037 - DNA, 13 bp, Artificial Sequence
  Oligonucleotide for detection of SNP TSC0003034
aatgatattgtag

SEQ ID NO: 13038 - DNA, 13 bp, Artificial Sequence
  Oligonucleotide for detection of SNP TSC0003034
ctacaatatcatt

SEQ ID NO: 13039 - DNA, 13 bp, Artificial Sequence
  Oligonucleotide for detection of SNP TSC0003034
aatgatgttgtag

SEQ ID NO: 13040 - DNA, 13 bp, Artificial Sequence
  Oligonucleotide for detection of SNP TSC0003034
ctacaacatcatt

SEQ ID NO: 13041 - DNA, 13 bp, Artificial Sequence
  Oligonucleotide for detection of SNP TSC0003034
aacgatattgtag

SEQ ID NO: 13042 - DNA, 13 bp, Artificial Sequence
  Oligonucleotide for detection of SNP TSC0003034
ctacaatatcgtt

SEQ ID NO: 13043 - DNA, 13 bp, Artificial Sequence
  Oligonucleotide for detection of SNP TSC0003034
aacgatgttgtag

SEQ ID NO: 13044 - DNA, 13 bp, Artificial Sequence
  Oligonucleotide for detection of SNP TSC0003034
ctacaacatcgtt

SEQ ID NO: 13045 - DNA, 13 bp, Artificial Sequence
  Oligonucleotide for detection of SNP TSC0003035
tttattagaattt

SEQ ID NO: 13046 - DNA, 13 bp, Artificial Sequence
  Oligonucleotide for detection of SNP TSC0003035
aaattctaataaa

SEQ ID NO: 13047 - DNA, 13 bp, Artificial Sequence
  Oligonucleotide for detection of SNP TSC0003035
tttattggaattt

SEQ ID NO: 13048 - DNA, 13 bp, Artificial Sequence
  Oligonucleotide for detection of SNP TSC0003035
aaattccaataaa

SEQ ID NO: 13049 - DNA, 13 bp, Artificial Sequence
  Oligonucleotide for detection of SNP TSC0003036
atgagatgagtat

SEQ ID NO: 13050 - DNA, 13 bp, Artificial Sequence
  Oligonucleotide for detection of SNP TSC0003036
atactcatctcat

SEQ ID NO: 13051 - DNA, 13 bp, Artificial Sequence
  Oligonucleotide for detection of SNP TSC0003036
atgagacgagtat

SEQ ID NO: 13052 - DNA, 13 bp, Artificial Sequence
  Oligonucleotide for detection of SNP TSC0003036
atactcgtctcat

SEQ ID NO: 13053 - DNA, 13 bp, Artificial Sequence
  Oligonucleotide for detection of SNP TSC0003036
atgtttgttttat

SEQ ID NO: 13054 - DNA, 13 bp, Artificial Sequence
  Oligonucleotide for detection of SNP TSC0003036
ataaaacaaacat

SEQ ID NO: 13055 - DNA, 13 bp, Artificial Sequence
  Oligonucleotide for detection of SNP TSC0003036
atgtttattttat

SEQ ID NO: 13056 - DNA, 13 bp, Artificial Sequence
  Oligonucleotide for detection of SNP TSC0003036
ataaaataaacat

SEQ ID NO: 13057 - DNA, 13 bp, Artificial Sequence
  Oligonucleotide for detection of SNP TSC0003036
atgttcgttttat

SEQ ID NO: 13058 - DNA, 13 bp, Artificial Sequence
  Oligonucleotide for detection of SNP TSC0003036
ataaaacgaacat

SEQ ID NO: 13059 - DNA, 13 bp, Artificial Sequence
  Oligonucleotide for detection of SNP TSC0003037
ttttttgtataat

SEQ ID NO: 13060 - DNA, 13 bp, Artificial Sequence
  Oligonucleotide for detection of SNP TSC0003037
attatacaaaaaa

SEQ ID NO: 13061 - DNA, 13 bp, Artificial Sequence
  Oligonucleotide for detection of SNP TSC0003037
ttttttatataat

SEQ ID NO: 13062 - DNA, 13 bp, Artificial Sequence
  Oligonucleotide for detection of SNP TSC0003037
attatataaaaaa

SEQ ID NO: 13063 - DNA, 13 bp, Artificial Sequence
  Oligonucleotide for detection of SNP TSC0003038
ggtattaggtatg

SEQ ID NO: 13064 - DNA, 13 bp, Artificial Sequence
  Oligonucleotide for detection of SNP TSC0003038
catacctaatacc

SEQ ID NO: 13065 - DNA, 13 bp, Artificial Sequence
  Oligonucleotide for detection of SNP TSC0003038
ggtattgggtatg

SEQ ID NO: 13066 - DNA, 13 bp, Artificial Sequence
  Oligonucleotide for detection of SNP TSC0003038
catacccaatacc

SEQ ID NO: 13067 - DNA, 13 bp, Artificial Sequence
  Oligonucleotide for detection of SNP TSC0003039
tgtttagtgaaga

SEQ ID NO: 13068 - DNA, 13 bp, Artificial Sequence
  Oligonucleotide for detection of SNP TSC0003039
tcttcactaaaca

SEQ ID NO: 13069 - DNA, 13 bp, Artificial Sequence
  Oligonucleotide for detection of SNP TSC0003039
tgtttaatgaaga

SEQ ID NO: 13070 - DNA, 13 bp, Artificial Sequence
  Oligonucleotide for detection of SNP TSC0003039
tcttcattaaaca

SEQ ID NO: 13071 - DNA, 13 bp, Artificial Sequence
  Oligonucleotide for detection of SNP TSC0003040
gtaaaggaataay

SEQ ID NO: 13072 - DNA, 13 bp, Artificial Sequence
  Oligonucleotide for detection of SNP TSC0003040
rttattcctttac

SEQ ID NO: 13073 - DNA, 13 bp, Artificial Sequence
  Oligonucleotide for detection of SNP TSC0003040
gtaaagaaataay

SEQ ID NO: 13074 - DNA, 13 bp, Artificial Sequence
  Oligonucleotide for detection of SNP TSC0003040
rttatttctttac

SEQ ID NO: 13075 - DNA, 13 bp, Artificial Sequence
  Oligonucleotide for detection of SNP TSC0003041
tatattggtgagg

SEQ ID NO: 13076 - DNA, 13 bp, Artificial Sequence
  Oligonucleotide for detection of SNP TSC0003041
cctcaccaatata

SEQ ID NO: 13077 - DNA, 13 bp, Artificial Sequence
  Oligonucleotide for detection of SNP TSC0003041
tatattagtgagg

SEQ ID NO: 13078 - DNA, 13 bp, Artificial Sequence
  Oligonucleotide for detection of SNP TSC0003041
cctcactaatata

SEQ ID NO: 13079 - DNA, 13 bp, Artificial Sequence
  Oligonucleotide for detection of SNP TSC0003041
tatattggcgagg

SEQ ID NO: 13080 - DNA, 13 bp, Artificial Sequence
  Oligonucleotide for detection of SNP TSC0003041
cctcgccaatata

SEQ ID NO: 13081 - DNA, 13 bp, Artificial Sequence
  Oligonucleotide for detection of SNP TSC0003041
tatattagcgagg

SEQ ID NO: 13082 - DNA, 13 bp, Artificial Sequence
  Oligonucleotide for detection of SNP TSC0003041
cctcgctaatata

SEQ ID NO: 13083 - DNA, 13 bp, Artificial Sequence
  Oligonucleotide for detection of SNP TSC0003042
gatatattgaaga

SEQ ID NO: 13084 - DNA, 13 bp, Artificial Sequence
  Oligonucleotide for detection of SNP TSC0003042
tcttcaatatatc

SEQ ID NO: 13085 - DNA, 13 bp, Artificial Sequence
  Oligonucleotide for detection of SNP TSC0003042
gatatagtgaaga

SEQ ID NO: 13086 - DNA, 13 bp, Artificial Sequence
  Oligonucleotide for detection of SNP TSC0003042
tcttcactatatc

SEQ ID NO: 13087 - DNA, 13 bp, Artificial Sequence
  Oligonucleotide for detection of SNP TSC0003042
tttttattataty

SEQ ID NO: 13088 - DNA, 13 bp, Artificial Sequence
  Oligonucleotide for detection of SNP TSC0003042
ratataataaaaa

SEQ ID NO: 13089 - DNA, 13 bp, Artificial Sequence
  Oligonucleotide for detection of SNP TSC0003043
tagtaaatggtga

SEQ ID NO: 13090 - DNA, 13 bp, Artificial Sequence
  Oligonucleotide for detection of SNP TSC0003043
tcaccatttacta

SEQ ID NO: 13091 - DNA, 13 bp, Artificial Sequence
  Oligonucleotide for detection of SNP TSC0003043
tagtaattggtga

SEQ ID NO: 13092 - DNA, 13 bp, Artificial Sequence
  Oligonucleotide for detection of SNP TSC0003043
tcaccaattacta

SEQ ID NO: 13093 - DNA, 13 bp, Artificial Sequence
  Oligonucleotide for detection of SNP TSC0003043
ttattatttgttg

SEQ ID NO: 13094 - DNA, 13 bp, Artificial Sequence
  Oligonucleotide for detection of SNP TSC0003043
caacaaataataa

SEQ ID NO: 13095 - DNA, 13 bp, Artificial Sequence
  Oligonucleotide for detection of SNP TSC0003043
ttattaattgttg

SEQ ID NO: 13096 - DNA, 13 bp, Artificial Sequence
  Oligonucleotide for detection of SNP TSC0003043
caacaattaataa

SEQ ID NO: 13097 - DNA, 13 bp, Artificial Sequence
  Oligonucleotide for detection of SNP TSC0003044
ttttttgtatgta

SEQ ID NO: 13098 - DNA, 13 bp, Artificial Sequence
  Oligonucleotide for detection of SNP TSC0003044
tacatacaaaaaa

SEQ ID NO: 13099 - DNA, 13 bp, Artificial Sequence
  Oligonucleotide for detection of SNP TSC0003044
ttttttatatgta

SEQ ID NO: 13100 - DNA, 13 bp, Artificial Sequence
  Oligonucleotide for detection of SNP TSC0003044
tacatataaaaaa

SEQ ID NO: 13101 - DNA, 13 bp, Artificial Sequence
  Oligonucleotide for detection of SNP TSC0003045
ggggggtaaaaaa

SEQ ID NO: 13102 - DNA, 13 bp, Artificial Sequence
  Oligonucleotide for detection of SNP TSC0003045
ttttttacccccc

SEQ ID NO: 13103 - DNA, 13 bp, Artificial Sequence
  Oligonucleotide for detection of SNP TSC0003045
gggggggaaaaaa

SEQ ID NO: 13104 - DNA, 13 bp, Artificial Sequence
  Oligonucleotide for detection of SNP TSC0003045
ttttttccccccc

SEQ ID NO: 13105 - DNA, 13 bp, Artificial Sequence
  Oligonucleotide for detection of SNP TSC0003045
tttttttttttty

SEQ ID NO: 13106 - DNA, 13 bp, Artificial Sequence
  Oligonucleotide for detection of SNP TSC0003045
raaaaaaaaaaaa

SEQ ID NO: 13107 - DNA, 13 bp, Artificial Sequence
  Oligonucleotide for detection of SNP TSC0003046
atagagtgttgat

SEQ ID NO: 13108 - DNA, 13 bp, Artificial Sequence
  Oligonucleotide for detection of SNP TSC0003046
atcaacactctat

SEQ ID NO: 13109 - DNA, 13 bp, Artificial Sequence
  Oligonucleotide for detection of SNP TSC0003046
atagagcgttgat

SEQ ID NO: 13110 - DNA, 13 bp, Artificial Sequence
  Oligonucleotide for detection of SNP TSC0003046
atcaacgctctat

SEQ ID NO: 13111 - DNA, 13 bp, Artificial Sequence
  Oligonucleotide for detection of SNP TSC0003046
attagtgttttgt

SEQ ID NO: 13112 - DNA, 13 bp, Artificial Sequence
  Oligonucleotide for detection of SNP TSC0003046
acaaaacactaat

SEQ ID NO: 13113 - DNA, 13 bp, Artificial Sequence
  Oligonucleotide for detection of SNP TSC0003046
attagtattttgt

SEQ ID NO: 13114 - DNA, 13 bp, Artificial Sequence
  Oligonucleotide for detection of SNP TSC0003046
acaaaatactaat

SEQ ID NO: 13115 - DNA, 13 bp, Artificial Sequence
  Oligonucleotide for detection of SNP TSC0003046
attagcgttttgt

SEQ ID NO: 13116 - DNA, 13 bp, Artificial Sequence
  Oligonucleotide for detection of SNP TSC0003046
acaaaacgctaat

SEQ ID NO: 13117 - DNA, 13 bp, Artificial Sequence
  Oligonucleotide for detection of SNP TSC0003047
tgttatgaaatag

SEQ ID NO: 13118 - DNA, 13 bp, Artificial Sequence
  Oligonucleotide for detection of SNP TSC0003047
ctatttcataaca

SEQ ID NO: 13119 - DNA, 13 bp, Artificial Sequence
  Oligonucleotide for detection of SNP TSC0003047
tgttataaaatag

SEQ ID NO: 13120 - DNA, 13 bp, Artificial Sequence
  Oligonucleotide for detection of SNP TSC0003047
ctattttataaca

SEQ ID NO: 13121 - DNA, 13 bp, Artificial Sequence
  Oligonucleotide for detection of SNP TSC0003048
ttagataattatt

SEQ ID NO: 13122 - DNA, 13 bp, Artificial Sequence
  Oligonucleotide for detection of SNP TSC0003048
aataattatctaa

SEQ ID NO: 13123 - DNA, 13 bp, Artificial Sequence
  Oligonucleotide for detection of SNP TSC0003048
ttagattattatt

SEQ ID NO: 13124 - DNA, 13 bp, Artificial Sequence
  Oligonucleotide for detection of SNP TSC0003048
aataataatctaa

SEQ ID NO: 13125 - DNA, 13 bp, Artificial Sequence
  Oligonucleotide for detection of SNP TSC0003048
aataattatttga

SEQ ID NO: 13126 - DNA, 13 bp, Artificial Sequence
  Oligonucleotide for detection of SNP TSC0003048
tcaaataattatt

SEQ ID NO: 13127 - DNA, 13 bp, Artificial Sequence
  Oligonucleotide for detection of SNP TSC0003048
aataatgatttga

SEQ ID NO: 13128 - DNA, 13 bp, Artificial Sequence
  Oligonucleotide for detection of SNP TSC0003048
tcaaatcattatt

SEQ ID NO: 13129 - DNA, 13 bp, Artificial Sequence
  Oligonucleotide for detection of SNP TSC0003049
ataattatttttt

SEQ ID NO: 13130 - DNA, 13 bp, Artificial Sequence
  Oligonucleotide for detection of SNP TSC0003049
aaaaaataattat

SEQ ID NO: 13131 - DNA, 13 bp, Artificial Sequence
  Oligonucleotide for detection of SNP TSC0003049
ataattgtttttt

SEQ ID NO: 13132 - DNA, 13 bp, Artificial Sequence
  Oligonucleotide for detection of SNP TSC0003049
aaaaaacaattat

SEQ ID NO: 13133 - DNA, 13 bp, Artificial Sequence
  Oligonucleotide for detection of SNP TSC0003050
tgtttaataagta

SEQ ID NO: 13134 - DNA, 13 bp, Artificial Sequence
  Oligonucleotide for detection of SNP TSC0003050
tacttattaaaca

SEQ ID NO: 13135 - DNA, 13 bp, Artificial Sequence
  Oligonucleotide for detection of SNP TSC0003050
tgtttattaagta

SEQ ID NO: 13136 - DNA, 13 bp, Artificial Sequence
  Oligonucleotide for detection of SNP TSC0003050
tacttaataaaca

SEQ ID NO: 13137 - DNA, 13 bp, Artificial Sequence
  Oligonucleotide for detection of SNP TSC0003050
tatttattgaata

SEQ ID NO: 13138 - DNA, 13 bp, Artificial Sequence
  Oligonucleotide for detection of SNP TSC0003050
tattcaataaata

SEQ ID NO: 13139 - DNA, 13 bp, Artificial Sequence
  Oligonucleotide for detection of SNP TSC0003050
tatttagtgaata

SEQ ID NO: 13140 - DNA, 13 bp, Artificial Sequence
  Oligonucleotide for detection of SNP TSC0003050
tattcactaaata

SEQ ID NO: 13141 - DNA, 13 bp, Artificial Sequence
  Oligonucleotide for detection of SNP TSC0003051
tagtaagtaattg

SEQ ID NO: 13142 - DNA, 13 bp, Artificial Sequence
  Oligonucleotide for detection of SNP TSC0003051
caattacttacta

SEQ ID NO: 13143 - DNA, 13 bp, Artificial Sequence
  Oligonucleotide for detection of SNP TSC0003051
tagtaaataattg

SEQ ID NO: 13144 - DNA, 13 bp, Artificial Sequence
  Oligonucleotide for detection of SNP TSC0003051
caattatttacta

SEQ ID NO: 13145 - DNA, 13 bp, Artificial Sequence
  Oligonucleotide for detection of SNP TSC0003052
ttgtagatttgtt

SEQ ID NO: 13146 - DNA, 13 bp, Artificial Sequence
  Oligonucleotide for detection of SNP TSC0003052
aacaaatctacaa

SEQ ID NO: 13147 - DNA, 13 bp, Artificial Sequence
  Oligonucleotide for detection of SNP TSC0003052
ttgtaggtttgtt

SEQ ID NO: 13148 - DNA, 13 bp, Artificial Sequence
  Oligonucleotide for detection of SNP TSC0003052
aacaaacctacaa

SEQ ID NO: 13149 - DNA, 13 bp, Artificial Sequence
  Oligonucleotide for detection of SNP TSC0003053
atatagaatatta

SEQ ID NO: 13150 - DNA, 13 bp, Artificial Sequence
  Oligonucleotide for detection of SNP TSC0003053
taatattctatat

SEQ ID NO: 13151 - DNA, 13 bp, Artificial Sequence
  Oligonucleotide for detection of SNP TSC0003053
atatagtatatta

SEQ ID NO: 13152 - DNA, 13 bp, Artificial Sequence
  Oligonucleotide for detection of SNP TSC0003053
taatatactatat

SEQ ID NO: 13153 - DNA, 13 bp, Artificial Sequence
  Oligonucleotide for detection of SNP TSC0003053
tagtgttttgtat

SEQ ID NO: 13154 - DNA, 13 bp, Artificial Sequence
  Oligonucleotide for detection of SNP TSC0003053
atacaaaacacta

SEQ ID NO: 13155 - DNA, 13 bp, Artificial Sequence
  Oligonucleotide for detection of SNP TSC0003053
tagtgtgttgtat

SEQ ID NO: 13156 - DNA, 13 bp, Artificial Sequence
  Oligonucleotide for detection of SNP TSC0003053
atacaacacacta

SEQ ID NO: 13157 - DNA, 13 bp, Artificial Sequence
  Oligonucleotide for detection of SNP TSC0003054
aattttataatta

SEQ ID NO: 13158 - DNA, 13 bp, Artificial Sequence
  Oligonucleotide for detection of SNP TSC0003054
taattataaaatt

SEQ ID NO: 13159 - DNA, 13 bp, Artificial Sequence
  Oligonucleotide for detection of SNP TSC0003054
aattttgtaatta

SEQ ID NO: 13160 - DNA, 13 bp, Artificial Sequence
  Oligonucleotide for detection of SNP TSC0003054
taattacaaaatt

SEQ ID NO: 13161 - DNA, 13 bp, Artificial Sequence
  Oligonucleotide for detection of SNP TSC0003054
aatttcgtaatta

SEQ ID NO: 13162 - DNA, 13 bp, Artificial Sequence
  Oligonucleotide for detection of SNP TSC0003054
taattacgaaatt

SEQ ID NO: 13163 - DNA, 13 bp, Artificial Sequence
  Oligonucleotide for detection of SNP TSC0003054
tgattatgaagtt

SEQ ID NO: 13164 - DNA, 13 bp, Artificial Sequence
  Oligonucleotide for detection of SNP TSC0003054
aacttcataatca

SEQ ID NO: 13165 - DNA, 13 bp, Artificial Sequence
  Oligonucleotide for detection of SNP TSC0003054
tgattacgaagtt

SEQ ID NO: 13166 - DNA, 13 bp, Artificial Sequence
  Oligonucleotide for detection of SNP TSC0003054
aacttcgtaatca

SEQ ID NO: 13167 - DNA, 13 bp, Artificial Sequence
  Oligonucleotide for detection of SNP TSC0003056
tatttaaaagaaa

SEQ ID NO: 13168 - DNA, 13 bp, Artificial Sequence
  Oligonucleotide for detection of SNP TSC0003056
tttcttttaaata

SEQ ID NO: 13169 - DNA, 13 bp, Artificial Sequence
  Oligonucleotide for detection of SNP TSC0003056
tatttagaagaaa

SEQ ID NO: 13170 - DNA, 13 bp, Artificial Sequence
  Oligonucleotide for detection of SNP TSC0003056
tttcttctaaata

SEQ ID NO: 13171 - DNA, 13 bp, Artificial Sequence
  Oligonucleotide for detection of SNP TSC0003057
ttaatttgtagaa

SEQ ID NO: 13172 - DNA, 13 bp, Artificial Sequence
  Oligonucleotide for detection of SNP TSC0003057
ttctacaaattaa

SEQ ID NO: 13173 - DNA, 13 bp, Artificial Sequence
  Oligonucleotide for detection of SNP TSC0003057
ttaattcgtagaa

SEQ ID NO: 13174 - DNA, 13 bp, Artificial Sequence
  Oligonucleotide for detection of SNP TSC0003057
ttctacgaattaa

SEQ ID NO: 13175 - DNA, 13 bp, Artificial Sequence
  Oligonucleotide for detection of SNP TSC0003057
ttttatgagttga

SEQ ID NO: 13176 - DNA, 13 bp, Artificial Sequence
  Oligonucleotide for detection of SNP TSC0003057
tcaactcataaaa

SEQ ID NO: 13177 - DNA, 13 bp, Artificial Sequence
  Oligonucleotide for detection of SNP TSC0003057
ttttataagttga

SEQ ID NO: 13178 - DNA, 13 bp, Artificial Sequence
  Oligonucleotide for detection of SNP TSC0003057
tcaacttataaaa

SEQ ID NO: 13179 - DNA, 13 bp, Artificial Sequence
  Oligonucleotide for detection of SNP TSC0003057
ttttacgagttga

SEQ ID NO: 13180 - DNA, 13 bp, Artificial Sequence
  Oligonucleotide for detection of SNP TSC0003057
tcaactcgtaaaa

SEQ ID NO: 13181 - DNA, 13 bp, Artificial Sequence
  Oligonucleotide for detection of SNP TSC0003058
aggataatttaag

SEQ ID NO: 13182 - DNA, 13 bp, Artificial Sequence
  Oligonucleotide for detection of SNP TSC0003058
cttaaattatcct

SEQ ID NO: 13183 - DNA, 13 bp, Artificial Sequence
  Oligonucleotide for detection of SNP TSC0003058
aggatagtttaag

SEQ ID NO: 13184 - DNA, 13 bp, Artificial Sequence
  Oligonucleotide for detection of SNP TSC0003058
cttaaactatcct

SEQ ID NO: 13185 - DNA, 13 bp, Artificial Sequence
  Oligonucleotide for detection of SNP TSC0003059
tatataaatatat

SEQ ID NO: 13186 - DNA, 13 bp, Artificial Sequence
  Oligonucleotide for detection of SNP TSC0003059
atatatttatata

SEQ ID NO: 13187 - DNA, 13 bp, Artificial Sequence
  Oligonucleotide for detection of SNP TSC0003059
atgtatttatgta

SEQ ID NO: 13188 - DNA, 13 bp, Artificial Sequence
  Oligonucleotide for detection of SNP TSC0003059
tacataaatacat

SEQ ID NO: 13189 - DNA, 13 bp, Artificial Sequence
  Oligonucleotide for detection of SNP TSC0003059
atgtatgtatgta

SEQ ID NO: 13190 - DNA, 13 bp, Artificial Sequence
  Oligonucleotide for detection of SNP TSC0003059
tacatacatacat

SEQ ID NO: 13191 - DNA, 13 bp, Artificial Sequence
  Oligonucleotide for detection of SNP TSC0003060
ttgaggagtgatg

SEQ ID NO: 13192 - DNA, 13 bp, Artificial Sequence
  Oligonucleotide for detection of SNP TSC0003060
catcactcctcaa

SEQ ID NO: 13193 - DNA, 13 bp, Artificial Sequence
  Oligonucleotide for detection of SNP TSC0003060
ttgaggggtgatg

SEQ ID NO: 13194 - DNA, 13 bp, Artificial Sequence
  Oligonucleotide for detection of SNP TSC0003060
catcacccctcaa

SEQ ID NO: 13195 - DNA, 13 bp, Artificial Sequence
  Oligonucleotide for detection of SNP TSC0003060
ttgaggagtgacg

SEQ ID NO: 13196 - DNA, 13 bp, Artificial Sequence
  Oligonucleotide for detection of SNP TSC0003060
cgtcactcctcaa

SEQ ID NO: 13197 - DNA, 13 bp, Artificial Sequence
  Oligonucleotide for detection of SNP TSC0003060
ttgaggggtgacg

SEQ ID NO: 13198 - DNA, 13 bp, Artificial Sequence
  Oligonucleotide for detection of SNP TSC0003060
cgtcacccctcaa

SEQ ID NO: 13199 - DNA, 13 bp, Artificial Sequence
  Oligonucleotide for detection of SNP TSC0003061
gagtgatggggaa

SEQ ID NO: 13200 - DNA, 13 bp, Artificial Sequence
  Oligonucleotide for detection of SNP TSC0003061
ttccccatcactc

SEQ ID NO: 13201 - DNA, 13 bp, Artificial Sequence
  Oligonucleotide for detection of SNP TSC0003061
gagtgacggggaa

SEQ ID NO: 13202 - DNA, 13 bp, Artificial Sequence
  Oligonucleotide for detection of SNP TSC0003061
ttccccgtcactc

SEQ ID NO: 13203 - DNA, 13 bp, Artificial Sequence
  Oligonucleotide for detection of SNP TSC0003061
ttttttgttatty

SEQ ID NO: 13204 - DNA, 13 bp, Artificial Sequence
  Oligonucleotide for detection of SNP TSC0003061
raataacaaaaaa

SEQ ID NO: 13205 - DNA, 13 bp, Artificial Sequence
  Oligonucleotide for detection of SNP TSC0003061
ttttttattatty

SEQ ID NO: 13206 - DNA, 13 bp, Artificial Sequence
  Oligonucleotide for detection of SNP TSC0003061
raataataaaaaa

SEQ ID NO: 13207 - DNA, 13 bp, Artificial Sequence
  Oligonucleotide for detection of SNP TSC0003061
tttttcgttatty

SEQ ID NO: 13208 - DNA, 13 bp, Artificial Sequence
  Oligonucleotide for detection of SNP TSC0003061
raataacgaaaaa

SEQ ID NO: 13209 - DNA, 13 bp, Artificial Sequence
  Oligonucleotide for detection of SNP TSC0003062
tgaaggatattay

SEQ ID NO: 13210 - DNA, 13 bp, Artificial Sequence
  Oligonucleotide for detection of SNP TSC0003062
rtaatatccttca

SEQ ID NO: 13211 - DNA, 13 bp, Artificial Sequence
  Oligonucleotide for detection of SNP TSC0003062
tgaagggtattay

SEQ ID NO: 13212 - DNA, 13 bp, Artificial Sequence
  Oligonucleotide for detection of SNP TSC0003062
rtaatacccttca

SEQ ID NO: 13213 - DNA, 13 bp, Artificial Sequence
  Oligonucleotide for detection of SNP TSC0003063
ttttttattaatg

SEQ ID NO: 13214 - DNA, 13 bp, Artificial Sequence
  Oligonucleotide for detection of SNP TSC0003063
cattaataaaaaa

SEQ ID NO: 13215 - DNA, 13 bp, Artificial Sequence
  Oligonucleotide for detection of SNP TSC0003063
tttttttttaatg

SEQ ID NO: 13216 - DNA, 13 bp, Artificial Sequence
  Oligonucleotide for detection of SNP TSC0003063
cattaaaaaaaaa

SEQ ID NO: 13217 - DNA, 13 bp, Artificial Sequence
  Oligonucleotide for detection of SNP TSC0003063
tattgataaaaga

SEQ ID NO: 13218 - DNA, 13 bp, Artificial Sequence
  Oligonucleotide for detection of SNP TSC0003063
tcttttatcaata

SEQ ID NO: 13219 - DNA, 13 bp, Artificial Sequence
  Oligonucleotide for detection of SNP TSC0003063
tattgagaaaaga

SEQ ID NO: 13220 - DNA, 13 bp, Artificial Sequence
  Oligonucleotide for detection of SNP TSC0003063
tcttttctcaata

SEQ ID NO: 13221 - DNA, 13 bp, Artificial Sequence
  Oligonucleotide for detection of SNP TSC0003064
ttaattttttttt

SEQ ID NO: 13222 - DNA, 13 bp, Artificial Sequence
  Oligonucleotide for detection of SNP TSC0003064
aaaaaaaaattaa

SEQ ID NO: 13223 - DNA, 13 bp, Artificial Sequence
  Oligonucleotide for detection of SNP TSC0003064
aaaggaaaattaa

SEQ ID NO: 13224 - DNA, 13 bp, Artificial Sequence
  Oligonucleotide for detection of SNP TSC0003064
ttaattttccttt

SEQ ID NO: 13225 - DNA, 13 bp, Artificial Sequence
  Oligonucleotide for detection of SNP TSC0003064
aaaggataattaa

SEQ ID NO: 13226 - DNA, 13 bp, Artificial Sequence
  Oligonucleotide for detection of SNP TSC0003064
ttaattatccttt

SEQ ID NO: 13227 - DNA, 13 bp, Artificial Sequence
  Oligonucleotide for detection of SNP TSC0003065
ttttttgattaga

SEQ ID NO: 13228 - DNA, 13 bp, Artificial Sequence
  Oligonucleotide for detection of SNP TSC0003065
tctaatcaaaaaa

SEQ ID NO: 13229 - DNA, 13 bp, Artificial Sequence
  Oligonucleotide for detection of SNP TSC0003065
ttttttaattaga

SEQ ID NO: 13230 - DNA, 13 bp, Artificial Sequence
  Oligonucleotide for detection of SNP TSC0003065
tctaattaaaaaa

SEQ ID NO: 13231 - DNA, 13 bp, Artificial Sequence
  Oligonucleotide for detection of SNP TSC0003066
ttgattaagggaa

SEQ ID NO: 13232 - DNA, 13 bp, Artificial Sequence
  Oligonucleotide for detection of SNP TSC0003066
ttcccttaatcaa

SEQ ID NO: 13233 - DNA, 13 bp, Artificial Sequence
  Oligonucleotide for detection of SNP TSC0003066
ttgattgagggaa

SEQ ID NO: 13234 - DNA, 13 bp, Artificial Sequence
  Oligonucleotide for detection of SNP TSC0003066
ttccctcaatcaa

SEQ ID NO: 13235 - DNA, 13 bp, Artificial Sequence
  Oligonucleotide for detection of SNP TSC0003066
ttgatcgagggaa

SEQ ID NO: 13236 - DNA, 13 bp, Artificial Sequence
  Oligonucleotide for detection of SNP TSC0003066
ttccctcgatcaa

SEQ ID NO: 13237 - DNA, 13 bp, Artificial Sequence
  Oligonucleotide for detection of SNP TSC0003066
tttttttgattag

SEQ ID NO: 13238 - DNA, 13 bp, Artificial Sequence
  Oligonucleotide for detection of SNP TSC0003066
ctaatcaaaaaaa

SEQ ID NO: 13239 - DNA, 13 bp, Artificial Sequence
  Oligonucleotide for detection of SNP TSC0003066
ttttttcgattag

SEQ ID NO: 13240 - DNA, 13 bp, Artificial Sequence
  Oligonucleotide for detection of SNP TSC0003066
ctaatcgaaaaaa

SEQ ID NO: 13241 - DNA, 13 bp, Artificial Sequence
  Oligonucleotide for detection of SNP TSC0003068
aaggtaaaaaaat

SEQ ID NO: 13242 - DNA, 13 bp, Artificial Sequence
  Oligonucleotide for detection of SNP TSC0003068
atttttttacctt

SEQ ID NO: 13243 - DNA, 13 bp, Artificial Sequence
  Oligonucleotide for detection of SNP TSC0003068
aaggtagaaaaat

SEQ ID NO: 13244 - DNA, 13 bp, Artificial Sequence
  Oligonucleotide for detection of SNP TSC0003068
atttttctacctt

SEQ ID NO: 13245 - DNA, 13 bp, Artificial Sequence
  Oligonucleotide for detection of SNP TSC0003069
tttttttgtggty

SEQ ID NO: 13246 - DNA, 13 bp, Artificial Sequence
  Oligonucleotide for detection of SNP TSC0003069
raccacaaaaaaa

SEQ ID NO: 13247 - DNA, 13 bp, Artificial Sequence
  Oligonucleotide for detection of SNP TSC0003069
ttttttggtggty

SEQ ID NO: 13248 - DNA, 13 bp, Artificial Sequence
  Oligonucleotide for detection of SNP TSC0003069
raccaccaaaaaa

SEQ ID NO: 13249 - DNA, 13 bp, Artificial Sequence
  Oligonucleotide for detection of SNP TSC0003069
ggttataaaaaaa

SEQ ID NO: 13250 - DNA, 13 bp, Artificial Sequence
  Oligonucleotide for detection of SNP TSC0003069
tttttttataacc

SEQ ID NO: 13251 - DNA, 13 bp, Artificial Sequence
  Oligonucleotide for detection of SNP TSC0003069
ggttattaaaaaa

SEQ ID NO: 13252 - DNA, 13 bp, Artificial Sequence
  Oligonucleotide for detection of SNP TSC0003069
ttttttaataacc

SEQ ID NO: 13253 - DNA, 13 bp, Artificial Sequence
  Oligonucleotide for detection of SNP TSC0003070
gtaaaggtatagy

SEQ ID NO: 13254 - DNA, 13 bp, Artificial Sequence
  Oligonucleotide for detection of SNP TSC0003070
rctatacctttac

SEQ ID NO: 13255 - DNA, 13 bp, Artificial Sequence
  Oligonucleotide for detection of SNP TSC0003070
gtaaagatatagy

SEQ ID NO: 13256 - DNA, 13 bp, Artificial Sequence
  Oligonucleotide for detection of SNP TSC0003070
rctatatctttac

SEQ ID NO: 13257 - DNA, 13 bp, Artificial Sequence
  Oligonucleotide for detection of SNP TSC0003072
taaattgtattty

SEQ ID NO: 13258 - DNA, 13 bp, Artificial Sequence
  Oligonucleotide for detection of SNP TSC0003072
raaatacaattta

SEQ ID NO: 13259 - DNA, 13 bp, Artificial Sequence
  Oligonucleotide for detection of SNP TSC0003072
taaattatattty

SEQ ID NO: 13260 - DNA, 13 bp, Artificial Sequence
  Oligonucleotide for detection of SNP TSC0003072
raaatataattta

SEQ ID NO: 13261 - DNA, 13 bp, Artificial Sequence
  Oligonucleotide for detection of SNP TSC0003073
tttttgatttagg

SEQ ID NO: 13262 - DNA, 13 bp, Artificial Sequence
  Oligonucleotide for detection of SNP TSC0003073
cctaaatcaaaaa

SEQ ID NO: 13263 - DNA, 13 bp, Artificial Sequence
  Oligonucleotide for detection of SNP TSC0003073
tttttggtttagg

SEQ ID NO: 13264 - DNA, 13 bp, Artificial Sequence
  Oligonucleotide for detection of SNP TSC0003073
cctaaaccaaaaa

SEQ ID NO: 13265 - DNA, 13 bp, Artificial Sequence
  Oligonucleotide for detection of SNP TSC0003074
agataagtaatta

SEQ ID NO: 13266 - DNA, 13 bp, Artificial Sequence
  Oligonucleotide for detection of SNP TSC0003074
taattacttatct

SEQ ID NO: 13267 - DNA, 13 bp, Artificial Sequence
  Oligonucleotide for detection of SNP TSC0003074
agataaataatta

SEQ ID NO: 13268 - DNA, 13 bp, Artificial Sequence
  Oligonucleotide for detection of SNP TSC0003074
taattatttatct

SEQ ID NO: 13269 - DNA, 13 bp, Artificial Sequence
  Oligonucleotide for detection of SNP TSC0003075
tagaaaatattay

SEQ ID NO: 13270 - DNA, 13 bp, Artificial Sequence
  Oligonucleotide for detection of SNP TSC0003075
rtaatattttcta

SEQ ID NO: 13271 - DNA, 13 bp, Artificial Sequence
  Oligonucleotide for detection of SNP TSC0003075
tagaaagtattay

SEQ ID NO: 13272 - DNA, 13 bp, Artificial Sequence
  Oligonucleotide for detection of SNP TSC0003075
rtaatactttcta

SEQ ID NO: 13273 - DNA, 13 bp, Artificial Sequence
  Oligonucleotide for detection of SNP TSC0003076
aatattgtttatt

SEQ ID NO: 13274 - DNA, 13 bp, Artificial Sequence
  Oligonucleotide for detection of SNP TSC0003076
aataaacaatatt

SEQ ID NO: 13275 - DNA, 13 bp, Artificial Sequence
  Oligonucleotide for detection of SNP TSC0003076
aatattatttatt

SEQ ID NO: 13276 - DNA, 13 bp, Artificial Sequence
  Oligonucleotide for detection of SNP TSC0003076
aataaataatatt

SEQ ID NO: 13277 - DNA, 13 bp, Artificial Sequence
  Oligonucleotide for detection of SNP TSC0003078
agttagttggggg

SEQ ID NO: 13278 - DNA, 13 bp, Artificial Sequence
  Oligonucleotide for detection of SNP TSC0003078
cccccaactaact

SEQ ID NO: 13279 - DNA, 13 bp, Artificial Sequence
  Oligonucleotide for detection of SNP TSC0003078
agttaggtggggg

SEQ ID NO: 13280 - DNA, 13 bp, Artificial Sequence
  Oligonucleotide for detection of SNP TSC0003078
cccccacctaact

SEQ ID NO: 13281 - DNA, 13 bp, Artificial Sequence
  Oligonucleotide for detection of SNP TSC0003078
tttttagttagtt

SEQ ID NO: 13282 - DNA, 13 bp, Artificial Sequence
  Oligonucleotide for detection of SNP TSC0003078
aactaactaaaaa

SEQ ID NO: 13283 - DNA, 13 bp, Artificial Sequence
  Oligonucleotide for detection of SNP TSC0003078
tttttatttagtt

SEQ ID NO: 13284 - DNA, 13 bp, Artificial Sequence
  Oligonucleotide for detection of SNP TSC0003078
aactaaataaaaa

SEQ ID NO: 13285 - DNA, 13 bp, Artificial Sequence
  Oligonucleotide for detection of SNP TSC0003079
tttgatagttggt

SEQ ID NO: 13286 - DNA, 13 bp, Artificial Sequence
  Oligonucleotide for detection of SNP TSC0003079
accaactatcaaa

SEQ ID NO: 13287 - DNA, 13 bp, Artificial Sequence
  Oligonucleotide for detection of SNP TSC0003079
tttgatggttggt

SEQ ID NO: 13288 - DNA, 13 bp, Artificial Sequence
  Oligonucleotide for detection of SNP TSC0003079
accaaccatcaaa

SEQ ID NO: 13289 - DNA, 13 bp, Artificial Sequence
  Oligonucleotide for detection of SNP TSC0003079
tttgacggttggt

SEQ ID NO: 13290 - DNA, 13 bp, Artificial Sequence
  Oligonucleotide for detection of SNP TSC0003079
accaaccgtcaaa

SEQ ID NO: 13291 - DNA, 13 bp, Artificial Sequence
  Oligonucleotide for detection of SNP TSC0003079
attaattgttaag

SEQ ID NO: 13292 - DNA, 13 bp, Artificial Sequence
  Oligonucleotide for detection of SNP TSC0003079
cttaacaattaat

SEQ ID NO: 13293 - DNA, 13 bp, Artificial Sequence
  Oligonucleotide for detection of SNP TSC0003079
attaatcgttaag

SEQ ID NO: 13294 - DNA, 13 bp, Artificial Sequence
  Oligonucleotide for detection of SNP TSC0003079
cttaacgattaat

SEQ ID NO: 13295 - DNA, 13 bp, Artificial Sequence
  Oligonucleotide for detection of SNP TSC0003080
attgatataaatt

SEQ ID NO: 13296 - DNA, 13 bp, Artificial Sequence
  Oligonucleotide for detection of SNP TSC0003080
aatttatatcaat

SEQ ID NO: 13297 - DNA, 13 bp, Artificial Sequence
  Oligonucleotide for detection of SNP TSC0003080
attgatgtaaatt

SEQ ID NO: 13298 - DNA, 13 bp, Artificial Sequence
  Oligonucleotide for detection of SNP TSC0003080
aatttacatcaat

SEQ ID NO: 13299 - DNA, 13 bp, Artificial Sequence
  Oligonucleotide for detection of SNP TSC0003080
attgacgtaaatt

SEQ ID NO: 13300 - DNA, 13 bp, Artificial Sequence
  Oligonucleotide for detection of SNP TSC0003080
aatttacgtcaat

SEQ ID NO: 13301 - DNA, 13 bp, Artificial Sequence
  Oligonucleotide for detection of SNP TSC0003080
aatttatgttaat

SEQ ID NO: 13302 - DNA, 13 bp, Artificial Sequence
  Oligonucleotide for detection of SNP TSC0003080
attaacataaatt

SEQ ID NO: 13303 - DNA, 13 bp, Artificial Sequence
  Oligonucleotide for detection of SNP TSC0003080
aatttacgttaat

SEQ ID NO: 13304 - DNA, 13 bp, Artificial Sequence
  Oligonucleotide for detection of SNP TSC0003080
attaacgtaaatt

SEQ ID NO: 13305 - DNA, 13 bp, Artificial Sequence
  Oligonucleotide for detection of SNP TSC0003081
tttaagtgattta

SEQ ID NO: 13306 - DNA, 13 bp, Artificial Sequence
  Oligonucleotide for detection of SNP TSC0003081
taaatcacttaaa

SEQ ID NO: 13307 - DNA, 13 bp, Artificial Sequence
  Oligonucleotide for detection of SNP TSC0003081
tttaagcgattta

SEQ ID NO: 13308 - DNA, 13 bp, Artificial Sequence
  Oligonucleotide for detection of SNP TSC0003081
taaatcgcttaaa

SEQ ID NO: 13309 - DNA, 13 bp, Artificial Sequence
  Oligonucleotide for detection of SNP TSC0003081
tgaattgtttgag

SEQ ID NO: 13310 - DNA, 13 bp, Artificial Sequence
  Oligonucleotide for detection of SNP TSC0003081
ctcaaacaattca

SEQ ID NO: 13311 - DNA, 13 bp, Artificial Sequence
  Oligonucleotide for detection of SNP TSC0003081
tgaattatttgag

SEQ ID NO: 13312 - DNA, 13 bp, Artificial Sequence
  Oligonucleotide for detection of SNP TSC0003081
ctcaaataattca

SEQ ID NO: 13313 - DNA, 13 bp, Artificial Sequence
  Oligonucleotide for detection of SNP TSC0003081
tgaatcgtttgag

SEQ ID NO: 13314 - DNA, 13 bp, Artificial Sequence
  Oligonucleotide for detection of SNP TSC0003081
ctcaaacgattca

SEQ ID NO: 13315 - DNA, 13 bp, Artificial Sequence
  Oligonucleotide for detection of SNP TSC0003082
aggttagtattgy

SEQ ID NO: 13316 - DNA, 13 bp, Artificial Sequence
  Oligonucleotide for detection of SNP TSC0003082
rcaatactaacct

SEQ ID NO: 13317 - DNA, 13 bp, Artificial Sequence
  Oligonucleotide for detection of SNP TSC0003082
aggttaatattgy

SEQ ID NO: 13318 - DNA, 13 bp, Artificial Sequence
  Oligonucleotide for detection of SNP TSC0003082
rcaatattaacct

SEQ ID NO: 13319 - DNA, 13 bp, Artificial Sequence
  Oligonucleotide for detection of SNP TSC0003083
ttgaatatgagaa

SEQ ID NO: 13320 - DNA, 13 bp, Artificial Sequence
  Oligonucleotide for detection of SNP TSC0003083
ttctcatattcaa

SEQ ID NO: 13321 - DNA, 13 bp, Artificial Sequence
  Oligonucleotide for detection of SNP TSC0003083
ttgaatgtgagaa

SEQ ID NO: 13322 - DNA, 13 bp, Artificial Sequence
  Oligonucleotide for detection of SNP TSC0003083
ttctcacattcaa

SEQ ID NO: 13323 - DNA, 13 bp, Artificial Sequence
  Oligonucleotide for detection of SNP TSC0003083
ttgaacgtgagaa

SEQ ID NO: 13324 - DNA, 13 bp, Artificial Sequence
  Oligonucleotide for detection of SNP TSC0003083
ttctcacgttcaa

SEQ ID NO: 13325 - DNA, 13 bp, Artificial Sequence
  Oligonucleotide for detection of SNP TSC0003083
tttttatgtttag

SEQ ID NO: 13326 - DNA, 13 bp, Artificial Sequence
  Oligonucleotide for detection of SNP TSC0003083
ctaaacataaaaa

SEQ ID NO: 13327 - DNA, 13 bp, Artificial Sequence
  Oligonucleotide for detection of SNP TSC0003083
tttttacgtttag

SEQ ID NO: 13328 - DNA, 13 bp, Artificial Sequence
  Oligonucleotide for detection of SNP TSC0003083
ctaaacgtaaaaa

SEQ ID NO: 13329 - DNA, 13 bp, Artificial Sequence
  Oligonucleotide for detection of SNP TSC0003084
tagaggatttggg

SEQ ID NO: 13330 - DNA, 13 bp, Artificial Sequence
  Oligonucleotide for detection of SNP TSC0003084
cccaaatcctcta

SEQ ID NO: 13331 - DNA, 13 bp, Artificial Sequence
  Oligonucleotide for detection of SNP TSC0003084
tagagggtttggg

SEQ ID NO: 13332 - DNA, 13 bp, Artificial Sequence
  Oligonucleotide for detection of SNP TSC0003084
cccaaaccctcta

SEQ ID NO: 13333 - DNA, 13 bp, Artificial Sequence
  Oligonucleotide for detection of SNP TSC0003085
gtgaaaattttaa

SEQ ID NO: 13334 - DNA, 13 bp, Artificial Sequence
  Oligonucleotide for detection of SNP TSC0003085
ttaaaattttcac

SEQ ID NO: 13335 - DNA, 13 bp, Artificial Sequence
  Oligonucleotide for detection of SNP TSC0003085
gtgaaatttttaa

SEQ ID NO: 13336 - DNA, 13 bp, Artificial Sequence
  Oligonucleotide for detection of SNP TSC0003085
ttaaaaatttcac

SEQ ID NO: 13337 - DNA, 13 bp, Artificial Sequence
  Oligonucleotide for detection of SNP TSC0003085
ttaaaatttttay

SEQ ID NO: 13338 - DNA, 13 bp, Artificial Sequence
  Oligonucleotide for detection of SNP TSC0003085
rtaaaaattttaa

SEQ ID NO: 13339 - DNA, 13 bp, Artificial Sequence
  Oligonucleotide for detection of SNP TSC0003085
ttaaaaattttay

SEQ ID NO: 13340 - DNA, 13 bp, Artificial Sequence
  Oligonucleotide for detection of SNP TSC0003085
rtaaaatttttaa

SEQ ID NO: 13341 - DNA, 13 bp, Artificial Sequence
  Oligonucleotide for detection of SNP TSC0003086
tattatattttty

SEQ ID NO: 13342 - DNA, 13 bp, Artificial Sequence
  Oligonucleotide for detection of SNP TSC0003086
raaaaatataata

SEQ ID NO: 13343 - DNA, 13 bp, Artificial Sequence
  Oligonucleotide for detection of SNP TSC0003086
tattattttttty

SEQ ID NO: 13344 - DNA, 13 bp, Artificial Sequence
  Oligonucleotide for detection of SNP TSC0003086
raaaaaaataata

SEQ ID NO: 13345 - DNA, 13 bp, Artificial Sequence
  Oligonucleotide for detection of SNP TSC0003086
ggaaaatataatg

SEQ ID NO: 13346 - DNA, 13 bp, Artificial Sequence
  Oligonucleotide for detection of SNP TSC0003086
cattatattttcc

SEQ ID NO: 13347 - DNA, 13 bp, Artificial Sequence
  Oligonucleotide for detection of SNP TSC0003086
ggaaaagataatg

SEQ ID NO: 13348 - DNA, 13 bp, Artificial Sequence
  Oligonucleotide for detection of SNP TSC0003086
cattatcttttcc

SEQ ID NO: 13349 - DNA, 13 bp, Artificial Sequence
  Oligonucleotide for detection of SNP TSC0003087
tattttataaaaa

SEQ ID NO: 13350 - DNA, 13 bp, Artificial Sequence
  Oligonucleotide for detection of SNP TSC0003087
tttttataaaata

SEQ ID NO: 13351 - DNA, 13 bp, Artificial Sequence
  Oligonucleotide for detection of SNP TSC0003087
tattttgtaaaaa

SEQ ID NO: 13352 - DNA, 13 bp, Artificial Sequence
  Oligonucleotide for detection of SNP TSC0003087
tttttacaaaata

SEQ ID NO: 13353 - DNA, 13 bp, Artificial Sequence
  Oligonucleotide for detection of SNP TSC0003088
ttgttagaatgga

SEQ ID NO: 13354 - DNA, 13 bp, Artificial Sequence
  Oligonucleotide for detection of SNP TSC0003088
tccattctaacaa

SEQ ID NO: 13355 - DNA, 13 bp, Artificial Sequence
  Oligonucleotide for detection of SNP TSC0003088
ttgttaaaatgga

SEQ ID NO: 13356 - DNA, 13 bp, Artificial Sequence
  Oligonucleotide for detection of SNP TSC0003088
tccattttaacaa

SEQ ID NO: 13357 - DNA, 13 bp, Artificial Sequence
  Oligonucleotide for detection of SNP TSC0003088
ttgttagaacgga

SEQ ID NO: 13358 - DNA, 13 bp, Artificial Sequence
  Oligonucleotide for detection of SNP TSC0003088
tccgttctaacaa

SEQ ID NO: 13359 - DNA, 13 bp, Artificial Sequence
  Oligonucleotide for detection of SNP TSC0003088
ttgttaaaacgga

SEQ ID NO: 13360 - DNA, 13 bp, Artificial Sequence
  Oligonucleotide for detection of SNP TSC0003088
tccgttttaacaa

SEQ ID NO: 13361 - DNA, 13 bp, Artificial Sequence
  Oligonucleotide for detection of SNP TSC0003090
ttataatttttgt

SEQ ID NO: 13362 - DNA, 13 bp, Artificial Sequence
  Oligonucleotide for detection of SNP TSC0003090
acaaaaattataa

SEQ ID NO: 13363 - DNA, 13 bp, Artificial Sequence
  Oligonucleotide for detection of SNP TSC0003090
ttataagttttgt

SEQ ID NO: 13364 - DNA, 13 bp, Artificial Sequence
  Oligonucleotide for detection of SNP TSC0003090
acaaaacttataa

SEQ ID NO: 13365 - DNA, 13 bp, Artificial Sequence
  Oligonucleotide for detection of SNP TSC0003090
ataaaaattataa

SEQ ID NO: 13366 - DNA, 13 bp, Artificial Sequence
  Oligonucleotide for detection of SNP TSC0003090
ttataatttttat

SEQ ID NO: 13367 - DNA, 13 bp, Artificial Sequence
  Oligonucleotide for detection of SNP TSC0003090
ataaaatttataa

SEQ ID NO: 13368 - DNA, 13 bp, Artificial Sequence
  Oligonucleotide for detection of SNP TSC0003090
ttataaattttat

SEQ ID NO: 13369 - DNA, 13 bp, Artificial Sequence
  Oligonucleotide for detection of SNP TSC0003092
ttataattttgat

SEQ ID NO: 13370 - DNA, 13 bp, Artificial Sequence
  Oligonucleotide for detection of SNP TSC0003092
atcaaaattataa

SEQ ID NO: 13371 - DNA, 13 bp, Artificial Sequence
  Oligonucleotide for detection of SNP TSC0003092
ttataagtttgat

SEQ ID NO: 13372 - DNA, 13 bp, Artificial Sequence
  Oligonucleotide for detection of SNP TSC0003092
atcaaacttataa

SEQ ID NO: 13373 - DNA, 13 bp, Artificial Sequence
  Oligonucleotide for detection of SNP TSC0003092
attaaagttgtgg

SEQ ID NO: 13374 - DNA, 13 bp, Artificial Sequence
  Oligonucleotide for detection of SNP TSC0003092
ccacaactttaat

SEQ ID NO: 13375 - DNA, 13 bp, Artificial Sequence
  Oligonucleotide for detection of SNP TSC0003092
attaaatttgtgg

SEQ ID NO: 13376 - DNA, 13 bp, Artificial Sequence
  Oligonucleotide for detection of SNP TSC0003092
ccacaaatttaat

SEQ ID NO: 13377 - DNA, 13 bp, Artificial Sequence
  Oligonucleotide for detection of SNP TSC0003093
aaggttatgttgy

SEQ ID NO: 13378 - DNA, 13 bp, Artificial Sequence
  Oligonucleotide for detection of SNP TSC0003093
rcaacataacctt

SEQ ID NO: 13379 - DNA, 13 bp, Artificial Sequence
  Oligonucleotide for detection of SNP TSC0003093
aaggttgtgttgy

SEQ ID NO: 13380 - DNA, 13 bp, Artificial Sequence
  Oligonucleotide for detection of SNP TSC0003093
rcaacacaacctt

SEQ ID NO: 13381 - DNA, 13 bp, Artificial Sequence
  Oligonucleotide for detection of SNP TSC0003093
aaggtcgtgttgy

SEQ ID NO: 13382 - DNA, 13 bp, Artificial Sequence
  Oligonucleotide for detection of SNP TSC0003093
rcaacacgacctt

SEQ ID NO: 13383 - DNA, 13 bp, Artificial Sequence
  Oligonucleotide for detection of SNP TSC0003093
gtagtatgatttt

SEQ ID NO: 13384 - DNA, 13 bp, Artificial Sequence
  Oligonucleotide for detection of SNP TSC0003093
aaaatcatactac

SEQ ID NO: 13385 - DNA, 13 bp, Artificial Sequence
  Oligonucleotide for detection of SNP TSC0003093
gtagtacgatttt

SEQ ID NO: 13386 - DNA, 13 bp, Artificial Sequence
  Oligonucleotide for detection of SNP TSC0003093
aaaatcgtactac

SEQ ID NO: 13387 - DNA, 13 bp, Artificial Sequence
  Oligonucleotide for detection of SNP TSC0003095
aatatgaagaata

SEQ ID NO: 13388 - DNA, 13 bp, Artificial Sequence
  Oligonucleotide for detection of SNP TSC0003095
tattcttcatatt

SEQ ID NO: 13389 - DNA, 13 bp, Artificial Sequence
  Oligonucleotide for detection of SNP TSC0003095
aatatggagaata

SEQ ID NO: 13390 - DNA, 13 bp, Artificial Sequence
  Oligonucleotide for detection of SNP TSC0003095
tattctccatatt

SEQ ID NO: 13391 - DNA, 13 bp, Artificial Sequence
  Oligonucleotide for detection of SNP TSC0003096
ttttttagatttt

SEQ ID NO: 13392 - DNA, 13 bp, Artificial Sequence
  Oligonucleotide for detection of SNP TSC0003096
aaaatctaaaaaa

SEQ ID NO: 13393 - DNA, 13 bp, Artificial Sequence
  Oligonucleotide for detection of SNP TSC0003096
ttttttggatttt

SEQ ID NO: 13394 - DNA, 13 bp, Artificial Sequence
  Oligonucleotide for detection of SNP TSC0003096
aaaatccaaaaaa

SEQ ID NO: 13395 - DNA, 13 bp, Artificial Sequence
  Oligonucleotide for detection of SNP TSC0003096
tttttcggatttt

SEQ ID NO: 13396 - DNA, 13 bp, Artificial Sequence
  Oligonucleotide for detection of SNP TSC0003096
aaaatccgaaaaa

SEQ ID NO: 13397 - DNA, 13 bp, Artificial Sequence
  Oligonucleotide for detection of SNP TSC0003096
aaaatttgaagga

SEQ ID NO: 13398 - DNA, 13 bp, Artificial Sequence
  Oligonucleotide for detection of SNP TSC0003096
tccttcaaatttt

SEQ ID NO: 13399 - DNA, 13 bp, Artificial Sequence
  Oligonucleotide for detection of SNP TSC0003096
aaaattcgaagga

SEQ ID NO: 13400 - DNA, 13 bp, Artificial Sequence
  Oligonucleotide for detection of SNP TSC0003096
tccttcgaatttt

SEQ ID NO: 13401 - DNA, 13 bp, Artificial Sequence
  Oligonucleotide for detection of SNP TSC0003097
atatttttaatgt

SEQ ID NO: 13402 - DNA, 13 bp, Artificial Sequence
  Oligonucleotide for detection of SNP TSC0003097
acattaaaaatat

SEQ ID NO: 13403 - DNA, 13 bp, Artificial Sequence
  Oligonucleotide for detection of SNP TSC0003097
atatttgtaatgt

SEQ ID NO: 13404 - DNA, 13 bp, Artificial Sequence
  Oligonucleotide for detection of SNP TSC0003097
acattacaaatat

SEQ ID NO: 13405 - DNA, 13 bp, Artificial Sequence
  Oligonucleotide for detection of SNP TSC0003097
atattaaagatat

SEQ ID NO: 13406 - DNA, 13 bp, Artificial Sequence
  Oligonucleotide for detection of SNP TSC0003097
atatctttaatat

SEQ ID NO: 13407 - DNA, 13 bp, Artificial Sequence
  Oligonucleotide for detection of SNP TSC0003097
atattatagatat

SEQ ID NO: 13408 - DNA, 13 bp, Artificial Sequence
  Oligonucleotide for detection of SNP TSC0003097
atatctataatat

SEQ ID NO: 13409 - DNA, 13 bp, Artificial Sequence
  Oligonucleotide for detection of SNP TSC0003098
ggatgttttgaga

SEQ ID NO: 13410 - DNA, 13 bp, Artificial Sequence
  Oligonucleotide for detection of SNP TSC0003098
tctcaaaacatcc

SEQ ID NO: 13411 - DNA, 13 bp, Artificial Sequence
  Oligonucleotide for detection of SNP TSC0003098
ggatgtgttgaga

SEQ ID NO: 13412 - DNA, 13 bp, Artificial Sequence
  Oligonucleotide for detection of SNP TSC0003098
tctcaacacatcc

SEQ ID NO: 13413 - DNA, 13 bp, Artificial Sequence
  Oligonucleotide for detection of SNP TSC0003098
ttttagaatatty

SEQ ID NO: 13414 - DNA, 13 bp, Artificial Sequence
  Oligonucleotide for detection of SNP TSC0003098
raatattctaaaa

SEQ ID NO: 13415 - DNA, 13 bp, Artificial Sequence
  Oligonucleotide for detection of SNP TSC0003098
ttttagtatatty

SEQ ID NO: 13416 - DNA, 13 bp, Artificial Sequence
  Oligonucleotide for detection of SNP TSC0003098
raatatactaaaa

SEQ ID NO: 13417 - DNA, 13 bp, Artificial Sequence
  Oligonucleotide for detection of SNP TSC0003099
attataaaattaa

SEQ ID NO: 13418 - DNA, 13 bp, Artificial Sequence
  Oligonucleotide for detection of SNP TSC0003099
ttaattttataat

SEQ ID NO: 13419 - DNA, 13 bp, Artificial Sequence
  Oligonucleotide for detection of SNP TSC0003099
attatataattaa

SEQ ID NO: 13420 - DNA, 13 bp, Artificial Sequence
  Oligonucleotide for detection of SNP TSC0003099
ttaattatataat

SEQ ID NO: 13421 - DNA, 13 bp, Artificial Sequence
  Oligonucleotide for detection of SNP TSC0003099
ttgattttataat

SEQ ID NO: 13422 - DNA, 13 bp, Artificial Sequence
  Oligonucleotide for detection of SNP TSC0003099
attataaaatcaa

SEQ ID NO: 13423 - DNA, 13 bp, Artificial Sequence
  Oligonucleotide for detection of SNP TSC0003099
ttgattatataat

SEQ ID NO: 13424 - DNA, 13 bp, Artificial Sequence
  Oligonucleotide for detection of SNP TSC0003099
attatataatcaa

SEQ ID NO: 13425 - DNA, 13 bp, Artificial Sequence
  Oligonucleotide for detection of SNP TSC0003100
ttttttatatata

SEQ ID NO: 13426 - DNA, 13 bp, Artificial Sequence
  Oligonucleotide for detection of SNP TSC0003100
tatatataaaaaa

SEQ ID NO: 13427 - DNA, 13 bp, Artificial Sequence
  Oligonucleotide for detection of SNP TSC0003100
ttttttttatata

SEQ ID NO: 13428 - DNA, 13 bp, Artificial Sequence
  Oligonucleotide for detection of SNP TSC0003100
tatataaaaaaaa

SEQ ID NO: 13429 - DNA, 13 bp, Artificial Sequence
  Oligonucleotide for detection of SNP TSC0003100
tgtgtgtgagaga

SEQ ID NO: 13430 - DNA, 13 bp, Artificial Sequence
  Oligonucleotide for detection of SNP TSC0003100
tctctcacacaca

SEQ ID NO: 13431 - DNA, 13 bp, Artificial Sequence
  Oligonucleotide for detection of SNP TSC0003100
tgtgtgagagaga

SEQ ID NO: 13432 - DNA, 13 bp, Artificial Sequence
  Oligonucleotide for detection of SNP TSC0003100
tctctctcacaca

SEQ ID NO: 13433 - DNA, 13 bp, Artificial Sequence
  Oligonucleotide for detection of SNP TSC0003101
ttttatatatata

SEQ ID NO: 13434 - DNA, 13 bp, Artificial Sequence
  Oligonucleotide for detection of SNP TSC0003101
tatatatataaaa

SEQ ID NO: 13435 - DNA, 13 bp, Artificial Sequence
  Oligonucleotide for detection of SNP TSC0003101
ttttatttatata

SEQ ID NO: 13436 - DNA, 13 bp, Artificial Sequence
  Oligonucleotide for detection of SNP TSC0003101
tatataaataaaa

SEQ ID NO: 13437 - DNA, 13 bp, Artificial Sequence
  Oligonucleotide for detection of SNP TSC0003101
tgtgtgtgtgaga

SEQ ID NO: 13438 - DNA, 13 bp, Artificial Sequence
  Oligonucleotide for detection of SNP TSC0003101
tctcacacacaca

SEQ ID NO: 13439 - DNA, 13 bp, Artificial Sequence
  Oligonucleotide for detection of SNP TSC0003101
tgtgtgagtgaga

SEQ ID NO: 13440 - DNA, 13 bp, Artificial Sequence
  Oligonucleotide for detection of SNP TSC0003101
tctcactcacaca

SEQ ID NO: 13441 - DNA, 13 bp, Artificial Sequence
  Oligonucleotide for detection of SNP TSC0003102
atttgatagtagg

SEQ ID NO: 13442 - DNA, 13 bp, Artificial Sequence
  Oligonucleotide for detection of SNP TSC0003102
cctactatcaaat

SEQ ID NO: 13443 - DNA, 13 bp, Artificial Sequence
  Oligonucleotide for detection of SNP TSC0003102
atttgagagtagg

SEQ ID NO: 13444 - DNA, 13 bp, Artificial Sequence
  Oligonucleotide for detection of SNP TSC0003102
cctactctcaaat

SEQ ID NO: 13445 - DNA, 13 bp, Artificial Sequence
  Oligonucleotide for detection of SNP TSC0003102
tttgttattaaat

SEQ ID NO: 13446 - DNA, 13 bp, Artificial Sequence
  Oligonucleotide for detection of SNP TSC0003102
atttaataacaaa

SEQ ID NO: 13447 - DNA, 13 bp, Artificial Sequence
  Oligonucleotide for detection of SNP TSC0003102
tttgtttttaaat

SEQ ID NO: 13448 - DNA, 13 bp, Artificial Sequence
  Oligonucleotide for detection of SNP TSC0003102
atttaaaaacaaa

SEQ ID NO: 13449 - DNA, 13 bp, Artificial Sequence
  Oligonucleotide for detection of SNP TSC0003107
ggttatatgaagt

SEQ ID NO: 13450 - DNA, 13 bp, Artificial Sequence
  Oligonucleotide for detection of SNP TSC0003107
acttcatataacc

SEQ ID NO: 13451 - DNA, 13 bp, Artificial Sequence
  Oligonucleotide for detection of SNP TSC0003107
ggttatgtgaagt

SEQ ID NO: 13452 - DNA, 13 bp, Artificial Sequence
  Oligonucleotide for detection of SNP TSC0003107
acttcacataacc

SEQ ID NO: 13453 - DNA, 13 bp, Artificial Sequence
  Oligonucleotide for detection of SNP TSC0003107
ggttacgtgaagt

SEQ ID NO: 13454 - DNA, 13 bp, Artificial Sequence
  Oligonucleotide for detection of SNP TSC0003107
acttcacgtaacc

SEQ ID NO: 13455 - DNA, 13 bp, Artificial Sequence
  Oligonucleotide for detection of SNP TSC0003107
attttatgtagty

SEQ ID NO: 13456 - DNA, 13 bp, Artificial Sequence
  Oligonucleotide for detection of SNP TSC0003107
ractacataaaat

SEQ ID NO: 13457 - DNA, 13 bp, Artificial Sequence
  Oligonucleotide for detection of SNP TSC0003107
attttacgtagty

SEQ ID NO: 13458 - DNA, 13 bp, Artificial Sequence
  Oligonucleotide for detection of SNP TSC0003107
ractacgtaaaat

SEQ ID NO: 13459 - DNA, 13 bp, Artificial Sequence
  Oligonucleotide for detection of SNP TSC0003108
gataatgaggtag

SEQ ID NO: 13460 - DNA, 13 bp, Artificial Sequence
  Oligonucleotide for detection of SNP TSC0003108
ctacctcattatc

SEQ ID NO: 13461 - DNA, 13 bp, Artificial Sequence
  Oligonucleotide for detection of SNP TSC0003108
gataataaggtag

SEQ ID NO: 13462 - DNA, 13 bp, Artificial Sequence
  Oligonucleotide for detection of SNP TSC0003108
ctaccttattatc

SEQ ID NO: 13463 - DNA, 13 bp, Artificial Sequence
  Oligonucleotide for detection of SNP TSC0003109
gatggggttttay

SEQ ID NO: 13464 - DNA, 13 bp, Artificial Sequence
  Oligonucleotide for detection of SNP TSC0003109
rtaaaaccccatc

SEQ ID NO: 13465 - DNA, 13 bp, Artificial Sequence
  Oligonucleotide for detection of SNP TSC0003109
gatgggattttay

SEQ ID NO: 13466 - DNA, 13 bp, Artificial Sequence
  Oligonucleotide for detection of SNP TSC0003109
rtaaaatcccatc

SEQ ID NO: 13467 - DNA, 13 bp, Artificial Sequence
  Oligonucleotide for detection of SNP TSC0003113
aagtaagattggg

SEQ ID NO: 13468 - DNA, 13 bp, Artificial Sequence
  Oligonucleotide for detection of SNP TSC0003113
cccaatcttactt

SEQ ID NO: 13469 - DNA, 13 bp, Artificial Sequence
  Oligonucleotide for detection of SNP TSC0003113
aagtaaaattggg

SEQ ID NO: 13470 - DNA, 13 bp, Artificial Sequence
  Oligonucleotide for detection of SNP TSC0003113
cccaattttactt

SEQ ID NO: 13471 - DNA, 13 bp, Artificial Sequence
  Oligonucleotide for detection of SNP TSC0003114
ttgattaagttag

SEQ ID NO: 13472 - DNA, 13 bp, Artificial Sequence
  Oligonucleotide for detection of SNP TSC0003114
ctaacttaatcaa

SEQ ID NO: 13473 - DNA, 13 bp, Artificial Sequence
  Oligonucleotide for detection of SNP TSC0003114
ttgatttagttag

SEQ ID NO: 13474 - DNA, 13 bp, Artificial Sequence
  Oligonucleotide for detection of SNP TSC0003114
ctaactaaatcaa

SEQ ID NO: 13475 - DNA, 13 bp, Artificial Sequence
  Oligonucleotide for detection of SNP TSC0003114
ttgatttaattag

SEQ ID NO: 13476 - DNA, 13 bp, Artificial Sequence
  Oligonucleotide for detection of SNP TSC0003114
ctaattaaatcaa

SEQ ID NO: 13477 - DNA, 13 bp, Artificial Sequence
  Oligonucleotide for detection of SNP TSC0003114
ttgattaaattag

SEQ ID NO: 13478 - DNA, 13 bp, Artificial Sequence
  Oligonucleotide for detection of SNP TSC0003114
ctaatttaatcaa

SEQ ID NO: 13479 - DNA, 13 bp, Artificial Sequence
  Oligonucleotide for detection of SNP TSC0003115
aaaaaaatttaaa

SEQ ID NO: 13480 - DNA, 13 bp, Artificial Sequence
  Oligonucleotide for detection of SNP TSC0003115
tttaaattttttt

SEQ ID NO: 13481 - DNA, 13 bp, Artificial Sequence
  Oligonucleotide for detection of SNP TSC0003115
aaaaaattttaaa

SEQ ID NO: 13482 - DNA, 13 bp, Artificial Sequence
  Oligonucleotide for detection of SNP TSC0003115
tttaaaatttttt

SEQ ID NO: 13483 - DNA, 13 bp, Artificial Sequence
  Oligonucleotide for detection of SNP TSC0003115
tttgggttttttt

SEQ ID NO: 13484 - DNA, 13 bp, Artificial Sequence
  Oligonucleotide for detection of SNP TSC0003115
aaaaaaacccaaa

SEQ ID NO: 13485 - DNA, 13 bp, Artificial Sequence
  Oligonucleotide for detection of SNP TSC0003115
tttggggtttttt

SEQ ID NO: 13486 - DNA, 13 bp, Artificial Sequence
  Oligonucleotide for detection of SNP TSC0003115
aaaaaaccccaaa

SEQ ID NO: 13487 - DNA, 13 bp, Artificial Sequence
  Oligonucleotide for detection of SNP TSC0003116
aaattttaaaaaa

SEQ ID NO: 13488 - DNA, 13 bp, Artificial Sequence
  Oligonucleotide for detection of SNP TSC0003116
ttttttaaaattt

SEQ ID NO: 13489 - DNA, 13 bp, Artificial Sequence
  Oligonucleotide for detection of SNP TSC0003116
tttttttgggttt

SEQ ID NO: 13490 - DNA, 13 bp, Artificial Sequence
  Oligonucleotide for detection of SNP TSC0003116
aaacccaaaaaaa

SEQ ID NO: 13491 - DNA, 13 bp, Artificial Sequence
  Oligonucleotide for detection of SNP TSC0003116
ttttttggggttt

SEQ ID NO: 13492 - DNA, 13 bp, Artificial Sequence
  Oligonucleotide for detection of SNP TSC0003116
aaaccccaaaaaa

SEQ ID NO: 13493 - DNA, 13 bp, Artificial Sequence
  Oligonucleotide for detection of SNP TSC0003118
tgttttagtttty

SEQ ID NO: 13494 - DNA, 13 bp, Artificial Sequence
  Oligonucleotide for detection of SNP TSC0003118
raaaactaaaaca

SEQ ID NO: 13495 - DNA, 13 bp, Artificial Sequence
  Oligonucleotide for detection of SNP TSC0003118
tgttttggtttty

SEQ ID NO: 13496 - DNA, 13 bp, Artificial Sequence
  Oligonucleotide for detection of SNP TSC0003118
raaaaccaaaaca

SEQ ID NO: 13497 - DNA, 13 bp, Artificial Sequence
  Oligonucleotide for detection of SNP TSC0003118
tgtttcggtttty

SEQ ID NO: 13498 - DNA, 13 bp, Artificial Sequence
  Oligonucleotide for detection of SNP TSC0003118
raaaaccgaaaca

SEQ ID NO: 13499 - DNA, 13 bp, Artificial Sequence
  Oligonucleotide for detection of SNP TSC0003118
ggaggttgaggta

SEQ ID NO: 13500 - DNA, 13 bp, Artificial Sequence
  Oligonucleotide for detection of SNP TSC0003118
tacctcaacctcc

SEQ ID NO: 13501 - DNA, 13 bp, Artificial Sequence
  Oligonucleotide for detection of SNP TSC0003118
ggaggtcgaggta

SEQ ID NO: 13502 - DNA, 13 bp, Artificial Sequence
  Oligonucleotide for detection of SNP TSC0003118
tacctcgacctcc

SEQ ID NO: 13503 - DNA, 13 bp, Artificial Sequence
  Oligonucleotide for detection of SNP TSC0003119
ttttgaggtaagg

SEQ ID NO: 13504 - DNA, 13 bp, Artificial Sequence
  Oligonucleotide for detection of SNP TSC0003119
ccttacctcaaaa

SEQ ID NO: 13505 - DNA, 13 bp, Artificial Sequence
  Oligonucleotide for detection of SNP TSC0003119
ttttgaagtaagg

SEQ ID NO: 13506 - DNA, 13 bp, Artificial Sequence
  Oligonucleotide for detection of SNP TSC0003119
ccttacttcaaaa

SEQ ID NO: 13507 - DNA, 13 bp, Artificial Sequence
  Oligonucleotide for detection of SNP TSC0003120
tttttagttttgg

SEQ ID NO: 13508 - DNA, 13 bp, Artificial Sequence
  Oligonucleotide for detection of SNP TSC0003120
ccaaaactaaaaa

SEQ ID NO: 13509 - DNA, 13 bp, Artificial Sequence
  Oligonucleotide for detection of SNP TSC0003120
tttttaattttgg

SEQ ID NO: 13510 - DNA, 13 bp, Artificial Sequence
  Oligonucleotide for detection of SNP TSC0003120
ccaaaattaaaaa

SEQ ID NO: 13511 - DNA, 13 bp, Artificial Sequence
  Oligonucleotide for detection of SNP TSC0003121
ttaggtgttgtta

SEQ ID NO: 13512 - DNA, 13 bp, Artificial Sequence
  Oligonucleotide for detection of SNP TSC0003121
taacaacacctaa

SEQ ID NO: 13513 - DNA, 13 bp, Artificial Sequence
  Oligonucleotide for detection of SNP TSC0003121
ttaggtattgtta

SEQ ID NO: 13514 - DNA, 13 bp, Artificial Sequence
  Oligonucleotide for detection of SNP TSC0003121
taacaatacctaa

SEQ ID NO: 13515 - DNA, 13 bp, Artificial Sequence
  Oligonucleotide for detection of SNP TSC0003123
attttaatttttt

SEQ ID NO: 13516 - DNA, 13 bp, Artificial Sequence
  Oligonucleotide for detection of SNP TSC0003123
aaaaaattaaaat

SEQ ID NO: 13517 - DNA, 13 bp, Artificial Sequence
  Oligonucleotide for detection of SNP TSC0003124
ttatatatgtaat

SEQ ID NO: 13518 - DNA, 13 bp, Artificial Sequence
  Oligonucleotide for detection of SNP TSC0003124
attacatatataa

SEQ ID NO: 13519 - DNA, 13 bp, Artificial Sequence
  Oligonucleotide for detection of SNP TSC0003124
ttatatttgtaat

SEQ ID NO: 13520 - DNA, 13 bp, Artificial Sequence
  Oligonucleotide for detection of SNP TSC0003124
attacaaatataa

SEQ ID NO: 13521 - DNA, 13 bp, Artificial Sequence
  Oligonucleotide for detection of SNP TSC0003124
attatatatgtga

SEQ ID NO: 13522 - DNA, 13 bp, Artificial Sequence
  Oligonucleotide for detection of SNP TSC0003124
tcacatatataat

SEQ ID NO: 13523 - DNA, 13 bp, Artificial Sequence
  Oligonucleotide for detection of SNP TSC0003124
attatagatgtga

SEQ ID NO: 13524 - DNA, 13 bp, Artificial Sequence
  Oligonucleotide for detection of SNP TSC0003124
tcacatctataat

SEQ ID NO: 13525 - DNA, 13 bp, Artificial Sequence
  Oligonucleotide for detection of SNP TSC0003126
gtaagaagtttaa

SEQ ID NO: 13526 - DNA, 13 bp, Artificial Sequence
  Oligonucleotide for detection of SNP TSC0003126
ttaaacttcttac

SEQ ID NO: 13527 - DNA, 13 bp, Artificial Sequence
  Oligonucleotide for detection of SNP TSC0003126
gtaagaggtttaa

SEQ ID NO: 13528 - DNA, 13 bp, Artificial Sequence
  Oligonucleotide for detection of SNP TSC0003126
ttaaacctcttac

SEQ ID NO: 13529 - DNA, 13 bp, Artificial Sequence
  Oligonucleotide for detection of SNP TSC0003128
ttatgaagtgagg

SEQ ID NO: 13530 - DNA, 13 bp, Artificial Sequence
  Oligonucleotide for detection of SNP TSC0003128
cctcacttcataa

SEQ ID NO: 13531 - DNA, 13 bp, Artificial Sequence
  Oligonucleotide for detection of SNP TSC0003128
ttatgaggtgagg

SEQ ID NO: 13532 - DNA, 13 bp, Artificial Sequence
  Oligonucleotide for detection of SNP TSC0003128
cctcacctcataa

SEQ ID NO: 13533 - DNA, 13 bp, Artificial Sequence
  Oligonucleotide for detection of SNP TSC0003128
ttacgaagtgagg

SEQ ID NO: 13534 - DNA, 13 bp, Artificial Sequence
  Oligonucleotide for detection of SNP TSC0003128
cctcacttcgtaa

SEQ ID NO: 13535 - DNA, 13 bp, Artificial Sequence
  Oligonucleotide for detection of SNP TSC0003128
ttacgaggtgagg

SEQ ID NO: 13536 - DNA, 13 bp, Artificial Sequence
  Oligonucleotide for detection of SNP TSC0003128
cctcacctcgtaa

SEQ ID NO: 13537 - DNA, 13 bp, Artificial Sequence
  Oligonucleotide for detection of SNP TSC0003129
tattttattgtta

SEQ ID NO: 13538 - DNA, 13 bp, Artificial Sequence
  Oligonucleotide for detection of SNP TSC0003129
taacaataaaata

SEQ ID NO: 13539 - DNA, 13 bp, Artificial Sequence
  Oligonucleotide for detection of SNP TSC0003129
tatttttttgtta

SEQ ID NO: 13540 - DNA, 13 bp, Artificial Sequence
  Oligonucleotide for detection of SNP TSC0003129
taacaaaaaaata

SEQ ID NO: 13541 - DNA, 13 bp, Artificial Sequence
  Oligonucleotide for detection of SNP TSC0003129
taataataaaatg

SEQ ID NO: 13542 - DNA, 13 bp, Artificial Sequence
  Oligonucleotide for detection of SNP TSC0003129
cattttattatta

SEQ ID NO: 13543 - DNA, 13 bp, Artificial Sequence
  Oligonucleotide for detection of SNP TSC0003129
taataagaaaatg

SEQ ID NO: 13544 - DNA, 13 bp, Artificial Sequence
  Oligonucleotide for detection of SNP TSC0003129
cattttcttatta

SEQ ID NO: 13545 - DNA, 13 bp, Artificial Sequence
  Oligonucleotide for detection of SNP TSC0003130
taaagtttttaay

SEQ ID NO: 13546 - DNA, 13 bp, Artificial Sequence
  Oligonucleotide for detection of SNP TSC0003130
rttaaaaacttta

SEQ ID NO: 13547 - DNA, 13 bp, Artificial Sequence
  Oligonucleotide for detection of SNP TSC0003130
taaagtgtttaay

SEQ ID NO: 13548 - DNA, 13 bp, Artificial Sequence
  Oligonucleotide for detection of SNP TSC0003130
rttaaacacttta

SEQ ID NO: 13549 - DNA, 13 bp, Artificial Sequence
  Oligonucleotide for detection of SNP TSC0003130
taaagcgtttaay

SEQ ID NO: 13550 - DNA, 13 bp, Artificial Sequence
  Oligonucleotide for detection of SNP TSC0003130
rttaaacgcttta

SEQ ID NO: 13551 - DNA, 13 bp, Artificial Sequence
  Oligonucleotide for detection of SNP TSC0003130
gttgaaggttttg

SEQ ID NO: 13552 - DNA, 13 bp, Artificial Sequence
  Oligonucleotide for detection of SNP TSC0003130
caaaaccttcaac

SEQ ID NO: 13553 - DNA, 13 bp, Artificial Sequence
  Oligonucleotide for detection of SNP TSC0003130
gttgaatgttttg

SEQ ID NO: 13554 - DNA, 13 bp, Artificial Sequence
  Oligonucleotide for detection of SNP TSC0003130
caaaacattcaac

SEQ ID NO: 13555 - DNA, 13 bp, Artificial Sequence
  Oligonucleotide for detection of SNP TSC0003130
gttgaacgttttg

SEQ ID NO: 13556 - DNA, 13 bp, Artificial Sequence
  Oligonucleotide for detection of SNP TSC0003130
caaaacgttcaac

SEQ ID NO: 13557 - DNA, 13 bp, Artificial Sequence
  Oligonucleotide for detection of SNP TSC0003131
aatgataatatat

SEQ ID NO: 13558 - DNA, 13 bp, Artificial Sequence
  Oligonucleotide for detection of SNP TSC0003131
atatattatcatt

SEQ ID NO: 13559 - DNA, 13 bp, Artificial Sequence
  Oligonucleotide for detection of SNP TSC0003131
aatgattatatat

SEQ ID NO: 13560 - DNA, 13 bp, Artificial Sequence
  Oligonucleotide for detection of SNP TSC0003131
atatataatcatt

SEQ ID NO: 13561 - DNA, 13 bp, Artificial Sequence
  Oligonucleotide for detection of SNP TSC0003131
atatattgttatt

SEQ ID NO: 13562 - DNA, 13 bp, Artificial Sequence
  Oligonucleotide for detection of SNP TSC0003131
aataacaatatat

SEQ ID NO: 13563 - DNA, 13 bp, Artificial Sequence
  Oligonucleotide for detection of SNP TSC0003131
atatatggttatt

SEQ ID NO: 13564 - DNA, 13 bp, Artificial Sequence
  Oligonucleotide for detection of SNP TSC0003131
aataaccatatat

SEQ ID NO: 13565 - DNA, 13 bp, Artificial Sequence
  Oligonucleotide for detection of SNP TSC0003132
atatattattgag

SEQ ID NO: 13566 - DNA, 13 bp, Artificial Sequence
  Oligonucleotide for detection of SNP TSC0003132
ctcaataatatat

SEQ ID NO: 13567 - DNA, 13 bp, Artificial Sequence
  Oligonucleotide for detection of SNP TSC0003132
atatatgattgag

SEQ ID NO: 13568 - DNA, 13 bp, Artificial Sequence
  Oligonucleotide for detection of SNP TSC0003132
ctcaatcatatat

SEQ ID NO: 13569 - DNA, 13 bp, Artificial Sequence
  Oligonucleotide for detection of SNP TSC0003132
tttaataatatat

SEQ ID NO: 13570 - DNA, 13 bp, Artificial Sequence
  Oligonucleotide for detection of SNP TSC0003132
atatattattaaa

SEQ ID NO: 13571 - DNA, 13 bp, Artificial Sequence
  Oligonucleotide for detection of SNP TSC0003132
tttaattatatat

SEQ ID NO: 13572 - DNA, 13 bp, Artificial Sequence
  Oligonucleotide for detection of SNP TSC0003132
atatataattaaa

SEQ ID NO: 13573 - DNA, 13 bp, Artificial Sequence
  Oligonucleotide for detection of SNP TSC0003133
taggagaagaatt

SEQ ID NO: 13574 - DNA, 13 bp, Artificial Sequence
  Oligonucleotide for detection of SNP TSC0003133
aattcttctccta

SEQ ID NO: 13575 - DNA, 13 bp, Artificial Sequence
  Oligonucleotide for detection of SNP TSC0003133
taggagtagaatt

SEQ ID NO: 13576 - DNA, 13 bp, Artificial Sequence
  Oligonucleotide for detection of SNP TSC0003133
aattctactccta

SEQ ID NO: 13577 - DNA, 13 bp, Artificial Sequence
  Oligonucleotide for detection of SNP TSC0003133
aatttttttttta

SEQ ID NO: 13578 - DNA, 13 bp, Artificial Sequence
  Oligonucleotide for detection of SNP TSC0003133
taaaaaaaaaatt

SEQ ID NO: 13579 - DNA, 13 bp, Artificial Sequence
  Oligonucleotide for detection of SNP TSC0003134
gttaatatttgtt

SEQ ID NO: 13580 - DNA, 13 bp, Artificial Sequence
  Oligonucleotide for detection of SNP TSC0003134
aacaaatattaac

SEQ ID NO: 13581 - DNA, 13 bp, Artificial Sequence
  Oligonucleotide for detection of SNP TSC0003134
gttaatttttgtt

SEQ ID NO: 13582 - DNA, 13 bp, Artificial Sequence
  Oligonucleotide for detection of SNP TSC0003134
aacaaaaattaac

SEQ ID NO: 13583 - DNA, 13 bp, Artificial Sequence
  Oligonucleotide for detection of SNP TSC0003134
aataagtgttggy

SEQ ID NO: 13584 - DNA, 13 bp, Artificial Sequence
  Oligonucleotide for detection of SNP TSC0003134
rccaacacttatt

SEQ ID NO: 13585 - DNA, 13 bp, Artificial Sequence
  Oligonucleotide for detection of SNP TSC0003134
aataagagttggy

SEQ ID NO: 13586 - DNA, 13 bp, Artificial Sequence
  Oligonucleotide for detection of SNP TSC0003134
rccaactcttatt

SEQ ID NO: 13587 - DNA, 13 bp, Artificial Sequence
  Oligonucleotide for detection of SNP TSC0003135
ttttatttttggg

SEQ ID NO: 13588 - DNA, 13 bp, Artificial Sequence
  Oligonucleotide for detection of SNP TSC0003135
cccaaaaataaaa

SEQ ID NO: 13589 - DNA, 13 bp, Artificial Sequence
  Oligonucleotide for detection of SNP TSC0003135
ttttatgtttggg

SEQ ID NO: 13590 - DNA, 13 bp, Artificial Sequence
  Oligonucleotide for detection of SNP TSC0003135
cccaaacataaaa

SEQ ID NO: 13591 - DNA, 13 bp, Artificial Sequence
  Oligonucleotide for detection of SNP TSC0003135
ttttacgtttggg

SEQ ID NO: 13592 - DNA, 13 bp, Artificial Sequence
  Oligonucleotide for detection of SNP TSC0003135
cccaaacgtaaaa

SEQ ID NO: 13593 - DNA, 13 bp, Artificial Sequence
  Oligonucleotide for detection of SNP TSC0003135
tttaggagtggga

SEQ ID NO: 13594 - DNA, 13 bp, Artificial Sequence
  Oligonucleotide for detection of SNP TSC0003135
tcccactcctaaa

SEQ ID NO: 13595 - DNA, 13 bp, Artificial Sequence
  Oligonucleotide for detection of SNP TSC0003135
tttaggtgtggga

SEQ ID NO: 13596 - DNA, 13 bp, Artificial Sequence
  Oligonucleotide for detection of SNP TSC0003135
tcccacacctaaa

SEQ ID NO: 13597 - DNA, 13 bp, Artificial Sequence
  Oligonucleotide for detection of SNP TSC0003135
tttaggcgtggga

SEQ ID NO: 13598 - DNA, 13 bp, Artificial Sequence
  Oligonucleotide for detection of SNP TSC0003135
tcccacgcctaaa

SEQ ID NO: 13599 - DNA, 13 bp, Artificial Sequence
  Oligonucleotide for detection of SNP TSC0003136
tttaaataattta

SEQ ID NO: 13600 - DNA, 13 bp, Artificial Sequence
  Oligonucleotide for detection of SNP TSC0003136
taaattatttaaa

SEQ ID NO: 13601 - DNA, 13 bp, Artificial Sequence
  Oligonucleotide for detection of SNP TSC0003136
tttaaagaattta

SEQ ID NO: 13602 - DNA, 13 bp, Artificial Sequence
  Oligonucleotide for detection of SNP TSC0003136
taaattctttaaa

SEQ ID NO: 13603 - DNA, 13 bp, Artificial Sequence
  Oligonucleotide for detection of SNP TSC0003136
taagttatttgag

SEQ ID NO: 13604 - DNA, 13 bp, Artificial Sequence
  Oligonucleotide for detection of SNP TSC0003136
ctcaaataactta

SEQ ID NO: 13605 - DNA, 13 bp, Artificial Sequence
  Oligonucleotide for detection of SNP TSC0003136
taagttttttgag

SEQ ID NO: 13606 - DNA, 13 bp, Artificial Sequence
  Oligonucleotide for detection of SNP TSC0003136
ctcaaaaaactta

SEQ ID NO: 13607 - DNA, 13 bp, Artificial Sequence
  Oligonucleotide for detection of SNP TSC0003137
tataataaaaaaa

SEQ ID NO: 13608 - DNA, 13 bp, Artificial Sequence
  Oligonucleotide for detection of SNP TSC0003137
tttttttattata

SEQ ID NO: 13609 - DNA, 13 bp, Artificial Sequence
  Oligonucleotide for detection of SNP TSC0003137
tataattaaaaaa

SEQ ID NO: 13610 - DNA, 13 bp, Artificial Sequence
  Oligonucleotide for detection of SNP TSC0003137
ttttttaattata

SEQ ID NO: 13611 - DNA, 13 bp, Artificial Sequence
  Oligonucleotide for detection of SNP TSC0003137
tttttttattatg

SEQ ID NO: 13612 - DNA, 13 bp, Artificial Sequence
  Oligonucleotide for detection of SNP TSC0003137
cataataaaaaaa

SEQ ID NO: 13613 - DNA, 13 bp, Artificial Sequence
  Oligonucleotide for detection of SNP TSC0003137
ttttttaattatg

SEQ ID NO: 13614 - DNA, 13 bp, Artificial Sequence
  Oligonucleotide for detection of SNP TSC0003137
cataattaaaaaa

SEQ ID NO: 13615 - DNA, 13 bp, Artificial Sequence
  Oligonucleotide for detection of SNP TSC0003138
atatatgagtttt

SEQ ID NO: 13616 - DNA, 13 bp, Artificial Sequence
  Oligonucleotide for detection of SNP TSC0003138
aaaactcatatat

SEQ ID NO: 13617 - DNA, 13 bp, Artificial Sequence
  Oligonucleotide for detection of SNP TSC0003138
atatataagtttt

SEQ ID NO: 13618 - DNA, 13 bp, Artificial Sequence
  Oligonucleotide for detection of SNP TSC0003138
aaaacttatatat

SEQ ID NO: 13619 - DNA, 13 bp, Artificial Sequence
  Oligonucleotide for detection of SNP TSC0003139
gttgaaaatttta

SEQ ID NO: 13620 - DNA, 13 bp, Artificial Sequence
  Oligonucleotide for detection of SNP TSC0003139
taaaattttcaac

SEQ ID NO: 13621 - DNA, 13 bp, Artificial Sequence
  Oligonucleotide for detection of SNP TSC0003139
gttgaatatttta

SEQ ID NO: 13622 - DNA, 13 bp, Artificial Sequence
  Oligonucleotide for detection of SNP TSC0003139
taaaatattcaac

SEQ ID NO: 13623 - DNA, 13 bp, Artificial Sequence
  Oligonucleotide for detection of SNP TSC0003139
tgaagtttttaay

SEQ ID NO: 13624 - DNA, 13 bp, Artificial Sequence
  Oligonucleotide for detection of SNP TSC0003139
rttaaaaacttca

SEQ ID NO: 13625 - DNA, 13 bp, Artificial Sequence
  Oligonucleotide for detection of SNP TSC0003139
tgaagtgtttaay

SEQ ID NO: 13626 - DNA, 13 bp, Artificial Sequence
  Oligonucleotide for detection of SNP TSC0003139
rttaaacacttca

SEQ ID NO: 13627 - DNA, 13 bp, Artificial Sequence
  Oligonucleotide for detection of SNP TSC0003140
aggaaagaagtag

SEQ ID NO: 13628 - DNA, 13 bp, Artificial Sequence
  Oligonucleotide for detection of SNP TSC0003140
ctacttctttcct

SEQ ID NO: 13629 - DNA, 13 bp, Artificial Sequence
  Oligonucleotide for detection of SNP TSC0003140
aggaaaaaagtag

SEQ ID NO: 13630 - DNA, 13 bp, Artificial Sequence
  Oligonucleotide for detection of SNP TSC0003140
ctacttttttcct

SEQ ID NO: 13631 - DNA, 13 bp, Artificial Sequence
  Oligonucleotide for detection of SNP TSC0003141
atatttgtaaagg

SEQ ID NO: 13632 - DNA, 13 bp, Artificial Sequence
  Oligonucleotide for detection of SNP TSC0003141
cctttacaaatat

SEQ ID NO: 13633 - DNA, 13 bp, Artificial Sequence
  Oligonucleotide for detection of SNP TSC0003141
atatttataaagg

SEQ ID NO: 13634 - DNA, 13 bp, Artificial Sequence
  Oligonucleotide for detection of SNP TSC0003141
cctttataaatat

SEQ ID NO: 13635 - DNA, 13 bp, Artificial Sequence
  Oligonucleotide for detection of SNP TSC0003142
ttattaattagtt

SEQ ID NO: 13636 - DNA, 13 bp, Artificial Sequence
  Oligonucleotide for detection of SNP TSC0003142
aactaattaataa

SEQ ID NO: 13637 - DNA, 13 bp, Artificial Sequence
  Oligonucleotide for detection of SNP TSC0003142
ttattatttagtt

SEQ ID NO: 13638 - DNA, 13 bp, Artificial Sequence
  Oligonucleotide for detection of SNP TSC0003142
aactaaataataa

SEQ ID NO: 13639 - DNA, 13 bp, Artificial Sequence
  Oligonucleotide for detection of SNP TSC0003142
agttaattaatga

SEQ ID NO: 13640 - DNA, 13 bp, Artificial Sequence
  Oligonucleotide for detection of SNP TSC0003142
tcattaattaact

SEQ ID NO: 13641 - DNA, 13 bp, Artificial Sequence
  Oligonucleotide for detection of SNP TSC0003142
agttaagtaatga

SEQ ID NO: 13642 - DNA, 13 bp, Artificial Sequence
  Oligonucleotide for detection of SNP TSC0003142
tcattacttaact

SEQ ID NO: 13643 - DNA, 13 bp, Artificial Sequence
  Oligonucleotide for detection of SNP TSC0003144
ttgaatgggttat

SEQ ID NO: 13644 - DNA, 13 bp, Artificial Sequence
  Oligonucleotide for detection of SNP TSC0003144
ataacccattcaa

SEQ ID NO: 13645 - DNA, 13 bp, Artificial Sequence
  Oligonucleotide for detection of SNP TSC0003144
ttgaataggttat

SEQ ID NO: 13646 - DNA, 13 bp, Artificial Sequence
  Oligonucleotide for detection of SNP TSC0003144
ataacctattcaa

SEQ ID NO: 13647 - DNA, 13 bp, Artificial Sequence
  Oligonucleotide for detection of SNP TSC0003145
tttatatgtagaa

SEQ ID NO: 13648 - DNA, 13 bp, Artificial Sequence
  Oligonucleotide for detection of SNP TSC0003145
ttctacatataaa

SEQ ID NO: 13649 - DNA, 13 bp, Artificial Sequence
  Oligonucleotide for detection of SNP TSC0003145
tttatacgtagaa

SEQ ID NO: 13650 - DNA, 13 bp, Artificial Sequence
  Oligonucleotide for detection of SNP TSC0003145
ttctacgtataaa

SEQ ID NO: 13651 - DNA, 13 bp, Artificial Sequence
  Oligonucleotide for detection of SNP TSC0003145
ttttgtgtgtgga

SEQ ID NO: 13652 - DNA, 13 bp, Artificial Sequence
  Oligonucleotide for detection of SNP TSC0003145
tccacacacaaaa

SEQ ID NO: 13653 - DNA, 13 bp, Artificial Sequence
  Oligonucleotide for detection of SNP TSC0003145
ttttgtatgtgga

SEQ ID NO: 13654 - DNA, 13 bp, Artificial Sequence
  Oligonucleotide for detection of SNP TSC0003145
tccacatacaaaa

SEQ ID NO: 13655 - DNA, 13 bp, Artificial Sequence
  Oligonucleotide for detection of SNP TSC0003145
ttttgcgtgtgga

SEQ ID NO: 13656 - DNA, 13 bp, Artificial Sequence
  Oligonucleotide for detection of SNP TSC0003145
tccacacgcaaaa

SEQ ID NO: 13657 - DNA, 13 bp, Artificial Sequence
  Oligonucleotide for detection of SNP TSC0003146
atgtaatagttga

SEQ ID NO: 13658 - DNA, 13 bp, Artificial Sequence
  Oligonucleotide for detection of SNP TSC0003146
tcaactattacat

SEQ ID NO: 13659 - DNA, 13 bp, Artificial Sequence
  Oligonucleotide for detection of SNP TSC0003146
atgtaagagttga

SEQ ID NO: 13660 - DNA, 13 bp, Artificial Sequence
  Oligonucleotide for detection of SNP TSC0003146
tcaactcttacat

SEQ ID NO: 13661 - DNA, 13 bp, Artificial Sequence
  Oligonucleotide for detection of SNP TSC0003146
ttagttattatat

SEQ ID NO: 13662 - DNA, 13 bp, Artificial Sequence
  Oligonucleotide for detection of SNP TSC0003146
atataataactaa

SEQ ID NO: 13663 - DNA, 13 bp, Artificial Sequence
  Oligonucleotide for detection of SNP TSC0003146
ttagtttttatat

SEQ ID NO: 13664 - DNA, 13 bp, Artificial Sequence
  Oligonucleotide for detection of SNP TSC0003146
atataaaaactaa

SEQ ID NO: 13665 - DNA, 13 bp, Artificial Sequence
  Oligonucleotide for detection of SNP TSC0003147
aagtttaaatggg

SEQ ID NO: 13666 - DNA, 13 bp, Artificial Sequence
  Oligonucleotide for detection of SNP TSC0003147
cccatttaaactt

SEQ ID NO: 13667 - DNA, 13 bp, Artificial Sequence
  Oligonucleotide for detection of SNP TSC0003147
aagttttaatggg

SEQ ID NO: 13668 - DNA, 13 bp, Artificial Sequence
  Oligonucleotide for detection of SNP TSC0003147
cccattaaaactt

SEQ ID NO: 13669 - DNA, 13 bp, Artificial Sequence
  Oligonucleotide for detection of SNP TSC0003147
aagtttaaacggg

SEQ ID NO: 13670 - DNA, 13 bp, Artificial Sequence
  Oligonucleotide for detection of SNP TSC0003147
cccgtttaaactt

SEQ ID NO: 13671 - DNA, 13 bp, Artificial Sequence
  Oligonucleotide for detection of SNP TSC0003147
aagttttaacggg

SEQ ID NO: 13672 - DNA, 13 bp, Artificial Sequence
  Oligonucleotide for detection of SNP TSC0003147
cccgttaaaactt

SEQ ID NO: 13673 - DNA, 13 bp, Artificial Sequence
  Oligonucleotide for detection of SNP TSC0003147
tttgtttgggttt

SEQ ID NO: 13674 - DNA, 13 bp, Artificial Sequence
  Oligonucleotide for detection of SNP TSC0003147
aaacccaaacaaa

SEQ ID NO: 13675 - DNA, 13 bp, Artificial Sequence
  Oligonucleotide for detection of SNP TSC0003147
tttgttagggttt

SEQ ID NO: 13676 - DNA, 13 bp, Artificial Sequence
  Oligonucleotide for detection of SNP TSC0003147
aaaccctaacaaa

SEQ ID NO: 13677 - DNA, 13 bp, Artificial Sequence
  Oligonucleotide for detection of SNP TSC0003147
ttcgtttgggttt

SEQ ID NO: 13678 - DNA, 13 bp, Artificial Sequence
  Oligonucleotide for detection of SNP TSC0003147
aaacccaaacgaa

SEQ ID NO: 13679 - DNA, 13 bp, Artificial Sequence
  Oligonucleotide for detection of SNP TSC0003147
ttcgttagggttt

SEQ ID NO: 13680 - DNA, 13 bp, Artificial Sequence
  Oligonucleotide for detection of SNP TSC0003147
aaaccctaacgaa

SEQ ID NO: 13681 - DNA, 13 bp, Artificial Sequence
  Oligonucleotide for detection of SNP TSC0003148
gaaaaaagtagty

SEQ ID NO: 13682 - DNA, 13 bp, Artificial Sequence
  Oligonucleotide for detection of SNP TSC0003148
ractacttttttc

SEQ ID NO: 13683 - DNA, 13 bp, Artificial Sequence
  Oligonucleotide for detection of SNP TSC0003148
gaaaaaggtagty

SEQ ID NO: 13684 - DNA, 13 bp, Artificial Sequence
  Oligonucleotide for detection of SNP TSC0003148
ractacctttttc

SEQ ID NO: 13685 - DNA, 13 bp, Artificial Sequence
  Oligonucleotide for detection of SNP TSC0003149
atttttaggtttt

SEQ ID NO: 13686 - DNA, 13 bp, Artificial Sequence
  Oligonucleotide for detection of SNP TSC0003149
aaaacctaaaaat

SEQ ID NO: 13687 - DNA, 13 bp, Artificial Sequence
  Oligonucleotide for detection of SNP TSC0003149
atttttgggtttt

SEQ ID NO: 13688 - DNA, 13 bp, Artificial Sequence
  Oligonucleotide for detection of SNP TSC0003149
aaaacccaaaaat

SEQ ID NO: 13689 - DNA, 13 bp, Artificial Sequence
  Oligonucleotide for detection of SNP TSC0003149
attttcgggtttt

SEQ ID NO: 13690 - DNA, 13 bp, Artificial Sequence
  Oligonucleotide for detection of SNP TSC0003149
aaaacccgaaaat

SEQ ID NO: 13691 - DNA, 13 bp, Artificial Sequence
  Oligonucleotide for detection of SNP TSC0003149
aaagtttgagaat

SEQ ID NO: 13692 - DNA, 13 bp, Artificial Sequence
  Oligonucleotide for detection of SNP TSC0003149
attctcaaacttt

SEQ ID NO: 13693 - DNA, 13 bp, Artificial Sequence
  Oligonucleotide for detection of SNP TSC0003149
aaagttcgagaat

SEQ ID NO: 13694 - DNA, 13 bp, Artificial Sequence
  Oligonucleotide for detection of SNP TSC0003149
attctcgaacttt

SEQ ID NO: 13695 - DNA, 13 bp, Artificial Sequence
  Oligonucleotide for detection of SNP TSC0003150
ggtaagtgttttt

SEQ ID NO: 13696 - DNA, 13 bp, Artificial Sequence
  Oligonucleotide for detection of SNP TSC0003150
aaaaacacttacc

SEQ ID NO: 13697 - DNA, 13 bp, Artificial Sequence
  Oligonucleotide for detection of SNP TSC0003150
ggtaagggttttt

SEQ ID NO: 13698 - DNA, 13 bp, Artificial Sequence
  Oligonucleotide for detection of SNP TSC0003150
aaaaacccttacc

SEQ ID NO: 13699 - DNA, 13 bp, Artificial Sequence
  Oligonucleotide for detection of SNP TSC0003150
aaaagtatttgty

SEQ ID NO: 13700 - DNA, 13 bp, Artificial Sequence
  Oligonucleotide for detection of SNP TSC0003150
racaaatactttt

SEQ ID NO: 13701 - DNA, 13 bp, Artificial Sequence
  Oligonucleotide for detection of SNP TSC0003150
aaaagtttttgty

SEQ ID NO: 13702 - DNA, 13 bp, Artificial Sequence
  Oligonucleotide for detection of SNP TSC0003150
racaaaaactttt

SEQ ID NO: 13703 - DNA, 13 bp, Artificial Sequence
  Oligonucleotide for detection of SNP TSC0003152
taaagaaaggatg

SEQ ID NO: 13704 - DNA, 13 bp, Artificial Sequence
  Oligonucleotide for detection of SNP TSC0003152
catcctttcttta

SEQ ID NO: 13705 - DNA, 13 bp, Artificial Sequence
  Oligonucleotide for detection of SNP TSC0003152
taaagataggatg

SEQ ID NO: 13706 - DNA, 13 bp, Artificial Sequence
  Oligonucleotide for detection of SNP TSC0003152
catcctatcttta

SEQ ID NO: 13707 - DNA, 13 bp, Artificial Sequence
  Oligonucleotide for detection of SNP TSC0003152
tattttttttttg

SEQ ID NO: 13708 - DNA, 13 bp, Artificial Sequence
  Oligonucleotide for detection of SNP TSC0003152
caaaaaaaaaata

SEQ ID NO: 13709 - DNA, 13 bp, Artificial Sequence
  Oligonucleotide for detection of SNP TSC0003152
tattttgtttttg

SEQ ID NO: 13710 - DNA, 13 bp, Artificial Sequence
  Oligonucleotide for detection of SNP TSC0003152
caaaaacaaaata

SEQ ID NO: 13711 - DNA, 13 bp, Artificial Sequence
  Oligonucleotide for detection of SNP TSC0003153
atttttgtttgaa

SEQ ID NO: 13712 - DNA, 13 bp, Artificial Sequence
  Oligonucleotide for detection of SNP TSC0003153
ttcaaacaaaaat

SEQ ID NO: 13713 - DNA, 13 bp, Artificial Sequence
  Oligonucleotide for detection of SNP TSC0003153
atttttatttgaa

SEQ ID NO: 13714 - DNA, 13 bp, Artificial Sequence
  Oligonucleotide for detection of SNP TSC0003153
ttcaaataaaaat

SEQ ID NO: 13715 - DNA, 13 bp, Artificial Sequence
  Oligonucleotide for detection of SNP TSC0003154
tggaaagatgatt

SEQ ID NO: 13716 - DNA, 13 bp, Artificial Sequence
  Oligonucleotide for detection of SNP TSC0003154
aatcatctttcca

SEQ ID NO: 13717 - DNA, 13 bp, Artificial Sequence
  Oligonucleotide for detection of SNP TSC0003154
tggaaaaatgatt

SEQ ID NO: 13718 - DNA, 13 bp, Artificial Sequence
  Oligonucleotide for detection of SNP TSC0003154
aatcatttttcca

SEQ ID NO: 13719 - DNA, 13 bp, Artificial Sequence
  Oligonucleotide for detection of SNP TSC0003154
cggaaagatgatt

SEQ ID NO: 13720 - DNA, 13 bp, Artificial Sequence
  Oligonucleotide for detection of SNP TSC0003154
aatcatctttccg

SEQ ID NO: 13721 - DNA, 13 bp, Artificial Sequence
  Oligonucleotide for detection of SNP TSC0003154
cggaaaaatgatt

SEQ ID NO: 13722 - DNA, 13 bp, Artificial Sequence
  Oligonucleotide for detection of SNP TSC0003154
aatcatttttccg

SEQ ID NO: 13723 - DNA, 13 bp, Artificial Sequence
  Oligonucleotide for detection of SNP TSC0003155
taaatattgtatg

SEQ ID NO: 13724 - DNA, 13 bp, Artificial Sequence
  Oligonucleotide for detection of SNP TSC0003155
catacaatattta

SEQ ID NO: 13725 - DNA, 13 bp, Artificial Sequence
  Oligonucleotide for detection of SNP TSC0003155
taaatagtgtatg

SEQ ID NO: 13726 - DNA, 13 bp, Artificial Sequence
  Oligonucleotide for detection of SNP TSC0003155
catacactattta

SEQ ID NO: 13727 - DNA, 13 bp, Artificial Sequence
  Oligonucleotide for detection of SNP TSC0003155
tatataatatttg

SEQ ID NO: 13728 - DNA, 13 bp, Artificial Sequence
  Oligonucleotide for detection of SNP TSC0003155
caaatattatata

SEQ ID NO: 13729 - DNA, 13 bp, Artificial Sequence
  Oligonucleotide for detection of SNP TSC0003155
tatatattatttg

SEQ ID NO: 13730 - DNA, 13 bp, Artificial Sequence
  Oligonucleotide for detection of SNP TSC0003155
caaataatatata

SEQ ID NO: 13731 - DNA, 13 bp, Artificial Sequence
  Oligonucleotide for detection of SNP TSC0003156
agtttgtgtatag

SEQ ID NO: 13732 - DNA, 13 bp, Artificial Sequence
  Oligonucleotide for detection of SNP TSC0003156
ctatacacaaact

SEQ ID NO: 13733 - DNA, 13 bp, Artificial Sequence
  Oligonucleotide for detection of SNP TSC0003156
agtttgggtatag

SEQ ID NO: 13734 - DNA, 13 bp, Artificial Sequence
  Oligonucleotide for detection of SNP TSC0003156
ctatacccaaact

SEQ ID NO: 13735 - DNA, 13 bp, Artificial Sequence
  Oligonucleotide for detection of SNP TSC0003156
ttgtatataggtt

SEQ ID NO: 13736 - DNA, 13 bp, Artificial Sequence
  Oligonucleotide for detection of SNP TSC0003156
aacctatatacaa

SEQ ID NO: 13737 - DNA, 13 bp, Artificial Sequence
  Oligonucleotide for detection of SNP TSC0003156
ttgtatttaggtt

SEQ ID NO: 13738 - DNA, 13 bp, Artificial Sequence
  Oligonucleotide for detection of SNP TSC0003156
aacctaaatacaa

SEQ ID NO: 13739 - DNA, 13 bp, Artificial Sequence
  Oligonucleotide for detection of SNP TSC0003157
aagagtggaataa

SEQ ID NO: 13740 - DNA, 13 bp, Artificial Sequence
  Oligonucleotide for detection of SNP TSC0003157
ttattccactctt

SEQ ID NO: 13741 - DNA, 13 bp, Artificial Sequence
  Oligonucleotide for detection of SNP TSC0003157
aagagtagaataa

SEQ ID NO: 13742 - DNA, 13 bp, Artificial Sequence
  Oligonucleotide for detection of SNP TSC0003157
ttattctactctt

SEQ ID NO: 13743 - DNA, 13 bp, Artificial Sequence
  Oligonucleotide for detection of SNP TSC0003162
tgaatatgtaaag

SEQ ID NO: 13744 - DNA, 13 bp, Artificial Sequence
  Oligonucleotide for detection of SNP TSC0003162
ctttacatattca

SEQ ID NO: 13745 - DNA, 13 bp, Artificial Sequence
  Oligonucleotide for detection of SNP TSC0003162
tgaatacgtaaag

SEQ ID NO: 13746 - DNA, 13 bp, Artificial Sequence
  Oligonucleotide for detection of SNP TSC0003162
ctttacgtattca

SEQ ID NO: 13747 - DNA, 13 bp, Artificial Sequence
  Oligonucleotide for detection of SNP TSC0003162
ttttatgtgttta

SEQ ID NO: 13748 - DNA, 13 bp, Artificial Sequence
  Oligonucleotide for detection of SNP TSC0003162
taaacacataaaa

SEQ ID NO: 13749 - DNA, 13 bp, Artificial Sequence
  Oligonucleotide for detection of SNP TSC0003162
ttttatatgttta

SEQ ID NO: 13750 - DNA, 13 bp, Artificial Sequence
  Oligonucleotide for detection of SNP TSC0003162
taaacatataaaa

SEQ ID NO: 13751 - DNA, 13 bp, Artificial Sequence
  Oligonucleotide for detection of SNP TSC0003162
ttttacgtgttta

SEQ ID NO: 13752 - DNA, 13 bp, Artificial Sequence
  Oligonucleotide for detection of SNP TSC0003162
taaacacgtaaaa

SEQ ID NO: 13753 - DNA, 13 bp, Artificial Sequence
  Oligonucleotide for detection of SNP TSC0003164
gtattaattttat

SEQ ID NO: 13754 - DNA, 13 bp, Artificial Sequence
  Oligonucleotide for detection of SNP TSC0003164
ataaaattaatac

SEQ ID NO: 13755 - DNA, 13 bp, Artificial Sequence
  Oligonucleotide for detection of SNP TSC0003164
gtattatttttat

SEQ ID NO: 13756 - DNA, 13 bp, Artificial Sequence
  Oligonucleotide for detection of SNP TSC0003164
ataaaaataatac

SEQ ID NO: 13757 - DNA, 13 bp, Artificial Sequence
  Oligonucleotide for detection of SNP TSC0003164
ataaagttggtgy

SEQ ID NO: 13758 - DNA, 13 bp, Artificial Sequence
  Oligonucleotide for detection of SNP TSC0003164
rcaccaactttat

SEQ ID NO: 13759 - DNA, 13 bp, Artificial Sequence
  Oligonucleotide for detection of SNP TSC0003164
ataaagatggtgy

SEQ ID NO: 13760 - DNA, 13 bp, Artificial Sequence
  Oligonucleotide for detection of SNP TSC0003164
rcaccatctttat

SEQ ID NO: 13761 - DNA, 13 bp, Artificial Sequence
  Oligonucleotide for detection of SNP TSC0003165
attttatgtggaa

SEQ ID NO: 13762 - DNA, 13 bp, Artificial Sequence
  Oligonucleotide for detection of SNP TSC0003165
ttccacataaaat

SEQ ID NO: 13763 - DNA, 13 bp, Artificial Sequence
  Oligonucleotide for detection of SNP TSC0003165
attttacgtggaa

SEQ ID NO: 13764 - DNA, 13 bp, Artificial Sequence
  Oligonucleotide for detection of SNP TSC0003165
ttccacgtaaaat

SEQ ID NO: 13765 - DNA, 13 bp, Artificial Sequence
  Oligonucleotide for detection of SNP TSC0003165
ttttatgtgaaat

SEQ ID NO: 13766 - DNA, 13 bp, Artificial Sequence
  Oligonucleotide for detection of SNP TSC0003165
atttcacataaaa

SEQ ID NO: 13767 - DNA, 13 bp, Artificial Sequence
  Oligonucleotide for detection of SNP TSC0003165
ttttatatgaaat

SEQ ID NO: 13768 - DNA, 13 bp, Artificial Sequence
  Oligonucleotide for detection of SNP TSC0003165
atttcatataaaa

SEQ ID NO: 13769 - DNA, 13 bp, Artificial Sequence
  Oligonucleotide for detection of SNP TSC0003165
ttttacgtgaaat

SEQ ID NO: 13770 - DNA, 13 bp, Artificial Sequence
  Oligonucleotide for detection of SNP TSC0003165
atttcacgtaaaa

SEQ ID NO: 13771 - DNA, 13 bp, Artificial Sequence
  Oligonucleotide for detection of SNP TSC0003166
gtttatgaattat

SEQ ID NO: 13772 - DNA, 13 bp, Artificial Sequence
  Oligonucleotide for detection of SNP TSC0003166
ataattcataaac

SEQ ID NO: 13773 - DNA, 13 bp, Artificial Sequence
  Oligonucleotide for detection of SNP TSC0003166
gtttataaattat

SEQ ID NO: 13774 - DNA, 13 bp, Artificial Sequence
  Oligonucleotide for detection of SNP TSC0003166
ataatttataaac

SEQ ID NO: 13775 - DNA, 13 bp, Artificial Sequence
  Oligonucleotide for detection of SNP TSC0003169
tttttatgttaty

SEQ ID NO: 13776 - DNA, 13 bp, Artificial Sequence
  Oligonucleotide for detection of SNP TSC0003169
rataacataaaaa

SEQ ID NO: 13777 - DNA, 13 bp, Artificial Sequence
  Oligonucleotide for detection of SNP TSC0003169
tttttacgttaty

SEQ ID NO: 13778 - DNA, 13 bp, Artificial Sequence
  Oligonucleotide for detection of SNP TSC0003169
rataacgtaaaaa

SEQ ID NO: 13779 - DNA, 13 bp, Artificial Sequence
  Oligonucleotide for detection of SNP TSC0003169
ggtgatgtgagag

SEQ ID NO: 13780 - DNA, 13 bp, Artificial Sequence
  Oligonucleotide for detection of SNP TSC0003169
ctctcacatcacc

SEQ ID NO: 13781 - DNA, 13 bp, Artificial Sequence
  Oligonucleotide for detection of SNP TSC0003169
ggtgatatgagag

SEQ ID NO: 13782 - DNA, 13 bp, Artificial Sequence
  Oligonucleotide for detection of SNP TSC0003169
ctctcatatcacc

SEQ ID NO: 13783 - DNA, 13 bp, Artificial Sequence
  Oligonucleotide for detection of SNP TSC0003169
ggtgacgtgagag

SEQ ID NO: 13784 - DNA, 13 bp, Artificial Sequence
  Oligonucleotide for detection of SNP TSC0003169
ctctcacgtcacc

SEQ ID NO: 13785 - DNA, 13 bp, Artificial Sequence
  Oligonucleotide for detection of SNP TSC0003170
tttaataaagttt

SEQ ID NO: 13786 - DNA, 13 bp, Artificial Sequence
  Oligonucleotide for detection of SNP TSC0003170
aaactttattaaa

SEQ ID NO: 13787 - DNA, 13 bp, Artificial Sequence
  Oligonucleotide for detection of SNP TSC0003170
tttaatgaagttt

SEQ ID NO: 13788 - DNA, 13 bp, Artificial Sequence
  Oligonucleotide for detection of SNP TSC0003170
aaacttcattaaa

SEQ ID NO: 13789 - DNA, 13 bp, Artificial Sequence
  Oligonucleotide for detection of SNP TSC0003171
tatttaaagataa

SEQ ID NO: 13790 - DNA, 13 bp, Artificial Sequence
  Oligonucleotide for detection of SNP TSC0003171
ttatctttaaata

SEQ ID NO: 13791 - DNA, 13 bp, Artificial Sequence
  Oligonucleotide for detection of SNP TSC0003171
tatttatagataa

SEQ ID NO: 13792 - DNA, 13 bp, Artificial Sequence
  Oligonucleotide for detection of SNP TSC0003171
ttatctataaata

SEQ ID NO: 13793 - DNA, 13 bp, Artificial Sequence
  Oligonucleotide for detection of SNP TSC0003171
ttgtttttgaata

SEQ ID NO: 13794 - DNA, 13 bp, Artificial Sequence
  Oligonucleotide for detection of SNP TSC0003171
tattcaaaaacaa

SEQ ID NO: 13795 - DNA, 13 bp, Artificial Sequence
  Oligonucleotide for detection of SNP TSC0003171
ttgtttgtgaata

SEQ ID NO: 13796 - DNA, 13 bp, Artificial Sequence
  Oligonucleotide for detection of SNP TSC0003171
tattcacaaacaa

SEQ ID NO: 13797 - DNA, 13 bp, Artificial Sequence
  Oligonucleotide for detection of SNP TSC0003172
taaaagtggtata

SEQ ID NO: 13798 - DNA, 13 bp, Artificial Sequence
  Oligonucleotide for detection of SNP TSC0003172
tataccactttta

SEQ ID NO: 13799 - DNA, 13 bp, Artificial Sequence
  Oligonucleotide for detection of SNP TSC0003172
taaaagcggtata

SEQ ID NO: 13800 - DNA, 13 bp, Artificial Sequence
  Oligonucleotide for detection of SNP TSC0003172
tataccgctttta

SEQ ID NO: 13801 - DNA, 13 bp, Artificial Sequence
  Oligonucleotide for detection of SNP TSC0003172
tatattgttttta

SEQ ID NO: 13802 - DNA, 13 bp, Artificial Sequence
  Oligonucleotide for detection of SNP TSC0003172
taaaaacaatata

SEQ ID NO: 13803 - DNA, 13 bp, Artificial Sequence
  Oligonucleotide for detection of SNP TSC0003172
tatatcgttttta

SEQ ID NO: 13804 - DNA, 13 bp, Artificial Sequence
  Oligonucleotide for detection of SNP TSC0003172
taaaaacgatata

SEQ ID NO: 13805 - DNA, 13 bp, Artificial Sequence
  Oligonucleotide for detection of SNP TSC0003173
attttaattagty

SEQ ID NO: 13806 - DNA, 13 bp, Artificial Sequence
  Oligonucleotide for detection of SNP TSC0003173
ractaattaaaat

SEQ ID NO: 13807 - DNA, 13 bp, Artificial Sequence
  Oligonucleotide for detection of SNP TSC0003173
attttagttagty

SEQ ID NO: 13808 - DNA, 13 bp, Artificial Sequence
  Oligonucleotide for detection of SNP TSC0003173
ractaactaaaat

SEQ ID NO: 13809 - DNA, 13 bp, Artificial Sequence
  Oligonucleotide for detection of SNP TSC0003174
ggttataagaatt

SEQ ID NO: 13810 - DNA, 13 bp, Artificial Sequence
  Oligonucleotide for detection of SNP TSC0003174
aattcttataacc

SEQ ID NO: 13811 - DNA, 13 bp, Artificial Sequence
  Oligonucleotide for detection of SNP TSC0003174
ggttatgagaatt

SEQ ID NO: 13812 - DNA, 13 bp, Artificial Sequence
  Oligonucleotide for detection of SNP TSC0003174
aattctcataacc

SEQ ID NO: 13813 - DNA, 13 bp, Artificial Sequence
  Oligonucleotide for detection of SNP TSC0003175
taaagtgtagtgg

SEQ ID NO: 13814 - DNA, 13 bp, Artificial Sequence
  Oligonucleotide for detection of SNP TSC0003175
ccactacacttta

SEQ ID NO: 13815 - DNA, 13 bp, Artificial Sequence
  Oligonucleotide for detection of SNP TSC0003175
taaagtatagtgg

SEQ ID NO: 13816 - DNA, 13 bp, Artificial Sequence
  Oligonucleotide for detection of SNP TSC0003175
ccactatacttta

SEQ ID NO: 13817 - DNA, 13 bp, Artificial Sequence
  Oligonucleotide for detection of SNP TSC0003177
tggtttatttgaa

SEQ ID NO: 13818 - DNA, 13 bp, Artificial Sequence
  Oligonucleotide for detection of SNP TSC0003177
ttcaaataaacca

SEQ ID NO: 13819 - DNA, 13 bp, Artificial Sequence
  Oligonucleotide for detection of SNP TSC0003177
tggtttgtttgaa

SEQ ID NO: 13820 - DNA, 13 bp, Artificial Sequence
  Oligonucleotide for detection of SNP TSC0003177
ttcaaacaaacca

SEQ ID NO: 13821 - DNA, 13 bp, Artificial Sequence
  Oligonucleotide for detection of SNP TSC0003177
tggttcgtttgaa

SEQ ID NO: 13822 - DNA, 13 bp, Artificial Sequence
  Oligonucleotide for detection of SNP TSC0003177
ttcaaacgaacca

SEQ ID NO: 13823 - DNA, 13 bp, Artificial Sequence
  Oligonucleotide for detection of SNP TSC0003177
tttaaatgagtta

SEQ ID NO: 13824 - DNA, 13 bp, Artificial Sequence
  Oligonucleotide for detection of SNP TSC0003177
taactcatttaaa

SEQ ID NO: 13825 - DNA, 13 bp, Artificial Sequence
  Oligonucleotide for detection of SNP TSC0003177
tttaaacgagtta

SEQ ID NO: 13826 - DNA, 13 bp, Artificial Sequence
  Oligonucleotide for detection of SNP TSC0003177
taactcgtttaaa

SEQ ID NO: 13827 - DNA, 13 bp, Artificial Sequence
  Oligonucleotide for detection of SNP TSC0003178
ggtttggttaggy

SEQ ID NO: 13828 - DNA, 13 bp, Artificial Sequence
  Oligonucleotide for detection of SNP TSC0003178
rcctaaccaaacc

SEQ ID NO: 13829 - DNA, 13 bp, Artificial Sequence
  Oligonucleotide for detection of SNP TSC0003178
ggtttgattaggy

SEQ ID NO: 13830 - DNA, 13 bp, Artificial Sequence
  Oligonucleotide for detection of SNP TSC0003178
rcctaatcaaacc

SEQ ID NO: 13831 - DNA, 13 bp, Artificial Sequence
  Oligonucleotide for detection of SNP TSC0003179
ggaaagtgataga

SEQ ID NO: 13832 - DNA, 13 bp, Artificial Sequence
  Oligonucleotide for detection of SNP TSC0003179
tctatcactttcc

SEQ ID NO: 13833 - DNA, 13 bp, Artificial Sequence
  Oligonucleotide for detection of SNP TSC0003179
ggaaagcgataga

SEQ ID NO: 13834 - DNA, 13 bp, Artificial Sequence
  Oligonucleotide for detection of SNP TSC0003179
tctatcgctttcc

SEQ ID NO: 13835 - DNA, 13 bp, Artificial Sequence
  Oligonucleotide for detection of SNP TSC0003179
tttgttgttttty

SEQ ID NO: 13836 - DNA, 13 bp, Artificial Sequence
  Oligonucleotide for detection of SNP TSC0003179
raaaaacaacaaa

SEQ ID NO: 13837 - DNA, 13 bp, Artificial Sequence
  Oligonucleotide for detection of SNP TSC0003179
tttgttattttty

SEQ ID NO: 13838 - DNA, 13 bp, Artificial Sequence
  Oligonucleotide for detection of SNP TSC0003179
raaaaataacaaa

SEQ ID NO: 13839 - DNA, 13 bp, Artificial Sequence
  Oligonucleotide for detection of SNP TSC0003179
tttgtcgttttty

SEQ ID NO: 13840 - DNA, 13 bp, Artificial Sequence
  Oligonucleotide for detection of SNP TSC0003179
raaaaacgacaaa

SEQ ID NO: 13841 - DNA, 13 bp, Artificial Sequence
  Oligonucleotide for detection of SNP TSC0003180
gaatatattagay

SEQ ID NO: 13842 - DNA, 13 bp, Artificial Sequence
  Oligonucleotide for detection of SNP TSC0003180
rtctaatatattc

SEQ ID NO: 13843 - DNA, 13 bp, Artificial Sequence
  Oligonucleotide for detection of SNP TSC0003180
gaatatgttagay

SEQ ID NO: 13844 - DNA, 13 bp, Artificial Sequence
  Oligonucleotide for detection of SNP TSC0003180
rtctaacatattc

SEQ ID NO: 13845 - DNA, 13 bp, Artificial Sequence
  Oligonucleotide for detection of SNP TSC0003180
gaatacgttagay

SEQ ID NO: 13846 - DNA, 13 bp, Artificial Sequence
  Oligonucleotide for detection of SNP TSC0003180
rtctaacgtattc

SEQ ID NO: 13847 - DNA, 13 bp, Artificial Sequence
  Oligonucleotide for detection of SNP TSC0003180
gtttgatgtgtty

SEQ ID NO: 13848 - DNA, 13 bp, Artificial Sequence
  Oligonucleotide for detection of SNP TSC0003180
raacacatcaaac

SEQ ID NO: 13849 - DNA, 13 bp, Artificial Sequence
  Oligonucleotide for detection of SNP TSC0003180
gtttgacgtgtty

SEQ ID NO: 13850 - DNA, 13 bp, Artificial Sequence
  Oligonucleotide for detection of SNP TSC0003180
raacacgtcaaac

SEQ ID NO: 13851 - DNA, 13 bp, Artificial Sequence
  Oligonucleotide for detection of SNP TSC0003181
ttagagtgatgga

SEQ ID NO: 13852 - DNA, 13 bp, Artificial Sequence
  Oligonucleotide for detection of SNP TSC0003181
tccatcactctaa

SEQ ID NO: 13853 - DNA, 13 bp, Artificial Sequence
  Oligonucleotide for detection of SNP TSC0003181
ttagagcgatgga

SEQ ID NO: 13854 - DNA, 13 bp, Artificial Sequence
  Oligonucleotide for detection of SNP TSC0003181
tccatcgctctaa

SEQ ID NO: 13855 - DNA, 13 bp, Artificial Sequence
  Oligonucleotide for detection of SNP TSC0003181
tttattgttttag

SEQ ID NO: 13856 - DNA, 13 bp, Artificial Sequence
  Oligonucleotide for detection of SNP TSC0003181
ctaaaacaataaa

SEQ ID NO: 13857 - DNA, 13 bp, Artificial Sequence
  Oligonucleotide for detection of SNP TSC0003181
tttattattttag

SEQ ID NO: 13858 - DNA, 13 bp, Artificial Sequence
  Oligonucleotide for detection of SNP TSC0003181
ctaaaataataaa

SEQ ID NO: 13859 - DNA, 13 bp, Artificial Sequence
  Oligonucleotide for detection of SNP TSC0003181
tttatcgttttag

SEQ ID NO: 13860 - DNA, 13 bp, Artificial Sequence
  Oligonucleotide for detection of SNP TSC0003181
ctaaaacgataaa

SEQ ID NO: 13861 - DNA, 13 bp, Artificial Sequence
  Oligonucleotide for detection of SNP TSC0003182
gaggtgatgagtt

SEQ ID NO: 13862 - DNA, 13 bp, Artificial Sequence
  Oligonucleotide for detection of SNP TSC0003182
aactcatcacctc

SEQ ID NO: 13863 - DNA, 13 bp, Artificial Sequence
  Oligonucleotide for detection of SNP TSC0003182
gaggtggtgagtt

SEQ ID NO: 13864 - DNA, 13 bp, Artificial Sequence
  Oligonucleotide for detection of SNP TSC0003182
aactcaccacctc

SEQ ID NO: 13865 - DNA, 13 bp, Artificial Sequence
  Oligonucleotide for detection of SNP TSC0003186
ttttttgtaaaty

SEQ ID NO: 13866 - DNA, 13 bp, Artificial Sequence
  Oligonucleotide for detection of SNP TSC0003186
ratttacaaaaaa

SEQ ID NO: 13867 - DNA, 13 bp, Artificial Sequence
  Oligonucleotide for detection of SNP TSC0003186
ttttttataaaty

SEQ ID NO: 13868 - DNA, 13 bp, Artificial Sequence
  Oligonucleotide for detection of SNP TSC0003186
ratttataaaaaa

SEQ ID NO: 13869 - DNA, 13 bp, Artificial Sequence
  Oligonucleotide for detection of SNP TSC0003188
agtaatgttatag

SEQ ID NO: 13870 - DNA, 13 bp, Artificial Sequence
  Oligonucleotide for detection of SNP TSC0003188
ctataacattact

SEQ ID NO: 13871 - DNA, 13 bp, Artificial Sequence
  Oligonucleotide for detection of SNP TSC0003188
agtaatattatag

SEQ ID NO: 13872 - DNA, 13 bp, Artificial Sequence
  Oligonucleotide for detection of SNP TSC0003188
ctataatattact

SEQ ID NO: 13873 - DNA, 13 bp, Artificial Sequence
  Oligonucleotide for detection of SNP TSC0003189
atgtagatagagt

SEQ ID NO: 13874 - DNA, 13 bp, Artificial Sequence
  Oligonucleotide for detection of SNP TSC0003189
actctatctacat

SEQ ID NO: 13875 - DNA, 13 bp, Artificial Sequence
  Oligonucleotide for detection of SNP TSC0003189
atgtagttagagt

SEQ ID NO: 13876 - DNA, 13 bp, Artificial Sequence
  Oligonucleotide for detection of SNP TSC0003189
actctaactacat

SEQ ID NO: 13877 - DNA, 13 bp, Artificial Sequence
  Oligonucleotide for detection of SNP TSC0003189
attttatttatat

SEQ ID NO: 13878 - DNA, 13 bp, Artificial Sequence
  Oligonucleotide for detection of SNP TSC0003189
atataaataaaat

SEQ ID NO: 13879 - DNA, 13 bp, Artificial Sequence
  Oligonucleotide for detection of SNP TSC0003189
attttaattatat

SEQ ID NO: 13880 - DNA, 13 bp, Artificial Sequence
  Oligonucleotide for detection of SNP TSC0003189
atataattaaaat

SEQ ID NO: 13881 - DNA, 13 bp, Artificial Sequence
  Oligonucleotide for detection of SNP TSC0003190
taagtaaggtaaa

SEQ ID NO: 13882 - DNA, 13 bp, Artificial Sequence
  Oligonucleotide for detection of SNP TSC0003190
tttaccttactta

SEQ ID NO: 13883 - DNA, 13 bp, Artificial Sequence
  Oligonucleotide for detection of SNP TSC0003190
taagtatggtaaa

SEQ ID NO: 13884 - DNA, 13 bp, Artificial Sequence
  Oligonucleotide for detection of SNP TSC0003190
tttaccatactta

SEQ ID NO: 13885 - DNA, 13 bp, Artificial Sequence
  Oligonucleotide for detection of SNP TSC0003190
taagtacggtaaa

SEQ ID NO: 13886 - DNA, 13 bp, Artificial Sequence
  Oligonucleotide for detection of SNP TSC0003190
tttaccgtactta

SEQ ID NO: 13887 - DNA, 13 bp, Artificial Sequence
  Oligonucleotide for detection of SNP TSC0003190
tttgttttattta

SEQ ID NO: 13888 - DNA, 13 bp, Artificial Sequence
  Oligonucleotide for detection of SNP TSC0003190
taaataaaacaaa

SEQ ID NO: 13889 - DNA, 13 bp, Artificial Sequence
  Oligonucleotide for detection of SNP TSC0003190
tttgttgtattta

SEQ ID NO: 13890 - DNA, 13 bp, Artificial Sequence
  Oligonucleotide for detection of SNP TSC0003190
taaatacaacaaa

SEQ ID NO: 13891 - DNA, 13 bp, Artificial Sequence
  Oligonucleotide for detection of SNP TSC0003190
tttgtcgtattta

SEQ ID NO: 13892 - DNA, 13 bp, Artificial Sequence
  Oligonucleotide for detection of SNP TSC0003190
taaatacgacaaa

SEQ ID NO: 13893 - DNA, 13 bp, Artificial Sequence
  Oligonucleotide for detection of SNP TSC0003191
aaaaaagaaaaga

SEQ ID NO: 13894 - DNA, 13 bp, Artificial Sequence
  Oligonucleotide for detection of SNP TSC0003191
tcttttctttttt

SEQ ID NO: 13895 - DNA, 13 bp, Artificial Sequence
  Oligonucleotide for detection of SNP TSC0003191
aaaaaaaaaaaga

SEQ ID NO: 13896 - DNA, 13 bp, Artificial Sequence
  Oligonucleotide for detection of SNP TSC0003191
tcttttttttttt

SEQ ID NO: 13897 - DNA, 13 bp, Artificial Sequence
  Oligonucleotide for detection of SNP TSC0003192
tatttatttgtgg

SEQ ID NO: 13898 - DNA, 13 bp, Artificial Sequence
  Oligonucleotide for detection of SNP TSC0003192
ccacaaataaata

SEQ ID NO: 13899 - DNA, 13 bp, Artificial Sequence
  Oligonucleotide for detection of SNP TSC0003192
tatttagttgtgg

SEQ ID NO: 13900 - DNA, 13 bp, Artificial Sequence
  Oligonucleotide for detection of SNP TSC0003192
ccacaactaaata

SEQ ID NO: 13901 - DNA, 13 bp, Artificial Sequence
  Oligonucleotide for detection of SNP TSC0003192
ttataagtaagtg

SEQ ID NO: 13902 - DNA, 13 bp, Artificial Sequence
  Oligonucleotide for detection of SNP TSC0003192
cacttacttataa

SEQ ID NO: 13903 - DNA, 13 bp, Artificial Sequence
  Oligonucleotide for detection of SNP TSC0003192
ttataattaagtg

SEQ ID NO: 13904 - DNA, 13 bp, Artificial Sequence
  Oligonucleotide for detection of SNP TSC0003192
cacttaattataa

SEQ ID NO: 13905 - DNA, 13 bp, Artificial Sequence
  Oligonucleotide for detection of SNP TSC0003193
tgtttagtatttt

SEQ ID NO: 13906 - DNA, 13 bp, Artificial Sequence
  Oligonucleotide for detection of SNP TSC0003193
aaaatactaaaca

SEQ ID NO: 13907 - DNA, 13 bp, Artificial Sequence
  Oligonucleotide for detection of SNP TSC0003193
tgtttaatatttt

SEQ ID NO: 13908 - DNA, 13 bp, Artificial Sequence
  Oligonucleotide for detection of SNP TSC0003193
aaaatattaaaca

SEQ ID NO: 13909 - DNA, 13 bp, Artificial Sequence
  Oligonucleotide for detection of SNP TSC0003194
ataaggaaagaaa

SEQ ID NO: 13910 - DNA, 13 bp, Artificial Sequence
  Oligonucleotide for detection of SNP TSC0003194
tttctttccttat

SEQ ID NO: 13911 - DNA, 13 bp, Artificial Sequence
  Oligonucleotide for detection of SNP TSC0003194
ataagggaagaaa

SEQ ID NO: 13912 - DNA, 13 bp, Artificial Sequence
  Oligonucleotide for detection of SNP TSC0003194
tttcttcccttat

SEQ ID NO: 13913 - DNA, 13 bp, Artificial Sequence
  Oligonucleotide for detection of SNP TSC0003195
aaaaaggagaaaa

SEQ ID NO: 13914 - DNA, 13 bp, Artificial Sequence
  Oligonucleotide for detection of SNP TSC0003195
ttttctccttttt

SEQ ID NO: 13915 - DNA, 13 bp, Artificial Sequence
  Oligonucleotide for detection of SNP TSC0003195
aaaaagaagaaaa

SEQ ID NO: 13916 - DNA, 13 bp, Artificial Sequence
  Oligonucleotide for detection of SNP TSC0003195
ttttcttcttttt

SEQ ID NO: 13917 - DNA, 13 bp, Artificial Sequence
  Oligonucleotide for detection of SNP TSC0003196
gtatgatggtaaa

SEQ ID NO: 13918 - DNA, 13 bp, Artificial Sequence
  Oligonucleotide for detection of SNP TSC0003196
tttaccatcatac

SEQ ID NO: 13919 - DNA, 13 bp, Artificial Sequence
  Oligonucleotide for detection of SNP TSC0003196
gtatgacggtaaa

SEQ ID NO: 13920 - DNA, 13 bp, Artificial Sequence
  Oligonucleotide for detection of SNP TSC0003196
tttaccgtcatac

SEQ ID NO: 13921 - DNA, 13 bp, Artificial Sequence
  Oligonucleotide for detection of SNP TSC0003196
tttgttgttatgy

SEQ ID NO: 13922 - DNA, 13 bp, Artificial Sequence
  Oligonucleotide for detection of SNP TSC0003196
rcataacaacaaa

SEQ ID NO: 13923 - DNA, 13 bp, Artificial Sequence
  Oligonucleotide for detection of SNP TSC0003196
tttgttattatgy

SEQ ID NO: 13924 - DNA, 13 bp, Artificial Sequence
  Oligonucleotide for detection of SNP TSC0003196
rcataataacaaa

SEQ ID NO: 13925 - DNA, 13 bp, Artificial Sequence
  Oligonucleotide for detection of SNP TSC0003196
tttgtcgttatgy

SEQ ID NO: 13926 - DNA, 13 bp, Artificial Sequence
  Oligonucleotide for detection of SNP TSC0003196
rcataacgacaaa

SEQ ID NO: 13927 - DNA, 13 bp, Artificial Sequence
  Oligonucleotide for detection of SNP TSC0003197
ataaaaatatttt

SEQ ID NO: 13928 - DNA, 13 bp, Artificial Sequence
  Oligonucleotide for detection of SNP TSC0003197
aaaatatttttat

SEQ ID NO: 13929 - DNA, 13 bp, Artificial Sequence
  Oligonucleotide for detection of SNP TSC0003197
ataaaagtatttt

SEQ ID NO: 13930 - DNA, 13 bp, Artificial Sequence
  Oligonucleotide for detection of SNP TSC0003197
aaaatacttttat

SEQ ID NO: 13931 - DNA, 13 bp, Artificial Sequence
  Oligonucleotide for detection of SNP TSC0003198
gttttttgtgtay

SEQ ID NO: 13932 - DNA, 13 bp, Artificial Sequence
  Oligonucleotide for detection of SNP TSC0003198
rtacacaaaaaac

SEQ ID NO: 13933 - DNA, 13 bp, Artificial Sequence
  Oligonucleotide for detection of SNP TSC0003198
gtttttcgtgtay

SEQ ID NO: 13934 - DNA, 13 bp, Artificial Sequence
  Oligonucleotide for detection of SNP TSC0003198
rtacacgaaaaac

SEQ ID NO: 13935 - DNA, 13 bp, Artificial Sequence
  Oligonucleotide for detection of SNP TSC0003198
gttttttgcgtay

SEQ ID NO: 13936 - DNA, 13 bp, Artificial Sequence
  Oligonucleotide for detection of SNP TSC0003198
rtacgcaaaaaac

SEQ ID NO: 13937 - DNA, 13 bp, Artificial Sequence
  Oligonucleotide for detection of SNP TSC0003198
gtttttcgcgtay

SEQ ID NO: 13938 - DNA, 13 bp, Artificial Sequence
  Oligonucleotide for detection of SNP TSC0003198
rtacgcgaaaaac

SEQ ID NO: 13939 - DNA, 13 bp, Artificial Sequence
  Oligonucleotide for detection of SNP TSC0003198
gtgtgtgggaggy

SEQ ID NO: 13940 - DNA, 13 bp, Artificial Sequence
  Oligonucleotide for detection of SNP TSC0003198
rcctcccacacac

SEQ ID NO: 13941 - DNA, 13 bp, Artificial Sequence
  Oligonucleotide for detection of SNP TSC0003198
gtgtgtaggaggy

SEQ ID NO: 13942 - DNA, 13 bp, Artificial Sequence
  Oligonucleotide for detection of SNP TSC0003198
rcctcctacacac

SEQ ID NO: 13943 - DNA, 13 bp, Artificial Sequence
  Oligonucleotide for detection of SNP TSC0003198
gtgcgtgggaggy

SEQ ID NO: 13944 - DNA, 13 bp, Artificial Sequence
  Oligonucleotide for detection of SNP TSC0003198
rcctcccacgcac

SEQ ID NO: 13945 - DNA, 13 bp, Artificial Sequence
  Oligonucleotide for detection of SNP TSC0003198
gtgcgtaggaggy

SEQ ID NO: 13946 - DNA, 13 bp, Artificial Sequence
  Oligonucleotide for detection of SNP TSC0003198
rcctcctacgcac

SEQ ID NO: 13947 - DNA, 13 bp, Artificial Sequence
  Oligonucleotide for detection of SNP TSC0003198
gtgtgcgggaggy

SEQ ID NO: 13948 - DNA, 13 bp, Artificial Sequence
  Oligonucleotide for detection of SNP TSC0003198
rcctcccgcacac

SEQ ID NO: 13949 - DNA, 13 bp, Artificial Sequence
  Oligonucleotide for detection of SNP TSC0003198
gtgcgcgggaggy

SEQ ID NO: 13950 - DNA, 13 bp, Artificial Sequence
  Oligonucleotide for detection of SNP TSC0003198
rcctcccgcgcac

SEQ ID NO: 13951 - DNA, 13 bp, Artificial Sequence
  Oligonucleotide for detection of SNP TSC0003199
tgatgagttttay

SEQ ID NO: 13952 - DNA, 13 bp, Artificial Sequence
  Oligonucleotide for detection of SNP TSC0003199
rtaaaactcatca

SEQ ID NO: 13953 - DNA, 13 bp, Artificial Sequence
  Oligonucleotide for detection of SNP TSC0003199
tgatgaattttay

SEQ ID NO: 13954 - DNA, 13 bp, Artificial Sequence
  Oligonucleotide for detection of SNP TSC0003199
rtaaaattcatca

SEQ ID NO: 13955 - DNA, 13 bp, Artificial Sequence
  Oligonucleotide for detection of SNP TSC0003199
tgacgagttttay

SEQ ID NO: 13956 - DNA, 13 bp, Artificial Sequence
  Oligonucleotide for detection of SNP TSC0003199
rtaaaactcgtca

SEQ ID NO: 13957 - DNA, 13 bp, Artificial Sequence
  Oligonucleotide for detection of SNP TSC0003199
tgacgaattttay

SEQ ID NO: 13958 - DNA, 13 bp, Artificial Sequence
  Oligonucleotide for detection of SNP TSC0003199
rtaaaattcgtca

SEQ ID NO: 13959 - DNA, 13 bp, Artificial Sequence
  Oligonucleotide for detection of SNP TSC0003200
gttgttaaggata

SEQ ID NO: 13960 - DNA, 13 bp, Artificial Sequence
  Oligonucleotide for detection of SNP TSC0003200
tatccttaacaac

SEQ ID NO: 13961 - DNA, 13 bp, Artificial Sequence
  Oligonucleotide for detection of SNP TSC0003200
gttgttgaggata

SEQ ID NO: 13962 - DNA, 13 bp, Artificial Sequence
  Oligonucleotide for detection of SNP TSC0003200
tatcctcaacaac

SEQ ID NO: 13963 - DNA, 13 bp, Artificial Sequence
  Oligonucleotide for detection of SNP TSC0003201
tgttttatgttgy

SEQ ID NO: 13964 - DNA, 13 bp, Artificial Sequence
  Oligonucleotide for detection of SNP TSC0003201
rcaacataaaaca

SEQ ID NO: 13965 - DNA, 13 bp, Artificial Sequence
  Oligonucleotide for detection of SNP TSC0003201
tgttttttgttgy

SEQ ID NO: 13966 - DNA, 13 bp, Artificial Sequence
  Oligonucleotide for detection of SNP TSC0003201
rcaacaaaaaaca

SEQ ID NO: 13967 - DNA, 13 bp, Artificial Sequence
  Oligonucleotide for detection of SNP TSC0003201
gtaatataaaata

SEQ ID NO: 13968 - DNA, 13 bp, Artificial Sequence
  Oligonucleotide for detection of SNP TSC0003201
tattttatattac

SEQ ID NO: 13969 - DNA, 13 bp, Artificial Sequence
  Oligonucleotide for detection of SNP TSC0003201
gtaataaaaaata

SEQ ID NO: 13970 - DNA, 13 bp, Artificial Sequence
  Oligonucleotide for detection of SNP TSC0003201
tattttttattac

SEQ ID NO: 13971 - DNA, 13 bp, Artificial Sequence
  Oligonucleotide for detection of SNP TSC0003202
tttagttggttty

SEQ ID NO: 13972 - DNA, 13 bp, Artificial Sequence
  Oligonucleotide for detection of SNP TSC0003202
raaaccaactaaa

SEQ ID NO: 13973 - DNA, 13 bp, Artificial Sequence
  Oligonucleotide for detection of SNP TSC0003202
tttagtcggttty

SEQ ID NO: 13974 - DNA, 13 bp, Artificial Sequence
  Oligonucleotide for detection of SNP TSC0003202
raaaccgactaaa

SEQ ID NO: 13975 - DNA, 13 bp, Artificial Sequence
  Oligonucleotide for detection of SNP TSC0003202
gaggttggttgaa

SEQ ID NO: 13976 - DNA, 13 bp, Artificial Sequence
  Oligonucleotide for detection of SNP TSC0003202
ttcaaccaacctc

SEQ ID NO: 13977 - DNA, 13 bp, Artificial Sequence
  Oligonucleotide for detection of SNP TSC0003202
gaggttagttgaa

SEQ ID NO: 13978 - DNA, 13 bp, Artificial Sequence
  Oligonucleotide for detection of SNP TSC0003202
ttcaactaacctc

SEQ ID NO: 13979 - DNA, 13 bp, Artificial Sequence
  Oligonucleotide for detection of SNP TSC0003202
gaggtcggttgaa

SEQ ID NO: 13980 - DNA, 13 bp, Artificial Sequence
  Oligonucleotide for detection of SNP TSC0003202
ttcaaccgacctc

SEQ ID NO: 13981 - DNA, 13 bp, Artificial Sequence
  Oligonucleotide for detection of SNP TSC0003203
agttagagagaty

SEQ ID NO: 13982 - DNA, 13 bp, Artificial Sequence
  Oligonucleotide for detection of SNP TSC0003203
ratctctctaact

SEQ ID NO: 13983 - DNA, 13 bp, Artificial Sequence
  Oligonucleotide for detection of SNP TSC0003204
ataagtgaattay

SEQ ID NO: 13984 - DNA, 13 bp, Artificial Sequence
  Oligonucleotide for detection of SNP TSC0003204
rtaattcacttat

SEQ ID NO: 13985 - DNA, 13 bp, Artificial Sequence
  Oligonucleotide for detection of SNP TSC0003204
ataagtaaattay

SEQ ID NO: 13986 - DNA, 13 bp, Artificial Sequence
  Oligonucleotide for detection of SNP TSC0003204
rtaatttacttat

SEQ ID NO: 13987 - DNA, 13 bp, Artificial Sequence
  Oligonucleotide for detection of SNP TSC0003205
agattatgtatgy

SEQ ID NO: 13988 - DNA, 13 bp, Artificial Sequence
  Oligonucleotide for detection of SNP TSC0003205
rcatacataatct

SEQ ID NO: 13989 - DNA, 13 bp, Artificial Sequence
  Oligonucleotide for detection of SNP TSC0003205
agattacgtatgy

SEQ ID NO: 13990 - DNA, 13 bp, Artificial Sequence
  Oligonucleotide for detection of SNP TSC0003205
rcatacgtaatct

SEQ ID NO: 13991 - DNA, 13 bp, Artificial Sequence
  Oligonucleotide for detection of SNP TSC0003205
gtatatgtaattt

SEQ ID NO: 13992 - DNA, 13 bp, Artificial Sequence
  Oligonucleotide for detection of SNP TSC0003205
aaattacatatac

SEQ ID NO: 13993 - DNA, 13 bp, Artificial Sequence
  Oligonucleotide for detection of SNP TSC0003205
gtatatataattt

SEQ ID NO: 13994 - DNA, 13 bp, Artificial Sequence
  Oligonucleotide for detection of SNP TSC0003205
aaattatatatac

SEQ ID NO: 13995 - DNA, 13 bp, Artificial Sequence
  Oligonucleotide for detection of SNP TSC0003205
gtatacgtaattt

SEQ ID NO: 13996 - DNA, 13 bp, Artificial Sequence
  Oligonucleotide for detection of SNP TSC0003205
aaattacgtatac

SEQ ID NO: 13997 - DNA, 13 bp, Artificial Sequence
  Oligonucleotide for detection of SNP TSC0003207
aaatttgaaaaaa

SEQ ID NO: 13998 - DNA, 13 bp, Artificial Sequence
  Oligonucleotide for detection of SNP TSC0003207
ttttttcaaattt

SEQ ID NO: 13999 - DNA, 13 bp, Artificial Sequence
  Oligonucleotide for detection of SNP TSC0003208
gaggttattatgt

SEQ ID NO: 14000 - DNA, 13 bp, Artificial Sequence
  Oligonucleotide for detection of SNP TSC0003208
acataataacctc

SEQ ID NO: 14001 - DNA, 13 bp, Artificial Sequence
  Oligonucleotide for detection of SNP TSC0003208
gaggtttttatgt

SEQ ID NO: 14002 - DNA, 13 bp, Artificial Sequence
  Oligonucleotide for detection of SNP TSC0003208
acataaaaacctc

SEQ ID NO: 14003 - DNA, 13 bp, Artificial Sequence
  Oligonucleotide for detection of SNP TSC0003208
atatagtagttty

SEQ ID NO: 14004 - DNA, 13 bp, Artificial Sequence
  Oligonucleotide for detection of SNP TSC0003208
raaactactatat

SEQ ID NO: 14005 - DNA, 13 bp, Artificial Sequence
  Oligonucleotide for detection of SNP TSC0003208
atataggagttty

SEQ ID NO: 14006 - DNA, 13 bp, Artificial Sequence
  Oligonucleotide for detection of SNP TSC0003208
raaactcctatat

SEQ ID NO: 14007 - DNA, 13 bp, Artificial Sequence
  Oligonucleotide for detection of SNP TSC0003209
tttaggtgttata

SEQ ID NO: 14008 - DNA, 13 bp, Artificial Sequence
  Oligonucleotide for detection of SNP TSC0003209
tataacacctaaa

SEQ ID NO: 14009 - DNA, 13 bp, Artificial Sequence
  Oligonucleotide for detection of SNP TSC0003209
tttaggggttata

SEQ ID NO: 14010 - DNA, 13 bp, Artificial Sequence
  Oligonucleotide for detection of SNP TSC0003209
tataacccctaaa

SEQ ID NO: 14011 - DNA, 13 bp, Artificial Sequence
  Oligonucleotide for detection of SNP TSC0003209
tgtagtatttgaa

SEQ ID NO: 14012 - DNA, 13 bp, Artificial Sequence
  Oligonucleotide for detection of SNP TSC0003209
ttcaaatactaca

SEQ ID NO: 14013 - DNA, 13 bp, Artificial Sequence
  Oligonucleotide for detection of SNP TSC0003209
tgtagtttttgaa

SEQ ID NO: 14014 - DNA, 13 bp, Artificial Sequence
  Oligonucleotide for detection of SNP TSC0003209
ttcaaaaactaca

SEQ ID NO: 14015 - DNA, 13 bp, Artificial Sequence
  Oligonucleotide for detection of SNP TSC0003210
gataagtgatggg

SEQ ID NO: 14016 - DNA, 13 bp, Artificial Sequence
  Oligonucleotide for detection of SNP TSC0003210
cccatcacttatc

SEQ ID NO: 14017 - DNA, 13 bp, Artificial Sequence
  Oligonucleotide for detection of SNP TSC0003210
gataagcgatggg

SEQ ID NO: 14018 - DNA, 13 bp, Artificial Sequence
  Oligonucleotide for detection of SNP TSC0003210
cccatcgcttatc

SEQ ID NO: 14019 - DNA, 13 bp, Artificial Sequence
  Oligonucleotide for detection of SNP TSC0003210
tttattgtttgty

SEQ ID NO: 14020 - DNA, 13 bp, Artificial Sequence
  Oligonucleotide for detection of SNP TSC0003210
racaaacaataaa

SEQ ID NO: 14021 - DNA, 13 bp, Artificial Sequence
  Oligonucleotide for detection of SNP TSC0003210
tttattatttgty

SEQ ID NO: 14022 - DNA, 13 bp, Artificial Sequence
  Oligonucleotide for detection of SNP TSC0003210
racaaataataaa

SEQ ID NO: 14023 - DNA, 13 bp, Artificial Sequence
  Oligonucleotide for detection of SNP TSC0003210
tttatcgtttgty

SEQ ID NO: 14024 - DNA, 13 bp, Artificial Sequence
  Oligonucleotide for detection of SNP TSC0003210
racaaacgataaa

SEQ ID NO: 14025 - DNA, 13 bp, Artificial Sequence
  Oligonucleotide for detection of SNP TSC0003211
aaattaataattt

SEQ ID NO: 14026 - DNA, 13 bp, Artificial Sequence
  Oligonucleotide for detection of SNP TSC0003211
aaattattaattt

SEQ ID NO: 14027 - DNA, 13 bp, Artificial Sequence
  Oligonucleotide for detection of SNP TSC0003211
aaattagtaattt

SEQ ID NO: 14028 - DNA, 13 bp, Artificial Sequence
  Oligonucleotide for detection of SNP TSC0003211
aaattactaattt

SEQ ID NO: 14029 - DNA, 13 bp, Artificial Sequence
  Oligonucleotide for detection of SNP TSC0003212
gatttatgtgtgy

SEQ ID NO: 14030 - DNA, 13 bp, Artificial Sequence
  Oligonucleotide for detection of SNP TSC0003212
rcacacataaatc

SEQ ID NO: 14031 - DNA, 13 bp, Artificial Sequence
  Oligonucleotide for detection of SNP TSC0003212
gatttaggtgtgy

SEQ ID NO: 14032 - DNA, 13 bp, Artificial Sequence
  Oligonucleotide for detection of SNP TSC0003212
rcacacctaaatc

SEQ ID NO: 14033 - DNA, 13 bp, Artificial Sequence
  Oligonucleotide for detection of SNP TSC0003212
gatttacgtgtgy

SEQ ID NO: 14034 - DNA, 13 bp, Artificial Sequence
  Oligonucleotide for detection of SNP TSC0003212
rcacacgtaaatc

SEQ ID NO: 14035 - DNA, 13 bp, Artificial Sequence
  Oligonucleotide for detection of SNP TSC0003212
gatttaggtgcgy

SEQ ID NO: 14036 - DNA, 13 bp, Artificial Sequence
  Oligonucleotide for detection of SNP TSC0003212
rcgcacctaaatc

SEQ ID NO: 14037 - DNA, 13 bp, Artificial Sequence
  Oligonucleotide for detection of SNP TSC0003212
gatttatgtgcgy

SEQ ID NO: 14038 - DNA, 13 bp, Artificial Sequence
  Oligonucleotide for detection of SNP TSC0003212
rcgcacataaatc

SEQ ID NO: 14039 - DNA, 13 bp, Artificial Sequence
  Oligonucleotide for detection of SNP TSC0003212
gatttacgtgcgy

SEQ ID NO: 14040 - DNA, 13 bp, Artificial Sequence
  Oligonucleotide for detection of SNP TSC0003212
rcgcacgtaaatc

SEQ ID NO: 14041 - DNA, 13 bp, Artificial Sequence
  Oligonucleotide for detection of SNP TSC0003212
gtgtatgtaagty

SEQ ID NO: 14042 - DNA, 13 bp, Artificial Sequence
  Oligonucleotide for detection of SNP TSC0003212
racttacatacac

SEQ ID NO: 14043 - DNA, 13 bp, Artificial Sequence
  Oligonucleotide for detection of SNP TSC0003212
gtgtatttaagty

SEQ ID NO: 14044 - DNA, 13 bp, Artificial Sequence
  Oligonucleotide for detection of SNP TSC0003212
racttaaatacac

SEQ ID NO: 14045 - DNA, 13 bp, Artificial Sequence
  Oligonucleotide for detection of SNP TSC0003212
gcgtatgtaagty

SEQ ID NO: 14046 - DNA, 13 bp, Artificial Sequence
  Oligonucleotide for detection of SNP TSC0003212
racttacatacgc

SEQ ID NO: 14047 - DNA, 13 bp, Artificial Sequence
  Oligonucleotide for detection of SNP TSC0003212
gcgtatttaagty

SEQ ID NO: 14048 - DNA, 13 bp, Artificial Sequence
  Oligonucleotide for detection of SNP TSC0003212
racttaaatacgc

SEQ ID NO: 14049 - DNA, 13 bp, Artificial Sequence
  Oligonucleotide for detection of SNP TSC0003212
gtgtacgtaagty

SEQ ID NO: 14050 - DNA, 13 bp, Artificial Sequence
  Oligonucleotide for detection of SNP TSC0003212
racttacgtacac

SEQ ID NO: 14051 - DNA, 13 bp, Artificial Sequence
  Oligonucleotide for detection of SNP TSC0003212
gcgtacgtaagty

SEQ ID NO: 14052 - DNA, 13 bp, Artificial Sequence
  Oligonucleotide for detection of SNP TSC0003212
racttacgtacgc

SEQ ID NO: 14053 - DNA, 13 bp, Artificial Sequence
  Oligonucleotide for detection of SNP TSC0003213
gtattgagttttt

SEQ ID NO: 14054 - DNA, 13 bp, Artificial Sequence
  Oligonucleotide for detection of SNP TSC0003213
aaaaactcaatac

SEQ ID NO: 14055 - DNA, 13 bp, Artificial Sequence
  Oligonucleotide for detection of SNP TSC0003213
gtattgggttttt

SEQ ID NO: 14056 - DNA, 13 bp, Artificial Sequence
  Oligonucleotide for detection of SNP TSC0003213
aaaaacccaatac

SEQ ID NO: 14057 - DNA, 13 bp, Artificial Sequence
  Oligonucleotide for detection of SNP TSC0003214
gtataaattaagt

SEQ ID NO: 14058 - DNA, 13 bp, Artificial Sequence
  Oligonucleotide for detection of SNP TSC0003214
acttaatttatac

SEQ ID NO: 14059 - DNA, 13 bp, Artificial Sequence
  Oligonucleotide for detection of SNP TSC0003214
gtataagttaagt

SEQ ID NO: 14060 - DNA, 13 bp, Artificial Sequence
  Oligonucleotide for detection of SNP TSC0003214
acttaacttatac

SEQ ID NO: 14061 - DNA, 13 bp, Artificial Sequence
  Oligonucleotide for detection of SNP TSC0003215
gtagaatgggagt

SEQ ID NO: 14062 - DNA, 13 bp, Artificial Sequence
  Oligonucleotide for detection of SNP TSC0003215
actcccattctac

SEQ ID NO: 14063 - DNA, 13 bp, Artificial Sequence
  Oligonucleotide for detection of SNP TSC0003215
gtagaacgggagt

SEQ ID NO: 14064 - DNA, 13 bp, Artificial Sequence
  Oligonucleotide for detection of SNP TSC0003215
actcccgttctac

SEQ ID NO: 14065 - DNA, 13 bp, Artificial Sequence
  Oligonucleotide for detection of SNP TSC0003215
atttttgttttgy

SEQ ID NO: 14066 - DNA, 13 bp, Artificial Sequence
  Oligonucleotide for detection of SNP TSC0003215
rcaaaacaaaaat

SEQ ID NO: 14067 - DNA, 13 bp, Artificial Sequence
  Oligonucleotide for detection of SNP TSC0003215
atttttattttgy

SEQ ID NO: 14068 - DNA, 13 bp, Artificial Sequence
  Oligonucleotide for detection of SNP TSC0003215
rcaaaataaaaat

SEQ ID NO: 14069 - DNA, 13 bp, Artificial Sequence
  Oligonucleotide for detection of SNP TSC0003215
attttcgttttgy

SEQ ID NO: 14070 - DNA, 13 bp, Artificial Sequence
  Oligonucleotide for detection of SNP TSC0003215
rcaaaacgaaaat

SEQ ID NO: 14071 - DNA, 13 bp, Artificial Sequence
  Oligonucleotide for detection of SNP TSC0003216
attttagttattt

SEQ ID NO: 14072 - DNA, 13 bp, Artificial Sequence
  Oligonucleotide for detection of SNP TSC0003216
aaataactaaaat

SEQ ID NO: 14073 - DNA, 13 bp, Artificial Sequence
  Oligonucleotide for detection of SNP TSC0003216
attttaattattt

SEQ ID NO: 14074 - DNA, 13 bp, Artificial Sequence
  Oligonucleotide for detection of SNP TSC0003216
aaataattaaaat

SEQ ID NO: 14075 - DNA, 13 bp, Artificial Sequence
  Oligonucleotide for detection of SNP TSC0003217
aatttatgaagtt

SEQ ID NO: 14076 - DNA, 13 bp, Artificial Sequence
  Oligonucleotide for detection of SNP TSC0003217
aacttcataaatt

SEQ ID NO: 14077 - DNA, 13 bp, Artificial Sequence
  Oligonucleotide for detection of SNP TSC0003217
aatttacgaagtt

SEQ ID NO: 14078 - DNA, 13 bp, Artificial Sequence
  Oligonucleotide for detection of SNP TSC0003217
aacttcgtaaatt

SEQ ID NO: 14079 - DNA, 13 bp, Artificial Sequence
  Oligonucleotide for detection of SNP TSC0003217
aattttgtggatt

SEQ ID NO: 14080 - DNA, 13 bp, Artificial Sequence
  Oligonucleotide for detection of SNP TSC0003217
aatccacaaaatt

SEQ ID NO: 14081 - DNA, 13 bp, Artificial Sequence
  Oligonucleotide for detection of SNP TSC0003217
aattttatggatt

SEQ ID NO: 14082 - DNA, 13 bp, Artificial Sequence
  Oligonucleotide for detection of SNP TSC0003217
aatccataaaatt

SEQ ID NO: 14083 - DNA, 13 bp, Artificial Sequence
  Oligonucleotide for detection of SNP TSC0003217
aatttcgtggatt

SEQ ID NO: 14084 - DNA, 13 bp, Artificial Sequence
  Oligonucleotide for detection of SNP TSC0003217
aatccacgaaatt

SEQ ID NO: 14085 - DNA, 13 bp, Artificial Sequence
  Oligonucleotide for detection of SNP TSC0003218
tattatgtgagat

SEQ ID NO: 14086 - DNA, 13 bp, Artificial Sequence
  Oligonucleotide for detection of SNP TSC0003218
atctcacataata

SEQ ID NO: 14087 - DNA, 13 bp, Artificial Sequence
  Oligonucleotide for detection of SNP TSC0003218
tattatatgagat

SEQ ID NO: 14088 - DNA, 13 bp, Artificial Sequence
  Oligonucleotide for detection of SNP TSC0003218
atctcatataata

SEQ ID NO: 14089 - DNA, 13 bp, Artificial Sequence
  Oligonucleotide for detection of SNP TSC0003219
tattttgttagay

SEQ ID NO: 14090 - DNA, 13 bp, Artificial Sequence
  Oligonucleotide for detection of SNP TSC0003219
rtctaacaaaata

SEQ ID NO: 14091 - DNA, 13 bp, Artificial Sequence
  Oligonucleotide for detection of SNP TSC0003219
tattttattagay

SEQ ID NO: 14092 - DNA, 13 bp, Artificial Sequence
  Oligonucleotide for detection of SNP TSC0003219
rtctaataaaata

SEQ ID NO: 14093 - DNA, 13 bp, Artificial Sequence
  Oligonucleotide for detection of SNP TSC0003220
attttagttttgt

SEQ ID NO: 14094 - DNA, 13 bp, Artificial Sequence
  Oligonucleotide for detection of SNP TSC0003220
acaaaactaaaat

SEQ ID NO: 14095 - DNA, 13 bp, Artificial Sequence
  Oligonucleotide for detection of SNP TSC0003220
attttaattttgt

SEQ ID NO: 14096 - DNA, 13 bp, Artificial Sequence
  Oligonucleotide for detection of SNP TSC0003220
acaaaattaaaat

SEQ ID NO: 14097 - DNA, 13 bp, Artificial Sequence
  Oligonucleotide for detection of SNP TSC0003221
atggggtgttatt

SEQ ID NO: 14098 - DNA, 13 bp, Artificial Sequence
  Oligonucleotide for detection of SNP TSC0003221
aataacaccccat

SEQ ID NO: 14099 - DNA, 13 bp, Artificial Sequence
  Oligonucleotide for detection of SNP TSC0003221
atggggcgttatt

SEQ ID NO: 14100 - DNA, 13 bp, Artificial Sequence
  Oligonucleotide for detection of SNP TSC0003221
aataacgccccat

SEQ ID NO: 14101 - DNA, 13 bp, Artificial Sequence
  Oligonucleotide for detection of SNP TSC0003221
agtaatgttttat

SEQ ID NO: 14102 - DNA, 13 bp, Artificial Sequence
  Oligonucleotide for detection of SNP TSC0003221
ataaaacattact

SEQ ID NO: 14103 - DNA, 13 bp, Artificial Sequence
  Oligonucleotide for detection of SNP TSC0003221
agtaatattttat

SEQ ID NO: 14104 - DNA, 13 bp, Artificial Sequence
  Oligonucleotide for detection of SNP TSC0003221
ataaaatattact

SEQ ID NO: 14105 - DNA, 13 bp, Artificial Sequence
  Oligonucleotide for detection of SNP TSC0003221
agtaacgttttat

SEQ ID NO: 14106 - DNA, 13 bp, Artificial Sequence
  Oligonucleotide for detection of SNP TSC0003221
ataaaacgttact

SEQ ID NO: 14107 - DNA, 13 bp, Artificial Sequence
  Oligonucleotide for detection of SNP TSC0003222
agagaaataatga

SEQ ID NO: 14108 - DNA, 13 bp, Artificial Sequence
  Oligonucleotide for detection of SNP TSC0003222
tcattatttctct

SEQ ID NO: 14109 - DNA, 13 bp, Artificial Sequence
  Oligonucleotide for detection of SNP TSC0003222
agagaagtaatga

SEQ ID NO: 14110 - DNA, 13 bp, Artificial Sequence
  Oligonucleotide for detection of SNP TSC0003222
tcattacttctct

SEQ ID NO: 14111 - DNA, 13 bp, Artificial Sequence
  Oligonucleotide for detection of SNP TSC0003223
ttgaggtggatgg

SEQ ID NO: 14112 - DNA, 13 bp, Artificial Sequence
  Oligonucleotide for detection of SNP TSC0003223
ccatccacctcaa

SEQ ID NO: 14113 - DNA, 13 bp, Artificial Sequence
  Oligonucleotide for detection of SNP TSC0003223
tcgaggtggatgg

SEQ ID NO: 14114 - DNA, 13 bp, Artificial Sequence
  Oligonucleotide for detection of SNP TSC0003223
ccatccacctcga

SEQ ID NO: 14115 - DNA, 13 bp, Artificial Sequence
  Oligonucleotide for detection of SNP TSC0003223
ttgaggcggatgg

SEQ ID NO: 14116 - DNA, 13 bp, Artificial Sequence
  Oligonucleotide for detection of SNP TSC0003223
ccatccgcctcaa

SEQ ID NO: 14117 - DNA, 13 bp, Artificial Sequence
  Oligonucleotide for detection of SNP TSC0003223
ttgaggtggacgg

SEQ ID NO: 14118 - DNA, 13 bp, Artificial Sequence
  Oligonucleotide for detection of SNP TSC0003223
ccgtccacctcaa

SEQ ID NO: 14119 - DNA, 13 bp, Artificial Sequence
  Oligonucleotide for detection of SNP TSC0003223
tcgaggtggacgg

SEQ ID NO: 14120 - DNA, 13 bp, Artificial Sequence
  Oligonucleotide for detection of SNP TSC0003223
ccgtccacctcga

SEQ ID NO: 14121 - DNA, 13 bp, Artificial Sequence
  Oligonucleotide for detection of SNP TSC0003223
tcgaggcggatgg

SEQ ID NO: 14122 - DNA, 13 bp, Artificial Sequence
  Oligonucleotide for detection of SNP TSC0003223
ccatccgcctcga

SEQ ID NO: 14123 - DNA, 13 bp, Artificial Sequence
  Oligonucleotide for detection of SNP TSC0003223
ttgaggcggacgg

SEQ ID NO: 14124 - DNA, 13 bp, Artificial Sequence
  Oligonucleotide for detection of SNP TSC0003223
ccgtccgcctcaa

SEQ ID NO: 14125 - DNA, 13 bp, Artificial Sequence
  Oligonucleotide for detection of SNP TSC0003223
tcgaggcggacgg

SEQ ID NO: 14126 - DNA, 13 bp, Artificial Sequence
  Oligonucleotide for detection of SNP TSC0003223
ccgtccgcctcga

SEQ ID NO: 14127 - DNA, 13 bp, Artificial Sequence
  Oligonucleotide for detection of SNP TSC0003223
tcgtttgttttgg

SEQ ID NO: 14128 - DNA, 13 bp, Artificial Sequence
  Oligonucleotide for detection of SNP TSC0003223
ccaaaacaaacga

SEQ ID NO: 14129 - DNA, 13 bp, Artificial Sequence
  Oligonucleotide for detection of SNP TSC0003223
tcgtttattttgg

SEQ ID NO: 14130 - DNA, 13 bp, Artificial Sequence
  Oligonucleotide for detection of SNP TSC0003223
ccaaaataaacga

SEQ ID NO: 14131 - DNA, 13 bp, Artificial Sequence
  Oligonucleotide for detection of SNP TSC0003223
ttgtttatttcgg

SEQ ID NO: 14132 - DNA, 13 bp, Artificial Sequence
  Oligonucleotide for detection of SNP TSC0003223
ccgaaataaacaa

SEQ ID NO: 14133 - DNA, 13 bp, Artificial Sequence
  Oligonucleotide for detection of SNP TSC0003223
ttgtttgtttcgg

SEQ ID NO: 14134 - DNA, 13 bp, Artificial Sequence
  Oligonucleotide for detection of SNP TSC0003223
ccgaaacaaacaa

SEQ ID NO: 14135 - DNA, 13 bp, Artificial Sequence
  Oligonucleotide for detection of SNP TSC0003223
tcgtttatttcgg

SEQ ID NO: 14136 - DNA, 13 bp, Artificial Sequence
  Oligonucleotide for detection of SNP TSC0003223
ccgaaataaacga

SEQ ID NO: 14137 - DNA, 13 bp, Artificial Sequence
  Oligonucleotide for detection of SNP TSC0003223
tcgttcgttttgg

SEQ ID NO: 14138 - DNA, 13 bp, Artificial Sequence
  Oligonucleotide for detection of SNP TSC0003223
ccaaaacgaacga

SEQ ID NO: 14139 - DNA, 13 bp, Artificial Sequence
  Oligonucleotide for detection of SNP TSC0003223
tcgtttgtttcgg

SEQ ID NO: 14140 - DNA, 13 bp, Artificial Sequence
  Oligonucleotide for detection of SNP TSC0003223
ccgaaacaaacga

SEQ ID NO: 14141 - DNA, 13 bp, Artificial Sequence
  Oligonucleotide for detection of SNP TSC0003223
ttgttcgtttcgg

SEQ ID NO: 14142 - DNA, 13 bp, Artificial Sequence
  Oligonucleotide for detection of SNP TSC0003223
ccgaaacgaacaa

SEQ ID NO: 14143 - DNA, 13 bp, Artificial Sequence
  Oligonucleotide for detection of SNP TSC0003223
tcgttcgtttcgg

SEQ ID NO: 14144 - DNA, 13 bp, Artificial Sequence
  Oligonucleotide for detection of SNP TSC0003223
ccgaaacgaacga

SEQ ID NO: 14145 - DNA, 13 bp, Artificial Sequence
  Oligonucleotide for detection of SNP TSC0003224
atttgtatatata

SEQ ID NO: 14146 - DNA, 13 bp, Artificial Sequence
  Oligonucleotide for detection of SNP TSC0003224
tatatatacaaat

SEQ ID NO: 14147 - DNA, 13 bp, Artificial Sequence
  Oligonucleotide for detection of SNP TSC0003224
atttgtgtatata

SEQ ID NO: 14148 - DNA, 13 bp, Artificial Sequence
  Oligonucleotide for detection of SNP TSC0003224
tatatacacaaat

SEQ ID NO: 14149 - DNA, 13 bp, Artificial Sequence
  Oligonucleotide for detection of SNP TSC0003224
atttgcgtatata

SEQ ID NO: 14150 - DNA, 13 bp, Artificial Sequence
  Oligonucleotide for detection of SNP TSC0003224
tatatacgcaaat

SEQ ID NO: 14151 - DNA, 13 bp, Artificial Sequence
  Oligonucleotide for detection of SNP TSC0003224
tatatatgtaaat

SEQ ID NO: 14152 - DNA, 13 bp, Artificial Sequence
  Oligonucleotide for detection of SNP TSC0003224
atttacatatata

SEQ ID NO: 14153 - DNA, 13 bp, Artificial Sequence
  Oligonucleotide for detection of SNP TSC0003224
tatatacgtaaat

SEQ ID NO: 14154 - DNA, 13 bp, Artificial Sequence
  Oligonucleotide for detection of SNP TSC0003224
atttacgtatata

SEQ ID NO: 14155 - DNA, 13 bp, Artificial Sequence
  Oligonucleotide for detection of SNP TSC0003228
ggttgtatatatg

SEQ ID NO: 14156 - DNA, 13 bp, Artificial Sequence
  Oligonucleotide for detection of SNP TSC0003228
catatatacaacc

SEQ ID NO: 14157 - DNA, 13 bp, Artificial Sequence
  Oligonucleotide for detection of SNP TSC0003228
ggttgtgtatatg

SEQ ID NO: 14158 - DNA, 13 bp, Artificial Sequence
  Oligonucleotide for detection of SNP TSC0003228
catatacacaacc

SEQ ID NO: 14159 - DNA, 13 bp, Artificial Sequence
  Oligonucleotide for detection of SNP TSC0003228
ggttgcgtatatg

SEQ ID NO: 14160 - DNA, 13 bp, Artificial Sequence
  Oligonucleotide for detection of SNP TSC0003228
catatacgcaacc

SEQ ID NO: 14161 - DNA, 13 bp, Artificial Sequence
  Oligonucleotide for detection of SNP TSC0003228
tatatatgtaaty

SEQ ID NO: 14162 - DNA, 13 bp, Artificial Sequence
  Oligonucleotide for detection of SNP TSC0003228
rattacatatata

SEQ ID NO: 14163 - DNA, 13 bp, Artificial Sequence
  Oligonucleotide for detection of SNP TSC0003228
tatatacgtaaty

SEQ ID NO: 14164 - DNA, 13 bp, Artificial Sequence
  Oligonucleotide for detection of SNP TSC0003228
rattacgtatata

SEQ ID NO: 14165 - DNA, 13 bp, Artificial Sequence
  Oligonucleotide for detection of SNP TSC0003230
attaagttttatt

SEQ ID NO: 14166 - DNA, 13 bp, Artificial Sequence
  Oligonucleotide for detection of SNP TSC0003230
aataaaacttaat

SEQ ID NO: 14167 - DNA, 13 bp, Artificial Sequence
  Oligonucleotide for detection of SNP TSC0003230
attaaggtttatt

SEQ ID NO: 14168 - DNA, 13 bp, Artificial Sequence
  Oligonucleotide for detection of SNP TSC0003230
aataaaccttaat

SEQ ID NO: 14169 - DNA, 13 bp, Artificial Sequence
  Oligonucleotide for detection of SNP TSC0003230
agtggggtttgat

SEQ ID NO: 14170 - DNA, 13 bp, Artificial Sequence
  Oligonucleotide for detection of SNP TSC0003230
atcaaaccccact

SEQ ID NO: 14171 - DNA, 13 bp, Artificial Sequence
  Oligonucleotide for detection of SNP TSC0003230
agtgggttttgat

SEQ ID NO: 14172 - DNA, 13 bp, Artificial Sequence
  Oligonucleotide for detection of SNP TSC0003230
atcaaaacccact

SEQ ID NO: 14173 - DNA, 13 bp, Artificial Sequence
  Oligonucleotide for detection of SNP TSC0003234
gtatgtatgtgta

SEQ ID NO: 14174 - DNA, 13 bp, Artificial Sequence
  Oligonucleotide for detection of SNP TSC0003234
tacacatacatac

SEQ ID NO: 14175 - DNA, 13 bp, Artificial Sequence
  Oligonucleotide for detection of SNP TSC0003234
gtatgtgtgtgta

SEQ ID NO: 14176 - DNA, 13 bp, Artificial Sequence
  Oligonucleotide for detection of SNP TSC0003234
tacacacacatac

SEQ ID NO: 14177 - DNA, 13 bp, Artificial Sequence
  Oligonucleotide for detection of SNP TSC0003234
gtacgtatgtgta

SEQ ID NO: 14178 - DNA, 13 bp, Artificial Sequence
  Oligonucleotide for detection of SNP TSC0003234
tacacatacgtac

SEQ ID NO: 14179 - DNA, 13 bp, Artificial Sequence
  Oligonucleotide for detection of SNP TSC0003234
gtacgtgtgtgta

SEQ ID NO: 14180 - DNA, 13 bp, Artificial Sequence
  Oligonucleotide for detection of SNP TSC0003234
tacacacacgtac

SEQ ID NO: 14181 - DNA, 13 bp, Artificial Sequence
  Oligonucleotide for detection of SNP TSC0003234
gtatgtacgtgta

SEQ ID NO: 14182 - DNA, 13 bp, Artificial Sequence
  Oligonucleotide for detection of SNP TSC0003234
tacacgtacatac

SEQ ID NO: 14183 - DNA, 13 bp, Artificial Sequence
  Oligonucleotide for detection of SNP TSC0003234
gtatgcgtgtgta

SEQ ID NO: 14184 - DNA, 13 bp, Artificial Sequence
  Oligonucleotide for detection of SNP TSC0003234
tacacacgcatac

SEQ ID NO: 14185 - DNA, 13 bp, Artificial Sequence
  Oligonucleotide for detection of SNP TSC0003234
gtatgtatgcgta

SEQ ID NO: 14186 - DNA, 13 bp, Artificial Sequence
  Oligonucleotide for detection of SNP TSC0003234
tacgcatacatac

SEQ ID NO: 14187 - DNA, 13 bp, Artificial Sequence
  Oligonucleotide for detection of SNP TSC0003234
gtatgtgcgtgta

SEQ ID NO: 14188 - DNA, 13 bp, Artificial Sequence
  Oligonucleotide for detection of SNP TSC0003234
tacacgcacatac

SEQ ID NO: 14189 - DNA, 13 bp, Artificial Sequence
  Oligonucleotide for detection of SNP TSC0003234
gtacgtacgtgta

SEQ ID NO: 14190 - DNA, 13 bp, Artificial Sequence
  Oligonucleotide for detection of SNP TSC0003234
tacacgtacgtac

SEQ ID NO: 14191 - DNA, 13 bp, Artificial Sequence
  Oligonucleotide for detection of SNP TSC0003234
gtatgtgtgcgta

SEQ ID NO: 14192 - DNA, 13 bp, Artificial Sequence
  Oligonucleotide for detection of SNP TSC0003234
tacgcacacatac

SEQ ID NO: 14193 - DNA, 13 bp, Artificial Sequence
  Oligonucleotide for detection of SNP TSC0003234
gtacgtatgcgta

SEQ ID NO: 14194 - DNA, 13 bp, Artificial Sequence
  Oligonucleotide for detection of SNP TSC0003234
tacgcatacgtac

SEQ ID NO: 14195 - DNA, 13 bp, Artificial Sequence
  Oligonucleotide for detection of SNP TSC0003234
gtacgcgtgtgta

SEQ ID NO: 14196 - DNA, 13 bp, Artificial Sequence
  Oligonucleotide for detection of SNP TSC0003234
tacacacgcgtac

SEQ ID NO: 14197 - DNA, 13 bp, Artificial Sequence
  Oligonucleotide for detection of SNP TSC0003234
gtatgtacgcgta

SEQ ID NO: 14198 - DNA, 13 bp, Artificial Sequence
  Oligonucleotide for detection of SNP TSC0003234
tacgcgtacatac

SEQ ID NO: 14199 - DNA, 13 bp, Artificial Sequence
  Oligonucleotide for detection of SNP TSC0003234
gtacgtgcgtgta

SEQ ID NO: 14200 - DNA, 13 bp, Artificial Sequence
  Oligonucleotide for detection of SNP TSC0003234
tacacgcacgtac

SEQ ID NO: 14201 - DNA, 13 bp, Artificial Sequence
  Oligonucleotide for detection of SNP TSC0003234
gtacgtacgcgta

SEQ ID NO: 14202 - DNA, 13 bp, Artificial Sequence
  Oligonucleotide for detection of SNP TSC0003234
tacgcgtacgtac

SEQ ID NO: 14203 - DNA, 13 bp, Artificial Sequence
  Oligonucleotide for detection of SNP TSC0003234
gtacgtgtgcgta

SEQ ID NO: 14204 - DNA, 13 bp, Artificial Sequence
  Oligonucleotide for detection of SNP TSC0003234
tacgcacacgtac

SEQ ID NO: 14205 - DNA, 13 bp, Artificial Sequence
  Oligonucleotide for detection of SNP TSC0003234
gtatgcgcgtgta

SEQ ID NO: 14206 - DNA, 13 bp, Artificial Sequence
  Oligonucleotide for detection of SNP TSC0003234
tacacgcgcatac

SEQ ID NO: 14207 - DNA, 13 bp, Artificial Sequence
  Oligonucleotide for detection of SNP TSC0003234
gtatgcgtgcgta

SEQ ID NO: 14208 - DNA, 13 bp, Artificial Sequence
  Oligonucleotide for detection of SNP TSC0003234
tacgcacgcatac

SEQ ID NO: 14209 - DNA, 13 bp, Artificial Sequence
  Oligonucleotide for detection of SNP TSC0003234
gtatgtgcgcgta

SEQ ID NO: 14210 - DNA, 13 bp, Artificial Sequence
  Oligonucleotide for detection of SNP TSC0003234
tacgcgcacatac

SEQ ID NO: 14211 - DNA, 13 bp, Artificial Sequence
  Oligonucleotide for detection of SNP TSC0003234
gtacgcgcgtgta

SEQ ID NO: 14212 - DNA, 13 bp, Artificial Sequence
  Oligonucleotide for detection of SNP TSC0003234
tacacgcgcgtac

SEQ ID NO: 14213 - DNA, 13 bp, Artificial Sequence
  Oligonucleotide for detection of SNP TSC0003234
gtacgcgtgcgta

SEQ ID NO: 14214 - DNA, 13 bp, Artificial Sequence
  Oligonucleotide for detection of SNP TSC0003234
tacgcacgcgtac

SEQ ID NO: 14215 - DNA, 13 bp, Artificial Sequence
  Oligonucleotide for detection of SNP TSC0003234
gtacgtgcgcgta

SEQ ID NO: 14216 - DNA, 13 bp, Artificial Sequence
  Oligonucleotide for detection of SNP TSC0003234
tacgcgcacgtac

SEQ ID NO: 14217 - DNA, 13 bp, Artificial Sequence
  Oligonucleotide for detection of SNP TSC0003234
gtatgcgcgcgta

SEQ ID NO: 14218 - DNA, 13 bp, Artificial Sequence
  Oligonucleotide for detection of SNP TSC0003234
tacgcgcgcatac

SEQ ID NO: 14219 - DNA, 13 bp, Artificial Sequence
  Oligonucleotide for detection of SNP TSC0003234
gtacgcgcgcgta

SEQ ID NO: 14220 - DNA, 13 bp, Artificial Sequence
  Oligonucleotide for detection of SNP TSC0003234
tacgcgcgcgtac

SEQ ID NO: 14221 - DNA, 13 bp, Artificial Sequence
  Oligonucleotide for detection of SNP TSC0003234
tgtgtgtgtgtgy

SEQ ID NO: 14222 - DNA, 13 bp, Artificial Sequence
  Oligonucleotide for detection of SNP TSC0003234
rcacacacacaca

SEQ ID NO: 14223 - DNA, 13 bp, Artificial Sequence
  Oligonucleotide for detection of SNP TSC0003234
tgcgtgtgtgtgy

SEQ ID NO: 14224 - DNA, 13 bp, Artificial Sequence
  Oligonucleotide for detection of SNP TSC0003234
rcacacacacgca

SEQ ID NO: 14225 - DNA, 13 bp, Artificial Sequence
  Oligonucleotide for detection of SNP TSC0003234
tgtgcgtgtgtgy

SEQ ID NO: 14226 - DNA, 13 bp, Artificial Sequence
  Oligonucleotide for detection of SNP TSC0003234
rcacacacgcaca

SEQ ID NO: 14227 - DNA, 13 bp, Artificial Sequence
  Oligonucleotide for detection of SNP TSC0003234
tgtgtgtgcgtgy

SEQ ID NO: 14228 - DNA, 13 bp, Artificial Sequence
  Oligonucleotide for detection of SNP TSC0003234
rcacgcacacaca

SEQ ID NO: 14229 - DNA, 13 bp, Artificial Sequence
  Oligonucleotide for detection of SNP TSC0003234
tgtgtgcgtgtgy

SEQ ID NO: 14230 - DNA, 13 bp, Artificial Sequence
  Oligonucleotide for detection of SNP TSC0003234
rcacacgcacaca

SEQ ID NO: 14231 - DNA, 13 bp, Artificial Sequence
  Oligonucleotide for detection of SNP TSC0003234
tgcgcgtgtgtgy

SEQ ID NO: 14232 - DNA, 13 bp, Artificial Sequence
  Oligonucleotide for detection of SNP TSC0003234
rcacacacgcgca

SEQ ID NO: 14233 - DNA, 13 bp, Artificial Sequence
  Oligonucleotide for detection of SNP TSC0003234
tgcgtgtgcgtgy

SEQ ID NO: 14234 - DNA, 13 bp, Artificial Sequence
  Oligonucleotide for detection of SNP TSC0003234
rcacgcacacgca

SEQ ID NO: 14235 - DNA, 13 bp, Artificial Sequence
  Oligonucleotide for detection of SNP TSC0003234
tgtgcgtgcgtgy

SEQ ID NO: 14236 - DNA, 13 bp, Artificial Sequence
  Oligonucleotide for detection of SNP TSC0003234
rcacgcacgcaca

SEQ ID NO: 14237 - DNA, 13 bp, Artificial Sequence
  Oligonucleotide for detection of SNP TSC0003234
tgcgtgcgtgtgy

SEQ ID NO: 14238 - DNA, 13 bp, Artificial Sequence
  Oligonucleotide for detection of SNP TSC0003234
rcacacgcacgca

SEQ ID NO: 14239 - DNA, 13 bp, Artificial Sequence
  Oligonucleotide for detection of SNP TSC0003234
tgcgcgtgcgtgy

SEQ ID NO: 14240 - DNA, 13 bp, Artificial Sequence
  Oligonucleotide for detection of SNP TSC0003234
rcacgcacgcgca

SEQ ID NO: 14241 - DNA, 13 bp, Artificial Sequence
  Oligonucleotide for detection of SNP TSC0003234
tgtgcgcgtgtgy

SEQ ID NO: 14242 - DNA, 13 bp, Artificial Sequence
  Oligonucleotide for detection of SNP TSC0003234
rcacacgcgcaca

SEQ ID NO: 14243 - DNA, 13 bp, Artificial Sequence
  Oligonucleotide for detection of SNP TSC0003234
tgtgtgcgcgtgy

SEQ ID NO: 14244 - DNA, 13 bp, Artificial Sequence
  Oligonucleotide for detection of SNP TSC0003234
rcacgcgcacaca

SEQ ID NO: 14245 - DNA, 13 bp, Artificial Sequence
  Oligonucleotide for detection of SNP TSC0003234
tgcgcgcgtgtgy

SEQ ID NO: 14246 - DNA, 13 bp, Artificial Sequence
  Oligonucleotide for detection of SNP TSC0003234
rcacacgcgcgca

SEQ ID NO: 14247 - DNA, 13 bp, Artificial Sequence
  Oligonucleotide for detection of SNP TSC0003234
tgcgtgcgcgtgy

SEQ ID NO: 14248 - DNA, 13 bp, Artificial Sequence
  Oligonucleotide for detection of SNP TSC0003234
rcacgcgcacgca

SEQ ID NO: 14249 - DNA, 13 bp, Artificial Sequence
  Oligonucleotide for detection of SNP TSC0003234
tgtgcgcgcgtgy

SEQ ID NO: 14250 - DNA, 13 bp, Artificial Sequence
  Oligonucleotide for detection of SNP TSC0003234
rcacgcgcgcaca

SEQ ID NO: 14251 - DNA, 13 bp, Artificial Sequence
  Oligonucleotide for detection of SNP TSC0003234
tgcgcgcgcgtgy

SEQ ID NO: 14252 - DNA, 13 bp, Artificial Sequence
  Oligonucleotide for detection of SNP TSC0003234
rcacgcgcgcgca

SEQ ID NO: 14253 - DNA, 13 bp, Artificial Sequence
  Oligonucleotide for detection of SNP TSC0003235
gatttaaatttat

SEQ ID NO: 14254 - DNA, 13 bp, Artificial Sequence
  Oligonucleotide for detection of SNP TSC0003235
ataaatttaaatc

SEQ ID NO: 14255 - DNA, 13 bp, Artificial Sequence
  Oligonucleotide for detection of SNP TSC0003235
gatttagatttat

SEQ ID NO: 14256 - DNA, 13 bp, Artificial Sequence
  Oligonucleotide for detection of SNP TSC0003235
ataaatctaaatc

SEQ ID NO: 14257 - DNA, 13 bp, Artificial Sequence
  Oligonucleotide for detection of SNP TSC0003236
aaaaaaaagagag

SEQ ID NO: 14258 - DNA, 13 bp, Artificial Sequence
  Oligonucleotide for detection of SNP TSC0003236
ctctctttttttt

SEQ ID NO: 14259 - DNA, 13 bp, Artificial Sequence
  Oligonucleotide for detection of SNP TSC0003236
aaaaaagagagag

SEQ ID NO: 14260 - DNA, 13 bp, Artificial Sequence
  Oligonucleotide for detection of SNP TSC0003236
ctctctctttttt

SEQ ID NO: 14261 - DNA, 13 bp, Artificial Sequence
  Oligonucleotide for detection of SNP TSC0003237
ggaaggattattt

SEQ ID NO: 14262 - DNA, 13 bp, Artificial Sequence
  Oligonucleotide for detection of SNP TSC0003237
aaataatccttcc

SEQ ID NO: 14263 - DNA, 13 bp, Artificial Sequence
  Oligonucleotide for detection of SNP TSC0003237
ggaaggtttattt

SEQ ID NO: 14264 - DNA, 13 bp, Artificial Sequence
  Oligonucleotide for detection of SNP TSC0003237
aaataaaccttcc

SEQ ID NO: 14265 - DNA, 13 bp, Artificial Sequence
  Oligonucleotide for detection of SNP TSC0003237
aagtgatttttty

SEQ ID NO: 14266 - DNA, 13 bp, Artificial Sequence
  Oligonucleotide for detection of SNP TSC0003237
raaaaaatcactt

SEQ ID NO: 14267 - DNA, 13 bp, Artificial Sequence
  Oligonucleotide for detection of SNP TSC0003237
aagtgaattttty

SEQ ID NO: 14268 - DNA, 13 bp, Artificial Sequence
  Oligonucleotide for detection of SNP TSC0003237
raaaaattcactt

SEQ ID NO: 14269 - DNA, 13 bp, Artificial Sequence
  Oligonucleotide for detection of SNP TSC0003238
gaatttaggaggy

SEQ ID NO: 14270 - DNA, 13 bp, Artificial Sequence
  Oligonucleotide for detection of SNP TSC0003238
rcctcctaaattc

SEQ ID NO: 14271 - DNA, 13 bp, Artificial Sequence
  Oligonucleotide for detection of SNP TSC0003238
gaatttgggaggy

SEQ ID NO: 14272 - DNA, 13 bp, Artificial Sequence
  Oligonucleotide for detection of SNP TSC0003238
rcctcccaaattc

SEQ ID NO: 14273 - DNA, 13 bp, Artificial Sequence
  Oligonucleotide for detection of SNP TSC0003238
gaattcgggaggy

SEQ ID NO: 14274 - DNA, 13 bp, Artificial Sequence
  Oligonucleotide for detection of SNP TSC0003238
rcctcccgaattc

SEQ ID NO: 14275 - DNA, 13 bp, Artificial Sequence
  Oligonucleotide for detection of SNP TSC0003238
gttttttgggtty

SEQ ID NO: 14276 - DNA, 13 bp, Artificial Sequence
  Oligonucleotide for detection of SNP TSC0003238
raacccaaaaaac

SEQ ID NO: 14277 - DNA, 13 bp, Artificial Sequence
  Oligonucleotide for detection of SNP TSC0003238
gtttttcgggtty

SEQ ID NO: 14278 - DNA, 13 bp, Artificial Sequence
  Oligonucleotide for detection of SNP TSC0003238
raacccgaaaaac

SEQ ID NO: 14279 - DNA, 13 bp, Artificial Sequence
  Oligonucleotide for detection of SNP TSC0003242
ttgtatatattty

SEQ ID NO: 14280 - DNA, 13 bp, Artificial Sequence
  Oligonucleotide for detection of SNP TSC0003242
raaatatatacaa

SEQ ID NO: 14281 - DNA, 13 bp, Artificial Sequence
  Oligonucleotide for detection of SNP TSC0003242
ttgtatgtattty

SEQ ID NO: 14282 - DNA, 13 bp, Artificial Sequence
  Oligonucleotide for detection of SNP TSC0003242
raaatacatacaa

SEQ ID NO: 14283 - DNA, 13 bp, Artificial Sequence
  Oligonucleotide for detection of SNP TSC0003243
aaaaaagggtttg

SEQ ID NO: 14284 - DNA, 13 bp, Artificial Sequence
  Oligonucleotide for detection of SNP TSC0003243
caaaccctttttt

SEQ ID NO: 14285 - DNA, 13 bp, Artificial Sequence
  Oligonucleotide for detection of SNP TSC0003243
aaaaaaaggtttg

SEQ ID NO: 14286 - DNA, 13 bp, Artificial Sequence
  Oligonucleotide for detection of SNP TSC0003243
caaaccttttttt

SEQ ID NO: 14287 - DNA, 13 bp, Artificial Sequence
  Oligonucleotide for detection of SNP TSC0003244
aaatattgtggtt

SEQ ID NO: 14288 - DNA, 13 bp, Artificial Sequence
  Oligonucleotide for detection of SNP TSC0003244
aaccacaatattt

SEQ ID NO: 14289 - DNA, 13 bp, Artificial Sequence
  Oligonucleotide for detection of SNP TSC0003244
aaatatcgtggtt

SEQ ID NO: 14290 - DNA, 13 bp, Artificial Sequence
  Oligonucleotide for detection of SNP TSC0003244
aaccacgatattt

SEQ ID NO: 14291 - DNA, 13 bp, Artificial Sequence
  Oligonucleotide for detection of SNP TSC0003244
agttatggtgttt

SEQ ID NO: 14292 - DNA, 13 bp, Artificial Sequence
  Oligonucleotide for detection of SNP TSC0003244
aaacaccataact

SEQ ID NO: 14293 - DNA, 13 bp, Artificial Sequence
  Oligonucleotide for detection of SNP TSC0003244
agttatagtgttt

SEQ ID NO: 14294 - DNA, 13 bp, Artificial Sequence
  Oligonucleotide for detection of SNP TSC0003244
aaacactataact

SEQ ID NO: 14295 - DNA, 13 bp, Artificial Sequence
  Oligonucleotide for detection of SNP TSC0003244
agttacggtgttt

SEQ ID NO: 14296 - DNA, 13 bp, Artificial Sequence
  Oligonucleotide for detection of SNP TSC0003244
aaacaccgtaact

SEQ ID NO: 14297 - DNA, 13 bp, Artificial Sequence
  Oligonucleotide for detection of SNP TSC0003245
tgtatagtattaa

SEQ ID NO: 14298 - DNA, 13 bp, Artificial Sequence
  Oligonucleotide for detection of SNP TSC0003245
ttaatactataca

SEQ ID NO: 14299 - DNA, 13 bp, Artificial Sequence
  Oligonucleotide for detection of SNP TSC0003245
tgtataatattaa

SEQ ID NO: 14300 - DNA, 13 bp, Artificial Sequence
  Oligonucleotide for detection of SNP TSC0003245
ttaatattataca

SEQ ID NO: 14301 - DNA, 13 bp, Artificial Sequence
  Oligonucleotide for detection of SNP TSC0003247
tgtattaattgtt

SEQ ID NO: 14302 - DNA, 13 bp, Artificial Sequence
  Oligonucleotide for detection of SNP TSC0003247
aacaattaataca

SEQ ID NO: 14303 - DNA, 13 bp, Artificial Sequence
  Oligonucleotide for detection of SNP TSC0003247
tgtatttattgtt

SEQ ID NO: 14304 - DNA, 13 bp, Artificial Sequence
  Oligonucleotide for detection of SNP TSC0003247
aacaataaataca

SEQ ID NO: 14305 - DNA, 13 bp, Artificial Sequence
  Oligonucleotide for detection of SNP TSC0003247
agtaattgatata

SEQ ID NO: 14306 - DNA, 13 bp, Artificial Sequence
  Oligonucleotide for detection of SNP TSC0003247
tatatcaattact

SEQ ID NO: 14307 - DNA, 13 bp, Artificial Sequence
  Oligonucleotide for detection of SNP TSC0003247
agtaatagatata

SEQ ID NO: 14308 - DNA, 13 bp, Artificial Sequence
  Oligonucleotide for detection of SNP TSC0003247
tatatctattact

SEQ ID NO: 14309 - DNA, 13 bp, Artificial Sequence
  Oligonucleotide for detection of SNP TSC0003248
tggtaaattgagt

SEQ ID NO: 14310 - DNA, 13 bp, Artificial Sequence
  Oligonucleotide for detection of SNP TSC0003248
actcaatttacca

SEQ ID NO: 14311 - DNA, 13 bp, Artificial Sequence
  Oligonucleotide for detection of SNP TSC0003248
tggtaatttgagt

SEQ ID NO: 14312 - DNA, 13 bp, Artificial Sequence
  Oligonucleotide for detection of SNP TSC0003248
actcaaattacca

SEQ ID NO: 14313 - DNA, 13 bp, Artificial Sequence
  Oligonucleotide for detection of SNP TSC0003248
atttaatttgtta

SEQ ID NO: 14314 - DNA, 13 bp, Artificial Sequence
  Oligonucleotide for detection of SNP TSC0003248
taacaaattaaat

SEQ ID NO: 14315 - DNA, 13 bp, Artificial Sequence
  Oligonucleotide for detection of SNP TSC0003248
atttaagttgtta

SEQ ID NO: 14316 - DNA, 13 bp, Artificial Sequence
  Oligonucleotide for detection of SNP TSC0003248
taacaacttaaat

SEQ ID NO: 14317 - DNA, 13 bp, Artificial Sequence
  Oligonucleotide for detection of SNP TSC0003249
gtatttagagggt

SEQ ID NO: 14318 - DNA, 13 bp, Artificial Sequence
  Oligonucleotide for detection of SNP TSC0003249
accctctaaatac

SEQ ID NO: 14319 - DNA, 13 bp, Artificial Sequence
  Oligonucleotide for detection of SNP TSC0003249
gtatttggagggt

SEQ ID NO: 14320 - DNA, 13 bp, Artificial Sequence
  Oligonucleotide for detection of SNP TSC0003249
accctccaaatac

SEQ ID NO: 14321 - DNA, 13 bp, Artificial Sequence
  Oligonucleotide for detection of SNP TSC0003249
gtattcggagggt

SEQ ID NO: 14322 - DNA, 13 bp, Artificial Sequence
  Oligonucleotide for detection of SNP TSC0003249
accctccgaatac

SEQ ID NO: 14323 - DNA, 13 bp, Artificial Sequence
  Oligonucleotide for detection of SNP TSC0003249
attttttgggtgy

SEQ ID NO: 14324 - DNA, 13 bp, Artificial Sequence
  Oligonucleotide for detection of SNP TSC0003249
rcacccaaaaaat

SEQ ID NO: 14325 - DNA, 13 bp, Artificial Sequence
  Oligonucleotide for detection of SNP TSC0003249
atttttcgggtgy

SEQ ID NO: 14326 - DNA, 13 bp, Artificial Sequence
  Oligonucleotide for detection of SNP TSC0003249
rcacccgaaaaat

SEQ ID NO: 14327 - DNA, 13 bp, Artificial Sequence
  Oligonucleotide for detection of SNP TSC0003250
tgtttagttttgt

SEQ ID NO: 14328 - DNA, 13 bp, Artificial Sequence
  Oligonucleotide for detection of SNP TSC0003250
acaaaactaaaca

SEQ ID NO: 14329 - DNA, 13 bp, Artificial Sequence
  Oligonucleotide for detection of SNP TSC0003251
ttatagtgttttt

SEQ ID NO: 14330 - DNA, 13 bp, Artificial Sequence
  Oligonucleotide for detection of SNP TSC0003251
aaaaacactataa

SEQ ID NO: 14331 - DNA, 13 bp, Artificial Sequence
  Oligonucleotide for detection of SNP TSC0003251
ttatagcgttttt

SEQ ID NO: 14332 - DNA, 13 bp, Artificial Sequence
  Oligonucleotide for detection of SNP TSC0003251
aaaaacgctataa

SEQ ID NO: 14333 - DNA, 13 bp, Artificial Sequence
  Oligonucleotide for detection of SNP TSC0003251
aggagtgttgtaa

SEQ ID NO: 14334 - DNA, 13 bp, Artificial Sequence
  Oligonucleotide for detection of SNP TSC0003251
ttacaacactcct

SEQ ID NO: 14335 - DNA, 13 bp, Artificial Sequence
  Oligonucleotide for detection of SNP TSC0003251
aggagtattgtaa

SEQ ID NO: 14336 - DNA, 13 bp, Artificial Sequence
  Oligonucleotide for detection of SNP TSC0003251
ttacaatactcct

SEQ ID NO: 14337 - DNA, 13 bp, Artificial Sequence
  Oligonucleotide for detection of SNP TSC0003251
aggagcgttgtaa

SEQ ID NO: 14338 - DNA, 13 bp, Artificial Sequence
  Oligonucleotide for detection of SNP TSC0003251
ttacaacgctcct

SEQ ID NO: 14339 - DNA, 13 bp, Artificial Sequence
  Oligonucleotide for detection of SNP TSC0003252
aaaaaaggaagaa

SEQ ID NO: 14340 - DNA, 13 bp, Artificial Sequence
  Oligonucleotide for detection of SNP TSC0003252
ttcttcctttttt

SEQ ID NO: 14341 - DNA, 13 bp, Artificial Sequence
  Oligonucleotide for detection of SNP TSC0003252
aaaaaaagaagaa

SEQ ID NO: 14342 - DNA, 13 bp, Artificial Sequence
  Oligonucleotide for detection of SNP TSC0003252
ttcttcttttttt

SEQ ID NO: 14343 - DNA, 13 bp, Artificial Sequence
  Oligonucleotide for detection of SNP TSC0003253
ttttgtaaggttg

SEQ ID NO: 14344 - DNA, 13 bp, Artificial Sequence
  Oligonucleotide for detection of SNP TSC0003253
caaccttacaaaa

SEQ ID NO: 14345 - DNA, 13 bp, Artificial Sequence
  Oligonucleotide for detection of SNP TSC0003253
ttttgtgaggttg

SEQ ID NO: 14346 - DNA, 13 bp, Artificial Sequence
  Oligonucleotide for detection of SNP TSC0003253
caacctcacaaaa

SEQ ID NO: 14347 - DNA, 13 bp, Artificial Sequence
  Oligonucleotide for detection of SNP TSC0003253
ttttgcgaggttg

SEQ ID NO: 14348 - DNA, 13 bp, Artificial Sequence
  Oligonucleotide for detection of SNP TSC0003253
caacctcgcaaaa

SEQ ID NO: 14349 - DNA, 13 bp, Artificial Sequence
  Oligonucleotide for detection of SNP TSC0003253
tagttttgtagag

SEQ ID NO: 14350 - DNA, 13 bp, Artificial Sequence
  Oligonucleotide for detection of SNP TSC0003253
ctctacaaaacta

SEQ ID NO: 14351 - DNA, 13 bp, Artificial Sequence
  Oligonucleotide for detection of SNP TSC0003253
tagtttcgtagag

SEQ ID NO: 14352 - DNA, 13 bp, Artificial Sequence
  Oligonucleotide for detection of SNP TSC0003253
ctctacgaaacta

SEQ ID NO: 14353 - DNA, 13 bp, Artificial Sequence
  Oligonucleotide for detection of SNP TSC0003254
ttttaggtattty

SEQ ID NO: 14354 - DNA, 13 bp, Artificial Sequence
  Oligonucleotide for detection of SNP TSC0003254
raaatacctaaaa

SEQ ID NO: 14355 - DNA, 13 bp, Artificial Sequence
  Oligonucleotide for detection of SNP TSC0003254
ttttagatattty

SEQ ID NO: 14356 - DNA, 13 bp, Artificial Sequence
  Oligonucleotide for detection of SNP TSC0003254
raaatatctaaaa

SEQ ID NO: 14357 - DNA, 13 bp, Artificial Sequence
  Oligonucleotide for detection of SNP TSC0003255
tagagatttggty

SEQ ID NO: 14358 - DNA, 13 bp, Artificial Sequence
  Oligonucleotide for detection of SNP TSC0003255
raccaaatctcta

SEQ ID NO: 14359 - DNA, 13 bp, Artificial Sequence
  Oligonucleotide for detection of SNP TSC0003255
tagagagttggty

SEQ ID NO: 14360 - DNA, 13 bp, Artificial Sequence
  Oligonucleotide for detection of SNP TSC0003255
raccaactctcta

SEQ ID NO: 14361 - DNA, 13 bp, Artificial Sequence
  Oligonucleotide for detection of SNP TSC0003255
ggttaggtttttg

SEQ ID NO: 14362 - DNA, 13 bp, Artificial Sequence
  Oligonucleotide for detection of SNP TSC0003255
caaaaacctaacc

SEQ ID NO: 14363 - DNA, 13 bp, Artificial Sequence
  Oligonucleotide for detection of SNP TSC0003255
ggttagttttttg

SEQ ID NO: 14364 - DNA, 13 bp, Artificial Sequence
  Oligonucleotide for detection of SNP TSC0003255
caaaaaactaacc

SEQ ID NO: 14365 - DNA, 13 bp, Artificial Sequence
  Oligonucleotide for detection of SNP TSC0003256
gggtattttgtty

SEQ ID NO: 14366 - DNA, 13 bp, Artificial Sequence
  Oligonucleotide for detection of SNP TSC0003256
raacaaaataccc

SEQ ID NO: 14367 - DNA, 13 bp, Artificial Sequence
  Oligonucleotide for detection of SNP TSC0003256
gggtatgttgtty

SEQ ID NO: 14368 - DNA, 13 bp, Artificial Sequence
  Oligonucleotide for detection of SNP TSC0003256
raacaacataccc

SEQ ID NO: 14369 - DNA, 13 bp, Artificial Sequence
  Oligonucleotide for detection of SNP TSC0003256
ggataagatgtty

SEQ ID NO: 14370 - DNA, 13 bp, Artificial Sequence
  Oligonucleotide for detection of SNP TSC0003256
raacatcttatcc

SEQ ID NO: 14371 - DNA, 13 bp, Artificial Sequence
  Oligonucleotide for detection of SNP TSC0003256
ggataatatgtty

SEQ ID NO: 14372 - DNA, 13 bp, Artificial Sequence
  Oligonucleotide for detection of SNP TSC0003256
raacatattatcc

SEQ ID NO: 14373 - DNA, 13 bp, Artificial Sequence
  Oligonucleotide for detection of SNP TSC0003257
tggttatgatgga

SEQ ID NO: 14374 - DNA, 13 bp, Artificial Sequence
  Oligonucleotide for detection of SNP TSC0003257
tccatcataacca

SEQ ID NO: 14375 - DNA, 13 bp, Artificial Sequence
  Oligonucleotide for detection of SNP TSC0003257
tggttacgatgga

SEQ ID NO: 14376 - DNA, 13 bp, Artificial Sequence
  Oligonucleotide for detection of SNP TSC0003257
tccatcgtaacca

SEQ ID NO: 14377 - DNA, 13 bp, Artificial Sequence
  Oligonucleotide for detection of SNP TSC0003257
tttattgtagtta

SEQ ID NO: 14378 - DNA, 13 bp, Artificial Sequence
  Oligonucleotide for detection of SNP TSC0003257
taactacaataaa

SEQ ID NO: 14379 - DNA, 13 bp, Artificial Sequence
  Oligonucleotide for detection of SNP TSC0003257
tttattatagtta

SEQ ID NO: 14380 - DNA, 13 bp, Artificial Sequence
  Oligonucleotide for detection of SNP TSC0003257
taactataataaa

SEQ ID NO: 14381 - DNA, 13 bp, Artificial Sequence
  Oligonucleotide for detection of SNP TSC0003257
tttatcgtagtta

SEQ ID NO: 14382 - DNA, 13 bp, Artificial Sequence
  Oligonucleotide for detection of SNP TSC0003257
taactacgataaa

SEQ ID NO: 14383 - DNA, 13 bp, Artificial Sequence
  Oligonucleotide for detection of SNP TSC0003258
tgtattaatttty

SEQ ID NO: 14384 - DNA, 13 bp, Artificial Sequence
  Oligonucleotide for detection of SNP TSC0003258
raaaattaataca

SEQ ID NO: 14385 - DNA, 13 bp, Artificial Sequence
  Oligonucleotide for detection of SNP TSC0003258
tgtattgatttty

SEQ ID NO: 14386 - DNA, 13 bp, Artificial Sequence
  Oligonucleotide for detection of SNP TSC0003258
raaaatcaataca

SEQ ID NO: 14387 - DNA, 13 bp, Artificial Sequence
  Oligonucleotide for detection of SNP TSC0003258
cgtattaatttty

SEQ ID NO: 14388 - DNA, 13 bp, Artificial Sequence
  Oligonucleotide for detection of SNP TSC0003258
raaaattaatacg

SEQ ID NO: 14389 - DNA, 13 bp, Artificial Sequence
  Oligonucleotide for detection of SNP TSC0003258
cgtattgatttty

SEQ ID NO: 14390 - DNA, 13 bp, Artificial Sequence
  Oligonucleotide for detection of SNP TSC0003258
raaaatcaatacg

SEQ ID NO: 14391 - DNA, 13 bp, Artificial Sequence
  Oligonucleotide for detection of SNP TSC0003258
tgtatcgatttty

SEQ ID NO: 14392 - DNA, 13 bp, Artificial Sequence
  Oligonucleotide for detection of SNP TSC0003258
raaaatcgataca

SEQ ID NO: 14393 - DNA, 13 bp, Artificial Sequence
  Oligonucleotide for detection of SNP TSC0003258
cgtatcgatttty

SEQ ID NO: 14394 - DNA, 13 bp, Artificial Sequence
  Oligonucleotide for detection of SNP TSC0003258
raaaatcgatacg

SEQ ID NO: 14395 - DNA, 13 bp, Artificial Sequence
  Oligonucleotide for detection of SNP TSC0003258
gagagttgatatg

SEQ ID NO: 14396 - DNA, 13 bp, Artificial Sequence
  Oligonucleotide for detection of SNP TSC0003258
catatcaactctc

SEQ ID NO: 14397 - DNA, 13 bp, Artificial Sequence
  Oligonucleotide for detection of SNP TSC0003258
gagagttgatacg

SEQ ID NO: 14398 - DNA, 13 bp, Artificial Sequence
  Oligonucleotide for detection of SNP TSC0003258
cgtatcaactctc

SEQ ID NO: 14399 - DNA, 13 bp, Artificial Sequence
  Oligonucleotide for detection of SNP TSC0003258
gagagtcgatatg

SEQ ID NO: 14400 - DNA, 13 bp, Artificial Sequence
  Oligonucleotide for detection of SNP TSC0003258
catatcgactctc

SEQ ID NO: 14401 - DNA, 13 bp, Artificial Sequence
  Oligonucleotide for detection of SNP TSC0003258
gagagtcgatacg

SEQ ID NO: 14402 - DNA, 13 bp, Artificial Sequence
  Oligonucleotide for detection of SNP TSC0003258
cgtatcgactctc

SEQ ID NO: 14403 - DNA, 13 bp, Artificial Sequence
  Oligonucleotide for detection of SNP TSC0003259
aaaaaaaaaaaty

SEQ ID NO: 14404 - DNA, 13 bp, Artificial Sequence
  Oligonucleotide for detection of SNP TSC0003259
rattttttttttt

SEQ ID NO: 14405 - DNA, 13 bp, Artificial Sequence
  Oligonucleotide for detection of SNP TSC0003259
aaaaaagaaaaty

SEQ ID NO: 14406 - DNA, 13 bp, Artificial Sequence
  Oligonucleotide for detection of SNP TSC0003259
rattttctttttt

SEQ ID NO: 14407 - DNA, 13 bp, Artificial Sequence
  Oligonucleotide for detection of SNP TSC0003262
gtgtgggttgttt

SEQ ID NO: 14408 - DNA, 13 bp, Artificial Sequence
  Oligonucleotide for detection of SNP TSC0003262
aaacaacccacac

SEQ ID NO: 14409 - DNA, 13 bp, Artificial Sequence
  Oligonucleotide for detection of SNP TSC0003262
gtgtggattgttt

SEQ ID NO: 14410 - DNA, 13 bp, Artificial Sequence
  Oligonucleotide for detection of SNP TSC0003262
aaacaatccacac

SEQ ID NO: 14411 - DNA, 13 bp, Artificial Sequence
  Oligonucleotide for detection of SNP TSC0003263
taagtgattagay

SEQ ID NO: 14412 - DNA, 13 bp, Artificial Sequence
  Oligonucleotide for detection of SNP TSC0003263
rtctaatcactta

SEQ ID NO: 14413 - DNA, 13 bp, Artificial Sequence
  Oligonucleotide for detection of SNP TSC0003263
taagtgtttagay

SEQ ID NO: 14414 - DNA, 13 bp, Artificial Sequence
  Oligonucleotide for detection of SNP TSC0003263
rtctaaacactta

SEQ ID NO: 14415 - DNA, 13 bp, Artificial Sequence
  Oligonucleotide for detection of SNP TSC0003263
gtttaattattta

SEQ ID NO: 14416 - DNA, 13 bp, Artificial Sequence
  Oligonucleotide for detection of SNP TSC0003263
taaataattaaac

SEQ ID NO: 14417 - DNA, 13 bp, Artificial Sequence
  Oligonucleotide for detection of SNP TSC0003263
gtttaaatattta

SEQ ID NO: 14418 - DNA, 13 bp, Artificial Sequence
  Oligonucleotide for detection of SNP TSC0003263
taaatatttaaac

SEQ ID NO: 14419 - DNA, 13 bp, Artificial Sequence
  Oligonucleotide for detection of SNP TSC0003264
tggtttatttttt

SEQ ID NO: 14420 - DNA, 13 bp, Artificial Sequence
  Oligonucleotide for detection of SNP TSC0003264
aaaaaataaacca

SEQ ID NO: 14421 - DNA, 13 bp, Artificial Sequence
  Oligonucleotide for detection of SNP TSC0003264
tggtttgtttttt

SEQ ID NO: 14422 - DNA, 13 bp, Artificial Sequence
  Oligonucleotide for detection of SNP TSC0003264
aaaaaacaaacca

SEQ ID NO: 14423 - DNA, 13 bp, Artificial Sequence
  Oligonucleotide for detection of SNP TSC0003264
tggttcgtttttt

SEQ ID NO: 14424 - DNA, 13 bp, Artificial Sequence
  Oligonucleotide for detection of SNP TSC0003264
aaaaaacgaacca

SEQ ID NO: 14425 - DNA, 13 bp, Artificial Sequence
  Oligonucleotide for detection of SNP TSC0003264
agaaaatggatta

SEQ ID NO: 14426 - DNA, 13 bp, Artificial Sequence
  Oligonucleotide for detection of SNP TSC0003264
taatccattttct

SEQ ID NO: 14427 - DNA, 13 bp, Artificial Sequence
  Oligonucleotide for detection of SNP TSC0003264
agaaaacggatta

SEQ ID NO: 14428 - DNA, 13 bp, Artificial Sequence
  Oligonucleotide for detection of SNP TSC0003264
taatccgttttct

SEQ ID NO: 14429 - DNA, 13 bp, Artificial Sequence
  Oligonucleotide for detection of SNP TSC0003265
tttaattatggaa

SEQ ID NO: 14430 - DNA, 13 bp, Artificial Sequence
  Oligonucleotide for detection of SNP TSC0003265
ttccataattaaa

SEQ ID NO: 14431 - DNA, 13 bp, Artificial Sequence
  Oligonucleotide for detection of SNP TSC0003265
tttaatgatggaa

SEQ ID NO: 14432 - DNA, 13 bp, Artificial Sequence
  Oligonucleotide for detection of SNP TSC0003265
ttccatcattaaa

SEQ ID NO: 14433 - DNA, 13 bp, Artificial Sequence
  Oligonucleotide for detection of SNP TSC0003265
ttttataattaaa

SEQ ID NO: 14434 - DNA, 13 bp, Artificial Sequence
  Oligonucleotide for detection of SNP TSC0003265
tttaattataaaa

SEQ ID NO: 14435 - DNA, 13 bp, Artificial Sequence
  Oligonucleotide for detection of SNP TSC0003265
ttttattattaaa

SEQ ID NO: 14436 - DNA, 13 bp, Artificial Sequence
  Oligonucleotide for detection of SNP TSC0003265
tttaataataaaa

SEQ ID NO: 14437 - DNA, 13 bp, Artificial Sequence
  Oligonucleotide for detection of SNP TSC0003266
agatagggttttg

SEQ ID NO: 14438 - DNA, 13 bp, Artificial Sequence
  Oligonucleotide for detection of SNP TSC0003266
caaaaccctatct

SEQ ID NO: 14439 - DNA, 13 bp, Artificial Sequence
  Oligonucleotide for detection of SNP TSC0003266
agatagtgttttg

SEQ ID NO: 14440 - DNA, 13 bp, Artificial Sequence
  Oligonucleotide for detection of SNP TSC0003266
caaaacactatct

SEQ ID NO: 14441 - DNA, 13 bp, Artificial Sequence
  Oligonucleotide for detection of SNP TSC0003266
agatagcgttttg

SEQ ID NO: 14442 - DNA, 13 bp, Artificial Sequence
  Oligonucleotide for detection of SNP TSC0003266
caaaacgctatct

SEQ ID NO: 14443 - DNA, 13 bp, Artificial Sequence
  Oligonucleotide for detection of SNP TSC0003266
taagattttgttt

SEQ ID NO: 14444 - DNA, 13 bp, Artificial Sequence
  Oligonucleotide for detection of SNP TSC0003266
aaacaaaatctta

SEQ ID NO: 14445 - DNA, 13 bp, Artificial Sequence
  Oligonucleotide for detection of SNP TSC0003266
taagatgttgttt

SEQ ID NO: 14446 - DNA, 13 bp, Artificial Sequence
  Oligonucleotide for detection of SNP TSC0003266
aaacaacatctta

SEQ ID NO: 14447 - DNA, 13 bp, Artificial Sequence
  Oligonucleotide for detection of SNP TSC0003266
taagacgttgttt

SEQ ID NO: 14448 - DNA, 13 bp, Artificial Sequence
  Oligonucleotide for detection of SNP TSC0003266
aaacaacgtctta

SEQ ID NO: 14449 - DNA, 13 bp, Artificial Sequence
  Oligonucleotide for detection of SNP TSC0003267
tattttttagttt

SEQ ID NO: 14450 - DNA, 13 bp, Artificial Sequence
  Oligonucleotide for detection of SNP TSC0003267
aaactaaaaaata

SEQ ID NO: 14451 - DNA, 13 bp, Artificial Sequence
  Oligonucleotide for detection of SNP TSC0003267
tattttgtagttt

SEQ ID NO: 14452 - DNA, 13 bp, Artificial Sequence
  Oligonucleotide for detection of SNP TSC0003267
aaactacaaaata

SEQ ID NO: 14453 - DNA, 13 bp, Artificial Sequence
  Oligonucleotide for detection of SNP TSC0003267
tatttcgtagttt

SEQ ID NO: 14454 - DNA, 13 bp, Artificial Sequence
  Oligonucleotide for detection of SNP TSC0003267
aaactacgaaata

SEQ ID NO: 14455 - DNA, 13 bp, Artificial Sequence
  Oligonucleotide for detection of SNP TSC0003267
agattgagaggtg

SEQ ID NO: 14456 - DNA, 13 bp, Artificial Sequence
  Oligonucleotide for detection of SNP TSC0003267
cacctctcaatct

SEQ ID NO: 14457 - DNA, 13 bp, Artificial Sequence
  Oligonucleotide for detection of SNP TSC0003267
agattgtgaggtg

SEQ ID NO: 14458 - DNA, 13 bp, Artificial Sequence
  Oligonucleotide for detection of SNP TSC0003267
cacctcacaatct

SEQ ID NO: 14459 - DNA, 13 bp, Artificial Sequence
  Oligonucleotide for detection of SNP TSC0003267
agattgcgaggtg

SEQ ID NO: 14460 - DNA, 13 bp, Artificial Sequence
  Oligonucleotide for detection of SNP TSC0003267
cacctcgcaatct

SEQ ID NO: 14461 - DNA, 13 bp, Artificial Sequence
  Oligonucleotide for detection of SNP TSC0003268
aagaagatttgat

SEQ ID NO: 14462 - DNA, 13 bp, Artificial Sequence
  Oligonucleotide for detection of SNP TSC0003268
atcaaatcttctt

SEQ ID NO: 14463 - DNA, 13 bp, Artificial Sequence
  Oligonucleotide for detection of SNP TSC0003268
aagaagttttgat

SEQ ID NO: 14464 - DNA, 13 bp, Artificial Sequence
  Oligonucleotide for detection of SNP TSC0003268
atcaaaacttctt

SEQ ID NO: 14465 - DNA, 13 bp, Artificial Sequence
  Oligonucleotide for detection of SNP TSC0003268
attaggttttttt

SEQ ID NO: 14466 - DNA, 13 bp, Artificial Sequence
  Oligonucleotide for detection of SNP TSC0003268
aaaaaaacctaat

SEQ ID NO: 14467 - DNA, 13 bp, Artificial Sequence
  Oligonucleotide for detection of SNP TSC0003268
attaggatttttt

SEQ ID NO: 14468 - DNA, 13 bp, Artificial Sequence
  Oligonucleotide for detection of SNP TSC0003268
aaaaaatcctaat

SEQ ID NO: 14469 - DNA, 13 bp, Artificial Sequence
  Oligonucleotide for detection of SNP TSC0003269
aaatattggttaa

SEQ ID NO: 14470 - DNA, 13 bp, Artificial Sequence
  Oligonucleotide for detection of SNP TSC0003269
ttaaccaatattt

SEQ ID NO: 14471 - DNA, 13 bp, Artificial Sequence
  Oligonucleotide for detection of SNP TSC0003269
aaatatcggttaa

SEQ ID NO: 14472 - DNA, 13 bp, Artificial Sequence
  Oligonucleotide for detection of SNP TSC0003269
ttaaccgatattt

SEQ ID NO: 14473 - DNA, 13 bp, Artificial Sequence
  Oligonucleotide for detection of SNP TSC0003269
ttgattgatattt

SEQ ID NO: 14474 - DNA, 13 bp, Artificial Sequence
  Oligonucleotide for detection of SNP TSC0003269
aaatatcaatcaa

SEQ ID NO: 14475 - DNA, 13 bp, Artificial Sequence
  Oligonucleotide for detection of SNP TSC0003269
ttgattaatattt

SEQ ID NO: 14476 - DNA, 13 bp, Artificial Sequence
  Oligonucleotide for detection of SNP TSC0003269
aaatattaatcaa

SEQ ID NO: 14477 - DNA, 13 bp, Artificial Sequence
  Oligonucleotide for detection of SNP TSC0003269
ttgatcgatattt

SEQ ID NO: 14478 - DNA, 13 bp, Artificial Sequence
  Oligonucleotide for detection of SNP TSC0003269
aaatatcgatcaa

SEQ ID NO: 14479 - DNA, 13 bp, Artificial Sequence
  Oligonucleotide for detection of SNP TSC0003270
tttttttgagata

SEQ ID NO: 14480 - DNA, 13 bp, Artificial Sequence
  Oligonucleotide for detection of SNP TSC0003270
tatctcaaaaaaa

SEQ ID NO: 14481 - DNA, 13 bp, Artificial Sequence
  Oligonucleotide for detection of SNP TSC0003270
ttttttggagata

SEQ ID NO: 14482 - DNA, 13 bp, Artificial Sequence
  Oligonucleotide for detection of SNP TSC0003270
tatctccaaaaaa

SEQ ID NO: 14483 - DNA, 13 bp, Artificial Sequence
  Oligonucleotide for detection of SNP TSC0003271
ggtttatgtttgt

SEQ ID NO: 14484 - DNA, 13 bp, Artificial Sequence
  Oligonucleotide for detection of SNP TSC0003271
acaaacataaacc

SEQ ID NO: 14485 - DNA, 13 bp, Artificial Sequence
  Oligonucleotide for detection of SNP TSC0003271
ggtttacgtttgt

SEQ ID NO: 14486 - DNA, 13 bp, Artificial Sequence
  Oligonucleotide for detection of SNP TSC0003271
acaaacgtaaacc

SEQ ID NO: 14487 - DNA, 13 bp, Artificial Sequence
  Oligonucleotide for detection of SNP TSC0003271
ataggtgtgagty

SEQ ID NO: 14488 - DNA, 13 bp, Artificial Sequence
  Oligonucleotide for detection of SNP TSC0003271
ractcacacctat

SEQ ID NO: 14489 - DNA, 13 bp, Artificial Sequence
  Oligonucleotide for detection of SNP TSC0003271
ataggtatgagty

SEQ ID NO: 14490 - DNA, 13 bp, Artificial Sequence
  Oligonucleotide for detection of SNP TSC0003271
ractcatacctat

SEQ ID NO: 14491 - DNA, 13 bp, Artificial Sequence
  Oligonucleotide for detection of SNP TSC0003271
ataggcgtgagty

SEQ ID NO: 14492 - DNA, 13 bp, Artificial Sequence
  Oligonucleotide for detection of SNP TSC0003271
ractcacgcctat

SEQ ID NO: 14493 - DNA, 13 bp, Artificial Sequence
  Oligonucleotide for detection of SNP TSC0003272
taataatgggtaa

SEQ ID NO: 14494 - DNA, 13 bp, Artificial Sequence
  Oligonucleotide for detection of SNP TSC0003272
ttacccattatta

SEQ ID NO: 14495 - DNA, 13 bp, Artificial Sequence
  Oligonucleotide for detection of SNP TSC0003272
taataacgggtaa

SEQ ID NO: 14496 - DNA, 13 bp, Artificial Sequence
  Oligonucleotide for detection of SNP TSC0003272
ttacccgttatta

SEQ ID NO: 14497 - DNA, 13 bp, Artificial Sequence
  Oligonucleotide for detection of SNP TSC0003272
ttgtttgttattg

SEQ ID NO: 14498 - DNA, 13 bp, Artificial Sequence
  Oligonucleotide for detection of SNP TSC0003272
caataacaaacaa

SEQ ID NO: 14499 - DNA, 13 bp, Artificial Sequence
  Oligonucleotide for detection of SNP TSC0003272
ttgtttattattg

SEQ ID NO: 14500 - DNA, 13 bp, Artificial Sequence
  Oligonucleotide for detection of SNP TSC0003272
caataataaacaa

SEQ ID NO: 14501 - DNA, 13 bp, Artificial Sequence
  Oligonucleotide for detection of SNP TSC0003272
ttgttcgttattg

SEQ ID NO: 14502 - DNA, 13 bp, Artificial Sequence
  Oligonucleotide for detection of SNP TSC0003272
caataacgaacaa

SEQ ID NO: 14503 - DNA, 13 bp, Artificial Sequence
  Oligonucleotide for detection of SNP TSC0003273
tttttttataaaa

SEQ ID NO: 14504 - DNA, 13 bp, Artificial Sequence
  Oligonucleotide for detection of SNP TSC0003273
ttttataaaaaaa

SEQ ID NO: 14505 - DNA, 13 bp, Artificial Sequence
  Oligonucleotide for detection of SNP TSC0003273
ttttttgataaaa

SEQ ID NO: 14506 - DNA, 13 bp, Artificial Sequence
  Oligonucleotide for detection of SNP TSC0003273
ttttatcaaaaaa

SEQ ID NO: 14507 - DNA, 13 bp, Artificial Sequence
  Oligonucleotide for detection of SNP TSC0003273
ttttatgaggaga

SEQ ID NO: 14508 - DNA, 13 bp, Artificial Sequence
  Oligonucleotide for detection of SNP TSC0003273
tctcctcataaaa

SEQ ID NO: 14509 - DNA, 13 bp, Artificial Sequence
  Oligonucleotide for detection of SNP TSC0003273
ttttattaggaga

SEQ ID NO: 14510 - DNA, 13 bp, Artificial Sequence
  Oligonucleotide for detection of SNP TSC0003273
tctcctaataaaa

SEQ ID NO: 14511 - DNA, 13 bp, Artificial Sequence
  Oligonucleotide for detection of SNP TSC0003274
attttgagaggty

SEQ ID NO: 14512 - DNA, 13 bp, Artificial Sequence
  Oligonucleotide for detection of SNP TSC0003274
racctctcaaaat

SEQ ID NO: 14513 - DNA, 13 bp, Artificial Sequence
  Oligonucleotide for detection of SNP TSC0003274
attttgggaggty

SEQ ID NO: 14514 - DNA, 13 bp, Artificial Sequence
  Oligonucleotide for detection of SNP TSC0003274
racctcccaaaat

SEQ ID NO: 14515 - DNA, 13 bp, Artificial Sequence
  Oligonucleotide for detection of SNP TSC0003274
atttcgagaggty

SEQ ID NO: 14516 - DNA, 13 bp, Artificial Sequence
  Oligonucleotide for detection of SNP TSC0003274
racctctcgaaat

SEQ ID NO: 14517 - DNA, 13 bp, Artificial Sequence
  Oligonucleotide for detection of SNP TSC0003274
atttcgggaggty

SEQ ID NO: 14518 - DNA, 13 bp, Artificial Sequence
  Oligonucleotide for detection of SNP TSC0003274
racctcccgaaat

SEQ ID NO: 14519 - DNA, 13 bp, Artificial Sequence
  Oligonucleotide for detection of SNP TSC0003275
aatgtaattttay

SEQ ID NO: 14520 - DNA, 13 bp, Artificial Sequence
  Oligonucleotide for detection of SNP TSC0003275
rtaaaattacatt

SEQ ID NO: 14521 - DNA, 13 bp, Artificial Sequence
  Oligonucleotide for detection of SNP TSC0003275
aatgtagttttay

SEQ ID NO: 14522 - DNA, 13 bp, Artificial Sequence
  Oligonucleotide for detection of SNP TSC0003275
rtaaaactacatt

SEQ ID NO: 14523 - DNA, 13 bp, Artificial Sequence
  Oligonucleotide for detection of SNP TSC0003275
aacgtaattttay

SEQ ID NO: 14524 - DNA, 13 bp, Artificial Sequence
  Oligonucleotide for detection of SNP TSC0003275
rtaaaattacgtt

SEQ ID NO: 14525 - DNA, 13 bp, Artificial Sequence
  Oligonucleotide for detection of SNP TSC0003275
aacgtagttttay

SEQ ID NO: 14526 - DNA, 13 bp, Artificial Sequence
  Oligonucleotide for detection of SNP TSC0003275
rtaaaactacgtt

SEQ ID NO: 14527 - DNA, 13 bp, Artificial Sequence
  Oligonucleotide for detection of SNP TSC0003279
taaaataagagaa

SEQ ID NO: 14528 - DNA, 13 bp, Artificial Sequence
  Oligonucleotide for detection of SNP TSC0003279
ttctcttatttta

SEQ ID NO: 14529 - DNA, 13 bp, Artificial Sequence
  Oligonucleotide for detection of SNP TSC0003279
taaaatgagagaa

SEQ ID NO: 14530 - DNA, 13 bp, Artificial Sequence
  Oligonucleotide for detection of SNP TSC0003279
ttctctcatttta

SEQ ID NO: 14531 - DNA, 13 bp, Artificial Sequence
  Oligonucleotide for detection of SNP TSC0003279
taaaacgagagaa

SEQ ID NO: 14532 - DNA, 13 bp, Artificial Sequence
  Oligonucleotide for detection of SNP TSC0003279
ttctctcgtttta

SEQ ID NO: 14533 - DNA, 13 bp, Artificial Sequence
  Oligonucleotide for detection of SNP TSC0003280
aaatttgtttttt

SEQ ID NO: 14534 - DNA, 13 bp, Artificial Sequence
  Oligonucleotide for detection of SNP TSC0003280
aaaaaacaaattt

SEQ ID NO: 14535 - DNA, 13 bp, Artificial Sequence
  Oligonucleotide for detection of SNP TSC0003280
aaatttatttttt

SEQ ID NO: 14536 - DNA, 13 bp, Artificial Sequence
  Oligonucleotide for detection of SNP TSC0003280
aaaaaataaattt

SEQ ID NO: 14537 - DNA, 13 bp, Artificial Sequence
  Oligonucleotide for detection of SNP TSC0003281
tgtttaaatttat

SEQ ID NO: 14538 - DNA, 13 bp, Artificial Sequence
  Oligonucleotide for detection of SNP TSC0003281
ataaatttaaaca

SEQ ID NO: 14539 - DNA, 13 bp, Artificial Sequence
  Oligonucleotide for detection of SNP TSC0003281
tgtttagatttat

SEQ ID NO: 14540 - DNA, 13 bp, Artificial Sequence
  Oligonucleotide for detection of SNP TSC0003281
ataaatctaaaca

SEQ ID NO: 14541 - DNA, 13 bp, Artificial Sequence
  Oligonucleotide for detection of SNP TSC0003282
gataaaatataay

SEQ ID NO: 14542 - DNA, 13 bp, Artificial Sequence
  Oligonucleotide for detection of SNP TSC0003282
rttatattttatc

SEQ ID NO: 14543 - DNA, 13 bp, Artificial Sequence
  Oligonucleotide for detection of SNP TSC0003282
gataaattataay

SEQ ID NO: 14544 - DNA, 13 bp, Artificial Sequence
  Oligonucleotide for detection of SNP TSC0003282
rttataatttatc

SEQ ID NO: 14545 - DNA, 13 bp, Artificial Sequence
  Oligonucleotide for detection of SNP TSC0003282
gttgtgttttaty

SEQ ID NO: 14546 - DNA, 13 bp, Artificial Sequence
  Oligonucleotide for detection of SNP TSC0003282
rataaaacacaac

SEQ ID NO: 14547 - DNA, 13 bp, Artificial Sequence
  Oligonucleotide for detection of SNP TSC0003282
gttgtggtttaty

SEQ ID NO: 14548 - DNA, 13 bp, Artificial Sequence
  Oligonucleotide for detection of SNP TSC0003282
rataaaccacaac

SEQ ID NO: 14549 - DNA, 13 bp, Artificial Sequence
  Oligonucleotide for detection of SNP TSC0003283
aggggtattagty

SEQ ID NO: 14550 - DNA, 13 bp, Artificial Sequence
  Oligonucleotide for detection of SNP TSC0003283
ractaatacccct

SEQ ID NO: 14551 - DNA, 13 bp, Artificial Sequence
  Oligonucleotide for detection of SNP TSC0003283
aggggtgttagty

SEQ ID NO: 14552 - DNA, 13 bp, Artificial Sequence
  Oligonucleotide for detection of SNP TSC0003283
ractaacacccct

SEQ ID NO: 14553 - DNA, 13 bp, Artificial Sequence
  Oligonucleotide for detection of SNP TSC0003284
atttaaaagatty

SEQ ID NO: 14554 - DNA, 13 bp, Artificial Sequence
  Oligonucleotide for detection of SNP TSC0003284
raatcttttaaat

SEQ ID NO: 14555 - DNA, 13 bp, Artificial Sequence
  Oligonucleotide for detection of SNP TSC0003284
atttaatagatty

SEQ ID NO: 14556 - DNA, 13 bp, Artificial Sequence
  Oligonucleotide for detection of SNP TSC0003284
raatctattaaat

SEQ ID NO: 14557 - DNA, 13 bp, Artificial Sequence
  Oligonucleotide for detection of SNP TSC0003284
gggttttttagat

SEQ ID NO: 14558 - DNA, 13 bp, Artificial Sequence
  Oligonucleotide for detection of SNP TSC0003284
atctaaaaaaccc

SEQ ID NO: 14559 - DNA, 13 bp, Artificial Sequence
  Oligonucleotide for detection of SNP TSC0003284
gggtttgttagat

SEQ ID NO: 14560 - DNA, 13 bp, Artificial Sequence
  Oligonucleotide for detection of SNP TSC0003284
atctaacaaaccc

SEQ ID NO: 14561 - DNA, 13 bp, Artificial Sequence
  Oligonucleotide for detection of SNP TSC0003286
tttttcgtttttt

SEQ ID NO: 14562 - DNA, 13 bp, Artificial Sequence
  Oligonucleotide for detection of SNP TSC0003286
aaaaaacgaaaaa

SEQ ID NO: 14563 - DNA, 13 bp, Artificial Sequence
  Oligonucleotide for detection of SNP TSC0003286
aggaggagggagg

SEQ ID NO: 14564 - DNA, 13 bp, Artificial Sequence
  Oligonucleotide for detection of SNP TSC0003286
cctccctcctcct

SEQ ID NO: 14565 - DNA, 13 bp, Artificial Sequence
  Oligonucleotide for detection of SNP TSC0003286
aggaggtgggagg

SEQ ID NO: 14566 - DNA, 13 bp, Artificial Sequence
  Oligonucleotide for detection of SNP TSC0003286
cctcccacctcct

SEQ ID NO: 14567 - DNA, 13 bp, Artificial Sequence
  Oligonucleotide for detection of SNP TSC0003286
aggaggcgggagg

SEQ ID NO: 14568 - DNA, 13 bp, Artificial Sequence
  Oligonucleotide for detection of SNP TSC0003286
cctcccgcctcct

SEQ ID NO: 14569 - DNA, 13 bp, Artificial Sequence
  Oligonucleotide for detection of SNP TSC0003287
tttagaggttgag

SEQ ID NO: 14570 - DNA, 13 bp, Artificial Sequence
  Oligonucleotide for detection of SNP TSC0003287
ctcaacctctaaa

SEQ ID NO: 14571 - DNA, 13 bp, Artificial Sequence
  Oligonucleotide for detection of SNP TSC0003287
tttagaagttgag

SEQ ID NO: 14572 - DNA, 13 bp, Artificial Sequence
  Oligonucleotide for detection of SNP TSC0003287
ctcaacttctaaa

SEQ ID NO: 14573 - DNA, 13 bp, Artificial Sequence
  Oligonucleotide for detection of SNP TSC0003288
taggtttgagtgy

SEQ ID NO: 14574 - DNA, 13 bp, Artificial Sequence
  Oligonucleotide for detection of SNP TSC0003288
rcactcaaaccta

SEQ ID NO: 14575 - DNA, 13 bp, Artificial Sequence
  Oligonucleotide for detection of SNP TSC0003288
taggttggagtgy

SEQ ID NO: 14576 - DNA, 13 bp, Artificial Sequence
  Oligonucleotide for detection of SNP TSC0003288
rcactccaaccta

SEQ ID NO: 14577 - DNA, 13 bp, Artificial Sequence
  Oligonucleotide for detection of SNP TSC0003288
gtatttaagtttg

SEQ ID NO: 14578 - DNA, 13 bp, Artificial Sequence
  Oligonucleotide for detection of SNP TSC0003288
caaacttaaatac

SEQ ID NO: 14579 - DNA, 13 bp, Artificial Sequence
  Oligonucleotide for detection of SNP TSC0003288
gtattttagtttg

SEQ ID NO: 14580 - DNA, 13 bp, Artificial Sequence
  Oligonucleotide for detection of SNP TSC0003288
caaactaaaatac

SEQ ID NO: 14581 - DNA, 13 bp, Artificial Sequence
  Oligonucleotide for detection of SNP TSC0003289
tatattagaattt

SEQ ID NO: 14582 - DNA, 13 bp, Artificial Sequence
  Oligonucleotide for detection of SNP TSC0003289
aaattctaatata

SEQ ID NO: 14583 - DNA, 13 bp, Artificial Sequence
  Oligonucleotide for detection of SNP TSC0003289
tatattggaattt

SEQ ID NO: 14584 - DNA, 13 bp, Artificial Sequence
  Oligonucleotide for detection of SNP TSC0003289
aaattccaatata

SEQ ID NO: 14585 - DNA, 13 bp, Artificial Sequence
  Oligonucleotide for detection of SNP TSC0003289
tatatcggaattt

SEQ ID NO: 14586 - DNA, 13 bp, Artificial Sequence
  Oligonucleotide for detection of SNP TSC0003289
aaattccgatata

SEQ ID NO: 14587 - DNA, 13 bp, Artificial Sequence
  Oligonucleotide for detection of SNP TSC0003289
agattttggtgtg

SEQ ID NO: 14588 - DNA, 13 bp, Artificial Sequence
  Oligonucleotide for detection of SNP TSC0003289
cacaccaaaatct

SEQ ID NO: 14589 - DNA, 13 bp, Artificial Sequence
  Oligonucleotide for detection of SNP TSC0003289
agatttcggtgtg

SEQ ID NO: 14590 - DNA, 13 bp, Artificial Sequence
  Oligonucleotide for detection of SNP TSC0003289
cacaccgaaatct

SEQ ID NO: 14591 - DNA, 13 bp, Artificial Sequence
  Oligonucleotide for detection of SNP TSC0003290
agaagtgaagagy

SEQ ID NO: 14592 - DNA, 13 bp, Artificial Sequence
  Oligonucleotide for detection of SNP TSC0003290
rctcttcacttct

SEQ ID NO: 14593 - DNA, 13 bp, Artificial Sequence
  Oligonucleotide for detection of SNP TSC0003290
agaagtaaagagy

SEQ ID NO: 14594 - DNA, 13 bp, Artificial Sequence
  Oligonucleotide for detection of SNP TSC0003290
rctctttacttct

SEQ ID NO: 14595 - DNA, 13 bp, Artificial Sequence
  Oligonucleotide for detection of SNP TSC0003291
tttataagtgatg

SEQ ID NO: 14596 - DNA, 13 bp, Artificial Sequence
  Oligonucleotide for detection of SNP TSC0003291
catcacttataaa

SEQ ID NO: 14597 - DNA, 13 bp, Artificial Sequence
  Oligonucleotide for detection of SNP TSC0003291
tttataggtgatg

SEQ ID NO: 14598 - DNA, 13 bp, Artificial Sequence
  Oligonucleotide for detection of SNP TSC0003291
catcacctataaa

SEQ ID NO: 14599 - DNA, 13 bp, Artificial Sequence
  Oligonucleotide for detection of SNP TSC0003292
tttttaattttat

SEQ ID NO: 14600 - DNA, 13 bp, Artificial Sequence
  Oligonucleotide for detection of SNP TSC0003292
ataaaattaaaaa

SEQ ID NO: 14601 - DNA, 13 bp, Artificial Sequence
  Oligonucleotide for detection of SNP TSC0003292
tttttagttttat

SEQ ID NO: 14602 - DNA, 13 bp, Artificial Sequence
  Oligonucleotide for detection of SNP TSC0003292
ataaaactaaaaa

SEQ ID NO: 14603 - DNA, 13 bp, Artificial Sequence
  Oligonucleotide for detection of SNP TSC0003294
taaggtttttttt

SEQ ID NO: 14604 - DNA, 13 bp, Artificial Sequence
  Oligonucleotide for detection of SNP TSC0003294
aaaaaaaacctta

SEQ ID NO: 14605 - DNA, 13 bp, Artificial Sequence
  Oligonucleotide for detection of SNP TSC0003294
taaggtgtttttt

SEQ ID NO: 14606 - DNA, 13 bp, Artificial Sequence
  Oligonucleotide for detection of SNP TSC0003294
aaaaaacacctta

SEQ ID NO: 14607 - DNA, 13 bp, Artificial Sequence
  Oligonucleotide for detection of SNP TSC0003294
aaaggaaatttta

SEQ ID NO: 14608 - DNA, 13 bp, Artificial Sequence
  Oligonucleotide for detection of SNP TSC0003294
taaaatttccttt

SEQ ID NO: 14609 - DNA, 13 bp, Artificial Sequence
  Oligonucleotide for detection of SNP TSC0003294
aaaggatatttta

SEQ ID NO: 14610 - DNA, 13 bp, Artificial Sequence
  Oligonucleotide for detection of SNP TSC0003294
taaaatatccttt

SEQ ID NO: 14611 - DNA, 13 bp, Artificial Sequence
  Oligonucleotide for detection of SNP TSC0003295
tttttgtgaggga

SEQ ID NO: 14612 - DNA, 13 bp, Artificial Sequence
  Oligonucleotide for detection of SNP TSC0003295
tccctcacaaaaa

SEQ ID NO: 14613 - DNA, 13 bp, Artificial Sequence
  Oligonucleotide for detection of SNP TSC0003295
tttttgggaggga

SEQ ID NO: 14614 - DNA, 13 bp, Artificial Sequence
  Oligonucleotide for detection of SNP TSC0003295
tccctcccaaaaa

SEQ ID NO: 14615 - DNA, 13 bp, Artificial Sequence
  Oligonucleotide for detection of SNP TSC0003296
gttaagatggtta

SEQ ID NO: 14616 - DNA, 13 bp, Artificial Sequence
  Oligonucleotide for detection of SNP TSC0003296
taaccatcttaac

SEQ ID NO: 14617 - DNA, 13 bp, Artificial Sequence
  Oligonucleotide for detection of SNP TSC0003296
gttaaggtggtta

SEQ ID NO: 14618 - DNA, 13 bp, Artificial Sequence
  Oligonucleotide for detection of SNP TSC0003296
taaccaccttaac

SEQ ID NO: 14619 - DNA, 13 bp, Artificial Sequence
  Oligonucleotide for detection of SNP TSC0003297
tagagtataatgt

SEQ ID NO: 14620 - DNA, 13 bp, Artificial Sequence
  Oligonucleotide for detection of SNP TSC0003297
acattatactcta

SEQ ID NO: 14621 - DNA, 13 bp, Artificial Sequence
  Oligonucleotide for detection of SNP TSC0003297
tagagtgtaatgt

SEQ ID NO: 14622 - DNA, 13 bp, Artificial Sequence
  Oligonucleotide for detection of SNP TSC0003297
acattacactcta

SEQ ID NO: 14623 - DNA, 13 bp, Artificial Sequence
  Oligonucleotide for detection of SNP TSC0003299
tagttttgttaay

SEQ ID NO: 14624 - DNA, 13 bp, Artificial Sequence
  Oligonucleotide for detection of SNP TSC0003299
rttaacaaaacta

SEQ ID NO: 14625 - DNA, 13 bp, Artificial Sequence
  Oligonucleotide for detection of SNP TSC0003299
tagtttggttaay

SEQ ID NO: 14626 - DNA, 13 bp, Artificial Sequence
  Oligonucleotide for detection of SNP TSC0003299
rttaaccaaacta

SEQ ID NO: 14627 - DNA, 13 bp, Artificial Sequence
  Oligonucleotide for detection of SNP TSC0003299
tagtttcgttaay

SEQ ID NO: 14628 - DNA, 13 bp, Artificial Sequence
  Oligonucleotide for detection of SNP TSC0003299
rttaacgaaacta

SEQ ID NO: 14629 - DNA, 13 bp, Artificial Sequence
  Oligonucleotide for detection of SNP TSC0003299
gttggtgaggttg

SEQ ID NO: 14630 - DNA, 13 bp, Artificial Sequence
  Oligonucleotide for detection of SNP TSC0003299
caacctcaccaac

SEQ ID NO: 14631 - DNA, 13 bp, Artificial Sequence
  Oligonucleotide for detection of SNP TSC0003299
gttggttaggttg

SEQ ID NO: 14632 - DNA, 13 bp, Artificial Sequence
  Oligonucleotide for detection of SNP TSC0003299
caacctaaccaac

SEQ ID NO: 14633 - DNA, 13 bp, Artificial Sequence
  Oligonucleotide for detection of SNP TSC0003299
gttggcgaggttg

SEQ ID NO: 14634 - DNA, 13 bp, Artificial Sequence
  Oligonucleotide for detection of SNP TSC0003299
caacctcgccaac

SEQ ID NO: 14635 - DNA, 13 bp, Artificial Sequence
  Oligonucleotide for detection of SNP TSC0003301
tattagggaataa

SEQ ID NO: 14636 - DNA, 13 bp, Artificial Sequence
  Oligonucleotide for detection of SNP TSC0003301
ttattccctaata

SEQ ID NO: 14637 - DNA, 13 bp, Artificial Sequence
  Oligonucleotide for detection of SNP TSC0003301
tattagagaataa

SEQ ID NO: 14638 - DNA, 13 bp, Artificial Sequence
  Oligonucleotide for detection of SNP TSC0003301
ttattctctaata

SEQ ID NO: 14639 - DNA, 13 bp, Artificial Sequence
  Oligonucleotide for detection of SNP TSC0003302
ggttttatatttt

SEQ ID NO: 14640 - DNA, 13 bp, Artificial Sequence
  Oligonucleotide for detection of SNP TSC0003302
aaaatataaaacc

SEQ ID NO: 14641 - DNA, 13 bp, Artificial Sequence
  Oligonucleotide for detection of SNP TSC0003302
ggttttttatttt

SEQ ID NO: 14642 - DNA, 13 bp, Artificial Sequence
  Oligonucleotide for detection of SNP TSC0003302
aaaataaaaaacc

SEQ ID NO: 14643 - DNA, 13 bp, Artificial Sequence
  Oligonucleotide for detection of SNP TSC0003302
agaatgtggggty

SEQ ID NO: 14644 - DNA, 13 bp, Artificial Sequence
  Oligonucleotide for detection of SNP TSC0003302
raccccacattct

SEQ ID NO: 14645 - DNA, 13 bp, Artificial Sequence
  Oligonucleotide for detection of SNP TSC0003302
agaatgaggggty

SEQ ID NO: 14646 - DNA, 13 bp, Artificial Sequence
  Oligonucleotide for detection of SNP TSC0003302
racccctcattct

SEQ ID NO: 14647 - DNA, 13 bp, Artificial Sequence
  Oligonucleotide for detection of SNP TSC0003303
tgaagagttattt

SEQ ID NO: 14648 - DNA, 13 bp, Artificial Sequence
  Oligonucleotide for detection of SNP TSC0003303
aaataactcttca

SEQ ID NO: 14649 - DNA, 13 bp, Artificial Sequence
  Oligonucleotide for detection of SNP TSC0003303
tgaagaattattt

SEQ ID NO: 14650 - DNA, 13 bp, Artificial Sequence
  Oligonucleotide for detection of SNP TSC0003303
aaataattcttca

SEQ ID NO: 14651 - DNA, 13 bp, Artificial Sequence
  Oligonucleotide for detection of SNP TSC0003305
atatggggttaag

SEQ ID NO: 14652 - DNA, 13 bp, Artificial Sequence
  Oligonucleotide for detection of SNP TSC0003305
cttaaccccatat

SEQ ID NO: 14653 - DNA, 13 bp, Artificial Sequence
  Oligonucleotide for detection of SNP TSC0003305
atatggagttaag

SEQ ID NO: 14654 - DNA, 13 bp, Artificial Sequence
  Oligonucleotide for detection of SNP TSC0003305
cttaactccatat

SEQ ID NO: 14655 - DNA, 13 bp, Artificial Sequence
  Oligonucleotide for detection of SNP TSC0003306
ttgaataataagt

SEQ ID NO: 14656 - DNA, 13 bp, Artificial Sequence
  Oligonucleotide for detection of SNP TSC0003306
acttattattcaa

SEQ ID NO: 14657 - DNA, 13 bp, Artificial Sequence
  Oligonucleotide for detection of SNP TSC0003306
ttgaatgataagt

SEQ ID NO: 14658 - DNA, 13 bp, Artificial Sequence
  Oligonucleotide for detection of SNP TSC0003306
acttatcattcaa

SEQ ID NO: 14659 - DNA, 13 bp, Artificial Sequence
  Oligonucleotide for detection of SNP TSC0003307
ttagagaggttgg

SEQ ID NO: 14660 - DNA, 13 bp, Artificial Sequence
  Oligonucleotide for detection of SNP TSC0003307
ccaacctctctaa

SEQ ID NO: 14661 - DNA, 13 bp, Artificial Sequence
  Oligonucleotide for detection of SNP TSC0003307
ttagaggggttgg

SEQ ID NO: 14662 - DNA, 13 bp, Artificial Sequence
  Oligonucleotide for detection of SNP TSC0003307
ccaacccctctaa

SEQ ID NO: 14663 - DNA, 13 bp, Artificial Sequence
  Oligonucleotide for detection of SNP TSC0003308
tatttattgagag

SEQ ID NO: 14664 - DNA, 13 bp, Artificial Sequence
  Oligonucleotide for detection of SNP TSC0003308
ctctcaataaata

SEQ ID NO: 14665 - DNA, 13 bp, Artificial Sequence
  Oligonucleotide for detection of SNP TSC0003308
tatttagtgagag

SEQ ID NO: 14666 - DNA, 13 bp, Artificial Sequence
  Oligonucleotide for detection of SNP TSC0003308
ctctcactaaata

SEQ ID NO: 14667 - DNA, 13 bp, Artificial Sequence
  Oligonucleotide for detection of SNP TSC0003308
tttttaataagtg

SEQ ID NO: 14668 - DNA, 13 bp, Artificial Sequence
  Oligonucleotide for detection of SNP TSC0003308
cacttattaaaaa

SEQ ID NO: 14669 - DNA, 13 bp, Artificial Sequence
  Oligonucleotide for detection of SNP TSC0003308
tttttattaagtg

SEQ ID NO: 14670 - DNA, 13 bp, Artificial Sequence
  Oligonucleotide for detection of SNP TSC0003308
cacttaataaaaa

SEQ ID NO: 14671 - DNA, 13 bp, Artificial Sequence
  Oligonucleotide for detection of SNP TSC0003310
aaaaaaaaaatag

SEQ ID NO: 14672 - DNA, 13 bp, Artificial Sequence
  Oligonucleotide for detection of SNP TSC0003310
ctatttttttttt

SEQ ID NO: 14673 - DNA, 13 bp, Artificial Sequence
  Oligonucleotide for detection of SNP TSC0003310
aaaaaagaaatag

SEQ ID NO: 14674 - DNA, 13 bp, Artificial Sequence
  Oligonucleotide for detection of SNP TSC0003310
ctatttctttttt

SEQ ID NO: 14675 - DNA, 13 bp, Artificial Sequence
  Oligonucleotide for detection of SNP TSC0003314
gatttttttttag

SEQ ID NO: 14676 - DNA, 13 bp, Artificial Sequence
  Oligonucleotide for detection of SNP TSC0003314
ctaaaaaaaaatc

SEQ ID NO: 14677 - DNA, 13 bp, Artificial Sequence
  Oligonucleotide for detection of SNP TSC0003314
gattttgttttag

SEQ ID NO: 14678 - DNA, 13 bp, Artificial Sequence
  Oligonucleotide for detection of SNP TSC0003314
ctaaaacaaaatc

SEQ ID NO: 14679 - DNA, 13 bp, Artificial Sequence
  Oligonucleotide for detection of SNP TSC0003314
ttgggaaagaaty

SEQ ID NO: 14680 - DNA, 13 bp, Artificial Sequence
  Oligonucleotide for detection of SNP TSC0003314
rattctttcccaa

SEQ ID NO: 14681 - DNA, 13 bp, Artificial Sequence
  Oligonucleotide for detection of SNP TSC0003314
ttgggatagaaty

SEQ ID NO: 14682 - DNA, 13 bp, Artificial Sequence
  Oligonucleotide for detection of SNP TSC0003314
rattctatcccaa

SEQ ID NO: 14683 - DNA, 13 bp, Artificial Sequence
  Oligonucleotide for detection of SNP TSC0003315
ttttagtttgtta

SEQ ID NO: 14684 - DNA, 13 bp, Artificial Sequence
  Oligonucleotide for detection of SNP TSC0003315
taacaaactaaaa

SEQ ID NO: 14685 - DNA, 13 bp, Artificial Sequence
  Oligonucleotide for detection of SNP TSC0003315
ttttagattgtta

SEQ ID NO: 14686 - DNA, 13 bp, Artificial Sequence
  Oligonucleotide for detection of SNP TSC0003315
taacaatctaaaa

SEQ ID NO: 14687 - DNA, 13 bp, Artificial Sequence
  Oligonucleotide for detection of SNP TSC0003315
tgataggttgggg

SEQ ID NO: 14688 - DNA, 13 bp, Artificial Sequence
  Oligonucleotide for detection of SNP TSC0003315
ccccaacctatca

SEQ ID NO: 14689 - DNA, 13 bp, Artificial Sequence
  Oligonucleotide for detection of SNP TSC0003315
tgatagtttgggg

SEQ ID NO: 14690 - DNA, 13 bp, Artificial Sequence
  Oligonucleotide for detection of SNP TSC0003315
ccccaaactatca

SEQ ID NO: 14691 - DNA, 13 bp, Artificial Sequence
  Oligonucleotide for detection of SNP TSC0003316
gttagtatgattg

SEQ ID NO: 14692 - DNA, 13 bp, Artificial Sequence
  Oligonucleotide for detection of SNP TSC0003316
caatcatactaac

SEQ ID NO: 14693 - DNA, 13 bp, Artificial Sequence
  Oligonucleotide for detection of SNP TSC0003316
gttagtgtgattg

SEQ ID NO: 14694 - DNA, 13 bp, Artificial Sequence
  Oligonucleotide for detection of SNP TSC0003316
caatcacactaac

SEQ ID NO: 14695 - DNA, 13 bp, Artificial Sequence
  Oligonucleotide for detection of SNP TSC0003316
gttagcgtgattg

SEQ ID NO: 14696 - DNA, 13 bp, Artificial Sequence
  Oligonucleotide for detection of SNP TSC0003316
caatcacgctaac

SEQ ID NO: 14697 - DNA, 13 bp, Artificial Sequence
  Oligonucleotide for detection of SNP TSC0003316
tagttatgttgay

SEQ ID NO: 14698 - DNA, 13 bp, Artificial Sequence
  Oligonucleotide for detection of SNP TSC0003316
rtcaacataacta

SEQ ID NO: 14699 - DNA, 13 bp, Artificial Sequence
  Oligonucleotide for detection of SNP TSC0003316
tagttacgttgay

SEQ ID NO: 14700 - DNA, 13 bp, Artificial Sequence
  Oligonucleotide for detection of SNP TSC0003316
rtcaacgtaacta

SEQ ID NO: 14701 - DNA, 13 bp, Artificial Sequence
  Oligonucleotide for detection of SNP TSC0003317
ttttaagttatay

SEQ ID NO: 14702 - DNA, 13 bp, Artificial Sequence
  Oligonucleotide for detection of SNP TSC0003317
rtataacttaaaa

SEQ ID NO: 14703 - DNA, 13 bp, Artificial Sequence
  Oligonucleotide for detection of SNP TSC0003317
ttttaaattatay

SEQ ID NO: 14704 - DNA, 13 bp, Artificial Sequence
  Oligonucleotide for detection of SNP TSC0003317
rtataatttaaaa

SEQ ID NO: 14705 - DNA, 13 bp, Artificial Sequence
  Oligonucleotide for detection of SNP TSC0003318
tttgatagggaga

SEQ ID NO: 14706 - DNA, 13 bp, Artificial Sequence
  Oligonucleotide for detection of SNP TSC0003318
tctccctatcaaa

SEQ ID NO: 14707 - DNA, 13 bp, Artificial Sequence
  Oligonucleotide for detection of SNP TSC0003318
tttgatggggaga

SEQ ID NO: 14708 - DNA, 13 bp, Artificial Sequence
  Oligonucleotide for detection of SNP TSC0003318
tctccccatcaaa

SEQ ID NO: 14709 - DNA, 13 bp, Artificial Sequence
  Oligonucleotide for detection of SNP TSC0003318
tttgacggggaga

SEQ ID NO: 14710 - DNA, 13 bp, Artificial Sequence
  Oligonucleotide for detection of SNP TSC0003318
tctccccgtcaaa

SEQ ID NO: 14711 - DNA, 13 bp, Artificial Sequence
  Oligonucleotide for detection of SNP TSC0003318
tttttttgttaag

SEQ ID NO: 14712 - DNA, 13 bp, Artificial Sequence
  Oligonucleotide for detection of SNP TSC0003318
cttaacaaaaaaa

SEQ ID NO: 14713 - DNA, 13 bp, Artificial Sequence
  Oligonucleotide for detection of SNP TSC0003318
ttttttcgttaag

SEQ ID NO: 14714 - DNA, 13 bp, Artificial Sequence
  Oligonucleotide for detection of SNP TSC0003318
cttaacgaaaaaa

SEQ ID NO: 14715 - DNA, 13 bp, Artificial Sequence
  Oligonucleotide for detection of SNP TSC0003319
ttggttaaaataa

SEQ ID NO: 14716 - DNA, 13 bp, Artificial Sequence
  Oligonucleotide for detection of SNP TSC0003319
ttattttaaccaa

SEQ ID NO: 14717 - DNA, 13 bp, Artificial Sequence
  Oligonucleotide for detection of SNP TSC0003319
ttggttgaaataa

SEQ ID NO: 14718 - DNA, 13 bp, Artificial Sequence
  Oligonucleotide for detection of SNP TSC0003319
ttatttcaaccaa

SEQ ID NO: 14719 - DNA, 13 bp, Artificial Sequence
  Oligonucleotide for detection of SNP TSC0003319
ttggtcgaaataa

SEQ ID NO: 14720 - DNA, 13 bp, Artificial Sequence
  Oligonucleotide for detection of SNP TSC0003319
ttatttcgaccaa

SEQ ID NO: 14721 - DNA, 13 bp, Artificial Sequence
  Oligonucleotide for detection of SNP TSC0003319
ttgttttgattaa

SEQ ID NO: 14722 - DNA, 13 bp, Artificial Sequence
  Oligonucleotide for detection of SNP TSC0003319
ttaatcaaaacaa

SEQ ID NO: 14723 - DNA, 13 bp, Artificial Sequence
  Oligonucleotide for detection of SNP TSC0003319
ttgtttcgattaa

SEQ ID NO: 14724 - DNA, 13 bp, Artificial Sequence
  Oligonucleotide for detection of SNP TSC0003319
ttaatcgaaacaa

SEQ ID NO: 14725 - DNA, 13 bp, Artificial Sequence
  Oligonucleotide for detection of SNP TSC0003320
attataatatgaa

SEQ ID NO: 14726 - DNA, 13 bp, Artificial Sequence
  Oligonucleotide for detection of SNP TSC0003320
ttcatattataat

SEQ ID NO: 14727 - DNA, 13 bp, Artificial Sequence
  Oligonucleotide for detection of SNP TSC0003320
attatagtatgaa

SEQ ID NO: 14728 - DNA, 13 bp, Artificial Sequence
  Oligonucleotide for detection of SNP TSC0003320
ttcatactataat

SEQ ID NO: 14729 - DNA, 13 bp, Artificial Sequence
  Oligonucleotide for detection of SNP TSC0003321
aaatttagaattt

SEQ ID NO: 14730 - DNA, 13 bp, Artificial Sequence
  Oligonucleotide for detection of SNP TSC0003321
aaattctaaattt

SEQ ID NO: 14731 - DNA, 13 bp, Artificial Sequence
  Oligonucleotide for detection of SNP TSC0003321
aaattttgaattt

SEQ ID NO: 14732 - DNA, 13 bp, Artificial Sequence
  Oligonucleotide for detection of SNP TSC0003321
aaattcaaaattt

SEQ ID NO: 14733 - DNA, 13 bp, Artificial Sequence
  Oligonucleotide for detection of SNP TSC0003321
aggtttaggattt

SEQ ID NO: 14734 - DNA, 13 bp, Artificial Sequence
  Oligonucleotide for detection of SNP TSC0003321
aaatcctaaacct

SEQ ID NO: 14735 - DNA, 13 bp, Artificial Sequence
  Oligonucleotide for detection of SNP TSC0003322
aaattataaggat

SEQ ID NO: 14736 - DNA, 13 bp, Artificial Sequence
  Oligonucleotide for detection of SNP TSC0003322
atccttataattt

SEQ ID NO: 14737 - DNA, 13 bp, Artificial Sequence
  Oligonucleotide for detection of SNP TSC0003322
aaattagaaggat

SEQ ID NO: 14738 - DNA, 13 bp, Artificial Sequence
  Oligonucleotide for detection of SNP TSC0003322
atccttctaattt

SEQ ID NO: 14739 - DNA, 13 bp, Artificial Sequence
  Oligonucleotide for detection of SNP TSC0003322
atttttgtaattt

SEQ ID NO: 14740 - DNA, 13 bp, Artificial Sequence
  Oligonucleotide for detection of SNP TSC0003322
aaattacaaaaat

SEQ ID NO: 14741 - DNA, 13 bp, Artificial Sequence
  Oligonucleotide for detection of SNP TSC0003322
atttttttaattt

SEQ ID NO: 14742 - DNA, 13 bp, Artificial Sequence
  Oligonucleotide for detection of SNP TSC0003322
aaattaaaaaaat

SEQ ID NO: 14743 - DNA, 13 bp, Artificial Sequence
  Oligonucleotide for detection of SNP TSC0003323
agggttaaataaa

SEQ ID NO: 14744 - DNA, 13 bp, Artificial Sequence
  Oligonucleotide for detection of SNP TSC0003323
tttatttaaccct

SEQ ID NO: 14745 - DNA, 13 bp, Artificial Sequence
  Oligonucleotide for detection of SNP TSC0003323
agggttgaataaa

SEQ ID NO: 14746 - DNA, 13 bp, Artificial Sequence
  Oligonucleotide for detection of SNP TSC0003323
tttattcaaccct

SEQ ID NO: 14747 - DNA, 13 bp, Artificial Sequence
  Oligonucleotide for detection of SNP TSC0003323
agggtcgaataaa

SEQ ID NO: 14748 - DNA, 13 bp, Artificial Sequence
  Oligonucleotide for detection of SNP TSC0003323
tttattcgaccct

SEQ ID NO: 14749 - DNA, 13 bp, Artificial Sequence
  Oligonucleotide for detection of SNP TSC0003323
tttatttgatttt

SEQ ID NO: 14750 - DNA, 13 bp, Artificial Sequence
  Oligonucleotide for detection of SNP TSC0003323
aaaatcaaataaa

SEQ ID NO: 14751 - DNA, 13 bp, Artificial Sequence
  Oligonucleotide for detection of SNP TSC0003323
tttattcgatttt

SEQ ID NO: 14752 - DNA, 13 bp, Artificial Sequence
  Oligonucleotide for detection of SNP TSC0003323
aaaatcgaataaa

SEQ ID NO: 14753 - DNA, 13 bp, Artificial Sequence
  Oligonucleotide for detection of SNP TSC0003324
gaaaatataaaay

SEQ ID NO: 14754 - DNA, 13 bp, Artificial Sequence
  Oligonucleotide for detection of SNP TSC0003324
rttttatattttc

SEQ ID NO: 14755 - DNA, 13 bp, Artificial Sequence
  Oligonucleotide for detection of SNP TSC0003324
gaaaatgtaaaay

SEQ ID NO: 14756 - DNA, 13 bp, Artificial Sequence
  Oligonucleotide for detection of SNP TSC0003324
rttttacattttc

SEQ ID NO: 14757 - DNA, 13 bp, Artificial Sequence
  Oligonucleotide for detection of SNP TSC0003325
tttttgtgtttag

SEQ ID NO: 14758 - DNA, 13 bp, Artificial Sequence
  Oligonucleotide for detection of SNP TSC0003325
ctaaacacaaaaa

SEQ ID NO: 14759 - DNA, 13 bp, Artificial Sequence
  Oligonucleotide for detection of SNP TSC0003325
tttttgcgtttag

SEQ ID NO: 14760 - DNA, 13 bp, Artificial Sequence
  Oligonucleotide for detection of SNP TSC0003325
ctaaacgcaaaaa

SEQ ID NO: 14761 - DNA, 13 bp, Artificial Sequence
  Oligonucleotide for detection of SNP TSC0003325
ttggatgtaaagg

SEQ ID NO: 14762 - DNA, 13 bp, Artificial Sequence
  Oligonucleotide for detection of SNP TSC0003325
cctttacatccaa

SEQ ID NO: 14763 - DNA, 13 bp, Artificial Sequence
  Oligonucleotide for detection of SNP TSC0003325
ttggatataaagg

SEQ ID NO: 14764 - DNA, 13 bp, Artificial Sequence
  Oligonucleotide for detection of SNP TSC0003325
cctttatatccaa

SEQ ID NO: 14765 - DNA, 13 bp, Artificial Sequence
  Oligonucleotide for detection of SNP TSC0003325
ttggacgtaaagg

SEQ ID NO: 14766 - DNA, 13 bp, Artificial Sequence
  Oligonucleotide for detection of SNP TSC0003325
cctttacgtccaa

SEQ ID NO: 14767 - DNA, 13 bp, Artificial Sequence
  Oligonucleotide for detection of SNP TSC0003326
tttatgattgtaa

SEQ ID NO: 14768 - DNA, 13 bp, Artificial Sequence
  Oligonucleotide for detection of SNP TSC0003326
ttacaatcataaa

SEQ ID NO: 14769 - DNA, 13 bp, Artificial Sequence
  Oligonucleotide for detection of SNP TSC0003326
tttatgtttgtaa

SEQ ID NO: 14770 - DNA, 13 bp, Artificial Sequence
  Oligonucleotide for detection of SNP TSC0003326
ttacaaacataaa

SEQ ID NO: 14771 - DNA, 13 bp, Artificial Sequence
  Oligonucleotide for detection of SNP TSC0003326
tttacgattgtaa

SEQ ID NO: 14772 - DNA, 13 bp, Artificial Sequence
  Oligonucleotide for detection of SNP TSC0003326
ttacaatcgtaaa

SEQ ID NO: 14773 - DNA, 13 bp, Artificial Sequence
  Oligonucleotide for detection of SNP TSC0003326
tttacgtttgtaa

SEQ ID NO: 14774 - DNA, 13 bp, Artificial Sequence
  Oligonucleotide for detection of SNP TSC0003326
ttacaaacgtaaa

SEQ ID NO: 14775 - DNA, 13 bp, Artificial Sequence
  Oligonucleotide for detection of SNP TSC0003326
tttatgatcgtaa

SEQ ID NO: 14776 - DNA, 13 bp, Artificial Sequence
  Oligonucleotide for detection of SNP TSC0003326
ttacgatcataaa

SEQ ID NO: 14777 - DNA, 13 bp, Artificial Sequence
  Oligonucleotide for detection of SNP TSC0003326
tttatgttcgtaa

SEQ ID NO: 14778 - DNA, 13 bp, Artificial Sequence
  Oligonucleotide for detection of SNP TSC0003326
ttacgaacataaa

SEQ ID NO: 14779 - DNA, 13 bp, Artificial Sequence
  Oligonucleotide for detection of SNP TSC0003326
tttacgatcgtaa

SEQ ID NO: 14780 - DNA, 13 bp, Artificial Sequence
  Oligonucleotide for detection of SNP TSC0003326
ttacgatcgtaaa

SEQ ID NO: 14781 - DNA, 13 bp, Artificial Sequence
  Oligonucleotide for detection of SNP TSC0003326
tttacgttcgtaa

SEQ ID NO: 14782 - DNA, 13 bp, Artificial Sequence
  Oligonucleotide for detection of SNP TSC0003326
ttacgaacgtaaa

SEQ ID NO: 14783 - DNA, 13 bp, Artificial Sequence
  Oligonucleotide for detection of SNP TSC0003326
ttatggttgtgag

SEQ ID NO: 14784 - DNA, 13 bp, Artificial Sequence
  Oligonucleotide for detection of SNP TSC0003326
ctcacaaccataa

SEQ ID NO: 14785 - DNA, 13 bp, Artificial Sequence
  Oligonucleotide for detection of SNP TSC0003326
ttatgggtgtgag

SEQ ID NO: 14786 - DNA, 13 bp, Artificial Sequence
  Oligonucleotide for detection of SNP TSC0003326
ctcacacccataa

SEQ ID NO: 14787 - DNA, 13 bp, Artificial Sequence
  Oligonucleotide for detection of SNP TSC0003326
ttacggttgtgag

SEQ ID NO: 14788 - DNA, 13 bp, Artificial Sequence
  Oligonucleotide for detection of SNP TSC0003326
ctcacaaccgtaa

SEQ ID NO: 14789 - DNA, 13 bp, Artificial Sequence
  Oligonucleotide for detection of SNP TSC0003326
ttacgggtgtgag

SEQ ID NO: 14790 - DNA, 13 bp, Artificial Sequence
  Oligonucleotide for detection of SNP TSC0003326
ctcacacccgtaa

SEQ ID NO: 14791 - DNA, 13 bp, Artificial Sequence
  Oligonucleotide for detection of SNP TSC0003326
ttatggtcgtgag

SEQ ID NO: 14792 - DNA, 13 bp, Artificial Sequence
  Oligonucleotide for detection of SNP TSC0003326
ctcacgaccataa

SEQ ID NO: 14793 - DNA, 13 bp, Artificial Sequence
  Oligonucleotide for detection of SNP TSC0003326
ttatgggcgtgag

SEQ ID NO: 14794 - DNA, 13 bp, Artificial Sequence
  Oligonucleotide for detection of SNP TSC0003326
ctcacgcccataa

SEQ ID NO: 14795 - DNA, 13 bp, Artificial Sequence
  Oligonucleotide for detection of SNP TSC0003326
ttacggtcgtgag

SEQ ID NO: 14796 - DNA, 13 bp, Artificial Sequence
  Oligonucleotide for detection of SNP TSC0003326
ctcacgaccgtaa

SEQ ID NO: 14797 - DNA, 13 bp, Artificial Sequence
  Oligonucleotide for detection of SNP TSC0003326
ttacgggcgtgag

SEQ ID NO: 14798 - DNA, 13 bp, Artificial Sequence
  Oligonucleotide for detection of SNP TSC0003326
ctcacgcccgtaa

SEQ ID NO: 14799 - DNA, 13 bp, Artificial Sequence
  Oligonucleotide for detection of SNP TSC0003328
tattgatgtttty

SEQ ID NO: 14800 - DNA, 13 bp, Artificial Sequence
  Oligonucleotide for detection of SNP TSC0003328
raaaacatcaata

SEQ ID NO: 14801 - DNA, 13 bp, Artificial Sequence
  Oligonucleotide for detection of SNP TSC0003328
tattgacgtttty

SEQ ID NO: 14802 - DNA, 13 bp, Artificial Sequence
  Oligonucleotide for detection of SNP TSC0003328
raaaacgtcaata

SEQ ID NO: 14803 - DNA, 13 bp, Artificial Sequence
  Oligonucleotide for detection of SNP TSC0003328
gagaatgttaata

SEQ ID NO: 14804 - DNA, 13 bp, Artificial Sequence
  Oligonucleotide for detection of SNP TSC0003328
tattaacattctc

SEQ ID NO: 14805 - DNA, 13 bp, Artificial Sequence
  Oligonucleotide for detection of SNP TSC0003328
gagaatattaata

SEQ ID NO: 14806 - DNA, 13 bp, Artificial Sequence
  Oligonucleotide for detection of SNP TSC0003328
tattaatattctc

SEQ ID NO: 14807 - DNA, 13 bp, Artificial Sequence
  Oligonucleotide for detection of SNP TSC0003328
gagaacgttaata

SEQ ID NO: 14808 - DNA, 13 bp, Artificial Sequence
  Oligonucleotide for detection of SNP TSC0003328
tattaacgttctc

SEQ ID NO: 14809 - DNA, 13 bp, Artificial Sequence
  Oligonucleotide for detection of SNP TSC0003330
ttttaagagtaaa

SEQ ID NO: 14810 - DNA, 13 bp, Artificial Sequence
  Oligonucleotide for detection of SNP TSC0003330
tttactcttaaaa

SEQ ID NO: 14811 - DNA, 13 bp, Artificial Sequence
  Oligonucleotide for detection of SNP TSC0003330
ttttaaaagtaaa

SEQ ID NO: 14812 - DNA, 13 bp, Artificial Sequence
  Oligonucleotide for detection of SNP TSC0003330
tttacttttaaaa

SEQ ID NO: 14813 - DNA, 13 bp, Artificial Sequence
  Oligonucleotide for detection of SNP TSC0003331
ttatttatttaat

SEQ ID NO: 14814 - DNA, 13 bp, Artificial Sequence
  Oligonucleotide for detection of SNP TSC0003331
attaaataaataa

SEQ ID NO: 14815 - DNA, 13 bp, Artificial Sequence
  Oligonucleotide for detection of SNP TSC0003331
ttatttgtttaat

SEQ ID NO: 14816 - DNA, 13 bp, Artificial Sequence
  Oligonucleotide for detection of SNP TSC0003331
attaaacaaataa

SEQ ID NO: 14817 - DNA, 13 bp, Artificial Sequence
  Oligonucleotide for detection of SNP TSC0003332
ttttttaaggtta

SEQ ID NO: 14818 - DNA, 13 bp, Artificial Sequence
  Oligonucleotide for detection of SNP TSC0003332
taaccttaaaaaa

SEQ ID NO: 14819 - DNA, 13 bp, Artificial Sequence
  Oligonucleotide for detection of SNP TSC0003332
ttttttgaggtta

SEQ ID NO: 14820 - DNA, 13 bp, Artificial Sequence
  Oligonucleotide for detection of SNP TSC0003332
taacctcaaaaaa

SEQ ID NO: 14821 - DNA, 13 bp, Artificial Sequence
  Oligonucleotide for detection of SNP TSC0003332
tttttcgaggtta

SEQ ID NO: 14822 - DNA, 13 bp, Artificial Sequence
  Oligonucleotide for detection of SNP TSC0003332
taacctcgaaaaa

SEQ ID NO: 14823 - DNA, 13 bp, Artificial Sequence
  Oligonucleotide for detection of SNP TSC0003332
taattttggggag

SEQ ID NO: 14824 - DNA, 13 bp, Artificial Sequence
  Oligonucleotide for detection of SNP TSC0003332
ctccccaaaatta

SEQ ID NO: 14825 - DNA, 13 bp, Artificial Sequence
  Oligonucleotide for detection of SNP TSC0003332
taatttcggggag

SEQ ID NO: 14826 - DNA, 13 bp, Artificial Sequence
  Oligonucleotide for detection of SNP TSC0003332
ctccccgaaatta

SEQ ID NO: 14827 - DNA, 13 bp, Artificial Sequence
  Oligonucleotide for detection of SNP TSC0003333
atgagtatgttgy

SEQ ID NO: 14828 - DNA, 13 bp, Artificial Sequence
  Oligonucleotide for detection of SNP TSC0003333
rcaacatactcat

SEQ ID NO: 14829 - DNA, 13 bp, Artificial Sequence
  Oligonucleotide for detection of SNP TSC0003333
atgagtttgttgy

SEQ ID NO: 14830 - DNA, 13 bp, Artificial Sequence
  Oligonucleotide for detection of SNP TSC0003333
rcaacaaactcat

SEQ ID NO: 14831 - DNA, 13 bp, Artificial Sequence
  Oligonucleotide for detection of SNP TSC0003333
acgagtatgttgy

SEQ ID NO: 14832 - DNA, 13 bp, Artificial Sequence
  Oligonucleotide for detection of SNP TSC0003333
rcaacatactcgt

SEQ ID NO: 14833 - DNA, 13 bp, Artificial Sequence
  Oligonucleotide for detection of SNP TSC0003333
acgagtttgttgy

SEQ ID NO: 14834 - DNA, 13 bp, Artificial Sequence
  Oligonucleotide for detection of SNP TSC0003333
rcaacaaactcgt

SEQ ID NO: 14835 - DNA, 13 bp, Artificial Sequence
  Oligonucleotide for detection of SNP TSC0003333
gtagtatgtttgt

SEQ ID NO: 14836 - DNA, 13 bp, Artificial Sequence
  Oligonucleotide for detection of SNP TSC0003333
acaaacatactac

SEQ ID NO: 14837 - DNA, 13 bp, Artificial Sequence
  Oligonucleotide for detection of SNP TSC0003333
gtagtaggtttgt

SEQ ID NO: 14838 - DNA, 13 bp, Artificial Sequence
  Oligonucleotide for detection of SNP TSC0003333
acaaacctactac

SEQ ID NO: 14839 - DNA, 13 bp, Artificial Sequence
  Oligonucleotide for detection of SNP TSC0003333
gtagtatgttcgt

SEQ ID NO: 14840 - DNA, 13 bp, Artificial Sequence
  Oligonucleotide for detection of SNP TSC0003333
acgaacatactac

SEQ ID NO: 14841 - DNA, 13 bp, Artificial Sequence
  Oligonucleotide for detection of SNP TSC0003333
gtagtaggttcgt

SEQ ID NO: 14842 - DNA, 13 bp, Artificial Sequence
  Oligonucleotide for detection of SNP TSC0003333
acgaacctactac

SEQ ID NO: 14843 - DNA, 13 bp, Artificial Sequence
  Oligonucleotide for detection of SNP TSC0003334
agtttgagagaaa

SEQ ID NO: 14844 - DNA, 13 bp, Artificial Sequence
  Oligonucleotide for detection of SNP TSC0003334
tttctctcaaact

SEQ ID NO: 14845 - DNA, 13 bp, Artificial Sequence
  Oligonucleotide for detection of SNP TSC0003334
agtttgggagaaa

SEQ ID NO: 14846 - DNA, 13 bp, Artificial Sequence
  Oligonucleotide for detection of SNP TSC0003334
tttctcccaaact

SEQ ID NO: 14847 - DNA, 13 bp, Artificial Sequence
  Oligonucleotide for detection of SNP TSC0003334
agttcgagagaaa

SEQ ID NO: 14848 - DNA, 13 bp, Artificial Sequence
  Oligonucleotide for detection of SNP TSC0003334
tttctctcgaact

SEQ ID NO: 14849 - DNA, 13 bp, Artificial Sequence
  Oligonucleotide for detection of SNP TSC0003334
agttcgggagaaa

SEQ ID NO: 14850 - DNA, 13 bp, Artificial Sequence
  Oligonucleotide for detection of SNP TSC0003334
tttctcccgaact

SEQ ID NO: 14851 - DNA, 13 bp, Artificial Sequence
  Oligonucleotide for detection of SNP TSC0003335
aatatatgtggty

SEQ ID NO: 14852 - DNA, 13 bp, Artificial Sequence
  Oligonucleotide for detection of SNP TSC0003335
raccacatatatt

SEQ ID NO: 14853 - DNA, 13 bp, Artificial Sequence
  Oligonucleotide for detection of SNP TSC0003335
aatatacgtggty

SEQ ID NO: 14854 - DNA, 13 bp, Artificial Sequence
  Oligonucleotide for detection of SNP TSC0003335
raccacgtatatt

SEQ ID NO: 14855 - DNA, 13 bp, Artificial Sequence
  Oligonucleotide for detection of SNP TSC0003335
ggttatgtgtatt

SEQ ID NO: 14856 - DNA, 13 bp, Artificial Sequence
  Oligonucleotide for detection of SNP TSC0003335
aatacacataacc

SEQ ID NO: 14857 - DNA, 13 bp, Artificial Sequence
  Oligonucleotide for detection of SNP TSC0003335
ggttatatgtatt

SEQ ID NO: 14858 - DNA, 13 bp, Artificial Sequence
  Oligonucleotide for detection of SNP TSC0003335
aatacatataacc

SEQ ID NO: 14859 - DNA, 13 bp, Artificial Sequence
  Oligonucleotide for detection of SNP TSC0003335
ggttacgtgtatt

SEQ ID NO: 14860 - DNA, 13 bp, Artificial Sequence
  Oligonucleotide for detection of SNP TSC0003335
aatacacgtaacc

SEQ ID NO: 14861 - DNA, 13 bp, Artificial Sequence
  Oligonucleotide for detection of SNP TSC0003336
ttattaattaaga

SEQ ID NO: 14862 - DNA, 13 bp, Artificial Sequence
  Oligonucleotide for detection of SNP TSC0003336
tcttaattaataa

SEQ ID NO: 14863 - DNA, 13 bp, Artificial Sequence
  Oligonucleotide for detection of SNP TSC0003336
ttattagttaaga

SEQ ID NO: 14864 - DNA, 13 bp, Artificial Sequence
  Oligonucleotide for detection of SNP TSC0003336
tcttaactaataa

SEQ ID NO: 14865 - DNA, 13 bp, Artificial Sequence
  Oligonucleotide for detection of SNP TSC0003337
ttagataatgtay

SEQ ID NO: 14866 - DNA, 13 bp, Artificial Sequence
  Oligonucleotide for detection of SNP TSC0003337
rtacattatctaa

SEQ ID NO: 14867 - DNA, 13 bp, Artificial Sequence
  Oligonucleotide for detection of SNP TSC0003337
ttagattatgtay

SEQ ID NO: 14868 - DNA, 13 bp, Artificial Sequence
  Oligonucleotide for detection of SNP TSC0003337
rtacataatctaa

SEQ ID NO: 14869 - DNA, 13 bp, Artificial Sequence
  Oligonucleotide for detection of SNP TSC0003337
gtatattgtttgg

SEQ ID NO: 14870 - DNA, 13 bp, Artificial Sequence
  Oligonucleotide for detection of SNP TSC0003337
ccaaacaatatac

SEQ ID NO: 14871 - DNA, 13 bp, Artificial Sequence
  Oligonucleotide for detection of SNP TSC0003337
gtatatagtttgg

SEQ ID NO: 14872 - DNA, 13 bp, Artificial Sequence
  Oligonucleotide for detection of SNP TSC0003337
ccaaactatatac

SEQ ID NO: 14873 - DNA, 13 bp, Artificial Sequence
  Oligonucleotide for detection of SNP TSC0003338
tatattttgatta

SEQ ID NO: 14874 - DNA, 13 bp, Artificial Sequence
  Oligonucleotide for detection of SNP TSC0003338
taatcaaaatata

SEQ ID NO: 14875 - DNA, 13 bp, Artificial Sequence
  Oligonucleotide for detection of SNP TSC0003338
tatattgtgatta

SEQ ID NO: 14876 - DNA, 13 bp, Artificial Sequence
  Oligonucleotide for detection of SNP TSC0003338
taatcacaatata

SEQ ID NO: 14877 - DNA, 13 bp, Artificial Sequence
  Oligonucleotide for detection of SNP TSC0003338
tagttaaaatgtg

SEQ ID NO: 14878 - DNA, 13 bp, Artificial Sequence
  Oligonucleotide for detection of SNP TSC0003338
cacattttaacta

SEQ ID NO: 14879 - DNA, 13 bp, Artificial Sequence
  Oligonucleotide for detection of SNP TSC0003338
tagttataatgtg

SEQ ID NO: 14880 - DNA, 13 bp, Artificial Sequence
  Oligonucleotide for detection of SNP TSC0003338
cacattataacta

SEQ ID NO: 14881 - DNA, 13 bp, Artificial Sequence
  Oligonucleotide for detection of SNP TSC0003339
gttttttaaatta

SEQ ID NO: 14882 - DNA, 13 bp, Artificial Sequence
  Oligonucleotide for detection of SNP TSC0003339
taatttaaaaaac

SEQ ID NO: 14883 - DNA, 13 bp, Artificial Sequence
  Oligonucleotide for detection of SNP TSC0003339
gtttttgaaatta

SEQ ID NO: 14884 - DNA, 13 bp, Artificial Sequence
  Oligonucleotide for detection of SNP TSC0003339
taatttcaaaaac

SEQ ID NO: 14885 - DNA, 13 bp, Artificial Sequence
  Oligonucleotide for detection of SNP TSC0003339
taatttgagaaay

SEQ ID NO: 14886 - DNA, 13 bp, Artificial Sequence
  Oligonucleotide for detection of SNP TSC0003339
rtttctcaaatta

SEQ ID NO: 14887 - DNA, 13 bp, Artificial Sequence
  Oligonucleotide for detection of SNP TSC0003339
taattttagaaay

SEQ ID NO: 14888 - DNA, 13 bp, Artificial Sequence
  Oligonucleotide for detection of SNP TSC0003339
rtttctaaaatta

SEQ ID NO: 14889 - DNA, 13 bp, Artificial Sequence
  Oligonucleotide for detection of SNP TSC0003340
attttggtgtatg

SEQ ID NO: 14890 - DNA, 13 bp, Artificial Sequence
  Oligonucleotide for detection of SNP TSC0003340
catacaccaaaat

SEQ ID NO: 14891 - DNA, 13 bp, Artificial Sequence
  Oligonucleotide for detection of SNP TSC0003340
attttgatgtatg

SEQ ID NO: 14892 - DNA, 13 bp, Artificial Sequence
  Oligonucleotide for detection of SNP TSC0003340
catacatcaaaat

SEQ ID NO: 14893 - DNA, 13 bp, Artificial Sequence
  Oligonucleotide for detection of SNP TSC0003341
tttagtaaaatay

SEQ ID NO: 14894 - DNA, 13 bp, Artificial Sequence
  Oligonucleotide for detection of SNP TSC0003341
rtattttactaaa

SEQ ID NO: 14895 - DNA, 13 bp, Artificial Sequence
  Oligonucleotide for detection of SNP TSC0003341
tttagtgaaatay

SEQ ID NO: 14896 - DNA, 13 bp, Artificial Sequence
  Oligonucleotide for detection of SNP TSC0003341
rtatttcactaaa

SEQ ID NO: 14897 - DNA, 13 bp, Artificial Sequence
  Oligonucleotide for detection of SNP TSC0003342
tgtgttagattty

SEQ ID NO: 14898 - DNA, 13 bp, Artificial Sequence
  Oligonucleotide for detection of SNP TSC0003342
raaatctaacaca

SEQ ID NO: 14899 - DNA, 13 bp, Artificial Sequence
  Oligonucleotide for detection of SNP TSC0003342
tgtgttggattty

SEQ ID NO: 14900 - DNA, 13 bp, Artificial Sequence
  Oligonucleotide for detection of SNP TSC0003342
raaatccaacaca

SEQ ID NO: 14901 - DNA, 13 bp, Artificial Sequence
  Oligonucleotide for detection of SNP TSC0003342
tgcgttagattty

SEQ ID NO: 14902 - DNA, 13 bp, Artificial Sequence
  Oligonucleotide for detection of SNP TSC0003342
raaatctaacgca

SEQ ID NO: 14903 - DNA, 13 bp, Artificial Sequence
  Oligonucleotide for detection of SNP TSC0003342
tgcgttggattty

SEQ ID NO: 14904 - DNA, 13 bp, Artificial Sequence
  Oligonucleotide for detection of SNP TSC0003342
raaatccaacgca

SEQ ID NO: 14905 - DNA, 13 bp, Artificial Sequence
  Oligonucleotide for detection of SNP TSC0003342
tgtgtcggattty

SEQ ID NO: 14906 - DNA, 13 bp, Artificial Sequence
  Oligonucleotide for detection of SNP TSC0003342
raaatccgacaca

SEQ ID NO: 14907 - DNA, 13 bp, Artificial Sequence
  Oligonucleotide for detection of SNP TSC0003342
tgcgtcggattty

SEQ ID NO: 14908 - DNA, 13 bp, Artificial Sequence
  Oligonucleotide for detection of SNP TSC0003342
raaatccgacgca

SEQ ID NO: 14909 - DNA, 13 bp, Artificial Sequence
  Oligonucleotide for detection of SNP TSC0003342
ggagtttggtgta

SEQ ID NO: 14910 - DNA, 13 bp, Artificial Sequence
  Oligonucleotide for detection of SNP TSC0003342
tacaccaaactcc

SEQ ID NO: 14911 - DNA, 13 bp, Artificial Sequence
  Oligonucleotide for detection of SNP TSC0003342
ggagtttggcgta

SEQ ID NO: 14912 - DNA, 13 bp, Artificial Sequence
  Oligonucleotide for detection of SNP TSC0003342
tacgccaaactcc

SEQ ID NO: 14913 - DNA, 13 bp, Artificial Sequence
  Oligonucleotide for detection of SNP TSC0003342
ggagttcggtgta

SEQ ID NO: 14914 - DNA, 13 bp, Artificial Sequence
  Oligonucleotide for detection of SNP TSC0003342
tacaccgaactcc

SEQ ID NO: 14915 - DNA, 13 bp, Artificial Sequence
  Oligonucleotide for detection of SNP TSC0003342
ggagttcggcgta

SEQ ID NO: 14916 - DNA, 13 bp, Artificial Sequence
  Oligonucleotide for detection of SNP TSC0003342
tacgccgaactcc

SEQ ID NO: 14917 - DNA, 13 bp, Artificial Sequence
  Oligonucleotide for detection of SNP TSC0003343
gttgtagggaaay

SEQ ID NO: 14918 - DNA, 13 bp, Artificial Sequence
  Oligonucleotide for detection of SNP TSC0003343
rtttccctacaac

SEQ ID NO: 14919 - DNA, 13 bp, Artificial Sequence
  Oligonucleotide for detection of SNP TSC0003343
gttgtaaggaaay

SEQ ID NO: 14920 - DNA, 13 bp, Artificial Sequence
  Oligonucleotide for detection of SNP TSC0003343
rtttccttacaac

SEQ ID NO: 14921 - DNA, 13 bp, Artificial Sequence
  Oligonucleotide for detection of SNP TSC0003344
taatttattgata

SEQ ID NO: 14922 - DNA, 13 bp, Artificial Sequence
  Oligonucleotide for detection of SNP TSC0003344
tatcaataaatta

SEQ ID NO: 14923 - DNA, 13 bp, Artificial Sequence
  Oligonucleotide for detection of SNP TSC0003344
taattttttgata

SEQ ID NO: 14924 - DNA, 13 bp, Artificial Sequence
  Oligonucleotide for detection of SNP TSC0003344
tatcaaaaaatta

SEQ ID NO: 14925 - DNA, 13 bp, Artificial Sequence
  Oligonucleotide for detection of SNP TSC0003344
tgttagtggatta

SEQ ID NO: 14926 - DNA, 13 bp, Artificial Sequence
  Oligonucleotide for detection of SNP TSC0003344
taatccactaaca

SEQ ID NO: 14927 - DNA, 13 bp, Artificial Sequence
  Oligonucleotide for detection of SNP TSC0003344
tgttagaggatta

SEQ ID NO: 14928 - DNA, 13 bp, Artificial Sequence
  Oligonucleotide for detection of SNP TSC0003344
taatcctctaaca

SEQ ID NO: 14929 - DNA, 13 bp, Artificial Sequence
  Oligonucleotide for detection of SNP TSC0003345
ttgaagaggttaa

SEQ ID NO: 14930 - DNA, 13 bp, Artificial Sequence
  Oligonucleotide for detection of SNP TSC0003345
ttaacctcttcaa

SEQ ID NO: 14931 - DNA, 13 bp, Artificial Sequence
  Oligonucleotide for detection of SNP TSC0003345
ttgaaggggttaa

SEQ ID NO: 14932 - DNA, 13 bp, Artificial Sequence
  Oligonucleotide for detection of SNP TSC0003345
ttaaccccttcaa

SEQ ID NO: 14933 - DNA, 13 bp, Artificial Sequence
  Oligonucleotide for detection of SNP TSC0003346
tagttgtggggaa

SEQ ID NO: 14934 - DNA, 13 bp, Artificial Sequence
  Oligonucleotide for detection of SNP TSC0003346
ttccccacaacta

SEQ ID NO: 14935 - DNA, 13 bp, Artificial Sequence
  Oligonucleotide for detection of SNP TSC0003346
tagttgcggggaa

SEQ ID NO: 14936 - DNA, 13 bp, Artificial Sequence
  Oligonucleotide for detection of SNP TSC0003346
ttccccgcaacta

SEQ ID NO: 14937 - DNA, 13 bp, Artificial Sequence
  Oligonucleotide for detection of SNP TSC0003348
gagattttgatta

SEQ ID NO: 14938 - DNA, 13 bp, Artificial Sequence
  Oligonucleotide for detection of SNP TSC0003348
taatcaaaatctc

SEQ ID NO: 14939 - DNA, 13 bp, Artificial Sequence
  Oligonucleotide for detection of SNP TSC0003348
gagattgtgatta

SEQ ID NO: 14940 - DNA, 13 bp, Artificial Sequence
  Oligonucleotide for detection of SNP TSC0003348
taatcacaatctc

SEQ ID NO: 14941 - DNA, 13 bp, Artificial Sequence
  Oligonucleotide for detection of SNP TSC0003348
tggttaaagttty

SEQ ID NO: 14942 - DNA, 13 bp, Artificial Sequence
  Oligonucleotide for detection of SNP TSC0003348
raaactttaacca

SEQ ID NO: 14943 - DNA, 13 bp, Artificial Sequence
  Oligonucleotide for detection of SNP TSC0003348
tggttatagttty

SEQ ID NO: 14944 - DNA, 13 bp, Artificial Sequence
  Oligonucleotide for detection of SNP TSC0003348
raaactataacca

SEQ ID NO: 14945 - DNA, 13 bp, Artificial Sequence
  Oligonucleotide for detection of SNP TSC0003349
tttattgtttttt

SEQ ID NO: 14946 - DNA, 13 bp, Artificial Sequence
  Oligonucleotide for detection of SNP TSC0003349
aaaaaacaataaa

SEQ ID NO: 14947 - DNA, 13 bp, Artificial Sequence
  Oligonucleotide for detection of SNP TSC0003349
aaagggaagtgag

SEQ ID NO: 14948 - DNA, 13 bp, Artificial Sequence
  Oligonucleotide for detection of SNP TSC0003349
ctcacttcccttt

SEQ ID NO: 14949 - DNA, 13 bp, Artificial Sequence
  Oligonucleotide for detection of SNP TSC0003349
aaagggtagtgag

SEQ ID NO: 14950 - DNA, 13 bp, Artificial Sequence
  Oligonucleotide for detection of SNP TSC0003349
ctcactacccttt

SEQ ID NO: 14951 - DNA, 13 bp, Artificial Sequence
  Oligonucleotide for detection of SNP TSC0003350
aggtgtatttagt

SEQ ID NO: 14952 - DNA, 13 bp, Artificial Sequence
  Oligonucleotide for detection of SNP TSC0003350
actaaatacacct

SEQ ID NO: 14953 - DNA, 13 bp, Artificial Sequence
  Oligonucleotide for detection of SNP TSC0003350
aggtgtgtttagt

SEQ ID NO: 14954 - DNA, 13 bp, Artificial Sequence
  Oligonucleotide for detection of SNP TSC0003350
actaaacacacct

SEQ ID NO: 14955 - DNA, 13 bp, Artificial Sequence
  Oligonucleotide for detection of SNP TSC0003351
aattagattgaat

SEQ ID NO: 14956 - DNA, 13 bp, Artificial Sequence
  Oligonucleotide for detection of SNP TSC0003351
attcaatctaatt

SEQ ID NO: 14957 - DNA, 13 bp, Artificial Sequence
  Oligonucleotide for detection of SNP TSC0003351
aattagtttgaat

SEQ ID NO: 14958 - DNA, 13 bp, Artificial Sequence
  Oligonucleotide for detection of SNP TSC0003351
attcaaactaatt

SEQ ID NO: 14959 - DNA, 13 bp, Artificial Sequence
  Oligonucleotide for detection of SNP TSC0003351
atttagtttggtt

SEQ ID NO: 14960 - DNA, 13 bp, Artificial Sequence
  Oligonucleotide for detection of SNP TSC0003351
aaccaaactaaat

SEQ ID NO: 14961 - DNA, 13 bp, Artificial Sequence
  Oligonucleotide for detection of SNP TSC0003351
atttaggttggtt

SEQ ID NO: 14962 - DNA, 13 bp, Artificial Sequence
  Oligonucleotide for detection of SNP TSC0003351
aaccaacctaaat

SEQ ID NO: 14963 - DNA, 13 bp, Artificial Sequence
  Oligonucleotide for detection of SNP TSC0003352
ttaaaaaagtaat

SEQ ID NO: 14964 - DNA, 13 bp, Artificial Sequence
  Oligonucleotide for detection of SNP TSC0003352
attacttttttaa

SEQ ID NO: 14965 - DNA, 13 bp, Artificial Sequence
  Oligonucleotide for detection of SNP TSC0003352
ttaaaagagtaat

SEQ ID NO: 14966 - DNA, 13 bp, Artificial Sequence
  Oligonucleotide for detection of SNP TSC0003352
attactcttttaa

SEQ ID NO: 14967 - DNA, 13 bp, Artificial Sequence
  Oligonucleotide for detection of SNP TSC0003353
tttggttgattat

SEQ ID NO: 14968 - DNA, 13 bp, Artificial Sequence
  Oligonucleotide for detection of SNP TSC0003353
ataatcaaccaaa

SEQ ID NO: 14969 - DNA, 13 bp, Artificial Sequence
  Oligonucleotide for detection of SNP TSC0003353
tttggtggattat

SEQ ID NO: 14970 - DNA, 13 bp, Artificial Sequence
  Oligonucleotide for detection of SNP TSC0003353
ataatccaccaaa

SEQ ID NO: 14971 - DNA, 13 bp, Artificial Sequence
  Oligonucleotide for detection of SNP TSC0003353
ataattaattaaa

SEQ ID NO: 14972 - DNA, 13 bp, Artificial Sequence
  Oligonucleotide for detection of SNP TSC0003353
tttaattaattat

SEQ ID NO: 14973 - DNA, 13 bp, Artificial Sequence
  Oligonucleotide for detection of SNP TSC0003353
ataatttattaaa

SEQ ID NO: 14974 - DNA, 13 bp, Artificial Sequence
  Oligonucleotide for detection of SNP TSC0003353
tttaataaattat

SEQ ID NO: 14975 - DNA, 13 bp, Artificial Sequence
  Oligonucleotide for detection of SNP TSC0003354
aggaggtttggag

SEQ ID NO: 14976 - DNA, 13 bp, Artificial Sequence
  Oligonucleotide for detection of SNP TSC0003354
ctccaaacctcct

SEQ ID NO: 14977 - DNA, 13 bp, Artificial Sequence
  Oligonucleotide for detection of SNP TSC0003354
aggaggattggag

SEQ ID NO: 14978 - DNA, 13 bp, Artificial Sequence
  Oligonucleotide for detection of SNP TSC0003354
ctccaatcctcct

SEQ ID NO: 14979 - DNA, 13 bp, Artificial Sequence
  Oligonucleotide for detection of SNP TSC0003357
gggttggttgtta

SEQ ID NO: 14980 - DNA, 13 bp, Artificial Sequence
  Oligonucleotide for detection of SNP TSC0003357
taacaaccaaccc

SEQ ID NO: 14981 - DNA, 13 bp, Artificial Sequence
  Oligonucleotide for detection of SNP TSC0003357
gggttgattgtta

SEQ ID NO: 14982 - DNA, 13 bp, Artificial Sequence
  Oligonucleotide for detection of SNP TSC0003357
taacaatcaaccc

SEQ ID NO: 14983 - DNA, 13 bp, Artificial Sequence
  Oligonucleotide for detection of SNP TSC0003358
gtatttagaattt

SEQ ID NO: 14984 - DNA, 13 bp, Artificial Sequence
  Oligonucleotide for detection of SNP TSC0003358
aaattctaaatac

SEQ ID NO: 14985 - DNA, 13 bp, Artificial Sequence
  Oligonucleotide for detection of SNP TSC0003358
gtatttggaattt

SEQ ID NO: 14986 - DNA, 13 bp, Artificial Sequence
  Oligonucleotide for detection of SNP TSC0003358
aaattccaaatac

SEQ ID NO: 14987 - DNA, 13 bp, Artificial Sequence
  Oligonucleotide for detection of SNP TSC0003360
ttttttgtgttta

SEQ ID NO: 14988 - DNA, 13 bp, Artificial Sequence
  Oligonucleotide for detection of SNP TSC0003360
taaacacaaaaaa

SEQ ID NO: 14989 - DNA, 13 bp, Artificial Sequence
  Oligonucleotide for detection of SNP TSC0003360
ttttttatgttta

SEQ ID NO: 14990 - DNA, 13 bp, Artificial Sequence
  Oligonucleotide for detection of SNP TSC0003360
taaacataaaaaa

SEQ ID NO: 14991 - DNA, 13 bp, Artificial Sequence
  Oligonucleotide for detection of SNP TSC0003361
attttattaatta

SEQ ID NO: 14992 - DNA, 13 bp, Artificial Sequence
  Oligonucleotide for detection of SNP TSC0003361
taattaataaaat

SEQ ID NO: 14993 - DNA, 13 bp, Artificial Sequence
  Oligonucleotide for detection of SNP TSC0003361
attttagtaatta

SEQ ID NO: 14994 - DNA, 13 bp, Artificial Sequence
  Oligonucleotide for detection of SNP TSC0003361
taattactaaaat

SEQ ID NO: 14995 - DNA, 13 bp, Artificial Sequence
  Oligonucleotide for detection of SNP TSC0003361
tggttagtgagat

SEQ ID NO: 14996 - DNA, 13 bp, Artificial Sequence
  Oligonucleotide for detection of SNP TSC0003361
atctcactaacca

SEQ ID NO: 14997 - DNA, 13 bp, Artificial Sequence
  Oligonucleotide for detection of SNP TSC0003361
tggttattgagat

SEQ ID NO: 14998 - DNA, 13 bp, Artificial Sequence
  Oligonucleotide for detection of SNP TSC0003361
atctcaataacca

SEQ ID NO: 14999 - DNA, 13 bp, Artificial Sequence
  Oligonucleotide for detection of SNP TSC0003362
attgaatggaata

SEQ ID NO: 15000 - DNA, 13 bp, Artificial Sequence
  Oligonucleotide for detection of SNP TSC0003362
tattccattcaat

SEQ ID NO: 15001 - DNA, 13 bp, Artificial Sequence
  Oligonucleotide for detection of SNP TSC0003362
attgaacggaata

SEQ ID NO: 15002 - DNA, 13 bp, Artificial Sequence
  Oligonucleotide for detection of SNP TSC0003362
tattccgttcaat

SEQ ID NO: 15003 - DNA, 13 bp, Artificial Sequence
  Oligonucleotide for detection of SNP TSC0003362
tgttttgtttagt

SEQ ID NO: 15004 - DNA, 13 bp, Artificial Sequence
  Oligonucleotide for detection of SNP TSC0003362
actaaacaaaaca

SEQ ID NO: 15005 - DNA, 13 bp, Artificial Sequence
  Oligonucleotide for detection of SNP TSC0003362
tgttttatttagt

SEQ ID NO: 15006 - DNA, 13 bp, Artificial Sequence
  Oligonucleotide for detection of SNP TSC0003362
actaaataaaaca

SEQ ID NO: 15007 - DNA, 13 bp, Artificial Sequence
  Oligonucleotide for detection of SNP TSC0003362
tgtttcgtttagt

SEQ ID NO: 15008 - DNA, 13 bp, Artificial Sequence
  Oligonucleotide for detection of SNP TSC0003362
actaaacgaaaca

SEQ ID NO: 15009 - DNA, 13 bp, Artificial Sequence
  Oligonucleotide for detection of SNP TSC0003363
gaatttttatagg

SEQ ID NO: 15010 - DNA, 13 bp, Artificial Sequence
  Oligonucleotide for detection of SNP TSC0003363
cctataaaaattc

SEQ ID NO: 15011 - DNA, 13 bp, Artificial Sequence
  Oligonucleotide for detection of SNP TSC0003363
gaatttgtatagg

SEQ ID NO: 15012 - DNA, 13 bp, Artificial Sequence
  Oligonucleotide for detection of SNP TSC0003363
cctatacaaattc

SEQ ID NO: 15013 - DNA, 13 bp, Artificial Sequence
  Oligonucleotide for detection of SNP TSC0003363
tttgtagagatty

SEQ ID NO: 15014 - DNA, 13 bp, Artificial Sequence
  Oligonucleotide for detection of SNP TSC0003363
raatctctacaaa

SEQ ID NO: 15015 - DNA, 13 bp, Artificial Sequence
  Oligonucleotide for detection of SNP TSC0003363
tttgtatagatty

SEQ ID NO: 15016 - DNA, 13 bp, Artificial Sequence
  Oligonucleotide for detection of SNP TSC0003363
raatctatacaaa

SEQ ID NO: 15017 - DNA, 13 bp, Artificial Sequence
  Oligonucleotide for detection of SNP TSC0003364
aaattatgaattt

SEQ ID NO: 15018 - DNA, 13 bp, Artificial Sequence
  Oligonucleotide for detection of SNP TSC0003364
aaattcataattt

SEQ ID NO: 15019 - DNA, 13 bp, Artificial Sequence
  Oligonucleotide for detection of SNP TSC0003364
aaattacgaattt

SEQ ID NO: 15020 - DNA, 13 bp, Artificial Sequence
  Oligonucleotide for detection of SNP TSC0003364
aaattcgtaattt

SEQ ID NO: 15021 - DNA, 13 bp, Artificial Sequence
  Oligonucleotide for detection of SNP TSC0003364
agatttgtggttt

SEQ ID NO: 15022 - DNA, 13 bp, Artificial Sequence
  Oligonucleotide for detection of SNP TSC0003364
aaaccacaaatct

SEQ ID NO: 15023 - DNA, 13 bp, Artificial Sequence
  Oligonucleotide for detection of SNP TSC0003364
agatttatggttt

SEQ ID NO: 15024 - DNA, 13 bp, Artificial Sequence
  Oligonucleotide for detection of SNP TSC0003364
aaaccataaatct

SEQ ID NO: 15025 - DNA, 13 bp, Artificial Sequence
  Oligonucleotide for detection of SNP TSC0003364
agattcgtggttt

SEQ ID NO: 15026 - DNA, 13 bp, Artificial Sequence
  Oligonucleotide for detection of SNP TSC0003364
aaaccacgaatct

SEQ ID NO: 15027 - DNA, 13 bp, Artificial Sequence
  Oligonucleotide for detection of SNP TSC0003365
aagttaatatttt

SEQ ID NO: 15028 - DNA, 13 bp, Artificial Sequence
  Oligonucleotide for detection of SNP TSC0003365
aaaatattaactt

SEQ ID NO: 15029 - DNA, 13 bp, Artificial Sequence
  Oligonucleotide for detection of SNP TSC0003365
aagttagtatttt

SEQ ID NO: 15030 - DNA, 13 bp, Artificial Sequence
  Oligonucleotide for detection of SNP TSC0003365
aaaatactaactt

SEQ ID NO: 15031 - DNA, 13 bp, Artificial Sequence
  Oligonucleotide for detection of SNP TSC0003368
gtgggagagttty

SEQ ID NO: 15032 - DNA, 13 bp, Artificial Sequence
  Oligonucleotide for detection of SNP TSC0003368
raaactctcccac

SEQ ID NO: 15033 - DNA, 13 bp, Artificial Sequence
  Oligonucleotide for detection of SNP TSC0003368
gtgggaaagttty

SEQ ID NO: 15034 - DNA, 13 bp, Artificial Sequence
  Oligonucleotide for detection of SNP TSC0003368
raaactttcccac

SEQ ID NO: 15035 - DNA, 13 bp, Artificial Sequence
  Oligonucleotide for detection of SNP TSC0003369
tgatatgaattta

SEQ ID NO: 15036 - DNA, 13 bp, Artificial Sequence
  Oligonucleotide for detection of SNP TSC0003369
taaattcatatca

SEQ ID NO: 15037 - DNA, 13 bp, Artificial Sequence
  Oligonucleotide for detection of SNP TSC0003369
tgatataaattta

SEQ ID NO: 15038 - DNA, 13 bp, Artificial Sequence
  Oligonucleotide for detection of SNP TSC0003369
taaatttatatca

SEQ ID NO: 15039 - DNA, 13 bp, Artificial Sequence
  Oligonucleotide for detection of SNP TSC0003370
tattaaaatgaat

SEQ ID NO: 15040 - DNA, 13 bp, Artificial Sequence
  Oligonucleotide for detection of SNP TSC0003370
attcattttaata

SEQ ID NO: 15041 - DNA, 13 bp, Artificial Sequence
  Oligonucleotide for detection of SNP TSC0003370
tattaagatgaat

SEQ ID NO: 15042 - DNA, 13 bp, Artificial Sequence
  Oligonucleotide for detection of SNP TSC0003370
attcatcttaata

SEQ ID NO: 15043 - DNA, 13 bp, Artificial Sequence
  Oligonucleotide for detection of SNP TSC0003371
gtttaagatatta

SEQ ID NO: 15044 - DNA, 13 bp, Artificial Sequence
  Oligonucleotide for detection of SNP TSC0003371
taatatcttaaac

SEQ ID NO: 15045 - DNA, 13 bp, Artificial Sequence
  Oligonucleotide for detection of SNP TSC0003371
gtttaaaatatta

SEQ ID NO: 15046 - DNA, 13 bp, Artificial Sequence
  Oligonucleotide for detection of SNP TSC0003371
taatattttaaac

SEQ ID NO: 15047 - DNA, 13 bp, Artificial Sequence
  Oligonucleotide for detection of SNP TSC0003372
ggagtagtgggtg

SEQ ID NO: 15048 - DNA, 13 bp, Artificial Sequence
  Oligonucleotide for detection of SNP TSC0003372
cacccactactcc

SEQ ID NO: 15049 - DNA, 13 bp, Artificial Sequence
  Oligonucleotide for detection of SNP TSC0003372
ggagtaatgggtg

SEQ ID NO: 15050 - DNA, 13 bp, Artificial Sequence
  Oligonucleotide for detection of SNP TSC0003372
cacccattactcc

SEQ ID NO: 15051 - DNA, 13 bp, Artificial Sequence
  Oligonucleotide for detection of SNP TSC0003373
tgaaaatgttatt

SEQ ID NO: 15052 - DNA, 13 bp, Artificial Sequence
  Oligonucleotide for detection of SNP TSC0003373
aataacattttca

SEQ ID NO: 15053 - DNA, 13 bp, Artificial Sequence
  Oligonucleotide for detection of SNP TSC0003373
tgaaaacgttatt

SEQ ID NO: 15054 - DNA, 13 bp, Artificial Sequence
  Oligonucleotide for detection of SNP TSC0003373
aataacgttttca

SEQ ID NO: 15055 - DNA, 13 bp, Artificial Sequence
  Oligonucleotide for detection of SNP TSC0003373
agtgatgttttta

SEQ ID NO: 15056 - DNA, 13 bp, Artificial Sequence
  Oligonucleotide for detection of SNP TSC0003373
taaaaacatcact

SEQ ID NO: 15057 - DNA, 13 bp, Artificial Sequence
  Oligonucleotide for detection of SNP TSC0003373
agtgatattttta

SEQ ID NO: 15058 - DNA, 13 bp, Artificial Sequence
  Oligonucleotide for detection of SNP TSC0003373
taaaaatatcact

SEQ ID NO: 15059 - DNA, 13 bp, Artificial Sequence
  Oligonucleotide for detection of SNP TSC0003373
agtgacgttttta

SEQ ID NO: 15060 - DNA, 13 bp, Artificial Sequence
  Oligonucleotide for detection of SNP TSC0003373
taaaaacgtcact

SEQ ID NO: 15061 - DNA, 13 bp, Artificial Sequence
  Oligonucleotide for detection of SNP TSC0003374
tgtgtatgtgtgy

SEQ ID NO: 15062 - DNA, 13 bp, Artificial Sequence
  Oligonucleotide for detection of SNP TSC0003374
rcacacatacaca

SEQ ID NO: 15063 - DNA, 13 bp, Artificial Sequence
  Oligonucleotide for detection of SNP TSC0003374
cgtgtatgtgtgy

SEQ ID NO: 15064 - DNA, 13 bp, Artificial Sequence
  Oligonucleotide for detection of SNP TSC0003374
rcacacatacacg

SEQ ID NO: 15065 - DNA, 13 bp, Artificial Sequence
  Oligonucleotide for detection of SNP TSC0003374
tgcgtatgtgtgy

SEQ ID NO: 15066 - DNA, 13 bp, Artificial Sequence
  Oligonucleotide for detection of SNP TSC0003374
rcacacatacgca

SEQ ID NO: 15067 - DNA, 13 bp, Artificial Sequence
  Oligonucleotide for detection of SNP TSC0003374
tgtgtacgtgtgy

SEQ ID NO: 15068 - DNA, 13 bp, Artificial Sequence
  Oligonucleotide for detection of SNP TSC0003374
rcacacgtacaca

SEQ ID NO: 15069 - DNA, 13 bp, Artificial Sequence
  Oligonucleotide for detection of SNP TSC0003374
tgtgtatgcgtgy

SEQ ID NO: 15070 - DNA, 13 bp, Artificial Sequence
  Oligonucleotide for detection of SNP TSC0003374
rcacgcatacaca

SEQ ID NO: 15071 - DNA, 13 bp, Artificial Sequence
  Oligonucleotide for detection of SNP TSC0003374
cgcgtatgtgtgy

SEQ ID NO: 15072 - DNA, 13 bp, Artificial Sequence
  Oligonucleotide for detection of SNP TSC0003374
rcacacatacgcg

SEQ ID NO: 15073 - DNA, 13 bp, Artificial Sequence
  Oligonucleotide for detection of SNP TSC0003374
cgtgtatgcgtgy

SEQ ID NO: 15074 - DNA, 13 bp, Artificial Sequence
  Oligonucleotide for detection of SNP TSC0003374
rcacgcatacacg

SEQ ID NO: 15075 - DNA, 13 bp, Artificial Sequence
  Oligonucleotide for detection of SNP TSC0003374
cgtgtacgtgtgy

SEQ ID NO: 15076 - DNA, 13 bp, Artificial Sequence
  Oligonucleotide for detection of SNP TSC0003374
rcacacgtacacg

SEQ ID NO: 15077 - DNA, 13 bp, Artificial Sequence
  Oligonucleotide for detection of SNP TSC0003374
tgcgtatgcgtgy

SEQ ID NO: 15078 - DNA, 13 bp, Artificial Sequence
  Oligonucleotide for detection of SNP TSC0003374
rcacgcatacgca

SEQ ID NO: 15079 - DNA, 13 bp, Artificial Sequence
  Oligonucleotide for detection of SNP TSC0003374
cgcgtatgcgtgy

SEQ ID NO: 15080 - DNA, 13 bp, Artificial Sequence
  Oligonucleotide for detection of SNP TSC0003374
rcacgcatacgcg

SEQ ID NO: 15081 - DNA, 13 bp, Artificial Sequence
  Oligonucleotide for detection of SNP TSC0003374
tgcgtacgtgtgy

SEQ ID NO: 15082 - DNA, 13 bp, Artificial Sequence
  Oligonucleotide for detection of SNP TSC0003374
rcacacgtacgca

SEQ ID NO: 15083 - DNA, 13 bp, Artificial Sequence
  Oligonucleotide for detection of SNP TSC0003374
tgtgtacgcgtgy

SEQ ID NO: 15084 - DNA, 13 bp, Artificial Sequence
  Oligonucleotide for detection of SNP TSC0003374
rcacgcgtacaca

SEQ ID NO: 15085 - DNA, 13 bp, Artificial Sequence
  Oligonucleotide for detection of SNP TSC0003374
cgcgtacgtgtgy

SEQ ID NO: 15086 - DNA, 13 bp, Artificial Sequence
  Oligonucleotide for detection of SNP TSC0003374
rcacacgtacgcg

SEQ ID NO: 15087 - DNA, 13 bp, Artificial Sequence
  Oligonucleotide for detection of SNP TSC0003374
cgtgtacgcgtgy

SEQ ID NO: 15088 - DNA, 13 bp, Artificial Sequence
  Oligonucleotide for detection of SNP TSC0003374
rcacgcgtacacg

SEQ ID NO: 15089 - DNA, 13 bp, Artificial Sequence
  Oligonucleotide for detection of SNP TSC0003374
tgcgtacgcgtgy

SEQ ID NO: 15090 - DNA, 13 bp, Artificial Sequence
  Oligonucleotide for detection of SNP TSC0003374
rcacgcgtacgca

SEQ ID NO: 15091 - DNA, 13 bp, Artificial Sequence
  Oligonucleotide for detection of SNP TSC0003374
cgcgtacgcgtgy

SEQ ID NO: 15092 - DNA, 13 bp, Artificial Sequence
  Oligonucleotide for detection of SNP TSC0003374
rcacgcgtacgcg

SEQ ID NO: 15093 - DNA, 13 bp, Artificial Sequence
  Oligonucleotide for detection of SNP TSC0003374
gtatgtgtgtgtg

SEQ ID NO: 15094 - DNA, 13 bp, Artificial Sequence
  Oligonucleotide for detection of SNP TSC0003374
cacacacacatac

SEQ ID NO: 15095 - DNA, 13 bp, Artificial Sequence
  Oligonucleotide for detection of SNP TSC0003374
gtatgtatgtgtg

SEQ ID NO: 15096 - DNA, 13 bp, Artificial Sequence
  Oligonucleotide for detection of SNP TSC0003374
cacacatacatac

SEQ ID NO: 15097 - DNA, 13 bp, Artificial Sequence
  Oligonucleotide for detection of SNP TSC0003374
gtacgtgtgtgtg

SEQ ID NO: 15098 - DNA, 13 bp, Artificial Sequence
  Oligonucleotide for detection of SNP TSC0003374
cacacacacgtac

SEQ ID NO: 15099 - DNA, 13 bp, Artificial Sequence
  Oligonucleotide for detection of SNP TSC0003374
gtacgtatgtgtg

SEQ ID NO: 15100 - DNA, 13 bp, Artificial Sequence
  Oligonucleotide for detection of SNP TSC0003374
cacacatacgtac

SEQ ID NO: 15101 - DNA, 13 bp, Artificial Sequence
  Oligonucleotide for detection of SNP TSC0003374
gtatgcgtgtgtg

SEQ ID NO: 15102 - DNA, 13 bp, Artificial Sequence
  Oligonucleotide for detection of SNP TSC0003374
cacacacgcatac

SEQ ID NO: 15103 - DNA, 13 bp, Artificial Sequence
  Oligonucleotide for detection of SNP TSC0003374
gtatgtatgcgtg

SEQ ID NO: 15104 - DNA, 13 bp, Artificial Sequence
  Oligonucleotide for detection of SNP TSC0003374
cacgcatacatac

SEQ ID NO: 15105 - DNA, 13 bp, Artificial Sequence
  Oligonucleotide for detection of SNP TSC0003374
gtatgtgtgcgtg

SEQ ID NO: 15106 - DNA, 13 bp, Artificial Sequence
  Oligonucleotide for detection of SNP TSC0003374
cacgcacacatac

SEQ ID NO: 15107 - DNA, 13 bp, Artificial Sequence
  Oligonucleotide for detection of SNP TSC0003374
gtatgtatgtgcg

SEQ ID NO: 15108 - DNA, 13 bp, Artificial Sequence
  Oligonucleotide for detection of SNP TSC0003374
cgcacatacatac

SEQ ID NO: 15109 - DNA, 13 bp, Artificial Sequence
  Oligonucleotide for detection of SNP TSC0003374
gtatgtgtgtgcg

SEQ ID NO: 15110 - DNA, 13 bp, Artificial Sequence
  Oligonucleotide for detection of SNP TSC0003374
cgcacacacatac

SEQ ID NO: 15111 - DNA, 13 bp, Artificial Sequence
  Oligonucleotide for detection of SNP TSC0003374
gtacgtatgcgtg

SEQ ID NO: 15112 - DNA, 13 bp, Artificial Sequence
  Oligonucleotide for detection of SNP TSC0003374
cacgcatacgtac

SEQ ID NO: 15113 - DNA, 13 bp, Artificial Sequence
  Oligonucleotide for detection of SNP TSC0003374
gtacgcgtgtgtg

SEQ ID NO: 15114 - DNA, 13 bp, Artificial Sequence
  Oligonucleotide for detection of SNP TSC0003374
cacacacgcgtac

SEQ ID NO: 15115 - DNA, 13 bp, Artificial Sequence
  Oligonucleotide for detection of SNP TSC0003374
gtacgtatgtgcg

SEQ ID NO: 15116 - DNA, 13 bp, Artificial Sequence
  Oligonucleotide for detection of SNP TSC0003374
cgcacatacgtac

SEQ ID NO: 15117 - DNA, 13 bp, Artificial Sequence
  Oligonucleotide for detection of SNP TSC0003374
gtacgtgtgcgtg

SEQ ID NO: 15118 - DNA, 13 bp, Artificial Sequence
  Oligonucleotide for detection of SNP TSC0003374
cacgcacacgtac

SEQ ID NO: 15119 - DNA, 13 bp, Artificial Sequence
  Oligonucleotide for detection of SNP TSC0003374
gtatgtatgcgcg

SEQ ID NO: 15120 - DNA, 13 bp, Artificial Sequence
  Oligonucleotide for detection of SNP TSC0003374
cgcgcatacatac

SEQ ID NO: 15121 - DNA, 13 bp, Artificial Sequence
  Oligonucleotide for detection of SNP TSC0003374
gtacgtgtgtgcg

SEQ ID NO: 15122 - DNA, 13 bp, Artificial Sequence
  Oligonucleotide for detection of SNP TSC0003374
cgcacacacgtac

SEQ ID NO: 15123 - DNA, 13 bp, Artificial Sequence
  Oligonucleotide for detection of SNP TSC0003374
gtacgtatgcgcg

SEQ ID NO: 15124 - DNA, 13 bp, Artificial Sequence
  Oligonucleotide for detection of SNP TSC0003374
cgcgcatacgtac

SEQ ID NO: 15125 - DNA, 13 bp, Artificial Sequence
  Oligonucleotide for detection of SNP TSC0003374
gtatgcgtgcgtg

SEQ ID NO: 15126 - DNA, 13 bp, Artificial Sequence
  Oligonucleotide for detection of SNP TSC0003374
cacgcacgcatac

SEQ ID NO: 15127 - DNA, 13 bp, Artificial Sequence
  Oligonucleotide for detection of SNP TSC0003374
gtatgcgtgtgcg

SEQ ID NO: 15128 - DNA, 13 bp, Artificial Sequence
  Oligonucleotide for detection of SNP TSC0003374
cgcacacgcatac

SEQ ID NO: 15129 - DNA, 13 bp, Artificial Sequence
  Oligonucleotide for detection of SNP TSC0003374
gtatgtgtgcgcg

SEQ ID NO: 15130 - DNA, 13 bp, Artificial Sequence
  Oligonucleotide for detection of SNP TSC0003374
cgcgcacacatac

SEQ ID NO: 15131 - DNA, 13 bp, Artificial Sequence
  Oligonucleotide for detection of SNP TSC0003374
gtacgcgtgcgtg

SEQ ID NO: 15132 - DNA, 13 bp, Artificial Sequence
  Oligonucleotide for detection of SNP TSC0003374
cacgcacgcgtac

SEQ ID NO: 15133 - DNA, 13 bp, Artificial Sequence
  Oligonucleotide for detection of SNP TSC0003374
gtacgcgtgtgcg

SEQ ID NO: 15134 - DNA, 13 bp, Artificial Sequence
  Oligonucleotide for detection of SNP TSC0003374
cgcacacgcgtac

SEQ ID NO: 15135 - DNA, 13 bp, Artificial Sequence
  Oligonucleotide for detection of SNP TSC0003374
gtacgtgtgcgcg

SEQ ID NO: 15136 - DNA, 13 bp, Artificial Sequence
  Oligonucleotide for detection of SNP TSC0003374
cgcgcacacgtac

SEQ ID NO: 15137 - DNA, 13 bp, Artificial Sequence
  Oligonucleotide for detection of SNP TSC0003374
gtatgcgtgcgcg

SEQ ID NO: 15138 - DNA, 13 bp, Artificial Sequence
  Oligonucleotide for detection of SNP TSC0003374
cgcgcacgcatac

SEQ ID NO: 15139 - DNA, 13 bp, Artificial Sequence
  Oligonucleotide for detection of SNP TSC0003374
gtacgcgtgcgcg

SEQ ID NO: 15140 - DNA, 13 bp, Artificial Sequence
  Oligonucleotide for detection of SNP TSC0003374
cgcgcacgcgtac

SEQ ID NO: 15141 - DNA, 13 bp, Artificial Sequence
  Oligonucleotide for detection of SNP TSC0003375
tttggattaaagt

SEQ ID NO: 15142 - DNA, 13 bp, Artificial Sequence
  Oligonucleotide for detection of SNP TSC0003375
actttaatccaaa

SEQ ID NO: 15143 - DNA, 13 bp, Artificial Sequence
  Oligonucleotide for detection of SNP TSC0003375
tttggagtaaagt

SEQ ID NO: 15144 - DNA, 13 bp, Artificial Sequence
  Oligonucleotide for detection of SNP TSC0003375
actttactccaaa

SEQ ID NO: 15145 - DNA, 13 bp, Artificial Sequence
  Oligonucleotide for detection of SNP TSC0003375
attttgatttaaa

SEQ ID NO: 15146 - DNA, 13 bp, Artificial Sequence
  Oligonucleotide for detection of SNP TSC0003375
tttaaatcaaaat

SEQ ID NO: 15147 - DNA, 13 bp, Artificial Sequence
  Oligonucleotide for detection of SNP TSC0003375
attttgttttaaa

SEQ ID NO: 15148 - DNA, 13 bp, Artificial Sequence
  Oligonucleotide for detection of SNP TSC0003375
tttaaaacaaaat

SEQ ID NO: 15149 - DNA, 13 bp, Artificial Sequence
  Oligonucleotide for detection of SNP TSC0003376
atagttgttgtag

SEQ ID NO: 15150 - DNA, 13 bp, Artificial Sequence
  Oligonucleotide for detection of SNP TSC0003376
ctacaacaactat

SEQ ID NO: 15151 - DNA, 13 bp, Artificial Sequence
  Oligonucleotide for detection of SNP TSC0003376
atagttattgtag

SEQ ID NO: 15152 - DNA, 13 bp, Artificial Sequence
  Oligonucleotide for detection of SNP TSC0003376
ctacaataactat

SEQ ID NO: 15153 - DNA, 13 bp, Artificial Sequence
  Oligonucleotide for detection of SNP TSC0003377
agttttagataat

SEQ ID NO: 15154 - DNA, 13 bp, Artificial Sequence
  Oligonucleotide for detection of SNP TSC0003377
attatctaaaact

SEQ ID NO: 15155 - DNA, 13 bp, Artificial Sequence
  Oligonucleotide for detection of SNP TSC0003377
agttttggataat

SEQ ID NO: 15156 - DNA, 13 bp, Artificial Sequence
  Oligonucleotide for detection of SNP TSC0003377
attatccaaaact

SEQ ID NO: 15157 - DNA, 13 bp, Artificial Sequence
  Oligonucleotide for detection of SNP TSC0003377
agtttcggataat

SEQ ID NO: 15158 - DNA, 13 bp, Artificial Sequence
  Oligonucleotide for detection of SNP TSC0003377
attatccgaaact

SEQ ID NO: 15159 - DNA, 13 bp, Artificial Sequence
  Oligonucleotide for detection of SNP TSC0003377
attgtttggagtt

SEQ ID NO: 15160 - DNA, 13 bp, Artificial Sequence
  Oligonucleotide for detection of SNP TSC0003377
aactccaaacaat

SEQ ID NO: 15161 - DNA, 13 bp, Artificial Sequence
  Oligonucleotide for detection of SNP TSC0003377
attgttcggagtt

SEQ ID NO: 15162 - DNA, 13 bp, Artificial Sequence
  Oligonucleotide for detection of SNP TSC0003377
aactccgaacaat

SEQ ID NO: 15163 - DNA, 13 bp, Artificial Sequence
  Oligonucleotide for detection of SNP TSC0003379
atgaggataataa

SEQ ID NO: 15164 - DNA, 13 bp, Artificial Sequence
  Oligonucleotide for detection of SNP TSC0003379
ttattatcctcat

SEQ ID NO: 15165 - DNA, 13 bp, Artificial Sequence
  Oligonucleotide for detection of SNP TSC0003379
atgagggtaataa

SEQ ID NO: 15166 - DNA, 13 bp, Artificial Sequence
  Oligonucleotide for detection of SNP TSC0003379
ttattaccctcat

SEQ ID NO: 15167 - DNA, 13 bp, Artificial Sequence
  Oligonucleotide for detection of SNP TSC0003380
taagggagtaaat

SEQ ID NO: 15168 - DNA, 13 bp, Artificial Sequence
  Oligonucleotide for detection of SNP TSC0003380
atttactccctta

SEQ ID NO: 15169 - DNA, 13 bp, Artificial Sequence
  Oligonucleotide for detection of SNP TSC0003380
taagggggtaaat

SEQ ID NO: 15170 - DNA, 13 bp, Artificial Sequence
  Oligonucleotide for detection of SNP TSC0003380
atttaccccctta

SEQ ID NO: 15171 - DNA, 13 bp, Artificial Sequence
  Oligonucleotide for detection of SNP TSC0003381
attaaaatttgaa

SEQ ID NO: 15172 - DNA, 13 bp, Artificial Sequence
  Oligonucleotide for detection of SNP TSC0003381
ttcaaattttaat

SEQ ID NO: 15173 - DNA, 13 bp, Artificial Sequence
  Oligonucleotide for detection of SNP TSC0003381
attaaagtttgaa

SEQ ID NO: 15174 - DNA, 13 bp, Artificial Sequence
  Oligonucleotide for detection of SNP TSC0003381
ttcaaactttaat

SEQ ID NO: 15175 - DNA, 13 bp, Artificial Sequence
  Oligonucleotide for detection of SNP TSC0003382
attgaaagatttt

SEQ ID NO: 15176 - DNA, 13 bp, Artificial Sequence
  Oligonucleotide for detection of SNP TSC0003382
aaaatctttcaat

SEQ ID NO: 15177 - DNA, 13 bp, Artificial Sequence
  Oligonucleotide for detection of SNP TSC0003382
attgaaggatttt

SEQ ID NO: 15178 - DNA, 13 bp, Artificial Sequence
  Oligonucleotide for detection of SNP TSC0003382
aaaatccttcaat

SEQ ID NO: 15179 - DNA, 13 bp, Artificial Sequence
  Oligonucleotide for detection of SNP TSC0003383
tgaaatttagaag

SEQ ID NO: 15180 - DNA, 13 bp, Artificial Sequence
  Oligonucleotide for detection of SNP TSC0003383
cttctaaatttca

SEQ ID NO: 15181 - DNA, 13 bp, Artificial Sequence
  Oligonucleotide for detection of SNP TSC0003383
tgaaatgtagaag

SEQ ID NO: 15182 - DNA, 13 bp, Artificial Sequence
  Oligonucleotide for detection of SNP TSC0003383
cttctacatttca

SEQ ID NO: 15183 - DNA, 13 bp, Artificial Sequence
  Oligonucleotide for detection of SNP TSC0003383
tttttggatttta

SEQ ID NO: 15184 - DNA, 13 bp, Artificial Sequence
  Oligonucleotide for detection of SNP TSC0003383
taaaatccaaaaa

SEQ ID NO: 15185 - DNA, 13 bp, Artificial Sequence
  Oligonucleotide for detection of SNP TSC0003383
tttttgtatttta

SEQ ID NO: 15186 - DNA, 13 bp, Artificial Sequence
  Oligonucleotide for detection of SNP TSC0003383
taaaatacaaaaa

SEQ ID NO: 15187 - DNA, 13 bp, Artificial Sequence
  Oligonucleotide for detection of SNP TSC0003384
gttatatgttgta

SEQ ID NO: 15188 - DNA, 13 bp, Artificial Sequence
  Oligonucleotide for detection of SNP TSC0003384
tacaacatataac

SEQ ID NO: 15189 - DNA, 13 bp, Artificial Sequence
  Oligonucleotide for detection of SNP TSC0003384
gttataggttgta

SEQ ID NO: 15190 - DNA, 13 bp, Artificial Sequence
  Oligonucleotide for detection of SNP TSC0003384
tacaacctataac

SEQ ID NO: 15191 - DNA, 13 bp, Artificial Sequence
  Oligonucleotide for detection of SNP TSC0003384
tgtagtatgtgay

SEQ ID NO: 15192 - DNA, 13 bp, Artificial Sequence
  Oligonucleotide for detection of SNP TSC0003384
rtcacatactaca

SEQ ID NO: 15193 - DNA, 13 bp, Artificial Sequence
  Oligonucleotide for detection of SNP TSC0003384
tgtagtttgtgay

SEQ ID NO: 15194 - DNA, 13 bp, Artificial Sequence
  Oligonucleotide for detection of SNP TSC0003384
rtcacaaactaca

SEQ ID NO: 15195 - DNA, 13 bp, Artificial Sequence
  Oligonucleotide for detection of SNP TSC0003385
tttagtatagtag

SEQ ID NO: 15196 - DNA, 13 bp, Artificial Sequence
  Oligonucleotide for detection of SNP TSC0003385
ctactatactaaa

SEQ ID NO: 15197 - DNA, 13 bp, Artificial Sequence
  Oligonucleotide for detection of SNP TSC0003385
tttagtgtagtag

SEQ ID NO: 15198 - DNA, 13 bp, Artificial Sequence
  Oligonucleotide for detection of SNP TSC0003385
ctactacactaaa

SEQ ID NO: 15199 - DNA, 13 bp, Artificial Sequence
  Oligonucleotide for detection of SNP TSC0003386
gtaggaatttata

SEQ ID NO: 15200 - DNA, 13 bp, Artificial Sequence
  Oligonucleotide for detection of SNP TSC0003386
tataaattcctac

SEQ ID NO: 15201 - DNA, 13 bp, Artificial Sequence
  Oligonucleotide for detection of SNP TSC0003386
gtaggagtttata

SEQ ID NO: 15202 - DNA, 13 bp, Artificial Sequence
  Oligonucleotide for detection of SNP TSC0003386
tataaactcctac

SEQ ID NO: 15203 - DNA, 13 bp, Artificial Sequence
  Oligonucleotide for detection of SNP TSC0003387
tttggttggggty

SEQ ID NO: 15204 - DNA, 13 bp, Artificial Sequence
  Oligonucleotide for detection of SNP TSC0003387
raccccaaccaaa

SEQ ID NO: 15205 - DNA, 13 bp, Artificial Sequence
  Oligonucleotide for detection of SNP TSC0003387
tttggtcggggty

SEQ ID NO: 15206 - DNA, 13 bp, Artificial Sequence
  Oligonucleotide for detection of SNP TSC0003387
raccccgaccaaa

SEQ ID NO: 15207 - DNA, 13 bp, Artificial Sequence
  Oligonucleotide for detection of SNP TSC0003387
gattttggttagg

SEQ ID NO: 15208 - DNA, 13 bp, Artificial Sequence
  Oligonucleotide for detection of SNP TSC0003387
cctaaccaaaatc

SEQ ID NO: 15209 - DNA, 13 bp, Artificial Sequence
  Oligonucleotide for detection of SNP TSC0003387
gattttagttagg

SEQ ID NO: 15210 - DNA, 13 bp, Artificial Sequence
  Oligonucleotide for detection of SNP TSC0003387
cctaactaaaatc

SEQ ID NO: 15211 - DNA, 13 bp, Artificial Sequence
  Oligonucleotide for detection of SNP TSC0003387
gatttcggttagg

SEQ ID NO: 15212 - DNA, 13 bp, Artificial Sequence
  Oligonucleotide for detection of SNP TSC0003387
cctaaccgaaatc

SEQ ID NO: 15213 - DNA, 13 bp, Artificial Sequence
  Oligonucleotide for detection of SNP TSC0003388
aaaaagtatatag

SEQ ID NO: 15214 - DNA, 13 bp, Artificial Sequence
  Oligonucleotide for detection of SNP TSC0003388
ctatatacttttt

SEQ ID NO: 15215 - DNA, 13 bp, Artificial Sequence
  Oligonucleotide for detection of SNP TSC0003388
aaaaaggatatag

SEQ ID NO: 15216 - DNA, 13 bp, Artificial Sequence
  Oligonucleotide for detection of SNP TSC0003388
ctatatccttttt

SEQ ID NO: 15217 - DNA, 13 bp, Artificial Sequence
  Oligonucleotide for detection of SNP TSC0003388
ttgtatgtttttt

SEQ ID NO: 15218 - DNA, 13 bp, Artificial Sequence
  Oligonucleotide for detection of SNP TSC0003388
aaaaaacatacaa

SEQ ID NO: 15219 - DNA, 13 bp, Artificial Sequence
  Oligonucleotide for detection of SNP TSC0003388
ttgtatttttttt

SEQ ID NO: 15220 - DNA, 13 bp, Artificial Sequence
  Oligonucleotide for detection of SNP TSC0003388
aaaaaaaatacaa

SEQ ID NO: 15221 - DNA, 13 bp, Artificial Sequence
  Oligonucleotide for detection of SNP TSC0003389
agtgtgattatgg

SEQ ID NO: 15222 - DNA, 13 bp, Artificial Sequence
  Oligonucleotide for detection of SNP TSC0003389
ccataatcacact

SEQ ID NO: 15223 - DNA, 13 bp, Artificial Sequence
  Oligonucleotide for detection of SNP TSC0003389
agtgtggttatgg

SEQ ID NO: 15224 - DNA, 13 bp, Artificial Sequence
  Oligonucleotide for detection of SNP TSC0003389
ccataaccacact

SEQ ID NO: 15225 - DNA, 13 bp, Artificial Sequence
  Oligonucleotide for detection of SNP TSC0003390
gattatagaagta

SEQ ID NO: 15226 - DNA, 13 bp, Artificial Sequence
  Oligonucleotide for detection of SNP TSC0003390
tacttctataatc

SEQ ID NO: 15227 - DNA, 13 bp, Artificial Sequence
  Oligonucleotide for detection of SNP TSC0003390
gattatggaagta

SEQ ID NO: 15228 - DNA, 13 bp, Artificial Sequence
  Oligonucleotide for detection of SNP TSC0003390
tacttccataatc

SEQ ID NO: 15229 - DNA, 13 bp, Artificial Sequence
  Oligonucleotide for detection of SNP TSC0003391
gagggtttttgaa

SEQ ID NO: 15230 - DNA, 13 bp, Artificial Sequence
  Oligonucleotide for detection of SNP TSC0003391
ttcaaaaaccctc

SEQ ID NO: 15231 - DNA, 13 bp, Artificial Sequence
  Oligonucleotide for detection of SNP TSC0003391
gagggtgtttgaa

SEQ ID NO: 15232 - DNA, 13 bp, Artificial Sequence
  Oligonucleotide for detection of SNP TSC0003391
ttcaaacaccctc

SEQ ID NO: 15233 - DNA, 13 bp, Artificial Sequence
  Oligonucleotide for detection of SNP TSC0003391
gagggcgtttgaa

SEQ ID NO: 15234 - DNA, 13 bp, Artificial Sequence
  Oligonucleotide for detection of SNP TSC0003391
ttcaaacgccctc

SEQ ID NO: 15235 - DNA, 13 bp, Artificial Sequence
  Oligonucleotide for detection of SNP TSC0003391
tttaggagtttty

SEQ ID NO: 15236 - DNA, 13 bp, Artificial Sequence
  Oligonucleotide for detection of SNP TSC0003391
raaaactcctaaa

SEQ ID NO: 15237 - DNA, 13 bp, Artificial Sequence
  Oligonucleotide for detection of SNP TSC0003391
tttaggtgtttty

SEQ ID NO: 15238 - DNA, 13 bp, Artificial Sequence
  Oligonucleotide for detection of SNP TSC0003391
raaaacacctaaa

SEQ ID NO: 15239 - DNA, 13 bp, Artificial Sequence
  Oligonucleotide for detection of SNP TSC0003391
tttaggcgtttty

SEQ ID NO: 15240 - DNA, 13 bp, Artificial Sequence
  Oligonucleotide for detection of SNP TSC0003391
raaaacgcctaaa

SEQ ID NO: 15241 - DNA, 13 bp, Artificial Sequence
  Oligonucleotide for detection of SNP TSC0003392
tttattaagaaag

SEQ ID NO: 15242 - DNA, 13 bp, Artificial Sequence
  Oligonucleotide for detection of SNP TSC0003392
ctttcttaataaa

SEQ ID NO: 15243 - DNA, 13 bp, Artificial Sequence
  Oligonucleotide for detection of SNP TSC0003392
tttattgagaaag

SEQ ID NO: 15244 - DNA, 13 bp, Artificial Sequence
  Oligonucleotide for detection of SNP TSC0003392
ctttctcaataaa

SEQ ID NO: 15245 - DNA, 13 bp, Artificial Sequence
  Oligonucleotide for detection of SNP TSC0003393
tttttttgaggag

SEQ ID NO: 15246 - DNA, 13 bp, Artificial Sequence
  Oligonucleotide for detection of SNP TSC0003393
ctcctcaaaaaaa

SEQ ID NO: 15247 - DNA, 13 bp, Artificial Sequence
  Oligonucleotide for detection of SNP TSC0003393
ttttttggaggag

SEQ ID NO: 15248 - DNA, 13 bp, Artificial Sequence
  Oligonucleotide for detection of SNP TSC0003393
ctcctccaaaaaa

SEQ ID NO: 15249 - DNA, 13 bp, Artificial Sequence
  Oligonucleotide for detection of SNP TSC0003393
ttttttaaagaag

SEQ ID NO: 15250 - DNA, 13 bp, Artificial Sequence
  Oligonucleotide for detection of SNP TSC0003393
cttctttaaaaaa

SEQ ID NO: 15251 - DNA, 13 bp, Artificial Sequence
  Oligonucleotide for detection of SNP TSC0003393
tttttttaagaag

SEQ ID NO: 15252 - DNA, 13 bp, Artificial Sequence
  Oligonucleotide for detection of SNP TSC0003393
cttcttaaaaaaa

SEQ ID NO: 15253 - DNA, 13 bp, Artificial Sequence
  Oligonucleotide for detection of SNP TSC0003394
tggaaatgtagag

SEQ ID NO: 15254 - DNA, 13 bp, Artificial Sequence
  Oligonucleotide for detection of SNP TSC0003394
ctctacatttcca

SEQ ID NO: 15255 - DNA, 13 bp, Artificial Sequence
  Oligonucleotide for detection of SNP TSC0003394
tggaaacgtagag

SEQ ID NO: 15256 - DNA, 13 bp, Artificial Sequence
  Oligonucleotide for detection of SNP TSC0003394
ctctacgtttcca

SEQ ID NO: 15257 - DNA, 13 bp, Artificial Sequence
  Oligonucleotide for detection of SNP TSC0003394
ttttatgttttta

SEQ ID NO: 15258 - DNA, 13 bp, Artificial Sequence
  Oligonucleotide for detection of SNP TSC0003394
taaaaacataaaa

SEQ ID NO: 15259 - DNA, 13 bp, Artificial Sequence
  Oligonucleotide for detection of SNP TSC0003394
ttttatattttta

SEQ ID NO: 15260 - DNA, 13 bp, Artificial Sequence
  Oligonucleotide for detection of SNP TSC0003394
taaaaatataaaa

SEQ ID NO: 15261 - DNA, 13 bp, Artificial Sequence
  Oligonucleotide for detection of SNP TSC0003394
ttttacgttttta

SEQ ID NO: 15262 - DNA, 13 bp, Artificial Sequence
  Oligonucleotide for detection of SNP TSC0003394
taaaaacgtaaaa

SEQ ID NO: 15263 - DNA, 13 bp, Artificial Sequence
  Oligonucleotide for detection of SNP TSC0003396
ttttttaaattay

SEQ ID NO: 15264 - DNA, 13 bp, Artificial Sequence
  Oligonucleotide for detection of SNP TSC0003396
rtaatttaaaaaa

SEQ ID NO: 15265 - DNA, 13 bp, Artificial Sequence
  Oligonucleotide for detection of SNP TSC0003396
tttttttaattay

SEQ ID NO: 15266 - DNA, 13 bp, Artificial Sequence
  Oligonucleotide for detection of SNP TSC0003396
rtaattaaaaaaa

SEQ ID NO: 15267 - DNA, 13 bp, Artificial Sequence
  Oligonucleotide for detection of SNP TSC0003396
gtaatttaaaaaa

SEQ ID NO: 15268 - DNA, 13 bp, Artificial Sequence
  Oligonucleotide for detection of SNP TSC0003396
ttttttaaattac

SEQ ID NO: 15269 - DNA, 13 bp, Artificial Sequence
  Oligonucleotide for detection of SNP TSC0003396
gtaattaaaaaaa

SEQ ID NO: 15270 - DNA, 13 bp, Artificial Sequence
  Oligonucleotide for detection of SNP TSC0003396
tttttttaattac

SEQ ID NO: 15271 - DNA, 13 bp, Artificial Sequence
  Oligonucleotide for detection of SNP TSC0003397
gagttaaaatttt

SEQ ID NO: 15272 - DNA, 13 bp, Artificial Sequence
  Oligonucleotide for detection of SNP TSC0003397
aaaattttaactc

SEQ ID NO: 15273 - DNA, 13 bp, Artificial Sequence
  Oligonucleotide for detection of SNP TSC0003397
gagttataatttt

SEQ ID NO: 15274 - DNA, 13 bp, Artificial Sequence
  Oligonucleotide for detection of SNP TSC0003397
aaaattataactc

SEQ ID NO: 15275 - DNA, 13 bp, Artificial Sequence
  Oligonucleotide for detection of SNP TSC0003397
agagttttaatty

SEQ ID NO: 15276 - DNA, 13 bp, Artificial Sequence
  Oligonucleotide for detection of SNP TSC0003397
raattaaaactct

SEQ ID NO: 15277 - DNA, 13 bp, Artificial Sequence
  Oligonucleotide for detection of SNP TSC0003397
agagttgtaatty

SEQ ID NO: 15278 - DNA, 13 bp, Artificial Sequence
  Oligonucleotide for detection of SNP TSC0003397
raattacaactct

SEQ ID NO: 15279 - DNA, 13 bp, Artificial Sequence
  Oligonucleotide for detection of SNP TSC0003398
gattataagaaat

SEQ ID NO: 15280 - DNA, 13 bp, Artificial Sequence
  Oligonucleotide for detection of SNP TSC0003398
atttcttataatc

SEQ ID NO: 15281 - DNA, 13 bp, Artificial Sequence
  Oligonucleotide for detection of SNP TSC0003398
gattatgagaaat

SEQ ID NO: 15282 - DNA, 13 bp, Artificial Sequence
  Oligonucleotide for detection of SNP TSC0003398
atttctcataatc

SEQ ID NO: 15283 - DNA, 13 bp, Artificial Sequence
  Oligonucleotide for detection of SNP TSC0003399
aagggaaagtgta

SEQ ID NO: 15284 - DNA, 13 bp, Artificial Sequence
  Oligonucleotide for detection of SNP TSC0003399
tacactttccctt

SEQ ID NO: 15285 - DNA, 13 bp, Artificial Sequence
  Oligonucleotide for detection of SNP TSC0003399
aagggatagtgta

SEQ ID NO: 15286 - DNA, 13 bp, Artificial Sequence
  Oligonucleotide for detection of SNP TSC0003399
tacactatccctt

SEQ ID NO: 15287 - DNA, 13 bp, Artificial Sequence
  Oligonucleotide for detection of SNP TSC0003400
aagtgtataggaa

SEQ ID NO: 15288 - DNA, 13 bp, Artificial Sequence
  Oligonucleotide for detection of SNP TSC0003400
ttcctatacactt

SEQ ID NO: 15289 - DNA, 13 bp, Artificial Sequence
  Oligonucleotide for detection of SNP TSC0003400
aagtgtgtaggaa

SEQ ID NO: 15290 - DNA, 13 bp, Artificial Sequence
  Oligonucleotide for detection of SNP TSC0003400
ttcctacacactt

SEQ ID NO: 15291 - DNA, 13 bp, Artificial Sequence
  Oligonucleotide for detection of SNP TSC0003401
gtttttttgatta

SEQ ID NO: 15292 - DNA, 13 bp, Artificial Sequence
  Oligonucleotide for detection of SNP TSC0003401
taatcaaaaaaac

SEQ ID NO: 15293 - DNA, 13 bp, Artificial Sequence
  Oligonucleotide for detection of SNP TSC0003401
gtttttgtgatta

SEQ ID NO: 15294 - DNA, 13 bp, Artificial Sequence
  Oligonucleotide for detection of SNP TSC0003401
taatcacaaaaac

SEQ ID NO: 15295 - DNA, 13 bp, Artificial Sequence
  Oligonucleotide for detection of SNP TSC0003401
taattaaaaaagy

SEQ ID NO: 15296 - DNA, 13 bp, Artificial Sequence
  Oligonucleotide for detection of SNP TSC0003401
rcttttttaatta

SEQ ID NO: 15297 - DNA, 13 bp, Artificial Sequence
  Oligonucleotide for detection of SNP TSC0003401
taattataaaagy

SEQ ID NO: 15298 - DNA, 13 bp, Artificial Sequence
  Oligonucleotide for detection of SNP TSC0003401
rcttttataatta

SEQ ID NO: 15299 - DNA, 13 bp, Artificial Sequence
  Oligonucleotide for detection of SNP TSC0003402
ttgagtattgaga

SEQ ID NO: 15300 - DNA, 13 bp, Artificial Sequence
  Oligonucleotide for detection of SNP TSC0003402
tctcaatactcaa

SEQ ID NO: 15301 - DNA, 13 bp, Artificial Sequence
  Oligonucleotide for detection of SNP TSC0003402
ttgagttttgaga

SEQ ID NO: 15302 - DNA, 13 bp, Artificial Sequence
  Oligonucleotide for detection of SNP TSC0003402
tctcaaaactcaa

SEQ ID NO: 15303 - DNA, 13 bp, Artificial Sequence
  Oligonucleotide for detection of SNP TSC0003402
tcgagtattgaga

SEQ ID NO: 15304 - DNA, 13 bp, Artificial Sequence
  Oligonucleotide for detection of SNP TSC0003402
tctcaatactcga

SEQ ID NO: 15305 - DNA, 13 bp, Artificial Sequence
  Oligonucleotide for detection of SNP TSC0003402
tcgagttttgaga

SEQ ID NO: 15306 - DNA, 13 bp, Artificial Sequence
  Oligonucleotide for detection of SNP TSC0003402
tctcaaaactcga

SEQ ID NO: 15307 - DNA, 13 bp, Artificial Sequence
  Oligonucleotide for detection of SNP TSC0003402
ttttagtgtttgg

SEQ ID NO: 15308 - DNA, 13 bp, Artificial Sequence
  Oligonucleotide for detection of SNP TSC0003402
ccaaacactaaaa

SEQ ID NO: 15309 - DNA, 13 bp, Artificial Sequence
  Oligonucleotide for detection of SNP TSC0003402
ttttagagtttgg

SEQ ID NO: 15310 - DNA, 13 bp, Artificial Sequence
  Oligonucleotide for detection of SNP TSC0003402
ccaaactctaaaa

SEQ ID NO: 15311 - DNA, 13 bp, Artificial Sequence
  Oligonucleotide for detection of SNP TSC0003402
ttttagtgttcgg

SEQ ID NO: 15312 - DNA, 13 bp, Artificial Sequence
  Oligonucleotide for detection of SNP TSC0003402
ccgaacactaaaa

SEQ ID NO: 15313 - DNA, 13 bp, Artificial Sequence
  Oligonucleotide for detection of SNP TSC0003402
ttttagagttcgg

SEQ ID NO: 15314 - DNA, 13 bp, Artificial Sequence
  Oligonucleotide for detection of SNP TSC0003402
ccgaactctaaaa

SEQ ID NO: 15315 - DNA, 13 bp, Artificial Sequence
  Oligonucleotide for detection of SNP TSC0003403
ttaagagtttttg

SEQ ID NO: 15316 - DNA, 13 bp, Artificial Sequence
  Oligonucleotide for detection of SNP TSC0003403
caaaaactcttaa

SEQ ID NO: 15317 - DNA, 13 bp, Artificial Sequence
  Oligonucleotide for detection of SNP TSC0003403
ttaagaatttttg

SEQ ID NO: 15318 - DNA, 13 bp, Artificial Sequence
  Oligonucleotide for detection of SNP TSC0003403
caaaaattcttaa

SEQ ID NO: 15319 - DNA, 13 bp, Artificial Sequence
  Oligonucleotide for detection of SNP TSC0003404
tatttagggttaa

SEQ ID NO: 15320 - DNA, 13 bp, Artificial Sequence
  Oligonucleotide for detection of SNP TSC0003404
ttaaccctaaata

SEQ ID NO: 15321 - DNA, 13 bp, Artificial Sequence
  Oligonucleotide for detection of SNP TSC0003404
tatttaaggttaa

SEQ ID NO: 15322 - DNA, 13 bp, Artificial Sequence
  Oligonucleotide for detection of SNP TSC0003404
ttaaccttaaata

SEQ ID NO: 15323 - DNA, 13 bp, Artificial Sequence
  Oligonucleotide for detection of SNP TSC0003405
tttaatataattg

SEQ ID NO: 15324 - DNA, 13 bp, Artificial Sequence
  Oligonucleotide for detection of SNP TSC0003405
caattatattaaa

SEQ ID NO: 15325 - DNA, 13 bp, Artificial Sequence
  Oligonucleotide for detection of SNP TSC0003405
tttaatgtaattg

SEQ ID NO: 15326 - DNA, 13 bp, Artificial Sequence
  Oligonucleotide for detection of SNP TSC0003405
caattacattaaa

SEQ ID NO: 15327 - DNA, 13 bp, Artificial Sequence
  Oligonucleotide for detection of SNP TSC0003405
tttaacgtaattg

SEQ ID NO: 15328 - DNA, 13 bp, Artificial Sequence
  Oligonucleotide for detection of SNP TSC0003405
caattacgttaaa

SEQ ID NO: 15329 - DNA, 13 bp, Artificial Sequence
  Oligonucleotide for detection of SNP TSC0003405
tagttatgttaaa

SEQ ID NO: 15330 - DNA, 13 bp, Artificial Sequence
  Oligonucleotide for detection of SNP TSC0003405
tttaacataacta

SEQ ID NO: 15331 - DNA, 13 bp, Artificial Sequence
  Oligonucleotide for detection of SNP TSC0003405
tagttacgttaaa

SEQ ID NO: 15332 - DNA, 13 bp, Artificial Sequence
  Oligonucleotide for detection of SNP TSC0003405
tttaacgtaacta

SEQ ID NO: 15333 - DNA, 13 bp, Artificial Sequence
  Oligonucleotide for detection of SNP TSC0003406
ttttttggtaagt

SEQ ID NO: 15334 - DNA, 13 bp, Artificial Sequence
  Oligonucleotide for detection of SNP TSC0003406
acttaccaaaaaa

SEQ ID NO: 15335 - DNA, 13 bp, Artificial Sequence
  Oligonucleotide for detection of SNP TSC0003406
ttttttagtaagt

SEQ ID NO: 15336 - DNA, 13 bp, Artificial Sequence
  Oligonucleotide for detection of SNP TSC0003406
acttactaaaaaa

SEQ ID NO: 15337 - DNA, 13 bp, Artificial Sequence
  Oligonucleotide for detection of SNP TSC0003407
gggttgtgtagty

SEQ ID NO: 15338 - DNA, 13 bp, Artificial Sequence
  Oligonucleotide for detection of SNP TSC0003407
ractacacaaccc

SEQ ID NO: 15339 - DNA, 13 bp, Artificial Sequence
  Oligonucleotide for detection of SNP TSC0003407
gggttgggtagty

SEQ ID NO: 15340 - DNA, 13 bp, Artificial Sequence
  Oligonucleotide for detection of SNP TSC0003407
ractacccaaccc

SEQ ID NO: 15341 - DNA, 13 bp, Artificial Sequence
  Oligonucleotide for detection of SNP TSC0003407
ggttgtatagtty

SEQ ID NO: 15342 - DNA, 13 bp, Artificial Sequence
  Oligonucleotide for detection of SNP TSC0003407
raactatacaacc

SEQ ID NO: 15343 - DNA, 13 bp, Artificial Sequence
  Oligonucleotide for detection of SNP TSC0003407
ggttgtttagtty

SEQ ID NO: 15344 - DNA, 13 bp, Artificial Sequence
  Oligonucleotide for detection of SNP TSC0003407
raactaaacaacc

SEQ ID NO: 15345 - DNA, 13 bp, Artificial Sequence
  Oligonucleotide for detection of SNP TSC0003408
agattaatagatg

SEQ ID NO: 15346 - DNA, 13 bp, Artificial Sequence
  Oligonucleotide for detection of SNP TSC0003408
catctattaatct

SEQ ID NO: 15347 - DNA, 13 bp, Artificial Sequence
  Oligonucleotide for detection of SNP TSC0003408
agattattagatg

SEQ ID NO: 15348 - DNA, 13 bp, Artificial Sequence
  Oligonucleotide for detection of SNP TSC0003408
catctaataatct

SEQ ID NO: 15349 - DNA, 13 bp, Artificial Sequence
  Oligonucleotide for detection of SNP TSC0003408
tatttattagttt

SEQ ID NO: 15350 - DNA, 13 bp, Artificial Sequence
  Oligonucleotide for detection of SNP TSC0003408
aaactaataaata

SEQ ID NO: 15351 - DNA, 13 bp, Artificial Sequence
  Oligonucleotide for detection of SNP TSC0003408
tatttagtagttt

SEQ ID NO: 15352 - DNA, 13 bp, Artificial Sequence
  Oligonucleotide for detection of SNP TSC0003408
aaactactaaata

SEQ ID NO: 15353 - DNA, 13 bp, Artificial Sequence
  Oligonucleotide for detection of SNP TSC0003409
ggaatatgttgay

SEQ ID NO: 15354 - DNA, 13 bp, Artificial Sequence
  Oligonucleotide for detection of SNP TSC0003409
rtcaacatattcc

SEQ ID NO: 15355 - DNA, 13 bp, Artificial Sequence
  Oligonucleotide for detection of SNP TSC0003409
ggaataggttgay

SEQ ID NO: 15356 - DNA, 13 bp, Artificial Sequence
  Oligonucleotide for detection of SNP TSC0003409
rtcaacctattcc

SEQ ID NO: 15357 - DNA, 13 bp, Artificial Sequence
  Oligonucleotide for detection of SNP TSC0003409
gttagtatgttty

SEQ ID NO: 15358 - DNA, 13 bp, Artificial Sequence
  Oligonucleotide for detection of SNP TSC0003409
raaacatactaac

SEQ ID NO: 15359 - DNA, 13 bp, Artificial Sequence
  Oligonucleotide for detection of SNP TSC0003409
gttagtttgttty

SEQ ID NO: 15360 - DNA, 13 bp, Artificial Sequence
  Oligonucleotide for detection of SNP TSC0003409
raaacaaactaac

SEQ ID NO: 15361 - DNA, 13 bp, Artificial Sequence
  Oligonucleotide for detection of SNP TSC0003410
ttaaatgataaaa

SEQ ID NO: 15362 - DNA, 13 bp, Artificial Sequence
  Oligonucleotide for detection of SNP TSC0003410
ttttatcatttaa

SEQ ID NO: 15363 - DNA, 13 bp, Artificial Sequence
  Oligonucleotide for detection of SNP TSC0003410
ttaaataataaaa

SEQ ID NO: 15364 - DNA, 13 bp, Artificial Sequence
  Oligonucleotide for detection of SNP TSC0003410
ttttattatttaa

SEQ ID NO: 15365 - DNA, 13 bp, Artificial Sequence
  Oligonucleotide for detection of SNP TSC0003411
attaaaaaagtag

SEQ ID NO: 15366 - DNA, 13 bp, Artificial Sequence
  Oligonucleotide for detection of SNP TSC0003411
ctacttttttaat

SEQ ID NO: 15367 - DNA, 13 bp, Artificial Sequence
  Oligonucleotide for detection of SNP TSC0003411
attaaataagtag

SEQ ID NO: 15368 - DNA, 13 bp, Artificial Sequence
  Oligonucleotide for detection of SNP TSC0003411
ctacttatttaat

SEQ ID NO: 15369 - DNA, 13 bp, Artificial Sequence
  Oligonucleotide for detection of SNP TSC0003411
ttatttttttaat

SEQ ID NO: 15370 - DNA, 13 bp, Artificial Sequence
  Oligonucleotide for detection of SNP TSC0003411
attaaaaaaataa

SEQ ID NO: 15371 - DNA, 13 bp, Artificial Sequence
  Oligonucleotide for detection of SNP TSC0003413
tattttaggaaag

SEQ ID NO: 15372 - DNA, 13 bp, Artificial Sequence
  Oligonucleotide for detection of SNP TSC0003413
ctttcctaaaata

SEQ ID NO: 15373 - DNA, 13 bp, Artificial Sequence
  Oligonucleotide for detection of SNP TSC0003413
tattttgggaaag

SEQ ID NO: 15374 - DNA, 13 bp, Artificial Sequence
  Oligonucleotide for detection of SNP TSC0003413
ctttcccaaaata

SEQ ID NO: 15375 - DNA, 13 bp, Artificial Sequence
  Oligonucleotide for detection of SNP TSC0003413
tatttcgggaaag

SEQ ID NO: 15376 - DNA, 13 bp, Artificial Sequence
  Oligonucleotide for detection of SNP TSC0003413
ctttcccgaaata

SEQ ID NO: 15377 - DNA, 13 bp, Artificial Sequence
  Oligonucleotide for detection of SNP TSC0003413
tttttttgaaata

SEQ ID NO: 15378 - DNA, 13 bp, Artificial Sequence
  Oligonucleotide for detection of SNP TSC0003413
tatttcaaaaaaa

SEQ ID NO: 15379 - DNA, 13 bp, Artificial Sequence
  Oligonucleotide for detection of SNP TSC0003413
ttttttcgaaata

SEQ ID NO: 15380 - DNA, 13 bp, Artificial Sequence
  Oligonucleotide for detection of SNP TSC0003413
tatttcgaaaaaa

SEQ ID NO: 15381 - DNA, 13 bp, Artificial Sequence
  Oligonucleotide for detection of SNP TSC0003414
ttttttaagttgt

SEQ ID NO: 15382 - DNA, 13 bp, Artificial Sequence
  Oligonucleotide for detection of SNP TSC0003414
acaacttaaaaaa

SEQ ID NO: 15383 - DNA, 13 bp, Artificial Sequence
  Oligonucleotide for detection of SNP TSC0003414
ttttttgagttgt

SEQ ID NO: 15384 - DNA, 13 bp, Artificial Sequence
  Oligonucleotide for detection of SNP TSC0003414
acaactcaaaaaa

SEQ ID NO: 15385 - DNA, 13 bp, Artificial Sequence
  Oligonucleotide for detection of SNP TSC0003415
atttttattatat

SEQ ID NO: 15386 - DNA, 13 bp, Artificial Sequence
  Oligonucleotide for detection of SNP TSC0003415
atataataaaaat

SEQ ID NO: 15387 - DNA, 13 bp, Artificial Sequence
  Oligonucleotide for detection of SNP TSC0003415
atttttgttatat

SEQ ID NO: 15388 - DNA, 13 bp, Artificial Sequence
  Oligonucleotide for detection of SNP TSC0003415
atataacaaaaat

SEQ ID NO: 15389 - DNA, 13 bp, Artificial Sequence
  Oligonucleotide for detection of SNP TSC0003416
tattttatttatt

SEQ ID NO: 15390 - DNA, 13 bp, Artificial Sequence
  Oligonucleotide for detection of SNP TSC0003416
aataaataaaata

SEQ ID NO: 15391 - DNA, 13 bp, Artificial Sequence
  Oligonucleotide for detection of SNP TSC0003416
tattttttttatt

SEQ ID NO: 15392 - DNA, 13 bp, Artificial Sequence
  Oligonucleotide for detection of SNP TSC0003416
aataaaaaaaata

SEQ ID NO: 15393 - DNA, 13 bp, Artificial Sequence
  Oligonucleotide for detection of SNP TSC0003416
aataaataaaatg

SEQ ID NO: 15394 - DNA, 13 bp, Artificial Sequence
  Oligonucleotide for detection of SNP TSC0003416
cattttatttatt

SEQ ID NO: 15395 - DNA, 13 bp, Artificial Sequence
  Oligonucleotide for detection of SNP TSC0003416
aataaaaaaaatg

SEQ ID NO: 15396 - DNA, 13 bp, Artificial Sequence
  Oligonucleotide for detection of SNP TSC0003416
cattttttttatt

SEQ ID NO: 15397 - DNA, 13 bp, Artificial Sequence
  Oligonucleotide for detection of SNP TSC0003417
gtttttatttttt

SEQ ID NO: 15398 - DNA, 13 bp, Artificial Sequence
  Oligonucleotide for detection of SNP TSC0003417
aaaaaataaaaac

SEQ ID NO: 15399 - DNA, 13 bp, Artificial Sequence
  Oligonucleotide for detection of SNP TSC0003417
gtttttgtttttt

SEQ ID NO: 15400 - DNA, 13 bp, Artificial Sequence
  Oligonucleotide for detection of SNP TSC0003417
aaaaaacaaaaac

SEQ ID NO: 15401 - DNA, 13 bp, Artificial Sequence
  Oligonucleotide for detection of SNP TSC0003417
gttttcgtttttt

SEQ ID NO: 15402 - DNA, 13 bp, Artificial Sequence
  Oligonucleotide for detection of SNP TSC0003417
aaaaaacgaaaac

SEQ ID NO: 15403 - DNA, 13 bp, Artificial Sequence
  Oligonucleotide for detection of SNP TSC0003417
aaggaatgggagy

SEQ ID NO: 15404 - DNA, 13 bp, Artificial Sequence
  Oligonucleotide for detection of SNP TSC0003417
rctcccattcctt

SEQ ID NO: 15405 - DNA, 13 bp, Artificial Sequence
  Oligonucleotide for detection of SNP TSC0003417
aaggaacgggagy

SEQ ID NO: 15406 - DNA, 13 bp, Artificial Sequence
  Oligonucleotide for detection of SNP TSC0003417
rctcccgttcctt

SEQ ID NO: 15407 - DNA, 13 bp, Artificial Sequence
  Oligonucleotide for detection of SNP TSC0003418
atatataaatata

SEQ ID NO: 15408 - DNA, 13 bp, Artificial Sequence
  Oligonucleotide for detection of SNP TSC0003418
tatatttatatat

SEQ ID NO: 15409 - DNA, 13 bp, Artificial Sequence
  Oligonucleotide for detection of SNP TSC0003418
atatatgaatata

SEQ ID NO: 15410 - DNA, 13 bp, Artificial Sequence
  Oligonucleotide for detection of SNP TSC0003418
tatattcatatat

SEQ ID NO: 15411 - DNA, 13 bp, Artificial Sequence
  Oligonucleotide for detection of SNP TSC0003420
tttaattattatt

SEQ ID NO: 15412 - DNA, 13 bp, Artificial Sequence
  Oligonucleotide for detection of SNP TSC0003420
aataataattaaa

SEQ ID NO: 15413 - DNA, 13 bp, Artificial Sequence
  Oligonucleotide for detection of SNP TSC0003420
tttaatgattatt

SEQ ID NO: 15414 - DNA, 13 bp, Artificial Sequence
  Oligonucleotide for detection of SNP TSC0003420
aataatcattaaa

SEQ ID NO: 15415 - DNA, 13 bp, Artificial Sequence
  Oligonucleotide for detection of SNP TSC0003420
aatagtaattggg

SEQ ID NO: 15416 - DNA, 13 bp, Artificial Sequence
  Oligonucleotide for detection of SNP TSC0003420
cccaattactatt

SEQ ID NO: 15417 - DNA, 13 bp, Artificial Sequence
  Oligonucleotide for detection of SNP TSC0003420
aatagttattggg

SEQ ID NO: 15418 - DNA, 13 bp, Artificial Sequence
  Oligonucleotide for detection of SNP TSC0003420
cccaataactatt

SEQ ID NO: 15419 - DNA, 13 bp, Artificial Sequence
  Oligonucleotide for detection of SNP TSC0003421
gttattattttta

SEQ ID NO: 15420 - DNA, 13 bp, Artificial Sequence
  Oligonucleotide for detection of SNP TSC0003421
taaaaataataac

SEQ ID NO: 15421 - DNA, 13 bp, Artificial Sequence
  Oligonucleotide for detection of SNP TSC0003421
gttattgttttta

SEQ ID NO: 15422 - DNA, 13 bp, Artificial Sequence
  Oligonucleotide for detection of SNP TSC0003421
taaaaacaataac

SEQ ID NO: 15423 - DNA, 13 bp, Artificial Sequence
  Oligonucleotide for detection of SNP TSC0003421
gttatcgttttta

SEQ ID NO: 15424 - DNA, 13 bp, Artificial Sequence
  Oligonucleotide for detection of SNP TSC0003421
taaaaacgataac

SEQ ID NO: 15425 - DNA, 13 bp, Artificial Sequence
  Oligonucleotide for detection of SNP TSC0003421
taaagatgataay

SEQ ID NO: 15426 - DNA, 13 bp, Artificial Sequence
  Oligonucleotide for detection of SNP TSC0003421
rttatcatcttta

SEQ ID NO: 15427 - DNA, 13 bp, Artificial Sequence
  Oligonucleotide for detection of SNP TSC0003421
taaagacgataay

SEQ ID NO: 15428 - DNA, 13 bp, Artificial Sequence
  Oligonucleotide for detection of SNP TSC0003421
rttatcgtcttta

SEQ ID NO: 15429 - DNA, 13 bp, Artificial Sequence
  Oligonucleotide for detection of SNP TSC0003422
taataatgtaaat

SEQ ID NO: 15430 - DNA, 13 bp, Artificial Sequence
  Oligonucleotide for detection of SNP TSC0003422
atttacattatta

SEQ ID NO: 15431 - DNA, 13 bp, Artificial Sequence
  Oligonucleotide for detection of SNP TSC0003422
taataaggtaaat

SEQ ID NO: 15432 - DNA, 13 bp, Artificial Sequence
  Oligonucleotide for detection of SNP TSC0003422
atttaccttatta

SEQ ID NO: 15433 - DNA, 13 bp, Artificial Sequence
  Oligonucleotide for detection of SNP TSC0003422
atttgtattattg

SEQ ID NO: 15434 - DNA, 13 bp, Artificial Sequence
  Oligonucleotide for detection of SNP TSC0003422
caataatacaaat

SEQ ID NO: 15435 - DNA, 13 bp, Artificial Sequence
  Oligonucleotide for detection of SNP TSC0003422
atttgttttattg

SEQ ID NO: 15436 - DNA, 13 bp, Artificial Sequence
  Oligonucleotide for detection of SNP TSC0003422
caataaaacaaat

SEQ ID NO: 15437 - DNA, 13 bp, Artificial Sequence
  Oligonucleotide for detection of SNP TSC0003425
aaatttaaaatgt

SEQ ID NO: 15438 - DNA, 13 bp, Artificial Sequence
  Oligonucleotide for detection of SNP TSC0003425
acattttaaattt

SEQ ID NO: 15439 - DNA, 13 bp, Artificial Sequence
  Oligonucleotide for detection of SNP TSC0003425
aaattttaaatgt

SEQ ID NO: 15440 - DNA, 13 bp, Artificial Sequence
  Oligonucleotide for detection of SNP TSC0003425
acatttaaaattt

SEQ ID NO: 15441 - DNA, 13 bp, Artificial Sequence
  Oligonucleotide for detection of SNP TSC0003425
atattttgagttt

SEQ ID NO: 15442 - DNA, 13 bp, Artificial Sequence
  Oligonucleotide for detection of SNP TSC0003425
aaactcaaaatat

SEQ ID NO: 15443 - DNA, 13 bp, Artificial Sequence
  Oligonucleotide for detection of SNP TSC0003425
atatttagagttt

SEQ ID NO: 15444 - DNA, 13 bp, Artificial Sequence
  Oligonucleotide for detection of SNP TSC0003425
aaactctaaatat

SEQ ID NO: 15445 - DNA, 13 bp, Artificial Sequence
  Oligonucleotide for detection of SNP TSC0003427
tggtttgttttta

SEQ ID NO: 15446 - DNA, 13 bp, Artificial Sequence
  Oligonucleotide for detection of SNP TSC0003427
taaaaacaaacca

SEQ ID NO: 15447 - DNA, 13 bp, Artificial Sequence
  Oligonucleotide for detection of SNP TSC0003427
tggtttattttta

SEQ ID NO: 15448 - DNA, 13 bp, Artificial Sequence
  Oligonucleotide for detection of SNP TSC0003427
taaaaataaacca

SEQ ID NO: 15449 - DNA, 13 bp, Artificial Sequence
  Oligonucleotide for detection of SNP TSC0003428
tgatatatatttg

SEQ ID NO: 15450 - DNA, 13 bp, Artificial Sequence
  Oligonucleotide for detection of SNP TSC0003428
caaatatatatca

SEQ ID NO: 15451 - DNA, 13 bp, Artificial Sequence
  Oligonucleotide for detection of SNP TSC0003428
tgatatgtatttg

SEQ ID NO: 15452 - DNA, 13 bp, Artificial Sequence
  Oligonucleotide for detection of SNP TSC0003428
caaatacatatca

SEQ ID NO: 15453 - DNA, 13 bp, Artificial Sequence
  Oligonucleotide for detection of SNP TSC0003428
cgatatatatttg

SEQ ID NO: 15454 - DNA, 13 bp, Artificial Sequence
  Oligonucleotide for detection of SNP TSC0003428
caaatatatatcg

SEQ ID NO: 15455 - DNA, 13 bp, Artificial Sequence
  Oligonucleotide for detection of SNP TSC0003428
cgatatgtatttg

SEQ ID NO: 15456 - DNA, 13 bp, Artificial Sequence
  Oligonucleotide for detection of SNP TSC0003428
caaatacatatcg

SEQ ID NO: 15457 - DNA, 13 bp, Artificial Sequence
  Oligonucleotide for detection of SNP TSC0003428
tgatacgtatttg

SEQ ID NO: 15458 - DNA, 13 bp, Artificial Sequence
  Oligonucleotide for detection of SNP TSC0003428
caaatacgtatca

SEQ ID NO: 15459 - DNA, 13 bp, Artificial Sequence
  Oligonucleotide for detection of SNP TSC0003428
cgatacgtatttg

SEQ ID NO: 15460 - DNA, 13 bp, Artificial Sequence
  Oligonucleotide for detection of SNP TSC0003428
caaatacgtatcg

SEQ ID NO: 15461 - DNA, 13 bp, Artificial Sequence
  Oligonucleotide for detection of SNP TSC0003428
taaatatgtattg

SEQ ID NO: 15462 - DNA, 13 bp, Artificial Sequence
  Oligonucleotide for detection of SNP TSC0003428
caatacatattta

SEQ ID NO: 15463 - DNA, 13 bp, Artificial Sequence
  Oligonucleotide for detection of SNP TSC0003428
taaatatgtatcg

SEQ ID NO: 15464 - DNA, 13 bp, Artificial Sequence
  Oligonucleotide for detection of SNP TSC0003428
cgatacatattta

SEQ ID NO: 15465 - DNA, 13 bp, Artificial Sequence
  Oligonucleotide for detection of SNP TSC0003428
taaatacgtattg

SEQ ID NO: 15466 - DNA, 13 bp, Artificial Sequence
  Oligonucleotide for detection of SNP TSC0003428
caatacgtattta

SEQ ID NO: 15467 - DNA, 13 bp, Artificial Sequence
  Oligonucleotide for detection of SNP TSC0003428
taaatacgtatcg

SEQ ID NO: 15468 - DNA, 13 bp, Artificial Sequence
  Oligonucleotide for detection of SNP TSC0003428
cgatacgtattta

SEQ ID NO: 15469 - DNA, 13 bp, Artificial Sequence
  Oligonucleotide for detection of SNP TSC0003429
tgagttgtattat

SEQ ID NO: 15470 - DNA, 13 bp, Artificial Sequence
  Oligonucleotide for detection of SNP TSC0003429
ataatacaactca

SEQ ID NO: 15471 - DNA, 13 bp, Artificial Sequence
  Oligonucleotide for detection of SNP TSC0003429
tgagttatattat

SEQ ID NO: 15472 - DNA, 13 bp, Artificial Sequence
  Oligonucleotide for detection of SNP TSC0003429
ataatataactca

SEQ ID NO: 15473 - DNA, 13 bp, Artificial Sequence
  Oligonucleotide for detection of SNP TSC0003430
tttgtataagata

SEQ ID NO: 15474 - DNA, 13 bp, Artificial Sequence
  Oligonucleotide for detection of SNP TSC0003430
tatcttatacaaa

SEQ ID NO: 15475 - DNA, 13 bp, Artificial Sequence
  Oligonucleotide for detection of SNP TSC0003430
tttgtagaagata

SEQ ID NO: 15476 - DNA, 13 bp, Artificial Sequence
  Oligonucleotide for detection of SNP TSC0003430
tatcttctacaaa

SEQ ID NO: 15477 - DNA, 13 bp, Artificial Sequence
  Oligonucleotide for detection of SNP TSC0003430
tgttttatgtaag

SEQ ID NO: 15478 - DNA, 13 bp, Artificial Sequence
  Oligonucleotide for detection of SNP TSC0003430
cttacataaaaca

SEQ ID NO: 15479 - DNA, 13 bp, Artificial Sequence
  Oligonucleotide for detection of SNP TSC0003430
tgttttttgtaag

SEQ ID NO: 15480 - DNA, 13 bp, Artificial Sequence
  Oligonucleotide for detection of SNP TSC0003430
cttacaaaaaaca

SEQ ID NO: 15481 - DNA, 13 bp, Artificial Sequence
  Oligonucleotide for detection of SNP TSC0003431
tttttgattttta

SEQ ID NO: 15482 - DNA, 13 bp, Artificial Sequence
  Oligonucleotide for detection of SNP TSC0003431
taaaaatcaaaaa

SEQ ID NO: 15483 - DNA, 13 bp, Artificial Sequence
  Oligonucleotide for detection of SNP TSC0003431
tttttgtttttta

SEQ ID NO: 15484 - DNA, 13 bp, Artificial Sequence
  Oligonucleotide for detection of SNP TSC0003431
taaaaaacaaaaa

SEQ ID NO: 15485 - DNA, 13 bp, Artificial Sequence
  Oligonucleotide for detection of SNP TSC0003431
taaggattaaagg

SEQ ID NO: 15486 - DNA, 13 bp, Artificial Sequence
  Oligonucleotide for detection of SNP TSC0003431
cctttaatcctta

SEQ ID NO: 15487 - DNA, 13 bp, Artificial Sequence
  Oligonucleotide for detection of SNP TSC0003431
taaggaataaagg

SEQ ID NO: 15488 - DNA, 13 bp, Artificial Sequence
  Oligonucleotide for detection of SNP TSC0003431
cctttattcctta

SEQ ID NO: 15489 - DNA, 13 bp, Artificial Sequence
  Oligonucleotide for detection of SNP TSC0003432
aataaacgtatga

SEQ ID NO: 15490 - DNA, 13 bp, Artificial Sequence
  Oligonucleotide for detection of SNP TSC0003432
tcatacgtttatt

SEQ ID NO: 15491 - DNA, 13 bp, Artificial Sequence
  Oligonucleotide for detection of SNP TSC0003433
agaagaatagtay

SEQ ID NO: 15492 - DNA, 13 bp, Artificial Sequence
  Oligonucleotide for detection of SNP TSC0003433
rtactattcttct

SEQ ID NO: 15493 - DNA, 13 bp, Artificial Sequence
  Oligonucleotide for detection of SNP TSC0003433
agaagagtagtay

SEQ ID NO: 15494 - DNA, 13 bp, Artificial Sequence
  Oligonucleotide for detection of SNP TSC0003433
rtactactcttct

SEQ ID NO: 15495 - DNA, 13 bp, Artificial Sequence
  Oligonucleotide for detection of SNP TSC0003434
aaaagaatttttt

SEQ ID NO: 15496 - DNA, 13 bp, Artificial Sequence
  Oligonucleotide for detection of SNP TSC0003434
aaaaaattctttt

SEQ ID NO: 15497 - DNA, 13 bp, Artificial Sequence
  Oligonucleotide for detection of SNP TSC0003434
aaaagagtttttt

SEQ ID NO: 15498 - DNA, 13 bp, Artificial Sequence
  Oligonucleotide for detection of SNP TSC0003434
aaaaaactctttt

SEQ ID NO: 15499 - DNA, 13 bp, Artificial Sequence
  Oligonucleotide for detection of SNP TSC0003435
gttattagtttay

SEQ ID NO: 15500 - DNA, 13 bp, Artificial Sequence
  Oligonucleotide for detection of SNP TSC0003435
rtaaactaataac

SEQ ID NO: 15501 - DNA, 13 bp, Artificial Sequence
  Oligonucleotide for detection of SNP TSC0003435
gttattggtttay

SEQ ID NO: 15502 - DNA, 13 bp, Artificial Sequence
  Oligonucleotide for detection of SNP TSC0003435
rtaaaccaataac

SEQ ID NO: 15503 - DNA, 13 bp, Artificial Sequence
  Oligonucleotide for detection of SNP TSC0003436
tttaaatatttta

SEQ ID NO: 15504 - DNA, 13 bp, Artificial Sequence
  Oligonucleotide for detection of SNP TSC0003436
taaaatatttaaa

SEQ ID NO: 15505 - DNA, 13 bp, Artificial Sequence
  Oligonucleotide for detection of SNP TSC0003436
tttaaagatttta

SEQ ID NO: 15506 - DNA, 13 bp, Artificial Sequence
  Oligonucleotide for detection of SNP TSC0003436
taaaatctttaaa

SEQ ID NO: 15507 - DNA, 13 bp, Artificial Sequence
  Oligonucleotide for detection of SNP TSC0003436
taaaatatttgaa

SEQ ID NO: 15508 - DNA, 13 bp, Artificial Sequence
  Oligonucleotide for detection of SNP TSC0003436
ttcaaatatttta

SEQ ID NO: 15509 - DNA, 13 bp, Artificial Sequence
  Oligonucleotide for detection of SNP TSC0003436
taaaatttttgaa

SEQ ID NO: 15510 - DNA, 13 bp, Artificial Sequence
  Oligonucleotide for detection of SNP TSC0003436
ttcaaaaatttta

SEQ ID NO: 15511 - DNA, 13 bp, Artificial Sequence
  Oligonucleotide for detection of SNP TSC0003437
ttgttaagtatat

SEQ ID NO: 15512 - DNA, 13 bp, Artificial Sequence
  Oligonucleotide for detection of SNP TSC0003437
atatacttaacaa

SEQ ID NO: 15513 - DNA, 13 bp, Artificial Sequence
  Oligonucleotide for detection of SNP TSC0003437
ttgttaggtatat

SEQ ID NO: 15514 - DNA, 13 bp, Artificial Sequence
  Oligonucleotide for detection of SNP TSC0003437
atatacctaacaa

SEQ ID NO: 15515 - DNA, 13 bp, Artificial Sequence
  Oligonucleotide for detection of SNP TSC0003438
ttgattataagtt

SEQ ID NO: 15516 - DNA, 13 bp, Artificial Sequence
  Oligonucleotide for detection of SNP TSC0003438
aacttataatcaa

SEQ ID NO: 15517 - DNA, 13 bp, Artificial Sequence
  Oligonucleotide for detection of SNP TSC0003438
ttgattttaagtt

SEQ ID NO: 15518 - DNA, 13 bp, Artificial Sequence
  Oligonucleotide for detection of SNP TSC0003438
aacttaaaatcaa

SEQ ID NO: 15519 - DNA, 13 bp, Artificial Sequence
  Oligonucleotide for detection of SNP TSC0003438
aatttgtggttag

SEQ ID NO: 15520 - DNA, 13 bp, Artificial Sequence
  Oligonucleotide for detection of SNP TSC0003438
ctaaccacaaatt

SEQ ID NO: 15521 - DNA, 13 bp, Artificial Sequence
  Oligonucleotide for detection of SNP TSC0003438
aatttgaggttag

SEQ ID NO: 15522 - DNA, 13 bp, Artificial Sequence
  Oligonucleotide for detection of SNP TSC0003438
ctaacctcaaatt

SEQ ID NO: 15523 - DNA, 13 bp, Artificial Sequence
  Oligonucleotide for detection of SNP TSC0003439
taaaaggttttta

SEQ ID NO: 15524 - DNA, 13 bp, Artificial Sequence
  Oligonucleotide for detection of SNP TSC0003439
taaaaacctttta

SEQ ID NO: 15525 - DNA, 13 bp, Artificial Sequence
  Oligonucleotide for detection of SNP TSC0003439
taaaagattttta

SEQ ID NO: 15526 - DNA, 13 bp, Artificial Sequence
  Oligonucleotide for detection of SNP TSC0003439
taaaaatctttta

SEQ ID NO: 15527 - DNA, 13 bp, Artificial Sequence
  Oligonucleotide for detection of SNP TSC0003440
ttttttattatta

SEQ ID NO: 15528 - DNA, 13 bp, Artificial Sequence
  Oligonucleotide for detection of SNP TSC0003440
taataataaaaaa

SEQ ID NO: 15529 - DNA, 13 bp, Artificial Sequence
  Oligonucleotide for detection of SNP TSC0003440
tttttttttatta

SEQ ID NO: 15530 - DNA, 13 bp, Artificial Sequence
  Oligonucleotide for detection of SNP TSC0003440
taataaaaaaaaa

SEQ ID NO: 15531 - DNA, 13 bp, Artificial Sequence
  Oligonucleotide for detection of SNP TSC0003440
taataataagaag

SEQ ID NO: 15532 - DNA, 13 bp, Artificial Sequence
  Oligonucleotide for detection of SNP TSC0003440
cttcttattatta

SEQ ID NO: 15533 - DNA, 13 bp, Artificial Sequence
  Oligonucleotide for detection of SNP TSC0003440
taataagaagaag

SEQ ID NO: 15534 - DNA, 13 bp, Artificial Sequence
  Oligonucleotide for detection of SNP TSC0003440
cttcttcttatta

SEQ ID NO: 15535 - DNA, 13 bp, Artificial Sequence
  Oligonucleotide for detection of SNP TSC0003441
tgtttaatttata

SEQ ID NO: 15536 - DNA, 13 bp, Artificial Sequence
  Oligonucleotide for detection of SNP TSC0003441
tataaattaaaca

SEQ ID NO: 15537 - DNA, 13 bp, Artificial Sequence
  Oligonucleotide for detection of SNP TSC0003441
tgtttagtttata

SEQ ID NO: 15538 - DNA, 13 bp, Artificial Sequence
  Oligonucleotide for detection of SNP TSC0003441
tataaactaaaca

SEQ ID NO: 15539 - DNA, 13 bp, Artificial Sequence
  Oligonucleotide for detection of SNP TSC0003442
tttagaggtaaty

SEQ ID NO: 15540 - DNA, 13 bp, Artificial Sequence
  Oligonucleotide for detection of SNP TSC0003442
rattacctctaaa

SEQ ID NO: 15541 - DNA, 13 bp, Artificial Sequence
  Oligonucleotide for detection of SNP TSC0003442
tttagaagtaaty

SEQ ID NO: 15542 - DNA, 13 bp, Artificial Sequence
  Oligonucleotide for detection of SNP TSC0003442
rattacttctaaa

SEQ ID NO: 15543 - DNA, 13 bp, Artificial Sequence
  Oligonucleotide for detection of SNP TSC0003443
ttttttttgttty

SEQ ID NO: 15544 - DNA, 13 bp, Artificial Sequence
  Oligonucleotide for detection of SNP TSC0003443
raaacaaaaaaaa

SEQ ID NO: 15545 - DNA, 13 bp, Artificial Sequence
  Oligonucleotide for detection of SNP TSC0003443
ttttttgtgttty

SEQ ID NO: 15546 - DNA, 13 bp, Artificial Sequence
  Oligonucleotide for detection of SNP TSC0003443
raaacacaaaaaa

SEQ ID NO: 15547 - DNA, 13 bp, Artificial Sequence
  Oligonucleotide for detection of SNP TSC0003443
gaggtagaagaaa

SEQ ID NO: 15548 - DNA, 13 bp, Artificial Sequence
  Oligonucleotide for detection of SNP TSC0003443
tttcttctacctc

SEQ ID NO: 15549 - DNA, 13 bp, Artificial Sequence
  Oligonucleotide for detection of SNP TSC0003443
gaggtataagaaa

SEQ ID NO: 15550 - DNA, 13 bp, Artificial Sequence
  Oligonucleotide for detection of SNP TSC0003443
tttcttatacctc

SEQ ID NO: 15551 - DNA, 13 bp, Artificial Sequence
  Oligonucleotide for detection of SNP TSC0003444
aaaaatatataaa

SEQ ID NO: 15552 - DNA, 13 bp, Artificial Sequence
  Oligonucleotide for detection of SNP TSC0003444
tttatatattttt

SEQ ID NO: 15553 - DNA, 13 bp, Artificial Sequence
  Oligonucleotide for detection of SNP TSC0003444
aaaaatgtataaa

SEQ ID NO: 15554 - DNA, 13 bp, Artificial Sequence
  Oligonucleotide for detection of SNP TSC0003444
tttatacattttt

SEQ ID NO: 15555 - DNA, 13 bp, Artificial Sequence
  Oligonucleotide for detection of SNP TSC0003444
aaaaacgtataaa

SEQ ID NO: 15556 - DNA, 13 bp, Artificial Sequence
  Oligonucleotide for detection of SNP TSC0003444
tttatacgttttt

SEQ ID NO: 15557 - DNA, 13 bp, Artificial Sequence
  Oligonucleotide for detection of SNP TSC0003444
tttatatgttttt

SEQ ID NO: 15558 - DNA, 13 bp, Artificial Sequence
  Oligonucleotide for detection of SNP TSC0003444
aaaaacatataaa

SEQ ID NO: 15559 - DNA, 13 bp, Artificial Sequence
  Oligonucleotide for detection of SNP TSC0003445
tgtttaagattty

SEQ ID NO: 15560 - DNA, 13 bp, Artificial Sequence
  Oligonucleotide for detection of SNP TSC0003445
raaatcttaaaca

SEQ ID NO: 15561 - DNA, 13 bp, Artificial Sequence
  Oligonucleotide for detection of SNP TSC0003445
tgtttaggattty

SEQ ID NO: 15562 - DNA, 13 bp, Artificial Sequence
  Oligonucleotide for detection of SNP TSC0003445
raaatcctaaaca

SEQ ID NO: 15563 - DNA, 13 bp, Artificial Sequence
  Oligonucleotide for detection of SNP TSC0003449
tttgggtttttag

SEQ ID NO: 15564 - DNA, 13 bp, Artificial Sequence
  Oligonucleotide for detection of SNP TSC0003449
ctaaaaacccaaa

SEQ ID NO: 15565 - DNA, 13 bp, Artificial Sequence
  Oligonucleotide for detection of SNP TSC0003449
tttggggttttag

SEQ ID NO: 15566 - DNA, 13 bp, Artificial Sequence
  Oligonucleotide for detection of SNP TSC0003449
ctaaaaccccaaa

SEQ ID NO: 15567 - DNA, 13 bp, Artificial Sequence
  Oligonucleotide for detection of SNP TSC0003449
ttgaggatttaga

SEQ ID NO: 15568 - DNA, 13 bp, Artificial Sequence
  Oligonucleotide for detection of SNP TSC0003449
tctaaatcctcaa

SEQ ID NO: 15569 - DNA, 13 bp, Artificial Sequence
  Oligonucleotide for detection of SNP TSC0003449
ttgaggttttaga

SEQ ID NO: 15570 - DNA, 13 bp, Artificial Sequence
  Oligonucleotide for detection of SNP TSC0003449
tctaaaacctcaa

SEQ ID NO: 15571 - DNA, 13 bp, Artificial Sequence
  Oligonucleotide for detection of SNP TSC0003450
ggtgttagttaty

SEQ ID NO: 15572 - DNA, 13 bp, Artificial Sequence
  Oligonucleotide for detection of SNP TSC0003450
rataactaacacc

SEQ ID NO: 15573 - DNA, 13 bp, Artificial Sequence
  Oligonucleotide for detection of SNP TSC0003450
ggtgtttgttaty

SEQ ID NO: 15574 - DNA, 13 bp, Artificial Sequence
  Oligonucleotide for detection of SNP TSC0003450
rataacaaacacc

SEQ ID NO: 15575 - DNA, 13 bp, Artificial Sequence
  Oligonucleotide for detection of SNP TSC0003450
ggcgttagttaty

SEQ ID NO: 15576 - DNA, 13 bp, Artificial Sequence
  Oligonucleotide for detection of SNP TSC0003450
rataactaacgcc

SEQ ID NO: 15577 - DNA, 13 bp, Artificial Sequence
  Oligonucleotide for detection of SNP TSC0003450
ggcgtttgttaty

SEQ ID NO: 15578 - DNA, 13 bp, Artificial Sequence
  Oligonucleotide for detection of SNP TSC0003450
rataacaaacgcc

SEQ ID NO: 15579 - DNA, 13 bp, Artificial Sequence
  Oligonucleotide for detection of SNP TSC0003450
ggtgttcgttaty

SEQ ID NO: 15580 - DNA, 13 bp, Artificial Sequence
  Oligonucleotide for detection of SNP TSC0003450
rataacgaacacc

SEQ ID NO: 15581 - DNA, 13 bp, Artificial Sequence
  Oligonucleotide for detection of SNP TSC0003450
ggcgttcgttaty

SEQ ID NO: 15582 - DNA, 13 bp, Artificial Sequence
  Oligonucleotide for detection of SNP TSC0003450
rataacgaacgcc

SEQ ID NO: 15583 - DNA, 13 bp, Artificial Sequence
  Oligonucleotide for detection of SNP TSC0003450
ggtggttggtgty

SEQ ID NO: 15584 - DNA, 13 bp, Artificial Sequence
  Oligonucleotide for detection of SNP TSC0003450
racaccaaccacc

SEQ ID NO: 15585 - DNA, 13 bp, Artificial Sequence
  Oligonucleotide for detection of SNP TSC0003450
ggtggtgggtgty

SEQ ID NO: 15586 - DNA, 13 bp, Artificial Sequence
  Oligonucleotide for detection of SNP TSC0003450
racacccaccacc

SEQ ID NO: 15587 - DNA, 13 bp, Artificial Sequence
  Oligonucleotide for detection of SNP TSC0003450
ggtggttggcgty

SEQ ID NO: 15588 - DNA, 13 bp, Artificial Sequence
  Oligonucleotide for detection of SNP TSC0003450
racgccaaccacc

SEQ ID NO: 15589 - DNA, 13 bp, Artificial Sequence
  Oligonucleotide for detection of SNP TSC0003450
ggtggcgggtgty

SEQ ID NO: 15590 - DNA, 13 bp, Artificial Sequence
  Oligonucleotide for detection of SNP TSC0003450
racacccgccacc

SEQ ID NO: 15591 - DNA, 13 bp, Artificial Sequence
  Oligonucleotide for detection of SNP TSC0003450
ggtggtgggcgty

SEQ ID NO: 15592 - DNA, 13 bp, Artificial Sequence
  Oligonucleotide for detection of SNP TSC0003450
racgcccaccacc

SEQ ID NO: 15593 - DNA, 13 bp, Artificial Sequence
  Oligonucleotide for detection of SNP TSC0003450
ggtggcgggcgty

SEQ ID NO: 15594 - DNA, 13 bp, Artificial Sequence
  Oligonucleotide for detection of SNP TSC0003450
racgcccgccacc

SEQ ID NO: 15595 - DNA, 13 bp, Artificial Sequence
  Oligonucleotide for detection of SNP TSC0003451
gtatatatttgtt

SEQ ID NO: 15596 - DNA, 13 bp, Artificial Sequence
  Oligonucleotide for detection of SNP TSC0003451
aacaaatatatac

SEQ ID NO: 15597 - DNA, 13 bp, Artificial Sequence
  Oligonucleotide for detection of SNP TSC0003451
gtatatgtttgtt

SEQ ID NO: 15598 - DNA, 13 bp, Artificial Sequence
  Oligonucleotide for detection of SNP TSC0003451
aacaaacatatac

SEQ ID NO: 15599 - DNA, 13 bp, Artificial Sequence
  Oligonucleotide for detection of SNP TSC0003451
gtatacgtttgtt

SEQ ID NO: 15600 - DNA, 13 bp, Artificial Sequence
  Oligonucleotide for detection of SNP TSC0003451
aacaaacgtatac

SEQ ID NO: 15601 - DNA, 13 bp, Artificial Sequence
  Oligonucleotide for detection of SNP TSC0003451
aataggtgtgtgy

SEQ ID NO: 15602 - DNA, 13 bp, Artificial Sequence
  Oligonucleotide for detection of SNP TSC0003451
rcacacacctatt

SEQ ID NO: 15603 - DNA, 13 bp, Artificial Sequence
  Oligonucleotide for detection of SNP TSC0003451
aataggcgtgtgy

SEQ ID NO: 15604 - DNA, 13 bp, Artificial Sequence
  Oligonucleotide for detection of SNP TSC0003451
rcacacgcctatt

SEQ ID NO: 15605 - DNA, 13 bp, Artificial Sequence
  Oligonucleotide for detection of SNP TSC0003452
taatgtgagtaaa

SEQ ID NO: 15606 - DNA, 13 bp, Artificial Sequence
  Oligonucleotide for detection of SNP TSC0003452
tttactcacatta

SEQ ID NO: 15607 - DNA, 13 bp, Artificial Sequence
  Oligonucleotide for detection of SNP TSC0003452
taatgtaagtaaa

SEQ ID NO: 15608 - DNA, 13 bp, Artificial Sequence
  Oligonucleotide for detection of SNP TSC0003452
tttacttacatta

SEQ ID NO: 15609 - DNA, 13 bp, Artificial Sequence
  Oligonucleotide for detection of SNP TSC0003454
ttgtttatggtty

SEQ ID NO: 15610 - DNA, 13 bp, Artificial Sequence
  Oligonucleotide for detection of SNP TSC0003454
raaccataaacaa

SEQ ID NO: 15611 - DNA, 13 bp, Artificial Sequence
  Oligonucleotide for detection of SNP TSC0003454
ttgtttttggtty

SEQ ID NO: 15612 - DNA, 13 bp, Artificial Sequence
  Oligonucleotide for detection of SNP TSC0003454
raaccaaaaacaa

SEQ ID NO: 15613 - DNA, 13 bp, Artificial Sequence
  Oligonucleotide for detection of SNP TSC0003454
gagttatgggtaa

SEQ ID NO: 15614 - DNA, 13 bp, Artificial Sequence
  Oligonucleotide for detection of SNP TSC0003454
ttacccataactc

SEQ ID NO: 15615 - DNA, 13 bp, Artificial Sequence
  Oligonucleotide for detection of SNP TSC0003454
gagttaggggtaa

SEQ ID NO: 15616 - DNA, 13 bp, Artificial Sequence
  Oligonucleotide for detection of SNP TSC0003454
ttacccctaactc

SEQ ID NO: 15617 - DNA, 13 bp, Artificial Sequence
  Oligonucleotide for detection of SNP TSC0003455
tggtttattttaa

SEQ ID NO: 15618 - DNA, 13 bp, Artificial Sequence
  Oligonucleotide for detection of SNP TSC0003455
ttaaaataaacca

SEQ ID NO: 15619 - DNA, 13 bp, Artificial Sequence
  Oligonucleotide for detection of SNP TSC0003455
tggttcgttttaa

SEQ ID NO: 15620 - DNA, 13 bp, Artificial Sequence
  Oligonucleotide for detection of SNP TSC0003455
ttaaaacgaacca

SEQ ID NO: 15621 - DNA, 13 bp, Artificial Sequence
  Oligonucleotide for detection of SNP TSC0003455
ttaaaatgagtta

SEQ ID NO: 15622 - DNA, 13 bp, Artificial Sequence
  Oligonucleotide for detection of SNP TSC0003455
taactcattttaa

SEQ ID NO: 15623 - DNA, 13 bp, Artificial Sequence
  Oligonucleotide for detection of SNP TSC0003455
ttaaaacgagtta

SEQ ID NO: 15624 - DNA, 13 bp, Artificial Sequence
  Oligonucleotide for detection of SNP TSC0003455
taactcgttttaa

SEQ ID NO: 15625 - DNA, 13 bp, Artificial Sequence
  Oligonucleotide for detection of SNP TSC0003456
agataaataagty

SEQ ID NO: 15626 - DNA, 13 bp, Artificial Sequence
  Oligonucleotide for detection of SNP TSC0003456
racttatttatct

SEQ ID NO: 15627 - DNA, 13 bp, Artificial Sequence
  Oligonucleotide for detection of SNP TSC0003456
agataagtaagty

SEQ ID NO: 15628 - DNA, 13 bp, Artificial Sequence
  Oligonucleotide for detection of SNP TSC0003456
racttacttatct

SEQ ID NO: 15629 - DNA, 13 bp, Artificial Sequence
  Oligonucleotide for detection of SNP TSC0003459
aagaatatattgt

SEQ ID NO: 15630 - DNA, 13 bp, Artificial Sequence
  Oligonucleotide for detection of SNP TSC0003459
acaatatattctt

SEQ ID NO: 15631 - DNA, 13 bp, Artificial Sequence
  Oligonucleotide for detection of SNP TSC0003459
aagaatgtattgt

SEQ ID NO: 15632 - DNA, 13 bp, Artificial Sequence
  Oligonucleotide for detection of SNP TSC0003459
acaatacattctt

SEQ ID NO: 15633 - DNA, 13 bp, Artificial Sequence
  Oligonucleotide for detection of SNP TSC0003459
aagaacgtattgt

SEQ ID NO: 15634 - DNA, 13 bp, Artificial Sequence
  Oligonucleotide for detection of SNP TSC0003459
acaatacgttctt

SEQ ID NO: 15635 - DNA, 13 bp, Artificial Sequence
  Oligonucleotide for detection of SNP TSC0003459
atagtgtgttttt

SEQ ID NO: 15636 - DNA, 13 bp, Artificial Sequence
  Oligonucleotide for detection of SNP TSC0003459
aaaaacacactat

SEQ ID NO: 15637 - DNA, 13 bp, Artificial Sequence
  Oligonucleotide for detection of SNP TSC0003459
atagtgcgttttt

SEQ ID NO: 15638 - DNA, 13 bp, Artificial Sequence
  Oligonucleotide for detection of SNP TSC0003459
aaaaacgcactat

SEQ ID NO: 15639 - DNA, 13 bp, Artificial Sequence
  Oligonucleotide for detection of SNP TSC0003460
tgaaatgtagtgy

SEQ ID NO: 15640 - DNA, 13 bp, Artificial Sequence
  Oligonucleotide for detection of SNP TSC0003460
rcactacatttca

SEQ ID NO: 15641 - DNA, 13 bp, Artificial Sequence
  Oligonucleotide for detection of SNP TSC0003460
tgaaatatagtgy

SEQ ID NO: 15642 - DNA, 13 bp, Artificial Sequence
  Oligonucleotide for detection of SNP TSC0003460
rcactatatttca

SEQ ID NO: 15643 - DNA, 13 bp, Artificial Sequence
  Oligonucleotide for detection of SNP TSC0003461
aaaggtataatta

SEQ ID NO: 15644 - DNA, 13 bp, Artificial Sequence
  Oligonucleotide for detection of SNP TSC0003461
taattataccttt

SEQ ID NO: 15645 - DNA, 13 bp, Artificial Sequence
  Oligonucleotide for detection of SNP TSC0003461
aaaggtgtaatta

SEQ ID NO: 15646 - DNA, 13 bp, Artificial Sequence
  Oligonucleotide for detection of SNP TSC0003461
taattacaccttt

SEQ ID NO: 15647 - DNA, 13 bp, Artificial Sequence
  Oligonucleotide for detection of SNP TSC0003461
aaaggcgtaatta

SEQ ID NO: 15648 - DNA, 13 bp, Artificial Sequence
  Oligonucleotide for detection of SNP TSC0003461
taattacgccttt

SEQ ID NO: 15649 - DNA, 13 bp, Artificial Sequence
  Oligonucleotide for detection of SNP TSC0003461
taattatgttttt

SEQ ID NO: 15650 - DNA, 13 bp, Artificial Sequence
  Oligonucleotide for detection of SNP TSC0003461
aaaaacataatta

SEQ ID NO: 15651 - DNA, 13 bp, Artificial Sequence
  Oligonucleotide for detection of SNP TSC0003461
taattacgttttt

SEQ ID NO: 15652 - DNA, 13 bp, Artificial Sequence
  Oligonucleotide for detection of SNP TSC0003461
aaaaacgtaatta

SEQ ID NO: 15653 - DNA, 13 bp, Artificial Sequence
  Oligonucleotide for detection of SNP TSC0003462
tagttagtagtta

SEQ ID NO: 15654 - DNA, 13 bp, Artificial Sequence
  Oligonucleotide for detection of SNP TSC0003462
taactactaacta

SEQ ID NO: 15655 - DNA, 13 bp, Artificial Sequence
  Oligonucleotide for detection of SNP TSC0003462
tagttaatagtta

SEQ ID NO: 15656 - DNA, 13 bp, Artificial Sequence
  Oligonucleotide for detection of SNP TSC0003462
taactattaacta

SEQ ID NO: 15657 - DNA, 13 bp, Artificial Sequence
  Oligonucleotide for detection of SNP TSC0003463
ggaagtgttttta

SEQ ID NO: 15658 - DNA, 13 bp, Artificial Sequence
  Oligonucleotide for detection of SNP TSC0003463
taaaaacacttcc

SEQ ID NO: 15659 - DNA, 13 bp, Artificial Sequence
  Oligonucleotide for detection of SNP TSC0003463
ggaagtattttta

SEQ ID NO: 15660 - DNA, 13 bp, Artificial Sequence
  Oligonucleotide for detection of SNP TSC0003463
taaaaatacttcc

SEQ ID NO: 15661 - DNA, 13 bp, Artificial Sequence
  Oligonucleotide for detection of SNP TSC0003464
tttagtgtttttt

SEQ ID NO: 15662 - DNA, 13 bp, Artificial Sequence
  Oligonucleotide for detection of SNP TSC0003464
aaaaaacactaaa

SEQ ID NO: 15663 - DNA, 13 bp, Artificial Sequence
  Oligonucleotide for detection of SNP TSC0003464
tttagcgtttttt

SEQ ID NO: 15664 - DNA, 13 bp, Artificial Sequence
  Oligonucleotide for detection of SNP TSC0003464
aaaaaacgctaaa

SEQ ID NO: 15665 - DNA, 13 bp, Artificial Sequence
  Oligonucleotide for detection of SNP TSC0003464
aagaaatgttgga

SEQ ID NO: 15666 - DNA, 13 bp, Artificial Sequence
  Oligonucleotide for detection of SNP TSC0003464
tccaacatttctt

SEQ ID NO: 15667 - DNA, 13 bp, Artificial Sequence
  Oligonucleotide for detection of SNP TSC0003464
aagaaacgttgga

SEQ ID NO: 15668 - DNA, 13 bp, Artificial Sequence
  Oligonucleotide for detection of SNP TSC0003464
tccaacgtttctt

SEQ ID NO: 15669 - DNA, 13 bp, Artificial Sequence
  Oligonucleotide for detection of SNP TSC0003465
ttagaagtgaatt

SEQ ID NO: 15670 - DNA, 13 bp, Artificial Sequence
  Oligonucleotide for detection of SNP TSC0003465
aattcacttctaa

SEQ ID NO: 15671 - DNA, 13 bp, Artificial Sequence
  Oligonucleotide for detection of SNP TSC0003465
ttagaaatgaatt

SEQ ID NO: 15672 - DNA, 13 bp, Artificial Sequence
  Oligonucleotide for detection of SNP TSC0003465
aattcatttctaa

SEQ ID NO: 15673 - DNA, 13 bp, Artificial Sequence
  Oligonucleotide for detection of SNP TSC0003466
attataggtatga

SEQ ID NO: 15674 - DNA, 13 bp, Artificial Sequence
  Oligonucleotide for detection of SNP TSC0003466
tcatacctataat

SEQ ID NO: 15675 - DNA, 13 bp, Artificial Sequence
  Oligonucleotide for detection of SNP TSC0003466
attataagtatga

SEQ ID NO: 15676 - DNA, 13 bp, Artificial Sequence
  Oligonucleotide for detection of SNP TSC0003466
tcatacttataat

SEQ ID NO: 15677 - DNA, 13 bp, Artificial Sequence
  Oligonucleotide for detection of SNP TSC0003467
agatttagtggag

SEQ ID NO: 15678 - DNA, 13 bp, Artificial Sequence
  Oligonucleotide for detection of SNP TSC0003467
ctccactaaatct

SEQ ID NO: 15679 - DNA, 13 bp, Artificial Sequence
  Oligonucleotide for detection of SNP TSC0003467
agatttggtggag

SEQ ID NO: 15680 - DNA, 13 bp, Artificial Sequence
  Oligonucleotide for detection of SNP TSC0003467
ctccaccaaatct

SEQ ID NO: 15681 - DNA, 13 bp, Artificial Sequence
  Oligonucleotide for detection of SNP TSC0003467
agattcggtggag

SEQ ID NO: 15682 - DNA, 13 bp, Artificial Sequence
  Oligonucleotide for detection of SNP TSC0003467
ctccaccgaatct

SEQ ID NO: 15683 - DNA, 13 bp, Artificial Sequence
  Oligonucleotide for detection of SNP TSC0003467
ttttattgggttt

SEQ ID NO: 15684 - DNA, 13 bp, Artificial Sequence
  Oligonucleotide for detection of SNP TSC0003467
aaacccaataaaa

SEQ ID NO: 15685 - DNA, 13 bp, Artificial Sequence
  Oligonucleotide for detection of SNP TSC0003467
ttttatcgggttt

SEQ ID NO: 15686 - DNA, 13 bp, Artificial Sequence
  Oligonucleotide for detection of SNP TSC0003467
aaacccgataaaa

SEQ ID NO: 15687 - DNA, 13 bp, Artificial Sequence
  Oligonucleotide for detection of SNP TSC0003468
aatgttgttatta

SEQ ID NO: 15688 - DNA, 13 bp, Artificial Sequence
  Oligonucleotide for detection of SNP TSC0003468
taataacaacatt

SEQ ID NO: 15689 - DNA, 13 bp, Artificial Sequence
  Oligonucleotide for detection of SNP TSC0003468
aatgttattatta

SEQ ID NO: 15690 - DNA, 13 bp, Artificial Sequence
  Oligonucleotide for detection of SNP TSC0003468
taataataacatt

SEQ ID NO: 15691 - DNA, 13 bp, Artificial Sequence
  Oligonucleotide for detection of SNP TSC0003472
tatataataaatt

SEQ ID NO: 15692 - DNA, 13 bp, Artificial Sequence
  Oligonucleotide for detection of SNP TSC0003472
aatttattatata

SEQ ID NO: 15693 - DNA, 13 bp, Artificial Sequence
  Oligonucleotide for detection of SNP TSC0003472
tatatagtaaatt

SEQ ID NO: 15694 - DNA, 13 bp, Artificial Sequence
  Oligonucleotide for detection of SNP TSC0003472
aatttactatata

SEQ ID NO: 15695 - DNA, 13 bp, Artificial Sequence
  Oligonucleotide for detection of SNP TSC0003473
ggtttgatttgga

SEQ ID NO: 15696 - DNA, 13 bp, Artificial Sequence
  Oligonucleotide for detection of SNP TSC0003473
tccaaatcaaacc

SEQ ID NO: 15697 - DNA, 13 bp, Artificial Sequence
  Oligonucleotide for detection of SNP TSC0003473
ggtttggtttgga

SEQ ID NO: 15698 - DNA, 13 bp, Artificial Sequence
  Oligonucleotide for detection of SNP TSC0003473
tccaaaccaaacc

SEQ ID NO: 15699 - DNA, 13 bp, Artificial Sequence
  Oligonucleotide for detection of SNP TSC0003474
aagtaggagaatt

SEQ ID NO: 15700 - DNA, 13 bp, Artificial Sequence
  Oligonucleotide for detection of SNP TSC0003474
aattctcctactt

SEQ ID NO: 15701 - DNA, 13 bp, Artificial Sequence
  Oligonucleotide for detection of SNP TSC0003474
aagtagaagaatt

SEQ ID NO: 15702 - DNA, 13 bp, Artificial Sequence
  Oligonucleotide for detection of SNP TSC0003474
aattcttctactt

SEQ ID NO: 15703 - DNA, 13 bp, Artificial Sequence
  Oligonucleotide for detection of SNP TSC0003475
aattttaaagtaa

SEQ ID NO: 15704 - DNA, 13 bp, Artificial Sequence
  Oligonucleotide for detection of SNP TSC0003475
ttactttaaaatt

SEQ ID NO: 15705 - DNA, 13 bp, Artificial Sequence
  Oligonucleotide for detection of SNP TSC0003475
aattttgaagtaa

SEQ ID NO: 15706 - DNA, 13 bp, Artificial Sequence
  Oligonucleotide for detection of SNP TSC0003475
ttacttcaaaatt

SEQ ID NO: 15707 - DNA, 13 bp, Artificial Sequence
  Oligonucleotide for detection of SNP TSC0003475
aatttcgaagtaa

SEQ ID NO: 15708 - DNA, 13 bp, Artificial Sequence
  Oligonucleotide for detection of SNP TSC0003475
ttacttcgaaatt

SEQ ID NO: 15709 - DNA, 13 bp, Artificial Sequence
  Oligonucleotide for detection of SNP TSC0003475
ttgttttgggatt

SEQ ID NO: 15710 - DNA, 13 bp, Artificial Sequence
  Oligonucleotide for detection of SNP TSC0003475
aatcccaaaacaa

SEQ ID NO: 15711 - DNA, 13 bp, Artificial Sequence
  Oligonucleotide for detection of SNP TSC0003475
ttgtttcgggatt

SEQ ID NO: 15712 - DNA, 13 bp, Artificial Sequence
  Oligonucleotide for detection of SNP TSC0003475
aatcccgaaacaa

SEQ ID NO: 15713 - DNA, 13 bp, Artificial Sequence
  Oligonucleotide for detection of SNP TSC0003477
tatattatagaaa

SEQ ID NO: 15714 - DNA, 13 bp, Artificial Sequence
  Oligonucleotide for detection of SNP TSC0003477
tttctataatata

SEQ ID NO: 15715 - DNA, 13 bp, Artificial Sequence
  Oligonucleotide for detection of SNP TSC0003477
tatattgtagaaa

SEQ ID NO: 15716 - DNA, 13 bp, Artificial Sequence
  Oligonucleotide for detection of SNP TSC0003477
tttctacaatata

SEQ ID NO: 15717 - DNA, 13 bp, Artificial Sequence
  Oligonucleotide for detection of SNP TSC0003478
agtgtaataggga

SEQ ID NO: 15718 - DNA, 13 bp, Artificial Sequence
  Oligonucleotide for detection of SNP TSC0003478
tccctattacact

SEQ ID NO: 15719 - DNA, 13 bp, Artificial Sequence
  Oligonucleotide for detection of SNP TSC0003478
agtgtagtaggga

SEQ ID NO: 15720 - DNA, 13 bp, Artificial Sequence
  Oligonucleotide for detection of SNP TSC0003478
tccctactacact

SEQ ID NO: 15721 - DNA, 13 bp, Artificial Sequence
  Oligonucleotide for detection of SNP TSC0003479
tgaaattaggtta

SEQ ID NO: 15722 - DNA, 13 bp, Artificial Sequence
  Oligonucleotide for detection of SNP TSC0003479
taacctaatttca

SEQ ID NO: 15723 - DNA, 13 bp, Artificial Sequence
  Oligonucleotide for detection of SNP TSC0003479
tgaaatgaggtta

SEQ ID NO: 15724 - DNA, 13 bp, Artificial Sequence
  Oligonucleotide for detection of SNP TSC0003479
taacctcatttca

SEQ ID NO: 15725 - DNA, 13 bp, Artificial Sequence
  Oligonucleotide for detection of SNP TSC0003479
tgaaacgaggtta

SEQ ID NO: 15726 - DNA, 13 bp, Artificial Sequence
  Oligonucleotide for detection of SNP TSC0003479
taacctcgtttca

SEQ ID NO: 15727 - DNA, 13 bp, Artificial Sequence
  Oligonucleotide for detection of SNP TSC0003479
tgatttagtttta

SEQ ID NO: 15728 - DNA, 13 bp, Artificial Sequence
  Oligonucleotide for detection of SNP TSC0003479
taaaactaaatca

SEQ ID NO: 15729 - DNA, 13 bp, Artificial Sequence
  Oligonucleotide for detection of SNP TSC0003479
tgattttgtttta

SEQ ID NO: 15730 - DNA, 13 bp, Artificial Sequence
  Oligonucleotide for detection of SNP TSC0003479
taaaacaaaatca

SEQ ID NO: 15731 - DNA, 13 bp, Artificial Sequence
  Oligonucleotide for detection of SNP TSC0003479
tgatttcgtttta

SEQ ID NO: 15732 - DNA, 13 bp, Artificial Sequence
  Oligonucleotide for detection of SNP TSC0003479
taaaacgaaatca

SEQ ID NO: 15733 - DNA, 13 bp, Artificial Sequence
  Oligonucleotide for detection of SNP TSC0003480
ataagtatggtgg

SEQ ID NO: 15734 - DNA, 13 bp, Artificial Sequence
  Oligonucleotide for detection of SNP TSC0003480
ccaccatacttat

SEQ ID NO: 15735 - DNA, 13 bp, Artificial Sequence
  Oligonucleotide for detection of SNP TSC0003480
ataagtttggtgg

SEQ ID NO: 15736 - DNA, 13 bp, Artificial Sequence
  Oligonucleotide for detection of SNP TSC0003480
ccaccaaacttat

SEQ ID NO: 15737 - DNA, 13 bp, Artificial Sequence
  Oligonucleotide for detection of SNP TSC0003480
ttattatgtttgt

SEQ ID NO: 15738 - DNA, 13 bp, Artificial Sequence
  Oligonucleotide for detection of SNP TSC0003480
acaaacataataa

SEQ ID NO: 15739 - DNA, 13 bp, Artificial Sequence
  Oligonucleotide for detection of SNP TSC0003480
ttattaggtttgt

SEQ ID NO: 15740 - DNA, 13 bp, Artificial Sequence
  Oligonucleotide for detection of SNP TSC0003480
acaaacctaataa

SEQ ID NO: 15741 - DNA, 13 bp, Artificial Sequence
  Oligonucleotide for detection of SNP TSC0003481
tttatggatggaa

SEQ ID NO: 15742 - DNA, 13 bp, Artificial Sequence
  Oligonucleotide for detection of SNP TSC0003481
ttccatccataaa

SEQ ID NO: 15743 - DNA, 13 bp, Artificial Sequence
  Oligonucleotide for detection of SNP TSC0003481
tttatgaatggaa

SEQ ID NO: 15744 - DNA, 13 bp, Artificial Sequence
  Oligonucleotide for detection of SNP TSC0003481
ttccattcataaa

SEQ ID NO: 15745 - DNA, 13 bp, Artificial Sequence
  Oligonucleotide for detection of SNP TSC0003484
tggagatggggtt

SEQ ID NO: 15746 - DNA, 13 bp, Artificial Sequence
  Oligonucleotide for detection of SNP TSC0003484
aaccccatctcca

SEQ ID NO: 15747 - DNA, 13 bp, Artificial Sequence
  Oligonucleotide for detection of SNP TSC0003484
tggagacggggtt

SEQ ID NO: 15748 - DNA, 13 bp, Artificial Sequence
  Oligonucleotide for detection of SNP TSC0003484
aaccccgtctcca

SEQ ID NO: 15749 - DNA, 13 bp, Artificial Sequence
  Oligonucleotide for detection of SNP TSC0003485
agtttttttatag

SEQ ID NO: 15750 - DNA, 13 bp, Artificial Sequence
  Oligonucleotide for detection of SNP TSC0003485
ctataaaaaaact

SEQ ID NO: 15751 - DNA, 13 bp, Artificial Sequence
  Oligonucleotide for detection of SNP TSC0003485
agttttgttatag

SEQ ID NO: 15752 - DNA, 13 bp, Artificial Sequence
  Oligonucleotide for detection of SNP TSC0003485
ctataacaaaact

SEQ ID NO: 15753 - DNA, 13 bp, Artificial Sequence
  Oligonucleotide for detection of SNP TSC0003485
agtttcgttatag

SEQ ID NO: 15754 - DNA, 13 bp, Artificial Sequence
  Oligonucleotide for detection of SNP TSC0003485
ctataacgaaact

SEQ ID NO: 15755 - DNA, 13 bp, Artificial Sequence
  Oligonucleotide for detection of SNP TSC0003485
ttatggaggaatt

SEQ ID NO: 15756 - DNA, 13 bp, Artificial Sequence
  Oligonucleotide for detection of SNP TSC0003485
aattcctccataa

SEQ ID NO: 15757 - DNA, 13 bp, Artificial Sequence
  Oligonucleotide for detection of SNP TSC0003485
ttatggtggaatt

SEQ ID NO: 15758 - DNA, 13 bp, Artificial Sequence
  Oligonucleotide for detection of SNP TSC0003485
aattccaccataa

SEQ ID NO: 15759 - DNA, 13 bp, Artificial Sequence
  Oligonucleotide for detection of SNP TSC0003485
ttatggcggaatt

SEQ ID NO: 15760 - DNA, 13 bp, Artificial Sequence
  Oligonucleotide for detection of SNP TSC0003485
aattccgccataa

SEQ ID NO: 15761 - DNA, 13 bp, Artificial Sequence
  Oligonucleotide for detection of SNP TSC0003486
aggttttgagaaa

SEQ ID NO: 15762 - DNA, 13 bp, Artificial Sequence
  Oligonucleotide for detection of SNP TSC0003486
tttctcaaaacct

SEQ ID NO: 15763 - DNA, 13 bp, Artificial Sequence
  Oligonucleotide for detection of SNP TSC0003486
aggtttcgagaaa

SEQ ID NO: 15764 - DNA, 13 bp, Artificial Sequence
  Oligonucleotide for detection of SNP TSC0003486
tttctcgaaacct

SEQ ID NO: 15765 - DNA, 13 bp, Artificial Sequence
  Oligonucleotide for detection of SNP TSC0003487
ttgttttttaggy

SEQ ID NO: 15766 - DNA, 13 bp, Artificial Sequence
  Oligonucleotide for detection of SNP TSC0003487
rcctaaaaaacaa

SEQ ID NO: 15767 - DNA, 13 bp, Artificial Sequence
  Oligonucleotide for detection of SNP TSC0003487
ttgtttgttaggy

SEQ ID NO: 15768 - DNA, 13 bp, Artificial Sequence
  Oligonucleotide for detection of SNP TSC0003487
rcctaacaaacaa

SEQ ID NO: 15769 - DNA, 13 bp, Artificial Sequence
  Oligonucleotide for detection of SNP TSC0003487
gtttgggaggtag

SEQ ID NO: 15770 - DNA, 13 bp, Artificial Sequence
  Oligonucleotide for detection of SNP TSC0003487
ctacctcccaaac

SEQ ID NO: 15771 - DNA, 13 bp, Artificial Sequence
  Oligonucleotide for detection of SNP TSC0003487
gtttggtaggtag

SEQ ID NO: 15772 - DNA, 13 bp, Artificial Sequence
  Oligonucleotide for detection of SNP TSC0003487
ctacctaccaaac

SEQ ID NO: 15773 - DNA, 13 bp, Artificial Sequence
  Oligonucleotide for detection of SNP TSC0003488
gtgtttgaggtta

SEQ ID NO: 15774 - DNA, 13 bp, Artificial Sequence
  Oligonucleotide for detection of SNP TSC0003488
taacctcaaacac

SEQ ID NO: 15775 - DNA, 13 bp, Artificial Sequence
  Oligonucleotide for detection of SNP TSC0003488
gtgtttaaggtta

SEQ ID NO: 15776 - DNA, 13 bp, Artificial Sequence
  Oligonucleotide for detection of SNP TSC0003488
taaccttaaacac

SEQ ID NO: 15777 - DNA, 13 bp, Artificial Sequence
  Oligonucleotide for detection of SNP TSC0003489
gagggtagagaat

SEQ ID NO: 15778 - DNA, 13 bp, Artificial Sequence
  Oligonucleotide for detection of SNP TSC0003489
attctctaccctc

SEQ ID NO: 15779 - DNA, 13 bp, Artificial Sequence
  Oligonucleotide for detection of SNP TSC0003489
gagggtggagaat

SEQ ID NO: 15780 - DNA, 13 bp, Artificial Sequence
  Oligonucleotide for detection of SNP TSC0003489
attctccaccctc

SEQ ID NO: 15781 - DNA, 13 bp, Artificial Sequence
  Oligonucleotide for detection of SNP TSC0003490
ttgttatgtttgg

SEQ ID NO: 15782 - DNA, 13 bp, Artificial Sequence
  Oligonucleotide for detection of SNP TSC0003490
ccaaacataacaa

SEQ ID NO: 15783 - DNA, 13 bp, Artificial Sequence
  Oligonucleotide for detection of SNP TSC0003490
ttgttacgtttgg

SEQ ID NO: 15784 - DNA, 13 bp, Artificial Sequence
  Oligonucleotide for detection of SNP TSC0003490
ccaaacgtaacaa

SEQ ID NO: 15785 - DNA, 13 bp, Artificial Sequence
  Oligonucleotide for detection of SNP TSC0003490
ttgttatgttcgg

SEQ ID NO: 15786 - DNA, 13 bp, Artificial Sequence
  Oligonucleotide for detection of SNP TSC0003490
ccgaacataacaa

SEQ ID NO: 15787 - DNA, 13 bp, Artificial Sequence
  Oligonucleotide for detection of SNP TSC0003490
ttgttacgttcgg

SEQ ID NO: 15788 - DNA, 13 bp, Artificial Sequence
  Oligonucleotide for detection of SNP TSC0003490
ccgaacgtaacaa

SEQ ID NO: 15789 - DNA, 13 bp, Artificial Sequence
  Oligonucleotide for detection of SNP TSC0003490
ttgggtgtggtag

SEQ ID NO: 15790 - DNA, 13 bp, Artificial Sequence
  Oligonucleotide for detection of SNP TSC0003490
ctaccacacccaa

SEQ ID NO: 15791 - DNA, 13 bp, Artificial Sequence
  Oligonucleotide for detection of SNP TSC0003490
ttgggtatggtag

SEQ ID NO: 15792 - DNA, 13 bp, Artificial Sequence
  Oligonucleotide for detection of SNP TSC0003490
ctaccatacccaa

SEQ ID NO: 15793 - DNA, 13 bp, Artificial Sequence
  Oligonucleotide for detection of SNP TSC0003490
tcgggtgtggtag

SEQ ID NO: 15794 - DNA, 13 bp, Artificial Sequence
  Oligonucleotide for detection of SNP TSC0003490
ctaccacacccga

SEQ ID NO: 15795 - DNA, 13 bp, Artificial Sequence
  Oligonucleotide for detection of SNP TSC0003490
tcgggtatggtag

SEQ ID NO: 15796 - DNA, 13 bp, Artificial Sequence
  Oligonucleotide for detection of SNP TSC0003490
ctaccatacccga

SEQ ID NO: 15797 - DNA, 13 bp, Artificial Sequence
  Oligonucleotide for detection of SNP TSC0003490
ttgggcgtggtag

SEQ ID NO: 15798 - DNA, 13 bp, Artificial Sequence
  Oligonucleotide for detection of SNP TSC0003490
ctaccacgcccaa

SEQ ID NO: 15799 - DNA, 13 bp, Artificial Sequence
  Oligonucleotide for detection of SNP TSC0003490
tcgggcgtggtag

SEQ ID NO: 15800 - DNA, 13 bp, Artificial Sequence
  Oligonucleotide for detection of SNP TSC0003490
ctaccacgcccga

SEQ ID NO: 15801 - DNA, 13 bp, Artificial Sequence
  Oligonucleotide for detection of SNP TSC0003491
gaatgatgtttta

SEQ ID NO: 15802 - DNA, 13 bp, Artificial Sequence
  Oligonucleotide for detection of SNP TSC0003491
taaaacatcattc

SEQ ID NO: 15803 - DNA, 13 bp, Artificial Sequence
  Oligonucleotide for detection of SNP TSC0003491
gaatgacgtttta

SEQ ID NO: 15804 - DNA, 13 bp, Artificial Sequence
  Oligonucleotide for detection of SNP TSC0003491
taaaacgtcattc

SEQ ID NO: 15805 - DNA, 13 bp, Artificial Sequence
  Oligonucleotide for detection of SNP TSC0003491
tgaagtgttatty

SEQ ID NO: 15806 - DNA, 13 bp, Artificial Sequence
  Oligonucleotide for detection of SNP TSC0003491
raataacacttca

SEQ ID NO: 15807 - DNA, 13 bp, Artificial Sequence
  Oligonucleotide for detection of SNP TSC0003491
tgaagtattatty

SEQ ID NO: 15808 - DNA, 13 bp, Artificial Sequence
  Oligonucleotide for detection of SNP TSC0003491
raataatacttca

SEQ ID NO: 15809 - DNA, 13 bp, Artificial Sequence
  Oligonucleotide for detection of SNP TSC0003491
tgaagcgttatty

SEQ ID NO: 15810 - DNA, 13 bp, Artificial Sequence
  Oligonucleotide for detection of SNP TSC0003491
raataacgcttca

SEQ ID NO: 15811 - DNA, 13 bp, Artificial Sequence
  Oligonucleotide for detection of SNP TSC0003492
ttttatgtggaag

SEQ ID NO: 15812 - DNA, 13 bp, Artificial Sequence
  Oligonucleotide for detection of SNP TSC0003492
cttccacataaaa

SEQ ID NO: 15813 - DNA, 13 bp, Artificial Sequence
  Oligonucleotide for detection of SNP TSC0003492
ttttatatggaag

SEQ ID NO: 15814 - DNA, 13 bp, Artificial Sequence
  Oligonucleotide for detection of SNP TSC0003492
cttccatataaaa

SEQ ID NO: 15815 - DNA, 13 bp, Artificial Sequence
  Oligonucleotide for detection of SNP TSC0003493
tattattttaggy

SEQ ID NO: 15816 - DNA, 13 bp, Artificial Sequence
  Oligonucleotide for detection of SNP TSC0003493
rcctaaaataata

SEQ ID NO: 15817 - DNA, 13 bp, Artificial Sequence
  Oligonucleotide for detection of SNP TSC0003493
tattatgttaggy

SEQ ID NO: 15818 - DNA, 13 bp, Artificial Sequence
  Oligonucleotide for detection of SNP TSC0003493
rcctaacataata

SEQ ID NO: 15819 - DNA, 13 bp, Artificial Sequence
  Oligonucleotide for detection of SNP TSC0003493
tattacgttaggy

SEQ ID NO: 15820 - DNA, 13 bp, Artificial Sequence
  Oligonucleotide for detection of SNP TSC0003493
rcctaacgtaata

SEQ ID NO: 15821 - DNA, 13 bp, Artificial Sequence
  Oligonucleotide for detection of SNP TSC0003493
gtttagggtggta

SEQ ID NO: 15822 - DNA, 13 bp, Artificial Sequence
  Oligonucleotide for detection of SNP TSC0003493
taccaccctaaac

SEQ ID NO: 15823 - DNA, 13 bp, Artificial Sequence
  Oligonucleotide for detection of SNP TSC0003493
gtttagtgtggta

SEQ ID NO: 15824 - DNA, 13 bp, Artificial Sequence
  Oligonucleotide for detection of SNP TSC0003493
taccacactaaac

SEQ ID NO: 15825 - DNA, 13 bp, Artificial Sequence
  Oligonucleotide for detection of SNP TSC0003493
gtttagcgtggta

SEQ ID NO: 15826 - DNA, 13 bp, Artificial Sequence
  Oligonucleotide for detection of SNP TSC0003493
taccacgctaaac

SEQ ID NO: 15827 - DNA, 13 bp, Artificial Sequence
  Oligonucleotide for detection of SNP TSC0003494
taaagtatgtata

SEQ ID NO: 15828 - DNA, 13 bp, Artificial Sequence
  Oligonucleotide for detection of SNP TSC0003494
tatacatacttta

SEQ ID NO: 15829 - DNA, 13 bp, Artificial Sequence
  Oligonucleotide for detection of SNP TSC0003494
taaagtgtgtata

SEQ ID NO: 15830 - DNA, 13 bp, Artificial Sequence
  Oligonucleotide for detection of SNP TSC0003494
tatacacacttta

SEQ ID NO: 15831 - DNA, 13 bp, Artificial Sequence
  Oligonucleotide for detection of SNP TSC0003494
taaagtacgtata

SEQ ID NO: 15832 - DNA, 13 bp, Artificial Sequence
  Oligonucleotide for detection of SNP TSC0003494
tatacgtacttta

SEQ ID NO: 15833 - DNA, 13 bp, Artificial Sequence
  Oligonucleotide for detection of SNP TSC0003494
taaagtgcgtata

SEQ ID NO: 15834 - DNA, 13 bp, Artificial Sequence
  Oligonucleotide for detection of SNP TSC0003494
tatacgcacttta

SEQ ID NO: 15835 - DNA, 13 bp, Artificial Sequence
  Oligonucleotide for detection of SNP TSC0003495
aattttgtattta

SEQ ID NO: 15836 - DNA, 13 bp, Artificial Sequence
  Oligonucleotide for detection of SNP TSC0003495
taaatacaaaatt

SEQ ID NO: 15837 - DNA, 13 bp, Artificial Sequence
  Oligonucleotide for detection of SNP TSC0003495
aattttatattta

SEQ ID NO: 15838 - DNA, 13 bp, Artificial Sequence
  Oligonucleotide for detection of SNP TSC0003495
taaatataaaatt

SEQ ID NO: 15839 - DNA, 13 bp, Artificial Sequence
  Oligonucleotide for detection of SNP TSC0003496
tttaattgtatty

SEQ ID NO: 15840 - DNA, 13 bp, Artificial Sequence
  Oligonucleotide for detection of SNP TSC0003496
raatacaattaaa

SEQ ID NO: 15841 - DNA, 13 bp, Artificial Sequence
  Oligonucleotide for detection of SNP TSC0003496
tttaatggtatty

SEQ ID NO: 15842 - DNA, 13 bp, Artificial Sequence
  Oligonucleotide for detection of SNP TSC0003496
raataccattaaa

SEQ ID NO: 15843 - DNA, 13 bp, Artificial Sequence
  Oligonucleotide for detection of SNP TSC0003496
gggtataattaaa

SEQ ID NO: 15844 - DNA, 13 bp, Artificial Sequence
  Oligonucleotide for detection of SNP TSC0003496
tttaattataccc

SEQ ID NO: 15845 - DNA, 13 bp, Artificial Sequence
  Oligonucleotide for detection of SNP TSC0003496
gggtattattaaa

SEQ ID NO: 15846 - DNA, 13 bp, Artificial Sequence
  Oligonucleotide for detection of SNP TSC0003496
tttaataataccc

SEQ ID NO: 15847 - DNA, 13 bp, Artificial Sequence
  Oligonucleotide for detection of SNP TSC0003497
ggtgtaatatggt

SEQ ID NO: 15848 - DNA, 13 bp, Artificial Sequence
  Oligonucleotide for detection of SNP TSC0003497
accatattacacc

SEQ ID NO: 15849 - DNA, 13 bp, Artificial Sequence
  Oligonucleotide for detection of SNP TSC0003497
ggtgtagtatggt

SEQ ID NO: 15850 - DNA, 13 bp, Artificial Sequence
  Oligonucleotide for detection of SNP TSC0003497
accatactacacc

SEQ ID NO: 15851 - DNA, 13 bp, Artificial Sequence
  Oligonucleotide for detection of SNP TSC0003497
ggtgtaatacggt

SEQ ID NO: 15852 - DNA, 13 bp, Artificial Sequence
  Oligonucleotide for detection of SNP TSC0003497
accgtattacacc

SEQ ID NO: 15853 - DNA, 13 bp, Artificial Sequence
  Oligonucleotide for detection of SNP TSC0003497
ggtgtagtacggt

SEQ ID NO: 15854 - DNA, 13 bp, Artificial Sequence
  Oligonucleotide for detection of SNP TSC0003497
accgtactacacc

SEQ ID NO: 15855 - DNA, 13 bp, Artificial Sequence
  Oligonucleotide for detection of SNP TSC0003498
agtagtaagtgtg

SEQ ID NO: 15856 - DNA, 13 bp, Artificial Sequence
  Oligonucleotide for detection of SNP TSC0003498
cacacttactact

SEQ ID NO: 15857 - DNA, 13 bp, Artificial Sequence
  Oligonucleotide for detection of SNP TSC0003498
agtagtgagtgtg

SEQ ID NO: 15858 - DNA, 13 bp, Artificial Sequence
  Oligonucleotide for detection of SNP TSC0003498
cacactcactact

SEQ ID NO: 15859 - DNA, 13 bp, Artificial Sequence
  Oligonucleotide for detection of SNP TSC0003498
agtagcgagtgtg

SEQ ID NO: 15860 - DNA, 13 bp, Artificial Sequence
  Oligonucleotide for detection of SNP TSC0003498
cacactcgctact

SEQ ID NO: 15861 - DNA, 13 bp, Artificial Sequence
  Oligonucleotide for detection of SNP TSC0003498
tatatttgttgtt

SEQ ID NO: 15862 - DNA, 13 bp, Artificial Sequence
  Oligonucleotide for detection of SNP TSC0003498
aacaacaaatata

SEQ ID NO: 15863 - DNA, 13 bp, Artificial Sequence
  Oligonucleotide for detection of SNP TSC0003498
tatattcgttgtt

SEQ ID NO: 15864 - DNA, 13 bp, Artificial Sequence
  Oligonucleotide for detection of SNP TSC0003498
aacaacgaatata

SEQ ID NO: 15865 - DNA, 13 bp, Artificial Sequence
  Oligonucleotide for detection of SNP TSC0003500
tatttaatatgta

SEQ ID NO: 15866 - DNA, 13 bp, Artificial Sequence
  Oligonucleotide for detection of SNP TSC0003500
tacatattaaata

SEQ ID NO: 15867 - DNA, 13 bp, Artificial Sequence
  Oligonucleotide for detection of SNP TSC0003500
tatttagtatgta

SEQ ID NO: 15868 - DNA, 13 bp, Artificial Sequence
  Oligonucleotide for detection of SNP TSC0003500
tacatactaaata

SEQ ID NO: 15869 - DNA, 13 bp, Artificial Sequence
  Oligonucleotide for detection of SNP TSC0003501
aaattttgttaat

SEQ ID NO: 15870 - DNA, 13 bp, Artificial Sequence
  Oligonucleotide for detection of SNP TSC0003501
attaacaaaattt

SEQ ID NO: 15871 - DNA, 13 bp, Artificial Sequence
  Oligonucleotide for detection of SNP TSC0003501
aaatttcgttaat

SEQ ID NO: 15872 - DNA, 13 bp, Artificial Sequence
  Oligonucleotide for detection of SNP TSC0003501
attaacgaaattt

SEQ ID NO: 15873 - DNA, 13 bp, Artificial Sequence
  Oligonucleotide for detection of SNP TSC0003501
attgatgaaattt

SEQ ID NO: 15874 - DNA, 13 bp, Artificial Sequence
  Oligonucleotide for detection of SNP TSC0003501
aaatttcatcaat

SEQ ID NO: 15875 - DNA, 13 bp, Artificial Sequence
  Oligonucleotide for detection of SNP TSC0003501
attgataaaattt

SEQ ID NO: 15876 - DNA, 13 bp, Artificial Sequence
  Oligonucleotide for detection of SNP TSC0003501
aaattttatcaat

SEQ ID NO: 15877 - DNA, 13 bp, Artificial Sequence
  Oligonucleotide for detection of SNP TSC0003501
attgacgaaattt

SEQ ID NO: 15878 - DNA, 13 bp, Artificial Sequence
  Oligonucleotide for detection of SNP TSC0003501
aaatttcgtcaat

SEQ ID NO: 15879 - DNA, 13 bp, Artificial Sequence
  Oligonucleotide for detection of SNP TSC0003502
aatagaatgagay

SEQ ID NO: 15880 - DNA, 13 bp, Artificial Sequence
  Oligonucleotide for detection of SNP TSC0003502
rtctcattctatt

SEQ ID NO: 15881 - DNA, 13 bp, Artificial Sequence
  Oligonucleotide for detection of SNP TSC0003502
aatagagtgagay

SEQ ID NO: 15882 - DNA, 13 bp, Artificial Sequence
  Oligonucleotide for detection of SNP TSC0003502
rtctcactctatt

SEQ ID NO: 15883 - DNA, 13 bp, Artificial Sequence
  Oligonucleotide for detection of SNP TSC0003503
tttgaaattttta

SEQ ID NO: 15884 - DNA, 13 bp, Artificial Sequence
  Oligonucleotide for detection of SNP TSC0003503
taaaaatttcaaa

SEQ ID NO: 15885 - DNA, 13 bp, Artificial Sequence
  Oligonucleotide for detection of SNP TSC0003503
tttgaatttttta

SEQ ID NO: 15886 - DNA, 13 bp, Artificial Sequence
  Oligonucleotide for detection of SNP TSC0003503
taaaaaattcaaa

SEQ ID NO: 15887 - DNA, 13 bp, Artificial Sequence
  Oligonucleotide for detection of SNP TSC0003503
tgagaattttagg

SEQ ID NO: 15888 - DNA, 13 bp, Artificial Sequence
  Oligonucleotide for detection of SNP TSC0003503
cctaaaattctca

SEQ ID NO: 15889 - DNA, 13 bp, Artificial Sequence
  Oligonucleotide for detection of SNP TSC0003503
tgagaagtttagg

SEQ ID NO: 15890 - DNA, 13 bp, Artificial Sequence
  Oligonucleotide for detection of SNP TSC0003503
cctaaacttctca

SEQ ID NO: 15891 - DNA, 13 bp, Artificial Sequence
  Oligonucleotide for detection of SNP TSC0003504
tttattttgtatt

SEQ ID NO: 15892 - DNA, 13 bp, Artificial Sequence
  Oligonucleotide for detection of SNP TSC0003504
aatacaaaataaa

SEQ ID NO: 15893 - DNA, 13 bp, Artificial Sequence
  Oligonucleotide for detection of SNP TSC0003504
tttattgtgtatt

SEQ ID NO: 15894 - DNA, 13 bp, Artificial Sequence
  Oligonucleotide for detection of SNP TSC0003504
aatacacaataaa

SEQ ID NO: 15895 - DNA, 13 bp, Artificial Sequence
  Oligonucleotide for detection of SNP TSC0003504
tttatcgtgtatt

SEQ ID NO: 15896 - DNA, 13 bp, Artificial Sequence
  Oligonucleotide for detection of SNP TSC0003504
aatacacgataaa

SEQ ID NO: 15897 - DNA, 13 bp, Artificial Sequence
  Oligonucleotide for detection of SNP TSC0003504
aatataagatgag

SEQ ID NO: 15898 - DNA, 13 bp, Artificial Sequence
  Oligonucleotide for detection of SNP TSC0003504
ctcatcttatatt

SEQ ID NO: 15899 - DNA, 13 bp, Artificial Sequence
  Oligonucleotide for detection of SNP TSC0003504
aatatatgatgag

SEQ ID NO: 15900 - DNA, 13 bp, Artificial Sequence
  Oligonucleotide for detection of SNP TSC0003504
ctcatcatatatt

SEQ ID NO: 15901 - DNA, 13 bp, Artificial Sequence
  Oligonucleotide for detection of SNP TSC0003504
aatatacgatgag

SEQ ID NO: 15902 - DNA, 13 bp, Artificial Sequence
  Oligonucleotide for detection of SNP TSC0003504
ctcatcgtatatt

SEQ ID NO: 15903 - DNA, 13 bp, Artificial Sequence
  Oligonucleotide for detection of SNP TSC0003506
tagggtaaggtat

SEQ ID NO: 15904 - DNA, 13 bp, Artificial Sequence
  Oligonucleotide for detection of SNP TSC0003506
ataccttacccta

SEQ ID NO: 15905 - DNA, 13 bp, Artificial Sequence
  Oligonucleotide for detection of SNP TSC0003506
tagggtgaggtat

SEQ ID NO: 15906 - DNA, 13 bp, Artificial Sequence
  Oligonucleotide for detection of SNP TSC0003506
atacctcacccta

SEQ ID NO: 15907 - DNA, 13 bp, Artificial Sequence
  Oligonucleotide for detection of SNP TSC0003506
tagggcgaggtat

SEQ ID NO: 15908 - DNA, 13 bp, Artificial Sequence
  Oligonucleotide for detection of SNP TSC0003506
atacctcgcccta

SEQ ID NO: 15909 - DNA, 13 bp, Artificial Sequence
  Oligonucleotide for detection of SNP TSC0003506
atgttttgttttg

SEQ ID NO: 15910 - DNA, 13 bp, Artificial Sequence
  Oligonucleotide for detection of SNP TSC0003506
caaaacaaaacat

SEQ ID NO: 15911 - DNA, 13 bp, Artificial Sequence
  Oligonucleotide for detection of SNP TSC0003506
atgtttcgttttg

SEQ ID NO: 15912 - DNA, 13 bp, Artificial Sequence
  Oligonucleotide for detection of SNP TSC0003506
caaaacgaaacat

SEQ ID NO: 15913 - DNA, 13 bp, Artificial Sequence
  Oligonucleotide for detection of SNP TSC0003507
taaataatttatt

SEQ ID NO: 15914 - DNA, 13 bp, Artificial Sequence
  Oligonucleotide for detection of SNP TSC0003507
aataaattattta

SEQ ID NO: 15915 - DNA, 13 bp, Artificial Sequence
  Oligonucleotide for detection of SNP TSC0003507
taaatattttatt

SEQ ID NO: 15916 - DNA, 13 bp, Artificial Sequence
  Oligonucleotide for detection of SNP TSC0003507
aataaaatattta

SEQ ID NO: 15917 - DNA, 13 bp, Artificial Sequence
  Oligonucleotide for detection of SNP TSC0003507
aatgagttgttta

SEQ ID NO: 15918 - DNA, 13 bp, Artificial Sequence
  Oligonucleotide for detection of SNP TSC0003507
taaacaactcatt

SEQ ID NO: 15919 - DNA, 13 bp, Artificial Sequence
  Oligonucleotide for detection of SNP TSC0003507
aatgaggtgttta

SEQ ID NO: 15920 - DNA, 13 bp, Artificial Sequence
  Oligonucleotide for detection of SNP TSC0003507
taaacacctcatt

SEQ ID NO: 15921 - DNA, 13 bp, Artificial Sequence
  Oligonucleotide for detection of SNP TSC0003508
tagagatggggtt

SEQ ID NO: 15922 - DNA, 13 bp, Artificial Sequence
  Oligonucleotide for detection of SNP TSC0003508
aaccccatctcta

SEQ ID NO: 15923 - DNA, 13 bp, Artificial Sequence
  Oligonucleotide for detection of SNP TSC0003508
tagagacggggtt

SEQ ID NO: 15924 - DNA, 13 bp, Artificial Sequence
  Oligonucleotide for detection of SNP TSC0003508
aaccccgtctcta

SEQ ID NO: 15925 - DNA, 13 bp, Artificial Sequence
  Oligonucleotide for detection of SNP TSC0003509
tggtagttgtttg

SEQ ID NO: 15926 - DNA, 13 bp, Artificial Sequence
  Oligonucleotide for detection of SNP TSC0003509
caaacaactacca

SEQ ID NO: 15927 - DNA, 13 bp, Artificial Sequence
  Oligonucleotide for detection of SNP TSC0003509
tggtaggtgtttg

SEQ ID NO: 15928 - DNA, 13 bp, Artificial Sequence
  Oligonucleotide for detection of SNP TSC0003509
caaacacctacca

SEQ ID NO: 15929 - DNA, 13 bp, Artificial Sequence
  Oligonucleotide for detection of SNP TSC0003509
taggtaattgtta

SEQ ID NO: 15930 - DNA, 13 bp, Artificial Sequence
  Oligonucleotide for detection of SNP TSC0003509
taacaattaccta

SEQ ID NO: 15931 - DNA, 13 bp, Artificial Sequence
  Oligonucleotide for detection of SNP TSC0003509
taggtatttgtta

SEQ ID NO: 15932 - DNA, 13 bp, Artificial Sequence
  Oligonucleotide for detection of SNP TSC0003509
taacaaataccta

SEQ ID NO: 15933 - DNA, 13 bp, Artificial Sequence
  Oligonucleotide for detection of SNP TSC0003510
ttttttgagtagy

SEQ ID NO: 15934 - DNA, 13 bp, Artificial Sequence
  Oligonucleotide for detection of SNP TSC0003510
rctactcaaaaaa

SEQ ID NO: 15935 - DNA, 13 bp, Artificial Sequence
  Oligonucleotide for detection of SNP TSC0003510
ttttttaagtagy

SEQ ID NO: 15936 - DNA, 13 bp, Artificial Sequence
  Oligonucleotide for detection of SNP TSC0003510
rctacttaaaaaa

SEQ ID NO: 15937 - DNA, 13 bp, Artificial Sequence
  Oligonucleotide for detection of SNP TSC0003511
tggaatatttgtg

SEQ ID NO: 15938 - DNA, 13 bp, Artificial Sequence
  Oligonucleotide for detection of SNP TSC0003511
cacaaatattcca

SEQ ID NO: 15939 - DNA, 13 bp, Artificial Sequence
  Oligonucleotide for detection of SNP TSC0003511
tggaatttttgtg

SEQ ID NO: 15940 - DNA, 13 bp, Artificial Sequence
  Oligonucleotide for detection of SNP TSC0003511
cacaaaaattcca

SEQ ID NO: 15941 - DNA, 13 bp, Artificial Sequence
  Oligonucleotide for detection of SNP TSC0003511
tggaatatttgcg

SEQ ID NO: 15942 - DNA, 13 bp, Artificial Sequence
  Oligonucleotide for detection of SNP TSC0003511
cgcaaatattcca

SEQ ID NO: 15943 - DNA, 13 bp, Artificial Sequence
  Oligonucleotide for detection of SNP TSC0003511
tggaatttttgcg

SEQ ID NO: 15944 - DNA, 13 bp, Artificial Sequence
  Oligonucleotide for detection of SNP TSC0003511
cgcaaaaattcca

SEQ ID NO: 15945 - DNA, 13 bp, Artificial Sequence
  Oligonucleotide for detection of SNP TSC0003511
tgtaagtatttta

SEQ ID NO: 15946 - DNA, 13 bp, Artificial Sequence
  Oligonucleotide for detection of SNP TSC0003511
taaaatacttaca

SEQ ID NO: 15947 - DNA, 13 bp, Artificial Sequence
  Oligonucleotide for detection of SNP TSC0003511
tgtaagaatttta

SEQ ID NO: 15948 - DNA, 13 bp, Artificial Sequence
  Oligonucleotide for detection of SNP TSC0003511
taaaattcttaca

SEQ ID NO: 15949 - DNA, 13 bp, Artificial Sequence
  Oligonucleotide for detection of SNP TSC0003511
cgtaagtatttta

SEQ ID NO: 15950 - DNA, 13 bp, Artificial Sequence
  Oligonucleotide for detection of SNP TSC0003511
taaaatacttacg

SEQ ID NO: 15951 - DNA, 13 bp, Artificial Sequence
  Oligonucleotide for detection of SNP TSC0003511
cgtaagaatttta

SEQ ID NO: 15952 - DNA, 13 bp, Artificial Sequence
  Oligonucleotide for detection of SNP TSC0003511
taaaattcttacg

SEQ ID NO: 15953 - DNA, 13 bp, Artificial Sequence
  Oligonucleotide for detection of SNP TSC0003512
tggtaagagtgty

SEQ ID NO: 15954 - DNA, 13 bp, Artificial Sequence
  Oligonucleotide for detection of SNP TSC0003512
racactcttacca

SEQ ID NO: 15955 - DNA, 13 bp, Artificial Sequence
  Oligonucleotide for detection of SNP TSC0003512
tggtaaaagtgty

SEQ ID NO: 15956 - DNA, 13 bp, Artificial Sequence
  Oligonucleotide for detection of SNP TSC0003512
racacttttacca

SEQ ID NO: 15957 - DNA, 13 bp, Artificial Sequence
  Oligonucleotide for detection of SNP TSC0003512
cggtaagagtgty

SEQ ID NO: 15958 - DNA, 13 bp, Artificial Sequence
  Oligonucleotide for detection of SNP TSC0003512
racactcttaccg

SEQ ID NO: 15959 - DNA, 13 bp, Artificial Sequence
  Oligonucleotide for detection of SNP TSC0003512
cggtaaaagtgty

SEQ ID NO: 15960 - DNA, 13 bp, Artificial Sequence
  Oligonucleotide for detection of SNP TSC0003512
racacttttaccg

SEQ ID NO: 15961 - DNA, 13 bp, Artificial Sequence
  Oligonucleotide for detection of SNP TSC0003513
tatgggtgtttgg

SEQ ID NO: 15962 - DNA, 13 bp, Artificial Sequence
  Oligonucleotide for detection of SNP TSC0003513
ccaaacacccata

SEQ ID NO: 15963 - DNA, 13 bp, Artificial Sequence
  Oligonucleotide for detection of SNP TSC0003513
tatgggggtttgg

SEQ ID NO: 15964 - DNA, 13 bp, Artificial Sequence
  Oligonucleotide for detection of SNP TSC0003513
ccaaacccccata

SEQ ID NO: 15965 - DNA, 13 bp, Artificial Sequence
  Oligonucleotide for detection of SNP TSC0003513
tacgggtgtttgg

SEQ ID NO: 15966 - DNA, 13 bp, Artificial Sequence
  Oligonucleotide for detection of SNP TSC0003513
ccaaacacccgta

SEQ ID NO: 15967 - DNA, 13 bp, Artificial Sequence
  Oligonucleotide for detection of SNP TSC0003513
tacgggggtttgg

SEQ ID NO: 15968 - DNA, 13 bp, Artificial Sequence
  Oligonucleotide for detection of SNP TSC0003513
ccaaacccccgta

SEQ ID NO: 15969 - DNA, 13 bp, Artificial Sequence
  Oligonucleotide for detection of SNP TSC0003513
tatgggcgtttgg

SEQ ID NO: 15970 - DNA, 13 bp, Artificial Sequence
  Oligonucleotide for detection of SNP TSC0003513
ccaaacgcccata

SEQ ID NO: 15971 - DNA, 13 bp, Artificial Sequence
  Oligonucleotide for detection of SNP TSC0003513
tatgggggttcgg

SEQ ID NO: 15972 - DNA, 13 bp, Artificial Sequence
  Oligonucleotide for detection of SNP TSC0003513
ccgaacccccata

SEQ ID NO: 15973 - DNA, 13 bp, Artificial Sequence
  Oligonucleotide for detection of SNP TSC0003513
tatgggtgttcgg

SEQ ID NO: 15974 - DNA, 13 bp, Artificial Sequence
  Oligonucleotide for detection of SNP TSC0003513
ccgaacacccata

SEQ ID NO: 15975 - DNA, 13 bp, Artificial Sequence
  Oligonucleotide for detection of SNP TSC0003513
tacgggggttcgg

SEQ ID NO: 15976 - DNA, 13 bp, Artificial Sequence
  Oligonucleotide for detection of SNP TSC0003513
ccgaacccccgta

SEQ ID NO: 15977 - DNA, 13 bp, Artificial Sequence
  Oligonucleotide for detection of SNP TSC0003513
tacgggcgtttgg

SEQ ID NO: 15978 - DNA, 13 bp, Artificial Sequence
  Oligonucleotide for detection of SNP TSC0003513
ccaaacgcccgta

SEQ ID NO: 15979 - DNA, 13 bp, Artificial Sequence
  Oligonucleotide for detection of SNP TSC0003513
tacgggtgttcgg

SEQ ID NO: 15980 - DNA, 13 bp, Artificial Sequence
  Oligonucleotide for detection of SNP TSC0003513
ccgaacacccgta

SEQ ID NO: 15981 - DNA, 13 bp, Artificial Sequence
  Oligonucleotide for detection of SNP TSC0003513
tatgggcgttcgg

SEQ ID NO: 15982 - DNA, 13 bp, Artificial Sequence
  Oligonucleotide for detection of SNP TSC0003513
ccgaacgcccata

SEQ ID NO: 15983 - DNA, 13 bp, Artificial Sequence
  Oligonucleotide for detection of SNP TSC0003513
tacgggcgttcgg

SEQ ID NO: 15984 - DNA, 13 bp, Artificial Sequence
  Oligonucleotide for detection of SNP TSC0003513
ccgaacgcccgta

SEQ ID NO: 15985 - DNA, 13 bp, Artificial Sequence
  Oligonucleotide for detection of SNP TSC0003513
ttgaatgtttgtg

SEQ ID NO: 15986 - DNA, 13 bp, Artificial Sequence
  Oligonucleotide for detection of SNP TSC0003513
cacaaacattcaa

SEQ ID NO: 15987 - DNA, 13 bp, Artificial Sequence
  Oligonucleotide for detection of SNP TSC0003513
ttgaatttttgtg

SEQ ID NO: 15988 - DNA, 13 bp, Artificial Sequence
  Oligonucleotide for detection of SNP TSC0003513
cacaaaaattcaa

SEQ ID NO: 15989 - DNA, 13 bp, Artificial Sequence
  Oligonucleotide for detection of SNP TSC0003513
tcgaatgtttgtg

SEQ ID NO: 15990 - DNA, 13 bp, Artificial Sequence
  Oligonucleotide for detection of SNP TSC0003513
cacaaacattcga

SEQ ID NO: 15991 - DNA, 13 bp, Artificial Sequence
  Oligonucleotide for detection of SNP TSC0003513
tcgaatttttgtg

SEQ ID NO: 15992 - DNA, 13 bp, Artificial Sequence
  Oligonucleotide for detection of SNP TSC0003513
cacaaaaattcga

SEQ ID NO: 15993 - DNA, 13 bp, Artificial Sequence
  Oligonucleotide for detection of SNP TSC0003513
ttgaacgtttgtg

SEQ ID NO: 15994 - DNA, 13 bp, Artificial Sequence
  Oligonucleotide for detection of SNP TSC0003513
cacaaacgttcaa

SEQ ID NO: 15995 - DNA, 13 bp, Artificial Sequence
  Oligonucleotide for detection of SNP TSC0003513
ttgaattttcgtg

SEQ ID NO: 15996 - DNA, 13 bp, Artificial Sequence
  Oligonucleotide for detection of SNP TSC0003513
cacgaaaattcaa

SEQ ID NO: 15997 - DNA, 13 bp, Artificial Sequence
  Oligonucleotide for detection of SNP TSC0003513
ttgaatgttcgtg

SEQ ID NO: 15998 - DNA, 13 bp, Artificial Sequence
  Oligonucleotide for detection of SNP TSC0003513
cacgaacattcaa

SEQ ID NO: 15999 - DNA, 13 bp, Artificial Sequence
  Oligonucleotide for detection of SNP TSC0003513
tcgaattttcgtg

SEQ ID NO: 16000 - DNA, 13 bp, Artificial Sequence
  Oligonucleotide for detection of SNP TSC0003513
cacgaaaattcga

SEQ ID NO: 16001 - DNA, 13 bp, Artificial Sequence
  Oligonucleotide for detection of SNP TSC0003513
tcgaacgtttgtg

SEQ ID NO: 16002 - DNA, 13 bp, Artificial Sequence
  Oligonucleotide for detection of SNP TSC0003513
cacaaacgttcga

SEQ ID NO: 16003 - DNA, 13 bp, Artificial Sequence
  Oligonucleotide for detection of SNP TSC0003513
tcgaatgttcgtg

SEQ ID NO: 16004 - DNA, 13 bp, Artificial Sequence
  Oligonucleotide for detection of SNP TSC0003513
cacgaacattcga

SEQ ID NO: 16005 - DNA, 13 bp, Artificial Sequence
  Oligonucleotide for detection of SNP TSC0003513
ttgaacgttcgtg

SEQ ID NO: 16006 - DNA, 13 bp, Artificial Sequence
  Oligonucleotide for detection of SNP TSC0003513
cacgaacgttcaa

SEQ ID NO: 16007 - DNA, 13 bp, Artificial Sequence
  Oligonucleotide for detection of SNP TSC0003513
tcgaacgttcgtg

SEQ ID NO: 16008 - DNA, 13 bp, Artificial Sequence
  Oligonucleotide for detection of SNP TSC0003513
cacgaacgttcga

SEQ ID NO: 16009 - DNA, 13 bp, Artificial Sequence
  Oligonucleotide for detection of SNP TSC0003514
ttaaaatgttggg

SEQ ID NO: 16010 - DNA, 13 bp, Artificial Sequence
  Oligonucleotide for detection of SNP TSC0003514
cccaacattttaa

SEQ ID NO: 16011 - DNA, 13 bp, Artificial Sequence
  Oligonucleotide for detection of SNP TSC0003514
ttaaaacgttggg

SEQ ID NO: 16012 - DNA, 13 bp, Artificial Sequence
  Oligonucleotide for detection of SNP TSC0003514
cccaacgttttaa

SEQ ID NO: 16013 - DNA, 13 bp, Artificial Sequence
  Oligonucleotide for detection of SNP TSC0003514
tttaatgttttgg

SEQ ID NO: 16014 - DNA, 13 bp, Artificial Sequence
  Oligonucleotide for detection of SNP TSC0003514
ccaaaacattaaa

SEQ ID NO: 16015 - DNA, 13 bp, Artificial Sequence
  Oligonucleotide for detection of SNP TSC0003514
tttaatattttgg

SEQ ID NO: 16016 - DNA, 13 bp, Artificial Sequence
  Oligonucleotide for detection of SNP TSC0003514
ccaaaatattaaa

SEQ ID NO: 16017 - DNA, 13 bp, Artificial Sequence
  Oligonucleotide for detection of SNP TSC0003514
tttaacgttttgg

SEQ ID NO: 16018 - DNA, 13 bp, Artificial Sequence
  Oligonucleotide for detection of SNP TSC0003514
ccaaaacgttaaa

SEQ ID NO: 16019 - DNA, 13 bp, Artificial Sequence
  Oligonucleotide for detection of SNP TSC0003515
atagtaattatty

SEQ ID NO: 16020 - DNA, 13 bp, Artificial Sequence
  Oligonucleotide for detection of SNP TSC0003515
raataattactat

SEQ ID NO: 16021 - DNA, 13 bp, Artificial Sequence
  Oligonucleotide for detection of SNP TSC0003515
atagtatttatty

SEQ ID NO: 16022 - DNA, 13 bp, Artificial Sequence
  Oligonucleotide for detection of SNP TSC0003515
raataaatactat

SEQ ID NO: 16023 - DNA, 13 bp, Artificial Sequence
  Oligonucleotide for detection of SNP TSC0003515
gagtagttattat

SEQ ID NO: 16024 - DNA, 13 bp, Artificial Sequence
  Oligonucleotide for detection of SNP TSC0003515
ataataactactc

SEQ ID NO: 16025 - DNA, 13 bp, Artificial Sequence
  Oligonucleotide for detection of SNP TSC0003515
gagtaggtattat

SEQ ID NO: 16026 - DNA, 13 bp, Artificial Sequence
  Oligonucleotide for detection of SNP TSC0003515
ataatacctactc

SEQ ID NO: 16027 - DNA, 13 bp, Artificial Sequence
  Oligonucleotide for detection of SNP TSC0003516
agttatagagaty

SEQ ID NO: 16028 - DNA, 13 bp, Artificial Sequence
  Oligonucleotide for detection of SNP TSC0003516
ratctctataact

SEQ ID NO: 16029 - DNA, 13 bp, Artificial Sequence
  Oligonucleotide for detection of SNP TSC0003516
agttatggagaty

SEQ ID NO: 16030 - DNA, 13 bp, Artificial Sequence
  Oligonucleotide for detection of SNP TSC0003516
ratctccataact

SEQ ID NO: 16031 - DNA, 13 bp, Artificial Sequence
  Oligonucleotide for detection of SNP TSC0003517
gatgattagtaga

SEQ ID NO: 16032 - DNA, 13 bp, Artificial Sequence
  Oligonucleotide for detection of SNP TSC0003517
tctactaatcatc

SEQ ID NO: 16033 - DNA, 13 bp, Artificial Sequence
  Oligonucleotide for detection of SNP TSC0003517
gatgatgagtaga

SEQ ID NO: 16034 - DNA, 13 bp, Artificial Sequence
  Oligonucleotide for detection of SNP TSC0003517
tctactcatcatc

SEQ ID NO: 16035 - DNA, 13 bp, Artificial Sequence
  Oligonucleotide for detection of SNP TSC0003517
gatgacgagtaga

SEQ ID NO: 16036 - DNA, 13 bp, Artificial Sequence
  Oligonucleotide for detection of SNP TSC0003517
tctactcgtcatc

SEQ ID NO: 16037 - DNA, 13 bp, Artificial Sequence
  Oligonucleotide for detection of SNP TSC0003517
tttattggttaty

SEQ ID NO: 16038 - DNA, 13 bp, Artificial Sequence
  Oligonucleotide for detection of SNP TSC0003517
rataaccaataaa

SEQ ID NO: 16039 - DNA, 13 bp, Artificial Sequence
  Oligonucleotide for detection of SNP TSC0003517
tttatttgttaty

SEQ ID NO: 16040 - DNA, 13 bp, Artificial Sequence
  Oligonucleotide for detection of SNP TSC0003517
rataacaaataaa

SEQ ID NO: 16041 - DNA, 13 bp, Artificial Sequence
  Oligonucleotide for detection of SNP TSC0003517
tttattcgttaty

SEQ ID NO: 16042 - DNA, 13 bp, Artificial Sequence
  Oligonucleotide for detection of SNP TSC0003517
rataacgaataaa

SEQ ID NO: 16043 - DNA, 13 bp, Artificial Sequence
  Oligonucleotide for detection of SNP TSC0003518
gtgaaagtgggta

SEQ ID NO: 16044 - DNA, 13 bp, Artificial Sequence
  Oligonucleotide for detection of SNP TSC0003518
tacccactttcac

SEQ ID NO: 16045 - DNA, 13 bp, Artificial Sequence
  Oligonucleotide for detection of SNP TSC0003518
gtgaaaatgggta

SEQ ID NO: 16046 - DNA, 13 bp, Artificial Sequence
  Oligonucleotide for detection of SNP TSC0003518
tacccattttcac

SEQ ID NO: 16047 - DNA, 13 bp, Artificial Sequence
  Oligonucleotide for detection of SNP TSC0003519
aagaattgaagag

SEQ ID NO: 16048 - DNA, 13 bp, Artificial Sequence
  Oligonucleotide for detection of SNP TSC0003519
ctcttcaattctt

SEQ ID NO: 16049 - DNA, 13 bp, Artificial Sequence
  Oligonucleotide for detection of SNP TSC0003519
aagaatcgaagag

SEQ ID NO: 16050 - DNA, 13 bp, Artificial Sequence
  Oligonucleotide for detection of SNP TSC0003519
ctcttcgattctt

SEQ ID NO: 16051 - DNA, 13 bp, Artificial Sequence
  Oligonucleotide for detection of SNP TSC0003519
ttttttagttttt

SEQ ID NO: 16052 - DNA, 13 bp, Artificial Sequence
  Oligonucleotide for detection of SNP TSC0003519
aaaaactaaaaaa

SEQ ID NO: 16053 - DNA, 13 bp, Artificial Sequence
  Oligonucleotide for detection of SNP TSC0003520
ggaaatattttaa

SEQ ID NO: 16054 - DNA, 13 bp, Artificial Sequence
  Oligonucleotide for detection of SNP TSC0003520
ttaaaatatttcc

SEQ ID NO: 16055 - DNA, 13 bp, Artificial Sequence
  Oligonucleotide for detection of SNP TSC0003520
ggaaattttttaa

SEQ ID NO: 16056 - DNA, 13 bp, Artificial Sequence
  Oligonucleotide for detection of SNP TSC0003520
ttaaaaaatttcc

SEQ ID NO: 16057 - DNA, 13 bp, Artificial Sequence
  Oligonucleotide for detection of SNP TSC0003520
ttaggatatttty

SEQ ID NO: 16058 - DNA, 13 bp, Artificial Sequence
  Oligonucleotide for detection of SNP TSC0003520
raaaatatcctaa

SEQ ID NO: 16059 - DNA, 13 bp, Artificial Sequence
  Oligonucleotide for detection of SNP TSC0003520
ttaggagatttty

SEQ ID NO: 16060 - DNA, 13 bp, Artificial Sequence
  Oligonucleotide for detection of SNP TSC0003520
raaaatctcctaa

SEQ ID NO: 16061 - DNA, 13 bp, Artificial Sequence
  Oligonucleotide for detection of SNP TSC0003521
ttatatggtttaa

SEQ ID NO: 16062 - DNA, 13 bp, Artificial Sequence
  Oligonucleotide for detection of SNP TSC0003521
ttaaaccatataa

SEQ ID NO: 16063 - DNA, 13 bp, Artificial Sequence
  Oligonucleotide for detection of SNP TSC0003521
ttatatagtttaa

SEQ ID NO: 16064 - DNA, 13 bp, Artificial Sequence
  Oligonucleotide for detection of SNP TSC0003521
ttaaactatataa

SEQ ID NO: 16065 - DNA, 13 bp, Artificial Sequence
  Oligonucleotide for detection of SNP TSC0003522
ggtagaagagaga

SEQ ID NO: 16066 - DNA, 13 bp, Artificial Sequence
  Oligonucleotide for detection of SNP TSC0003522
tctctcttctacc

SEQ ID NO: 16067 - DNA, 13 bp, Artificial Sequence
  Oligonucleotide for detection of SNP TSC0003522
ggtagaggagaga

SEQ ID NO: 16068 - DNA, 13 bp, Artificial Sequence
  Oligonucleotide for detection of SNP TSC0003522
tctctcctctacc

SEQ ID NO: 16069 - DNA, 13 bp, Artificial Sequence
  Oligonucleotide for detection of SNP TSC0003523
atgaggataagtg

SEQ ID NO: 16070 - DNA, 13 bp, Artificial Sequence
  Oligonucleotide for detection of SNP TSC0003523
cacttatcctcat

SEQ ID NO: 16071 - DNA, 13 bp, Artificial Sequence
  Oligonucleotide for detection of SNP TSC0003523
atgagggtaagtg

SEQ ID NO: 16072 - DNA, 13 bp, Artificial Sequence
  Oligonucleotide for detection of SNP TSC0003523
cacttaccctcat

SEQ ID NO: 16073 - DNA, 13 bp, Artificial Sequence
  Oligonucleotide for detection of SNP TSC0003524
tttatgaaagaay

SEQ ID NO: 16074 - DNA, 13 bp, Artificial Sequence
  Oligonucleotide for detection of SNP TSC0003524
rttctttcataaa

SEQ ID NO: 16075 - DNA, 13 bp, Artificial Sequence
  Oligonucleotide for detection of SNP TSC0003524
tttatgtaagaay

SEQ ID NO: 16076 - DNA, 13 bp, Artificial Sequence
  Oligonucleotide for detection of SNP TSC0003524
rttcttacataaa

SEQ ID NO: 16077 - DNA, 13 bp, Artificial Sequence
  Oligonucleotide for detection of SNP TSC0003524
gtttttttataaa

SEQ ID NO: 16078 - DNA, 13 bp, Artificial Sequence
  Oligonucleotide for detection of SNP TSC0003524
tttataaaaaaac

SEQ ID NO: 16079 - DNA, 13 bp, Artificial Sequence
  Oligonucleotide for detection of SNP TSC0003524
gtttttgtataaa

SEQ ID NO: 16080 - DNA, 13 bp, Artificial Sequence
  Oligonucleotide for detection of SNP TSC0003524
tttatacaaaaac

SEQ ID NO: 16081 - DNA, 13 bp, Artificial Sequence
  Oligonucleotide for detection of SNP TSC0003525
aaaaaattaaatg

SEQ ID NO: 16082 - DNA, 13 bp, Artificial Sequence
  Oligonucleotide for detection of SNP TSC0003525
catttaatttttt

SEQ ID NO: 16083 - DNA, 13 bp, Artificial Sequence
  Oligonucleotide for detection of SNP TSC0003525
aaaaaagtaaatg

SEQ ID NO: 16084 - DNA, 13 bp, Artificial Sequence
  Oligonucleotide for detection of SNP TSC0003525
catttactttttt

SEQ ID NO: 16085 - DNA, 13 bp, Artificial Sequence
  Oligonucleotide for detection of SNP TSC0003525
tatttggtttttt

SEQ ID NO: 16086 - DNA, 13 bp, Artificial Sequence
  Oligonucleotide for detection of SNP TSC0003525
aaaaaaccaaata

SEQ ID NO: 16087 - DNA, 13 bp, Artificial Sequence
  Oligonucleotide for detection of SNP TSC0003525
tatttgttttttt

SEQ ID NO: 16088 - DNA, 13 bp, Artificial Sequence
  Oligonucleotide for detection of SNP TSC0003525
aaaaaaacaaata

SEQ ID NO: 16089 - DNA, 13 bp, Artificial Sequence
  Oligonucleotide for detection of SNP TSC0003526
agtgttgtggaty

SEQ ID NO: 16090 - DNA, 13 bp, Artificial Sequence
  Oligonucleotide for detection of SNP TSC0003526
ratccacaacact

SEQ ID NO: 16091 - DNA, 13 bp, Artificial Sequence
  Oligonucleotide for detection of SNP TSC0003526
agtgttatggaty

SEQ ID NO: 16092 - DNA, 13 bp, Artificial Sequence
  Oligonucleotide for detection of SNP TSC0003526
ratccataacact

SEQ ID NO: 16093 - DNA, 13 bp, Artificial Sequence
  Oligonucleotide for detection of SNP TSC0003527
gagtttaaaaaat

SEQ ID NO: 16094 - DNA, 13 bp, Artificial Sequence
  Oligonucleotide for detection of SNP TSC0003527
attttttaaactc

SEQ ID NO: 16095 - DNA, 13 bp, Artificial Sequence
  Oligonucleotide for detection of SNP TSC0003527
gagttttaaaaat

SEQ ID NO: 16096 - DNA, 13 bp, Artificial Sequence
  Oligonucleotide for detection of SNP TSC0003527
atttttaaaactc

SEQ ID NO: 16097 - DNA, 13 bp, Artificial Sequence
  Oligonucleotide for detection of SNP TSC0003527
attttttaaatty

SEQ ID NO: 16098 - DNA, 13 bp, Artificial Sequence
  Oligonucleotide for detection of SNP TSC0003527
raatttaaaaaat

SEQ ID NO: 16099 - DNA, 13 bp, Artificial Sequence
  Oligonucleotide for detection of SNP TSC0003527
atttttaaaatty

SEQ ID NO: 16100 - DNA, 13 bp, Artificial Sequence
  Oligonucleotide for detection of SNP TSC0003527
raattttaaaaat

SEQ ID NO: 16101 - DNA, 13 bp, Artificial Sequence
  Oligonucleotide for detection of SNP TSC0003528
tagtaggtggtay

SEQ ID NO: 16102 - DNA, 13 bp, Artificial Sequence
  Oligonucleotide for detection of SNP TSC0003528
rtaccacctacta

SEQ ID NO: 16103 - DNA, 13 bp, Artificial Sequence
  Oligonucleotide for detection of SNP TSC0003528
tagtagatggtay

SEQ ID NO: 16104 - DNA, 13 bp, Artificial Sequence
  Oligonucleotide for detection of SNP TSC0003528
rtaccatctacta

SEQ ID NO: 16105 - DNA, 13 bp, Artificial Sequence
  Oligonucleotide for detection of SNP TSC0003529
tttaatatttaaa

SEQ ID NO: 16106 - DNA, 13 bp, Artificial Sequence
  Oligonucleotide for detection of SNP TSC0003529
tttaaatattaaa

SEQ ID NO: 16107 - DNA, 13 bp, Artificial Sequence
  Oligonucleotide for detection of SNP TSC0003529
tttaatttttaaa

SEQ ID NO: 16108 - DNA, 13 bp, Artificial Sequence
  Oligonucleotide for detection of SNP TSC0003529
tttaaaaattaaa

SEQ ID NO: 16109 - DNA, 13 bp, Artificial Sequence
  Oligonucleotide for detection of SNP TSC0003529
tttaggtgttgag

SEQ ID NO: 16110 - DNA, 13 bp, Artificial Sequence
  Oligonucleotide for detection of SNP TSC0003529
ctcaacacctaaa

SEQ ID NO: 16111 - DNA, 13 bp, Artificial Sequence
  Oligonucleotide for detection of SNP TSC0003529
tttaggggttgag

SEQ ID NO: 16112 - DNA, 13 bp, Artificial Sequence
  Oligonucleotide for detection of SNP TSC0003529
ctcaacccctaaa

SEQ ID NO: 16113 - DNA, 13 bp, Artificial Sequence
  Oligonucleotide for detection of SNP TSC0003530
agtgtagtggagt

SEQ ID NO: 16114 - DNA, 13 bp, Artificial Sequence
  Oligonucleotide for detection of SNP TSC0003530
actccactacact

SEQ ID NO: 16115 - DNA, 13 bp, Artificial Sequence
  Oligonucleotide for detection of SNP TSC0003530
agtgtaatggagt

SEQ ID NO: 16116 - DNA, 13 bp, Artificial Sequence
  Oligonucleotide for detection of SNP TSC0003530
actccattacact

SEQ ID NO: 16117 - DNA, 13 bp, Artificial Sequence
  Oligonucleotide for detection of SNP TSC0003531
agtatatgtgata

SEQ ID NO: 16118 - DNA, 13 bp, Artificial Sequence
  Oligonucleotide for detection of SNP TSC0003531
tatcacatatact

SEQ ID NO: 16119 - DNA, 13 bp, Artificial Sequence
  Oligonucleotide for detection of SNP TSC0003531
agtatacgtgata

SEQ ID NO: 16120 - DNA, 13 bp, Artificial Sequence
  Oligonucleotide for detection of SNP TSC0003531
tatcacgtatact

SEQ ID NO: 16121 - DNA, 13 bp, Artificial Sequence
  Oligonucleotide for detection of SNP TSC0003531
tattatgtgtatt

SEQ ID NO: 16122 - DNA, 13 bp, Artificial Sequence
  Oligonucleotide for detection of SNP TSC0003531
aatacacataata

SEQ ID NO: 16123 - DNA, 13 bp, Artificial Sequence
  Oligonucleotide for detection of SNP TSC0003531
tattatatgtatt

SEQ ID NO: 16124 - DNA, 13 bp, Artificial Sequence
  Oligonucleotide for detection of SNP TSC0003531
aatacatataata

SEQ ID NO: 16125 - DNA, 13 bp, Artificial Sequence
  Oligonucleotide for detection of SNP TSC0003531
tattacgtgtatt

SEQ ID NO: 16126 - DNA, 13 bp, Artificial Sequence
  Oligonucleotide for detection of SNP TSC0003531
aatacacgtaata

SEQ ID NO: 16127 - DNA, 13 bp, Artificial Sequence
  Oligonucleotide for detection of SNP TSC0003532
gataggtttttaa

SEQ ID NO: 16128 - DNA, 13 bp, Artificial Sequence
  Oligonucleotide for detection of SNP TSC0003532
ttaaaaacctatc

SEQ ID NO: 16129 - DNA, 13 bp, Artificial Sequence
  Oligonucleotide for detection of SNP TSC0003532
gatagggttttaa

SEQ ID NO: 16130 - DNA, 13 bp, Artificial Sequence
  Oligonucleotide for detection of SNP TSC0003532
ttaaaaccctatc

SEQ ID NO: 16131 - DNA, 13 bp, Artificial Sequence
  Oligonucleotide for detection of SNP TSC0003532
ttgagaatttaty

SEQ ID NO: 16132 - DNA, 13 bp, Artificial Sequence
  Oligonucleotide for detection of SNP TSC0003532
rataaattctcaa

SEQ ID NO: 16133 - DNA, 13 bp, Artificial Sequence
  Oligonucleotide for detection of SNP TSC0003532
ttgagattttaty

SEQ ID NO: 16134 - DNA, 13 bp, Artificial Sequence
  Oligonucleotide for detection of SNP TSC0003532
rataaaatctcaa

SEQ ID NO: 16135 - DNA, 13 bp, Artificial Sequence
  Oligonucleotide for detection of SNP TSC0003533
tgatttatttgtt

SEQ ID NO: 16136 - DNA, 13 bp, Artificial Sequence
  Oligonucleotide for detection of SNP TSC0003533
aacaaataaatca

SEQ ID NO: 16137 - DNA, 13 bp, Artificial Sequence
  Oligonucleotide for detection of SNP TSC0003533
tgatttttttgtt

SEQ ID NO: 16138 - DNA, 13 bp, Artificial Sequence
  Oligonucleotide for detection of SNP TSC0003533
aacaaaaaaatca

SEQ ID NO: 16139 - DNA, 13 bp, Artificial Sequence
  Oligonucleotide for detection of SNP TSC0003533
aatagatgaatta

SEQ ID NO: 16140 - DNA, 13 bp, Artificial Sequence
  Oligonucleotide for detection of SNP TSC0003533
taattcatctatt

SEQ ID NO: 16141 - DNA, 13 bp, Artificial Sequence
  Oligonucleotide for detection of SNP TSC0003533
aatagaggaatta

SEQ ID NO: 16142 - DNA, 13 bp, Artificial Sequence
  Oligonucleotide for detection of SNP TSC0003533
taattcctctatt

SEQ ID NO: 16143 - DNA, 13 bp, Artificial Sequence
  Oligonucleotide for detection of SNP TSC0003534
atagtgaggttat

SEQ ID NO: 16144 - DNA, 13 bp, Artificial Sequence
  Oligonucleotide for detection of SNP TSC0003534
ataacctcactat

SEQ ID NO: 16145 - DNA, 13 bp, Artificial Sequence
  Oligonucleotide for detection of SNP TSC0003534
atagtgtggttat

SEQ ID NO: 16146 - DNA, 13 bp, Artificial Sequence
  Oligonucleotide for detection of SNP TSC0003534
ataaccacactat

SEQ ID NO: 16147 - DNA, 13 bp, Artificial Sequence
  Oligonucleotide for detection of SNP TSC0003534
atggttttattgt

SEQ ID NO: 16148 - DNA, 13 bp, Artificial Sequence
  Oligonucleotide for detection of SNP TSC0003534
acaataaaaccat

SEQ ID NO: 16149 - DNA, 13 bp, Artificial Sequence
  Oligonucleotide for detection of SNP TSC0003534
atggttatattgt

SEQ ID NO: 16150 - DNA, 13 bp, Artificial Sequence
  Oligonucleotide for detection of SNP TSC0003534
acaatataaccat

SEQ ID NO: 16151 - DNA, 13 bp, Artificial Sequence
  Oligonucleotide for detection of SNP TSC0003535
agttatgttttay

SEQ ID NO: 16152 - DNA, 13 bp, Artificial Sequence
  Oligonucleotide for detection of SNP TSC0003535
rtaaaacataact

SEQ ID NO: 16153 - DNA, 13 bp, Artificial Sequence
  Oligonucleotide for detection of SNP TSC0003535
agttatattttay

SEQ ID NO: 16154 - DNA, 13 bp, Artificial Sequence
  Oligonucleotide for detection of SNP TSC0003535
rtaaaatataact

SEQ ID NO: 16155 - DNA, 13 bp, Artificial Sequence
  Oligonucleotide for detection of SNP TSC0003536
atatagattggty

SEQ ID NO: 16156 - DNA, 13 bp, Artificial Sequence
  Oligonucleotide for detection of SNP TSC0003536
raccaatctatat

SEQ ID NO: 16157 - DNA, 13 bp, Artificial Sequence
  Oligonucleotide for detection of SNP TSC0003536
atataggttggty

SEQ ID NO: 16158 - DNA, 13 bp, Artificial Sequence
  Oligonucleotide for detection of SNP TSC0003536
raccaacctatat

SEQ ID NO: 16159 - DNA, 13 bp, Artificial Sequence
  Oligonucleotide for detection of SNP TSC0003538
tatgggtaggtay

SEQ ID NO: 16160 - DNA, 13 bp, Artificial Sequence
  Oligonucleotide for detection of SNP TSC0003538
rtacctacccata

SEQ ID NO: 16161 - DNA, 13 bp, Artificial Sequence
  Oligonucleotide for detection of SNP TSC0003538
tatggggaggtay

SEQ ID NO: 16162 - DNA, 13 bp, Artificial Sequence
  Oligonucleotide for detection of SNP TSC0003538
rtacctccccata

SEQ ID NO: 16163 - DNA, 13 bp, Artificial Sequence
  Oligonucleotide for detection of SNP TSC0003538
gtatttgtttata

SEQ ID NO: 16164 - DNA, 13 bp, Artificial Sequence
  Oligonucleotide for detection of SNP TSC0003538
tataaacaaatac

SEQ ID NO: 16165 - DNA, 13 bp, Artificial Sequence
  Oligonucleotide for detection of SNP TSC0003538
gtatttttttata

SEQ ID NO: 16166 - DNA, 13 bp, Artificial Sequence
  Oligonucleotide for detection of SNP TSC0003538
tataaaaaaatac

SEQ ID NO: 16167 - DNA, 13 bp, Artificial Sequence
  Oligonucleotide for detection of SNP TSC0003539
gtgggaggaggat

SEQ ID NO: 16168 - DNA, 13 bp, Artificial Sequence
  Oligonucleotide for detection of SNP TSC0003539
atcctcctcccac

SEQ ID NO: 16169 - DNA, 13 bp, Artificial Sequence
  Oligonucleotide for detection of SNP TSC0003539
gtgggaagaggat

SEQ ID NO: 16170 - DNA, 13 bp, Artificial Sequence
  Oligonucleotide for detection of SNP TSC0003539
atcctcttcccac

SEQ ID NO: 16171 - DNA, 13 bp, Artificial Sequence
  Oligonucleotide for detection of SNP TSC0003540
gaaagaagaaata

SEQ ID NO: 16172 - DNA, 13 bp, Artificial Sequence
  Oligonucleotide for detection of SNP TSC0003540
tatttcttctttc

SEQ ID NO: 16173 - DNA, 13 bp, Artificial Sequence
  Oligonucleotide for detection of SNP TSC0003540
gaaagatgaaata

SEQ ID NO: 16174 - DNA, 13 bp, Artificial Sequence
  Oligonucleotide for detection of SNP TSC0003540
tatttcatctttc

SEQ ID NO: 16175 - DNA, 13 bp, Artificial Sequence
  Oligonucleotide for detection of SNP TSC0003540
tatttttttttty

SEQ ID NO: 16176 - DNA, 13 bp, Artificial Sequence
  Oligonucleotide for detection of SNP TSC0003540
raaaaaaaaaata

SEQ ID NO: 16177 - DNA, 13 bp, Artificial Sequence
  Oligonucleotide for detection of SNP TSC0003541
tagataagtgtta

SEQ ID NO: 16178 - DNA, 13 bp, Artificial Sequence
  Oligonucleotide for detection of SNP TSC0003541
taacacttatcta

SEQ ID NO: 16179 - DNA, 13 bp, Artificial Sequence
  Oligonucleotide for detection of SNP TSC0003541
tagatatgtgtta

SEQ ID NO: 16180 - DNA, 13 bp, Artificial Sequence
  Oligonucleotide for detection of SNP TSC0003541
taacacatatcta

SEQ ID NO: 16181 - DNA, 13 bp, Artificial Sequence
  Oligonucleotide for detection of SNP TSC0003541
tagatacgtgtta

SEQ ID NO: 16182 - DNA, 13 bp, Artificial Sequence
  Oligonucleotide for detection of SNP TSC0003541
taacacgtatcta

SEQ ID NO: 16183 - DNA, 13 bp, Artificial Sequence
  Oligonucleotide for detection of SNP TSC0003542
tttttgtgtaata

SEQ ID NO: 16184 - DNA, 13 bp, Artificial Sequence
  Oligonucleotide for detection of SNP TSC0003542
tattacacaaaaa

SEQ ID NO: 16185 - DNA, 13 bp, Artificial Sequence
  Oligonucleotide for detection of SNP TSC0003542
tttttgcgtaata

SEQ ID NO: 16186 - DNA, 13 bp, Artificial Sequence
  Oligonucleotide for detection of SNP TSC0003542
tattacgcaaaaa

SEQ ID NO: 16187 - DNA, 13 bp, Artificial Sequence
  Oligonucleotide for detection of SNP TSC0003542
tgttatgtaggaa

SEQ ID NO: 16188 - DNA, 13 bp, Artificial Sequence
  Oligonucleotide for detection of SNP TSC0003542
ttcctacataaca

SEQ ID NO: 16189 - DNA, 13 bp, Artificial Sequence
  Oligonucleotide for detection of SNP TSC0003542
tgttatataggaa

SEQ ID NO: 16190 - DNA, 13 bp, Artificial Sequence
  Oligonucleotide for detection of SNP TSC0003542
ttcctatataaca

SEQ ID NO: 16191 - DNA, 13 bp, Artificial Sequence
  Oligonucleotide for detection of SNP TSC0003542
tgttacgtaggaa

SEQ ID NO: 16192 - DNA, 13 bp, Artificial Sequence
  Oligonucleotide for detection of SNP TSC0003542
ttcctacgtaaca

SEQ ID NO: 16193 - DNA, 13 bp, Artificial Sequence
  Oligonucleotide for detection of SNP TSC0003543
attttagtattgt

SEQ ID NO: 16194 - DNA, 13 bp, Artificial Sequence
  Oligonucleotide for detection of SNP TSC0003543
acaatactaaaat

SEQ ID NO: 16195 - DNA, 13 bp, Artificial Sequence
  Oligonucleotide for detection of SNP TSC0003543
attttaatattgt

SEQ ID NO: 16196 - DNA, 13 bp, Artificial Sequence
  Oligonucleotide for detection of SNP TSC0003543
acaatattaaaat

SEQ ID NO: 16197 - DNA, 13 bp, Artificial Sequence
  Oligonucleotide for detection of SNP TSC0003544
tttttaatattgt

SEQ ID NO: 16198 - DNA, 13 bp, Artificial Sequence
  Oligonucleotide for detection of SNP TSC0003544
acaatattaaaaa

SEQ ID NO: 16199 - DNA, 13 bp, Artificial Sequence
  Oligonucleotide for detection of SNP TSC0003544
tttttagtattgt

SEQ ID NO: 16200 - DNA, 13 bp, Artificial Sequence
  Oligonucleotide for detection of SNP TSC0003544
acaatactaaaaa

SEQ ID NO: 16201 - DNA, 13 bp, Artificial Sequence
  Oligonucleotide for detection of SNP TSC0003545
tttaggaagagta

SEQ ID NO: 16202 - DNA, 13 bp, Artificial Sequence
  Oligonucleotide for detection of SNP TSC0003545
tactcttcctaaa

SEQ ID NO: 16203 - DNA, 13 bp, Artificial Sequence
  Oligonucleotide for detection of SNP TSC0003545
tttaggtagagta

SEQ ID NO: 16204 - DNA, 13 bp, Artificial Sequence
  Oligonucleotide for detection of SNP TSC0003545
tactctacctaaa

SEQ ID NO: 16205 - DNA, 13 bp, Artificial Sequence
  Oligonucleotide for detection of SNP TSC0003545
tattttttttgga

SEQ ID NO: 16206 - DNA, 13 bp, Artificial Sequence
  Oligonucleotide for detection of SNP TSC0003545
tccaaaaaaaata

SEQ ID NO: 16207 - DNA, 13 bp, Artificial Sequence
  Oligonucleotide for detection of SNP TSC0003545
tattttgtttgga

SEQ ID NO: 16208 - DNA, 13 bp, Artificial Sequence
  Oligonucleotide for detection of SNP TSC0003545
tccaaacaaaata

SEQ ID NO: 16209 - DNA, 13 bp, Artificial Sequence
  Oligonucleotide for detection of SNP TSC0003546
aaagtaaaagtat

SEQ ID NO: 16210 - DNA, 13 bp, Artificial Sequence
  Oligonucleotide for detection of SNP TSC0003546
atacttttacttt

SEQ ID NO: 16211 - DNA, 13 bp, Artificial Sequence
  Oligonucleotide for detection of SNP TSC0003546
aaagtagaagtat

SEQ ID NO: 16212 - DNA, 13 bp, Artificial Sequence
  Oligonucleotide for detection of SNP TSC0003546
atacttctacttt

SEQ ID NO: 16213 - DNA, 13 bp, Artificial Sequence
  Oligonucleotide for detection of SNP TSC0003547
ataaatatatggg

SEQ ID NO: 16214 - DNA, 13 bp, Artificial Sequence
  Oligonucleotide for detection of SNP TSC0003547
cccatatatttat

SEQ ID NO: 16215 - DNA, 13 bp, Artificial Sequence
  Oligonucleotide for detection of SNP TSC0003547
ataaatttatggg

SEQ ID NO: 16216 - DNA, 13 bp, Artificial Sequence
  Oligonucleotide for detection of SNP TSC0003547
cccataaatttat

SEQ ID NO: 16217 - DNA, 13 bp, Artificial Sequence
  Oligonucleotide for detection of SNP TSC0003547
tttatatgtttgt

SEQ ID NO: 16218 - DNA, 13 bp, Artificial Sequence
  Oligonucleotide for detection of SNP TSC0003547
acaaacatataaa

SEQ ID NO: 16219 - DNA, 13 bp, Artificial Sequence
  Oligonucleotide for detection of SNP TSC0003547
tttataagtttgt

SEQ ID NO: 16220 - DNA, 13 bp, Artificial Sequence
  Oligonucleotide for detection of SNP TSC0003547
acaaacttataaa

SEQ ID NO: 16221 - DNA, 13 bp, Artificial Sequence
  Oligonucleotide for detection of SNP TSC0003548
aattaaataaata

SEQ ID NO: 16222 - DNA, 13 bp, Artificial Sequence
  Oligonucleotide for detection of SNP TSC0003548
tatttatttaatt

SEQ ID NO: 16223 - DNA, 13 bp, Artificial Sequence
  Oligonucleotide for detection of SNP TSC0003548
aattaattaaata

SEQ ID NO: 16224 - DNA, 13 bp, Artificial Sequence
  Oligonucleotide for detection of SNP TSC0003548
tatttaattaatt

SEQ ID NO: 16225 - DNA, 13 bp, Artificial Sequence
  Oligonucleotide for detection of SNP TSC0003548
tgtttgtttggtt

SEQ ID NO: 16226 - DNA, 13 bp, Artificial Sequence
  Oligonucleotide for detection of SNP TSC0003548
aaccaaacaaaca

SEQ ID NO: 16227 - DNA, 13 bp, Artificial Sequence
  Oligonucleotide for detection of SNP TSC0003548
tgtttggttggtt

SEQ ID NO: 16228 - DNA, 13 bp, Artificial Sequence
  Oligonucleotide for detection of SNP TSC0003548
aaccaaccaaaca

SEQ ID NO: 16229 - DNA, 13 bp, Artificial Sequence
  Oligonucleotide for detection of SNP TSC0003549
gttgttattttty

SEQ ID NO: 16230 - DNA, 13 bp, Artificial Sequence
  Oligonucleotide for detection of SNP TSC0003549
raaaaataacaac

SEQ ID NO: 16231 - DNA, 13 bp, Artificial Sequence
  Oligonucleotide for detection of SNP TSC0003549
gttgtcgttttty

SEQ ID NO: 16232 - DNA, 13 bp, Artificial Sequence
  Oligonucleotide for detection of SNP TSC0003549
raaaaacgacaac

SEQ ID NO: 16233 - DNA, 13 bp, Artificial Sequence
  Oligonucleotide for detection of SNP TSC0003549
ggaggatgatagy

SEQ ID NO: 16234 - DNA, 13 bp, Artificial Sequence
  Oligonucleotide for detection of SNP TSC0003549
rctatcatcctcc

SEQ ID NO: 16235 - DNA, 13 bp, Artificial Sequence
  Oligonucleotide for detection of SNP TSC0003549
ggaggacgatagy

SEQ ID NO: 16236 - DNA, 13 bp, Artificial Sequence
  Oligonucleotide for detection of SNP TSC0003549
rctatcgtcctcc

SEQ ID NO: 16237 - DNA, 13 bp, Artificial Sequence
  Oligonucleotide for detection of SNP TSC0003550
aaataaaagttta

SEQ ID NO: 16238 - DNA, 13 bp, Artificial Sequence
  Oligonucleotide for detection of SNP TSC0003550
taaacttttattt

SEQ ID NO: 16239 - DNA, 13 bp, Artificial Sequence
  Oligonucleotide for detection of SNP TSC0003550
aaataagagttta

SEQ ID NO: 16240 - DNA, 13 bp, Artificial Sequence
  Oligonucleotide for detection of SNP TSC0003550
taaactcttattt

SEQ ID NO: 16241 - DNA, 13 bp, Artificial Sequence
  Oligonucleotide for detection of SNP TSC0003551
ggttttatttatt

SEQ ID NO: 16242 - DNA, 13 bp, Artificial Sequence
  Oligonucleotide for detection of SNP TSC0003551
aataaataaaacc

SEQ ID NO: 16243 - DNA, 13 bp, Artificial Sequence
  Oligonucleotide for detection of SNP TSC0003551
ggttttgtttatt

SEQ ID NO: 16244 - DNA, 13 bp, Artificial Sequence
  Oligonucleotide for detection of SNP TSC0003551
aataaacaaaacc

SEQ ID NO: 16245 - DNA, 13 bp, Artificial Sequence
  Oligonucleotide for detection of SNP TSC0003552
gtgagttgaaaty

SEQ ID NO: 16246 - DNA, 13 bp, Artificial Sequence
  Oligonucleotide for detection of SNP TSC0003552
ratttcaactcac

SEQ ID NO: 16247 - DNA, 13 bp, Artificial Sequence
  Oligonucleotide for detection of SNP TSC0003552
gtgagtcgaaaty

SEQ ID NO: 16248 - DNA, 13 bp, Artificial Sequence
  Oligonucleotide for detection of SNP TSC0003552
ratttcgactcac

SEQ ID NO: 16249 - DNA, 13 bp, Artificial Sequence
  Oligonucleotide for detection of SNP TSC0003552
gattttggtttay

SEQ ID NO: 16250 - DNA, 13 bp, Artificial Sequence
  Oligonucleotide for detection of SNP TSC0003552
rtaaaccaaaatc

SEQ ID NO: 16251 - DNA, 13 bp, Artificial Sequence
  Oligonucleotide for detection of SNP TSC0003552
gattttagtttay

SEQ ID NO: 16252 - DNA, 13 bp, Artificial Sequence
  Oligonucleotide for detection of SNP TSC0003552
rtaaactaaaatc

SEQ ID NO: 16253 - DNA, 13 bp, Artificial Sequence
  Oligonucleotide for detection of SNP TSC0003552
gatttcggtttay

SEQ ID NO: 16254 - DNA, 13 bp, Artificial Sequence
  Oligonucleotide for detection of SNP TSC0003552
rtaaaccgaaatc

SEQ ID NO: 16255 - DNA, 13 bp, Artificial Sequence
  Oligonucleotide for detection of SNP TSC0003553
aattttgagaatt

SEQ ID NO: 16256 - DNA, 13 bp, Artificial Sequence
  Oligonucleotide for detection of SNP TSC0003553
aattctcaaaatt

SEQ ID NO: 16257 - DNA, 13 bp, Artificial Sequence
  Oligonucleotide for detection of SNP TSC0003553
aattttaagaatt

SEQ ID NO: 16258 - DNA, 13 bp, Artificial Sequence
  Oligonucleotide for detection of SNP TSC0003553
aattcttaaaatt

SEQ ID NO: 16259 - DNA, 13 bp, Artificial Sequence
  Oligonucleotide for detection of SNP TSC0003556
ttttaggttgtgg

SEQ ID NO: 16260 - DNA, 13 bp, Artificial Sequence
  Oligonucleotide for detection of SNP TSC0003556
ccacaacctaaaa

SEQ ID NO: 16261 - DNA, 13 bp, Artificial Sequence
  Oligonucleotide for detection of SNP TSC0003556
ttttagattgtgg

SEQ ID NO: 16262 - DNA, 13 bp, Artificial Sequence
  Oligonucleotide for detection of SNP TSC0003556
ccacaatctaaaa

SEQ ID NO: 16263 - DNA, 13 bp, Artificial Sequence
  Oligonucleotide for detection of SNP TSC0003558
gaaatttggttty

SEQ ID NO: 16264 - DNA, 13 bp, Artificial Sequence
  Oligonucleotide for detection of SNP TSC0003558
raaaccaaatttc

SEQ ID NO: 16265 - DNA, 13 bp, Artificial Sequence
  Oligonucleotide for detection of SNP TSC0003558
gaaattcggttty

SEQ ID NO: 16266 - DNA, 13 bp, Artificial Sequence
  Oligonucleotide for detection of SNP TSC0003558
raaaccgaatttc

SEQ ID NO: 16267 - DNA, 13 bp, Artificial Sequence
  Oligonucleotide for detection of SNP TSC0003558
gagattgggttty

SEQ ID NO: 16268 - DNA, 13 bp, Artificial Sequence
  Oligonucleotide for detection of SNP TSC0003558
raaacccaatctc

SEQ ID NO: 16269 - DNA, 13 bp, Artificial Sequence
  Oligonucleotide for detection of SNP TSC0003558
gagattaggttty

SEQ ID NO: 16270 - DNA, 13 bp, Artificial Sequence
  Oligonucleotide for detection of SNP TSC0003558
raaacctaatctc

SEQ ID NO: 16271 - DNA, 13 bp, Artificial Sequence
  Oligonucleotide for detection of SNP TSC0003558
gagatcgggttty

SEQ ID NO: 16272 - DNA, 13 bp, Artificial Sequence
  Oligonucleotide for detection of SNP TSC0003558
raaacccgatctc

SEQ ID NO: 16273 - DNA, 13 bp, Artificial Sequence
  Oligonucleotide for detection of SNP TSC0003559
tatgttatatata

SEQ ID NO: 16274 - DNA, 13 bp, Artificial Sequence
  Oligonucleotide for detection of SNP TSC0003559
tatatataacata

SEQ ID NO: 16275 - DNA, 13 bp, Artificial Sequence
  Oligonucleotide for detection of SNP TSC0003559
tatgttttatata

SEQ ID NO: 16276 - DNA, 13 bp, Artificial Sequence
  Oligonucleotide for detection of SNP TSC0003559
tatataaaacata

SEQ ID NO: 16277 - DNA, 13 bp, Artificial Sequence
  Oligonucleotide for detection of SNP TSC0003559
tatatataatata

SEQ ID NO: 16278 - DNA, 13 bp, Artificial Sequence
  Oligonucleotide for detection of SNP TSC0003559
tatattatatata

SEQ ID NO: 16279 - DNA, 13 bp, Artificial Sequence
  Oligonucleotide for detection of SNP TSC0003559
tatataaaatata

SEQ ID NO: 16280 - DNA, 13 bp, Artificial Sequence
  Oligonucleotide for detection of SNP TSC0003559
tatattttatata

SEQ ID NO: 16281 - DNA, 13 bp, Artificial Sequence
  Oligonucleotide for detection of SNP TSC0003560
agttttgttgaty

SEQ ID NO: 16282 - DNA, 13 bp, Artificial Sequence
  Oligonucleotide for detection of SNP TSC0003560
ratcaacaaaact

SEQ ID NO: 16283 - DNA, 13 bp, Artificial Sequence
  Oligonucleotide for detection of SNP TSC0003560
agttttattgaty

SEQ ID NO: 16284 - DNA, 13 bp, Artificial Sequence
  Oligonucleotide for detection of SNP TSC0003560
ratcaataaaact

SEQ ID NO: 16285 - DNA, 13 bp, Artificial Sequence
  Oligonucleotide for detection of SNP TSC0003561
agtatatgtttta

SEQ ID NO: 16286 - DNA, 13 bp, Artificial Sequence
  Oligonucleotide for detection of SNP TSC0003561
taaaacatatact

SEQ ID NO: 16287 - DNA, 13 bp, Artificial Sequence
  Oligonucleotide for detection of SNP TSC0003561
agtatacgtttta

SEQ ID NO: 16288 - DNA, 13 bp, Artificial Sequence
  Oligonucleotide for detection of SNP TSC0003561
taaaacgtatact

SEQ ID NO: 16289 - DNA, 13 bp, Artificial Sequence
  Oligonucleotide for detection of SNP TSC0003561
taggatgtatatt

SEQ ID NO: 16290 - DNA, 13 bp, Artificial Sequence
  Oligonucleotide for detection of SNP TSC0003561
aatatacatccta

SEQ ID NO: 16291 - DNA, 13 bp, Artificial Sequence
  Oligonucleotide for detection of SNP TSC0003561
taggatatatatt

SEQ ID NO: 16292 - DNA, 13 bp, Artificial Sequence
  Oligonucleotide for detection of SNP TSC0003561
aatatatatccta

SEQ ID NO: 16293 - DNA, 13 bp, Artificial Sequence
  Oligonucleotide for detection of SNP TSC0003561
taggacgtatatt

SEQ ID NO: 16294 - DNA, 13 bp, Artificial Sequence
  Oligonucleotide for detection of SNP TSC0003561
aatatacgtccta

SEQ ID NO: 16295 - DNA, 13 bp, Artificial Sequence
  Oligonucleotide for detection of SNP TSC0003562
tataatgtaatga

SEQ ID NO: 16296 - DNA, 13 bp, Artificial Sequence
  Oligonucleotide for detection of SNP TSC0003562
tcattacattata

SEQ ID NO: 16297 - DNA, 13 bp, Artificial Sequence
  Oligonucleotide for detection of SNP TSC0003562
tataatataatga

SEQ ID NO: 16298 - DNA, 13 bp, Artificial Sequence
  Oligonucleotide for detection of SNP TSC0003562
tcattatattata

SEQ ID NO: 16299 - DNA, 13 bp, Artificial Sequence
  Oligonucleotide for detection of SNP TSC0003563
gtagtggtatttt

SEQ ID NO: 16300 - DNA, 13 bp, Artificial Sequence
  Oligonucleotide for detection of SNP TSC0003563
aaaataccactac

SEQ ID NO: 16301 - DNA, 13 bp, Artificial Sequence
  Oligonucleotide for detection of SNP TSC0003563
gtagtgatatttt

SEQ ID NO: 16302 - DNA, 13 bp, Artificial Sequence
  Oligonucleotide for detection of SNP TSC0003563
aaaatatcactac

SEQ ID NO: 16303 - DNA, 13 bp, Artificial Sequence
  Oligonucleotide for detection of SNP TSC0003564
tataatatgtaaa

SEQ ID NO: 16304 - DNA, 13 bp, Artificial Sequence
  Oligonucleotide for detection of SNP TSC0003564
tttacatattata

SEQ ID NO: 16305 - DNA, 13 bp, Artificial Sequence
  Oligonucleotide for detection of SNP TSC0003564
tataatgtgtaaa

SEQ ID NO: 16306 - DNA, 13 bp, Artificial Sequence
  Oligonucleotide for detection of SNP TSC0003564
tttacacattata

SEQ ID NO: 16307 - DNA, 13 bp, Artificial Sequence
  Oligonucleotide for detection of SNP TSC0003564
tataacgtgtaaa

SEQ ID NO: 16308 - DNA, 13 bp, Artificial Sequence
  Oligonucleotide for detection of SNP TSC0003564
tttacacgttata

SEQ ID NO: 16309 - DNA, 13 bp, Artificial Sequence
  Oligonucleotide for detection of SNP TSC0003564
tttatatgttata

SEQ ID NO: 16310 - DNA, 13 bp, Artificial Sequence
  Oligonucleotide for detection of SNP TSC0003564
tataacatataaa

SEQ ID NO: 16311 - DNA, 13 bp, Artificial Sequence
  Oligonucleotide for detection of SNP TSC0003564
tttatacgttata

SEQ ID NO: 16312 - DNA, 13 bp, Artificial Sequence
  Oligonucleotide for detection of SNP TSC0003564
tataacgtataaa

SEQ ID NO: 16313 - DNA, 13 bp, Artificial Sequence
  Oligonucleotide for detection of SNP TSC0003566
aaatgaatataag

SEQ ID NO: 16314 - DNA, 13 bp, Artificial Sequence
  Oligonucleotide for detection of SNP TSC0003566
cttatattcattt

SEQ ID NO: 16315 - DNA, 13 bp, Artificial Sequence
  Oligonucleotide for detection of SNP TSC0003566
aaatgattataag

SEQ ID NO: 16316 - DNA, 13 bp, Artificial Sequence
  Oligonucleotide for detection of SNP TSC0003566
cttataatcattt

SEQ ID NO: 16317 - DNA, 13 bp, Artificial Sequence
  Oligonucleotide for detection of SNP TSC0003566
tttgtatttattt

SEQ ID NO: 16318 - DNA, 13 bp, Artificial Sequence
  Oligonucleotide for detection of SNP TSC0003566
aaataaatacaaa

SEQ ID NO: 16319 - DNA, 13 bp, Artificial Sequence
  Oligonucleotide for detection of SNP TSC0003566
tttgtaattattt

SEQ ID NO: 16320 - DNA, 13 bp, Artificial Sequence
  Oligonucleotide for detection of SNP TSC0003566
aaataattacaaa

SEQ ID NO: 16321 - DNA, 13 bp, Artificial Sequence
  Oligonucleotide for detection of SNP TSC0003567
taaaattgtttga

SEQ ID NO: 16322 - DNA, 13 bp, Artificial Sequence
  Oligonucleotide for detection of SNP TSC0003567
tcaaacaatttta

SEQ ID NO: 16323 - DNA, 13 bp, Artificial Sequence
  Oligonucleotide for detection of SNP TSC0003567
taaaatcgtttga

SEQ ID NO: 16324 - DNA, 13 bp, Artificial Sequence
  Oligonucleotide for detection of SNP TSC0003567
tcaaacgatttta

SEQ ID NO: 16325 - DNA, 13 bp, Artificial Sequence
  Oligonucleotide for detection of SNP TSC0003567
ttaagtggtttta

SEQ ID NO: 16326 - DNA, 13 bp, Artificial Sequence
  Oligonucleotide for detection of SNP TSC0003567
taaaaccacttaa

SEQ ID NO: 16327 - DNA, 13 bp, Artificial Sequence
  Oligonucleotide for detection of SNP TSC0003567
ttaagtagtttta

SEQ ID NO: 16328 - DNA, 13 bp, Artificial Sequence
  Oligonucleotide for detection of SNP TSC0003567
taaaactacttaa

SEQ ID NO: 16329 - DNA, 13 bp, Artificial Sequence
  Oligonucleotide for detection of SNP TSC0003567
ttaagcggtttta

SEQ ID NO: 16330 - DNA, 13 bp, Artificial Sequence
  Oligonucleotide for detection of SNP TSC0003567
taaaaccgcttaa

SEQ ID NO: 16331 - DNA, 13 bp, Artificial Sequence
  Oligonucleotide for detection of SNP TSC0003568
tttttaatattaa

SEQ ID NO: 16332 - DNA, 13 bp, Artificial Sequence
  Oligonucleotide for detection of SNP TSC0003568
ttaatattaaaaa

SEQ ID NO: 16333 - DNA, 13 bp, Artificial Sequence
  Oligonucleotide for detection of SNP TSC0003568
tttttattattaa

SEQ ID NO: 16334 - DNA, 13 bp, Artificial Sequence
  Oligonucleotide for detection of SNP TSC0003568
ttaataataaaaa

SEQ ID NO: 16335 - DNA, 13 bp, Artificial Sequence
  Oligonucleotide for detection of SNP TSC0003568
ttgatattagaaa

SEQ ID NO: 16336 - DNA, 13 bp, Artificial Sequence
  Oligonucleotide for detection of SNP TSC0003568
tttctaatatcaa

SEQ ID NO: 16337 - DNA, 13 bp, Artificial Sequence
  Oligonucleotide for detection of SNP TSC0003568
ttgataatagaaa

SEQ ID NO: 16338 - DNA, 13 bp, Artificial Sequence
  Oligonucleotide for detection of SNP TSC0003568
tttctattatcaa

SEQ ID NO: 16339 - DNA, 13 bp, Artificial Sequence
  Oligonucleotide for detection of SNP TSC0003570
aattattgtgggg

SEQ ID NO: 16340 - DNA, 13 bp, Artificial Sequence
  Oligonucleotide for detection of SNP TSC0003570
ccccacaataatt

SEQ ID NO: 16341 - DNA, 13 bp, Artificial Sequence
  Oligonucleotide for detection of SNP TSC0003570
aattatcgtgggg

SEQ ID NO: 16342 - DNA, 13 bp, Artificial Sequence
  Oligonucleotide for detection of SNP TSC0003570
ccccacgataatt

SEQ ID NO: 16343 - DNA, 13 bp, Artificial Sequence
  Oligonucleotide for detection of SNP TSC0003570
ttttatgatagtt

SEQ ID NO: 16344 - DNA, 13 bp, Artificial Sequence
  Oligonucleotide for detection of SNP TSC0003570
aactatcataaaa

SEQ ID NO: 16345 - DNA, 13 bp, Artificial Sequence
  Oligonucleotide for detection of SNP TSC0003570
ttttataatagtt

SEQ ID NO: 16346 - DNA, 13 bp, Artificial Sequence
  Oligonucleotide for detection of SNP TSC0003570
aactattataaaa

SEQ ID NO: 16347 - DNA, 13 bp, Artificial Sequence
  Oligonucleotide for detection of SNP TSC0003570
ttttacgatagtt

SEQ ID NO: 16348 - DNA, 13 bp, Artificial Sequence
  Oligonucleotide for detection of SNP TSC0003570
aactatcgtaaaa

SEQ ID NO: 16349 - DNA, 13 bp, Artificial Sequence
  Oligonucleotide for detection of SNP TSC0003571
aattaagtaatta

SEQ ID NO: 16350 - DNA, 13 bp, Artificial Sequence
  Oligonucleotide for detection of SNP TSC0003571
taattacttaatt

SEQ ID NO: 16351 - DNA, 13 bp, Artificial Sequence
  Oligonucleotide for detection of SNP TSC0003571
aattaaataatta

SEQ ID NO: 16352 - DNA, 13 bp, Artificial Sequence
  Oligonucleotide for detection of SNP TSC0003571
taattatttaatt

SEQ ID NO: 16353 - DNA, 13 bp, Artificial Sequence
  Oligonucleotide for detection of SNP TSC0003573
gtagggaatggaa

SEQ ID NO: 16354 - DNA, 13 bp, Artificial Sequence
  Oligonucleotide for detection of SNP TSC0003573
ttccattccctac

SEQ ID NO: 16355 - DNA, 13 bp, Artificial Sequence
  Oligonucleotide for detection of SNP TSC0003573
gtagggtatggaa

SEQ ID NO: 16356 - DNA, 13 bp, Artificial Sequence
  Oligonucleotide for detection of SNP TSC0003573
ttccataccctac

SEQ ID NO: 16357 - DNA, 13 bp, Artificial Sequence
  Oligonucleotide for detection of SNP TSC0003573
ttttattttttgy

SEQ ID NO: 16358 - DNA, 13 bp, Artificial Sequence
  Oligonucleotide for detection of SNP TSC0003573
rcaaaaaataaaa

SEQ ID NO: 16359 - DNA, 13 bp, Artificial Sequence
  Oligonucleotide for detection of SNP TSC0003573
ttttatgttttgy

SEQ ID NO: 16360 - DNA, 13 bp, Artificial Sequence
  Oligonucleotide for detection of SNP TSC0003573
rcaaaacataaaa

SEQ ID NO: 16361 - DNA, 13 bp, Artificial Sequence
  Oligonucleotide for detection of SNP TSC0003574
tttgtgtgaagaa

SEQ ID NO: 16362 - DNA, 13 bp, Artificial Sequence
  Oligonucleotide for detection of SNP TSC0003574
ttcttcacacaaa

SEQ ID NO: 16363 - DNA, 13 bp, Artificial Sequence
  Oligonucleotide for detection of SNP TSC0003574
tttgtgggaagaa

SEQ ID NO: 16364 - DNA, 13 bp, Artificial Sequence
  Oligonucleotide for detection of SNP TSC0003574
ttcttcccacaaa

SEQ ID NO: 16365 - DNA, 13 bp, Artificial Sequence
  Oligonucleotide for detection of SNP TSC0003574
tttgcgtgaagaa

SEQ ID NO: 16366 - DNA, 13 bp, Artificial Sequence
  Oligonucleotide for detection of SNP TSC0003574
ttcttcacgcaaa

SEQ ID NO: 16367 - DNA, 13 bp, Artificial Sequence
  Oligonucleotide for detection of SNP TSC0003574
tttgcgggaagaa

SEQ ID NO: 16368 - DNA, 13 bp, Artificial Sequence
  Oligonucleotide for detection of SNP TSC0003574
ttcttcccgcaaa

SEQ ID NO: 16369 - DNA, 13 bp, Artificial Sequence
  Oligonucleotide for detection of SNP TSC0003574
tttgtgcgaagaa

SEQ ID NO: 16370 - DNA, 13 bp, Artificial Sequence
  Oligonucleotide for detection of SNP TSC0003574
ttcttcgcacaaa

SEQ ID NO: 16371 - DNA, 13 bp, Artificial Sequence
  Oligonucleotide for detection of SNP TSC0003574
tttgcgcgaagaa

SEQ ID NO: 16372 - DNA, 13 bp, Artificial Sequence
  Oligonucleotide for detection of SNP TSC0003574
ttcttcgcgcaaa

SEQ ID NO: 16373 - DNA, 13 bp, Artificial Sequence
  Oligonucleotide for detection of SNP TSC0003574
ttttttgtgtaga

SEQ ID NO: 16374 - DNA, 13 bp, Artificial Sequence
  Oligonucleotide for detection of SNP TSC0003574
tctacacaaaaaa

SEQ ID NO: 16375 - DNA, 13 bp, Artificial Sequence
  Oligonucleotide for detection of SNP TSC0003574
ttttttttgtaga

SEQ ID NO: 16376 - DNA, 13 bp, Artificial Sequence
  Oligonucleotide for detection of SNP TSC0003574
tctacaaaaaaaa

SEQ ID NO: 16377 - DNA, 13 bp, Artificial Sequence
  Oligonucleotide for detection of SNP TSC0003574
tttttcgtgtaga

SEQ ID NO: 16378 - DNA, 13 bp, Artificial Sequence
  Oligonucleotide for detection of SNP TSC0003574
tctacacgaaaaa

SEQ ID NO: 16379 - DNA, 13 bp, Artificial Sequence
  Oligonucleotide for detection of SNP TSC0003574
tttttttcgtaga

SEQ ID NO: 16380 - DNA, 13 bp, Artificial Sequence
  Oligonucleotide for detection of SNP TSC0003574
tctacgaaaaaaa

SEQ ID NO: 16381 - DNA, 13 bp, Artificial Sequence
  Oligonucleotide for detection of SNP TSC0003574
ttttttgcgtaga

SEQ ID NO: 16382 - DNA, 13 bp, Artificial Sequence
  Oligonucleotide for detection of SNP TSC0003574
tctacgcaaaaaa

SEQ ID NO: 16383 - DNA, 13 bp, Artificial Sequence
  Oligonucleotide for detection of SNP TSC0003574
tttttcgcgtaga

SEQ ID NO: 16384 - DNA, 13 bp, Artificial Sequence
  Oligonucleotide for detection of SNP TSC0003574
tctacgcgaaaaa

SEQ ID NO: 16385 - DNA, 13 bp, Artificial Sequence
  Oligonucleotide for detection of SNP TSC0003575
ggtgtattttgta

SEQ ID NO: 16386 - DNA, 13 bp, Artificial Sequence
  Oligonucleotide for detection of SNP TSC0003575
tacaaaatacacc

SEQ ID NO: 16387 - DNA, 13 bp, Artificial Sequence
  Oligonucleotide for detection of SNP TSC0003575
ggtgtagtttgta

SEQ ID NO: 16388 - DNA, 13 bp, Artificial Sequence
  Oligonucleotide for detection of SNP TSC0003575
tacaaactacacc

SEQ ID NO: 16389 - DNA, 13 bp, Artificial Sequence
  Oligonucleotide for detection of SNP TSC0003575
tgtagggtgtaty

SEQ ID NO: 16390 - DNA, 13 bp, Artificial Sequence
  Oligonucleotide for detection of SNP TSC0003575
ratacaccctaca

SEQ ID NO: 16391 - DNA, 13 bp, Artificial Sequence
  Oligonucleotide for detection of SNP TSC0003575
tgtaggttgtaty

SEQ ID NO: 16392 - DNA, 13 bp, Artificial Sequence
  Oligonucleotide for detection of SNP TSC0003575
ratacaacctaca

SEQ ID NO: 16393 - DNA, 13 bp, Artificial Sequence
  Oligonucleotide for detection of SNP TSC0003576
aattaggtttatt

SEQ ID NO: 16394 - DNA, 13 bp, Artificial Sequence
  Oligonucleotide for detection of SNP TSC0003576
aataaacctaatt

SEQ ID NO: 16395 - DNA, 13 bp, Artificial Sequence
  Oligonucleotide for detection of SNP TSC0003576
aattagatttatt

SEQ ID NO: 16396 - DNA, 13 bp, Artificial Sequence
  Oligonucleotide for detection of SNP TSC0003576
aataaatctaatt

SEQ ID NO: 16397 - DNA, 13 bp, Artificial Sequence
  Oligonucleotide for detection of SNP TSC0003577
tggtttggtttga

SEQ ID NO: 16398 - DNA, 13 bp, Artificial Sequence
  Oligonucleotide for detection of SNP TSC0003577
tcaaaccaaacca

SEQ ID NO: 16399 - DNA, 13 bp, Artificial Sequence
  Oligonucleotide for detection of SNP TSC0003577
tggtttagtttga

SEQ ID NO: 16400 - DNA, 13 bp, Artificial Sequence
  Oligonucleotide for detection of SNP TSC0003577
tcaaactaaacca

SEQ ID NO: 16401 - DNA, 13 bp, Artificial Sequence
  Oligonucleotide for detection of SNP TSC0003578
atttgtagtttta

SEQ ID NO: 16402 - DNA, 13 bp, Artificial Sequence
  Oligonucleotide for detection of SNP TSC0003578
taaaactacaaat

SEQ ID NO: 16403 - DNA, 13 bp, Artificial Sequence
  Oligonucleotide for detection of SNP TSC0003578
atttgtggtttta

SEQ ID NO: 16404 - DNA, 13 bp, Artificial Sequence
  Oligonucleotide for detection of SNP TSC0003578
taaaaccacaaat

SEQ ID NO: 16405 - DNA, 13 bp, Artificial Sequence
  Oligonucleotide for detection of SNP TSC0003579
aggaggtggagat

SEQ ID NO: 16406 - DNA, 13 bp, Artificial Sequence
  Oligonucleotide for detection of SNP TSC0003579
atctccacctcct

SEQ ID NO: 16407 - DNA, 13 bp, Artificial Sequence
  Oligonucleotide for detection of SNP TSC0003579
aggagggggagat

SEQ ID NO: 16408 - DNA, 13 bp, Artificial Sequence
  Oligonucleotide for detection of SNP TSC0003579
atctccccctcct

SEQ ID NO: 16409 - DNA, 13 bp, Artificial Sequence
  Oligonucleotide for detection of SNP TSC0003580
aaaatattttagg

SEQ ID NO: 16410 - DNA, 13 bp, Artificial Sequence
  Oligonucleotide for detection of SNP TSC0003580
cctaaaatatttt

SEQ ID NO: 16411 - DNA, 13 bp, Artificial Sequence
  Oligonucleotide for detection of SNP TSC0003580
aaaatagtttagg

SEQ ID NO: 16412 - DNA, 13 bp, Artificial Sequence
  Oligonucleotide for detection of SNP TSC0003580
cctaaactatttt

SEQ ID NO: 16413 - DNA, 13 bp, Artificial Sequence
  Oligonucleotide for detection of SNP TSC0003580
tttgaaatatttt

SEQ ID NO: 16414 - DNA, 13 bp, Artificial Sequence
  Oligonucleotide for detection of SNP TSC0003580
aaaatatttcaaa

SEQ ID NO: 16415 - DNA, 13 bp, Artificial Sequence
  Oligonucleotide for detection of SNP TSC0003580
tttgaattatttt

SEQ ID NO: 16416 - DNA, 13 bp, Artificial Sequence
  Oligonucleotide for detection of SNP TSC0003580
aaaataattcaaa

SEQ ID NO: 16417 - DNA, 13 bp, Artificial Sequence
  Oligonucleotide for detection of SNP TSC0003581
tgtagagagggtt

SEQ ID NO: 16418 - DNA, 13 bp, Artificial Sequence
  Oligonucleotide for detection of SNP TSC0003581
aaccctctctaca

SEQ ID NO: 16419 - DNA, 13 bp, Artificial Sequence
  Oligonucleotide for detection of SNP TSC0003581
tgtagaaagggtt

SEQ ID NO: 16420 - DNA, 13 bp, Artificial Sequence
  Oligonucleotide for detection of SNP TSC0003581
aaccctttctaca

SEQ ID NO: 16421 - DNA, 13 bp, Artificial Sequence
  Oligonucleotide for detection of SNP TSC0003582
attgagaggtgta

SEQ ID NO: 16422 - DNA, 13 bp, Artificial Sequence
  Oligonucleotide for detection of SNP TSC0003582
tacacctctcaat

SEQ ID NO: 16423 - DNA, 13 bp, Artificial Sequence
  Oligonucleotide for detection of SNP TSC0003582
attgagtggtgta

SEQ ID NO: 16424 - DNA, 13 bp, Artificial Sequence
  Oligonucleotide for detection of SNP TSC0003582
tacaccactcaat

SEQ ID NO: 16425 - DNA, 13 bp, Artificial Sequence
  Oligonucleotide for detection of SNP TSC0003582
attgagcggtgta

SEQ ID NO: 16426 - DNA, 13 bp, Artificial Sequence
  Oligonucleotide for detection of SNP TSC0003582
tacaccgctcaat

SEQ ID NO: 16427 - DNA, 13 bp, Artificial Sequence
  Oligonucleotide for detection of SNP TSC0003582
tatattttttagt

SEQ ID NO: 16428 - DNA, 13 bp, Artificial Sequence
  Oligonucleotide for detection of SNP TSC0003582
actaaaaaatata

SEQ ID NO: 16429 - DNA, 13 bp, Artificial Sequence
  Oligonucleotide for detection of SNP TSC0003582
tatattgtttagt

SEQ ID NO: 16430 - DNA, 13 bp, Artificial Sequence
  Oligonucleotide for detection of SNP TSC0003582
actaaacaatata

SEQ ID NO: 16431 - DNA, 13 bp, Artificial Sequence
  Oligonucleotide for detection of SNP TSC0003582
tatatcgtttagt

SEQ ID NO: 16432 - DNA, 13 bp, Artificial Sequence
  Oligonucleotide for detection of SNP TSC0003582
actaaacgatata

SEQ ID NO: 16433 - DNA, 13 bp, Artificial Sequence
  Oligonucleotide for detection of SNP TSC0003583
aaatttatttagt

SEQ ID NO: 16434 - DNA, 13 bp, Artificial Sequence
  Oligonucleotide for detection of SNP TSC0003583
actaaataaattt

SEQ ID NO: 16435 - DNA, 13 bp, Artificial Sequence
  Oligonucleotide for detection of SNP TSC0003583
aaatttttttagt

SEQ ID NO: 16436 - DNA, 13 bp, Artificial Sequence
  Oligonucleotide for detection of SNP TSC0003583
actaaaaaaattt

SEQ ID NO: 16437 - DNA, 13 bp, Artificial Sequence
  Oligonucleotide for detection of SNP TSC0003583
attgagtgagttt

SEQ ID NO: 16438 - DNA, 13 bp, Artificial Sequence
  Oligonucleotide for detection of SNP TSC0003583
aaactcactcaat

SEQ ID NO: 16439 - DNA, 13 bp, Artificial Sequence
  Oligonucleotide for detection of SNP TSC0003583
attgagggagttt

SEQ ID NO: 16440 - DNA, 13 bp, Artificial Sequence
  Oligonucleotide for detection of SNP TSC0003583
aaactccctcaat

SEQ ID NO: 16441 - DNA, 13 bp, Artificial Sequence
  Oligonucleotide for detection of SNP TSC0003584
ttttttattgaga

SEQ ID NO: 16442 - DNA, 13 bp, Artificial Sequence
  Oligonucleotide for detection of SNP TSC0003584
tctcaataaaaaa

SEQ ID NO: 16443 - DNA, 13 bp, Artificial Sequence
  Oligonucleotide for detection of SNP TSC0003584
ttttttgttgaga

SEQ ID NO: 16444 - DNA, 13 bp, Artificial Sequence
  Oligonucleotide for detection of SNP TSC0003584
tctcaacaaaaaa

SEQ ID NO: 16445 - DNA, 13 bp, Artificial Sequence
  Oligonucleotide for detection of SNP TSC0003584
tttttcgttgaga

SEQ ID NO: 16446 - DNA, 13 bp, Artificial Sequence
  Oligonucleotide for detection of SNP TSC0003584
tctcaacgaaaaa

SEQ ID NO: 16447 - DNA, 13 bp, Artificial Sequence
  Oligonucleotide for detection of SNP TSC0003584
ttttagtgagaaa

SEQ ID NO: 16448 - DNA, 13 bp, Artificial Sequence
  Oligonucleotide for detection of SNP TSC0003584
tttctcactaaaa

SEQ ID NO: 16449 - DNA, 13 bp, Artificial Sequence
  Oligonucleotide for detection of SNP TSC0003584
ttttagcgagaaa

SEQ ID NO: 16450 - DNA, 13 bp, Artificial Sequence
  Oligonucleotide for detection of SNP TSC0003584
tttctcgctaaaa

SEQ ID NO: 16451 - DNA, 13 bp, Artificial Sequence
  Oligonucleotide for detection of SNP TSC0003585
gttttagttaggt

SEQ ID NO: 16452 - DNA, 13 bp, Artificial Sequence
  Oligonucleotide for detection of SNP TSC0003585
acctaactaaaac

SEQ ID NO: 16453 - DNA, 13 bp, Artificial Sequence
  Oligonucleotide for detection of SNP TSC0003585
gttttaattaggt

SEQ ID NO: 16454 - DNA, 13 bp, Artificial Sequence
  Oligonucleotide for detection of SNP TSC0003585
acctaattaaaac

SEQ ID NO: 16455 - DNA, 13 bp, Artificial Sequence
  Oligonucleotide for detection of SNP TSC0003586
aggaatattttta

SEQ ID NO: 16456 - DNA, 13 bp, Artificial Sequence
  Oligonucleotide for detection of SNP TSC0003586
taaaaatattcct

SEQ ID NO: 16457 - DNA, 13 bp, Artificial Sequence
  Oligonucleotide for detection of SNP TSC0003586
aggaatgttttta

SEQ ID NO: 16458 - DNA, 13 bp, Artificial Sequence
  Oligonucleotide for detection of SNP TSC0003586
taaaaacattcct

SEQ ID NO: 16459 - DNA, 13 bp, Artificial Sequence
  Oligonucleotide for detection of SNP TSC0003588
tgtgaaatattta

SEQ ID NO: 16460 - DNA, 13 bp, Artificial Sequence
  Oligonucleotide for detection of SNP TSC0003588
taaatatttcaca

SEQ ID NO: 16461 - DNA, 13 bp, Artificial Sequence
  Oligonucleotide for detection of SNP TSC0003588
tgtgaattattta

SEQ ID NO: 16462 - DNA, 13 bp, Artificial Sequence
  Oligonucleotide for detection of SNP TSC0003588
taaataattcaca

SEQ ID NO: 16463 - DNA, 13 bp, Artificial Sequence
  Oligonucleotide for detection of SNP TSC0003588
taaatattttata

SEQ ID NO: 16464 - DNA, 13 bp, Artificial Sequence
  Oligonucleotide for detection of SNP TSC0003588
tataaaatattta

SEQ ID NO: 16465 - DNA, 13 bp, Artificial Sequence
  Oligonucleotide for detection of SNP TSC0003588
taaataatttata

SEQ ID NO: 16466 - DNA, 13 bp, Artificial Sequence
  Oligonucleotide for detection of SNP TSC0003588
tataaattattta

SEQ ID NO: 16467 - DNA, 13 bp, Artificial Sequence
  Oligonucleotide for detection of SNP TSC0003589
attttagttaagt

SEQ ID NO: 16468 - DNA, 13 bp, Artificial Sequence
  Oligonucleotide for detection of SNP TSC0003589
acttaactaaaat

SEQ ID NO: 16469 - DNA, 13 bp, Artificial Sequence
  Oligonucleotide for detection of SNP TSC0003589
attttaattaagt

SEQ ID NO: 16470 - DNA, 13 bp, Artificial Sequence
  Oligonucleotide for detection of SNP TSC0003589
acttaattaaaat

SEQ ID NO: 16471 - DNA, 13 bp, Artificial Sequence
  Oligonucleotide for detection of SNP TSC0003590
ttggtatttgaty

SEQ ID NO: 16472 - DNA, 13 bp, Artificial Sequence
  Oligonucleotide for detection of SNP TSC0003590
ratcaaataccaa

SEQ ID NO: 16473 - DNA, 13 bp, Artificial Sequence
  Oligonucleotide for detection of SNP TSC0003590
ttggtagttgaty

SEQ ID NO: 16474 - DNA, 13 bp, Artificial Sequence
  Oligonucleotide for detection of SNP TSC0003590
ratcaactaccaa

SEQ ID NO: 16475 - DNA, 13 bp, Artificial Sequence
  Oligonucleotide for detection of SNP TSC0003590
ggttaggtgttaa

SEQ ID NO: 16476 - DNA, 13 bp, Artificial Sequence
  Oligonucleotide for detection of SNP TSC0003590
ttaacacctaacc

SEQ ID NO: 16477 - DNA, 13 bp, Artificial Sequence
  Oligonucleotide for detection of SNP TSC0003590
ggttagttgttaa

SEQ ID NO: 16478 - DNA, 13 bp, Artificial Sequence
  Oligonucleotide for detection of SNP TSC0003590
ttaacaactaacc

SEQ ID NO: 16479 - DNA, 13 bp, Artificial Sequence
  Oligonucleotide for detection of SNP TSC0003591
ataaaaatttatg

SEQ ID NO: 16480 - DNA, 13 bp, Artificial Sequence
  Oligonucleotide for detection of SNP TSC0003591
cataaatttttat

SEQ ID NO: 16481 - DNA, 13 bp, Artificial Sequence
  Oligonucleotide for detection of SNP TSC0003591
ataaaattttatg

SEQ ID NO: 16482 - DNA, 13 bp, Artificial Sequence
  Oligonucleotide for detection of SNP TSC0003591
cataaaattttat

SEQ ID NO: 16483 - DNA, 13 bp, Artificial Sequence
  Oligonucleotide for detection of SNP TSC0003591
tatgaatttttat

SEQ ID NO: 16484 - DNA, 13 bp, Artificial Sequence
  Oligonucleotide for detection of SNP TSC0003591
ataaaaattcata

SEQ ID NO: 16485 - DNA, 13 bp, Artificial Sequence
  Oligonucleotide for detection of SNP TSC0003591
tatgaagttttat

SEQ ID NO: 16486 - DNA, 13 bp, Artificial Sequence
  Oligonucleotide for detection of SNP TSC0003591
ataaaacttcata

SEQ ID NO: 16487 - DNA, 13 bp, Artificial Sequence
  Oligonucleotide for detection of SNP TSC0003594
gaatgagtgtgtg

SEQ ID NO: 16488 - DNA, 13 bp, Artificial Sequence
  Oligonucleotide for detection of SNP TSC0003594
cacacactcattc

SEQ ID NO: 16489 - DNA, 13 bp, Artificial Sequence
  Oligonucleotide for detection of SNP TSC0003594
gaatgaatgtgtg

SEQ ID NO: 16490 - DNA, 13 bp, Artificial Sequence
  Oligonucleotide for detection of SNP TSC0003594
cacacattcattc

SEQ ID NO: 16491 - DNA, 13 bp, Artificial Sequence
  Oligonucleotide for detection of SNP TSC0003594
gaatgagtgcgtg

SEQ ID NO: 16492 - DNA, 13 bp, Artificial Sequence
  Oligonucleotide for detection of SNP TSC0003594
cacgcactcattc

SEQ ID NO: 16493 - DNA, 13 bp, Artificial Sequence
  Oligonucleotide for detection of SNP TSC0003594
gaatgaatgcgtg

SEQ ID NO: 16494 - DNA, 13 bp, Artificial Sequence
  Oligonucleotide for detection of SNP TSC0003594
cacgcattcattc

SEQ ID NO: 16495 - DNA, 13 bp, Artificial Sequence
  Oligonucleotide for detection of SNP TSC0003595
gttattagtgaaa

SEQ ID NO: 16496 - DNA, 13 bp, Artificial Sequence
  Oligonucleotide for detection of SNP TSC0003595
tttcactaataac

SEQ ID NO: 16497 - DNA, 13 bp, Artificial Sequence
  Oligonucleotide for detection of SNP TSC0003595
gttattggtgaaa

SEQ ID NO: 16498 - DNA, 13 bp, Artificial Sequence
  Oligonucleotide for detection of SNP TSC0003595
tttcaccaataac

SEQ ID NO: 16499 - DNA, 13 bp, Artificial Sequence
  Oligonucleotide for detection of SNP TSC0003595
gttatcggtgaaa

SEQ ID NO: 16500 - DNA, 13 bp, Artificial Sequence
  Oligonucleotide for detection of SNP TSC0003595
tttcaccgataac

SEQ ID NO: 16501 - DNA, 13 bp, Artificial Sequence
  Oligonucleotide for detection of SNP TSC0003595
ttttattggtaay

SEQ ID NO: 16502 - DNA, 13 bp, Artificial Sequence
  Oligonucleotide for detection of SNP TSC0003595
rttaccaataaaa

SEQ ID NO: 16503 - DNA, 13 bp, Artificial Sequence
  Oligonucleotide for detection of SNP TSC0003595
ttttatcggtaay

SEQ ID NO: 16504 - DNA, 13 bp, Artificial Sequence
  Oligonucleotide for detection of SNP TSC0003595
rttaccgataaaa

SEQ ID NO: 16505 - DNA, 13 bp, Artificial Sequence
  Oligonucleotide for detection of SNP TSC0003596
ttggttttttggy

SEQ ID NO: 16506 - DNA, 13 bp, Artificial Sequence
  Oligonucleotide for detection of SNP TSC0003596
rccaaaaaaccaa

SEQ ID NO: 16507 - DNA, 13 bp, Artificial Sequence
  Oligonucleotide for detection of SNP TSC0003596
ttggttgtttggy

SEQ ID NO: 16508 - DNA, 13 bp, Artificial Sequence
  Oligonucleotide for detection of SNP TSC0003596
rccaaacaaccaa

SEQ ID NO: 16509 - DNA, 13 bp, Artificial Sequence
  Oligonucleotide for detection of SNP TSC0003596
ttggtcgtttggy

SEQ ID NO: 16510 - DNA, 13 bp, Artificial Sequence
  Oligonucleotide for detection of SNP TSC0003596
rccaaacgaccaa

SEQ ID NO: 16511 - DNA, 13 bp, Artificial Sequence
  Oligonucleotide for detection of SNP TSC0003596
gttaaaggattaa

SEQ ID NO: 16512 - DNA, 13 bp, Artificial Sequence
  Oligonucleotide for detection of SNP TSC0003596
ttaatcctttaac

SEQ ID NO: 16513 - DNA, 13 bp, Artificial Sequence
  Oligonucleotide for detection of SNP TSC0003596
gttaaatgattaa

SEQ ID NO: 16514 - DNA, 13 bp, Artificial Sequence
  Oligonucleotide for detection of SNP TSC0003596
ttaatcatttaac

SEQ ID NO: 16515 - DNA, 13 bp, Artificial Sequence
  Oligonucleotide for detection of SNP TSC0003596
gttaaacgattaa

SEQ ID NO: 16516 - DNA, 13 bp, Artificial Sequence
  Oligonucleotide for detection of SNP TSC0003596
ttaatcgtttaac

SEQ ID NO: 16517 - DNA, 13 bp, Artificial Sequence
  Oligonucleotide for detection of SNP TSC0003597
agaaaggtaatta

SEQ ID NO: 16518 - DNA, 13 bp, Artificial Sequence
  Oligonucleotide for detection of SNP TSC0003597
taattacctttct

SEQ ID NO: 16519 - DNA, 13 bp, Artificial Sequence
  Oligonucleotide for detection of SNP TSC0003597
agaaagataatta

SEQ ID NO: 16520 - DNA, 13 bp, Artificial Sequence
  Oligonucleotide for detection of SNP TSC0003597
taattatctttct

SEQ ID NO: 16521 - DNA, 13 bp, Artificial Sequence
  Oligonucleotide for detection of SNP TSC0003598
aattttatataty

SEQ ID NO: 16522 - DNA, 13 bp, Artificial Sequence
  Oligonucleotide for detection of SNP TSC0003598
ratatataaaatt

SEQ ID NO: 16523 - DNA, 13 bp, Artificial Sequence
  Oligonucleotide for detection of SNP TSC0003598
aattttgtataty

SEQ ID NO: 16524 - DNA, 13 bp, Artificial Sequence
  Oligonucleotide for detection of SNP TSC0003598
ratatacaaaatt

SEQ ID NO: 16525 - DNA, 13 bp, Artificial Sequence
  Oligonucleotide for detection of SNP TSC0003598
aatttcgtataty

SEQ ID NO: 16526 - DNA, 13 bp, Artificial Sequence
  Oligonucleotide for detection of SNP TSC0003598
ratatacgaaatt

SEQ ID NO: 16527 - DNA, 13 bp, Artificial Sequence
  Oligonucleotide for detection of SNP TSC0003598
ggtatatgaggtt

SEQ ID NO: 16528 - DNA, 13 bp, Artificial Sequence
  Oligonucleotide for detection of SNP TSC0003598
aacctcatatacc

SEQ ID NO: 16529 - DNA, 13 bp, Artificial Sequence
  Oligonucleotide for detection of SNP TSC0003598
ggtatacgaggtt

SEQ ID NO: 16530 - DNA, 13 bp, Artificial Sequence
  Oligonucleotide for detection of SNP TSC0003598
aacctcgtatacc

SEQ ID NO: 16531 - DNA, 13 bp, Artificial Sequence
  Oligonucleotide for detection of SNP TSC0003599
ttttgatttgtty

SEQ ID NO: 16532 - DNA, 13 bp, Artificial Sequence
  Oligonucleotide for detection of SNP TSC0003599
raacaaatcaaaa

SEQ ID NO: 16533 - DNA, 13 bp, Artificial Sequence
  Oligonucleotide for detection of SNP TSC0003599
ttttgagttgtty

SEQ ID NO: 16534 - DNA, 13 bp, Artificial Sequence
  Oligonucleotide for detection of SNP TSC0003599
raacaactcaaaa

SEQ ID NO: 16535 - DNA, 13 bp, Artificial Sequence
  Oligonucleotide for detection of SNP TSC0003599
tttcgatttgtty

SEQ ID NO: 16536 - DNA, 13 bp, Artificial Sequence
  Oligonucleotide for detection of SNP TSC0003599
raacaaatcgaaa

SEQ ID NO: 16537 - DNA, 13 bp, Artificial Sequence
  Oligonucleotide for detection of SNP TSC0003599
tttcgagttgtty

SEQ ID NO: 16538 - DNA, 13 bp, Artificial Sequence
  Oligonucleotide for detection of SNP TSC0003599
raacaactcgaaa

SEQ ID NO: 16539 - DNA, 13 bp, Artificial Sequence
  Oligonucleotide for detection of SNP TSC0003599
gagtaggttgaag

SEQ ID NO: 16540 - DNA, 13 bp, Artificial Sequence
  Oligonucleotide for detection of SNP TSC0003599
cttcaacctactc

SEQ ID NO: 16541 - DNA, 13 bp, Artificial Sequence
  Oligonucleotide for detection of SNP TSC0003599
gagtagtttgaag

SEQ ID NO: 16542 - DNA, 13 bp, Artificial Sequence
  Oligonucleotide for detection of SNP TSC0003599
cttcaaactactc

SEQ ID NO: 16543 - DNA, 13 bp, Artificial Sequence
  Oligonucleotide for detection of SNP TSC0003599
gagtaggtcgaag

SEQ ID NO: 16544 - DNA, 13 bp, Artificial Sequence
  Oligonucleotide for detection of SNP TSC0003599
cttcgacctactc

SEQ ID NO: 16545 - DNA, 13 bp, Artificial Sequence
  Oligonucleotide for detection of SNP TSC0003599
gagtagttcgaag

SEQ ID NO: 16546 - DNA, 13 bp, Artificial Sequence
  Oligonucleotide for detection of SNP TSC0003599
cttcgaactactc

SEQ ID NO: 16547 - DNA, 13 bp, Artificial Sequence
  Oligonucleotide for detection of SNP TSC0003600
ggtgattagttgy

SEQ ID NO: 16548 - DNA, 13 bp, Artificial Sequence
  Oligonucleotide for detection of SNP TSC0003600
rcaactaatcacc

SEQ ID NO: 16549 - DNA, 13 bp, Artificial Sequence
  Oligonucleotide for detection of SNP TSC0003600
ggtgatgagttgy

SEQ ID NO: 16550 - DNA, 13 bp, Artificial Sequence
  Oligonucleotide for detection of SNP TSC0003600
rcaactcatcacc

SEQ ID NO: 16551 - DNA, 13 bp, Artificial Sequence
  Oligonucleotide for detection of SNP TSC0003600
ggtgacgagttgy

SEQ ID NO: 16552 - DNA, 13 bp, Artificial Sequence
  Oligonucleotide for detection of SNP TSC0003600
rcaactcgtcacc

SEQ ID NO: 16553 - DNA, 13 bp, Artificial Sequence
  Oligonucleotide for detection of SNP TSC0003600
gtagttggttaty

SEQ ID NO: 16554 - DNA, 13 bp, Artificial Sequence
  Oligonucleotide for detection of SNP TSC0003600
rataaccaactac

SEQ ID NO: 16555 - DNA, 13 bp, Artificial Sequence
  Oligonucleotide for detection of SNP TSC0003600
gtagtttgttaty

SEQ ID NO: 16556 - DNA, 13 bp, Artificial Sequence
  Oligonucleotide for detection of SNP TSC0003600
rataacaaactac

SEQ ID NO: 16557 - DNA, 13 bp, Artificial Sequence
  Oligonucleotide for detection of SNP TSC0003600
gtagttcgttaty

SEQ ID NO: 16558 - DNA, 13 bp, Artificial Sequence
  Oligonucleotide for detection of SNP TSC0003600
rataacgaactac

SEQ ID NO: 16559 - DNA, 13 bp, Artificial Sequence
  Oligonucleotide for detection of SNP TSC0003601
aattttatttgta

SEQ ID NO: 16560 - DNA, 13 bp, Artificial Sequence
  Oligonucleotide for detection of SNP TSC0003601
tacaaataaaatt

SEQ ID NO: 16561 - DNA, 13 bp, Artificial Sequence
  Oligonucleotide for detection of SNP TSC0003601
aatttcgtttgta

SEQ ID NO: 16562 - DNA, 13 bp, Artificial Sequence
  Oligonucleotide for detection of SNP TSC0003601
tacaaacgaaatt

SEQ ID NO: 16563 - DNA, 13 bp, Artificial Sequence
  Oligonucleotide for detection of SNP TSC0003601
tatagatggggtt

SEQ ID NO: 16564 - DNA, 13 bp, Artificial Sequence
  Oligonucleotide for detection of SNP TSC0003601
aaccccatctata

SEQ ID NO: 16565 - DNA, 13 bp, Artificial Sequence
  Oligonucleotide for detection of SNP TSC0003601
tatagacggggtt

SEQ ID NO: 16566 - DNA, 13 bp, Artificial Sequence
  Oligonucleotide for detection of SNP TSC0003601
aaccccgtctata

SEQ ID NO: 16567 - DNA, 13 bp, Artificial Sequence
  Oligonucleotide for detection of SNP TSC0003602
ttattatgtattt

SEQ ID NO: 16568 - DNA, 13 bp, Artificial Sequence
  Oligonucleotide for detection of SNP TSC0003602
aaatacataataa

SEQ ID NO: 16569 - DNA, 13 bp, Artificial Sequence
  Oligonucleotide for detection of SNP TSC0003602
ttattacgtattt

SEQ ID NO: 16570 - DNA, 13 bp, Artificial Sequence
  Oligonucleotide for detection of SNP TSC0003602
aaatacgtaataa

SEQ ID NO: 16571 - DNA, 13 bp, Artificial Sequence
  Oligonucleotide for detection of SNP TSC0003602
aggtgtgtaatag

SEQ ID NO: 16572 - DNA, 13 bp, Artificial Sequence
  Oligonucleotide for detection of SNP TSC0003602
ctattacacacct

SEQ ID NO: 16573 - DNA, 13 bp, Artificial Sequence
  Oligonucleotide for detection of SNP TSC0003602
aggtgtataatag

SEQ ID NO: 16574 - DNA, 13 bp, Artificial Sequence
  Oligonucleotide for detection of SNP TSC0003602
ctattatacacct

SEQ ID NO: 16575 - DNA, 13 bp, Artificial Sequence
  Oligonucleotide for detection of SNP TSC0003602
aggtgcgtaatag

SEQ ID NO: 16576 - DNA, 13 bp, Artificial Sequence
  Oligonucleotide for detection of SNP TSC0003602
ctattacgcacct

SEQ ID NO: 16577 - DNA, 13 bp, Artificial Sequence
  Oligonucleotide for detection of SNP TSC0003603
ggaattataaatg

SEQ ID NO: 16578 - DNA, 13 bp, Artificial Sequence
  Oligonucleotide for detection of SNP TSC0003603
catttataattcc

SEQ ID NO: 16579 - DNA, 13 bp, Artificial Sequence
  Oligonucleotide for detection of SNP TSC0003603
ggaattgtaaatg

SEQ ID NO: 16580 - DNA, 13 bp, Artificial Sequence
  Oligonucleotide for detection of SNP TSC0003603
catttacaattcc

SEQ ID NO: 16581 - DNA, 13 bp, Artificial Sequence
  Oligonucleotide for detection of SNP TSC0003606
gtttatgtttttt

SEQ ID NO: 16582 - DNA, 13 bp, Artificial Sequence
  Oligonucleotide for detection of SNP TSC0003606
aaaaaacataaac

SEQ ID NO: 16583 - DNA, 13 bp, Artificial Sequence
  Oligonucleotide for detection of SNP TSC0003606
gtttatatttttt

SEQ ID NO: 16584 - DNA, 13 bp, Artificial Sequence
  Oligonucleotide for detection of SNP TSC0003606
aaaaaatataaac

SEQ ID NO: 16585 - DNA, 13 bp, Artificial Sequence
  Oligonucleotide for detection of SNP TSC0003607
attttaaatgtat

SEQ ID NO: 16586 - DNA, 13 bp, Artificial Sequence
  Oligonucleotide for detection of SNP TSC0003607
atacatttaaaat

SEQ ID NO: 16587 - DNA, 13 bp, Artificial Sequence
  Oligonucleotide for detection of SNP TSC0003607
attttatatgtat

SEQ ID NO: 16588 - DNA, 13 bp, Artificial Sequence
  Oligonucleotide for detection of SNP TSC0003607
atacatataaaat

SEQ ID NO: 16589 - DNA, 13 bp, Artificial Sequence
  Oligonucleotide for detection of SNP TSC0003607
atgtatttgaggt

SEQ ID NO: 16590 - DNA, 13 bp, Artificial Sequence
  Oligonucleotide for detection of SNP TSC0003607
acctcaaatacat

SEQ ID NO: 16591 - DNA, 13 bp, Artificial Sequence
  Oligonucleotide for detection of SNP TSC0003607
atgtatgtgaggt

SEQ ID NO: 16592 - DNA, 13 bp, Artificial Sequence
  Oligonucleotide for detection of SNP TSC0003607
acctcacatacat

SEQ ID NO: 16593 - DNA, 13 bp, Artificial Sequence
  Oligonucleotide for detection of SNP TSC0003608
aggtttggtattt

SEQ ID NO: 16594 - DNA, 13 bp, Artificial Sequence
  Oligonucleotide for detection of SNP TSC0003608
aaataccaaacct

SEQ ID NO: 16595 - DNA, 13 bp, Artificial Sequence
  Oligonucleotide for detection of SNP TSC0003608
aggtttagtattt

SEQ ID NO: 16596 - DNA, 13 bp, Artificial Sequence
  Oligonucleotide for detection of SNP TSC0003608
aaatactaaacct

SEQ ID NO: 16597 - DNA, 13 bp, Artificial Sequence
  Oligonucleotide for detection of SNP TSC0003609
aatgaggaatatt

SEQ ID NO: 16598 - DNA, 13 bp, Artificial Sequence
  Oligonucleotide for detection of SNP TSC0003609
aatattcctcatt

SEQ ID NO: 16599 - DNA, 13 bp, Artificial Sequence
  Oligonucleotide for detection of SNP TSC0003609
aatgagaaatatt

SEQ ID NO: 16600 - DNA, 13 bp, Artificial Sequence
  Oligonucleotide for detection of SNP TSC0003609
aatatttctcatt

SEQ ID NO: 16601 - DNA, 13 bp, Artificial Sequence
  Oligonucleotide for detection of SNP TSC0003610
gaaaagagttgaa

SEQ ID NO: 16602 - DNA, 13 bp, Artificial Sequence
  Oligonucleotide for detection of SNP TSC0003610
ttcaactcttttc

SEQ ID NO: 16603 - DNA, 13 bp, Artificial Sequence
  Oligonucleotide for detection of SNP TSC0003610
gaaaagggttgaa

SEQ ID NO: 16604 - DNA, 13 bp, Artificial Sequence
  Oligonucleotide for detection of SNP TSC0003610
ttcaacccttttc

SEQ ID NO: 16605 - DNA, 13 bp, Artificial Sequence
  Oligonucleotide for detection of SNP TSC0003611
aaaatgatgaaag

SEQ ID NO: 16606 - DNA, 13 bp, Artificial Sequence
  Oligonucleotide for detection of SNP TSC0003611
ctttcatcatttt

SEQ ID NO: 16607 - DNA, 13 bp, Artificial Sequence
  Oligonucleotide for detection of SNP TSC0003611
aaaatggtgaaag

SEQ ID NO: 16608 - DNA, 13 bp, Artificial Sequence
  Oligonucleotide for detection of SNP TSC0003611
ctttcaccatttt

SEQ ID NO: 16609 - DNA, 13 bp, Artificial Sequence
  Oligonucleotide for detection of SNP TSC0003611
aaaacgatgaaag

SEQ ID NO: 16610 - DNA, 13 bp, Artificial Sequence
  Oligonucleotide for detection of SNP TSC0003611
ctttcatcgtttt

SEQ ID NO: 16611 - DNA, 13 bp, Artificial Sequence
  Oligonucleotide for detection of SNP TSC0003611
aaaacggtgaaag

SEQ ID NO: 16612 - DNA, 13 bp, Artificial Sequence
  Oligonucleotide for detection of SNP TSC0003611
ctttcaccgtttt

SEQ ID NO: 16613 - DNA, 13 bp, Artificial Sequence
  Oligonucleotide for detection of SNP TSC0003612
attttagaaggta

SEQ ID NO: 16614 - DNA, 13 bp, Artificial Sequence
  Oligonucleotide for detection of SNP TSC0003612
taccttctaaaat

SEQ ID NO: 16615 - DNA, 13 bp, Artificial Sequence
  Oligonucleotide for detection of SNP TSC0003612
attttaaaaggta

SEQ ID NO: 16616 - DNA, 13 bp, Artificial Sequence
  Oligonucleotide for detection of SNP TSC0003612
taccttttaaaat

SEQ ID NO: 16617 - DNA, 13 bp, Artificial Sequence
  Oligonucleotide for detection of SNP TSC0003613
gtttatgtataga

SEQ ID NO: 16618 - DNA, 13 bp, Artificial Sequence
  Oligonucleotide for detection of SNP TSC0003613
tctatacataaac

SEQ ID NO: 16619 - DNA, 13 bp, Artificial Sequence
  Oligonucleotide for detection of SNP TSC0003613
gtttatatataga

SEQ ID NO: 16620 - DNA, 13 bp, Artificial Sequence
  Oligonucleotide for detection of SNP TSC0003613
tctatatataaac

SEQ ID NO: 16621 - DNA, 13 bp, Artificial Sequence
  Oligonucleotide for detection of SNP TSC0003615
ttattaaaaaaga

SEQ ID NO: 16622 - DNA, 13 bp, Artificial Sequence
  Oligonucleotide for detection of SNP TSC0003615
tcttttttaataa

SEQ ID NO: 16623 - DNA, 13 bp, Artificial Sequence
  Oligonucleotide for detection of SNP TSC0003615
ttattagaaaaga

SEQ ID NO: 16624 - DNA, 13 bp, Artificial Sequence
  Oligonucleotide for detection of SNP TSC0003615
tcttttctaataa

SEQ ID NO: 16625 - DNA, 13 bp, Artificial Sequence
  Oligonucleotide for detection of SNP TSC0003616
tatatgatatttt

SEQ ID NO: 16626 - DNA, 13 bp, Artificial Sequence
  Oligonucleotide for detection of SNP TSC0003616
aaaatatcatata

SEQ ID NO: 16627 - DNA, 13 bp, Artificial Sequence
  Oligonucleotide for detection of SNP TSC0003616
tatatgttatttt

SEQ ID NO: 16628 - DNA, 13 bp, Artificial Sequence
  Oligonucleotide for detection of SNP TSC0003616
aaaataacatata

SEQ ID NO: 16629 - DNA, 13 bp, Artificial Sequence
  Oligonucleotide for detection of SNP TSC0003616
aaaatgttatgtg

SEQ ID NO: 16630 - DNA, 13 bp, Artificial Sequence
  Oligonucleotide for detection of SNP TSC0003616
cacataacatttt

SEQ ID NO: 16631 - DNA, 13 bp, Artificial Sequence
  Oligonucleotide for detection of SNP TSC0003616
aaaatggtatgtg

SEQ ID NO: 16632 - DNA, 13 bp, Artificial Sequence
  Oligonucleotide for detection of SNP TSC0003616
cacataccatttt

SEQ ID NO: 16633 - DNA, 13 bp, Artificial Sequence
  Oligonucleotide for detection of SNP TSC0003617
tatggatttttay

SEQ ID NO: 16634 - DNA, 13 bp, Artificial Sequence
  Oligonucleotide for detection of SNP TSC0003617
rtaaaaatccata

SEQ ID NO: 16635 - DNA, 13 bp, Artificial Sequence
  Oligonucleotide for detection of SNP TSC0003617
tatggagttttay

SEQ ID NO: 16636 - DNA, 13 bp, Artificial Sequence
  Oligonucleotide for detection of SNP TSC0003617
rtaaaactccata

SEQ ID NO: 16637 - DNA, 13 bp, Artificial Sequence
  Oligonucleotide for detection of SNP TSC0003617
gtaaaagtttatg

SEQ ID NO: 16638 - DNA, 13 bp, Artificial Sequence
  Oligonucleotide for detection of SNP TSC0003617
cataaacttttac

SEQ ID NO: 16639 - DNA, 13 bp, Artificial Sequence
  Oligonucleotide for detection of SNP TSC0003617
gtaaaattttatg

SEQ ID NO: 16640 - DNA, 13 bp, Artificial Sequence
  Oligonucleotide for detection of SNP TSC0003617
cataaaattttac

SEQ ID NO: 16641 - DNA, 13 bp, Artificial Sequence
  Oligonucleotide for detection of SNP TSC0003619
attattatttttt

SEQ ID NO: 16642 - DNA, 13 bp, Artificial Sequence
  Oligonucleotide for detection of SNP TSC0003619
aaaaaataataat

SEQ ID NO: 16643 - DNA, 13 bp, Artificial Sequence
  Oligonucleotide for detection of SNP TSC0003619
attattttttttt

SEQ ID NO: 16644 - DNA, 13 bp, Artificial Sequence
  Oligonucleotide for detection of SNP TSC0003619
aaaaaaaaataat

SEQ ID NO: 16645 - DNA, 13 bp, Artificial Sequence
  Oligonucleotide for detection of SNP TSC0003620
aggataaatgagt

SEQ ID NO: 16646 - DNA, 13 bp, Artificial Sequence
  Oligonucleotide for detection of SNP TSC0003620
actcatttatcct

SEQ ID NO: 16647 - DNA, 13 bp, Artificial Sequence
  Oligonucleotide for detection of SNP TSC0003620
aggatagatgagt

SEQ ID NO: 16648 - DNA, 13 bp, Artificial Sequence
  Oligonucleotide for detection of SNP TSC0003620
actcatctatcct

SEQ ID NO: 16649 - DNA, 13 bp, Artificial Sequence
  Oligonucleotide for detection of SNP TSC0003621
attttaaaaaaaa

SEQ ID NO: 16650 - DNA, 13 bp, Artificial Sequence
  Oligonucleotide for detection of SNP TSC0003621
ttttttttaaaat

SEQ ID NO: 16651 - DNA, 13 bp, Artificial Sequence
  Oligonucleotide for detection of SNP TSC0003621
attttagaaaaaa

SEQ ID NO: 16652 - DNA, 13 bp, Artificial Sequence
  Oligonucleotide for detection of SNP TSC0003621
ttttttctaaaat

SEQ ID NO: 16653 - DNA, 13 bp, Artificial Sequence
  Oligonucleotide for detection of SNP TSC0003622
ttagttatttaaa

SEQ ID NO: 16654 - DNA, 13 bp, Artificial Sequence
  Oligonucleotide for detection of SNP TSC0003622
tttaaataactaa

SEQ ID NO: 16655 - DNA, 13 bp, Artificial Sequence
  Oligonucleotide for detection of SNP TSC0003622
ttagttttttaaa

SEQ ID NO: 16656 - DNA, 13 bp, Artificial Sequence
  Oligonucleotide for detection of SNP TSC0003622
tttaaaaaactaa

SEQ ID NO: 16657 - DNA, 13 bp, Artificial Sequence
  Oligonucleotide for detection of SNP TSC0003622
tttaaataattga

SEQ ID NO: 16658 - DNA, 13 bp, Artificial Sequence
  Oligonucleotide for detection of SNP TSC0003622
tcaattatttaaa

SEQ ID NO: 16659 - DNA, 13 bp, Artificial Sequence
  Oligonucleotide for detection of SNP TSC0003622
tttaaagaattga

SEQ ID NO: 16660 - DNA, 13 bp, Artificial Sequence
  Oligonucleotide for detection of SNP TSC0003622
tcaattctttaaa

SEQ ID NO: 16661 - DNA, 13 bp, Artificial Sequence
  Oligonucleotide for detection of SNP TSC0003624
aggtatatatgty

SEQ ID NO: 16662 - DNA, 13 bp, Artificial Sequence
  Oligonucleotide for detection of SNP TSC0003624
racatatatacct

SEQ ID NO: 16663 - DNA, 13 bp, Artificial Sequence
  Oligonucleotide for detection of SNP TSC0003624
aggtatgtatgty

SEQ ID NO: 16664 - DNA, 13 bp, Artificial Sequence
  Oligonucleotide for detection of SNP TSC0003624
racatacatacct

SEQ ID NO: 16665 - DNA, 13 bp, Artificial Sequence
  Oligonucleotide for detection of SNP TSC0003624
aggtatatacgty

SEQ ID NO: 16666 - DNA, 13 bp, Artificial Sequence
  Oligonucleotide for detection of SNP TSC0003624
racgtatatacct

SEQ ID NO: 16667 - DNA, 13 bp, Artificial Sequence
  Oligonucleotide for detection of SNP TSC0003624
aggtacgtatgty

SEQ ID NO: 16668 - DNA, 13 bp, Artificial Sequence
  Oligonucleotide for detection of SNP TSC0003624
racatacgtacct

SEQ ID NO: 16669 - DNA, 13 bp, Artificial Sequence
  Oligonucleotide for detection of SNP TSC0003624
aggtatgtacgty

SEQ ID NO: 16670 - DNA, 13 bp, Artificial Sequence
  Oligonucleotide for detection of SNP TSC0003624
racgtacatacct

SEQ ID NO: 16671 - DNA, 13 bp, Artificial Sequence
  Oligonucleotide for detection of SNP TSC0003624
aggtacgtacgty

SEQ ID NO: 16672 - DNA, 13 bp, Artificial Sequence
  Oligonucleotide for detection of SNP TSC0003624
racgtacgtacct

SEQ ID NO: 16673 - DNA, 13 bp, Artificial Sequence
  Oligonucleotide for detection of SNP TSC0003624
gatgtatgtgttt

SEQ ID NO: 16674 - DNA, 13 bp, Artificial Sequence
  Oligonucleotide for detection of SNP TSC0003624
aaacacatacatc

SEQ ID NO: 16675 - DNA, 13 bp, Artificial Sequence
  Oligonucleotide for detection of SNP TSC0003624
gacgtatgtgttt

SEQ ID NO: 16676 - DNA, 13 bp, Artificial Sequence
  Oligonucleotide for detection of SNP TSC0003624
aaacacatacgtc

SEQ ID NO: 16677 - DNA, 13 bp, Artificial Sequence
  Oligonucleotide for detection of SNP TSC0003624
gatgtacgtgttt

SEQ ID NO: 16678 - DNA, 13 bp, Artificial Sequence
  Oligonucleotide for detection of SNP TSC0003624
aaacacgtacatc

SEQ ID NO: 16679 - DNA, 13 bp, Artificial Sequence
  Oligonucleotide for detection of SNP TSC0003624
gacgtacgtgttt

SEQ ID NO: 16680 - DNA, 13 bp, Artificial Sequence
  Oligonucleotide for detection of SNP TSC0003624
aaacacgtacgtc

SEQ ID NO: 16681 - DNA, 13 bp, Artificial Sequence
  Oligonucleotide for detection of SNP TSC0003625
gatttatggatty

SEQ ID NO: 16682 - DNA, 13 bp, Artificial Sequence
  Oligonucleotide for detection of SNP TSC0003625
raatccataaatc

SEQ ID NO: 16683 - DNA, 13 bp, Artificial Sequence
  Oligonucleotide for detection of SNP TSC0003625
gatttacggatty

SEQ ID NO: 16684 - DNA, 13 bp, Artificial Sequence
  Oligonucleotide for detection of SNP TSC0003625
raatccgtaaatc

SEQ ID NO: 16685 - DNA, 13 bp, Artificial Sequence
  Oligonucleotide for detection of SNP TSC0003625
gggtttgtgaaty

SEQ ID NO: 16686 - DNA, 13 bp, Artificial Sequence
  Oligonucleotide for detection of SNP TSC0003625
rattcacaaaccc

SEQ ID NO: 16687 - DNA, 13 bp, Artificial Sequence
  Oligonucleotide for detection of SNP TSC0003625
gggtttatgaaty

SEQ ID NO: 16688 - DNA, 13 bp, Artificial Sequence
  Oligonucleotide for detection of SNP TSC0003625
rattcataaaccc

SEQ ID NO: 16689 - DNA, 13 bp, Artificial Sequence
  Oligonucleotide for detection of SNP TSC0003625
gggttcgtgaaty

SEQ ID NO: 16690 - DNA, 13 bp, Artificial Sequence
  Oligonucleotide for detection of SNP TSC0003625
rattcacgaaccc

SEQ ID NO: 16691 - DNA, 13 bp, Artificial Sequence
  Oligonucleotide for detection of SNP TSC0003626
taagtgattgtty

SEQ ID NO: 16692 - DNA, 13 bp, Artificial Sequence
  Oligonucleotide for detection of SNP TSC0003626
raacaatcactta

SEQ ID NO: 16693 - DNA, 13 bp, Artificial Sequence
  Oligonucleotide for detection of SNP TSC0003626
taagtggttgtty

SEQ ID NO: 16694 - DNA, 13 bp, Artificial Sequence
  Oligonucleotide for detection of SNP TSC0003626
raacaaccactta

SEQ ID NO: 16695 - DNA, 13 bp, Artificial Sequence
  Oligonucleotide for detection of SNP TSC0003627
ggttaggagtttg

SEQ ID NO: 16696 - DNA, 13 bp, Artificial Sequence
  Oligonucleotide for detection of SNP TSC0003627
caaactcctaacc

SEQ ID NO: 16697 - DNA, 13 bp, Artificial Sequence
  Oligonucleotide for detection of SNP TSC0003627
ggttagaagtttg

SEQ ID NO: 16698 - DNA, 13 bp, Artificial Sequence
  Oligonucleotide for detection of SNP TSC0003627
caaacttctaacc

SEQ ID NO: 16699 - DNA, 13 bp, Artificial Sequence
  Oligonucleotide for detection of SNP TSC0003627
ggttaggagttcg

SEQ ID NO: 16700 - DNA, 13 bp, Artificial Sequence
  Oligonucleotide for detection of SNP TSC0003627
cgaactcctaacc

SEQ ID NO: 16701 - DNA, 13 bp, Artificial Sequence
  Oligonucleotide for detection of SNP TSC0003627
ggttagaagttcg

SEQ ID NO: 16702 - DNA, 13 bp, Artificial Sequence
  Oligonucleotide for detection of SNP TSC0003627
cgaacttctaacc

SEQ ID NO: 16703 - DNA, 13 bp, Artificial Sequence
  Oligonucleotide for detection of SNP TSC0003628
tttattataaaga

SEQ ID NO: 16704 - DNA, 13 bp, Artificial Sequence
  Oligonucleotide for detection of SNP TSC0003628
tctttataataaa

SEQ ID NO: 16705 - DNA, 13 bp, Artificial Sequence
  Oligonucleotide for detection of SNP TSC0003628
tttattttaaaga

SEQ ID NO: 16706 - DNA, 13 bp, Artificial Sequence
  Oligonucleotide for detection of SNP TSC0003628
tctttaaaataaa

SEQ ID NO: 16707 - DNA, 13 bp, Artificial Sequence
  Oligonucleotide for detection of SNP TSC0003628
tttttataatgaa

SEQ ID NO: 16708 - DNA, 13 bp, Artificial Sequence
  Oligonucleotide for detection of SNP TSC0003628
ttcattataaaaa

SEQ ID NO: 16709 - DNA, 13 bp, Artificial Sequence
  Oligonucleotide for detection of SNP TSC0003628
tttttagaatgaa

SEQ ID NO: 16710 - DNA, 13 bp, Artificial Sequence
  Oligonucleotide for detection of SNP TSC0003628
ttcattctaaaaa

SEQ ID NO: 16711 - DNA, 13 bp, Artificial Sequence
  Oligonucleotide for detection of SNP TSC0003629
gtaaatgttttat

SEQ ID NO: 16712 - DNA, 13 bp, Artificial Sequence
  Oligonucleotide for detection of SNP TSC0003629
ataaaacatttac

SEQ ID NO: 16713 - DNA, 13 bp, Artificial Sequence
  Oligonucleotide for detection of SNP TSC0003629
gtaaatattttat

SEQ ID NO: 16714 - DNA, 13 bp, Artificial Sequence
  Oligonucleotide for detection of SNP TSC0003629
ataaaatatttac

SEQ ID NO: 16715 - DNA, 13 bp, Artificial Sequence
  Oligonucleotide for detection of SNP TSC0003630
atataggtagtat

SEQ ID NO: 16716 - DNA, 13 bp, Artificial Sequence
  Oligonucleotide for detection of SNP TSC0003630
atactacctatat

SEQ ID NO: 16717 - DNA, 13 bp, Artificial Sequence
  Oligonucleotide for detection of SNP TSC0003630
atatagatagtat

SEQ ID NO: 16718 - DNA, 13 bp, Artificial Sequence
  Oligonucleotide for detection of SNP TSC0003630
atactatctatat

SEQ ID NO: 16719 - DNA, 13 bp, Artificial Sequence
  Oligonucleotide for detection of SNP TSC0003631
atggagggttggy

SEQ ID NO: 16720 - DNA, 13 bp, Artificial Sequence
  Oligonucleotide for detection of SNP TSC0003631
rccaaccctccat

SEQ ID NO: 16721 - DNA, 13 bp, Artificial Sequence
  Oligonucleotide for detection of SNP TSC0003631
atggagagttggy

SEQ ID NO: 16722 - DNA, 13 bp, Artificial Sequence
  Oligonucleotide for detection of SNP TSC0003631
rccaactctccat

SEQ ID NO: 16723 - DNA, 13 bp, Artificial Sequence
  Oligonucleotide for detection of SNP TSC0003631
acggagggttggy

SEQ ID NO: 16724 - DNA, 13 bp, Artificial Sequence
  Oligonucleotide for detection of SNP TSC0003631
rccaaccctccgt

SEQ ID NO: 16725 - DNA, 13 bp, Artificial Sequence
  Oligonucleotide for detection of SNP TSC0003631
acggagagttggy

SEQ ID NO: 16726 - DNA, 13 bp, Artificial Sequence
  Oligonucleotide for detection of SNP TSC0003631
rccaactctccgt

SEQ ID NO: 16727 - DNA, 13 bp, Artificial Sequence
  Oligonucleotide for detection of SNP TSC0003632
aaagttaaaaaaa

SEQ ID NO: 16728 - DNA, 13 bp, Artificial Sequence
  Oligonucleotide for detection of SNP TSC0003632
tttttttaacttt

SEQ ID NO: 16729 - DNA, 13 bp, Artificial Sequence
  Oligonucleotide for detection of SNP TSC0003632
aaagtttaaaaaa

SEQ ID NO: 16730 - DNA, 13 bp, Artificial Sequence
  Oligonucleotide for detection of SNP TSC0003632
ttttttaaacttt

SEQ ID NO: 16731 - DNA, 13 bp, Artificial Sequence
  Oligonucleotide for detection of SNP TSC0003633
ttagtaatttata

SEQ ID NO: 16732 - DNA, 13 bp, Artificial Sequence
  Oligonucleotide for detection of SNP TSC0003633
tataaattactaa

SEQ ID NO: 16733 - DNA, 13 bp, Artificial Sequence
  Oligonucleotide for detection of SNP TSC0003633
ttagtagtttata

SEQ ID NO: 16734 - DNA, 13 bp, Artificial Sequence
  Oligonucleotide for detection of SNP TSC0003633
tataaactactaa

SEQ ID NO: 16735 - DNA, 13 bp, Artificial Sequence
  Oligonucleotide for detection of SNP TSC0003635
gtggataatttga

SEQ ID NO: 16736 - DNA, 13 bp, Artificial Sequence
  Oligonucleotide for detection of SNP TSC0003635
tcaaattatccac

SEQ ID NO: 16737 - DNA, 13 bp, Artificial Sequence
  Oligonucleotide for detection of SNP TSC0003635
gtggattatttga

SEQ ID NO: 16738 - DNA, 13 bp, Artificial Sequence
  Oligonucleotide for detection of SNP TSC0003635
tcaaataatccac

SEQ ID NO: 16739 - DNA, 13 bp, Artificial Sequence
  Oligonucleotide for detection of SNP TSC0003635
ttaggttatttay

SEQ ID NO: 16740 - DNA, 13 bp, Artificial Sequence
  Oligonucleotide for detection of SNP TSC0003635
rtaaataacctaa

SEQ ID NO: 16741 - DNA, 13 bp, Artificial Sequence
  Oligonucleotide for detection of SNP TSC0003635
ttaggtgatttay

SEQ ID NO: 16742 - DNA, 13 bp, Artificial Sequence
  Oligonucleotide for detection of SNP TSC0003635
rtaaatcacctaa

SEQ ID NO: 16743 - DNA, 13 bp, Artificial Sequence
  Oligonucleotide for detection of SNP TSC0003636
tttattaaaaata

SEQ ID NO: 16744 - DNA, 13 bp, Artificial Sequence
  Oligonucleotide for detection of SNP TSC0003636
tatttttaataaa

SEQ ID NO: 16745 - DNA, 13 bp, Artificial Sequence
  Oligonucleotide for detection of SNP TSC0003636
tttattgaaaata

SEQ ID NO: 16746 - DNA, 13 bp, Artificial Sequence
  Oligonucleotide for detection of SNP TSC0003636
tattttcaataaa

SEQ ID NO: 16747 - DNA, 13 bp, Artificial Sequence
  Oligonucleotide for detection of SNP TSC0003638
tttttatgattta

SEQ ID NO: 16748 - DNA, 13 bp, Artificial Sequence
  Oligonucleotide for detection of SNP TSC0003638
taaatcataaaaa

SEQ ID NO: 16749 - DNA, 13 bp, Artificial Sequence
  Oligonucleotide for detection of SNP TSC0003638
tttttacgattta

SEQ ID NO: 16750 - DNA, 13 bp, Artificial Sequence
  Oligonucleotide for detection of SNP TSC0003638
taaatcgtaaaaa

SEQ ID NO: 16751 - DNA, 13 bp, Artificial Sequence
  Oligonucleotide for detection of SNP TSC0003638
taggttgtagaaa

SEQ ID NO: 16752 - DNA, 13 bp, Artificial Sequence
  Oligonucleotide for detection of SNP TSC0003638
tttctacaaccta

SEQ ID NO: 16753 - DNA, 13 bp, Artificial Sequence
  Oligonucleotide for detection of SNP TSC0003638
taggttatagaaa

SEQ ID NO: 16754 - DNA, 13 bp, Artificial Sequence
  Oligonucleotide for detection of SNP TSC0003638
tttctataaccta

SEQ ID NO: 16755 - DNA, 13 bp, Artificial Sequence
  Oligonucleotide for detection of SNP TSC0003638
taggtcgtagaaa

SEQ ID NO: 16756 - DNA, 13 bp, Artificial Sequence
  Oligonucleotide for detection of SNP TSC0003638
tttctacgaccta

SEQ ID NO: 16757 - DNA, 13 bp, Artificial Sequence
  Oligonucleotide for detection of SNP TSC0003639
agttaggttgaty

SEQ ID NO: 16758 - DNA, 13 bp, Artificial Sequence
  Oligonucleotide for detection of SNP TSC0003639
ratcaacctaact

SEQ ID NO: 16759 - DNA, 13 bp, Artificial Sequence
  Oligonucleotide for detection of SNP TSC0003639
agttagattgaty

SEQ ID NO: 16760 - DNA, 13 bp, Artificial Sequence
  Oligonucleotide for detection of SNP TSC0003639
ratcaatctaact

SEQ ID NO: 16761 - DNA, 13 bp, Artificial Sequence
  Oligonucleotide for detection of SNP TSC0003640
gtatttatttttg

SEQ ID NO: 16762 - DNA, 13 bp, Artificial Sequence
  Oligonucleotide for detection of SNP TSC0003640
caaaaataaatac

SEQ ID NO: 16763 - DNA, 13 bp, Artificial Sequence
  Oligonucleotide for detection of SNP TSC0003640
gtatttgtttttg

SEQ ID NO: 16764 - DNA, 13 bp, Artificial Sequence
  Oligonucleotide for detection of SNP TSC0003640
caaaaacaaatac

SEQ ID NO: 16765 - DNA, 13 bp, Artificial Sequence
  Oligonucleotide for detection of SNP TSC0003641
ttttaagatttag

SEQ ID NO: 16766 - DNA, 13 bp, Artificial Sequence
  Oligonucleotide for detection of SNP TSC0003641
ctaaatcttaaaa

SEQ ID NO: 16767 - DNA, 13 bp, Artificial Sequence
  Oligonucleotide for detection of SNP TSC0003641
ttttaaaatttag

SEQ ID NO: 16768 - DNA, 13 bp, Artificial Sequence
  Oligonucleotide for detection of SNP TSC0003641
ctaaattttaaaa

SEQ ID NO: 16769 - DNA, 13 bp, Artificial Sequence
  Oligonucleotide for detection of SNP TSC0003643
tttggtggtaatg

SEQ ID NO: 16770 - DNA, 13 bp, Artificial Sequence
  Oligonucleotide for detection of SNP TSC0003643
cattaccaccaaa

SEQ ID NO: 16771 - DNA, 13 bp, Artificial Sequence
  Oligonucleotide for detection of SNP TSC0003643
tttggtagtaatg

SEQ ID NO: 16772 - DNA, 13 bp, Artificial Sequence
  Oligonucleotide for detection of SNP TSC0003643
cattactaccaaa

SEQ ID NO: 16773 - DNA, 13 bp, Artificial Sequence
  Oligonucleotide for detection of SNP TSC0003644
agaattaaatgat

SEQ ID NO: 16774 - DNA, 13 bp, Artificial Sequence
  Oligonucleotide for detection of SNP TSC0003644
atcatttaattct

SEQ ID NO: 16775 - DNA, 13 bp, Artificial Sequence
  Oligonucleotide for detection of SNP TSC0003644
agaatttaatgat

SEQ ID NO: 16776 - DNA, 13 bp, Artificial Sequence
  Oligonucleotide for detection of SNP TSC0003644
atcattaaattct

SEQ ID NO: 16777 - DNA, 13 bp, Artificial Sequence
  Oligonucleotide for detection of SNP TSC0003644
attatttaatttt

SEQ ID NO: 16778 - DNA, 13 bp, Artificial Sequence
  Oligonucleotide for detection of SNP TSC0003644
aaaattaaataat

SEQ ID NO: 16779 - DNA, 13 bp, Artificial Sequence
  Oligonucleotide for detection of SNP TSC0003644
attattgaatttt

SEQ ID NO: 16780 - DNA, 13 bp, Artificial Sequence
  Oligonucleotide for detection of SNP TSC0003644
aaaattcaataat

SEQ ID NO: 16781 - DNA, 13 bp, Artificial Sequence
  Oligonucleotide for detection of SNP TSC0003647
attatgagatagy

SEQ ID NO: 16782 - DNA, 13 bp, Artificial Sequence
  Oligonucleotide for detection of SNP TSC0003647
rctatctcataat

SEQ ID NO: 16783 - DNA, 13 bp, Artificial Sequence
  Oligonucleotide for detection of SNP TSC0003647
attatgggatagy

SEQ ID NO: 16784 - DNA, 13 bp, Artificial Sequence
  Oligonucleotide for detection of SNP TSC0003647
rctatcccataat

SEQ ID NO: 16785 - DNA, 13 bp, Artificial Sequence
  Oligonucleotide for detection of SNP TSC0003648
gtttttgtaataa

SEQ ID NO: 16786 - DNA, 13 bp, Artificial Sequence
  Oligonucleotide for detection of SNP TSC0003648
ttattacaaaaac

SEQ ID NO: 16787 - DNA, 13 bp, Artificial Sequence
  Oligonucleotide for detection of SNP TSC0003648
gtttttataataa

SEQ ID NO: 16788 - DNA, 13 bp, Artificial Sequence
  Oligonucleotide for detection of SNP TSC0003648
ttattataaaaac

SEQ ID NO: 16789 - DNA, 13 bp, Artificial Sequence
  Oligonucleotide for detection of SNP TSC0003649
ggagaggtggaga

SEQ ID NO: 16790 - DNA, 13 bp, Artificial Sequence
  Oligonucleotide for detection of SNP TSC0003649
tctccacctctcc

SEQ ID NO: 16791 - DNA, 13 bp, Artificial Sequence
  Oligonucleotide for detection of SNP TSC0003649
ggagagatggaga

SEQ ID NO: 16792 - DNA, 13 bp, Artificial Sequence
  Oligonucleotide for detection of SNP TSC0003649
tctccatctctcc

SEQ ID NO: 16793 - DNA, 13 bp, Artificial Sequence
  Oligonucleotide for detection of SNP TSC0003650
ttgatgtttaaag

SEQ ID NO: 16794 - DNA, 13 bp, Artificial Sequence
  Oligonucleotide for detection of SNP TSC0003650
ctttaaacatcaa

SEQ ID NO: 16795 - DNA, 13 bp, Artificial Sequence
  Oligonucleotide for detection of SNP TSC0003650
ttgatggttaaag

SEQ ID NO: 16796 - DNA, 13 bp, Artificial Sequence
  Oligonucleotide for detection of SNP TSC0003650
ctttaaccatcaa

SEQ ID NO: 16797 - DNA, 13 bp, Artificial Sequence
  Oligonucleotide for detection of SNP TSC0003650
ttgacgtttaaag

SEQ ID NO: 16798 - DNA, 13 bp, Artificial Sequence
  Oligonucleotide for detection of SNP TSC0003650
ctttaaacgtcaa

SEQ ID NO: 16799 - DNA, 13 bp, Artificial Sequence
  Oligonucleotide for detection of SNP TSC0003650
ttgacggttaaag

SEQ ID NO: 16800 - DNA, 13 bp, Artificial Sequence
  Oligonucleotide for detection of SNP TSC0003650
ctttaaccgtcaa

SEQ ID NO: 16801 - DNA, 13 bp, Artificial Sequence
  Oligonucleotide for detection of SNP TSC0003650
ttttaggtgttaa

SEQ ID NO: 16802 - DNA, 13 bp, Artificial Sequence
  Oligonucleotide for detection of SNP TSC0003650
ttaacacctaaaa

SEQ ID NO: 16803 - DNA, 13 bp, Artificial Sequence
  Oligonucleotide for detection of SNP TSC0003650
ttttagttgttaa

SEQ ID NO: 16804 - DNA, 13 bp, Artificial Sequence
  Oligonucleotide for detection of SNP TSC0003650
ttaacaactaaaa

SEQ ID NO: 16805 - DNA, 13 bp, Artificial Sequence
  Oligonucleotide for detection of SNP TSC0003650
ttttaggcgttaa

SEQ ID NO: 16806 - DNA, 13 bp, Artificial Sequence
  Oligonucleotide for detection of SNP TSC0003650
ttaacgcctaaaa

SEQ ID NO: 16807 - DNA, 13 bp, Artificial Sequence
  Oligonucleotide for detection of SNP TSC0003650
ttttagtcgttaa

SEQ ID NO: 16808 - DNA, 13 bp, Artificial Sequence
  Oligonucleotide for detection of SNP TSC0003650
ttaacgactaaaa

SEQ ID NO: 16809 - DNA, 13 bp, Artificial Sequence
  Oligonucleotide for detection of SNP TSC0003651
tgtttagtaatgy

SEQ ID NO: 16810 - DNA, 13 bp, Artificial Sequence
  Oligonucleotide for detection of SNP TSC0003651
rcattactaaaca

SEQ ID NO: 16811 - DNA, 13 bp, Artificial Sequence
  Oligonucleotide for detection of SNP TSC0003651
tgtttaataatgy

SEQ ID NO: 16812 - DNA, 13 bp, Artificial Sequence
  Oligonucleotide for detection of SNP TSC0003651
rcattattaaaca

SEQ ID NO: 16813 - DNA, 13 bp, Artificial Sequence
  Oligonucleotide for detection of SNP TSC0003652
gaaataataatty

SEQ ID NO: 16814 - DNA, 13 bp, Artificial Sequence
  Oligonucleotide for detection of SNP TSC0003652
raattattatttc

SEQ ID NO: 16815 - DNA, 13 bp, Artificial Sequence
  Oligonucleotide for detection of SNP TSC0003652
gaaatagtaatty

SEQ ID NO: 16816 - DNA, 13 bp, Artificial Sequence
  Oligonucleotide for detection of SNP TSC0003652
raattactatttc

SEQ ID NO: 16817 - DNA, 13 bp, Artificial Sequence
  Oligonucleotide for detection of SNP TSC0003653
ttttagggttaty

SEQ ID NO: 16818 - DNA, 13 bp, Artificial Sequence
  Oligonucleotide for detection of SNP TSC0003653
rataaccctaaaa

SEQ ID NO: 16819 - DNA, 13 bp, Artificial Sequence
  Oligonucleotide for detection of SNP TSC0003654
gtggtgatgtgta

SEQ ID NO: 16820 - DNA, 13 bp, Artificial Sequence
  Oligonucleotide for detection of SNP TSC0003654
tacacatcaccac

SEQ ID NO: 16821 - DNA, 13 bp, Artificial Sequence
  Oligonucleotide for detection of SNP TSC0003654
gtggtggtgtgta

SEQ ID NO: 16822 - DNA, 13 bp, Artificial Sequence
  Oligonucleotide for detection of SNP TSC0003654
tacacaccaccac

SEQ ID NO: 16823 - DNA, 13 bp, Artificial Sequence
  Oligonucleotide for detection of SNP TSC0003654
gtggtgatgcgta

SEQ ID NO: 16824 - DNA, 13 bp, Artificial Sequence
  Oligonucleotide for detection of SNP TSC0003654
tacgcatcaccac

SEQ ID NO: 16825 - DNA, 13 bp, Artificial Sequence
  Oligonucleotide for detection of SNP TSC0003654
gtggtggtgcgta

SEQ ID NO: 16826 - DNA, 13 bp, Artificial Sequence
  Oligonucleotide for detection of SNP TSC0003654
tacgcaccaccac

SEQ ID NO: 16827 - DNA, 13 bp, Artificial Sequence
  Oligonucleotide for detection of SNP TSC0003655
tttgtgtgggttt

SEQ ID NO: 16828 - DNA, 13 bp, Artificial Sequence
  Oligonucleotide for detection of SNP TSC0003655
aaacccacacaaa

SEQ ID NO: 16829 - DNA, 13 bp, Artificial Sequence
  Oligonucleotide for detection of SNP TSC0003655
tttgtgcgggttt

SEQ ID NO: 16830 - DNA, 13 bp, Artificial Sequence
  Oligonucleotide for detection of SNP TSC0003655
aaacccgcacaaa

SEQ ID NO: 16831 - DNA, 13 bp, Artificial Sequence
  Oligonucleotide for detection of SNP TSC0003655
aaatttgtataaa

SEQ ID NO: 16832 - DNA, 13 bp, Artificial Sequence
  Oligonucleotide for detection of SNP TSC0003655
tttatacaaattt

SEQ ID NO: 16833 - DNA, 13 bp, Artificial Sequence
  Oligonucleotide for detection of SNP TSC0003655
aaatttatataaa

SEQ ID NO: 16834 - DNA, 13 bp, Artificial Sequence
  Oligonucleotide for detection of SNP TSC0003655
tttatataaattt

SEQ ID NO: 16835 - DNA, 13 bp, Artificial Sequence
  Oligonucleotide for detection of SNP TSC0003655
aaattcgtataaa

SEQ ID NO: 16836 - DNA, 13 bp, Artificial Sequence
  Oligonucleotide for detection of SNP TSC0003655
tttatacgaattt

SEQ ID NO: 16837 - DNA, 13 bp, Artificial Sequence
  Oligonucleotide for detection of SNP TSC0003656
ttaaagtttttat

SEQ ID NO: 16838 - DNA, 13 bp, Artificial Sequence
  Oligonucleotide for detection of SNP TSC0003656
ataaaaactttaa

SEQ ID NO: 16839 - DNA, 13 bp, Artificial Sequence
  Oligonucleotide for detection of SNP TSC0003656
ttaaaggttttat

SEQ ID NO: 16840 - DNA, 13 bp, Artificial Sequence
  Oligonucleotide for detection of SNP TSC0003656
ataaaacctttaa

SEQ ID NO: 16841 - DNA, 13 bp, Artificial Sequence
  Oligonucleotide for detection of SNP TSC0003656
atagagattttga

SEQ ID NO: 16842 - DNA, 13 bp, Artificial Sequence
  Oligonucleotide for detection of SNP TSC0003656
tcaaaatctctat

SEQ ID NO: 16843 - DNA, 13 bp, Artificial Sequence
  Oligonucleotide for detection of SNP TSC0003656
atagagtttttga

SEQ ID NO: 16844 - DNA, 13 bp, Artificial Sequence
  Oligonucleotide for detection of SNP TSC0003656
tcaaaaactctat

SEQ ID NO: 16845 - DNA, 13 bp, Artificial Sequence
  Oligonucleotide for detection of SNP TSC0003657
ttggagatttttt

SEQ ID NO: 16846 - DNA, 13 bp, Artificial Sequence
  Oligonucleotide for detection of SNP TSC0003657
aaaaaatctccaa

SEQ ID NO: 16847 - DNA, 13 bp, Artificial Sequence
  Oligonucleotide for detection of SNP TSC0003657
ttggaggtttttt

SEQ ID NO: 16848 - DNA, 13 bp, Artificial Sequence
  Oligonucleotide for detection of SNP TSC0003657
aaaaaacctccaa

SEQ ID NO: 16849 - DNA, 13 bp, Artificial Sequence
  Oligonucleotide for detection of SNP TSC0003660
tttttcgagtagy

SEQ ID NO: 16850 - DNA, 13 bp, Artificial Sequence
  Oligonucleotide for detection of SNP TSC0003660
rctactcgaaaaa

SEQ ID NO: 16851 - DNA, 13 bp, Artificial Sequence
  Oligonucleotide for detection of SNP TSC0003660
gttatttgggagg

SEQ ID NO: 16852 - DNA, 13 bp, Artificial Sequence
  Oligonucleotide for detection of SNP TSC0003660
cctcccaaataac

SEQ ID NO: 16853 - DNA, 13 bp, Artificial Sequence
  Oligonucleotide for detection of SNP TSC0003660
gttattcgggagg

SEQ ID NO: 16854 - DNA, 13 bp, Artificial Sequence
  Oligonucleotide for detection of SNP TSC0003660
cctcccgaataac

SEQ ID NO: 16855 - DNA, 13 bp, Artificial Sequence
  Oligonucleotide for detection of SNP TSC0003661
aaaaaaagaaaga

SEQ ID NO: 16856 - DNA, 13 bp, Artificial Sequence
  Oligonucleotide for detection of SNP TSC0003661
tctttcttttttt

SEQ ID NO: 16857 - DNA, 13 bp, Artificial Sequence
  Oligonucleotide for detection of SNP TSC0003661
aaaaaaggaaaga

SEQ ID NO: 16858 - DNA, 13 bp, Artificial Sequence
  Oligonucleotide for detection of SNP TSC0003661
tctttcctttttt

SEQ ID NO: 16859 - DNA, 13 bp, Artificial Sequence
  Oligonucleotide for detection of SNP TSC0003662
tggattgtttgag

SEQ ID NO: 16860 - DNA, 13 bp, Artificial Sequence
  Oligonucleotide for detection of SNP TSC0003662
ctcaaacaatcca

SEQ ID NO: 16861 - DNA, 13 bp, Artificial Sequence
  Oligonucleotide for detection of SNP TSC0003662
tggattatttgag

SEQ ID NO: 16862 - DNA, 13 bp, Artificial Sequence
  Oligonucleotide for detection of SNP TSC0003662
ctcaaataatcca

SEQ ID NO: 16863 - DNA, 13 bp, Artificial Sequence
  Oligonucleotide for detection of SNP TSC0003662
tggatcgtttgag

SEQ ID NO: 16864 - DNA, 13 bp, Artificial Sequence
  Oligonucleotide for detection of SNP TSC0003662
ctcaaacgatcca

SEQ ID NO: 16865 - DNA, 13 bp, Artificial Sequence
  Oligonucleotide for detection of SNP TSC0003663
agagaggttttag

SEQ ID NO: 16866 - DNA, 13 bp, Artificial Sequence
  Oligonucleotide for detection of SNP TSC0003663
ctaaaacctctct

SEQ ID NO: 16867 - DNA, 13 bp, Artificial Sequence
  Oligonucleotide for detection of SNP TSC0003663
agagagattttag

SEQ ID NO: 16868 - DNA, 13 bp, Artificial Sequence
  Oligonucleotide for detection of SNP TSC0003663
ctaaaatctctct

SEQ ID NO: 16869 - DNA, 13 bp, Artificial Sequence
  Oligonucleotide for detection of SNP TSC0003664
gtagatgtagaaa

SEQ ID NO: 16870 - DNA, 13 bp, Artificial Sequence
  Oligonucleotide for detection of SNP TSC0003664
tttctacatctac

SEQ ID NO: 16871 - DNA, 13 bp, Artificial Sequence
  Oligonucleotide for detection of SNP TSC0003664
gtagatatagaaa

SEQ ID NO: 16872 - DNA, 13 bp, Artificial Sequence
  Oligonucleotide for detection of SNP TSC0003664
tttctatatctac

SEQ ID NO: 16873 - DNA, 13 bp, Artificial Sequence
  Oligonucleotide for detection of SNP TSC0003664
gtagacgtagaaa

SEQ ID NO: 16874 - DNA, 13 bp, Artificial Sequence
  Oligonucleotide for detection of SNP TSC0003664
tttctacgtctac

SEQ ID NO: 16875 - DNA, 13 bp, Artificial Sequence
  Oligonucleotide for detection of SNP TSC0003665
aaaatattagtgt

SEQ ID NO: 16876 - DNA, 13 bp, Artificial Sequence
  Oligonucleotide for detection of SNP TSC0003665
acactaatatttt

SEQ ID NO: 16877 - DNA, 13 bp, Artificial Sequence
  Oligonucleotide for detection of SNP TSC0003665
aaaatagtagtgt

SEQ ID NO: 16878 - DNA, 13 bp, Artificial Sequence
  Oligonucleotide for detection of SNP TSC0003665
acactactatttt

SEQ ID NO: 16879 - DNA, 13 bp, Artificial Sequence
  Oligonucleotide for detection of SNP TSC0003665
aaaatattagcgt

SEQ ID NO: 16880 - DNA, 13 bp, Artificial Sequence
  Oligonucleotide for detection of SNP TSC0003665
acgctaatatttt

SEQ ID NO: 16881 - DNA, 13 bp, Artificial Sequence
  Oligonucleotide for detection of SNP TSC0003665
aaaatagtagcgt

SEQ ID NO: 16882 - DNA, 13 bp, Artificial Sequence
  Oligonucleotide for detection of SNP TSC0003665
acgctactatttt

SEQ ID NO: 16883 - DNA, 13 bp, Artificial Sequence
  Oligonucleotide for detection of SNP TSC0003665
atgttagtatttt

SEQ ID NO: 16884 - DNA, 13 bp, Artificial Sequence
  Oligonucleotide for detection of SNP TSC0003665
aaaatactaacat

SEQ ID NO: 16885 - DNA, 13 bp, Artificial Sequence
  Oligonucleotide for detection of SNP TSC0003665
atgttattatttt

SEQ ID NO: 16886 - DNA, 13 bp, Artificial Sequence
  Oligonucleotide for detection of SNP TSC0003665
aaaataataacat

SEQ ID NO: 16887 - DNA, 13 bp, Artificial Sequence
  Oligonucleotide for detection of SNP TSC0003665
acgttagtatttt

SEQ ID NO: 16888 - DNA, 13 bp, Artificial Sequence
  Oligonucleotide for detection of SNP TSC0003665
aaaatactaacgt

SEQ ID NO: 16889 - DNA, 13 bp, Artificial Sequence
  Oligonucleotide for detection of SNP TSC0003665
acgttattatttt

SEQ ID NO: 16890 - DNA, 13 bp, Artificial Sequence
  Oligonucleotide for detection of SNP TSC0003665
aaaataataacgt

SEQ ID NO: 16891 - DNA, 13 bp, Artificial Sequence
  Oligonucleotide for detection of SNP TSC0003666
tatatatggtaaa

SEQ ID NO: 16892 - DNA, 13 bp, Artificial Sequence
  Oligonucleotide for detection of SNP TSC0003666
tttaccatatata

SEQ ID NO: 16893 - DNA, 13 bp, Artificial Sequence
  Oligonucleotide for detection of SNP TSC0003666
tatatacggtaaa

SEQ ID NO: 16894 - DNA, 13 bp, Artificial Sequence
  Oligonucleotide for detection of SNP TSC0003666
tttaccgtatata

SEQ ID NO: 16895 - DNA, 13 bp, Artificial Sequence
  Oligonucleotide for detection of SNP TSC0003666
tttattgtatatg

SEQ ID NO: 16896 - DNA, 13 bp, Artificial Sequence
  Oligonucleotide for detection of SNP TSC0003666
catatacaataaa

SEQ ID NO: 16897 - DNA, 13 bp, Artificial Sequence
  Oligonucleotide for detection of SNP TSC0003666
tttattatatatg

SEQ ID NO: 16898 - DNA, 13 bp, Artificial Sequence
  Oligonucleotide for detection of SNP TSC0003666
catatataataaa

SEQ ID NO: 16899 - DNA, 13 bp, Artificial Sequence
  Oligonucleotide for detection of SNP TSC0003666
tttatcgtatatg

SEQ ID NO: 16900 - DNA, 13 bp, Artificial Sequence
  Oligonucleotide for detection of SNP TSC0003666
catatacgataaa

SEQ ID NO: 16901 - DNA, 13 bp, Artificial Sequence
  Oligonucleotide for detection of SNP TSC0003667
attattatttagt

SEQ ID NO: 16902 - DNA, 13 bp, Artificial Sequence
  Oligonucleotide for detection of SNP TSC0003667
actaaataataat

SEQ ID NO: 16903 - DNA, 13 bp, Artificial Sequence
  Oligonucleotide for detection of SNP TSC0003667
attattttttagt

SEQ ID NO: 16904 - DNA, 13 bp, Artificial Sequence
  Oligonucleotide for detection of SNP TSC0003667
actaaaaaataat

SEQ ID NO: 16905 - DNA, 13 bp, Artificial Sequence
  Oligonucleotide for detection of SNP TSC0003667
attgaataatagt

SEQ ID NO: 16906 - DNA, 13 bp, Artificial Sequence
  Oligonucleotide for detection of SNP TSC0003667
actattattcaat

SEQ ID NO: 16907 - DNA, 13 bp, Artificial Sequence
  Oligonucleotide for detection of SNP TSC0003667
attgaaaaatagt

SEQ ID NO: 16908 - DNA, 13 bp, Artificial Sequence
  Oligonucleotide for detection of SNP TSC0003667
actatttttcaat

SEQ ID NO: 16909 - DNA, 13 bp, Artificial Sequence
  Oligonucleotide for detection of SNP TSC0003668
gtgtttattagty

SEQ ID NO: 16910 - DNA, 13 bp, Artificial Sequence
  Oligonucleotide for detection of SNP TSC0003668
ractaataaacac

SEQ ID NO: 16911 - DNA, 13 bp, Artificial Sequence
  Oligonucleotide for detection of SNP TSC0003668
gtgttttttagty

SEQ ID NO: 16912 - DNA, 13 bp, Artificial Sequence
  Oligonucleotide for detection of SNP TSC0003668
ractaaaaaacac

SEQ ID NO: 16913 - DNA, 13 bp, Artificial Sequence
  Oligonucleotide for detection of SNP TSC0003668
ggttgatagatay

SEQ ID NO: 16914 - DNA, 13 bp, Artificial Sequence
  Oligonucleotide for detection of SNP TSC0003668
rtatctatcaacc

SEQ ID NO: 16915 - DNA, 13 bp, Artificial Sequence
  Oligonucleotide for detection of SNP TSC0003668
ggttgagagatay

SEQ ID NO: 16916 - DNA, 13 bp, Artificial Sequence
  Oligonucleotide for detection of SNP TSC0003668
rtatctctcaacc

SEQ ID NO: 16917 - DNA, 13 bp, Artificial Sequence
  Oligonucleotide for detection of SNP TSC0003669
tagtatgtattaa

SEQ ID NO: 16918 - DNA, 13 bp, Artificial Sequence
  Oligonucleotide for detection of SNP TSC0003669
ttaatacatacta

SEQ ID NO: 16919 - DNA, 13 bp, Artificial Sequence
  Oligonucleotide for detection of SNP TSC0003669
tagtatatattaa

SEQ ID NO: 16920 - DNA, 13 bp, Artificial Sequence
  Oligonucleotide for detection of SNP TSC0003669
ttaatatatacta

SEQ ID NO: 16921 - DNA, 13 bp, Artificial Sequence
  Oligonucleotide for detection of SNP TSC0003670
agttgatgtttta

SEQ ID NO: 16922 - DNA, 13 bp, Artificial Sequence
  Oligonucleotide for detection of SNP TSC0003670
taaaacatcaact

SEQ ID NO: 16923 - DNA, 13 bp, Artificial Sequence
  Oligonucleotide for detection of SNP TSC0003670
agttgacgtttta

SEQ ID NO: 16924 - DNA, 13 bp, Artificial Sequence
  Oligonucleotide for detection of SNP TSC0003670
taaaacgtcaact

SEQ ID NO: 16925 - DNA, 13 bp, Artificial Sequence
  Oligonucleotide for detection of SNP TSC0003670
taagatgttagtt

SEQ ID NO: 16926 - DNA, 13 bp, Artificial Sequence
  Oligonucleotide for detection of SNP TSC0003670
aactaacatctta

SEQ ID NO: 16927 - DNA, 13 bp, Artificial Sequence
  Oligonucleotide for detection of SNP TSC0003670
taagatattagtt

SEQ ID NO: 16928 - DNA, 13 bp, Artificial Sequence
  Oligonucleotide for detection of SNP TSC0003670
aactaatatctta

SEQ ID NO: 16929 - DNA, 13 bp, Artificial Sequence
  Oligonucleotide for detection of SNP TSC0003670
taagacgttagtt

SEQ ID NO: 16930 - DNA, 13 bp, Artificial Sequence
  Oligonucleotide for detection of SNP TSC0003670
aactaacgtctta

SEQ ID NO: 16931 - DNA, 13 bp, Artificial Sequence
  Oligonucleotide for detection of SNP TSC0003671
ggtataaatattt

SEQ ID NO: 16932 - DNA, 13 bp, Artificial Sequence
  Oligonucleotide for detection of SNP TSC0003671
aaatatttatacc

SEQ ID NO: 16933 - DNA, 13 bp, Artificial Sequence
  Oligonucleotide for detection of SNP TSC0003671
ggtatatatattt

SEQ ID NO: 16934 - DNA, 13 bp, Artificial Sequence
  Oligonucleotide for detection of SNP TSC0003671
aaatatatatacc

SEQ ID NO: 16935 - DNA, 13 bp, Artificial Sequence
  Oligonucleotide for detection of SNP TSC0003671
agatatttataty

SEQ ID NO: 16936 - DNA, 13 bp, Artificial Sequence
  Oligonucleotide for detection of SNP TSC0003671
ratataaatatct

SEQ ID NO: 16937 - DNA, 13 bp, Artificial Sequence
  Oligonucleotide for detection of SNP TSC0003671
agatatgtataty

SEQ ID NO: 16938 - DNA, 13 bp, Artificial Sequence
  Oligonucleotide for detection of SNP TSC0003671
ratatacatatct

SEQ ID NO: 16939 - DNA, 13 bp, Artificial Sequence
  Oligonucleotide for detection of SNP TSC0003672
tattttatgagtt

SEQ ID NO: 16940 - DNA, 13 bp, Artificial Sequence
  Oligonucleotide for detection of SNP TSC0003672
aactcataaaata

SEQ ID NO: 16941 - DNA, 13 bp, Artificial Sequence
  Oligonucleotide for detection of SNP TSC0003672
tattttttgagtt

SEQ ID NO: 16942 - DNA, 13 bp, Artificial Sequence
  Oligonucleotide for detection of SNP TSC0003672
aactcaaaaaata

SEQ ID NO: 16943 - DNA, 13 bp, Artificial Sequence
  Oligonucleotide for detection of SNP TSC0003672
tattttacgagtt

SEQ ID NO: 16944 - DNA, 13 bp, Artificial Sequence
  Oligonucleotide for detection of SNP TSC0003672
aactcgtaaaata

SEQ ID NO: 16945 - DNA, 13 bp, Artificial Sequence
  Oligonucleotide for detection of SNP TSC0003672
tatttttcgagtt

SEQ ID NO: 16946 - DNA, 13 bp, Artificial Sequence
  Oligonucleotide for detection of SNP TSC0003672
aactcgaaaaata

SEQ ID NO: 16947 - DNA, 13 bp, Artificial Sequence
  Oligonucleotide for detection of SNP TSC0003672
aatttgtggagta

SEQ ID NO: 16948 - DNA, 13 bp, Artificial Sequence
  Oligonucleotide for detection of SNP TSC0003672
tactccacaaatt

SEQ ID NO: 16949 - DNA, 13 bp, Artificial Sequence
  Oligonucleotide for detection of SNP TSC0003672
aatttgaggagta

SEQ ID NO: 16950 - DNA, 13 bp, Artificial Sequence
  Oligonucleotide for detection of SNP TSC0003672
tactcctcaaatt

SEQ ID NO: 16951 - DNA, 13 bp, Artificial Sequence
  Oligonucleotide for detection of SNP TSC0003672
aattcgtggagta

SEQ ID NO: 16952 - DNA, 13 bp, Artificial Sequence
  Oligonucleotide for detection of SNP TSC0003672
tactccacgaatt

SEQ ID NO: 16953 - DNA, 13 bp, Artificial Sequence
  Oligonucleotide for detection of SNP TSC0003672
aattcgaggagta

SEQ ID NO: 16954 - DNA, 13 bp, Artificial Sequence
  Oligonucleotide for detection of SNP TSC0003672
tactcctcgaatt

SEQ ID NO: 16955 - DNA, 13 bp, Artificial Sequence
  Oligonucleotide for detection of SNP TSC0003673
aaatataagagga

SEQ ID NO: 16956 - DNA, 13 bp, Artificial Sequence
  Oligonucleotide for detection of SNP TSC0003673
tcctcttatattt

SEQ ID NO: 16957 - DNA, 13 bp, Artificial Sequence
  Oligonucleotide for detection of SNP TSC0003673
aaatattagagga

SEQ ID NO: 16958 - DNA, 13 bp, Artificial Sequence
  Oligonucleotide for detection of SNP TSC0003673
tcctctaatattt

SEQ ID NO: 16959 - DNA, 13 bp, Artificial Sequence
  Oligonucleotide for detection of SNP TSC0003673
tttttttatgttt

SEQ ID NO: 16960 - DNA, 13 bp, Artificial Sequence
  Oligonucleotide for detection of SNP TSC0003673
aaacataaaaaaa

SEQ ID NO: 16961 - DNA, 13 bp, Artificial Sequence
  Oligonucleotide for detection of SNP TSC0003673
ttttttaatgttt

SEQ ID NO: 16962 - DNA, 13 bp, Artificial Sequence
  Oligonucleotide for detection of SNP TSC0003673
aaacattaaaaaa

SEQ ID NO: 16963 - DNA, 13 bp, Artificial Sequence
  Oligonucleotide for detection of SNP TSC0003674
ttttttggttatg

SEQ ID NO: 16964 - DNA, 13 bp, Artificial Sequence
  Oligonucleotide for detection of SNP TSC0003674
cataaccaaaaaa

SEQ ID NO: 16965 - DNA, 13 bp, Artificial Sequence
  Oligonucleotide for detection of SNP TSC0003674
ttttttagttatg

SEQ ID NO: 16966 - DNA, 13 bp, Artificial Sequence
  Oligonucleotide for detection of SNP TSC0003674
cataactaaaaaa

SEQ ID NO: 16967 - DNA, 13 bp, Artificial Sequence
  Oligonucleotide for detection of SNP TSC0003675
ttaaaaggtttat

SEQ ID NO: 16968 - DNA, 13 bp, Artificial Sequence
  Oligonucleotide for detection of SNP TSC0003675
ataaaccttttaa

SEQ ID NO: 16969 - DNA, 13 bp, Artificial Sequence
  Oligonucleotide for detection of SNP TSC0003675
ttaaaaagtttat

SEQ ID NO: 16970 - DNA, 13 bp, Artificial Sequence
  Oligonucleotide for detection of SNP TSC0003675
ataaactttttaa

SEQ ID NO: 16971 - DNA, 13 bp, Artificial Sequence
  Oligonucleotide for detection of SNP TSC0003676
ttttatatgtatt

SEQ ID NO: 16972 - DNA, 13 bp, Artificial Sequence
  Oligonucleotide for detection of SNP TSC0003676
aatacatataaaa

SEQ ID NO: 16973 - DNA, 13 bp, Artificial Sequence
  Oligonucleotide for detection of SNP TSC0003676
ttttatgtgtatt

SEQ ID NO: 16974 - DNA, 13 bp, Artificial Sequence
  Oligonucleotide for detection of SNP TSC0003676
aatacacataaaa

SEQ ID NO: 16975 - DNA, 13 bp, Artificial Sequence
  Oligonucleotide for detection of SNP TSC0003677
tatttaggaggtt

SEQ ID NO: 16976 - DNA, 13 bp, Artificial Sequence
  Oligonucleotide for detection of SNP TSC0003677
aacctcctaaata

SEQ ID NO: 16977 - DNA, 13 bp, Artificial Sequence
  Oligonucleotide for detection of SNP TSC0003677
tatttaagaggtt

SEQ ID NO: 16978 - DNA, 13 bp, Artificial Sequence
  Oligonucleotide for detection of SNP TSC0003677
aacctcttaaata

SEQ ID NO: 16979 - DNA, 13 bp, Artificial Sequence
  Oligonucleotide for detection of SNP TSC0003678
tttataggtataa

SEQ ID NO: 16980 - DNA, 13 bp, Artificial Sequence
  Oligonucleotide for detection of SNP TSC0003678
ttatacctataaa

SEQ ID NO: 16981 - DNA, 13 bp, Artificial Sequence
  Oligonucleotide for detection of SNP TSC0003678
tttataagtataa

SEQ ID NO: 16982 - DNA, 13 bp, Artificial Sequence
  Oligonucleotide for detection of SNP TSC0003678
ttatacttataaa

SEQ ID NO: 16983 - DNA, 13 bp, Artificial Sequence
  Oligonucleotide for detection of SNP TSC0003679
atgtataattgaa

SEQ ID NO: 16984 - DNA, 13 bp, Artificial Sequence
  Oligonucleotide for detection of SNP TSC0003679
ttcaattatacat

SEQ ID NO: 16985 - DNA, 13 bp, Artificial Sequence
  Oligonucleotide for detection of SNP TSC0003679
atgtattattgaa

SEQ ID NO: 16986 - DNA, 13 bp, Artificial Sequence
  Oligonucleotide for detection of SNP TSC0003679
ttcaataatacat

SEQ ID NO: 16987 - DNA, 13 bp, Artificial Sequence
  Oligonucleotide for detection of SNP TSC0003679
tttagttgtatat

SEQ ID NO: 16988 - DNA, 13 bp, Artificial Sequence
  Oligonucleotide for detection of SNP TSC0003679
atatacaactaaa

SEQ ID NO: 16989 - DNA, 13 bp, Artificial Sequence
  Oligonucleotide for detection of SNP TSC0003679
tttagtggtatat

SEQ ID NO: 16990 - DNA, 13 bp, Artificial Sequence
  Oligonucleotide for detection of SNP TSC0003679
atataccactaaa

SEQ ID NO: 16991 - DNA, 13 bp, Artificial Sequence
  Oligonucleotide for detection of SNP TSC0003680
tgtataattgaay

SEQ ID NO: 16992 - DNA, 13 bp, Artificial Sequence
  Oligonucleotide for detection of SNP TSC0003680
rttcaattataca

SEQ ID NO: 16993 - DNA, 13 bp, Artificial Sequence
  Oligonucleotide for detection of SNP TSC0003680
tgtatagttgaay

SEQ ID NO: 16994 - DNA, 13 bp, Artificial Sequence
  Oligonucleotide for detection of SNP TSC0003680
rttcaactataca

SEQ ID NO: 16995 - DNA, 13 bp, Artificial Sequence
  Oligonucleotide for detection of SNP TSC0003682
ggtgagggtgatg

SEQ ID NO: 16996 - DNA, 13 bp, Artificial Sequence
  Oligonucleotide for detection of SNP TSC0003682
catcaccctcacc

SEQ ID NO: 16997 - DNA, 13 bp, Artificial Sequence
  Oligonucleotide for detection of SNP TSC0003682
ggtgagagtgatg

SEQ ID NO: 16998 - DNA, 13 bp, Artificial Sequence
  Oligonucleotide for detection of SNP TSC0003682
catcactctcacc

SEQ ID NO: 16999 - DNA, 13 bp, Artificial Sequence
  Oligonucleotide for detection of SNP TSC0003682
ggcgagggtgatg

SEQ ID NO: 17000 - DNA, 13 bp, Artificial Sequence
  Oligonucleotide for detection of SNP TSC0003682
catcaccctcgcc

SEQ ID NO: 17001 - DNA, 13 bp, Artificial Sequence
  Oligonucleotide for detection of SNP TSC0003682
ggcgagagtgatg

SEQ ID NO: 17002 - DNA, 13 bp, Artificial Sequence
  Oligonucleotide for detection of SNP TSC0003682
catcactctcgcc

SEQ ID NO: 17003 - DNA, 13 bp, Artificial Sequence
  Oligonucleotide for detection of SNP TSC0003682
ggtgagggcgatg

SEQ ID NO: 17004 - DNA, 13 bp, Artificial Sequence
  Oligonucleotide for detection of SNP TSC0003682
catcgccctcacc

SEQ ID NO: 17005 - DNA, 13 bp, Artificial Sequence
  Oligonucleotide for detection of SNP TSC0003682
ggtgagagcgatg

SEQ ID NO: 17006 - DNA, 13 bp, Artificial Sequence
  Oligonucleotide for detection of SNP TSC0003682
catcgctctcacc

SEQ ID NO: 17007 - DNA, 13 bp, Artificial Sequence
  Oligonucleotide for detection of SNP TSC0003682
ggcgagggcgatg

SEQ ID NO: 17008 - DNA, 13 bp, Artificial Sequence
  Oligonucleotide for detection of SNP TSC0003682
catcgccctcgcc

SEQ ID NO: 17009 - DNA, 13 bp, Artificial Sequence
  Oligonucleotide for detection of SNP TSC0003682
ggcgagagcgatg

SEQ ID NO: 17010 - DNA, 13 bp, Artificial Sequence
  Oligonucleotide for detection of SNP TSC0003682
catcgctctcgcc

SEQ ID NO: 17011 - DNA, 13 bp, Artificial Sequence
  Oligonucleotide for detection of SNP TSC0003683
tgtgagtttttty

SEQ ID NO: 17012 - DNA, 13 bp, Artificial Sequence
  Oligonucleotide for detection of SNP TSC0003683
raaaaaactcaca

SEQ ID NO: 17013 - DNA, 13 bp, Artificial Sequence
  Oligonucleotide for detection of SNP TSC0003683
tgtgaggttttty

SEQ ID NO: 17014 - DNA, 13 bp, Artificial Sequence
  Oligonucleotide for detection of SNP TSC0003683
raaaaacctcaca

SEQ ID NO: 17015 - DNA, 13 bp, Artificial Sequence
  Oligonucleotide for detection of SNP TSC0003683
ggagaggtttata

SEQ ID NO: 17016 - DNA, 13 bp, Artificial Sequence
  Oligonucleotide for detection of SNP TSC0003683
tataaacctctcc

SEQ ID NO: 17017 - DNA, 13 bp, Artificial Sequence
  Oligonucleotide for detection of SNP TSC0003683
ggagagttttata

SEQ ID NO: 17018 - DNA, 13 bp, Artificial Sequence
  Oligonucleotide for detection of SNP TSC0003683
tataaaactctcc

SEQ ID NO: 17019 - DNA, 13 bp, Artificial Sequence
  Oligonucleotide for detection of SNP TSC0003684
ggtattatagagy

SEQ ID NO: 17020 - DNA, 13 bp, Artificial Sequence
  Oligonucleotide for detection of SNP TSC0003684
rctctataatacc

SEQ ID NO: 17021 - DNA, 13 bp, Artificial Sequence
  Oligonucleotide for detection of SNP TSC0003684
ggtattgtagagy

SEQ ID NO: 17022 - DNA, 13 bp, Artificial Sequence
  Oligonucleotide for detection of SNP TSC0003684
rctctacaatacc

SEQ ID NO: 17023 - DNA, 13 bp, Artificial Sequence
  Oligonucleotide for detection of SNP TSC0003684
ggtatcgtagagy

SEQ ID NO: 17024 - DNA, 13 bp, Artificial Sequence
  Oligonucleotide for detection of SNP TSC0003684
rctctacgatacc

SEQ ID NO: 17025 - DNA, 13 bp, Artificial Sequence
  Oligonucleotide for detection of SNP TSC0003684
gttttgtggtgty

SEQ ID NO: 17026 - DNA, 13 bp, Artificial Sequence
  Oligonucleotide for detection of SNP TSC0003684
racaccacaaaac

SEQ ID NO: 17027 - DNA, 13 bp, Artificial Sequence
  Oligonucleotide for detection of SNP TSC0003684
gttttgcggtgty

SEQ ID NO: 17028 - DNA, 13 bp, Artificial Sequence
  Oligonucleotide for detection of SNP TSC0003684
racaccgcaaaac

SEQ ID NO: 17029 - DNA, 13 bp, Artificial Sequence
  Oligonucleotide for detection of SNP TSC0003685
ttttagatttttt

SEQ ID NO: 17030 - DNA, 13 bp, Artificial Sequence
  Oligonucleotide for detection of SNP TSC0003685
aaaaaatctaaaa

SEQ ID NO: 17031 - DNA, 13 bp, Artificial Sequence
  Oligonucleotide for detection of SNP TSC0003685
ttttaggtttttt

SEQ ID NO: 17032 - DNA, 13 bp, Artificial Sequence
  Oligonucleotide for detection of SNP TSC0003685
aaaaaacctaaaa

SEQ ID NO: 17033 - DNA, 13 bp, Artificial Sequence
  Oligonucleotide for detection of SNP TSC0003686
atgaaatgattty

SEQ ID NO: 17034 - DNA, 13 bp, Artificial Sequence
  Oligonucleotide for detection of SNP TSC0003686
raaatcatttcat

SEQ ID NO: 17035 - DNA, 13 bp, Artificial Sequence
  Oligonucleotide for detection of SNP TSC0003686
atgaaaggattty

SEQ ID NO: 17036 - DNA, 13 bp, Artificial Sequence
  Oligonucleotide for detection of SNP TSC0003686
raaatcctttcat

SEQ ID NO: 17037 - DNA, 13 bp, Artificial Sequence
  Oligonucleotide for detection of SNP TSC0003686
gaaattattttat

SEQ ID NO: 17038 - DNA, 13 bp, Artificial Sequence
  Oligonucleotide for detection of SNP TSC0003686
ataaaataatttc

SEQ ID NO: 17039 - DNA, 13 bp, Artificial Sequence
  Oligonucleotide for detection of SNP TSC0003686
gaaatttttttat

SEQ ID NO: 17040 - DNA, 13 bp, Artificial Sequence
  Oligonucleotide for detection of SNP TSC0003686
ataaaaaaatttc

SEQ ID NO: 17041 - DNA, 13 bp, Artificial Sequence
  Oligonucleotide for detection of SNP TSC0003687
ggtttaagattgt

SEQ ID NO: 17042 - DNA, 13 bp, Artificial Sequence
  Oligonucleotide for detection of SNP TSC0003687
acaatcttaaacc

SEQ ID NO: 17043 - DNA, 13 bp, Artificial Sequence
  Oligonucleotide for detection of SNP TSC0003687
ggtttaggattgt

SEQ ID NO: 17044 - DNA, 13 bp, Artificial Sequence
  Oligonucleotide for detection of SNP TSC0003687
acaatcctaaacc

SEQ ID NO: 17045 - DNA, 13 bp, Artificial Sequence
  Oligonucleotide for detection of SNP TSC0003688
atatagggggtgg

SEQ ID NO: 17046 - DNA, 13 bp, Artificial Sequence
  Oligonucleotide for detection of SNP TSC0003688
ccaccccctatat

SEQ ID NO: 17047 - DNA, 13 bp, Artificial Sequence
  Oligonucleotide for detection of SNP TSC0003688
atatagagggtgg

SEQ ID NO: 17048 - DNA, 13 bp, Artificial Sequence
  Oligonucleotide for detection of SNP TSC0003688
ccaccctctatat

SEQ ID NO: 17049 - DNA, 13 bp, Artificial Sequence
  Oligonucleotide for detection of SNP TSC0003690
tagtaagttaata

SEQ ID NO: 17050 - DNA, 13 bp, Artificial Sequence
  Oligonucleotide for detection of SNP TSC0003690
tattaacttacta

SEQ ID NO: 17051 - DNA, 13 bp, Artificial Sequence
  Oligonucleotide for detection of SNP TSC0003690
tagtaaattaata

SEQ ID NO: 17052 - DNA, 13 bp, Artificial Sequence
  Oligonucleotide for detection of SNP TSC0003690
tattaatttacta

SEQ ID NO: 17053 - DNA, 13 bp, Artificial Sequence
  Oligonucleotide for detection of SNP TSC0003691
attgtatgtttta

SEQ ID NO: 17054 - DNA, 13 bp, Artificial Sequence
  Oligonucleotide for detection of SNP TSC0003691
taaaacatacaat

SEQ ID NO: 17055 - DNA, 13 bp, Artificial Sequence
  Oligonucleotide for detection of SNP TSC0003691
attgtacgtttta

SEQ ID NO: 17056 - DNA, 13 bp, Artificial Sequence
  Oligonucleotide for detection of SNP TSC0003691
taaaacgtacaat

SEQ ID NO: 17057 - DNA, 13 bp, Artificial Sequence
  Oligonucleotide for detection of SNP TSC0003691
tggagtgtgtaat

SEQ ID NO: 17058 - DNA, 13 bp, Artificial Sequence
  Oligonucleotide for detection of SNP TSC0003691
attacacactcca

SEQ ID NO: 17059 - DNA, 13 bp, Artificial Sequence
  Oligonucleotide for detection of SNP TSC0003691
tggagtatgtaat

SEQ ID NO: 17060 - DNA, 13 bp, Artificial Sequence
  Oligonucleotide for detection of SNP TSC0003691
attacatactcca

SEQ ID NO: 17061 - DNA, 13 bp, Artificial Sequence
  Oligonucleotide for detection of SNP TSC0003691
tggagcgtgtaat

SEQ ID NO: 17062 - DNA, 13 bp, Artificial Sequence
  Oligonucleotide for detection of SNP TSC0003691
attacacgctcca

SEQ ID NO: 17063 - DNA, 13 bp, Artificial Sequence
  Oligonucleotide for detection of SNP TSC0003692
ttaaggtgggtaa

SEQ ID NO: 17064 - DNA, 13 bp, Artificial Sequence
  Oligonucleotide for detection of SNP TSC0003692
ttacccaccttaa

SEQ ID NO: 17065 - DNA, 13 bp, Artificial Sequence
  Oligonucleotide for detection of SNP TSC0003692
ttaaggcgggtaa

SEQ ID NO: 17066 - DNA, 13 bp, Artificial Sequence
  Oligonucleotide for detection of SNP TSC0003692
ttacccgccttaa

SEQ ID NO: 17067 - DNA, 13 bp, Artificial Sequence
  Oligonucleotide for detection of SNP TSC0003693
agatggtgtttag

SEQ ID NO: 17068 - DNA, 13 bp, Artificial Sequence
  Oligonucleotide for detection of SNP TSC0003693
ctaaacaccatct

SEQ ID NO: 17069 - DNA, 13 bp, Artificial Sequence
  Oligonucleotide for detection of SNP TSC0003693
agatggcgtttag

SEQ ID NO: 17070 - DNA, 13 bp, Artificial Sequence
  Oligonucleotide for detection of SNP TSC0003693
ctaaacgccatct

SEQ ID NO: 17071 - DNA, 13 bp, Artificial Sequence
  Oligonucleotide for detection of SNP TSC0003693
ttgggtgttattt

SEQ ID NO: 17072 - DNA, 13 bp, Artificial Sequence
  Oligonucleotide for detection of SNP TSC0003693
aaataacacccaa

SEQ ID NO: 17073 - DNA, 13 bp, Artificial Sequence
  Oligonucleotide for detection of SNP TSC0003693
ttgggtattattt

SEQ ID NO: 17074 - DNA, 13 bp, Artificial Sequence
  Oligonucleotide for detection of SNP TSC0003693
aaataatacccaa

SEQ ID NO: 17075 - DNA, 13 bp, Artificial Sequence
  Oligonucleotide for detection of SNP TSC0003693
ttgggcgttattt

SEQ ID NO: 17076 - DNA, 13 bp, Artificial Sequence
  Oligonucleotide for detection of SNP TSC0003693
aaataacgcccaa

SEQ ID NO: 17077 - DNA, 13 bp, Artificial Sequence
  Oligonucleotide for detection of SNP TSC0003694
tttgaataatggt

SEQ ID NO: 17078 - DNA, 13 bp, Artificial Sequence
  Oligonucleotide for detection of SNP TSC0003694
accattattcaaa

SEQ ID NO: 17079 - DNA, 13 bp, Artificial Sequence
  Oligonucleotide for detection of SNP TSC0003694
tttgaagaatggt

SEQ ID NO: 17080 - DNA, 13 bp, Artificial Sequence
  Oligonucleotide for detection of SNP TSC0003694
accattcttcaaa

SEQ ID NO: 17081 - DNA, 13 bp, Artificial Sequence
  Oligonucleotide for detection of SNP TSC0003694
attattatttaga

SEQ ID NO: 17082 - DNA, 13 bp, Artificial Sequence
  Oligonucleotide for detection of SNP TSC0003694
tctaaataataat

SEQ ID NO: 17083 - DNA, 13 bp, Artificial Sequence
  Oligonucleotide for detection of SNP TSC0003694
attattttttaga

SEQ ID NO: 17084 - DNA, 13 bp, Artificial Sequence
  Oligonucleotide for detection of SNP TSC0003694
tctaaaaaataat

SEQ ID NO: 17085 - DNA, 13 bp, Artificial Sequence
  Oligonucleotide for detection of SNP TSC0003695
gataagtatggaa

SEQ ID NO: 17086 - DNA, 13 bp, Artificial Sequence
  Oligonucleotide for detection of SNP TSC0003695
ttccatacttatc

SEQ ID NO: 17087 - DNA, 13 bp, Artificial Sequence
  Oligonucleotide for detection of SNP TSC0003695
gataaggatggaa

SEQ ID NO: 17088 - DNA, 13 bp, Artificial Sequence
  Oligonucleotide for detection of SNP TSC0003695
ttccatccttatc

SEQ ID NO: 17089 - DNA, 13 bp, Artificial Sequence
  Oligonucleotide for detection of SNP TSC0003695
ttttatatttaty

SEQ ID NO: 17090 - DNA, 13 bp, Artificial Sequence
  Oligonucleotide for detection of SNP TSC0003695
rataaatataaaa

SEQ ID NO: 17091 - DNA, 13 bp, Artificial Sequence
  Oligonucleotide for detection of SNP TSC0003695
ttttatttttaty

SEQ ID NO: 17092 - DNA, 13 bp, Artificial Sequence
  Oligonucleotide for detection of SNP TSC0003695
rataaaaataaaa

SEQ ID NO: 17093 - DNA, 13 bp, Artificial Sequence
  Oligonucleotide for detection of SNP TSC0003696
gggaatatatttt

SEQ ID NO: 17094 - DNA, 13 bp, Artificial Sequence
  Oligonucleotide for detection of SNP TSC0003696
aaaatatattccc

SEQ ID NO: 17095 - DNA, 13 bp, Artificial Sequence
  Oligonucleotide for detection of SNP TSC0003696
gggaatttatttt

SEQ ID NO: 17096 - DNA, 13 bp, Artificial Sequence
  Oligonucleotide for detection of SNP TSC0003696
aaaataaattccc

SEQ ID NO: 17097 - DNA, 13 bp, Artificial Sequence
  Oligonucleotide for detection of SNP TSC0003696
agaatatatttty

SEQ ID NO: 17098 - DNA, 13 bp, Artificial Sequence
  Oligonucleotide for detection of SNP TSC0003696
raaaatatattct

SEQ ID NO: 17099 - DNA, 13 bp, Artificial Sequence
  Oligonucleotide for detection of SNP TSC0003696
agaatagatttty

SEQ ID NO: 17100 - DNA, 13 bp, Artificial Sequence
  Oligonucleotide for detection of SNP TSC0003696
raaaatctattct

SEQ ID NO: 17101 - DNA, 13 bp, Artificial Sequence
  Oligonucleotide for detection of SNP TSC0003698
agtaagagttttg

SEQ ID NO: 17102 - DNA, 13 bp, Artificial Sequence
  Oligonucleotide for detection of SNP TSC0003698
caaaactcttact

SEQ ID NO: 17103 - DNA, 13 bp, Artificial Sequence
  Oligonucleotide for detection of SNP TSC0003698
agtaagggttttg

SEQ ID NO: 17104 - DNA, 13 bp, Artificial Sequence
  Oligonucleotide for detection of SNP TSC0003698
caaaacccttact

SEQ ID NO: 17105 - DNA, 13 bp, Artificial Sequence
  Oligonucleotide for detection of SNP TSC0003698
agtaagagtttcg

SEQ ID NO: 17106 - DNA, 13 bp, Artificial Sequence
  Oligonucleotide for detection of SNP TSC0003698
cgaaactcttact

SEQ ID NO: 17107 - DNA, 13 bp, Artificial Sequence
  Oligonucleotide for detection of SNP TSC0003698
agtaagggtttcg

SEQ ID NO: 17108 - DNA, 13 bp, Artificial Sequence
  Oligonucleotide for detection of SNP TSC0003698
cgaaacccttact

SEQ ID NO: 17109 - DNA, 13 bp, Artificial Sequence
  Oligonucleotide for detection of SNP TSC0003699
gttttattttttt

SEQ ID NO: 17110 - DNA, 13 bp, Artificial Sequence
  Oligonucleotide for detection of SNP TSC0003699
aaaaaaataaaac

SEQ ID NO: 17111 - DNA, 13 bp, Artificial Sequence
  Oligonucleotide for detection of SNP TSC0003699
gttttaatttttt

SEQ ID NO: 17112 - DNA, 13 bp, Artificial Sequence
  Oligonucleotide for detection of SNP TSC0003699
aaaaaattaaaac

SEQ ID NO: 17113 - DNA, 13 bp, Artificial Sequence
  Oligonucleotide for detection of SNP TSC0003699
aaaaaagtaaaay

SEQ ID NO: 17114 - DNA, 13 bp, Artificial Sequence
  Oligonucleotide for detection of SNP TSC0003699
rttttactttttt

SEQ ID NO: 17115 - DNA, 13 bp, Artificial Sequence
  Oligonucleotide for detection of SNP TSC0003699
aaaaaattaaaay

SEQ ID NO: 17116 - DNA, 13 bp, Artificial Sequence
  Oligonucleotide for detection of SNP TSC0003699
rttttaatttttt

SEQ ID NO: 17117 - DNA, 13 bp, Artificial Sequence
  Oligonucleotide for detection of SNP TSC0003700
ggtgtatgattty

SEQ ID NO: 17118 - DNA, 13 bp, Artificial Sequence
  Oligonucleotide for detection of SNP TSC0003700
raaatcatacacc

SEQ ID NO: 17119 - DNA, 13 bp, Artificial Sequence
  Oligonucleotide for detection of SNP TSC0003700
ggtgtacgattty

SEQ ID NO: 17120 - DNA, 13 bp, Artificial Sequence
  Oligonucleotide for detection of SNP TSC0003700
raaatcgtacacc

SEQ ID NO: 17121 - DNA, 13 bp, Artificial Sequence
  Oligonucleotide for detection of SNP TSC0003700
gaaattgtataty

SEQ ID NO: 17122 - DNA, 13 bp, Artificial Sequence
  Oligonucleotide for detection of SNP TSC0003700
ratatacaatttc

SEQ ID NO: 17123 - DNA, 13 bp, Artificial Sequence
  Oligonucleotide for detection of SNP TSC0003700
gaaattatataty

SEQ ID NO: 17124 - DNA, 13 bp, Artificial Sequence
  Oligonucleotide for detection of SNP TSC0003700
ratatataatttc

SEQ ID NO: 17125 - DNA, 13 bp, Artificial Sequence
  Oligonucleotide for detection of SNP TSC0003700
gaaatcgtataty

SEQ ID NO: 17126 - DNA, 13 bp, Artificial Sequence
  Oligonucleotide for detection of SNP TSC0003700
ratatacgatttc

SEQ ID NO: 17127 - DNA, 13 bp, Artificial Sequence
  Oligonucleotide for detection of SNP TSC0003702
agagatgtagggy

SEQ ID NO: 17128 - DNA, 13 bp, Artificial Sequence
  Oligonucleotide for detection of SNP TSC0003702
rccctacatctct

SEQ ID NO: 17129 - DNA, 13 bp, Artificial Sequence
  Oligonucleotide for detection of SNP TSC0003702
agagatatagggy

SEQ ID NO: 17130 - DNA, 13 bp, Artificial Sequence
  Oligonucleotide for detection of SNP TSC0003702
rccctatatctct

SEQ ID NO: 17131 - DNA, 13 bp, Artificial Sequence
  Oligonucleotide for detection of SNP TSC0003704
agaaataggggaa

SEQ ID NO: 17132 - DNA, 13 bp, Artificial Sequence
  Oligonucleotide for detection of SNP TSC0003704
ttcccctatttct

SEQ ID NO: 17133 - DNA, 13 bp, Artificial Sequence
  Oligonucleotide for detection of SNP TSC0003704
agaaattggggaa

SEQ ID NO: 17134 - DNA, 13 bp, Artificial Sequence
  Oligonucleotide for detection of SNP TSC0003704
ttccccaatttct

SEQ ID NO: 17135 - DNA, 13 bp, Artificial Sequence
  Oligonucleotide for detection of SNP TSC0003704
agaaatcggggaa

SEQ ID NO: 17136 - DNA, 13 bp, Artificial Sequence
  Oligonucleotide for detection of SNP TSC0003704
ttccccgatttct

SEQ ID NO: 17137 - DNA, 13 bp, Artificial Sequence
  Oligonucleotide for detection of SNP TSC0003706
tatgatgggaaag

SEQ ID NO: 17138 - DNA, 13 bp, Artificial Sequence
  Oligonucleotide for detection of SNP TSC0003706
ctttcccatcata

SEQ ID NO: 17139 - DNA, 13 bp, Artificial Sequence
  Oligonucleotide for detection of SNP TSC0003706
tatgataggaaag

SEQ ID NO: 17140 - DNA, 13 bp, Artificial Sequence
  Oligonucleotide for detection of SNP TSC0003706
ctttcctatcata

SEQ ID NO: 17141 - DNA, 13 bp, Artificial Sequence
  Oligonucleotide for detection of SNP TSC0003707
ttagttaaaagtg

SEQ ID NO: 17142 - DNA, 13 bp, Artificial Sequence
  Oligonucleotide for detection of SNP TSC0003707
cacttttaactaa

SEQ ID NO: 17143 - DNA, 13 bp, Artificial Sequence
  Oligonucleotide for detection of SNP TSC0003707
ttagttgaaagtg

SEQ ID NO: 17144 - DNA, 13 bp, Artificial Sequence
  Oligonucleotide for detection of SNP TSC0003707
cactttcaactaa

SEQ ID NO: 17145 - DNA, 13 bp, Artificial Sequence
  Oligonucleotide for detection of SNP TSC0003707
ttagtcgaaagtg

SEQ ID NO: 17146 - DNA, 13 bp, Artificial Sequence
  Oligonucleotide for detection of SNP TSC0003707
cactttcgactaa

SEQ ID NO: 17147 - DNA, 13 bp, Artificial Sequence
  Oligonucleotide for detection of SNP TSC0003707
tatttttgattag

SEQ ID NO: 17148 - DNA, 13 bp, Artificial Sequence
  Oligonucleotide for detection of SNP TSC0003707
ctaatcaaaaata

SEQ ID NO: 17149 - DNA, 13 bp, Artificial Sequence
  Oligonucleotide for detection of SNP TSC0003707
tattttcgattag

SEQ ID NO: 17150 - DNA, 13 bp, Artificial Sequence
  Oligonucleotide for detection of SNP TSC0003707
ctaatcgaaaata

SEQ ID NO: 17151 - DNA, 13 bp, Artificial Sequence
  Oligonucleotide for detection of SNP TSC0003708
agttttgtgtttt

SEQ ID NO: 17152 - DNA, 13 bp, Artificial Sequence
  Oligonucleotide for detection of SNP TSC0003708
aaaacacaaaact

SEQ ID NO: 17153 - DNA, 13 bp, Artificial Sequence
  Oligonucleotide for detection of SNP TSC0003708
agttttatgtttt

SEQ ID NO: 17154 - DNA, 13 bp, Artificial Sequence
  Oligonucleotide for detection of SNP TSC0003708
aaaacataaaact

SEQ ID NO: 17155 - DNA, 13 bp, Artificial Sequence
  Oligonucleotide for detection of SNP TSC0003709
gtaatttgtggty

SEQ ID NO: 17156 - DNA, 13 bp, Artificial Sequence
  Oligonucleotide for detection of SNP TSC0003709
raccacaaattac

SEQ ID NO: 17157 - DNA, 13 bp, Artificial Sequence
  Oligonucleotide for detection of SNP TSC0003709
gtaattcgtggty

SEQ ID NO: 17158 - DNA, 13 bp, Artificial Sequence
  Oligonucleotide for detection of SNP TSC0003709
raccacgaattac

SEQ ID NO: 17159 - DNA, 13 bp, Artificial Sequence
  Oligonucleotide for detection of SNP TSC0003709
ggttatgggttay

SEQ ID NO: 17160 - DNA, 13 bp, Artificial Sequence
  Oligonucleotide for detection of SNP TSC0003709
rtaacccataacc

SEQ ID NO: 17161 - DNA, 13 bp, Artificial Sequence
  Oligonucleotide for detection of SNP TSC0003709
ggttataggttay

SEQ ID NO: 17162 - DNA, 13 bp, Artificial Sequence
  Oligonucleotide for detection of SNP TSC0003709
rtaacctataacc

SEQ ID NO: 17163 - DNA, 13 bp, Artificial Sequence
  Oligonucleotide for detection of SNP TSC0003709
ggttacgggttay

SEQ ID NO: 17164 - DNA, 13 bp, Artificial Sequence
  Oligonucleotide for detection of SNP TSC0003709
rtaacccgtaacc

SEQ ID NO: 17165 - DNA, 13 bp, Artificial Sequence
  Oligonucleotide for detection of SNP TSC0003710
atttttggatgat

SEQ ID NO: 17166 - DNA, 13 bp, Artificial Sequence
  Oligonucleotide for detection of SNP TSC0003710
atcatccaaaaat

SEQ ID NO: 17167 - DNA, 13 bp, Artificial Sequence
  Oligonucleotide for detection of SNP TSC0003710
atttttagatgat

SEQ ID NO: 17168 - DNA, 13 bp, Artificial Sequence
  Oligonucleotide for detection of SNP TSC0003710
atcatctaaaaat

SEQ ID NO: 17169 - DNA, 13 bp, Artificial Sequence
  Oligonucleotide for detection of SNP TSC0003710
attttcggatgat

SEQ ID NO: 17170 - DNA, 13 bp, Artificial Sequence
  Oligonucleotide for detection of SNP TSC0003710
atcatccgaaaat

SEQ ID NO: 17171 - DNA, 13 bp, Artificial Sequence
  Oligonucleotide for detection of SNP TSC0003710
attatttggggat

SEQ ID NO: 17172 - DNA, 13 bp, Artificial Sequence
  Oligonucleotide for detection of SNP TSC0003710
atccccaaataat

SEQ ID NO: 17173 - DNA, 13 bp, Artificial Sequence
  Oligonucleotide for detection of SNP TSC0003710
attattcggggat

SEQ ID NO: 17174 - DNA, 13 bp, Artificial Sequence
  Oligonucleotide for detection of SNP TSC0003710
atccccgaataat

SEQ ID NO: 17175 - DNA, 13 bp, Artificial Sequence
  Oligonucleotide for detection of SNP TSC0003712
tttattataattt

SEQ ID NO: 17176 - DNA, 13 bp, Artificial Sequence
  Oligonucleotide for detection of SNP TSC0003712
aaattataataaa

SEQ ID NO: 17177 - DNA, 13 bp, Artificial Sequence
  Oligonucleotide for detection of SNP TSC0003712
tttattgtaattt

SEQ ID NO: 17178 - DNA, 13 bp, Artificial Sequence
  Oligonucleotide for detection of SNP TSC0003712
aaattacaataaa

SEQ ID NO: 17179 - DNA, 13 bp, Artificial Sequence
  Oligonucleotide for detection of SNP TSC0003713
gttttgggtgagg

SEQ ID NO: 17180 - DNA, 13 bp, Artificial Sequence
  Oligonucleotide for detection of SNP TSC0003713
cctcacccaaaac

SEQ ID NO: 17181 - DNA, 13 bp, Artificial Sequence
  Oligonucleotide for detection of SNP TSC0003713
gttttgtgtgagg

SEQ ID NO: 17182 - DNA, 13 bp, Artificial Sequence
  Oligonucleotide for detection of SNP TSC0003713
cctcacacaaaac

SEQ ID NO: 17183 - DNA, 13 bp, Artificial Sequence
  Oligonucleotide for detection of SNP TSC0003713
ttttatttaggay

SEQ ID NO: 17184 - DNA, 13 bp, Artificial Sequence
  Oligonucleotide for detection of SNP TSC0003713
rtcctaaataaaa

SEQ ID NO: 17185 - DNA, 13 bp, Artificial Sequence
  Oligonucleotide for detection of SNP TSC0003713
ttttatataggay

SEQ ID NO: 17186 - DNA, 13 bp, Artificial Sequence
  Oligonucleotide for detection of SNP TSC0003713
rtcctatataaaa

SEQ ID NO: 17187 - DNA, 13 bp, Artificial Sequence
  Oligonucleotide for detection of SNP TSC0003717
ttatttgtagttg

SEQ ID NO: 17188 - DNA, 13 bp, Artificial Sequence
  Oligonucleotide for detection of SNP TSC0003717
caactacaaataa

SEQ ID NO: 17189 - DNA, 13 bp, Artificial Sequence
  Oligonucleotide for detection of SNP TSC0003717
ttatttatagttg

SEQ ID NO: 17190 - DNA, 13 bp, Artificial Sequence
  Oligonucleotide for detection of SNP TSC0003717
caactataaataa

SEQ ID NO: 17191 - DNA, 13 bp, Artificial Sequence
  Oligonucleotide for detection of SNP TSC0003719
aagttagaaaaat

SEQ ID NO: 17192 - DNA, 13 bp, Artificial Sequence
  Oligonucleotide for detection of SNP TSC0003719
atttttctaactt

SEQ ID NO: 17193 - DNA, 13 bp, Artificial Sequence
  Oligonucleotide for detection of SNP TSC0003719
aagttataaaaat

SEQ ID NO: 17194 - DNA, 13 bp, Artificial Sequence
  Oligonucleotide for detection of SNP TSC0003719
atttttataactt

SEQ ID NO: 17195 - DNA, 13 bp, Artificial Sequence
  Oligonucleotide for detection of SNP TSC0003719
atttttttgattt

SEQ ID NO: 17196 - DNA, 13 bp, Artificial Sequence
  Oligonucleotide for detection of SNP TSC0003719
aaatcaaaaaaat

SEQ ID NO: 17197 - DNA, 13 bp, Artificial Sequence
  Oligonucleotide for detection of SNP TSC0003719
atttttatgattt

SEQ ID NO: 17198 - DNA, 13 bp, Artificial Sequence
  Oligonucleotide for detection of SNP TSC0003719
aaatcataaaaat

SEQ ID NO: 17199 - DNA, 13 bp, Artificial Sequence
  Oligonucleotide for detection of SNP TSC0003720
ttttatggttagg

SEQ ID NO: 17200 - DNA, 13 bp, Artificial Sequence
  Oligonucleotide for detection of SNP TSC0003720
cctaaccataaaa

SEQ ID NO: 17201 - DNA, 13 bp, Artificial Sequence
  Oligonucleotide for detection of SNP TSC0003720
ttttatagttagg

SEQ ID NO: 17202 - DNA, 13 bp, Artificial Sequence
  Oligonucleotide for detection of SNP TSC0003720
cctaactataaaa

SEQ ID NO: 17203 - DNA, 13 bp, Artificial Sequence
  Oligonucleotide for detection of SNP TSC0003720
ttttacggttagg

SEQ ID NO: 17204 - DNA, 13 bp, Artificial Sequence
  Oligonucleotide for detection of SNP TSC0003720
cctaaccgtaaaa

SEQ ID NO: 17205 - DNA, 13 bp, Artificial Sequence
  Oligonucleotide for detection of SNP TSC0003720
tttgattgtggga

SEQ ID NO: 17206 - DNA, 13 bp, Artificial Sequence
  Oligonucleotide for detection of SNP TSC0003720
tcccacaatcaaa

SEQ ID NO: 17207 - DNA, 13 bp, Artificial Sequence
  Oligonucleotide for detection of SNP TSC0003720
tttgatcgtggga

SEQ ID NO: 17208 - DNA, 13 bp, Artificial Sequence
  Oligonucleotide for detection of SNP TSC0003720
tcccacgatcaaa

SEQ ID NO: 17209 - DNA, 13 bp, Artificial Sequence
  Oligonucleotide for detection of SNP TSC0003721
gttataatatttt

SEQ ID NO: 17210 - DNA, 13 bp, Artificial Sequence
  Oligonucleotide for detection of SNP TSC0003721
aaaatattataac

SEQ ID NO: 17211 - DNA, 13 bp, Artificial Sequence
  Oligonucleotide for detection of SNP TSC0003721
gttatattatttt

SEQ ID NO: 17212 - DNA, 13 bp, Artificial Sequence
  Oligonucleotide for detection of SNP TSC0003721
aaaataatataac

SEQ ID NO: 17213 - DNA, 13 bp, Artificial Sequence
  Oligonucleotide for detection of SNP TSC0003721
agaatattataay

SEQ ID NO: 17214 - DNA, 13 bp, Artificial Sequence
  Oligonucleotide for detection of SNP TSC0003721
rttataatattct

SEQ ID NO: 17215 - DNA, 13 bp, Artificial Sequence
  Oligonucleotide for detection of SNP TSC0003721
agaataatataay

SEQ ID NO: 17216 - DNA, 13 bp, Artificial Sequence
  Oligonucleotide for detection of SNP TSC0003721
rttatattattct

SEQ ID NO: 17217 - DNA, 13 bp, Artificial Sequence
  Oligonucleotide for detection of SNP TSC0003723
agaatgataaagy

SEQ ID NO: 17218 - DNA, 13 bp, Artificial Sequence
  Oligonucleotide for detection of SNP TSC0003723
rctttatcattct

SEQ ID NO: 17219 - DNA, 13 bp, Artificial Sequence
  Oligonucleotide for detection of SNP TSC0003723
agaatggtaaagy

SEQ ID NO: 17220 - DNA, 13 bp, Artificial Sequence
  Oligonucleotide for detection of SNP TSC0003723
rctttaccattct

SEQ ID NO: 17221 - DNA, 13 bp, Artificial Sequence
  Oligonucleotide for detection of SNP TSC0003724
tttttaatgagta

SEQ ID NO: 17222 - DNA, 13 bp, Artificial Sequence
  Oligonucleotide for detection of SNP TSC0003724
tactcattaaaaa

SEQ ID NO: 17223 - DNA, 13 bp, Artificial Sequence
  Oligonucleotide for detection of SNP TSC0003724
tttttagtgagta

SEQ ID NO: 17224 - DNA, 13 bp, Artificial Sequence
  Oligonucleotide for detection of SNP TSC0003724
tactcactaaaaa

SEQ ID NO: 17225 - DNA, 13 bp, Artificial Sequence
  Oligonucleotide for detection of SNP TSC0003725
gtggttttagagy

SEQ ID NO: 17226 - DNA, 13 bp, Artificial Sequence
  Oligonucleotide for detection of SNP TSC0003725
rctctaaaaccac

SEQ ID NO: 17227 - DNA, 13 bp, Artificial Sequence
  Oligonucleotide for detection of SNP TSC0003725
gtggttgtagagy

SEQ ID NO: 17228 - DNA, 13 bp, Artificial Sequence
  Oligonucleotide for detection of SNP TSC0003725
rctctacaaccac

SEQ ID NO: 17229 - DNA, 13 bp, Artificial Sequence
  Oligonucleotide for detection of SNP TSC0003725
gttttggaattay

SEQ ID NO: 17230 - DNA, 13 bp, Artificial Sequence
  Oligonucleotide for detection of SNP TSC0003725
rtaattccaaaac

SEQ ID NO: 17231 - DNA, 13 bp, Artificial Sequence
  Oligonucleotide for detection of SNP TSC0003725
gttttgtaattay

SEQ ID NO: 17232 - DNA, 13 bp, Artificial Sequence
  Oligonucleotide for detection of SNP TSC0003725
rtaattacaaaac

SEQ ID NO: 17233 - DNA, 13 bp, Artificial Sequence
  Oligonucleotide for detection of SNP TSC0003727
atttgtaggaaga

SEQ ID NO: 17234 - DNA, 13 bp, Artificial Sequence
  Oligonucleotide for detection of SNP TSC0003727
tcttcctacaaat

SEQ ID NO: 17235 - DNA, 13 bp, Artificial Sequence
  Oligonucleotide for detection of SNP TSC0003727
atttgtgggaaga

SEQ ID NO: 17236 - DNA, 13 bp, Artificial Sequence
  Oligonucleotide for detection of SNP TSC0003727
tcttcccacaaat

SEQ ID NO: 17237 - DNA, 13 bp, Artificial Sequence
  Oligonucleotide for detection of SNP TSC0003727
atttgcgggaaga

SEQ ID NO: 17238 - DNA, 13 bp, Artificial Sequence
  Oligonucleotide for detection of SNP TSC0003727
tcttcccgcaaat

SEQ ID NO: 17239 - DNA, 13 bp, Artificial Sequence
  Oligonucleotide for detection of SNP TSC0003727
tttttttgtagat

SEQ ID NO: 17240 - DNA, 13 bp, Artificial Sequence
  Oligonucleotide for detection of SNP TSC0003727
atctacaaaaaaa

SEQ ID NO: 17241 - DNA, 13 bp, Artificial Sequence
  Oligonucleotide for detection of SNP TSC0003727
ttttttcgtagat

SEQ ID NO: 17242 - DNA, 13 bp, Artificial Sequence
  Oligonucleotide for detection of SNP TSC0003727
atctacgaaaaaa

SEQ ID NO: 17243 - DNA, 13 bp, Artificial Sequence
  Oligonucleotide for detection of SNP TSC0003728
ttaggtatggtgg

SEQ ID NO: 17244 - DNA, 13 bp, Artificial Sequence
  Oligonucleotide for detection of SNP TSC0003728
ccaccatacctaa

SEQ ID NO: 17245 - DNA, 13 bp, Artificial Sequence
  Oligonucleotide for detection of SNP TSC0003728
ttaggtgtggtgg

SEQ ID NO: 17246 - DNA, 13 bp, Artificial Sequence
  Oligonucleotide for detection of SNP TSC0003728
ccaccacacctaa

SEQ ID NO: 17247 - DNA, 13 bp, Artificial Sequence
  Oligonucleotide for detection of SNP TSC0003728
ttaggtacggtgg

SEQ ID NO: 17248 - DNA, 13 bp, Artificial Sequence
  Oligonucleotide for detection of SNP TSC0003728
ccaccgtacctaa

SEQ ID NO: 17249 - DNA, 13 bp, Artificial Sequence
  Oligonucleotide for detection of SNP TSC0003728
ttaggcgtggtgg

SEQ ID NO: 17250 - DNA, 13 bp, Artificial Sequence
  Oligonucleotide for detection of SNP TSC0003728
ccaccacgcctaa

SEQ ID NO: 17251 - DNA, 13 bp, Artificial Sequence
  Oligonucleotide for detection of SNP TSC0003728
ttaggtgcggtgg

SEQ ID NO: 17252 - DNA, 13 bp, Artificial Sequence
  Oligonucleotide for detection of SNP TSC0003728
ccaccgcacctaa

SEQ ID NO: 17253 - DNA, 13 bp, Artificial Sequence
  Oligonucleotide for detection of SNP TSC0003728
ttaggcgcggtgg

SEQ ID NO: 17254 - DNA, 13 bp, Artificial Sequence
  Oligonucleotide for detection of SNP TSC0003728
ccaccgcgcctaa

SEQ ID NO: 17255 - DNA, 13 bp, Artificial Sequence
  Oligonucleotide for detection of SNP TSC0003728
ttattgtgtttgg

SEQ ID NO: 17256 - DNA, 13 bp, Artificial Sequence
  Oligonucleotide for detection of SNP TSC0003728
ccaaacacaataa

SEQ ID NO: 17257 - DNA, 13 bp, Artificial Sequence
  Oligonucleotide for detection of SNP TSC0003728
ttatcgtgtttgg

SEQ ID NO: 17258 - DNA, 13 bp, Artificial Sequence
  Oligonucleotide for detection of SNP TSC0003728
ccaaacacgataa

SEQ ID NO: 17259 - DNA, 13 bp, Artificial Sequence
  Oligonucleotide for detection of SNP TSC0003728
ttattgcgtttgg

SEQ ID NO: 17260 - DNA, 13 bp, Artificial Sequence
  Oligonucleotide for detection of SNP TSC0003728
ccaaacgcaataa

SEQ ID NO: 17261 - DNA, 13 bp, Artificial Sequence
  Oligonucleotide for detection of SNP TSC0003728
ttatcgcgtttgg

SEQ ID NO: 17262 - DNA, 13 bp, Artificial Sequence
  Oligonucleotide for detection of SNP TSC0003728
ccaaacgcgataa

SEQ ID NO: 17263 - DNA, 13 bp, Artificial Sequence
  Oligonucleotide for detection of SNP TSC0003732
gaatggagtgaay

SEQ ID NO: 17264 - DNA, 13 bp, Artificial Sequence
  Oligonucleotide for detection of SNP TSC0003732
rttcactccattc

SEQ ID NO: 17265 - DNA, 13 bp, Artificial Sequence
  Oligonucleotide for detection of SNP TSC0003732
gaatggggtgaay

SEQ ID NO: 17266 - DNA, 13 bp, Artificial Sequence
  Oligonucleotide for detection of SNP TSC0003732
rttcaccccattc

SEQ ID NO: 17267 - DNA, 13 bp, Artificial Sequence
  Oligonucleotide for detection of SNP TSC0003733
ataggtgtttatt

SEQ ID NO: 17268 - DNA, 13 bp, Artificial Sequence
  Oligonucleotide for detection of SNP TSC0003733
aataaacacctat

SEQ ID NO: 17269 - DNA, 13 bp, Artificial Sequence
  Oligonucleotide for detection of SNP TSC0003733
ataggtttttatt

SEQ ID NO: 17270 - DNA, 13 bp, Artificial Sequence
  Oligonucleotide for detection of SNP TSC0003733
aataaaaacctat

SEQ ID NO: 17271 - DNA, 13 bp, Artificial Sequence
  Oligonucleotide for detection of SNP TSC0003733
agtgggtatttat

SEQ ID NO: 17272 - DNA, 13 bp, Artificial Sequence
  Oligonucleotide for detection of SNP TSC0003733
ataaatacccact

SEQ ID NO: 17273 - DNA, 13 bp, Artificial Sequence
  Oligonucleotide for detection of SNP TSC0003733
agtgggaatttat

SEQ ID NO: 17274 - DNA, 13 bp, Artificial Sequence
  Oligonucleotide for detection of SNP TSC0003733
ataaattcccact

SEQ ID NO: 17275 - DNA, 13 bp, Artificial Sequence
  Oligonucleotide for detection of SNP TSC0003734
tgttaaaggttaa

SEQ ID NO: 17276 - DNA, 13 bp, Artificial Sequence
  Oligonucleotide for detection of SNP TSC0003734
ttaacctttaaca

SEQ ID NO: 17277 - DNA, 13 bp, Artificial Sequence
  Oligonucleotide for detection of SNP TSC0003734
tgttaatggttaa

SEQ ID NO: 17278 - DNA, 13 bp, Artificial Sequence
  Oligonucleotide for detection of SNP TSC0003734
ttaaccattaaca

SEQ ID NO: 17279 - DNA, 13 bp, Artificial Sequence
  Oligonucleotide for detection of SNP TSC0003734
cgttaaaggttaa

SEQ ID NO: 17280 - DNA, 13 bp, Artificial Sequence
  Oligonucleotide for detection of SNP TSC0003734
ttaacctttaacg

SEQ ID NO: 17281 - DNA, 13 bp, Artificial Sequence
  Oligonucleotide for detection of SNP TSC0003734
cgttaatggttaa

SEQ ID NO: 17282 - DNA, 13 bp, Artificial Sequence
  Oligonucleotide for detection of SNP TSC0003734
ttaaccattaacg

SEQ ID NO: 17283 - DNA, 13 bp, Artificial Sequence
  Oligonucleotide for detection of SNP TSC0003734
tgttaacggttaa

SEQ ID NO: 17284 - DNA, 13 bp, Artificial Sequence
  Oligonucleotide for detection of SNP TSC0003734
ttaaccgttaaca

SEQ ID NO: 17285 - DNA, 13 bp, Artificial Sequence
  Oligonucleotide for detection of SNP TSC0003734
cgttaacggttaa

SEQ ID NO: 17286 - DNA, 13 bp, Artificial Sequence
  Oligonucleotide for detection of SNP TSC0003734
ttaaccgttaacg

SEQ ID NO: 17287 - DNA, 13 bp, Artificial Sequence
  Oligonucleotide for detection of SNP TSC0003734
ttagtttttggtg

SEQ ID NO: 17288 - DNA, 13 bp, Artificial Sequence
  Oligonucleotide for detection of SNP TSC0003734
caccaaaaactaa

SEQ ID NO: 17289 - DNA, 13 bp, Artificial Sequence
  Oligonucleotide for detection of SNP TSC0003734
ttagttgttggtg

SEQ ID NO: 17290 - DNA, 13 bp, Artificial Sequence
  Oligonucleotide for detection of SNP TSC0003734
caccaacaactaa

SEQ ID NO: 17291 - DNA, 13 bp, Artificial Sequence
  Oligonucleotide for detection of SNP TSC0003734
ttagtttttggcg

SEQ ID NO: 17292 - DNA, 13 bp, Artificial Sequence
  Oligonucleotide for detection of SNP TSC0003734
cgccaaaaactaa

SEQ ID NO: 17293 - DNA, 13 bp, Artificial Sequence
  Oligonucleotide for detection of SNP TSC0003734
ttagtcgttggtg

SEQ ID NO: 17294 - DNA, 13 bp, Artificial Sequence
  Oligonucleotide for detection of SNP TSC0003734
caccaacgactaa

SEQ ID NO: 17295 - DNA, 13 bp, Artificial Sequence
  Oligonucleotide for detection of SNP TSC0003734
ttagttgttggcg

SEQ ID NO: 17296 - DNA, 13 bp, Artificial Sequence
  Oligonucleotide for detection of SNP TSC0003734
cgccaacaactaa

SEQ ID NO: 17297 - DNA, 13 bp, Artificial Sequence
  Oligonucleotide for detection of SNP TSC0003734
ttagtcgttggcg

SEQ ID NO: 17298 - DNA, 13 bp, Artificial Sequence
  Oligonucleotide for detection of SNP TSC0003734
cgccaacgactaa

SEQ ID NO: 17299 - DNA, 13 bp, Artificial Sequence
  Oligonucleotide for detection of SNP TSC0003735
tttaggtattttt

SEQ ID NO: 17300 - DNA, 13 bp, Artificial Sequence
  Oligonucleotide for detection of SNP TSC0003735
aaaaatacctaaa

SEQ ID NO: 17301 - DNA, 13 bp, Artificial Sequence
  Oligonucleotide for detection of SNP TSC0003735
tttaggaattttt

SEQ ID NO: 17302 - DNA, 13 bp, Artificial Sequence
  Oligonucleotide for detection of SNP TSC0003735
aaaaattcctaaa

SEQ ID NO: 17303 - DNA, 13 bp, Artificial Sequence
  Oligonucleotide for detection of SNP TSC0003735
aggagtgtttgga

SEQ ID NO: 17304 - DNA, 13 bp, Artificial Sequence
  Oligonucleotide for detection of SNP TSC0003735
tccaaacactcct

SEQ ID NO: 17305 - DNA, 13 bp, Artificial Sequence
  Oligonucleotide for detection of SNP TSC0003735
aggagtttttgga

SEQ ID NO: 17306 - DNA, 13 bp, Artificial Sequence
  Oligonucleotide for detection of SNP TSC0003735
tccaaaaactcct

SEQ ID NO: 17307 - DNA, 13 bp, Artificial Sequence
  Oligonucleotide for detection of SNP TSC0003736
tagggaagtggag

SEQ ID NO: 17308 - DNA, 13 bp, Artificial Sequence
  Oligonucleotide for detection of SNP TSC0003736
ctccacttcccta

SEQ ID NO: 17309 - DNA, 13 bp, Artificial Sequence
  Oligonucleotide for detection of SNP TSC0003736
tagggaggtggag

SEQ ID NO: 17310 - DNA, 13 bp, Artificial Sequence
  Oligonucleotide for detection of SNP TSC0003736
ctccacctcccta

SEQ ID NO: 17311 - DNA, 13 bp, Artificial Sequence
  Oligonucleotide for detection of SNP TSC0003736
tagggaagcggag

SEQ ID NO: 17312 - DNA, 13 bp, Artificial Sequence
  Oligonucleotide for detection of SNP TSC0003736
ctccgcttcccta

SEQ ID NO: 17313 - DNA, 13 bp, Artificial Sequence
  Oligonucleotide for detection of SNP TSC0003736
tagggaggcggag

SEQ ID NO: 17314 - DNA, 13 bp, Artificial Sequence
  Oligonucleotide for detection of SNP TSC0003736
ctccgcctcccta

SEQ ID NO: 17315 - DNA, 13 bp, Artificial Sequence
  Oligonucleotide for detection of SNP TSC0003737
attaggatgttat

SEQ ID NO: 17316 - DNA, 13 bp, Artificial Sequence
  Oligonucleotide for detection of SNP TSC0003737
ataacatcctaat

SEQ ID NO: 17317 - DNA, 13 bp, Artificial Sequence
  Oligonucleotide for detection of SNP TSC0003737
attagggtgttat

SEQ ID NO: 17318 - DNA, 13 bp, Artificial Sequence
  Oligonucleotide for detection of SNP TSC0003737
ataacaccctaat

SEQ ID NO: 17319 - DNA, 13 bp, Artificial Sequence
  Oligonucleotide for detection of SNP TSC0003737
attaggacgttat

SEQ ID NO: 17320 - DNA, 13 bp, Artificial Sequence
  Oligonucleotide for detection of SNP TSC0003737
ataacgtcctaat

SEQ ID NO: 17321 - DNA, 13 bp, Artificial Sequence
  Oligonucleotide for detection of SNP TSC0003737
attagggcgttat

SEQ ID NO: 17322 - DNA, 13 bp, Artificial Sequence
  Oligonucleotide for detection of SNP TSC0003737
ataacgccctaat

SEQ ID NO: 17323 - DNA, 13 bp, Artificial Sequence
  Oligonucleotide for detection of SNP TSC0003738
aaaatattaatta

SEQ ID NO: 17324 - DNA, 13 bp, Artificial Sequence
  Oligonucleotide for detection of SNP TSC0003738
taattaatatttt

SEQ ID NO: 17325 - DNA, 13 bp, Artificial Sequence
  Oligonucleotide for detection of SNP TSC0003738
aaaatagtaatta

SEQ ID NO: 17326 - DNA, 13 bp, Artificial Sequence
  Oligonucleotide for detection of SNP TSC0003738
taattactatttt

SEQ ID NO: 17327 - DNA, 13 bp, Artificial Sequence
  Oligonucleotide for detection of SNP TSC0003738
tgattggtatttt

SEQ ID NO: 17328 - DNA, 13 bp, Artificial Sequence
  Oligonucleotide for detection of SNP TSC0003738
aaaataccaatca

SEQ ID NO: 17329 - DNA, 13 bp, Artificial Sequence
  Oligonucleotide for detection of SNP TSC0003738
tgattgttatttt

SEQ ID NO: 17330 - DNA, 13 bp, Artificial Sequence
  Oligonucleotide for detection of SNP TSC0003738
aaaataacaatca

SEQ ID NO: 17331 - DNA, 13 bp, Artificial Sequence
  Oligonucleotide for detection of SNP TSC0003739
aaatgtgtagaty

SEQ ID NO: 17332 - DNA, 13 bp, Artificial Sequence
  Oligonucleotide for detection of SNP TSC0003739
ratctacacattt

SEQ ID NO: 17333 - DNA, 13 bp, Artificial Sequence
  Oligonucleotide for detection of SNP TSC0003739
aaatgtatagaty

SEQ ID NO: 17334 - DNA, 13 bp, Artificial Sequence
  Oligonucleotide for detection of SNP TSC0003739
ratctatacattt

SEQ ID NO: 17335 - DNA, 13 bp, Artificial Sequence
  Oligonucleotide for detection of SNP TSC0003741
ggttgggtttttt

SEQ ID NO: 17336 - DNA, 13 bp, Artificial Sequence
  Oligonucleotide for detection of SNP TSC0003741
aaaaaacccaacc

SEQ ID NO: 17337 - DNA, 13 bp, Artificial Sequence
  Oligonucleotide for detection of SNP TSC0003741
ggttggttttttt

SEQ ID NO: 17338 - DNA, 13 bp, Artificial Sequence
  Oligonucleotide for detection of SNP TSC0003741
aaaaaaaccaacc

SEQ ID NO: 17339 - DNA, 13 bp, Artificial Sequence
  Oligonucleotide for detection of SNP TSC0003741
ggtcgggtttttt

SEQ ID NO: 17340 - DNA, 13 bp, Artificial Sequence
  Oligonucleotide for detection of SNP TSC0003741
aaaaaacccgacc

SEQ ID NO: 17341 - DNA, 13 bp, Artificial Sequence
  Oligonucleotide for detection of SNP TSC0003741
ggtcggttttttt

SEQ ID NO: 17342 - DNA, 13 bp, Artificial Sequence
  Oligonucleotide for detection of SNP TSC0003741
aaaaaaaccgacc

SEQ ID NO: 17343 - DNA, 13 bp, Artificial Sequence
  Oligonucleotide for detection of SNP TSC0003741
aggagatttggty

SEQ ID NO: 17344 - DNA, 13 bp, Artificial Sequence
  Oligonucleotide for detection of SNP TSC0003741
raccaaatctcct

SEQ ID NO: 17345 - DNA, 13 bp, Artificial Sequence
  Oligonucleotide for detection of SNP TSC0003741
aggagagttggty

SEQ ID NO: 17346 - DNA, 13 bp, Artificial Sequence
  Oligonucleotide for detection of SNP TSC0003741
raccaactctcct

SEQ ID NO: 17347 - DNA, 13 bp, Artificial Sequence
  Oligonucleotide for detection of SNP TSC0003741
aggagattcggty

SEQ ID NO: 17348 - DNA, 13 bp, Artificial Sequence
  Oligonucleotide for detection of SNP TSC0003741
raccgaatctcct

SEQ ID NO: 17349 - DNA, 13 bp, Artificial Sequence
  Oligonucleotide for detection of SNP TSC0003741
aggagagtcggty

SEQ ID NO: 17350 - DNA, 13 bp, Artificial Sequence
  Oligonucleotide for detection of SNP TSC0003741
raccgactctcct

SEQ ID NO: 17351 - DNA, 13 bp, Artificial Sequence
  Oligonucleotide for detection of SNP TSC0003742
ttgattgtgttag

SEQ ID NO: 17352 - DNA, 13 bp, Artificial Sequence
  Oligonucleotide for detection of SNP TSC0003742
ctaacacaatcaa

SEQ ID NO: 17353 - DNA, 13 bp, Artificial Sequence
  Oligonucleotide for detection of SNP TSC0003742
ttgattatgttag

SEQ ID NO: 17354 - DNA, 13 bp, Artificial Sequence
  Oligonucleotide for detection of SNP TSC0003742
ctaacataatcaa

SEQ ID NO: 17355 - DNA, 13 bp, Artificial Sequence
  Oligonucleotide for detection of SNP TSC0003742
ttgatcgtgttag

SEQ ID NO: 17356 - DNA, 13 bp, Artificial Sequence
  Oligonucleotide for detection of SNP TSC0003742
ctaacacgatcaa

SEQ ID NO: 17357 - DNA, 13 bp, Artificial Sequence
  Oligonucleotide for detection of SNP TSC0003742
ttggtatgattaa

SEQ ID NO: 17358 - DNA, 13 bp, Artificial Sequence
  Oligonucleotide for detection of SNP TSC0003742
ttaatcataccaa

SEQ ID NO: 17359 - DNA, 13 bp, Artificial Sequence
  Oligonucleotide for detection of SNP TSC0003742
ttggtacgattaa

SEQ ID NO: 17360 - DNA, 13 bp, Artificial Sequence
  Oligonucleotide for detection of SNP TSC0003742
ttaatcgtaccaa

SEQ ID NO: 17361 - DNA, 13 bp, Artificial Sequence
  Oligonucleotide for detection of SNP TSC0003746
ttaaataaggtag

SEQ ID NO: 17362 - DNA, 13 bp, Artificial Sequence
  Oligonucleotide for detection of SNP TSC0003746
ctaccttatttaa

SEQ ID NO: 17363 - DNA, 13 bp, Artificial Sequence
  Oligonucleotide for detection of SNP TSC0003746
ttaaatgaggtag

SEQ ID NO: 17364 - DNA, 13 bp, Artificial Sequence
  Oligonucleotide for detection of SNP TSC0003746
ctacctcatttaa

SEQ ID NO: 17365 - DNA, 13 bp, Artificial Sequence
  Oligonucleotide for detection of SNP TSC0003747
attggtattaaaa

SEQ ID NO: 17366 - DNA, 13 bp, Artificial Sequence
  Oligonucleotide for detection of SNP TSC0003747
ttttaataccaat

SEQ ID NO: 17367 - DNA, 13 bp, Artificial Sequence
  Oligonucleotide for detection of SNP TSC0003747
attggttttaaaa

SEQ ID NO: 17368 - DNA, 13 bp, Artificial Sequence
  Oligonucleotide for detection of SNP TSC0003747
ttttaaaaccaat

SEQ ID NO: 17369 - DNA, 13 bp, Artificial Sequence
  Oligonucleotide for detection of SNP TSC0003747
ttttaatattaat

SEQ ID NO: 17370 - DNA, 13 bp, Artificial Sequence
  Oligonucleotide for detection of SNP TSC0003747
attaatattaaaa

SEQ ID NO: 17371 - DNA, 13 bp, Artificial Sequence
  Oligonucleotide for detection of SNP TSC0003747
ttttaaaattaat

SEQ ID NO: 17372 - DNA, 13 bp, Artificial Sequence
  Oligonucleotide for detection of SNP TSC0003747
attaattttaaaa

SEQ ID NO: 17373 - DNA, 13 bp, Artificial Sequence
  Oligonucleotide for detection of SNP TSC0003748
gagagagtagtag

SEQ ID NO: 17374 - DNA, 13 bp, Artificial Sequence
  Oligonucleotide for detection of SNP TSC0003748
ctactactctctc

SEQ ID NO: 17375 - DNA, 13 bp, Artificial Sequence
  Oligonucleotide for detection of SNP TSC0003748
gagagaatagtag

SEQ ID NO: 17376 - DNA, 13 bp, Artificial Sequence
  Oligonucleotide for detection of SNP TSC0003748
ctactattctctc

SEQ ID NO: 17377 - DNA, 13 bp, Artificial Sequence
  Oligonucleotide for detection of SNP TSC0003750
ttttattgagatt

SEQ ID NO: 17378 - DNA, 13 bp, Artificial Sequence
  Oligonucleotide for detection of SNP TSC0003750
aatctcaataaaa

SEQ ID NO: 17379 - DNA, 13 bp, Artificial Sequence
  Oligonucleotide for detection of SNP TSC0003750
ttttatcgagatt

SEQ ID NO: 17380 - DNA, 13 bp, Artificial Sequence
  Oligonucleotide for detection of SNP TSC0003750
aatctcgataaaa

SEQ ID NO: 17381 - DNA, 13 bp, Artificial Sequence
  Oligonucleotide for detection of SNP TSC0003750
aattttaatgaag

SEQ ID NO: 17382 - DNA, 13 bp, Artificial Sequence
  Oligonucleotide for detection of SNP TSC0003750
cttcattaaaatt

SEQ ID NO: 17383 - DNA, 13 bp, Artificial Sequence
  Oligonucleotide for detection of SNP TSC0003750
aattttgatgaag

SEQ ID NO: 17384 - DNA, 13 bp, Artificial Sequence
  Oligonucleotide for detection of SNP TSC0003750
cttcatcaaaatt

SEQ ID NO: 17385 - DNA, 13 bp, Artificial Sequence
  Oligonucleotide for detection of SNP TSC0003750
aatttcgatgaag

SEQ ID NO: 17386 - DNA, 13 bp, Artificial Sequence
  Oligonucleotide for detection of SNP TSC0003750
cttcatcgaaatt

SEQ ID NO: 17387 - DNA, 13 bp, Artificial Sequence
  Oligonucleotide for detection of SNP TSC0003752
tagtgaggggaat

SEQ ID NO: 17388 - DNA, 13 bp, Artificial Sequence
  Oligonucleotide for detection of SNP TSC0003752
attcccctcacta

SEQ ID NO: 17389 - DNA, 13 bp, Artificial Sequence
  Oligonucleotide for detection of SNP TSC0003752
tagtgaagggaat

SEQ ID NO: 17390 - DNA, 13 bp, Artificial Sequence
  Oligonucleotide for detection of SNP TSC0003752
attcccttcacta

SEQ ID NO: 17391 - DNA, 13 bp, Artificial Sequence
  Oligonucleotide for detection of SNP TSC0003754
atgtatatatgta

SEQ ID NO: 17392 - DNA, 13 bp, Artificial Sequence
  Oligonucleotide for detection of SNP TSC0003754
tacatatatacat

SEQ ID NO: 17393 - DNA, 13 bp, Artificial Sequence
  Oligonucleotide for detection of SNP TSC0003756
taaggatggattt

SEQ ID NO: 17394 - DNA, 13 bp, Artificial Sequence
  Oligonucleotide for detection of SNP TSC0003756
aaatccatcctta

SEQ ID NO: 17395 - DNA, 13 bp, Artificial Sequence
  Oligonucleotide for detection of SNP TSC0003756
taaggacggattt

SEQ ID NO: 17396 - DNA, 13 bp, Artificial Sequence
  Oligonucleotide for detection of SNP TSC0003756
aaatccgtcctta

SEQ ID NO: 17397 - DNA, 13 bp, Artificial Sequence
  Oligonucleotide for detection of SNP TSC0003756
aaatttgttttta

SEQ ID NO: 17398 - DNA, 13 bp, Artificial Sequence
  Oligonucleotide for detection of SNP TSC0003756
taaaaacaaattt

SEQ ID NO: 17399 - DNA, 13 bp, Artificial Sequence
  Oligonucleotide for detection of SNP TSC0003756
aaatttattttta

SEQ ID NO: 17400 - DNA, 13 bp, Artificial Sequence
  Oligonucleotide for detection of SNP TSC0003756
taaaaataaattt

SEQ ID NO: 17401 - DNA, 13 bp, Artificial Sequence
  Oligonucleotide for detection of SNP TSC0003756
aaattcgttttta

SEQ ID NO: 17402 - DNA, 13 bp, Artificial Sequence
  Oligonucleotide for detection of SNP TSC0003756
taaaaacgaattt

SEQ ID NO: 17403 - DNA, 13 bp, Artificial Sequence
  Oligonucleotide for detection of SNP TSC0003758
ttgataattttaa

SEQ ID NO: 17404 - DNA, 13 bp, Artificial Sequence
  Oligonucleotide for detection of SNP TSC0003758
ttaaaattatcaa

SEQ ID NO: 17405 - DNA, 13 bp, Artificial Sequence
  Oligonucleotide for detection of SNP TSC0003758
ttgatagttttaa

SEQ ID NO: 17406 - DNA, 13 bp, Artificial Sequence
  Oligonucleotide for detection of SNP TSC0003758
ttaaaactatcaa

SEQ ID NO: 17407 - DNA, 13 bp, Artificial Sequence
  Oligonucleotide for detection of SNP TSC0003758
tcgataattttaa

SEQ ID NO: 17408 - DNA, 13 bp, Artificial Sequence
  Oligonucleotide for detection of SNP TSC0003758
ttaaaattatcga

SEQ ID NO: 17409 - DNA, 13 bp, Artificial Sequence
  Oligonucleotide for detection of SNP TSC0003758
tcgatagttttaa

SEQ ID NO: 17410 - DNA, 13 bp, Artificial Sequence
  Oligonucleotide for detection of SNP TSC0003758
ttaaaactatcga

SEQ ID NO: 17411 - DNA, 13 bp, Artificial Sequence
  Oligonucleotide for detection of SNP TSC0003761
tttaatttgagta

SEQ ID NO: 17412 - DNA, 13 bp, Artificial Sequence
  Oligonucleotide for detection of SNP TSC0003761
tactcaaattaaa

SEQ ID NO: 17413 - DNA, 13 bp, Artificial Sequence
  Oligonucleotide for detection of SNP TSC0003761
tttaatacgagta

SEQ ID NO: 17414 - DNA, 13 bp, Artificial Sequence
  Oligonucleotide for detection of SNP TSC0003761
tactcgtattaaa

SEQ ID NO: 17415 - DNA, 13 bp, Artificial Sequence
  Oligonucleotide for detection of SNP TSC0003761
tttaattcgagta

SEQ ID NO: 17416 - DNA, 13 bp, Artificial Sequence
  Oligonucleotide for detection of SNP TSC0003761
tactcgaattaaa

SEQ ID NO: 17417 - DNA, 13 bp, Artificial Sequence
  Oligonucleotide for detection of SNP TSC0003761
tgtttgtgttagg

SEQ ID NO: 17418 - DNA, 13 bp, Artificial Sequence
  Oligonucleotide for detection of SNP TSC0003761
cctaacacaaaca

SEQ ID NO: 17419 - DNA, 13 bp, Artificial Sequence
  Oligonucleotide for detection of SNP TSC0003761
tgtttgggttagg

SEQ ID NO: 17420 - DNA, 13 bp, Artificial Sequence
  Oligonucleotide for detection of SNP TSC0003761
cctaacccaaaca

SEQ ID NO: 17421 - DNA, 13 bp, Artificial Sequence
  Oligonucleotide for detection of SNP TSC0003761
tgttcgtgttagg

SEQ ID NO: 17422 - DNA, 13 bp, Artificial Sequence
  Oligonucleotide for detection of SNP TSC0003761
cctaacacgaaca

SEQ ID NO: 17423 - DNA, 13 bp, Artificial Sequence
  Oligonucleotide for detection of SNP TSC0003761
tgttcgggttagg

SEQ ID NO: 17424 - DNA, 13 bp, Artificial Sequence
  Oligonucleotide for detection of SNP TSC0003761
cctaacccgaaca

SEQ ID NO: 17425 - DNA, 13 bp, Artificial Sequence
  Oligonucleotide for detection of SNP TSC0003762
taggatgatagtt

SEQ ID NO: 17426 - DNA, 13 bp, Artificial Sequence
  Oligonucleotide for detection of SNP TSC0003762
aactatcatccta

SEQ ID NO: 17427 - DNA, 13 bp, Artificial Sequence
  Oligonucleotide for detection of SNP TSC0003762
taggataatagtt

SEQ ID NO: 17428 - DNA, 13 bp, Artificial Sequence
  Oligonucleotide for detection of SNP TSC0003762
aactattatccta

SEQ ID NO: 17429 - DNA, 13 bp, Artificial Sequence
  Oligonucleotide for detection of SNP TSC0003763
ttttaaattgtat

SEQ ID NO: 17430 - DNA, 13 bp, Artificial Sequence
  Oligonucleotide for detection of SNP TSC0003763
atacaatttaaaa

SEQ ID NO: 17431 - DNA, 13 bp, Artificial Sequence
  Oligonucleotide for detection of SNP TSC0003763
ttttaagttgtat

SEQ ID NO: 17432 - DNA, 13 bp, Artificial Sequence
  Oligonucleotide for detection of SNP TSC0003763
atacaacttaaaa

SEQ ID NO: 17433 - DNA, 13 bp, Artificial Sequence
  Oligonucleotide for detection of SNP TSC0003764
gttagtatattag

SEQ ID NO: 17434 - DNA, 13 bp, Artificial Sequence
  Oligonucleotide for detection of SNP TSC0003764
ctaatatactaac

SEQ ID NO: 17435 - DNA, 13 bp, Artificial Sequence
  Oligonucleotide for detection of SNP TSC0003764
gttagtttattag

SEQ ID NO: 17436 - DNA, 13 bp, Artificial Sequence
  Oligonucleotide for detection of SNP TSC0003764
ctaataaactaac

SEQ ID NO: 17437 - DNA, 13 bp, Artificial Sequence
  Oligonucleotide for detection of SNP TSC0003764
ttaatatgttgay

SEQ ID NO: 17438 - DNA, 13 bp, Artificial Sequence
  Oligonucleotide for detection of SNP TSC0003764
rtcaacatattaa

SEQ ID NO: 17439 - DNA, 13 bp, Artificial Sequence
  Oligonucleotide for detection of SNP TSC0003764
ttaataggttgay

SEQ ID NO: 17440 - DNA, 13 bp, Artificial Sequence
  Oligonucleotide for detection of SNP TSC0003764
rtcaacctattaa

SEQ ID NO: 17441 - DNA, 13 bp, Artificial Sequence
  Oligonucleotide for detection of SNP TSC0003765
aatttaagtagag

SEQ ID NO: 17442 - DNA, 13 bp, Artificial Sequence
  Oligonucleotide for detection of SNP TSC0003765
ctctacttaaatt

SEQ ID NO: 17443 - DNA, 13 bp, Artificial Sequence
  Oligonucleotide for detection of SNP TSC0003765
aatttaggtagag

SEQ ID NO: 17444 - DNA, 13 bp, Artificial Sequence
  Oligonucleotide for detection of SNP TSC0003765
ctctacctaaatt

SEQ ID NO: 17445 - DNA, 13 bp, Artificial Sequence
  Oligonucleotide for detection of SNP TSC0003766
ttgtggatgggga

SEQ ID NO: 17446 - DNA, 13 bp, Artificial Sequence
  Oligonucleotide for detection of SNP TSC0003766
tccccatccacaa

SEQ ID NO: 17447 - DNA, 13 bp, Artificial Sequence
  Oligonucleotide for detection of SNP TSC0003766
ttgtggttgggga

SEQ ID NO: 17448 - DNA, 13 bp, Artificial Sequence
  Oligonucleotide for detection of SNP TSC0003766
tccccaaccacaa

SEQ ID NO: 17449 - DNA, 13 bp, Artificial Sequence
  Oligonucleotide for detection of SNP TSC0003766
tcgtggatgggga

SEQ ID NO: 17450 - DNA, 13 bp, Artificial Sequence
  Oligonucleotide for detection of SNP TSC0003766
tccccatccacga

SEQ ID NO: 17451 - DNA, 13 bp, Artificial Sequence
  Oligonucleotide for detection of SNP TSC0003766
tcgtggttgggga

SEQ ID NO: 17452 - DNA, 13 bp, Artificial Sequence
  Oligonucleotide for detection of SNP TSC0003766
tccccaaccacga

SEQ ID NO: 17453 - DNA, 13 bp, Artificial Sequence
  Oligonucleotide for detection of SNP TSC0003766
ttgcggatgggga

SEQ ID NO: 17454 - DNA, 13 bp, Artificial Sequence
  Oligonucleotide for detection of SNP TSC0003766
tccccatccgcaa

SEQ ID NO: 17455 - DNA, 13 bp, Artificial Sequence
  Oligonucleotide for detection of SNP TSC0003766
ttgcggttgggga

SEQ ID NO: 17456 - DNA, 13 bp, Artificial Sequence
  Oligonucleotide for detection of SNP TSC0003766
tccccaaccgcaa

SEQ ID NO: 17457 - DNA, 13 bp, Artificial Sequence
  Oligonucleotide for detection of SNP TSC0003766
tcgcggatgggga

SEQ ID NO: 17458 - DNA, 13 bp, Artificial Sequence
  Oligonucleotide for detection of SNP TSC0003766
tccccatccgcga

SEQ ID NO: 17459 - DNA, 13 bp, Artificial Sequence
  Oligonucleotide for detection of SNP TSC0003766
tcgcggttgggga

SEQ ID NO: 17460 - DNA, 13 bp, Artificial Sequence
  Oligonucleotide for detection of SNP TSC0003766
tccccaaccgcga

SEQ ID NO: 17461 - DNA, 13 bp, Artificial Sequence
  Oligonucleotide for detection of SNP TSC0003766
tttttatttgtgg

SEQ ID NO: 17462 - DNA, 13 bp, Artificial Sequence
  Oligonucleotide for detection of SNP TSC0003766
ccacaaataaaaa

SEQ ID NO: 17463 - DNA, 13 bp, Artificial Sequence
  Oligonucleotide for detection of SNP TSC0003766
tttttagttgtgg

SEQ ID NO: 17464 - DNA, 13 bp, Artificial Sequence
  Oligonucleotide for detection of SNP TSC0003766
ccacaactaaaaa

SEQ ID NO: 17465 - DNA, 13 bp, Artificial Sequence
  Oligonucleotide for detection of SNP TSC0003766
tttttattcgtgg

SEQ ID NO: 17466 - DNA, 13 bp, Artificial Sequence
  Oligonucleotide for detection of SNP TSC0003766
ccacgaataaaaa

SEQ ID NO: 17467 - DNA, 13 bp, Artificial Sequence
  Oligonucleotide for detection of SNP TSC0003766
tttttagtcgtgg

SEQ ID NO: 17468 - DNA, 13 bp, Artificial Sequence
  Oligonucleotide for detection of SNP TSC0003766
ccacgactaaaaa

SEQ ID NO: 17469 - DNA, 13 bp, Artificial Sequence
  Oligonucleotide for detection of SNP TSC0003766
tttttatttgcgg

SEQ ID NO: 17470 - DNA, 13 bp, Artificial Sequence
  Oligonucleotide for detection of SNP TSC0003766
ccgcaaataaaaa

SEQ ID NO: 17471 - DNA, 13 bp, Artificial Sequence
  Oligonucleotide for detection of SNP TSC0003766
tttttagttgcgg

SEQ ID NO: 17472 - DNA, 13 bp, Artificial Sequence
  Oligonucleotide for detection of SNP TSC0003766
ccgcaactaaaaa

SEQ ID NO: 17473 - DNA, 13 bp, Artificial Sequence
  Oligonucleotide for detection of SNP TSC0003766
tttttattcgcgg

SEQ ID NO: 17474 - DNA, 13 bp, Artificial Sequence
  Oligonucleotide for detection of SNP TSC0003766
ccgcgaataaaaa

SEQ ID NO: 17475 - DNA, 13 bp, Artificial Sequence
  Oligonucleotide for detection of SNP TSC0003766
tttttagtcgcgg

SEQ ID NO: 17476 - DNA, 13 bp, Artificial Sequence
  Oligonucleotide for detection of SNP TSC0003766
ccgcgactaaaaa

SEQ ID NO: 17477 - DNA, 13 bp, Artificial Sequence
  Oligonucleotide for detection of SNP TSC0003768
atttaagatttta

SEQ ID NO: 17478 - DNA, 13 bp, Artificial Sequence
  Oligonucleotide for detection of SNP TSC0003768
taaaatcttaaat

SEQ ID NO: 17479 - DNA, 13 bp, Artificial Sequence
  Oligonucleotide for detection of SNP TSC0003768
atttaaaatttta

SEQ ID NO: 17480 - DNA, 13 bp, Artificial Sequence
  Oligonucleotide for detection of SNP TSC0003768
taaaattttaaat

SEQ ID NO: 17481 - DNA, 13 bp, Artificial Sequence
  Oligonucleotide for detection of SNP TSC0003769
tttgttttgggty

SEQ ID NO: 17482 - DNA, 13 bp, Artificial Sequence
  Oligonucleotide for detection of SNP TSC0003769
racccaaaacaaa

SEQ ID NO: 17483 - DNA, 13 bp, Artificial Sequence
  Oligonucleotide for detection of SNP TSC0003769
tttgttgtgggty

SEQ ID NO: 17484 - DNA, 13 bp, Artificial Sequence
  Oligonucleotide for detection of SNP TSC0003769
racccacaacaaa

SEQ ID NO: 17485 - DNA, 13 bp, Artificial Sequence
  Oligonucleotide for detection of SNP TSC0003769
ttcgttttgggty

SEQ ID NO: 17486 - DNA, 13 bp, Artificial Sequence
  Oligonucleotide for detection of SNP TSC0003769
racccaaaacgaa

SEQ ID NO: 17487 - DNA, 13 bp, Artificial Sequence
  Oligonucleotide for detection of SNP TSC0003769
ttcgttgtgggty

SEQ ID NO: 17488 - DNA, 13 bp, Artificial Sequence
  Oligonucleotide for detection of SNP TSC0003769
racccacaacgaa

SEQ ID NO: 17489 - DNA, 13 bp, Artificial Sequence
  Oligonucleotide for detection of SNP TSC0003769
tttgtttcgggty

SEQ ID NO: 17490 - DNA, 13 bp, Artificial Sequence
  Oligonucleotide for detection of SNP TSC0003769
racccgaaacaaa

SEQ ID NO: 17491 - DNA, 13 bp, Artificial Sequence
  Oligonucleotide for detection of SNP TSC0003769
tttgtcgtgggty

SEQ ID NO: 17492 - DNA, 13 bp, Artificial Sequence
  Oligonucleotide for detection of SNP TSC0003769
racccacgacaaa

SEQ ID NO: 17493 - DNA, 13 bp, Artificial Sequence
  Oligonucleotide for detection of SNP TSC0003769
ttcgtttcgggty

SEQ ID NO: 17494 - DNA, 13 bp, Artificial Sequence
  Oligonucleotide for detection of SNP TSC0003769
racccgaaacgaa

SEQ ID NO: 17495 - DNA, 13 bp, Artificial Sequence
  Oligonucleotide for detection of SNP TSC0003769
tttgttgcgggty

SEQ ID NO: 17496 - DNA, 13 bp, Artificial Sequence
  Oligonucleotide for detection of SNP TSC0003769
racccgcaacaaa

SEQ ID NO: 17497 - DNA, 13 bp, Artificial Sequence
  Oligonucleotide for detection of SNP TSC0003769
ttcgtcgtgggty

SEQ ID NO: 17498 - DNA, 13 bp, Artificial Sequence
  Oligonucleotide for detection of SNP TSC0003769
racccacgacgaa

SEQ ID NO: 17499 - DNA, 13 bp, Artificial Sequence
  Oligonucleotide for detection of SNP TSC0003769
ttcgttgcgggty

SEQ ID NO: 17500 - DNA, 13 bp, Artificial Sequence
  Oligonucleotide for detection of SNP TSC0003769
racccgcaacgaa

SEQ ID NO: 17501 - DNA, 13 bp, Artificial Sequence
  Oligonucleotide for detection of SNP TSC0003769
tttgtcgcgggty

SEQ ID NO: 17502 - DNA, 13 bp, Artificial Sequence
  Oligonucleotide for detection of SNP TSC0003769
racccgcgacaaa

SEQ ID NO: 17503 - DNA, 13 bp, Artificial Sequence
  Oligonucleotide for detection of SNP TSC0003769
ttcgtcgcgggty

SEQ ID NO: 17504 - DNA, 13 bp, Artificial Sequence
  Oligonucleotide for detection of SNP TSC0003769
racccgcgacgaa

SEQ ID NO: 17505 - DNA, 13 bp, Artificial Sequence
  Oligonucleotide for detection of SNP TSC0003769
ggtttgaggtggg

SEQ ID NO: 17506 - DNA, 13 bp, Artificial Sequence
  Oligonucleotide for detection of SNP TSC0003769
cccacctcaaacc

SEQ ID NO: 17507 - DNA, 13 bp, Artificial Sequence
  Oligonucleotide for detection of SNP TSC0003769
ggtttgtggtggg

SEQ ID NO: 17508 - DNA, 13 bp, Artificial Sequence
  Oligonucleotide for detection of SNP TSC0003769
cccaccacaaacc

SEQ ID NO: 17509 - DNA, 13 bp, Artificial Sequence
  Oligonucleotide for detection of SNP TSC0003769
ggttcgaggtggg

SEQ ID NO: 17510 - DNA, 13 bp, Artificial Sequence
  Oligonucleotide for detection of SNP TSC0003769
cccacctcgaacc

SEQ ID NO: 17511 - DNA, 13 bp, Artificial Sequence
  Oligonucleotide for detection of SNP TSC0003769
ggttcgtggtggg

SEQ ID NO: 17512 - DNA, 13 bp, Artificial Sequence
  Oligonucleotide for detection of SNP TSC0003769
cccaccacgaacc

SEQ ID NO: 17513 - DNA, 13 bp, Artificial Sequence
  Oligonucleotide for detection of SNP TSC0003769
ggtttgaggcggg

SEQ ID NO: 17514 - DNA, 13 bp, Artificial Sequence
  Oligonucleotide for detection of SNP TSC0003769
cccgcctcaaacc

SEQ ID NO: 17515 - DNA, 13 bp, Artificial Sequence
  Oligonucleotide for detection of SNP TSC0003769
ggtttgcggtggg

SEQ ID NO: 17516 - DNA, 13 bp, Artificial Sequence
  Oligonucleotide for detection of SNP TSC0003769
cccaccgcaaacc

SEQ ID NO: 17517 - DNA, 13 bp, Artificial Sequence
  Oligonucleotide for detection of SNP TSC0003769
ggttcgaggcggg

SEQ ID NO: 17518 - DNA, 13 bp, Artificial Sequence
  Oligonucleotide for detection of SNP TSC0003769
cccgcctcgaacc

SEQ ID NO: 17519 - DNA, 13 bp, Artificial Sequence
  Oligonucleotide for detection of SNP TSC0003769
ggtttgtggcggg

SEQ ID NO: 17520 - DNA, 13 bp, Artificial Sequence
  Oligonucleotide for detection of SNP TSC0003769
cccgccacaaacc

SEQ ID NO: 17521 - DNA, 13 bp, Artificial Sequence
  Oligonucleotide for detection of SNP TSC0003769
ggttcgcggtggg

SEQ ID NO: 17522 - DNA, 13 bp, Artificial Sequence
  Oligonucleotide for detection of SNP TSC0003769
cccaccgcgaacc

SEQ ID NO: 17523 - DNA, 13 bp, Artificial Sequence
  Oligonucleotide for detection of SNP TSC0003769
ggttcgtggcggg

SEQ ID NO: 17524 - DNA, 13 bp, Artificial Sequence
  Oligonucleotide for detection of SNP TSC0003769
cccgccacgaacc

SEQ ID NO: 17525 - DNA, 13 bp, Artificial Sequence
  Oligonucleotide for detection of SNP TSC0003769
ggtttgcggcggg

SEQ ID NO: 17526 - DNA, 13 bp, Artificial Sequence
  Oligonucleotide for detection of SNP TSC0003769
cccgccgcaaacc

SEQ ID NO: 17527 - DNA, 13 bp, Artificial Sequence
  Oligonucleotide for detection of SNP TSC0003769
ggttcgcggcggg

SEQ ID NO: 17528 - DNA, 13 bp, Artificial Sequence
  Oligonucleotide for detection of SNP TSC0003769
cccgccgcgaacc

SEQ ID NO: 17529 - DNA, 13 bp, Artificial Sequence
  Oligonucleotide for detection of SNP TSC0003770
tttgttgttattt

SEQ ID NO: 17530 - DNA, 13 bp, Artificial Sequence
  Oligonucleotide for detection of SNP TSC0003770
aaataacaacaaa

SEQ ID NO: 17531 - DNA, 13 bp, Artificial Sequence
  Oligonucleotide for detection of SNP TSC0003770
tttgtttttattt

SEQ ID NO: 17532 - DNA, 13 bp, Artificial Sequence
  Oligonucleotide for detection of SNP TSC0003770
aaataaaaacaaa

SEQ ID NO: 17533 - DNA, 13 bp, Artificial Sequence
  Oligonucleotide for detection of SNP TSC0003770
agatgatagtaaa

SEQ ID NO: 17534 - DNA, 13 bp, Artificial Sequence
  Oligonucleotide for detection of SNP TSC0003770
tttactatcatct

SEQ ID NO: 17535 - DNA, 13 bp, Artificial Sequence
  Oligonucleotide for detection of SNP TSC0003770
agatgaaagtaaa

SEQ ID NO: 17536 - DNA, 13 bp, Artificial Sequence
  Oligonucleotide for detection of SNP TSC0003770
tttactttcatct

SEQ ID NO: 17537 - DNA, 13 bp, Artificial Sequence
  Oligonucleotide for detection of SNP TSC0003771
gggaagtgaagag

SEQ ID NO: 17538 - DNA, 13 bp, Artificial Sequence
  Oligonucleotide for detection of SNP TSC0003771
ctcttcacttccc

SEQ ID NO: 17539 - DNA, 13 bp, Artificial Sequence
  Oligonucleotide for detection of SNP TSC0003771
gggaagcgaagag

SEQ ID NO: 17540 - DNA, 13 bp, Artificial Sequence
  Oligonucleotide for detection of SNP TSC0003771
ctcttcgcttccc

SEQ ID NO: 17541 - DNA, 13 bp, Artificial Sequence
  Oligonucleotide for detection of SNP TSC0003772
gtgtttgtgtttt

SEQ ID NO: 17542 - DNA, 13 bp, Artificial Sequence
  Oligonucleotide for detection of SNP TSC0003772
aaaacacaaacac

SEQ ID NO: 17543 - DNA, 13 bp, Artificial Sequence
  Oligonucleotide for detection of SNP TSC0003772
gtgtttttgtttt

SEQ ID NO: 17544 - DNA, 13 bp, Artificial Sequence
  Oligonucleotide for detection of SNP TSC0003772
aaaacaaaaacac

SEQ ID NO: 17545 - DNA, 13 bp, Artificial Sequence
  Oligonucleotide for detection of SNP TSC0003772
gcgtttgtgtttt

SEQ ID NO: 17546 - DNA, 13 bp, Artificial Sequence
  Oligonucleotide for detection of SNP TSC0003772
aaaacacaaacgc

SEQ ID NO: 17547 - DNA, 13 bp, Artificial Sequence
  Oligonucleotide for detection of SNP TSC0003772
gcgtttttgtttt

SEQ ID NO: 17548 - DNA, 13 bp, Artificial Sequence
  Oligonucleotide for detection of SNP TSC0003772
aaaacaaaaacgc

SEQ ID NO: 17549 - DNA, 13 bp, Artificial Sequence
  Oligonucleotide for detection of SNP TSC0003772
gtgttcgtgtttt

SEQ ID NO: 17550 - DNA, 13 bp, Artificial Sequence
  Oligonucleotide for detection of SNP TSC0003772
aaaacacgaacac

SEQ ID NO: 17551 - DNA, 13 bp, Artificial Sequence
  Oligonucleotide for detection of SNP TSC0003772
gtgttttcgtttt

SEQ ID NO: 17552 - DNA, 13 bp, Artificial Sequence
  Oligonucleotide for detection of SNP TSC0003772
aaaacgaaaacac

SEQ ID NO: 17553 - DNA, 13 bp, Artificial Sequence
  Oligonucleotide for detection of SNP TSC0003772
gtgtttgcgtttt

SEQ ID NO: 17554 - DNA, 13 bp, Artificial Sequence
  Oligonucleotide for detection of SNP TSC0003772
aaaacgcaaacac

SEQ ID NO: 17555 - DNA, 13 bp, Artificial Sequence
  Oligonucleotide for detection of SNP TSC0003772
gcgttttcgtttt

SEQ ID NO: 17556 - DNA, 13 bp, Artificial Sequence
  Oligonucleotide for detection of SNP TSC0003772
aaaacgaaaacgc

SEQ ID NO: 17557 - DNA, 13 bp, Artificial Sequence
  Oligonucleotide for detection of SNP TSC0003772
gcgttcgtgtttt

SEQ ID NO: 17558 - DNA, 13 bp, Artificial Sequence
  Oligonucleotide for detection of SNP TSC0003772
aaaacacgaacgc

SEQ ID NO: 17559 - DNA, 13 bp, Artificial Sequence
  Oligonucleotide for detection of SNP TSC0003772
gcgtttgcgtttt

SEQ ID NO: 17560 - DNA, 13 bp, Artificial Sequence
  Oligonucleotide for detection of SNP TSC0003772
aaaacgcaaacgc

SEQ ID NO: 17561 - DNA, 13 bp, Artificial Sequence
  Oligonucleotide for detection of SNP TSC0003772
gtgttcgcgtttt

SEQ ID NO: 17562 - DNA, 13 bp, Artificial Sequence
  Oligonucleotide for detection of SNP TSC0003772
aaaacgcgaacac

SEQ ID NO: 17563 - DNA, 13 bp, Artificial Sequence
  Oligonucleotide for detection of SNP TSC0003772
gcgttcgcgtttt

SEQ ID NO: 17564 - DNA, 13 bp, Artificial Sequence
  Oligonucleotide for detection of SNP TSC0003772
aaaacgcgaacgc

SEQ ID NO: 17565 - DNA, 13 bp, Artificial Sequence
  Oligonucleotide for detection of SNP TSC0003772
agagtgtgagtgy

SEQ ID NO: 17566 - DNA, 13 bp, Artificial Sequence
  Oligonucleotide for detection of SNP TSC0003772
rcactcacactct

SEQ ID NO: 17567 - DNA, 13 bp, Artificial Sequence
  Oligonucleotide for detection of SNP TSC0003772
agagtgggagtgy

SEQ ID NO: 17568 - DNA, 13 bp, Artificial Sequence
  Oligonucleotide for detection of SNP TSC0003772
rcactcccactct

SEQ ID NO: 17569 - DNA, 13 bp, Artificial Sequence
  Oligonucleotide for detection of SNP TSC0003772
agagcgtgagtgy

SEQ ID NO: 17570 - DNA, 13 bp, Artificial Sequence
  Oligonucleotide for detection of SNP TSC0003772
rcactcacgctct

SEQ ID NO: 17571 - DNA, 13 bp, Artificial Sequence
  Oligonucleotide for detection of SNP TSC0003772
agagcgggagtgy

SEQ ID NO: 17572 - DNA, 13 bp, Artificial Sequence
  Oligonucleotide for detection of SNP TSC0003772
rcactcccgctct

SEQ ID NO: 17573 - DNA, 13 bp, Artificial Sequence
  Oligonucleotide for detection of SNP TSC0003772
agagtgcgagtgy

SEQ ID NO: 17574 - DNA, 13 bp, Artificial Sequence
  Oligonucleotide for detection of SNP TSC0003772
rcactcgcactct

SEQ ID NO: 17575 - DNA, 13 bp, Artificial Sequence
  Oligonucleotide for detection of SNP TSC0003772
agagtgggagcgy

SEQ ID NO: 17576 - DNA, 13 bp, Artificial Sequence
  Oligonucleotide for detection of SNP TSC0003772
rcgctcccactct

SEQ ID NO: 17577 - DNA, 13 bp, Artificial Sequence
  Oligonucleotide for detection of SNP TSC0003772
agagtgtgagcgy

SEQ ID NO: 17578 - DNA, 13 bp, Artificial Sequence
  Oligonucleotide for detection of SNP TSC0003772
rcgctcacactct

SEQ ID NO: 17579 - DNA, 13 bp, Artificial Sequence
  Oligonucleotide for detection of SNP TSC0003772
agagcgggagcgy

SEQ ID NO: 17580 - DNA, 13 bp, Artificial Sequence
  Oligonucleotide for detection of SNP TSC0003772
rcgctcccgctct

SEQ ID NO: 17581 - DNA, 13 bp, Artificial Sequence
  Oligonucleotide for detection of SNP TSC0003772
agagcgcgagtgy

SEQ ID NO: 17582 - DNA, 13 bp, Artificial Sequence
  Oligonucleotide for detection of SNP TSC0003772
rcactcgcgctct

SEQ ID NO: 17583 - DNA, 13 bp, Artificial Sequence
  Oligonucleotide for detection of SNP TSC0003772
agagcgtgagcgy

SEQ ID NO: 17584 - DNA, 13 bp, Artificial Sequence
  Oligonucleotide for detection of SNP TSC0003772
rcgctcacgctct

SEQ ID NO: 17585 - DNA, 13 bp, Artificial Sequence
  Oligonucleotide for detection of SNP TSC0003772
agagtgcgagcgy

SEQ ID NO: 17586 - DNA, 13 bp, Artificial Sequence
  Oligonucleotide for detection of SNP TSC0003772
rcgctcgcactct

SEQ ID NO: 17587 - DNA, 13 bp, Artificial Sequence
  Oligonucleotide for detection of SNP TSC0003772
agagcgcgagcgy

SEQ ID NO: 17588 - DNA, 13 bp, Artificial Sequence
  Oligonucleotide for detection of SNP TSC0003772
rcgctcgcgctct

SEQ ID NO: 17589 - DNA, 13 bp, Artificial Sequence
  Oligonucleotide for detection of SNP TSC0003773
ggagttggaatgt

SEQ ID NO: 17590 - DNA, 13 bp, Artificial Sequence
  Oligonucleotide for detection of SNP TSC0003773
acattccaactcc

SEQ ID NO: 17591 - DNA, 13 bp, Artificial Sequence
  Oligonucleotide for detection of SNP TSC0003773
ggagttagaatgt

SEQ ID NO: 17592 - DNA, 13 bp, Artificial Sequence
  Oligonucleotide for detection of SNP TSC0003773
acattctaactcc

SEQ ID NO: 17593 - DNA, 13 bp, Artificial Sequence
  Oligonucleotide for detection of SNP TSC0003773
ggagtcggaatgt

SEQ ID NO: 17594 - DNA, 13 bp, Artificial Sequence
  Oligonucleotide for detection of SNP TSC0003773
acattccgactcc

SEQ ID NO: 17595 - DNA, 13 bp, Artificial Sequence
  Oligonucleotide for detection of SNP TSC0003773
atattttggttty

SEQ ID NO: 17596 - DNA, 13 bp, Artificial Sequence
  Oligonucleotide for detection of SNP TSC0003773
raaaccaaaatat

SEQ ID NO: 17597 - DNA, 13 bp, Artificial Sequence
  Oligonucleotide for detection of SNP TSC0003773
atatttcggttty

SEQ ID NO: 17598 - DNA, 13 bp, Artificial Sequence
  Oligonucleotide for detection of SNP TSC0003773
raaaccgaaatat

SEQ ID NO: 17599 - DNA, 13 bp, Artificial Sequence
  Oligonucleotide for detection of SNP TSC0003777
ttattgtagagtt

SEQ ID NO: 17600 - DNA, 13 bp, Artificial Sequence
  Oligonucleotide for detection of SNP TSC0003777
aactctacaataa

SEQ ID NO: 17601 - DNA, 13 bp, Artificial Sequence
  Oligonucleotide for detection of SNP TSC0003777
ttattgaagagtt

SEQ ID NO: 17602 - DNA, 13 bp, Artificial Sequence
  Oligonucleotide for detection of SNP TSC0003777
aactcttcaataa

SEQ ID NO: 17603 - DNA, 13 bp, Artificial Sequence
  Oligonucleotide for detection of SNP TSC0003777
aattttgtagtgg

SEQ ID NO: 17604 - DNA, 13 bp, Artificial Sequence
  Oligonucleotide for detection of SNP TSC0003777
ccactacaaaatt

SEQ ID NO: 17605 - DNA, 13 bp, Artificial Sequence
  Oligonucleotide for detection of SNP TSC0003777
aattttttagtgg

SEQ ID NO: 17606 - DNA, 13 bp, Artificial Sequence
  Oligonucleotide for detection of SNP TSC0003777
ccactaaaaaatt

SEQ ID NO: 17607 - DNA, 13 bp, Artificial Sequence
  Oligonucleotide for detection of SNP TSC0003778
tatgtgatgtttt

SEQ ID NO: 17608 - DNA, 13 bp, Artificial Sequence
  Oligonucleotide for detection of SNP TSC0003778
aaaacatcacata

SEQ ID NO: 17609 - DNA, 13 bp, Artificial Sequence
  Oligonucleotide for detection of SNP TSC0003778
tatgtggtgtttt

SEQ ID NO: 17610 - DNA, 13 bp, Artificial Sequence
  Oligonucleotide for detection of SNP TSC0003778
aaaacaccacata

SEQ ID NO: 17611 - DNA, 13 bp, Artificial Sequence
  Oligonucleotide for detection of SNP TSC0003778
tatgtgacgtttt

SEQ ID NO: 17612 - DNA, 13 bp, Artificial Sequence
  Oligonucleotide for detection of SNP TSC0003778
aaaacgtcacata

SEQ ID NO: 17613 - DNA, 13 bp, Artificial Sequence
  Oligonucleotide for detection of SNP TSC0003778
tatgtggcgtttt

SEQ ID NO: 17614 - DNA, 13 bp, Artificial Sequence
  Oligonucleotide for detection of SNP TSC0003778
aaaacgccacata

SEQ ID NO: 17615 - DNA, 13 bp, Artificial Sequence
  Oligonucleotide for detection of SNP TSC0003779
atgtgatgttttg

SEQ ID NO: 17616 - DNA, 13 bp, Artificial Sequence
  Oligonucleotide for detection of SNP TSC0003779
caaaacatcacat

SEQ ID NO: 17617 - DNA, 13 bp, Artificial Sequence
  Oligonucleotide for detection of SNP TSC0003779
atgtgaagttttg

SEQ ID NO: 17618 - DNA, 13 bp, Artificial Sequence
  Oligonucleotide for detection of SNP TSC0003779
caaaacttcacat

SEQ ID NO: 17619 - DNA, 13 bp, Artificial Sequence
  Oligonucleotide for detection of SNP TSC0003779
atgtgacgttttg

SEQ ID NO: 17620 - DNA, 13 bp, Artificial Sequence
  Oligonucleotide for detection of SNP TSC0003779
caaaacgtcacat

SEQ ID NO: 17621 - DNA, 13 bp, Artificial Sequence
  Oligonucleotide for detection of SNP TSC0003779
taaggtgttatat

SEQ ID NO: 17622 - DNA, 13 bp, Artificial Sequence
  Oligonucleotide for detection of SNP TSC0003779
atataacacctta

SEQ ID NO: 17623 - DNA, 13 bp, Artificial Sequence
  Oligonucleotide for detection of SNP TSC0003779
taaggttttatat

SEQ ID NO: 17624 - DNA, 13 bp, Artificial Sequence
  Oligonucleotide for detection of SNP TSC0003779
atataaaacctta

SEQ ID NO: 17625 - DNA, 13 bp, Artificial Sequence
  Oligonucleotide for detection of SNP TSC0003779
taaggcgttatat

SEQ ID NO: 17626 - DNA, 13 bp, Artificial Sequence
  Oligonucleotide for detection of SNP TSC0003779
atataacgcctta

SEQ ID NO: 17627 - DNA, 13 bp, Artificial Sequence
  Oligonucleotide for detection of SNP TSC0003780
taaaatagatgag

SEQ ID NO: 17628 - DNA, 13 bp, Artificial Sequence
  Oligonucleotide for detection of SNP TSC0003780
ctcatctatttta

SEQ ID NO: 17629 - DNA, 13 bp, Artificial Sequence
  Oligonucleotide for detection of SNP TSC0003780
taaaattgatgag

SEQ ID NO: 17630 - DNA, 13 bp, Artificial Sequence
  Oligonucleotide for detection of SNP TSC0003780
ctcatcaatttta

SEQ ID NO: 17631 - DNA, 13 bp, Artificial Sequence
  Oligonucleotide for detection of SNP TSC0003780
taaaatcgatgag

SEQ ID NO: 17632 - DNA, 13 bp, Artificial Sequence
  Oligonucleotide for detection of SNP TSC0003780
ctcatcgatttta

SEQ ID NO: 17633 - DNA, 13 bp, Artificial Sequence
  Oligonucleotide for detection of SNP TSC0003780
tttatttgtttta

SEQ ID NO: 17634 - DNA, 13 bp, Artificial Sequence
  Oligonucleotide for detection of SNP TSC0003780
taaaacaaataaa

SEQ ID NO: 17635 - DNA, 13 bp, Artificial Sequence
  Oligonucleotide for detection of SNP TSC0003780
tttattggtttta

SEQ ID NO: 17636 - DNA, 13 bp, Artificial Sequence
  Oligonucleotide for detection of SNP TSC0003780
taaaaccaataaa

SEQ ID NO: 17637 - DNA, 13 bp, Artificial Sequence
  Oligonucleotide for detection of SNP TSC0003780
tttatcggtttta

SEQ ID NO: 17638 - DNA, 13 bp, Artificial Sequence
  Oligonucleotide for detection of SNP TSC0003780
taaaaccgataaa

SEQ ID NO: 17639 - DNA, 13 bp, Artificial Sequence
  Oligonucleotide for detection of SNP TSC0003782
tgtgtgattagta

SEQ ID NO: 17640 - DNA, 13 bp, Artificial Sequence
  Oligonucleotide for detection of SNP TSC0003782
tactaatcacaca

SEQ ID NO: 17641 - DNA, 13 bp, Artificial Sequence
  Oligonucleotide for detection of SNP TSC0003782
tgtgtgtttagta

SEQ ID NO: 17642 - DNA, 13 bp, Artificial Sequence
  Oligonucleotide for detection of SNP TSC0003782
tactaaacacaca

SEQ ID NO: 17643 - DNA, 13 bp, Artificial Sequence
  Oligonucleotide for detection of SNP TSC0003782
tgttggttatata

SEQ ID NO: 17644 - DNA, 13 bp, Artificial Sequence
  Oligonucleotide for detection of SNP TSC0003782
tatataaccaaca

SEQ ID NO: 17645 - DNA, 13 bp, Artificial Sequence
  Oligonucleotide for detection of SNP TSC0003782
tgttgggtatata

SEQ ID NO: 17646 - DNA, 13 bp, Artificial Sequence
  Oligonucleotide for detection of SNP TSC0003782
tatatacccaaca

SEQ ID NO: 17647 - DNA, 13 bp, Artificial Sequence
  Oligonucleotide for detection of SNP TSC0003783
aattgttaaggty

SEQ ID NO: 17648 - DNA, 13 bp, Artificial Sequence
  Oligonucleotide for detection of SNP TSC0003783
raccttaacaatt

SEQ ID NO: 17649 - DNA, 13 bp, Artificial Sequence
  Oligonucleotide for detection of SNP TSC0003783
aattgtgaaggty

SEQ ID NO: 17650 - DNA, 13 bp, Artificial Sequence
  Oligonucleotide for detection of SNP TSC0003783
raccttcacaatt

SEQ ID NO: 17651 - DNA, 13 bp, Artificial Sequence
  Oligonucleotide for detection of SNP TSC0003783
ggttttaatagtt

SEQ ID NO: 17652 - DNA, 13 bp, Artificial Sequence
  Oligonucleotide for detection of SNP TSC0003783
aactattaaaacc

SEQ ID NO: 17653 - DNA, 13 bp, Artificial Sequence
  Oligonucleotide for detection of SNP TSC0003783
ggtttttatagtt

SEQ ID NO: 17654 - DNA, 13 bp, Artificial Sequence
  Oligonucleotide for detection of SNP TSC0003783
aactataaaaacc

SEQ ID NO: 17655 - DNA, 13 bp, Artificial Sequence
  Oligonucleotide for detection of SNP TSC0003784
ttttttgtaaatt

SEQ ID NO: 17656 - DNA, 13 bp, Artificial Sequence
  Oligonucleotide for detection of SNP TSC0003784
aatttacaaaaaa

SEQ ID NO: 17657 - DNA, 13 bp, Artificial Sequence
  Oligonucleotide for detection of SNP TSC0003784
ttttttataaatt

SEQ ID NO: 17658 - DNA, 13 bp, Artificial Sequence
  Oligonucleotide for detection of SNP TSC0003784
aatttataaaaaa

SEQ ID NO: 17659 - DNA, 13 bp, Artificial Sequence
  Oligonucleotide for detection of SNP TSC0003785
ggtgggtgatggy

SEQ ID NO: 17660 - DNA, 13 bp, Artificial Sequence
  Oligonucleotide for detection of SNP TSC0003785
rccatcacccacc

SEQ ID NO: 17661 - DNA, 13 bp, Artificial Sequence
  Oligonucleotide for detection of SNP TSC0003785
ggcgggtgatggy

SEQ ID NO: 17662 - DNA, 13 bp, Artificial Sequence
  Oligonucleotide for detection of SNP TSC0003785
rccatcacccgcc

SEQ ID NO: 17663 - DNA, 13 bp, Artificial Sequence
  Oligonucleotide for detection of SNP TSC0003785
ggtgggcgatggy

SEQ ID NO: 17664 - DNA, 13 bp, Artificial Sequence
  Oligonucleotide for detection of SNP TSC0003785
rccatcgcccacc

SEQ ID NO: 17665 - DNA, 13 bp, Artificial Sequence
  Oligonucleotide for detection of SNP TSC0003785
ggcgggcgatggy

SEQ ID NO: 17666 - DNA, 13 bp, Artificial Sequence
  Oligonucleotide for detection of SNP TSC0003785
rccatcgcccgcc

SEQ ID NO: 17667 - DNA, 13 bp, Artificial Sequence
  Oligonucleotide for detection of SNP TSC0003785
gttattatttgty

SEQ ID NO: 17668 - DNA, 13 bp, Artificial Sequence
  Oligonucleotide for detection of SNP TSC0003785
racaaataataac

SEQ ID NO: 17669 - DNA, 13 bp, Artificial Sequence
  Oligonucleotide for detection of SNP TSC0003785
gttattgtttgty

SEQ ID NO: 17670 - DNA, 13 bp, Artificial Sequence
  Oligonucleotide for detection of SNP TSC0003785
racaaacaataac

SEQ ID NO: 17671 - DNA, 13 bp, Artificial Sequence
  Oligonucleotide for detection of SNP TSC0003785
gttattattcgty

SEQ ID NO: 17672 - DNA, 13 bp, Artificial Sequence
  Oligonucleotide for detection of SNP TSC0003785
racgaataataac

SEQ ID NO: 17673 - DNA, 13 bp, Artificial Sequence
  Oligonucleotide for detection of SNP TSC0003785
gttatcgtttgty

SEQ ID NO: 17674 - DNA, 13 bp, Artificial Sequence
  Oligonucleotide for detection of SNP TSC0003785
racaaacgataac

SEQ ID NO: 17675 - DNA, 13 bp, Artificial Sequence
  Oligonucleotide for detection of SNP TSC0003785
gttattgttcgty

SEQ ID NO: 17676 - DNA, 13 bp, Artificial Sequence
  Oligonucleotide for detection of SNP TSC0003785
racgaacaataac

SEQ ID NO: 17677 - DNA, 13 bp, Artificial Sequence
  Oligonucleotide for detection of SNP TSC0003785
gttatcgttcgty

SEQ ID NO: 17678 - DNA, 13 bp, Artificial Sequence
  Oligonucleotide for detection of SNP TSC0003785
racgaacgataac

SEQ ID NO: 17679 - DNA, 13 bp, Artificial Sequence
  Oligonucleotide for detection of SNP TSC0003787
ggtaaagttgtga

SEQ ID NO: 17680 - DNA, 13 bp, Artificial Sequence
  Oligonucleotide for detection of SNP TSC0003787
tcacaactttacc

SEQ ID NO: 17681 - DNA, 13 bp, Artificial Sequence
  Oligonucleotide for detection of SNP TSC0003787
ggtaaatttgtga

SEQ ID NO: 17682 - DNA, 13 bp, Artificial Sequence
  Oligonucleotide for detection of SNP TSC0003787
tcacaaatttacc

SEQ ID NO: 17683 - DNA, 13 bp, Artificial Sequence
  Oligonucleotide for detection of SNP TSC0003787
ttataattttaty

SEQ ID NO: 17684 - DNA, 13 bp, Artificial Sequence
  Oligonucleotide for detection of SNP TSC0003787
rataaaattataa

SEQ ID NO: 17685 - DNA, 13 bp, Artificial Sequence
  Oligonucleotide for detection of SNP TSC0003787
ttataagtttaty

SEQ ID NO: 17686 - DNA, 13 bp, Artificial Sequence
  Oligonucleotide for detection of SNP TSC0003787
rataaacttataa

SEQ ID NO: 17687 - DNA, 13 bp, Artificial Sequence
  Oligonucleotide for detection of SNP TSC0003790
ttagtatgtgtty

SEQ ID NO: 17688 - DNA, 13 bp, Artificial Sequence
  Oligonucleotide for detection of SNP TSC0003790
raacacatactaa

SEQ ID NO: 17689 - DNA, 13 bp, Artificial Sequence
  Oligonucleotide for detection of SNP TSC0003790
ttagtacgtgtty

SEQ ID NO: 17690 - DNA, 13 bp, Artificial Sequence
  Oligonucleotide for detection of SNP TSC0003790
raacacgtactaa

SEQ ID NO: 17691 - DNA, 13 bp, Artificial Sequence
  Oligonucleotide for detection of SNP TSC0003790
gaatatgtgttgg

SEQ ID NO: 17692 - DNA, 13 bp, Artificial Sequence
  Oligonucleotide for detection of SNP TSC0003790
ccaacacatattc

SEQ ID NO: 17693 - DNA, 13 bp, Artificial Sequence
  Oligonucleotide for detection of SNP TSC0003790
gaatatatgttgg

SEQ ID NO: 17694 - DNA, 13 bp, Artificial Sequence
  Oligonucleotide for detection of SNP TSC0003790
ccaacatatattc

SEQ ID NO: 17695 - DNA, 13 bp, Artificial Sequence
  Oligonucleotide for detection of SNP TSC0003790
gaatacgtgttgg

SEQ ID NO: 17696 - DNA, 13 bp, Artificial Sequence
  Oligonucleotide for detection of SNP TSC0003790
ccaacacgtattc

SEQ ID NO: 17697 - DNA, 13 bp, Artificial Sequence
  Oligonucleotide for detection of SNP TSC0003791
agatagaatggay

SEQ ID NO: 17698 - DNA, 13 bp, Artificial Sequence
  Oligonucleotide for detection of SNP TSC0003791
rtccattctatct

SEQ ID NO: 17699 - DNA, 13 bp, Artificial Sequence
  Oligonucleotide for detection of SNP TSC0003791
agataggatggay

SEQ ID NO: 17700 - DNA, 13 bp, Artificial Sequence
  Oligonucleotide for detection of SNP TSC0003791
rtccatcctatct

SEQ ID NO: 17701 - DNA, 13 bp, Artificial Sequence
  Oligonucleotide for detection of SNP TSC0003791
agatagaacggay

SEQ ID NO: 17702 - DNA, 13 bp, Artificial Sequence
  Oligonucleotide for detection of SNP TSC0003791
rtccgttctatct

SEQ ID NO: 17703 - DNA, 13 bp, Artificial Sequence
  Oligonucleotide for detection of SNP TSC0003791
agataggacggay

SEQ ID NO: 17704 - DNA, 13 bp, Artificial Sequence
  Oligonucleotide for detection of SNP TSC0003791
rtccgtcctatct

SEQ ID NO: 17705 - DNA, 13 bp, Artificial Sequence
  Oligonucleotide for detection of SNP TSC0003792
gtattttgggttt

SEQ ID NO: 17706 - DNA, 13 bp, Artificial Sequence
  Oligonucleotide for detection of SNP TSC0003792
aaacccaaaatac

SEQ ID NO: 17707 - DNA, 13 bp, Artificial Sequence
  Oligonucleotide for detection of SNP TSC0003792
gtatttggggttt

SEQ ID NO: 17708 - DNA, 13 bp, Artificial Sequence
  Oligonucleotide for detection of SNP TSC0003792
aaaccccaaatac

SEQ ID NO: 17709 - DNA, 13 bp, Artificial Sequence
  Oligonucleotide for detection of SNP TSC0003792
gtattcggggttt

SEQ ID NO: 17710 - DNA, 13 bp, Artificial Sequence
  Oligonucleotide for detection of SNP TSC0003792
aaaccccgaatac

SEQ ID NO: 17711 - DNA, 13 bp, Artificial Sequence
  Oligonucleotide for detection of SNP TSC0003792
agatttagggtay

SEQ ID NO: 17712 - DNA, 13 bp, Artificial Sequence
  Oligonucleotide for detection of SNP TSC0003792
rtaccctaaatct

SEQ ID NO: 17713 - DNA, 13 bp, Artificial Sequence
  Oligonucleotide for detection of SNP TSC0003792
agattttgggtay

SEQ ID NO: 17714 - DNA, 13 bp, Artificial Sequence
  Oligonucleotide for detection of SNP TSC0003792
rtacccaaaatct

SEQ ID NO: 17715 - DNA, 13 bp, Artificial Sequence
  Oligonucleotide for detection of SNP TSC0003792
agatttcgggtay

SEQ ID NO: 17716 - DNA, 13 bp, Artificial Sequence
  Oligonucleotide for detection of SNP TSC0003792
rtacccgaaatct

SEQ ID NO: 17717 - DNA, 13 bp, Artificial Sequence
  Oligonucleotide for detection of SNP TSC0003795
gttaggatagttg

SEQ ID NO: 17718 - DNA, 13 bp, Artificial Sequence
  Oligonucleotide for detection of SNP TSC0003795
caactatcctaac

SEQ ID NO: 17719 - DNA, 13 bp, Artificial Sequence
  Oligonucleotide for detection of SNP TSC0003795
gttagggtagttg

SEQ ID NO: 17720 - DNA, 13 bp, Artificial Sequence
  Oligonucleotide for detection of SNP TSC0003795
caactaccctaac

SEQ ID NO: 17721 - DNA, 13 bp, Artificial Sequence
  Oligonucleotide for detection of SNP TSC0003796
gttgggtgtggag

SEQ ID NO: 17722 - DNA, 13 bp, Artificial Sequence
  Oligonucleotide for detection of SNP TSC0003796
ctccacacccaac

SEQ ID NO: 17723 - DNA, 13 bp, Artificial Sequence
  Oligonucleotide for detection of SNP TSC0003796
gtcgggtgtggag

SEQ ID NO: 17724 - DNA, 13 bp, Artificial Sequence
  Oligonucleotide for detection of SNP TSC0003796
ctccacacccgac

SEQ ID NO: 17725 - DNA, 13 bp, Artificial Sequence
  Oligonucleotide for detection of SNP TSC0003796
gttgggcgtggag

SEQ ID NO: 17726 - DNA, 13 bp, Artificial Sequence
  Oligonucleotide for detection of SNP TSC0003796
ctccacgcccaac

SEQ ID NO: 17727 - DNA, 13 bp, Artificial Sequence
  Oligonucleotide for detection of SNP TSC0003796
gtcgggcgtggag

SEQ ID NO: 17728 - DNA, 13 bp, Artificial Sequence
  Oligonucleotide for detection of SNP TSC0003796
ctccacgcccgac

SEQ ID NO: 17729 - DNA, 13 bp, Artificial Sequence
  Oligonucleotide for detection of SNP TSC0003796
ttttatgtttggy

SEQ ID NO: 17730 - DNA, 13 bp, Artificial Sequence
  Oligonucleotide for detection of SNP TSC0003796
rccaaacataaaa

SEQ ID NO: 17731 - DNA, 13 bp, Artificial Sequence
  Oligonucleotide for detection of SNP TSC0003796
ttttatatttggy

SEQ ID NO: 17732 - DNA, 13 bp, Artificial Sequence
  Oligonucleotide for detection of SNP TSC0003796
rccaaatataaaa

SEQ ID NO: 17733 - DNA, 13 bp, Artificial Sequence
  Oligonucleotide for detection of SNP TSC0003796
ttttacgtttggy

SEQ ID NO: 17734 - DNA, 13 bp, Artificial Sequence
  Oligonucleotide for detection of SNP TSC0003796
rccaaacgtaaaa

SEQ ID NO: 17735 - DNA, 13 bp, Artificial Sequence
  Oligonucleotide for detection of SNP TSC0003796
ttttatattcggy

SEQ ID NO: 17736 - DNA, 13 bp, Artificial Sequence
  Oligonucleotide for detection of SNP TSC0003796
rccgaatataaaa

SEQ ID NO: 17737 - DNA, 13 bp, Artificial Sequence
  Oligonucleotide for detection of SNP TSC0003796
ttttatgttcggy

SEQ ID NO: 17738 - DNA, 13 bp, Artificial Sequence
  Oligonucleotide for detection of SNP TSC0003796
rccgaacataaaa

SEQ ID NO: 17739 - DNA, 13 bp, Artificial Sequence
  Oligonucleotide for detection of SNP TSC0003796
ttttacgttcggy

SEQ ID NO: 17740 - DNA, 13 bp, Artificial Sequence
  Oligonucleotide for detection of SNP TSC0003796
rccgaacgtaaaa

SEQ ID NO: 17741 - DNA, 13 bp, Artificial Sequence
  Oligonucleotide for detection of SNP TSC0003797
taagtatgggtaa

SEQ ID NO: 17742 - DNA, 13 bp, Artificial Sequence
  Oligonucleotide for detection of SNP TSC0003797
ttacccatactta

SEQ ID NO: 17743 - DNA, 13 bp, Artificial Sequence
  Oligonucleotide for detection of SNP TSC0003797
taagtaagggtaa

SEQ ID NO: 17744 - DNA, 13 bp, Artificial Sequence
  Oligonucleotide for detection of SNP TSC0003797
ttacccttactta

SEQ ID NO: 17745 - DNA, 13 bp, Artificial Sequence
  Oligonucleotide for detection of SNP TSC0003797
ttatttatgttta

SEQ ID NO: 17746 - DNA, 13 bp, Artificial Sequence
  Oligonucleotide for detection of SNP TSC0003797
taaacataaataa

SEQ ID NO: 17747 - DNA, 13 bp, Artificial Sequence
  Oligonucleotide for detection of SNP TSC0003797
ttatttttgttta

SEQ ID NO: 17748 - DNA, 13 bp, Artificial Sequence
  Oligonucleotide for detection of SNP TSC0003797
taaacaaaaataa

SEQ ID NO: 17749 - DNA, 13 bp, Artificial Sequence
  Oligonucleotide for detection of SNP TSC0003798
ttgttggatttag

SEQ ID NO: 17750 - DNA, 13 bp, Artificial Sequence
  Oligonucleotide for detection of SNP TSC0003798
ctaaatccaacaa

SEQ ID NO: 17751 - DNA, 13 bp, Artificial Sequence
  Oligonucleotide for detection of SNP TSC0003798
ttgttgaatttag

SEQ ID NO: 17752 - DNA, 13 bp, Artificial Sequence
  Oligonucleotide for detection of SNP TSC0003798
ctaaattcaacaa

SEQ ID NO: 17753 - DNA, 13 bp, Artificial Sequence
  Oligonucleotide for detection of SNP TSC0003798
tcgttggatttag

SEQ ID NO: 17754 - DNA, 13 bp, Artificial Sequence
  Oligonucleotide for detection of SNP TSC0003798
ctaaatccaacga

SEQ ID NO: 17755 - DNA, 13 bp, Artificial Sequence
  Oligonucleotide for detection of SNP TSC0003798
tcgttgaatttag

SEQ ID NO: 17756 - DNA, 13 bp, Artificial Sequence
  Oligonucleotide for detection of SNP TSC0003798
ctaaattcaacga

SEQ ID NO: 17757 - DNA, 13 bp, Artificial Sequence
  Oligonucleotide for detection of SNP TSC0003798
ttgtcggatttag

SEQ ID NO: 17758 - DNA, 13 bp, Artificial Sequence
  Oligonucleotide for detection of SNP TSC0003798
ctaaatccgacaa

SEQ ID NO: 17759 - DNA, 13 bp, Artificial Sequence
  Oligonucleotide for detection of SNP TSC0003798
ttgtcgaatttag

SEQ ID NO: 17760 - DNA, 13 bp, Artificial Sequence
  Oligonucleotide for detection of SNP TSC0003798
ctaaattcgacaa

SEQ ID NO: 17761 - DNA, 13 bp, Artificial Sequence
  Oligonucleotide for detection of SNP TSC0003798
tcgtcggatttag

SEQ ID NO: 17762 - DNA, 13 bp, Artificial Sequence
  Oligonucleotide for detection of SNP TSC0003798
ctaaatccgacga

SEQ ID NO: 17763 - DNA, 13 bp, Artificial Sequence
  Oligonucleotide for detection of SNP TSC0003798
tcgtcgaatttag

SEQ ID NO: 17764 - DNA, 13 bp, Artificial Sequence
  Oligonucleotide for detection of SNP TSC0003798
ctaaattcgacga

SEQ ID NO: 17765 - DNA, 13 bp, Artificial Sequence
  Oligonucleotide for detection of SNP TSC0003800
attttaaatagaa

SEQ ID NO: 17766 - DNA, 13 bp, Artificial Sequence
  Oligonucleotide for detection of SNP TSC0003800
ttctatttaaaat

SEQ ID NO: 17767 - DNA, 13 bp, Artificial Sequence
  Oligonucleotide for detection of SNP TSC0003800
attttagatagaa

SEQ ID NO: 17768 - DNA, 13 bp, Artificial Sequence
  Oligonucleotide for detection of SNP TSC0003800
ttctatctaaaat

SEQ ID NO: 17769 - DNA, 13 bp, Artificial Sequence
  Oligonucleotide for detection of SNP TSC0003801
gttttttgatatt

SEQ ID NO: 17770 - DNA, 13 bp, Artificial Sequence
  Oligonucleotide for detection of SNP TSC0003801
aatatcaaaaaac

SEQ ID NO: 17771 - DNA, 13 bp, Artificial Sequence
  Oligonucleotide for detection of SNP TSC0003801
gtttttcgatatt

SEQ ID NO: 17772 - DNA, 13 bp, Artificial Sequence
  Oligonucleotide for detection of SNP TSC0003801
aatatcgaaaaac

SEQ ID NO: 17773 - DNA, 13 bp, Artificial Sequence
  Oligonucleotide for detection of SNP TSC0003801
aatgttaagagay

SEQ ID NO: 17774 - DNA, 13 bp, Artificial Sequence
  Oligonucleotide for detection of SNP TSC0003801
rtctcttaacatt

SEQ ID NO: 17775 - DNA, 13 bp, Artificial Sequence
  Oligonucleotide for detection of SNP TSC0003801
aatgttgagagay

SEQ ID NO: 17776 - DNA, 13 bp, Artificial Sequence
  Oligonucleotide for detection of SNP TSC0003801
rtctctcaacatt

SEQ ID NO: 17777 - DNA, 13 bp, Artificial Sequence
  Oligonucleotide for detection of SNP TSC0003801
aatgtcgagagay

SEQ ID NO: 17778 - DNA, 13 bp, Artificial Sequence
  Oligonucleotide for detection of SNP TSC0003801
rtctctcgacatt

SEQ ID NO: 17779 - DNA, 13 bp, Artificial Sequence
  Oligonucleotide for detection of SNP TSC0003802
tgtgtgtgtgcgy

SEQ ID NO: 17780 - DNA, 13 bp, Artificial Sequence
  Oligonucleotide for detection of SNP TSC0003802
rcgcacacacaca

SEQ ID NO: 17781 - DNA, 13 bp, Artificial Sequence
  Oligonucleotide for detection of SNP TSC0003802
tgtgtgtgcgcgy

SEQ ID NO: 17782 - DNA, 13 bp, Artificial Sequence
  Oligonucleotide for detection of SNP TSC0003802
rcgcgcacacaca

SEQ ID NO: 17783 - DNA, 13 bp, Artificial Sequence
  Oligonucleotide for detection of SNP TSC0003802
tgtgtgcgtgcgy

SEQ ID NO: 17784 - DNA, 13 bp, Artificial Sequence
  Oligonucleotide for detection of SNP TSC0003802
rcgcacgcacaca

SEQ ID NO: 17785 - DNA, 13 bp, Artificial Sequence
  Oligonucleotide for detection of SNP TSC0003802
tgtgtgcgcgcgy

SEQ ID NO: 17786 - DNA, 13 bp, Artificial Sequence
  Oligonucleotide for detection of SNP TSC0003802
rcgcgcgcacaca

SEQ ID NO: 17787 - DNA, 13 bp, Artificial Sequence
  Oligonucleotide for detection of SNP TSC0003802
gtgtgtatatata

SEQ ID NO: 17788 - DNA, 13 bp, Artificial Sequence
  Oligonucleotide for detection of SNP TSC0003802
tatatatacacac

SEQ ID NO: 17789 - DNA, 13 bp, Artificial Sequence
  Oligonucleotide for detection of SNP TSC0003802
gtgtgtgtatata

SEQ ID NO: 17790 - DNA, 13 bp, Artificial Sequence
  Oligonucleotide for detection of SNP TSC0003802
tatatacacacac

SEQ ID NO: 17791 - DNA, 13 bp, Artificial Sequence
  Oligonucleotide for detection of SNP TSC0003802
gcgtgtatatata

SEQ ID NO: 17792 - DNA, 13 bp, Artificial Sequence
  Oligonucleotide for detection of SNP TSC0003802
tatatatacacgc

SEQ ID NO: 17793 - DNA, 13 bp, Artificial Sequence
  Oligonucleotide for detection of SNP TSC0003802
gcgtgtgtatata

SEQ ID NO: 17794 - DNA, 13 bp, Artificial Sequence
  Oligonucleotide for detection of SNP TSC0003802
tatatacacacgc

SEQ ID NO: 17795 - DNA, 13 bp, Artificial Sequence
  Oligonucleotide for detection of SNP TSC0003802
gtgcgtatatata

SEQ ID NO: 17796 - DNA, 13 bp, Artificial Sequence
  Oligonucleotide for detection of SNP TSC0003802
tatatatacgcac

SEQ ID NO: 17797 - DNA, 13 bp, Artificial Sequence
  Oligonucleotide for detection of SNP TSC0003802
gtgcgtgtatata

SEQ ID NO: 17798 - DNA, 13 bp, Artificial Sequence
  Oligonucleotide for detection of SNP TSC0003802
tatatacacgcac

SEQ ID NO: 17799 - DNA, 13 bp, Artificial Sequence
  Oligonucleotide for detection of SNP TSC0003802
gcgcgtatatata

SEQ ID NO: 17800 - DNA, 13 bp, Artificial Sequence
  Oligonucleotide for detection of SNP TSC0003802
tatatatacgcgc

SEQ ID NO: 17801 - DNA, 13 bp, Artificial Sequence
  Oligonucleotide for detection of SNP TSC0003802
gtgtgcgtatata

SEQ ID NO: 17802 - DNA, 13 bp, Artificial Sequence
  Oligonucleotide for detection of SNP TSC0003802
tatatacgcacac

SEQ ID NO: 17803 - DNA, 13 bp, Artificial Sequence
  Oligonucleotide for detection of SNP TSC0003802
gcgcgtgtatata

SEQ ID NO: 17804 - DNA, 13 bp, Artificial Sequence
  Oligonucleotide for detection of SNP TSC0003802
tatatacacgcgc

SEQ ID NO: 17805 - DNA, 13 bp, Artificial Sequence
  Oligonucleotide for detection of SNP TSC0003802
gcgtgcgtatata

SEQ ID NO: 17806 - DNA, 13 bp, Artificial Sequence
  Oligonucleotide for detection of SNP TSC0003802
tatatacgcacgc

SEQ ID NO: 17807 - DNA, 13 bp, Artificial Sequence
  Oligonucleotide for detection of SNP TSC0003802
gtgcgcgtatata

SEQ ID NO: 17808 - DNA, 13 bp, Artificial Sequence
  Oligonucleotide for detection of SNP TSC0003802
tatatacgcgcac

SEQ ID NO: 17809 - DNA, 13 bp, Artificial Sequence
  Oligonucleotide for detection of SNP TSC0003802
gcgcgcgtatata

SEQ ID NO: 17810 - DNA, 13 bp, Artificial Sequence
  Oligonucleotide for detection of SNP TSC0003802
tatatacgcgcgc

SEQ ID NO: 17811 - DNA, 13 bp, Artificial Sequence
  Oligonucleotide for detection of SNP TSC0003807
tgtatttaaataa

SEQ ID NO: 17812 - DNA, 13 bp, Artificial Sequence
  Oligonucleotide for detection of SNP TSC0003807
ttatttaaataca

SEQ ID NO: 17813 - DNA, 13 bp, Artificial Sequence
  Oligonucleotide for detection of SNP TSC0003807
tgtattaaaataa

SEQ ID NO: 17814 - DNA, 13 bp, Artificial Sequence
  Oligonucleotide for detection of SNP TSC0003807
ttattttaataca

SEQ ID NO: 17815 - DNA, 13 bp, Artificial Sequence
  Oligonucleotide for detection of SNP TSC0003807
ttatttgggtgta

SEQ ID NO: 17816 - DNA, 13 bp, Artificial Sequence
  Oligonucleotide for detection of SNP TSC0003807
tacacccaaataa

SEQ ID NO: 17817 - DNA, 13 bp, Artificial Sequence
  Oligonucleotide for detection of SNP TSC0003807
ttattttggtgta

SEQ ID NO: 17818 - DNA, 13 bp, Artificial Sequence
  Oligonucleotide for detection of SNP TSC0003807
tacaccaaaataa

SEQ ID NO: 17819 - DNA, 13 bp, Artificial Sequence
  Oligonucleotide for detection of SNP TSC0003809
gtgggtatggtgg

SEQ ID NO: 17820 - DNA, 13 bp, Artificial Sequence
  Oligonucleotide for detection of SNP TSC0003809
ccaccatacccac

SEQ ID NO: 17821 - DNA, 13 bp, Artificial Sequence
  Oligonucleotide for detection of SNP TSC0003809
gtgggtttggtgg

SEQ ID NO: 17822 - DNA, 13 bp, Artificial Sequence
  Oligonucleotide for detection of SNP TSC0003809
ccaccaaacccac

SEQ ID NO: 17823 - DNA, 13 bp, Artificial Sequence
  Oligonucleotide for detection of SNP TSC0003809
gtgggtacggtgg

SEQ ID NO: 17824 - DNA, 13 bp, Artificial Sequence
  Oligonucleotide for detection of SNP TSC0003809
ccaccgtacccac

SEQ ID NO: 17825 - DNA, 13 bp, Artificial Sequence
  Oligonucleotide for detection of SNP TSC0003809
gtgggttcggtgg

SEQ ID NO: 17826 - DNA, 13 bp, Artificial Sequence
  Oligonucleotide for detection of SNP TSC0003809
ccaccgaacccac

SEQ ID NO: 17827 - DNA, 13 bp, Artificial Sequence
  Oligonucleotide for detection of SNP TSC0003809
ttattgtgtttay

SEQ ID NO: 17828 - DNA, 13 bp, Artificial Sequence
  Oligonucleotide for detection of SNP TSC0003809
rtaaacacaataa

SEQ ID NO: 17829 - DNA, 13 bp, Artificial Sequence
  Oligonucleotide for detection of SNP TSC0003809
ttattgggtttay

SEQ ID NO: 17830 - DNA, 13 bp, Artificial Sequence
  Oligonucleotide for detection of SNP TSC0003809
rtaaacccaataa

SEQ ID NO: 17831 - DNA, 13 bp, Artificial Sequence
  Oligonucleotide for detection of SNP TSC0003809
ttatcgtgtttay

SEQ ID NO: 17832 - DNA, 13 bp, Artificial Sequence
  Oligonucleotide for detection of SNP TSC0003809
rtaaacacgataa

SEQ ID NO: 17833 - DNA, 13 bp, Artificial Sequence
  Oligonucleotide for detection of SNP TSC0003809
ttatcgggtttay

SEQ ID NO: 17834 - DNA, 13 bp, Artificial Sequence
  Oligonucleotide for detection of SNP TSC0003809
rtaaacccgataa

SEQ ID NO: 17835 - DNA, 13 bp, Artificial Sequence
  Oligonucleotide for detection of SNP TSC0003811
tagatgtggaaga

SEQ ID NO: 17836 - DNA, 13 bp, Artificial Sequence
  Oligonucleotide for detection of SNP TSC0003811
tcttccacatcta

SEQ ID NO: 17837 - DNA, 13 bp, Artificial Sequence
  Oligonucleotide for detection of SNP TSC0003811
tagatgcggaaga

SEQ ID NO: 17838 - DNA, 13 bp, Artificial Sequence
  Oligonucleotide for detection of SNP TSC0003811
tcttccgcatcta

SEQ ID NO: 17839 - DNA, 13 bp, Artificial Sequence
  Oligonucleotide for detection of SNP TSC0003811
ttttttatatttg

SEQ ID NO: 17840 - DNA, 13 bp, Artificial Sequence
  Oligonucleotide for detection of SNP TSC0003811
caaatataaaaaa

SEQ ID NO: 17841 - DNA, 13 bp, Artificial Sequence
  Oligonucleotide for detection of SNP TSC0003811
ttttttgtatttg

SEQ ID NO: 17842 - DNA, 13 bp, Artificial Sequence
  Oligonucleotide for detection of SNP TSC0003811
caaatacaaaaaa

SEQ ID NO: 17843 - DNA, 13 bp, Artificial Sequence
  Oligonucleotide for detection of SNP TSC0003811
tttttcgtatttg

SEQ ID NO: 17844 - DNA, 13 bp, Artificial Sequence
  Oligonucleotide for detection of SNP TSC0003811
caaatacgaaaaa

SEQ ID NO: 17845 - DNA, 13 bp, Artificial Sequence
  Oligonucleotide for detection of SNP TSC0003815
tataaggatatay

SEQ ID NO: 17846 - DNA, 13 bp, Artificial Sequence
  Oligonucleotide for detection of SNP TSC0003815
rtatatccttata

SEQ ID NO: 17847 - DNA, 13 bp, Artificial Sequence
  Oligonucleotide for detection of SNP TSC0003815
tataagaatatay

SEQ ID NO: 17848 - DNA, 13 bp, Artificial Sequence
  Oligonucleotide for detection of SNP TSC0003815
rtatattcttata

SEQ ID NO: 17849 - DNA, 13 bp, Artificial Sequence
  Oligonucleotide for detection of SNP TSC0003816
ttattgaagaaat

SEQ ID NO: 17850 - DNA, 13 bp, Artificial Sequence
  Oligonucleotide for detection of SNP TSC0003816
atttcttcaataa

SEQ ID NO: 17851 - DNA, 13 bp, Artificial Sequence
  Oligonucleotide for detection of SNP TSC0003816
ttattggagaaat

SEQ ID NO: 17852 - DNA, 13 bp, Artificial Sequence
  Oligonucleotide for detection of SNP TSC0003816
atttctccaataa

SEQ ID NO: 17853 - DNA, 13 bp, Artificial Sequence
  Oligonucleotide for detection of SNP TSC0003816
ttatcgaagaaat

SEQ ID NO: 17854 - DNA, 13 bp, Artificial Sequence
  Oligonucleotide for detection of SNP TSC0003816
atttcttcgataa

SEQ ID NO: 17855 - DNA, 13 bp, Artificial Sequence
  Oligonucleotide for detection of SNP TSC0003816
ttatcggagaaat

SEQ ID NO: 17856 - DNA, 13 bp, Artificial Sequence
  Oligonucleotide for detection of SNP TSC0003816
atttctccgataa

SEQ ID NO: 17857 - DNA, 13 bp, Artificial Sequence
  Oligonucleotide for detection of SNP TSC0003817
atgtgaattttay

SEQ ID NO: 17858 - DNA, 13 bp, Artificial Sequence
  Oligonucleotide for detection of SNP TSC0003817
rtaaaattcacat

SEQ ID NO: 17859 - DNA, 13 bp, Artificial Sequence
  Oligonucleotide for detection of SNP TSC0003817
atgtgagttttay

SEQ ID NO: 17860 - DNA, 13 bp, Artificial Sequence
  Oligonucleotide for detection of SNP TSC0003817
rtaaaactcacat

SEQ ID NO: 17861 - DNA, 13 bp, Artificial Sequence
  Oligonucleotide for detection of SNP TSC0003817
atgcgaattttay

SEQ ID NO: 17862 - DNA, 13 bp, Artificial Sequence
  Oligonucleotide for detection of SNP TSC0003817
rtaaaattcgcat

SEQ ID NO: 17863 - DNA, 13 bp, Artificial Sequence
  Oligonucleotide for detection of SNP TSC0003817
atgcgagttttay

SEQ ID NO: 17864 - DNA, 13 bp, Artificial Sequence
  Oligonucleotide for detection of SNP TSC0003817
rtaaaactcgcat

SEQ ID NO: 17865 - DNA, 13 bp, Artificial Sequence
  Oligonucleotide for detection of SNP TSC0003818
tttatggtttttg

SEQ ID NO: 17866 - DNA, 13 bp, Artificial Sequence
  Oligonucleotide for detection of SNP TSC0003818
caaaaaccataaa

SEQ ID NO: 17867 - DNA, 13 bp, Artificial Sequence
  Oligonucleotide for detection of SNP TSC0003818
tttatgatttttg

SEQ ID NO: 17868 - DNA, 13 bp, Artificial Sequence
  Oligonucleotide for detection of SNP TSC0003818
caaaaatcataaa

SEQ ID NO: 17869 - DNA, 13 bp, Artificial Sequence
  Oligonucleotide for detection of SNP TSC0003818
tttatggttttcg

SEQ ID NO: 17870 - DNA, 13 bp, Artificial Sequence
  Oligonucleotide for detection of SNP TSC0003818
cgaaaaccataaa

SEQ ID NO: 17871 - DNA, 13 bp, Artificial Sequence
  Oligonucleotide for detection of SNP TSC0003818
tttatgattttcg

SEQ ID NO: 17872 - DNA, 13 bp, Artificial Sequence
  Oligonucleotide for detection of SNP TSC0003818
cgaaaatcataaa

SEQ ID NO: 17873 - DNA, 13 bp, Artificial Sequence
  Oligonucleotide for detection of SNP TSC0003819
tgaaatgtataaa

SEQ ID NO: 17874 - DNA, 13 bp, Artificial Sequence
  Oligonucleotide for detection of SNP TSC0003819
tttatacatttca

SEQ ID NO: 17875 - DNA, 13 bp, Artificial Sequence
  Oligonucleotide for detection of SNP TSC0003819
tgaaatttataaa

SEQ ID NO: 17876 - DNA, 13 bp, Artificial Sequence
  Oligonucleotide for detection of SNP TSC0003819
tttataaatttca

SEQ ID NO: 17877 - DNA, 13 bp, Artificial Sequence
  Oligonucleotide for detection of SNP TSC0003819
tttatgtatttta

SEQ ID NO: 17878 - DNA, 13 bp, Artificial Sequence
  Oligonucleotide for detection of SNP TSC0003819
taaaatacataaa

SEQ ID NO: 17879 - DNA, 13 bp, Artificial Sequence
  Oligonucleotide for detection of SNP TSC0003819
tttatggatttta

SEQ ID NO: 17880 - DNA, 13 bp, Artificial Sequence
  Oligonucleotide for detection of SNP TSC0003819
taaaatccataaa

SEQ ID NO: 17881 - DNA, 13 bp, Artificial Sequence
  Oligonucleotide for detection of SNP TSC0003821
aagagagaaaaag

SEQ ID NO: 17882 - DNA, 13 bp, Artificial Sequence
  Oligonucleotide for detection of SNP TSC0003821
ctttttctctctt

SEQ ID NO: 17883 - DNA, 13 bp, Artificial Sequence
  Oligonucleotide for detection of SNP TSC0003821
aagagataaaaag

SEQ ID NO: 17884 - DNA, 13 bp, Artificial Sequence
  Oligonucleotide for detection of SNP TSC0003821
ctttttatctctt

SEQ ID NO: 17885 - DNA, 13 bp, Artificial Sequence
  Oligonucleotide for detection of SNP TSC0003822
tttttgggattta

SEQ ID NO: 17886 - DNA, 13 bp, Artificial Sequence
  Oligonucleotide for detection of SNP TSC0003822
taaatcccaaaaa

SEQ ID NO: 17887 - DNA, 13 bp, Artificial Sequence
  Oligonucleotide for detection of SNP TSC0003822
tttttgagattta

SEQ ID NO: 17888 - DNA, 13 bp, Artificial Sequence
  Oligonucleotide for detection of SNP TSC0003822
taaatctcaaaaa

SEQ ID NO: 17889 - DNA, 13 bp, Artificial Sequence
  Oligonucleotide for detection of SNP TSC0003824
tttaaggttgttg

SEQ ID NO: 17890 - DNA, 13 bp, Artificial Sequence
  Oligonucleotide for detection of SNP TSC0003824
caacaaccttaaa

SEQ ID NO: 17891 - DNA, 13 bp, Artificial Sequence
  Oligonucleotide for detection of SNP TSC0003824
tttaagattgttg

SEQ ID NO: 17892 - DNA, 13 bp, Artificial Sequence
  Oligonucleotide for detection of SNP TSC0003824
caacaatcttaaa

SEQ ID NO: 17893 - DNA, 13 bp, Artificial Sequence
  Oligonucleotide for detection of SNP TSC0003825
tgggatgggaagg

SEQ ID NO: 17894 - DNA, 13 bp, Artificial Sequence
  Oligonucleotide for detection of SNP TSC0003825
ccttcccatccca

SEQ ID NO: 17895 - DNA, 13 bp, Artificial Sequence
  Oligonucleotide for detection of SNP TSC0003825
tgggataggaagg

SEQ ID NO: 17896 - DNA, 13 bp, Artificial Sequence
  Oligonucleotide for detection of SNP TSC0003825
ccttcctatccca

SEQ ID NO: 17897 - DNA, 13 bp, Artificial Sequence
  Oligonucleotide for detection of SNP TSC0003826
tttattgttatta

SEQ ID NO: 17898 - DNA, 13 bp, Artificial Sequence
  Oligonucleotide for detection of SNP TSC0003826
taataacaataaa

SEQ ID NO: 17899 - DNA, 13 bp, Artificial Sequence
  Oligonucleotide for detection of SNP TSC0003826
tttattattatta

SEQ ID NO: 17900 - DNA, 13 bp, Artificial Sequence
  Oligonucleotide for detection of SNP TSC0003826
taataataataaa

SEQ ID NO: 17901 - DNA, 13 bp, Artificial Sequence
  Oligonucleotide for detection of SNP TSC0003826
tttatcgttatta

SEQ ID NO: 17902 - DNA, 13 bp, Artificial Sequence
  Oligonucleotide for detection of SNP TSC0003826
taataacgataaa

SEQ ID NO: 17903 - DNA, 13 bp, Artificial Sequence
  Oligonucleotide for detection of SNP TSC0003826
tgatgatggtagg

SEQ ID NO: 17904 - DNA, 13 bp, Artificial Sequence
  Oligonucleotide for detection of SNP TSC0003826
cctaccatcatca

SEQ ID NO: 17905 - DNA, 13 bp, Artificial Sequence
  Oligonucleotide for detection of SNP TSC0003826
tgatgacggtagg

SEQ ID NO: 17906 - DNA, 13 bp, Artificial Sequence
  Oligonucleotide for detection of SNP TSC0003826
cctaccgtcatca

SEQ ID NO: 17907 - DNA, 13 bp, Artificial Sequence
  Oligonucleotide for detection of SNP TSC0003828
ttaattgtaagaa

SEQ ID NO: 17908 - DNA, 13 bp, Artificial Sequence
  Oligonucleotide for detection of SNP TSC0003828
ttcttacaattaa

SEQ ID NO: 17909 - DNA, 13 bp, Artificial Sequence
  Oligonucleotide for detection of SNP TSC0003828
ttaattataagaa

SEQ ID NO: 17910 - DNA, 13 bp, Artificial Sequence
  Oligonucleotide for detection of SNP TSC0003828
ttcttataattaa

SEQ ID NO: 17911 - DNA, 13 bp, Artificial Sequence
  Oligonucleotide for detection of SNP TSC0003829
ttagagtagatty

SEQ ID NO: 17912 - DNA, 13 bp, Artificial Sequence
  Oligonucleotide for detection of SNP TSC0003829
raatctactctaa

SEQ ID NO: 17913 - DNA, 13 bp, Artificial Sequence
  Oligonucleotide for detection of SNP TSC0003829
ttagagaagatty

SEQ ID NO: 17914 - DNA, 13 bp, Artificial Sequence
  Oligonucleotide for detection of SNP TSC0003829
raatcttctctaa

SEQ ID NO: 17915 - DNA, 13 bp, Artificial Sequence
  Oligonucleotide for detection of SNP TSC0003829
gggtttgttttga

SEQ ID NO: 17916 - DNA, 13 bp, Artificial Sequence
  Oligonucleotide for detection of SNP TSC0003829
tcaaaacaaaccc

SEQ ID NO: 17917 - DNA, 13 bp, Artificial Sequence
  Oligonucleotide for detection of SNP TSC0003829
gggttttttttga

SEQ ID NO: 17918 - DNA, 13 bp, Artificial Sequence
  Oligonucleotide for detection of SNP TSC0003829
tcaaaaaaaaccc

SEQ ID NO: 17919 - DNA, 13 bp, Artificial Sequence
  Oligonucleotide for detection of SNP TSC0003830
tttgtgtgtggta

SEQ ID NO: 17920 - DNA, 13 bp, Artificial Sequence
  Oligonucleotide for detection of SNP TSC0003830
taccacacacaaa

SEQ ID NO: 17921 - DNA, 13 bp, Artificial Sequence
  Oligonucleotide for detection of SNP TSC0003830
tttgtgggtggta

SEQ ID NO: 17922 - DNA, 13 bp, Artificial Sequence
  Oligonucleotide for detection of SNP TSC0003830
taccacccacaaa

SEQ ID NO: 17923 - DNA, 13 bp, Artificial Sequence
  Oligonucleotide for detection of SNP TSC0003830
tgttatatataga

SEQ ID NO: 17924 - DNA, 13 bp, Artificial Sequence
  Oligonucleotide for detection of SNP TSC0003830
tctatatataaca

SEQ ID NO: 17925 - DNA, 13 bp, Artificial Sequence
  Oligonucleotide for detection of SNP TSC0003830
tgttatttataga

SEQ ID NO: 17926 - DNA, 13 bp, Artificial Sequence
  Oligonucleotide for detection of SNP TSC0003830
tctataaataaca

SEQ ID NO: 17927 - DNA, 13 bp, Artificial Sequence
  Oligonucleotide for detection of SNP TSC0003831
atgtagatttagy

SEQ ID NO: 17928 - DNA, 13 bp, Artificial Sequence
  Oligonucleotide for detection of SNP TSC0003831
rctaaatctacat

SEQ ID NO: 17929 - DNA, 13 bp, Artificial Sequence
  Oligonucleotide for detection of SNP TSC0003831
atgtagttttagy

SEQ ID NO: 17930 - DNA, 13 bp, Artificial Sequence
  Oligonucleotide for detection of SNP TSC0003831
rctaaaactacat

SEQ ID NO: 17931 - DNA, 13 bp, Artificial Sequence
  Oligonucleotide for detection of SNP TSC0003831
gttgagtttatat

SEQ ID NO: 17932 - DNA, 13 bp, Artificial Sequence
  Oligonucleotide for detection of SNP TSC0003831
atataaactcaac

SEQ ID NO: 17933 - DNA, 13 bp, Artificial Sequence
  Oligonucleotide for detection of SNP TSC0003831
gttgagattatat

SEQ ID NO: 17934 - DNA, 13 bp, Artificial Sequence
  Oligonucleotide for detection of SNP TSC0003831
atataatctcaac

SEQ ID NO: 17935 - DNA, 13 bp, Artificial Sequence
  Oligonucleotide for detection of SNP TSC0003832
ttgatgggttagt

SEQ ID NO: 17936 - DNA, 13 bp, Artificial Sequence
  Oligonucleotide for detection of SNP TSC0003832
actaacccatcaa

SEQ ID NO: 17937 - DNA, 13 bp, Artificial Sequence
  Oligonucleotide for detection of SNP TSC0003832
ttgatgagttagt

SEQ ID NO: 17938 - DNA, 13 bp, Artificial Sequence
  Oligonucleotide for detection of SNP TSC0003832
actaactcatcaa

SEQ ID NO: 17939 - DNA, 13 bp, Artificial Sequence
  Oligonucleotide for detection of SNP TSC0003833
gagttttgtgttt

SEQ ID NO: 17940 - DNA, 13 bp, Artificial Sequence
  Oligonucleotide for detection of SNP TSC0003833
aaacacaaaactc

SEQ ID NO: 17941 - DNA, 13 bp, Artificial Sequence
  Oligonucleotide for detection of SNP TSC0003833
gagtttcgtgttt

SEQ ID NO: 17942 - DNA, 13 bp, Artificial Sequence
  Oligonucleotide for detection of SNP TSC0003833
aaacacgaaactc

SEQ ID NO: 17943 - DNA, 13 bp, Artificial Sequence
  Oligonucleotide for detection of SNP TSC0003833
agatatagggtty

SEQ ID NO: 17944 - DNA, 13 bp, Artificial Sequence
  Oligonucleotide for detection of SNP TSC0003833
raaccctatatct

SEQ ID NO: 17945 - DNA, 13 bp, Artificial Sequence
  Oligonucleotide for detection of SNP TSC0003833
agatatggggtty

SEQ ID NO: 17946 - DNA, 13 bp, Artificial Sequence
  Oligonucleotide for detection of SNP TSC0003833
raaccccatatct

SEQ ID NO: 17947 - DNA, 13 bp, Artificial Sequence
  Oligonucleotide for detection of SNP TSC0003833
agatacggggtty

SEQ ID NO: 17948 - DNA, 13 bp, Artificial Sequence
  Oligonucleotide for detection of SNP TSC0003833
raaccccgtatct

SEQ ID NO: 17949 - DNA, 13 bp, Artificial Sequence
  Oligonucleotide for detection of SNP TSC0003835
attgaatttttat

SEQ ID NO: 17950 - DNA, 13 bp, Artificial Sequence
  Oligonucleotide for detection of SNP TSC0003835
ataaaaattcaat

SEQ ID NO: 17951 - DNA, 13 bp, Artificial Sequence
  Oligonucleotide for detection of SNP TSC0003835
attgaaattttat

SEQ ID NO: 17952 - DNA, 13 bp, Artificial Sequence
  Oligonucleotide for detection of SNP TSC0003835
ataaaatttcaat

SEQ ID NO: 17953 - DNA, 13 bp, Artificial Sequence
  Oligonucleotide for detection of SNP TSC0003835
atcgaatttttat

SEQ ID NO: 17954 - DNA, 13 bp, Artificial Sequence
  Oligonucleotide for detection of SNP TSC0003835
ataaaaattcgat

SEQ ID NO: 17955 - DNA, 13 bp, Artificial Sequence
  Oligonucleotide for detection of SNP TSC0003835
atcgaaattttat

SEQ ID NO: 17956 - DNA, 13 bp, Artificial Sequence
  Oligonucleotide for detection of SNP TSC0003835
ataaaatttcgat

SEQ ID NO: 17957 - DNA, 13 bp, Artificial Sequence
  Oligonucleotide for detection of SNP TSC0003835
ataaaagtttggt

SEQ ID NO: 17958 - DNA, 13 bp, Artificial Sequence
  Oligonucleotide for detection of SNP TSC0003835
accaaacttttat

SEQ ID NO: 17959 - DNA, 13 bp, Artificial Sequence
  Oligonucleotide for detection of SNP TSC0003835
ataaaattttggt

SEQ ID NO: 17960 - DNA, 13 bp, Artificial Sequence
  Oligonucleotide for detection of SNP TSC0003835
accaaaattttat

SEQ ID NO: 17961 - DNA, 13 bp, Artificial Sequence
  Oligonucleotide for detection of SNP TSC0003835
ataaaagttcggt

SEQ ID NO: 17962 - DNA, 13 bp, Artificial Sequence
  Oligonucleotide for detection of SNP TSC0003835
accgaacttttat

SEQ ID NO: 17963 - DNA, 13 bp, Artificial Sequence
  Oligonucleotide for detection of SNP TSC0003835
ataaaatttcggt

SEQ ID NO: 17964 - DNA, 13 bp, Artificial Sequence
  Oligonucleotide for detection of SNP TSC0003835
accgaaattttat

SEQ ID NO: 17965 - DNA, 13 bp, Artificial Sequence
  Oligonucleotide for detection of SNP TSC0003836
agataatgtagaa

SEQ ID NO: 17966 - DNA, 13 bp, Artificial Sequence
  Oligonucleotide for detection of SNP TSC0003836
ttctacattatct

SEQ ID NO: 17967 - DNA, 13 bp, Artificial Sequence
  Oligonucleotide for detection of SNP TSC0003836
agataacgtagaa

SEQ ID NO: 17968 - DNA, 13 bp, Artificial Sequence
  Oligonucleotide for detection of SNP TSC0003836
ttctacgttatct

SEQ ID NO: 17969 - DNA, 13 bp, Artificial Sequence
  Oligonucleotide for detection of SNP TSC0003836
ttttgtattgttt

SEQ ID NO: 17970 - DNA, 13 bp, Artificial Sequence
  Oligonucleotide for detection of SNP TSC0003836
aaacaatacaaaa

SEQ ID NO: 17971 - DNA, 13 bp, Artificial Sequence
  Oligonucleotide for detection of SNP TSC0003836
ttttgtgttgttt

SEQ ID NO: 17972 - DNA, 13 bp, Artificial Sequence
  Oligonucleotide for detection of SNP TSC0003836
aaacaacacaaaa

SEQ ID NO: 17973 - DNA, 13 bp, Artificial Sequence
  Oligonucleotide for detection of SNP TSC0003836
ttttgcgttgttt

SEQ ID NO: 17974 - DNA, 13 bp, Artificial Sequence
  Oligonucleotide for detection of SNP TSC0003836
aaacaacgcaaaa

SEQ ID NO: 17975 - DNA, 13 bp, Artificial Sequence
  Oligonucleotide for detection of SNP TSC0003837
tttttagtattty

SEQ ID NO: 17976 - DNA, 13 bp, Artificial Sequence
  Oligonucleotide for detection of SNP TSC0003837
raaatactaaaaa

SEQ ID NO: 17977 - DNA, 13 bp, Artificial Sequence
  Oligonucleotide for detection of SNP TSC0003837
tttttaatattty

SEQ ID NO: 17978 - DNA, 13 bp, Artificial Sequence
  Oligonucleotide for detection of SNP TSC0003837
raaatattaaaaa

SEQ ID NO: 17979 - DNA, 13 bp, Artificial Sequence
  Oligonucleotide for detection of SNP TSC0003839
tgttttggtttag

SEQ ID NO: 17980 - DNA, 13 bp, Artificial Sequence
  Oligonucleotide for detection of SNP TSC0003839
ctaaaccaaaaca

SEQ ID NO: 17981 - DNA, 13 bp, Artificial Sequence
  Oligonucleotide for detection of SNP TSC0003839
tgttttagtttag

SEQ ID NO: 17982 - DNA, 13 bp, Artificial Sequence
  Oligonucleotide for detection of SNP TSC0003839
ctaaactaaaaca

SEQ ID NO: 17983 - DNA, 13 bp, Artificial Sequence
  Oligonucleotide for detection of SNP TSC0003839
tgtttcggtttag

SEQ ID NO: 17984 - DNA, 13 bp, Artificial Sequence
  Oligonucleotide for detection of SNP TSC0003839
ctaaaccgaaaca

SEQ ID NO: 17985 - DNA, 13 bp, Artificial Sequence
  Oligonucleotide for detection of SNP TSC0003839
ttgagttgagata

SEQ ID NO: 17986 - DNA, 13 bp, Artificial Sequence
  Oligonucleotide for detection of SNP TSC0003839
tatctcaactcaa

SEQ ID NO: 17987 - DNA, 13 bp, Artificial Sequence
  Oligonucleotide for detection of SNP TSC0003839
ttgagtcgagata

SEQ ID NO: 17988 - DNA, 13 bp, Artificial Sequence
  Oligonucleotide for detection of SNP TSC0003839
tatctcgactcaa

SEQ ID NO: 17989 - DNA, 13 bp, Artificial Sequence
  Oligonucleotide for detection of SNP TSC0003841
gggaataagatta

SEQ ID NO: 17990 - DNA, 13 bp, Artificial Sequence
  Oligonucleotide for detection of SNP TSC0003841
taatcttattccc

SEQ ID NO: 17991 - DNA, 13 bp, Artificial Sequence
  Oligonucleotide for detection of SNP TSC0003841
gggaattagatta

SEQ ID NO: 17992 - DNA, 13 bp, Artificial Sequence
  Oligonucleotide for detection of SNP TSC0003841
taatctaattccc

SEQ ID NO: 17993 - DNA, 13 bp, Artificial Sequence
  Oligonucleotide for detection of SNP TSC0003841
tggttttatttty

SEQ ID NO: 17994 - DNA, 13 bp, Artificial Sequence
  Oligonucleotide for detection of SNP TSC0003841
raaaataaaacca

SEQ ID NO: 17995 - DNA, 13 bp, Artificial Sequence
  Oligonucleotide for detection of SNP TSC0003841
tggtttgatttty

SEQ ID NO: 17996 - DNA, 13 bp, Artificial Sequence
  Oligonucleotide for detection of SNP TSC0003841
raaaatcaaacca

SEQ ID NO: 17997 - DNA, 13 bp, Artificial Sequence
  Oligonucleotide for detection of SNP TSC0003842
taggttgtattty

SEQ ID NO: 17998 - DNA, 13 bp, Artificial Sequence
  Oligonucleotide for detection of SNP TSC0003842
raaatacaaccta

SEQ ID NO: 17999 - DNA, 13 bp, Artificial Sequence
  Oligonucleotide for detection of SNP TSC0003842
taggttatattty

SEQ ID NO: 18000 - DNA, 13 bp, Artificial Sequence
  Oligonucleotide for detection of SNP TSC0003842
raaatataaccta

SEQ ID NO: 18001 - DNA, 13 bp, Artificial Sequence
  Oligonucleotide for detection of SNP TSC0003843
gtgaggatagggy

SEQ ID NO: 18002 - DNA, 13 bp, Artificial Sequence
  Oligonucleotide for detection of SNP TSC0003843
rccctatcctcac

SEQ ID NO: 18003 - DNA, 13 bp, Artificial Sequence
  Oligonucleotide for detection of SNP TSC0003843
gtgagggtagggy

SEQ ID NO: 18004 - DNA, 13 bp, Artificial Sequence
  Oligonucleotide for detection of SNP TSC0003843
rccctaccctcac

SEQ ID NO: 18005 - DNA, 13 bp, Artificial Sequence
  Oligonucleotide for detection of SNP TSC0003844
ttttttgtttatt

SEQ ID NO: 18006 - DNA, 13 bp, Artificial Sequence
  Oligonucleotide for detection of SNP TSC0003844
aataaacaaaaaa

SEQ ID NO: 18007 - DNA, 13 bp, Artificial Sequence
  Oligonucleotide for detection of SNP TSC0003844
ttttttttttatt

SEQ ID NO: 18008 - DNA, 13 bp, Artificial Sequence
  Oligonucleotide for detection of SNP TSC0003844
aataaaaaaaaaa

SEQ ID NO: 18009 - DNA, 13 bp, Artificial Sequence
  Oligonucleotide for detection of SNP TSC0003844
aataaataaaagg

SEQ ID NO: 18010 - DNA, 13 bp, Artificial Sequence
  Oligonucleotide for detection of SNP TSC0003844
ccttttatttatt

SEQ ID NO: 18011 - DNA, 13 bp, Artificial Sequence
  Oligonucleotide for detection of SNP TSC0003844
aataaagaaaagg

SEQ ID NO: 18012 - DNA, 13 bp, Artificial Sequence
  Oligonucleotide for detection of SNP TSC0003844
ccttttctttatt

SEQ ID NO: 18013 - DNA, 13 bp, Artificial Sequence
  Oligonucleotide for detection of SNP TSC0003845
ttaaaaagggtta

SEQ ID NO: 18014 - DNA, 13 bp, Artificial Sequence
  Oligonucleotide for detection of SNP TSC0003845
taaccctttttaa

SEQ ID NO: 18015 - DNA, 13 bp, Artificial Sequence
  Oligonucleotide for detection of SNP TSC0003845
ttaaaatgggtta

SEQ ID NO: 18016 - DNA, 13 bp, Artificial Sequence
  Oligonucleotide for detection of SNP TSC0003845
taacccattttaa

SEQ ID NO: 18017 - DNA, 13 bp, Artificial Sequence
  Oligonucleotide for detection of SNP TSC0003845
ttaaaacgggtta

SEQ ID NO: 18018 - DNA, 13 bp, Artificial Sequence
  Oligonucleotide for detection of SNP TSC0003845
taacccgttttaa

SEQ ID NO: 18019 - DNA, 13 bp, Artificial Sequence
  Oligonucleotide for detection of SNP TSC0003845
taattttttttga

SEQ ID NO: 18020 - DNA, 13 bp, Artificial Sequence
  Oligonucleotide for detection of SNP TSC0003845
tcaaaaaaaatta

SEQ ID NO: 18021 - DNA, 13 bp, Artificial Sequence
  Oligonucleotide for detection of SNP TSC0003845
taatttgttttga

SEQ ID NO: 18022 - DNA, 13 bp, Artificial Sequence
  Oligonucleotide for detection of SNP TSC0003845
tcaaaacaaatta

SEQ ID NO: 18023 - DNA, 13 bp, Artificial Sequence
  Oligonucleotide for detection of SNP TSC0003845
taattcgttttga

SEQ ID NO: 18024 - DNA, 13 bp, Artificial Sequence
  Oligonucleotide for detection of SNP TSC0003845
tcaaaacgaatta

SEQ ID NO: 18025 - DNA, 13 bp, Artificial Sequence
  Oligonucleotide for detection of SNP TSC0003846
tagagaagttttt

SEQ ID NO: 18026 - DNA, 13 bp, Artificial Sequence
  Oligonucleotide for detection of SNP TSC0003846
aaaaacttctcta

SEQ ID NO: 18027 - DNA, 13 bp, Artificial Sequence
  Oligonucleotide for detection of SNP TSC0003846
tagagaggttttt

SEQ ID NO: 18028 - DNA, 13 bp, Artificial Sequence
  Oligonucleotide for detection of SNP TSC0003846
aaaaacctctcta

SEQ ID NO: 18029 - DNA, 13 bp, Artificial Sequence
  Oligonucleotide for detection of SNP TSC0003847
ataagggaaagat

SEQ ID NO: 18030 - DNA, 13 bp, Artificial Sequence
  Oligonucleotide for detection of SNP TSC0003847
atctttcccttat

SEQ ID NO: 18031 - DNA, 13 bp, Artificial Sequence
  Oligonucleotide for detection of SNP TSC0003847
ataaggaaaagat

SEQ ID NO: 18032 - DNA, 13 bp, Artificial Sequence
  Oligonucleotide for detection of SNP TSC0003847
atcttttccttat

SEQ ID NO: 18033 - DNA, 13 bp, Artificial Sequence
  Oligonucleotide for detection of SNP TSC0003848
tttagggttttty

SEQ ID NO: 18034 - DNA, 13 bp, Artificial Sequence
  Oligonucleotide for detection of SNP TSC0003848
raaaaaccctaaa

SEQ ID NO: 18035 - DNA, 13 bp, Artificial Sequence
  Oligonucleotide for detection of SNP TSC0003848
tttaggattttty

SEQ ID NO: 18036 - DNA, 13 bp, Artificial Sequence
  Oligonucleotide for detection of SNP TSC0003848
raaaaatcctaaa

SEQ ID NO: 18037 - DNA, 13 bp, Artificial Sequence
  Oligonucleotide for detection of SNP TSC0003849
tataatatggtay

SEQ ID NO: 18038 - DNA, 13 bp, Artificial Sequence
  Oligonucleotide for detection of SNP TSC0003849
rtaccatattata

SEQ ID NO: 18039 - DNA, 13 bp, Artificial Sequence
  Oligonucleotide for detection of SNP TSC0003849
tataatttggtay

SEQ ID NO: 18040 - DNA, 13 bp, Artificial Sequence
  Oligonucleotide for detection of SNP TSC0003849
rtaccaaattata

SEQ ID NO: 18041 - DNA, 13 bp, Artificial Sequence
  Oligonucleotide for detection of SNP TSC0003849
gtattatgttgtg

SEQ ID NO: 18042 - DNA, 13 bp, Artificial Sequence
  Oligonucleotide for detection of SNP TSC0003849
cacaacataatac

SEQ ID NO: 18043 - DNA, 13 bp, Artificial Sequence
  Oligonucleotide for detection of SNP TSC0003849
gtattaagttgtg

SEQ ID NO: 18044 - DNA, 13 bp, Artificial Sequence
  Oligonucleotide for detection of SNP TSC0003849
cacaacttaatac

SEQ ID NO: 18045 - DNA, 13 bp, Artificial Sequence
  Oligonucleotide for detection of SNP TSC0003850
agttggggttata

SEQ ID NO: 18046 - DNA, 13 bp, Artificial Sequence
  Oligonucleotide for detection of SNP TSC0003850
tataaccccaact

SEQ ID NO: 18047 - DNA, 13 bp, Artificial Sequence
  Oligonucleotide for detection of SNP TSC0003850
agttggagttata

SEQ ID NO: 18048 - DNA, 13 bp, Artificial Sequence
  Oligonucleotide for detection of SNP TSC0003850
tataactccaact

SEQ ID NO: 18049 - DNA, 13 bp, Artificial Sequence
  Oligonucleotide for detection of SNP TSC0003852
ttgagggtgagga

SEQ ID NO: 18050 - DNA, 13 bp, Artificial Sequence
  Oligonucleotide for detection of SNP TSC0003852
tcctcaccctcaa

SEQ ID NO: 18051 - DNA, 13 bp, Artificial Sequence
  Oligonucleotide for detection of SNP TSC0003852
ttgaggatgagga

SEQ ID NO: 18052 - DNA, 13 bp, Artificial Sequence
  Oligonucleotide for detection of SNP TSC0003852
tcctcatcctcaa

SEQ ID NO: 18053 - DNA, 13 bp, Artificial Sequence
  Oligonucleotide for detection of SNP TSC0003853
ggagtttgagagy

SEQ ID NO: 18054 - DNA, 13 bp, Artificial Sequence
  Oligonucleotide for detection of SNP TSC0003853
rctctcaaactcc

SEQ ID NO: 18055 - DNA, 13 bp, Artificial Sequence
  Oligonucleotide for detection of SNP TSC0003853
ggagttcgagagy

SEQ ID NO: 18056 - DNA, 13 bp, Artificial Sequence
  Oligonucleotide for detection of SNP TSC0003853
rctctcgaactcc

SEQ ID NO: 18057 - DNA, 13 bp, Artificial Sequence
  Oligonucleotide for detection of SNP TSC0003853
gtttttagattty

SEQ ID NO: 18058 - DNA, 13 bp, Artificial Sequence
  Oligonucleotide for detection of SNP TSC0003853
raaatctaaaaac

SEQ ID NO: 18059 - DNA, 13 bp, Artificial Sequence
  Oligonucleotide for detection of SNP TSC0003853
gtttttggattty

SEQ ID NO: 18060 - DNA, 13 bp, Artificial Sequence
  Oligonucleotide for detection of SNP TSC0003853
raaatccaaaaac

SEQ ID NO: 18061 - DNA, 13 bp, Artificial Sequence
  Oligonucleotide for detection of SNP TSC0003853
gttttcggattty

SEQ ID NO: 18062 - DNA, 13 bp, Artificial Sequence
  Oligonucleotide for detection of SNP TSC0003853
raaatccgaaaac

SEQ ID NO: 18063 - DNA, 13 bp, Artificial Sequence
  Oligonucleotide for detection of SNP TSC0003854
tatttatggttgg

SEQ ID NO: 18064 - DNA, 13 bp, Artificial Sequence
  Oligonucleotide for detection of SNP TSC0003854
ccaaccataaata

SEQ ID NO: 18065 - DNA, 13 bp, Artificial Sequence
  Oligonucleotide for detection of SNP TSC0003854
tatttacggttgg

SEQ ID NO: 18066 - DNA, 13 bp, Artificial Sequence
  Oligonucleotide for detection of SNP TSC0003854
ccaaccgtaaata

SEQ ID NO: 18067 - DNA, 13 bp, Artificial Sequence
  Oligonucleotide for detection of SNP TSC0003854
tatttatggtcgg

SEQ ID NO: 18068 - DNA, 13 bp, Artificial Sequence
  Oligonucleotide for detection of SNP TSC0003854
ccgaccataaata

SEQ ID NO: 18069 - DNA, 13 bp, Artificial Sequence
  Oligonucleotide for detection of SNP TSC0003854
tatttacggtcgg

SEQ ID NO: 18070 - DNA, 13 bp, Artificial Sequence
  Oligonucleotide for detection of SNP TSC0003854
ccgaccgtaaata

SEQ ID NO: 18071 - DNA, 13 bp, Artificial Sequence
  Oligonucleotide for detection of SNP TSC0003854
ttggttgtaaatg

SEQ ID NO: 18072 - DNA, 13 bp, Artificial Sequence
  Oligonucleotide for detection of SNP TSC0003854
catttacaaccaa

SEQ ID NO: 18073 - DNA, 13 bp, Artificial Sequence
  Oligonucleotide for detection of SNP TSC0003854
ttggttataaatg

SEQ ID NO: 18074 - DNA, 13 bp, Artificial Sequence
  Oligonucleotide for detection of SNP TSC0003854
catttataaccaa

SEQ ID NO: 18075 - DNA, 13 bp, Artificial Sequence
  Oligonucleotide for detection of SNP TSC0003854
tcggttgtaaatg

SEQ ID NO: 18076 - DNA, 13 bp, Artificial Sequence
  Oligonucleotide for detection of SNP TSC0003854
catttacaaccga

SEQ ID NO: 18077 - DNA, 13 bp, Artificial Sequence
  Oligonucleotide for detection of SNP TSC0003854
tcggttataaatg

SEQ ID NO: 18078 - DNA, 13 bp, Artificial Sequence
  Oligonucleotide for detection of SNP TSC0003854
catttataaccga

SEQ ID NO: 18079 - DNA, 13 bp, Artificial Sequence
  Oligonucleotide for detection of SNP TSC0003854
ttggtcgtaaatg

SEQ ID NO: 18080 - DNA, 13 bp, Artificial Sequence
  Oligonucleotide for detection of SNP TSC0003854
catttacgaccaa

SEQ ID NO: 18081 - DNA, 13 bp, Artificial Sequence
  Oligonucleotide for detection of SNP TSC0003854
tcggtcgtaaatg

SEQ ID NO: 18082 - DNA, 13 bp, Artificial Sequence
  Oligonucleotide for detection of SNP TSC0003854
catttacgaccga

SEQ ID NO: 18083 - DNA, 13 bp, Artificial Sequence
  Oligonucleotide for detection of SNP TSC0003855
tattttgtttata

SEQ ID NO: 18084 - DNA, 13 bp, Artificial Sequence
  Oligonucleotide for detection of SNP TSC0003855
tataaacaaaata

SEQ ID NO: 18085 - DNA, 13 bp, Artificial Sequence
  Oligonucleotide for detection of SNP TSC0003855
tatgaataaagta

SEQ ID NO: 18086 - DNA, 13 bp, Artificial Sequence
  Oligonucleotide for detection of SNP TSC0003855
tactttattcata

SEQ ID NO: 18087 - DNA, 13 bp, Artificial Sequence
  Oligonucleotide for detection of SNP TSC0003855
tatgaagaaagta

SEQ ID NO: 18088 - DNA, 13 bp, Artificial Sequence
  Oligonucleotide for detection of SNP TSC0003855
tactttcttcata

SEQ ID NO: 18089 - DNA, 13 bp, Artificial Sequence
  Oligonucleotide for detection of SNP TSC0003856
aaatgtgtgttta

SEQ ID NO: 18090 - DNA, 13 bp, Artificial Sequence
  Oligonucleotide for detection of SNP TSC0003856
taaacacacattt

SEQ ID NO: 18091 - DNA, 13 bp, Artificial Sequence
  Oligonucleotide for detection of SNP TSC0003856
aaatgtttgttta

SEQ ID NO: 18092 - DNA, 13 bp, Artificial Sequence
  Oligonucleotide for detection of SNP TSC0003856
taaacaaacattt

SEQ ID NO: 18093 - DNA, 13 bp, Artificial Sequence
  Oligonucleotide for detection of SNP TSC0003856
aaacgtgtgttta

SEQ ID NO: 18094 - DNA, 13 bp, Artificial Sequence
  Oligonucleotide for detection of SNP TSC0003856
taaacacacgttt

SEQ ID NO: 18095 - DNA, 13 bp, Artificial Sequence
  Oligonucleotide for detection of SNP TSC0003856
aaacgtttgttta

SEQ ID NO: 18096 - DNA, 13 bp, Artificial Sequence
  Oligonucleotide for detection of SNP TSC0003856
taaacaaacgttt

SEQ ID NO: 18097 - DNA, 13 bp, Artificial Sequence
  Oligonucleotide for detection of SNP TSC0003856
aaatgcgtgttta

SEQ ID NO: 18098 - DNA, 13 bp, Artificial Sequence
  Oligonucleotide for detection of SNP TSC0003856
taaacacgcattt

SEQ ID NO: 18099 - DNA, 13 bp, Artificial Sequence
  Oligonucleotide for detection of SNP TSC0003856
aaacgcgtgttta

SEQ ID NO: 18100 - DNA, 13 bp, Artificial Sequence
  Oligonucleotide for detection of SNP TSC0003856
taaacacgcgttt

SEQ ID NO: 18101 - DNA, 13 bp, Artificial Sequence
  Oligonucleotide for detection of SNP TSC0003856
tggatatgtgttt

SEQ ID NO: 18102 - DNA, 13 bp, Artificial Sequence
  Oligonucleotide for detection of SNP TSC0003856
aaacacatatcca

SEQ ID NO: 18103 - DNA, 13 bp, Artificial Sequence
  Oligonucleotide for detection of SNP TSC0003856
tggataagtgttt

SEQ ID NO: 18104 - DNA, 13 bp, Artificial Sequence
  Oligonucleotide for detection of SNP TSC0003856
aaacacttatcca

SEQ ID NO: 18105 - DNA, 13 bp, Artificial Sequence
  Oligonucleotide for detection of SNP TSC0003856
tggatacgtgttt

SEQ ID NO: 18106 - DNA, 13 bp, Artificial Sequence
  Oligonucleotide for detection of SNP TSC0003856
aaacacgtatcca

SEQ ID NO: 18107 - DNA, 13 bp, Artificial Sequence
  Oligonucleotide for detection of SNP TSC0003856
tggataagcgttt

SEQ ID NO: 18108 - DNA, 13 bp, Artificial Sequence
  Oligonucleotide for detection of SNP TSC0003856
aaacgcttatcca

SEQ ID NO: 18109 - DNA, 13 bp, Artificial Sequence
  Oligonucleotide for detection of SNP TSC0003856
tggatatgcgttt

SEQ ID NO: 18110 - DNA, 13 bp, Artificial Sequence
  Oligonucleotide for detection of SNP TSC0003856
aaacgcatatcca

SEQ ID NO: 18111 - DNA, 13 bp, Artificial Sequence
  Oligonucleotide for detection of SNP TSC0003856
tggatacgcgttt

SEQ ID NO: 18112 - DNA, 13 bp, Artificial Sequence
  Oligonucleotide for detection of SNP TSC0003856
aaacgcgtatcca

SEQ ID NO: 18113 - DNA, 13 bp, Artificial Sequence
  Oligonucleotide for detection of SNP TSC0003857
ttttagtttttag

SEQ ID NO: 18114 - DNA, 13 bp, Artificial Sequence
  Oligonucleotide for detection of SNP TSC0003857
ctaaaaactaaaa

SEQ ID NO: 18115 - DNA, 13 bp, Artificial Sequence
  Oligonucleotide for detection of SNP TSC0003857
ttaggagttagga

SEQ ID NO: 18116 - DNA, 13 bp, Artificial Sequence
  Oligonucleotide for detection of SNP TSC0003857
tcctaactcctaa

SEQ ID NO: 18117 - DNA, 13 bp, Artificial Sequence
  Oligonucleotide for detection of SNP TSC0003857
ttaggatttagga

SEQ ID NO: 18118 - DNA, 13 bp, Artificial Sequence
  Oligonucleotide for detection of SNP TSC0003857
tcctaaatcctaa

SEQ ID NO: 18119 - DNA, 13 bp, Artificial Sequence
  Oligonucleotide for detection of SNP TSC0003858
gtataagttatat

SEQ ID NO: 18120 - DNA, 13 bp, Artificial Sequence
  Oligonucleotide for detection of SNP TSC0003858
atataacttatac

SEQ ID NO: 18121 - DNA, 13 bp, Artificial Sequence
  Oligonucleotide for detection of SNP TSC0003858
gtataaattatat

SEQ ID NO: 18122 - DNA, 13 bp, Artificial Sequence
  Oligonucleotide for detection of SNP TSC0003858
atataatttatac

SEQ ID NO: 18123 - DNA, 13 bp, Artificial Sequence
  Oligonucleotide for detection of SNP TSC0003859
gatgtgggagtta

SEQ ID NO: 18124 - DNA, 13 bp, Artificial Sequence
  Oligonucleotide for detection of SNP TSC0003859
taactcccacatc

SEQ ID NO: 18125 - DNA, 13 bp, Artificial Sequence
  Oligonucleotide for detection of SNP TSC0003859
gatgtgagagtta

SEQ ID NO: 18126 - DNA, 13 bp, Artificial Sequence
  Oligonucleotide for detection of SNP TSC0003859
taactctcacatc

SEQ ID NO: 18127 - DNA, 13 bp, Artificial Sequence
  Oligonucleotide for detection of SNP TSC0003859
gatgcgggagtta

SEQ ID NO: 18128 - DNA, 13 bp, Artificial Sequence
  Oligonucleotide for detection of SNP TSC0003859
taactcccgcatc

SEQ ID NO: 18129 - DNA, 13 bp, Artificial Sequence
  Oligonucleotide for detection of SNP TSC0003859
gatgcgagagtta

SEQ ID NO: 18130 - DNA, 13 bp, Artificial Sequence
  Oligonucleotide for detection of SNP TSC0003859
taactctcgcatc

SEQ ID NO: 18131 - DNA, 13 bp, Artificial Sequence
  Oligonucleotide for detection of SNP TSC0003860
tggttaattgaat

SEQ ID NO: 18132 - DNA, 13 bp, Artificial Sequence
  Oligonucleotide for detection of SNP TSC0003860
attcaattaacca

SEQ ID NO: 18133 - DNA, 13 bp, Artificial Sequence
  Oligonucleotide for detection of SNP TSC0003860
tggttagttgaat

SEQ ID NO: 18134 - DNA, 13 bp, Artificial Sequence
  Oligonucleotide for detection of SNP TSC0003860
attcaactaacca

SEQ ID NO: 18135 - DNA, 13 bp, Artificial Sequence
  Oligonucleotide for detection of SNP TSC0003861
tgtttgtgttgag

SEQ ID NO: 18136 - DNA, 13 bp, Artificial Sequence
  Oligonucleotide for detection of SNP TSC0003861
ctcaacacaaaca

SEQ ID NO: 18137 - DNA, 13 bp, Artificial Sequence
  Oligonucleotide for detection of SNP TSC0003861
tgtttgggttgag

SEQ ID NO: 18138 - DNA, 13 bp, Artificial Sequence
  Oligonucleotide for detection of SNP TSC0003861
ctcaacccaaaca

SEQ ID NO: 18139 - DNA, 13 bp, Artificial Sequence
  Oligonucleotide for detection of SNP TSC0003861
tttagtataagta

SEQ ID NO: 18140 - DNA, 13 bp, Artificial Sequence
  Oligonucleotide for detection of SNP TSC0003861
tacttatactaaa

SEQ ID NO: 18141 - DNA, 13 bp, Artificial Sequence
  Oligonucleotide for detection of SNP TSC0003861
tttagtttaagta

SEQ ID NO: 18142 - DNA, 13 bp, Artificial Sequence
  Oligonucleotide for detection of SNP TSC0003861
tacttaaactaaa

SEQ ID NO: 18143 - DNA, 13 bp, Artificial Sequence
  Oligonucleotide for detection of SNP TSC0003862
agagagatattty

SEQ ID NO: 18144 - DNA, 13 bp, Artificial Sequence
  Oligonucleotide for detection of SNP TSC0003862
raaatatctctct

SEQ ID NO: 18145 - DNA, 13 bp, Artificial Sequence
  Oligonucleotide for detection of SNP TSC0003862
agagaggtattty

SEQ ID NO: 18146 - DNA, 13 bp, Artificial Sequence
  Oligonucleotide for detection of SNP TSC0003862
raaatacctctct

SEQ ID NO: 18147 - DNA, 13 bp, Artificial Sequence
  Oligonucleotide for detection of SNP TSC0003863
ttagtgatgtaay

SEQ ID NO: 18148 - DNA, 13 bp, Artificial Sequence
  Oligonucleotide for detection of SNP TSC0003863
rttacatcactaa

SEQ ID NO: 18149 - DNA, 13 bp, Artificial Sequence
  Oligonucleotide for detection of SNP TSC0003863
ttagtggtgtaay

SEQ ID NO: 18150 - DNA, 13 bp, Artificial Sequence
  Oligonucleotide for detection of SNP TSC0003863
rttacaccactaa

SEQ ID NO: 18151 - DNA, 13 bp, Artificial Sequence
  Oligonucleotide for detection of SNP TSC0003864
ttttagatatttt

SEQ ID NO: 18152 - DNA, 13 bp, Artificial Sequence
  Oligonucleotide for detection of SNP TSC0003864
aaaatatctaaaa

SEQ ID NO: 18153 - DNA, 13 bp, Artificial Sequence
  Oligonucleotide for detection of SNP TSC0003864
ttttaggtatttt

SEQ ID NO: 18154 - DNA, 13 bp, Artificial Sequence
  Oligonucleotide for detection of SNP TSC0003864
aaaatacctaaaa

SEQ ID NO: 18155 - DNA, 13 bp, Artificial Sequence
  Oligonucleotide for detection of SNP TSC0003865
ttaaatagagtgy

SEQ ID NO: 18156 - DNA, 13 bp, Artificial Sequence
  Oligonucleotide for detection of SNP TSC0003865
rcactctatttaa

SEQ ID NO: 18157 - DNA, 13 bp, Artificial Sequence
  Oligonucleotide for detection of SNP TSC0003865
ttaaatggagtgy

SEQ ID NO: 18158 - DNA, 13 bp, Artificial Sequence
  Oligonucleotide for detection of SNP TSC0003865
rcactccatttaa

SEQ ID NO: 18159 - DNA, 13 bp, Artificial Sequence
  Oligonucleotide for detection of SNP TSC0003866
gttgttaaatagg

SEQ ID NO: 18160 - DNA, 13 bp, Artificial Sequence
  Oligonucleotide for detection of SNP TSC0003866
cctatttaacaac

SEQ ID NO: 18161 - DNA, 13 bp, Artificial Sequence
  Oligonucleotide for detection of SNP TSC0003866
gttgttgaatagg

SEQ ID NO: 18162 - DNA, 13 bp, Artificial Sequence
  Oligonucleotide for detection of SNP TSC0003866
cctattcaacaac

SEQ ID NO: 18163 - DNA, 13 bp, Artificial Sequence
  Oligonucleotide for detection of SNP TSC0003867
taaaaatggttgg

SEQ ID NO: 18164 - DNA, 13 bp, Artificial Sequence
  Oligonucleotide for detection of SNP TSC0003867
ccaaccattttta

SEQ ID NO: 18165 - DNA, 13 bp, Artificial Sequence
  Oligonucleotide for detection of SNP TSC0003867
taaaaaaggttgg

SEQ ID NO: 18166 - DNA, 13 bp, Artificial Sequence
  Oligonucleotide for detection of SNP TSC0003867
ccaacctttttta

SEQ ID NO: 18167 - DNA, 13 bp, Artificial Sequence
  Oligonucleotide for detection of SNP TSC0003867
taaaaacggttgg

SEQ ID NO: 18168 - DNA, 13 bp, Artificial Sequence
  Oligonucleotide for detection of SNP TSC0003867
ccaaccgttttta

SEQ ID NO: 18169 - DNA, 13 bp, Artificial Sequence
  Oligonucleotide for detection of SNP TSC0003867
ttagttgtttttg

SEQ ID NO: 18170 - DNA, 13 bp, Artificial Sequence
  Oligonucleotide for detection of SNP TSC0003867
caaaaacaactaa

SEQ ID NO: 18171 - DNA, 13 bp, Artificial Sequence
  Oligonucleotide for detection of SNP TSC0003867
ttagttttttttg

SEQ ID NO: 18172 - DNA, 13 bp, Artificial Sequence
  Oligonucleotide for detection of SNP TSC0003867
caaaaaaaactaa

SEQ ID NO: 18173 - DNA, 13 bp, Artificial Sequence
  Oligonucleotide for detection of SNP TSC0003867
ttagtcgtttttg

SEQ ID NO: 18174 - DNA, 13 bp, Artificial Sequence
  Oligonucleotide for detection of SNP TSC0003867
caaaaacgactaa

SEQ ID NO: 18175 - DNA, 13 bp, Artificial Sequence
  Oligonucleotide for detection of SNP TSC0003868
ttattatgtttag

SEQ ID NO: 18176 - DNA, 13 bp, Artificial Sequence
  Oligonucleotide for detection of SNP TSC0003868
ctaaacataataa

SEQ ID NO: 18177 - DNA, 13 bp, Artificial Sequence
  Oligonucleotide for detection of SNP TSC0003868
ttattacgtttag

SEQ ID NO: 18178 - DNA, 13 bp, Artificial Sequence
  Oligonucleotide for detection of SNP TSC0003868
ctaaacgtaataa

SEQ ID NO: 18179 - DNA, 13 bp, Artificial Sequence
  Oligonucleotide for detection of SNP TSC0003868
ttgggcgtggtgg

SEQ ID NO: 18180 - DNA, 13 bp, Artificial Sequence
  Oligonucleotide for detection of SNP TSC0003868
ccaccacgcccaa

SEQ ID NO: 18181 - DNA, 13 bp, Artificial Sequence
  Oligonucleotide for detection of SNP TSC0003869
tgtttattttttt

SEQ ID NO: 18182 - DNA, 13 bp, Artificial Sequence
  Oligonucleotide for detection of SNP TSC0003869
aaaaaaataaaca

SEQ ID NO: 18183 - DNA, 13 bp, Artificial Sequence
  Oligonucleotide for detection of SNP TSC0003869
tgtttaatttttt

SEQ ID NO: 18184 - DNA, 13 bp, Artificial Sequence
  Oligonucleotide for detection of SNP TSC0003869
aaaaaattaaaca

SEQ ID NO: 18185 - DNA, 13 bp, Artificial Sequence
  Oligonucleotide for detection of SNP TSC0003869
aaaaaaatgagta

SEQ ID NO: 18186 - DNA, 13 bp, Artificial Sequence
  Oligonucleotide for detection of SNP TSC0003869
tactcattttttt

SEQ ID NO: 18187 - DNA, 13 bp, Artificial Sequence
  Oligonucleotide for detection of SNP TSC0003869
aaaaaattgagta

SEQ ID NO: 18188 - DNA, 13 bp, Artificial Sequence
  Oligonucleotide for detection of SNP TSC0003869
tactcaatttttt

SEQ ID NO: 18189 - DNA, 13 bp, Artificial Sequence
  Oligonucleotide for detection of SNP TSC0003871
gttgagagtggtg

SEQ ID NO: 18190 - DNA, 13 bp, Artificial Sequence
  Oligonucleotide for detection of SNP TSC0003871
caccactctcaac

SEQ ID NO: 18191 - DNA, 13 bp, Artificial Sequence
  Oligonucleotide for detection of SNP TSC0003871
gttgagtgtggtg

SEQ ID NO: 18192 - DNA, 13 bp, Artificial Sequence
  Oligonucleotide for detection of SNP TSC0003871
caccacactcaac

SEQ ID NO: 18193 - DNA, 13 bp, Artificial Sequence
  Oligonucleotide for detection of SNP TSC0003871
gttgagcgtggtg

SEQ ID NO: 18194 - DNA, 13 bp, Artificial Sequence
  Oligonucleotide for detection of SNP TSC0003871
caccacgctcaac

SEQ ID NO: 18195 - DNA, 13 bp, Artificial Sequence
  Oligonucleotide for detection of SNP TSC0003871
tattatttttagy

SEQ ID NO: 18196 - DNA, 13 bp, Artificial Sequence
  Oligonucleotide for detection of SNP TSC0003871
rctaaaaataata

SEQ ID NO: 18197 - DNA, 13 bp, Artificial Sequence
  Oligonucleotide for detection of SNP TSC0003871
tattatgtttagy

SEQ ID NO: 18198 - DNA, 13 bp, Artificial Sequence
  Oligonucleotide for detection of SNP TSC0003871
rctaaacataata

SEQ ID NO: 18199 - DNA, 13 bp, Artificial Sequence
  Oligonucleotide for detection of SNP TSC0003871
tattacgtttagy

SEQ ID NO: 18200 - DNA, 13 bp, Artificial Sequence
  Oligonucleotide for detection of SNP TSC0003871
rctaaacgtaata

SEQ ID NO: 18201 - DNA, 13 bp, Artificial Sequence
  Oligonucleotide for detection of SNP TSC0003872
ttaaagatataty

SEQ ID NO: 18202 - DNA, 13 bp, Artificial Sequence
  Oligonucleotide for detection of SNP TSC0003872
ratatatctttaa

SEQ ID NO: 18203 - DNA, 13 bp, Artificial Sequence
  Oligonucleotide for detection of SNP TSC0003872
ttaaaggtataty

SEQ ID NO: 18204 - DNA, 13 bp, Artificial Sequence
  Oligonucleotide for detection of SNP TSC0003872
ratatacctttaa

SEQ ID NO: 18205 - DNA, 13 bp, Artificial Sequence
  Oligonucleotide for detection of SNP TSC0003873
tgaatatgttatt

SEQ ID NO: 18206 - DNA, 13 bp, Artificial Sequence
  Oligonucleotide for detection of SNP TSC0003873
aataacatattca

SEQ ID NO: 18207 - DNA, 13 bp, Artificial Sequence
  Oligonucleotide for detection of SNP TSC0003873
tgaatacgttatt

SEQ ID NO: 18208 - DNA, 13 bp, Artificial Sequence
  Oligonucleotide for detection of SNP TSC0003873
aataacgtattca

SEQ ID NO: 18209 - DNA, 13 bp, Artificial Sequence
  Oligonucleotide for detection of SNP TSC0003873
agtaatatgttta

SEQ ID NO: 18210 - DNA, 13 bp, Artificial Sequence
  Oligonucleotide for detection of SNP TSC0003873
taaacatattact

SEQ ID NO: 18211 - DNA, 13 bp, Artificial Sequence
  Oligonucleotide for detection of SNP TSC0003873
agtaatgtgttta

SEQ ID NO: 18212 - DNA, 13 bp, Artificial Sequence
  Oligonucleotide for detection of SNP TSC0003873
taaacacattact

SEQ ID NO: 18213 - DNA, 13 bp, Artificial Sequence
  Oligonucleotide for detection of SNP TSC0003873
agtaacgtgttta

SEQ ID NO: 18214 - DNA, 13 bp, Artificial Sequence
  Oligonucleotide for detection of SNP TSC0003873
taaacacgttact

SEQ ID NO: 18215 - DNA, 13 bp, Artificial Sequence
  Oligonucleotide for detection of SNP TSC0003874
aagaagtggagat

SEQ ID NO: 18216 - DNA, 13 bp, Artificial Sequence
  Oligonucleotide for detection of SNP TSC0003874
atctccacttctt

SEQ ID NO: 18217 - DNA, 13 bp, Artificial Sequence
  Oligonucleotide for detection of SNP TSC0003874
aagaagcggagat

SEQ ID NO: 18218 - DNA, 13 bp, Artificial Sequence
  Oligonucleotide for detection of SNP TSC0003874
atctccgcttctt

SEQ ID NO: 18219 - DNA, 13 bp, Artificial Sequence
  Oligonucleotide for detection of SNP TSC0003875
gagaaagagggag

SEQ ID NO: 18220 - DNA, 13 bp, Artificial Sequence
  Oligonucleotide for detection of SNP TSC0003875
ctccctctttctc

SEQ ID NO: 18221 - DNA, 13 bp, Artificial Sequence
  Oligonucleotide for detection of SNP TSC0003875
gagaaaaagggag

SEQ ID NO: 18222 - DNA, 13 bp, Artificial Sequence
  Oligonucleotide for detection of SNP TSC0003875
ctccctttttctc

SEQ ID NO: 18223 - DNA, 13 bp, Artificial Sequence
  Oligonucleotide for detection of SNP TSC0003876
tttgatgttgtty

SEQ ID NO: 18224 - DNA, 13 bp, Artificial Sequence
  Oligonucleotide for detection of SNP TSC0003876
raacaacatcaaa

SEQ ID NO: 18225 - DNA, 13 bp, Artificial Sequence
  Oligonucleotide for detection of SNP TSC0003876
tttgatattgtty

SEQ ID NO: 18226 - DNA, 13 bp, Artificial Sequence
  Oligonucleotide for detection of SNP TSC0003876
raacaatatcaaa

SEQ ID NO: 18227 - DNA, 13 bp, Artificial Sequence
  Oligonucleotide for detection of SNP TSC0003876
tttgacgttgtty

SEQ ID NO: 18228 - DNA, 13 bp, Artificial Sequence
  Oligonucleotide for detection of SNP TSC0003876
raacaacgtcaaa

SEQ ID NO: 18229 - DNA, 13 bp, Artificial Sequence
  Oligonucleotide for detection of SNP TSC0003876
ggataatgttaga

SEQ ID NO: 18230 - DNA, 13 bp, Artificial Sequence
  Oligonucleotide for detection of SNP TSC0003876
tctaacattatcc

SEQ ID NO: 18231 - DNA, 13 bp, Artificial Sequence
  Oligonucleotide for detection of SNP TSC0003876
ggataacgttaga

SEQ ID NO: 18232 - DNA, 13 bp, Artificial Sequence
  Oligonucleotide for detection of SNP TSC0003876
tctaacgttatcc

SEQ ID NO: 18233 - DNA, 13 bp, Artificial Sequence
  Oligonucleotide for detection of SNP TSC0003877
tttttttagatag

SEQ ID NO: 18234 - DNA, 13 bp, Artificial Sequence
  Oligonucleotide for detection of SNP TSC0003877
ctatctaaaaaaa

SEQ ID NO: 18235 - DNA, 13 bp, Artificial Sequence
  Oligonucleotide for detection of SNP TSC0003877
ttttttaagatag

SEQ ID NO: 18236 - DNA, 13 bp, Artificial Sequence
  Oligonucleotide for detection of SNP TSC0003877
ctatcttaaaaaa

SEQ ID NO: 18237 - DNA, 13 bp, Artificial Sequence
  Oligonucleotide for detection of SNP TSC0003878
ttttaatggggay

SEQ ID NO: 18238 - DNA, 13 bp, Artificial Sequence
  Oligonucleotide for detection of SNP TSC0003878
rtccccattaaaa

SEQ ID NO: 18239 - DNA, 13 bp, Artificial Sequence
  Oligonucleotide for detection of SNP TSC0003878
ttttaacggggay

SEQ ID NO: 18240 - DNA, 13 bp, Artificial Sequence
  Oligonucleotide for detection of SNP TSC0003878
rtccccgttaaaa

SEQ ID NO: 18241 - DNA, 13 bp, Artificial Sequence
  Oligonucleotide for detection of SNP TSC0003878
gtttttgttagga

SEQ ID NO: 18242 - DNA, 13 bp, Artificial Sequence
  Oligonucleotide for detection of SNP TSC0003878
tcctaacaaaaac

SEQ ID NO: 18243 - DNA, 13 bp, Artificial Sequence
  Oligonucleotide for detection of SNP TSC0003878
gtttttattagga

SEQ ID NO: 18244 - DNA, 13 bp, Artificial Sequence
  Oligonucleotide for detection of SNP TSC0003878
tcctaataaaaac

SEQ ID NO: 18245 - DNA, 13 bp, Artificial Sequence
  Oligonucleotide for detection of SNP TSC0003878
gttttcgttagga

SEQ ID NO: 18246 - DNA, 13 bp, Artificial Sequence
  Oligonucleotide for detection of SNP TSC0003878
tcctaacgaaaac

SEQ ID NO: 18247 - DNA, 13 bp, Artificial Sequence
  Oligonucleotide for detection of SNP TSC0003879
agaaaataaaaaa

SEQ ID NO: 18248 - DNA, 13 bp, Artificial Sequence
  Oligonucleotide for detection of SNP TSC0003879
ttttttattttct

SEQ ID NO: 18249 - DNA, 13 bp, Artificial Sequence
  Oligonucleotide for detection of SNP TSC0003879
agaaaaaaaaaaa

SEQ ID NO: 18250 - DNA, 13 bp, Artificial Sequence
  Oligonucleotide for detection of SNP TSC0003879
tttttttttttct

SEQ ID NO: 18251 - DNA, 13 bp, Artificial Sequence
  Oligonucleotide for detection of SNP TSC0003880
tgtttttgatttg

SEQ ID NO: 18252 - DNA, 13 bp, Artificial Sequence
  Oligonucleotide for detection of SNP TSC0003880
caaatcaaaaaca

SEQ ID NO: 18253 - DNA, 13 bp, Artificial Sequence
  Oligonucleotide for detection of SNP TSC0003880
tgttttcgatttg

SEQ ID NO: 18254 - DNA, 13 bp, Artificial Sequence
  Oligonucleotide for detection of SNP TSC0003880
caaatcgaaaaca

SEQ ID NO: 18255 - DNA, 13 bp, Artificial Sequence
  Oligonucleotide for detection of SNP TSC0003880
taaattgaaggta

SEQ ID NO: 18256 - DNA, 13 bp, Artificial Sequence
  Oligonucleotide for detection of SNP TSC0003880
taccttcaattta

SEQ ID NO: 18257 - DNA, 13 bp, Artificial Sequence
  Oligonucleotide for detection of SNP TSC0003880
taaattaaaggta

SEQ ID NO: 18258 - DNA, 13 bp, Artificial Sequence
  Oligonucleotide for detection of SNP TSC0003880
tacctttaattta

SEQ ID NO: 18259 - DNA, 13 bp, Artificial Sequence
  Oligonucleotide for detection of SNP TSC0003880
taaatcgaaggta

SEQ ID NO: 18260 - DNA, 13 bp, Artificial Sequence
  Oligonucleotide for detection of SNP TSC0003880
taccttcgattta

SEQ ID NO: 18261 - DNA, 13 bp, Artificial Sequence
  Oligonucleotide for detection of SNP TSC0003882
ttattatgaaata

SEQ ID NO: 18262 - DNA, 13 bp, Artificial Sequence
  Oligonucleotide for detection of SNP TSC0003882
tatttcataataa

SEQ ID NO: 18263 - DNA, 13 bp, Artificial Sequence
  Oligonucleotide for detection of SNP TSC0003882
ttattacgaaata

SEQ ID NO: 18264 - DNA, 13 bp, Artificial Sequence
  Oligonucleotide for detection of SNP TSC0003882
tatttcgtaataa

SEQ ID NO: 18265 - DNA, 13 bp, Artificial Sequence
  Oligonucleotide for detection of SNP TSC0003882
tattttataatga

SEQ ID NO: 18266 - DNA, 13 bp, Artificial Sequence
  Oligonucleotide for detection of SNP TSC0003882
tcattataaaata

SEQ ID NO: 18267 - DNA, 13 bp, Artificial Sequence
  Oligonucleotide for detection of SNP TSC0003882
tattttgtaatga

SEQ ID NO: 18268 - DNA, 13 bp, Artificial Sequence
  Oligonucleotide for detection of SNP TSC0003882
tcattacaaaata

SEQ ID NO: 18269 - DNA, 13 bp, Artificial Sequence
  Oligonucleotide for detection of SNP TSC0003882
tatttcgtaatga

SEQ ID NO: 18270 - DNA, 13 bp, Artificial Sequence
  Oligonucleotide for detection of SNP TSC0003882
tcattacgaaata

SEQ ID NO: 18271 - DNA, 13 bp, Artificial Sequence
  Oligonucleotide for detection of SNP TSC0003883
gaaagaaagtaaa

SEQ ID NO: 18272 - DNA, 13 bp, Artificial Sequence
  Oligonucleotide for detection of SNP TSC0003883
tttactttctttc

SEQ ID NO: 18273 - DNA, 13 bp, Artificial Sequence
  Oligonucleotide for detection of SNP TSC0003883
gaaagagagtaaa

SEQ ID NO: 18274 - DNA, 13 bp, Artificial Sequence
  Oligonucleotide for detection of SNP TSC0003883
tttactctctttc

SEQ ID NO: 18275 - DNA, 13 bp, Artificial Sequence
  Oligonucleotide for detection of SNP TSC0003884
tttatgtgtatag

SEQ ID NO: 18276 - DNA, 13 bp, Artificial Sequence
  Oligonucleotide for detection of SNP TSC0003884
ctatacacataaa

SEQ ID NO: 18277 - DNA, 13 bp, Artificial Sequence
  Oligonucleotide for detection of SNP TSC0003884
tttatgggtatag

SEQ ID NO: 18278 - DNA, 13 bp, Artificial Sequence
  Oligonucleotide for detection of SNP TSC0003884
ctatacccataaa

SEQ ID NO: 18279 - DNA, 13 bp, Artificial Sequence
  Oligonucleotide for detection of SNP TSC0003884
tttacgtgtatag

SEQ ID NO: 18280 - DNA, 13 bp, Artificial Sequence
  Oligonucleotide for detection of SNP TSC0003884
ctatacacgtaaa

SEQ ID NO: 18281 - DNA, 13 bp, Artificial Sequence
  Oligonucleotide for detection of SNP TSC0003884
tttacgggtatag

SEQ ID NO: 18282 - DNA, 13 bp, Artificial Sequence
  Oligonucleotide for detection of SNP TSC0003884
ctatacccgtaaa

SEQ ID NO: 18283 - DNA, 13 bp, Artificial Sequence
  Oligonucleotide for detection of SNP TSC0003884
tttatgcgtatag

SEQ ID NO: 18284 - DNA, 13 bp, Artificial Sequence
  Oligonucleotide for detection of SNP TSC0003884
ctatacgcataaa

SEQ ID NO: 18285 - DNA, 13 bp, Artificial Sequence
  Oligonucleotide for detection of SNP TSC0003884
tttacgcgtatag

SEQ ID NO: 18286 - DNA, 13 bp, Artificial Sequence
  Oligonucleotide for detection of SNP TSC0003884
ctatacgcgtaaa

SEQ ID NO: 18287 - DNA, 13 bp, Artificial Sequence
  Oligonucleotide for detection of SNP TSC0003884
ttatgtgtgtgga

SEQ ID NO: 18288 - DNA, 13 bp, Artificial Sequence
  Oligonucleotide for detection of SNP TSC0003884
tccacacacataa

SEQ ID NO: 18289 - DNA, 13 bp, Artificial Sequence
  Oligonucleotide for detection of SNP TSC0003884
ttatgtttgtgga

SEQ ID NO: 18290 - DNA, 13 bp, Artificial Sequence
  Oligonucleotide for detection of SNP TSC0003884
tccacaaacataa

SEQ ID NO: 18291 - DNA, 13 bp, Artificial Sequence
  Oligonucleotide for detection of SNP TSC0003884
ttatgcgtgtgga

SEQ ID NO: 18292 - DNA, 13 bp, Artificial Sequence
  Oligonucleotide for detection of SNP TSC0003884
tccacacgcataa

SEQ ID NO: 18293 - DNA, 13 bp, Artificial Sequence
  Oligonucleotide for detection of SNP TSC0003884
ttatgttcgtgga

SEQ ID NO: 18294 - DNA, 13 bp, Artificial Sequence
  Oligonucleotide for detection of SNP TSC0003884
tccacgaacataa

SEQ ID NO: 18295 - DNA, 13 bp, Artificial Sequence
  Oligonucleotide for detection of SNP TSC0003884
ttatgtgcgtgga

SEQ ID NO: 18296 - DNA, 13 bp, Artificial Sequence
  Oligonucleotide for detection of SNP TSC0003884
tccacgcacataa

SEQ ID NO: 18297 - DNA, 13 bp, Artificial Sequence
  Oligonucleotide for detection of SNP TSC0003884
ttatgcgcgtgga

SEQ ID NO: 18298 - DNA, 13 bp, Artificial Sequence
  Oligonucleotide for detection of SNP TSC0003884
tccacgcgcataa

SEQ ID NO: 18299 - DNA, 13 bp, Artificial Sequence
  Oligonucleotide for detection of SNP TSC0003885
taaatgttatttt

SEQ ID NO: 18300 - DNA, 13 bp, Artificial Sequence
  Oligonucleotide for detection of SNP TSC0003885
aaaataacattta

SEQ ID NO: 18301 - DNA, 13 bp, Artificial Sequence
  Oligonucleotide for detection of SNP TSC0003885
taaatggtatttt

SEQ ID NO: 18302 - DNA, 13 bp, Artificial Sequence
  Oligonucleotide for detection of SNP TSC0003885
aaaataccattta

SEQ ID NO: 18303 - DNA, 13 bp, Artificial Sequence
  Oligonucleotide for detection of SNP TSC0003885
agaatgatatttg

SEQ ID NO: 18304 - DNA, 13 bp, Artificial Sequence
  Oligonucleotide for detection of SNP TSC0003885
caaatatcattct

SEQ ID NO: 18305 - DNA, 13 bp, Artificial Sequence
  Oligonucleotide for detection of SNP TSC0003885
agaatgttatttg

SEQ ID NO: 18306 - DNA, 13 bp, Artificial Sequence
  Oligonucleotide for detection of SNP TSC0003885
caaataacattct

SEQ ID NO: 18307 - DNA, 13 bp, Artificial Sequence
  Oligonucleotide for detection of SNP TSC0003886
ttgtttgttttaa

SEQ ID NO: 18308 - DNA, 13 bp, Artificial Sequence
  Oligonucleotide for detection of SNP TSC0003886
ttaaaacaaacaa

SEQ ID NO: 18309 - DNA, 13 bp, Artificial Sequence
  Oligonucleotide for detection of SNP TSC0003886
ttgtttattttaa

SEQ ID NO: 18310 - DNA, 13 bp, Artificial Sequence
  Oligonucleotide for detection of SNP TSC0003886
ttaaaataaacaa

SEQ ID NO: 18311 - DNA, 13 bp, Artificial Sequence
  Oligonucleotide for detection of SNP TSC0003886
ttgttcgttttaa

SEQ ID NO: 18312 - DNA, 13 bp, Artificial Sequence
  Oligonucleotide for detection of SNP TSC0003886
ttaaaacgaacaa

SEQ ID NO: 18313 - DNA, 13 bp, Artificial Sequence
  Oligonucleotide for detection of SNP TSC0003886
ttagagtgagtag

SEQ ID NO: 18314 - DNA, 13 bp, Artificial Sequence
  Oligonucleotide for detection of SNP TSC0003886
ctactcactctaa

SEQ ID NO: 18315 - DNA, 13 bp, Artificial Sequence
  Oligonucleotide for detection of SNP TSC0003886
ttagagcgagtag

SEQ ID NO: 18316 - DNA, 13 bp, Artificial Sequence
  Oligonucleotide for detection of SNP TSC0003886
ctactcgctctaa

SEQ ID NO: 18317 - DNA, 13 bp, Artificial Sequence
  Oligonucleotide for detection of SNP TSC0003887
gatataatataga

SEQ ID NO: 18318 - DNA, 13 bp, Artificial Sequence
  Oligonucleotide for detection of SNP TSC0003887
tctatattatatc

SEQ ID NO: 18319 - DNA, 13 bp, Artificial Sequence
  Oligonucleotide for detection of SNP TSC0003887
gatatagtataga

SEQ ID NO: 18320 - DNA, 13 bp, Artificial Sequence
  Oligonucleotide for detection of SNP TSC0003887
tctatactatatc

SEQ ID NO: 18321 - DNA, 13 bp, Artificial Sequence
  Oligonucleotide for detection of SNP TSC0003888
gtttttagtgttt

SEQ ID NO: 18322 - DNA, 13 bp, Artificial Sequence
  Oligonucleotide for detection of SNP TSC0003888
aaacactaaaaac

SEQ ID NO: 18323 - DNA, 13 bp, Artificial Sequence
  Oligonucleotide for detection of SNP TSC0003888
gtttttggtgttt

SEQ ID NO: 18324 - DNA, 13 bp, Artificial Sequence
  Oligonucleotide for detection of SNP TSC0003888
aaacaccaaaaac

SEQ ID NO: 18325 - DNA, 13 bp, Artificial Sequence
  Oligonucleotide for detection of SNP TSC0003888
gttttcggtgttt

SEQ ID NO: 18326 - DNA, 13 bp, Artificial Sequence
  Oligonucleotide for detection of SNP TSC0003888
aaacaccgaaaac

SEQ ID NO: 18327 - DNA, 13 bp, Artificial Sequence
  Oligonucleotide for detection of SNP TSC0003888
agatattgaagay

SEQ ID NO: 18328 - DNA, 13 bp, Artificial Sequence
  Oligonucleotide for detection of SNP TSC0003888
rtcttcaatatct

SEQ ID NO: 18329 - DNA, 13 bp, Artificial Sequence
  Oligonucleotide for detection of SNP TSC0003888
agatatcgaagay

SEQ ID NO: 18330 - DNA, 13 bp, Artificial Sequence
  Oligonucleotide for detection of SNP TSC0003888
rtcttcgatatct

SEQ ID NO: 18331 - DNA, 13 bp, Artificial Sequence
  Oligonucleotide for detection of SNP TSC0003889
gttttaggttaty

SEQ ID NO: 18332 - DNA, 13 bp, Artificial Sequence
  Oligonucleotide for detection of SNP TSC0003889
rataacctaaaac

SEQ ID NO: 18333 - DNA, 13 bp, Artificial Sequence
  Oligonucleotide for detection of SNP TSC0003889
gttttaagttaty

SEQ ID NO: 18334 - DNA, 13 bp, Artificial Sequence
  Oligonucleotide for detection of SNP TSC0003889
rataacttaaaac

SEQ ID NO: 18335 - DNA, 13 bp, Artificial Sequence
  Oligonucleotide for detection of SNP TSC0003890
tggggtaggaaaa

SEQ ID NO: 18336 - DNA, 13 bp, Artificial Sequence
  Oligonucleotide for detection of SNP TSC0003890
ttttcctacccca

SEQ ID NO: 18337 - DNA, 13 bp, Artificial Sequence
  Oligonucleotide for detection of SNP TSC0003890
tggggtgggaaaa

SEQ ID NO: 18338 - DNA, 13 bp, Artificial Sequence
  Oligonucleotide for detection of SNP TSC0003890
ttttcccacccca

SEQ ID NO: 18339 - DNA, 13 bp, Artificial Sequence
  Oligonucleotide for detection of SNP TSC0003890
tggggcgggaaaa

SEQ ID NO: 18340 - DNA, 13 bp, Artificial Sequence
  Oligonucleotide for detection of SNP TSC0003890
ttttcccgcccca

SEQ ID NO: 18341 - DNA, 13 bp, Artificial Sequence
  Oligonucleotide for detection of SNP TSC0003891
gagttaagattgy

SEQ ID NO: 18342 - DNA, 13 bp, Artificial Sequence
  Oligonucleotide for detection of SNP TSC0003891
rcaatcttaactc

SEQ ID NO: 18343 - DNA, 13 bp, Artificial Sequence
  Oligonucleotide for detection of SNP TSC0003891
gagttaggattgy

SEQ ID NO: 18344 - DNA, 13 bp, Artificial Sequence
  Oligonucleotide for detection of SNP TSC0003891
rcaatcctaactc

SEQ ID NO: 18345 - DNA, 13 bp, Artificial Sequence
  Oligonucleotide for detection of SNP TSC0003892
ggaaggaaggaag

SEQ ID NO: 18346 - DNA, 13 bp, Artificial Sequence
  Oligonucleotide for detection of SNP TSC0003892
cttccttccttcc

SEQ ID NO: 18347 - DNA, 13 bp, Artificial Sequence
  Oligonucleotide for detection of SNP TSC0003892
ggaagggaggaag

SEQ ID NO: 18348 - DNA, 13 bp, Artificial Sequence
  Oligonucleotide for detection of SNP TSC0003892
cttcctcccttcc

SEQ ID NO: 18349 - DNA, 13 bp, Artificial Sequence
  Oligonucleotide for detection of SNP TSC0003893
tgaatgtgtaaaa

SEQ ID NO: 18350 - DNA, 13 bp, Artificial Sequence
  Oligonucleotide for detection of SNP TSC0003893
ttttacacattca

SEQ ID NO: 18351 - DNA, 13 bp, Artificial Sequence
  Oligonucleotide for detection of SNP TSC0003893
tgaatgggtaaaa

SEQ ID NO: 18352 - DNA, 13 bp, Artificial Sequence
  Oligonucleotide for detection of SNP TSC0003893
ttttacccattca

SEQ ID NO: 18353 - DNA, 13 bp, Artificial Sequence
  Oligonucleotide for detection of SNP TSC0003893
ttttgtatattta

SEQ ID NO: 18354 - DNA, 13 bp, Artificial Sequence
  Oligonucleotide for detection of SNP TSC0003893
taaatatacaaaa

SEQ ID NO: 18355 - DNA, 13 bp, Artificial Sequence
  Oligonucleotide for detection of SNP TSC0003893
ttttgtttattta

SEQ ID NO: 18356 - DNA, 13 bp, Artificial Sequence
  Oligonucleotide for detection of SNP TSC0003893
taaataaacaaaa

SEQ ID NO: 18357 - DNA, 13 bp, Artificial Sequence
  Oligonucleotide for detection of SNP TSC0003894
tatttgagattaa

SEQ ID NO: 18358 - DNA, 13 bp, Artificial Sequence
  Oligonucleotide for detection of SNP TSC0003894
ttaatctcaaata

SEQ ID NO: 18359 - DNA, 13 bp, Artificial Sequence
  Oligonucleotide for detection of SNP TSC0003894
tatttgtgattaa

SEQ ID NO: 18360 - DNA, 13 bp, Artificial Sequence
  Oligonucleotide for detection of SNP TSC0003894
ttaatcacaaata

SEQ ID NO: 18361 - DNA, 13 bp, Artificial Sequence
  Oligonucleotide for detection of SNP TSC0003894
ttgattttaggtg

SEQ ID NO: 18362 - DNA, 13 bp, Artificial Sequence
  Oligonucleotide for detection of SNP TSC0003894
cacctaaaatcaa

SEQ ID NO: 18363 - DNA, 13 bp, Artificial Sequence
  Oligonucleotide for detection of SNP TSC0003894
ttgattataggtg

SEQ ID NO: 18364 - DNA, 13 bp, Artificial Sequence
  Oligonucleotide for detection of SNP TSC0003894
cacctataatcaa

SEQ ID NO: 18365 - DNA, 13 bp, Artificial Sequence
  Oligonucleotide for detection of SNP TSC0003896
ttggtgggaggag

SEQ ID NO: 18366 - DNA, 13 bp, Artificial Sequence
  Oligonucleotide for detection of SNP TSC0003896
ctcctcccaccaa

SEQ ID NO: 18367 - DNA, 13 bp, Artificial Sequence
  Oligonucleotide for detection of SNP TSC0003896
ttggtgagaggag

SEQ ID NO: 18368 - DNA, 13 bp, Artificial Sequence
  Oligonucleotide for detection of SNP TSC0003896
ctcctctcaccaa

SEQ ID NO: 18369 - DNA, 13 bp, Artificial Sequence
  Oligonucleotide for detection of SNP TSC0003896
tcggtgggaggag

SEQ ID NO: 18370 - DNA, 13 bp, Artificial Sequence
  Oligonucleotide for detection of SNP TSC0003896
ctcctcccaccga

SEQ ID NO: 18371 - DNA, 13 bp, Artificial Sequence
  Oligonucleotide for detection of SNP TSC0003896
tcggtgagaggag

SEQ ID NO: 18372 - DNA, 13 bp, Artificial Sequence
  Oligonucleotide for detection of SNP TSC0003896
ctcctctcaccga

SEQ ID NO: 18373 - DNA, 13 bp, Artificial Sequence
  Oligonucleotide for detection of SNP TSC0003896
ttggcgggaggag

SEQ ID NO: 18374 - DNA, 13 bp, Artificial Sequence
  Oligonucleotide for detection of SNP TSC0003896
ctcctcccgccaa

SEQ ID NO: 18375 - DNA, 13 bp, Artificial Sequence
  Oligonucleotide for detection of SNP TSC0003896
ttggcgagaggag

SEQ ID NO: 18376 - DNA, 13 bp, Artificial Sequence
  Oligonucleotide for detection of SNP TSC0003896
ctcctctcgccaa

SEQ ID NO: 18377 - DNA, 13 bp, Artificial Sequence
  Oligonucleotide for detection of SNP TSC0003896
tcggcgggaggag

SEQ ID NO: 18378 - DNA, 13 bp, Artificial Sequence
  Oligonucleotide for detection of SNP TSC0003896
ctcctcccgccga

SEQ ID NO: 18379 - DNA, 13 bp, Artificial Sequence
  Oligonucleotide for detection of SNP TSC0003896
tcggcgagaggag

SEQ ID NO: 18380 - DNA, 13 bp, Artificial Sequence
  Oligonucleotide for detection of SNP TSC0003896
ctcctctcgccga

SEQ ID NO: 18381 - DNA, 13 bp, Artificial Sequence
  Oligonucleotide for detection of SNP TSC0003897
tagaatggtttty

SEQ ID NO: 18382 - DNA, 13 bp, Artificial Sequence
  Oligonucleotide for detection of SNP TSC0003897
raaaaccattcta

SEQ ID NO: 18383 - DNA, 13 bp, Artificial Sequence
  Oligonucleotide for detection of SNP TSC0003897
tagaatagtttty

SEQ ID NO: 18384 - DNA, 13 bp, Artificial Sequence
  Oligonucleotide for detection of SNP TSC0003897
raaaactattcta

SEQ ID NO: 18385 - DNA, 13 bp, Artificial Sequence
  Oligonucleotide for detection of SNP TSC0003897
tagaacggtttty

SEQ ID NO: 18386 - DNA, 13 bp, Artificial Sequence
  Oligonucleotide for detection of SNP TSC0003897
raaaaccgttcta

SEQ ID NO: 18387 - DNA, 13 bp, Artificial Sequence
  Oligonucleotide for detection of SNP TSC0003897
gggagttgttttg

SEQ ID NO: 18388 - DNA, 13 bp, Artificial Sequence
  Oligonucleotide for detection of SNP TSC0003897
caaaacaactccc

SEQ ID NO: 18389 - DNA, 13 bp, Artificial Sequence
  Oligonucleotide for detection of SNP TSC0003897
gggagtcgttttg

SEQ ID NO: 18390 - DNA, 13 bp, Artificial Sequence
  Oligonucleotide for detection of SNP TSC0003897
caaaacgactccc

SEQ ID NO: 18391 - DNA, 13 bp, Artificial Sequence
  Oligonucleotide for detection of SNP TSC0003898
gttgttattttgg

SEQ ID NO: 18392 - DNA, 13 bp, Artificial Sequence
  Oligonucleotide for detection of SNP TSC0003898
ccaaaataacaac

SEQ ID NO: 18393 - DNA, 13 bp, Artificial Sequence
  Oligonucleotide for detection of SNP TSC0003898
gttgtttttttgg

SEQ ID NO: 18394 - DNA, 13 bp, Artificial Sequence
  Oligonucleotide for detection of SNP TSC0003898
ccaaaaaaacaac

SEQ ID NO: 18395 - DNA, 13 bp, Artificial Sequence
  Oligonucleotide for detection of SNP TSC0003898
ttaaggtaataay

SEQ ID NO: 18396 - DNA, 13 bp, Artificial Sequence
  Oligonucleotide for detection of SNP TSC0003898
rttattaccttaa

SEQ ID NO: 18397 - DNA, 13 bp, Artificial Sequence
  Oligonucleotide for detection of SNP TSC0003898
ttaaggaaataay

SEQ ID NO: 18398 - DNA, 13 bp, Artificial Sequence
  Oligonucleotide for detection of SNP TSC0003898
rttatttccttaa

SEQ ID NO: 18399 - DNA, 13 bp, Artificial Sequence
  Oligonucleotide for detection of SNP TSC0003899
tatgtttttatta

SEQ ID NO: 18400 - DNA, 13 bp, Artificial Sequence
  Oligonucleotide for detection of SNP TSC0003899
taataaaaacata

SEQ ID NO: 18401 - DNA, 13 bp, Artificial Sequence
  Oligonucleotide for detection of SNP TSC0003899
tatgttattatta

SEQ ID NO: 18402 - DNA, 13 bp, Artificial Sequence
  Oligonucleotide for detection of SNP TSC0003899
taataataacata

SEQ ID NO: 18403 - DNA, 13 bp, Artificial Sequence
  Oligonucleotide for detection of SNP TSC0003899
taatgagagtata

SEQ ID NO: 18404 - DNA, 13 bp, Artificial Sequence
  Oligonucleotide for detection of SNP TSC0003899
tatactctcatta

SEQ ID NO: 18405 - DNA, 13 bp, Artificial Sequence
  Oligonucleotide for detection of SNP TSC0003899
taatgatagtata

SEQ ID NO: 18406 - DNA, 13 bp, Artificial Sequence
  Oligonucleotide for detection of SNP TSC0003899
tatactatcatta

SEQ ID NO: 18407 - DNA, 13 bp, Artificial Sequence
  Oligonucleotide for detection of SNP TSC0003900
ggtttagagttgg

SEQ ID NO: 18408 - DNA, 13 bp, Artificial Sequence
  Oligonucleotide for detection of SNP TSC0003900
ccaactctaaacc

SEQ ID NO: 18409 - DNA, 13 bp, Artificial Sequence
  Oligonucleotide for detection of SNP TSC0003900
ggtttatagttgg

SEQ ID NO: 18410 - DNA, 13 bp, Artificial Sequence
  Oligonucleotide for detection of SNP TSC0003900
ccaactataaacc

SEQ ID NO: 18411 - DNA, 13 bp, Artificial Sequence
  Oligonucleotide for detection of SNP TSC0003900
ttagttttgagty

SEQ ID NO: 18412 - DNA, 13 bp, Artificial Sequence
  Oligonucleotide for detection of SNP TSC0003900
ractcaaaactaa

SEQ ID NO: 18413 - DNA, 13 bp, Artificial Sequence
  Oligonucleotide for detection of SNP TSC0003900
ttagttgtgagty

SEQ ID NO: 18414 - DNA, 13 bp, Artificial Sequence
  Oligonucleotide for detection of SNP TSC0003900
ractcacaactaa

SEQ ID NO: 18415 - DNA, 13 bp, Artificial Sequence
  Oligonucleotide for detection of SNP TSC0003901
tttatttgttatt

SEQ ID NO: 18416 - DNA, 13 bp, Artificial Sequence
  Oligonucleotide for detection of SNP TSC0003901
aataacaaataaa

SEQ ID NO: 18417 - DNA, 13 bp, Artificial Sequence
  Oligonucleotide for detection of SNP TSC0003901
tttattcgttatt

SEQ ID NO: 18418 - DNA, 13 bp, Artificial Sequence
  Oligonucleotide for detection of SNP TSC0003901
aataacgaataaa

SEQ ID NO: 18419 - DNA, 13 bp, Artificial Sequence
  Oligonucleotide for detection of SNP TSC0003901
agtaatgggtgaa

SEQ ID NO: 18420 - DNA, 13 bp, Artificial Sequence
  Oligonucleotide for detection of SNP TSC0003901
ttcacccattact

SEQ ID NO: 18421 - DNA, 13 bp, Artificial Sequence
  Oligonucleotide for detection of SNP TSC0003901
agtaataggtgaa

SEQ ID NO: 18422 - DNA, 13 bp, Artificial Sequence
  Oligonucleotide for detection of SNP TSC0003901
ttcacctattact

SEQ ID NO: 18423 - DNA, 13 bp, Artificial Sequence
  Oligonucleotide for detection of SNP TSC0003901
agtaacgggtgaa

SEQ ID NO: 18424 - DNA, 13 bp, Artificial Sequence
  Oligonucleotide for detection of SNP TSC0003901
ttcacccgttact

SEQ ID NO: 18425 - DNA, 13 bp, Artificial Sequence
  Oligonucleotide for detection of SNP TSC0003902
aatgttgtaatty

SEQ ID NO: 18426 - DNA, 13 bp, Artificial Sequence
  Oligonucleotide for detection of SNP TSC0003902
raattacaacatt

SEQ ID NO: 18427 - DNA, 13 bp, Artificial Sequence
  Oligonucleotide for detection of SNP TSC0003902
aatgttataatty

SEQ ID NO: 18428 - DNA, 13 bp, Artificial Sequence
  Oligonucleotide for detection of SNP TSC0003902
raattataacatt

SEQ ID NO: 18429 - DNA, 13 bp, Artificial Sequence
  Oligonucleotide for detection of SNP TSC0003902
aacgttgtaatty

SEQ ID NO: 18430 - DNA, 13 bp, Artificial Sequence
  Oligonucleotide for detection of SNP TSC0003902
raattacaacgtt

SEQ ID NO: 18431 - DNA, 13 bp, Artificial Sequence
  Oligonucleotide for detection of SNP TSC0003902
aacgttataatty

SEQ ID NO: 18432 - DNA, 13 bp, Artificial Sequence
  Oligonucleotide for detection of SNP TSC0003902
raattataacgtt

SEQ ID NO: 18433 - DNA, 13 bp, Artificial Sequence
  Oligonucleotide for detection of SNP TSC0003903
taaaattgaagty

SEQ ID NO: 18434 - DNA, 13 bp, Artificial Sequence
  Oligonucleotide for detection of SNP TSC0003903
racttcaatttta

SEQ ID NO: 18435 - DNA, 13 bp, Artificial Sequence
  Oligonucleotide for detection of SNP TSC0003903
taaaatcgaagty

SEQ ID NO: 18436 - DNA, 13 bp, Artificial Sequence
  Oligonucleotide for detection of SNP TSC0003903
racttcgatttta

SEQ ID NO: 18437 - DNA, 13 bp, Artificial Sequence
  Oligonucleotide for detection of SNP TSC0003903
gattttagttttg

SEQ ID NO: 18438 - DNA, 13 bp, Artificial Sequence
  Oligonucleotide for detection of SNP TSC0003903
caaaactaaaatc

SEQ ID NO: 18439 - DNA, 13 bp, Artificial Sequence
  Oligonucleotide for detection of SNP TSC0003903
gattttggttttg

SEQ ID NO: 18440 - DNA, 13 bp, Artificial Sequence
  Oligonucleotide for detection of SNP TSC0003903
caaaaccaaaatc

SEQ ID NO: 18441 - DNA, 13 bp, Artificial Sequence
  Oligonucleotide for detection of SNP TSC0003903
gatttcggttttg

SEQ ID NO: 18442 - DNA, 13 bp, Artificial Sequence
  Oligonucleotide for detection of SNP TSC0003903
caaaaccgaaatc

SEQ ID NO: 18443 - DNA, 13 bp, Artificial Sequence
  Oligonucleotide for detection of SNP TSC0003904
taatgtggtaata

SEQ ID NO: 18444 - DNA, 13 bp, Artificial Sequence
  Oligonucleotide for detection of SNP TSC0003904
tattaccacatta

SEQ ID NO: 18445 - DNA, 13 bp, Artificial Sequence
  Oligonucleotide for detection of SNP TSC0003904
taatgtagtaata

SEQ ID NO: 18446 - DNA, 13 bp, Artificial Sequence
  Oligonucleotide for detection of SNP TSC0003904
tattactacatta

SEQ ID NO: 18447 - DNA, 13 bp, Artificial Sequence
  Oligonucleotide for detection of SNP TSC0003904
taatgcggtaata

SEQ ID NO: 18448 - DNA, 13 bp, Artificial Sequence
  Oligonucleotide for detection of SNP TSC0003904
tattaccgcatta

SEQ ID NO: 18449 - DNA, 13 bp, Artificial Sequence
  Oligonucleotide for detection of SNP TSC0003904
tgttgttgtattg

SEQ ID NO: 18450 - DNA, 13 bp, Artificial Sequence
  Oligonucleotide for detection of SNP TSC0003904
caatacaacaaca

SEQ ID NO: 18451 - DNA, 13 bp, Artificial Sequence
  Oligonucleotide for detection of SNP TSC0003904
tgttgtcgtattg

SEQ ID NO: 18452 - DNA, 13 bp, Artificial Sequence
  Oligonucleotide for detection of SNP TSC0003904
caatacgacaaca

SEQ ID NO: 18453 - DNA, 13 bp, Artificial Sequence
  Oligonucleotide for detection of SNP TSC0003905
ttttttttgagat

SEQ ID NO: 18454 - DNA, 13 bp, Artificial Sequence
  Oligonucleotide for detection of SNP TSC0003905
atctcaaaaaaaa

SEQ ID NO: 18455 - DNA, 13 bp, Artificial Sequence
  Oligonucleotide for detection of SNP TSC0003905
ttttttgtgagat

SEQ ID NO: 18456 - DNA, 13 bp, Artificial Sequence
  Oligonucleotide for detection of SNP TSC0003905
atctcacaaaaaa

SEQ ID NO: 18457 - DNA, 13 bp, Artificial Sequence
  Oligonucleotide for detection of SNP TSC0003905
attttataaaaaa

SEQ ID NO: 18458 - DNA, 13 bp, Artificial Sequence
  Oligonucleotide for detection of SNP TSC0003905
ttttttataaaat

SEQ ID NO: 18459 - DNA, 13 bp, Artificial Sequence
  Oligonucleotide for detection of SNP TSC0003906
tgttttggtagtt

SEQ ID NO: 18460 - DNA, 13 bp, Artificial Sequence
  Oligonucleotide for detection of SNP TSC0003906
aactaccaaaaca

SEQ ID NO: 18461 - DNA, 13 bp, Artificial Sequence
  Oligonucleotide for detection of SNP TSC0003906
tgttttagtagtt

SEQ ID NO: 18462 - DNA, 13 bp, Artificial Sequence
  Oligonucleotide for detection of SNP TSC0003906
aactactaaaaca

SEQ ID NO: 18463 - DNA, 13 bp, Artificial Sequence
  Oligonucleotide for detection of SNP TSC0003906
cgttttggtagtt

SEQ ID NO: 18464 - DNA, 13 bp, Artificial Sequence
  Oligonucleotide for detection of SNP TSC0003906
aactaccaaaacg

SEQ ID NO: 18465 - DNA, 13 bp, Artificial Sequence
  Oligonucleotide for detection of SNP TSC0003906
cgttttagtagtt

SEQ ID NO: 18466 - DNA, 13 bp, Artificial Sequence
  Oligonucleotide for detection of SNP TSC0003906
aactactaaaacg

SEQ ID NO: 18467 - DNA, 13 bp, Artificial Sequence
  Oligonucleotide for detection of SNP TSC0003907
agatagtgtggtt

SEQ ID NO: 18468 - DNA, 13 bp, Artificial Sequence
  Oligonucleotide for detection of SNP TSC0003907
aaccacactatct

SEQ ID NO: 18469 - DNA, 13 bp, Artificial Sequence
  Oligonucleotide for detection of SNP TSC0003907
agatagcgtggtt

SEQ ID NO: 18470 - DNA, 13 bp, Artificial Sequence
  Oligonucleotide for detection of SNP TSC0003907
aaccacgctatct

SEQ ID NO: 18471 - DNA, 13 bp, Artificial Sequence
  Oligonucleotide for detection of SNP TSC0003907
agttatgttgttt

SEQ ID NO: 18472 - DNA, 13 bp, Artificial Sequence
  Oligonucleotide for detection of SNP TSC0003907
aaacaacataact

SEQ ID NO: 18473 - DNA, 13 bp, Artificial Sequence
  Oligonucleotide for detection of SNP TSC0003907
agttatattgttt

SEQ ID NO: 18474 - DNA, 13 bp, Artificial Sequence
  Oligonucleotide for detection of SNP TSC0003907
aaacaatataact

SEQ ID NO: 18475 - DNA, 13 bp, Artificial Sequence
  Oligonucleotide for detection of SNP TSC0003907
agttacgttgttt

SEQ ID NO: 18476 - DNA, 13 bp, Artificial Sequence
  Oligonucleotide for detection of SNP TSC0003907
aaacaacgtaact

SEQ ID NO: 18477 - DNA, 13 bp, Artificial Sequence
  Oligonucleotide for detection of SNP TSC0003908
tattattgtgaaa

SEQ ID NO: 18478 - DNA, 13 bp, Artificial Sequence
  Oligonucleotide for detection of SNP TSC0003908
tttcacaataata

SEQ ID NO: 18479 - DNA, 13 bp, Artificial Sequence
  Oligonucleotide for detection of SNP TSC0003908
tattatcgtgaaa

SEQ ID NO: 18480 - DNA, 13 bp, Artificial Sequence
  Oligonucleotide for detection of SNP TSC0003908
tttcacgataata

SEQ ID NO: 18481 - DNA, 13 bp, Artificial Sequence
  Oligonucleotide for detection of SNP TSC0003908
ttttatagtaatg

SEQ ID NO: 18482 - DNA, 13 bp, Artificial Sequence
  Oligonucleotide for detection of SNP TSC0003908
cattactataaaa

SEQ ID NO: 18483 - DNA, 13 bp, Artificial Sequence
  Oligonucleotide for detection of SNP TSC0003908
ttttatggtaatg

SEQ ID NO: 18484 - DNA, 13 bp, Artificial Sequence
  Oligonucleotide for detection of SNP TSC0003908
cattaccataaaa

SEQ ID NO: 18485 - DNA, 13 bp, Artificial Sequence
  Oligonucleotide for detection of SNP TSC0003908
ttttacggtaatg

SEQ ID NO: 18486 - DNA, 13 bp, Artificial Sequence
  Oligonucleotide for detection of SNP TSC0003908
cattaccgtaaaa

SEQ ID NO: 18487 - DNA, 13 bp, Artificial Sequence
  Oligonucleotide for detection of SNP TSC0003909
gaattatgtttga

SEQ ID NO: 18488 - DNA, 13 bp, Artificial Sequence
  Oligonucleotide for detection of SNP TSC0003909
tcaaacataattc

SEQ ID NO: 18489 - DNA, 13 bp, Artificial Sequence
  Oligonucleotide for detection of SNP TSC0003909
gaattacgtttga

SEQ ID NO: 18490 - DNA, 13 bp, Artificial Sequence
  Oligonucleotide for detection of SNP TSC0003909
tcaaacgtaattc

SEQ ID NO: 18491 - DNA, 13 bp, Artificial Sequence
  Oligonucleotide for detection of SNP TSC0003909
ttaggtatggtty

SEQ ID NO: 18492 - DNA, 13 bp, Artificial Sequence
  Oligonucleotide for detection of SNP TSC0003909
raaccatacctaa

SEQ ID NO: 18493 - DNA, 13 bp, Artificial Sequence
  Oligonucleotide for detection of SNP TSC0003909
ttaggtgtggtty

SEQ ID NO: 18494 - DNA, 13 bp, Artificial Sequence
  Oligonucleotide for detection of SNP TSC0003909
raaccacacctaa

SEQ ID NO: 18495 - DNA, 13 bp, Artificial Sequence
  Oligonucleotide for detection of SNP TSC0003909
ttaggcgtggtty

SEQ ID NO: 18496 - DNA, 13 bp, Artificial Sequence
  Oligonucleotide for detection of SNP TSC0003909
raaccacgcctaa

SEQ ID NO: 18497 - DNA, 13 bp, Artificial Sequence
  Oligonucleotide for detection of SNP TSC0003910
ttgtattttttat

SEQ ID NO: 18498 - DNA, 13 bp, Artificial Sequence
  Oligonucleotide for detection of SNP TSC0003910
ataaaaaatacaa

SEQ ID NO: 18499 - DNA, 13 bp, Artificial Sequence
  Oligonucleotide for detection of SNP TSC0003910
ttgtatattttat

SEQ ID NO: 18500 - DNA, 13 bp, Artificial Sequence
  Oligonucleotide for detection of SNP TSC0003910
ataaaatatacaa

SEQ ID NO: 18501 - DNA, 13 bp, Artificial Sequence
  Oligonucleotide for detection of SNP TSC0003910
atgaaaggtatag

SEQ ID NO: 18502 - DNA, 13 bp, Artificial Sequence
  Oligonucleotide for detection of SNP TSC0003910
ctatacctttcat

SEQ ID NO: 18503 - DNA, 13 bp, Artificial Sequence
  Oligonucleotide for detection of SNP TSC0003910
atgaaatgtatag

SEQ ID NO: 18504 - DNA, 13 bp, Artificial Sequence
  Oligonucleotide for detection of SNP TSC0003910
ctatacatttcat

SEQ ID NO: 18505 - DNA, 13 bp, Artificial Sequence
  Oligonucleotide for detection of SNP TSC0003912
aggtaatgtttta

SEQ ID NO: 18506 - DNA, 13 bp, Artificial Sequence
  Oligonucleotide for detection of SNP TSC0003912
taaaacattacct

SEQ ID NO: 18507 - DNA, 13 bp, Artificial Sequence
  Oligonucleotide for detection of SNP TSC0003912
aggtaaggtttta

SEQ ID NO: 18508 - DNA, 13 bp, Artificial Sequence
  Oligonucleotide for detection of SNP TSC0003912
taaaaccttacct

SEQ ID NO: 18509 - DNA, 13 bp, Artificial Sequence
  Oligonucleotide for detection of SNP TSC0003912
aggtaacgtttta

SEQ ID NO: 18510 - DNA, 13 bp, Artificial Sequence
  Oligonucleotide for detection of SNP TSC0003912
taaaacgttacct

SEQ ID NO: 18511 - DNA, 13 bp, Artificial Sequence
  Oligonucleotide for detection of SNP TSC0003912
taaaatgttgttt

SEQ ID NO: 18512 - DNA, 13 bp, Artificial Sequence
  Oligonucleotide for detection of SNP TSC0003912
aaacaacatttta

SEQ ID NO: 18513 - DNA, 13 bp, Artificial Sequence
  Oligonucleotide for detection of SNP TSC0003912
taaaattttgttt

SEQ ID NO: 18514 - DNA, 13 bp, Artificial Sequence
  Oligonucleotide for detection of SNP TSC0003912
aaacaaaatttta

SEQ ID NO: 18515 - DNA, 13 bp, Artificial Sequence
  Oligonucleotide for detection of SNP TSC0003912
taaaacgttgttt

SEQ ID NO: 18516 - DNA, 13 bp, Artificial Sequence
  Oligonucleotide for detection of SNP TSC0003912
aaacaacgtttta

SEQ ID NO: 18517 - DNA, 13 bp, Artificial Sequence
  Oligonucleotide for detection of SNP TSC0003913
tgatagagataag

SEQ ID NO: 18518 - DNA, 13 bp, Artificial Sequence
  Oligonucleotide for detection of SNP TSC0003913
cttatctctatca

SEQ ID NO: 18519 - DNA, 13 bp, Artificial Sequence
  Oligonucleotide for detection of SNP TSC0003913
tgatagggataag

SEQ ID NO: 18520 - DNA, 13 bp, Artificial Sequence
  Oligonucleotide for detection of SNP TSC0003913
cttatccctatca

SEQ ID NO: 18521 - DNA, 13 bp, Artificial Sequence
  Oligonucleotide for detection of SNP TSC0003914
tttttcgtttttg

SEQ ID NO: 18522 - DNA, 13 bp, Artificial Sequence
  Oligonucleotide for detection of SNP TSC0003914
caaaaacgaaaaa

SEQ ID NO: 18523 - DNA, 13 bp, Artificial Sequence
  Oligonucleotide for detection of SNP TSC0003914
tagggatgaaggg

SEQ ID NO: 18524 - DNA, 13 bp, Artificial Sequence
  Oligonucleotide for detection of SNP TSC0003914
cccttcatcccta

SEQ ID NO: 18525 - DNA, 13 bp, Artificial Sequence
  Oligonucleotide for detection of SNP TSC0003914
tagggacgaaggg

SEQ ID NO: 18526 - DNA, 13 bp, Artificial Sequence
  Oligonucleotide for detection of SNP TSC0003914
cccttcgtcccta

SEQ ID NO: 18527 - DNA, 13 bp, Artificial Sequence
  Oligonucleotide for detection of SNP TSC0003915
tttgttgattaty

SEQ ID NO: 18528 - DNA, 13 bp, Artificial Sequence
  Oligonucleotide for detection of SNP TSC0003915
rataatcaacaaa

SEQ ID NO: 18529 - DNA, 13 bp, Artificial Sequence
  Oligonucleotide for detection of SNP TSC0003915
tttgttaattaty

SEQ ID NO: 18530 - DNA, 13 bp, Artificial Sequence
  Oligonucleotide for detection of SNP TSC0003915
rataattaacaaa

SEQ ID NO: 18531 - DNA, 13 bp, Artificial Sequence
  Oligonucleotide for detection of SNP TSC0003915
ttcgttgattaty

SEQ ID NO: 18532 - DNA, 13 bp, Artificial Sequence
  Oligonucleotide for detection of SNP TSC0003915
rataatcaacgaa

SEQ ID NO: 18533 - DNA, 13 bp, Artificial Sequence
  Oligonucleotide for detection of SNP TSC0003915
ttcgttaattaty

SEQ ID NO: 18534 - DNA, 13 bp, Artificial Sequence
  Oligonucleotide for detection of SNP TSC0003915
rataattaacgaa

SEQ ID NO: 18535 - DNA, 13 bp, Artificial Sequence
  Oligonucleotide for detection of SNP TSC0003915
tttgtcgattaty

SEQ ID NO: 18536 - DNA, 13 bp, Artificial Sequence
  Oligonucleotide for detection of SNP TSC0003915
rataatcgacaaa

SEQ ID NO: 18537 - DNA, 13 bp, Artificial Sequence
  Oligonucleotide for detection of SNP TSC0003915
ttcgtcgattaty

SEQ ID NO: 18538 - DNA, 13 bp, Artificial Sequence
  Oligonucleotide for detection of SNP TSC0003915
rataatcgacgaa

SEQ ID NO: 18539 - DNA, 13 bp, Artificial Sequence
  Oligonucleotide for detection of SNP TSC0003915
ggtgattggtgga

SEQ ID NO: 18540 - DNA, 13 bp, Artificial Sequence
  Oligonucleotide for detection of SNP TSC0003915
tccaccaatcacc

SEQ ID NO: 18541 - DNA, 13 bp, Artificial Sequence
  Oligonucleotide for detection of SNP TSC0003915
ggtgatcggtgga

SEQ ID NO: 18542 - DNA, 13 bp, Artificial Sequence
  Oligonucleotide for detection of SNP TSC0003915
tccaccgatcacc

SEQ ID NO: 18543 - DNA, 13 bp, Artificial Sequence
  Oligonucleotide for detection of SNP TSC0003915
ggtgattggcgga

SEQ ID NO: 18544 - DNA, 13 bp, Artificial Sequence
  Oligonucleotide for detection of SNP TSC0003915
tccgccaatcacc

SEQ ID NO: 18545 - DNA, 13 bp, Artificial Sequence
  Oligonucleotide for detection of SNP TSC0003915
ggtgatcggcgga

SEQ ID NO: 18546 - DNA, 13 bp, Artificial Sequence
  Oligonucleotide for detection of SNP TSC0003915
tccgccgatcacc

SEQ ID NO: 18547 - DNA, 13 bp, Artificial Sequence
  Oligonucleotide for detection of SNP TSC0003916
aaaatagttgtgy

SEQ ID NO: 18548 - DNA, 13 bp, Artificial Sequence
  Oligonucleotide for detection of SNP TSC0003916
rcacaactatttt

SEQ ID NO: 18549 - DNA, 13 bp, Artificial Sequence
  Oligonucleotide for detection of SNP TSC0003916
aaaatatttgtgy

SEQ ID NO: 18550 - DNA, 13 bp, Artificial Sequence
  Oligonucleotide for detection of SNP TSC0003916
rcacaaatatttt

SEQ ID NO: 18551 - DNA, 13 bp, Artificial Sequence
  Oligonucleotide for detection of SNP TSC0003916
gtataattatttt

SEQ ID NO: 18552 - DNA, 13 bp, Artificial Sequence
  Oligonucleotide for detection of SNP TSC0003916
aaaataattatac

SEQ ID NO: 18553 - DNA, 13 bp, Artificial Sequence
  Oligonucleotide for detection of SNP TSC0003916
gtataagtatttt

SEQ ID NO: 18554 - DNA, 13 bp, Artificial Sequence
  Oligonucleotide for detection of SNP TSC0003916
aaaatacttatac

SEQ ID NO: 18555 - DNA, 13 bp, Artificial Sequence
  Oligonucleotide for detection of SNP TSC0003917
atgaaatgagatt

SEQ ID NO: 18556 - DNA, 13 bp, Artificial Sequence
  Oligonucleotide for detection of SNP TSC0003917
aatctcatttcat

SEQ ID NO: 18557 - DNA, 13 bp, Artificial Sequence
  Oligonucleotide for detection of SNP TSC0003917
atgaaacgagatt

SEQ ID NO: 18558 - DNA, 13 bp, Artificial Sequence
  Oligonucleotide for detection of SNP TSC0003917
aatctcgtttcat

SEQ ID NO: 18559 - DNA, 13 bp, Artificial Sequence
  Oligonucleotide for detection of SNP TSC0003918
tatttatattgat

SEQ ID NO: 18560 - DNA, 13 bp, Artificial Sequence
  Oligonucleotide for detection of SNP TSC0003918
atcaatataaata

SEQ ID NO: 18561 - DNA, 13 bp, Artificial Sequence
  Oligonucleotide for detection of SNP TSC0003918
tatttagattgat

SEQ ID NO: 18562 - DNA, 13 bp, Artificial Sequence
  Oligonucleotide for detection of SNP TSC0003918
atcaatctaaata

SEQ ID NO: 18563 - DNA, 13 bp, Artificial Sequence
  Oligonucleotide for detection of SNP TSC0003918
attaatgtgggtg

SEQ ID NO: 18564 - DNA, 13 bp, Artificial Sequence
  Oligonucleotide for detection of SNP TSC0003918
cacccacattaat

SEQ ID NO: 18565 - DNA, 13 bp, Artificial Sequence
  Oligonucleotide for detection of SNP TSC0003918
attaatttgggtg

SEQ ID NO: 18566 - DNA, 13 bp, Artificial Sequence
  Oligonucleotide for detection of SNP TSC0003918
cacccaaattaat

SEQ ID NO: 18567 - DNA, 13 bp, Artificial Sequence
  Oligonucleotide for detection of SNP TSC0003919
aagttaagtttty

SEQ ID NO: 18568 - DNA, 13 bp, Artificial Sequence
  Oligonucleotide for detection of SNP TSC0003919
raaaacttaactt

SEQ ID NO: 18569 - DNA, 13 bp, Artificial Sequence
  Oligonucleotide for detection of SNP TSC0003919
aagttatgtttty

SEQ ID NO: 18570 - DNA, 13 bp, Artificial Sequence
  Oligonucleotide for detection of SNP TSC0003919
raaaacataactt

SEQ ID NO: 18571 - DNA, 13 bp, Artificial Sequence
  Oligonucleotide for detection of SNP TSC0003919
aagttacgtttty

SEQ ID NO: 18572 - DNA, 13 bp, Artificial Sequence
  Oligonucleotide for detection of SNP TSC0003919
raaaacgtaactt

SEQ ID NO: 18573 - DNA, 13 bp, Artificial Sequence
  Oligonucleotide for detection of SNP TSC0003919
gggagtttgattt

SEQ ID NO: 18574 - DNA, 13 bp, Artificial Sequence
  Oligonucleotide for detection of SNP TSC0003919
aaatcaaactccc

SEQ ID NO: 18575 - DNA, 13 bp, Artificial Sequence
  Oligonucleotide for detection of SNP TSC0003919
gggagtgtgattt

SEQ ID NO: 18576 - DNA, 13 bp, Artificial Sequence
  Oligonucleotide for detection of SNP TSC0003919
aaatcacactccc

SEQ ID NO: 18577 - DNA, 13 bp, Artificial Sequence
  Oligonucleotide for detection of SNP TSC0003919
gggagcgtgattt

SEQ ID NO: 18578 - DNA, 13 bp, Artificial Sequence
  Oligonucleotide for detection of SNP TSC0003919
aaatcacgctccc

SEQ ID NO: 18579 - DNA, 13 bp, Artificial Sequence
  Oligonucleotide for detection of SNP TSC0003921
gtattttgggagg

SEQ ID NO: 18580 - DNA, 13 bp, Artificial Sequence
  Oligonucleotide for detection of SNP TSC0003921
cctcccaaaatac

SEQ ID NO: 18581 - DNA, 13 bp, Artificial Sequence
  Oligonucleotide for detection of SNP TSC0003921
gtatttcgggagg

SEQ ID NO: 18582 - DNA, 13 bp, Artificial Sequence
  Oligonucleotide for detection of SNP TSC0003921
cctcccgaaatac

SEQ ID NO: 18583 - DNA, 13 bp, Artificial Sequence
  Oligonucleotide for detection of SNP TSC0003921
ttttttaaagtgy

SEQ ID NO: 18584 - DNA, 13 bp, Artificial Sequence
  Oligonucleotide for detection of SNP TSC0003921
rcactttaaaaaa

SEQ ID NO: 18585 - DNA, 13 bp, Artificial Sequence
  Oligonucleotide for detection of SNP TSC0003921
ttttttgaagtgy

SEQ ID NO: 18586 - DNA, 13 bp, Artificial Sequence
  Oligonucleotide for detection of SNP TSC0003921
rcacttcaaaaaa

SEQ ID NO: 18587 - DNA, 13 bp, Artificial Sequence
  Oligonucleotide for detection of SNP TSC0003921
tttttcgaagtgy

SEQ ID NO: 18588 - DNA, 13 bp, Artificial Sequence
  Oligonucleotide for detection of SNP TSC0003921
rcacttcgaaaaa

SEQ ID NO: 18589 - DNA, 13 bp, Artificial Sequence
  Oligonucleotide for detection of SNP TSC0003922
ataaaggaattta

SEQ ID NO: 18590 - DNA, 13 bp, Artificial Sequence
  Oligonucleotide for detection of SNP TSC0003922
taaattcctttat

SEQ ID NO: 18591 - DNA, 13 bp, Artificial Sequence
  Oligonucleotide for detection of SNP TSC0003922
ataaagaaattta

SEQ ID NO: 18592 - DNA, 13 bp, Artificial Sequence
  Oligonucleotide for detection of SNP TSC0003922
taaatttctttat

SEQ ID NO: 18593 - DNA, 13 bp, Artificial Sequence
  Oligonucleotide for detection of SNP TSC0003923
taagggggggtaa

SEQ ID NO: 18594 - DNA, 13 bp, Artificial Sequence
  Oligonucleotide for detection of SNP TSC0003923
ttaccccccctta

SEQ ID NO: 18595 - DNA, 13 bp, Artificial Sequence
  Oligonucleotide for detection of SNP TSC0003923
taagggtgggtaa

SEQ ID NO: 18596 - DNA, 13 bp, Artificial Sequence
  Oligonucleotide for detection of SNP TSC0003923
ttacccaccctta

SEQ ID NO: 18597 - DNA, 13 bp, Artificial Sequence
  Oligonucleotide for detection of SNP TSC0003923
ttatttttttttg

SEQ ID NO: 18598 - DNA, 13 bp, Artificial Sequence
  Oligonucleotide for detection of SNP TSC0003923
caaaaaaaaataa

SEQ ID NO: 18599 - DNA, 13 bp, Artificial Sequence
  Oligonucleotide for detection of SNP TSC0003923
ttatttatttttg

SEQ ID NO: 18600 - DNA, 13 bp, Artificial Sequence
  Oligonucleotide for detection of SNP TSC0003923
caaaaataaataa

SEQ ID NO: 18601 - DNA, 13 bp, Artificial Sequence
  Oligonucleotide for detection of SNP TSC0003925
tttaatatgaatt

SEQ ID NO: 18602 - DNA, 13 bp, Artificial Sequence
  Oligonucleotide for detection of SNP TSC0003925
aattcatattaaa

SEQ ID NO: 18603 - DNA, 13 bp, Artificial Sequence
  Oligonucleotide for detection of SNP TSC0003925
tttaatgtgaatt

SEQ ID NO: 18604 - DNA, 13 bp, Artificial Sequence
  Oligonucleotide for detection of SNP TSC0003925
aattcacattaaa

SEQ ID NO: 18605 - DNA, 13 bp, Artificial Sequence
  Oligonucleotide for detection of SNP TSC0003925
tttaacgtgaatt

SEQ ID NO: 18606 - DNA, 13 bp, Artificial Sequence
  Oligonucleotide for detection of SNP TSC0003925
aattcacgttaaa

SEQ ID NO: 18607 - DNA, 13 bp, Artificial Sequence
  Oligonucleotide for detection of SNP TSC0003925
agtttatgttgag

SEQ ID NO: 18608 - DNA, 13 bp, Artificial Sequence
  Oligonucleotide for detection of SNP TSC0003925
ctcaacataaact

SEQ ID NO: 18609 - DNA, 13 bp, Artificial Sequence
  Oligonucleotide for detection of SNP TSC0003925
agtttacgttgag

SEQ ID NO: 18610 - DNA, 13 bp, Artificial Sequence
  Oligonucleotide for detection of SNP TSC0003925
ctcaacgtaaact

SEQ ID NO: 18611 - DNA, 13 bp, Artificial Sequence
  Oligonucleotide for detection of SNP TSC0003926
attatgggggtty

SEQ ID NO: 18612 - DNA, 13 bp, Artificial Sequence
  Oligonucleotide for detection of SNP TSC0003926
raacccccataat

SEQ ID NO: 18613 - DNA, 13 bp, Artificial Sequence
  Oligonucleotide for detection of SNP TSC0003926
attatgagggtty

SEQ ID NO: 18614 - DNA, 13 bp, Artificial Sequence
  Oligonucleotide for detection of SNP TSC0003926
raaccctcataat

SEQ ID NO: 18615 - DNA, 13 bp, Artificial Sequence
  Oligonucleotide for detection of SNP TSC0003927
gaaggtttttttt

SEQ ID NO: 18616 - DNA, 13 bp, Artificial Sequence
  Oligonucleotide for detection of SNP TSC0003927
aaaaaaaaccttc

SEQ ID NO: 18617 - DNA, 13 bp, Artificial Sequence
  Oligonucleotide for detection of SNP TSC0003927
gaaggtatttttt

SEQ ID NO: 18618 - DNA, 13 bp, Artificial Sequence
  Oligonucleotide for detection of SNP TSC0003927
aaaaaataccttc

SEQ ID NO: 18619 - DNA, 13 bp, Artificial Sequence
  Oligonucleotide for detection of SNP TSC0003927
aaaaaaagtttty

SEQ ID NO: 18620 - DNA, 13 bp, Artificial Sequence
  Oligonucleotide for detection of SNP TSC0003927
raaaacttttttt

SEQ ID NO: 18621 - DNA, 13 bp, Artificial Sequence
  Oligonucleotide for detection of SNP TSC0003927
aaaaaatgtttty

SEQ ID NO: 18622 - DNA, 13 bp, Artificial Sequence
  Oligonucleotide for detection of SNP TSC0003927
raaaacatttttt

SEQ ID NO: 18623 - DNA, 13 bp, Artificial Sequence
  Oligonucleotide for detection of SNP TSC0003928
tagttttgttagg

SEQ ID NO: 18624 - DNA, 13 bp, Artificial Sequence
  Oligonucleotide for detection of SNP TSC0003928
cctaacaaaacta

SEQ ID NO: 18625 - DNA, 13 bp, Artificial Sequence
  Oligonucleotide for detection of SNP TSC0003928
tagtttcgttagg

SEQ ID NO: 18626 - DNA, 13 bp, Artificial Sequence
  Oligonucleotide for detection of SNP TSC0003928
cctaacgaaacta

SEQ ID NO: 18627 - DNA, 13 bp, Artificial Sequence
  Oligonucleotide for detection of SNP TSC0003928
tttggtggggttg

SEQ ID NO: 18628 - DNA, 13 bp, Artificial Sequence
  Oligonucleotide for detection of SNP TSC0003928
caaccccaccaaa

SEQ ID NO: 18629 - DNA, 13 bp, Artificial Sequence
  Oligonucleotide for detection of SNP TSC0003928
tttggtagggttg

SEQ ID NO: 18630 - DNA, 13 bp, Artificial Sequence
  Oligonucleotide for detection of SNP TSC0003928
caaccctaccaaa

SEQ ID NO: 18631 - DNA, 13 bp, Artificial Sequence
  Oligonucleotide for detection of SNP TSC0003928
tttggcggggttg

SEQ ID NO: 18632 - DNA, 13 bp, Artificial Sequence
  Oligonucleotide for detection of SNP TSC0003928
caaccccgccaaa

SEQ ID NO: 18633 - DNA, 13 bp, Artificial Sequence
  Oligonucleotide for detection of SNP TSC0003929
tttttagtaatty

SEQ ID NO: 18634 - DNA, 13 bp, Artificial Sequence
  Oligonucleotide for detection of SNP TSC0003929
raattactaaaaa

SEQ ID NO: 18635 - DNA, 13 bp, Artificial Sequence
  Oligonucleotide for detection of SNP TSC0003929
tttttaataatty

SEQ ID NO: 18636 - DNA, 13 bp, Artificial Sequence
  Oligonucleotide for detection of SNP TSC0003929
raattattaaaaa

SEQ ID NO: 18637 - DNA, 13 bp, Artificial Sequence
  Oligonucleotide for detection of SNP TSC0003930
agatagtgttttt

SEQ ID NO: 18638 - DNA, 13 bp, Artificial Sequence
  Oligonucleotide for detection of SNP TSC0003930
aaaaacactatct

SEQ ID NO: 18639 - DNA, 13 bp, Artificial Sequence
  Oligonucleotide for detection of SNP TSC0003930
agatagggttttt

SEQ ID NO: 18640 - DNA, 13 bp, Artificial Sequence
  Oligonucleotide for detection of SNP TSC0003930
aaaaaccctatct

SEQ ID NO: 18641 - DNA, 13 bp, Artificial Sequence
  Oligonucleotide for detection of SNP TSC0003930
agaaatattgttt

SEQ ID NO: 18642 - DNA, 13 bp, Artificial Sequence
  Oligonucleotide for detection of SNP TSC0003930
aaacaatatttct

SEQ ID NO: 18643 - DNA, 13 bp, Artificial Sequence
  Oligonucleotide for detection of SNP TSC0003930
agaaattttgttt

SEQ ID NO: 18644 - DNA, 13 bp, Artificial Sequence
  Oligonucleotide for detection of SNP TSC0003930
aaacaaaatttct

SEQ ID NO: 18645 - DNA, 13 bp, Artificial Sequence
  Oligonucleotide for detection of SNP TSC0003931
ttaaaaggaataa

SEQ ID NO: 18646 - DNA, 13 bp, Artificial Sequence
  Oligonucleotide for detection of SNP TSC0003931
ttattccttttaa

SEQ ID NO: 18647 - DNA, 13 bp, Artificial Sequence
  Oligonucleotide for detection of SNP TSC0003931
ttaaaaagaataa

SEQ ID NO: 18648 - DNA, 13 bp, Artificial Sequence
  Oligonucleotide for detection of SNP TSC0003931
ttattctttttaa

SEQ ID NO: 18649 - DNA, 13 bp, Artificial Sequence
  Oligonucleotide for detection of SNP TSC0003932
aaaatatggtatt

SEQ ID NO: 18650 - DNA, 13 bp, Artificial Sequence
  Oligonucleotide for detection of SNP TSC0003932
aataccatatttt

SEQ ID NO: 18651 - DNA, 13 bp, Artificial Sequence
  Oligonucleotide for detection of SNP TSC0003932
aaaatacggtatt

SEQ ID NO: 18652 - DNA, 13 bp, Artificial Sequence
  Oligonucleotide for detection of SNP TSC0003932
aataccgtatttt

SEQ ID NO: 18653 - DNA, 13 bp, Artificial Sequence
  Oligonucleotide for detection of SNP TSC0003932
aatgttatgtttt

SEQ ID NO: 18654 - DNA, 13 bp, Artificial Sequence
  Oligonucleotide for detection of SNP TSC0003932
aaaacataacatt

SEQ ID NO: 18655 - DNA, 13 bp, Artificial Sequence
  Oligonucleotide for detection of SNP TSC0003932
aatgttgtgtttt

SEQ ID NO: 18656 - DNA, 13 bp, Artificial Sequence
  Oligonucleotide for detection of SNP TSC0003932
aaaacacaacatt

SEQ ID NO: 18657 - DNA, 13 bp, Artificial Sequence
  Oligonucleotide for detection of SNP TSC0003932
aatgtcgtgtttt

SEQ ID NO: 18658 - DNA, 13 bp, Artificial Sequence
  Oligonucleotide for detection of SNP TSC0003932
aaaacacgacatt

SEQ ID NO: 18659 - DNA, 13 bp, Artificial Sequence
  Oligonucleotide for detection of SNP TSC0003933
attataataattt

SEQ ID NO: 18660 - DNA, 13 bp, Artificial Sequence
  Oligonucleotide for detection of SNP TSC0003933
aaattattataat

SEQ ID NO: 18661 - DNA, 13 bp, Artificial Sequence
  Oligonucleotide for detection of SNP TSC0003933
attatagtaattt

SEQ ID NO: 18662 - DNA, 13 bp, Artificial Sequence
  Oligonucleotide for detection of SNP TSC0003933
aaattactataat

SEQ ID NO: 18663 - DNA, 13 bp, Artificial Sequence
  Oligonucleotide for detection of SNP TSC0003934
tatataggaggaa

SEQ ID NO: 18664 - DNA, 13 bp, Artificial Sequence
  Oligonucleotide for detection of SNP TSC0003934
ttcctcctatata

SEQ ID NO: 18665 - DNA, 13 bp, Artificial Sequence
  Oligonucleotide for detection of SNP TSC0003934
tatatatgaggaa

SEQ ID NO: 18666 - DNA, 13 bp, Artificial Sequence
  Oligonucleotide for detection of SNP TSC0003934
ttcctcatatata

SEQ ID NO: 18667 - DNA, 13 bp, Artificial Sequence
  Oligonucleotide for detection of SNP TSC0003935
tatttatagtagy

SEQ ID NO: 18668 - DNA, 13 bp, Artificial Sequence
  Oligonucleotide for detection of SNP TSC0003935
rctactataaata

SEQ ID NO: 18669 - DNA, 13 bp, Artificial Sequence
  Oligonucleotide for detection of SNP TSC0003935
tatttagagtagy

SEQ ID NO: 18670 - DNA, 13 bp, Artificial Sequence
  Oligonucleotide for detection of SNP TSC0003935
rctactctaaata

SEQ ID NO: 18671 - DNA, 13 bp, Artificial Sequence
  Oligonucleotide for detection of SNP TSC0003935
gttattttgaatg

SEQ ID NO: 18672 - DNA, 13 bp, Artificial Sequence
  Oligonucleotide for detection of SNP TSC0003935
cattcaaaataac

SEQ ID NO: 18673 - DNA, 13 bp, Artificial Sequence
  Oligonucleotide for detection of SNP TSC0003936
tttttaattgagy

SEQ ID NO: 18674 - DNA, 13 bp, Artificial Sequence
  Oligonucleotide for detection of SNP TSC0003936
rctcaattaaaaa

SEQ ID NO: 18675 - DNA, 13 bp, Artificial Sequence
  Oligonucleotide for detection of SNP TSC0003936
tttttagttgagy

SEQ ID NO: 18676 - DNA, 13 bp, Artificial Sequence
  Oligonucleotide for detection of SNP TSC0003936
rctcaactaaaaa

SEQ ID NO: 18677 - DNA, 13 bp, Artificial Sequence
  Oligonucleotide for detection of SNP TSC0003937
aggtggaggtaty

SEQ ID NO: 18678 - DNA, 13 bp, Artificial Sequence
  Oligonucleotide for detection of SNP TSC0003937
ratacctccacct

SEQ ID NO: 18679 - DNA, 13 bp, Artificial Sequence
  Oligonucleotide for detection of SNP TSC0003937
aggtgggggtaty

SEQ ID NO: 18680 - DNA, 13 bp, Artificial Sequence
  Oligonucleotide for detection of SNP TSC0003937
ratacccccacct

SEQ ID NO: 18681 - DNA, 13 bp, Artificial Sequence
  Oligonucleotide for detection of SNP TSC0003937
aggcggaggtaty

SEQ ID NO: 18682 - DNA, 13 bp, Artificial Sequence
  Oligonucleotide for detection of SNP TSC0003937
ratacctccgcct

SEQ ID NO: 18683 - DNA, 13 bp, Artificial Sequence
  Oligonucleotide for detection of SNP TSC0003937
aggcgggggtaty

SEQ ID NO: 18684 - DNA, 13 bp, Artificial Sequence
  Oligonucleotide for detection of SNP TSC0003937
ratacccccgcct

SEQ ID NO: 18685 - DNA, 13 bp, Artificial Sequence
  Oligonucleotide for detection of SNP TSC0003938
ggtggaggtatta

SEQ ID NO: 18686 - DNA, 13 bp, Artificial Sequence
  Oligonucleotide for detection of SNP TSC0003938
taatacctccacc

SEQ ID NO: 18687 - DNA, 13 bp, Artificial Sequence
  Oligonucleotide for detection of SNP TSC0003938
ggtggaagtatta

SEQ ID NO: 18688 - DNA, 13 bp, Artificial Sequence
  Oligonucleotide for detection of SNP TSC0003938
taatacttccacc

SEQ ID NO: 18689 - DNA, 13 bp, Artificial Sequence
  Oligonucleotide for detection of SNP TSC0003938
ggcggaggtatta

SEQ ID NO: 18690 - DNA, 13 bp, Artificial Sequence
  Oligonucleotide for detection of SNP TSC0003938
taatacctccgcc

SEQ ID NO: 18691 - DNA, 13 bp, Artificial Sequence
  Oligonucleotide for detection of SNP TSC0003938
ggcggaagtatta

SEQ ID NO: 18692 - DNA, 13 bp, Artificial Sequence
  Oligonucleotide for detection of SNP TSC0003938
taatacttccgcc

SEQ ID NO: 18693 - DNA, 13 bp, Artificial Sequence
  Oligonucleotide for detection of SNP TSC0003940
ggaggttgaggtg

SEQ ID NO: 18694 - DNA, 13 bp, Artificial Sequence
  Oligonucleotide for detection of SNP TSC0003940
cacctcaacctcc

SEQ ID NO: 18695 - DNA, 13 bp, Artificial Sequence
  Oligonucleotide for detection of SNP TSC0003940
ggaggttgaggcg

SEQ ID NO: 18696 - DNA, 13 bp, Artificial Sequence
  Oligonucleotide for detection of SNP TSC0003940
cgcctcaacctcc

SEQ ID NO: 18697 - DNA, 13 bp, Artificial Sequence
  Oligonucleotide for detection of SNP TSC0003940
ggaggtcgaggtg

SEQ ID NO: 18698 - DNA, 13 bp, Artificial Sequence
  Oligonucleotide for detection of SNP TSC0003940
cacctcgacctcc

SEQ ID NO: 18699 - DNA, 13 bp, Artificial Sequence
  Oligonucleotide for detection of SNP TSC0003940
ggaggtcgaggcg

SEQ ID NO: 18700 - DNA, 13 bp, Artificial Sequence
  Oligonucleotide for detection of SNP TSC0003940
cgcctcgacctcc

SEQ ID NO: 18701 - DNA, 13 bp, Artificial Sequence
  Oligonucleotide for detection of SNP TSC0003940
cgttttagtttty

SEQ ID NO: 18702 - DNA, 13 bp, Artificial Sequence
  Oligonucleotide for detection of SNP TSC0003940
raaaactaaaacg

SEQ ID NO: 18703 - DNA, 13 bp, Artificial Sequence
  Oligonucleotide for detection of SNP TSC0003940
cgttttggtttty

SEQ ID NO: 18704 - DNA, 13 bp, Artificial Sequence
  Oligonucleotide for detection of SNP TSC0003940
raaaaccaaaacg

SEQ ID NO: 18705 - DNA, 13 bp, Artificial Sequence
  Oligonucleotide for detection of SNP TSC0003940
cgtttcggtttty

SEQ ID NO: 18706 - DNA, 13 bp, Artificial Sequence
  Oligonucleotide for detection of SNP TSC0003940
raaaaccgaaacg

SEQ ID NO: 18707 - DNA, 13 bp, Artificial Sequence
  Oligonucleotide for detection of SNP TSC0003941
gtgttaggggttt

SEQ ID NO: 18708 - DNA, 13 bp, Artificial Sequence
  Oligonucleotide for detection of SNP TSC0003941
aaacccctaacac

SEQ ID NO: 18709 - DNA, 13 bp, Artificial Sequence
  Oligonucleotide for detection of SNP TSC0003941
gtgttatgggttt

SEQ ID NO: 18710 - DNA, 13 bp, Artificial Sequence
  Oligonucleotide for detection of SNP TSC0003941
aaacccataacac

SEQ ID NO: 18711 - DNA, 13 bp, Artificial Sequence
  Oligonucleotide for detection of SNP TSC0003941
gtgttacgggttt

SEQ ID NO: 18712 - DNA, 13 bp, Artificial Sequence
  Oligonucleotide for detection of SNP TSC0003941
aaacccgtaacac

SEQ ID NO: 18713 - DNA, 13 bp, Artificial Sequence
  Oligonucleotide for detection of SNP TSC0003941
aggtttttagtay

SEQ ID NO: 18714 - DNA, 13 bp, Artificial Sequence
  Oligonucleotide for detection of SNP TSC0003941
rtactaaaaacct

SEQ ID NO: 18715 - DNA, 13 bp, Artificial Sequence
  Oligonucleotide for detection of SNP TSC0003941
aggtttgtagtay

SEQ ID NO: 18716 - DNA, 13 bp, Artificial Sequence
  Oligonucleotide for detection of SNP TSC0003941
rtactacaaacct

SEQ ID NO: 18717 - DNA, 13 bp, Artificial Sequence
  Oligonucleotide for detection of SNP TSC0003941
aggttcgtagtay

SEQ ID NO: 18718 - DNA, 13 bp, Artificial Sequence
  Oligonucleotide for detection of SNP TSC0003941
rtactacgaacct

SEQ ID NO: 18719 - DNA, 13 bp, Artificial Sequence
  Oligonucleotide for detection of SNP TSC0003942
aaaaatataatgt

SEQ ID NO: 18720 - DNA, 13 bp, Artificial Sequence
  Oligonucleotide for detection of SNP TSC0003942
acattatattttt

SEQ ID NO: 18721 - DNA, 13 bp, Artificial Sequence
  Oligonucleotide for detection of SNP TSC0003942
aaaaatttaatgt

SEQ ID NO: 18722 - DNA, 13 bp, Artificial Sequence
  Oligonucleotide for detection of SNP TSC0003942
acattaaattttt

SEQ ID NO: 18723 - DNA, 13 bp, Artificial Sequence
  Oligonucleotide for detection of SNP TSC0003942
atattatattttt

SEQ ID NO: 18724 - DNA, 13 bp, Artificial Sequence
  Oligonucleotide for detection of SNP TSC0003942
aaaaatataatat

SEQ ID NO: 18725 - DNA, 13 bp, Artificial Sequence
  Oligonucleotide for detection of SNP TSC0003942
atattaaattttt

SEQ ID NO: 18726 - DNA, 13 bp, Artificial Sequence
  Oligonucleotide for detection of SNP TSC0003942
aaaaatttaatat

SEQ ID NO: 18727 - DNA, 13 bp, Artificial Sequence
  Oligonucleotide for detection of SNP TSC0003943
tttttttggtatt

SEQ ID NO: 18728 - DNA, 13 bp, Artificial Sequence
  Oligonucleotide for detection of SNP TSC0003943
aataccaaaaaaa

SEQ ID NO: 18729 - DNA, 13 bp, Artificial Sequence
  Oligonucleotide for detection of SNP TSC0003943
ttttttcggtatt

SEQ ID NO: 18730 - DNA, 13 bp, Artificial Sequence
  Oligonucleotide for detection of SNP TSC0003943
aataccgaaaaaa

SEQ ID NO: 18731 - DNA, 13 bp, Artificial Sequence
  Oligonucleotide for detection of SNP TSC0003943
agtattaggaaga

SEQ ID NO: 18732 - DNA, 13 bp, Artificial Sequence
  Oligonucleotide for detection of SNP TSC0003943
tcttcctaatact

SEQ ID NO: 18733 - DNA, 13 bp, Artificial Sequence
  Oligonucleotide for detection of SNP TSC0003943
agtattgggaaga

SEQ ID NO: 18734 - DNA, 13 bp, Artificial Sequence
  Oligonucleotide for detection of SNP TSC0003943
tcttcccaatact

SEQ ID NO: 18735 - DNA, 13 bp, Artificial Sequence
  Oligonucleotide for detection of SNP TSC0003943
agtatcgggaaga

SEQ ID NO: 18736 - DNA, 13 bp, Artificial Sequence
  Oligonucleotide for detection of SNP TSC0003943
tcttcccgatact

SEQ ID NO: 18737 - DNA, 13 bp, Artificial Sequence
  Oligonucleotide for detection of SNP TSC0003944
agttataggttga

SEQ ID NO: 18738 - DNA, 13 bp, Artificial Sequence
  Oligonucleotide for detection of SNP TSC0003944
tcaacctataact

SEQ ID NO: 18739 - DNA, 13 bp, Artificial Sequence
  Oligonucleotide for detection of SNP TSC0003944
agttatgggttga

SEQ ID NO: 18740 - DNA, 13 bp, Artificial Sequence
  Oligonucleotide for detection of SNP TSC0003944
tcaacccataact

SEQ ID NO: 18741 - DNA, 13 bp, Artificial Sequence
  Oligonucleotide for detection of SNP TSC0003944
agttacgggttga

SEQ ID NO: 18742 - DNA, 13 bp, Artificial Sequence
  Oligonucleotide for detection of SNP TSC0003944
tcaacccgtaact

SEQ ID NO: 18743 - DNA, 13 bp, Artificial Sequence
  Oligonucleotide for detection of SNP TSC0003944
ttagtttgtggtt

SEQ ID NO: 18744 - DNA, 13 bp, Artificial Sequence
  Oligonucleotide for detection of SNP TSC0003944
aaccacaaactaa

SEQ ID NO: 18745 - DNA, 13 bp, Artificial Sequence
  Oligonucleotide for detection of SNP TSC0003944
ttagttcgtggtt

SEQ ID NO: 18746 - DNA, 13 bp, Artificial Sequence
  Oligonucleotide for detection of SNP TSC0003944
aaccacgaactaa

SEQ ID NO: 18747 - DNA, 13 bp, Artificial Sequence
  Oligonucleotide for detection of SNP TSC0003945
ttggttattttgg

SEQ ID NO: 18748 - DNA, 13 bp, Artificial Sequence
  Oligonucleotide for detection of SNP TSC0003945
ccaaaataaccaa

SEQ ID NO: 18749 - DNA, 13 bp, Artificial Sequence
  Oligonucleotide for detection of SNP TSC0003945
ttggttgttttgg

SEQ ID NO: 18750 - DNA, 13 bp, Artificial Sequence
  Oligonucleotide for detection of SNP TSC0003945
ccaaaacaaccaa

SEQ ID NO: 18751 - DNA, 13 bp, Artificial Sequence
  Oligonucleotide for detection of SNP TSC0003946
aaggttatttttt

SEQ ID NO: 18752 - DNA, 13 bp, Artificial Sequence
  Oligonucleotide for detection of SNP TSC0003946
aaaaaataacctt

SEQ ID NO: 18753 - DNA, 13 bp, Artificial Sequence
  Oligonucleotide for detection of SNP TSC0003946
aaaaaaaagtttt

SEQ ID NO: 18754 - DNA, 13 bp, Artificial Sequence
  Oligonucleotide for detection of SNP TSC0003946
aaaactttttttt

SEQ ID NO: 18755 - DNA, 13 bp, Artificial Sequence
  Oligonucleotide for detection of SNP TSC0003946
aaaaaatagtttt

SEQ ID NO: 18756 - DNA, 13 bp, Artificial Sequence
  Oligonucleotide for detection of SNP TSC0003946
aaaactatttttt

SEQ ID NO: 18757 - DNA, 13 bp, Artificial Sequence
  Oligonucleotide for detection of SNP TSC0003947
atatatatgtgtg

SEQ ID NO: 18758 - DNA, 13 bp, Artificial Sequence
  Oligonucleotide for detection of SNP TSC0003947
cacacatatatat

SEQ ID NO: 18759 - DNA, 13 bp, Artificial Sequence
  Oligonucleotide for detection of SNP TSC0003947
atatatgtgtgtg

SEQ ID NO: 18760 - DNA, 13 bp, Artificial Sequence
  Oligonucleotide for detection of SNP TSC0003947
cacacacatatat

SEQ ID NO: 18761 - DNA, 13 bp, Artificial Sequence
  Oligonucleotide for detection of SNP TSC0003948
aaaaaaagatttt

SEQ ID NO: 18762 - DNA, 13 bp, Artificial Sequence
  Oligonucleotide for detection of SNP TSC0003948
aaaatcttttttt

SEQ ID NO: 18763 - DNA, 13 bp, Artificial Sequence
  Oligonucleotide for detection of SNP TSC0003948
aaaaaaggatttt

SEQ ID NO: 18764 - DNA, 13 bp, Artificial Sequence
  Oligonucleotide for detection of SNP TSC0003948
aaaatcctttttt

SEQ ID NO: 18765 - DNA, 13 bp, Artificial Sequence
  Oligonucleotide for detection of SNP TSC0003949
ttgagggaaatag

SEQ ID NO: 18766 - DNA, 13 bp, Artificial Sequence
  Oligonucleotide for detection of SNP TSC0003949
ctatttccctcaa

SEQ ID NO: 18767 - DNA, 13 bp, Artificial Sequence
  Oligonucleotide for detection of SNP TSC0003949
ttgaggaaaatag

SEQ ID NO: 18768 - DNA, 13 bp, Artificial Sequence
  Oligonucleotide for detection of SNP TSC0003949
ctattttcctcaa

SEQ ID NO: 18769 - DNA, 13 bp, Artificial Sequence
  Oligonucleotide for detection of SNP TSC0003950
tgagggaaataga

SEQ ID NO: 18770 - DNA, 13 bp, Artificial Sequence
  Oligonucleotide for detection of SNP TSC0003950
tctatttccctca

SEQ ID NO: 18771 - DNA, 13 bp, Artificial Sequence
  Oligonucleotide for detection of SNP TSC0003950
tgagggtaataga

SEQ ID NO: 18772 - DNA, 13 bp, Artificial Sequence
  Oligonucleotide for detection of SNP TSC0003950
tctattaccctca

SEQ ID NO: 18773 - DNA, 13 bp, Artificial Sequence
  Oligonucleotide for detection of SNP TSC0003950
tttatttttttta

SEQ ID NO: 18774 - DNA, 13 bp, Artificial Sequence
  Oligonucleotide for detection of SNP TSC0003950
taaaaaaaataaa

SEQ ID NO: 18775 - DNA, 13 bp, Artificial Sequence
  Oligonucleotide for detection of SNP TSC0003950
tttattgttttta

SEQ ID NO: 18776 - DNA, 13 bp, Artificial Sequence
  Oligonucleotide for detection of SNP TSC0003950
taaaaacaataaa

SEQ ID NO: 18777 - DNA, 13 bp, Artificial Sequence
  Oligonucleotide for detection of SNP TSC0003951
agaatagtgttta

SEQ ID NO: 18778 - DNA, 13 bp, Artificial Sequence
  Oligonucleotide for detection of SNP TSC0003951
taaacactattct

SEQ ID NO: 18779 - DNA, 13 bp, Artificial Sequence
  Oligonucleotide for detection of SNP TSC0003951
agaatattgttta

SEQ ID NO: 18780 - DNA, 13 bp, Artificial Sequence
  Oligonucleotide for detection of SNP TSC0003951
taaacaatattct

SEQ ID NO: 18781 - DNA, 13 bp, Artificial Sequence
  Oligonucleotide for detection of SNP TSC0003951
taggtattatttt

SEQ ID NO: 18782 - DNA, 13 bp, Artificial Sequence
  Oligonucleotide for detection of SNP TSC0003951
aaaataataccta

SEQ ID NO: 18783 - DNA, 13 bp, Artificial Sequence
  Oligonucleotide for detection of SNP TSC0003951
taggtagtatttt

SEQ ID NO: 18784 - DNA, 13 bp, Artificial Sequence
  Oligonucleotide for detection of SNP TSC0003951
aaaatactaccta

SEQ ID NO: 18785 - DNA, 13 bp, Artificial Sequence
  Oligonucleotide for detection of SNP TSC0003952
ggagtagtattgy

SEQ ID NO: 18786 - DNA, 13 bp, Artificial Sequence
  Oligonucleotide for detection of SNP TSC0003952
rcaatactactcc

SEQ ID NO: 18787 - DNA, 13 bp, Artificial Sequence
  Oligonucleotide for detection of SNP TSC0003952
ggagtaatattgy

SEQ ID NO: 18788 - DNA, 13 bp, Artificial Sequence
  Oligonucleotide for detection of SNP TSC0003952
rcaatattactcc

SEQ ID NO: 18789 - DNA, 13 bp, Artificial Sequence
  Oligonucleotide for detection of SNP TSC0003953
atatttattgtta

SEQ ID NO: 18790 - DNA, 13 bp, Artificial Sequence
  Oligonucleotide for detection of SNP TSC0003953
taacaataaatat

SEQ ID NO: 18791 - DNA, 13 bp, Artificial Sequence
  Oligonucleotide for detection of SNP TSC0003953
atattttttgtta

SEQ ID NO: 18792 - DNA, 13 bp, Artificial Sequence
  Oligonucleotide for detection of SNP TSC0003953
taacaaaaaatat

SEQ ID NO: 18793 - DNA, 13 bp, Artificial Sequence
  Oligonucleotide for detection of SNP TSC0003953
tagtagtgggtat

SEQ ID NO: 18794 - DNA, 13 bp, Artificial Sequence
  Oligonucleotide for detection of SNP TSC0003953
atacccactacta

SEQ ID NO: 18795 - DNA, 13 bp, Artificial Sequence
  Oligonucleotide for detection of SNP TSC0003953
tagtagggggtat

SEQ ID NO: 18796 - DNA, 13 bp, Artificial Sequence
  Oligonucleotide for detection of SNP TSC0003953
ataccccctacta

SEQ ID NO: 18797 - DNA, 13 bp, Artificial Sequence
  Oligonucleotide for detection of SNP TSC0003954
aaatttgtaagga

SEQ ID NO: 18798 - DNA, 13 bp, Artificial Sequence
  Oligonucleotide for detection of SNP TSC0003954
tccttacaaattt

SEQ ID NO: 18799 - DNA, 13 bp, Artificial Sequence
  Oligonucleotide for detection of SNP TSC0003954
aaatttttaagga

SEQ ID NO: 18800 - DNA, 13 bp, Artificial Sequence
  Oligonucleotide for detection of SNP TSC0003954
tccttaaaaattt

SEQ ID NO: 18801 - DNA, 13 bp, Artificial Sequence
  Oligonucleotide for detection of SNP TSC0003954
tttttgtaagttt

SEQ ID NO: 18802 - DNA, 13 bp, Artificial Sequence
  Oligonucleotide for detection of SNP TSC0003954
aaacttacaaaaa

SEQ ID NO: 18803 - DNA, 13 bp, Artificial Sequence
  Oligonucleotide for detection of SNP TSC0003954
tttttgaaagttt

SEQ ID NO: 18804 - DNA, 13 bp, Artificial Sequence
  Oligonucleotide for detection of SNP TSC0003954
aaactttcaaaaa

SEQ ID NO: 18805 - DNA, 13 bp, Artificial Sequence
  Oligonucleotide for detection of SNP TSC0003955
tttattgggggga

SEQ ID NO: 18806 - DNA, 13 bp, Artificial Sequence
  Oligonucleotide for detection of SNP TSC0003955
tccccccaataaa

SEQ ID NO: 18807 - DNA, 13 bp, Artificial Sequence
  Oligonucleotide for detection of SNP TSC0003955
tttattaggggga

SEQ ID NO: 18808 - DNA, 13 bp, Artificial Sequence
  Oligonucleotide for detection of SNP TSC0003955
tccccctaataaa

SEQ ID NO: 18809-18818 - skipped (10 entries)

SEQ ID NO: 18819 - DNA, 13 bp, Artificial Sequence
  Oligonucleotide for detection of SNP TSC0003957
ggatatgggattt

SEQ ID NO: 18820 - DNA, 13 bp, Artificial Sequence
  Oligonucleotide for detection of SNP TSC0003957
aaatcccatatcc

SEQ ID NO: 18821 - DNA, 13 bp, Artificial Sequence
  Oligonucleotide for detection of SNP TSC0003957
ggatataggattt

SEQ ID NO: 18822 - DNA, 13 bp, Artificial Sequence
  Oligonucleotide for detection of SNP TSC0003957
aaatcctatatcc

SEQ ID NO: 18823 - DNA, 13 bp, Artificial Sequence
  Oligonucleotide for detection of SNP TSC0003958
gtagaagtagtty

SEQ ID NO: 18824 - DNA, 13 bp, Artificial Sequence
  Oligonucleotide for detection of SNP TSC0003958
raactacttctac

SEQ ID NO: 18825 - DNA, 13 bp, Artificial Sequence
  Oligonucleotide for detection of SNP TSC0003958
gtagaattagtty

SEQ ID NO: 18826 - DNA, 13 bp, Artificial Sequence
  Oligonucleotide for detection of SNP TSC0003958
raactaattctac

SEQ ID NO: 18827 - DNA, 13 bp, Artificial Sequence
  Oligonucleotide for detection of SNP TSC0003958
gagttatttttay

SEQ ID NO: 18828 - DNA, 13 bp, Artificial Sequence
  Oligonucleotide for detection of SNP TSC0003958
rtaaaaataactc

SEQ ID NO: 18829 - DNA, 13 bp, Artificial Sequence
  Oligonucleotide for detection of SNP TSC0003958
gagttagttttay

SEQ ID NO: 18830 - DNA, 13 bp, Artificial Sequence
  Oligonucleotide for detection of SNP TSC0003958
rtaaaactaactc

SEQ ID NO: 18831 - DNA, 13 bp, Artificial Sequence
  Oligonucleotide for detection of SNP TSC0003959
agaagtagagaga

SEQ ID NO: 18832 - DNA, 13 bp, Artificial Sequence
  Oligonucleotide for detection of SNP TSC0003959
tctctctacttct

SEQ ID NO: 18833 - DNA, 13 bp, Artificial Sequence
  Oligonucleotide for detection of SNP TSC0003959
agaagtggagaga

SEQ ID NO: 18834 - DNA, 13 bp, Artificial Sequence
  Oligonucleotide for detection of SNP TSC0003959
tctctccacttct

SEQ ID NO: 18835 - DNA, 13 bp, Artificial Sequence
  Oligonucleotide for detection of SNP TSC0003959
agaagcggagaga

SEQ ID NO: 18836 - DNA, 13 bp, Artificial Sequence
  Oligonucleotide for detection of SNP TSC0003959
tctctccgcttct

SEQ ID NO: 18837 - DNA, 13 bp, Artificial Sequence
  Oligonucleotide for detection of SNP TSC0003959
ttttttcgttttt

SEQ ID NO: 18838 - DNA, 13 bp, Artificial Sequence
  Oligonucleotide for detection of SNP TSC0003959
aaaaacgaaaaaa

SEQ ID NO: 18839 - DNA, 13 bp, Artificial Sequence
  Oligonucleotide for detection of SNP TSC0003960
aaatgtgatgaty

SEQ ID NO: 18840 - DNA, 13 bp, Artificial Sequence
  Oligonucleotide for detection of SNP TSC0003960
ratcatcacattt

SEQ ID NO: 18841 - DNA, 13 bp, Artificial Sequence
  Oligonucleotide for detection of SNP TSC0003960
aaatgtaatgaty

SEQ ID NO: 18842 - DNA, 13 bp, Artificial Sequence
  Oligonucleotide for detection of SNP TSC0003960
ratcattacattt

SEQ ID NO: 18843 - DNA, 13 bp, Artificial Sequence
  Oligonucleotide for detection of SNP TSC0003960
aaatgcgatgaty

SEQ ID NO: 18844 - DNA, 13 bp, Artificial Sequence
  Oligonucleotide for detection of SNP TSC0003960
ratcatcgcattt

SEQ ID NO: 18845 - DNA, 13 bp, Artificial Sequence
  Oligonucleotide for detection of SNP TSC0003960
ggttattgtattt

SEQ ID NO: 18846 - DNA, 13 bp, Artificial Sequence
  Oligonucleotide for detection of SNP TSC0003960
aaatacaataacc

SEQ ID NO: 18847 - DNA, 13 bp, Artificial Sequence
  Oligonucleotide for detection of SNP TSC0003960
ggttatcgtattt

SEQ ID NO: 18848 - DNA, 13 bp, Artificial Sequence
  Oligonucleotide for detection of SNP TSC0003960
aaatacgataacc

SEQ ID NO: 18849 - DNA, 13 bp, Artificial Sequence
  Oligonucleotide for detection of SNP TSC0003961
ttattttatttag

SEQ ID NO: 18850 - DNA, 13 bp, Artificial Sequence
  Oligonucleotide for detection of SNP TSC0003961
ctaaataaaataa

SEQ ID NO: 18851 - DNA, 13 bp, Artificial Sequence
  Oligonucleotide for detection of SNP TSC0003961
ttatttaatttag

SEQ ID NO: 18852 - DNA, 13 bp, Artificial Sequence
  Oligonucleotide for detection of SNP TSC0003961
ctaaattaaataa

SEQ ID NO: 18853 - DNA, 13 bp, Artificial Sequence
  Oligonucleotide for detection of SNP TSC0003961
ttagatagaatga

SEQ ID NO: 18854 - DNA, 13 bp, Artificial Sequence
  Oligonucleotide for detection of SNP TSC0003961
tcattctatctaa

SEQ ID NO: 18855 - DNA, 13 bp, Artificial Sequence
  Oligonucleotide for detection of SNP TSC0003961
ttagattgaatga

SEQ ID NO: 18856 - DNA, 13 bp, Artificial Sequence
  Oligonucleotide for detection of SNP TSC0003961
tcattcaatctaa

SEQ ID NO: 18857 - DNA, 13 bp, Artificial Sequence
  Oligonucleotide for detection of SNP TSC0003962
atttttaggaatt

SEQ ID NO: 18858 - DNA, 13 bp, Artificial Sequence
  Oligonucleotide for detection of SNP TSC0003962
aattcctaaaaat

SEQ ID NO: 18859 - DNA, 13 bp, Artificial Sequence
  Oligonucleotide for detection of SNP TSC0003962
atttttgggaatt

SEQ ID NO: 18860 - DNA, 13 bp, Artificial Sequence
  Oligonucleotide for detection of SNP TSC0003962
aattcccaaaaat

SEQ ID NO: 18861 - DNA, 13 bp, Artificial Sequence
  Oligonucleotide for detection of SNP TSC0003962
attttcgggaatt

SEQ ID NO: 18862 - DNA, 13 bp, Artificial Sequence
  Oligonucleotide for detection of SNP TSC0003962
aattcccgaaaat

SEQ ID NO: 18863 - DNA, 13 bp, Artificial Sequence
  Oligonucleotide for detection of SNP TSC0003962
agtttttgagaat

SEQ ID NO: 18864 - DNA, 13 bp, Artificial Sequence
  Oligonucleotide for detection of SNP TSC0003962
attctcaaaaact

SEQ ID NO: 18865 - DNA, 13 bp, Artificial Sequence
  Oligonucleotide for detection of SNP TSC0003962
agttttcgagaat

SEQ ID NO: 18866 - DNA, 13 bp, Artificial Sequence
  Oligonucleotide for detection of SNP TSC0003962
attctcgaaaact

SEQ ID NO: 18867 - DNA, 13 bp, Artificial Sequence
  Oligonucleotide for detection of SNP TSC0003963
taattaggaatty

SEQ ID NO: 18868 - DNA, 13 bp, Artificial Sequence
  Oligonucleotide for detection of SNP TSC0003963
raattcctaatta

SEQ ID NO: 18869 - DNA, 13 bp, Artificial Sequence
  Oligonucleotide for detection of SNP TSC0003963
taattaagaatty

SEQ ID NO: 18870 - DNA, 13 bp, Artificial Sequence
  Oligonucleotide for detection of SNP TSC0003963
raattcttaatta

SEQ ID NO: 18871 - DNA, 13 bp, Artificial Sequence
  Oligonucleotide for detection of SNP TSC0003964
aattattgtatty

SEQ ID NO: 18872 - DNA, 13 bp, Artificial Sequence
  Oligonucleotide for detection of SNP TSC0003964
raatacaataatt

SEQ ID NO: 18873 - DNA, 13 bp, Artificial Sequence
  Oligonucleotide for detection of SNP TSC0003964
aattatcgtatty

SEQ ID NO: 18874 - DNA, 13 bp, Artificial Sequence
  Oligonucleotide for detection of SNP TSC0003964
raatacgataatt

SEQ ID NO: 18875 - DNA, 13 bp, Artificial Sequence
  Oligonucleotide for detection of SNP TSC0003965
gtttttatatggt

SEQ ID NO: 18876 - DNA, 13 bp, Artificial Sequence
  Oligonucleotide for detection of SNP TSC0003965
accatataaaaac

SEQ ID NO: 18877 - DNA, 13 bp, Artificial Sequence
  Oligonucleotide for detection of SNP TSC0003965
gtttttttatggt

SEQ ID NO: 18878 - DNA, 13 bp, Artificial Sequence
  Oligonucleotide for detection of SNP TSC0003965
accataaaaaaac

SEQ ID NO: 18879 - DNA, 13 bp, Artificial Sequence
  Oligonucleotide for detection of SNP TSC0003965
attatgtgaggay

SEQ ID NO: 18880 - DNA, 13 bp, Artificial Sequence
  Oligonucleotide for detection of SNP TSC0003965
rtcctcacataat

SEQ ID NO: 18881 - DNA, 13 bp, Artificial Sequence
  Oligonucleotide for detection of SNP TSC0003965
attatgagaggay

SEQ ID NO: 18882 - DNA, 13 bp, Artificial Sequence
  Oligonucleotide for detection of SNP TSC0003965
rtcctctcataat

SEQ ID NO: 18883 - DNA, 13 bp, Artificial Sequence
  Oligonucleotide for detection of SNP TSC0003966
tatttttgggggt

SEQ ID NO: 18884 - DNA, 13 bp, Artificial Sequence
  Oligonucleotide for detection of SNP TSC0003966
acccccaaaaata

SEQ ID NO: 18885 - DNA, 13 bp, Artificial Sequence
  Oligonucleotide for detection of SNP TSC0003966
tattttggggggt

SEQ ID NO: 18886 - DNA, 13 bp, Artificial Sequence
  Oligonucleotide for detection of SNP TSC0003966
accccccaaaata

SEQ ID NO: 18887 - DNA, 13 bp, Artificial Sequence
  Oligonucleotide for detection of SNP TSC0003966
atttttaaagatg

SEQ ID NO: 18888 - DNA, 13 bp, Artificial Sequence
  Oligonucleotide for detection of SNP TSC0003966
catctttaaaaat

SEQ ID NO: 18889 - DNA, 13 bp, Artificial Sequence
  Oligonucleotide for detection of SNP TSC0003966
attttttaagatg

SEQ ID NO: 18890 - DNA, 13 bp, Artificial Sequence
  Oligonucleotide for detection of SNP TSC0003966
catcttaaaaaat

SEQ ID NO: 18891 - DNA, 13 bp, Artificial Sequence
  Oligonucleotide for detection of SNP TSC0003967
taaattatattgg

SEQ ID NO: 18892 - DNA, 13 bp, Artificial Sequence
  Oligonucleotide for detection of SNP TSC0003967
ccaatataattta

SEQ ID NO: 18893 - DNA, 13 bp, Artificial Sequence
  Oligonucleotide for detection of SNP TSC0003967
taaattgtattgg

SEQ ID NO: 18894 - DNA, 13 bp, Artificial Sequence
  Oligonucleotide for detection of SNP TSC0003967
ccaatacaattta

SEQ ID NO: 18895 - DNA, 13 bp, Artificial Sequence
  Oligonucleotide for detection of SNP TSC0003967
taaatcgtattgg

SEQ ID NO: 18896 - DNA, 13 bp, Artificial Sequence
  Oligonucleotide for detection of SNP TSC0003967
ccaatacgattta

SEQ ID NO: 18897 - DNA, 13 bp, Artificial Sequence
  Oligonucleotide for detection of SNP TSC0003967
ttagtatggttta

SEQ ID NO: 18898 - DNA, 13 bp, Artificial Sequence
  Oligonucleotide for detection of SNP TSC0003967
taaaccatactaa

SEQ ID NO: 18899 - DNA, 13 bp, Artificial Sequence
  Oligonucleotide for detection of SNP TSC0003967
ttagtacggttta

SEQ ID NO: 18900 - DNA, 13 bp, Artificial Sequence
  Oligonucleotide for detection of SNP TSC0003967
taaaccgtactaa

SEQ ID NO: 18901 - DNA, 13 bp, Artificial Sequence
  Oligonucleotide for detection of SNP TSC0003968
gtattaatattgy

SEQ ID NO: 18902 - DNA, 13 bp, Artificial Sequence
  Oligonucleotide for detection of SNP TSC0003968
rcaatattaatac

SEQ ID NO: 18903 - DNA, 13 bp, Artificial Sequence
  Oligonucleotide for detection of SNP TSC0003968
gtattagtattgy

SEQ ID NO: 18904 - DNA, 13 bp, Artificial Sequence
  Oligonucleotide for detection of SNP TSC0003968
rcaatactaatac

SEQ ID NO: 18905 - DNA, 13 bp, Artificial Sequence
  Oligonucleotide for detection of SNP TSC0003969
atgttttggaggg

SEQ ID NO: 18906 - DNA, 13 bp, Artificial Sequence
  Oligonucleotide for detection of SNP TSC0003969
ccctccaaaacat

SEQ ID NO: 18907 - DNA, 13 bp, Artificial Sequence
  Oligonucleotide for detection of SNP TSC0003969
atgtttcggaggg

SEQ ID NO: 18908 - DNA, 13 bp, Artificial Sequence
  Oligonucleotide for detection of SNP TSC0003969
ccctccgaaacat

SEQ ID NO: 18909 - DNA, 13 bp, Artificial Sequence
  Oligonucleotide for detection of SNP TSC0003969
ttttttggggtat

SEQ ID NO: 18910 - DNA, 13 bp, Artificial Sequence
  Oligonucleotide for detection of SNP TSC0003969
ataccccaaaaaa

SEQ ID NO: 18911 - DNA, 13 bp, Artificial Sequence
  Oligonucleotide for detection of SNP TSC0003969
ttttttagggtat

SEQ ID NO: 18912 - DNA, 13 bp, Artificial Sequence
  Oligonucleotide for detection of SNP TSC0003969
ataccctaaaaaa

SEQ ID NO: 18913 - DNA, 13 bp, Artificial Sequence
  Oligonucleotide for detection of SNP TSC0003969
tttttcggggtat

SEQ ID NO: 18914 - DNA, 13 bp, Artificial Sequence
  Oligonucleotide for detection of SNP TSC0003969
ataccccgaaaaa

SEQ ID NO: 18915 - DNA, 13 bp, Artificial Sequence
  Oligonucleotide for detection of SNP TSC0003970
gtttttagttttt

SEQ ID NO: 18916 - DNA, 13 bp, Artificial Sequence
  Oligonucleotide for detection of SNP TSC0003970
aaaaactaaaaac

SEQ ID NO: 18917 - DNA, 13 bp, Artificial Sequence
  Oligonucleotide for detection of SNP TSC0003970
gttttcggttttt

SEQ ID NO: 18918 - DNA, 13 bp, Artificial Sequence
  Oligonucleotide for detection of SNP TSC0003970
aaaaaccgaaaac

SEQ ID NO: 18919 - DNA, 13 bp, Artificial Sequence
  Oligonucleotide for detection of SNP TSC0003970
agaggttggaggy

SEQ ID NO: 18920 - DNA, 13 bp, Artificial Sequence
  Oligonucleotide for detection of SNP TSC0003970
rcctccaacctct

SEQ ID NO: 18921 - DNA, 13 bp, Artificial Sequence
  Oligonucleotide for detection of SNP TSC0003970
agaggtcggaggy

SEQ ID NO: 18922 - DNA, 13 bp, Artificial Sequence
  Oligonucleotide for detection of SNP TSC0003970
rcctccgacctct

SEQ ID NO: 18923 - DNA, 13 bp, Artificial Sequence
  Oligonucleotide for detection of SNP TSC0003971
atttaaggtgaty

SEQ ID NO: 18924 - DNA, 13 bp, Artificial Sequence
  Oligonucleotide for detection of SNP TSC0003971
ratcaccttaaat

SEQ ID NO: 18925 - DNA, 13 bp, Artificial Sequence
  Oligonucleotide for detection of SNP TSC0003971
atttaaagtgaty

SEQ ID NO: 18926 - DNA, 13 bp, Artificial Sequence
  Oligonucleotide for detection of SNP TSC0003971
ratcactttaaat

SEQ ID NO: 18927 - DNA, 13 bp, Artificial Sequence
  Oligonucleotide for detection of SNP TSC0003973
gttgtaggtaagt

SEQ ID NO: 18928 - DNA, 13 bp, Artificial Sequence
  Oligonucleotide for detection of SNP TSC0003973
acttacctacaac

SEQ ID NO: 18929 - DNA, 13 bp, Artificial Sequence
  Oligonucleotide for detection of SNP TSC0003973
gttgtaagtaagt

SEQ ID NO: 18930 - DNA, 13 bp, Artificial Sequence
  Oligonucleotide for detection of SNP TSC0003973
acttacttacaac

SEQ ID NO: 18931 - DNA, 13 bp, Artificial Sequence
  Oligonucleotide for detection of SNP TSC0003974
ttttaggaatggt

SEQ ID NO: 18932 - DNA, 13 bp, Artificial Sequence
  Oligonucleotide for detection of SNP TSC0003974
accattcctaaaa

SEQ ID NO: 18933 - DNA, 13 bp, Artificial Sequence
  Oligonucleotide for detection of SNP TSC0003974
ttttagaaatggt

SEQ ID NO: 18934 - DNA, 13 bp, Artificial Sequence
  Oligonucleotide for detection of SNP TSC0003974
accatttctaaaa

SEQ ID NO: 18935 - DNA, 13 bp, Artificial Sequence
  Oligonucleotide for detection of SNP TSC0003974
ttttaggaacggt

SEQ ID NO: 18936 - DNA, 13 bp, Artificial Sequence
  Oligonucleotide for detection of SNP TSC0003974
accgttcctaaaa

SEQ ID NO: 18937 - DNA, 13 bp, Artificial Sequence
  Oligonucleotide for detection of SNP TSC0003974
ttttagaaacggt

SEQ ID NO: 18938 - DNA, 13 bp, Artificial Sequence
  Oligonucleotide for detection of SNP TSC0003974
accgtttctaaaa

SEQ ID NO: 18939 - DNA, 13 bp, Artificial Sequence
  Oligonucleotide for detection of SNP TSC0003975
ttttgtattattt

SEQ ID NO: 18940 - DNA, 13 bp, Artificial Sequence
  Oligonucleotide for detection of SNP TSC0003975
aaataatacaaaa

SEQ ID NO: 18941 - DNA, 13 bp, Artificial Sequence
  Oligonucleotide for detection of SNP TSC0003975
ttttgtgttattt

SEQ ID NO: 18942 - DNA, 13 bp, Artificial Sequence
  Oligonucleotide for detection of SNP TSC0003975
aaataacacaaaa

SEQ ID NO: 18943 - DNA, 13 bp, Artificial Sequence
  Oligonucleotide for detection of SNP TSC0003975
tttcgtattattt

SEQ ID NO: 18944 - DNA, 13 bp, Artificial Sequence
  Oligonucleotide for detection of SNP TSC0003975
aaataatacgaaa

SEQ ID NO: 18945 - DNA, 13 bp, Artificial Sequence
  Oligonucleotide for detection of SNP TSC0003975
tttcgtgttattt

SEQ ID NO: 18946 - DNA, 13 bp, Artificial Sequence
  Oligonucleotide for detection of SNP TSC0003975
aaataacacgaaa

SEQ ID NO: 18947 - DNA, 13 bp, Artificial Sequence
  Oligonucleotide for detection of SNP TSC0003976
atgttatgtagty

SEQ ID NO: 18948 - DNA, 13 bp, Artificial Sequence
  Oligonucleotide for detection of SNP TSC0003976
ractacataacat

SEQ ID NO: 18949 - DNA, 13 bp, Artificial Sequence
  Oligonucleotide for detection of SNP TSC0003976
atgttacgtagty

SEQ ID NO: 18950 - DNA, 13 bp, Artificial Sequence
  Oligonucleotide for detection of SNP TSC0003976
ractacgtaacat

SEQ ID NO: 18951 - DNA, 13 bp, Artificial Sequence
  Oligonucleotide for detection of SNP TSC0003976
ggttatgtaatat

SEQ ID NO: 18952 - DNA, 13 bp, Artificial Sequence
  Oligonucleotide for detection of SNP TSC0003976
atattacataacc

SEQ ID NO: 18953 - DNA, 13 bp, Artificial Sequence
  Oligonucleotide for detection of SNP TSC0003976
ggttatataatat

SEQ ID NO: 18954 - DNA, 13 bp, Artificial Sequence
  Oligonucleotide for detection of SNP TSC0003976
atattatataacc

SEQ ID NO: 18955 - DNA, 13 bp, Artificial Sequence
  Oligonucleotide for detection of SNP TSC0003976
ggttacgtaatat

SEQ ID NO: 18956 - DNA, 13 bp, Artificial Sequence
  Oligonucleotide for detection of SNP TSC0003976
atattacgtaacc

SEQ ID NO: 18957 - DNA, 13 bp, Artificial Sequence
  Oligonucleotide for detection of SNP TSC0003977
atgattatataag

SEQ ID NO: 18958 - DNA, 13 bp, Artificial Sequence
  Oligonucleotide for detection of SNP TSC0003977
cttatataatcat

SEQ ID NO: 18959 - DNA, 13 bp, Artificial Sequence
  Oligonucleotide for detection of SNP TSC0003977
atgattgtataag

SEQ ID NO: 18960 - DNA, 13 bp, Artificial Sequence
  Oligonucleotide for detection of SNP TSC0003977
cttatacaatcat

SEQ ID NO: 18961 - DNA, 13 bp, Artificial Sequence
  Oligonucleotide for detection of SNP TSC0003977
atgatcgtataag

SEQ ID NO: 18962 - DNA, 13 bp, Artificial Sequence
  Oligonucleotide for detection of SNP TSC0003977
cttatacgatcat

SEQ ID NO: 18963 - DNA, 13 bp, Artificial Sequence
  Oligonucleotide for detection of SNP TSC0003977
tttgtgtgattat

SEQ ID NO: 18964 - DNA, 13 bp, Artificial Sequence
  Oligonucleotide for detection of SNP TSC0003977
ataatcacacaaa

SEQ ID NO: 18965 - DNA, 13 bp, Artificial Sequence
  Oligonucleotide for detection of SNP TSC0003977
tttgtgcgattat

SEQ ID NO: 18966 - DNA, 13 bp, Artificial Sequence
  Oligonucleotide for detection of SNP TSC0003977
ataatcgcacaaa

SEQ ID NO: 18967 - DNA, 13 bp, Artificial Sequence
  Oligonucleotide for detection of SNP TSC0003978
agaatatgtagty

SEQ ID NO: 18968 - DNA, 13 bp, Artificial Sequence
  Oligonucleotide for detection of SNP TSC0003978
ractacatattct

SEQ ID NO: 18969 - DNA, 13 bp, Artificial Sequence
  Oligonucleotide for detection of SNP TSC0003978
agaatacgtagty

SEQ ID NO: 18970 - DNA, 13 bp, Artificial Sequence
  Oligonucleotide for detection of SNP TSC0003978
ractacgtattct

SEQ ID NO: 18971 - DNA, 13 bp, Artificial Sequence
  Oligonucleotide for detection of SNP TSC0003978
ggttatatatttt

SEQ ID NO: 18972 - DNA, 13 bp, Artificial Sequence
  Oligonucleotide for detection of SNP TSC0003978
aaaatatataacc

SEQ ID NO: 18973 - DNA, 13 bp, Artificial Sequence
  Oligonucleotide for detection of SNP TSC0003978
ggttatgtatttt

SEQ ID NO: 18974 - DNA, 13 bp, Artificial Sequence
  Oligonucleotide for detection of SNP TSC0003978
aaaatacataacc

SEQ ID NO: 18975 - DNA, 13 bp, Artificial Sequence
  Oligonucleotide for detection of SNP TSC0003978
ggttacgtatttt

SEQ ID NO: 18976 - DNA, 13 bp, Artificial Sequence
  Oligonucleotide for detection of SNP TSC0003978
aaaatacgtaacc

SEQ ID NO: 18977 - DNA, 13 bp, Artificial Sequence
  Oligonucleotide for detection of SNP TSC0003979
gaggtagagaaaa

SEQ ID NO: 18978 - DNA, 13 bp, Artificial Sequence
  Oligonucleotide for detection of SNP TSC0003979
ttttctctacctc

SEQ ID NO: 18979 - DNA, 13 bp, Artificial Sequence
  Oligonucleotide for detection of SNP TSC0003979
gaggtatagaaaa

SEQ ID NO: 18980 - DNA, 13 bp, Artificial Sequence
  Oligonucleotide for detection of SNP TSC0003979
ttttctatacctc

SEQ ID NO: 18981 - DNA, 13 bp, Artificial Sequence
  Oligonucleotide for detection of SNP TSC0003980
attaatgagtgtg

SEQ ID NO: 18982 - DNA, 13 bp, Artificial Sequence
  Oligonucleotide for detection of SNP TSC0003980
cacactcattaat

SEQ ID NO: 18983 - DNA, 13 bp, Artificial Sequence
  Oligonucleotide for detection of SNP TSC0003980
attaattagtgtg

SEQ ID NO: 18984 - DNA, 13 bp, Artificial Sequence
  Oligonucleotide for detection of SNP TSC0003980
cacactaattaat

SEQ ID NO: 18985 - DNA, 13 bp, Artificial Sequence
  Oligonucleotide for detection of SNP TSC0003980
tatatttattgat

SEQ ID NO: 18986 - DNA, 13 bp, Artificial Sequence
  Oligonucleotide for detection of SNP TSC0003980
atcaataaatata

SEQ ID NO: 18987 - DNA, 13 bp, Artificial Sequence
  Oligonucleotide for detection of SNP TSC0003980
tatattgattgat

SEQ ID NO: 18988 - DNA, 13 bp, Artificial Sequence
  Oligonucleotide for detection of SNP TSC0003980
atcaatcaatata

SEQ ID NO: 18989 - DNA, 13 bp, Artificial Sequence
  Oligonucleotide for detection of SNP TSC0003981
ttttatatgtgty

SEQ ID NO: 18990 - DNA, 13 bp, Artificial Sequence
  Oligonucleotide for detection of SNP TSC0003981
racacatataaaa

SEQ ID NO: 18991 - DNA, 13 bp, Artificial Sequence
  Oligonucleotide for detection of SNP TSC0003981
ttttatgtgtgty

SEQ ID NO: 18992 - DNA, 13 bp, Artificial Sequence
  Oligonucleotide for detection of SNP TSC0003981
racacacataaaa

SEQ ID NO: 18993 - DNA, 13 bp, Artificial Sequence
  Oligonucleotide for detection of SNP TSC0003981
ttttatacgtgty

SEQ ID NO: 18994 - DNA, 13 bp, Artificial Sequence
  Oligonucleotide for detection of SNP TSC0003981
racacgtataaaa

SEQ ID NO: 18995 - DNA, 13 bp, Artificial Sequence
  Oligonucleotide for detection of SNP TSC0003981
ttttacgtgtgty

SEQ ID NO: 18996 - DNA, 13 bp, Artificial Sequence
  Oligonucleotide for detection of SNP TSC0003981
racacacgtaaaa

SEQ ID NO: 18997 - DNA, 13 bp, Artificial Sequence
  Oligonucleotide for detection of SNP TSC0003981
ttttatgcgtgty

SEQ ID NO: 18998 - DNA, 13 bp, Artificial Sequence
  Oligonucleotide for detection of SNP TSC0003981
racacgcataaaa

SEQ ID NO: 18999 - DNA, 13 bp, Artificial Sequence
  Oligonucleotide for detection of SNP TSC0003981
ttttacgcgtgty

SEQ ID NO: 19000 - DNA, 13 bp, Artificial Sequence
  Oligonucleotide for detection of SNP TSC0003981
racacgcgtaaaa

SEQ ID NO: 19001 - DNA, 13 bp, Artificial Sequence
  Oligonucleotide for detection of SNP TSC0003981
ggtatgtgtgaaa

SEQ ID NO: 19002 - DNA, 13 bp, Artificial Sequence
  Oligonucleotide for detection of SNP TSC0003981
tttcacacatacc

SEQ ID NO: 19003 - DNA, 13 bp, Artificial Sequence
  Oligonucleotide for detection of SNP TSC0003981
ggtacgtgtgaaa

SEQ ID NO: 19004 - DNA, 13 bp, Artificial Sequence
  Oligonucleotide for detection of SNP TSC0003981
tttcacacgtacc

SEQ ID NO: 19005 - DNA, 13 bp, Artificial Sequence
  Oligonucleotide for detection of SNP TSC0003981
ggtatgcgtgaaa

SEQ ID NO: 19006 - DNA, 13 bp, Artificial Sequence
  Oligonucleotide for detection of SNP TSC0003981
tttcacgcatacc

SEQ ID NO: 19007 - DNA, 13 bp, Artificial Sequence
  Oligonucleotide for detection of SNP TSC0003981
ggtacgcgtgaaa

SEQ ID NO: 19008 - DNA, 13 bp, Artificial Sequence
  Oligonucleotide for detection of SNP TSC0003981
tttcacgcgtacc

SEQ ID NO: 19009 - DNA, 13 bp, Artificial Sequence
  Oligonucleotide for detection of SNP TSC0003983
ggttttttgaaat

SEQ ID NO: 19010 - DNA, 13 bp, Artificial Sequence
  Oligonucleotide for detection of SNP TSC0003983
atttcaaaaaacc

SEQ ID NO: 19011 - DNA, 13 bp, Artificial Sequence
  Oligonucleotide for detection of SNP TSC0003983
ggttttgtgaaat

SEQ ID NO: 19012 - DNA, 13 bp, Artificial Sequence
  Oligonucleotide for detection of SNP TSC0003983
atttcacaaaacc

SEQ ID NO: 19013 - DNA, 13 bp, Artificial Sequence
  Oligonucleotide for detection of SNP TSC0003983
attttaaaggaty

SEQ ID NO: 19014 - DNA, 13 bp, Artificial Sequence
  Oligonucleotide for detection of SNP TSC0003983
ratcctttaaaat

SEQ ID NO: 19015 - DNA, 13 bp, Artificial Sequence
  Oligonucleotide for detection of SNP TSC0003983
attttataggaty

SEQ ID NO: 19016 - DNA, 13 bp, Artificial Sequence
  Oligonucleotide for detection of SNP TSC0003983
ratcctataaaat

SEQ ID NO: 19017 - DNA, 13 bp, Artificial Sequence
  Oligonucleotide for detection of SNP TSC0003984
tttttagtgtgay

SEQ ID NO: 19018 - DNA, 13 bp, Artificial Sequence
  Oligonucleotide for detection of SNP TSC0003984
rtcacactaaaaa

SEQ ID NO: 19019 - DNA, 13 bp, Artificial Sequence
  Oligonucleotide for detection of SNP TSC0003984
tttttaatgtgay

SEQ ID NO: 19020 - DNA, 13 bp, Artificial Sequence
  Oligonucleotide for detection of SNP TSC0003984
rtcacattaaaaa

SEQ ID NO: 19021 - DNA, 13 bp, Artificial Sequence
  Oligonucleotide for detection of SNP TSC0003985
tttattaaattta

SEQ ID NO: 19022 - DNA, 13 bp, Artificial Sequence
  Oligonucleotide for detection of SNP TSC0003985
taaatttaataaa

SEQ ID NO: 19023 - DNA, 13 bp, Artificial Sequence
  Oligonucleotide for detection of SNP TSC0003985
tttattgaattta

SEQ ID NO: 19024 - DNA, 13 bp, Artificial Sequence
  Oligonucleotide for detection of SNP TSC0003985
taaattcaataaa

SEQ ID NO: 19025 - DNA, 13 bp, Artificial Sequence
  Oligonucleotide for detection of SNP TSC0003986
agagagggggtgg

SEQ ID NO: 19026 - DNA, 13 bp, Artificial Sequence
  Oligonucleotide for detection of SNP TSC0003986
ccaccccctctct

SEQ ID NO: 19027 - DNA, 13 bp, Artificial Sequence
  Oligonucleotide for detection of SNP TSC0003986
agagagagggtgg

SEQ ID NO: 19028 - DNA, 13 bp, Artificial Sequence
  Oligonucleotide for detection of SNP TSC0003986
ccaccctctctct

SEQ ID NO: 19029 - DNA, 13 bp, Artificial Sequence
  Oligonucleotide for detection of SNP TSC0003987
aagggtgtggtag

SEQ ID NO: 19030 - DNA, 13 bp, Artificial Sequence
  Oligonucleotide for detection of SNP TSC0003987
ctaccacaccctt

SEQ ID NO: 19031 - DNA, 13 bp, Artificial Sequence
  Oligonucleotide for detection of SNP TSC0003987
aagggtatggtag

SEQ ID NO: 19032 - DNA, 13 bp, Artificial Sequence
  Oligonucleotide for detection of SNP TSC0003987
ctaccataccctt

SEQ ID NO: 19033 - DNA, 13 bp, Artificial Sequence
  Oligonucleotide for detection of SNP TSC0003988
ttaattagtttgt

SEQ ID NO: 19034 - DNA, 13 bp, Artificial Sequence
  Oligonucleotide for detection of SNP TSC0003988
acaaactaattaa

SEQ ID NO: 19035 - DNA, 13 bp, Artificial Sequence
  Oligonucleotide for detection of SNP TSC0003988
ttaatttgtttgt

SEQ ID NO: 19036 - DNA, 13 bp, Artificial Sequence
  Oligonucleotide for detection of SNP TSC0003988
acaaacaaattaa

SEQ ID NO: 19037 - DNA, 13 bp, Artificial Sequence
  Oligonucleotide for detection of SNP TSC0003988
ttaattcgtttgt

SEQ ID NO: 19038 - DNA, 13 bp, Artificial Sequence
  Oligonucleotide for detection of SNP TSC0003988
acaaacgaattaa

SEQ ID NO: 19039 - DNA, 13 bp, Artificial Sequence
  Oligonucleotide for detection of SNP TSC0003988
ataaattgattaa

SEQ ID NO: 19040 - DNA, 13 bp, Artificial Sequence
  Oligonucleotide for detection of SNP TSC0003988
ttaatcaatttat

SEQ ID NO: 19041 - DNA, 13 bp, Artificial Sequence
  Oligonucleotide for detection of SNP TSC0003988
ataaatggattaa

SEQ ID NO: 19042 - DNA, 13 bp, Artificial Sequence
  Oligonucleotide for detection of SNP TSC0003988
ttaatccatttat

SEQ ID NO: 19043 - DNA, 13 bp, Artificial Sequence
  Oligonucleotide for detection of SNP TSC0003988
ataaacggattaa

SEQ ID NO: 19044 - DNA, 13 bp, Artificial Sequence
  Oligonucleotide for detection of SNP TSC0003988
ttaatccgtttat

SEQ ID NO: 19045 - DNA, 13 bp, Artificial Sequence
  Oligonucleotide for detection of SNP TSC0003991
atgaaaagattgt

SEQ ID NO: 19046 - DNA, 13 bp, Artificial Sequence
  Oligonucleotide for detection of SNP TSC0003991
acaatcttttcat

SEQ ID NO: 19047 - DNA, 13 bp, Artificial Sequence
  Oligonucleotide for detection of SNP TSC0003991
atgaaatgattgt

SEQ ID NO: 19048 - DNA, 13 bp, Artificial Sequence
  Oligonucleotide for detection of SNP TSC0003991
acaatcatttcat

SEQ ID NO: 19049 - DNA, 13 bp, Artificial Sequence
  Oligonucleotide for detection of SNP TSC0003991
acgaaaagattgt

SEQ ID NO: 19050 - DNA, 13 bp, Artificial Sequence
  Oligonucleotide for detection of SNP TSC0003991
acaatcttttcgt

SEQ ID NO: 19051 - DNA, 13 bp, Artificial Sequence
  Oligonucleotide for detection of SNP TSC0003991
acgaaatgattgt

SEQ ID NO: 19052 - DNA, 13 bp, Artificial Sequence
  Oligonucleotide for detection of SNP TSC0003991
acaatcatttcgt

SEQ ID NO: 19053 - DNA, 13 bp, Artificial Sequence
  Oligonucleotide for detection of SNP TSC0003991
atgaaacgattgt

SEQ ID NO: 19054 - DNA, 13 bp, Artificial Sequence
  Oligonucleotide for detection of SNP TSC0003991
acaatcgtttcat

SEQ ID NO: 19055 - DNA, 13 bp, Artificial Sequence
  Oligonucleotide for detection of SNP TSC0003991
acgaaacgattgt

SEQ ID NO: 19056 - DNA, 13 bp, Artificial Sequence
  Oligonucleotide for detection of SNP TSC0003991
acaatcgtttcgt

SEQ ID NO: 19057 - DNA, 13 bp, Artificial Sequence
  Oligonucleotide for detection of SNP TSC0003991
atagtttttttgt

SEQ ID NO: 19058 - DNA, 13 bp, Artificial Sequence
  Oligonucleotide for detection of SNP TSC0003991
acaaaaaaactat

SEQ ID NO: 19059 - DNA, 13 bp, Artificial Sequence
  Oligonucleotide for detection of SNP TSC0003991
atagttgttttgt

SEQ ID NO: 19060 - DNA, 13 bp, Artificial Sequence
  Oligonucleotide for detection of SNP TSC0003991
acaaaacaactat

SEQ ID NO: 19061 - DNA, 13 bp, Artificial Sequence
  Oligonucleotide for detection of SNP TSC0003991
atagttttttcgt

SEQ ID NO: 19062 - DNA, 13 bp, Artificial Sequence
  Oligonucleotide for detection of SNP TSC0003991
acgaaaaaactat

SEQ ID NO: 19063 - DNA, 13 bp, Artificial Sequence
  Oligonucleotide for detection of SNP TSC0003991
atagtcgttttgt

SEQ ID NO: 19064 - DNA, 13 bp, Artificial Sequence
  Oligonucleotide for detection of SNP TSC0003991
acaaaacgactat

SEQ ID NO: 19065 - DNA, 13 bp, Artificial Sequence
  Oligonucleotide for detection of SNP TSC0003991
atagttgtttcgt

SEQ ID NO: 19066 - DNA, 13 bp, Artificial Sequence
  Oligonucleotide for detection of SNP TSC0003991
acgaaacaactat

SEQ ID NO: 19067 - DNA, 13 bp, Artificial Sequence
  Oligonucleotide for detection of SNP TSC0003991
atagtcgtttcgt

SEQ ID NO: 19068 - DNA, 13 bp, Artificial Sequence
  Oligonucleotide for detection of SNP TSC0003991
acgaaacgactat

SEQ ID NO: 19069 - DNA, 13 bp, Artificial Sequence
  Oligonucleotide for detection of SNP TSC0003993
aggtatgtaagtt

SEQ ID NO: 19070 - DNA, 13 bp, Artificial Sequence
  Oligonucleotide for detection of SNP TSC0003993
aacttacatacct

SEQ ID NO: 19071 - DNA, 13 bp, Artificial Sequence
  Oligonucleotide for detection of SNP TSC0003993
aggtatttaagtt

SEQ ID NO: 19072 - DNA, 13 bp, Artificial Sequence
  Oligonucleotide for detection of SNP TSC0003993
aacttaaatacct

SEQ ID NO: 19073 - DNA, 13 bp, Artificial Sequence
  Oligonucleotide for detection of SNP TSC0003993
agtttgtatgttt

SEQ ID NO: 19074 - DNA, 13 bp, Artificial Sequence
  Oligonucleotide for detection of SNP TSC0003993
aaacatacaaact

SEQ ID NO: 19075 - DNA, 13 bp, Artificial Sequence
  Oligonucleotide for detection of SNP TSC0003993
agtttgaatgttt

SEQ ID NO: 19076 - DNA, 13 bp, Artificial Sequence
  Oligonucleotide for detection of SNP TSC0003993
aaacattcaaact

SEQ ID NO: 19077 - DNA, 13 bp, Artificial Sequence
  Oligonucleotide for detection of SNP TSC0003995
gtagagtgggtga

SEQ ID NO: 19078 - DNA, 13 bp, Artificial Sequence
  Oligonucleotide for detection of SNP TSC0003995
tcacccactctac

SEQ ID NO: 19079 - DNA, 13 bp, Artificial Sequence
  Oligonucleotide for detection of SNP TSC0003995
gtagagagggtga

SEQ ID NO: 19080 - DNA, 13 bp, Artificial Sequence
  Oligonucleotide for detection of SNP TSC0003995
tcaccctctctac

SEQ ID NO: 19081 - DNA, 13 bp, Artificial Sequence
  Oligonucleotide for detection of SNP TSC0003995
gtagagcgggtga

SEQ ID NO: 19082 - DNA, 13 bp, Artificial Sequence
  Oligonucleotide for detection of SNP TSC0003995
tcacccgctctac

SEQ ID NO: 19083 - DNA, 13 bp, Artificial Sequence
  Oligonucleotide for detection of SNP TSC0003995
ttatttgttttgy

SEQ ID NO: 19084 - DNA, 13 bp, Artificial Sequence
  Oligonucleotide for detection of SNP TSC0003995
rcaaaacaaataa

SEQ ID NO: 19085 - DNA, 13 bp, Artificial Sequence
  Oligonucleotide for detection of SNP TSC0003995
ttattttttttgy

SEQ ID NO: 19086 - DNA, 13 bp, Artificial Sequence
  Oligonucleotide for detection of SNP TSC0003995
rcaaaaaaaataa

SEQ ID NO: 19087 - DNA, 13 bp, Artificial Sequence
  Oligonucleotide for detection of SNP TSC0003995
ttattcgttttgy

SEQ ID NO: 19088 - DNA, 13 bp, Artificial Sequence
  Oligonucleotide for detection of SNP TSC0003995
rcaaaacgaataa

SEQ ID NO: 19089 - DNA, 13 bp, Artificial Sequence
  Oligonucleotide for detection of SNP TSC0003997
tgtttttgtgtgt

SEQ ID NO: 19090 - DNA, 13 bp, Artificial Sequence
  Oligonucleotide for detection of SNP TSC0003997
acacacaaaaaca

SEQ ID NO: 19091 - DNA, 13 bp, Artificial Sequence
  Oligonucleotide for detection of SNP TSC0003997
tgttttcgtgtgt

SEQ ID NO: 19092 - DNA, 13 bp, Artificial Sequence
  Oligonucleotide for detection of SNP TSC0003997
acacacgaaaaca

SEQ ID NO: 19093 - DNA, 13 bp, Artificial Sequence
  Oligonucleotide for detection of SNP TSC0003997
tgtttttgcgtgt

SEQ ID NO: 19094 - DNA, 13 bp, Artificial Sequence
  Oligonucleotide for detection of SNP TSC0003997
acacgcaaaaaca

SEQ ID NO: 19095 - DNA, 13 bp, Artificial Sequence
  Oligonucleotide for detection of SNP TSC0003997
tgttttcgcgtgt

SEQ ID NO: 19096 - DNA, 13 bp, Artificial Sequence
  Oligonucleotide for detection of SNP TSC0003997
acacgcgaaaaca

SEQ ID NO: 19097 - DNA, 13 bp, Artificial Sequence
  Oligonucleotide for detection of SNP TSC0003997
atatgtggagata

SEQ ID NO: 19098 - DNA, 13 bp, Artificial Sequence
  Oligonucleotide for detection of SNP TSC0003997
tatctccacatat

SEQ ID NO: 19099 - DNA, 13 bp, Artificial Sequence
  Oligonucleotide for detection of SNP TSC0003997
atatgtagagata

SEQ ID NO: 19100 - DNA, 13 bp, Artificial Sequence
  Oligonucleotide for detection of SNP TSC0003997
tatctctacatat

SEQ ID NO: 19101 - DNA, 13 bp, Artificial Sequence
  Oligonucleotide for detection of SNP TSC0003997
atacgtggagata

SEQ ID NO: 19102 - DNA, 13 bp, Artificial Sequence
  Oligonucleotide for detection of SNP TSC0003997
tatctccacgtat

SEQ ID NO: 19103 - DNA, 13 bp, Artificial Sequence
  Oligonucleotide for detection of SNP TSC0003997
atacgtagagata

SEQ ID NO: 19104 - DNA, 13 bp, Artificial Sequence
  Oligonucleotide for detection of SNP TSC0003997
tatctctacgtat

SEQ ID NO: 19105 - DNA, 13 bp, Artificial Sequence
  Oligonucleotide for detection of SNP TSC0003997
atatgcggagata

SEQ ID NO: 19106 - DNA, 13 bp, Artificial Sequence
  Oligonucleotide for detection of SNP TSC0003997
tatctccgcatat

SEQ ID NO: 19107 - DNA, 13 bp, Artificial Sequence
  Oligonucleotide for detection of SNP TSC0003997
atacgcggagata

SEQ ID NO: 19108 - DNA, 13 bp, Artificial Sequence
  Oligonucleotide for detection of SNP TSC0003997
tatctccgcgtat

SEQ ID NO: 19109 - DNA, 13 bp, Artificial Sequence
  Oligonucleotide for detection of SNP TSC0003998
attttttgtgata

SEQ ID NO: 19110 - DNA, 13 bp, Artificial Sequence
  Oligonucleotide for detection of SNP TSC0003998
tatcacaaaaaat

SEQ ID NO: 19111 - DNA, 13 bp, Artificial Sequence
  Oligonucleotide for detection of SNP TSC0003998
atttttagtgata

SEQ ID NO: 19112 - DNA, 13 bp, Artificial Sequence
  Oligonucleotide for detection of SNP TSC0003998
tatcactaaaaat

SEQ ID NO: 19113 - DNA, 13 bp, Artificial Sequence
  Oligonucleotide for detection of SNP TSC0003998
tgttataaagagt

SEQ ID NO: 19114 - DNA, 13 bp, Artificial Sequence
  Oligonucleotide for detection of SNP TSC0003998
actctttataaca

SEQ ID NO: 19115 - DNA, 13 bp, Artificial Sequence
  Oligonucleotide for detection of SNP TSC0003998
tgttattaagagt

SEQ ID NO: 19116 - DNA, 13 bp, Artificial Sequence
  Oligonucleotide for detection of SNP TSC0003998
actcttaataaca

SEQ ID NO: 19117 - DNA, 13 bp, Artificial Sequence
  Oligonucleotide for detection of SNP TSC0004000
tgattataattaa

SEQ ID NO: 19118 - DNA, 13 bp, Artificial Sequence
  Oligonucleotide for detection of SNP TSC0004000
ttaattataatca

SEQ ID NO: 19119 - DNA, 13 bp, Artificial Sequence
  Oligonucleotide for detection of SNP TSC0004000
tgattagaattaa

SEQ ID NO: 19120 - DNA, 13 bp, Artificial Sequence
  Oligonucleotide for detection of SNP TSC0004000
ttaattctaatca

SEQ ID NO: 19121 - DNA, 13 bp, Artificial Sequence
  Oligonucleotide for detection of SNP TSC0004000
ttggttgtgatta

SEQ ID NO: 19122 - DNA, 13 bp, Artificial Sequence
  Oligonucleotide for detection of SNP TSC0004000
taatcacaaccaa

SEQ ID NO: 19123 - DNA, 13 bp, Artificial Sequence
  Oligonucleotide for detection of SNP TSC0004000
ttggttttgatta

SEQ ID NO: 19124 - DNA, 13 bp, Artificial Sequence
  Oligonucleotide for detection of SNP TSC0004000
taatcaaaaccaa

SEQ ID NO: 19125 - DNA, 13 bp, Artificial Sequence
  Oligonucleotide for detection of SNP TSC0004001
aataataaatagg

SEQ ID NO: 19126 - DNA, 13 bp, Artificial Sequence
  Oligonucleotide for detection of SNP TSC0004001
cctatttattatt

SEQ ID NO: 19127 - DNA, 13 bp, Artificial Sequence
  Oligonucleotide for detection of SNP TSC0004001
aataattaatagg

SEQ ID NO: 19128 - DNA, 13 bp, Artificial Sequence
  Oligonucleotide for detection of SNP TSC0004001
cctattaattatt

SEQ ID NO: 19129 - DNA, 13 bp, Artificial Sequence
  Oligonucleotide for detection of SNP TSC0004001
tttgtttgttgtt

SEQ ID NO: 19130 - DNA, 13 bp, Artificial Sequence
  Oligonucleotide for detection of SNP TSC0004001
aacaacaaacaaa

SEQ ID NO: 19131 - DNA, 13 bp, Artificial Sequence
  Oligonucleotide for detection of SNP TSC0004001
tttgttggttgtt

SEQ ID NO: 19132 - DNA, 13 bp, Artificial Sequence
  Oligonucleotide for detection of SNP TSC0004001
aacaaccaacaaa

SEQ ID NO: 19133 - DNA, 13 bp, Artificial Sequence
  Oligonucleotide for detection of SNP TSC0004002
gttttttgggtgt

SEQ ID NO: 19134 - DNA, 13 bp, Artificial Sequence
  Oligonucleotide for detection of SNP TSC0004002
acacccaaaaaac

SEQ ID NO: 19135 - DNA, 13 bp, Artificial Sequence
  Oligonucleotide for detection of SNP TSC0004002
gtttttggggtgt

SEQ ID NO: 19136 - DNA, 13 bp, Artificial Sequence
  Oligonucleotide for detection of SNP TSC0004002
acaccccaaaaac

SEQ ID NO: 19137 - DNA, 13 bp, Artificial Sequence
  Oligonucleotide for detection of SNP TSC0004002
gtttttcgggtgt

SEQ ID NO: 19138 - DNA, 13 bp, Artificial Sequence
  Oligonucleotide for detection of SNP TSC0004002
acacccgaaaaac

SEQ ID NO: 19139 - DNA, 13 bp, Artificial Sequence
  Oligonucleotide for detection of SNP TSC0004002
atatttgagaaay

SEQ ID NO: 19140 - DNA, 13 bp, Artificial Sequence
  Oligonucleotide for detection of SNP TSC0004002
rtttctcaaatat

SEQ ID NO: 19141 - DNA, 13 bp, Artificial Sequence
  Oligonucleotide for detection of SNP TSC0004002
atattttagaaay

SEQ ID NO: 19142 - DNA, 13 bp, Artificial Sequence
  Oligonucleotide for detection of SNP TSC0004002
rtttctaaaatat

SEQ ID NO: 19143 - DNA, 13 bp, Artificial Sequence
  Oligonucleotide for detection of SNP TSC0004002
atattcgagaaay

SEQ ID NO: 19144 - DNA, 13 bp, Artificial Sequence
  Oligonucleotide for detection of SNP TSC0004002
rtttctcgaatat

SEQ ID NO: 19145 - DNA, 13 bp, Artificial Sequence
  Oligonucleotide for detection of SNP TSC0004005
tgttttaagagga

SEQ ID NO: 19146 - DNA, 13 bp, Artificial Sequence
  Oligonucleotide for detection of SNP TSC0004005
tcctcttaaaaca

SEQ ID NO: 19147 - DNA, 13 bp, Artificial Sequence
  Oligonucleotide for detection of SNP TSC0004005
tgttttgagagga

SEQ ID NO: 19148 - DNA, 13 bp, Artificial Sequence
  Oligonucleotide for detection of SNP TSC0004005
tcctctcaaaaca

SEQ ID NO: 19149 - DNA, 13 bp, Artificial Sequence
  Oligonucleotide for detection of SNP TSC0004005
tgtttcgagagga

SEQ ID NO: 19150 - DNA, 13 bp, Artificial Sequence
  Oligonucleotide for detection of SNP TSC0004005
tcctctcgaaaca

SEQ ID NO: 19151 - DNA, 13 bp, Artificial Sequence
  Oligonucleotide for detection of SNP TSC0004006
ttaataggataag

SEQ ID NO: 19152 - DNA, 13 bp, Artificial Sequence
  Oligonucleotide for detection of SNP TSC0004006
cttatcctattaa

SEQ ID NO: 19153 - DNA, 13 bp, Artificial Sequence
  Oligonucleotide for detection of SNP TSC0004006
ttaataagataag

SEQ ID NO: 19154 - DNA, 13 bp, Artificial Sequence
  Oligonucleotide for detection of SNP TSC0004006
cttatcttattaa

SEQ ID NO: 19155 - DNA, 13 bp, Artificial Sequence
  Oligonucleotide for detection of SNP TSC0004007
aaatttaagtatt

SEQ ID NO: 19156 - DNA, 13 bp, Artificial Sequence
  Oligonucleotide for detection of SNP TSC0004007
aatacttaaattt

SEQ ID NO: 19157 - DNA, 13 bp, Artificial Sequence
  Oligonucleotide for detection of SNP TSC0004007
aaattttagtatt

SEQ ID NO: 19158 - DNA, 13 bp, Artificial Sequence
  Oligonucleotide for detection of SNP TSC0004007
aatactaaaattt

SEQ ID NO: 19159 - DNA, 13 bp, Artificial Sequence
  Oligonucleotide for detection of SNP TSC0004007
agtatttgagttt

SEQ ID NO: 19160 - DNA, 13 bp, Artificial Sequence
  Oligonucleotide for detection of SNP TSC0004007
aaactcaaatact

SEQ ID NO: 19161 - DNA, 13 bp, Artificial Sequence
  Oligonucleotide for detection of SNP TSC0004007
agtattagagttt

SEQ ID NO: 19162 - DNA, 13 bp, Artificial Sequence
  Oligonucleotide for detection of SNP TSC0004007
aaactctaatact

SEQ ID NO: 19163 - DNA, 13 bp, Artificial Sequence
  Oligonucleotide for detection of SNP TSC0004008
tttaagtgatttt

SEQ ID NO: 19164 - DNA, 13 bp, Artificial Sequence
  Oligonucleotide for detection of SNP TSC0004008
aaaatcacttaaa

SEQ ID NO: 19165 - DNA, 13 bp, Artificial Sequence
  Oligonucleotide for detection of SNP TSC0004008
tttaagagatttt

SEQ ID NO: 19166 - DNA, 13 bp, Artificial Sequence
  Oligonucleotide for detection of SNP TSC0004008
aaaatctcttaaa

SEQ ID NO: 19167 - DNA, 13 bp, Artificial Sequence
  Oligonucleotide for detection of SNP TSC0004008
tttaagcgatttt

SEQ ID NO: 19168 - DNA, 13 bp, Artificial Sequence
  Oligonucleotide for detection of SNP TSC0004008
aaaatcgcttaaa

SEQ ID NO: 19169 - DNA, 13 bp, Artificial Sequence
  Oligonucleotide for detection of SNP TSC0004008
agaattgtttgaa

SEQ ID NO: 19170 - DNA, 13 bp, Artificial Sequence
  Oligonucleotide for detection of SNP TSC0004008
ttcaaacaattct

SEQ ID NO: 19171 - DNA, 13 bp, Artificial Sequence
  Oligonucleotide for detection of SNP TSC0004008
agaattttttgaa

SEQ ID NO: 19172 - DNA, 13 bp, Artificial Sequence
  Oligonucleotide for detection of SNP TSC0004008
ttcaaaaaattct

SEQ ID NO: 19173 - DNA, 13 bp, Artificial Sequence
  Oligonucleotide for detection of SNP TSC0004008
agaatcgtttgaa

SEQ ID NO: 19174 - DNA, 13 bp, Artificial Sequence
  Oligonucleotide for detection of SNP TSC0004008
ttcaaacgattct

SEQ ID NO: 19175 - DNA, 13 bp, Artificial Sequence
  Oligonucleotide for detection of SNP TSC0004010
gttggtagtgggg

SEQ ID NO: 19176 - DNA, 13 bp, Artificial Sequence
  Oligonucleotide for detection of SNP TSC0004010
ccccactaccaac

SEQ ID NO: 19177 - DNA, 13 bp, Artificial Sequence
  Oligonucleotide for detection of SNP TSC0004010
gttggtggtgggg

SEQ ID NO: 19178 - DNA, 13 bp, Artificial Sequence
  Oligonucleotide for detection of SNP TSC0004010
ccccaccaccaac

SEQ ID NO: 19179 - DNA, 13 bp, Artificial Sequence
  Oligonucleotide for detection of SNP TSC0004010
gtcggtagtgggg

SEQ ID NO: 19180 - DNA, 13 bp, Artificial Sequence
  Oligonucleotide for detection of SNP TSC0004010
ccccactaccgac

SEQ ID NO: 19181 - DNA, 13 bp, Artificial Sequence
  Oligonucleotide for detection of SNP TSC0004010
gtcggtggtgggg

SEQ ID NO: 19182 - DNA, 13 bp, Artificial Sequence
  Oligonucleotide for detection of SNP TSC0004010
ccccaccaccgac

SEQ ID NO: 19183 - DNA, 13 bp, Artificial Sequence
  Oligonucleotide for detection of SNP TSC0004010
gttggcggtgggg

SEQ ID NO: 19184 - DNA, 13 bp, Artificial Sequence
  Oligonucleotide for detection of SNP TSC0004010
ccccaccgccaac

SEQ ID NO: 19185 - DNA, 13 bp, Artificial Sequence
  Oligonucleotide for detection of SNP TSC0004010
gtcggcggtgggg

SEQ ID NO: 19186 - DNA, 13 bp, Artificial Sequence
  Oligonucleotide for detection of SNP TSC0004010
ccccaccgccgac

SEQ ID NO: 19187 - DNA, 13 bp, Artificial Sequence
  Oligonucleotide for detection of SNP TSC0004010
ttttattgttggy

SEQ ID NO: 19188 - DNA, 13 bp, Artificial Sequence
  Oligonucleotide for detection of SNP TSC0004010
rccaacaataaaa

SEQ ID NO: 19189 - DNA, 13 bp, Artificial Sequence
  Oligonucleotide for detection of SNP TSC0004010
ttttattgtcggy

SEQ ID NO: 19190 - DNA, 13 bp, Artificial Sequence
  Oligonucleotide for detection of SNP TSC0004010
rccgacaataaaa

SEQ ID NO: 19191 - DNA, 13 bp, Artificial Sequence
  Oligonucleotide for detection of SNP TSC0004010
ttttatcgttggy

SEQ ID NO: 19192 - DNA, 13 bp, Artificial Sequence
  Oligonucleotide for detection of SNP TSC0004010
rccaacgataaaa

SEQ ID NO: 19193 - DNA, 13 bp, Artificial Sequence
  Oligonucleotide for detection of SNP TSC0004010
ttttatcgtcggy

SEQ ID NO: 19194 - DNA, 13 bp, Artificial Sequence
  Oligonucleotide for detection of SNP TSC0004010
rccgacgataaaa

SEQ ID NO: 19195 - DNA, 13 bp, Artificial Sequence
  Oligonucleotide for detection of SNP TSC0004011
gggtattggtatt

SEQ ID NO: 19196 - DNA, 13 bp, Artificial Sequence
  Oligonucleotide for detection of SNP TSC0004011
aataccaataccc

SEQ ID NO: 19197 - DNA, 13 bp, Artificial Sequence
  Oligonucleotide for detection of SNP TSC0004011
gggtataggtatt

SEQ ID NO: 19198 - DNA, 13 bp, Artificial Sequence
  Oligonucleotide for detection of SNP TSC0004011
aatacctataccc

SEQ ID NO: 19199 - DNA, 13 bp, Artificial Sequence
  Oligonucleotide for detection of SNP TSC0004011
aatgttagtgtty

SEQ ID NO: 19200 - DNA, 13 bp, Artificial Sequence
  Oligonucleotide for detection of SNP TSC0004011
raacactaacatt

SEQ ID NO: 19201 - DNA, 13 bp, Artificial Sequence
  Oligonucleotide for detection of SNP TSC0004011
aatgtttgtgtty

SEQ ID NO: 19202 - DNA, 13 bp, Artificial Sequence
  Oligonucleotide for detection of SNP TSC0004011
raacacaaacatt

SEQ ID NO: 19203 - DNA, 13 bp, Artificial Sequence
  Oligonucleotide for detection of SNP TSC0004012
tgttttatgtgag

SEQ ID NO: 19204 - DNA, 13 bp, Artificial Sequence
  Oligonucleotide for detection of SNP TSC0004012
ctcacataaaaca

SEQ ID NO: 19205 - DNA, 13 bp, Artificial Sequence
  Oligonucleotide for detection of SNP TSC0004012
tgttttgtgtgag

SEQ ID NO: 19206 - DNA, 13 bp, Artificial Sequence
  Oligonucleotide for detection of SNP TSC0004012
ctcacacaaaaca

SEQ ID NO: 19207 - DNA, 13 bp, Artificial Sequence
  Oligonucleotide for detection of SNP TSC0004013
tagttattttttt

SEQ ID NO: 19208 - DNA, 13 bp, Artificial Sequence
  Oligonucleotide for detection of SNP TSC0004013
aaaaaaataacta

SEQ ID NO: 19209 - DNA, 13 bp, Artificial Sequence
  Oligonucleotide for detection of SNP TSC0004013
tagttaatttttt

SEQ ID NO: 19210 - DNA, 13 bp, Artificial Sequence
  Oligonucleotide for detection of SNP TSC0004013
aaaaaattaacta

SEQ ID NO: 19211 - DNA, 13 bp, Artificial Sequence
  Oligonucleotide for detection of SNP TSC0004013
aaaaaaatagttg

SEQ ID NO: 19212 - DNA, 13 bp, Artificial Sequence
  Oligonucleotide for detection of SNP TSC0004013
caactattttttt

SEQ ID NO: 19213 - DNA, 13 bp, Artificial Sequence
  Oligonucleotide for detection of SNP TSC0004013
aaaaaattagttg

SEQ ID NO: 19214 - DNA, 13 bp, Artificial Sequence
  Oligonucleotide for detection of SNP TSC0004013
caactaatttttt

SEQ ID NO: 19215 - DNA, 13 bp, Artificial Sequence
  Oligonucleotide for detection of SNP TSC0004014
tttgttttttgag

SEQ ID NO: 19216 - DNA, 13 bp, Artificial Sequence
  Oligonucleotide for detection of SNP TSC0004014
ctcaaaaaacaaa

SEQ ID NO: 19217 - DNA, 13 bp, Artificial Sequence
  Oligonucleotide for detection of SNP TSC0004014
tttgttatttgag

SEQ ID NO: 19218 - DNA, 13 bp, Artificial Sequence
  Oligonucleotide for detection of SNP TSC0004014
ctcaaataacaaa

SEQ ID NO: 19219 - DNA, 13 bp, Artificial Sequence
  Oligonucleotide for detection of SNP TSC0004014
tttaagggatagg

SEQ ID NO: 19220 - DNA, 13 bp, Artificial Sequence
  Oligonucleotide for detection of SNP TSC0004014
cctatcccttaaa

SEQ ID NO: 19221 - DNA, 13 bp, Artificial Sequence
  Oligonucleotide for detection of SNP TSC0004014
tttaagtgatagg

SEQ ID NO: 19222 - DNA, 13 bp, Artificial Sequence
  Oligonucleotide for detection of SNP TSC0004014
cctatcacttaaa

SEQ ID NO: 19223 - DNA, 13 bp, Artificial Sequence
  Oligonucleotide for detection of SNP TSC0004015
ataattaaaaatg

SEQ ID NO: 19224 - DNA, 13 bp, Artificial Sequence
  Oligonucleotide for detection of SNP TSC0004015
catttttaattat

SEQ ID NO: 19225 - DNA, 13 bp, Artificial Sequence
  Oligonucleotide for detection of SNP TSC0004015
ataattgaaaatg

SEQ ID NO: 19226 - DNA, 13 bp, Artificial Sequence
  Oligonucleotide for detection of SNP TSC0004015
cattttcaattat

SEQ ID NO: 19227 - DNA, 13 bp, Artificial Sequence
  Oligonucleotide for detection of SNP TSC0004015
ataatcgaaaatg

SEQ ID NO: 19228 - DNA, 13 bp, Artificial Sequence
  Oligonucleotide for detection of SNP TSC0004015
cattttcgattat

SEQ ID NO: 19229 - DNA, 13 bp, Artificial Sequence
  Oligonucleotide for detection of SNP TSC0004015
tatttttggttgt

SEQ ID NO: 19230 - DNA, 13 bp, Artificial Sequence
  Oligonucleotide for detection of SNP TSC0004015
acaaccaaaaata

SEQ ID NO: 19231 - DNA, 13 bp, Artificial Sequence
  Oligonucleotide for detection of SNP TSC0004015
tattttcggttgt

SEQ ID NO: 19232 - DNA, 13 bp, Artificial Sequence
  Oligonucleotide for detection of SNP TSC0004015
acaaccgaaaata

SEQ ID NO: 19233 - DNA, 13 bp, Artificial Sequence
  Oligonucleotide for detection of SNP TSC0004016
tagagtattagta

SEQ ID NO: 19234 - DNA, 13 bp, Artificial Sequence
  Oligonucleotide for detection of SNP TSC0004016
tactaatactcta

SEQ ID NO: 19235 - DNA, 13 bp, Artificial Sequence
  Oligonucleotide for detection of SNP TSC0004016
tagagtgttagta

SEQ ID NO: 19236 - DNA, 13 bp, Artificial Sequence
  Oligonucleotide for detection of SNP TSC0004016
tactaacactcta

SEQ ID NO: 19237 - DNA, 13 bp, Artificial Sequence
  Oligonucleotide for detection of SNP TSC0004017
tttttaatgtata

SEQ ID NO: 19238 - DNA, 13 bp, Artificial Sequence
  Oligonucleotide for detection of SNP TSC0004017
tatacattaaaaa

SEQ ID NO: 19239 - DNA, 13 bp, Artificial Sequence
  Oligonucleotide for detection of SNP TSC0004017
tttttagtgtata

SEQ ID NO: 19240 - DNA, 13 bp, Artificial Sequence
  Oligonucleotide for detection of SNP TSC0004017
tatacactaaaaa

SEQ ID NO: 19241 - DNA, 13 bp, Artificial Sequence
  Oligonucleotide for detection of SNP TSC0004018
tttttgtggggag

SEQ ID NO: 19242 - DNA, 13 bp, Artificial Sequence
  Oligonucleotide for detection of SNP TSC0004018
ctccccacaaaaa

SEQ ID NO: 19243 - DNA, 13 bp, Artificial Sequence
  Oligonucleotide for detection of SNP TSC0004018
tttttgcggggag

SEQ ID NO: 19244 - DNA, 13 bp, Artificial Sequence
  Oligonucleotide for detection of SNP TSC0004018
ctccccgcaaaaa

SEQ ID NO: 19245 - DNA, 13 bp, Artificial Sequence
  Oligonucleotide for detection of SNP TSC0004018
ttttttgtaaaaa

SEQ ID NO: 19246 - DNA, 13 bp, Artificial Sequence
  Oligonucleotide for detection of SNP TSC0004018
tttttacaaaaaa

SEQ ID NO: 19247 - DNA, 13 bp, Artificial Sequence
  Oligonucleotide for detection of SNP TSC0004018
tttttcgtaaaaa

SEQ ID NO: 19248 - DNA, 13 bp, Artificial Sequence
  Oligonucleotide for detection of SNP TSC0004018
tttttacgaaaaa

SEQ ID NO: 19249 - DNA, 13 bp, Artificial Sequence
  Oligonucleotide for detection of SNP TSC0004019
ggattggttaatt

SEQ ID NO: 19250 - DNA, 13 bp, Artificial Sequence
  Oligonucleotide for detection of SNP TSC0004019
aattaaccaatcc

SEQ ID NO: 19251 - DNA, 13 bp, Artificial Sequence
  Oligonucleotide for detection of SNP TSC0004019
ggattgattaatt

SEQ ID NO: 19252 - DNA, 13 bp, Artificial Sequence
  Oligonucleotide for detection of SNP TSC0004019
aattaatcaatcc

SEQ ID NO: 19253 - DNA, 13 bp, Artificial Sequence
  Oligonucleotide for detection of SNP TSC0004020
ttaggtgggggtg

SEQ ID NO: 19254 - DNA, 13 bp, Artificial Sequence
  Oligonucleotide for detection of SNP TSC0004020
cacccccacctaa

SEQ ID NO: 19255 - DNA, 13 bp, Artificial Sequence
  Oligonucleotide for detection of SNP TSC0004020
ttaggttggggtg

SEQ ID NO: 19256 - DNA, 13 bp, Artificial Sequence
  Oligonucleotide for detection of SNP TSC0004020
caccccaacctaa

SEQ ID NO: 19257 - DNA, 13 bp, Artificial Sequence
  Oligonucleotide for detection of SNP TSC0004020
ttaggcgggggtg

SEQ ID NO: 19258 - DNA, 13 bp, Artificial Sequence
  Oligonucleotide for detection of SNP TSC0004020
cacccccgcctaa

SEQ ID NO: 19259 - DNA, 13 bp, Artificial Sequence
  Oligonucleotide for detection of SNP TSC0004020
tatttttgtttgg

SEQ ID NO: 19260 - DNA, 13 bp, Artificial Sequence
  Oligonucleotide for detection of SNP TSC0004020
ccaaacaaaaata

SEQ ID NO: 19261 - DNA, 13 bp, Artificial Sequence
  Oligonucleotide for detection of SNP TSC0004020
tattttagtttgg

SEQ ID NO: 19262 - DNA, 13 bp, Artificial Sequence
  Oligonucleotide for detection of SNP TSC0004020
ccaaactaaaata

SEQ ID NO: 19263 - DNA, 13 bp, Artificial Sequence
  Oligonucleotide for detection of SNP TSC0004020
tattttcgtttgg

SEQ ID NO: 19264 - DNA, 13 bp, Artificial Sequence
  Oligonucleotide for detection of SNP TSC0004020
ccaaacgaaaata

SEQ ID NO: 19265 - DNA, 13 bp, Artificial Sequence
  Oligonucleotide for detection of SNP TSC0004021
gttggtgtttaat

SEQ ID NO: 19266 - DNA, 13 bp, Artificial Sequence
  Oligonucleotide for detection of SNP TSC0004021
attaaacaccaac

SEQ ID NO: 19267 - DNA, 13 bp, Artificial Sequence
  Oligonucleotide for detection of SNP TSC0004021
gttggtatttaat

SEQ ID NO: 19268 - DNA, 13 bp, Artificial Sequence
  Oligonucleotide for detection of SNP TSC0004021
attaaataccaac

SEQ ID NO: 19269 - DNA, 13 bp, Artificial Sequence
  Oligonucleotide for detection of SNP TSC0004021
gttggcgtttaat

SEQ ID NO: 19270 - DNA, 13 bp, Artificial Sequence
  Oligonucleotide for detection of SNP TSC0004021
attaaacgccaac

SEQ ID NO: 19271 - DNA, 13 bp, Artificial Sequence
  Oligonucleotide for detection of SNP TSC0004021
attgaatgttagy

SEQ ID NO: 19272 - DNA, 13 bp, Artificial Sequence
  Oligonucleotide for detection of SNP TSC0004021
rctaacattcaat

SEQ ID NO: 19273 - DNA, 13 bp, Artificial Sequence
  Oligonucleotide for detection of SNP TSC0004021
attgaacgttagy

SEQ ID NO: 19274 - DNA, 13 bp, Artificial Sequence
  Oligonucleotide for detection of SNP TSC0004021
rctaacgttcaat

SEQ ID NO: 19275 - DNA, 13 bp, Artificial Sequence
  Oligonucleotide for detection of SNP TSC0004023
taaagtaggggaa

SEQ ID NO: 19276 - DNA, 13 bp, Artificial Sequence
  Oligonucleotide for detection of SNP TSC0004023
ttcccctacttta

SEQ ID NO: 19277 - DNA, 13 bp, Artificial Sequence
  Oligonucleotide for detection of SNP TSC0004023
taaagtgggggaa

SEQ ID NO: 19278 - DNA, 13 bp, Artificial Sequence
  Oligonucleotide for detection of SNP TSC0004023
ttcccccacttta

SEQ ID NO: 19279 - DNA, 13 bp, Artificial Sequence
  Oligonucleotide for detection of SNP TSC0004023
taaagcgggggaa

SEQ ID NO: 19280 - DNA, 13 bp, Artificial Sequence
  Oligonucleotide for detection of SNP TSC0004023
ttcccccgcttta

SEQ ID NO: 19281 - DNA, 13 bp, Artificial Sequence
  Oligonucleotide for detection of SNP TSC0004023
tttttttgttttg

SEQ ID NO: 19282 - DNA, 13 bp, Artificial Sequence
  Oligonucleotide for detection of SNP TSC0004023
caaaacaaaaaaa

SEQ ID NO: 19283 - DNA, 13 bp, Artificial Sequence
  Oligonucleotide for detection of SNP TSC0004023
ttttttcgttttg

SEQ ID NO: 19284 - DNA, 13 bp, Artificial Sequence
  Oligonucleotide for detection of SNP TSC0004023
caaaacgaaaaaa

SEQ ID NO: 19285 - DNA, 13 bp, Artificial Sequence
  Oligonucleotide for detection of SNP TSC0004024
atttttagtattg

SEQ ID NO: 19286 - DNA, 13 bp, Artificial Sequence
  Oligonucleotide for detection of SNP TSC0004024
caatactaaaaat

SEQ ID NO: 19287 - DNA, 13 bp, Artificial Sequence
  Oligonucleotide for detection of SNP TSC0004024
atttttggtattg

SEQ ID NO: 19288 - DNA, 13 bp, Artificial Sequence
  Oligonucleotide for detection of SNP TSC0004024
caataccaaaaat

SEQ ID NO: 19289 - DNA, 13 bp, Artificial Sequence
  Oligonucleotide for detection of SNP TSC0004025
tggttttgttagg

SEQ ID NO: 19290 - DNA, 13 bp, Artificial Sequence
  Oligonucleotide for detection of SNP TSC0004025
cctaacaaaacca

SEQ ID NO: 19291 - DNA, 13 bp, Artificial Sequence
  Oligonucleotide for detection of SNP TSC0004025
tggtttggttagg

SEQ ID NO: 19292 - DNA, 13 bp, Artificial Sequence
  Oligonucleotide for detection of SNP TSC0004025
cctaaccaaacca

SEQ ID NO: 19293 - DNA, 13 bp, Artificial Sequence
  Oligonucleotide for detection of SNP TSC0004025
tttgataaagtta

SEQ ID NO: 19294 - DNA, 13 bp, Artificial Sequence
  Oligonucleotide for detection of SNP TSC0004025
taactttatcaaa

SEQ ID NO: 19295 - DNA, 13 bp, Artificial Sequence
  Oligonucleotide for detection of SNP TSC0004025
tttgattaagtta

SEQ ID NO: 19296 - DNA, 13 bp, Artificial Sequence
  Oligonucleotide for detection of SNP TSC0004025
taacttaatcaaa

SEQ ID NO: 19297 - DNA, 13 bp, Artificial Sequence
  Oligonucleotide for detection of SNP TSC0004026
aagttaggaaaag

SEQ ID NO: 19298 - DNA, 13 bp, Artificial Sequence
  Oligonucleotide for detection of SNP TSC0004026
cttttcctaactt

SEQ ID NO: 19299 - DNA, 13 bp, Artificial Sequence
  Oligonucleotide for detection of SNP TSC0004026
aagttaagaaaag

SEQ ID NO: 19300 - DNA, 13 bp, Artificial Sequence
  Oligonucleotide for detection of SNP TSC0004026
cttttcttaactt

SEQ ID NO: 19301 - DNA, 13 bp, Artificial Sequence
  Oligonucleotide for detection of SNP TSC0004028
attagaatgtatt

SEQ ID NO: 19302 - DNA, 13 bp, Artificial Sequence
  Oligonucleotide for detection of SNP TSC0004028
aatacattctaat

SEQ ID NO: 19303 - DNA, 13 bp, Artificial Sequence
  Oligonucleotide for detection of SNP TSC0004028
attagagtgtatt

SEQ ID NO: 19304 - DNA, 13 bp, Artificial Sequence
  Oligonucleotide for detection of SNP TSC0004028
aatacactctaat

SEQ ID NO: 19305 - DNA, 13 bp, Artificial Sequence
  Oligonucleotide for detection of SNP TSC0004029
gatttttggtttt

SEQ ID NO: 19306 - DNA, 13 bp, Artificial Sequence
  Oligonucleotide for detection of SNP TSC0004029
aaaaccaaaaatc

SEQ ID NO: 19307 - DNA, 13 bp, Artificial Sequence
  Oligonucleotide for detection of SNP TSC0004029
gattttcggtttt

SEQ ID NO: 19308 - DNA, 13 bp, Artificial Sequence
  Oligonucleotide for detection of SNP TSC0004029
aaaaccgaaaatc

SEQ ID NO: 19309 - DNA, 13 bp, Artificial Sequence
  Oligonucleotide for detection of SNP TSC0004029
agagttggaagty

SEQ ID NO: 19310 - DNA, 13 bp, Artificial Sequence
  Oligonucleotide for detection of SNP TSC0004029
racttccaactct

SEQ ID NO: 19311 - DNA, 13 bp, Artificial Sequence
  Oligonucleotide for detection of SNP TSC0004029
agagttagaagty

SEQ ID NO: 19312 - DNA, 13 bp, Artificial Sequence
  Oligonucleotide for detection of SNP TSC0004029
racttctaactct

SEQ ID NO: 19313 - DNA, 13 bp, Artificial Sequence
  Oligonucleotide for detection of SNP TSC0004029
agagtcggaagty

SEQ ID NO: 19314 - DNA, 13 bp, Artificial Sequence
  Oligonucleotide for detection of SNP TSC0004029
racttccgactct

SEQ ID NO: 19315 - DNA, 13 bp, Artificial Sequence
  Oligonucleotide for detection of SNP TSC0004030
tttgtagtatgty

SEQ ID NO: 19316 - DNA, 13 bp, Artificial Sequence
  Oligonucleotide for detection of SNP TSC0004030
racatactacaaa

SEQ ID NO: 19317 - DNA, 13 bp, Artificial Sequence
  Oligonucleotide for detection of SNP TSC0004030
tttgtattatgty

SEQ ID NO: 19318 - DNA, 13 bp, Artificial Sequence
  Oligonucleotide for detection of SNP TSC0004030
racataatacaaa

SEQ ID NO: 19319 - DNA, 13 bp, Artificial Sequence
  Oligonucleotide for detection of SNP TSC0004030
gatatattgtagg

SEQ ID NO: 19320 - DNA, 13 bp, Artificial Sequence
  Oligonucleotide for detection of SNP TSC0004030
cctacaatatatc

SEQ ID NO: 19321 - DNA, 13 bp, Artificial Sequence
  Oligonucleotide for detection of SNP TSC0004030
gatatagtgtagg

SEQ ID NO: 19322 - DNA, 13 bp, Artificial Sequence
  Oligonucleotide for detection of SNP TSC0004030
cctacactatatc

SEQ ID NO: 19323 - DNA, 13 bp, Artificial Sequence
  Oligonucleotide for detection of SNP TSC0004031
aagaaggaggagg

SEQ ID NO: 19324 - DNA, 13 bp, Artificial Sequence
  Oligonucleotide for detection of SNP TSC0004031
cctcctccttctt

SEQ ID NO: 19325 - DNA, 13 bp, Artificial Sequence
  Oligonucleotide for detection of SNP TSC0004031
aagaagaaggagg

SEQ ID NO: 19326 - DNA, 13 bp, Artificial Sequence
  Oligonucleotide for detection of SNP TSC0004031
cctccttcttctt

SEQ ID NO: 19327 - DNA, 13 bp, Artificial Sequence
  Oligonucleotide for detection of SNP TSC0004032
tataatatggata

SEQ ID NO: 19328 - DNA, 13 bp, Artificial Sequence
  Oligonucleotide for detection of SNP TSC0004032
tatccatattata

SEQ ID NO: 19329 - DNA, 13 bp, Artificial Sequence
  Oligonucleotide for detection of SNP TSC0004032
tataatgtggata

SEQ ID NO: 19330 - DNA, 13 bp, Artificial Sequence
  Oligonucleotide for detection of SNP TSC0004032
tatccacattata

SEQ ID NO: 19331 - DNA, 13 bp, Artificial Sequence
  Oligonucleotide for detection of SNP TSC0004032
tataacgtggata

SEQ ID NO: 19332 - DNA, 13 bp, Artificial Sequence
  Oligonucleotide for detection of SNP TSC0004032
tatccacgttata

SEQ ID NO: 19333 - DNA, 13 bp, Artificial Sequence
  Oligonucleotide for detection of SNP TSC0004032
tgtttatgttatg

SEQ ID NO: 19334 - DNA, 13 bp, Artificial Sequence
  Oligonucleotide for detection of SNP TSC0004032
cataacataaaca

SEQ ID NO: 19335 - DNA, 13 bp, Artificial Sequence
  Oligonucleotide for detection of SNP TSC0004032
tgtttacgttatg

SEQ ID NO: 19336 - DNA, 13 bp, Artificial Sequence
  Oligonucleotide for detection of SNP TSC0004032
cataacgtaaaca

SEQ ID NO: 19337 - DNA, 13 bp, Artificial Sequence
  Oligonucleotide for detection of SNP TSC0004033
aatgaagttagtg

SEQ ID NO: 19338 - DNA, 13 bp, Artificial Sequence
  Oligonucleotide for detection of SNP TSC0004033
cactaacttcatt

SEQ ID NO: 19339 - DNA, 13 bp, Artificial Sequence
  Oligonucleotide for detection of SNP TSC0004033
aatgaaattagtg

SEQ ID NO: 19340 - DNA, 13 bp, Artificial Sequence
  Oligonucleotide for detection of SNP TSC0004033
cactaatttcatt

SEQ ID NO: 19341 - DNA, 13 bp, Artificial Sequence
  Oligonucleotide for detection of SNP TSC0004034
taaatatggagaa

SEQ ID NO: 19342 - DNA, 13 bp, Artificial Sequence
  Oligonucleotide for detection of SNP TSC0004034
ttctccatattta

SEQ ID NO: 19343 - DNA, 13 bp, Artificial Sequence
  Oligonucleotide for detection of SNP TSC0004034
taaatacggagaa

SEQ ID NO: 19344 - DNA, 13 bp, Artificial Sequence
  Oligonucleotide for detection of SNP TSC0004034
ttctccgtattta

SEQ ID NO: 19345 - DNA, 13 bp, Artificial Sequence
  Oligonucleotide for detection of SNP TSC0004035
tgttgttgtgatg

SEQ ID NO: 19346 - DNA, 13 bp, Artificial Sequence
  Oligonucleotide for detection of SNP TSC0004035
catcacaacaaca

SEQ ID NO: 19347 - DNA, 13 bp, Artificial Sequence
  Oligonucleotide for detection of SNP TSC0004035
tgttgtggtgatg

SEQ ID NO: 19348 - DNA, 13 bp, Artificial Sequence
  Oligonucleotide for detection of SNP TSC0004035
catcaccacaaca

SEQ ID NO: 19349 - DNA, 13 bp, Artificial Sequence
  Oligonucleotide for detection of SNP TSC0004035
cgttgttgtgatg

SEQ ID NO: 19350 - DNA, 13 bp, Artificial Sequence
  Oligonucleotide for detection of SNP TSC0004035
catcacaacaacg

SEQ ID NO: 19351 - DNA, 13 bp, Artificial Sequence
  Oligonucleotide for detection of SNP TSC0004035
cgttgtggtgatg

SEQ ID NO: 19352 - DNA, 13 bp, Artificial Sequence
  Oligonucleotide for detection of SNP TSC0004035
catcaccacaacg

SEQ ID NO: 19353 - DNA, 13 bp, Artificial Sequence
  Oligonucleotide for detection of SNP TSC0004035
tattataataatg

SEQ ID NO: 19354 - DNA, 13 bp, Artificial Sequence
  Oligonucleotide for detection of SNP TSC0004035
cattattataata

SEQ ID NO: 19355 - DNA, 13 bp, Artificial Sequence
  Oligonucleotide for detection of SNP TSC0004035
tattattataatg

SEQ ID NO: 19356 - DNA, 13 bp, Artificial Sequence
  Oligonucleotide for detection of SNP TSC0004035
cattataataata

SEQ ID NO: 19357 - DNA, 13 bp, Artificial Sequence
  Oligonucleotide for detection of SNP TSC0004035
tattataataacg

SEQ ID NO: 19358 - DNA, 13 bp, Artificial Sequence
  Oligonucleotide for detection of SNP TSC0004035
cgttattataata

SEQ ID NO: 19359 - DNA, 13 bp, Artificial Sequence
  Oligonucleotide for detection of SNP TSC0004035
tattattataacg

SEQ ID NO: 19360 - DNA, 13 bp, Artificial Sequence
  Oligonucleotide for detection of SNP TSC0004035
cgttataataata

SEQ ID NO: 19361 - DNA, 13 bp, Artificial Sequence
  Oligonucleotide for detection of SNP TSC0004036
tgggttatataty

SEQ ID NO: 19362 - DNA, 13 bp, Artificial Sequence
  Oligonucleotide for detection of SNP TSC0004036
ratatataaccca

SEQ ID NO: 19363 - DNA, 13 bp, Artificial Sequence
  Oligonucleotide for detection of SNP TSC0004036
tgggttttataty

SEQ ID NO: 19364 - DNA, 13 bp, Artificial Sequence
  Oligonucleotide for detection of SNP TSC0004036
ratataaaaccca

SEQ ID NO: 19365 - DNA, 13 bp, Artificial Sequence
  Oligonucleotide for detection of SNP TSC0004036
cgggttatataty

SEQ ID NO: 19366 - DNA, 13 bp, Artificial Sequence
  Oligonucleotide for detection of SNP TSC0004036
ratatataacccg

SEQ ID NO: 19367 - DNA, 13 bp, Artificial Sequence
  Oligonucleotide for detection of SNP TSC0004036
cgggttttataty

SEQ ID NO: 19368 - DNA, 13 bp, Artificial Sequence
  Oligonucleotide for detection of SNP TSC0004036
ratataaaacccg

SEQ ID NO: 19369 - DNA, 13 bp, Artificial Sequence
  Oligonucleotide for detection of SNP TSC0004036
ggtgtataatttg

SEQ ID NO: 19370 - DNA, 13 bp, Artificial Sequence
  Oligonucleotide for detection of SNP TSC0004036
caaattatacacc

SEQ ID NO: 19371 - DNA, 13 bp, Artificial Sequence
  Oligonucleotide for detection of SNP TSC0004036
ggtgtaaaatttg

SEQ ID NO: 19372 - DNA, 13 bp, Artificial Sequence
  Oligonucleotide for detection of SNP TSC0004036
caaattttacacc

SEQ ID NO: 19373 - DNA, 13 bp, Artificial Sequence
  Oligonucleotide for detection of SNP TSC0004036
ggtgtataattcg

SEQ ID NO: 19374 - DNA, 13 bp, Artificial Sequence
  Oligonucleotide for detection of SNP TSC0004036
cgaattatacacc

SEQ ID NO: 19375 - DNA, 13 bp, Artificial Sequence
  Oligonucleotide for detection of SNP TSC0004036
ggtgtaaaattcg

SEQ ID NO: 19376 - DNA, 13 bp, Artificial Sequence
  Oligonucleotide for detection of SNP TSC0004036
cgaattttacacc

SEQ ID NO: 19377 - DNA, 13 bp, Artificial Sequence
  Oligonucleotide for detection of SNP TSC0004037
ttttagtggaggg

SEQ ID NO: 19378 - DNA, 13 bp, Artificial Sequence
  Oligonucleotide for detection of SNP TSC0004037
ccctccactaaaa

SEQ ID NO: 19379 - DNA, 13 bp, Artificial Sequence
  Oligonucleotide for detection of SNP TSC0004037
ttttagcggaggg

SEQ ID NO: 19380 - DNA, 13 bp, Artificial Sequence
  Oligonucleotide for detection of SNP TSC0004037
ccctccgctaaaa

SEQ ID NO: 19381 - DNA, 13 bp, Artificial Sequence
  Oligonucleotide for detection of SNP TSC0004037
ttttttattgaaa

SEQ ID NO: 19382 - DNA, 13 bp, Artificial Sequence
  Oligonucleotide for detection of SNP TSC0004037
tttcaataaaaaa

SEQ ID NO: 19383 - DNA, 13 bp, Artificial Sequence
  Oligonucleotide for detection of SNP TSC0004037
ttttttgttgaaa

SEQ ID NO: 19384 - DNA, 13 bp, Artificial Sequence
  Oligonucleotide for detection of SNP TSC0004037
tttcaacaaaaaa

SEQ ID NO: 19385 - DNA, 13 bp, Artificial Sequence
  Oligonucleotide for detection of SNP TSC0004037
tttttcgttgaaa

SEQ ID NO: 19386 - DNA, 13 bp, Artificial Sequence
  Oligonucleotide for detection of SNP TSC0004037
tttcaacgaaaaa

SEQ ID NO: 19387 - DNA, 13 bp, Artificial Sequence
  Oligonucleotide for detection of SNP TSC0004038
gaagttgttagag

SEQ ID NO: 19388 - DNA, 13 bp, Artificial Sequence
  Oligonucleotide for detection of SNP TSC0004038
ctctaacaacttc

SEQ ID NO: 19389 - DNA, 13 bp, Artificial Sequence
  Oligonucleotide for detection of SNP TSC0004038
gaagttattagag

SEQ ID NO: 19390 - DNA, 13 bp, Artificial Sequence
  Oligonucleotide for detection of SNP TSC0004038
ctctaataacttc

SEQ ID NO: 19391 - DNA, 13 bp, Artificial Sequence
  Oligonucleotide for detection of SNP TSC0004038
gaagtcgttagag

SEQ ID NO: 19392 - DNA, 13 bp, Artificial Sequence
  Oligonucleotide for detection of SNP TSC0004038
ctctaacgacttc

SEQ ID NO: 19393 - DNA, 13 bp, Artificial Sequence
  Oligonucleotide for detection of SNP TSC0004038
ttttagtggttty

SEQ ID NO: 19394 - DNA, 13 bp, Artificial Sequence
  Oligonucleotide for detection of SNP TSC0004038
raaaccactaaaa

SEQ ID NO: 19395 - DNA, 13 bp, Artificial Sequence
  Oligonucleotide for detection of SNP TSC0004038
ttttagcggttty

SEQ ID NO: 19396 - DNA, 13 bp, Artificial Sequence
  Oligonucleotide for detection of SNP TSC0004038
raaaccgctaaaa

SEQ ID NO: 19397 - DNA, 13 bp, Artificial Sequence
  Oligonucleotide for detection of SNP TSC0004039
ttaatattattat

SEQ ID NO: 19398 - DNA, 13 bp, Artificial Sequence
  Oligonucleotide for detection of SNP TSC0004039
ataataatattaa

SEQ ID NO: 19399 - DNA, 13 bp, Artificial Sequence
  Oligonucleotide for detection of SNP TSC0004039
ttaataatattat

SEQ ID NO: 19400 - DNA, 13 bp, Artificial Sequence
  Oligonucleotide for detection of SNP TSC0004039
ataatattattaa

SEQ ID NO: 19401 - DNA, 13 bp, Artificial Sequence
  Oligonucleotide for detection of SNP TSC0004039
atgatgatattaa

SEQ ID NO: 19402 - DNA, 13 bp, Artificial Sequence
  Oligonucleotide for detection of SNP TSC0004039
ttaatatcatcat

SEQ ID NO: 19403 - DNA, 13 bp, Artificial Sequence
  Oligonucleotide for detection of SNP TSC0004039
atgatgttattaa

SEQ ID NO: 19404 - DNA, 13 bp, Artificial Sequence
  Oligonucleotide for detection of SNP TSC0004039
ttaataacatcat

SEQ ID NO: 19405 - DNA, 13 bp, Artificial Sequence
  Oligonucleotide for detection of SNP TSC0004040
gatatggggtgtg

SEQ ID NO: 19406 - DNA, 13 bp, Artificial Sequence
  Oligonucleotide for detection of SNP TSC0004040
cacaccccatatc

SEQ ID NO: 19407 - DNA, 13 bp, Artificial Sequence
  Oligonucleotide for detection of SNP TSC0004040
gatatgaggtgtg

SEQ ID NO: 19408 - DNA, 13 bp, Artificial Sequence
  Oligonucleotide for detection of SNP TSC0004040
cacacctcatatc

SEQ ID NO: 19409 - DNA, 13 bp, Artificial Sequence
  Oligonucleotide for detection of SNP TSC0004041
gttaggtttttty

SEQ ID NO: 19410 - DNA, 13 bp, Artificial Sequence
  Oligonucleotide for detection of SNP TSC0004041
raaaaaacctaac

SEQ ID NO: 19411 - DNA, 13 bp, Artificial Sequence
  Oligonucleotide for detection of SNP TSC0004041
gttagggttttty

SEQ ID NO: 19412 - DNA, 13 bp, Artificial Sequence
  Oligonucleotide for detection of SNP TSC0004041
raaaaaccctaac

SEQ ID NO: 19413 - DNA, 13 bp, Artificial Sequence
  Oligonucleotide for detection of SNP TSC0004041
gaggggatttggy

SEQ ID NO: 19414 - DNA, 13 bp, Artificial Sequence
  Oligonucleotide for detection of SNP TSC0004041
rccaaatcccctc

SEQ ID NO: 19415 - DNA, 13 bp, Artificial Sequence
  Oligonucleotide for detection of SNP TSC0004041
gaggggttttggy

SEQ ID NO: 19416 - DNA, 13 bp, Artificial Sequence
  Oligonucleotide for detection of SNP TSC0004041
rccaaaacccctc

SEQ ID NO: 19417 - DNA, 13 bp, Artificial Sequence
  Oligonucleotide for detection of SNP TSC0004042
tattttggattat

SEQ ID NO: 19418 - DNA, 13 bp, Artificial Sequence
  Oligonucleotide for detection of SNP TSC0004042
ataatccaaaata

SEQ ID NO: 19419 - DNA, 13 bp, Artificial Sequence
  Oligonucleotide for detection of SNP TSC0004042
tattttagattat

SEQ ID NO: 19420 - DNA, 13 bp, Artificial Sequence
  Oligonucleotide for detection of SNP TSC0004042
ataatctaaaata

SEQ ID NO: 19421 - DNA, 13 bp, Artificial Sequence
  Oligonucleotide for detection of SNP TSC0004043
atgtttgttaggy

SEQ ID NO: 19422 - DNA, 13 bp, Artificial Sequence
  Oligonucleotide for detection of SNP TSC0004043
rcctaacaaacat

SEQ ID NO: 19423 - DNA, 13 bp, Artificial Sequence
  Oligonucleotide for detection of SNP TSC0004043
atgttttttaggy

SEQ ID NO: 19424 - DNA, 13 bp, Artificial Sequence
  Oligonucleotide for detection of SNP TSC0004043
rcctaaaaaacat

SEQ ID NO: 19425 - DNA, 13 bp, Artificial Sequence
  Oligonucleotide for detection of SNP TSC0004043
atgttcgttaggy

SEQ ID NO: 19426 - DNA, 13 bp, Artificial Sequence
  Oligonucleotide for detection of SNP TSC0004043
rcctaacgaacat

SEQ ID NO: 19427 - DNA, 13 bp, Artificial Sequence
  Oligonucleotide for detection of SNP TSC0004043
gtttggtgaatat

SEQ ID NO: 19428 - DNA, 13 bp, Artificial Sequence
  Oligonucleotide for detection of SNP TSC0004043
atattcaccaaac

SEQ ID NO: 19429 - DNA, 13 bp, Artificial Sequence
  Oligonucleotide for detection of SNP TSC0004043
gtttggagaatat

SEQ ID NO: 19430 - DNA, 13 bp, Artificial Sequence
  Oligonucleotide for detection of SNP TSC0004043
atattctccaaac

SEQ ID NO: 19431 - DNA, 13 bp, Artificial Sequence
  Oligonucleotide for detection of SNP TSC0004043
gtttggcgaatat

SEQ ID NO: 19432 - DNA, 13 bp, Artificial Sequence
  Oligonucleotide for detection of SNP TSC0004043
atattcgccaaac

SEQ ID NO: 19433 - DNA, 13 bp, Artificial Sequence
  Oligonucleotide for detection of SNP TSC0004044
ttagttggtttaa

SEQ ID NO: 19434 - DNA, 13 bp, Artificial Sequence
  Oligonucleotide for detection of SNP TSC0004044
ttaaaccaactaa

SEQ ID NO: 19435 - DNA, 13 bp, Artificial Sequence
  Oligonucleotide for detection of SNP TSC0004044
ttagttagtttaa

SEQ ID NO: 19436 - DNA, 13 bp, Artificial Sequence
  Oligonucleotide for detection of SNP TSC0004044
ttaaactaactaa

SEQ ID NO: 19437 - DNA, 13 bp, Artificial Sequence
  Oligonucleotide for detection of SNP TSC0004045
tatgtatgaataa

SEQ ID NO: 19438 - DNA, 13 bp, Artificial Sequence
  Oligonucleotide for detection of SNP TSC0004045
ttattcatacata

SEQ ID NO: 19439 - DNA, 13 bp, Artificial Sequence
  Oligonucleotide for detection of SNP TSC0004045
tatgtacgaataa

SEQ ID NO: 19440 - DNA, 13 bp, Artificial Sequence
  Oligonucleotide for detection of SNP TSC0004045
ttattcgtacata

SEQ ID NO: 19441 - DNA, 13 bp, Artificial Sequence
  Oligonucleotide for detection of SNP TSC0004045
ttatttgtatata

SEQ ID NO: 19442 - DNA, 13 bp, Artificial Sequence
  Oligonucleotide for detection of SNP TSC0004045
tatatacaaataa

SEQ ID NO: 19443 - DNA, 13 bp, Artificial Sequence
  Oligonucleotide for detection of SNP TSC0004045
ttatttatatata

SEQ ID NO: 19444 - DNA, 13 bp, Artificial Sequence
  Oligonucleotide for detection of SNP TSC0004045
tatatataaataa

SEQ ID NO: 19445 - DNA, 13 bp, Artificial Sequence
  Oligonucleotide for detection of SNP TSC0004045
ttattcgtatata

SEQ ID NO: 19446 - DNA, 13 bp, Artificial Sequence
  Oligonucleotide for detection of SNP TSC0004045
tatatacgaataa

SEQ ID NO: 19447 - DNA, 13 bp, Artificial Sequence
  Oligonucleotide for detection of SNP TSC0004046
tatagtaagtttg

SEQ ID NO: 19448 - DNA, 13 bp, Artificial Sequence
  Oligonucleotide for detection of SNP TSC0004046
caaacttactata

SEQ ID NO: 19449 - DNA, 13 bp, Artificial Sequence
  Oligonucleotide for detection of SNP TSC0004046
tatagtgagtttg

SEQ ID NO: 19450 - DNA, 13 bp, Artificial Sequence
  Oligonucleotide for detection of SNP TSC0004046
caaactcactata

SEQ ID NO: 19451 - DNA, 13 bp, Artificial Sequence
  Oligonucleotide for detection of SNP TSC0004047
aagtggttatatg

SEQ ID NO: 19452 - DNA, 13 bp, Artificial Sequence
  Oligonucleotide for detection of SNP TSC0004047
catataaccactt

SEQ ID NO: 19453 - DNA, 13 bp, Artificial Sequence
  Oligonucleotide for detection of SNP TSC0004047
aagtggatatatg

SEQ ID NO: 19454 - DNA, 13 bp, Artificial Sequence
  Oligonucleotide for detection of SNP TSC0004047
catatatccactt

SEQ ID NO: 19455 - DNA, 13 bp, Artificial Sequence
  Oligonucleotide for detection of SNP TSC0004047
tatgtaattattt

SEQ ID NO: 19456 - DNA, 13 bp, Artificial Sequence
  Oligonucleotide for detection of SNP TSC0004047
aaataattacata

SEQ ID NO: 19457 - DNA, 13 bp, Artificial Sequence
  Oligonucleotide for detection of SNP TSC0004047
tatgtatttattt

SEQ ID NO: 19458 - DNA, 13 bp, Artificial Sequence
  Oligonucleotide for detection of SNP TSC0004047
aaataaatacata

SEQ ID NO: 19459 - DNA, 13 bp, Artificial Sequence
  Oligonucleotide for detection of SNP TSC0004049
tgttgttgttatg

SEQ ID NO: 19460 - DNA, 13 bp, Artificial Sequence
  Oligonucleotide for detection of SNP TSC0004049
cataacaacaaca

SEQ ID NO: 19461 - DNA, 13 bp, Artificial Sequence
  Oligonucleotide for detection of SNP TSC0004049
tgtcgttgttatg

SEQ ID NO: 19462 - DNA, 13 bp, Artificial Sequence
  Oligonucleotide for detection of SNP TSC0004049
cataacaacgaca

SEQ ID NO: 19463 - DNA, 13 bp, Artificial Sequence
  Oligonucleotide for detection of SNP TSC0004049
tgttgtcgttatg

SEQ ID NO: 19464 - DNA, 13 bp, Artificial Sequence
  Oligonucleotide for detection of SNP TSC0004049
cataacgacaaca

SEQ ID NO: 19465 - DNA, 13 bp, Artificial Sequence
  Oligonucleotide for detection of SNP TSC0004049
tgtcgtcgttatg

SEQ ID NO: 19466 - DNA, 13 bp, Artificial Sequence
  Oligonucleotide for detection of SNP TSC0004049
cataacgacgaca

SEQ ID NO: 19467 - DNA, 13 bp, Artificial Sequence
  Oligonucleotide for detection of SNP TSC0004049
tatagtggtggta

SEQ ID NO: 19468 - DNA, 13 bp, Artificial Sequence
  Oligonucleotide for detection of SNP TSC0004049
taccaccactata

SEQ ID NO: 19469 - DNA, 13 bp, Artificial Sequence
  Oligonucleotide for detection of SNP TSC0004049
tatagtagtggta

SEQ ID NO: 19470 - DNA, 13 bp, Artificial Sequence
  Oligonucleotide for detection of SNP TSC0004049
taccactactata

SEQ ID NO: 19471 - DNA, 13 bp, Artificial Sequence
  Oligonucleotide for detection of SNP TSC0004049
tatagcggtggta

SEQ ID NO: 19472 - DNA, 13 bp, Artificial Sequence
  Oligonucleotide for detection of SNP TSC0004049
taccaccgctata

SEQ ID NO: 19473 - DNA, 13 bp, Artificial Sequence
  Oligonucleotide for detection of SNP TSC0004049
tatagtagcggta

SEQ ID NO: 19474 - DNA, 13 bp, Artificial Sequence
  Oligonucleotide for detection of SNP TSC0004049
taccgctactata

SEQ ID NO: 19475 - DNA, 13 bp, Artificial Sequence
  Oligonucleotide for detection of SNP TSC0004049
tatagtggcggta

SEQ ID NO: 19476 - DNA, 13 bp, Artificial Sequence
  Oligonucleotide for detection of SNP TSC0004049
taccgccactata

SEQ ID NO: 19477 - DNA, 13 bp, Artificial Sequence
  Oligonucleotide for detection of SNP TSC0004049
tatagcggcggta

SEQ ID NO: 19478 - DNA, 13 bp, Artificial Sequence
  Oligonucleotide for detection of SNP TSC0004049
taccgccgctata

SEQ ID NO: 19479 - DNA, 13 bp, Artificial Sequence
  Oligonucleotide for detection of SNP TSC0004050
ggatgggggtggt

SEQ ID NO: 19480 - DNA, 13 bp, Artificial Sequence
  Oligonucleotide for detection of SNP TSC0004050
accacccccatcc

SEQ ID NO: 19481 - DNA, 13 bp, Artificial Sequence
  Oligonucleotide for detection of SNP TSC0004050
ggatggaggtggt

SEQ ID NO: 19482 - DNA, 13 bp, Artificial Sequence
  Oligonucleotide for detection of SNP TSC0004050
accacctccatcc

SEQ ID NO: 19483 - DNA, 13 bp, Artificial Sequence
  Oligonucleotide for detection of SNP TSC0004051
ttattttattttt

SEQ ID NO: 19484 - DNA, 13 bp, Artificial Sequence
  Oligonucleotide for detection of SNP TSC0004051
aaaaataaaataa

SEQ ID NO: 19485 - DNA, 13 bp, Artificial Sequence
  Oligonucleotide for detection of SNP TSC0004051
ttatttgattttt

SEQ ID NO: 19486 - DNA, 13 bp, Artificial Sequence
  Oligonucleotide for detection of SNP TSC0004051
aaaaatcaaataa

SEQ ID NO: 19487 - DNA, 13 bp, Artificial Sequence
  Oligonucleotide for detection of SNP TSC0004051
ttattcgattttt

SEQ ID NO: 19488 - DNA, 13 bp, Artificial Sequence
  Oligonucleotide for detection of SNP TSC0004051
aaaaatcgaataa

SEQ ID NO: 19489 - DNA, 13 bp, Artificial Sequence
  Oligonucleotide for detection of SNP TSC0004051
aggggtggggtgg

SEQ ID NO: 19490 - DNA, 13 bp, Artificial Sequence
  Oligonucleotide for detection of SNP TSC0004051
ccaccccacccct

SEQ ID NO: 19491 - DNA, 13 bp, Artificial Sequence
  Oligonucleotide for detection of SNP TSC0004051
aggggttgggtgg

SEQ ID NO: 19492 - DNA, 13 bp, Artificial Sequence
  Oligonucleotide for detection of SNP TSC0004051
ccacccaacccct

SEQ ID NO: 19493 - DNA, 13 bp, Artificial Sequence
  Oligonucleotide for detection of SNP TSC0004051
aggggtcgggtgg

SEQ ID NO: 19494 - DNA, 13 bp, Artificial Sequence
  Oligonucleotide for detection of SNP TSC0004051
ccacccgacccct

SEQ ID NO: 19495 - DNA, 13 bp, Artificial Sequence
  Oligonucleotide for detection of SNP TSC0004052
ttggagaaaaatg

SEQ ID NO: 19496 - DNA, 13 bp, Artificial Sequence
  Oligonucleotide for detection of SNP TSC0004052
catttttctccaa

SEQ ID NO: 19497 - DNA, 13 bp, Artificial Sequence
  Oligonucleotide for detection of SNP TSC0004052
ttggagtaaaatg

SEQ ID NO: 19498 - DNA, 13 bp, Artificial Sequence
  Oligonucleotide for detection of SNP TSC0004052
cattttactccaa

SEQ ID NO: 19499 - DNA, 13 bp, Artificial Sequence
  Oligonucleotide for detection of SNP TSC0004052
tatttttttttaa

SEQ ID NO: 19500 - DNA, 13 bp, Artificial Sequence
  Oligonucleotide for detection of SNP TSC0004052
ttaaaaaaaaata

SEQ ID NO: 19501 - DNA, 13 bp, Artificial Sequence
  Oligonucleotide for detection of SNP TSC0004052
tattttgttttaa

SEQ ID NO: 19502 - DNA, 13 bp, Artificial Sequence
  Oligonucleotide for detection of SNP TSC0004052
ttaaaacaaaata

SEQ ID NO: 19503 - DNA, 13 bp, Artificial Sequence
  Oligonucleotide for detection of SNP TSC0004053
tttgttgaaaatt

SEQ ID NO: 19504 - DNA, 13 bp, Artificial Sequence
  Oligonucleotide for detection of SNP TSC0004053
aattttcaacaaa

SEQ ID NO: 19505 - DNA, 13 bp, Artificial Sequence
  Oligonucleotide for detection of SNP TSC0004053
tttgttaaaaatt

SEQ ID NO: 19506 - DNA, 13 bp, Artificial Sequence
  Oligonucleotide for detection of SNP TSC0004053
aatttttaacaaa

SEQ ID NO: 19507 - DNA, 13 bp, Artificial Sequence
  Oligonucleotide for detection of SNP TSC0004053
tttgtcgaaaatt

SEQ ID NO: 19508 - DNA, 13 bp, Artificial Sequence
  Oligonucleotide for detection of SNP TSC0004053
aattttcgacaaa

SEQ ID NO: 19509 - DNA, 13 bp, Artificial Sequence
  Oligonucleotide for detection of SNP TSC0004053
aatttttgatagg

SEQ ID NO: 19510 - DNA, 13 bp, Artificial Sequence
  Oligonucleotide for detection of SNP TSC0004053
cctatcaaaaatt

SEQ ID NO: 19511 - DNA, 13 bp, Artificial Sequence
  Oligonucleotide for detection of SNP TSC0004053
aattttcgatagg

SEQ ID NO: 19512 - DNA, 13 bp, Artificial Sequence
  Oligonucleotide for detection of SNP TSC0004053
cctatcgaaaatt

SEQ ID NO: 19513 - DNA, 13 bp, Artificial Sequence
  Oligonucleotide for detection of SNP TSC0004055
tagtgggttagag

SEQ ID NO: 19514 - DNA, 13 bp, Artificial Sequence
  Oligonucleotide for detection of SNP TSC0004055
ctctaacccacta

SEQ ID NO: 19515 - DNA, 13 bp, Artificial Sequence
  Oligonucleotide for detection of SNP TSC0004055
tagtggattagag

SEQ ID NO: 19516 - DNA, 13 bp, Artificial Sequence
  Oligonucleotide for detection of SNP TSC0004055
ctctaatccacta

SEQ ID NO: 19517 - DNA, 13 bp, Artificial Sequence
  Oligonucleotide for detection of SNP TSC0004056
agttttattttty

SEQ ID NO: 19518 - DNA, 13 bp, Artificial Sequence
  Oligonucleotide for detection of SNP TSC0004056
raaaaataaaact

SEQ ID NO: 19519 - DNA, 13 bp, Artificial Sequence
  Oligonucleotide for detection of SNP TSC0004056
ggaggataggatt

SEQ ID NO: 19520 - DNA, 13 bp, Artificial Sequence
  Oligonucleotide for detection of SNP TSC0004056
aatcctatcctcc

SEQ ID NO: 19521 - DNA, 13 bp, Artificial Sequence
  Oligonucleotide for detection of SNP TSC0004056
ggaggagaggatt

SEQ ID NO: 19522 - DNA, 13 bp, Artificial Sequence
  Oligonucleotide for detection of SNP TSC0004056
aatcctctcctcc

SEQ ID NO: 19523 - DNA, 13 bp, Artificial Sequence
  Oligonucleotide for detection of SNP TSC0004057
tagaaaattttty

SEQ ID NO: 19524 - DNA, 13 bp, Artificial Sequence
  Oligonucleotide for detection of SNP TSC0004057
raaaaattttcta

SEQ ID NO: 19525 - DNA, 13 bp, Artificial Sequence
  Oligonucleotide for detection of SNP TSC0004057
tagaaagttttty

SEQ ID NO: 19526 - DNA, 13 bp, Artificial Sequence
  Oligonucleotide for detection of SNP TSC0004057
raaaaactttcta

SEQ ID NO: 19527 - DNA, 13 bp, Artificial Sequence
  Oligonucleotide for detection of SNP TSC0004058
ttaggttggattt

SEQ ID NO: 19528 - DNA, 13 bp, Artificial Sequence
  Oligonucleotide for detection of SNP TSC0004058
aaatccaacctaa

SEQ ID NO: 19529 - DNA, 13 bp, Artificial Sequence
  Oligonucleotide for detection of SNP TSC0004058
ttaggtcggattt

SEQ ID NO: 19530 - DNA, 13 bp, Artificial Sequence
  Oligonucleotide for detection of SNP TSC0004058
aaatccgacctaa

SEQ ID NO: 19531 - DNA, 13 bp, Artificial Sequence
  Oligonucleotide for detection of SNP TSC0004058
aggtttggtttag

SEQ ID NO: 19532 - DNA, 13 bp, Artificial Sequence
  Oligonucleotide for detection of SNP TSC0004058
ctaaaccaaacct

SEQ ID NO: 19533 - DNA, 13 bp, Artificial Sequence
  Oligonucleotide for detection of SNP TSC0004058
aggtttagtttag

SEQ ID NO: 19534 - DNA, 13 bp, Artificial Sequence
  Oligonucleotide for detection of SNP TSC0004058
ctaaactaaacct

SEQ ID NO: 19535 - DNA, 13 bp, Artificial Sequence
  Oligonucleotide for detection of SNP TSC0004058
aggttcggtttag

SEQ ID NO: 19536 - DNA, 13 bp, Artificial Sequence
  Oligonucleotide for detection of SNP TSC0004058
ctaaaccgaacct

SEQ ID NO: 19537 - DNA, 13 bp, Artificial Sequence
  Oligonucleotide for detection of SNP TSC0004059
tattgagtttttt

SEQ ID NO: 19538 - DNA, 13 bp, Artificial Sequence
  Oligonucleotide for detection of SNP TSC0004059
aaaaaactcaata

SEQ ID NO: 19539 - DNA, 13 bp, Artificial Sequence
  Oligonucleotide for detection of SNP TSC0004059
tattgattttttt

SEQ ID NO: 19540 - DNA, 13 bp, Artificial Sequence
  Oligonucleotide for detection of SNP TSC0004059
aaaaaaatcaata

SEQ ID NO: 19541 - DNA, 13 bp, Artificial Sequence
  Oligonucleotide for detection of SNP TSC0004059
aaagaatttaatg

SEQ ID NO: 19542 - DNA, 13 bp, Artificial Sequence
  Oligonucleotide for detection of SNP TSC0004059
cattaaattcttt

SEQ ID NO: 19543 - DNA, 13 bp, Artificial Sequence
  Oligonucleotide for detection of SNP TSC0004059
aaagaaattaatg

SEQ ID NO: 19544 - DNA, 13 bp, Artificial Sequence
  Oligonucleotide for detection of SNP TSC0004059
cattaatttcttt

SEQ ID NO: 19545 - DNA, 13 bp, Artificial Sequence
  Oligonucleotide for detection of SNP TSC0004060
ttgggtgtttaga

SEQ ID NO: 19546 - DNA, 13 bp, Artificial Sequence
  Oligonucleotide for detection of SNP TSC0004060
tctaaacacccaa

SEQ ID NO: 19547 - DNA, 13 bp, Artificial Sequence
  Oligonucleotide for detection of SNP TSC0004060
ttgggtttttaga

SEQ ID NO: 19548 - DNA, 13 bp, Artificial Sequence
  Oligonucleotide for detection of SNP TSC0004060
tctaaaaacccaa

SEQ ID NO: 19549 - DNA, 13 bp, Artificial Sequence
  Oligonucleotide for detection of SNP TSC0004060
tttgggtatttag

SEQ ID NO: 19550 - DNA, 13 bp, Artificial Sequence
  Oligonucleotide for detection of SNP TSC0004060
ctaaatacccaaa

SEQ ID NO: 19551 - DNA, 13 bp, Artificial Sequence
  Oligonucleotide for detection of SNP TSC0004060
tttggggatttag

SEQ ID NO: 19552 - DNA, 13 bp, Artificial Sequence
  Oligonucleotide for detection of SNP TSC0004060
ctaaatccccaaa

SEQ ID NO: 19553 - DNA, 13 bp, Artificial Sequence
  Oligonucleotide for detection of SNP TSC0004061
gattatgaggtta

SEQ ID NO: 19554 - DNA, 13 bp, Artificial Sequence
  Oligonucleotide for detection of SNP TSC0004061
taacctcataatc

SEQ ID NO: 19555 - DNA, 13 bp, Artificial Sequence
  Oligonucleotide for detection of SNP TSC0004061
gattataaggtta

SEQ ID NO: 19556 - DNA, 13 bp, Artificial Sequence
  Oligonucleotide for detection of SNP TSC0004061
taaccttataatc

SEQ ID NO: 19557 - DNA, 13 bp, Artificial Sequence
  Oligonucleotide for detection of SNP TSC0004062
tgatgggtggtgy

SEQ ID NO: 19558 - DNA, 13 bp, Artificial Sequence
  Oligonucleotide for detection of SNP TSC0004062
rcaccacccatca

SEQ ID NO: 19559 - DNA, 13 bp, Artificial Sequence
  Oligonucleotide for detection of SNP TSC0004062
tgatggatggtgy

SEQ ID NO: 19560 - DNA, 13 bp, Artificial Sequence
  Oligonucleotide for detection of SNP TSC0004062
rcaccatccatca

SEQ ID NO: 19561 - DNA, 13 bp, Artificial Sequence
  Oligonucleotide for detection of SNP TSC0004062
tgatgggcggtgy

SEQ ID NO: 19562 - DNA, 13 bp, Artificial Sequence
  Oligonucleotide for detection of SNP TSC0004062
rcaccgcccatca

SEQ ID NO: 19563 - DNA, 13 bp, Artificial Sequence
  Oligonucleotide for detection of SNP TSC0004062
tgatggacggtgy

SEQ ID NO: 19564 - DNA, 13 bp, Artificial Sequence
  Oligonucleotide for detection of SNP TSC0004062
rcaccgtccatca

SEQ ID NO: 19565 - DNA, 13 bp, Artificial Sequence
  Oligonucleotide for detection of SNP TSC0004063
agtggatgaagay

SEQ ID NO: 19566 - DNA, 13 bp, Artificial Sequence
  Oligonucleotide for detection of SNP TSC0004063
rtcttcatccact

SEQ ID NO: 19567 - DNA, 13 bp, Artificial Sequence
  Oligonucleotide for detection of SNP TSC0004063
agtggacgaagay

SEQ ID NO: 19568 - DNA, 13 bp, Artificial Sequence
  Oligonucleotide for detection of SNP TSC0004063
rtcttcgtccact

SEQ ID NO: 19569 - DNA, 13 bp, Artificial Sequence
  Oligonucleotide for detection of SNP TSC0004063
gtttttgtttatt

SEQ ID NO: 19570 - DNA, 13 bp, Artificial Sequence
  Oligonucleotide for detection of SNP TSC0004063
aataaacaaaaac

SEQ ID NO: 19571 - DNA, 13 bp, Artificial Sequence
  Oligonucleotide for detection of SNP TSC0004063
gtttttatttatt

SEQ ID NO: 19572 - DNA, 13 bp, Artificial Sequence
  Oligonucleotide for detection of SNP TSC0004063
aataaataaaaac

SEQ ID NO: 19573 - DNA, 13 bp, Artificial Sequence
  Oligonucleotide for detection of SNP TSC0004063
gttttcgtttatt

SEQ ID NO: 19574 - DNA, 13 bp, Artificial Sequence
  Oligonucleotide for detection of SNP TSC0004063
aataaacgaaaac

SEQ ID NO: 19575 - DNA, 13 bp, Artificial Sequence
  Oligonucleotide for detection of SNP TSC0004064
gaagttattaaaa

SEQ ID NO: 19576 - DNA, 13 bp, Artificial Sequence
  Oligonucleotide for detection of SNP TSC0004064
ttttaataacttc

SEQ ID NO: 19577 - DNA, 13 bp, Artificial Sequence
  Oligonucleotide for detection of SNP TSC0004064
gaagttgttaaaa

SEQ ID NO: 19578 - DNA, 13 bp, Artificial Sequence
  Oligonucleotide for detection of SNP TSC0004064
ttttaacaacttc

SEQ ID NO: 19579 - DNA, 13 bp, Artificial Sequence
  Oligonucleotide for detection of SNP TSC0004065
gttaaatatgtta

SEQ ID NO: 19580 - DNA, 13 bp, Artificial Sequence
  Oligonucleotide for detection of SNP TSC0004065
taacatatttaac

SEQ ID NO: 19581 - DNA, 13 bp, Artificial Sequence
  Oligonucleotide for detection of SNP TSC0004065
gttaaagatgtta

SEQ ID NO: 19582 - DNA, 13 bp, Artificial Sequence
  Oligonucleotide for detection of SNP TSC0004065
taacatctttaac

SEQ ID NO: 19583 - DNA, 13 bp, Artificial Sequence
  Oligonucleotide for detection of SNP TSC0004065
taatatatttgay

SEQ ID NO: 19584 - DNA, 13 bp, Artificial Sequence
  Oligonucleotide for detection of SNP TSC0004065
rtcaaatatatta

SEQ ID NO: 19585 - DNA, 13 bp, Artificial Sequence
  Oligonucleotide for detection of SNP TSC0004065
taatatttttgay

SEQ ID NO: 19586 - DNA, 13 bp, Artificial Sequence
  Oligonucleotide for detection of SNP TSC0004065
rtcaaaaatatta

SEQ ID NO: 19587 - DNA, 13 bp, Artificial Sequence
  Oligonucleotide for detection of SNP TSC0004066
aaatataggggga

SEQ ID NO: 19588 - DNA, 13 bp, Artificial Sequence
  Oligonucleotide for detection of SNP TSC0004066
tccccctatattt

SEQ ID NO: 19589 - DNA, 13 bp, Artificial Sequence
  Oligonucleotide for detection of SNP TSC0004066
aaatattggggga

SEQ ID NO: 19590 - DNA, 13 bp, Artificial Sequence
  Oligonucleotide for detection of SNP TSC0004066
tcccccaatattt

SEQ ID NO: 19591 - DNA, 13 bp, Artificial Sequence
  Oligonucleotide for detection of SNP TSC0004067
gagtgatgttatt

SEQ ID NO: 19592 - DNA, 13 bp, Artificial Sequence
  Oligonucleotide for detection of SNP TSC0004067
aataacatcactc

SEQ ID NO: 19593 - DNA, 13 bp, Artificial Sequence
  Oligonucleotide for detection of SNP TSC0004067
gagtgaagttatt

SEQ ID NO: 19594 - DNA, 13 bp, Artificial Sequence
  Oligonucleotide for detection of SNP TSC0004067
aataacttcactc

SEQ ID NO: 19595 - DNA, 13 bp, Artificial Sequence
  Oligonucleotide for detection of SNP TSC0004067
gagcgatgttatt

SEQ ID NO: 19596 - DNA, 13 bp, Artificial Sequence
  Oligonucleotide for detection of SNP TSC0004067
aataacatcgctc

SEQ ID NO: 19597 - DNA, 13 bp, Artificial Sequence
  Oligonucleotide for detection of SNP TSC0004067
gagcgaagttatt

SEQ ID NO: 19598 - DNA, 13 bp, Artificial Sequence
  Oligonucleotide for detection of SNP TSC0004067
aataacttcgctc

SEQ ID NO: 19599 - DNA, 13 bp, Artificial Sequence
  Oligonucleotide for detection of SNP TSC0004067
gagtgacgttatt

SEQ ID NO: 19600 - DNA, 13 bp, Artificial Sequence
  Oligonucleotide for detection of SNP TSC0004067
aataacgtcactc

SEQ ID NO: 19601 - DNA, 13 bp, Artificial Sequence
  Oligonucleotide for detection of SNP TSC0004067
gagcgacgttatt

SEQ ID NO: 19602 - DNA, 13 bp, Artificial Sequence
  Oligonucleotide for detection of SNP TSC0004067
aataacgtcgctc

SEQ ID NO: 19603 - DNA, 13 bp, Artificial Sequence
  Oligonucleotide for detection of SNP TSC0004067
aatggtgttgtty

SEQ ID NO: 19604 - DNA, 13 bp, Artificial Sequence
  Oligonucleotide for detection of SNP TSC0004067
raacaacaccatt

SEQ ID NO: 19605 - DNA, 13 bp, Artificial Sequence
  Oligonucleotide for detection of SNP TSC0004067
aatggttttgtty

SEQ ID NO: 19606 - DNA, 13 bp, Artificial Sequence
  Oligonucleotide for detection of SNP TSC0004067
raacaaaaccatt

SEQ ID NO: 19607 - DNA, 13 bp, Artificial Sequence
  Oligonucleotide for detection of SNP TSC0004067
aatggcgttgtty

SEQ ID NO: 19608 - DNA, 13 bp, Artificial Sequence
  Oligonucleotide for detection of SNP TSC0004067
raacaacgccatt

SEQ ID NO: 19609 - DNA, 13 bp, Artificial Sequence
  Oligonucleotide for detection of SNP TSC0004067
aatggtttcgtty

SEQ ID NO: 19610 - DNA, 13 bp, Artificial Sequence
  Oligonucleotide for detection of SNP TSC0004067
raacgaaaccatt

SEQ ID NO: 19611 - DNA, 13 bp, Artificial Sequence
  Oligonucleotide for detection of SNP TSC0004067
aatggtgtcgtty

SEQ ID NO: 19612 - DNA, 13 bp, Artificial Sequence
  Oligonucleotide for detection of SNP TSC0004067
raacgacaccatt

SEQ ID NO: 19613 - DNA, 13 bp, Artificial Sequence
  Oligonucleotide for detection of SNP TSC0004067
aatggcgtcgtty

SEQ ID NO: 19614 - DNA, 13 bp, Artificial Sequence
  Oligonucleotide for detection of SNP TSC0004067
raacgacgccatt

SEQ ID NO: 19615 - DNA, 13 bp, Artificial Sequence
  Oligonucleotide for detection of SNP TSC0004068
ttatagattttta

SEQ ID NO: 19616 - DNA, 13 bp, Artificial Sequence
  Oligonucleotide for detection of SNP TSC0004068
taaaaatctataa

SEQ ID NO: 19617 - DNA, 13 bp, Artificial Sequence
  Oligonucleotide for detection of SNP TSC0004068
ttatagtttttta

SEQ ID NO: 19618 - DNA, 13 bp, Artificial Sequence
  Oligonucleotide for detection of SNP TSC0004068
taaaaaactataa

SEQ ID NO: 19619 - DNA, 13 bp, Artificial Sequence
  Oligonucleotide for detection of SNP TSC0004068
tggaagtttgtaa

SEQ ID NO: 19620 - DNA, 13 bp, Artificial Sequence
  Oligonucleotide for detection of SNP TSC0004068
ttacaaacttcca

SEQ ID NO: 19621 - DNA, 13 bp, Artificial Sequence
  Oligonucleotide for detection of SNP TSC0004068
tggaaggttgtaa

SEQ ID NO: 19622 - DNA, 13 bp, Artificial Sequence
  Oligonucleotide for detection of SNP TSC0004068
ttacaaccttcca

SEQ ID NO: 19623 - DNA, 13 bp, Artificial Sequence
  Oligonucleotide for detection of SNP TSC0004069
ttttttggagttt

SEQ ID NO: 19624 - DNA, 13 bp, Artificial Sequence
  Oligonucleotide for detection of SNP TSC0004069
aaactccaaaaaa

SEQ ID NO: 19625 - DNA, 13 bp, Artificial Sequence
  Oligonucleotide for detection of SNP TSC0004069
tttttcggagttt

SEQ ID NO: 19626 - DNA, 13 bp, Artificial Sequence
  Oligonucleotide for detection of SNP TSC0004069
aaactccgaaaaa

SEQ ID NO: 19627 - DNA, 13 bp, Artificial Sequence
  Oligonucleotide for detection of SNP TSC0004069
aaattttgagagg

SEQ ID NO: 19628 - DNA, 13 bp, Artificial Sequence
  Oligonucleotide for detection of SNP TSC0004069
cctctcaaaattt

SEQ ID NO: 19629 - DNA, 13 bp, Artificial Sequence
  Oligonucleotide for detection of SNP TSC0004069
aaatttagagagg

SEQ ID NO: 19630 - DNA, 13 bp, Artificial Sequence
  Oligonucleotide for detection of SNP TSC0004069
cctctctaaattt

SEQ ID NO: 19631 - DNA, 13 bp, Artificial Sequence
  Oligonucleotide for detection of SNP TSC0004069
aaatttcgagagg

SEQ ID NO: 19632 - DNA, 13 bp, Artificial Sequence
  Oligonucleotide for detection of SNP TSC0004069
cctctcgaaattt

SEQ ID NO: 19633 - DNA, 13 bp, Artificial Sequence
  Oligonucleotide for detection of SNP TSC0004070
aataatagagagg

SEQ ID NO: 19634 - DNA, 13 bp, Artificial Sequence
  Oligonucleotide for detection of SNP TSC0004070
cctctctattatt

SEQ ID NO: 19635 - DNA, 13 bp, Artificial Sequence
  Oligonucleotide for detection of SNP TSC0004070
aataatggagagg

SEQ ID NO: 19636 - DNA, 13 bp, Artificial Sequence
  Oligonucleotide for detection of SNP TSC0004070
cctctccattatt

SEQ ID NO: 19637 - DNA, 13 bp, Artificial Sequence
  Oligonucleotide for detection of SNP TSC0004071
tgttaagtatatt

SEQ ID NO: 19638 - DNA, 13 bp, Artificial Sequence
  Oligonucleotide for detection of SNP TSC0004071
aatatacttaaca

SEQ ID NO: 19639 - DNA, 13 bp, Artificial Sequence
  Oligonucleotide for detection of SNP TSC0004071
tgttaaatatatt

SEQ ID NO: 19640 - DNA, 13 bp, Artificial Sequence
  Oligonucleotide for detection of SNP TSC0004071
aatatatttaaca

SEQ ID NO: 19641 - DNA, 13 bp, Artificial Sequence
  Oligonucleotide for detection of SNP TSC0004072
tggagtgggggga

SEQ ID NO: 19642 - DNA, 13 bp, Artificial Sequence
  Oligonucleotide for detection of SNP TSC0004072
tccccccactcca

SEQ ID NO: 19643 - DNA, 13 bp, Artificial Sequence
  Oligonucleotide for detection of SNP TSC0004072
tggagtaggggga

SEQ ID NO: 19644 - DNA, 13 bp, Artificial Sequence
  Oligonucleotide for detection of SNP TSC0004072
tccccctactcca

SEQ ID NO: 19645 - DNA, 13 bp, Artificial Sequence
  Oligonucleotide for detection of SNP TSC0004072
tggagcgggggga

SEQ ID NO: 19646 - DNA, 13 bp, Artificial Sequence
  Oligonucleotide for detection of SNP TSC0004072
tccccccgctcca

SEQ ID NO: 19647 - DNA, 13 bp, Artificial Sequence
  Oligonucleotide for detection of SNP TSC0004073
ggatgtaaagaty

SEQ ID NO: 19648 - DNA, 13 bp, Artificial Sequence
  Oligonucleotide for detection of SNP TSC0004073
ratctttacatcc

SEQ ID NO: 19649 - DNA, 13 bp, Artificial Sequence
  Oligonucleotide for detection of SNP TSC0004073
ggatgtgaagaty

SEQ ID NO: 19650 - DNA, 13 bp, Artificial Sequence
  Oligonucleotide for detection of SNP TSC0004073
ratcttcacatcc

SEQ ID NO: 19651 - DNA, 13 bp, Artificial Sequence
  Oligonucleotide for detection of SNP TSC0004073
ggacgtaaagaty

SEQ ID NO: 19652 - DNA, 13 bp, Artificial Sequence
  Oligonucleotide for detection of SNP TSC0004073
ratctttacgtcc

SEQ ID NO: 19653 - DNA, 13 bp, Artificial Sequence
  Oligonucleotide for detection of SNP TSC0004073
ggacgtgaagaty

SEQ ID NO: 19654 - DNA, 13 bp, Artificial Sequence
  Oligonucleotide for detection of SNP TSC0004073
ratcttcacgtcc

SEQ ID NO: 19655 - DNA, 13 bp, Artificial Sequence
  Oligonucleotide for detection of SNP TSC0004073
ggatgcgaagaty

SEQ ID NO: 19656 - DNA, 13 bp, Artificial Sequence
  Oligonucleotide for detection of SNP TSC0004073
ratcttcgcatcc

SEQ ID NO: 19657 - DNA, 13 bp, Artificial Sequence
  Oligonucleotide for detection of SNP TSC0004073
ggacgcgaagaty

SEQ ID NO: 19658 - DNA, 13 bp, Artificial Sequence
  Oligonucleotide for detection of SNP TSC0004073
ratcttcgcgtcc

SEQ ID NO: 19659 - DNA, 13 bp, Artificial Sequence
  Oligonucleotide for detection of SNP TSC0004073
gatttttgtgtty

SEQ ID NO: 19660 - DNA, 13 bp, Artificial Sequence
  Oligonucleotide for detection of SNP TSC0004073
raacacaaaaatc

SEQ ID NO: 19661 - DNA, 13 bp, Artificial Sequence
  Oligonucleotide for detection of SNP TSC0004073
gatttttgcgtty

SEQ ID NO: 19662 - DNA, 13 bp, Artificial Sequence
  Oligonucleotide for detection of SNP TSC0004073
raacgcaaaaatc

SEQ ID NO: 19663 - DNA, 13 bp, Artificial Sequence
  Oligonucleotide for detection of SNP TSC0004073
gattttcgtgtty

SEQ ID NO: 19664 - DNA, 13 bp, Artificial Sequence
  Oligonucleotide for detection of SNP TSC0004073
raacacgaaaatc

SEQ ID NO: 19665 - DNA, 13 bp, Artificial Sequence
  Oligonucleotide for detection of SNP TSC0004073
gattttcgcgtty

SEQ ID NO: 19666 - DNA, 13 bp, Artificial Sequence
  Oligonucleotide for detection of SNP TSC0004073
raacgcgaaaatc

SEQ ID NO: 19667 - DNA, 13 bp, Artificial Sequence
  Oligonucleotide for detection of SNP TSC0004074
ttttgaattatag

SEQ ID NO: 19668 - DNA, 13 bp, Artificial Sequence
  Oligonucleotide for detection of SNP TSC0004074
ctataattcaaaa

SEQ ID NO: 19669 - DNA, 13 bp, Artificial Sequence
  Oligonucleotide for detection of SNP TSC0004074
ttttgagttatag

SEQ ID NO: 19670 - DNA, 13 bp, Artificial Sequence
  Oligonucleotide for detection of SNP TSC0004074
ctataactcaaaa

SEQ ID NO: 19671 - DNA, 13 bp, Artificial Sequence
  Oligonucleotide for detection of SNP TSC0004075
gttttagagtgta

SEQ ID NO: 19672 - DNA, 13 bp, Artificial Sequence
  Oligonucleotide for detection of SNP TSC0004075
tacactctaaaac

SEQ ID NO: 19673 - DNA, 13 bp, Artificial Sequence
  Oligonucleotide for detection of SNP TSC0004075
gttttaaagtgta

SEQ ID NO: 19674 - DNA, 13 bp, Artificial Sequence
  Oligonucleotide for detection of SNP TSC0004075
tacactttaaaac

SEQ ID NO: 19675 - DNA, 13 bp, Artificial Sequence
  Oligonucleotide for detection of SNP TSC0004076
atatgaggttata

SEQ ID NO: 19676 - DNA, 13 bp, Artificial Sequence
  Oligonucleotide for detection of SNP TSC0004076
tataacctcatat

SEQ ID NO: 19677 - DNA, 13 bp, Artificial Sequence
  Oligonucleotide for detection of SNP TSC0004076
atatgaagttata

SEQ ID NO: 19678 - DNA, 13 bp, Artificial Sequence
  Oligonucleotide for detection of SNP TSC0004076
tataacttcatat

SEQ ID NO: 19679 - DNA, 13 bp, Artificial Sequence
  Oligonucleotide for detection of SNP TSC0004076
atacgaggttata

SEQ ID NO: 19680 - DNA, 13 bp, Artificial Sequence
  Oligonucleotide for detection of SNP TSC0004076
tataacctcgtat

SEQ ID NO: 19681 - DNA, 13 bp, Artificial Sequence
  Oligonucleotide for detection of SNP TSC0004076
atacgaagttata

SEQ ID NO: 19682 - DNA, 13 bp, Artificial Sequence
  Oligonucleotide for detection of SNP TSC0004076
tataacttcgtat

SEQ ID NO: 19683 - DNA, 13 bp, Artificial Sequence
  Oligonucleotide for detection of SNP TSC0004077
ttttggtgtttty

SEQ ID NO: 19684 - DNA, 13 bp, Artificial Sequence
  Oligonucleotide for detection of SNP TSC0004077
raaaacaccaaaa

SEQ ID NO: 19685 - DNA, 13 bp, Artificial Sequence
  Oligonucleotide for detection of SNP TSC0004077
ttttggcgtttty

SEQ ID NO: 19686 - DNA, 13 bp, Artificial Sequence
  Oligonucleotide for detection of SNP TSC0004077
raaaacgccaaaa

SEQ ID NO: 19687 - DNA, 13 bp, Artificial Sequence
  Oligonucleotide for detection of SNP TSC0004077
ggggatattaagg

SEQ ID NO: 19688 - DNA, 13 bp, Artificial Sequence
  Oligonucleotide for detection of SNP TSC0004077
ccttaatatcccc

SEQ ID NO: 19689 - DNA, 13 bp, Artificial Sequence
  Oligonucleotide for detection of SNP TSC0004077
ggggatgttaagg

SEQ ID NO: 19690 - DNA, 13 bp, Artificial Sequence
  Oligonucleotide for detection of SNP TSC0004077
ccttaacatcccc

SEQ ID NO: 19691 - DNA, 13 bp, Artificial Sequence
  Oligonucleotide for detection of SNP TSC0004077
ggggacgttaagg

SEQ ID NO: 19692 - DNA, 13 bp, Artificial Sequence
  Oligonucleotide for detection of SNP TSC0004077
ccttaacgtcccc

SEQ ID NO: 19693 - DNA, 13 bp, Artificial Sequence
  Oligonucleotide for detection of SNP TSC0004078
aagttagttatgg

SEQ ID NO: 19694 - DNA, 13 bp, Artificial Sequence
  Oligonucleotide for detection of SNP TSC0004078
ccataactaactt

SEQ ID NO: 19695 - DNA, 13 bp, Artificial Sequence
  Oligonucleotide for detection of SNP TSC0004078
aagttatttatgg

SEQ ID NO: 19696 - DNA, 13 bp, Artificial Sequence
  Oligonucleotide for detection of SNP TSC0004078
ccataaataactt

SEQ ID NO: 19697 - DNA, 13 bp, Artificial Sequence
  Oligonucleotide for detection of SNP TSC0004078
ttataattgattt

SEQ ID NO: 19698 - DNA, 13 bp, Artificial Sequence
  Oligonucleotide for detection of SNP TSC0004078
aaatcaattataa

SEQ ID NO: 19699 - DNA, 13 bp, Artificial Sequence
  Oligonucleotide for detection of SNP TSC0004078
ttataaatgattt

SEQ ID NO: 19700 - DNA, 13 bp, Artificial Sequence
  Oligonucleotide for detection of SNP TSC0004078
aaatcatttataa

SEQ ID NO: 19701 - DNA, 13 bp, Artificial Sequence
  Oligonucleotide for detection of SNP TSC0004079
gagttttgttttg

SEQ ID NO: 19702 - DNA, 13 bp, Artificial Sequence
  Oligonucleotide for detection of SNP TSC0004079
caaaacaaaactc

SEQ ID NO: 19703 - DNA, 13 bp, Artificial Sequence
  Oligonucleotide for detection of SNP TSC0004079
gagtttcgttttg

SEQ ID NO: 19704 - DNA, 13 bp, Artificial Sequence
  Oligonucleotide for detection of SNP TSC0004079
caaaacgaaactc

SEQ ID NO: 19705 - DNA, 13 bp, Artificial Sequence
  Oligonucleotide for detection of SNP TSC0004079
tagagtgagatty

SEQ ID NO: 19706 - DNA, 13 bp, Artificial Sequence
  Oligonucleotide for detection of SNP TSC0004079
raatctcactcta

SEQ ID NO: 19707 - DNA, 13 bp, Artificial Sequence
  Oligonucleotide for detection of SNP TSC0004079
tagagtaagatty

SEQ ID NO: 19708 - DNA, 13 bp, Artificial Sequence
  Oligonucleotide for detection of SNP TSC0004079
raatcttactcta

SEQ ID NO: 19709 - DNA, 13 bp, Artificial Sequence
  Oligonucleotide for detection of SNP TSC0004079
tagagcgagatty

SEQ ID NO: 19710 - DNA, 13 bp, Artificial Sequence
  Oligonucleotide for detection of SNP TSC0004079
raatctcgctcta

SEQ ID NO: 19711 - DNA, 13 bp, Artificial Sequence
  Oligonucleotide for detection of SNP TSC0004080
gttttttgttata

SEQ ID NO: 19712 - DNA, 13 bp, Artificial Sequence
  Oligonucleotide for detection of SNP TSC0004080
tataacaaaaaac

SEQ ID NO: 19713 - DNA, 13 bp, Artificial Sequence
  Oligonucleotide for detection of SNP TSC0004080
gtttttcgttata

SEQ ID NO: 19714 - DNA, 13 bp, Artificial Sequence
  Oligonucleotide for detection of SNP TSC0004080
tataacgaaaaac

SEQ ID NO: 19715 - DNA, 13 bp, Artificial Sequence
  Oligonucleotide for detection of SNP TSC0004080
tatgataagaagy

SEQ ID NO: 19716 - DNA, 13 bp, Artificial Sequence
  Oligonucleotide for detection of SNP TSC0004080
rcttcttatcata

SEQ ID NO: 19717 - DNA, 13 bp, Artificial Sequence
  Oligonucleotide for detection of SNP TSC0004080
tatgatgagaagy

SEQ ID NO: 19718 - DNA, 13 bp, Artificial Sequence
  Oligonucleotide for detection of SNP TSC0004080
rcttctcatcata

SEQ ID NO: 19719 - DNA, 13 bp, Artificial Sequence
  Oligonucleotide for detection of SNP TSC0004080
tatgacgagaagy

SEQ ID NO: 19720 - DNA, 13 bp, Artificial Sequence
  Oligonucleotide for detection of SNP TSC0004080
rcttctcgtcata

SEQ ID NO: 19721 - DNA, 13 bp, Artificial Sequence
  Oligonucleotide for detection of SNP TSC0004081
attttagttaaga

SEQ ID NO: 19722 - DNA, 13 bp, Artificial Sequence
  Oligonucleotide for detection of SNP TSC0004081
tcttaactaaaat

SEQ ID NO: 19723 - DNA, 13 bp, Artificial Sequence
  Oligonucleotide for detection of SNP TSC0004081
attttatttaaga

SEQ ID NO: 19724 - DNA, 13 bp, Artificial Sequence
  Oligonucleotide for detection of SNP TSC0004081
tcttaaataaaat

SEQ ID NO: 19725 - DNA, 13 bp, Artificial Sequence
  Oligonucleotide for detection of SNP TSC0004081
ttttggttgagat

SEQ ID NO: 19726 - DNA, 13 bp, Artificial Sequence
  Oligonucleotide for detection of SNP TSC0004081
atctcaaccaaaa

SEQ ID NO: 19727 - DNA, 13 bp, Artificial Sequence
  Oligonucleotide for detection of SNP TSC0004081
ttttgggtgagat

SEQ ID NO: 19728 - DNA, 13 bp, Artificial Sequence
  Oligonucleotide for detection of SNP TSC0004081
atctcacccaaaa

SEQ ID NO: 19729 - DNA, 13 bp, Artificial Sequence
  Oligonucleotide for detection of SNP TSC0004082
tttgttttattgg

SEQ ID NO: 19730 - DNA, 13 bp, Artificial Sequence
  Oligonucleotide for detection of SNP TSC0004082
ccaataaaacaaa

SEQ ID NO: 19731 - DNA, 13 bp, Artificial Sequence
  Oligonucleotide for detection of SNP TSC0004082
tttgttatattgg

SEQ ID NO: 19732 - DNA, 13 bp, Artificial Sequence
  Oligonucleotide for detection of SNP TSC0004082
ccaatataacaaa

SEQ ID NO: 19733 - DNA, 13 bp, Artificial Sequence
  Oligonucleotide for detection of SNP TSC0004082
ttaatatgataag

SEQ ID NO: 19734 - DNA, 13 bp, Artificial Sequence
  Oligonucleotide for detection of SNP TSC0004082
cttatcatattaa

SEQ ID NO: 19735 - DNA, 13 bp, Artificial Sequence
  Oligonucleotide for detection of SNP TSC0004083
gttagtgttgata

SEQ ID NO: 19736 - DNA, 13 bp, Artificial Sequence
  Oligonucleotide for detection of SNP TSC0004083
tatcaacactaac

SEQ ID NO: 19737 - DNA, 13 bp, Artificial Sequence
  Oligonucleotide for detection of SNP TSC0004083
gttagttttgata

SEQ ID NO: 19738 - DNA, 13 bp, Artificial Sequence
  Oligonucleotide for detection of SNP TSC0004083
tatcaaaactaac

SEQ ID NO: 19739 - DNA, 13 bp, Artificial Sequence
  Oligonucleotide for detection of SNP TSC0004083
gttagcgttgata

SEQ ID NO: 19740 - DNA, 13 bp, Artificial Sequence
  Oligonucleotide for detection of SNP TSC0004083
tatcaacgctaac

SEQ ID NO: 19741 - DNA, 13 bp, Artificial Sequence
  Oligonucleotide for detection of SNP TSC0004083
tgttagtgttaay

SEQ ID NO: 19742 - DNA, 13 bp, Artificial Sequence
  Oligonucleotide for detection of SNP TSC0004083
rttaacactaaca

SEQ ID NO: 19743 - DNA, 13 bp, Artificial Sequence
  Oligonucleotide for detection of SNP TSC0004083
tgttagagttaay

SEQ ID NO: 19744 - DNA, 13 bp, Artificial Sequence
  Oligonucleotide for detection of SNP TSC0004083
rttaactctaaca

SEQ ID NO: 19745 - DNA, 13 bp, Artificial Sequence
  Oligonucleotide for detection of SNP TSC0004083
tgttagcgttaay

SEQ ID NO: 19746 - DNA, 13 bp, Artificial Sequence
  Oligonucleotide for detection of SNP TSC0004083
rttaacgctaaca

SEQ ID NO: 19747 - DNA, 13 bp, Artificial Sequence
  Oligonucleotide for detection of SNP TSC0004085
ttatttatttttt

SEQ ID NO: 19748 - DNA, 13 bp, Artificial Sequence
  Oligonucleotide for detection of SNP TSC0004085
aaaaaataaataa

SEQ ID NO: 19749 - DNA, 13 bp, Artificial Sequence
  Oligonucleotide for detection of SNP TSC0004085
ttatttgtttttt

SEQ ID NO: 19750 - DNA, 13 bp, Artificial Sequence
  Oligonucleotide for detection of SNP TSC0004085
aaaaaacaaataa

SEQ ID NO: 19751 - DNA, 13 bp, Artificial Sequence
  Oligonucleotide for detection of SNP TSC0004085
ttattcgtttttt

SEQ ID NO: 19752 - DNA, 13 bp, Artificial Sequence
  Oligonucleotide for detection of SNP TSC0004085
aaaaaacgaataa

SEQ ID NO: 19753 - DNA, 13 bp, Artificial Sequence
  Oligonucleotide for detection of SNP TSC0004085
aaaggatgagtga

SEQ ID NO: 19754 - DNA, 13 bp, Artificial Sequence
  Oligonucleotide for detection of SNP TSC0004085
tcactcatccttt

SEQ ID NO: 19755 - DNA, 13 bp, Artificial Sequence
  Oligonucleotide for detection of SNP TSC0004085
aaaggacgagtga

SEQ ID NO: 19756 - DNA, 13 bp, Artificial Sequence
  Oligonucleotide for detection of SNP TSC0004085
tcactcgtccttt

SEQ ID NO: 19757 - DNA, 13 bp, Artificial Sequence
  Oligonucleotide for detection of SNP TSC0004086
ttaattagtttat

SEQ ID NO: 19758 - DNA, 13 bp, Artificial Sequence
  Oligonucleotide for detection of SNP TSC0004086
ataaactaattaa

SEQ ID NO: 19759 - DNA, 13 bp, Artificial Sequence
  Oligonucleotide for detection of SNP TSC0004086
ttaattggtttat

SEQ ID NO: 19760 - DNA, 13 bp, Artificial Sequence
  Oligonucleotide for detection of SNP TSC0004086
ataaaccaattaa

SEQ ID NO: 19761 - DNA, 13 bp, Artificial Sequence
  Oligonucleotide for detection of SNP TSC0004087
tgtttaatatata

SEQ ID NO: 19762 - DNA, 13 bp, Artificial Sequence
  Oligonucleotide for detection of SNP TSC0004087
tatatattaaaca

SEQ ID NO: 19763 - DNA, 13 bp, Artificial Sequence
  Oligonucleotide for detection of SNP TSC0004087
tgtttagtatata

SEQ ID NO: 19764 - DNA, 13 bp, Artificial Sequence
  Oligonucleotide for detection of SNP TSC0004087
tatatactaaaca

SEQ ID NO: 19765 - DNA, 13 bp, Artificial Sequence
  Oligonucleotide for detection of SNP TSC0004089
ttgggtgtttagg

SEQ ID NO: 19766 - DNA, 13 bp, Artificial Sequence
  Oligonucleotide for detection of SNP TSC0004089
cctaaacacccaa

SEQ ID NO: 19767 - DNA, 13 bp, Artificial Sequence
  Oligonucleotide for detection of SNP TSC0004089
ttgggtttttagg

SEQ ID NO: 19768 - DNA, 13 bp, Artificial Sequence
  Oligonucleotide for detection of SNP TSC0004089
cctaaaaacccaa

SEQ ID NO: 19769 - DNA, 13 bp, Artificial Sequence
  Oligonucleotide for detection of SNP TSC0004089
ttgggcgtttagg

SEQ ID NO: 19770 - DNA, 13 bp, Artificial Sequence
  Oligonucleotide for detection of SNP TSC0004089
cctaaacgcccaa

SEQ ID NO: 19771 - DNA, 13 bp, Artificial Sequence
  Oligonucleotide for detection of SNP TSC0004089
tttgaatgtttag

SEQ ID NO: 19772 - DNA, 13 bp, Artificial Sequence
  Oligonucleotide for detection of SNP TSC0004089
ctaaacattcaaa

SEQ ID NO: 19773 - DNA, 13 bp, Artificial Sequence
  Oligonucleotide for detection of SNP TSC0004089
tttgaaggtttag

SEQ ID NO: 19774 - DNA, 13 bp, Artificial Sequence
  Oligonucleotide for detection of SNP TSC0004089
ctaaaccttcaaa

SEQ ID NO: 19775 - DNA, 13 bp, Artificial Sequence
  Oligonucleotide for detection of SNP TSC0004089
tttgaacgtttag

SEQ ID NO: 19776 - DNA, 13 bp, Artificial Sequence
  Oligonucleotide for detection of SNP TSC0004089
ctaaacgttcaaa

SEQ ID NO: 19777 - DNA, 13 bp, Artificial Sequence
  Oligonucleotide for detection of SNP TSC0004090
attgatgaataay

SEQ ID NO: 19778 - DNA, 13 bp, Artificial Sequence
  Oligonucleotide for detection of SNP TSC0004090
rttattcatcaat

SEQ ID NO: 19779 - DNA, 13 bp, Artificial Sequence
  Oligonucleotide for detection of SNP TSC0004090
attgattaataay

SEQ ID NO: 19780 - DNA, 13 bp, Artificial Sequence
  Oligonucleotide for detection of SNP TSC0004090
rttattaatcaat

SEQ ID NO: 19781 - DNA, 13 bp, Artificial Sequence
  Oligonucleotide for detection of SNP TSC0004090
gttgtttattagt

SEQ ID NO: 19782 - DNA, 13 bp, Artificial Sequence
  Oligonucleotide for detection of SNP TSC0004090
actaataaacaac

SEQ ID NO: 19783 - DNA, 13 bp, Artificial Sequence
  Oligonucleotide for detection of SNP TSC0004090
gttgttaattagt

SEQ ID NO: 19784 - DNA, 13 bp, Artificial Sequence
  Oligonucleotide for detection of SNP TSC0004090
actaattaacaac

SEQ ID NO: 19785 - DNA, 13 bp, Artificial Sequence
  Oligonucleotide for detection of SNP TSC0004091
ttagttaagtaga

SEQ ID NO: 19786 - DNA, 13 bp, Artificial Sequence
  Oligonucleotide for detection of SNP TSC0004091
tctacttaactaa

SEQ ID NO: 19787 - DNA, 13 bp, Artificial Sequence
  Oligonucleotide for detection of SNP TSC0004091
ttagttgagtaga

SEQ ID NO: 19788 - DNA, 13 bp, Artificial Sequence
  Oligonucleotide for detection of SNP TSC0004091
tctactcaactaa

SEQ ID NO: 19789 - DNA, 13 bp, Artificial Sequence
  Oligonucleotide for detection of SNP TSC0004092
ttgtatgtagttt

SEQ ID NO: 19790 - DNA, 13 bp, Artificial Sequence
  Oligonucleotide for detection of SNP TSC0004092
aaactacatacaa

SEQ ID NO: 19791 - DNA, 13 bp, Artificial Sequence
  Oligonucleotide for detection of SNP TSC0004092
ttgtatatagttt

SEQ ID NO: 19792 - DNA, 13 bp, Artificial Sequence
  Oligonucleotide for detection of SNP TSC0004092
aaactatatacaa

SEQ ID NO: 19793 - DNA, 13 bp, Artificial Sequence
  Oligonucleotide for detection of SNP TSC0004092
tcgtatgtagttt

SEQ ID NO: 19794 - DNA, 13 bp, Artificial Sequence
  Oligonucleotide for detection of SNP TSC0004092
aaactacatacga

SEQ ID NO: 19795 - DNA, 13 bp, Artificial Sequence
  Oligonucleotide for detection of SNP TSC0004092
tcgtatatagttt

SEQ ID NO: 19796 - DNA, 13 bp, Artificial Sequence
  Oligonucleotide for detection of SNP TSC0004092
aaactatatacga

SEQ ID NO: 19797 - DNA, 13 bp, Artificial Sequence
  Oligonucleotide for detection of SNP TSC0004093
gtagttgattgat

SEQ ID NO: 19798 - DNA, 13 bp, Artificial Sequence
  Oligonucleotide for detection of SNP TSC0004093
atcaatcaactac

SEQ ID NO: 19799 - DNA, 13 bp, Artificial Sequence
  Oligonucleotide for detection of SNP TSC0004093
gtagttaattgat

SEQ ID NO: 19800 - DNA, 13 bp, Artificial Sequence
  Oligonucleotide for detection of SNP TSC0004093
atcaattaactac

SEQ ID NO: 19801 - DNA, 13 bp, Artificial Sequence
  Oligonucleotide for detection of SNP TSC0004093
gtagtcgattgat

SEQ ID NO: 19802 - DNA, 13 bp, Artificial Sequence
  Oligonucleotide for detection of SNP TSC0004093
atcaatcgactac

SEQ ID NO: 19803 - DNA, 13 bp, Artificial Sequence
  Oligonucleotide for detection of SNP TSC0004093
gtagttaatcgat

SEQ ID NO: 19804 - DNA, 13 bp, Artificial Sequence
  Oligonucleotide for detection of SNP TSC0004093
atcgattaactac

SEQ ID NO: 19805 - DNA, 13 bp, Artificial Sequence
  Oligonucleotide for detection of SNP TSC0004093
gtagttgatcgat

SEQ ID NO: 19806 - DNA, 13 bp, Artificial Sequence
  Oligonucleotide for detection of SNP TSC0004093
atcgatcaactac

SEQ ID NO: 19807 - DNA, 13 bp, Artificial Sequence
  Oligonucleotide for detection of SNP TSC0004093
gtagtcgatcgat

SEQ ID NO: 19808 - DNA, 13 bp, Artificial Sequence
  Oligonucleotide for detection of SNP TSC0004093
atcgatcgactac

SEQ ID NO: 19809 - DNA, 13 bp, Artificial Sequence
  Oligonucleotide for detection of SNP TSC0004093
attgattggttgy

SEQ ID NO: 19810 - DNA, 13 bp, Artificial Sequence
  Oligonucleotide for detection of SNP TSC0004093
rcaaccaatcaat

SEQ ID NO: 19811 - DNA, 13 bp, Artificial Sequence
  Oligonucleotide for detection of SNP TSC0004093
atcgattggttgy

SEQ ID NO: 19812 - DNA, 13 bp, Artificial Sequence
  Oligonucleotide for detection of SNP TSC0004093
rcaaccaatcgat

SEQ ID NO: 19813 - DNA, 13 bp, Artificial Sequence
  Oligonucleotide for detection of SNP TSC0004093
attgatcggttgy

SEQ ID NO: 19814 - DNA, 13 bp, Artificial Sequence
  Oligonucleotide for detection of SNP TSC0004093
rcaaccgatcaat

SEQ ID NO: 19815 - DNA, 13 bp, Artificial Sequence
  Oligonucleotide for detection of SNP TSC0004093
atcgatcggttgy

SEQ ID NO: 19816 - DNA, 13 bp, Artificial Sequence
  Oligonucleotide for detection of SNP TSC0004093
rcaaccgatcgat

SEQ ID NO: 19817 - DNA, 13 bp, Artificial Sequence
  Oligonucleotide for detection of SNP TSC0004094
tttttttggggtt

SEQ ID NO: 19818 - DNA, 13 bp, Artificial Sequence
  Oligonucleotide for detection of SNP TSC0004094
aaccccaaaaaaa

SEQ ID NO: 19819 - DNA, 13 bp, Artificial Sequence
  Oligonucleotide for detection of SNP TSC0004094
ttttttcggggtt

SEQ ID NO: 19820 - DNA, 13 bp, Artificial Sequence
  Oligonucleotide for detection of SNP TSC0004094
aaccccgaaaaaa

SEQ ID NO: 19821 - DNA, 13 bp, Artificial Sequence
  Oligonucleotide for detection of SNP TSC0004094
agttttaggagag

SEQ ID NO: 19822 - DNA, 13 bp, Artificial Sequence
  Oligonucleotide for detection of SNP TSC0004094
ctctcctaaaact

SEQ ID NO: 19823 - DNA, 13 bp, Artificial Sequence
  Oligonucleotide for detection of SNP TSC0004094
agttttgggagag

SEQ ID NO: 19824 - DNA, 13 bp, Artificial Sequence
  Oligonucleotide for detection of SNP TSC0004094
ctctcccaaaact

SEQ ID NO: 19825 - DNA, 13 bp, Artificial Sequence
  Oligonucleotide for detection of SNP TSC0004094
agtttcgggagag

SEQ ID NO: 19826 - DNA, 13 bp, Artificial Sequence
  Oligonucleotide for detection of SNP TSC0004094
ctctcccgaaact

SEQ ID NO: 19827 - DNA, 13 bp, Artificial Sequence
  Oligonucleotide for detection of SNP TSC0004095
ttgaggtgggtgt

SEQ ID NO: 19828 - DNA, 13 bp, Artificial Sequence
  Oligonucleotide for detection of SNP TSC0004095
acacccacctcaa

SEQ ID NO: 19829 - DNA, 13 bp, Artificial Sequence
  Oligonucleotide for detection of SNP TSC0004095
tcgaggtgggtgt

SEQ ID NO: 19830 - DNA, 13 bp, Artificial Sequence
  Oligonucleotide for detection of SNP TSC0004095
acacccacctcga

SEQ ID NO: 19831 - DNA, 13 bp, Artificial Sequence
  Oligonucleotide for detection of SNP TSC0004095
ttgaggcgggtgt

SEQ ID NO: 19832 - DNA, 13 bp, Artificial Sequence
  Oligonucleotide for detection of SNP TSC0004095
acacccgcctcaa

SEQ ID NO: 19833 - DNA, 13 bp, Artificial Sequence
  Oligonucleotide for detection of SNP TSC0004095
tcgaggcgggtgt

SEQ ID NO: 19834 - DNA, 13 bp, Artificial Sequence
  Oligonucleotide for detection of SNP TSC0004095
acacccgcctcga

SEQ ID NO: 19835 - DNA, 13 bp, Artificial Sequence
  Oligonucleotide for detection of SNP TSC0004095
atatttgttttgg

SEQ ID NO: 19836 - DNA, 13 bp, Artificial Sequence
  Oligonucleotide for detection of SNP TSC0004095
ccaaaacaaatat

SEQ ID NO: 19837 - DNA, 13 bp, Artificial Sequence
  Oligonucleotide for detection of SNP TSC0004095
atatttattttgg

SEQ ID NO: 19838 - DNA, 13 bp, Artificial Sequence
  Oligonucleotide for detection of SNP TSC0004095
ccaaaataaatat

SEQ ID NO: 19839 - DNA, 13 bp, Artificial Sequence
  Oligonucleotide for detection of SNP TSC0004095
atattcgttttgg

SEQ ID NO: 19840 - DNA, 13 bp, Artificial Sequence
  Oligonucleotide for detection of SNP TSC0004095
ccaaaacgaatat

SEQ ID NO: 19841 - DNA, 13 bp, Artificial Sequence
  Oligonucleotide for detection of SNP TSC0004095
atatttatttcgg

SEQ ID NO: 19842 - DNA, 13 bp, Artificial Sequence
  Oligonucleotide for detection of SNP TSC0004095
ccgaaataaatat

SEQ ID NO: 19843 - DNA, 13 bp, Artificial Sequence
  Oligonucleotide for detection of SNP TSC0004095
atatttgtttcgg

SEQ ID NO: 19844 - DNA, 13 bp, Artificial Sequence
  Oligonucleotide for detection of SNP TSC0004095
ccgaaacaaatat

SEQ ID NO: 19845 - DNA, 13 bp, Artificial Sequence
  Oligonucleotide for detection of SNP TSC0004095
atattcgtttcgg

SEQ ID NO: 19846 - DNA, 13 bp, Artificial Sequence
  Oligonucleotide for detection of SNP TSC0004095
ccgaaacgaatat

SEQ ID NO: 19847 - DNA, 13 bp, Artificial Sequence
  Oligonucleotide for detection of SNP TSC0004097
gatgtagtgggty

SEQ ID NO: 19848 - DNA, 13 bp, Artificial Sequence
  Oligonucleotide for detection of SNP TSC0004097
racccactacatc

SEQ ID NO: 19849 - DNA, 13 bp, Artificial Sequence
  Oligonucleotide for detection of SNP TSC0004097
gatgtaatgggty

SEQ ID NO: 19850 - DNA, 13 bp, Artificial Sequence
  Oligonucleotide for detection of SNP TSC0004097
racccattacatc

SEQ ID NO: 19851 - DNA, 13 bp, Artificial Sequence
  Oligonucleotide for detection of SNP TSC0004098
tttattagatatt

SEQ ID NO: 19852 - DNA, 13 bp, Artificial Sequence
  Oligonucleotide for detection of SNP TSC0004098
aatatctaataaa

SEQ ID NO: 19853 - DNA, 13 bp, Artificial Sequence
  Oligonucleotide for detection of SNP TSC0004098
tttattggatatt

SEQ ID NO: 19854 - DNA, 13 bp, Artificial Sequence
  Oligonucleotide for detection of SNP TSC0004098
aatatccaataaa

SEQ ID NO: 19855 - DNA, 13 bp, Artificial Sequence
  Oligonucleotide for detection of SNP TSC0004099
tgtgtggttttga

SEQ ID NO: 19856 - DNA, 13 bp, Artificial Sequence
  Oligonucleotide for detection of SNP TSC0004099
tcaaaaccacaca

SEQ ID NO: 19857 - DNA, 13 bp, Artificial Sequence
  Oligonucleotide for detection of SNP TSC0004099
tgtgtgattttga

SEQ ID NO: 19858 - DNA, 13 bp, Artificial Sequence
  Oligonucleotide for detection of SNP TSC0004099
tcaaaatcacaca

SEQ ID NO: 19859 - DNA, 13 bp, Artificial Sequence
  Oligonucleotide for detection of SNP TSC0004100
ttgtaaattttgy

SEQ ID NO: 19860 - DNA, 13 bp, Artificial Sequence
  Oligonucleotide for detection of SNP TSC0004100
rcaaaatttacaa

SEQ ID NO: 19861 - DNA, 13 bp, Artificial Sequence
  Oligonucleotide for detection of SNP TSC0004100
ttgtaatttttgy

SEQ ID NO: 19862 - DNA, 13 bp, Artificial Sequence
  Oligonucleotide for detection of SNP TSC0004100
rcaaaaattacaa

SEQ ID NO: 19863 - DNA, 13 bp, Artificial Sequence
  Oligonucleotide for detection of SNP TSC0004100
ttgtaaatttcgy

SEQ ID NO: 19864 - DNA, 13 bp, Artificial Sequence
  Oligonucleotide for detection of SNP TSC0004100
rcgaaatttacaa

SEQ ID NO: 19865 - DNA, 13 bp, Artificial Sequence
  Oligonucleotide for detection of SNP TSC0004100
ttgtaattttcgy

SEQ ID NO: 19866 - DNA, 13 bp, Artificial Sequence
  Oligonucleotide for detection of SNP TSC0004100
rcgaaaattacaa

SEQ ID NO: 19867 - DNA, 13 bp, Artificial Sequence
  Oligonucleotide for detection of SNP TSC0004100
gtggagtttgtag

SEQ ID NO: 19868 - DNA, 13 bp, Artificial Sequence
  Oligonucleotide for detection of SNP TSC0004100
ctacaaactccac

SEQ ID NO: 19869 - DNA, 13 bp, Artificial Sequence
  Oligonucleotide for detection of SNP TSC0004100
gtggaggttgtag

SEQ ID NO: 19870 - DNA, 13 bp, Artificial Sequence
  Oligonucleotide for detection of SNP TSC0004100
ctacaacctccac

SEQ ID NO: 19871 - DNA, 13 bp, Artificial Sequence
  Oligonucleotide for detection of SNP TSC0004100
gcggagtttgtag

SEQ ID NO: 19872 - DNA, 13 bp, Artificial Sequence
  Oligonucleotide for detection of SNP TSC0004100
ctacaaactccgc

SEQ ID NO: 19873 - DNA, 13 bp, Artificial Sequence
  Oligonucleotide for detection of SNP TSC0004100
gcggaggttgtag

SEQ ID NO: 19874 - DNA, 13 bp, Artificial Sequence
  Oligonucleotide for detection of SNP TSC0004100
ctacaacctccgc

SEQ ID NO: 19875 - DNA, 13 bp, Artificial Sequence
  Oligonucleotide for detection of SNP TSC0004101
gttgggtgtagta

SEQ ID NO: 19876 - DNA, 13 bp, Artificial Sequence
  Oligonucleotide for detection of SNP TSC0004101
tactacacccaac

SEQ ID NO: 19877 - DNA, 13 bp, Artificial Sequence
  Oligonucleotide for detection of SNP TSC0004101
gtcgggtgtagta

SEQ ID NO: 19878 - DNA, 13 bp, Artificial Sequence
  Oligonucleotide for detection of SNP TSC0004101
tactacacccgac

SEQ ID NO: 19879 - DNA, 13 bp, Artificial Sequence
  Oligonucleotide for detection of SNP TSC0004101
gttgggcgtagta

SEQ ID NO: 19880 - DNA, 13 bp, Artificial Sequence
  Oligonucleotide for detection of SNP TSC0004101
tactacgcccaac

SEQ ID NO: 19881 - DNA, 13 bp, Artificial Sequence
  Oligonucleotide for detection of SNP TSC0004101
gtcgggcgtagta

SEQ ID NO: 19882 - DNA, 13 bp, Artificial Sequence
  Oligonucleotide for detection of SNP TSC0004101
tactacgcccgac

SEQ ID NO: 19883 - DNA, 13 bp, Artificial Sequence
  Oligonucleotide for detection of SNP TSC0004101
tattgtgtttggy

SEQ ID NO: 19884 - DNA, 13 bp, Artificial Sequence
  Oligonucleotide for detection of SNP TSC0004101
rccaaacacaata

SEQ ID NO: 19885 - DNA, 13 bp, Artificial Sequence
  Oligonucleotide for detection of SNP TSC0004101
tattgtatttggy

SEQ ID NO: 19886 - DNA, 13 bp, Artificial Sequence
  Oligonucleotide for detection of SNP TSC0004101
rccaaatacaata

SEQ ID NO: 19887 - DNA, 13 bp, Artificial Sequence
  Oligonucleotide for detection of SNP TSC0004101
tattgcgtttggy

SEQ ID NO: 19888 - DNA, 13 bp, Artificial Sequence
  Oligonucleotide for detection of SNP TSC0004101
rccaaacgcaata

SEQ ID NO: 19889 - DNA, 13 bp, Artificial Sequence
  Oligonucleotide for detection of SNP TSC0004101
tattgtattcggy

SEQ ID NO: 19890 - DNA, 13 bp, Artificial Sequence
  Oligonucleotide for detection of SNP TSC0004101
rccgaatacaata

SEQ ID NO: 19891 - DNA, 13 bp, Artificial Sequence
  Oligonucleotide for detection of SNP TSC0004101
tattgtgttcggy

SEQ ID NO: 19892 - DNA, 13 bp, Artificial Sequence
  Oligonucleotide for detection of SNP TSC0004101
rccgaacacaata

SEQ ID NO: 19893 - DNA, 13 bp, Artificial Sequence
  Oligonucleotide for detection of SNP TSC0004101
tattgcgttcggy

SEQ ID NO: 19894 - DNA, 13 bp, Artificial Sequence
  Oligonucleotide for detection of SNP TSC0004101
rccgaacgcaata

SEQ ID NO: 19895 - DNA, 13 bp, Artificial Sequence
  Oligonucleotide for detection of SNP TSC0004102
ggttagtgttagy

SEQ ID NO: 19896 - DNA, 13 bp, Artificial Sequence
  Oligonucleotide for detection of SNP TSC0004102
rctaacactaacc

SEQ ID NO: 19897 - DNA, 13 bp, Artificial Sequence
  Oligonucleotide for detection of SNP TSC0004102
ggttagggttagy

SEQ ID NO: 19898 - DNA, 13 bp, Artificial Sequence
  Oligonucleotide for detection of SNP TSC0004102
rctaaccctaacc

SEQ ID NO: 19899 - DNA, 13 bp, Artificial Sequence
  Oligonucleotide for detection of SNP TSC0004102
ggttagcgttagy

SEQ ID NO: 19900 - DNA, 13 bp, Artificial Sequence
  Oligonucleotide for detection of SNP TSC0004102
rctaacgctaacc

SEQ ID NO: 19901 - DNA, 13 bp, Artificial Sequence
  Oligonucleotide for detection of SNP TSC0004102
gttgatgttggty

SEQ ID NO: 19902 - DNA, 13 bp, Artificial Sequence
  Oligonucleotide for detection of SNP TSC0004102
raccaacatcaac

SEQ ID NO: 19903 - DNA, 13 bp, Artificial Sequence
  Oligonucleotide for detection of SNP TSC0004102
gttgattttggty

SEQ ID NO: 19904 - DNA, 13 bp, Artificial Sequence
  Oligonucleotide for detection of SNP TSC0004102
raccaaaatcaac

SEQ ID NO: 19905 - DNA, 13 bp, Artificial Sequence
  Oligonucleotide for detection of SNP TSC0004102
gttgacgttggty

SEQ ID NO: 19906 - DNA, 13 bp, Artificial Sequence
  Oligonucleotide for detection of SNP TSC0004102
raccaacgtcaac

SEQ ID NO: 19907 - DNA, 13 bp, Artificial Sequence
  Oligonucleotide for detection of SNP TSC0004103
tatgagatagatt

SEQ ID NO: 19908 - DNA, 13 bp, Artificial Sequence
  Oligonucleotide for detection of SNP TSC0004103
aatctatctcata

SEQ ID NO: 19909 - DNA, 13 bp, Artificial Sequence
  Oligonucleotide for detection of SNP TSC0004103
tatgaggtagatt

SEQ ID NO: 19910 - DNA, 13 bp, Artificial Sequence
  Oligonucleotide for detection of SNP TSC0004103
aatctacctcata

SEQ ID NO: 19911 - DNA, 13 bp, Artificial Sequence
  Oligonucleotide for detection of SNP TSC0004104
atttatatattat

SEQ ID NO: 19912 - DNA, 13 bp, Artificial Sequence
  Oligonucleotide for detection of SNP TSC0004104
ataatatataaat

SEQ ID NO: 19913 - DNA, 13 bp, Artificial Sequence
  Oligonucleotide for detection of SNP TSC0004104
atttatttattat

SEQ ID NO: 19914 - DNA, 13 bp, Artificial Sequence
  Oligonucleotide for detection of SNP TSC0004104
ataataaataaat

SEQ ID NO: 19915 - DNA, 13 bp, Artificial Sequence
  Oligonucleotide for detection of SNP TSC0004104
atggtatatgaat

SEQ ID NO: 19916 - DNA, 13 bp, Artificial Sequence
  Oligonucleotide for detection of SNP TSC0004104
attcatataccat

SEQ ID NO: 19917 - DNA, 13 bp, Artificial Sequence
  Oligonucleotide for detection of SNP TSC0004104
atggtaaatgaat

SEQ ID NO: 19918 - DNA, 13 bp, Artificial Sequence
  Oligonucleotide for detection of SNP TSC0004104
attcatttaccat

SEQ ID NO: 19919 - DNA, 13 bp, Artificial Sequence
  Oligonucleotide for detection of SNP TSC0004105
ttttattgtgtty

SEQ ID NO: 19920 - DNA, 13 bp, Artificial Sequence
  Oligonucleotide for detection of SNP TSC0004105
raacacaataaaa

SEQ ID NO: 19921 - DNA, 13 bp, Artificial Sequence
  Oligonucleotide for detection of SNP TSC0004105
ttttatcgtgtty

SEQ ID NO: 19922 - DNA, 13 bp, Artificial Sequence
  Oligonucleotide for detection of SNP TSC0004105
raacacgataaaa

SEQ ID NO: 19923 - DNA, 13 bp, Artificial Sequence
  Oligonucleotide for detection of SNP TSC0004105
ggatatggtaaga

SEQ ID NO: 19924 - DNA, 13 bp, Artificial Sequence
  Oligonucleotide for detection of SNP TSC0004105
tcttaccatatcc

SEQ ID NO: 19925 - DNA, 13 bp, Artificial Sequence
  Oligonucleotide for detection of SNP TSC0004105
ggatatagtaaga

SEQ ID NO: 19926 - DNA, 13 bp, Artificial Sequence
  Oligonucleotide for detection of SNP TSC0004105
tcttactatatcc

SEQ ID NO: 19927 - DNA, 13 bp, Artificial Sequence
  Oligonucleotide for detection of SNP TSC0004105
ggatacggtaaga

SEQ ID NO: 19928 - DNA, 13 bp, Artificial Sequence
  Oligonucleotide for detection of SNP TSC0004105
tcttaccgtatcc

SEQ ID NO: 19929 - DNA, 13 bp, Artificial Sequence
  Oligonucleotide for detection of SNP TSC0004106
aatatttgagatt

SEQ ID NO: 19930 - DNA, 13 bp, Artificial Sequence
  Oligonucleotide for detection of SNP TSC0004106
aatctcaaatatt

SEQ ID NO: 19931 - DNA, 13 bp, Artificial Sequence
  Oligonucleotide for detection of SNP TSC0004106
aatattcgagatt

SEQ ID NO: 19932 - DNA, 13 bp, Artificial Sequence
  Oligonucleotide for detection of SNP TSC0004106
aatctcgaatatt

SEQ ID NO: 19933 - DNA, 13 bp, Artificial Sequence
  Oligonucleotide for detection of SNP TSC0004106
agttttaggtatt

SEQ ID NO: 19934 - DNA, 13 bp, Artificial Sequence
  Oligonucleotide for detection of SNP TSC0004106
aatacctaaaact

SEQ ID NO: 19935 - DNA, 13 bp, Artificial Sequence
  Oligonucleotide for detection of SNP TSC0004106
agttttgggtatt

SEQ ID NO: 19936 - DNA, 13 bp, Artificial Sequence
  Oligonucleotide for detection of SNP TSC0004106
aatacccaaaact

SEQ ID NO: 19937 - DNA, 13 bp, Artificial Sequence
  Oligonucleotide for detection of SNP TSC0004106
agtttcgggtatt

SEQ ID NO: 19938 - DNA, 13 bp, Artificial Sequence
  Oligonucleotide for detection of SNP TSC0004106
aatacccgaaact

SEQ ID NO: 19939 - DNA, 13 bp, Artificial Sequence
  Oligonucleotide for detection of SNP TSC0004107
gttagagggtgga

SEQ ID NO: 19940 - DNA, 13 bp, Artificial Sequence
  Oligonucleotide for detection of SNP TSC0004107
tccaccctctaac

SEQ ID NO: 19941 - DNA, 13 bp, Artificial Sequence
  Oligonucleotide for detection of SNP TSC0004107
gttagaaggtgga

SEQ ID NO: 19942 - DNA, 13 bp, Artificial Sequence
  Oligonucleotide for detection of SNP TSC0004107
tccaccttctaac

SEQ ID NO: 19943 - DNA, 13 bp, Artificial Sequence
  Oligonucleotide for detection of SNP TSC0004108
atttattgttaty

SEQ ID NO: 19944 - DNA, 13 bp, Artificial Sequence
  Oligonucleotide for detection of SNP TSC0004108
rataacaataaat

SEQ ID NO: 19945 - DNA, 13 bp, Artificial Sequence
  Oligonucleotide for detection of SNP TSC0004108
atttatcgttaty

SEQ ID NO: 19946 - DNA, 13 bp, Artificial Sequence
  Oligonucleotide for detection of SNP TSC0004108
rataacgataaat

SEQ ID NO: 19947 - DNA, 13 bp, Artificial Sequence
  Oligonucleotide for detection of SNP TSC0004108
ggtggtagtgaat

SEQ ID NO: 19948 - DNA, 13 bp, Artificial Sequence
  Oligonucleotide for detection of SNP TSC0004108
attcactaccacc

SEQ ID NO: 19949 - DNA, 13 bp, Artificial Sequence
  Oligonucleotide for detection of SNP TSC0004108
ggtggtggtgaat

SEQ ID NO: 19950 - DNA, 13 bp, Artificial Sequence
  Oligonucleotide for detection of SNP TSC0004108
attcaccaccacc

SEQ ID NO: 19951 - DNA, 13 bp, Artificial Sequence
  Oligonucleotide for detection of SNP TSC0004108
ggtggcggtgaat

SEQ ID NO: 19952 - DNA, 13 bp, Artificial Sequence
  Oligonucleotide for detection of SNP TSC0004108
attcaccgccacc

SEQ ID NO: 19953 - DNA, 13 bp, Artificial Sequence
  Oligonucleotide for detection of SNP TSC0004109
aggaaagtgtaay

SEQ ID NO: 19954 - DNA, 13 bp, Artificial Sequence
  Oligonucleotide for detection of SNP TSC0004109
rttacactttcct

SEQ ID NO: 19955 - DNA, 13 bp, Artificial Sequence
  Oligonucleotide for detection of SNP TSC0004109
aggaaaatgtaay

SEQ ID NO: 19956 - DNA, 13 bp, Artificial Sequence
  Oligonucleotide for detection of SNP TSC0004109
rttacattttcct

SEQ ID NO: 19957 - DNA, 13 bp, Artificial Sequence
  Oligonucleotide for detection of SNP TSC0004109
aggaaagcgtaay

SEQ ID NO: 19958 - DNA, 13 bp, Artificial Sequence
  Oligonucleotide for detection of SNP TSC0004109
rttacgctttcct

SEQ ID NO: 19959 - DNA, 13 bp, Artificial Sequence
  Oligonucleotide for detection of SNP TSC0004109
aggaaaacgtaay

SEQ ID NO: 19960 - DNA, 13 bp, Artificial Sequence
  Oligonucleotide for detection of SNP TSC0004109
rttacgttttcct

SEQ ID NO: 19961 - DNA, 13 bp, Artificial Sequence
  Oligonucleotide for detection of SNP TSC0004110
aaattttgttggg

SEQ ID NO: 19962 - DNA, 13 bp, Artificial Sequence
  Oligonucleotide for detection of SNP TSC0004110
cccaacaaaattt

SEQ ID NO: 19963 - DNA, 13 bp, Artificial Sequence
  Oligonucleotide for detection of SNP TSC0004110
aaatttcgttggg

SEQ ID NO: 19964 - DNA, 13 bp, Artificial Sequence
  Oligonucleotide for detection of SNP TSC0004110
cccaacgaaattt

SEQ ID NO: 19965 - DNA, 13 bp, Artificial Sequence
  Oligonucleotide for detection of SNP TSC0004110
tttagtagagttt

SEQ ID NO: 19966 - DNA, 13 bp, Artificial Sequence
  Oligonucleotide for detection of SNP TSC0004110
aaactctactaaa

SEQ ID NO: 19967 - DNA, 13 bp, Artificial Sequence
  Oligonucleotide for detection of SNP TSC0004110
tttagtggagttt

SEQ ID NO: 19968 - DNA, 13 bp, Artificial Sequence
  Oligonucleotide for detection of SNP TSC0004110
aaactccactaaa

SEQ ID NO: 19969 - DNA, 13 bp, Artificial Sequence
  Oligonucleotide for detection of SNP TSC0004110
tttagcggagttt

SEQ ID NO: 19970 - DNA, 13 bp, Artificial Sequence
  Oligonucleotide for detection of SNP TSC0004110
aaactccgctaaa

SEQ ID NO: 19971 - DNA, 13 bp, Artificial Sequence
  Oligonucleotide for detection of SNP TSC0004111
attatttaagtta

SEQ ID NO: 19972 - DNA, 13 bp, Artificial Sequence
  Oligonucleotide for detection of SNP TSC0004111
taacttaaataat

SEQ ID NO: 19973 - DNA, 13 bp, Artificial Sequence
  Oligonucleotide for detection of SNP TSC0004111
attattgaagtta

SEQ ID NO: 19974 - DNA, 13 bp, Artificial Sequence
  Oligonucleotide for detection of SNP TSC0004111
taacttcaataat

SEQ ID NO: 19975 - DNA, 13 bp, Artificial Sequence
  Oligonucleotide for detection of SNP TSC0004111
attatcgaagtta

SEQ ID NO: 19976 - DNA, 13 bp, Artificial Sequence
  Oligonucleotide for detection of SNP TSC0004111
taacttcgataat

SEQ ID NO: 19977 - DNA, 13 bp, Artificial Sequence
  Oligonucleotide for detection of SNP TSC0004111
tgatttggatgat

SEQ ID NO: 19978 - DNA, 13 bp, Artificial Sequence
  Oligonucleotide for detection of SNP TSC0004111
atcatccaaatca

SEQ ID NO: 19979 - DNA, 13 bp, Artificial Sequence
  Oligonucleotide for detection of SNP TSC0004111
tgattttgatgat

SEQ ID NO: 19980 - DNA, 13 bp, Artificial Sequence
  Oligonucleotide for detection of SNP TSC0004111
atcatcaaaatca

SEQ ID NO: 19981 - DNA, 13 bp, Artificial Sequence
  Oligonucleotide for detection of SNP TSC0004111
tgatttcgatgat

SEQ ID NO: 19982 - DNA, 13 bp, Artificial Sequence
  Oligonucleotide for detection of SNP TSC0004111
atcatcgaaatca

SEQ ID NO: 19983 - DNA, 13 bp, Artificial Sequence
  Oligonucleotide for detection of SNP TSC0004112
tagtgaattgaaa

SEQ ID NO: 19984 - DNA, 13 bp, Artificial Sequence
  Oligonucleotide for detection of SNP TSC0004112
tttcaattcacta

SEQ ID NO: 19985 - DNA, 13 bp, Artificial Sequence
  Oligonucleotide for detection of SNP TSC0004112
tagtgagttgaaa

SEQ ID NO: 19986 - DNA, 13 bp, Artificial Sequence
  Oligonucleotide for detection of SNP TSC0004112
tttcaactcacta

SEQ ID NO: 19987 - DNA, 13 bp, Artificial Sequence
  Oligonucleotide for detection of SNP TSC0004112
tagcgaattgaaa

SEQ ID NO: 19988 - DNA, 13 bp, Artificial Sequence
  Oligonucleotide for detection of SNP TSC0004112
tttcaattcgcta

SEQ ID NO: 19989 - DNA, 13 bp, Artificial Sequence
  Oligonucleotide for detection of SNP TSC0004112
tagcgagttgaaa

SEQ ID NO: 19990 - DNA, 13 bp, Artificial Sequence
  Oligonucleotide for detection of SNP TSC0004112
tttcaactcgcta

SEQ ID NO: 19991 - DNA, 13 bp, Artificial Sequence
  Oligonucleotide for detection of SNP TSC0004113
taagtagatttty

SEQ ID NO: 19992 - DNA, 13 bp, Artificial Sequence
  Oligonucleotide for detection of SNP TSC0004113
raaaatctactta

SEQ ID NO: 19993 - DNA, 13 bp, Artificial Sequence
  Oligonucleotide for detection of SNP TSC0004113
taagtaaatttty

SEQ ID NO: 19994 - DNA, 13 bp, Artificial Sequence
  Oligonucleotide for detection of SNP TSC0004113
raaaatttactta

SEQ ID NO: 19995 - DNA, 13 bp, Artificial Sequence
  Oligonucleotide for detection of SNP TSC0004114
ggaattgtaggaa

SEQ ID NO: 19996 - DNA, 13 bp, Artificial Sequence
  Oligonucleotide for detection of SNP TSC0004114
ttcctacaattcc

SEQ ID NO: 19997 - DNA, 13 bp, Artificial Sequence
  Oligonucleotide for detection of SNP TSC0004114
ggaattataggaa

SEQ ID NO: 19998 - DNA, 13 bp, Artificial Sequence
  Oligonucleotide for detection of SNP TSC0004114
ttcctataattcc

SEQ ID NO: 19999 - DNA, 13 bp, Artificial Sequence
  Oligonucleotide for detection of SNP TSC0004115
tattattgttttg

SEQ ID NO: 20000 - DNA, 13 bp, Artificial Sequence
  Oligonucleotide for detection of SNP TSC0004115
caaaacaataata

SEQ ID NO: 20001 - DNA, 13 bp, Artificial Sequence
  Oligonucleotide for detection of SNP TSC0004115
tattatcgttttg

SEQ ID NO: 20002 - DNA, 13 bp, Artificial Sequence
  Oligonucleotide for detection of SNP TSC0004115
caaaacgataata

SEQ ID NO: 20003 - DNA, 13 bp, Artificial Sequence
  Oligonucleotide for detection of SNP TSC0004115
taagatggtgatg

SEQ ID NO: 20004 - DNA, 13 bp, Artificial Sequence
  Oligonucleotide for detection of SNP TSC0004115
catcaccatctta

SEQ ID NO: 20005 - DNA, 13 bp, Artificial Sequence
  Oligonucleotide for detection of SNP TSC0004115
taagatagtgatg

SEQ ID NO: 20006 - DNA, 13 bp, Artificial Sequence
  Oligonucleotide for detection of SNP TSC0004115
catcactatctta

SEQ ID NO: 20007 - DNA, 13 bp, Artificial Sequence
  Oligonucleotide for detection of SNP TSC0004115
taagacggtgatg

SEQ ID NO: 20008 - DNA, 13 bp, Artificial Sequence
  Oligonucleotide for detection of SNP TSC0004115
catcaccgtctta

SEQ ID NO: 20009 - DNA, 13 bp, Artificial Sequence
  Oligonucleotide for detection of SNP TSC0004116
ttgaggatatggt

SEQ ID NO: 20010 - DNA, 13 bp, Artificial Sequence
  Oligonucleotide for detection of SNP TSC0004116
accatatcctcaa

SEQ ID NO: 20011 - DNA, 13 bp, Artificial Sequence
  Oligonucleotide for detection of SNP TSC0004116
ttgagggtatggt

SEQ ID NO: 20012 - DNA, 13 bp, Artificial Sequence
  Oligonucleotide for detection of SNP TSC0004116
accataccctcaa

SEQ ID NO: 20013 - DNA, 13 bp, Artificial Sequence
  Oligonucleotide for detection of SNP TSC0004117
gtgggggtggagg

SEQ ID NO: 20014 - DNA, 13 bp, Artificial Sequence
  Oligonucleotide for detection of SNP TSC0004117
cctccacccccac

SEQ ID NO: 20015 - DNA, 13 bp, Artificial Sequence
  Oligonucleotide for detection of SNP TSC0004117
gtggggttggagg

SEQ ID NO: 20016 - DNA, 13 bp, Artificial Sequence
  Oligonucleotide for detection of SNP TSC0004117
cctccaaccccac

SEQ ID NO: 20017 - DNA, 13 bp, Artificial Sequence
  Oligonucleotide for detection of SNP TSC0004118
gagttttattttg

SEQ ID NO: 20018 - DNA, 13 bp, Artificial Sequence
  Oligonucleotide for detection of SNP TSC0004118
caaaataaaactc

SEQ ID NO: 20019 - DNA, 13 bp, Artificial Sequence
  Oligonucleotide for detection of SNP TSC0004118
gagtttgattttg

SEQ ID NO: 20020 - DNA, 13 bp, Artificial Sequence
  Oligonucleotide for detection of SNP TSC0004118
caaaatcaaactc

SEQ ID NO: 20021 - DNA, 13 bp, Artificial Sequence
  Oligonucleotide for detection of SNP TSC0004118
taaagtaaaatty

SEQ ID NO: 20022 - DNA, 13 bp, Artificial Sequence
  Oligonucleotide for detection of SNP TSC0004118
raattttacttta

SEQ ID NO: 20023 - DNA, 13 bp, Artificial Sequence
  Oligonucleotide for detection of SNP TSC0004118
taaagttaaatty

SEQ ID NO: 20024 - DNA, 13 bp, Artificial Sequence
  Oligonucleotide for detection of SNP TSC0004118
raatttaacttta

SEQ ID NO: 20025 - DNA, 13 bp, Artificial Sequence
  Oligonucleotide for detection of SNP TSC0004119
ttgtttattattt

SEQ ID NO: 20026 - DNA, 13 bp, Artificial Sequence
  Oligonucleotide for detection of SNP TSC0004119
aaataataaacaa

SEQ ID NO: 20027 - DNA, 13 bp, Artificial Sequence
  Oligonucleotide for detection of SNP TSC0004119
ttgttttttattt

SEQ ID NO: 20028 - DNA, 13 bp, Artificial Sequence
  Oligonucleotide for detection of SNP TSC0004119
aaataaaaaacaa

SEQ ID NO: 20029 - DNA, 13 bp, Artificial Sequence
  Oligonucleotide for detection of SNP TSC0004119
tcgtttattattt

SEQ ID NO: 20030 - DNA, 13 bp, Artificial Sequence
  Oligonucleotide for detection of SNP TSC0004119
aaataataaacga

SEQ ID NO: 20031 - DNA, 13 bp, Artificial Sequence
  Oligonucleotide for detection of SNP TSC0004119
tcgttttttattt

SEQ ID NO: 20032 - DNA, 13 bp, Artificial Sequence
  Oligonucleotide for detection of SNP TSC0004119
aaataaaaaacga

SEQ ID NO: 20033 - DNA, 13 bp, Artificial Sequence
  Oligonucleotide for detection of SNP TSC0004119
aaataatagatga

SEQ ID NO: 20034 - DNA, 13 bp, Artificial Sequence
  Oligonucleotide for detection of SNP TSC0004119
tcatctattattt

SEQ ID NO: 20035 - DNA, 13 bp, Artificial Sequence
  Oligonucleotide for detection of SNP TSC0004119
aaataagagatga

SEQ ID NO: 20036 - DNA, 13 bp, Artificial Sequence
  Oligonucleotide for detection of SNP TSC0004119
tcatctcttattt

SEQ ID NO: 20037 - DNA, 13 bp, Artificial Sequence
  Oligonucleotide for detection of SNP TSC0004119
aaataatagacga

SEQ ID NO: 20038 - DNA, 13 bp, Artificial Sequence
  Oligonucleotide for detection of SNP TSC0004119
tcgtctattattt

SEQ ID NO: 20039 - DNA, 13 bp, Artificial Sequence
  Oligonucleotide for detection of SNP TSC0004119
aaataagagacga

SEQ ID NO: 20040 - DNA, 13 bp, Artificial Sequence
  Oligonucleotide for detection of SNP TSC0004119
tcgtctcttattt

SEQ ID NO: 20041 - DNA, 13 bp, Artificial Sequence
  Oligonucleotide for detection of SNP TSC0004121
ttagttagagagg

SEQ ID NO: 20042 - DNA, 13 bp, Artificial Sequence
  Oligonucleotide for detection of SNP TSC0004121
cctctctaactaa

SEQ ID NO: 20043 - DNA, 13 bp, Artificial Sequence
  Oligonucleotide for detection of SNP TSC0004121
ttagttggagagg

SEQ ID NO: 20044 - DNA, 13 bp, Artificial Sequence
  Oligonucleotide for detection of SNP TSC0004121
cctctccaactaa

SEQ ID NO: 20045 - DNA, 13 bp, Artificial Sequence
  Oligonucleotide for detection of SNP TSC0004121
ttagtcggagagg

SEQ ID NO: 20046 - DNA, 13 bp, Artificial Sequence
  Oligonucleotide for detection of SNP TSC0004121
cctctccgactaa

SEQ ID NO: 20047 - DNA, 13 bp, Artificial Sequence
  Oligonucleotide for detection of SNP TSC0004121
tttttttggttgg

SEQ ID NO: 20048 - DNA, 13 bp, Artificial Sequence
  Oligonucleotide for detection of SNP TSC0004121
ccaaccaaaaaaa

SEQ ID NO: 20049 - DNA, 13 bp, Artificial Sequence
  Oligonucleotide for detection of SNP TSC0004121
ttttttcggttgg

SEQ ID NO: 20050 - DNA, 13 bp, Artificial Sequence
  Oligonucleotide for detection of SNP TSC0004121
ccaaccgaaaaaa

SEQ ID NO: 20051 - DNA, 13 bp, Artificial Sequence
  Oligonucleotide for detection of SNP TSC0004122
tttaaaatggtat

SEQ ID NO: 20052 - DNA, 13 bp, Artificial Sequence
  Oligonucleotide for detection of SNP TSC0004122
ataccattttaaa

SEQ ID NO: 20053 - DNA, 13 bp, Artificial Sequence
  Oligonucleotide for detection of SNP TSC0004122
tttaaagtggtat

SEQ ID NO: 20054 - DNA, 13 bp, Artificial Sequence
  Oligonucleotide for detection of SNP TSC0004122
ataccactttaaa

SEQ ID NO: 20055 - DNA, 13 bp, Artificial Sequence
  Oligonucleotide for detection of SNP TSC0004123
gtagaattgaatt

SEQ ID NO: 20056 - DNA, 13 bp, Artificial Sequence
  Oligonucleotide for detection of SNP TSC0004123
aattcaattctac

SEQ ID NO: 20057 - DNA, 13 bp, Artificial Sequence
  Oligonucleotide for detection of SNP TSC0004123
gtagaaatgaatt

SEQ ID NO: 20058 - DNA, 13 bp, Artificial Sequence
  Oligonucleotide for detection of SNP TSC0004123
aattcatttctac

SEQ ID NO: 20059 - DNA, 13 bp, Artificial Sequence
  Oligonucleotide for detection of SNP TSC0004123
aatttaattttgy

SEQ ID NO: 20060 - DNA, 13 bp, Artificial Sequence
  Oligonucleotide for detection of SNP TSC0004123
rcaaaattaaatt

SEQ ID NO: 20061 - DNA, 13 bp, Artificial Sequence
  Oligonucleotide for detection of SNP TSC0004123
aatttatttttgy

SEQ ID NO: 20062 - DNA, 13 bp, Artificial Sequence
  Oligonucleotide for detection of SNP TSC0004123
rcaaaaataaatt

SEQ ID NO: 20063 - DNA, 13 bp, Artificial Sequence
  Oligonucleotide for detection of SNP TSC0004124
gttagggattttt

SEQ ID NO: 20064 - DNA, 13 bp, Artificial Sequence
  Oligonucleotide for detection of SNP TSC0004124
aaaaatccctaac

SEQ ID NO: 20065 - DNA, 13 bp, Artificial Sequence
  Oligonucleotide for detection of SNP TSC0004124
gttaggtattttt

SEQ ID NO: 20066 - DNA, 13 bp, Artificial Sequence
  Oligonucleotide for detection of SNP TSC0004124
aaaaatacctaac

SEQ ID NO: 20067 - DNA, 13 bp, Artificial Sequence
  Oligonucleotide for detection of SNP TSC0004124
aggggtttttagy

SEQ ID NO: 20068 - DNA, 13 bp, Artificial Sequence
  Oligonucleotide for detection of SNP TSC0004124
rctaaaaacccct

SEQ ID NO: 20069 - DNA, 13 bp, Artificial Sequence
  Oligonucleotide for detection of SNP TSC0004124
aggggtgtttagy

SEQ ID NO: 20070 - DNA, 13 bp, Artificial Sequence
  Oligonucleotide for detection of SNP TSC0004124
rctaaacacccct

SEQ ID NO: 20071 - DNA, 13 bp, Artificial Sequence
  Oligonucleotide for detection of SNP TSC0004125
tttttaatgggga

SEQ ID NO: 20072 - DNA, 13 bp, Artificial Sequence
  Oligonucleotide for detection of SNP TSC0004125
tccccattaaaaa

SEQ ID NO: 20073 - DNA, 13 bp, Artificial Sequence
  Oligonucleotide for detection of SNP TSC0004125
tttttattgggga

SEQ ID NO: 20074 - DNA, 13 bp, Artificial Sequence
  Oligonucleotide for detection of SNP TSC0004125
tccccaataaaaa

SEQ ID NO: 20075 - DNA, 13 bp, Artificial Sequence
  Oligonucleotide for detection of SNP TSC0004125
tttttaacgggga

SEQ ID NO: 20076 - DNA, 13 bp, Artificial Sequence
  Oligonucleotide for detection of SNP TSC0004125
tccccgttaaaaa

SEQ ID NO: 20077 - DNA, 13 bp, Artificial Sequence
  Oligonucleotide for detection of SNP TSC0004125
tttttatcgggga

SEQ ID NO: 20078 - DNA, 13 bp, Artificial Sequence
  Oligonucleotide for detection of SNP TSC0004125
tccccgataaaaa

SEQ ID NO: 20079 - DNA, 13 bp, Artificial Sequence
  Oligonucleotide for detection of SNP TSC0004125
tttttgttaagaa

SEQ ID NO: 20080 - DNA, 13 bp, Artificial Sequence
  Oligonucleotide for detection of SNP TSC0004125
ttcttaacaaaaa

SEQ ID NO: 20081 - DNA, 13 bp, Artificial Sequence
  Oligonucleotide for detection of SNP TSC0004125
tttttggtaagaa

SEQ ID NO: 20082 - DNA, 13 bp, Artificial Sequence
  Oligonucleotide for detection of SNP TSC0004125
ttcttaccaaaaa

SEQ ID NO: 20083 - DNA, 13 bp, Artificial Sequence
  Oligonucleotide for detection of SNP TSC0004125
ttttcgttaagaa

SEQ ID NO: 20084 - DNA, 13 bp, Artificial Sequence
  Oligonucleotide for detection of SNP TSC0004125
ttcttaacgaaaa

SEQ ID NO: 20085 - DNA, 13 bp, Artificial Sequence
  Oligonucleotide for detection of SNP TSC0004125
ttttcggtaagaa

SEQ ID NO: 20086 - DNA, 13 bp, Artificial Sequence
  Oligonucleotide for detection of SNP TSC0004125
ttcttaccgaaaa

SEQ ID NO: 20087 - DNA, 13 bp, Artificial Sequence
  Oligonucleotide for detection of SNP TSC0004126
ataaatgataaga

SEQ ID NO: 20088 - DNA, 13 bp, Artificial Sequence
  Oligonucleotide for detection of SNP TSC0004126
tcttatcatttat

SEQ ID NO: 20089 - DNA, 13 bp, Artificial Sequence
  Oligonucleotide for detection of SNP TSC0004126
ataaataataaga

SEQ ID NO: 20090 - DNA, 13 bp, Artificial Sequence
  Oligonucleotide for detection of SNP TSC0004126
tcttattatttat

SEQ ID NO: 20091 - DNA, 13 bp, Artificial Sequence
  Oligonucleotide for detection of SNP TSC0004127
gttataattatgg

SEQ ID NO: 20092 - DNA, 13 bp, Artificial Sequence
  Oligonucleotide for detection of SNP TSC0004127
ccataattataac

SEQ ID NO: 20093 - DNA, 13 bp, Artificial Sequence
  Oligonucleotide for detection of SNP TSC0004127
gttatatttatgg

SEQ ID NO: 20094 - DNA, 13 bp, Artificial Sequence
  Oligonucleotide for detection of SNP TSC0004127
ccataaatataac

SEQ ID NO: 20095 - DNA, 13 bp, Artificial Sequence
  Oligonucleotide for detection of SNP TSC0004127
ttataattataay

SEQ ID NO: 20096 - DNA, 13 bp, Artificial Sequence
  Oligonucleotide for detection of SNP TSC0004127
rttataattataa

SEQ ID NO: 20097 - DNA, 13 bp, Artificial Sequence
  Oligonucleotide for detection of SNP TSC0004127
ttataagtataay

SEQ ID NO: 20098 - DNA, 13 bp, Artificial Sequence
  Oligonucleotide for detection of SNP TSC0004127
rttatacttataa

SEQ ID NO: 20099 - DNA, 13 bp, Artificial Sequence
  Oligonucleotide for detection of SNP TSC0004128
gtgaggttaggty

SEQ ID NO: 20100 - DNA, 13 bp, Artificial Sequence
  Oligonucleotide for detection of SNP TSC0004128
racctaacctcac

SEQ ID NO: 20101 - DNA, 13 bp, Artificial Sequence
  Oligonucleotide for detection of SNP TSC0004128
gtgagggtaggty

SEQ ID NO: 20102 - DNA, 13 bp, Artificial Sequence
  Oligonucleotide for detection of SNP TSC0004128
racctaccctcac

SEQ ID NO: 20103 - DNA, 13 bp, Artificial Sequence
  Oligonucleotide for detection of SNP TSC0004128
gcgaggttaggty

SEQ ID NO: 20104 - DNA, 13 bp, Artificial Sequence
  Oligonucleotide for detection of SNP TSC0004128
racctaacctcgc

SEQ ID NO: 20105 - DNA, 13 bp, Artificial Sequence
  Oligonucleotide for detection of SNP TSC0004128
gcgagggtaggty

SEQ ID NO: 20106 - DNA, 13 bp, Artificial Sequence
  Oligonucleotide for detection of SNP TSC0004128
racctaccctcgc

SEQ ID NO: 20107 - DNA, 13 bp, Artificial Sequence
  Oligonucleotide for detection of SNP TSC0004128
gatttggttttgy

SEQ ID NO: 20108 - DNA, 13 bp, Artificial Sequence
  Oligonucleotide for detection of SNP TSC0004128
rcaaaaccaaatc

SEQ ID NO: 20109 - DNA, 13 bp, Artificial Sequence
  Oligonucleotide for detection of SNP TSC0004128
gatttgtttttgy

SEQ ID NO: 20110 - DNA, 13 bp, Artificial Sequence
  Oligonucleotide for detection of SNP TSC0004128
rcaaaaacaaatc

SEQ ID NO: 20111 - DNA, 13 bp, Artificial Sequence
  Oligonucleotide for detection of SNP TSC0004128
gatttggtttcgy

SEQ ID NO: 20112 - DNA, 13 bp, Artificial Sequence
  Oligonucleotide for detection of SNP TSC0004128
rcgaaaccaaatc

SEQ ID NO: 20113 - DNA, 13 bp, Artificial Sequence
  Oligonucleotide for detection of SNP TSC0004128
gatttgttttcgy

SEQ ID NO: 20114 - DNA, 13 bp, Artificial Sequence
  Oligonucleotide for detection of SNP TSC0004128
rcgaaaacaaatc

SEQ ID NO: 20115 - DNA, 13 bp, Artificial Sequence
  Oligonucleotide for detection of SNP TSC0004129
tttttttgtggtt

SEQ ID NO: 20116 - DNA, 13 bp, Artificial Sequence
  Oligonucleotide for detection of SNP TSC0004129
aaccacaaaaaaa

SEQ ID NO: 20117 - DNA, 13 bp, Artificial Sequence
  Oligonucleotide for detection of SNP TSC0004129
ttttttagtggtt

SEQ ID NO: 20118 - DNA, 13 bp, Artificial Sequence
  Oligonucleotide for detection of SNP TSC0004129
aaccactaaaaaa

SEQ ID NO: 20119 - DNA, 13 bp, Artificial Sequence
  Oligonucleotide for detection of SNP TSC0004129
ttttttcgtggtt

SEQ ID NO: 20120 - DNA, 13 bp, Artificial Sequence
  Oligonucleotide for detection of SNP TSC0004129
aaccacgaaaaaa

SEQ ID NO: 20121 - DNA, 13 bp, Artificial Sequence
  Oligonucleotide for detection of SNP TSC0004129
ttttttagcggtt

SEQ ID NO: 20122 - DNA, 13 bp, Artificial Sequence
  Oligonucleotide for detection of SNP TSC0004129
aaccgctaaaaaa

SEQ ID NO: 20123 - DNA, 13 bp, Artificial Sequence
  Oligonucleotide for detection of SNP TSC0004129
tttttttgcggtt

SEQ ID NO: 20124 - DNA, 13 bp, Artificial Sequence
  Oligonucleotide for detection of SNP TSC0004129
aaccgcaaaaaaa

SEQ ID NO: 20125 - DNA, 13 bp, Artificial Sequence
  Oligonucleotide for detection of SNP TSC0004129
ttttttcgcggtt

SEQ ID NO: 20126 - DNA, 13 bp, Artificial Sequence
  Oligonucleotide for detection of SNP TSC0004129
aaccgcgaaaaaa

SEQ ID NO: 20127 - DNA, 13 bp, Artificial Sequence
  Oligonucleotide for detection of SNP TSC0004129
aattgtgaaggag

SEQ ID NO: 20128 - DNA, 13 bp, Artificial Sequence
  Oligonucleotide for detection of SNP TSC0004129
ctccttcacaatt

SEQ ID NO: 20129 - DNA, 13 bp, Artificial Sequence
  Oligonucleotide for detection of SNP TSC0004129
aattgttaaggag

SEQ ID NO: 20130 - DNA, 13 bp, Artificial Sequence
  Oligonucleotide for detection of SNP TSC0004129
ctccttaacaatt

SEQ ID NO: 20131 - DNA, 13 bp, Artificial Sequence
  Oligonucleotide for detection of SNP TSC0004129
aatcgtgaaggag

SEQ ID NO: 20132 - DNA, 13 bp, Artificial Sequence
  Oligonucleotide for detection of SNP TSC0004129
ctccttcacgatt

SEQ ID NO: 20133 - DNA, 13 bp, Artificial Sequence
  Oligonucleotide for detection of SNP TSC0004129
aatcgttaaggag

SEQ ID NO: 20134 - DNA, 13 bp, Artificial Sequence
  Oligonucleotide for detection of SNP TSC0004129
ctccttaacgatt

SEQ ID NO: 20135 - DNA, 13 bp, Artificial Sequence
  Oligonucleotide for detection of SNP TSC0004129
aattgcgaaggag

SEQ ID NO: 20136 - DNA, 13 bp, Artificial Sequence
  Oligonucleotide for detection of SNP TSC0004129
ctccttcgcaatt

SEQ ID NO: 20137 - DNA, 13 bp, Artificial Sequence
  Oligonucleotide for detection of SNP TSC0004129
aatcgcgaaggag

SEQ ID NO: 20138 - DNA, 13 bp, Artificial Sequence
  Oligonucleotide for detection of SNP TSC0004129
ctccttcgcgatt

SEQ ID NO: 20139 - DNA, 13 bp, Artificial Sequence
  Oligonucleotide for detection of SNP TSC0004132
ggatatttatgga

SEQ ID NO: 20140 - DNA, 13 bp, Artificial Sequence
  Oligonucleotide for detection of SNP TSC0004132
tccataaatatcc

SEQ ID NO: 20141 - DNA, 13 bp, Artificial Sequence
  Oligonucleotide for detection of SNP TSC0004132
ggatatatatgga

SEQ ID NO: 20142 - DNA, 13 bp, Artificial Sequence
  Oligonucleotide for detection of SNP TSC0004132
tccatatatatcc

SEQ ID NO: 20143 - DNA, 13 bp, Artificial Sequence
  Oligonucleotide for detection of SNP TSC0004133
ggtatagagtttt

SEQ ID NO: 20144 - DNA, 13 bp, Artificial Sequence
  Oligonucleotide for detection of SNP TSC0004133
aaaactctatacc

SEQ ID NO: 20145 - DNA, 13 bp, Artificial Sequence
  Oligonucleotide for detection of SNP TSC0004133
ggtataaagtttt

SEQ ID NO: 20146 - DNA, 13 bp, Artificial Sequence
  Oligonucleotide for detection of SNP TSC0004133
aaaactttatacc

SEQ ID NO: 20147 - DNA, 13 bp, Artificial Sequence
  Oligonucleotide for detection of SNP TSC0004134
ttttaggttgttg

SEQ ID NO: 20148 - DNA, 13 bp, Artificial Sequence
  Oligonucleotide for detection of SNP TSC0004134
caacaacctaaaa

SEQ ID NO: 20149 - DNA, 13 bp, Artificial Sequence
  Oligonucleotide for detection of SNP TSC0004134
ttttagattgttg

SEQ ID NO: 20150 - DNA, 13 bp, Artificial Sequence
  Oligonucleotide for detection of SNP TSC0004134
caacaatctaaaa

SEQ ID NO: 20151 - DNA, 13 bp, Artificial Sequence
  Oligonucleotide for detection of SNP TSC0004134
ttttaggtcgttg

SEQ ID NO: 20152 - DNA, 13 bp, Artificial Sequence
  Oligonucleotide for detection of SNP TSC0004134
caacgacctaaaa

SEQ ID NO: 20153 - DNA, 13 bp, Artificial Sequence
  Oligonucleotide for detection of SNP TSC0004134
ttttagatcgttg

SEQ ID NO: 20154 - DNA, 13 bp, Artificial Sequence
  Oligonucleotide for detection of SNP TSC0004134
caacgatctaaaa

SEQ ID NO: 20155 - DNA, 13 bp, Artificial Sequence
  Oligonucleotide for detection of SNP TSC0004135
gtttttgttgagy

SEQ ID NO: 20156 - DNA, 13 bp, Artificial Sequence
  Oligonucleotide for detection of SNP TSC0004135
rctcaacaaaaac

SEQ ID NO: 20157 - DNA, 13 bp, Artificial Sequence
  Oligonucleotide for detection of SNP TSC0004135
gtttttattgagy

SEQ ID NO: 20158 - DNA, 13 bp, Artificial Sequence
  Oligonucleotide for detection of SNP TSC0004135
rctcaataaaaac

SEQ ID NO: 20159 - DNA, 13 bp, Artificial Sequence
  Oligonucleotide for detection of SNP TSC0004136
agggtaggagtga

SEQ ID NO: 20160 - DNA, 13 bp, Artificial Sequence
  Oligonucleotide for detection of SNP TSC0004136
tcactcctaccct

SEQ ID NO: 20161 - DNA, 13 bp, Artificial Sequence
  Oligonucleotide for detection of SNP TSC0004136
agggtatgagtga

SEQ ID NO: 20162 - DNA, 13 bp, Artificial Sequence
  Oligonucleotide for detection of SNP TSC0004136
tcactcataccct

SEQ ID NO: 20163 - DNA, 13 bp, Artificial Sequence
  Oligonucleotide for detection of SNP TSC0004136
ttatttttgtttt

SEQ ID NO: 20164 - DNA, 13 bp, Artificial Sequence
  Oligonucleotide for detection of SNP TSC0004136
aaaacaaaaataa

SEQ ID NO: 20165 - DNA, 13 bp, Artificial Sequence
  Oligonucleotide for detection of SNP TSC0004136
ttatttatgtttt

SEQ ID NO: 20166 - DNA, 13 bp, Artificial Sequence
  Oligonucleotide for detection of SNP TSC0004136
aaaacataaataa

SEQ ID NO: 20167 - DNA, 13 bp, Artificial Sequence
  Oligonucleotide for detection of SNP TSC0004137
tggatagagttta

SEQ ID NO: 20168 - DNA, 13 bp, Artificial Sequence
  Oligonucleotide for detection of SNP TSC0004137
taaactctatcca

SEQ ID NO: 20169 - DNA, 13 bp, Artificial Sequence
  Oligonucleotide for detection of SNP TSC0004137
tggatatagttta

SEQ ID NO: 20170 - DNA, 13 bp, Artificial Sequence
  Oligonucleotide for detection of SNP TSC0004137
taaactatatcca

SEQ ID NO: 20171 - DNA, 13 bp, Artificial Sequence
  Oligonucleotide for detection of SNP TSC0004137
tgggttttgttta

SEQ ID NO: 20172 - DNA, 13 bp, Artificial Sequence
  Oligonucleotide for detection of SNP TSC0004137
taaacaaaaccca

SEQ ID NO: 20173 - DNA, 13 bp, Artificial Sequence
  Oligonucleotide for detection of SNP TSC0004137
tgggttgtgttta

SEQ ID NO: 20174 - DNA, 13 bp, Artificial Sequence
  Oligonucleotide for detection of SNP TSC0004137
taaacacaaccca

SEQ ID NO: 20175 - DNA, 13 bp, Artificial Sequence
  Oligonucleotide for detection of SNP TSC0004138
attattattgttt

SEQ ID NO: 20176 - DNA, 13 bp, Artificial Sequence
  Oligonucleotide for detection of SNP TSC0004138
aaacaataataat

SEQ ID NO: 20177 - DNA, 13 bp, Artificial Sequence
  Oligonucleotide for detection of SNP TSC0004138
attattgttgttt

SEQ ID NO: 20178 - DNA, 13 bp, Artificial Sequence
  Oligonucleotide for detection of SNP TSC0004138
aaacaacaataat

SEQ ID NO: 20179 - DNA, 13 bp, Artificial Sequence
  Oligonucleotide for detection of SNP TSC0004138
attatcgttgttt

SEQ ID NO: 20180 - DNA, 13 bp, Artificial Sequence
  Oligonucleotide for detection of SNP TSC0004138
aaacaacgataat

SEQ ID NO: 20181 - DNA, 13 bp, Artificial Sequence
  Oligonucleotide for detection of SNP TSC0004138
aagtaatgataat

SEQ ID NO: 20182 - DNA, 13 bp, Artificial Sequence
  Oligonucleotide for detection of SNP TSC0004138
attatcattactt

SEQ ID NO: 20183 - DNA, 13 bp, Artificial Sequence
  Oligonucleotide for detection of SNP TSC0004138
aagtaacgataat

SEQ ID NO: 20184 - DNA, 13 bp, Artificial Sequence
  Oligonucleotide for detection of SNP TSC0004138
attatcgttactt

SEQ ID NO: 20185 - DNA, 13 bp, Artificial Sequence
  Oligonucleotide for detection of SNP TSC0004139
ttatttgtttgat

SEQ ID NO: 20186 - DNA, 13 bp, Artificial Sequence
  Oligonucleotide for detection of SNP TSC0004139
atcaaacaaataa

SEQ ID NO: 20187 - DNA, 13 bp, Artificial Sequence
  Oligonucleotide for detection of SNP TSC0004139
ttatttatttgat

SEQ ID NO: 20188 - DNA, 13 bp, Artificial Sequence
  Oligonucleotide for detection of SNP TSC0004139
atcaaataaataa

SEQ ID NO: 20189 - DNA, 13 bp, Artificial Sequence
  Oligonucleotide for detection of SNP TSC0004139
ttattcgtttgat

SEQ ID NO: 20190 - DNA, 13 bp, Artificial Sequence
  Oligonucleotide for detection of SNP TSC0004139
atcaaacgaataa

SEQ ID NO: 20191 - DNA, 13 bp, Artificial Sequence
  Oligonucleotide for detection of SNP TSC0004139
attaaatgaatga

SEQ ID NO: 20192 - DNA, 13 bp, Artificial Sequence
  Oligonucleotide for detection of SNP TSC0004139
tcattcatttaat

SEQ ID NO: 20193 - DNA, 13 bp, Artificial Sequence
  Oligonucleotide for detection of SNP TSC0004139
attaaacgaatga

SEQ ID NO: 20194 - DNA, 13 bp, Artificial Sequence
  Oligonucleotide for detection of SNP TSC0004139
tcattcgtttaat

SEQ ID NO: 20195 - DNA, 13 bp, Artificial Sequence
  Oligonucleotide for detection of SNP TSC0004140
aatttgaggggtg

SEQ ID NO: 20196 - DNA, 13 bp, Artificial Sequence
  Oligonucleotide for detection of SNP TSC0004140
cacccctcaaatt

SEQ ID NO: 20197 - DNA, 13 bp, Artificial Sequence
  Oligonucleotide for detection of SNP TSC0004140
aatttggggggtg

SEQ ID NO: 20198 - DNA, 13 bp, Artificial Sequence
  Oligonucleotide for detection of SNP TSC0004140
caccccccaaatt

SEQ ID NO: 20199 - DNA, 13 bp, Artificial Sequence
  Oligonucleotide for detection of SNP TSC0004142
tggatttattatt

SEQ ID NO: 20200 - DNA, 13 bp, Artificial Sequence
  Oligonucleotide for detection of SNP TSC0004142
aataataaatcca

SEQ ID NO: 20201 - DNA, 13 bp, Artificial Sequence
  Oligonucleotide for detection of SNP TSC0004142
tggattaattatt

SEQ ID NO: 20202 - DNA, 13 bp, Artificial Sequence
  Oligonucleotide for detection of SNP TSC0004142
aataattaatcca

SEQ ID NO: 20203 - DNA, 13 bp, Artificial Sequence
  Oligonucleotide for detection of SNP TSC0004142
cggatttattatt

SEQ ID NO: 20204 - DNA, 13 bp, Artificial Sequence
  Oligonucleotide for detection of SNP TSC0004142
aataataaatccg

SEQ ID NO: 20205 - DNA, 13 bp, Artificial Sequence
  Oligonucleotide for detection of SNP TSC0004142
cggattaattatt

SEQ ID NO: 20206 - DNA, 13 bp, Artificial Sequence
  Oligonucleotide for detection of SNP TSC0004142
aataattaatccg

SEQ ID NO: 20207 - DNA, 13 bp, Artificial Sequence
  Oligonucleotide for detection of SNP TSC0004142
agtaataagtttg

SEQ ID NO: 20208 - DNA, 13 bp, Artificial Sequence
  Oligonucleotide for detection of SNP TSC0004142
caaacttattact

SEQ ID NO: 20209 - DNA, 13 bp, Artificial Sequence
  Oligonucleotide for detection of SNP TSC0004142
agtaattagtttg

SEQ ID NO: 20210 - DNA, 13 bp, Artificial Sequence
  Oligonucleotide for detection of SNP TSC0004142
caaactaattact

SEQ ID NO: 20211 - DNA, 13 bp, Artificial Sequence
  Oligonucleotide for detection of SNP TSC0004142
agtaataagttcg

SEQ ID NO: 20212 - DNA, 13 bp, Artificial Sequence
  Oligonucleotide for detection of SNP TSC0004142
cgaacttattact

SEQ ID NO: 20213 - DNA, 13 bp, Artificial Sequence
  Oligonucleotide for detection of SNP TSC0004142
agtaattagttcg

SEQ ID NO: 20214 - DNA, 13 bp, Artificial Sequence
  Oligonucleotide for detection of SNP TSC0004142
cgaactaattact

SEQ ID NO: 20215 - DNA, 13 bp, Artificial Sequence
  Oligonucleotide for detection of SNP TSC0004143
ttgaggagaggtg

SEQ ID NO: 20216 - DNA, 13 bp, Artificial Sequence
  Oligonucleotide for detection of SNP TSC0004143
cacctctcctcaa

SEQ ID NO: 20217 - DNA, 13 bp, Artificial Sequence
  Oligonucleotide for detection of SNP TSC0004143
ttgaggggaggtg

SEQ ID NO: 20218 - DNA, 13 bp, Artificial Sequence
  Oligonucleotide for detection of SNP TSC0004143
cacctcccctcaa

SEQ ID NO: 20219 - DNA, 13 bp, Artificial Sequence
  Oligonucleotide for detection of SNP TSC0004144
tttatgtggggag

SEQ ID NO: 20220 - DNA, 13 bp, Artificial Sequence
  Oligonucleotide for detection of SNP TSC0004144
ctccccacataaa

SEQ ID NO: 20221 - DNA, 13 bp, Artificial Sequence
  Oligonucleotide for detection of SNP TSC0004144
tttatggggggag

SEQ ID NO: 20222 - DNA, 13 bp, Artificial Sequence
  Oligonucleotide for detection of SNP TSC0004144
ctccccccataaa

SEQ ID NO: 20223 - DNA, 13 bp, Artificial Sequence
  Oligonucleotide for detection of SNP TSC0004144
ttttttatatggg

SEQ ID NO: 20224 - DNA, 13 bp, Artificial Sequence
  Oligonucleotide for detection of SNP TSC0004144
cccatataaaaaa

SEQ ID NO: 20225 - DNA, 13 bp, Artificial Sequence
  Oligonucleotide for detection of SNP TSC0004144
ttttttttatggg

SEQ ID NO: 20226 - DNA, 13 bp, Artificial Sequence
  Oligonucleotide for detection of SNP TSC0004144
cccataaaaaaaa

SEQ ID NO: 20227 - DNA, 13 bp, Artificial Sequence
  Oligonucleotide for detection of SNP TSC0004145
agttttatttgaa

SEQ ID NO: 20228 - DNA, 13 bp, Artificial Sequence
  Oligonucleotide for detection of SNP TSC0004145
ttcaaataaaact

SEQ ID NO: 20229 - DNA, 13 bp, Artificial Sequence
  Oligonucleotide for detection of SNP TSC0004145
agttttgtttgaa

SEQ ID NO: 20230 - DNA, 13 bp, Artificial Sequence
  Oligonucleotide for detection of SNP TSC0004145
ttcaaacaaaact

SEQ ID NO: 20231 - DNA, 13 bp, Artificial Sequence
  Oligonucleotide for detection of SNP TSC0004145
agtttcgtttgaa

SEQ ID NO: 20232 - DNA, 13 bp, Artificial Sequence
  Oligonucleotide for detection of SNP TSC0004145
ttcaaacgaaact

SEQ ID NO: 20233 - DNA, 13 bp, Artificial Sequence
  Oligonucleotide for detection of SNP TSC0004145
tttaaatgagatt

SEQ ID NO: 20234 - DNA, 13 bp, Artificial Sequence
  Oligonucleotide for detection of SNP TSC0004145
aatctcatttaaa

SEQ ID NO: 20235 - DNA, 13 bp, Artificial Sequence
  Oligonucleotide for detection of SNP TSC0004145
tttaaacgagatt

SEQ ID NO: 20236 - DNA, 13 bp, Artificial Sequence
  Oligonucleotide for detection of SNP TSC0004145
aatctcgtttaaa

SEQ ID NO: 20237 - DNA, 13 bp, Artificial Sequence
  Oligonucleotide for detection of SNP TSC0004146
ttaatttaggatt

SEQ ID NO: 20238 - DNA, 13 bp, Artificial Sequence
  Oligonucleotide for detection of SNP TSC0004146
aatcctaaattaa

SEQ ID NO: 20239 - DNA, 13 bp, Artificial Sequence
  Oligonucleotide for detection of SNP TSC0004146
ttaattgaggatt

SEQ ID NO: 20240 - DNA, 13 bp, Artificial Sequence
  Oligonucleotide for detection of SNP TSC0004146
aatcctcaattaa

SEQ ID NO: 20241 - DNA, 13 bp, Artificial Sequence
  Oligonucleotide for detection of SNP TSC0004146
ttaatcgaggatt

SEQ ID NO: 20242 - DNA, 13 bp, Artificial Sequence
  Oligonucleotide for detection of SNP TSC0004146
aatcctcgattaa

SEQ ID NO: 20243 - DNA, 13 bp, Artificial Sequence
  Oligonucleotide for detection of SNP TSC0004146
aattttgggttag

SEQ ID NO: 20244 - DNA, 13 bp, Artificial Sequence
  Oligonucleotide for detection of SNP TSC0004146
ctaacccaaaatt

SEQ ID NO: 20245 - DNA, 13 bp, Artificial Sequence
  Oligonucleotide for detection of SNP TSC0004146
aatttttggttag

SEQ ID NO: 20246 - DNA, 13 bp, Artificial Sequence
  Oligonucleotide for detection of SNP TSC0004146
ctaaccaaaaatt

SEQ ID NO: 20247 - DNA, 13 bp, Artificial Sequence
  Oligonucleotide for detection of SNP TSC0004146
aattttcggttag

SEQ ID NO: 20248 - DNA, 13 bp, Artificial Sequence
  Oligonucleotide for detection of SNP TSC0004146
ctaaccgaaaatt

SEQ ID NO: 20249 - DNA, 13 bp, Artificial Sequence
  Oligonucleotide for detection of SNP TSC0004147
ttttttgtgtgtg

SEQ ID NO: 20250 - DNA, 13 bp, Artificial Sequence
  Oligonucleotide for detection of SNP TSC0004147
cacacacaaaaaa

SEQ ID NO: 20251 - DNA, 13 bp, Artificial Sequence
  Oligonucleotide for detection of SNP TSC0004147
tatatatagagag

SEQ ID NO: 20252 - DNA, 13 bp, Artificial Sequence
  Oligonucleotide for detection of SNP TSC0004147
ctctctatatata

SEQ ID NO: 20253 - DNA, 13 bp, Artificial Sequence
  Oligonucleotide for detection of SNP TSC0004147
tatatagagagag

SEQ ID NO: 20254 - DNA, 13 bp, Artificial Sequence
  Oligonucleotide for detection of SNP TSC0004147
ctctctctatata

SEQ ID NO: 20255 - DNA, 13 bp, Artificial Sequence
  Oligonucleotide for detection of SNP TSC0004148
tagaatttagatt

SEQ ID NO: 20256 - DNA, 13 bp, Artificial Sequence
  Oligonucleotide for detection of SNP TSC0004148
aatctaaattcta

SEQ ID NO: 20257 - DNA, 13 bp, Artificial Sequence
  Oligonucleotide for detection of SNP TSC0004148
tagaatatagatt

SEQ ID NO: 20258 - DNA, 13 bp, Artificial Sequence
  Oligonucleotide for detection of SNP TSC0004148
aatctatattcta

SEQ ID NO: 20259 - DNA, 13 bp, Artificial Sequence
  Oligonucleotide for detection of SNP TSC0004148
aatttgggttttg

SEQ ID NO: 20260 - DNA, 13 bp, Artificial Sequence
  Oligonucleotide for detection of SNP TSC0004148
caaaacccaaatt

SEQ ID NO: 20261 - DNA, 13 bp, Artificial Sequence
  Oligonucleotide for detection of SNP TSC0004148
aatttgtgttttg

SEQ ID NO: 20262 - DNA, 13 bp, Artificial Sequence
  Oligonucleotide for detection of SNP TSC0004148
caaaacacaaatt

SEQ ID NO: 20263 - DNA, 13 bp, Artificial Sequence
  Oligonucleotide for detection of SNP TSC0004150
gtgatagtagaat

SEQ ID NO: 20264 - DNA, 13 bp, Artificial Sequence
  Oligonucleotide for detection of SNP TSC0004150
attctactatcac

SEQ ID NO: 20265 - DNA, 13 bp, Artificial Sequence
  Oligonucleotide for detection of SNP TSC0004150
gtgataatagaat

SEQ ID NO: 20266 - DNA, 13 bp, Artificial Sequence
  Oligonucleotide for detection of SNP TSC0004150
attctattatcac

SEQ ID NO: 20267 - DNA, 13 bp, Artificial Sequence
  Oligonucleotide for detection of SNP TSC0004151
gaaagatggattg

SEQ ID NO: 20268 - DNA, 13 bp, Artificial Sequence
  Oligonucleotide for detection of SNP TSC0004151
caatccatctttc

SEQ ID NO: 20269 - DNA, 13 bp, Artificial Sequence
  Oligonucleotide for detection of SNP TSC0004151
gaaagacggattg

SEQ ID NO: 20270 - DNA, 13 bp, Artificial Sequence
  Oligonucleotide for detection of SNP TSC0004151
caatccgtctttc

SEQ ID NO: 20271 - DNA, 13 bp, Artificial Sequence
  Oligonucleotide for detection of SNP TSC0004152
tataaatgtataa

SEQ ID NO: 20272 - DNA, 13 bp, Artificial Sequence
  Oligonucleotide for detection of SNP TSC0004152
ttatacatttata

SEQ ID NO: 20273 - DNA, 13 bp, Artificial Sequence
  Oligonucleotide for detection of SNP TSC0004152
tataaacgtataa

SEQ ID NO: 20274 - DNA, 13 bp, Artificial Sequence
  Oligonucleotide for detection of SNP TSC0004152
ttatacgtttata

SEQ ID NO: 20275 - DNA, 13 bp, Artificial Sequence
  Oligonucleotide for detection of SNP TSC0004152
ttgtatgtttata

SEQ ID NO: 20276 - DNA, 13 bp, Artificial Sequence
  Oligonucleotide for detection of SNP TSC0004152
tataaacatacaa

SEQ ID NO: 20277 - DNA, 13 bp, Artificial Sequence
  Oligonucleotide for detection of SNP TSC0004152
ttgtatatttata

SEQ ID NO: 20278 - DNA, 13 bp, Artificial Sequence
  Oligonucleotide for detection of SNP TSC0004152
tataaatatacaa

SEQ ID NO: 20279 - DNA, 13 bp, Artificial Sequence
  Oligonucleotide for detection of SNP TSC0004152
ttgtacgtttata

SEQ ID NO: 20280 - DNA, 13 bp, Artificial Sequence
  Oligonucleotide for detection of SNP TSC0004152
tataaacgtacaa

SEQ ID NO: 20281 - DNA, 13 bp, Artificial Sequence
  Oligonucleotide for detection of SNP TSC0004153
atgaggatagata

SEQ ID NO: 20282 - DNA, 13 bp, Artificial Sequence
  Oligonucleotide for detection of SNP TSC0004153
tatctatcctcat

SEQ ID NO: 20283 - DNA, 13 bp, Artificial Sequence
  Oligonucleotide for detection of SNP TSC0004153
atgagggtagata

SEQ ID NO: 20284 - DNA, 13 bp, Artificial Sequence
  Oligonucleotide for detection of SNP TSC0004153
tatctaccctcat

SEQ ID NO: 20285 - DNA, 13 bp, Artificial Sequence
  Oligonucleotide for detection of SNP TSC0004154
gtaggtatattag

SEQ ID NO: 20286 - DNA, 13 bp, Artificial Sequence
  Oligonucleotide for detection of SNP TSC0004154
ctaatatacctac

SEQ ID NO: 20287 - DNA, 13 bp, Artificial Sequence
  Oligonucleotide for detection of SNP TSC0004154
gtaggtgtattag

SEQ ID NO: 20288 - DNA, 13 bp, Artificial Sequence
  Oligonucleotide for detection of SNP TSC0004154
ctaatacacctac

SEQ ID NO: 20289 - DNA, 13 bp, Artificial Sequence
  Oligonucleotide for detection of SNP TSC0004155
ttttatagtattg

SEQ ID NO: 20290 - DNA, 13 bp, Artificial Sequence
  Oligonucleotide for detection of SNP TSC0004155
caatactataaaa

SEQ ID NO: 20291 - DNA, 13 bp, Artificial Sequence
  Oligonucleotide for detection of SNP TSC0004155
ttttattgtattg

SEQ ID NO: 20292 - DNA, 13 bp, Artificial Sequence
  Oligonucleotide for detection of SNP TSC0004155
caatacaataaaa

SEQ ID NO: 20293 - DNA, 13 bp, Artificial Sequence
  Oligonucleotide for detection of SNP TSC0004155
ttttatcgtattg

SEQ ID NO: 20294 - DNA, 13 bp, Artificial Sequence
  Oligonucleotide for detection of SNP TSC0004155
caatacgataaaa

SEQ ID NO: 20295 - DNA, 13 bp, Artificial Sequence
  Oligonucleotide for detection of SNP TSC0004155
tagtgttgtaaga

SEQ ID NO: 20296 - DNA, 13 bp, Artificial Sequence
  Oligonucleotide for detection of SNP TSC0004155
tcttacaacacta

SEQ ID NO: 20297 - DNA, 13 bp, Artificial Sequence
  Oligonucleotide for detection of SNP TSC0004155
tagtgtggtaaga

SEQ ID NO: 20298 - DNA, 13 bp, Artificial Sequence
  Oligonucleotide for detection of SNP TSC0004155
tcttaccacacta

SEQ ID NO: 20299 - DNA, 13 bp, Artificial Sequence
  Oligonucleotide for detection of SNP TSC0004155
tagtgcggtaaga

SEQ ID NO: 20300 - DNA, 13 bp, Artificial Sequence
  Oligonucleotide for detection of SNP TSC0004155
tcttaccgcacta

SEQ ID NO: 20301 - DNA, 13 bp, Artificial Sequence
  Oligonucleotide for detection of SNP TSC0004156
gtaatagatagga

SEQ ID NO: 20302 - DNA, 13 bp, Artificial Sequence
  Oligonucleotide for detection of SNP TSC0004156
tcctatctattac

SEQ ID NO: 20303 - DNA, 13 bp, Artificial Sequence
  Oligonucleotide for detection of SNP TSC0004156
gtaatatatagga

SEQ ID NO: 20304 - DNA, 13 bp, Artificial Sequence
  Oligonucleotide for detection of SNP TSC0004156
tcctatatattac

SEQ ID NO: 20305 - DNA, 13 bp, Artificial Sequence
  Oligonucleotide for detection of SNP TSC0004156
ttttatttattay

SEQ ID NO: 20306 - DNA, 13 bp, Artificial Sequence
  Oligonucleotide for detection of SNP TSC0004156
rtaataaataaaa

SEQ ID NO: 20307 - DNA, 13 bp, Artificial Sequence
  Oligonucleotide for detection of SNP TSC0004156
ttttatgtattay

SEQ ID NO: 20308 - DNA, 13 bp, Artificial Sequence
  Oligonucleotide for detection of SNP TSC0004156
rtaatacataaaa

SEQ ID NO: 20309 - DNA, 13 bp, Artificial Sequence
  Oligonucleotide for detection of SNP TSC0004157
ttgttagtgaaty

SEQ ID NO: 20310 - DNA, 13 bp, Artificial Sequence
  Oligonucleotide for detection of SNP TSC0004157
rattcactaacaa

SEQ ID NO: 20311 - DNA, 13 bp, Artificial Sequence
  Oligonucleotide for detection of SNP TSC0004157
ttgttaatgaaty

SEQ ID NO: 20312 - DNA, 13 bp, Artificial Sequence
  Oligonucleotide for detection of SNP TSC0004157
rattcattaacaa

SEQ ID NO: 20313 - DNA, 13 bp, Artificial Sequence
  Oligonucleotide for detection of SNP TSC0004158
ttaggtgtgaggt

SEQ ID NO: 20314 - DNA, 13 bp, Artificial Sequence
  Oligonucleotide for detection of SNP TSC0004158
acctcacacctaa

SEQ ID NO: 20315 - DNA, 13 bp, Artificial Sequence
  Oligonucleotide for detection of SNP TSC0004158
ttaggtatgaggt

SEQ ID NO: 20316 - DNA, 13 bp, Artificial Sequence
  Oligonucleotide for detection of SNP TSC0004158
acctcatacctaa

SEQ ID NO: 20317 - DNA, 13 bp, Artificial Sequence
  Oligonucleotide for detection of SNP TSC0004159
ttgatggttgttt

SEQ ID NO: 20318 - DNA, 13 bp, Artificial Sequence
  Oligonucleotide for detection of SNP TSC0004159
aaacaaccatcaa

SEQ ID NO: 20319 - DNA, 13 bp, Artificial Sequence
  Oligonucleotide for detection of SNP TSC0004159
ttgatgattgttt

SEQ ID NO: 20320 - DNA, 13 bp, Artificial Sequence
  Oligonucleotide for detection of SNP TSC0004159
aaacaatcatcaa

SEQ ID NO: 20321 - DNA, 13 bp, Artificial Sequence
  Oligonucleotide for detection of SNP TSC0004159
ttgacggttgttt

SEQ ID NO: 20322 - DNA, 13 bp, Artificial Sequence
  Oligonucleotide for detection of SNP TSC0004159
aaacaaccgtcaa

SEQ ID NO: 20323 - DNA, 13 bp, Artificial Sequence
  Oligonucleotide for detection of SNP TSC0004159
ttgacgattgttt

SEQ ID NO: 20324 - DNA, 13 bp, Artificial Sequence
  Oligonucleotide for detection of SNP TSC0004159
aaacaatcgtcaa

SEQ ID NO: 20325 - DNA, 13 bp, Artificial Sequence
  Oligonucleotide for detection of SNP TSC0004160
gattttgtatgtg

SEQ ID NO: 20326 - DNA, 13 bp, Artificial Sequence
  Oligonucleotide for detection of SNP TSC0004160
cacatacaaaatc

SEQ ID NO: 20327 - DNA, 13 bp, Artificial Sequence
  Oligonucleotide for detection of SNP TSC0004160
gattttttatgtg

SEQ ID NO: 20328 - DNA, 13 bp, Artificial Sequence
  Oligonucleotide for detection of SNP TSC0004160
cacataaaaaatc

SEQ ID NO: 20329 - DNA, 13 bp, Artificial Sequence
  Oligonucleotide for detection of SNP TSC0004160
tatatgtagggty

SEQ ID NO: 20330 - DNA, 13 bp, Artificial Sequence
  Oligonucleotide for detection of SNP TSC0004160
raccctacatata

SEQ ID NO: 20331 - DNA, 13 bp, Artificial Sequence
  Oligonucleotide for detection of SNP TSC0004160
tatatggagggty

SEQ ID NO: 20332 - DNA, 13 bp, Artificial Sequence
  Oligonucleotide for detection of SNP TSC0004160
raccctccatata

SEQ ID NO: 20333 - DNA, 13 bp, Artificial Sequence
  Oligonucleotide for detection of SNP TSC0004161
gtaatttatatty

SEQ ID NO: 20334 - DNA, 13 bp, Artificial Sequence
  Oligonucleotide for detection of SNP TSC0004161
raatataaattac

SEQ ID NO: 20335 - DNA, 13 bp, Artificial Sequence
  Oligonucleotide for detection of SNP TSC0004161
gtaattgatatty

SEQ ID NO: 20336 - DNA, 13 bp, Artificial Sequence
  Oligonucleotide for detection of SNP TSC0004161
raatatcaattac

SEQ ID NO: 20337 - DNA, 13 bp, Artificial Sequence
  Oligonucleotide for detection of SNP TSC0004161
gagtgtgaattgy

SEQ ID NO: 20338 - DNA, 13 bp, Artificial Sequence
  Oligonucleotide for detection of SNP TSC0004161
rcaattcacactc

SEQ ID NO: 20339 - DNA, 13 bp, Artificial Sequence
  Oligonucleotide for detection of SNP TSC0004161
gagtgttaattgy

SEQ ID NO: 20340 - DNA, 13 bp, Artificial Sequence
  Oligonucleotide for detection of SNP TSC0004161
rcaattaacactc

SEQ ID NO: 20341 - DNA, 13 bp, Artificial Sequence
  Oligonucleotide for detection of SNP TSC0004162
ttgtttggattta

SEQ ID NO: 20342 - DNA, 13 bp, Artificial Sequence
  Oligonucleotide for detection of SNP TSC0004162
taaatccaaacaa

SEQ ID NO: 20343 - DNA, 13 bp, Artificial Sequence
  Oligonucleotide for detection of SNP TSC0004162
ttgttttgattta

SEQ ID NO: 20344 - DNA, 13 bp, Artificial Sequence
  Oligonucleotide for detection of SNP TSC0004162
taaatcaaaacaa

SEQ ID NO: 20345 - DNA, 13 bp, Artificial Sequence
  Oligonucleotide for detection of SNP TSC0004162
ttgtttcgattta

SEQ ID NO: 20346 - DNA, 13 bp, Artificial Sequence
  Oligonucleotide for detection of SNP TSC0004162
taaatcgaaacaa

SEQ ID NO: 20347 - DNA, 13 bp, Artificial Sequence
  Oligonucleotide for detection of SNP TSC0004162
tgaatttaaataa

SEQ ID NO: 20348 - DNA, 13 bp, Artificial Sequence
  Oligonucleotide for detection of SNP TSC0004162
ttatttaaattca

SEQ ID NO: 20349 - DNA, 13 bp, Artificial Sequence
  Oligonucleotide for detection of SNP TSC0004162
tgaattgaaataa

SEQ ID NO: 20350 - DNA, 13 bp, Artificial Sequence
  Oligonucleotide for detection of SNP TSC0004162
ttatttcaattca

SEQ ID NO: 20351 - DNA, 13 bp, Artificial Sequence
  Oligonucleotide for detection of SNP TSC0004162
tgaatcgaaataa

SEQ ID NO: 20352 - DNA, 13 bp, Artificial Sequence
  Oligonucleotide for detection of SNP TSC0004162
ttatttcgattca

SEQ ID NO: 20353 - DNA, 13 bp, Artificial Sequence
  Oligonucleotide for detection of SNP TSC0004163
gatattgattttt

SEQ ID NO: 20354 - DNA, 13 bp, Artificial Sequence
  Oligonucleotide for detection of SNP TSC0004163
aaaaatcaatatc

SEQ ID NO: 20355 - DNA, 13 bp, Artificial Sequence
  Oligonucleotide for detection of SNP TSC0004163
gatattaattttt

SEQ ID NO: 20356 - DNA, 13 bp, Artificial Sequence
  Oligonucleotide for detection of SNP TSC0004163
aaaaattaatatc

SEQ ID NO: 20357 - DNA, 13 bp, Artificial Sequence
  Oligonucleotide for detection of SNP TSC0004163
gatatcgattttt

SEQ ID NO: 20358 - DNA, 13 bp, Artificial Sequence
  Oligonucleotide for detection of SNP TSC0004163
aaaaatcgatatc

SEQ ID NO: 20359 - DNA, 13 bp, Artificial Sequence
  Oligonucleotide for detection of SNP TSC0004163
aagagttgatgty

SEQ ID NO: 20360 - DNA, 13 bp, Artificial Sequence
  Oligonucleotide for detection of SNP TSC0004163
racatcaactctt

SEQ ID NO: 20361 - DNA, 13 bp, Artificial Sequence
  Oligonucleotide for detection of SNP TSC0004163
aagagtcgatgty

SEQ ID NO: 20362 - DNA, 13 bp, Artificial Sequence
  Oligonucleotide for detection of SNP TSC0004163
racatcgactctt

SEQ ID NO: 20363 - DNA, 13 bp, Artificial Sequence
  Oligonucleotide for detection of SNP TSC0004166
ttgtattgtatat

SEQ ID NO: 20364 - DNA, 13 bp, Artificial Sequence
  Oligonucleotide for detection of SNP TSC0004166
atatacaatacaa

SEQ ID NO: 20365 - DNA, 13 bp, Artificial Sequence
  Oligonucleotide for detection of SNP TSC0004166
ttgtatcgtatat

SEQ ID NO: 20366 - DNA, 13 bp, Artificial Sequence
  Oligonucleotide for detection of SNP TSC0004166
atatacgatacaa

SEQ ID NO: 20367 - DNA, 13 bp, Artificial Sequence
  Oligonucleotide for detection of SNP TSC0004166
atgtgtggtatag

SEQ ID NO: 20368 - DNA, 13 bp, Artificial Sequence
  Oligonucleotide for detection of SNP TSC0004166
ctataccacacat

SEQ ID NO: 20369 - DNA, 13 bp, Artificial Sequence
  Oligonucleotide for detection of SNP TSC0004166
atgtgtagtatag

SEQ ID NO: 20370 - DNA, 13 bp, Artificial Sequence
  Oligonucleotide for detection of SNP TSC0004166
ctatactacacat

SEQ ID NO: 20371 - DNA, 13 bp, Artificial Sequence
  Oligonucleotide for detection of SNP TSC0004166
atgtgcggtatag

SEQ ID NO: 20372 - DNA, 13 bp, Artificial Sequence
  Oligonucleotide for detection of SNP TSC0004166
ctataccgcacat

SEQ ID NO: 20373 - DNA, 13 bp, Artificial Sequence
  Oligonucleotide for detection of SNP TSC0004167
agtaataagaggy

SEQ ID NO: 20374 - DNA, 13 bp, Artificial Sequence
  Oligonucleotide for detection of SNP TSC0004167
rcctcttattact

SEQ ID NO: 20375 - DNA, 13 bp, Artificial Sequence
  Oligonucleotide for detection of SNP TSC0004167
agtaattagaggy

SEQ ID NO: 20376 - DNA, 13 bp, Artificial Sequence
  Oligonucleotide for detection of SNP TSC0004167
rcctctaattact

SEQ ID NO: 20377 - DNA, 13 bp, Artificial Sequence
  Oligonucleotide for detection of SNP TSC0004167
gttttttattatt

SEQ ID NO: 20378 - DNA, 13 bp, Artificial Sequence
  Oligonucleotide for detection of SNP TSC0004167
aataataaaaaac

SEQ ID NO: 20379 - DNA, 13 bp, Artificial Sequence
  Oligonucleotide for detection of SNP TSC0004167
gtttttaattatt

SEQ ID NO: 20380 - DNA, 13 bp, Artificial Sequence
  Oligonucleotide for detection of SNP TSC0004167
aataattaaaaac

SEQ ID NO: 20381 - DNA, 13 bp, Artificial Sequence
  Oligonucleotide for detection of SNP TSC0004168
tttaggatgtagg

SEQ ID NO: 20382 - DNA, 13 bp, Artificial Sequence
  Oligonucleotide for detection of SNP TSC0004168
cctacatcctaaa

SEQ ID NO: 20383 - DNA, 13 bp, Artificial Sequence
  Oligonucleotide for detection of SNP TSC0004168
tttagggtgtagg

SEQ ID NO: 20384 - DNA, 13 bp, Artificial Sequence
  Oligonucleotide for detection of SNP TSC0004168
cctacaccctaaa

SEQ ID NO: 20385 - DNA, 13 bp, Artificial Sequence
  Oligonucleotide for detection of SNP TSC0004169
aaagtatagattt

SEQ ID NO: 20386 - DNA, 13 bp, Artificial Sequence
  Oligonucleotide for detection of SNP TSC0004169
aaatctatacttt

SEQ ID NO: 20387 - DNA, 13 bp, Artificial Sequence
  Oligonucleotide for detection of SNP TSC0004169
aaagtagagattt

SEQ ID NO: 20388 - DNA, 13 bp, Artificial Sequence
  Oligonucleotide for detection of SNP TSC0004169
aaatctctacttt

SEQ ID NO: 20389 - DNA, 13 bp, Artificial Sequence
  Oligonucleotide for detection of SNP TSC0004169
aaatttgtgtttt

SEQ ID NO: 20390 - DNA, 13 bp, Artificial Sequence
  Oligonucleotide for detection of SNP TSC0004169
aaaacacaaattt

SEQ ID NO: 20391 - DNA, 13 bp, Artificial Sequence
  Oligonucleotide for detection of SNP TSC0004169
aaatttttgtttt

SEQ ID NO: 20392 - DNA, 13 bp, Artificial Sequence
  Oligonucleotide for detection of SNP TSC0004169
aaaacaaaaattt

SEQ ID NO: 20393 - DNA, 13 bp, Artificial Sequence
  Oligonucleotide for detection of SNP TSC0004170
gaagtttgggaga

SEQ ID NO: 20394 - DNA, 13 bp, Artificial Sequence
  Oligonucleotide for detection of SNP TSC0004170
tctcccaaacttc

SEQ ID NO: 20395 - DNA, 13 bp, Artificial Sequence
  Oligonucleotide for detection of SNP TSC0004170
gaagttcgggaga

SEQ ID NO: 20396 - DNA, 13 bp, Artificial Sequence
  Oligonucleotide for detection of SNP TSC0004170
tctcccgaacttc

SEQ ID NO: 20397 - DNA, 13 bp, Artificial Sequence
  Oligonucleotide for detection of SNP TSC0004170
ttttttggattty

SEQ ID NO: 20398 - DNA, 13 bp, Artificial Sequence
  Oligonucleotide for detection of SNP TSC0004170
raaatccaaaaaa

SEQ ID NO: 20399 - DNA, 13 bp, Artificial Sequence
  Oligonucleotide for detection of SNP TSC0004170
ttttttagattty

SEQ ID NO: 20400 - DNA, 13 bp, Artificial Sequence
  Oligonucleotide for detection of SNP TSC0004170
raaatctaaaaaa

SEQ ID NO: 20401 - DNA, 13 bp, Artificial Sequence
  Oligonucleotide for detection of SNP TSC0004170
tttttcggattty

SEQ ID NO: 20402 - DNA, 13 bp, Artificial Sequence
  Oligonucleotide for detection of SNP TSC0004170
raaatccgaaaaa

SEQ ID NO: 20403 - DNA, 13 bp, Artificial Sequence
  Oligonucleotide for detection of SNP TSC0004171
taatgtaagtgat

SEQ ID NO: 20404 - DNA, 13 bp, Artificial Sequence
  Oligonucleotide for detection of SNP TSC0004171
atcacttacatta

SEQ ID NO: 20405 - DNA, 13 bp, Artificial Sequence
  Oligonucleotide for detection of SNP TSC0004171
taatgtgagtgat

SEQ ID NO: 20406 - DNA, 13 bp, Artificial Sequence
  Oligonucleotide for detection of SNP TSC0004171
atcactcacatta

SEQ ID NO: 20407 - DNA, 13 bp, Artificial Sequence
  Oligonucleotide for detection of SNP TSC0004172
tttggggggttga

SEQ ID NO: 20408 - DNA, 13 bp, Artificial Sequence
  Oligonucleotide for detection of SNP TSC0004172
tcaaccccccaaa

SEQ ID NO: 20409 - DNA, 13 bp, Artificial Sequence
  Oligonucleotide for detection of SNP TSC0004173
ttgtgtattatty

SEQ ID NO: 20410 - DNA, 13 bp, Artificial Sequence
  Oligonucleotide for detection of SNP TSC0004173
raataatacacaa

SEQ ID NO: 20411 - DNA, 13 bp, Artificial Sequence
  Oligonucleotide for detection of SNP TSC0004173
ttgtgtgttatty

SEQ ID NO: 20412 - DNA, 13 bp, Artificial Sequence
  Oligonucleotide for detection of SNP TSC0004173
raataacacacaa

SEQ ID NO: 20413 - DNA, 13 bp, Artificial Sequence
  Oligonucleotide for detection of SNP TSC0004173
ttgtgcgttatty

SEQ ID NO: 20414 - DNA, 13 bp, Artificial Sequence
  Oligonucleotide for detection of SNP TSC0004173
raataacgcacaa

SEQ ID NO: 20415 - DNA, 13 bp, Artificial Sequence
  Oligonucleotide for detection of SNP TSC0004173
gggtgatgtatag

SEQ ID NO: 20416 - DNA, 13 bp, Artificial Sequence
  Oligonucleotide for detection of SNP TSC0004173
ctatacatcaccc

SEQ ID NO: 20417 - DNA, 13 bp, Artificial Sequence
  Oligonucleotide for detection of SNP TSC0004173
gggtgacgtatag

SEQ ID NO: 20418 - DNA, 13 bp, Artificial Sequence
  Oligonucleotide for detection of SNP TSC0004173
ctatacgtcaccc

SEQ ID NO: 20419 - DNA, 13 bp, Artificial Sequence
  Oligonucleotide for detection of SNP TSC0004174
attgtggtttttt

SEQ ID NO: 20420 - DNA, 13 bp, Artificial Sequence
  Oligonucleotide for detection of SNP TSC0004174
aaaaaaccacaat

SEQ ID NO: 20421 - DNA, 13 bp, Artificial Sequence
  Oligonucleotide for detection of SNP TSC0004174
attgtgttttttt

SEQ ID NO: 20422 - DNA, 13 bp, Artificial Sequence
  Oligonucleotide for detection of SNP TSC0004174
aaaaaaacacaat

SEQ ID NO: 20423 - DNA, 13 bp, Artificial Sequence
  Oligonucleotide for detection of SNP TSC0004174
aagaagttatagt

SEQ ID NO: 20424 - DNA, 13 bp, Artificial Sequence
  Oligonucleotide for detection of SNP TSC0004174
actataacttctt

SEQ ID NO: 20425 - DNA, 13 bp, Artificial Sequence
  Oligonucleotide for detection of SNP TSC0004174
aagaaggtatagt

SEQ ID NO: 20426 - DNA, 13 bp, Artificial Sequence
  Oligonucleotide for detection of SNP TSC0004174
actataccttctt

SEQ ID NO: 20427 - DNA, 13 bp, Artificial Sequence
  Oligonucleotide for detection of SNP TSC0004175
aggataggtaaga

SEQ ID NO: 20428 - DNA, 13 bp, Artificial Sequence
  Oligonucleotide for detection of SNP TSC0004175
tcttacctatcct

SEQ ID NO: 20429 - DNA, 13 bp, Artificial Sequence
  Oligonucleotide for detection of SNP TSC0004175
aggatatgtaaga

SEQ ID NO: 20430 - DNA, 13 bp, Artificial Sequence
  Oligonucleotide for detection of SNP TSC0004175
tcttacatatcct

SEQ ID NO: 20431 - DNA, 13 bp, Artificial Sequence
  Oligonucleotide for detection of SNP TSC0004175
ttttatttgtttt

SEQ ID NO: 20432 - DNA, 13 bp, Artificial Sequence
  Oligonucleotide for detection of SNP TSC0004175
aaaacaaataaaa

SEQ ID NO: 20433 - DNA, 13 bp, Artificial Sequence
  Oligonucleotide for detection of SNP TSC0004175
ttttatatgtttt

SEQ ID NO: 20434 - DNA, 13 bp, Artificial Sequence
  Oligonucleotide for detection of SNP TSC0004175
aaaacatataaaa

SEQ ID NO: 20435 - DNA, 13 bp, Artificial Sequence
  Oligonucleotide for detection of SNP TSC0004176
taattttggttta

SEQ ID NO: 20436 - DNA, 13 bp, Artificial Sequence
  Oligonucleotide for detection of SNP TSC0004176
taaaccaaaatta

SEQ ID NO: 20437 - DNA, 13 bp, Artificial Sequence
  Oligonucleotide for detection of SNP TSC0004176
taatttcggttta

SEQ ID NO: 20438 - DNA, 13 bp, Artificial Sequence
  Oligonucleotide for detection of SNP TSC0004176
taaaccgaaatta

SEQ ID NO: 20439 - DNA, 13 bp, Artificial Sequence
  Oligonucleotide for detection of SNP TSC0004176
tgagttaagattg

SEQ ID NO: 20440 - DNA, 13 bp, Artificial Sequence
  Oligonucleotide for detection of SNP TSC0004176
caatcttaactca

SEQ ID NO: 20441 - DNA, 13 bp, Artificial Sequence
  Oligonucleotide for detection of SNP TSC0004176
tgagttgagattg

SEQ ID NO: 20442 - DNA, 13 bp, Artificial Sequence
  Oligonucleotide for detection of SNP TSC0004176
caatctcaactca

SEQ ID NO: 20443 - DNA, 13 bp, Artificial Sequence
  Oligonucleotide for detection of SNP TSC0004176
tgagtcgagattg

SEQ ID NO: 20444 - DNA, 13 bp, Artificial Sequence
  Oligonucleotide for detection of SNP TSC0004176
caatctcgactca

SEQ ID NO: 20445 - DNA, 13 bp, Artificial Sequence
  Oligonucleotide for detection of SNP TSC0004177
attgtagaagaaa

SEQ ID NO: 20446 - DNA, 13 bp, Artificial Sequence
  Oligonucleotide for detection of SNP TSC0004177
tttcttctacaat

SEQ ID NO: 20447 - DNA, 13 bp, Artificial Sequence
  Oligonucleotide for detection of SNP TSC0004177
attgtaaaagaaa

SEQ ID NO: 20448 - DNA, 13 bp, Artificial Sequence
  Oligonucleotide for detection of SNP TSC0004177
tttcttttacaat

SEQ ID NO: 20449 - DNA, 13 bp, Artificial Sequence
  Oligonucleotide for detection of SNP TSC0004178
ggaattgtgattt

SEQ ID NO: 20450 - DNA, 13 bp, Artificial Sequence
  Oligonucleotide for detection of SNP TSC0004178
aaatcacaattcc

SEQ ID NO: 20451 - DNA, 13 bp, Artificial Sequence
  Oligonucleotide for detection of SNP TSC0004178
ggaattatgattt

SEQ ID NO: 20452 - DNA, 13 bp, Artificial Sequence
  Oligonucleotide for detection of SNP TSC0004178
aaatcataattcc

SEQ ID NO: 20453 - DNA, 13 bp, Artificial Sequence
  Oligonucleotide for detection of SNP TSC0004178
ggaatcgtgattt

SEQ ID NO: 20454 - DNA, 13 bp, Artificial Sequence
  Oligonucleotide for detection of SNP TSC0004178
aaatcacgattcc

SEQ ID NO: 20455 - DNA, 13 bp, Artificial Sequence
  Oligonucleotide for detection of SNP TSC0004178
aggttatggttty

SEQ ID NO: 20456 - DNA, 13 bp, Artificial Sequence
  Oligonucleotide for detection of SNP TSC0004178
raaaccataacct

SEQ ID NO: 20457 - DNA, 13 bp, Artificial Sequence
  Oligonucleotide for detection of SNP TSC0004178
aggttacggttty

SEQ ID NO: 20458 - DNA, 13 bp, Artificial Sequence
  Oligonucleotide for detection of SNP TSC0004178
raaaccgtaacct

SEQ ID NO: 20459 - DNA, 13 bp, Artificial Sequence
  Oligonucleotide for detection of SNP TSC0004179
gaggttaggagtt

SEQ ID NO: 20460 - DNA, 13 bp, Artificial Sequence
  Oligonucleotide for detection of SNP TSC0004179
aactcctaacctc

SEQ ID NO: 20461 - DNA, 13 bp, Artificial Sequence
  Oligonucleotide for detection of SNP TSC0004179
gaggttgggagtt

SEQ ID NO: 20462 - DNA, 13 bp, Artificial Sequence
  Oligonucleotide for detection of SNP TSC0004179
aactcccaacctc

SEQ ID NO: 20463 - DNA, 13 bp, Artificial Sequence
  Oligonucleotide for detection of SNP TSC0004179
gaggtcgggagtt

SEQ ID NO: 20464 - DNA, 13 bp, Artificial Sequence
  Oligonucleotide for detection of SNP TSC0004179
aactcccgacctc

SEQ ID NO: 20465 - DNA, 13 bp, Artificial Sequence
  Oligonucleotide for detection of SNP TSC0004179
aatttttgattty

SEQ ID NO: 20466 - DNA, 13 bp, Artificial Sequence
  Oligonucleotide for detection of SNP TSC0004179
raaatcaaaaatt

SEQ ID NO: 20467 - DNA, 13 bp, Artificial Sequence
  Oligonucleotide for detection of SNP TSC0004179
aattttcgattty

SEQ ID NO: 20468 - DNA, 13 bp, Artificial Sequence
  Oligonucleotide for detection of SNP TSC0004179
raaatcgaaaatt

SEQ ID NO: 20469 - DNA, 13 bp, Artificial Sequence
  Oligonucleotide for detection of SNP TSC0004180
gtaatatgtgggt

SEQ ID NO: 20470 - DNA, 13 bp, Artificial Sequence
  Oligonucleotide for detection of SNP TSC0004180
acccacatattac

SEQ ID NO: 20471 - DNA, 13 bp, Artificial Sequence
  Oligonucleotide for detection of SNP TSC0004180
gtaatacgtgggt

SEQ ID NO: 20472 - DNA, 13 bp, Artificial Sequence
  Oligonucleotide for detection of SNP TSC0004180
acccacgtattac

SEQ ID NO: 20473 - DNA, 13 bp, Artificial Sequence
  Oligonucleotide for detection of SNP TSC0004180
atttatatgttgy

SEQ ID NO: 20474 - DNA, 13 bp, Artificial Sequence
  Oligonucleotide for detection of SNP TSC0004180
rcaacatataaat

SEQ ID NO: 20475 - DNA, 13 bp, Artificial Sequence
  Oligonucleotide for detection of SNP TSC0004180
atttatgtgttgy

SEQ ID NO: 20476 - DNA, 13 bp, Artificial Sequence
  Oligonucleotide for detection of SNP TSC0004180
rcaacacataaat

SEQ ID NO: 20477 - DNA, 13 bp, Artificial Sequence
  Oligonucleotide for detection of SNP TSC0004180
atttacgtgttgy

SEQ ID NO: 20478 - DNA, 13 bp, Artificial Sequence
  Oligonucleotide for detection of SNP TSC0004180
rcaacacgtaaat

SEQ ID NO: 20479 - DNA, 13 bp, Artificial Sequence
  Oligonucleotide for detection of SNP TSC0004181
tttttagaatagg

SEQ ID NO: 20480 - DNA, 13 bp, Artificial Sequence
  Oligonucleotide for detection of SNP TSC0004181
cctattctaaaaa

SEQ ID NO: 20481 - DNA, 13 bp, Artificial Sequence
  Oligonucleotide for detection of SNP TSC0004181
tttttaaaatagg

SEQ ID NO: 20482 - DNA, 13 bp, Artificial Sequence
  Oligonucleotide for detection of SNP TSC0004181
cctattttaaaaa

SEQ ID NO: 20483 - DNA, 13 bp, Artificial Sequence
  Oligonucleotide for detection of SNP TSC0004182
ggagtaattttag

SEQ ID NO: 20484 - DNA, 13 bp, Artificial Sequence
  Oligonucleotide for detection of SNP TSC0004182
ctaaaattactcc

SEQ ID NO: 20485 - DNA, 13 bp, Artificial Sequence
  Oligonucleotide for detection of SNP TSC0004182
ggagtatttttag

SEQ ID NO: 20486 - DNA, 13 bp, Artificial Sequence
  Oligonucleotide for detection of SNP TSC0004182
ctaaaaatactcc

SEQ ID NO: 20487 - DNA, 13 bp, Artificial Sequence
  Oligonucleotide for detection of SNP TSC0004182
ttgaagttgttty

SEQ ID NO: 20488 - DNA, 13 bp, Artificial Sequence
  Oligonucleotide for detection of SNP TSC0004182
raaacaacttcaa

SEQ ID NO: 20489 - DNA, 13 bp, Artificial Sequence
  Oligonucleotide for detection of SNP TSC0004182
ttgaaggtgttty

SEQ ID NO: 20490 - DNA, 13 bp, Artificial Sequence
  Oligonucleotide for detection of SNP TSC0004182
raaacaccttcaa

SEQ ID NO: 20491 - DNA, 13 bp, Artificial Sequence
  Oligonucleotide for detection of SNP TSC0004183
aaatttaagaatg

SEQ ID NO: 20492 - DNA, 13 bp, Artificial Sequence
  Oligonucleotide for detection of SNP TSC0004183
cattcttaaattt

SEQ ID NO: 20493 - DNA, 13 bp, Artificial Sequence
  Oligonucleotide for detection of SNP TSC0004183
aaattttagaatg

SEQ ID NO: 20494 - DNA, 13 bp, Artificial Sequence
  Oligonucleotide for detection of SNP TSC0004183
cattctaaaattt

SEQ ID NO: 20495 - DNA, 13 bp, Artificial Sequence
  Oligonucleotide for detection of SNP TSC0004183
tatttttagattt

SEQ ID NO: 20496 - DNA, 13 bp, Artificial Sequence
  Oligonucleotide for detection of SNP TSC0004183
aaatctaaaaata

SEQ ID NO: 20497 - DNA, 13 bp, Artificial Sequence
  Oligonucleotide for detection of SNP TSC0004183
tattttgagattt

SEQ ID NO: 20498 - DNA, 13 bp, Artificial Sequence
  Oligonucleotide for detection of SNP TSC0004183
aaatctcaaaata

SEQ ID NO: 20499 - DNA, 13 bp, Artificial Sequence
  Oligonucleotide for detection of SNP TSC0004184
gttagaattgtgy

SEQ ID NO: 20500 - DNA, 13 bp, Artificial Sequence
  Oligonucleotide for detection of SNP TSC0004184
rcacaattctaac

SEQ ID NO: 20501 - DNA, 13 bp, Artificial Sequence
  Oligonucleotide for detection of SNP TSC0004184
gttagatttgtgy

SEQ ID NO: 20502 - DNA, 13 bp, Artificial Sequence
  Oligonucleotide for detection of SNP TSC0004184
rcacaaatctaac

SEQ ID NO: 20503 - DNA, 13 bp, Artificial Sequence
  Oligonucleotide for detection of SNP TSC0004184
gttagaatcgtgy

SEQ ID NO: 20504 - DNA, 13 bp, Artificial Sequence
  Oligonucleotide for detection of SNP TSC0004184
rcacgattctaac

SEQ ID NO: 20505 - DNA, 13 bp, Artificial Sequence
  Oligonucleotide for detection of SNP TSC0004184
gttagattcgtgy

SEQ ID NO: 20506 - DNA, 13 bp, Artificial Sequence
  Oligonucleotide for detection of SNP TSC0004184
rcacgaatctaac

SEQ ID NO: 20507 - DNA, 13 bp, Artificial Sequence
  Oligonucleotide for detection of SNP TSC0004184
gtatggttttagy

SEQ ID NO: 20508 - DNA, 13 bp, Artificial Sequence
  Oligonucleotide for detection of SNP TSC0004184
rctaaaaccatac

SEQ ID NO: 20509 - DNA, 13 bp, Artificial Sequence
  Oligonucleotide for detection of SNP TSC0004184
gtatggatttagy

SEQ ID NO: 20510 - DNA, 13 bp, Artificial Sequence
  Oligonucleotide for detection of SNP TSC0004184
rctaaatccatac

SEQ ID NO: 20511 - DNA, 13 bp, Artificial Sequence
  Oligonucleotide for detection of SNP TSC0004184
gtacggttttagy

SEQ ID NO: 20512 - DNA, 13 bp, Artificial Sequence
  Oligonucleotide for detection of SNP TSC0004184
rctaaaaccgtac

SEQ ID NO: 20513 - DNA, 13 bp, Artificial Sequence
  Oligonucleotide for detection of SNP TSC0004184
gtacggatttagy

SEQ ID NO: 20514 - DNA, 13 bp, Artificial Sequence
  Oligonucleotide for detection of SNP TSC0004184
rctaaatccgtac

SEQ ID NO: 20515 - DNA, 13 bp, Artificial Sequence
  Oligonucleotide for detection of SNP TSC0004185
ttttgtgtgtatt

SEQ ID NO: 20516 - DNA, 13 bp, Artificial Sequence
  Oligonucleotide for detection of SNP TSC0004185
aatacacacaaaa

SEQ ID NO: 20517 - DNA, 13 bp, Artificial Sequence
  Oligonucleotide for detection of SNP TSC0004185
ttttgtttgtatt

SEQ ID NO: 20518 - DNA, 13 bp, Artificial Sequence
  Oligonucleotide for detection of SNP TSC0004185
aatacaaacaaaa

SEQ ID NO: 20519 - DNA, 13 bp, Artificial Sequence
  Oligonucleotide for detection of SNP TSC0004185
aatgtatataaaa

SEQ ID NO: 20520 - DNA, 13 bp, Artificial Sequence
  Oligonucleotide for detection of SNP TSC0004185
ttttatatacatt

SEQ ID NO: 20521 - DNA, 13 bp, Artificial Sequence
  Oligonucleotide for detection of SNP TSC0004185
aatgtagataaaa

SEQ ID NO: 20522 - DNA, 13 bp, Artificial Sequence
  Oligonucleotide for detection of SNP TSC0004185
ttttatctacatt

SEQ ID NO: 20523 - DNA, 13 bp, Artificial Sequence
  Oligonucleotide for detection of SNP TSC0004186
tagtgtgaaagag

SEQ ID NO: 20524 - DNA, 13 bp, Artificial Sequence
  Oligonucleotide for detection of SNP TSC0004186
ctctttcacacta

SEQ ID NO: 20525 - DNA, 13 bp, Artificial Sequence
  Oligonucleotide for detection of SNP TSC0004186
tagtgttaaagag

SEQ ID NO: 20526 - DNA, 13 bp, Artificial Sequence
  Oligonucleotide for detection of SNP TSC0004186
ctctttaacacta

SEQ ID NO: 20527 - DNA, 13 bp, Artificial Sequence
  Oligonucleotide for detection of SNP TSC0004186
tagcgtgaaagag

SEQ ID NO: 20528 - DNA, 13 bp, Artificial Sequence
  Oligonucleotide for detection of SNP TSC0004186
ctctttcacgcta

SEQ ID NO: 20529 - DNA, 13 bp, Artificial Sequence
  Oligonucleotide for detection of SNP TSC0004186
tagcgttaaagag

SEQ ID NO: 20530 - DNA, 13 bp, Artificial Sequence
  Oligonucleotide for detection of SNP TSC0004186
ctctttaacgcta

SEQ ID NO: 20531 - DNA, 13 bp, Artificial Sequence
  Oligonucleotide for detection of SNP TSC0004186
tttttttatgtta

SEQ ID NO: 20532 - DNA, 13 bp, Artificial Sequence
  Oligonucleotide for detection of SNP TSC0004186
taacataaaaaaa

SEQ ID NO: 20533 - DNA, 13 bp, Artificial Sequence
  Oligonucleotide for detection of SNP TSC0004186
ttttttgatgtta

SEQ ID NO: 20534 - DNA, 13 bp, Artificial Sequence
  Oligonucleotide for detection of SNP TSC0004186
taacatcaaaaaa

SEQ ID NO: 20535 - DNA, 13 bp, Artificial Sequence
  Oligonucleotide for detection of SNP TSC0004186
tttttttacgtta

SEQ ID NO: 20536 - DNA, 13 bp, Artificial Sequence
  Oligonucleotide for detection of SNP TSC0004186
taacgtaaaaaaa

SEQ ID NO: 20537 - DNA, 13 bp, Artificial Sequence
  Oligonucleotide for detection of SNP TSC0004186
ttttttgacgtta

SEQ ID NO: 20538 - DNA, 13 bp, Artificial Sequence
  Oligonucleotide for detection of SNP TSC0004186
taacgtcaaaaaa

SEQ ID NO: 20539 - DNA, 13 bp, Artificial Sequence
  Oligonucleotide for detection of SNP TSC0004187
ggatgaagaggay

SEQ ID NO: 20540 - DNA, 13 bp, Artificial Sequence
  Oligonucleotide for detection of SNP TSC0004187
rtcctcttcatcc

SEQ ID NO: 20541 - DNA, 13 bp, Artificial Sequence
  Oligonucleotide for detection of SNP TSC0004187
ggatgaggaggay

SEQ ID NO: 20542 - DNA, 13 bp, Artificial Sequence
  Oligonucleotide for detection of SNP TSC0004187
rtcctcctcatcc

SEQ ID NO: 20543 - DNA, 13 bp, Artificial Sequence
  Oligonucleotide for detection of SNP TSC0004188
ttatatgttatty

SEQ ID NO: 20544 - DNA, 13 bp, Artificial Sequence
  Oligonucleotide for detection of SNP TSC0004188
raataacatataa

SEQ ID NO: 20545 - DNA, 13 bp, Artificial Sequence
  Oligonucleotide for detection of SNP TSC0004188
ttatatattatty

SEQ ID NO: 20546 - DNA, 13 bp, Artificial Sequence
  Oligonucleotide for detection of SNP TSC0004188
raataatatataa

SEQ ID NO: 20547 - DNA, 13 bp, Artificial Sequence
  Oligonucleotide for detection of SNP TSC0004188
ttatacgttatty

SEQ ID NO: 20548 - DNA, 13 bp, Artificial Sequence
  Oligonucleotide for detection of SNP TSC0004188
raataacgtataa

SEQ ID NO: 20549 - DNA, 13 bp, Artificial Sequence
  Oligonucleotide for detection of SNP TSC0004188
gaatggtgtgtaa

SEQ ID NO: 20550 - DNA, 13 bp, Artificial Sequence
  Oligonucleotide for detection of SNP TSC0004188
ttacacaccattc

SEQ ID NO: 20551 - DNA, 13 bp, Artificial Sequence
  Oligonucleotide for detection of SNP TSC0004188
gaatggcgtgtaa

SEQ ID NO: 20552 - DNA, 13 bp, Artificial Sequence
  Oligonucleotide for detection of SNP TSC0004188
ttacacgccattc

SEQ ID NO: 20553 - DNA, 13 bp, Artificial Sequence
  Oligonucleotide for detection of SNP TSC0004189
agtaggggaatgt

SEQ ID NO: 20554 - DNA, 13 bp, Artificial Sequence
  Oligonucleotide for detection of SNP TSC0004189
acattcccctact

SEQ ID NO: 20555 - DNA, 13 bp, Artificial Sequence
  Oligonucleotide for detection of SNP TSC0004189
agtaggagaatgt

SEQ ID NO: 20556 - DNA, 13 bp, Artificial Sequence
  Oligonucleotide for detection of SNP TSC0004189
acattctcctact

SEQ ID NO: 20557 - DNA, 13 bp, Artificial Sequence
  Oligonucleotide for detection of SNP TSC0004190
taaaaagggatta

SEQ ID NO: 20558 - DNA, 13 bp, Artificial Sequence
  Oligonucleotide for detection of SNP TSC0004190
taatcccttttta

SEQ ID NO: 20559 - DNA, 13 bp, Artificial Sequence
  Oligonucleotide for detection of SNP TSC0004190
taaaaaaggatta

SEQ ID NO: 20560 - DNA, 13 bp, Artificial Sequence
  Oligonucleotide for detection of SNP TSC0004190
taatcctttttta

SEQ ID NO: 20561 - DNA, 13 bp, Artificial Sequence
  Oligonucleotide for detection of SNP TSC0004191
tttttgtgagaty

SEQ ID NO: 20562 - DNA, 13 bp, Artificial Sequence
  Oligonucleotide for detection of SNP TSC0004191
ratctcacaaaaa

SEQ ID NO: 20563 - DNA, 13 bp, Artificial Sequence
  Oligonucleotide for detection of SNP TSC0004191
tttttgagagaty

SEQ ID NO: 20564 - DNA, 13 bp, Artificial Sequence
  Oligonucleotide for detection of SNP TSC0004191
ratctctcaaaaa

SEQ ID NO: 20565 - DNA, 13 bp, Artificial Sequence
  Oligonucleotide for detection of SNP TSC0004191
ggttttataaaaa

SEQ ID NO: 20566 - DNA, 13 bp, Artificial Sequence
  Oligonucleotide for detection of SNP TSC0004191
tttttataaaacc

SEQ ID NO: 20567 - DNA, 13 bp, Artificial Sequence
  Oligonucleotide for detection of SNP TSC0004191
ggttttttaaaaa

SEQ ID NO: 20568 - DNA, 13 bp, Artificial Sequence
  Oligonucleotide for detection of SNP TSC0004191
tttttaaaaaacc

SEQ ID NO: 20569 - DNA, 13 bp, Artificial Sequence
  Oligonucleotide for detection of SNP TSC0004192
atatatgtatatt

SEQ ID NO: 20570 - DNA, 13 bp, Artificial Sequence
  Oligonucleotide for detection of SNP TSC0004192
aatatacatatat

SEQ ID NO: 20571 - DNA, 13 bp, Artificial Sequence
  Oligonucleotide for detection of SNP TSC0004192
atatatatatatt

SEQ ID NO: 20572 - DNA, 13 bp, Artificial Sequence
  Oligonucleotide for detection of SNP TSC0004192
aatatatatatat

SEQ ID NO: 20573 - DNA, 13 bp, Artificial Sequence
  Oligonucleotide for detection of SNP TSC0004192
atatacgtatatt

SEQ ID NO: 20574 - DNA, 13 bp, Artificial Sequence
  Oligonucleotide for detection of SNP TSC0004192
aatatacgtatat

SEQ ID NO: 20575 - DNA, 13 bp, Artificial Sequence
  Oligonucleotide for detection of SNP TSC0004192
agtgtatgtatat

SEQ ID NO: 20576 - DNA, 13 bp, Artificial Sequence
  Oligonucleotide for detection of SNP TSC0004192
atatacatacact

SEQ ID NO: 20577 - DNA, 13 bp, Artificial Sequence
  Oligonucleotide for detection of SNP TSC0004192
agtgtacgtatat

SEQ ID NO: 20578 - DNA, 13 bp, Artificial Sequence
  Oligonucleotide for detection of SNP TSC0004192
atatacgtacact

SEQ ID NO: 20579 - DNA, 13 bp, Artificial Sequence
  Oligonucleotide for detection of SNP TSC0004193
ttgaggaagggta

SEQ ID NO: 20580 - DNA, 13 bp, Artificial Sequence
  Oligonucleotide for detection of SNP TSC0004193
tacccttcctcaa

SEQ ID NO: 20581 - DNA, 13 bp, Artificial Sequence
  Oligonucleotide for detection of SNP TSC0004193
ttgagggagggta

SEQ ID NO: 20582 - DNA, 13 bp, Artificial Sequence
  Oligonucleotide for detection of SNP TSC0004193
taccctccctcaa

SEQ ID NO: 20583 - DNA, 13 bp, Artificial Sequence
  Oligonucleotide for detection of SNP TSC0004194
taaagttggttag

SEQ ID NO: 20584 - DNA, 13 bp, Artificial Sequence
  Oligonucleotide for detection of SNP TSC0004194
ctaaccaacttta

SEQ ID NO: 20585 - DNA, 13 bp, Artificial Sequence
  Oligonucleotide for detection of SNP TSC0004194
taaagtcggttag

SEQ ID NO: 20586 - DNA, 13 bp, Artificial Sequence
  Oligonucleotide for detection of SNP TSC0004194
ctaaccgacttta

SEQ ID NO: 20587 - DNA, 13 bp, Artificial Sequence
  Oligonucleotide for detection of SNP TSC0004194
ttgattggtttta

SEQ ID NO: 20588 - DNA, 13 bp, Artificial Sequence
  Oligonucleotide for detection of SNP TSC0004194
taaaaccaatcaa

SEQ ID NO: 20589 - DNA, 13 bp, Artificial Sequence
  Oligonucleotide for detection of SNP TSC0004194
ttgattagtttta

SEQ ID NO: 20590 - DNA, 13 bp, Artificial Sequence
  Oligonucleotide for detection of SNP TSC0004194
taaaactaatcaa

SEQ ID NO: 20591 - DNA, 13 bp, Artificial Sequence
  Oligonucleotide for detection of SNP TSC0004194
ttgatcggtttta

SEQ ID NO: 20592 - DNA, 13 bp, Artificial Sequence
  Oligonucleotide for detection of SNP TSC0004194
taaaaccgatcaa

SEQ ID NO: 20593 - DNA, 13 bp, Artificial Sequence
  Oligonucleotide for detection of SNP TSC0004195
ttaattgttgaty

SEQ ID NO: 20594 - DNA, 13 bp, Artificial Sequence
  Oligonucleotide for detection of SNP TSC0004195
ratcaacaattaa

SEQ ID NO: 20595 - DNA, 13 bp, Artificial Sequence
  Oligonucleotide for detection of SNP TSC0004195
ttaattattgaty

SEQ ID NO: 20596 - DNA, 13 bp, Artificial Sequence
  Oligonucleotide for detection of SNP TSC0004195
ratcaataattaa

SEQ ID NO: 20597 - DNA, 13 bp, Artificial Sequence
  Oligonucleotide for detection of SNP TSC0004195
ttaatcgttgaty

SEQ ID NO: 20598 - DNA, 13 bp, Artificial Sequence
  Oligonucleotide for detection of SNP TSC0004195
ratcaacgattaa

SEQ ID NO: 20599 - DNA, 13 bp, Artificial Sequence
  Oligonucleotide for detection of SNP TSC0004195
ggttaatgattaa

SEQ ID NO: 20600 - DNA, 13 bp, Artificial Sequence
  Oligonucleotide for detection of SNP TSC0004195
ttaatcattaacc

SEQ ID NO: 20601 - DNA, 13 bp, Artificial Sequence
  Oligonucleotide for detection of SNP TSC0004195
ggttaacgattaa

SEQ ID NO: 20602 - DNA, 13 bp, Artificial Sequence
  Oligonucleotide for detection of SNP TSC0004195
ttaatcgttaacc

SEQ ID NO: 20603 - DNA, 13 bp, Artificial Sequence
  Oligonucleotide for detection of SNP TSC0004196
aaggtagaggttt

SEQ ID NO: 20604 - DNA, 13 bp, Artificial Sequence
  Oligonucleotide for detection of SNP TSC0004196
aaacctctacctt

SEQ ID NO: 20605 - DNA, 13 bp, Artificial Sequence
  Oligonucleotide for detection of SNP TSC0004196
aaggtaaaggttt

SEQ ID NO: 20606 - DNA, 13 bp, Artificial Sequence
  Oligonucleotide for detection of SNP TSC0004196
aaacctttacctt

SEQ ID NO: 20607 - DNA, 13 bp, Artificial Sequence
  Oligonucleotide for detection of SNP TSC0004197
tattaagaaaaaa

SEQ ID NO: 20608 - DNA, 13 bp, Artificial Sequence
  Oligonucleotide for detection of SNP TSC0004197
ttttttcttaata

SEQ ID NO: 20609 - DNA, 13 bp, Artificial Sequence
  Oligonucleotide for detection of SNP TSC0004197
tattaaaaaaaaa

SEQ ID NO: 20610 - DNA, 13 bp, Artificial Sequence
  Oligonucleotide for detection of SNP TSC0004197
tttttttttaata

SEQ ID NO: 20611 - DNA, 13 bp, Artificial Sequence
  Oligonucleotide for detection of SNP TSC0004198
ggagatagaagga

SEQ ID NO: 20612 - DNA, 13 bp, Artificial Sequence
  Oligonucleotide for detection of SNP TSC0004198
tccttctatctcc

SEQ ID NO: 20613 - DNA, 13 bp, Artificial Sequence
  Oligonucleotide for detection of SNP TSC0004198
ggagatggaagga

SEQ ID NO: 20614 - DNA, 13 bp, Artificial Sequence
  Oligonucleotide for detection of SNP TSC0004198
tccttccatctcc

SEQ ID NO: 20615 - DNA, 13 bp, Artificial Sequence
  Oligonucleotide for detection of SNP TSC0004199
ttgtttggtggta

SEQ ID NO: 20616 - DNA, 13 bp, Artificial Sequence
  Oligonucleotide for detection of SNP TSC0004199
taccaccaaacaa

SEQ ID NO: 20617 - DNA, 13 bp, Artificial Sequence
  Oligonucleotide for detection of SNP TSC0004199
ttgtttagtggta

SEQ ID NO: 20618 - DNA, 13 bp, Artificial Sequence
  Oligonucleotide for detection of SNP TSC0004199
taccactaaacaa

SEQ ID NO: 20619 - DNA, 13 bp, Artificial Sequence
  Oligonucleotide for detection of SNP TSC0004199
ttgttcggtggta

SEQ ID NO: 20620 - DNA, 13 bp, Artificial Sequence
  Oligonucleotide for detection of SNP TSC0004199
taccaccgaacaa

SEQ ID NO: 20621 - DNA, 13 bp, Artificial Sequence
  Oligonucleotide for detection of SNP TSC0004199
tgttattgaatag

SEQ ID NO: 20622 - DNA, 13 bp, Artificial Sequence
  Oligonucleotide for detection of SNP TSC0004199
ctattcaataaca

SEQ ID NO: 20623 - DNA, 13 bp, Artificial Sequence
  Oligonucleotide for detection of SNP TSC0004199
tgttatcgaatag

SEQ ID NO: 20624 - DNA, 13 bp, Artificial Sequence
  Oligonucleotide for detection of SNP TSC0004199
ctattcgataaca

SEQ ID NO: 20625 - DNA, 13 bp, Artificial Sequence
  Oligonucleotide for detection of SNP TSC0004200
ttttttagttgtt

SEQ ID NO: 20626 - DNA, 13 bp, Artificial Sequence
  Oligonucleotide for detection of SNP TSC0004200
aacaactaaaaaa

SEQ ID NO: 20627 - DNA, 13 bp, Artificial Sequence
  Oligonucleotide for detection of SNP TSC0004200
tttttttgttgtt

SEQ ID NO: 20628 - DNA, 13 bp, Artificial Sequence
  Oligonucleotide for detection of SNP TSC0004200
aacaacaaaaaaa

SEQ ID NO: 20629 - DNA, 13 bp, Artificial Sequence
  Oligonucleotide for detection of SNP TSC0004200
ttttttcgttgtt

SEQ ID NO: 20630 - DNA, 13 bp, Artificial Sequence
  Oligonucleotide for detection of SNP TSC0004200
aacaacgaaaaaa

SEQ ID NO: 20631 - DNA, 13 bp, Artificial Sequence
  Oligonucleotide for detection of SNP TSC0004200
aataattagggaa

SEQ ID NO: 20632 - DNA, 13 bp, Artificial Sequence
  Oligonucleotide for detection of SNP TSC0004200
ttccctaattatt

SEQ ID NO: 20633 - DNA, 13 bp, Artificial Sequence
  Oligonucleotide for detection of SNP TSC0004200
aataatgagggaa

SEQ ID NO: 20634 - DNA, 13 bp, Artificial Sequence
  Oligonucleotide for detection of SNP TSC0004200
ttccctcattatt

SEQ ID NO: 20635 - DNA, 13 bp, Artificial Sequence
  Oligonucleotide for detection of SNP TSC0004200
aataacgagggaa

SEQ ID NO: 20636 - DNA, 13 bp, Artificial Sequence
  Oligonucleotide for detection of SNP TSC0004200
ttccctcgttatt

SEQ ID NO: 20637 - DNA, 13 bp, Artificial Sequence
  Oligonucleotide for detection of SNP TSC0004201
tggaaaagatata

SEQ ID NO: 20638 - DNA, 13 bp, Artificial Sequence
  Oligonucleotide for detection of SNP TSC0004201
tatatcttttcca

SEQ ID NO: 20639 - DNA, 13 bp, Artificial Sequence
  Oligonucleotide for detection of SNP TSC0004201
tggaaaggatata

SEQ ID NO: 20640 - DNA, 13 bp, Artificial Sequence
  Oligonucleotide for detection of SNP TSC0004201
tatatcctttcca

SEQ ID NO: 20641 - DNA, 13 bp, Artificial Sequence
  Oligonucleotide for detection of SNP TSC0004202
ttagatatatagg

SEQ ID NO: 20642 - DNA, 13 bp, Artificial Sequence
  Oligonucleotide for detection of SNP TSC0004202
cctatatatctaa

SEQ ID NO: 20643 - DNA, 13 bp, Artificial Sequence
  Oligonucleotide for detection of SNP TSC0004202
ttagatgtatagg

SEQ ID NO: 20644 - DNA, 13 bp, Artificial Sequence
  Oligonucleotide for detection of SNP TSC0004202
cctatacatctaa

SEQ ID NO: 20645 - DNA, 13 bp, Artificial Sequence
  Oligonucleotide for detection of SNP TSC0004202
ttagacgtatagg

SEQ ID NO: 20646 - DNA, 13 bp, Artificial Sequence
  Oligonucleotide for detection of SNP TSC0004202
cctatacgtctaa

SEQ ID NO: 20647 - DNA, 13 bp, Artificial Sequence
  Oligonucleotide for detection of SNP TSC0004202
tttatatgtttaa

SEQ ID NO: 20648 - DNA, 13 bp, Artificial Sequence
  Oligonucleotide for detection of SNP TSC0004202
ttaaacatataaa

SEQ ID NO: 20649 - DNA, 13 bp, Artificial Sequence
  Oligonucleotide for detection of SNP TSC0004202
tttatacgtttaa

SEQ ID NO: 20650 - DNA, 13 bp, Artificial Sequence
  Oligonucleotide for detection of SNP TSC0004202
ttaaacgtataaa

SEQ ID NO: 20651 - DNA, 13 bp, Artificial Sequence
  Oligonucleotide for detection of SNP TSC0004203
gtagatagtttty

SEQ ID NO: 20652 - DNA, 13 bp, Artificial Sequence
  Oligonucleotide for detection of SNP TSC0004203
raaaactatctac

SEQ ID NO: 20653 - DNA, 13 bp, Artificial Sequence
  Oligonucleotide for detection of SNP TSC0004203
gtagatggtttty

SEQ ID NO: 20654 - DNA, 13 bp, Artificial Sequence
  Oligonucleotide for detection of SNP TSC0004203
raaaaccatctac

SEQ ID NO: 20655 - DNA, 13 bp, Artificial Sequence
  Oligonucleotide for detection of SNP TSC0004203
gtagacggtttty

SEQ ID NO: 20656 - DNA, 13 bp, Artificial Sequence
  Oligonucleotide for detection of SNP TSC0004203
raaaaccgtctac

SEQ ID NO: 20657 - DNA, 13 bp, Artificial Sequence
  Oligonucleotide for detection of SNP TSC0004203
gggaattgtttgy

SEQ ID NO: 20658 - DNA, 13 bp, Artificial Sequence
  Oligonucleotide for detection of SNP TSC0004203
rcaaacaattccc

SEQ ID NO: 20659 - DNA, 13 bp, Artificial Sequence
  Oligonucleotide for detection of SNP TSC0004203
gggaatcgtttgy

SEQ ID NO: 20660 - DNA, 13 bp, Artificial Sequence
  Oligonucleotide for detection of SNP TSC0004203
rcaaacgattccc

SEQ ID NO: 20661 - DNA, 13 bp, Artificial Sequence
  Oligonucleotide for detection of SNP TSC0004204
ttgatagatattt

SEQ ID NO: 20662 - DNA, 13 bp, Artificial Sequence
  Oligonucleotide for detection of SNP TSC0004204
aaatatctatcaa

SEQ ID NO: 20663 - DNA, 13 bp, Artificial Sequence
  Oligonucleotide for detection of SNP TSC0004204
ttgataaatattt

SEQ ID NO: 20664 - DNA, 13 bp, Artificial Sequence
  Oligonucleotide for detection of SNP TSC0004204
aaatatttatcaa

SEQ ID NO: 20665 - DNA, 13 bp, Artificial Sequence
  Oligonucleotide for detection of SNP TSC0004205
atagtggtggagt

SEQ ID NO: 20666 - DNA, 13 bp, Artificial Sequence
  Oligonucleotide for detection of SNP TSC0004205
actccaccactat

SEQ ID NO: 20667 - DNA, 13 bp, Artificial Sequence
  Oligonucleotide for detection of SNP TSC0004205
atagtgatggagt

SEQ ID NO: 20668 - DNA, 13 bp, Artificial Sequence
  Oligonucleotide for detection of SNP TSC0004205
actccatcactat

SEQ ID NO: 20669 - DNA, 13 bp, Artificial Sequence
  Oligonucleotide for detection of SNP TSC0004206
taatttgataatt

SEQ ID NO: 20670 - DNA, 13 bp, Artificial Sequence
  Oligonucleotide for detection of SNP TSC0004206
aattatcaaatta

SEQ ID NO: 20671 - DNA, 13 bp, Artificial Sequence
  Oligonucleotide for detection of SNP TSC0004206
taatttaataatt

SEQ ID NO: 20672 - DNA, 13 bp, Artificial Sequence
  Oligonucleotide for detection of SNP TSC0004206
aattattaaatta

SEQ ID NO: 20673 - DNA, 13 bp, Artificial Sequence
  Oligonucleotide for detection of SNP TSC0004207
tgtagtagtttay

SEQ ID NO: 20674 - DNA, 13 bp, Artificial Sequence
  Oligonucleotide for detection of SNP TSC0004207
rtaaactactaca

SEQ ID NO: 20675 - DNA, 13 bp, Artificial Sequence
  Oligonucleotide for detection of SNP TSC0004207
tgtagtggtttay

SEQ ID NO: 20676 - DNA, 13 bp, Artificial Sequence
  Oligonucleotide for detection of SNP TSC0004207
rtaaaccactaca

SEQ ID NO: 20677 - DNA, 13 bp, Artificial Sequence
  Oligonucleotide for detection of SNP TSC0004207
cgtagtagtttay

SEQ ID NO: 20678 - DNA, 13 bp, Artificial Sequence
  Oligonucleotide for detection of SNP TSC0004207
rtaaactactacg

SEQ ID NO: 20679 - DNA, 13 bp, Artificial Sequence
  Oligonucleotide for detection of SNP TSC0004207
cgtagtggtttay

SEQ ID NO: 20680 - DNA, 13 bp, Artificial Sequence
  Oligonucleotide for detection of SNP TSC0004207
rtaaaccactacg

SEQ ID NO: 20681 - DNA, 13 bp, Artificial Sequence
  Oligonucleotide for detection of SNP TSC0004208
ttaagtatatttg

SEQ ID NO: 20682 - DNA, 13 bp, Artificial Sequence
  Oligonucleotide for detection of SNP TSC0004208
caaatatacttaa

SEQ ID NO: 20683 - DNA, 13 bp, Artificial Sequence
  Oligonucleotide for detection of SNP TSC0004208
ttaagtttatttg

SEQ ID NO: 20684 - DNA, 13 bp, Artificial Sequence
  Oligonucleotide for detection of SNP TSC0004208
caaataaacttaa

SEQ ID NO: 20685 - DNA, 13 bp, Artificial Sequence
  Oligonucleotide for detection of SNP TSC0004208
taaatatgtttaa

SEQ ID NO: 20686 - DNA, 13 bp, Artificial Sequence
  Oligonucleotide for detection of SNP TSC0004208
ttaaacatattta

SEQ ID NO: 20687 - DNA, 13 bp, Artificial Sequence
  Oligonucleotide for detection of SNP TSC0004208
taaataggtttaa

SEQ ID NO: 20688 - DNA, 13 bp, Artificial Sequence
  Oligonucleotide for detection of SNP TSC0004208
ttaaacctattta

SEQ ID NO: 20689 - DNA, 13 bp, Artificial Sequence
  Oligonucleotide for detection of SNP TSC0004209
tattattgttatt

SEQ ID NO: 20690 - DNA, 13 bp, Artificial Sequence
  Oligonucleotide for detection of SNP TSC0004209
aataacaataata

SEQ ID NO: 20691 - DNA, 13 bp, Artificial Sequence
  Oligonucleotide for detection of SNP TSC0004209
tattatcgttatt

SEQ ID NO: 20692 - DNA, 13 bp, Artificial Sequence
  Oligonucleotide for detection of SNP TSC0004209
aataacgataata

SEQ ID NO: 20693 - DNA, 13 bp, Artificial Sequence
  Oligonucleotide for detection of SNP TSC0004209
aatagtggtaatg

SEQ ID NO: 20694 - DNA, 13 bp, Artificial Sequence
  Oligonucleotide for detection of SNP TSC0004209
cattaccactatt

SEQ ID NO: 20695 - DNA, 13 bp, Artificial Sequence
  Oligonucleotide for detection of SNP TSC0004209
aatagtagtaatg

SEQ ID NO: 20696 - DNA, 13 bp, Artificial Sequence
  Oligonucleotide for detection of SNP TSC0004209
cattactactatt

SEQ ID NO: 20697 - DNA, 13 bp, Artificial Sequence
  Oligonucleotide for detection of SNP TSC0004209
aatagcggtaatg

SEQ ID NO: 20698 - DNA, 13 bp, Artificial Sequence
  Oligonucleotide for detection of SNP TSC0004209
cattaccgctatt

SEQ ID NO: 20699 - DNA, 13 bp, Artificial Sequence
  Oligonucleotide for detection of SNP TSC0004210
tttttgatttttt

SEQ ID NO: 20700 - DNA, 13 bp, Artificial Sequence
  Oligonucleotide for detection of SNP TSC0004210
aaaaaatcaaaaa

SEQ ID NO: 20701 - DNA, 13 bp, Artificial Sequence
  Oligonucleotide for detection of SNP TSC0004210
aaaaaagtaaaaa

SEQ ID NO: 20702 - DNA, 13 bp, Artificial Sequence
  Oligonucleotide for detection of SNP TSC0004210
tttttactttttt

SEQ ID NO: 20703 - DNA, 13 bp, Artificial Sequence
  Oligonucleotide for detection of SNP TSC0004211
ttgtatagtttga

SEQ ID NO: 20704 - DNA, 13 bp, Artificial Sequence
  Oligonucleotide for detection of SNP TSC0004211
tcaaactatacaa

SEQ ID NO: 20705 - DNA, 13 bp, Artificial Sequence
  Oligonucleotide for detection of SNP TSC0004211
ttgtatggtttga

SEQ ID NO: 20706 - DNA, 13 bp, Artificial Sequence
  Oligonucleotide for detection of SNP TSC0004211
tcaaaccatacaa

SEQ ID NO: 20707 - DNA, 13 bp, Artificial Sequence
  Oligonucleotide for detection of SNP TSC0004212
tggtaagggaata

SEQ ID NO: 20708 - DNA, 13 bp, Artificial Sequence
  Oligonucleotide for detection of SNP TSC0004212
tattcccttacca

SEQ ID NO: 20709 - DNA, 13 bp, Artificial Sequence
  Oligonucleotide for detection of SNP TSC0004212
tggtaaaggaata

SEQ ID NO: 20710 - DNA, 13 bp, Artificial Sequence
  Oligonucleotide for detection of SNP TSC0004212
tattcctttacca

SEQ ID NO: 20711 - DNA, 13 bp, Artificial Sequence
  Oligonucleotide for detection of SNP TSC0004214
gggagggagggag

SEQ ID NO: 20712 - DNA, 13 bp, Artificial Sequence
  Oligonucleotide for detection of SNP TSC0004214
ctccctccctccc

SEQ ID NO: 20713 - DNA, 13 bp, Artificial Sequence
  Oligonucleotide for detection of SNP TSC0004214
gggaggaagggag

SEQ ID NO: 20714 - DNA, 13 bp, Artificial Sequence
  Oligonucleotide for detection of SNP TSC0004214
ctcccttcctccc

SEQ ID NO: 20715 - DNA, 13 bp, Artificial Sequence
  Oligonucleotide for detection of SNP TSC0004215
tattatgtatgaa

SEQ ID NO: 20716 - DNA, 13 bp, Artificial Sequence
  Oligonucleotide for detection of SNP TSC0004215
ttcatacataata

SEQ ID NO: 20717 - DNA, 13 bp, Artificial Sequence
  Oligonucleotide for detection of SNP TSC0004215
tattatatatgaa

SEQ ID NO: 20718 - DNA, 13 bp, Artificial Sequence
  Oligonucleotide for detection of SNP TSC0004215
ttcatatataata

SEQ ID NO: 20719 - DNA, 13 bp, Artificial Sequence
  Oligonucleotide for detection of SNP TSC0004215
tattacgtatgaa

SEQ ID NO: 20720 - DNA, 13 bp, Artificial Sequence
  Oligonucleotide for detection of SNP TSC0004215
ttcatacgtaata

SEQ ID NO: 20721 - DNA, 13 bp, Artificial Sequence
  Oligonucleotide for detection of SNP TSC0004215
tttatatgtggta

SEQ ID NO: 20722 - DNA, 13 bp, Artificial Sequence
  Oligonucleotide for detection of SNP TSC0004215
taccacatataaa

SEQ ID NO: 20723 - DNA, 13 bp, Artificial Sequence
  Oligonucleotide for detection of SNP TSC0004215
tttatacgtggta

SEQ ID NO: 20724 - DNA, 13 bp, Artificial Sequence
  Oligonucleotide for detection of SNP TSC0004215
taccacgtataaa

SEQ ID NO: 20725 - DNA, 13 bp, Artificial Sequence
  Oligonucleotide for detection of SNP TSC0004216
agggtggagtgtt

SEQ ID NO: 20726 - DNA, 13 bp, Artificial Sequence
  Oligonucleotide for detection of SNP TSC0004216
aacactccaccct

SEQ ID NO: 20727 - DNA, 13 bp, Artificial Sequence
  Oligonucleotide for detection of SNP TSC0004216
agggtgaagtgtt

SEQ ID NO: 20728 - DNA, 13 bp, Artificial Sequence
  Oligonucleotide for detection of SNP TSC0004216
aacacttcaccct

SEQ ID NO: 20729 - DNA, 13 bp, Artificial Sequence
  Oligonucleotide for detection of SNP TSC0004216
agggcggagtgtt

SEQ ID NO: 20730 - DNA, 13 bp, Artificial Sequence
  Oligonucleotide for detection of SNP TSC0004216
aacactccgccct

SEQ ID NO: 20731 - DNA, 13 bp, Artificial Sequence
  Oligonucleotide for detection of SNP TSC0004216
agggcgaagtgtt

SEQ ID NO: 20732 - DNA, 13 bp, Artificial Sequence
  Oligonucleotide for detection of SNP TSC0004216
aacacttcgccct

SEQ ID NO: 20733 - DNA, 13 bp, Artificial Sequence
  Oligonucleotide for detection of SNP TSC0004217
tttgaaagtagta

SEQ ID NO: 20734 - DNA, 13 bp, Artificial Sequence
  Oligonucleotide for detection of SNP TSC0004217
tactactttcaaa

SEQ ID NO: 20735 - DNA, 13 bp, Artificial Sequence
  Oligonucleotide for detection of SNP TSC0004217
tttgaaggtagta

SEQ ID NO: 20736 - DNA, 13 bp, Artificial Sequence
  Oligonucleotide for detection of SNP TSC0004217
tactaccttcaaa

SEQ ID NO: 20737 - DNA, 13 bp, Artificial Sequence
  Oligonucleotide for detection of SNP TSC0004219
aatgttttatttt

SEQ ID NO: 20738 - DNA, 13 bp, Artificial Sequence
  Oligonucleotide for detection of SNP TSC0004219
aaaataaaacatt

SEQ ID NO: 20739 - DNA, 13 bp, Artificial Sequence
  Oligonucleotide for detection of SNP TSC0004219
aatgttgtatttt

SEQ ID NO: 20740 - DNA, 13 bp, Artificial Sequence
  Oligonucleotide for detection of SNP TSC0004219
aaaatacaacatt

SEQ ID NO: 20741 - DNA, 13 bp, Artificial Sequence
  Oligonucleotide for detection of SNP TSC0004219
aatgtcgtatttt

SEQ ID NO: 20742 - DNA, 13 bp, Artificial Sequence
  Oligonucleotide for detection of SNP TSC0004219
aaaatacgacatt

SEQ ID NO: 20743 - DNA, 13 bp, Artificial Sequence
  Oligonucleotide for detection of SNP TSC0004219
aaaatgggatatt

SEQ ID NO: 20744 - DNA, 13 bp, Artificial Sequence
  Oligonucleotide for detection of SNP TSC0004219
aatatcccatttt

SEQ ID NO: 20745 - DNA, 13 bp, Artificial Sequence
  Oligonucleotide for detection of SNP TSC0004219
aaaatgtgatatt

SEQ ID NO: 20746 - DNA, 13 bp, Artificial Sequence
  Oligonucleotide for detection of SNP TSC0004219
aatatcacatttt

SEQ ID NO: 20747 - DNA, 13 bp, Artificial Sequence
  Oligonucleotide for detection of SNP TSC0004219
aaaatgcgatatt

SEQ ID NO: 20748 - DNA, 13 bp, Artificial Sequence
  Oligonucleotide for detection of SNP TSC0004219
aatatcgcatttt

SEQ ID NO: 20749 - DNA, 13 bp, Artificial Sequence
  Oligonucleotide for detection of SNP TSC0004220
gtaggatggtagg

SEQ ID NO: 20750 - DNA, 13 bp, Artificial Sequence
  Oligonucleotide for detection of SNP TSC0004220
cctaccatcctac

SEQ ID NO: 20751 - DNA, 13 bp, Artificial Sequence
  Oligonucleotide for detection of SNP TSC0004220
gtaggagggtagg

SEQ ID NO: 20752 - DNA, 13 bp, Artificial Sequence
  Oligonucleotide for detection of SNP TSC0004220
cctaccctcctac

SEQ ID NO: 20753 - DNA, 13 bp, Artificial Sequence
  Oligonucleotide for detection of SNP TSC0004220
gtaggacggtagg

SEQ ID NO: 20754 - DNA, 13 bp, Artificial Sequence
  Oligonucleotide for detection of SNP TSC0004220
cctaccgtcctac

SEQ ID NO: 20755 - DNA, 13 bp, Artificial Sequence
  Oligonucleotide for detection of SNP TSC0004220
tttgttgttttgy

SEQ ID NO: 20756 - DNA, 13 bp, Artificial Sequence
  Oligonucleotide for detection of SNP TSC0004220
rcaaaacaacaaa

SEQ ID NO: 20757 - DNA, 13 bp, Artificial Sequence
  Oligonucleotide for detection of SNP TSC0004220
tttgtttttttgy

SEQ ID NO: 20758 - DNA, 13 bp, Artificial Sequence
  Oligonucleotide for detection of SNP TSC0004220
rcaaaaaaacaaa

SEQ ID NO: 20759 - DNA, 13 bp, Artificial Sequence
  Oligonucleotide for detection of SNP TSC0004220
tttgtcgttttgy

SEQ ID NO: 20760 - DNA, 13 bp, Artificial Sequence
  Oligonucleotide for detection of SNP TSC0004220
rcaaaacgacaaa

SEQ ID NO: 20761 - DNA, 13 bp, Artificial Sequence
  Oligonucleotide for detection of SNP TSC0004221
gaaagagttattt

SEQ ID NO: 20762 - DNA, 13 bp, Artificial Sequence
  Oligonucleotide for detection of SNP TSC0004221
aaataactctttc

SEQ ID NO: 20763 - DNA, 13 bp, Artificial Sequence
  Oligonucleotide for detection of SNP TSC0004221
gaaagaattattt

SEQ ID NO: 20764 - DNA, 13 bp, Artificial Sequence
  Oligonucleotide for detection of SNP TSC0004221
aaataattctttc

SEQ ID NO: 20765 - DNA, 13 bp, Artificial Sequence
  Oligonucleotide for detection of SNP TSC0004222
tgattttgttata

SEQ ID NO: 20766 - DNA, 13 bp, Artificial Sequence
  Oligonucleotide for detection of SNP TSC0004222
tataacaaaatca

SEQ ID NO: 20767 - DNA, 13 bp, Artificial Sequence
  Oligonucleotide for detection of SNP TSC0004222
tgatttcgttata

SEQ ID NO: 20768 - DNA, 13 bp, Artificial Sequence
  Oligonucleotide for detection of SNP TSC0004222
tataacgaaatca

SEQ ID NO: 20769 - DNA, 13 bp, Artificial Sequence
  Oligonucleotide for detection of SNP TSC0004222
tgtggtaaagtta

SEQ ID NO: 20770 - DNA, 13 bp, Artificial Sequence
  Oligonucleotide for detection of SNP TSC0004222
taactttaccaca

SEQ ID NO: 20771 - DNA, 13 bp, Artificial Sequence
  Oligonucleotide for detection of SNP TSC0004222
tgtggtgaagtta

SEQ ID NO: 20772 - DNA, 13 bp, Artificial Sequence
  Oligonucleotide for detection of SNP TSC0004222
taacttcaccaca

SEQ ID NO: 20773 - DNA, 13 bp, Artificial Sequence
  Oligonucleotide for detection of SNP TSC0004222
tgtggcgaagtta

SEQ ID NO: 20774 - DNA, 13 bp, Artificial Sequence
  Oligonucleotide for detection of SNP TSC0004222
taacttcgccaca

SEQ ID NO: 20775 - DNA, 13 bp, Artificial Sequence
  Oligonucleotide for detection of SNP TSC0004223
atggaattatatt

SEQ ID NO: 20776 - DNA, 13 bp, Artificial Sequence
  Oligonucleotide for detection of SNP TSC0004223
aatataattccat

SEQ ID NO: 20777 - DNA, 13 bp, Artificial Sequence
  Oligonucleotide for detection of SNP TSC0004223
atggaagtatatt

SEQ ID NO: 20778 - DNA, 13 bp, Artificial Sequence
  Oligonucleotide for detection of SNP TSC0004223
aatatacttccat

SEQ ID NO: 20779 - DNA, 13 bp, Artificial Sequence
  Oligonucleotide for detection of SNP TSC0004223
agtgtgattttat

SEQ ID NO: 20780 - DNA, 13 bp, Artificial Sequence
  Oligonucleotide for detection of SNP TSC0004223
ataaaatcacact

SEQ ID NO: 20781 - DNA, 13 bp, Artificial Sequence
  Oligonucleotide for detection of SNP TSC0004223
agtgtgtttttat

SEQ ID NO: 20782 - DNA, 13 bp, Artificial Sequence
  Oligonucleotide for detection of SNP TSC0004223
ataaaaacacact

SEQ ID NO: 20783 - DNA, 13 bp, Artificial Sequence
  Oligonucleotide for detection of SNP TSC0004224
tatttagtttaat

SEQ ID NO: 20784 - DNA, 13 bp, Artificial Sequence
  Oligonucleotide for detection of SNP TSC0004224
attaaactaaata

SEQ ID NO: 20785 - DNA, 13 bp, Artificial Sequence
  Oligonucleotide for detection of SNP TSC0004224
tatttaatttaat

SEQ ID NO: 20786 - DNA, 13 bp, Artificial Sequence
  Oligonucleotide for detection of SNP TSC0004224
attaaattaaata

SEQ ID NO: 20787 - DNA, 13 bp, Artificial Sequence
  Oligonucleotide for detection of SNP TSC0004225
ttttatttattga

SEQ ID NO: 20788 - DNA, 13 bp, Artificial Sequence
  Oligonucleotide for detection of SNP TSC0004225
tcaataaataaaa

SEQ ID NO: 20789 - DNA, 13 bp, Artificial Sequence
  Oligonucleotide for detection of SNP TSC0004225
ttttatatattga

SEQ ID NO: 20790 - DNA, 13 bp, Artificial Sequence
  Oligonucleotide for detection of SNP TSC0004225
tcaatatataaaa

SEQ ID NO: 20791 - DNA, 13 bp, Artificial Sequence
  Oligonucleotide for detection of SNP TSC0004225
ttaataaataaaa

SEQ ID NO: 20792 - DNA, 13 bp, Artificial Sequence
  Oligonucleotide for detection of SNP TSC0004225
ttttatttattaa

SEQ ID NO: 20793 - DNA, 13 bp, Artificial Sequence
  Oligonucleotide for detection of SNP TSC0004225
ttaatatataaaa

SEQ ID NO: 20794 - DNA, 13 bp, Artificial Sequence
  Oligonucleotide for detection of SNP TSC0004225
ttttatatattaa

SEQ ID NO: 20795 - DNA, 13 bp, Artificial Sequence
  Oligonucleotide for detection of SNP TSC0004226
ggagtttgtagga

SEQ ID NO: 20796 - DNA, 13 bp, Artificial Sequence
  Oligonucleotide for detection of SNP TSC0004226
tcctacaaactcc

SEQ ID NO: 20797 - DNA, 13 bp, Artificial Sequence
  Oligonucleotide for detection of SNP TSC0004226
ggagttcgtagga

SEQ ID NO: 20798 - DNA, 13 bp, Artificial Sequence
  Oligonucleotide for detection of SNP TSC0004226
tcctacgaactcc

SEQ ID NO: 20799 - DNA, 13 bp, Artificial Sequence
  Oligonucleotide for detection of SNP TSC0004226
ttttgtagattty

SEQ ID NO: 20800 - DNA, 13 bp, Artificial Sequence
  Oligonucleotide for detection of SNP TSC0004226
raaatctacaaaa

SEQ ID NO: 20801 - DNA, 13 bp, Artificial Sequence
  Oligonucleotide for detection of SNP TSC0004226
ttttgtggattty

SEQ ID NO: 20802 - DNA, 13 bp, Artificial Sequence
  Oligonucleotide for detection of SNP TSC0004226
raaatccacaaaa

SEQ ID NO: 20803 - DNA, 13 bp, Artificial Sequence
  Oligonucleotide for detection of SNP TSC0004226
ttttgcggattty

SEQ ID NO: 20804 - DNA, 13 bp, Artificial Sequence
  Oligonucleotide for detection of SNP TSC0004226
raaatccgcaaaa

SEQ ID NO: 20805 - DNA, 13 bp, Artificial Sequence
  Oligonucleotide for detection of SNP TSC0004228
ataggtgtaggat

SEQ ID NO: 20806 - DNA, 13 bp, Artificial Sequence
  Oligonucleotide for detection of SNP TSC0004228
atcctacacctat

SEQ ID NO: 20807 - DNA, 13 bp, Artificial Sequence
  Oligonucleotide for detection of SNP TSC0004228
ataggtataggat

SEQ ID NO: 20808 - DNA, 13 bp, Artificial Sequence
  Oligonucleotide for detection of SNP TSC0004228
atcctatacctat

SEQ ID NO: 20809 - DNA, 13 bp, Artificial Sequence
  Oligonucleotide for detection of SNP TSC0004229
gatagttgggtga

SEQ ID NO: 20810 - DNA, 13 bp, Artificial Sequence
  Oligonucleotide for detection of SNP TSC0004229
tcacccaactatc

SEQ ID NO: 20811 - DNA, 13 bp, Artificial Sequence
  Oligonucleotide for detection of SNP TSC0004229
gatagtcgggtga

SEQ ID NO: 20812 - DNA, 13 bp, Artificial Sequence
  Oligonucleotide for detection of SNP TSC0004229
tcacccgactatc

SEQ ID NO: 20813 - DNA, 13 bp, Artificial Sequence
  Oligonucleotide for detection of SNP TSC0004229
ttatttgattaty

SEQ ID NO: 20814 - DNA, 13 bp, Artificial Sequence
  Oligonucleotide for detection of SNP TSC0004229
rataatcaaataa

SEQ ID NO: 20815 - DNA, 13 bp, Artificial Sequence
  Oligonucleotide for detection of SNP TSC0004229
ttatttaattaty

SEQ ID NO: 20816 - DNA, 13 bp, Artificial Sequence
  Oligonucleotide for detection of SNP TSC0004229
rataattaaataa

SEQ ID NO: 20817 - DNA, 13 bp, Artificial Sequence
  Oligonucleotide for detection of SNP TSC0004229
ttattcgattaty

SEQ ID NO: 20818 - DNA, 13 bp, Artificial Sequence
  Oligonucleotide for detection of SNP TSC0004229
rataatcgaataa

SEQ ID NO: 20819 - DNA, 13 bp, Artificial Sequence
  Oligonucleotide for detection of SNP TSC0004230
tttattgtttagt

SEQ ID NO: 20820 - DNA, 13 bp, Artificial Sequence
  Oligonucleotide for detection of SNP TSC0004230
actaaacaataaa

SEQ ID NO: 20821 - DNA, 13 bp, Artificial Sequence
  Oligonucleotide for detection of SNP TSC0004230
tttattatttagt

SEQ ID NO: 20822 - DNA, 13 bp, Artificial Sequence
  Oligonucleotide for detection of SNP TSC0004230
actaaataataaa

SEQ ID NO: 20823 - DNA, 13 bp, Artificial Sequence
  Oligonucleotide for detection of SNP TSC0004231
gtttaatgagttt

SEQ ID NO: 20824 - DNA, 13 bp, Artificial Sequence
  Oligonucleotide for detection of SNP TSC0004231
aaactcattaaac

SEQ ID NO: 20825 - DNA, 13 bp, Artificial Sequence
  Oligonucleotide for detection of SNP TSC0004231
gtttaacgagttt

SEQ ID NO: 20826 - DNA, 13 bp, Artificial Sequence
  Oligonucleotide for detection of SNP TSC0004231
aaactcgttaaac

SEQ ID NO: 20827 - DNA, 13 bp, Artificial Sequence
  Oligonucleotide for detection of SNP TSC0004231
agatttgttgaay

SEQ ID NO: 20828 - DNA, 13 bp, Artificial Sequence
  Oligonucleotide for detection of SNP TSC0004231
rttcaacaaatct

SEQ ID NO: 20829 - DNA, 13 bp, Artificial Sequence
  Oligonucleotide for detection of SNP TSC0004231
agatttattgaay

SEQ ID NO: 20830 - DNA, 13 bp, Artificial Sequence
  Oligonucleotide for detection of SNP TSC0004231
rttcaataaatct

SEQ ID NO: 20831 - DNA, 13 bp, Artificial Sequence
  Oligonucleotide for detection of SNP TSC0004231
agattcgttgaay

SEQ ID NO: 20832 - DNA, 13 bp, Artificial Sequence
  Oligonucleotide for detection of SNP TSC0004231
rttcaacgaatct

SEQ ID NO: 20833 - DNA, 13 bp, Artificial Sequence
  Oligonucleotide for detection of SNP TSC0004232
gtaagggagtaay

SEQ ID NO: 20834 - DNA, 13 bp, Artificial Sequence
  Oligonucleotide for detection of SNP TSC0004232
rttactcccttac

SEQ ID NO: 20835 - DNA, 13 bp, Artificial Sequence
  Oligonucleotide for detection of SNP TSC0004232
gtaaggaagtaay

SEQ ID NO: 20836 - DNA, 13 bp, Artificial Sequence
  Oligonucleotide for detection of SNP TSC0004232
rttacttccttac

SEQ ID NO: 20837 - DNA, 13 bp, Artificial Sequence
  Oligonucleotide for detection of SNP TSC0004233
atttattttattt

SEQ ID NO: 20838 - DNA, 13 bp, Artificial Sequence
  Oligonucleotide for detection of SNP TSC0004233
aaataaaataaat

SEQ ID NO: 20839 - DNA, 13 bp, Artificial Sequence
  Oligonucleotide for detection of SNP TSC0004233
atttatgttattt

SEQ ID NO: 20840 - DNA, 13 bp, Artificial Sequence
  Oligonucleotide for detection of SNP TSC0004233
aaataacataaat

SEQ ID NO: 20841 - DNA, 13 bp, Artificial Sequence
  Oligonucleotide for detection of SNP TSC0004233
aggtgaaatgaat

SEQ ID NO: 20842 - DNA, 13 bp, Artificial Sequence
  Oligonucleotide for detection of SNP TSC0004233
attcatttcacct

SEQ ID NO: 20843 - DNA, 13 bp, Artificial Sequence
  Oligonucleotide for detection of SNP TSC0004233
aggtgatatgaat

SEQ ID NO: 20844 - DNA, 13 bp, Artificial Sequence
  Oligonucleotide for detection of SNP TSC0004233
attcatatcacct

SEQ ID NO: 20845 - DNA, 13 bp, Artificial Sequence
  Oligonucleotide for detection of SNP TSC0004234
gtagatgggataa

SEQ ID NO: 20846 - DNA, 13 bp, Artificial Sequence
  Oligonucleotide for detection of SNP TSC0004234
ttatcccatctac

SEQ ID NO: 20847 - DNA, 13 bp, Artificial Sequence
  Oligonucleotide for detection of SNP TSC0004234
gtagataggataa

SEQ ID NO: 20848 - DNA, 13 bp, Artificial Sequence
  Oligonucleotide for detection of SNP TSC0004234
ttatcctatctac

SEQ ID NO: 20849 - DNA, 13 bp, Artificial Sequence
  Oligonucleotide for detection of SNP TSC0004235
aggaatgtttgga

SEQ ID NO: 20850 - DNA, 13 bp, Artificial Sequence
  Oligonucleotide for detection of SNP TSC0004235
tccaaacattcct

SEQ ID NO: 20851 - DNA, 13 bp, Artificial Sequence
  Oligonucleotide for detection of SNP TSC0004235
aggaatatttgga

SEQ ID NO: 20852 - DNA, 13 bp, Artificial Sequence
  Oligonucleotide for detection of SNP TSC0004235
tccaaatattcct

SEQ ID NO: 20853 - DNA, 13 bp, Artificial Sequence
  Oligonucleotide for detection of SNP TSC0004236
ttatgtattttta

SEQ ID NO: 20854 - DNA, 13 bp, Artificial Sequence
  Oligonucleotide for detection of SNP TSC0004236
taaaaatacataa

SEQ ID NO: 20855 - DNA, 13 bp, Artificial Sequence
  Oligonucleotide for detection of SNP TSC0004236
ttatgtgttttta

SEQ ID NO: 20856 - DNA, 13 bp, Artificial Sequence
  Oligonucleotide for detection of SNP TSC0004236
taaaaacacataa

SEQ ID NO: 20857 - DNA, 13 bp, Artificial Sequence
  Oligonucleotide for detection of SNP TSC0004236
ttatgcgttttta

SEQ ID NO: 20858 - DNA, 13 bp, Artificial Sequence
  Oligonucleotide for detection of SNP TSC0004236
taaaaacgcataa

SEQ ID NO: 20859 - DNA, 13 bp, Artificial Sequence
  Oligonucleotide for detection of SNP TSC0004236
tgggagtgtataa

SEQ ID NO: 20860 - DNA, 13 bp, Artificial Sequence
  Oligonucleotide for detection of SNP TSC0004236
ttatacactccca

SEQ ID NO: 20861 - DNA, 13 bp, Artificial Sequence
  Oligonucleotide for detection of SNP TSC0004236
tgggagcgtataa

SEQ ID NO: 20862 - DNA, 13 bp, Artificial Sequence
  Oligonucleotide for detection of SNP TSC0004236
ttatacgctccca

SEQ ID NO: 20863 - DNA, 13 bp, Artificial Sequence
  Oligonucleotide for detection of SNP TSC0004237
attttaagatagy

SEQ ID NO: 20864 - DNA, 13 bp, Artificial Sequence
  Oligonucleotide for detection of SNP TSC0004237
rctatcttaaaat

SEQ ID NO: 20865 - DNA, 13 bp, Artificial Sequence
  Oligonucleotide for detection of SNP TSC0004237
attttaggatagy

SEQ ID NO: 20866 - DNA, 13 bp, Artificial Sequence
  Oligonucleotide for detection of SNP TSC0004237
rctatcctaaaat

SEQ ID NO: 20867 - DNA, 13 bp, Artificial Sequence
  Oligonucleotide for detection of SNP TSC0004238
tagggttggatgt

SEQ ID NO: 20868 - DNA, 13 bp, Artificial Sequence
  Oligonucleotide for detection of SNP TSC0004238
acatccaacccta

SEQ ID NO: 20869 - DNA, 13 bp, Artificial Sequence
  Oligonucleotide for detection of SNP TSC0004238
tagggtcggatgt

SEQ ID NO: 20870 - DNA, 13 bp, Artificial Sequence
  Oligonucleotide for detection of SNP TSC0004238
acatccgacccta

SEQ ID NO: 20871 - DNA, 13 bp, Artificial Sequence
  Oligonucleotide for detection of SNP TSC0004239
aaattagttttgg

SEQ ID NO: 20872 - DNA, 13 bp, Artificial Sequence
  Oligonucleotide for detection of SNP TSC0004239
ccaaaactaattt

SEQ ID NO: 20873 - DNA, 13 bp, Artificial Sequence
  Oligonucleotide for detection of SNP TSC0004239
aaattaattttgg

SEQ ID NO: 20874 - DNA, 13 bp, Artificial Sequence
  Oligonucleotide for detection of SNP TSC0004239
ccaaaattaattt

SEQ ID NO: 20875 - DNA, 13 bp, Artificial Sequence
  Oligonucleotide for detection of SNP TSC0004240
gtatagagagagy

SEQ ID NO: 20876 - DNA, 13 bp, Artificial Sequence
  Oligonucleotide for detection of SNP TSC0004240
rctctctctatac

SEQ ID NO: 20877 - DNA, 13 bp, Artificial Sequence
  Oligonucleotide for detection of SNP TSC0004240
gtatagtgagagy

SEQ ID NO: 20878 - DNA, 13 bp, Artificial Sequence
  Oligonucleotide for detection of SNP TSC0004240
rctctcactatac

SEQ ID NO: 20879 - DNA, 13 bp, Artificial Sequence
  Oligonucleotide for detection of SNP TSC0004240
gtatagcgagagy

SEQ ID NO: 20880 - DNA, 13 bp, Artificial Sequence
  Oligonucleotide for detection of SNP TSC0004240
rctctcgctatac

SEQ ID NO: 20881 - DNA, 13 bp, Artificial Sequence
  Oligonucleotide for detection of SNP TSC0004240
gttttttttgtay

SEQ ID NO: 20882 - DNA, 13 bp, Artificial Sequence
  Oligonucleotide for detection of SNP TSC0004240
rtacaaaaaaaac

SEQ ID NO: 20883 - DNA, 13 bp, Artificial Sequence
  Oligonucleotide for detection of SNP TSC0004240
gtttttgttgtay

SEQ ID NO: 20884 - DNA, 13 bp, Artificial Sequence
  Oligonucleotide for detection of SNP TSC0004240
rtacaacaaaaac

SEQ ID NO: 20885 - DNA, 13 bp, Artificial Sequence
  Oligonucleotide for detection of SNP TSC0004240
gttttcgttgtay

SEQ ID NO: 20886 - DNA, 13 bp, Artificial Sequence
  Oligonucleotide for detection of SNP TSC0004240
rtacaacgaaaac

SEQ ID NO: 20887 - DNA, 13 bp, Artificial Sequence
  Oligonucleotide for detection of SNP TSC0004241
ttttgtagaatgy

SEQ ID NO: 20888 - DNA, 13 bp, Artificial Sequence
  Oligonucleotide for detection of SNP TSC0004241
rcattctacaaaa

SEQ ID NO: 20889 - DNA, 13 bp, Artificial Sequence
  Oligonucleotide for detection of SNP TSC0004241
ttttgtggaatgy

SEQ ID NO: 20890 - DNA, 13 bp, Artificial Sequence
  Oligonucleotide for detection of SNP TSC0004241
rcattccacaaaa

SEQ ID NO: 20891 - DNA, 13 bp, Artificial Sequence
  Oligonucleotide for detection of SNP TSC0004241
ttttgtagaacgy

SEQ ID NO: 20892 - DNA, 13 bp, Artificial Sequence
  Oligonucleotide for detection of SNP TSC0004241
rcgttctacaaaa

SEQ ID NO: 20893 - DNA, 13 bp, Artificial Sequence
  Oligonucleotide for detection of SNP TSC0004241
ttttgtggaacgy

SEQ ID NO: 20894 - DNA, 13 bp, Artificial Sequence
  Oligonucleotide for detection of SNP TSC0004241
rcgttccacaaaa

SEQ ID NO: 20895 - DNA, 13 bp, Artificial Sequence
  Oligonucleotide for detection of SNP TSC0004242
ttagtttttaggy

SEQ ID NO: 20896 - DNA, 13 bp, Artificial Sequence
  Oligonucleotide for detection of SNP TSC0004242
rcctaaaaactaa

SEQ ID NO: 20897 - DNA, 13 bp, Artificial Sequence
  Oligonucleotide for detection of SNP TSC0004242
ttagttgttaggy

SEQ ID NO: 20898 - DNA, 13 bp, Artificial Sequence
  Oligonucleotide for detection of SNP TSC0004242
rcctaacaactaa

SEQ ID NO: 20899 - DNA, 13 bp, Artificial Sequence
  Oligonucleotide for detection of SNP TSC0004242
gtttggaaattgg

SEQ ID NO: 20900 - DNA, 13 bp, Artificial Sequence
  Oligonucleotide for detection of SNP TSC0004242
ccaatttccaaac

SEQ ID NO: 20901 - DNA, 13 bp, Artificial Sequence
  Oligonucleotide for detection of SNP TSC0004242
gtttggtaattgg

SEQ ID NO: 20902 - DNA, 13 bp, Artificial Sequence
  Oligonucleotide for detection of SNP TSC0004242
ccaattaccaaac

SEQ ID NO: 20903 - DNA, 13 bp, Artificial Sequence
  Oligonucleotide for detection of SNP TSC0004243
attgtaattgttt

SEQ ID NO: 20904 - DNA, 13 bp, Artificial Sequence
  Oligonucleotide for detection of SNP TSC0004243
aaacaattacaat

SEQ ID NO: 20905 - DNA, 13 bp, Artificial Sequence
  Oligonucleotide for detection of SNP TSC0004243
attgtatttgttt

SEQ ID NO: 20906 - DNA, 13 bp, Artificial Sequence
  Oligonucleotide for detection of SNP TSC0004243
aaacaaatacaat

SEQ ID NO: 20907 - DNA, 13 bp, Artificial Sequence
  Oligonucleotide for detection of SNP TSC0004243
atcgtaattgttt

SEQ ID NO: 20908 - DNA, 13 bp, Artificial Sequence
  Oligonucleotide for detection of SNP TSC0004243
aaacaattacgat

SEQ ID NO: 20909 - DNA, 13 bp, Artificial Sequence
  Oligonucleotide for detection of SNP TSC0004243
atcgtatttgttt

SEQ ID NO: 20910 - DNA, 13 bp, Artificial Sequence
  Oligonucleotide for detection of SNP TSC0004243
aaacaaatacgat

SEQ ID NO: 20911 - DNA, 13 bp, Artificial Sequence
  Oligonucleotide for detection of SNP TSC0004243
aggtaattgtggt

SEQ ID NO: 20912 - DNA, 13 bp, Artificial Sequence
  Oligonucleotide for detection of SNP TSC0004243
accacaattacct

SEQ ID NO: 20913 - DNA, 13 bp, Artificial Sequence
  Oligonucleotide for detection of SNP TSC0004243
aggtaagtgtggt

SEQ ID NO: 20914 - DNA, 13 bp, Artificial Sequence
  Oligonucleotide for detection of SNP TSC0004243
accacacttacct

SEQ ID NO: 20915 - DNA, 13 bp, Artificial Sequence
  Oligonucleotide for detection of SNP TSC0004243
aggtaattgcggt

SEQ ID NO: 20916 - DNA, 13 bp, Artificial Sequence
  Oligonucleotide for detection of SNP TSC0004243
accgcaattacct

SEQ ID NO: 20917 - DNA, 13 bp, Artificial Sequence
  Oligonucleotide for detection of SNP TSC0004243
aggtaagtgcggt

SEQ ID NO: 20918 - DNA, 13 bp, Artificial Sequence
  Oligonucleotide for detection of SNP TSC0004243
accgcacttacct

SEQ ID NO: 20919 - DNA, 13 bp, Artificial Sequence
  Oligonucleotide for detection of SNP TSC0004245
tgaatgagagtag

SEQ ID NO: 20920 - DNA, 13 bp, Artificial Sequence
  Oligonucleotide for detection of SNP TSC0004245
ctactctcattca

SEQ ID NO: 20921 - DNA, 13 bp, Artificial Sequence
  Oligonucleotide for detection of SNP TSC0004245
tgaatgggagtag

SEQ ID NO: 20922 - DNA, 13 bp, Artificial Sequence
  Oligonucleotide for detection of SNP TSC0004245
ctactcccattca

SEQ ID NO: 20923 - DNA, 13 bp, Artificial Sequence
  Oligonucleotide for detection of SNP TSC0004246
gtaggaggatagg

SEQ ID NO: 20924 - DNA, 13 bp, Artificial Sequence
  Oligonucleotide for detection of SNP TSC0004246
cctatcctcctac

SEQ ID NO: 20925 - DNA, 13 bp, Artificial Sequence
  Oligonucleotide for detection of SNP TSC0004246
gtaggaagatagg

SEQ ID NO: 20926 - DNA, 13 bp, Artificial Sequence
  Oligonucleotide for detection of SNP TSC0004246
cctatcttcctac

SEQ ID NO: 20927 - DNA, 13 bp, Artificial Sequence
  Oligonucleotide for detection of SNP TSC0004247
ttgggtataagta

SEQ ID NO: 20928 - DNA, 13 bp, Artificial Sequence
  Oligonucleotide for detection of SNP TSC0004247
tacttatacccaa

SEQ ID NO: 20929 - DNA, 13 bp, Artificial Sequence
  Oligonucleotide for detection of SNP TSC0004247
ttgggtttaagta

SEQ ID NO: 20930 - DNA, 13 bp, Artificial Sequence
  Oligonucleotide for detection of SNP TSC0004247
tacttaaacccaa

SEQ ID NO: 20931 - DNA, 13 bp, Artificial Sequence
  Oligonucleotide for detection of SNP TSC0004247
tcgggtataagta

SEQ ID NO: 20932 - DNA, 13 bp, Artificial Sequence
  Oligonucleotide for detection of SNP TSC0004247
tacttatacccga

SEQ ID NO: 20933 - DNA, 13 bp, Artificial Sequence
  Oligonucleotide for detection of SNP TSC0004247
tcgggtttaagta

SEQ ID NO: 20934 - DNA, 13 bp, Artificial Sequence
  Oligonucleotide for detection of SNP TSC0004247
tacttaaacccga

SEQ ID NO: 20935 - DNA, 13 bp, Artificial Sequence
  Oligonucleotide for detection of SNP TSC0004247
tatttgtatttgg

SEQ ID NO: 20936 - DNA, 13 bp, Artificial Sequence
  Oligonucleotide for detection of SNP TSC0004247
ccaaatacaaata

SEQ ID NO: 20937 - DNA, 13 bp, Artificial Sequence
  Oligonucleotide for detection of SNP TSC0004247
tatttgaatttgg

SEQ ID NO: 20938 - DNA, 13 bp, Artificial Sequence
  Oligonucleotide for detection of SNP TSC0004247
ccaaattcaaata

SEQ ID NO: 20939 - DNA, 13 bp, Artificial Sequence
  Oligonucleotide for detection of SNP TSC0004247
tatttgtattcgg

SEQ ID NO: 20940 - DNA, 13 bp, Artificial Sequence
  Oligonucleotide for detection of SNP TSC0004247
ccgaatacaaata

SEQ ID NO: 20941 - DNA, 13 bp, Artificial Sequence
  Oligonucleotide for detection of SNP TSC0004247
tatttgaattcgg

SEQ ID NO: 20942 - DNA, 13 bp, Artificial Sequence
  Oligonucleotide for detection of SNP TSC0004247
ccgaattcaaata

SEQ ID NO: 20943 - DNA, 13 bp, Artificial Sequence
  Oligonucleotide for detection of SNP TSC0004248
tttagagataaaa

SEQ ID NO: 20944 - DNA, 13 bp, Artificial Sequence
  Oligonucleotide for detection of SNP TSC0004248
ttttatctctaaa

SEQ ID NO: 20945 - DNA, 13 bp, Artificial Sequence
  Oligonucleotide for detection of SNP TSC0004248
tttagaaataaaa

SEQ ID NO: 20946 - DNA, 13 bp, Artificial Sequence
  Oligonucleotide for detection of SNP TSC0004248
ttttatttctaaa

SEQ ID NO: 20947 - DNA, 13 bp, Artificial Sequence
  Oligonucleotide for detection of SNP TSC0004250
attgagtgtttty

SEQ ID NO: 20948 - DNA, 13 bp, Artificial Sequence
  Oligonucleotide for detection of SNP TSC0004250
raaaacactcaat

SEQ ID NO: 20949 - DNA, 13 bp, Artificial Sequence
  Oligonucleotide for detection of SNP TSC0004250
attgagcgtttty

SEQ ID NO: 20950 - DNA, 13 bp, Artificial Sequence
  Oligonucleotide for detection of SNP TSC0004250
raaaacgctcaat

SEQ ID NO: 20951 - DNA, 13 bp, Artificial Sequence
  Oligonucleotide for detection of SNP TSC0004250
ggaagtatttaat

SEQ ID NO: 20952 - DNA, 13 bp, Artificial Sequence
  Oligonucleotide for detection of SNP TSC0004250
attaaatacttcc

SEQ ID NO: 20953 - DNA, 13 bp, Artificial Sequence
  Oligonucleotide for detection of SNP TSC0004250
ggaagtgtttaat

SEQ ID NO: 20954 - DNA, 13 bp, Artificial Sequence
  Oligonucleotide for detection of SNP TSC0004250
attaaacacttcc

SEQ ID NO: 20955 - DNA, 13 bp, Artificial Sequence
  Oligonucleotide for detection of SNP TSC0004250
ggaagcgtttaat

SEQ ID NO: 20956 - DNA, 13 bp, Artificial Sequence
  Oligonucleotide for detection of SNP TSC0004250
attaaacgcttcc

SEQ ID NO: 20957 - DNA, 13 bp, Artificial Sequence
  Oligonucleotide for detection of SNP TSC0004251
gattaaatggttt

SEQ ID NO: 20958 - DNA, 13 bp, Artificial Sequence
  Oligonucleotide for detection of SNP TSC0004251
aaaccatttaatc

SEQ ID NO: 20959 - DNA, 13 bp, Artificial Sequence
  Oligonucleotide for detection of SNP TSC0004251
gattaagtggttt

SEQ ID NO: 20960 - DNA, 13 bp, Artificial Sequence
  Oligonucleotide for detection of SNP TSC0004251
aaaccacttaatc

SEQ ID NO: 20961 - DNA, 13 bp, Artificial Sequence
  Oligonucleotide for detection of SNP TSC0004252
taaaatatatgtt

SEQ ID NO: 20962 - DNA, 13 bp, Artificial Sequence
  Oligonucleotide for detection of SNP TSC0004252
aacatatatttta

SEQ ID NO: 20963 - DNA, 13 bp, Artificial Sequence
  Oligonucleotide for detection of SNP TSC0004252
taaaatgtatgtt

SEQ ID NO: 20964 - DNA, 13 bp, Artificial Sequence
  Oligonucleotide for detection of SNP TSC0004252
aacatacatttta

SEQ ID NO: 20965 - DNA, 13 bp, Artificial Sequence
  Oligonucleotide for detection of SNP TSC0004252
taaaatatacgtt

SEQ ID NO: 20966 - DNA, 13 bp, Artificial Sequence
  Oligonucleotide for detection of SNP TSC0004252
aacgtatatttta

SEQ ID NO: 20967 - DNA, 13 bp, Artificial Sequence
  Oligonucleotide for detection of SNP TSC0004252
taaaacgtatgtt

SEQ ID NO: 20968 - DNA, 13 bp, Artificial Sequence
  Oligonucleotide for detection of SNP TSC0004252
aacatacgtttta

SEQ ID NO: 20969 - DNA, 13 bp, Artificial Sequence
  Oligonucleotide for detection of SNP TSC0004252
taaaatgtacgtt

SEQ ID NO: 20970 - DNA, 13 bp, Artificial Sequence
  Oligonucleotide for detection of SNP TSC0004252
aacgtacatttta

SEQ ID NO: 20971 - DNA, 13 bp, Artificial Sequence
  Oligonucleotide for detection of SNP TSC0004252
taaaacgtacgtt

SEQ ID NO: 20972 - DNA, 13 bp, Artificial Sequence
  Oligonucleotide for detection of SNP TSC0004252
aacgtacgtttta

SEQ ID NO: 20973 - DNA, 13 bp, Artificial Sequence
  Oligonucleotide for detection of SNP TSC0004252
aatgtgtgttttg

SEQ ID NO: 20974 - DNA, 13 bp, Artificial Sequence
  Oligonucleotide for detection of SNP TSC0004252
caaaacacacatt

SEQ ID NO: 20975 - DNA, 13 bp, Artificial Sequence
  Oligonucleotide for detection of SNP TSC0004252
aacgtgtgttttg

SEQ ID NO: 20976 - DNA, 13 bp, Artificial Sequence
  Oligonucleotide for detection of SNP TSC0004252
caaaacacacgtt

SEQ ID NO: 20977 - DNA, 13 bp, Artificial Sequence
  Oligonucleotide for detection of SNP TSC0004252
aatgtgcgttttg

SEQ ID NO: 20978 - DNA, 13 bp, Artificial Sequence
  Oligonucleotide for detection of SNP TSC0004252
caaaacgcacatt

SEQ ID NO: 20979 - DNA, 13 bp, Artificial Sequence
  Oligonucleotide for detection of SNP TSC0004252
aacgtgcgttttg

SEQ ID NO: 20980 - DNA, 13 bp, Artificial Sequence
  Oligonucleotide for detection of SNP TSC0004252
caaaacgcacgtt

SEQ ID NO: 20981 - DNA, 13 bp, Artificial Sequence
  Oligonucleotide for detection of SNP TSC0004253
ttgtttagatttt

SEQ ID NO: 20982 - DNA, 13 bp, Artificial Sequence
  Oligonucleotide for detection of SNP TSC0004253
aaaatctaaacaa

SEQ ID NO: 20983 - DNA, 13 bp, Artificial Sequence
  Oligonucleotide for detection of SNP TSC0004253
ttgtttggatttt

SEQ ID NO: 20984 - DNA, 13 bp, Artificial Sequence
  Oligonucleotide for detection of SNP TSC0004253
aaaatccaaacaa

SEQ ID NO: 20985 - DNA, 13 bp, Artificial Sequence
  Oligonucleotide for detection of SNP TSC0004253
tcgtttagatttt

SEQ ID NO: 20986 - DNA, 13 bp, Artificial Sequence
  Oligonucleotide for detection of SNP TSC0004253
aaaatctaaacga

SEQ ID NO: 20987 - DNA, 13 bp, Artificial Sequence
  Oligonucleotide for detection of SNP TSC0004253
tcgtttggatttt

SEQ ID NO: 20988 - DNA, 13 bp, Artificial Sequence
  Oligonucleotide for detection of SNP TSC0004253
aaaatccaaacga

SEQ ID NO: 20989 - DNA, 13 bp, Artificial Sequence
  Oligonucleotide for detection of SNP TSC0004253
ttgttcggatttt

SEQ ID NO: 20990 - DNA, 13 bp, Artificial Sequence
  Oligonucleotide for detection of SNP TSC0004253
aaaatccgaacaa

SEQ ID NO: 20991 - DNA, 13 bp, Artificial Sequence
  Oligonucleotide for detection of SNP TSC0004253
tcgttcggatttt

SEQ ID NO: 20992 - DNA, 13 bp, Artificial Sequence
  Oligonucleotide for detection of SNP TSC0004253
aaaatccgaacga

SEQ ID NO: 20993 - DNA, 13 bp, Artificial Sequence
  Oligonucleotide for detection of SNP TSC0004253
agggtttgaatgg

SEQ ID NO: 20994 - DNA, 13 bp, Artificial Sequence
  Oligonucleotide for detection of SNP TSC0004253
ccattcaaaccct

SEQ ID NO: 20995 - DNA, 13 bp, Artificial Sequence
  Oligonucleotide for detection of SNP TSC0004253
agggtttgaacgg

SEQ ID NO: 20996 - DNA, 13 bp, Artificial Sequence
  Oligonucleotide for detection of SNP TSC0004253
ccgttcaaaccct

SEQ ID NO: 20997 - DNA, 13 bp, Artificial Sequence
  Oligonucleotide for detection of SNP TSC0004253
agggttcgaatgg

SEQ ID NO: 20998 - DNA, 13 bp, Artificial Sequence
  Oligonucleotide for detection of SNP TSC0004253
ccattcgaaccct

SEQ ID NO: 20999 - DNA, 13 bp, Artificial Sequence
  Oligonucleotide for detection of SNP TSC0004253
agggttcgaacgg

SEQ ID NO: 21000 - DNA, 13 bp, Artificial Sequence
  Oligonucleotide for detection of SNP TSC0004253
ccgttcgaaccct

SEQ ID NO: 21001 - DNA, 13 bp, Artificial Sequence
  Oligonucleotide for detection of SNP TSC0004254
aatttaaaagtta

SEQ ID NO: 21002 - DNA, 13 bp, Artificial Sequence
  Oligonucleotide for detection of SNP TSC0004254
taacttttaaatt

SEQ ID NO: 21003 - DNA, 13 bp, Artificial Sequence
  Oligonucleotide for detection of SNP TSC0004254
aatttagaagtta

SEQ ID NO: 21004 - DNA, 13 bp, Artificial Sequence
  Oligonucleotide for detection of SNP TSC0004254
taacttctaaatt

SEQ ID NO: 21005 - DNA, 13 bp, Artificial Sequence
  Oligonucleotide for detection of SNP TSC0004255
gtatagataaagy

SEQ ID NO: 21006 - DNA, 13 bp, Artificial Sequence
  Oligonucleotide for detection of SNP TSC0004255
rctttatctatac

SEQ ID NO: 21007 - DNA, 13 bp, Artificial Sequence
  Oligonucleotide for detection of SNP TSC0004255
gtataggtaaagy

SEQ ID NO: 21008 - DNA, 13 bp, Artificial Sequence
  Oligonucleotide for detection of SNP TSC0004255
rctttacctatac

SEQ ID NO: 21009 - DNA, 13 bp, Artificial Sequence
  Oligonucleotide for detection of SNP TSC0004256
gtagtttgggtaa

SEQ ID NO: 21010 - DNA, 13 bp, Artificial Sequence
  Oligonucleotide for detection of SNP TSC0004256
ttacccaaactac

SEQ ID NO: 21011 - DNA, 13 bp, Artificial Sequence
  Oligonucleotide for detection of SNP TSC0004256
gtagttcgggtaa

SEQ ID NO: 21012 - DNA, 13 bp, Artificial Sequence
  Oligonucleotide for detection of SNP TSC0004256
ttacccgaactac

SEQ ID NO: 21013 - DNA, 13 bp, Artificial Sequence
  Oligonucleotide for detection of SNP TSC0004256
ttgtttaagttgy

SEQ ID NO: 21014 - DNA, 13 bp, Artificial Sequence
  Oligonucleotide for detection of SNP TSC0004256
rcaacttaaacaa

SEQ ID NO: 21015 - DNA, 13 bp, Artificial Sequence
  Oligonucleotide for detection of SNP TSC0004256
ttgtttgagttgy

SEQ ID NO: 21016 - DNA, 13 bp, Artificial Sequence
  Oligonucleotide for detection of SNP TSC0004256
rcaactcaaacaa

SEQ ID NO: 21017 - DNA, 13 bp, Artificial Sequence
  Oligonucleotide for detection of SNP TSC0004256
ttgttcgagttgy

SEQ ID NO: 21018 - DNA, 13 bp, Artificial Sequence
  Oligonucleotide for detection of SNP TSC0004256
rcaactcgaacaa

SEQ ID NO: 21019 - DNA, 13 bp, Artificial Sequence
  Oligonucleotide for detection of SNP TSC0004257
ttttaaggtagtg

SEQ ID NO: 21020 - DNA, 13 bp, Artificial Sequence
  Oligonucleotide for detection of SNP TSC0004257
cactaccttaaaa

SEQ ID NO: 21021 - DNA, 13 bp, Artificial Sequence
  Oligonucleotide for detection of SNP TSC0004257
ttttaaagtagtg

SEQ ID NO: 21022 - DNA, 13 bp, Artificial Sequence
  Oligonucleotide for detection of SNP TSC0004257
cactactttaaaa

SEQ ID NO: 21023 - DNA, 13 bp, Artificial Sequence
  Oligonucleotide for detection of SNP TSC0004258
aagtaaggtaata

SEQ ID NO: 21024 - DNA, 13 bp, Artificial Sequence
  Oligonucleotide for detection of SNP TSC0004258
tattaccttactt

SEQ ID NO: 21025 - DNA, 13 bp, Artificial Sequence
  Oligonucleotide for detection of SNP TSC0004258
aagtaaagtaata

SEQ ID NO: 21026 - DNA, 13 bp, Artificial Sequence
  Oligonucleotide for detection of SNP TSC0004258
tattactttactt

SEQ ID NO: 21027 - DNA, 13 bp, Artificial Sequence
  Oligonucleotide for detection of SNP TSC0004259
agatatgtattag

SEQ ID NO: 21028 - DNA, 13 bp, Artificial Sequence
  Oligonucleotide for detection of SNP TSC0004259
ctaatacatatct

SEQ ID NO: 21029 - DNA, 13 bp, Artificial Sequence
  Oligonucleotide for detection of SNP TSC0004259
agatatatattag

SEQ ID NO: 21030 - DNA, 13 bp, Artificial Sequence
  Oligonucleotide for detection of SNP TSC0004259
ctaatatatatct

SEQ ID NO: 21031 - DNA, 13 bp, Artificial Sequence
  Oligonucleotide for detection of SNP TSC0004259
agatacgtattag

SEQ ID NO: 21032 - DNA, 13 bp, Artificial Sequence
  Oligonucleotide for detection of SNP TSC0004259
ctaatacgtatct

SEQ ID NO: 21033 - DNA, 13 bp, Artificial Sequence
  Oligonucleotide for detection of SNP TSC0004259
ttaatatgtgttt

SEQ ID NO: 21034 - DNA, 13 bp, Artificial Sequence
  Oligonucleotide for detection of SNP TSC0004259
aaacacatattaa

SEQ ID NO: 21035 - DNA, 13 bp, Artificial Sequence
  Oligonucleotide for detection of SNP TSC0004259
ttaatacgtgttt

SEQ ID NO: 21036 - DNA, 13 bp, Artificial Sequence
  Oligonucleotide for detection of SNP TSC0004259
aaacacgtattaa

SEQ ID NO: 21037 - DNA, 13 bp, Artificial Sequence
  Oligonucleotide for detection of SNP TSC0004261
atattataatttt

SEQ ID NO: 21038 - DNA, 13 bp, Artificial Sequence
  Oligonucleotide for detection of SNP TSC0004261
aaaattataatat

SEQ ID NO: 21039 - DNA, 13 bp, Artificial Sequence
  Oligonucleotide for detection of SNP TSC0004261
atattaaaatttt

SEQ ID NO: 21040 - DNA, 13 bp, Artificial Sequence
  Oligonucleotide for detection of SNP TSC0004261
aaaattttaatat

SEQ ID NO: 21041 - DNA, 13 bp, Artificial Sequence
  Oligonucleotide for detection of SNP TSC0004261
agggttgtgatgt

SEQ ID NO: 21042 - DNA, 13 bp, Artificial Sequence
  Oligonucleotide for detection of SNP TSC0004261
acatcacaaccct

SEQ ID NO: 21043 - DNA, 13 bp, Artificial Sequence
  Oligonucleotide for detection of SNP TSC0004261
agggttttgatgt

SEQ ID NO: 21044 - DNA, 13 bp, Artificial Sequence
  Oligonucleotide for detection of SNP TSC0004261
acatcaaaaccct

SEQ ID NO: 21045 - DNA, 13 bp, Artificial Sequence
  Oligonucleotide for detection of SNP TSC0004262
ttttaagagttat

SEQ ID NO: 21046 - DNA, 13 bp, Artificial Sequence
  Oligonucleotide for detection of SNP TSC0004262
ataactcttaaaa

SEQ ID NO: 21047 - DNA, 13 bp, Artificial Sequence
  Oligonucleotide for detection of SNP TSC0004262
ttttaaaagttat

SEQ ID NO: 21048 - DNA, 13 bp, Artificial Sequence
  Oligonucleotide for detection of SNP TSC0004262
ataacttttaaaa

SEQ ID NO: 21049 - DNA, 13 bp, Artificial Sequence
  Oligonucleotide for detection of SNP TSC0004263
tattttgggtaaa

SEQ ID NO: 21050 - DNA, 13 bp, Artificial Sequence
  Oligonucleotide for detection of SNP TSC0004263
tttacccaaaata

SEQ ID NO: 21051 - DNA, 13 bp, Artificial Sequence
  Oligonucleotide for detection of SNP TSC0004263
tatttttggtaaa

SEQ ID NO: 21052 - DNA, 13 bp, Artificial Sequence
  Oligonucleotide for detection of SNP TSC0004263
tttaccaaaaata

SEQ ID NO: 21053 - DNA, 13 bp, Artificial Sequence
  Oligonucleotide for detection of SNP TSC0004263
tatttcgggtaaa

SEQ ID NO: 21054 - DNA, 13 bp, Artificial Sequence
  Oligonucleotide for detection of SNP TSC0004263
tttacccgaaata

SEQ ID NO: 21055 - DNA, 13 bp, Artificial Sequence
  Oligonucleotide for detection of SNP TSC0004263
tattttcggtaaa

SEQ ID NO: 21056 - DNA, 13 bp, Artificial Sequence
  Oligonucleotide for detection of SNP TSC0004263
tttaccgaaaata

SEQ ID NO: 21057 - DNA, 13 bp, Artificial Sequence
  Oligonucleotide for detection of SNP TSC0004263
tttgtttggggta

SEQ ID NO: 21058 - DNA, 13 bp, Artificial Sequence
  Oligonucleotide for detection of SNP TSC0004263
taccccaaacaaa

SEQ ID NO: 21059 - DNA, 13 bp, Artificial Sequence
  Oligonucleotide for detection of SNP TSC0004263
tttgttgggggta

SEQ ID NO: 21060 - DNA, 13 bp, Artificial Sequence
  Oligonucleotide for detection of SNP TSC0004263
tacccccaacaaa

SEQ ID NO: 21061 - DNA, 13 bp, Artificial Sequence
  Oligonucleotide for detection of SNP TSC0004263
tttgttcggggta

SEQ ID NO: 21062 - DNA, 13 bp, Artificial Sequence
  Oligonucleotide for detection of SNP TSC0004263
taccccgaacaaa

SEQ ID NO: 21063 - DNA, 13 bp, Artificial Sequence
  Oligonucleotide for detection of SNP TSC0004263
tttgtcgggggta

SEQ ID NO: 21064 - DNA, 13 bp, Artificial Sequence
  Oligonucleotide for detection of SNP TSC0004263
tacccccgacaaa

SEQ ID NO: 21065 - DNA, 13 bp, Artificial Sequence
  Oligonucleotide for detection of SNP TSC0004264
taaaatgaggatt

SEQ ID NO: 21066 - DNA, 13 bp, Artificial Sequence
  Oligonucleotide for detection of SNP TSC0004264
aatcctcatttta

SEQ ID NO: 21067 - DNA, 13 bp, Artificial Sequence
  Oligonucleotide for detection of SNP TSC0004264
taaaataaggatt

SEQ ID NO: 21068 - DNA, 13 bp, Artificial Sequence
  Oligonucleotide for detection of SNP TSC0004264
aatccttatttta

SEQ ID NO: 21069 - DNA, 13 bp, Artificial Sequence
  Oligonucleotide for detection of SNP TSC0004264
taaaacgaggatt

SEQ ID NO: 21070 - DNA, 13 bp, Artificial Sequence
  Oligonucleotide for detection of SNP TSC0004264
aatcctcgtttta

SEQ ID NO: 21071 - DNA, 13 bp, Artificial Sequence
  Oligonucleotide for detection of SNP TSC0004264
aatttttgtttta

SEQ ID NO: 21072 - DNA, 13 bp, Artificial Sequence
  Oligonucleotide for detection of SNP TSC0004264
taaaacaaaaatt

SEQ ID NO: 21073 - DNA, 13 bp, Artificial Sequence
  Oligonucleotide for detection of SNP TSC0004264
aattttcgtttta

SEQ ID NO: 21074 - DNA, 13 bp, Artificial Sequence
  Oligonucleotide for detection of SNP TSC0004264
taaaacgaaaatt

SEQ ID NO: 21075 - DNA, 13 bp, Artificial Sequence
  Oligonucleotide for detection of SNP TSC0004265
ggtatatggttag

SEQ ID NO: 21076 - DNA, 13 bp, Artificial Sequence
  Oligonucleotide for detection of SNP TSC0004265
ctaaccatatacc

SEQ ID NO: 21077 - DNA, 13 bp, Artificial Sequence
  Oligonucleotide for detection of SNP TSC0004265
ggtatagggttag

SEQ ID NO: 21078 - DNA, 13 bp, Artificial Sequence
  Oligonucleotide for detection of SNP TSC0004265
ctaaccctatacc

SEQ ID NO: 21079 - DNA, 13 bp, Artificial Sequence
  Oligonucleotide for detection of SNP TSC0004265
ggtatacggttag

SEQ ID NO: 21080 - DNA, 13 bp, Artificial Sequence
  Oligonucleotide for detection of SNP TSC0004265
ctaaccgtatacc

SEQ ID NO: 21081 - DNA, 13 bp, Artificial Sequence
  Oligonucleotide for detection of SNP TSC0004265
ttggttgtgtgty

SEQ ID NO: 21082 - DNA, 13 bp, Artificial Sequence
  Oligonucleotide for detection of SNP TSC0004265
racacacaaccaa

SEQ ID NO: 21083 - DNA, 13 bp, Artificial Sequence
  Oligonucleotide for detection of SNP TSC0004265
ttggttttgtgty

SEQ ID NO: 21084 - DNA, 13 bp, Artificial Sequence
  Oligonucleotide for detection of SNP TSC0004265
racacaaaaccaa

SEQ ID NO: 21085 - DNA, 13 bp, Artificial Sequence
  Oligonucleotide for detection of SNP TSC0004265
ttggtcgtgtgty

SEQ ID NO: 21086 - DNA, 13 bp, Artificial Sequence
  Oligonucleotide for detection of SNP TSC0004265
racacacgaccaa

SEQ ID NO: 21087 - DNA, 13 bp, Artificial Sequence
  Oligonucleotide for detection of SNP TSC0004266
tgtattgtgttat

SEQ ID NO: 21088 - DNA, 13 bp, Artificial Sequence
  Oligonucleotide for detection of SNP TSC0004266
ataacacaataca

SEQ ID NO: 21089 - DNA, 13 bp, Artificial Sequence
  Oligonucleotide for detection of SNP TSC0004266
tgtattttgttat

SEQ ID NO: 21090 - DNA, 13 bp, Artificial Sequence
  Oligonucleotide for detection of SNP TSC0004266
ataacaaaataca

SEQ ID NO: 21091 - DNA, 13 bp, Artificial Sequence
  Oligonucleotide for detection of SNP TSC0004266
atgatatagtgta

SEQ ID NO: 21092 - DNA, 13 bp, Artificial Sequence
  Oligonucleotide for detection of SNP TSC0004266
tacactatatcat

SEQ ID NO: 21093 - DNA, 13 bp, Artificial Sequence
  Oligonucleotide for detection of SNP TSC0004266
atgatagagtgta

SEQ ID NO: 21094 - DNA, 13 bp, Artificial Sequence
  Oligonucleotide for detection of SNP TSC0004266
tacactctatcat

SEQ ID NO: 21095 - DNA, 13 bp, Artificial Sequence
  Oligonucleotide for detection of SNP TSC0004267
ttgtttgttttgt

SEQ ID NO: 21096 - DNA, 13 bp, Artificial Sequence
  Oligonucleotide for detection of SNP TSC0004267
acaaaacaaacaa

SEQ ID NO: 21097 - DNA, 13 bp, Artificial Sequence
  Oligonucleotide for detection of SNP TSC0004267
ttgtttattttgt

SEQ ID NO: 21098 - DNA, 13 bp, Artificial Sequence
  Oligonucleotide for detection of SNP TSC0004267
acaaaataaacaa

SEQ ID NO: 21099 - DNA, 13 bp, Artificial Sequence
  Oligonucleotide for detection of SNP TSC0004267
tcgtttgttttgt

SEQ ID NO: 21100 - DNA, 13 bp, Artificial Sequence
  Oligonucleotide for detection of SNP TSC0004267
acaaaacaaacga

SEQ ID NO: 21101 - DNA, 13 bp, Artificial Sequence
  Oligonucleotide for detection of SNP TSC0004267
tcgtttattttgt

SEQ ID NO: 21102 - DNA, 13 bp, Artificial Sequence
  Oligonucleotide for detection of SNP TSC0004267
acaaaataaacga

SEQ ID NO: 21103 - DNA, 13 bp, Artificial Sequence
  Oligonucleotide for detection of SNP TSC0004267
ttgttcgttttgt

SEQ ID NO: 21104 - DNA, 13 bp, Artificial Sequence
  Oligonucleotide for detection of SNP TSC0004267
acaaaacgaacaa

SEQ ID NO: 21105 - DNA, 13 bp, Artificial Sequence
  Oligonucleotide for detection of SNP TSC0004267
ttgtttatttcgt

SEQ ID NO: 21106 - DNA, 13 bp, Artificial Sequence
  Oligonucleotide for detection of SNP TSC0004267
acgaaataaacaa

SEQ ID NO: 21107 - DNA, 13 bp, Artificial Sequence
  Oligonucleotide for detection of SNP TSC0004267
ttgtttgtttcgt

SEQ ID NO: 21108 - DNA, 13 bp, Artificial Sequence
  Oligonucleotide for detection of SNP TSC0004267
acgaaacaaacaa

SEQ ID NO: 21109 - DNA, 13 bp, Artificial Sequence
  Oligonucleotide for detection of SNP TSC0004267
tcgtttatttcgt

SEQ ID NO: 21110 - DNA, 13 bp, Artificial Sequence
  Oligonucleotide for detection of SNP TSC0004267
acgaaataaacga

SEQ ID NO: 21111 - DNA, 13 bp, Artificial Sequence
  Oligonucleotide for detection of SNP TSC0004267
tcgttcgttttgt

SEQ ID NO: 21112 - DNA, 13 bp, Artificial Sequence
  Oligonucleotide for detection of SNP TSC0004267
acaaaacgaacga

SEQ ID NO: 21113 - DNA, 13 bp, Artificial Sequence
  Oligonucleotide for detection of SNP TSC0004267
tcgtttgtttcgt

SEQ ID NO: 21114 - DNA, 13 bp, Artificial Sequence
  Oligonucleotide for detection of SNP TSC0004267
acgaaacaaacga

SEQ ID NO: 21115 - DNA, 13 bp, Artificial Sequence
  Oligonucleotide for detection of SNP TSC0004267
ttgttcgtttcgt

SEQ ID NO: 21116 - DNA, 13 bp, Artificial Sequence
  Oligonucleotide for detection of SNP TSC0004267
acgaaacgaacaa

SEQ ID NO: 21117 - DNA, 13 bp, Artificial Sequence
  Oligonucleotide for detection of SNP TSC0004267
tcgttcgtttcgt

SEQ ID NO: 21118 - DNA, 13 bp, Artificial Sequence
  Oligonucleotide for detection of SNP TSC0004267
acgaaacgaacga

SEQ ID NO: 21119 - DNA, 13 bp, Artificial Sequence
  Oligonucleotide for detection of SNP TSC0004267
atgaagtgagtga

SEQ ID NO: 21120 - DNA, 13 bp, Artificial Sequence
  Oligonucleotide for detection of SNP TSC0004267
tcactcacttcat

SEQ ID NO: 21121 - DNA, 13 bp, Artificial Sequence
  Oligonucleotide for detection of SNP TSC0004267
acgaagtgagtga

SEQ ID NO: 21122 - DNA, 13 bp, Artificial Sequence
  Oligonucleotide for detection of SNP TSC0004267
tcactcacttcgt

SEQ ID NO: 21123 - DNA, 13 bp, Artificial Sequence
  Oligonucleotide for detection of SNP TSC0004267
atgaagcgagtga

SEQ ID NO: 21124 - DNA, 13 bp, Artificial Sequence
  Oligonucleotide for detection of SNP TSC0004267
tcactcgcttcat

SEQ ID NO: 21125 - DNA, 13 bp, Artificial Sequence
  Oligonucleotide for detection of SNP TSC0004267
atgaagtgagcga

SEQ ID NO: 21126 - DNA, 13 bp, Artificial Sequence
  Oligonucleotide for detection of SNP TSC0004267
tcgctcacttcat

SEQ ID NO: 21127 - DNA, 13 bp, Artificial Sequence
  Oligonucleotide for detection of SNP TSC0004267
acgaagtgagcga

SEQ ID NO: 21128 - DNA, 13 bp, Artificial Sequence
  Oligonucleotide for detection of SNP TSC0004267
tcgctcacttcgt

SEQ ID NO: 21129 - DNA, 13 bp, Artificial Sequence
  Oligonucleotide for detection of SNP TSC0004267
acgaagcgagtga

SEQ ID NO: 21130 - DNA, 13 bp, Artificial Sequence
  Oligonucleotide for detection of SNP TSC0004267
tcactcgcttcgt

SEQ ID NO: 21131 - DNA, 13 bp, Artificial Sequence
  Oligonucleotide for detection of SNP TSC0004267
atgaagcgagcga

SEQ ID NO: 21132 - DNA, 13 bp, Artificial Sequence
  Oligonucleotide for detection of SNP TSC0004267
tcgctcgcttcat

SEQ ID NO: 21133 - DNA, 13 bp, Artificial Sequence
  Oligonucleotide for detection of SNP TSC0004267
acgaagcgagcga

SEQ ID NO: 21134 - DNA, 13 bp, Artificial Sequence
  Oligonucleotide for detection of SNP TSC0004267
tcgctcgcttcgt

SEQ ID NO: 21135 - DNA, 13 bp, Artificial Sequence
  Oligonucleotide for detection of SNP TSC0004268
ttgagggtgttga

SEQ ID NO: 21136 - DNA, 13 bp, Artificial Sequence
  Oligonucleotide for detection of SNP TSC0004268
tcaacaccctcaa

SEQ ID NO: 21137 - DNA, 13 bp, Artificial Sequence
  Oligonucleotide for detection of SNP TSC0004268
ttgaggttgttga

SEQ ID NO: 21138 - DNA, 13 bp, Artificial Sequence
  Oligonucleotide for detection of SNP TSC0004268
tcaacaacctcaa

SEQ ID NO: 21139 - DNA, 13 bp, Artificial Sequence
  Oligonucleotide for detection of SNP TSC0004268
ttagtatttttaa

SEQ ID NO: 21140 - DNA, 13 bp, Artificial Sequence
  Oligonucleotide for detection of SNP TSC0004268
ttaaaaatactaa

SEQ ID NO: 21141 - DNA, 13 bp, Artificial Sequence
  Oligonucleotide for detection of SNP TSC0004268
ttagtagttttaa

SEQ ID NO: 21142 - DNA, 13 bp, Artificial Sequence
  Oligonucleotide for detection of SNP TSC0004268
ttaaaactactaa

SEQ ID NO: 21143 - DNA, 13 bp, Artificial Sequence
  Oligonucleotide for detection of SNP TSC0004269
aattattgtggtg

SEQ ID NO: 21144 - DNA, 13 bp, Artificial Sequence
  Oligonucleotide for detection of SNP TSC0004269
caccacaataatt

SEQ ID NO: 21145 - DNA, 13 bp, Artificial Sequence
  Oligonucleotide for detection of SNP TSC0004269
aattatcgtggtg

SEQ ID NO: 21146 - DNA, 13 bp, Artificial Sequence
  Oligonucleotide for detection of SNP TSC0004269
caccacgataatt

SEQ ID NO: 21147 - DNA, 13 bp, Artificial Sequence
  Oligonucleotide for detection of SNP TSC0004269
tattatggtgatt

SEQ ID NO: 21148 - DNA, 13 bp, Artificial Sequence
  Oligonucleotide for detection of SNP TSC0004269
aatcaccataata

SEQ ID NO: 21149 - DNA, 13 bp, Artificial Sequence
  Oligonucleotide for detection of SNP TSC0004269
tattatagtgatt

SEQ ID NO: 21150 - DNA, 13 bp, Artificial Sequence
  Oligonucleotide for detection of SNP TSC0004269
aatcactataata

SEQ ID NO: 21151 - DNA, 13 bp, Artificial Sequence
  Oligonucleotide for detection of SNP TSC0004269
tattacggtgatt

SEQ ID NO: 21152 - DNA, 13 bp, Artificial Sequence
  Oligonucleotide for detection of SNP TSC0004269
aatcaccgtaata

SEQ ID NO: 21153 - DNA, 13 bp, Artificial Sequence
  Oligonucleotide for detection of SNP TSC0004270
attgtaaatattt

SEQ ID NO: 21154 - DNA, 13 bp, Artificial Sequence
  Oligonucleotide for detection of SNP TSC0004270
aaatatttacaat

SEQ ID NO: 21155 - DNA, 13 bp, Artificial Sequence
  Oligonucleotide for detection of SNP TSC0004270
attgtatatattt

SEQ ID NO: 21156 - DNA, 13 bp, Artificial Sequence
  Oligonucleotide for detection of SNP TSC0004270
aaatatatacaat

SEQ ID NO: 21157 - DNA, 13 bp, Artificial Sequence
  Oligonucleotide for detection of SNP TSC0004270
aaatatgtataat

SEQ ID NO: 21158 - DNA, 13 bp, Artificial Sequence
  Oligonucleotide for detection of SNP TSC0004270
attatacatattt

SEQ ID NO: 21159 - DNA, 13 bp, Artificial Sequence
  Oligonucleotide for detection of SNP TSC0004271
aggtgatttgtat

SEQ ID NO: 21160 - DNA, 13 bp, Artificial Sequence
  Oligonucleotide for detection of SNP TSC0004271
atacaaatcacct

SEQ ID NO: 21161 - DNA, 13 bp, Artificial Sequence
  Oligonucleotide for detection of SNP TSC0004271
aggtgagttgtat

SEQ ID NO: 21162 - DNA, 13 bp, Artificial Sequence
  Oligonucleotide for detection of SNP TSC0004271
atacaactcacct

SEQ ID NO: 21163 - DNA, 13 bp, Artificial Sequence
  Oligonucleotide for detection of SNP TSC0004271
atgtagattattt

SEQ ID NO: 21164 - DNA, 13 bp, Artificial Sequence
  Oligonucleotide for detection of SNP TSC0004271
aaataatctacat

SEQ ID NO: 21165 - DNA, 13 bp, Artificial Sequence
  Oligonucleotide for detection of SNP TSC0004271
atgtagtttattt

SEQ ID NO: 21166 - DNA, 13 bp, Artificial Sequence
  Oligonucleotide for detection of SNP TSC0004271
aaataaactacat

SEQ ID NO: 21167 - DNA, 13 bp, Artificial Sequence
  Oligonucleotide for detection of SNP TSC0004272
aaaaggtgtatty

SEQ ID NO: 21168 - DNA, 13 bp, Artificial Sequence
  Oligonucleotide for detection of SNP TSC0004272
raatacacctttt

SEQ ID NO: 21169 - DNA, 13 bp, Artificial Sequence
  Oligonucleotide for detection of SNP TSC0004272
aaaaggcgtatty

SEQ ID NO: 21170 - DNA, 13 bp, Artificial Sequence
  Oligonucleotide for detection of SNP TSC0004272
raatacgcctttt

SEQ ID NO: 21171 - DNA, 13 bp, Artificial Sequence
  Oligonucleotide for detection of SNP TSC0004272
gggtgtgtttttt

SEQ ID NO: 21172 - DNA, 13 bp, Artificial Sequence
  Oligonucleotide for detection of SNP TSC0004272
aaaaaacacaccc

SEQ ID NO: 21173 - DNA, 13 bp, Artificial Sequence
  Oligonucleotide for detection of SNP TSC0004272
gggtgtatttttt

SEQ ID NO: 21174 - DNA, 13 bp, Artificial Sequence
  Oligonucleotide for detection of SNP TSC0004272
aaaaaatacaccc

SEQ ID NO: 21175 - DNA, 13 bp, Artificial Sequence
  Oligonucleotide for detection of SNP TSC0004272
gggtgcgtttttt

SEQ ID NO: 21176 - DNA, 13 bp, Artificial Sequence
  Oligonucleotide for detection of SNP TSC0004272
aaaaaacgcaccc

SEQ ID NO: 21177 - DNA, 13 bp, Artificial Sequence
  Oligonucleotide for detection of SNP TSC0004273
ggtatggaagttt

SEQ ID NO: 21178 - DNA, 13 bp, Artificial Sequence
  Oligonucleotide for detection of SNP TSC0004273
aaacttccatacc

SEQ ID NO: 21179 - DNA, 13 bp, Artificial Sequence
  Oligonucleotide for detection of SNP TSC0004273
ggtatgtaagttt

SEQ ID NO: 21180 - DNA, 13 bp, Artificial Sequence
  Oligonucleotide for detection of SNP TSC0004273
aaacttacatacc

SEQ ID NO: 21181 - DNA, 13 bp, Artificial Sequence
  Oligonucleotide for detection of SNP TSC0004273
aagtttttatgty

SEQ ID NO: 21182 - DNA, 13 bp, Artificial Sequence
  Oligonucleotide for detection of SNP TSC0004273
racataaaaactt

SEQ ID NO: 21183 - DNA, 13 bp, Artificial Sequence
  Oligonucleotide for detection of SNP TSC0004273
aagtttgtatgty

SEQ ID NO: 21184 - DNA, 13 bp, Artificial Sequence
  Oligonucleotide for detection of SNP TSC0004273
racatacaaactt

SEQ ID NO: 21185 - DNA, 13 bp, Artificial Sequence
  Oligonucleotide for detection of SNP TSC0004275
tttgggtatggay

SEQ ID NO: 21186 - DNA, 13 bp, Artificial Sequence
  Oligonucleotide for detection of SNP TSC0004275
rtccatacccaaa

SEQ ID NO: 21187 - DNA, 13 bp, Artificial Sequence
  Oligonucleotide for detection of SNP TSC0004275
tttggggatggay

SEQ ID NO: 21188 - DNA, 13 bp, Artificial Sequence
  Oligonucleotide for detection of SNP TSC0004275
rtccatccccaaa

SEQ ID NO: 21189 - DNA, 13 bp, Artificial Sequence
  Oligonucleotide for detection of SNP TSC0004275
gtttatatttagg

SEQ ID NO: 21190 - DNA, 13 bp, Artificial Sequence
  Oligonucleotide for detection of SNP TSC0004275
cctaaatataaac

SEQ ID NO: 21191 - DNA, 13 bp, Artificial Sequence
  Oligonucleotide for detection of SNP TSC0004275
gtttatttttagg

SEQ ID NO: 21192 - DNA, 13 bp, Artificial Sequence
  Oligonucleotide for detection of SNP TSC0004275
cctaaaaataaac

SEQ ID NO: 21193 - DNA, 13 bp, Artificial Sequence
  Oligonucleotide for detection of SNP TSC0004276
gagagtagggatg

SEQ ID NO: 21194 - DNA, 13 bp, Artificial Sequence
  Oligonucleotide for detection of SNP TSC0004276
catccctactctc

SEQ ID NO: 21195 - DNA, 13 bp, Artificial Sequence
  Oligonucleotide for detection of SNP TSC0004276
gagagttgggatg

SEQ ID NO: 21196 - DNA, 13 bp, Artificial Sequence
  Oligonucleotide for detection of SNP TSC0004276
catcccaactctc

SEQ ID NO: 21197 - DNA, 13 bp, Artificial Sequence
  Oligonucleotide for detection of SNP TSC0004276
gagagtagggacg

SEQ ID NO: 21198 - DNA, 13 bp, Artificial Sequence
  Oligonucleotide for detection of SNP TSC0004276
cgtccctactctc

SEQ ID NO: 21199 - DNA, 13 bp, Artificial Sequence
  Oligonucleotide for detection of SNP TSC0004276
gagagtcgggatg

SEQ ID NO: 21200 - DNA, 13 bp, Artificial Sequence
  Oligonucleotide for detection of SNP TSC0004276
catcccgactctc

SEQ ID NO: 21201 - DNA, 13 bp, Artificial Sequence
  Oligonucleotide for detection of SNP TSC0004276
gagagttgggacg

SEQ ID NO: 21202 - DNA, 13 bp, Artificial Sequence
  Oligonucleotide for detection of SNP TSC0004276
cgtcccaactctc

SEQ ID NO: 21203 - DNA, 13 bp, Artificial Sequence
  Oligonucleotide for detection of SNP TSC0004276
gagagtcgggacg

SEQ ID NO: 21204 - DNA, 13 bp, Artificial Sequence
  Oligonucleotide for detection of SNP TSC0004276
cgtcccgactctc

SEQ ID NO: 21205 - DNA, 13 bp, Artificial Sequence
  Oligonucleotide for detection of SNP TSC0004276
tgtttttgtttty

SEQ ID NO: 21206 - DNA, 13 bp, Artificial Sequence
  Oligonucleotide for detection of SNP TSC0004276
raaaacaaaaaca

SEQ ID NO: 21207 - DNA, 13 bp, Artificial Sequence
  Oligonucleotide for detection of SNP TSC0004276
cgtttttgtttty

SEQ ID NO: 21208 - DNA, 13 bp, Artificial Sequence
  Oligonucleotide for detection of SNP TSC0004276
raaaacaaaaacg

SEQ ID NO: 21209 - DNA, 13 bp, Artificial Sequence
  Oligonucleotide for detection of SNP TSC0004277
aataatgtattty

SEQ ID NO: 21210 - DNA, 13 bp, Artificial Sequence
  Oligonucleotide for detection of SNP TSC0004277
raaatacattatt

SEQ ID NO: 21211 - DNA, 13 bp, Artificial Sequence
  Oligonucleotide for detection of SNP TSC0004277
aataatatattty

SEQ ID NO: 21212 - DNA, 13 bp, Artificial Sequence
  Oligonucleotide for detection of SNP TSC0004277
raaatatattatt

SEQ ID NO: 21213 - DNA, 13 bp, Artificial Sequence
  Oligonucleotide for detection of SNP TSC0004277
aataacgtattty

SEQ ID NO: 21214 - DNA, 13 bp, Artificial Sequence
  Oligonucleotide for detection of SNP TSC0004277
raaatacgttatt

SEQ ID NO: 21215 - DNA, 13 bp, Artificial Sequence
  Oligonucleotide for detection of SNP TSC0004277
ggaatatgttgtt

SEQ ID NO: 21216 - DNA, 13 bp, Artificial Sequence
  Oligonucleotide for detection of SNP TSC0004277
aacaacatattcc

SEQ ID NO: 21217 - DNA, 13 bp, Artificial Sequence
  Oligonucleotide for detection of SNP TSC0004277
ggaatacgttgtt

SEQ ID NO: 21218 - DNA, 13 bp, Artificial Sequence
  Oligonucleotide for detection of SNP TSC0004277
aacaacgtattcc

SEQ ID NO: 21219 - DNA, 13 bp, Artificial Sequence
  Oligonucleotide for detection of SNP TSC0004278
tattttagtttty

SEQ ID NO: 21220 - DNA, 13 bp, Artificial Sequence
  Oligonucleotide for detection of SNP TSC0004278
raaaactaaaata

SEQ ID NO: 21221 - DNA, 13 bp, Artificial Sequence
  Oligonucleotide for detection of SNP TSC0004278
tattttggtttty

SEQ ID NO: 21222 - DNA, 13 bp, Artificial Sequence
  Oligonucleotide for detection of SNP TSC0004278
raaaaccaaaata

SEQ ID NO: 21223 - DNA, 13 bp, Artificial Sequence
  Oligonucleotide for detection of SNP TSC0004279
ttttgttgtgtaa

SEQ ID NO: 21224 - DNA, 13 bp, Artificial Sequence
  Oligonucleotide for detection of SNP TSC0004279
ttacacaacaaaa

SEQ ID NO: 21225 - DNA, 13 bp, Artificial Sequence
  Oligonucleotide for detection of SNP TSC0004279
ttttgtcgtgtaa

SEQ ID NO: 21226 - DNA, 13 bp, Artificial Sequence
  Oligonucleotide for detection of SNP TSC0004279
ttacacgacaaaa

SEQ ID NO: 21227 - DNA, 13 bp, Artificial Sequence
  Oligonucleotide for detection of SNP TSC0004279
ttatatgatagaa

SEQ ID NO: 21228 - DNA, 13 bp, Artificial Sequence
  Oligonucleotide for detection of SNP TSC0004279
ttctatcatataa

SEQ ID NO: 21229 - DNA, 13 bp, Artificial Sequence
  Oligonucleotide for detection of SNP TSC0004279
ttatataatagaa

SEQ ID NO: 21230 - DNA, 13 bp, Artificial Sequence
  Oligonucleotide for detection of SNP TSC0004279
ttctattatataa

SEQ ID NO: 21231 - DNA, 13 bp, Artificial Sequence
  Oligonucleotide for detection of SNP TSC0004279
ttatacgatagaa

SEQ ID NO: 21232 - DNA, 13 bp, Artificial Sequence
  Oligonucleotide for detection of SNP TSC0004279
ttctatcgtataa

SEQ ID NO: 21233 - DNA, 13 bp, Artificial Sequence
  Oligonucleotide for detection of SNP TSC0004280
gtatagggaagtt

SEQ ID NO: 21234 - DNA, 13 bp, Artificial Sequence
  Oligonucleotide for detection of SNP TSC0004280
aacttccctatac

SEQ ID NO: 21235 - DNA, 13 bp, Artificial Sequence
  Oligonucleotide for detection of SNP TSC0004280
gtatagagaagtt

SEQ ID NO: 21236 - DNA, 13 bp, Artificial Sequence
  Oligonucleotide for detection of SNP TSC0004280
aacttctctatac

SEQ ID NO: 21237 - DNA, 13 bp, Artificial Sequence
  Oligonucleotide for detection of SNP TSC0004281
attataatggtga

SEQ ID NO: 21238 - DNA, 13 bp, Artificial Sequence
  Oligonucleotide for detection of SNP TSC0004281
tcaccattataat

SEQ ID NO: 21239 - DNA, 13 bp, Artificial Sequence
  Oligonucleotide for detection of SNP TSC0004281
attatagtggtga

SEQ ID NO: 21240 - DNA, 13 bp, Artificial Sequence
  Oligonucleotide for detection of SNP TSC0004281
tcaccactataat

SEQ ID NO: 21241 - DNA, 13 bp, Artificial Sequence
  Oligonucleotide for detection of SNP TSC0004282
tataattggtagy

SEQ ID NO: 21242 - DNA, 13 bp, Artificial Sequence
  Oligonucleotide for detection of SNP TSC0004282
rctaccaattata

SEQ ID NO: 21243 - DNA, 13 bp, Artificial Sequence
  Oligonucleotide for detection of SNP TSC0004282
tataataggtagy

SEQ ID NO: 21244 - DNA, 13 bp, Artificial Sequence
  Oligonucleotide for detection of SNP TSC0004282
rctacctattata

SEQ ID NO: 21245 - DNA, 13 bp, Artificial Sequence
  Oligonucleotide for detection of SNP TSC0004282
tataatcggtagy

SEQ ID NO: 21246 - DNA, 13 bp, Artificial Sequence
  Oligonucleotide for detection of SNP TSC0004282
rctaccgattata

SEQ ID NO: 21247 - DNA, 13 bp, Artificial Sequence
  Oligonucleotide for detection of SNP TSC0004282
gttgttggttatg

SEQ ID NO: 21248 - DNA, 13 bp, Artificial Sequence
  Oligonucleotide for detection of SNP TSC0004282
cataaccaacaac

SEQ ID NO: 21249 - DNA, 13 bp, Artificial Sequence
  Oligonucleotide for detection of SNP TSC0004282
gttgtttgttatg

SEQ ID NO: 21250 - DNA, 13 bp, Artificial Sequence
  Oligonucleotide for detection of SNP TSC0004282
cataacaaacaac

SEQ ID NO: 21251 - DNA, 13 bp, Artificial Sequence
  Oligonucleotide for detection of SNP TSC0004282
gttgtcggttatg

SEQ ID NO: 21252 - DNA, 13 bp, Artificial Sequence
  Oligonucleotide for detection of SNP TSC0004282
cataaccgacaac

SEQ ID NO: 21253 - DNA, 13 bp, Artificial Sequence
  Oligonucleotide for detection of SNP TSC0004283
tgtttttgaagta

SEQ ID NO: 21254 - DNA, 13 bp, Artificial Sequence
  Oligonucleotide for detection of SNP TSC0004283
tacttcaaaaaca

SEQ ID NO: 21255 - DNA, 13 bp, Artificial Sequence
  Oligonucleotide for detection of SNP TSC0004283
tgttttcgaagta

SEQ ID NO: 21256 - DNA, 13 bp, Artificial Sequence
  Oligonucleotide for detection of SNP TSC0004283
tacttcgaaaaca

SEQ ID NO: 21257 - DNA, 13 bp, Artificial Sequence
  Oligonucleotide for detection of SNP TSC0004283
tgttttaaggata

SEQ ID NO: 21258 - DNA, 13 bp, Artificial Sequence
  Oligonucleotide for detection of SNP TSC0004283
tatccttaaaaca

SEQ ID NO: 21259 - DNA, 13 bp, Artificial Sequence
  Oligonucleotide for detection of SNP TSC0004283
tgttttgaggata

SEQ ID NO: 21260 - DNA, 13 bp, Artificial Sequence
  Oligonucleotide for detection of SNP TSC0004283
tatcctcaaaaca

SEQ ID NO: 21261 - DNA, 13 bp, Artificial Sequence
  Oligonucleotide for detection of SNP TSC0004283
tgtttcgaggata

SEQ ID NO: 21262 - DNA, 13 bp, Artificial Sequence
  Oligonucleotide for detection of SNP TSC0004283
tatcctcgaaaca

SEQ ID NO: 21263 - DNA, 13 bp, Artificial Sequence
  Oligonucleotide for detection of SNP TSC0004284
tgaggtgggtgga

SEQ ID NO: 21264 - DNA, 13 bp, Artificial Sequence
  Oligonucleotide for detection of SNP TSC0004284
tccacccacctca

SEQ ID NO: 21265 - DNA, 13 bp, Artificial Sequence
  Oligonucleotide for detection of SNP TSC0004284
tgaggtaggtgga

SEQ ID NO: 21266 - DNA, 13 bp, Artificial Sequence
  Oligonucleotide for detection of SNP TSC0004284
tccacctacctca

SEQ ID NO: 21267 - DNA, 13 bp, Artificial Sequence
  Oligonucleotide for detection of SNP TSC0004284
cgaggtgggtgga

SEQ ID NO: 21268 - DNA, 13 bp, Artificial Sequence
  Oligonucleotide for detection of SNP TSC0004284
tccacccacctcg

SEQ ID NO: 21269 - DNA, 13 bp, Artificial Sequence
  Oligonucleotide for detection of SNP TSC0004284
cgaggtaggtgga

SEQ ID NO: 21270 - DNA, 13 bp, Artificial Sequence
  Oligonucleotide for detection of SNP TSC0004284
tccacctacctcg

SEQ ID NO: 21271 - DNA, 13 bp, Artificial Sequence
  Oligonucleotide for detection of SNP TSC0004284
tgaggcgggtgga

SEQ ID NO: 21272 - DNA, 13 bp, Artificial Sequence
  Oligonucleotide for detection of SNP TSC0004284
tccacccgcctca

SEQ ID NO: 21273 - DNA, 13 bp, Artificial Sequence
  Oligonucleotide for detection of SNP TSC0004284
cgaggcgggtgga

SEQ ID NO: 21274 - DNA, 13 bp, Artificial Sequence
  Oligonucleotide for detection of SNP TSC0004284
tccacccgcctcg

SEQ ID NO: 21275 - DNA, 13 bp, Artificial Sequence
  Oligonucleotide for detection of SNP TSC0004284
tttatttgttttg

SEQ ID NO: 21276 - DNA, 13 bp, Artificial Sequence
  Oligonucleotide for detection of SNP TSC0004284
caaaacaaataaa

SEQ ID NO: 21277 - DNA, 13 bp, Artificial Sequence
  Oligonucleotide for detection of SNP TSC0004284
tttattcgttttg

SEQ ID NO: 21278 - DNA, 13 bp, Artificial Sequence
  Oligonucleotide for detection of SNP TSC0004284
caaaacgaataaa

SEQ ID NO: 21279 - DNA, 13 bp, Artificial Sequence
  Oligonucleotide for detection of SNP TSC0004284
tttatttgtttcg

SEQ ID NO: 21280 - DNA, 13 bp, Artificial Sequence
  Oligonucleotide for detection of SNP TSC0004284
cgaaacaaataaa

SEQ ID NO: 21281 - DNA, 13 bp, Artificial Sequence
  Oligonucleotide for detection of SNP TSC0004284
tttattcgtttcg

SEQ ID NO: 21282 - DNA, 13 bp, Artificial Sequence
  Oligonucleotide for detection of SNP TSC0004284
cgaaacgaataaa

SEQ ID NO: 21283 - DNA, 13 bp, Artificial Sequence
  Oligonucleotide for detection of SNP TSC0004285
ggatgagggagat

SEQ ID NO: 21284 - DNA, 13 bp, Artificial Sequence
  Oligonucleotide for detection of SNP TSC0004285
atctccctcatcc

SEQ ID NO: 21285 - DNA, 13 bp, Artificial Sequence
  Oligonucleotide for detection of SNP TSC0004285
ggatgaaggagat

SEQ ID NO: 21286 - DNA, 13 bp, Artificial Sequence
  Oligonucleotide for detection of SNP TSC0004285
atctccttcatcc

SEQ ID NO: 21287 - DNA, 13 bp, Artificial Sequence
  Oligonucleotide for detection of SNP TSC0004286
tttataatttttt

SEQ ID NO: 21288 - DNA, 13 bp, Artificial Sequence
  Oligonucleotide for detection of SNP TSC0004286
aaaaaattataaa

SEQ ID NO: 21289 - DNA, 13 bp, Artificial Sequence
  Oligonucleotide for detection of SNP TSC0004286
tttatagtttttt

SEQ ID NO: 21290 - DNA, 13 bp, Artificial Sequence
  Oligonucleotide for detection of SNP TSC0004286
aaaaaactataaa

SEQ ID NO: 21291 - DNA, 13 bp, Artificial Sequence
  Oligonucleotide for detection of SNP TSC0004287
gtgataagaattg

SEQ ID NO: 21292 - DNA, 13 bp, Artificial Sequence
  Oligonucleotide for detection of SNP TSC0004287
caattcttatcac

SEQ ID NO: 21293 - DNA, 13 bp, Artificial Sequence
  Oligonucleotide for detection of SNP TSC0004287
gtgataggaattg

SEQ ID NO: 21294 - DNA, 13 bp, Artificial Sequence
  Oligonucleotide for detection of SNP TSC0004287
caattcctatcac

SEQ ID NO: 21295 - DNA, 13 bp, Artificial Sequence
  Oligonucleotide for detection of SNP TSC0004287
gcgataagaattg

SEQ ID NO: 21296 - DNA, 13 bp, Artificial Sequence
  Oligonucleotide for detection of SNP TSC0004287
caattcttatcgc

SEQ ID NO: 21297 - DNA, 13 bp, Artificial Sequence
  Oligonucleotide for detection of SNP TSC0004287
gcgataggaattg

SEQ ID NO: 21298 - DNA, 13 bp, Artificial Sequence
  Oligonucleotide for detection of SNP TSC0004287
caattcctatcgc

SEQ ID NO: 21299 - DNA, 13 bp, Artificial Sequence
  Oligonucleotide for detection of SNP TSC0004287
gtgataagaatcg

SEQ ID NO: 21300 - DNA, 13 bp, Artificial Sequence
  Oligonucleotide for detection of SNP TSC0004287
cgattcttatcac

SEQ ID NO: 21301 - DNA, 13 bp, Artificial Sequence
  Oligonucleotide for detection of SNP TSC0004287
gtgataggaatcg

SEQ ID NO: 21302 - DNA, 13 bp, Artificial Sequence
  Oligonucleotide for detection of SNP TSC0004287
cgattcctatcac

SEQ ID NO: 21303 - DNA, 13 bp, Artificial Sequence
  Oligonucleotide for detection of SNP TSC0004287
gcgataagaatcg

SEQ ID NO: 21304 - DNA, 13 bp, Artificial Sequence
  Oligonucleotide for detection of SNP TSC0004287
cgattcttatcgc

SEQ ID NO: 21305 - DNA, 13 bp, Artificial Sequence
  Oligonucleotide for detection of SNP TSC0004287
gcgataggaatcg

SEQ ID NO: 21306 - DNA, 13 bp, Artificial Sequence
  Oligonucleotide for detection of SNP TSC0004287
cgattcctatcgc

SEQ ID NO: 21307 - DNA, 13 bp, Artificial Sequence
  Oligonucleotide for detection of SNP TSC0004288
ttgggttatttgy

SEQ ID NO: 21308 - DNA, 13 bp, Artificial Sequence
  Oligonucleotide for detection of SNP TSC0004288
rcaaataacccaa

SEQ ID NO: 21309 - DNA, 13 bp, Artificial Sequence
  Oligonucleotide for detection of SNP TSC0004288
ttgggtgatttgy

SEQ ID NO: 21310 - DNA, 13 bp, Artificial Sequence
  Oligonucleotide for detection of SNP TSC0004288
rcaaatcacccaa

SEQ ID NO: 21311 - DNA, 13 bp, Artificial Sequence
  Oligonucleotide for detection of SNP TSC0004288
gtagatgatttag

SEQ ID NO: 21312 - DNA, 13 bp, Artificial Sequence
  Oligonucleotide for detection of SNP TSC0004288
ctaaatcatctac

SEQ ID NO: 21313 - DNA, 13 bp, Artificial Sequence
  Oligonucleotide for detection of SNP TSC0004288
gtagattatttag

SEQ ID NO: 21314 - DNA, 13 bp, Artificial Sequence
  Oligonucleotide for detection of SNP TSC0004288
ctaaataatctac

SEQ ID NO: 21315 - DNA, 13 bp, Artificial Sequence
  Oligonucleotide for detection of SNP TSC0004289
tatttggtaggtt

SEQ ID NO: 21316 - DNA, 13 bp, Artificial Sequence
  Oligonucleotide for detection of SNP TSC0004289
aacctaccaaata

SEQ ID NO: 21317 - DNA, 13 bp, Artificial Sequence
  Oligonucleotide for detection of SNP TSC0004289
tatttgataggtt

SEQ ID NO: 21318 - DNA, 13 bp, Artificial Sequence
  Oligonucleotide for detection of SNP TSC0004289
aacctatcaaata

SEQ ID NO: 21319 - DNA, 13 bp, Artificial Sequence
  Oligonucleotide for detection of SNP TSC0004289
tattcggtaggtt

SEQ ID NO: 21320 - DNA, 13 bp, Artificial Sequence
  Oligonucleotide for detection of SNP TSC0004289
aacctaccgaata

SEQ ID NO: 21321 - DNA, 13 bp, Artificial Sequence
  Oligonucleotide for detection of SNP TSC0004289
tattcgataggtt

SEQ ID NO: 21322 - DNA, 13 bp, Artificial Sequence
  Oligonucleotide for detection of SNP TSC0004289
aacctatcgaata

SEQ ID NO: 21323 - DNA, 13 bp, Artificial Sequence
  Oligonucleotide for detection of SNP TSC0004290
gttaaaagttttt

SEQ ID NO: 21324 - DNA, 13 bp, Artificial Sequence
  Oligonucleotide for detection of SNP TSC0004290
aaaaacttttaac

SEQ ID NO: 21325 - DNA, 13 bp, Artificial Sequence
  Oligonucleotide for detection of SNP TSC0004290
gttaaaggttttt

SEQ ID NO: 21326 - DNA, 13 bp, Artificial Sequence
  Oligonucleotide for detection of SNP TSC0004290
aaaaacctttaac

SEQ ID NO: 21327 - DNA, 13 bp, Artificial Sequence
  Oligonucleotide for detection of SNP TSC0004291
ttttatatttatt

SEQ ID NO: 21328 - DNA, 13 bp, Artificial Sequence
  Oligonucleotide for detection of SNP TSC0004291
aataaatataaaa

SEQ ID NO: 21329 - DNA, 13 bp, Artificial Sequence
  Oligonucleotide for detection of SNP TSC0004291
ttttatgtttatt

SEQ ID NO: 21330 - DNA, 13 bp, Artificial Sequence
  Oligonucleotide for detection of SNP TSC0004291
aataaacataaaa

SEQ ID NO: 21331 - DNA, 13 bp, Artificial Sequence
  Oligonucleotide for detection of SNP TSC0004292
agttggagatgaa

SEQ ID NO: 21332 - DNA, 13 bp, Artificial Sequence
  Oligonucleotide for detection of SNP TSC0004292
ttcatctccaact

SEQ ID NO: 21333 - DNA, 13 bp, Artificial Sequence
  Oligonucleotide for detection of SNP TSC0004292
agttggggatgaa

SEQ ID NO: 21334 - DNA, 13 bp, Artificial Sequence
  Oligonucleotide for detection of SNP TSC0004292
ttcatccccaact

SEQ ID NO: 21335 - DNA, 13 bp, Artificial Sequence
  Oligonucleotide for detection of SNP TSC0004293
tagagtagaagat

SEQ ID NO: 21336 - DNA, 13 bp, Artificial Sequence
  Oligonucleotide for detection of SNP TSC0004293
atcttctactcta

SEQ ID NO: 21337 - DNA, 13 bp, Artificial Sequence
  Oligonucleotide for detection of SNP TSC0004293
tagagtggaagat

SEQ ID NO: 21338 - DNA, 13 bp, Artificial Sequence
  Oligonucleotide for detection of SNP TSC0004293
atcttccactcta

SEQ ID NO: 21339 - DNA, 13 bp, Artificial Sequence
  Oligonucleotide for detection of SNP TSC0004294
ttggtttggtagt

SEQ ID NO: 21340 - DNA, 13 bp, Artificial Sequence
  Oligonucleotide for detection of SNP TSC0004294
actaccaaaccaa

SEQ ID NO: 21341 - DNA, 13 bp, Artificial Sequence
  Oligonucleotide for detection of SNP TSC0004294
ttggttcggtagt

SEQ ID NO: 21342 - DNA, 13 bp, Artificial Sequence
  Oligonucleotide for detection of SNP TSC0004294
actaccgaaccaa

SEQ ID NO: 21343 - DNA, 13 bp, Artificial Sequence
  Oligonucleotide for detection of SNP TSC0004294
attgttaagttag

SEQ ID NO: 21344 - DNA, 13 bp, Artificial Sequence
  Oligonucleotide for detection of SNP TSC0004294
ctaacttaacaat

SEQ ID NO: 21345 - DNA, 13 bp, Artificial Sequence
  Oligonucleotide for detection of SNP TSC0004294
attgttgagttag

SEQ ID NO: 21346 - DNA, 13 bp, Artificial Sequence
  Oligonucleotide for detection of SNP TSC0004294
ctaactcaacaat

SEQ ID NO: 21347 - DNA, 13 bp, Artificial Sequence
  Oligonucleotide for detection of SNP TSC0004294
attgtcgagttag

SEQ ID NO: 21348 - DNA, 13 bp, Artificial Sequence
  Oligonucleotide for detection of SNP TSC0004294
ctaactcgacaat

SEQ ID NO: 21349 - DNA, 13 bp, Artificial Sequence
  Oligonucleotide for detection of SNP TSC0004295
aggttttgagtty

SEQ ID NO: 21350 - DNA, 13 bp, Artificial Sequence
  Oligonucleotide for detection of SNP TSC0004295
raactcaaaacct

SEQ ID NO: 21351 - DNA, 13 bp, Artificial Sequence
  Oligonucleotide for detection of SNP TSC0004295
aggtttcgagtty

SEQ ID NO: 21352 - DNA, 13 bp, Artificial Sequence
  Oligonucleotide for detection of SNP TSC0004295
raactcgaaacct

SEQ ID NO: 21353 - DNA, 13 bp, Artificial Sequence
  Oligonucleotide for detection of SNP TSC0004295
gggtttgggattt

SEQ ID NO: 21354 - DNA, 13 bp, Artificial Sequence
  Oligonucleotide for detection of SNP TSC0004295
aaatcccaaaccc

SEQ ID NO: 21355 - DNA, 13 bp, Artificial Sequence
  Oligonucleotide for detection of SNP TSC0004295
gggtttaggattt

SEQ ID NO: 21356 - DNA, 13 bp, Artificial Sequence
  Oligonucleotide for detection of SNP TSC0004295
aaatcctaaaccc

SEQ ID NO: 21357 - DNA, 13 bp, Artificial Sequence
  Oligonucleotide for detection of SNP TSC0004295
gggttcgggattt

SEQ ID NO: 21358 - DNA, 13 bp, Artificial Sequence
  Oligonucleotide for detection of SNP TSC0004295
aaatcccgaaccc

SEQ ID NO: 21359 - DNA, 13 bp, Artificial Sequence
  Oligonucleotide for detection of SNP TSC0004296
tggtaaggttaty

SEQ ID NO: 21360 - DNA, 13 bp, Artificial Sequence
  Oligonucleotide for detection of SNP TSC0004296
rataaccttacca

SEQ ID NO: 21361 - DNA, 13 bp, Artificial Sequence
  Oligonucleotide for detection of SNP TSC0004296
tggtaaagttaty

SEQ ID NO: 21362 - DNA, 13 bp, Artificial Sequence
  Oligonucleotide for detection of SNP TSC0004296
rataactttacca

SEQ ID NO: 21363 - DNA, 13 bp, Artificial Sequence
  Oligonucleotide for detection of SNP TSC0004297
ttagtatgttttt

SEQ ID NO: 21364 - DNA, 13 bp, Artificial Sequence
  Oligonucleotide for detection of SNP TSC0004297
aaaaacatactaa

SEQ ID NO: 21365 - DNA, 13 bp, Artificial Sequence
  Oligonucleotide for detection of SNP TSC0004297
ttagtacgttttt

SEQ ID NO: 21366 - DNA, 13 bp, Artificial Sequence
  Oligonucleotide for detection of SNP TSC0004297
aaaaacgtactaa

SEQ ID NO: 21367 - DNA, 13 bp, Artificial Sequence
  Oligonucleotide for detection of SNP TSC0004297
aaaggtgtgttgg

SEQ ID NO: 21368 - DNA, 13 bp, Artificial Sequence
  Oligonucleotide for detection of SNP TSC0004297
ccaacacaccttt

SEQ ID NO: 21369 - DNA, 13 bp, Artificial Sequence
  Oligonucleotide for detection of SNP TSC0004297
aaaggtatgttgg

SEQ ID NO: 21370 - DNA, 13 bp, Artificial Sequence
  Oligonucleotide for detection of SNP TSC0004297
ccaacataccttt

SEQ ID NO: 21371 - DNA, 13 bp, Artificial Sequence
  Oligonucleotide for detection of SNP TSC0004297
aaaggcgtgttgg

SEQ ID NO: 21372 - DNA, 13 bp, Artificial Sequence
  Oligonucleotide for detection of SNP TSC0004297
ccaacacgccttt

SEQ ID NO: 21373 - DNA, 13 bp, Artificial Sequence
  Oligonucleotide for detection of SNP TSC0004298
ttttttcgggtag

SEQ ID NO: 21374 - DNA, 13 bp, Artificial Sequence
  Oligonucleotide for detection of SNP TSC0004298
ctacccgaaaaaa

SEQ ID NO: 21375 - DNA, 13 bp, Artificial Sequence
  Oligonucleotide for detection of SNP TSC0004298
ttgttttaaaagg

SEQ ID NO: 21376 - DNA, 13 bp, Artificial Sequence
  Oligonucleotide for detection of SNP TSC0004298
ccttttaaaacaa

SEQ ID NO: 21377 - DNA, 13 bp, Artificial Sequence
  Oligonucleotide for detection of SNP TSC0004298
ttgtttgaaaagg

SEQ ID NO: 21378 - DNA, 13 bp, Artificial Sequence
  Oligonucleotide for detection of SNP TSC0004298
ccttttcaaacaa

SEQ ID NO: 21379 - DNA, 13 bp, Artificial Sequence
  Oligonucleotide for detection of SNP TSC0004298
ttgttcgaaaagg

SEQ ID NO: 21380 - DNA, 13 bp, Artificial Sequence
  Oligonucleotide for detection of SNP TSC0004298
ccttttcgaacaa

SEQ ID NO: 21381 - DNA, 13 bp, Artificial Sequence
  Oligonucleotide for detection of SNP TSC0004299
ggtataaagtaaa

SEQ ID NO: 21382 - DNA, 13 bp, Artificial Sequence
  Oligonucleotide for detection of SNP TSC0004299
tttactttatacc

SEQ ID NO: 21383 - DNA, 13 bp, Artificial Sequence
  Oligonucleotide for detection of SNP TSC0004299
ggtatagagtaaa

SEQ ID NO: 21384 - DNA, 13 bp, Artificial Sequence
  Oligonucleotide for detection of SNP TSC0004299
tttactctatacc

SEQ ID NO: 21385 - DNA, 13 bp, Artificial Sequence
  Oligonucleotide for detection of SNP TSC0004300
gtgggtggtttat

SEQ ID NO: 21386 - DNA, 13 bp, Artificial Sequence
  Oligonucleotide for detection of SNP TSC0004300
ataaaccacccac

SEQ ID NO: 21387 - DNA, 13 bp, Artificial Sequence
  Oligonucleotide for detection of SNP TSC0004300
gtgggtagtttat

SEQ ID NO: 21388 - DNA, 13 bp, Artificial Sequence
  Oligonucleotide for detection of SNP TSC0004300
ataaactacccac

SEQ ID NO: 21389 - DNA, 13 bp, Artificial Sequence
  Oligonucleotide for detection of SNP TSC0004300
gcgggtggtttat

SEQ ID NO: 21390 - DNA, 13 bp, Artificial Sequence
  Oligonucleotide for detection of SNP TSC0004300
ataaaccacccgc

SEQ ID NO: 21391 - DNA, 13 bp, Artificial Sequence
  Oligonucleotide for detection of SNP TSC0004300
gcgggtagtttat

SEQ ID NO: 21392 - DNA, 13 bp, Artificial Sequence
  Oligonucleotide for detection of SNP TSC0004300
ataaactacccgc

SEQ ID NO: 21393 - DNA, 13 bp, Artificial Sequence
  Oligonucleotide for detection of SNP TSC0004301
agtggggatttta

SEQ ID NO: 21394 - DNA, 13 bp, Artificial Sequence
  Oligonucleotide for detection of SNP TSC0004301
taaaatccccact

SEQ ID NO: 21395 - DNA, 13 bp, Artificial Sequence
  Oligonucleotide for detection of SNP TSC0004301
agtgggaatttta

SEQ ID NO: 21396 - DNA, 13 bp, Artificial Sequence
  Oligonucleotide for detection of SNP TSC0004301
taaaattcccact

SEQ ID NO: 21397 - DNA, 13 bp, Artificial Sequence
  Oligonucleotide for detection of SNP TSC0004302
ggtaaatgatata

SEQ ID NO: 21398 - DNA, 13 bp, Artificial Sequence
  Oligonucleotide for detection of SNP TSC0004302
tatatcatttacc

SEQ ID NO: 21399 - DNA, 13 bp, Artificial Sequence
  Oligonucleotide for detection of SNP TSC0004302
ggtaaacgatata

SEQ ID NO: 21400 - DNA, 13 bp, Artificial Sequence
  Oligonucleotide for detection of SNP TSC0004302
tatatcgtttacc

SEQ ID NO: 21401 - DNA, 13 bp, Artificial Sequence
  Oligonucleotide for detection of SNP TSC0004302
tgtgttgtttaty

SEQ ID NO: 21402 - DNA, 13 bp, Artificial Sequence
  Oligonucleotide for detection of SNP TSC0004302
rataaacaacaca

SEQ ID NO: 21403 - DNA, 13 bp, Artificial Sequence
  Oligonucleotide for detection of SNP TSC0004302
tgtgttatttaty

SEQ ID NO: 21404 - DNA, 13 bp, Artificial Sequence
  Oligonucleotide for detection of SNP TSC0004302
rataaataacaca

SEQ ID NO: 21405 - DNA, 13 bp, Artificial Sequence
  Oligonucleotide for detection of SNP TSC0004302
tgtgtcgtttaty

SEQ ID NO: 21406 - DNA, 13 bp, Artificial Sequence
  Oligonucleotide for detection of SNP TSC0004302
rataaacgacaca

SEQ ID NO: 21407 - DNA, 13 bp, Artificial Sequence
  Oligonucleotide for detection of SNP TSC0004303
tttaatggtttty

SEQ ID NO: 21408 - DNA, 13 bp, Artificial Sequence
  Oligonucleotide for detection of SNP TSC0004303
raaaaccattaaa

SEQ ID NO: 21409 - DNA, 13 bp, Artificial Sequence
  Oligonucleotide for detection of SNP TSC0004303
tttaatagtttty

SEQ ID NO: 21410 - DNA, 13 bp, Artificial Sequence
  Oligonucleotide for detection of SNP TSC0004303
raaaactattaaa

SEQ ID NO: 21411 - DNA, 13 bp, Artificial Sequence
  Oligonucleotide for detection of SNP TSC0004303
tttaacggtttty

SEQ ID NO: 21412 - DNA, 13 bp, Artificial Sequence
  Oligonucleotide for detection of SNP TSC0004303
raaaaccgttaaa

SEQ ID NO: 21413 - DNA, 13 bp, Artificial Sequence
  Oligonucleotide for detection of SNP TSC0004303
gagaattgttgaa

SEQ ID NO: 21414 - DNA, 13 bp, Artificial Sequence
  Oligonucleotide for detection of SNP TSC0004303
ttcaacaattctc

SEQ ID NO: 21415 - DNA, 13 bp, Artificial Sequence
  Oligonucleotide for detection of SNP TSC0004303
gagaatcgttgaa

SEQ ID NO: 21416 - DNA, 13 bp, Artificial Sequence
  Oligonucleotide for detection of SNP TSC0004303
ttcaacgattctc

SEQ ID NO: 21417 - DNA, 13 bp, Artificial Sequence
  Oligonucleotide for detection of SNP TSC0004304
aagtgtattgata

SEQ ID NO: 21418 - DNA, 13 bp, Artificial Sequence
  Oligonucleotide for detection of SNP TSC0004304
tatcaatacactt

SEQ ID NO: 21419 - DNA, 13 bp, Artificial Sequence
  Oligonucleotide for detection of SNP TSC0004304
aagtgtgttgata

SEQ ID NO: 21420 - DNA, 13 bp, Artificial Sequence
  Oligonucleotide for detection of SNP TSC0004304
tatcaacacactt

SEQ ID NO: 21421 - DNA, 13 bp, Artificial Sequence
  Oligonucleotide for detection of SNP TSC0004305
gattaagttataa

SEQ ID NO: 21422 - DNA, 13 bp, Artificial Sequence
  Oligonucleotide for detection of SNP TSC0004305
ttataacttaatc

SEQ ID NO: 21423 - DNA, 13 bp, Artificial Sequence
  Oligonucleotide for detection of SNP TSC0004305
gattaaattataa

SEQ ID NO: 21424 - DNA, 13 bp, Artificial Sequence
  Oligonucleotide for detection of SNP TSC0004305
ttataatttaatc

SEQ ID NO: 21425 - DNA, 13 bp, Artificial Sequence
  Oligonucleotide for detection of SNP TSC0004306
tgattagtggtag

SEQ ID NO: 21426 - DNA, 13 bp, Artificial Sequence
  Oligonucleotide for detection of SNP TSC0004306
ctaccactaatca

SEQ ID NO: 21427 - DNA, 13 bp, Artificial Sequence
  Oligonucleotide for detection of SNP TSC0004306
tgattaatggtag

SEQ ID NO: 21428 - DNA, 13 bp, Artificial Sequence
  Oligonucleotide for detection of SNP TSC0004306
ctaccattaatca

SEQ ID NO: 21429 - DNA, 13 bp, Artificial Sequence
  Oligonucleotide for detection of SNP TSC0004308
ttttatgtgttga

SEQ ID NO: 21430 - DNA, 13 bp, Artificial Sequence
  Oligonucleotide for detection of SNP TSC0004308
tcaacacataaaa

SEQ ID NO: 21431 - DNA, 13 bp, Artificial Sequence
  Oligonucleotide for detection of SNP TSC0004308
ttttatatgttga

SEQ ID NO: 21432 - DNA, 13 bp, Artificial Sequence
  Oligonucleotide for detection of SNP TSC0004308
tcaacatataaaa

SEQ ID NO: 21433 - DNA, 13 bp, Artificial Sequence
  Oligonucleotide for detection of SNP TSC0004310
ttatgttggttty

SEQ ID NO: 21434 - DNA, 13 bp, Artificial Sequence
  Oligonucleotide for detection of SNP TSC0004310
raaaccaacataa

SEQ ID NO: 21435 - DNA, 13 bp, Artificial Sequence
  Oligonucleotide for detection of SNP TSC0004310
ttatgtcggttty

SEQ ID NO: 21436 - DNA, 13 bp, Artificial Sequence
  Oligonucleotide for detection of SNP TSC0004310
raaaccgacataa

SEQ ID NO: 21437 - DNA, 13 bp, Artificial Sequence
  Oligonucleotide for detection of SNP TSC0004310
ggagttggtatag

SEQ ID NO: 21438 - DNA, 13 bp, Artificial Sequence
  Oligonucleotide for detection of SNP TSC0004310
ctataccaactcc

SEQ ID NO: 21439 - DNA, 13 bp, Artificial Sequence
  Oligonucleotide for detection of SNP TSC0004310
ggagttagtatag

SEQ ID NO: 21440 - DNA, 13 bp, Artificial Sequence
  Oligonucleotide for detection of SNP TSC0004310
ctatactaactcc

SEQ ID NO: 21441 - DNA, 13 bp, Artificial Sequence
  Oligonucleotide for detection of SNP TSC0004310
ggagtcggtatag

SEQ ID NO: 21442 - DNA, 13 bp, Artificial Sequence
  Oligonucleotide for detection of SNP TSC0004310
ctataccgactcc

SEQ ID NO: 21443 - DNA, 13 bp, Artificial Sequence
  Oligonucleotide for detection of SNP TSC0004311
gagaggtaagaga

SEQ ID NO: 21444 - DNA, 13 bp, Artificial Sequence
  Oligonucleotide for detection of SNP TSC0004311
tctcttacctctc

SEQ ID NO: 21445 - DNA, 13 bp, Artificial Sequence
  Oligonucleotide for detection of SNP TSC0004311
gagagggaagaga

SEQ ID NO: 21446 - DNA, 13 bp, Artificial Sequence
  Oligonucleotide for detection of SNP TSC0004311
tctcttccctctc

SEQ ID NO: 21447 - DNA, 13 bp, Artificial Sequence
  Oligonucleotide for detection of SNP TSC0004312
ttatgggttatta

SEQ ID NO: 21448 - DNA, 13 bp, Artificial Sequence
  Oligonucleotide for detection of SNP TSC0004312
taataacccataa

SEQ ID NO: 21449 - DNA, 13 bp, Artificial Sequence
  Oligonucleotide for detection of SNP TSC0004312
ttatggtttatta

SEQ ID NO: 21450 - DNA, 13 bp, Artificial Sequence
  Oligonucleotide for detection of SNP TSC0004312
taataaaccataa

SEQ ID NO: 21451 - DNA, 13 bp, Artificial Sequence
  Oligonucleotide for detection of SNP TSC0004312
ttacgggttatta

SEQ ID NO: 21452 - DNA, 13 bp, Artificial Sequence
  Oligonucleotide for detection of SNP TSC0004312
taataacccgtaa

SEQ ID NO: 21453 - DNA, 13 bp, Artificial Sequence
  Oligonucleotide for detection of SNP TSC0004312
ttacggtttatta

SEQ ID NO: 21454 - DNA, 13 bp, Artificial Sequence
  Oligonucleotide for detection of SNP TSC0004312
taataaaccgtaa

SEQ ID NO: 21455 - DNA, 13 bp, Artificial Sequence
  Oligonucleotide for detection of SNP TSC0004312
tagtgatttgtga

SEQ ID NO: 21456 - DNA, 13 bp, Artificial Sequence
  Oligonucleotide for detection of SNP TSC0004312
tcacaaatcacta

SEQ ID NO: 21457 - DNA, 13 bp, Artificial Sequence
  Oligonucleotide for detection of SNP TSC0004312
tagtgaattgtga

SEQ ID NO: 21458 - DNA, 13 bp, Artificial Sequence
  Oligonucleotide for detection of SNP TSC0004312
tcacaattcacta

SEQ ID NO: 21459 - DNA, 13 bp, Artificial Sequence
  Oligonucleotide for detection of SNP TSC0004312
tagtgattcgtga

SEQ ID NO: 21460 - DNA, 13 bp, Artificial Sequence
  Oligonucleotide for detection of SNP TSC0004312
tcacgaatcacta

SEQ ID NO: 21461 - DNA, 13 bp, Artificial Sequence
  Oligonucleotide for detection of SNP TSC0004312
tagtgaatcgtga

SEQ ID NO: 21462 - DNA, 13 bp, Artificial Sequence
  Oligonucleotide for detection of SNP TSC0004312
tcacgattcacta

SEQ ID NO: 21463 - DNA, 13 bp, Artificial Sequence
  Oligonucleotide for detection of SNP TSC0004313
tttatgaaggtty

SEQ ID NO: 21464 - DNA, 13 bp, Artificial Sequence
  Oligonucleotide for detection of SNP TSC0004313
raaccttcataaa

SEQ ID NO: 21465 - DNA, 13 bp, Artificial Sequence
  Oligonucleotide for detection of SNP TSC0004313
tttatggaggtty

SEQ ID NO: 21466 - DNA, 13 bp, Artificial Sequence
  Oligonucleotide for detection of SNP TSC0004313
raacctccataaa

SEQ ID NO: 21467 - DNA, 13 bp, Artificial Sequence
  Oligonucleotide for detection of SNP TSC0004315
ttagtaattttaa

SEQ ID NO: 21468 - DNA, 13 bp, Artificial Sequence
  Oligonucleotide for detection of SNP TSC0004315
ttaaaattactaa

SEQ ID NO: 21469 - DNA, 13 bp, Artificial Sequence
  Oligonucleotide for detection of SNP TSC0004316
tttatttgtttgt

SEQ ID NO: 21470 - DNA, 13 bp, Artificial Sequence
  Oligonucleotide for detection of SNP TSC0004316
acaaacaaataaa

SEQ ID NO: 21471 - DNA, 13 bp, Artificial Sequence
  Oligonucleotide for detection of SNP TSC0004316
tttattcgtttgt

SEQ ID NO: 21472 - DNA, 13 bp, Artificial Sequence
  Oligonucleotide for detection of SNP TSC0004316
acaaacgaataaa

SEQ ID NO: 21473 - DNA, 13 bp, Artificial Sequence
  Oligonucleotide for detection of SNP TSC0004316
atagataaatgaa

SEQ ID NO: 21474 - DNA, 13 bp, Artificial Sequence
  Oligonucleotide for detection of SNP TSC0004316
ttcatttatctat

SEQ ID NO: 21475 - DNA, 13 bp, Artificial Sequence
  Oligonucleotide for detection of SNP TSC0004316
atagatgaatgaa

SEQ ID NO: 21476 - DNA, 13 bp, Artificial Sequence
  Oligonucleotide for detection of SNP TSC0004316
ttcattcatctat

SEQ ID NO: 21477 - DNA, 13 bp, Artificial Sequence
  Oligonucleotide for detection of SNP TSC0004316
atagacgaatgaa

SEQ ID NO: 21478 - DNA, 13 bp, Artificial Sequence
  Oligonucleotide for detection of SNP TSC0004316
ttcattcgtctat

SEQ ID NO: 21479 - DNA, 13 bp, Artificial Sequence
  Oligonucleotide for detection of SNP TSC0004317
aattgagaatttt

SEQ ID NO: 21480 - DNA, 13 bp, Artificial Sequence
  Oligonucleotide for detection of SNP TSC0004317
aaaattctcaatt

SEQ ID NO: 21481 - DNA, 13 bp, Artificial Sequence
  Oligonucleotide for detection of SNP TSC0004317
aattgaaaatttt

SEQ ID NO: 21482 - DNA, 13 bp, Artificial Sequence
  Oligonucleotide for detection of SNP TSC0004317
aaaattttcaatt

SEQ ID NO: 21483 - DNA, 13 bp, Artificial Sequence
  Oligonucleotide for detection of SNP TSC0004317
aatcgagaatttt

SEQ ID NO: 21484 - DNA, 13 bp, Artificial Sequence
  Oligonucleotide for detection of SNP TSC0004317
aaaattctcgatt

SEQ ID NO: 21485 - DNA, 13 bp, Artificial Sequence
  Oligonucleotide for detection of SNP TSC0004317
aatcgaaaatttt

SEQ ID NO: 21486 - DNA, 13 bp, Artificial Sequence
  Oligonucleotide for detection of SNP TSC0004317
aaaattttcgatt

SEQ ID NO: 21487 - DNA, 13 bp, Artificial Sequence
  Oligonucleotide for detection of SNP TSC0004318
tttgaggtttagt

SEQ ID NO: 21488 - DNA, 13 bp, Artificial Sequence
  Oligonucleotide for detection of SNP TSC0004318
actaaacctcaaa

SEQ ID NO: 21489 - DNA, 13 bp, Artificial Sequence
  Oligonucleotide for detection of SNP TSC0004318
tttgagatttagt

SEQ ID NO: 21490 - DNA, 13 bp, Artificial Sequence
  Oligonucleotide for detection of SNP TSC0004318
actaaatctcaaa

SEQ ID NO: 21491 - DNA, 13 bp, Artificial Sequence
  Oligonucleotide for detection of SNP TSC0004318
ttcgaggtttagt

SEQ ID NO: 21492 - DNA, 13 bp, Artificial Sequence
  Oligonucleotide for detection of SNP TSC0004318
actaaacctcgaa

SEQ ID NO: 21493 - DNA, 13 bp, Artificial Sequence
  Oligonucleotide for detection of SNP TSC0004318
ttcgagatttagt

SEQ ID NO: 21494 - DNA, 13 bp, Artificial Sequence
  Oligonucleotide for detection of SNP TSC0004318
actaaatctcgaa

SEQ ID NO: 21495 - DNA, 13 bp, Artificial Sequence
  Oligonucleotide for detection of SNP TSC0004320
ttttaagaagtaa

SEQ ID NO: 21496 - DNA, 13 bp, Artificial Sequence
  Oligonucleotide for detection of SNP TSC0004320
ttacttcttaaaa

SEQ ID NO: 21497 - DNA, 13 bp, Artificial Sequence
  Oligonucleotide for detection of SNP TSC0004320
ttttaataagtaa

SEQ ID NO: 21498 - DNA, 13 bp, Artificial Sequence
  Oligonucleotide for detection of SNP TSC0004320
ttacttattaaaa

SEQ ID NO: 21499 - DNA, 13 bp, Artificial Sequence
  Oligonucleotide for detection of SNP TSC0004320
ttgttttttgggg

SEQ ID NO: 21500 - DNA, 13 bp, Artificial Sequence
  Oligonucleotide for detection of SNP TSC0004320
ccccaaaaaacaa

SEQ ID NO: 21501 - DNA, 13 bp, Artificial Sequence
  Oligonucleotide for detection of SNP TSC0004320
ttgtttgttgggg

SEQ ID NO: 21502 - DNA, 13 bp, Artificial Sequence
  Oligonucleotide for detection of SNP TSC0004320
ccccaacaaacaa

SEQ ID NO: 21503 - DNA, 13 bp, Artificial Sequence
  Oligonucleotide for detection of SNP TSC0004321
agggtagtgaaat

SEQ ID NO: 21504 - DNA, 13 bp, Artificial Sequence
  Oligonucleotide for detection of SNP TSC0004321
atttcactaccct

SEQ ID NO: 21505 - DNA, 13 bp, Artificial Sequence
  Oligonucleotide for detection of SNP TSC0004321
agggtaatgaaat

SEQ ID NO: 21506 - DNA, 13 bp, Artificial Sequence
  Oligonucleotide for detection of SNP TSC0004321
atttcattaccct

SEQ ID NO: 21507 - DNA, 13 bp, Artificial Sequence
  Oligonucleotide for detection of SNP TSC0004322
gttgggtgtttag

SEQ ID NO: 21508 - DNA, 13 bp, Artificial Sequence
  Oligonucleotide for detection of SNP TSC0004322
ctaaacacccaac

SEQ ID NO: 21509 - DNA, 13 bp, Artificial Sequence
  Oligonucleotide for detection of SNP TSC0004322
gttgggggtttag

SEQ ID NO: 21510 - DNA, 13 bp, Artificial Sequence
  Oligonucleotide for detection of SNP TSC0004322
ctaaacccccaac

SEQ ID NO: 21511 - DNA, 13 bp, Artificial Sequence
  Oligonucleotide for detection of SNP TSC0004322
gttgggcgtttag

SEQ ID NO: 21512 - DNA, 13 bp, Artificial Sequence
  Oligonucleotide for detection of SNP TSC0004322
ctaaacgcccaac

SEQ ID NO: 21513 - DNA, 13 bp, Artificial Sequence
  Oligonucleotide for detection of SNP TSC0004322
ttggatgtttagy

SEQ ID NO: 21514 - DNA, 13 bp, Artificial Sequence
  Oligonucleotide for detection of SNP TSC0004322
rctaaacatccaa

SEQ ID NO: 21515 - DNA, 13 bp, Artificial Sequence
  Oligonucleotide for detection of SNP TSC0004322
ttggatttttagy

SEQ ID NO: 21516 - DNA, 13 bp, Artificial Sequence
  Oligonucleotide for detection of SNP TSC0004322
rctaaaaatccaa

SEQ ID NO: 21517 - DNA, 13 bp, Artificial Sequence
  Oligonucleotide for detection of SNP TSC0004322
ttggacgtttagy

SEQ ID NO: 21518 - DNA, 13 bp, Artificial Sequence
  Oligonucleotide for detection of SNP TSC0004322
rctaaacgtccaa

SEQ ID NO: 21519 - DNA, 13 bp, Artificial Sequence
  Oligonucleotide for detection of SNP TSC0004323
atagatagaaaty

SEQ ID NO: 21520 - DNA, 13 bp, Artificial Sequence
  Oligonucleotide for detection of SNP TSC0004323
ratttctatctat

SEQ ID NO: 21521 - DNA, 13 bp, Artificial Sequence
  Oligonucleotide for detection of SNP TSC0004323
atagatggaaaty

SEQ ID NO: 21522 - DNA, 13 bp, Artificial Sequence
  Oligonucleotide for detection of SNP TSC0004323
ratttccatctat

SEQ ID NO: 21523 - DNA, 13 bp, Artificial Sequence
  Oligonucleotide for detection of SNP TSC0004323
atagacggaaaty

SEQ ID NO: 21524 - DNA, 13 bp, Artificial Sequence
  Oligonucleotide for detection of SNP TSC0004323
ratttccgtctat

SEQ ID NO: 21525 - DNA, 13 bp, Artificial Sequence
  Oligonucleotide for detection of SNP TSC0004323
ggtttttgtttgt

SEQ ID NO: 21526 - DNA, 13 bp, Artificial Sequence
  Oligonucleotide for detection of SNP TSC0004323
acaaacaaaaacc

SEQ ID NO: 21527 - DNA, 13 bp, Artificial Sequence
  Oligonucleotide for detection of SNP TSC0004323
ggttttcgtttgt

SEQ ID NO: 21528 - DNA, 13 bp, Artificial Sequence
  Oligonucleotide for detection of SNP TSC0004323
acaaacgaaaacc

SEQ ID NO: 21529 - DNA, 13 bp, Artificial Sequence
  Oligonucleotide for detection of SNP TSC0004324
tagaatttataay

SEQ ID NO: 21530 - DNA, 13 bp, Artificial Sequence
  Oligonucleotide for detection of SNP TSC0004324
rttataaattcta

SEQ ID NO: 21531 - DNA, 13 bp, Artificial Sequence
  Oligonucleotide for detection of SNP TSC0004324
tagaatatataay

SEQ ID NO: 21532 - DNA, 13 bp, Artificial Sequence
  Oligonucleotide for detection of SNP TSC0004324
rttatatattcta

SEQ ID NO: 21533 - DNA, 13 bp, Artificial Sequence
  Oligonucleotide for detection of SNP TSC0004324
gttatggattttg

SEQ ID NO: 21534 - DNA, 13 bp, Artificial Sequence
  Oligonucleotide for detection of SNP TSC0004324
caaaatccataac

SEQ ID NO: 21535 - DNA, 13 bp, Artificial Sequence
  Oligonucleotide for detection of SNP TSC0004324
gttatgtattttg

SEQ ID NO: 21536 - DNA, 13 bp, Artificial Sequence
  Oligonucleotide for detection of SNP TSC0004324
caaaatacataac

SEQ ID NO: 21537 - DNA, 13 bp, Artificial Sequence
  Oligonucleotide for detection of SNP TSC0004325
tggttgatatgty

SEQ ID NO: 21538 - DNA, 13 bp, Artificial Sequence
  Oligonucleotide for detection of SNP TSC0004325
racatatcaacca

SEQ ID NO: 21539 - DNA, 13 bp, Artificial Sequence
  Oligonucleotide for detection of SNP TSC0004325
tggttggtatgty

SEQ ID NO: 21540 - DNA, 13 bp, Artificial Sequence
  Oligonucleotide for detection of SNP TSC0004325
racataccaacca

SEQ ID NO: 21541 - DNA, 13 bp, Artificial Sequence
  Oligonucleotide for detection of SNP TSC0004327
ttttgatttttty

SEQ ID NO: 21542 - DNA, 13 bp, Artificial Sequence
  Oligonucleotide for detection of SNP TSC0004327
raaaaaatcaaaa

SEQ ID NO: 21543 - DNA, 13 bp, Artificial Sequence
  Oligonucleotide for detection of SNP TSC0004327
ttttgagttttty

SEQ ID NO: 21544 - DNA, 13 bp, Artificial Sequence
  Oligonucleotide for detection of SNP TSC0004327
raaaaactcaaaa

SEQ ID NO: 21545 - DNA, 13 bp, Artificial Sequence
  Oligonucleotide for detection of SNP TSC0004327
gagagggttaagg

SEQ ID NO: 21546 - DNA, 13 bp, Artificial Sequence
  Oligonucleotide for detection of SNP TSC0004327
ccttaaccctctc

SEQ ID NO: 21547 - DNA, 13 bp, Artificial Sequence
  Oligonucleotide for detection of SNP TSC0004327
gagaggtttaagg

SEQ ID NO: 21548 - DNA, 13 bp, Artificial Sequence
  Oligonucleotide for detection of SNP TSC0004327
ccttaaacctctc

SEQ ID NO: 21549 - DNA, 13 bp, Artificial Sequence
  Oligonucleotide for detection of SNP TSC0004328
gtagatatagtaa

SEQ ID NO: 21550 - DNA, 13 bp, Artificial Sequence
  Oligonucleotide for detection of SNP TSC0004328
ttactatatctac

SEQ ID NO: 21551 - DNA, 13 bp, Artificial Sequence
  Oligonucleotide for detection of SNP TSC0004328
gtagatgtagtaa

SEQ ID NO: 21552 - DNA, 13 bp, Artificial Sequence
  Oligonucleotide for detection of SNP TSC0004328
ttactacatctac

SEQ ID NO: 21553 - DNA, 13 bp, Artificial Sequence
  Oligonucleotide for detection of SNP TSC0004329
tgtgttaaatttt

SEQ ID NO: 21554 - DNA, 13 bp, Artificial Sequence
  Oligonucleotide for detection of SNP TSC0004329
aaaatttaacaca

SEQ ID NO: 21555 - DNA, 13 bp, Artificial Sequence
  Oligonucleotide for detection of SNP TSC0004329
tgtgttgaatttt

SEQ ID NO: 21556 - DNA, 13 bp, Artificial Sequence
  Oligonucleotide for detection of SNP TSC0004329
aaaattcaacaca

SEQ ID NO: 21557 - DNA, 13 bp, Artificial Sequence
  Oligonucleotide for detection of SNP TSC0004329
tgcgttaaatttt

SEQ ID NO: 21558 - DNA, 13 bp, Artificial Sequence
  Oligonucleotide for detection of SNP TSC0004329
aaaatttaacgca

SEQ ID NO: 21559 - DNA, 13 bp, Artificial Sequence
  Oligonucleotide for detection of SNP TSC0004329
tgcgttgaatttt

SEQ ID NO: 21560 - DNA, 13 bp, Artificial Sequence
  Oligonucleotide for detection of SNP TSC0004329
aaaattcaacgca

SEQ ID NO: 21561 - DNA, 13 bp, Artificial Sequence
  Oligonucleotide for detection of SNP TSC0004330
gaaagaagaaagg

SEQ ID NO: 21562 - DNA, 13 bp, Artificial Sequence
  Oligonucleotide for detection of SNP TSC0004330
cctttcttctttc

SEQ ID NO: 21563 - DNA, 13 bp, Artificial Sequence
  Oligonucleotide for detection of SNP TSC0004330
gaaagatgaaagg

SEQ ID NO: 21564 - DNA, 13 bp, Artificial Sequence
  Oligonucleotide for detection of SNP TSC0004330
cctttcatctttc

SEQ ID NO: 21565 - DNA, 13 bp, Artificial Sequence
  Oligonucleotide for detection of SNP TSC0004330
gaaagacgaaagg

SEQ ID NO: 21566 - DNA, 13 bp, Artificial Sequence
  Oligonucleotide for detection of SNP TSC0004330
cctttcgtctttc

SEQ ID NO: 21567 - DNA, 13 bp, Artificial Sequence
  Oligonucleotide for detection of SNP TSC0004331
tagatataggtga

SEQ ID NO: 21568 - DNA, 13 bp, Artificial Sequence
  Oligonucleotide for detection of SNP TSC0004331
tcacctatatcta

SEQ ID NO: 21569 - DNA, 13 bp, Artificial Sequence
  Oligonucleotide for detection of SNP TSC0004331
tagataaaggtga

SEQ ID NO: 21570 - DNA, 13 bp, Artificial Sequence
  Oligonucleotide for detection of SNP TSC0004331
tcacctttatcta

SEQ ID NO: 21571 - DNA, 13 bp, Artificial Sequence
  Oligonucleotide for detection of SNP TSC0004331
ttatttatattta

SEQ ID NO: 21572 - DNA, 13 bp, Artificial Sequence
  Oligonucleotide for detection of SNP TSC0004331
taaatataaataa

SEQ ID NO: 21573 - DNA, 13 bp, Artificial Sequence
  Oligonucleotide for detection of SNP TSC0004331
ttatttttattta

SEQ ID NO: 21574 - DNA, 13 bp, Artificial Sequence
  Oligonucleotide for detection of SNP TSC0004331
taaataaaaataa

SEQ ID NO: 21575 - DNA, 13 bp, Artificial Sequence
  Oligonucleotide for detection of SNP TSC0004332
tattatatataag

SEQ ID NO: 21576 - DNA, 13 bp, Artificial Sequence
  Oligonucleotide for detection of SNP TSC0004332
cttatatataata

SEQ ID NO: 21577 - DNA, 13 bp, Artificial Sequence
  Oligonucleotide for detection of SNP TSC0004332
tattatttataag

SEQ ID NO: 21578 - DNA, 13 bp, Artificial Sequence
  Oligonucleotide for detection of SNP TSC0004332
cttataaataata

SEQ ID NO: 21579 - DNA, 13 bp, Artificial Sequence
  Oligonucleotide for detection of SNP TSC0004332
tttatgtataata

SEQ ID NO: 21580 - DNA, 13 bp, Artificial Sequence
  Oligonucleotide for detection of SNP TSC0004332
tattatacataaa

SEQ ID NO: 21581 - DNA, 13 bp, Artificial Sequence
  Oligonucleotide for detection of SNP TSC0004332
tttatggataata

SEQ ID NO: 21582 - DNA, 13 bp, Artificial Sequence
  Oligonucleotide for detection of SNP TSC0004332
tattatccataaa

SEQ ID NO: 21583 - DNA, 13 bp, Artificial Sequence
  Oligonucleotide for detection of SNP TSC0004333
taggtaagtaagy

SEQ ID NO: 21584 - DNA, 13 bp, Artificial Sequence
  Oligonucleotide for detection of SNP TSC0004333
rcttacttaccta

SEQ ID NO: 21585 - DNA, 13 bp, Artificial Sequence
  Oligonucleotide for detection of SNP TSC0004333
taggtatgtaagy

SEQ ID NO: 21586 - DNA, 13 bp, Artificial Sequence
  Oligonucleotide for detection of SNP TSC0004333
rcttacataccta

SEQ ID NO: 21587 - DNA, 13 bp, Artificial Sequence
  Oligonucleotide for detection of SNP TSC0004333
gtttgtttgtttg

SEQ ID NO: 21588 - DNA, 13 bp, Artificial Sequence
  Oligonucleotide for detection of SNP TSC0004333
caaacaaacaaac

SEQ ID NO: 21589 - DNA, 13 bp, Artificial Sequence
  Oligonucleotide for detection of SNP TSC0004333
gtttgtatgtttg

SEQ ID NO: 21590 - DNA, 13 bp, Artificial Sequence
  Oligonucleotide for detection of SNP TSC0004333
caaacatacaaac

SEQ ID NO: 21591 - DNA, 13 bp, Artificial Sequence
  Oligonucleotide for detection of SNP TSC0004334
atttttgttttay

SEQ ID NO: 21592 - DNA, 13 bp, Artificial Sequence
  Oligonucleotide for detection of SNP TSC0004334
rtaaaacaaaaat

SEQ ID NO: 21593 - DNA, 13 bp, Artificial Sequence
  Oligonucleotide for detection of SNP TSC0004334
attttttttttay

SEQ ID NO: 21594 - DNA, 13 bp, Artificial Sequence
  Oligonucleotide for detection of SNP TSC0004334
rtaaaaaaaaaat

SEQ ID NO: 21595 - DNA, 13 bp, Artificial Sequence
  Oligonucleotide for detection of SNP TSC0004334
attttcgttttay

SEQ ID NO: 21596 - DNA, 13 bp, Artificial Sequence
  Oligonucleotide for detection of SNP TSC0004334
rtaaaacgaaaat

SEQ ID NO: 21597 - DNA, 13 bp, Artificial Sequence
  Oligonucleotide for detection of SNP TSC0004334
gtaaaatgaaaat

SEQ ID NO: 21598 - DNA, 13 bp, Artificial Sequence
  Oligonucleotide for detection of SNP TSC0004334
attttcattttac

SEQ ID NO: 21599 - DNA, 13 bp, Artificial Sequence
  Oligonucleotide for detection of SNP TSC0004334
gtaaaaagaaaat

SEQ ID NO: 21600 - DNA, 13 bp, Artificial Sequence
  Oligonucleotide for detection of SNP TSC0004334
attttctttttac

SEQ ID NO: 21601 - DNA, 13 bp, Artificial Sequence
  Oligonucleotide for detection of SNP TSC0004334
gtaaaacgaaaat

SEQ ID NO: 21602 - DNA, 13 bp, Artificial Sequence
  Oligonucleotide for detection of SNP TSC0004334
attttcgttttac

SEQ ID NO: 21603 - DNA, 13 bp, Artificial Sequence
  Oligonucleotide for detection of SNP TSC0004335
ttaggagtatagg

SEQ ID NO: 21604 - DNA, 13 bp, Artificial Sequence
  Oligonucleotide for detection of SNP TSC0004335
cctatactcctaa

SEQ ID NO: 21605 - DNA, 13 bp, Artificial Sequence
  Oligonucleotide for detection of SNP TSC0004335
ttaggaatatagg

SEQ ID NO: 21606 - DNA, 13 bp, Artificial Sequence
  Oligonucleotide for detection of SNP TSC0004335
cctatattcctaa

SEQ ID NO: 21607 - DNA, 13 bp, Artificial Sequence
  Oligonucleotide for detection of SNP TSC0004336
ttaaaggaagtga

SEQ ID NO: 21608 - DNA, 13 bp, Artificial Sequence
  Oligonucleotide for detection of SNP TSC0004336
tcacttcctttaa

SEQ ID NO: 21609 - DNA, 13 bp, Artificial Sequence
  Oligonucleotide for detection of SNP TSC0004336
ttaaagaaagtga

SEQ ID NO: 21610 - DNA, 13 bp, Artificial Sequence
  Oligonucleotide for detection of SNP TSC0004336
tcactttctttaa

SEQ ID NO: 21611 - DNA, 13 bp, Artificial Sequence
  Oligonucleotide for detection of SNP TSC0004337
atgattattagtg

SEQ ID NO: 21612 - DNA, 13 bp, Artificial Sequence
  Oligonucleotide for detection of SNP TSC0004337
cactaataatcat

SEQ ID NO: 21613 - DNA, 13 bp, Artificial Sequence
  Oligonucleotide for detection of SNP TSC0004337
atgattgttagtg

SEQ ID NO: 21614 - DNA, 13 bp, Artificial Sequence
  Oligonucleotide for detection of SNP TSC0004337
cactaacaatcat

SEQ ID NO: 21615 - DNA, 13 bp, Artificial Sequence
  Oligonucleotide for detection of SNP TSC0004337
atgatcgttagtg

SEQ ID NO: 21616 - DNA, 13 bp, Artificial Sequence
  Oligonucleotide for detection of SNP TSC0004337
cactaacgatcat

SEQ ID NO: 21617 - DNA, 13 bp, Artificial Sequence
  Oligonucleotide for detection of SNP TSC0004337
tattggtgattat

SEQ ID NO: 21618 - DNA, 13 bp, Artificial Sequence
  Oligonucleotide for detection of SNP TSC0004337
ataatcaccaata

SEQ ID NO: 21619 - DNA, 13 bp, Artificial Sequence
  Oligonucleotide for detection of SNP TSC0004337
tattggcgattat

SEQ ID NO: 21620 - DNA, 13 bp, Artificial Sequence
  Oligonucleotide for detection of SNP TSC0004337
ataatcgccaata

SEQ ID NO: 21621 - DNA, 13 bp, Artificial Sequence
  Oligonucleotide for detection of SNP TSC0004338
ttttttgaatatg

SEQ ID NO: 21622 - DNA, 13 bp, Artificial Sequence
  Oligonucleotide for detection of SNP TSC0004338
catattcaaaaaa

SEQ ID NO: 21623 - DNA, 13 bp, Artificial Sequence
  Oligonucleotide for detection of SNP TSC0004338
tttttttaatatg

SEQ ID NO: 21624 - DNA, 13 bp, Artificial Sequence
  Oligonucleotide for detection of SNP TSC0004338
catattaaaaaaa

SEQ ID NO: 21625 - DNA, 13 bp, Artificial Sequence
  Oligonucleotide for detection of SNP TSC0004338
ttttttgaatacg

SEQ ID NO: 21626 - DNA, 13 bp, Artificial Sequence
  Oligonucleotide for detection of SNP TSC0004338
cgtattcaaaaaa

SEQ ID NO: 21627 - DNA, 13 bp, Artificial Sequence
  Oligonucleotide for detection of SNP TSC0004338
tttttttaatacg

SEQ ID NO: 21628 - DNA, 13 bp, Artificial Sequence
  Oligonucleotide for detection of SNP TSC0004338
cgtattaaaaaaa

SEQ ID NO: 21629 - DNA, 13 bp, Artificial Sequence
  Oligonucleotide for detection of SNP TSC0004338
tgtatttaagaga

SEQ ID NO: 21630 - DNA, 13 bp, Artificial Sequence
  Oligonucleotide for detection of SNP TSC0004338
tctcttaaataca

SEQ ID NO: 21631 - DNA, 13 bp, Artificial Sequence
  Oligonucleotide for detection of SNP TSC0004338
tgtattgaagaga

SEQ ID NO: 21632 - DNA, 13 bp, Artificial Sequence
  Oligonucleotide for detection of SNP TSC0004338
tctcttcaataca

SEQ ID NO: 21633 - DNA, 13 bp, Artificial Sequence
  Oligonucleotide for detection of SNP TSC0004338
cgtatttaagaga

SEQ ID NO: 21634 - DNA, 13 bp, Artificial Sequence
  Oligonucleotide for detection of SNP TSC0004338
tctcttaaatacg

SEQ ID NO: 21635 - DNA, 13 bp, Artificial Sequence
  Oligonucleotide for detection of SNP TSC0004338
cgtattgaagaga

SEQ ID NO: 21636 - DNA, 13 bp, Artificial Sequence
  Oligonucleotide for detection of SNP TSC0004338
tctcttcaatacg

SEQ ID NO: 21637 - DNA, 13 bp, Artificial Sequence
  Oligonucleotide for detection of SNP TSC0004339
tatttggggtgga

SEQ ID NO: 21638 - DNA, 13 bp, Artificial Sequence
  Oligonucleotide for detection of SNP TSC0004339
tccaccccaaata

SEQ ID NO: 21639 - DNA, 13 bp, Artificial Sequence
  Oligonucleotide for detection of SNP TSC0004339
tatttgtggtgga

SEQ ID NO: 21640 - DNA, 13 bp, Artificial Sequence
  Oligonucleotide for detection of SNP TSC0004339
tccaccacaaata

SEQ ID NO: 21641 - DNA, 13 bp, Artificial Sequence
  Oligonucleotide for detection of SNP TSC0004339
tatttgcggtgga

SEQ ID NO: 21642 - DNA, 13 bp, Artificial Sequence
  Oligonucleotide for detection of SNP TSC0004339
tccaccgcaaata

SEQ ID NO: 21643 - DNA, 13 bp, Artificial Sequence
  Oligonucleotide for detection of SNP TSC0004339
tttattttaaata

SEQ ID NO: 21644 - DNA, 13 bp, Artificial Sequence
  Oligonucleotide for detection of SNP TSC0004339
tatttaaaataaa

SEQ ID NO: 21645 - DNA, 13 bp, Artificial Sequence
  Oligonucleotide for detection of SNP TSC0004339
tttattgtaaata

SEQ ID NO: 21646 - DNA, 13 bp, Artificial Sequence
  Oligonucleotide for detection of SNP TSC0004339
tatttacaataaa

SEQ ID NO: 21647 - DNA, 13 bp, Artificial Sequence
  Oligonucleotide for detection of SNP TSC0004339
tttatcgtaaata

SEQ ID NO: 21648 - DNA, 13 bp, Artificial Sequence
  Oligonucleotide for detection of SNP TSC0004339
tatttacgataaa

SEQ ID NO: 21649 - DNA, 13 bp, Artificial Sequence
  Oligonucleotide for detection of SNP TSC0004340
tatgaaattagga

SEQ ID NO: 21650 - DNA, 13 bp, Artificial Sequence
  Oligonucleotide for detection of SNP TSC0004340
tcctaatttcata

SEQ ID NO: 21651 - DNA, 13 bp, Artificial Sequence
  Oligonucleotide for detection of SNP TSC0004340
tatgaagttagga

SEQ ID NO: 21652 - DNA, 13 bp, Artificial Sequence
  Oligonucleotide for detection of SNP TSC0004340
tcctaacttcata

SEQ ID NO: 21653 - DNA, 13 bp, Artificial Sequence
  Oligonucleotide for detection of SNP TSC0004340
tacgaaattagga

SEQ ID NO: 21654 - DNA, 13 bp, Artificial Sequence
  Oligonucleotide for detection of SNP TSC0004340
tcctaatttcgta

SEQ ID NO: 21655 - DNA, 13 bp, Artificial Sequence
  Oligonucleotide for detection of SNP TSC0004340
tacgaagttagga

SEQ ID NO: 21656 - DNA, 13 bp, Artificial Sequence
  Oligonucleotide for detection of SNP TSC0004340
tcctaacttcgta

SEQ ID NO: 21657 - DNA, 13 bp, Artificial Sequence
  Oligonucleotide for detection of SNP TSC0004341
atttgaggagtat

SEQ ID NO: 21658 - DNA, 13 bp, Artificial Sequence
  Oligonucleotide for detection of SNP TSC0004341
atactcctcaaat

SEQ ID NO: 21659 - DNA, 13 bp, Artificial Sequence
  Oligonucleotide for detection of SNP TSC0004341
atttgaagagtat

SEQ ID NO: 21660 - DNA, 13 bp, Artificial Sequence
  Oligonucleotide for detection of SNP TSC0004341
atactcttcaaat

SEQ ID NO: 21661 - DNA, 13 bp, Artificial Sequence
  Oligonucleotide for detection of SNP TSC0004341
attcgaggagtat

SEQ ID NO: 21662 - DNA, 13 bp, Artificial Sequence
  Oligonucleotide for detection of SNP TSC0004341
atactcctcgaat

SEQ ID NO: 21663 - DNA, 13 bp, Artificial Sequence
  Oligonucleotide for detection of SNP TSC0004341
attcgaagagtat

SEQ ID NO: 21664 - DNA, 13 bp, Artificial Sequence
  Oligonucleotide for detection of SNP TSC0004341
atactcttcgaat

SEQ ID NO: 21665 - DNA, 13 bp, Artificial Sequence
  Oligonucleotide for detection of SNP TSC0004342
gttagtaggaata

SEQ ID NO: 21666 - DNA, 13 bp, Artificial Sequence
  Oligonucleotide for detection of SNP TSC0004342
tattcctactaac

SEQ ID NO: 21667 - DNA, 13 bp, Artificial Sequence
  Oligonucleotide for detection of SNP TSC0004342
gttagtgggaata

SEQ ID NO: 21668 - DNA, 13 bp, Artificial Sequence
  Oligonucleotide for detection of SNP TSC0004342
tattcccactaac

SEQ ID NO: 21669 - DNA, 13 bp, Artificial Sequence
  Oligonucleotide for detection of SNP TSC0004342
gttagcgggaata

SEQ ID NO: 21670 - DNA, 13 bp, Artificial Sequence
  Oligonucleotide for detection of SNP TSC0004342
tattcccgctaac

SEQ ID NO: 21671 - DNA, 13 bp, Artificial Sequence
  Oligonucleotide for detection of SNP TSC0004342
tgtttttgttgay

SEQ ID NO: 21672 - DNA, 13 bp, Artificial Sequence
  Oligonucleotide for detection of SNP TSC0004342
rtcaacaaaaaca

SEQ ID NO: 21673 - DNA, 13 bp, Artificial Sequence
  Oligonucleotide for detection of SNP TSC0004342
tgttttcgttgay

SEQ ID NO: 21674 - DNA, 13 bp, Artificial Sequence
  Oligonucleotide for detection of SNP TSC0004342
rtcaacgaaaaca

SEQ ID NO: 21675 - DNA, 13 bp, Artificial Sequence
  Oligonucleotide for detection of SNP TSC0004343
atttttgttattt

SEQ ID NO: 21676 - DNA, 13 bp, Artificial Sequence
  Oligonucleotide for detection of SNP TSC0004343
aaataacaaaaat

SEQ ID NO: 21677 - DNA, 13 bp, Artificial Sequence
  Oligonucleotide for detection of SNP TSC0004344
gattttattttta

SEQ ID NO: 21678 - DNA, 13 bp, Artificial Sequence
  Oligonucleotide for detection of SNP TSC0004344
taaaaataaaatc

SEQ ID NO: 21679 - DNA, 13 bp, Artificial Sequence
  Oligonucleotide for detection of SNP TSC0004344
gattttgttttta

SEQ ID NO: 21680 - DNA, 13 bp, Artificial Sequence
  Oligonucleotide for detection of SNP TSC0004344
taaaaacaaaatc

SEQ ID NO: 21681 - DNA, 13 bp, Artificial Sequence
  Oligonucleotide for detection of SNP TSC0004344
gatttcgttttta

SEQ ID NO: 21682 - DNA, 13 bp, Artificial Sequence
  Oligonucleotide for detection of SNP TSC0004344
taaaaacgaaatc

SEQ ID NO: 21683 - DNA, 13 bp, Artificial Sequence
  Oligonucleotide for detection of SNP TSC0004344
tgggggtgggaty

SEQ ID NO: 21684 - DNA, 13 bp, Artificial Sequence
  Oligonucleotide for detection of SNP TSC0004344
ratcccaccccca

SEQ ID NO: 21685 - DNA, 13 bp, Artificial Sequence
  Oligonucleotide for detection of SNP TSC0004344
tgggggcgggaty

SEQ ID NO: 21686 - DNA, 13 bp, Artificial Sequence
  Oligonucleotide for detection of SNP TSC0004344
ratcccgccccca

SEQ ID NO: 21687 - DNA, 13 bp, Artificial Sequence
  Oligonucleotide for detection of SNP TSC0004345
taggtacgtaagy

SEQ ID NO: 21688 - DNA, 13 bp, Artificial Sequence
  Oligonucleotide for detection of SNP TSC0004345
rcttacgtaccta

SEQ ID NO: 21689 - DNA, 13 bp, Artificial Sequence
  Oligonucleotide for detection of SNP TSC0004345
gtttgtgtgtttg

SEQ ID NO: 21690 - DNA, 13 bp, Artificial Sequence
  Oligonucleotide for detection of SNP TSC0004345
caaacacacaaac

SEQ ID NO: 21691 - DNA, 13 bp, Artificial Sequence
  Oligonucleotide for detection of SNP TSC0004345
gtttgcgtgtttg

SEQ ID NO: 21692 - DNA, 13 bp, Artificial Sequence
  Oligonucleotide for detection of SNP TSC0004345
caaacacgcaaac

SEQ ID NO: 21693 - DNA, 13 bp, Artificial Sequence
  Oligonucleotide for detection of SNP TSC0004346
gagttaaggatty

SEQ ID NO: 21694 - DNA, 13 bp, Artificial Sequence
  Oligonucleotide for detection of SNP TSC0004346
raatccttaactc

SEQ ID NO: 21695 - DNA, 13 bp, Artificial Sequence
  Oligonucleotide for detection of SNP TSC0004346
gagttagggatty

SEQ ID NO: 21696 - DNA, 13 bp, Artificial Sequence
  Oligonucleotide for detection of SNP TSC0004346
raatccctaactc

SEQ ID NO: 21697 - DNA, 13 bp, Artificial Sequence
  Oligonucleotide for detection of SNP TSC0004347
taagtttggtgty

SEQ ID NO: 21698 - DNA, 13 bp, Artificial Sequence
  Oligonucleotide for detection of SNP TSC0004347
racaccaaactta

SEQ ID NO: 21699 - DNA, 13 bp, Artificial Sequence
  Oligonucleotide for detection of SNP TSC0004347
taagttcggtgty

SEQ ID NO: 21700 - DNA, 13 bp, Artificial Sequence
  Oligonucleotide for detection of SNP TSC0004347
racaccgaactta

SEQ ID NO: 21701 - DNA, 13 bp, Artificial Sequence
  Oligonucleotide for detection of SNP TSC0004347
ggtattgagtttg

SEQ ID NO: 21702 - DNA, 13 bp, Artificial Sequence
  Oligonucleotide for detection of SNP TSC0004347
caaactcaatacc

SEQ ID NO: 21703 - DNA, 13 bp, Artificial Sequence
  Oligonucleotide for detection of SNP TSC0004347
ggtattaagtttg

SEQ ID NO: 21704 - DNA, 13 bp, Artificial Sequence
  Oligonucleotide for detection of SNP TSC0004347
caaacttaatacc

SEQ ID NO: 21705 - DNA, 13 bp, Artificial Sequence
  Oligonucleotide for detection of SNP TSC0004347
ggtatcgagtttg

SEQ ID NO: 21706 - DNA, 13 bp, Artificial Sequence
  Oligonucleotide for detection of SNP TSC0004347
caaactcgatacc

SEQ ID NO: 21707 - DNA, 13 bp, Artificial Sequence
  Oligonucleotide for detection of SNP TSC0004348
tatgtttagttat

SEQ ID NO: 21708 - DNA, 13 bp, Artificial Sequence
  Oligonucleotide for detection of SNP TSC0004348
ataactaaacata

SEQ ID NO: 21709 - DNA, 13 bp, Artificial Sequence
  Oligonucleotide for detection of SNP TSC0004348
tatgttgagttat

SEQ ID NO: 21710 - DNA, 13 bp, Artificial Sequence
  Oligonucleotide for detection of SNP TSC0004348
ataactcaacata

SEQ ID NO: 21711 - DNA, 13 bp, Artificial Sequence
  Oligonucleotide for detection of SNP TSC0004348
tatgtcgagttat

SEQ ID NO: 21712 - DNA, 13 bp, Artificial Sequence
  Oligonucleotide for detection of SNP TSC0004348
ataactcgacata

SEQ ID NO: 21713 - DNA, 13 bp, Artificial Sequence
  Oligonucleotide for detection of SNP TSC0004348
atagttgggtatg

SEQ ID NO: 21714 - DNA, 13 bp, Artificial Sequence
  Oligonucleotide for detection of SNP TSC0004348
catacccaactat

SEQ ID NO: 21715 - DNA, 13 bp, Artificial Sequence
  Oligonucleotide for detection of SNP TSC0004348
atagtttggtatg

SEQ ID NO: 21716 - DNA, 13 bp, Artificial Sequence
  Oligonucleotide for detection of SNP TSC0004348
cataccaaactat

SEQ ID NO: 21717 - DNA, 13 bp, Artificial Sequence
  Oligonucleotide for detection of SNP TSC0004348
atagttcggtatg

SEQ ID NO: 21718 - DNA, 13 bp, Artificial Sequence
  Oligonucleotide for detection of SNP TSC0004348
cataccgaactat

SEQ ID NO: 21719 - DNA, 13 bp, Artificial Sequence
  Oligonucleotide for detection of SNP TSC0004349
ggagttggagaty

SEQ ID NO: 21720 - DNA, 13 bp, Artificial Sequence
  Oligonucleotide for detection of SNP TSC0004349
ratctccaactcc

SEQ ID NO: 21721 - DNA, 13 bp, Artificial Sequence
  Oligonucleotide for detection of SNP TSC0004349
ggagtttgagaty

SEQ ID NO: 21722 - DNA, 13 bp, Artificial Sequence
  Oligonucleotide for detection of SNP TSC0004349
ratctcaaactcc

SEQ ID NO: 21723 - DNA, 13 bp, Artificial Sequence
  Oligonucleotide for detection of SNP TSC0004349
ggagttcgagaty

SEQ ID NO: 21724 - DNA, 13 bp, Artificial Sequence
  Oligonucleotide for detection of SNP TSC0004349
ratctcgaactcc

SEQ ID NO: 21725 - DNA, 13 bp, Artificial Sequence
  Oligonucleotide for detection of SNP TSC0004349
ggtttttaattty

SEQ ID NO: 21726 - DNA, 13 bp, Artificial Sequence
  Oligonucleotide for detection of SNP TSC0004349
raaattaaaaacc

SEQ ID NO: 21727 - DNA, 13 bp, Artificial Sequence
  Oligonucleotide for detection of SNP TSC0004349
ggttttgaattty

SEQ ID NO: 21728 - DNA, 13 bp, Artificial Sequence
  Oligonucleotide for detection of SNP TSC0004349
raaattcaaaacc

SEQ ID NO: 21729 - DNA, 13 bp, Artificial Sequence
  Oligonucleotide for detection of SNP TSC0004349
ggtttcgaattty

SEQ ID NO: 21730 - DNA, 13 bp, Artificial Sequence
  Oligonucleotide for detection of SNP TSC0004349
raaattcgaaacc

SEQ ID NO: 21731 - DNA, 13 bp, Artificial Sequence
  Oligonucleotide for detection of SNP TSC0004351
aatgtttggagay

SEQ ID NO: 21732 - DNA, 13 bp, Artificial Sequence
  Oligonucleotide for detection of SNP TSC0004351
rtctccaaacatt

SEQ ID NO: 21733 - DNA, 13 bp, Artificial Sequence
  Oligonucleotide for detection of SNP TSC0004351
aatgttcggagay

SEQ ID NO: 21734 - DNA, 13 bp, Artificial Sequence
  Oligonucleotide for detection of SNP TSC0004351
rtctccgaacatt

SEQ ID NO: 21735 - DNA, 13 bp, Artificial Sequence
  Oligonucleotide for detection of SNP TSC0004351
gtttttaagtatt

SEQ ID NO: 21736 - DNA, 13 bp, Artificial Sequence
  Oligonucleotide for detection of SNP TSC0004351
aatacttaaaaac

SEQ ID NO: 21737 - DNA, 13 bp, Artificial Sequence
  Oligonucleotide for detection of SNP TSC0004351
gtttttgagtatt

SEQ ID NO: 21738 - DNA, 13 bp, Artificial Sequence
  Oligonucleotide for detection of SNP TSC0004351
aatactcaaaaac

SEQ ID NO: 21739 - DNA, 13 bp, Artificial Sequence
  Oligonucleotide for detection of SNP TSC0004351
gttttcgagtatt

SEQ ID NO: 21740 - DNA, 13 bp, Artificial Sequence
  Oligonucleotide for detection of SNP TSC0004351
aatactcgaaaac

SEQ ID NO: 21741 - DNA, 13 bp, Artificial Sequence
  Oligonucleotide for detection of SNP TSC0004352
ggatttatttttt

SEQ ID NO: 21742 - DNA, 13 bp, Artificial Sequence
  Oligonucleotide for detection of SNP TSC0004352
aaaaaataaatcc

SEQ ID NO: 21743 - DNA, 13 bp, Artificial Sequence
  Oligonucleotide for detection of SNP TSC0004352
ggatttgtttttt

SEQ ID NO: 21744 - DNA, 13 bp, Artificial Sequence
  Oligonucleotide for detection of SNP TSC0004352
aaaaaacaaatcc

SEQ ID NO: 21745 - DNA, 13 bp, Artificial Sequence
  Oligonucleotide for detection of SNP TSC0004352
ggattcgtttttt

SEQ ID NO: 21746 - DNA, 13 bp, Artificial Sequence
  Oligonucleotide for detection of SNP TSC0004352
aaaaaacgaatcc

SEQ ID NO: 21747 - DNA, 13 bp, Artificial Sequence
  Oligonucleotide for detection of SNP TSC0004352
aggaagtggatty

SEQ ID NO: 21748 - DNA, 13 bp, Artificial Sequence
  Oligonucleotide for detection of SNP TSC0004352
raatccacttcct

SEQ ID NO: 21749 - DNA, 13 bp, Artificial Sequence
  Oligonucleotide for detection of SNP TSC0004352
aggaagcggatty

SEQ ID NO: 21750 - DNA, 13 bp, Artificial Sequence
  Oligonucleotide for detection of SNP TSC0004352
raatccgcttcct

SEQ ID NO: 21751 - DNA, 13 bp, Artificial Sequence
  Oligonucleotide for detection of SNP TSC0004353
tgttataatgtty

SEQ ID NO: 21752 - DNA, 13 bp, Artificial Sequence
  Oligonucleotide for detection of SNP TSC0004353
raacattataaca

SEQ ID NO: 21753 - DNA, 13 bp, Artificial Sequence
  Oligonucleotide for detection of SNP TSC0004353
tgttatgatgtty

SEQ ID NO: 21754 - DNA, 13 bp, Artificial Sequence
  Oligonucleotide for detection of SNP TSC0004353
raacatcataaca

SEQ ID NO: 21755 - DNA, 13 bp, Artificial Sequence
  Oligonucleotide for detection of SNP TSC0004353
tgttacgatgtty

SEQ ID NO: 21756 - DNA, 13 bp, Artificial Sequence
  Oligonucleotide for detection of SNP TSC0004353
raacatcgtaaca

SEQ ID NO: 21757 - DNA, 13 bp, Artificial Sequence
  Oligonucleotide for detection of SNP TSC0004353
gggtattgtggta

SEQ ID NO: 21758 - DNA, 13 bp, Artificial Sequence
  Oligonucleotide for detection of SNP TSC0004353
taccacaataccc

SEQ ID NO: 21759 - DNA, 13 bp, Artificial Sequence
  Oligonucleotide for detection of SNP TSC0004353
gggtatcgtggta

SEQ ID NO: 21760 - DNA, 13 bp, Artificial Sequence
  Oligonucleotide for detection of SNP TSC0004353
taccacgataccc

SEQ ID NO: 21761 - DNA, 13 bp, Artificial Sequence
  Oligonucleotide for detection of SNP TSC0004354
aaattatgaggty

SEQ ID NO: 21762 - DNA, 13 bp, Artificial Sequence
  Oligonucleotide for detection of SNP TSC0004354
racctcataattt

SEQ ID NO: 21763 - DNA, 13 bp, Artificial Sequence
  Oligonucleotide for detection of SNP TSC0004354
aaattacgaggty

SEQ ID NO: 21764 - DNA, 13 bp, Artificial Sequence
  Oligonucleotide for detection of SNP TSC0004354
racctcgtaattt

SEQ ID NO: 21765 - DNA, 13 bp, Artificial Sequence
  Oligonucleotide for detection of SNP TSC0004354
gattttgtgattt

SEQ ID NO: 21766 - DNA, 13 bp, Artificial Sequence
  Oligonucleotide for detection of SNP TSC0004354
aaatcacaaaatc

SEQ ID NO: 21767 - DNA, 13 bp, Artificial Sequence
  Oligonucleotide for detection of SNP TSC0004354
gattttatgattt

SEQ ID NO: 21768 - DNA, 13 bp, Artificial Sequence
  Oligonucleotide for detection of SNP TSC0004354
aaatcataaaatc

SEQ ID NO: 21769 - DNA, 13 bp, Artificial Sequence
  Oligonucleotide for detection of SNP TSC0004354
gatttcgtgattt

SEQ ID NO: 21770 - DNA, 13 bp, Artificial Sequence
  Oligonucleotide for detection of SNP TSC0004354
aaatcacgaaatc

SEQ ID NO: 21771 - DNA, 13 bp, Artificial Sequence
  Oligonucleotide for detection of SNP TSC0004356
aattgagtgtagy

SEQ ID NO: 21772 - DNA, 13 bp, Artificial Sequence
  Oligonucleotide for detection of SNP TSC0004356
rctacactcaatt

SEQ ID NO: 21773 - DNA, 13 bp, Artificial Sequence
  Oligonucleotide for detection of SNP TSC0004356
aattgaatgtagy

SEQ ID NO: 21774 - DNA, 13 bp, Artificial Sequence
  Oligonucleotide for detection of SNP TSC0004356
rctacattcaatt

SEQ ID NO: 21775 - DNA, 13 bp, Artificial Sequence
  Oligonucleotide for detection of SNP TSC0004356
aatcgagtgtagy

SEQ ID NO: 21776 - DNA, 13 bp, Artificial Sequence
  Oligonucleotide for detection of SNP TSC0004356
rctacactcgatt

SEQ ID NO: 21777 - DNA, 13 bp, Artificial Sequence
  Oligonucleotide for detection of SNP TSC0004356
aatcgaatgtagy

SEQ ID NO: 21778 - DNA, 13 bp, Artificial Sequence
  Oligonucleotide for detection of SNP TSC0004356
rctacattcgatt

SEQ ID NO: 21779 - DNA, 13 bp, Artificial Sequence
  Oligonucleotide for detection of SNP TSC0004357
aggtaatgagagg

SEQ ID NO: 21780 - DNA, 13 bp, Artificial Sequence
  Oligonucleotide for detection of SNP TSC0004357
cctctcattacct

SEQ ID NO: 21781 - DNA, 13 bp, Artificial Sequence
  Oligonucleotide for detection of SNP TSC0004357
aggtaacgagagg

SEQ ID NO: 21782 - DNA, 13 bp, Artificial Sequence
  Oligonucleotide for detection of SNP TSC0004357
cctctcgttacct

SEQ ID NO: 21783 - DNA, 13 bp, Artificial Sequence
  Oligonucleotide for detection of SNP TSC0004357
ttttttgttgttt

SEQ ID NO: 21784 - DNA, 13 bp, Artificial Sequence
  Oligonucleotide for detection of SNP TSC0004357
aaacaacaaaaaa

SEQ ID NO: 21785 - DNA, 13 bp, Artificial Sequence
  Oligonucleotide for detection of SNP TSC0004357
ttttttattgttt

SEQ ID NO: 21786 - DNA, 13 bp, Artificial Sequence
  Oligonucleotide for detection of SNP TSC0004357
aaacaataaaaaa

SEQ ID NO: 21787 - DNA, 13 bp, Artificial Sequence
  Oligonucleotide for detection of SNP TSC0004357
tttttcgttgttt

SEQ ID NO: 21788 - DNA, 13 bp, Artificial Sequence
  Oligonucleotide for detection of SNP TSC0004357
aaacaacgaaaaa

SEQ ID NO: 21789 - DNA, 13 bp, Artificial Sequence
  Oligonucleotide for detection of SNP TSC0004358
aggttttaaaagg

SEQ ID NO: 21790 - DNA, 13 bp, Artificial Sequence
  Oligonucleotide for detection of SNP TSC0004358
ccttttaaaacct

SEQ ID NO: 21791 - DNA, 13 bp, Artificial Sequence
  Oligonucleotide for detection of SNP TSC0004358
aggtttaaaaagg

SEQ ID NO: 21792 - DNA, 13 bp, Artificial Sequence
  Oligonucleotide for detection of SNP TSC0004358
cctttttaaacct

SEQ ID NO: 21793 - DNA, 13 bp, Artificial Sequence
  Oligonucleotide for detection of SNP TSC0004358
ttttttggaattt

SEQ ID NO: 21794 - DNA, 13 bp, Artificial Sequence
  Oligonucleotide for detection of SNP TSC0004358
aaattccaaaaaa

SEQ ID NO: 21795 - DNA, 13 bp, Artificial Sequence
  Oligonucleotide for detection of SNP TSC0004358
tttttttgaattt

SEQ ID NO: 21796 - DNA, 13 bp, Artificial Sequence
  Oligonucleotide for detection of SNP TSC0004358
aaattcaaaaaaa

SEQ ID NO: 21797 - DNA, 13 bp, Artificial Sequence
  Oligonucleotide for detection of SNP TSC0004359
ttgtagtgggttt

SEQ ID NO: 21798 - DNA, 13 bp, Artificial Sequence
  Oligonucleotide for detection of SNP TSC0004359
aaacccactacaa

SEQ ID NO: 21799 - DNA, 13 bp, Artificial Sequence
  Oligonucleotide for detection of SNP TSC0004359
ttgtagcgggttt

SEQ ID NO: 21800 - DNA, 13 bp, Artificial Sequence
  Oligonucleotide for detection of SNP TSC0004359
aaacccgctacaa

SEQ ID NO: 21801 - DNA, 13 bp, Artificial Sequence
  Oligonucleotide for detection of SNP TSC0004359
aggtttattgtag

SEQ ID NO: 21802 - DNA, 13 bp, Artificial Sequence
  Oligonucleotide for detection of SNP TSC0004359
ctacaataaacct

SEQ ID NO: 21803 - DNA, 13 bp, Artificial Sequence
  Oligonucleotide for detection of SNP TSC0004359
aggtttgttgtag

SEQ ID NO: 21804 - DNA, 13 bp, Artificial Sequence
  Oligonucleotide for detection of SNP TSC0004359
ctacaacaaacct

SEQ ID NO: 21805 - DNA, 13 bp, Artificial Sequence
  Oligonucleotide for detection of SNP TSC0004359
aggttcgttgtag

SEQ ID NO: 21806 - DNA, 13 bp, Artificial Sequence
  Oligonucleotide for detection of SNP TSC0004359
ctacaacgaacct

SEQ ID NO: 21807 - DNA, 13 bp, Artificial Sequence
  Oligonucleotide for detection of SNP TSC0004360
tggttatgtgtag

SEQ ID NO: 21808 - DNA, 13 bp, Artificial Sequence
  Oligonucleotide for detection of SNP TSC0004360
ctacacataacca

SEQ ID NO: 21809 - DNA, 13 bp, Artificial Sequence
  Oligonucleotide for detection of SNP TSC0004360
tggttacgtgtag

SEQ ID NO: 21810 - DNA, 13 bp, Artificial Sequence
  Oligonucleotide for detection of SNP TSC0004360
ctacacgtaacca

SEQ ID NO: 21811 - DNA, 13 bp, Artificial Sequence
  Oligonucleotide for detection of SNP TSC0004360
tggttatgcgtag

SEQ ID NO: 21812 - DNA, 13 bp, Artificial Sequence
  Oligonucleotide for detection of SNP TSC0004360
ctacgcataacca

SEQ ID NO: 21813 - DNA, 13 bp, Artificial Sequence
  Oligonucleotide for detection of SNP TSC0004360
tggttacgcgtag

SEQ ID NO: 21814 - DNA, 13 bp, Artificial Sequence
  Oligonucleotide for detection of SNP TSC0004360
ctacgcgtaacca

SEQ ID NO: 21815 - DNA, 13 bp, Artificial Sequence
  Oligonucleotide for detection of SNP TSC0004360
ttgtgtgtggtta

SEQ ID NO: 21816 - DNA, 13 bp, Artificial Sequence
  Oligonucleotide for detection of SNP TSC0004360
taaccacacacaa

SEQ ID NO: 21817 - DNA, 13 bp, Artificial Sequence
  Oligonucleotide for detection of SNP TSC0004360
ttgtgtatggtta

SEQ ID NO: 21818 - DNA, 13 bp, Artificial Sequence
  Oligonucleotide for detection of SNP TSC0004360
taaccatacacaa

SEQ ID NO: 21819 - DNA, 13 bp, Artificial Sequence
  Oligonucleotide for detection of SNP TSC0004360
ttgcgtgtggtta

SEQ ID NO: 21820 - DNA, 13 bp, Artificial Sequence
  Oligonucleotide for detection of SNP TSC0004360
taaccacacgcaa

SEQ ID NO: 21821 - DNA, 13 bp, Artificial Sequence
  Oligonucleotide for detection of SNP TSC0004360
ttgcgtatggtta

SEQ ID NO: 21822 - DNA, 13 bp, Artificial Sequence
  Oligonucleotide for detection of SNP TSC0004360
taaccatacgcaa

SEQ ID NO: 21823 - DNA, 13 bp, Artificial Sequence
  Oligonucleotide for detection of SNP TSC0004360
ttgtgcgtggtta

SEQ ID NO: 21824 - DNA, 13 bp, Artificial Sequence
  Oligonucleotide for detection of SNP TSC0004360
taaccacgcacaa

SEQ ID NO: 21825 - DNA, 13 bp, Artificial Sequence
  Oligonucleotide for detection of SNP TSC0004360
ttgcgcgtggtta

SEQ ID NO: 21826 - DNA, 13 bp, Artificial Sequence
  Oligonucleotide for detection of SNP TSC0004360
taaccacgcgcaa

SEQ ID NO: 21827 - DNA, 13 bp, Artificial Sequence
  Oligonucleotide for detection of SNP TSC0004361
ttaggtttagtaa

SEQ ID NO: 21828 - DNA, 13 bp, Artificial Sequence
  Oligonucleotide for detection of SNP TSC0004361
ttactaaacctaa

SEQ ID NO: 21829 - DNA, 13 bp, Artificial Sequence
  Oligonucleotide for detection of SNP TSC0004361
ttaggtatagtaa

SEQ ID NO: 21830 - DNA, 13 bp, Artificial Sequence
  Oligonucleotide for detection of SNP TSC0004361
ttactatacctaa

SEQ ID NO: 21831 - DNA, 13 bp, Artificial Sequence
  Oligonucleotide for detection of SNP TSC0004361
ttgttgaatttaa

SEQ ID NO: 21832 - DNA, 13 bp, Artificial Sequence
  Oligonucleotide for detection of SNP TSC0004361
ttaaattcaacaa

SEQ ID NO: 21833 - DNA, 13 bp, Artificial Sequence
  Oligonucleotide for detection of SNP TSC0004361
ttgttgtatttaa

SEQ ID NO: 21834 - DNA, 13 bp, Artificial Sequence
  Oligonucleotide for detection of SNP TSC0004361
ttaaatacaacaa

SEQ ID NO: 21835 - DNA, 13 bp, Artificial Sequence
  Oligonucleotide for detection of SNP TSC0004362
ttaatgatatggt

SEQ ID NO: 21836 - DNA, 13 bp, Artificial Sequence
  Oligonucleotide for detection of SNP TSC0004362
accatatcattaa

SEQ ID NO: 21837 - DNA, 13 bp, Artificial Sequence
  Oligonucleotide for detection of SNP TSC0004362
ttaatgttatggt

SEQ ID NO: 21838 - DNA, 13 bp, Artificial Sequence
  Oligonucleotide for detection of SNP TSC0004362
accataacattaa

SEQ ID NO: 21839 - DNA, 13 bp, Artificial Sequence
  Oligonucleotide for detection of SNP TSC0004362
attatgttattag

SEQ ID NO: 21840 - DNA, 13 bp, Artificial Sequence
  Oligonucleotide for detection of SNP TSC0004362
ctaataacataat

SEQ ID NO: 21841 - DNA, 13 bp, Artificial Sequence
  Oligonucleotide for detection of SNP TSC0004362
attatggtattag

SEQ ID NO: 21842 - DNA, 13 bp, Artificial Sequence
  Oligonucleotide for detection of SNP TSC0004362
ctaataccataat

SEQ ID NO: 21843 - DNA, 13 bp, Artificial Sequence
  Oligonucleotide for detection of SNP TSC0004363
aagtttatatgty

SEQ ID NO: 21844 - DNA, 13 bp, Artificial Sequence
  Oligonucleotide for detection of SNP TSC0004363
racatataaactt

SEQ ID NO: 21845 - DNA, 13 bp, Artificial Sequence
  Oligonucleotide for detection of SNP TSC0004364
taattttgtatgy

SEQ ID NO: 21846 - DNA, 13 bp, Artificial Sequence
  Oligonucleotide for detection of SNP TSC0004364
rcatacaaaatta

SEQ ID NO: 21847 - DNA, 13 bp, Artificial Sequence
  Oligonucleotide for detection of SNP TSC0004364
taattttgtacgy

SEQ ID NO: 21848 - DNA, 13 bp, Artificial Sequence
  Oligonucleotide for detection of SNP TSC0004364
rcgtacaaaatta

SEQ ID NO: 21849 - DNA, 13 bp, Artificial Sequence
  Oligonucleotide for detection of SNP TSC0004364
taatttcgtatgy

SEQ ID NO: 21850 - DNA, 13 bp, Artificial Sequence
  Oligonucleotide for detection of SNP TSC0004364
rcatacgaaatta

SEQ ID NO: 21851 - DNA, 13 bp, Artificial Sequence
  Oligonucleotide for detection of SNP TSC0004364
taatttcgtacgy

SEQ ID NO: 21852 - DNA, 13 bp, Artificial Sequence
  Oligonucleotide for detection of SNP TSC0004364
rcgtacgaaatta

SEQ ID NO: 21853 - DNA, 13 bp, Artificial Sequence
  Oligonucleotide for detection of SNP TSC0004364
gtgtgtagaattg

SEQ ID NO: 21854 - DNA, 13 bp, Artificial Sequence
  Oligonucleotide for detection of SNP TSC0004364
caattctacacac

SEQ ID NO: 21855 - DNA, 13 bp, Artificial Sequence
  Oligonucleotide for detection of SNP TSC0004364
gtgtgtggaattg

SEQ ID NO: 21856 - DNA, 13 bp, Artificial Sequence
  Oligonucleotide for detection of SNP TSC0004364
caattccacacac

SEQ ID NO: 21857 - DNA, 13 bp, Artificial Sequence
  Oligonucleotide for detection of SNP TSC0004364
gcgtgtagaattg

SEQ ID NO: 21858 - DNA, 13 bp, Artificial Sequence
  Oligonucleotide for detection of SNP TSC0004364
caattctacacgc

SEQ ID NO: 21859 - DNA, 13 bp, Artificial Sequence
  Oligonucleotide for detection of SNP TSC0004364
gcgtgtggaattg

SEQ ID NO: 21860 - DNA, 13 bp, Artificial Sequence
  Oligonucleotide for detection of SNP TSC0004364
caattccacacgc

SEQ ID NO: 21861 - DNA, 13 bp, Artificial Sequence
  Oligonucleotide for detection of SNP TSC0004364
gtgtgcggaattg

SEQ ID NO: 21862 - DNA, 13 bp, Artificial Sequence
  Oligonucleotide for detection of SNP TSC0004364
caattccgcacac

SEQ ID NO: 21863 - DNA, 13 bp, Artificial Sequence
  Oligonucleotide for detection of SNP TSC0004364
gcgtgcggaattg

SEQ ID NO: 21864 - DNA, 13 bp, Artificial Sequence
  Oligonucleotide for detection of SNP TSC0004364
caattccgcacgc

SEQ ID NO: 21865 - DNA, 13 bp, Artificial Sequence
  Oligonucleotide for detection of SNP TSC0004365
agtagtatggagt

SEQ ID NO: 21866 - DNA, 13 bp, Artificial Sequence
  Oligonucleotide for detection of SNP TSC0004365
actccatactact

SEQ ID NO: 21867 - DNA, 13 bp, Artificial Sequence
  Oligonucleotide for detection of SNP TSC0004365
agtagtgtggagt

SEQ ID NO: 21868 - DNA, 13 bp, Artificial Sequence
  Oligonucleotide for detection of SNP TSC0004365
actccacactact

SEQ ID NO: 21869 - DNA, 13 bp, Artificial Sequence
  Oligonucleotide for detection of SNP TSC0004365
agtagcgtggagt

SEQ ID NO: 21870 - DNA, 13 bp, Artificial Sequence
  Oligonucleotide for detection of SNP TSC0004365
actccacgctact

SEQ ID NO: 21871 - DNA, 13 bp, Artificial Sequence
  Oligonucleotide for detection of SNP TSC0004365
attttatgttgtt

SEQ ID NO: 21872 - DNA, 13 bp, Artificial Sequence
  Oligonucleotide for detection of SNP TSC0004365
aacaacataaaat

SEQ ID NO: 21873 - DNA, 13 bp, Artificial Sequence
  Oligonucleotide for detection of SNP TSC0004365
attttacgttgtt

SEQ ID NO: 21874 - DNA, 13 bp, Artificial Sequence
  Oligonucleotide for detection of SNP TSC0004365
aacaacgtaaaat

SEQ ID NO: 21875 - DNA, 13 bp, Artificial Sequence
  Oligonucleotide for detection of SNP TSC0004366
attgaagaggtat

SEQ ID NO: 21876 - DNA, 13 bp, Artificial Sequence
  Oligonucleotide for detection of SNP TSC0004366
atacctcttcaat

SEQ ID NO: 21877 - DNA, 13 bp, Artificial Sequence
  Oligonucleotide for detection of SNP TSC0004366
attgaaaaggtat

SEQ ID NO: 21878 - DNA, 13 bp, Artificial Sequence
  Oligonucleotide for detection of SNP TSC0004366
ataccttttcaat

SEQ ID NO: 21879 - DNA, 13 bp, Artificial Sequence
  Oligonucleotide for detection of SNP TSC0004367
ttattagttttta

SEQ ID NO: 21880 - DNA, 13 bp, Artificial Sequence
  Oligonucleotide for detection of SNP TSC0004367
taaaaactaataa

SEQ ID NO: 21881 - DNA, 13 bp, Artificial Sequence
  Oligonucleotide for detection of SNP TSC0004367
ttattaattttta

SEQ ID NO: 21882 - DNA, 13 bp, Artificial Sequence
  Oligonucleotide for detection of SNP TSC0004367
taaaaattaataa

SEQ ID NO: 21883 - DNA, 13 bp, Artificial Sequence
  Oligonucleotide for detection of SNP TSC0004368
gtaataatgaagg

SEQ ID NO: 21884 - DNA, 13 bp, Artificial Sequence
  Oligonucleotide for detection of SNP TSC0004368
ccttcattattac

SEQ ID NO: 21885 - DNA, 13 bp, Artificial Sequence
  Oligonucleotide for detection of SNP TSC0004368
gtaatagtgaagg

SEQ ID NO: 21886 - DNA, 13 bp, Artificial Sequence
  Oligonucleotide for detection of SNP TSC0004368
ccttcactattac

SEQ ID NO: 21887 - DNA, 13 bp, Artificial Sequence
  Oligonucleotide for detection of SNP TSC0004369
tgtaattgtttty

SEQ ID NO: 21888 - DNA, 13 bp, Artificial Sequence
  Oligonucleotide for detection of SNP TSC0004369
raaaacaattaca

SEQ ID NO: 21889 - DNA, 13 bp, Artificial Sequence
  Oligonucleotide for detection of SNP TSC0004369
tgtaatcgtttty

SEQ ID NO: 21890 - DNA, 13 bp, Artificial Sequence
  Oligonucleotide for detection of SNP TSC0004369
raaaacgattaca

SEQ ID NO: 21891 - DNA, 13 bp, Artificial Sequence
  Oligonucleotide for detection of SNP TSC0004369
ggaaatgattgta

SEQ ID NO: 21892 - DNA, 13 bp, Artificial Sequence
  Oligonucleotide for detection of SNP TSC0004369
tacaatcatttcc

SEQ ID NO: 21893 - DNA, 13 bp, Artificial Sequence
  Oligonucleotide for detection of SNP TSC0004369
ggaaataattgta

SEQ ID NO: 21894 - DNA, 13 bp, Artificial Sequence
  Oligonucleotide for detection of SNP TSC0004369
tacaattatttcc

SEQ ID NO: 21895 - DNA, 13 bp, Artificial Sequence
  Oligonucleotide for detection of SNP TSC0004369
ggaaacgattgta

SEQ ID NO: 21896 - DNA, 13 bp, Artificial Sequence
  Oligonucleotide for detection of SNP TSC0004369
tacaatcgtttcc

SEQ ID NO: 21897 - DNA, 13 bp, Artificial Sequence
  Oligonucleotide for detection of SNP TSC0004370
ttagatagttttt

SEQ ID NO: 21898 - DNA, 13 bp, Artificial Sequence
  Oligonucleotide for detection of SNP TSC0004370
aaaaactatctaa

SEQ ID NO: 21899 - DNA, 13 bp, Artificial Sequence
  Oligonucleotide for detection of SNP TSC0004370
ttagatggttttt

SEQ ID NO: 21900 - DNA, 13 bp, Artificial Sequence
  Oligonucleotide for detection of SNP TSC0004370
aaaaaccatctaa

SEQ ID NO: 21901 - DNA, 13 bp, Artificial Sequence
  Oligonucleotide for detection of SNP TSC0004370
ttagacggttttt

SEQ ID NO: 21902 - DNA, 13 bp, Artificial Sequence
  Oligonucleotide for detection of SNP TSC0004370
aaaaaccgtctaa

SEQ ID NO: 21903 - DNA, 13 bp, Artificial Sequence
  Oligonucleotide for detection of SNP TSC0004370
aaaggttgtttaa

SEQ ID NO: 21904 - DNA, 13 bp, Artificial Sequence
  Oligonucleotide for detection of SNP TSC0004370
ttaaacaaccttt

SEQ ID NO: 21905 - DNA, 13 bp, Artificial Sequence
  Oligonucleotide for detection of SNP TSC0004370
aaaggtcgtttaa

SEQ ID NO: 21906 - DNA, 13 bp, Artificial Sequence
  Oligonucleotide for detection of SNP TSC0004370
ttaaacgaccttt

SEQ ID NO: 21907 - DNA, 13 bp, Artificial Sequence
  Oligonucleotide for detection of SNP TSC0004371
aagttggttagat

SEQ ID NO: 21908 - DNA, 13 bp, Artificial Sequence
  Oligonucleotide for detection of SNP TSC0004371
atctaaccaactt

SEQ ID NO: 21909 - DNA, 13 bp, Artificial Sequence
  Oligonucleotide for detection of SNP TSC0004371
aagttgattagat

SEQ ID NO: 21910 - DNA, 13 bp, Artificial Sequence
  Oligonucleotide for detection of SNP TSC0004371
atctaatcaactt

SEQ ID NO: 21911 - DNA, 13 bp, Artificial Sequence
  Oligonucleotide for detection of SNP TSC0004372
ggttggataggty

SEQ ID NO: 21912 - DNA, 13 bp, Artificial Sequence
  Oligonucleotide for detection of SNP TSC0004372
racctatccaacc

SEQ ID NO: 21913 - DNA, 13 bp, Artificial Sequence
  Oligonucleotide for detection of SNP TSC0004372
ggttggttaggty

SEQ ID NO: 21914 - DNA, 13 bp, Artificial Sequence
  Oligonucleotide for detection of SNP TSC0004372
racctaaccaacc

SEQ ID NO: 21915 - DNA, 13 bp, Artificial Sequence
  Oligonucleotide for detection of SNP TSC0004372
ggtttgtttagty

SEQ ID NO: 21916 - DNA, 13 bp, Artificial Sequence
  Oligonucleotide for detection of SNP TSC0004372
ractaaacaaacc

SEQ ID NO: 21917 - DNA, 13 bp, Artificial Sequence
  Oligonucleotide for detection of SNP TSC0004372
ggtttggttagty

SEQ ID NO: 21918 - DNA, 13 bp, Artificial Sequence
  Oligonucleotide for detection of SNP TSC0004372
ractaaccaaacc

SEQ ID NO: 21919 - DNA, 13 bp, Artificial Sequence
  Oligonucleotide for detection of SNP TSC0004373
aattttgtgtatt

SEQ ID NO: 21920 - DNA, 13 bp, Artificial Sequence
  Oligonucleotide for detection of SNP TSC0004373
aatacacaaaatt

SEQ ID NO: 21921 - DNA, 13 bp, Artificial Sequence
  Oligonucleotide for detection of SNP TSC0004373
aattttttgtatt

SEQ ID NO: 21922 - DNA, 13 bp, Artificial Sequence
  Oligonucleotide for detection of SNP TSC0004373
aatacaaaaaatt

SEQ ID NO: 21923 - DNA, 13 bp, Artificial Sequence
  Oligonucleotide for detection of SNP TSC0004373
aatatatagaatt

SEQ ID NO: 21924 - DNA, 13 bp, Artificial Sequence
  Oligonucleotide for detection of SNP TSC0004373
aattctatatatt

SEQ ID NO: 21925 - DNA, 13 bp, Artificial Sequence
  Oligonucleotide for detection of SNP TSC0004373
aatatagagaatt

SEQ ID NO: 21926 - DNA, 13 bp, Artificial Sequence
  Oligonucleotide for detection of SNP TSC0004373
aattctctatatt

SEQ ID NO: 21927 - DNA, 13 bp, Artificial Sequence
  Oligonucleotide for detection of SNP TSC0004374
taagatatgtttt

SEQ ID NO: 21928 - DNA, 13 bp, Artificial Sequence
  Oligonucleotide for detection of SNP TSC0004374
aaaacatatctta

SEQ ID NO: 21929 - DNA, 13 bp, Artificial Sequence
  Oligonucleotide for detection of SNP TSC0004374
taagatgtgtttt

SEQ ID NO: 21930 - DNA, 13 bp, Artificial Sequence
  Oligonucleotide for detection of SNP TSC0004374
aaaacacatctta

SEQ ID NO: 21931 - DNA, 13 bp, Artificial Sequence
  Oligonucleotide for detection of SNP TSC0004375
gtggaaataaaaa

SEQ ID NO: 21932 - DNA, 13 bp, Artificial Sequence
  Oligonucleotide for detection of SNP TSC0004375
tttttatttccac

SEQ ID NO: 21933 - DNA, 13 bp, Artificial Sequence
  Oligonucleotide for detection of SNP TSC0004375
gtggaagtaaaaa

SEQ ID NO: 21934 - DNA, 13 bp, Artificial Sequence
  Oligonucleotide for detection of SNP TSC0004375
tttttacttccac

SEQ ID NO: 21935 - DNA, 13 bp, Artificial Sequence
  Oligonucleotide for detection of SNP TSC0004376
aataatgtaaatg

SEQ ID NO: 21936 - DNA, 13 bp, Artificial Sequence
  Oligonucleotide for detection of SNP TSC0004376
catttacattatt

SEQ ID NO: 21937 - DNA, 13 bp, Artificial Sequence
  Oligonucleotide for detection of SNP TSC0004376
aataatataaatg

SEQ ID NO: 21938 - DNA, 13 bp, Artificial Sequence
  Oligonucleotide for detection of SNP TSC0004376
catttatattatt

SEQ ID NO: 21939 - DNA, 13 bp, Artificial Sequence
  Oligonucleotide for detection of SNP TSC0004377
gattaagtgagtt

SEQ ID NO: 21940 - DNA, 13 bp, Artificial Sequence
  Oligonucleotide for detection of SNP TSC0004377
aactcacttaatc

SEQ ID NO: 21941 - DNA, 13 bp, Artificial Sequence
  Oligonucleotide for detection of SNP TSC0004377
gattaaatgagtt

SEQ ID NO: 21942 - DNA, 13 bp, Artificial Sequence
  Oligonucleotide for detection of SNP TSC0004377
aactcatttaatc

SEQ ID NO: 21943 - DNA, 13 bp, Artificial Sequence
  Oligonucleotide for detection of SNP TSC0004378
tttagtatatgaa

SEQ ID NO: 21944 - DNA, 13 bp, Artificial Sequence
  Oligonucleotide for detection of SNP TSC0004378
ttcatatactaaa

SEQ ID NO: 21945 - DNA, 13 bp, Artificial Sequence
  Oligonucleotide for detection of SNP TSC0004378
tttagtgtatgaa

SEQ ID NO: 21946 - DNA, 13 bp, Artificial Sequence
  Oligonucleotide for detection of SNP TSC0004378
ttcatacactaaa

SEQ ID NO: 21947 - DNA, 13 bp, Artificial Sequence
  Oligonucleotide for detection of SNP TSC0004378
tttagcgtatgaa

SEQ ID NO: 21948 - DNA, 13 bp, Artificial Sequence
  Oligonucleotide for detection of SNP TSC0004378
ttcatacgctaaa

SEQ ID NO: 21949 - DNA, 13 bp, Artificial Sequence
  Oligonucleotide for detection of SNP TSC0004378
tttatatgttgaa

SEQ ID NO: 21950 - DNA, 13 bp, Artificial Sequence
  Oligonucleotide for detection of SNP TSC0004378
ttcaacatataaa

SEQ ID NO: 21951 - DNA, 13 bp, Artificial Sequence
  Oligonucleotide for detection of SNP TSC0004378
tttatacgttgaa

SEQ ID NO: 21952 - DNA, 13 bp, Artificial Sequence
  Oligonucleotide for detection of SNP TSC0004378
ttcaacgtataaa

SEQ ID NO: 21953 - DNA, 13 bp, Artificial Sequence
  Oligonucleotide for detection of SNP TSC0004380
aaggatgtgtttg

SEQ ID NO: 21954 - DNA, 13 bp, Artificial Sequence
  Oligonucleotide for detection of SNP TSC0004380
caaacacatcctt

SEQ ID NO: 21955 - DNA, 13 bp, Artificial Sequence
  Oligonucleotide for detection of SNP TSC0004380
aaggatatgtttg

SEQ ID NO: 21956 - DNA, 13 bp, Artificial Sequence
  Oligonucleotide for detection of SNP TSC0004380
caaacatatcctt

SEQ ID NO: 21957 - DNA, 13 bp, Artificial Sequence
  Oligonucleotide for detection of SNP TSC0004380
aaggacgtgtttg

SEQ ID NO: 21958 - DNA, 13 bp, Artificial Sequence
  Oligonucleotide for detection of SNP TSC0004380
caaacacgtcctt

SEQ ID NO: 21959 - DNA, 13 bp, Artificial Sequence
  Oligonucleotide for detection of SNP TSC0004380
taaatatgttttt

SEQ ID NO: 21960 - DNA, 13 bp, Artificial Sequence
  Oligonucleotide for detection of SNP TSC0004380
aaaaacatattta

SEQ ID NO: 21961 - DNA, 13 bp, Artificial Sequence
  Oligonucleotide for detection of SNP TSC0004380
taaatacgttttt

SEQ ID NO: 21962 - DNA, 13 bp, Artificial Sequence
  Oligonucleotide for detection of SNP TSC0004380
aaaaacgtattta

SEQ ID NO: 21963 - DNA, 13 bp, Artificial Sequence
  Oligonucleotide for detection of SNP TSC0004381
gaagtgggggaag

SEQ ID NO: 21964 - DNA, 13 bp, Artificial Sequence
  Oligonucleotide for detection of SNP TSC0004381
cttcccccacttc

SEQ ID NO: 21965 - DNA, 13 bp, Artificial Sequence
  Oligonucleotide for detection of SNP TSC0004381
gaagtgagggaag

SEQ ID NO: 21966 - DNA, 13 bp, Artificial Sequence
  Oligonucleotide for detection of SNP TSC0004381
cttccctcacttc

SEQ ID NO: 21967 - DNA, 13 bp, Artificial Sequence
  Oligonucleotide for detection of SNP TSC0004382
atgaggttagggg

SEQ ID NO: 21968 - DNA, 13 bp, Artificial Sequence
  Oligonucleotide for detection of SNP TSC0004382
cccctaacctcat

SEQ ID NO: 21969 - DNA, 13 bp, Artificial Sequence
  Oligonucleotide for detection of SNP TSC0004382
atgaggatagggg

SEQ ID NO: 21970 - DNA, 13 bp, Artificial Sequence
  Oligonucleotide for detection of SNP TSC0004382
cccctatcctcat

SEQ ID NO: 21971 - DNA, 13 bp, Artificial Sequence
  Oligonucleotide for detection of SNP TSC0004382
tttttatttttat

SEQ ID NO: 21972 - DNA, 13 bp, Artificial Sequence
  Oligonucleotide for detection of SNP TSC0004382
ataaaaataaaaa

SEQ ID NO: 21973 - DNA, 13 bp, Artificial Sequence
  Oligonucleotide for detection of SNP TSC0004383
gatgtatgtagta

SEQ ID NO: 21974 - DNA, 13 bp, Artificial Sequence
  Oligonucleotide for detection of SNP TSC0004383
tactacatacatc

SEQ ID NO: 21975 - DNA, 13 bp, Artificial Sequence
  Oligonucleotide for detection of SNP TSC0004383
gacgtatgtagta

SEQ ID NO: 21976 - DNA, 13 bp, Artificial Sequence
  Oligonucleotide for detection of SNP TSC0004383
tactacatacgtc

SEQ ID NO: 21977 - DNA, 13 bp, Artificial Sequence
  Oligonucleotide for detection of SNP TSC0004383
gatgtacgtagta

SEQ ID NO: 21978 - DNA, 13 bp, Artificial Sequence
  Oligonucleotide for detection of SNP TSC0004383
tactacgtacatc

SEQ ID NO: 21979 - DNA, 13 bp, Artificial Sequence
  Oligonucleotide for detection of SNP TSC0004383
gacgtacgtagta

SEQ ID NO: 21980 - DNA, 13 bp, Artificial Sequence
  Oligonucleotide for detection of SNP TSC0004383
tactacgtacgtc

SEQ ID NO: 21981 - DNA, 13 bp, Artificial Sequence
  Oligonucleotide for detection of SNP TSC0004383
tattgtgtgtgty

SEQ ID NO: 21982 - DNA, 13 bp, Artificial Sequence
  Oligonucleotide for detection of SNP TSC0004383
racacacacaata

SEQ ID NO: 21983 - DNA, 13 bp, Artificial Sequence
  Oligonucleotide for detection of SNP TSC0004383
tattgtatgtgty

SEQ ID NO: 21984 - DNA, 13 bp, Artificial Sequence
  Oligonucleotide for detection of SNP TSC0004383
racacatacaata

SEQ ID NO: 21985 - DNA, 13 bp, Artificial Sequence
  Oligonucleotide for detection of SNP TSC0004383
tattgcgtgtgty

SEQ ID NO: 21986 - DNA, 13 bp, Artificial Sequence
  Oligonucleotide for detection of SNP TSC0004383
racacacgcaata

SEQ ID NO: 21987 - DNA, 13 bp, Artificial Sequence
  Oligonucleotide for detection of SNP TSC0004383
tattgtatgcgty

SEQ ID NO: 21988 - DNA, 13 bp, Artificial Sequence
  Oligonucleotide for detection of SNP TSC0004383
racgcatacaata

SEQ ID NO: 21989 - DNA, 13 bp, Artificial Sequence
  Oligonucleotide for detection of SNP TSC0004383
tattgtgtgcgty

SEQ ID NO: 21990 - DNA, 13 bp, Artificial Sequence
  Oligonucleotide for detection of SNP TSC0004383
racgcacacaata

SEQ ID NO: 21991 - DNA, 13 bp, Artificial Sequence
  Oligonucleotide for detection of SNP TSC0004383
tattgcgtgcgty

SEQ ID NO: 21992 - DNA, 13 bp, Artificial Sequence
  Oligonucleotide for detection of SNP TSC0004383
racgcacgcaata

SEQ ID NO: 21993 - DNA, 13 bp, Artificial Sequence
  Oligonucleotide for detection of SNP TSC0004384
gttattgttagag

SEQ ID NO: 21994 - DNA, 13 bp, Artificial Sequence
  Oligonucleotide for detection of SNP TSC0004384
ctctaacaataac

SEQ ID NO: 21995 - DNA, 13 bp, Artificial Sequence
  Oligonucleotide for detection of SNP TSC0004384
gttattattagag

SEQ ID NO: 21996 - DNA, 13 bp, Artificial Sequence
  Oligonucleotide for detection of SNP TSC0004384
ctctaataataac

SEQ ID NO: 21997 - DNA, 13 bp, Artificial Sequence
  Oligonucleotide for detection of SNP TSC0004384
gttatcgttagag

SEQ ID NO: 21998 - DNA, 13 bp, Artificial Sequence
  Oligonucleotide for detection of SNP TSC0004384
ctctaacgataac

SEQ ID NO: 21999 - DNA, 13 bp, Artificial Sequence
  Oligonucleotide for detection of SNP TSC0004384
ttttgatggtggy

SEQ ID NO: 22000 - DNA, 13 bp, Artificial Sequence
  Oligonucleotide for detection of SNP TSC0004384
rccaccatcaaaa

SEQ ID NO: 22001 - DNA, 13 bp, Artificial Sequence
  Oligonucleotide for detection of SNP TSC0004384
ttttgacggtggy

SEQ ID NO: 22002 - DNA, 13 bp, Artificial Sequence
  Oligonucleotide for detection of SNP TSC0004384
rccaccgtcaaaa

SEQ ID NO: 22003 - DNA, 13 bp, Artificial Sequence
  Oligonucleotide for detection of SNP TSC0004385
gattttgtatgtt

SEQ ID NO: 22004 - DNA, 13 bp, Artificial Sequence
  Oligonucleotide for detection of SNP TSC0004385
aacatacaaaatc

SEQ ID NO: 22005 - DNA, 13 bp, Artificial Sequence
  Oligonucleotide for detection of SNP TSC0004385
gattttttatgtt

SEQ ID NO: 22006 - DNA, 13 bp, Artificial Sequence
  Oligonucleotide for detection of SNP TSC0004385
aacataaaaaatc

SEQ ID NO: 22007 - DNA, 13 bp, Artificial Sequence
  Oligonucleotide for detection of SNP TSC0004385
agtatgtagagty

SEQ ID NO: 22008 - DNA, 13 bp, Artificial Sequence
  Oligonucleotide for detection of SNP TSC0004385
ractctacatact

SEQ ID NO: 22009 - DNA, 13 bp, Artificial Sequence
  Oligonucleotide for detection of SNP TSC0004385
agtatgaagagty

SEQ ID NO: 22010 - DNA, 13 bp, Artificial Sequence
  Oligonucleotide for detection of SNP TSC0004385
ractcttcatact

SEQ ID NO: 22011 - DNA, 13 bp, Artificial Sequence
  Oligonucleotide for detection of SNP TSC0004386
gaggttatagtga

SEQ ID NO: 22012 - DNA, 13 bp, Artificial Sequence
  Oligonucleotide for detection of SNP TSC0004386
tcactataacctc

SEQ ID NO: 22013 - DNA, 13 bp, Artificial Sequence
  Oligonucleotide for detection of SNP TSC0004386
ttattggaattty

SEQ ID NO: 22014 - DNA, 13 bp, Artificial Sequence
  Oligonucleotide for detection of SNP TSC0004386
raaattccaataa

SEQ ID NO: 22015 - DNA, 13 bp, Artificial Sequence
  Oligonucleotide for detection of SNP TSC0004387
aggttaaaatatg

SEQ ID NO: 22016 - DNA, 13 bp, Artificial Sequence
  Oligonucleotide for detection of SNP TSC0004387
catattttaacct

SEQ ID NO: 22017 - DNA, 13 bp, Artificial Sequence
  Oligonucleotide for detection of SNP TSC0004387
aggttagaatatg

SEQ ID NO: 22018 - DNA, 13 bp, Artificial Sequence
  Oligonucleotide for detection of SNP TSC0004387
catattctaacct

SEQ ID NO: 22019 - DNA, 13 bp, Artificial Sequence
  Oligonucleotide for detection of SNP TSC0004388
tagttaattttaa

SEQ ID NO: 22020 - DNA, 13 bp, Artificial Sequence
  Oligonucleotide for detection of SNP TSC0004388
ttaaaattaacta

SEQ ID NO: 22021 - DNA, 13 bp, Artificial Sequence
  Oligonucleotide for detection of SNP TSC0004388
tagttatttttaa

SEQ ID NO: 22022 - DNA, 13 bp, Artificial Sequence
  Oligonucleotide for detection of SNP TSC0004388
ttaaaaataacta

SEQ ID NO: 22023 - DNA, 13 bp, Artificial Sequence
  Oligonucleotide for detection of SNP TSC0004388
ttaggattggtta

SEQ ID NO: 22024 - DNA, 13 bp, Artificial Sequence
  Oligonucleotide for detection of SNP TSC0004388
taaccaatcctaa

SEQ ID NO: 22025 - DNA, 13 bp, Artificial Sequence
  Oligonucleotide for detection of SNP TSC0004388
ttaggaatggtta

SEQ ID NO: 22026 - DNA, 13 bp, Artificial Sequence
  Oligonucleotide for detection of SNP TSC0004388
taaccattcctaa

SEQ ID NO: 22027 - DNA, 13 bp, Artificial Sequence
  Oligonucleotide for detection of SNP TSC0004389
tttaaaatgggat

SEQ ID NO: 22028 - DNA, 13 bp, Artificial Sequence
  Oligonucleotide for detection of SNP TSC0004389
atcccattttaaa

SEQ ID NO: 22029 - DNA, 13 bp, Artificial Sequence
  Oligonucleotide for detection of SNP TSC0004389
tttaaagtgggat

SEQ ID NO: 22030 - DNA, 13 bp, Artificial Sequence
  Oligonucleotide for detection of SNP TSC0004389
atcccactttaaa

SEQ ID NO: 22031 - DNA, 13 bp, Artificial Sequence
  Oligonucleotide for detection of SNP TSC0004390
atatggtggggga

SEQ ID NO: 22032 - DNA, 13 bp, Artificial Sequence
  Oligonucleotide for detection of SNP TSC0004390
tcccccaccatat

SEQ ID NO: 22033 - DNA, 13 bp, Artificial Sequence
  Oligonucleotide for detection of SNP TSC0004390
atatggcggggga

SEQ ID NO: 22034 - DNA, 13 bp, Artificial Sequence
  Oligonucleotide for detection of SNP TSC0004390
tcccccgccatat

SEQ ID NO: 22035 - DNA, 13 bp, Artificial Sequence
  Oligonucleotide for detection of SNP TSC0004390
ttttttgttatgt

SEQ ID NO: 22036 - DNA, 13 bp, Artificial Sequence
  Oligonucleotide for detection of SNP TSC0004390
acataacaaaaaa

SEQ ID NO: 22037 - DNA, 13 bp, Artificial Sequence
  Oligonucleotide for detection of SNP TSC0004390
ttttttattatgt

SEQ ID NO: 22038 - DNA, 13 bp, Artificial Sequence
  Oligonucleotide for detection of SNP TSC0004390
acataataaaaaa

SEQ ID NO: 22039 - DNA, 13 bp, Artificial Sequence
  Oligonucleotide for detection of SNP TSC0004390
tttttcgttatgt

SEQ ID NO: 22040 - DNA, 13 bp, Artificial Sequence
  Oligonucleotide for detection of SNP TSC0004390
acataacgaaaaa

SEQ ID NO: 22041 - DNA, 13 bp, Artificial Sequence
  Oligonucleotide for detection of SNP TSC0004391
tttagatatgtty

SEQ ID NO: 22042 - DNA, 13 bp, Artificial Sequence
  Oligonucleotide for detection of SNP TSC0004391
raacatatctaaa

SEQ ID NO: 22043 - DNA, 13 bp, Artificial Sequence
  Oligonucleotide for detection of SNP TSC0004391
tttagagatgtty

SEQ ID NO: 22044 - DNA, 13 bp, Artificial Sequence
  Oligonucleotide for detection of SNP TSC0004391
raacatctctaaa

SEQ ID NO: 22045 - DNA, 13 bp, Artificial Sequence
  Oligonucleotide for detection of SNP TSC0004391
tttagatacgtty

SEQ ID NO: 22046 - DNA, 13 bp, Artificial Sequence
  Oligonucleotide for detection of SNP TSC0004391
raacgtatctaaa

SEQ ID NO: 22047 - DNA, 13 bp, Artificial Sequence
  Oligonucleotide for detection of SNP TSC0004391
tttagagacgtty

SEQ ID NO: 22048 - DNA, 13 bp, Artificial Sequence
  Oligonucleotide for detection of SNP TSC0004391
raacgtctctaaa

SEQ ID NO: 22049 - DNA, 13 bp, Artificial Sequence
  Oligonucleotide for detection of SNP TSC0004391
ggatgtatttgga

SEQ ID NO: 22050 - DNA, 13 bp, Artificial Sequence
  Oligonucleotide for detection of SNP TSC0004391
tccaaatacatcc

SEQ ID NO: 22051 - DNA, 13 bp, Artificial Sequence
  Oligonucleotide for detection of SNP TSC0004391
ggatgtttttgga

SEQ ID NO: 22052 - DNA, 13 bp, Artificial Sequence
  Oligonucleotide for detection of SNP TSC0004391
tccaaaaacatcc

SEQ ID NO: 22053 - DNA, 13 bp, Artificial Sequence
  Oligonucleotide for detection of SNP TSC0004391
ggacgtatttgga

SEQ ID NO: 22054 - DNA, 13 bp, Artificial Sequence
  Oligonucleotide for detection of SNP TSC0004391
tccaaatacgtcc

SEQ ID NO: 22055 - DNA, 13 bp, Artificial Sequence
  Oligonucleotide for detection of SNP TSC0004391
ggacgtttttgga

SEQ ID NO: 22056 - DNA, 13 bp, Artificial Sequence
  Oligonucleotide for detection of SNP TSC0004391
tccaaaaacgtcc

SEQ ID NO: 22057 - DNA, 13 bp, Artificial Sequence
  Oligonucleotide for detection of SNP TSC0004392
tgtatggtaaata

SEQ ID NO: 22058 - DNA, 13 bp, Artificial Sequence
  Oligonucleotide for detection of SNP TSC0004392
tatttaccataca

SEQ ID NO: 22059 - DNA, 13 bp, Artificial Sequence
  Oligonucleotide for detection of SNP TSC0004392
tgtatgataaata

SEQ ID NO: 22060 - DNA, 13 bp, Artificial Sequence
  Oligonucleotide for detection of SNP TSC0004392
tatttatcataca

SEQ ID NO: 22061 - DNA, 13 bp, Artificial Sequence
  Oligonucleotide for detection of SNP TSC0004393
tgtgtatatttty

SEQ ID NO: 22062 - DNA, 13 bp, Artificial Sequence
  Oligonucleotide for detection of SNP TSC0004393
raaaatatacaca

SEQ ID NO: 22063 - DNA, 13 bp, Artificial Sequence
  Oligonucleotide for detection of SNP TSC0004393
tgtgtaaatttty

SEQ ID NO: 22064 - DNA, 13 bp, Artificial Sequence
  Oligonucleotide for detection of SNP TSC0004393
raaaatttacaca

SEQ ID NO: 22065 - DNA, 13 bp, Artificial Sequence
  Oligonucleotide for detection of SNP TSC0004393
cgtgtatatttty

SEQ ID NO: 22066 - DNA, 13 bp, Artificial Sequence
  Oligonucleotide for detection of SNP TSC0004393
raaaatatacacg

SEQ ID NO: 22067 - DNA, 13 bp, Artificial Sequence
  Oligonucleotide for detection of SNP TSC0004393
cgtgtaaatttty

SEQ ID NO: 22068 - DNA, 13 bp, Artificial Sequence
  Oligonucleotide for detection of SNP TSC0004393
raaaatttacacg

SEQ ID NO: 22069 - DNA, 13 bp, Artificial Sequence
  Oligonucleotide for detection of SNP TSC0004393
tgcgtatatttty

SEQ ID NO: 22070 - DNA, 13 bp, Artificial Sequence
  Oligonucleotide for detection of SNP TSC0004393
raaaatatacgca

SEQ ID NO: 22071 - DNA, 13 bp, Artificial Sequence
  Oligonucleotide for detection of SNP TSC0004393
tgcgtaaatttty

SEQ ID NO: 22072 - DNA, 13 bp, Artificial Sequence
  Oligonucleotide for detection of SNP TSC0004393
raaaatttacgca

SEQ ID NO: 22073 - DNA, 13 bp, Artificial Sequence
  Oligonucleotide for detection of SNP TSC0004393
cgcgtatatttty

SEQ ID NO: 22074 - DNA, 13 bp, Artificial Sequence
  Oligonucleotide for detection of SNP TSC0004393
raaaatatacgcg

SEQ ID NO: 22075 - DNA, 13 bp, Artificial Sequence
  Oligonucleotide for detection of SNP TSC0004393
cgcgtaaatttty

SEQ ID NO: 22076 - DNA, 13 bp, Artificial Sequence
  Oligonucleotide for detection of SNP TSC0004393
raaaatttacgcg

SEQ ID NO: 22077 - DNA, 13 bp, Artificial Sequence
  Oligonucleotide for detection of SNP TSC0004393
gggggtatatgtg

SEQ ID NO: 22078 - DNA, 13 bp, Artificial Sequence
  Oligonucleotide for detection of SNP TSC0004393
cacatataccccc

SEQ ID NO: 22079 - DNA, 13 bp, Artificial Sequence
  Oligonucleotide for detection of SNP TSC0004393
gggggtttatgtg

SEQ ID NO: 22080 - DNA, 13 bp, Artificial Sequence
  Oligonucleotide for detection of SNP TSC0004393
cacataaaccccc

SEQ ID NO: 22081 - DNA, 13 bp, Artificial Sequence
  Oligonucleotide for detection of SNP TSC0004393
gggggtatacgtg

SEQ ID NO: 22082 - DNA, 13 bp, Artificial Sequence
  Oligonucleotide for detection of SNP TSC0004393
cacgtataccccc

SEQ ID NO: 22083 - DNA, 13 bp, Artificial Sequence
  Oligonucleotide for detection of SNP TSC0004393
gggggtttacgtg

SEQ ID NO: 22084 - DNA, 13 bp, Artificial Sequence
  Oligonucleotide for detection of SNP TSC0004393
cacgtaaaccccc

SEQ ID NO: 22085 - DNA, 13 bp, Artificial Sequence
  Oligonucleotide for detection of SNP TSC0004393
gggggtatatgcg

SEQ ID NO: 22086 - DNA, 13 bp, Artificial Sequence
  Oligonucleotide for detection of SNP TSC0004393
cgcatataccccc

SEQ ID NO: 22087 - DNA, 13 bp, Artificial Sequence
  Oligonucleotide for detection of SNP TSC0004393
gggggtttatgcg

SEQ ID NO: 22088 - DNA, 13 bp, Artificial Sequence
  Oligonucleotide for detection of SNP TSC0004393
cgcataaaccccc

SEQ ID NO: 22089 - DNA, 13 bp, Artificial Sequence
  Oligonucleotide for detection of SNP TSC0004393
gggggtatacgcg

SEQ ID NO: 22090 - DNA, 13 bp, Artificial Sequence
  Oligonucleotide for detection of SNP TSC0004393
cgcgtataccccc

SEQ ID NO: 22091 - DNA, 13 bp, Artificial Sequence
  Oligonucleotide for detection of SNP TSC0004393
gggggtttacgcg

SEQ ID NO: 22092 - DNA, 13 bp, Artificial Sequence
  Oligonucleotide for detection of SNP TSC0004393
cgcgtaaaccccc

SEQ ID NO: 22093 - DNA, 13 bp, Artificial Sequence
  Oligonucleotide for detection of SNP TSC0004394
tttagaatttgag

SEQ ID NO: 22094 - DNA, 13 bp, Artificial Sequence
  Oligonucleotide for detection of SNP TSC0004394
ctcaaattctaaa

SEQ ID NO: 22095 - DNA, 13 bp, Artificial Sequence
  Oligonucleotide for detection of SNP TSC0004394
tttagagtttgag

SEQ ID NO: 22096 - DNA, 13 bp, Artificial Sequence
  Oligonucleotide for detection of SNP TSC0004394
ctcaaactctaaa

SEQ ID NO: 22097 - DNA, 13 bp, Artificial Sequence
  Oligonucleotide for detection of SNP TSC0004394
tttagaattcgag

SEQ ID NO: 22098 - DNA, 13 bp, Artificial Sequence
  Oligonucleotide for detection of SNP TSC0004394
ctcgaattctaaa

SEQ ID NO: 22099 - DNA, 13 bp, Artificial Sequence
  Oligonucleotide for detection of SNP TSC0004394
tttagagttcgag

SEQ ID NO: 22100 - DNA, 13 bp, Artificial Sequence
  Oligonucleotide for detection of SNP TSC0004394
ctcgaactctaaa

SEQ ID NO: 22101 - DNA, 13 bp, Artificial Sequence
  Oligonucleotide for detection of SNP TSC0004395
attgttatatgtg

SEQ ID NO: 22102 - DNA, 13 bp, Artificial Sequence
  Oligonucleotide for detection of SNP TSC0004395
cacatataacaat

SEQ ID NO: 22103 - DNA, 13 bp, Artificial Sequence
  Oligonucleotide for detection of SNP TSC0004395
attgttgtatgtg

SEQ ID NO: 22104 - DNA, 13 bp, Artificial Sequence
  Oligonucleotide for detection of SNP TSC0004395
cacatacaacaat

SEQ ID NO: 22105 - DNA, 13 bp, Artificial Sequence
  Oligonucleotide for detection of SNP TSC0004395
attgttatacgtg

SEQ ID NO: 22106 - DNA, 13 bp, Artificial Sequence
  Oligonucleotide for detection of SNP TSC0004395
cacgtataacaat

SEQ ID NO: 22107 - DNA, 13 bp, Artificial Sequence
  Oligonucleotide for detection of SNP TSC0004395
attgttgtacgtg

SEQ ID NO: 22108 - DNA, 13 bp, Artificial Sequence
  Oligonucleotide for detection of SNP TSC0004395
cacgtacaacaat

SEQ ID NO: 22109 - DNA, 13 bp, Artificial Sequence
  Oligonucleotide for detection of SNP TSC0004396
agaagggggtggg

SEQ ID NO: 22110 - DNA, 13 bp, Artificial Sequence
  Oligonucleotide for detection of SNP TSC0004396
cccacccccttct

SEQ ID NO: 22111 - DNA, 13 bp, Artificial Sequence
  Oligonucleotide for detection of SNP TSC0004396
agaaggaggtggg

SEQ ID NO: 22112 - DNA, 13 bp, Artificial Sequence
  Oligonucleotide for detection of SNP TSC0004396
cccacctccttct

SEQ ID NO: 22113 - DNA, 13 bp, Artificial Sequence
  Oligonucleotide for detection of SNP TSC0004397
gagtttaagtatt

SEQ ID NO: 22114 - DNA, 13 bp, Artificial Sequence
  Oligonucleotide for detection of SNP TSC0004397
aatacttaaactc

SEQ ID NO: 22115 - DNA, 13 bp, Artificial Sequence
  Oligonucleotide for detection of SNP TSC0004397
gagtttgagtatt

SEQ ID NO: 22116 - DNA, 13 bp, Artificial Sequence
  Oligonucleotide for detection of SNP TSC0004397
aatactcaaactc

SEQ ID NO: 22117 - DNA, 13 bp, Artificial Sequence
  Oligonucleotide for detection of SNP TSC0004397
gagttcgagtatt

SEQ ID NO: 22118 - DNA, 13 bp, Artificial Sequence
  Oligonucleotide for detection of SNP TSC0004397
aatactcgaactc

SEQ ID NO: 22119 - DNA, 13 bp, Artificial Sequence
  Oligonucleotide for detection of SNP TSC0004397
agtgtttgaatty

SEQ ID NO: 22120 - DNA, 13 bp, Artificial Sequence
  Oligonucleotide for detection of SNP TSC0004397
raattcaaacact

SEQ ID NO: 22121 - DNA, 13 bp, Artificial Sequence
  Oligonucleotide for detection of SNP TSC0004397
agtgttcgaatty

SEQ ID NO: 22122 - DNA, 13 bp, Artificial Sequence
  Oligonucleotide for detection of SNP TSC0004397
raattcgaacact

SEQ ID NO: 22123 - DNA, 13 bp, Artificial Sequence
  Oligonucleotide for detection of SNP TSC0004398
tttttaaggattt

SEQ ID NO: 22124 - DNA, 13 bp, Artificial Sequence
  Oligonucleotide for detection of SNP TSC0004398
aaatccttaaaaa

SEQ ID NO: 22125 - DNA, 13 bp, Artificial Sequence
  Oligonucleotide for detection of SNP TSC0004398
tttttagggattt

SEQ ID NO: 22126 - DNA, 13 bp, Artificial Sequence
  Oligonucleotide for detection of SNP TSC0004398
aaatccctaaaaa

SEQ ID NO: 22127 - DNA, 13 bp, Artificial Sequence
  Oligonucleotide for detection of SNP TSC0004399
atatgttggggta

SEQ ID NO: 22128 - DNA, 13 bp, Artificial Sequence
  Oligonucleotide for detection of SNP TSC0004399
taccccaacatat

SEQ ID NO: 22129 - DNA, 13 bp, Artificial Sequence
  Oligonucleotide for detection of SNP TSC0004399
atacgttggggta

SEQ ID NO: 22130 - DNA, 13 bp, Artificial Sequence
  Oligonucleotide for detection of SNP TSC0004399
taccccaacgtat

SEQ ID NO: 22131 - DNA, 13 bp, Artificial Sequence
  Oligonucleotide for detection of SNP TSC0004399
atatgtcggggta

SEQ ID NO: 22132 - DNA, 13 bp, Artificial Sequence
  Oligonucleotide for detection of SNP TSC0004399
taccccgacatat

SEQ ID NO: 22133 - DNA, 13 bp, Artificial Sequence
  Oligonucleotide for detection of SNP TSC0004399
atacgtcggggta

SEQ ID NO: 22134 - DNA, 13 bp, Artificial Sequence
  Oligonucleotide for detection of SNP TSC0004399
taccccgacgtat

SEQ ID NO: 22135 - DNA, 13 bp, Artificial Sequence
  Oligonucleotide for detection of SNP TSC0004399
tgttttggtgtgt

SEQ ID NO: 22136 - DNA, 13 bp, Artificial Sequence
  Oligonucleotide for detection of SNP TSC0004399
acacaccaaaaca

SEQ ID NO: 22137 - DNA, 13 bp, Artificial Sequence
  Oligonucleotide for detection of SNP TSC0004399
tgttttagtgtgt

SEQ ID NO: 22138 - DNA, 13 bp, Artificial Sequence
  Oligonucleotide for detection of SNP TSC0004399
acacactaaaaca

SEQ ID NO: 22139 - DNA, 13 bp, Artificial Sequence
  Oligonucleotide for detection of SNP TSC0004399
tgtttcggtgtgt

SEQ ID NO: 22140 - DNA, 13 bp, Artificial Sequence
  Oligonucleotide for detection of SNP TSC0004399
acacaccgaaaca

SEQ ID NO: 22141 - DNA, 13 bp, Artificial Sequence
  Oligonucleotide for detection of SNP TSC0004399
tgttttagcgtgt

SEQ ID NO: 22142 - DNA, 13 bp, Artificial Sequence
  Oligonucleotide for detection of SNP TSC0004399
acacgctaaaaca

SEQ ID NO: 22143 - DNA, 13 bp, Artificial Sequence
  Oligonucleotide for detection of SNP TSC0004399
tgttttggcgtgt

SEQ ID NO: 22144 - DNA, 13 bp, Artificial Sequence
  Oligonucleotide for detection of SNP TSC0004399
acacgccaaaaca

SEQ ID NO: 22145 - DNA, 13 bp, Artificial Sequence
  Oligonucleotide for detection of SNP TSC0004399
tgtttcggcgtgt

SEQ ID NO: 22146 - DNA, 13 bp, Artificial Sequence
  Oligonucleotide for detection of SNP TSC0004399
acacgccgaaaca

SEQ ID NO: 22147 - DNA, 13 bp, Artificial Sequence
  Oligonucleotide for detection of SNP TSC0004400
ttttagaggtgtg

SEQ ID NO: 22148 - DNA, 13 bp, Artificial Sequence
  Oligonucleotide for detection of SNP TSC0004400
cacacctctaaaa

SEQ ID NO: 22149 - DNA, 13 bp, Artificial Sequence
  Oligonucleotide for detection of SNP TSC0004400
ttttagtggtgtg

SEQ ID NO: 22150 - DNA, 13 bp, Artificial Sequence
  Oligonucleotide for detection of SNP TSC0004400
cacaccactaaaa

SEQ ID NO: 22151 - DNA, 13 bp, Artificial Sequence
  Oligonucleotide for detection of SNP TSC0004400
ttttagaggcgtg

SEQ ID NO: 22152 - DNA, 13 bp, Artificial Sequence
  Oligonucleotide for detection of SNP TSC0004400
cacgcctctaaaa

SEQ ID NO: 22153 - DNA, 13 bp, Artificial Sequence
  Oligonucleotide for detection of SNP TSC0004400
ttttagcggtgtg

SEQ ID NO: 22154 - DNA, 13 bp, Artificial Sequence
  Oligonucleotide for detection of SNP TSC0004400
cacaccgctaaaa

SEQ ID NO: 22155 - DNA, 13 bp, Artificial Sequence
  Oligonucleotide for detection of SNP TSC0004400
ttttagaggtgcg

SEQ ID NO: 22156 - DNA, 13 bp, Artificial Sequence
  Oligonucleotide for detection of SNP TSC0004400
cgcacctctaaaa

SEQ ID NO: 22157 - DNA, 13 bp, Artificial Sequence
  Oligonucleotide for detection of SNP TSC0004400
ttttagtggcgtg

SEQ ID NO: 22158 - DNA, 13 bp, Artificial Sequence
  Oligonucleotide for detection of SNP TSC0004400
cacgccactaaaa

SEQ ID NO: 22159 - DNA, 13 bp, Artificial Sequence
  Oligonucleotide for detection of SNP TSC0004400
ttttagaggcgcg

SEQ ID NO: 22160 - DNA, 13 bp, Artificial Sequence
  Oligonucleotide for detection of SNP TSC0004400
cgcgcctctaaaa

SEQ ID NO: 22161 - DNA, 13 bp, Artificial Sequence
  Oligonucleotide for detection of SNP TSC0004400
ttttagtggtgcg

SEQ ID NO: 22162 - DNA, 13 bp, Artificial Sequence
  Oligonucleotide for detection of SNP TSC0004400
cgcaccactaaaa

SEQ ID NO: 22163 - DNA, 13 bp, Artificial Sequence
  Oligonucleotide for detection of SNP TSC0004400
ttttagcggcgtg

SEQ ID NO: 22164 - DNA, 13 bp, Artificial Sequence
  Oligonucleotide for detection of SNP TSC0004400
cacgccgctaaaa

SEQ ID NO: 22165 - DNA, 13 bp, Artificial Sequence
  Oligonucleotide for detection of SNP TSC0004400
ttttagcggtgcg

SEQ ID NO: 22166 - DNA, 13 bp, Artificial Sequence
  Oligonucleotide for detection of SNP TSC0004400
cgcaccgctaaaa

SEQ ID NO: 22167 - DNA, 13 bp, Artificial Sequence
  Oligonucleotide for detection of SNP TSC0004400
ttttagtggcgcg

SEQ ID NO: 22168 - DNA, 13 bp, Artificial Sequence
  Oligonucleotide for detection of SNP TSC0004400
cgcgccactaaaa

SEQ ID NO: 22169 - DNA, 13 bp, Artificial Sequence
  Oligonucleotide for detection of SNP TSC0004400
ttttagcggcgcg

SEQ ID NO: 22170 - DNA, 13 bp, Artificial Sequence
  Oligonucleotide for detection of SNP TSC0004400
cgcgccgctaaaa

SEQ ID NO: 22171 - DNA, 13 bp, Artificial Sequence
  Oligonucleotide for detection of SNP TSC0004400
tgtgtttttagag

SEQ ID NO: 22172 - DNA, 13 bp, Artificial Sequence
  Oligonucleotide for detection of SNP TSC0004400
ctctaaaaacaca

SEQ ID NO: 22173 - DNA, 13 bp, Artificial Sequence
  Oligonucleotide for detection of SNP TSC0004400
tgtgttgttagag

SEQ ID NO: 22174 - DNA, 13 bp, Artificial Sequence
  Oligonucleotide for detection of SNP TSC0004400
ctctaacaacaca

SEQ ID NO: 22175 - DNA, 13 bp, Artificial Sequence
  Oligonucleotide for detection of SNP TSC0004400
cgtgtttttagag

SEQ ID NO: 22176 - DNA, 13 bp, Artificial Sequence
  Oligonucleotide for detection of SNP TSC0004400
ctctaaaaacacg

SEQ ID NO: 22177 - DNA, 13 bp, Artificial Sequence
  Oligonucleotide for detection of SNP TSC0004400
cgtgttgttagag

SEQ ID NO: 22178 - DNA, 13 bp, Artificial Sequence
  Oligonucleotide for detection of SNP TSC0004400
ctctaacaacacg

SEQ ID NO: 22179 - DNA, 13 bp, Artificial Sequence
  Oligonucleotide for detection of SNP TSC0004400
tgcgtttttagag

SEQ ID NO: 22180 - DNA, 13 bp, Artificial Sequence
  Oligonucleotide for detection of SNP TSC0004400
ctctaaaaacgca

SEQ ID NO: 22181 - DNA, 13 bp, Artificial Sequence
  Oligonucleotide for detection of SNP TSC0004400
tgcgttgttagag

SEQ ID NO: 22182 - DNA, 13 bp, Artificial Sequence
  Oligonucleotide for detection of SNP TSC0004400
ctctaacaacgca

SEQ ID NO: 22183 - DNA, 13 bp, Artificial Sequence
  Oligonucleotide for detection of SNP TSC0004400
cgcgtttttagag

SEQ ID NO: 22184 - DNA, 13 bp, Artificial Sequence
  Oligonucleotide for detection of SNP TSC0004400
ctctaaaaacgcg

SEQ ID NO: 22185 - DNA, 13 bp, Artificial Sequence
  Oligonucleotide for detection of SNP TSC0004400
tgtgtcgttagag

SEQ ID NO: 22186 - DNA, 13 bp, Artificial Sequence
  Oligonucleotide for detection of SNP TSC0004400
ctctaacgacaca

SEQ ID NO: 22187 - DNA, 13 bp, Artificial Sequence
  Oligonucleotide for detection of SNP TSC0004400
cgcgttgttagag

SEQ ID NO: 22188 - DNA, 13 bp, Artificial Sequence
  Oligonucleotide for detection of SNP TSC0004400
ctctaacaacgcg

SEQ ID NO: 22189 - DNA, 13 bp, Artificial Sequence
  Oligonucleotide for detection of SNP TSC0004400
cgtgtcgttagag

SEQ ID NO: 22190 - DNA, 13 bp, Artificial Sequence
  Oligonucleotide for detection of SNP TSC0004400
ctctaacgacacg

SEQ ID NO: 22191 - DNA, 13 bp, Artificial Sequence
  Oligonucleotide for detection of SNP TSC0004400
tgcgtcgttagag

SEQ ID NO: 22192 - DNA, 13 bp, Artificial Sequence
  Oligonucleotide for detection of SNP TSC0004400
ctctaacgacgca

SEQ ID NO: 22193 - DNA, 13 bp, Artificial Sequence
  Oligonucleotide for detection of SNP TSC0004400
cgcgtcgttagag

SEQ ID NO: 22194 - DNA, 13 bp, Artificial Sequence
  Oligonucleotide for detection of SNP TSC0004400
ctctaacgacgcg

SEQ ID NO: 22195 - DNA, 13 bp, Artificial Sequence
  Oligonucleotide for detection of SNP TSC0004401
ggtattaattagg

SEQ ID NO: 22196 - DNA, 13 bp, Artificial Sequence
  Oligonucleotide for detection of SNP TSC0004401
cctaattaatacc

SEQ ID NO: 22197 - DNA, 13 bp, Artificial Sequence
  Oligonucleotide for detection of SNP TSC0004401
ggtattgattagg

SEQ ID NO: 22198 - DNA, 13 bp, Artificial Sequence
  Oligonucleotide for detection of SNP TSC0004401
cctaatcaatacc

SEQ ID NO: 22199 - DNA, 13 bp, Artificial Sequence
  Oligonucleotide for detection of SNP TSC0004402
gtttttattggta

SEQ ID NO: 22200 - DNA, 13 bp, Artificial Sequence
  Oligonucleotide for detection of SNP TSC0004402
taccaataaaaac

SEQ ID NO: 22201 - DNA, 13 bp, Artificial Sequence
  Oligonucleotide for detection of SNP TSC0004402
gtttttgttggta

SEQ ID NO: 22202 - DNA, 13 bp, Artificial Sequence
  Oligonucleotide for detection of SNP TSC0004402
taccaacaaaaac

SEQ ID NO: 22203 - DNA, 13 bp, Artificial Sequence
  Oligonucleotide for detection of SNP TSC0004403
ttaataagagatt

SEQ ID NO: 22204 - DNA, 13 bp, Artificial Sequence
  Oligonucleotide for detection of SNP TSC0004403
aatctcttattaa

SEQ ID NO: 22205 - DNA, 13 bp, Artificial Sequence
  Oligonucleotide for detection of SNP TSC0004403
ttaatatgagatt

SEQ ID NO: 22206 - DNA, 13 bp, Artificial Sequence
  Oligonucleotide for detection of SNP TSC0004403
aatctcatattaa

SEQ ID NO: 22207 - DNA, 13 bp, Artificial Sequence
  Oligonucleotide for detection of SNP TSC0004403
aattttttgttaa

SEQ ID NO: 22208 - DNA, 13 bp, Artificial Sequence
  Oligonucleotide for detection of SNP TSC0004403
ttaacaaaaaatt

SEQ ID NO: 22209 - DNA, 13 bp, Artificial Sequence
  Oligonucleotide for detection of SNP TSC0004403
aattttatgttaa

SEQ ID NO: 22210 - DNA, 13 bp, Artificial Sequence
  Oligonucleotide for detection of SNP TSC0004403
ttaacataaaatt

SEQ ID NO: 22211 - DNA, 13 bp, Artificial Sequence
  Oligonucleotide for detection of SNP TSC0004405
tgtatgtatatgt

SEQ ID NO: 22212 - DNA, 13 bp, Artificial Sequence
  Oligonucleotide for detection of SNP TSC0004405
acatatacataca

SEQ ID NO: 22213 - DNA, 13 bp, Artificial Sequence
  Oligonucleotide for detection of SNP TSC0004405
tgtatgaatatgt

SEQ ID NO: 22214 - DNA, 13 bp, Artificial Sequence
  Oligonucleotide for detection of SNP TSC0004405
acatattcataca

SEQ ID NO: 22215 - DNA, 13 bp, Artificial Sequence
  Oligonucleotide for detection of SNP TSC0004406
agattggataaat

SEQ ID NO: 22216 - DNA, 13 bp, Artificial Sequence
  Oligonucleotide for detection of SNP TSC0004406
atttatccaatct

SEQ ID NO: 22217 - DNA, 13 bp, Artificial Sequence
  Oligonucleotide for detection of SNP TSC0004406
agattgaataaat

SEQ ID NO: 22218 - DNA, 13 bp, Artificial Sequence
  Oligonucleotide for detection of SNP TSC0004406
atttattcaatct

SEQ ID NO: 22219 - DNA, 13 bp, Artificial Sequence
  Oligonucleotide for detection of SNP TSC0004407
ttatttgtaattt

SEQ ID NO: 22220 - DNA, 13 bp, Artificial Sequence
  Oligonucleotide for detection of SNP TSC0004407
aaattacaaataa

SEQ ID NO: 22221 - DNA, 13 bp, Artificial Sequence
  Oligonucleotide for detection of SNP TSC0004407
ttatttataattt

SEQ ID NO: 22222 - DNA, 13 bp, Artificial Sequence
  Oligonucleotide for detection of SNP TSC0004407
aaattataaataa

SEQ ID NO: 22223 - DNA, 13 bp, Artificial Sequence
  Oligonucleotide for detection of SNP TSC0004408
ggttaaatgtagy

SEQ ID NO: 22224 - DNA, 13 bp, Artificial Sequence
  Oligonucleotide for detection of SNP TSC0004408
rctacatttaacc

SEQ ID NO: 22225 - DNA, 13 bp, Artificial Sequence
  Oligonucleotide for detection of SNP TSC0004408
ggttaagtgtagy

SEQ ID NO: 22226 - DNA, 13 bp, Artificial Sequence
  Oligonucleotide for detection of SNP TSC0004408
rctacacttaacc

SEQ ID NO: 22227 - DNA, 13 bp, Artificial Sequence
  Oligonucleotide for detection of SNP TSC0004409
taatgatgataga

SEQ ID NO: 22228 - DNA, 13 bp, Artificial Sequence
  Oligonucleotide for detection of SNP TSC0004409
tctatcatcatta

SEQ ID NO: 22229 - DNA, 13 bp, Artificial Sequence
  Oligonucleotide for detection of SNP TSC0004409
taatgacgataga

SEQ ID NO: 22230 - DNA, 13 bp, Artificial Sequence
  Oligonucleotide for detection of SNP TSC0004409
tctatcgtcatta

SEQ ID NO: 22231 - DNA, 13 bp, Artificial Sequence
  Oligonucleotide for detection of SNP TSC0004409
tttgttattattg

SEQ ID NO: 22232 - DNA, 13 bp, Artificial Sequence
  Oligonucleotide for detection of SNP TSC0004409
caataataacaaa

SEQ ID NO: 22233 - DNA, 13 bp, Artificial Sequence
  Oligonucleotide for detection of SNP TSC0004409
tttgttgttattg

SEQ ID NO: 22234 - DNA, 13 bp, Artificial Sequence
  Oligonucleotide for detection of SNP TSC0004409
caataacaacaaa

SEQ ID NO: 22235 - DNA, 13 bp, Artificial Sequence
  Oligonucleotide for detection of SNP TSC0004409
tttgtcgttattg

SEQ ID NO: 22236 - DNA, 13 bp, Artificial Sequence
  Oligonucleotide for detection of SNP TSC0004409
caataacgacaaa

SEQ ID NO: 22237 - DNA, 13 bp, Artificial Sequence
  Oligonucleotide for detection of SNP TSC0004410
ttaataagttgay

SEQ ID NO: 22238 - DNA, 13 bp, Artificial Sequence
  Oligonucleotide for detection of SNP TSC0004410
rtcaacttattaa

SEQ ID NO: 22239 - DNA, 13 bp, Artificial Sequence
  Oligonucleotide for detection of SNP TSC0004411
aatgtggagttga

SEQ ID NO: 22240 - DNA, 13 bp, Artificial Sequence
  Oligonucleotide for detection of SNP TSC0004411
tcaactccacatt

SEQ ID NO: 22241 - DNA, 13 bp, Artificial Sequence
  Oligonucleotide for detection of SNP TSC0004411
aatgtgaagttga

SEQ ID NO: 22242 - DNA, 13 bp, Artificial Sequence
  Oligonucleotide for detection of SNP TSC0004411
tcaacttcacatt

SEQ ID NO: 22243 - DNA, 13 bp, Artificial Sequence
  Oligonucleotide for detection of SNP TSC0004411
aacgtggagttga

SEQ ID NO: 22244 - DNA, 13 bp, Artificial Sequence
  Oligonucleotide for detection of SNP TSC0004411
tcaactccacgtt

SEQ ID NO: 22245 - DNA, 13 bp, Artificial Sequence
  Oligonucleotide for detection of SNP TSC0004411
aacgtgaagttga

SEQ ID NO: 22246 - DNA, 13 bp, Artificial Sequence
  Oligonucleotide for detection of SNP TSC0004411
tcaacttcacgtt

SEQ ID NO: 22247 - DNA, 13 bp, Artificial Sequence
  Oligonucleotide for detection of SNP TSC0004411
aatgtggagtcga

SEQ ID NO: 22248 - DNA, 13 bp, Artificial Sequence
  Oligonucleotide for detection of SNP TSC0004411
tcgactccacatt

SEQ ID NO: 22249 - DNA, 13 bp, Artificial Sequence
  Oligonucleotide for detection of SNP TSC0004411
aatgtgaagtcga

SEQ ID NO: 22250 - DNA, 13 bp, Artificial Sequence
  Oligonucleotide for detection of SNP TSC0004411
tcgacttcacatt

SEQ ID NO: 22251 - DNA, 13 bp, Artificial Sequence
  Oligonucleotide for detection of SNP TSC0004411
aacgtggagtcga

SEQ ID NO: 22252 - DNA, 13 bp, Artificial Sequence
  Oligonucleotide for detection of SNP TSC0004411
tcgactccacgtt

SEQ ID NO: 22253 - DNA, 13 bp, Artificial Sequence
  Oligonucleotide for detection of SNP TSC0004411
aacgtgaagtcga

SEQ ID NO: 22254 - DNA, 13 bp, Artificial Sequence
  Oligonucleotide for detection of SNP TSC0004411
tcgacttcacgtt

SEQ ID NO: 22255 - DNA, 13 bp, Artificial Sequence
  Oligonucleotide for detection of SNP TSC0004412
gataaaaatttaa

SEQ ID NO: 22256 - DNA, 13 bp, Artificial Sequence
  Oligonucleotide for detection of SNP TSC0004412
ttaaatttttatc

SEQ ID NO: 22257 - DNA, 13 bp, Artificial Sequence
  Oligonucleotide for detection of SNP TSC0004412
gataaatatttaa

SEQ ID NO: 22258 - DNA, 13 bp, Artificial Sequence
  Oligonucleotide for detection of SNP TSC0004412
ttaaatatttatc

SEQ ID NO: 22259 - DNA, 13 bp, Artificial Sequence
  Oligonucleotide for detection of SNP TSC0004412
ttggatttttaty

SEQ ID NO: 22260 - DNA, 13 bp, Artificial Sequence
  Oligonucleotide for detection of SNP TSC0004412
rataaaaatccaa

SEQ ID NO: 22261 - DNA, 13 bp, Artificial Sequence
  Oligonucleotide for detection of SNP TSC0004412
ttggatatttaty

SEQ ID NO: 22262 - DNA, 13 bp, Artificial Sequence
  Oligonucleotide for detection of SNP TSC0004412
rataaatatccaa

SEQ ID NO: 22263 - DNA, 13 bp, Artificial Sequence
  Oligonucleotide for detection of SNP TSC0004413
ttagaaggtttay

SEQ ID NO: 22264 - DNA, 13 bp, Artificial Sequence
  Oligonucleotide for detection of SNP TSC0004413
rtaaaccttctaa

SEQ ID NO: 22265 - DNA, 13 bp, Artificial Sequence
  Oligonucleotide for detection of SNP TSC0004413
ttagaaagtttay

SEQ ID NO: 22266 - DNA, 13 bp, Artificial Sequence
  Oligonucleotide for detection of SNP TSC0004413
rtaaactttctaa

SEQ ID NO: 22267 - DNA, 13 bp, Artificial Sequence
  Oligonucleotide for detection of SNP TSC0004414
tgtagggatgtaa

SEQ ID NO: 22268 - DNA, 13 bp, Artificial Sequence
  Oligonucleotide for detection of SNP TSC0004414
ttacatccctaca

SEQ ID NO: 22269 - DNA, 13 bp, Artificial Sequence
  Oligonucleotide for detection of SNP TSC0004414
tgtaggtatgtaa

SEQ ID NO: 22270 - DNA, 13 bp, Artificial Sequence
  Oligonucleotide for detection of SNP TSC0004414
ttacatacctaca

SEQ ID NO: 22271 - DNA, 13 bp, Artificial Sequence
  Oligonucleotide for detection of SNP TSC0004414
ttgtatttttgta

SEQ ID NO: 22272 - DNA, 13 bp, Artificial Sequence
  Oligonucleotide for detection of SNP TSC0004414
tacaaaaatacaa

SEQ ID NO: 22273 - DNA, 13 bp, Artificial Sequence
  Oligonucleotide for detection of SNP TSC0004414
ttgtatgtttgta

SEQ ID NO: 22274 - DNA, 13 bp, Artificial Sequence
  Oligonucleotide for detection of SNP TSC0004414
tacaaacatacaa

SEQ ID NO: 22275 - DNA, 13 bp, Artificial Sequence
  Oligonucleotide for detection of SNP TSC0004415
ttgagggaggaga

SEQ ID NO: 22276 - DNA, 13 bp, Artificial Sequence
  Oligonucleotide for detection of SNP TSC0004415
tctcctccctcaa

SEQ ID NO: 22277 - DNA, 13 bp, Artificial Sequence
  Oligonucleotide for detection of SNP TSC0004415
ttgaggaaggaga

SEQ ID NO: 22278 - DNA, 13 bp, Artificial Sequence
  Oligonucleotide for detection of SNP TSC0004415
tctccttcctcaa

SEQ ID NO: 22279 - DNA, 13 bp, Artificial Sequence
  Oligonucleotide for detection of SNP TSC0004417
agtttggatgttt

SEQ ID NO: 22280 - DNA, 13 bp, Artificial Sequence
  Oligonucleotide for detection of SNP TSC0004417
aaacatccaaact

SEQ ID NO: 22281 - DNA, 13 bp, Artificial Sequence
  Oligonucleotide for detection of SNP TSC0004418
ttttagaatgtty

SEQ ID NO: 22282 - DNA, 13 bp, Artificial Sequence
  Oligonucleotide for detection of SNP TSC0004418
raacattctaaaa

SEQ ID NO: 22283 - DNA, 13 bp, Artificial Sequence
  Oligonucleotide for detection of SNP TSC0004418
ttttaggatgtty

SEQ ID NO: 22284 - DNA, 13 bp, Artificial Sequence
  Oligonucleotide for detection of SNP TSC0004418
raacatcctaaaa

SEQ ID NO: 22285 - DNA, 13 bp, Artificial Sequence
  Oligonucleotide for detection of SNP TSC0004419
gtatttaaataag

SEQ ID NO: 22286 - DNA, 13 bp, Artificial Sequence
  Oligonucleotide for detection of SNP TSC0004419
cttatttaaatac

SEQ ID NO: 22287 - DNA, 13 bp, Artificial Sequence
  Oligonucleotide for detection of SNP TSC0004419
gtattttaataag

SEQ ID NO: 22288 - DNA, 13 bp, Artificial Sequence
  Oligonucleotide for detection of SNP TSC0004419
cttattaaaatac

SEQ ID NO: 22289 - DNA, 13 bp, Artificial Sequence
  Oligonucleotide for detection of SNP TSC0004419
tttatttaaatgy

SEQ ID NO: 22290 - DNA, 13 bp, Artificial Sequence
  Oligonucleotide for detection of SNP TSC0004419
rcatttaaataaa

SEQ ID NO: 22291 - DNA, 13 bp, Artificial Sequence
  Oligonucleotide for detection of SNP TSC0004419
tttattgaaatgy

SEQ ID NO: 22292 - DNA, 13 bp, Artificial Sequence
  Oligonucleotide for detection of SNP TSC0004419
rcatttcaataaa

SEQ ID NO: 22293 - DNA, 13 bp, Artificial Sequence
  Oligonucleotide for detection of SNP TSC0004420
tttttttatgatt

SEQ ID NO: 22294 - DNA, 13 bp, Artificial Sequence
  Oligonucleotide for detection of SNP TSC0004420
aatcataaaaaaa

SEQ ID NO: 22295 - DNA, 13 bp, Artificial Sequence
  Oligonucleotide for detection of SNP TSC0004420
ttttttaatgatt

SEQ ID NO: 22296 - DNA, 13 bp, Artificial Sequence
  Oligonucleotide for detection of SNP TSC0004420
aatcattaaaaaa

SEQ ID NO: 22297 - DNA, 13 bp, Artificial Sequence
  Oligonucleotide for detection of SNP TSC0004420
aattataaaaaaa

SEQ ID NO: 22298 - DNA, 13 bp, Artificial Sequence
  Oligonucleotide for detection of SNP TSC0004420
tttttttataatt

SEQ ID NO: 22299 - DNA, 13 bp, Artificial Sequence
  Oligonucleotide for detection of SNP TSC0004420
aattattaaaaaa

SEQ ID NO: 22300 - DNA, 13 bp, Artificial Sequence
  Oligonucleotide for detection of SNP TSC0004420
ttttttaataatt

SEQ ID NO: 22301 - DNA, 13 bp, Artificial Sequence
  Oligonucleotide for detection of SNP TSC0004421
tatagtagattay

SEQ ID NO: 22302 - DNA, 13 bp, Artificial Sequence
  Oligonucleotide for detection of SNP TSC0004421
rtaatctactata

SEQ ID NO: 22303 - DNA, 13 bp, Artificial Sequence
  Oligonucleotide for detection of SNP TSC0004421
tatagtggattay

SEQ ID NO: 22304 - DNA, 13 bp, Artificial Sequence
  Oligonucleotide for detection of SNP TSC0004421
rtaatccactata

SEQ ID NO: 22305 - DNA, 13 bp, Artificial Sequence
  Oligonucleotide for detection of SNP TSC0004422
attgttattggga

SEQ ID NO: 22306 - DNA, 13 bp, Artificial Sequence
  Oligonucleotide for detection of SNP TSC0004422
tcccaataacaat

SEQ ID NO: 22307 - DNA, 13 bp, Artificial Sequence
  Oligonucleotide for detection of SNP TSC0004422
attgttgttggga

SEQ ID NO: 22308 - DNA, 13 bp, Artificial Sequence
  Oligonucleotide for detection of SNP TSC0004422
tcccaacaacaat

SEQ ID NO: 22309 - DNA, 13 bp, Artificial Sequence
  Oligonucleotide for detection of SNP TSC0004422
atcgttattggga

SEQ ID NO: 22310 - DNA, 13 bp, Artificial Sequence
  Oligonucleotide for detection of SNP TSC0004422
tcccaataacgat

SEQ ID NO: 22311 - DNA, 13 bp, Artificial Sequence
  Oligonucleotide for detection of SNP TSC0004422
atcgttgttggga

SEQ ID NO: 22312 - DNA, 13 bp, Artificial Sequence
  Oligonucleotide for detection of SNP TSC0004422
tcccaacaacgat

SEQ ID NO: 22313 - DNA, 13 bp, Artificial Sequence
  Oligonucleotide for detection of SNP TSC0004423
ttttttgattttt

SEQ ID NO: 22314 - DNA, 13 bp, Artificial Sequence
  Oligonucleotide for detection of SNP TSC0004423
aaaaatcaaaaaa

SEQ ID NO: 22315 - DNA, 13 bp, Artificial Sequence
  Oligonucleotide for detection of SNP TSC0004424
tgtaaagtatgaa

SEQ ID NO: 22316 - DNA, 13 bp, Artificial Sequence
  Oligonucleotide for detection of SNP TSC0004424
ttcatactttaca

SEQ ID NO: 22317 - DNA, 13 bp, Artificial Sequence
  Oligonucleotide for detection of SNP TSC0004424
tgtaaaatatgaa

SEQ ID NO: 22318 - DNA, 13 bp, Artificial Sequence
  Oligonucleotide for detection of SNP TSC0004424
ttcatattttaca

SEQ ID NO: 22319 - DNA, 13 bp, Artificial Sequence
  Oligonucleotide for detection of SNP TSC0004425
ttatatatatttt

SEQ ID NO: 22320 - DNA, 13 bp, Artificial Sequence
  Oligonucleotide for detection of SNP TSC0004425
aaaatatatataa

SEQ ID NO: 22321 - DNA, 13 bp, Artificial Sequence
  Oligonucleotide for detection of SNP TSC0004425
ttatatttatttt

SEQ ID NO: 22322 - DNA, 13 bp, Artificial Sequence
  Oligonucleotide for detection of SNP TSC0004425
aaaataaatataa

SEQ ID NO: 22323 - DNA, 13 bp, Artificial Sequence
  Oligonucleotide for detection of SNP TSC0004425
aggatgtgtgtga

SEQ ID NO: 22324 - DNA, 13 bp, Artificial Sequence
  Oligonucleotide for detection of SNP TSC0004425
tcacacacatcct

SEQ ID NO: 22325 - DNA, 13 bp, Artificial Sequence
  Oligonucleotide for detection of SNP TSC0004425
aggatgagtgtga

SEQ ID NO: 22326 - DNA, 13 bp, Artificial Sequence
  Oligonucleotide for detection of SNP TSC0004425
tcacactcatcct

SEQ ID NO: 22327 - DNA, 13 bp, Artificial Sequence
  Oligonucleotide for detection of SNP TSC0004426
tttttgaattttt

SEQ ID NO: 22328 - DNA, 13 bp, Artificial Sequence
  Oligonucleotide for detection of SNP TSC0004426
aaaaattcaaaaa

SEQ ID NO: 22329 - DNA, 13 bp, Artificial Sequence
  Oligonucleotide for detection of SNP TSC0004426
tttttgtattttt

SEQ ID NO: 22330 - DNA, 13 bp, Artificial Sequence
  Oligonucleotide for detection of SNP TSC0004426
aaaaatacaaaaa

SEQ ID NO: 22331 - DNA, 13 bp, Artificial Sequence
  Oligonucleotide for detection of SNP TSC0004426
aaaaatttaaaaa

SEQ ID NO: 22332 - DNA, 13 bp, Artificial Sequence
  Oligonucleotide for detection of SNP TSC0004426
tttttaaattttt

SEQ ID NO: 22333 - DNA, 13 bp, Artificial Sequence
  Oligonucleotide for detection of SNP TSC0004426
aaaaatgtaaaaa

SEQ ID NO: 22334 - DNA, 13 bp, Artificial Sequence
  Oligonucleotide for detection of SNP TSC0004426
tttttacattttt

SEQ ID NO: 22335 - DNA, 13 bp, Artificial Sequence
  Oligonucleotide for detection of SNP TSC0004427
tattgtggattgt

SEQ ID NO: 22336 - DNA, 13 bp, Artificial Sequence
  Oligonucleotide for detection of SNP TSC0004427
acaatccacaata

SEQ ID NO: 22337 - DNA, 13 bp, Artificial Sequence
  Oligonucleotide for detection of SNP TSC0004427
tattgtagattgt

SEQ ID NO: 22338 - DNA, 13 bp, Artificial Sequence
  Oligonucleotide for detection of SNP TSC0004427
acaatctacaata

SEQ ID NO: 22339 - DNA, 13 bp, Artificial Sequence
  Oligonucleotide for detection of SNP TSC0004427
tattgcggattgt

SEQ ID NO: 22340 - DNA, 13 bp, Artificial Sequence
  Oligonucleotide for detection of SNP TSC0004427
acaatccgcaata

SEQ ID NO: 22341 - DNA, 13 bp, Artificial Sequence
  Oligonucleotide for detection of SNP TSC0004427
atagtttgtaatg

SEQ ID NO: 22342 - DNA, 13 bp, Artificial Sequence
  Oligonucleotide for detection of SNP TSC0004427
cattacaaactat

SEQ ID NO: 22343 - DNA, 13 bp, Artificial Sequence
  Oligonucleotide for detection of SNP TSC0004427
atagttcgtaatg

SEQ ID NO: 22344 - DNA, 13 bp, Artificial Sequence
  Oligonucleotide for detection of SNP TSC0004427
cattacgaactat

SEQ ID NO: 22345 - DNA, 13 bp, Artificial Sequence
  Oligonucleotide for detection of SNP TSC0004428
gggatattttagt

SEQ ID NO: 22346 - DNA, 13 bp, Artificial Sequence
  Oligonucleotide for detection of SNP TSC0004428
actaaaatatccc

SEQ ID NO: 22347 - DNA, 13 bp, Artificial Sequence
  Oligonucleotide for detection of SNP TSC0004428
gggataatttagt

SEQ ID NO: 22348 - DNA, 13 bp, Artificial Sequence
  Oligonucleotide for detection of SNP TSC0004428
actaaattatccc

SEQ ID NO: 22349 - DNA, 13 bp, Artificial Sequence
  Oligonucleotide for detection of SNP TSC0004428
attgaaatattty

SEQ ID NO: 22350 - DNA, 13 bp, Artificial Sequence
  Oligonucleotide for detection of SNP TSC0004428
raaatatttcaat

SEQ ID NO: 22351 - DNA, 13 bp, Artificial Sequence
  Oligonucleotide for detection of SNP TSC0004428
attgaattattty

SEQ ID NO: 22352 - DNA, 13 bp, Artificial Sequence
  Oligonucleotide for detection of SNP TSC0004428
raaataattcaat

SEQ ID NO: 22353 - DNA, 13 bp, Artificial Sequence
  Oligonucleotide for detection of SNP TSC0004429
tatagttgataga

SEQ ID NO: 22354 - DNA, 13 bp, Artificial Sequence
  Oligonucleotide for detection of SNP TSC0004429
tctatcaactata

SEQ ID NO: 22355 - DNA, 13 bp, Artificial Sequence
  Oligonucleotide for detection of SNP TSC0004429
tatagtcgataga

SEQ ID NO: 22356 - DNA, 13 bp, Artificial Sequence
  Oligonucleotide for detection of SNP TSC0004429
tctatcgactata

SEQ ID NO: 22357 - DNA, 13 bp, Artificial Sequence
  Oligonucleotide for detection of SNP TSC0004429
tttattgattatg

SEQ ID NO: 22358 - DNA, 13 bp, Artificial Sequence
  Oligonucleotide for detection of SNP TSC0004429
cataatcaataaa

SEQ ID NO: 22359 - DNA, 13 bp, Artificial Sequence
  Oligonucleotide for detection of SNP TSC0004429
tttattaattatg

SEQ ID NO: 22360 - DNA, 13 bp, Artificial Sequence
  Oligonucleotide for detection of SNP TSC0004429
cataattaataaa

SEQ ID NO: 22361 - DNA, 13 bp, Artificial Sequence
  Oligonucleotide for detection of SNP TSC0004429
tttatcgattatg

SEQ ID NO: 22362 - DNA, 13 bp, Artificial Sequence
  Oligonucleotide for detection of SNP TSC0004429
cataatcgataaa

SEQ ID NO: 22363 - DNA, 13 bp, Artificial Sequence
  Oligonucleotide for detection of SNP TSC0004430
tgtttgaggaaaa

SEQ ID NO: 22364 - DNA, 13 bp, Artificial Sequence
  Oligonucleotide for detection of SNP TSC0004430
ttttcctcaaaca

SEQ ID NO: 22365 - DNA, 13 bp, Artificial Sequence
  Oligonucleotide for detection of SNP TSC0004430
tgtttggggaaaa

SEQ ID NO: 22366 - DNA, 13 bp, Artificial Sequence
  Oligonucleotide for detection of SNP TSC0004430
ttttccccaaaca

SEQ ID NO: 22367 - DNA, 13 bp, Artificial Sequence
  Oligonucleotide for detection of SNP TSC0004431
tttttagtagttg

SEQ ID NO: 22368 - DNA, 13 bp, Artificial Sequence
  Oligonucleotide for detection of SNP TSC0004431
caactactaaaaa

SEQ ID NO: 22369 - DNA, 13 bp, Artificial Sequence
  Oligonucleotide for detection of SNP TSC0004431
tttttaatagttg

SEQ ID NO: 22370 - DNA, 13 bp, Artificial Sequence
  Oligonucleotide for detection of SNP TSC0004431
caactattaaaaa

SEQ ID NO: 22371 - DNA, 13 bp, Artificial Sequence
  Oligonucleotide for detection of SNP TSC0004432
gggaggatgggag

SEQ ID NO: 22372 - DNA, 13 bp, Artificial Sequence
  Oligonucleotide for detection of SNP TSC0004432
ctcccatcctccc

SEQ ID NO: 22373 - DNA, 13 bp, Artificial Sequence
  Oligonucleotide for detection of SNP TSC0004432
gggaggttgggag

SEQ ID NO: 22374 - DNA, 13 bp, Artificial Sequence
  Oligonucleotide for detection of SNP TSC0004432
ctcccaacctccc

SEQ ID NO: 22375 - DNA, 13 bp, Artificial Sequence
  Oligonucleotide for detection of SNP TSC0004432
gggaggacgggag

SEQ ID NO: 22376 - DNA, 13 bp, Artificial Sequence
  Oligonucleotide for detection of SNP TSC0004432
ctcccgtcctccc

SEQ ID NO: 22377 - DNA, 13 bp, Artificial Sequence
  Oligonucleotide for detection of SNP TSC0004432
gggaggtcgggag

SEQ ID NO: 22378 - DNA, 13 bp, Artificial Sequence
  Oligonucleotide for detection of SNP TSC0004432
ctcccgacctccc

SEQ ID NO: 22379 - DNA, 13 bp, Artificial Sequence
  Oligonucleotide for detection of SNP TSC0004432
tttttgtttttty

SEQ ID NO: 22380 - DNA, 13 bp, Artificial Sequence
  Oligonucleotide for detection of SNP TSC0004432
raaaaaacaaaaa

SEQ ID NO: 22381 - DNA, 13 bp, Artificial Sequence
  Oligonucleotide for detection of SNP TSC0004432
tttttgattttty

SEQ ID NO: 22382 - DNA, 13 bp, Artificial Sequence
  Oligonucleotide for detection of SNP TSC0004432
raaaaatcaaaaa

SEQ ID NO: 22383 - DNA, 13 bp, Artificial Sequence
  Oligonucleotide for detection of SNP TSC0004432
ttttcgtttttty

SEQ ID NO: 22384 - DNA, 13 bp, Artificial Sequence
  Oligonucleotide for detection of SNP TSC0004432
raaaaaacgaaaa

SEQ ID NO: 22385 - DNA, 13 bp, Artificial Sequence
  Oligonucleotide for detection of SNP TSC0004432
ttttcgattttty

SEQ ID NO: 22386 - DNA, 13 bp, Artificial Sequence
  Oligonucleotide for detection of SNP TSC0004432
raaaaatcgaaaa

SEQ ID NO: 22387 - DNA, 13 bp, Artificial Sequence
  Oligonucleotide for detection of SNP TSC0004433
ttttggtttgttg

SEQ ID NO: 22388 - DNA, 13 bp, Artificial Sequence
  Oligonucleotide for detection of SNP TSC0004433
caacaaaccaaaa

SEQ ID NO: 22389 - DNA, 13 bp, Artificial Sequence
  Oligonucleotide for detection of SNP TSC0004433
ttttgggttgttg

SEQ ID NO: 22390 - DNA, 13 bp, Artificial Sequence
  Oligonucleotide for detection of SNP TSC0004433
caacaacccaaaa

SEQ ID NO: 22391 - DNA, 13 bp, Artificial Sequence
  Oligonucleotide for detection of SNP TSC0004433
tagtagattagga

SEQ ID NO: 22392 - DNA, 13 bp, Artificial Sequence
  Oligonucleotide for detection of SNP TSC0004433
tcctaatctacta

SEQ ID NO: 22393 - DNA, 13 bp, Artificial Sequence
  Oligonucleotide for detection of SNP TSC0004433
tagtagtttagga

SEQ ID NO: 22394 - DNA, 13 bp, Artificial Sequence
  Oligonucleotide for detection of SNP TSC0004433
tcctaaactacta

SEQ ID NO: 22395 - DNA, 13 bp, Artificial Sequence
  Oligonucleotide for detection of SNP TSC0004434
tttttatggttty

SEQ ID NO: 22396 - DNA, 13 bp, Artificial Sequence
  Oligonucleotide for detection of SNP TSC0004434
raaaccataaaaa

SEQ ID NO: 22397 - DNA, 13 bp, Artificial Sequence
  Oligonucleotide for detection of SNP TSC0004434
tttttagggttty

SEQ ID NO: 22398 - DNA, 13 bp, Artificial Sequence
  Oligonucleotide for detection of SNP TSC0004434
raaaccctaaaaa

SEQ ID NO: 22399 - DNA, 13 bp, Artificial Sequence
  Oligonucleotide for detection of SNP TSC0004434
tttttacggttty

SEQ ID NO: 22400 - DNA, 13 bp, Artificial Sequence
  Oligonucleotide for detection of SNP TSC0004434
raaaccgtaaaaa

SEQ ID NO: 22401 - DNA, 13 bp, Artificial Sequence
  Oligonucleotide for detection of SNP TSC0004434
ggagttgtagggg

SEQ ID NO: 22402 - DNA, 13 bp, Artificial Sequence
  Oligonucleotide for detection of SNP TSC0004434
cccctacaactcc

SEQ ID NO: 22403 - DNA, 13 bp, Artificial Sequence
  Oligonucleotide for detection of SNP TSC0004434
ggagttttagggg

SEQ ID NO: 22404 - DNA, 13 bp, Artificial Sequence
  Oligonucleotide for detection of SNP TSC0004434
cccctaaaactcc

SEQ ID NO: 22405 - DNA, 13 bp, Artificial Sequence
  Oligonucleotide for detection of SNP TSC0004434
ggagtcgtagggg

SEQ ID NO: 22406 - DNA, 13 bp, Artificial Sequence
  Oligonucleotide for detection of SNP TSC0004434
cccctacgactcc

SEQ ID NO: 22407 - DNA, 13 bp, Artificial Sequence
  Oligonucleotide for detection of SNP TSC0004435
gtaagttttttty

SEQ ID NO: 22408 - DNA, 13 bp, Artificial Sequence
  Oligonucleotide for detection of SNP TSC0004435
raaaaaaacttac

SEQ ID NO: 22409 - DNA, 13 bp, Artificial Sequence
  Oligonucleotide for detection of SNP TSC0004435
gtaagtattttty

SEQ ID NO: 22410 - DNA, 13 bp, Artificial Sequence
  Oligonucleotide for detection of SNP TSC0004435
raaaaatacttac

SEQ ID NO: 22411 - DNA, 13 bp, Artificial Sequence
  Oligonucleotide for detection of SNP TSC0004435
gagagaggtttgy

SEQ ID NO: 22412 - DNA, 13 bp, Artificial Sequence
  Oligonucleotide for detection of SNP TSC0004435
rcaaacctctctc

SEQ ID NO: 22413 - DNA, 13 bp, Artificial Sequence
  Oligonucleotide for detection of SNP TSC0004435
gagagatgtttgy

SEQ ID NO: 22414 - DNA, 13 bp, Artificial Sequence
  Oligonucleotide for detection of SNP TSC0004435
rcaaacatctctc

SEQ ID NO: 22415 - DNA, 13 bp, Artificial Sequence
  Oligonucleotide for detection of SNP TSC0004436
ttttaggattgty

SEQ ID NO: 22416 - DNA, 13 bp, Artificial Sequence
  Oligonucleotide for detection of SNP TSC0004436
racaatcctaaaa

SEQ ID NO: 22417 - DNA, 13 bp, Artificial Sequence
  Oligonucleotide for detection of SNP TSC0004436
ttttagaattgty

SEQ ID NO: 22418 - DNA, 13 bp, Artificial Sequence
  Oligonucleotide for detection of SNP TSC0004436
racaattctaaaa

SEQ ID NO: 22419 - DNA, 13 bp, Artificial Sequence
  Oligonucleotide for detection of SNP TSC0004437
ttgaaaaagaaag

SEQ ID NO: 22420 - DNA, 13 bp, Artificial Sequence
  Oligonucleotide for detection of SNP TSC0004437
ctttctttttcaa

SEQ ID NO: 22421 - DNA, 13 bp, Artificial Sequence
  Oligonucleotide for detection of SNP TSC0004437
ttgaaagagaaag

SEQ ID NO: 22422 - DNA, 13 bp, Artificial Sequence
  Oligonucleotide for detection of SNP TSC0004437
ctttctctttcaa

SEQ ID NO: 22423 - DNA, 13 bp, Artificial Sequence
  Oligonucleotide for detection of SNP TSC0004438
tgggagtggatgy

SEQ ID NO: 22424 - DNA, 13 bp, Artificial Sequence
  Oligonucleotide for detection of SNP TSC0004438
rcatccactccca

SEQ ID NO: 22425 - DNA, 13 bp, Artificial Sequence
  Oligonucleotide for detection of SNP TSC0004438
cgggagtggatgy

SEQ ID NO: 22426 - DNA, 13 bp, Artificial Sequence
  Oligonucleotide for detection of SNP TSC0004438
rcatccactcccg

SEQ ID NO: 22427 - DNA, 13 bp, Artificial Sequence
  Oligonucleotide for detection of SNP TSC0004438
tgggagcggatgy

SEQ ID NO: 22428 - DNA, 13 bp, Artificial Sequence
  Oligonucleotide for detection of SNP TSC0004438
rcatccgctccca

SEQ ID NO: 22429 - DNA, 13 bp, Artificial Sequence
  Oligonucleotide for detection of SNP TSC0004438
cgggagcggatgy

SEQ ID NO: 22430 - DNA, 13 bp, Artificial Sequence
  Oligonucleotide for detection of SNP TSC0004438
rcatccgctcccg

SEQ ID NO: 22431 - DNA, 13 bp, Artificial Sequence
  Oligonucleotide for detection of SNP TSC0004438
gtatttattttcg

SEQ ID NO: 22432 - DNA, 13 bp, Artificial Sequence
  Oligonucleotide for detection of SNP TSC0004438
cgaaaataaatac

SEQ ID NO: 22433 - DNA, 13 bp, Artificial Sequence
  Oligonucleotide for detection of SNP TSC0004438
gtattcgtttttg

SEQ ID NO: 22434 - DNA, 13 bp, Artificial Sequence
  Oligonucleotide for detection of SNP TSC0004438
caaaaacgaatac

SEQ ID NO: 22435 - DNA, 13 bp, Artificial Sequence
  Oligonucleotide for detection of SNP TSC0004438
gtatttgttttcg

SEQ ID NO: 22436 - DNA, 13 bp, Artificial Sequence
  Oligonucleotide for detection of SNP TSC0004438
cgaaaacaaatac

SEQ ID NO: 22437 - DNA, 13 bp, Artificial Sequence
  Oligonucleotide for detection of SNP TSC0004438
gtattcgttttcg

SEQ ID NO: 22438 - DNA, 13 bp, Artificial Sequence
  Oligonucleotide for detection of SNP TSC0004438
cgaaaacgaatac

SEQ ID NO: 22439 - DNA, 13 bp, Artificial Sequence
  Oligonucleotide for detection of SNP TSC0004439
ttttaggagagat

SEQ ID NO: 22440 - DNA, 13 bp, Artificial Sequence
  Oligonucleotide for detection of SNP TSC0004439
atctctcctaaaa

SEQ ID NO: 22441 - DNA, 13 bp, Artificial Sequence
  Oligonucleotide for detection of SNP TSC0004439
ttttagaagagat

SEQ ID NO: 22442 - DNA, 13 bp, Artificial Sequence
  Oligonucleotide for detection of SNP TSC0004439
atctcttctaaaa

SEQ ID NO: 22443 - DNA, 13 bp, Artificial Sequence
  Oligonucleotide for detection of SNP TSC0004440
ttatgttgagaat

SEQ ID NO: 22444 - DNA, 13 bp, Artificial Sequence
  Oligonucleotide for detection of SNP TSC0004440
attctcaacataa

SEQ ID NO: 22445 - DNA, 13 bp, Artificial Sequence
  Oligonucleotide for detection of SNP TSC0004440
ttacgttgagaat

SEQ ID NO: 22446 - DNA, 13 bp, Artificial Sequence
  Oligonucleotide for detection of SNP TSC0004440
attctcaacgtaa

SEQ ID NO: 22447 - DNA, 13 bp, Artificial Sequence
  Oligonucleotide for detection of SNP TSC0004440
ttatgtcgagaat

SEQ ID NO: 22448 - DNA, 13 bp, Artificial Sequence
  Oligonucleotide for detection of SNP TSC0004440
attctcgacataa

SEQ ID NO: 22449 - DNA, 13 bp, Artificial Sequence
  Oligonucleotide for detection of SNP TSC0004440
ttacgtcgagaat

SEQ ID NO: 22450 - DNA, 13 bp, Artificial Sequence
  Oligonucleotide for detection of SNP TSC0004440
attctcgacgtaa

SEQ ID NO: 22451 - DNA, 13 bp, Artificial Sequence
  Oligonucleotide for detection of SNP TSC0004440
atttttagtgtaa

SEQ ID NO: 22452 - DNA, 13 bp, Artificial Sequence
  Oligonucleotide for detection of SNP TSC0004440
ttacactaaaaat

SEQ ID NO: 22453 - DNA, 13 bp, Artificial Sequence
  Oligonucleotide for detection of SNP TSC0004440
atttttggtgtaa

SEQ ID NO: 22454 - DNA, 13 bp, Artificial Sequence
  Oligonucleotide for detection of SNP TSC0004440
ttacaccaaaaat

SEQ ID NO: 22455 - DNA, 13 bp, Artificial Sequence
  Oligonucleotide for detection of SNP TSC0004440
atttttagcgtaa

SEQ ID NO: 22456 - DNA, 13 bp, Artificial Sequence
  Oligonucleotide for detection of SNP TSC0004440
ttacgctaaaaat

SEQ ID NO: 22457 - DNA, 13 bp, Artificial Sequence
  Oligonucleotide for detection of SNP TSC0004440
attttcggtgtaa

SEQ ID NO: 22458 - DNA, 13 bp, Artificial Sequence
  Oligonucleotide for detection of SNP TSC0004440
ttacaccgaaaat

SEQ ID NO: 22459 - DNA, 13 bp, Artificial Sequence
  Oligonucleotide for detection of SNP TSC0004440
atttttggcgtaa

SEQ ID NO: 22460 - DNA, 13 bp, Artificial Sequence
  Oligonucleotide for detection of SNP TSC0004440
ttacgccaaaaat

SEQ ID NO: 22461 - DNA, 13 bp, Artificial Sequence
  Oligonucleotide for detection of SNP TSC0004440
attttcggcgtaa

SEQ ID NO: 22462 - DNA, 13 bp, Artificial Sequence
  Oligonucleotide for detection of SNP TSC0004440
ttacgccgaaaat

SEQ ID NO: 22463 - DNA, 13 bp, Artificial Sequence
  Oligonucleotide for detection of SNP TSC0004441
attttggttttay

SEQ ID NO: 22464 - DNA, 13 bp, Artificial Sequence
  Oligonucleotide for detection of SNP TSC0004441
rtaaaaccaaaat

SEQ ID NO: 22465 - DNA, 13 bp, Artificial Sequence
  Oligonucleotide for detection of SNP TSC0004441
attttgattttay

SEQ ID NO: 22466 - DNA, 13 bp, Artificial Sequence
  Oligonucleotide for detection of SNP TSC0004441
rtaaaatcaaaat

SEQ ID NO: 22467 - DNA, 13 bp, Artificial Sequence
  Oligonucleotide for detection of SNP TSC0004442
atttatgtttggg

SEQ ID NO: 22468 - DNA, 13 bp, Artificial Sequence
  Oligonucleotide for detection of SNP TSC0004442
cccaaacataaat

SEQ ID NO: 22469 - DNA, 13 bp, Artificial Sequence
  Oligonucleotide for detection of SNP TSC0004442
atttatatttggg

SEQ ID NO: 22470 - DNA, 13 bp, Artificial Sequence
  Oligonucleotide for detection of SNP TSC0004442
cccaaatataaat

SEQ ID NO: 22471 - DNA, 13 bp, Artificial Sequence
  Oligonucleotide for detection of SNP TSC0004442
atttacgtttggg

SEQ ID NO: 22472 - DNA, 13 bp, Artificial Sequence
  Oligonucleotide for detection of SNP TSC0004442
cccaaacgtaaat

SEQ ID NO: 22473 - DNA, 13 bp, Artificial Sequence
  Oligonucleotide for detection of SNP TSC0004442
tttaagtgtaggt

SEQ ID NO: 22474 - DNA, 13 bp, Artificial Sequence
  Oligonucleotide for detection of SNP TSC0004442
acctacacttaaa

SEQ ID NO: 22475 - DNA, 13 bp, Artificial Sequence
  Oligonucleotide for detection of SNP TSC0004442
tttaagcgtaggt

SEQ ID NO: 22476 - DNA, 13 bp, Artificial Sequence
  Oligonucleotide for detection of SNP TSC0004442
acctacgcttaaa

SEQ ID NO: 22477 - DNA, 13 bp, Artificial Sequence
  Oligonucleotide for detection of SNP TSC0004443
ttttttggggttg

SEQ ID NO: 22478 - DNA, 13 bp, Artificial Sequence
  Oligonucleotide for detection of SNP TSC0004443
caaccccaaaaaa

SEQ ID NO: 22479 - DNA, 13 bp, Artificial Sequence
  Oligonucleotide for detection of SNP TSC0004443
ttttttagggttg

SEQ ID NO: 22480 - DNA, 13 bp, Artificial Sequence
  Oligonucleotide for detection of SNP TSC0004443
caaccctaaaaaa

SEQ ID NO: 22481 - DNA, 13 bp, Artificial Sequence
  Oligonucleotide for detection of SNP TSC0004443
tttttcggggttg

SEQ ID NO: 22482 - DNA, 13 bp, Artificial Sequence
  Oligonucleotide for detection of SNP TSC0004443
caaccccgaaaaa

SEQ ID NO: 22483 - DNA, 13 bp, Artificial Sequence
  Oligonucleotide for detection of SNP TSC0004443
tagttttgaagaa

SEQ ID NO: 22484 - DNA, 13 bp, Artificial Sequence
  Oligonucleotide for detection of SNP TSC0004443
ttcttcaaaacta

SEQ ID NO: 22485 - DNA, 13 bp, Artificial Sequence
  Oligonucleotide for detection of SNP TSC0004443
tagtttcgaagaa

SEQ ID NO: 22486 - DNA, 13 bp, Artificial Sequence
  Oligonucleotide for detection of SNP TSC0004443
ttcttcgaaacta

SEQ ID NO: 22487 - DNA, 13 bp, Artificial Sequence
  Oligonucleotide for detection of SNP TSC0004444
tgtttaataattt

SEQ ID NO: 22488 - DNA, 13 bp, Artificial Sequence
  Oligonucleotide for detection of SNP TSC0004444
aaattattaaaca

SEQ ID NO: 22489 - DNA, 13 bp, Artificial Sequence
  Oligonucleotide for detection of SNP TSC0004444
tgtttagtaattt

SEQ ID NO: 22490 - DNA, 13 bp, Artificial Sequence
  Oligonucleotide for detection of SNP TSC0004444
aaattactaaaca

SEQ ID NO: 22491 - DNA, 13 bp, Artificial Sequence
  Oligonucleotide for detection of SNP TSC0004444
cgtttaataattt

SEQ ID NO: 22492 - DNA, 13 bp, Artificial Sequence
  Oligonucleotide for detection of SNP TSC0004444
aaattattaaacg

SEQ ID NO: 22493 - DNA, 13 bp, Artificial Sequence
  Oligonucleotide for detection of SNP TSC0004444
cgtttagtaattt

SEQ ID NO: 22494 - DNA, 13 bp, Artificial Sequence
  Oligonucleotide for detection of SNP TSC0004444
aaattactaaacg

SEQ ID NO: 22495 - DNA, 13 bp, Artificial Sequence
  Oligonucleotide for detection of SNP TSC0004445
gatagagattatt

SEQ ID NO: 22496 - DNA, 13 bp, Artificial Sequence
  Oligonucleotide for detection of SNP TSC0004445
aataatctctatc

SEQ ID NO: 22497 - DNA, 13 bp, Artificial Sequence
  Oligonucleotide for detection of SNP TSC0004445
gatagaaattatt

SEQ ID NO: 22498 - DNA, 13 bp, Artificial Sequence
  Oligonucleotide for detection of SNP TSC0004445
aataatttctatc

SEQ ID NO: 22499 - DNA, 13 bp, Artificial Sequence
  Oligonucleotide for detection of SNP TSC0004446
ggaggttggggtt

SEQ ID NO: 22500 - DNA, 13 bp, Artificial Sequence
  Oligonucleotide for detection of SNP TSC0004446
aaccccaacctcc

SEQ ID NO: 22501 - DNA, 13 bp, Artificial Sequence
  Oligonucleotide for detection of SNP TSC0004446
ggaggtcggggtt

SEQ ID NO: 22502 - DNA, 13 bp, Artificial Sequence
  Oligonucleotide for detection of SNP TSC0004446
aaccccgacctcc

SEQ ID NO: 22503 - DNA, 13 bp, Artificial Sequence
  Oligonucleotide for detection of SNP TSC0004447
ttttgatggtaty

SEQ ID NO: 22504 - DNA, 13 bp, Artificial Sequence
  Oligonucleotide for detection of SNP TSC0004447
rataccatcaaaa

SEQ ID NO: 22505 - DNA, 13 bp, Artificial Sequence
  Oligonucleotide for detection of SNP TSC0004447
ttttgacggtaty

SEQ ID NO: 22506 - DNA, 13 bp, Artificial Sequence
  Oligonucleotide for detection of SNP TSC0004447
rataccgtcaaaa

SEQ ID NO: 22507 - DNA, 13 bp, Artificial Sequence
  Oligonucleotide for detection of SNP TSC0004447
ggtgttattagag

SEQ ID NO: 22508 - DNA, 13 bp, Artificial Sequence
  Oligonucleotide for detection of SNP TSC0004447
ctctaataacacc

SEQ ID NO: 22509 - DNA, 13 bp, Artificial Sequence
  Oligonucleotide for detection of SNP TSC0004447
ggtgttgttagag

SEQ ID NO: 22510 - DNA, 13 bp, Artificial Sequence
  Oligonucleotide for detection of SNP TSC0004447
ctctaacaacacc

SEQ ID NO: 22511 - DNA, 13 bp, Artificial Sequence
  Oligonucleotide for detection of SNP TSC0004447
ggtgtcgttagag

SEQ ID NO: 22512 - DNA, 13 bp, Artificial Sequence
  Oligonucleotide for detection of SNP TSC0004447
ctctaacgacacc

SEQ ID NO: 22513 - DNA, 13 bp, Artificial Sequence
  Oligonucleotide for detection of SNP TSC0004448
gagtgggggatgg

SEQ ID NO: 22514 - DNA, 13 bp, Artificial Sequence
  Oligonucleotide for detection of SNP TSC0004448
ccatcccccactc

SEQ ID NO: 22515 - DNA, 13 bp, Artificial Sequence
  Oligonucleotide for detection of SNP TSC0004448
gagtggaggatgg

SEQ ID NO: 22516 - DNA, 13 bp, Artificial Sequence
  Oligonucleotide for detection of SNP TSC0004448
ccatcctccactc

SEQ ID NO: 22517 - DNA, 13 bp, Artificial Sequence
  Oligonucleotide for detection of SNP TSC0004449
attttggtattag

SEQ ID NO: 22518 - DNA, 13 bp, Artificial Sequence
  Oligonucleotide for detection of SNP TSC0004449
ctaataccaaaat

SEQ ID NO: 22519 - DNA, 13 bp, Artificial Sequence
  Oligonucleotide for detection of SNP TSC0004449
attttgatattag

SEQ ID NO: 22520 - DNA, 13 bp, Artificial Sequence
  Oligonucleotide for detection of SNP TSC0004449
ctaatatcaaaat

SEQ ID NO: 22521 - DNA, 13 bp, Artificial Sequence
  Oligonucleotide for detection of SNP TSC0004450
gttgtatgtaagt

SEQ ID NO: 22522 - DNA, 13 bp, Artificial Sequence
  Oligonucleotide for detection of SNP TSC0004450
acttacatacaac

SEQ ID NO: 22523 - DNA, 13 bp, Artificial Sequence
  Oligonucleotide for detection of SNP TSC0004450
gttgtacgtaagt

SEQ ID NO: 22524 - DNA, 13 bp, Artificial Sequence
  Oligonucleotide for detection of SNP TSC0004450
acttacgtacaac

SEQ ID NO: 22525 - DNA, 13 bp, Artificial Sequence
  Oligonucleotide for detection of SNP TSC0004450
atttatatgtagy

SEQ ID NO: 22526 - DNA, 13 bp, Artificial Sequence
  Oligonucleotide for detection of SNP TSC0004450
rctacatataaat

SEQ ID NO: 22527 - DNA, 13 bp, Artificial Sequence
  Oligonucleotide for detection of SNP TSC0004450
atttatgtgtagy

SEQ ID NO: 22528 - DNA, 13 bp, Artificial Sequence
  Oligonucleotide for detection of SNP TSC0004450
rctacacataaat

SEQ ID NO: 22529 - DNA, 13 bp, Artificial Sequence
  Oligonucleotide for detection of SNP TSC0004450
atttacgtgtagy

SEQ ID NO: 22530 - DNA, 13 bp, Artificial Sequence
  Oligonucleotide for detection of SNP TSC0004450
rctacacgtaaat

SEQ ID NO: 22531 - DNA, 13 bp, Artificial Sequence
  Oligonucleotide for detection of SNP TSC0004451
ttattagattggt

SEQ ID NO: 22532 - DNA, 13 bp, Artificial Sequence
  Oligonucleotide for detection of SNP TSC0004451
accaatctaataa

SEQ ID NO: 22533 - DNA, 13 bp, Artificial Sequence
  Oligonucleotide for detection of SNP TSC0004451
ttattaaattggt

SEQ ID NO: 22534 - DNA, 13 bp, Artificial Sequence
  Oligonucleotide for detection of SNP TSC0004451
accaatttaataa

SEQ ID NO: 22535 - DNA, 13 bp, Artificial Sequence
  Oligonucleotide for detection of SNP TSC0004452
ggtttggtgttta

SEQ ID NO: 22536 - DNA, 13 bp, Artificial Sequence
  Oligonucleotide for detection of SNP TSC0004452
taaacaccaaacc

SEQ ID NO: 22537 - DNA, 13 bp, Artificial Sequence
  Oligonucleotide for detection of SNP TSC0004452
ggtttgttgttta

SEQ ID NO: 22538 - DNA, 13 bp, Artificial Sequence
  Oligonucleotide for detection of SNP TSC0004452
taaacaacaaacc

SEQ ID NO: 22539 - DNA, 13 bp, Artificial Sequence
  Oligonucleotide for detection of SNP TSC0004452
tgggtattaggty

SEQ ID NO: 22540 - DNA, 13 bp, Artificial Sequence
  Oligonucleotide for detection of SNP TSC0004452
racctaataccca

SEQ ID NO: 22541 - DNA, 13 bp, Artificial Sequence
  Oligonucleotide for detection of SNP TSC0004452
tgggtagtaggty

SEQ ID NO: 22542 - DNA, 13 bp, Artificial Sequence
  Oligonucleotide for detection of SNP TSC0004452
racctactaccca

SEQ ID NO: 22543 - DNA, 13 bp, Artificial Sequence
  Oligonucleotide for detection of SNP TSC0004453
attaaaagattgg

SEQ ID NO: 22544 - DNA, 13 bp, Artificial Sequence
  Oligonucleotide for detection of SNP TSC0004453
ccaatcttttaat

SEQ ID NO: 22545 - DNA, 13 bp, Artificial Sequence
  Oligonucleotide for detection of SNP TSC0004453
attaaaggattgg

SEQ ID NO: 22546 - DNA, 13 bp, Artificial Sequence
  Oligonucleotide for detection of SNP TSC0004453
ccaatcctttaat

SEQ ID NO: 22547 - DNA, 13 bp, Artificial Sequence
  Oligonucleotide for detection of SNP TSC0004454
tttattgttgata

SEQ ID NO: 22548 - DNA, 13 bp, Artificial Sequence
  Oligonucleotide for detection of SNP TSC0004454
tatcaacaataaa

SEQ ID NO: 22549 - DNA, 13 bp, Artificial Sequence
  Oligonucleotide for detection of SNP TSC0004454
tttatttttgata

SEQ ID NO: 22550 - DNA, 13 bp, Artificial Sequence
  Oligonucleotide for detection of SNP TSC0004454
tatcaaaaataaa

SEQ ID NO: 22551 - DNA, 13 bp, Artificial Sequence
  Oligonucleotide for detection of SNP TSC0004454
tgttaatagtgaa

SEQ ID NO: 22552 - DNA, 13 bp, Artificial Sequence
  Oligonucleotide for detection of SNP TSC0004454
ttcactattaaca

SEQ ID NO: 22553 - DNA, 13 bp, Artificial Sequence
  Oligonucleotide for detection of SNP TSC0004454
tgttaagagtgaa

SEQ ID NO: 22554 - DNA, 13 bp, Artificial Sequence
  Oligonucleotide for detection of SNP TSC0004454
ttcactcttaaca

SEQ ID NO: 22555 - DNA, 13 bp, Artificial Sequence
  Oligonucleotide for detection of SNP TSC0004455
gagtgtgtgggtg

SEQ ID NO: 22556 - DNA, 13 bp, Artificial Sequence
  Oligonucleotide for detection of SNP TSC0004455
cacccacacactc

SEQ ID NO: 22557 - DNA, 13 bp, Artificial Sequence
  Oligonucleotide for detection of SNP TSC0004455
gagtgtatgggtg

SEQ ID NO: 22558 - DNA, 13 bp, Artificial Sequence
  Oligonucleotide for detection of SNP TSC0004455
cacccatacactc

SEQ ID NO: 22559 - DNA, 13 bp, Artificial Sequence
  Oligonucleotide for detection of SNP TSC0004456
tatattgttatty

SEQ ID NO: 22560 - DNA, 13 bp, Artificial Sequence
  Oligonucleotide for detection of SNP TSC0004456
raataacaatata

SEQ ID NO: 22561 - DNA, 13 bp, Artificial Sequence
  Oligonucleotide for detection of SNP TSC0004456
tatatttttatty

SEQ ID NO: 22562 - DNA, 13 bp, Artificial Sequence
  Oligonucleotide for detection of SNP TSC0004456
raataaaaatata

SEQ ID NO: 22563 - DNA, 13 bp, Artificial Sequence
  Oligonucleotide for detection of SNP TSC0004456
tatatcgttatty

SEQ ID NO: 22564 - DNA, 13 bp, Artificial Sequence
  Oligonucleotide for detection of SNP TSC0004456
raataacgatata

SEQ ID NO: 22565 - DNA, 13 bp, Artificial Sequence
  Oligonucleotide for detection of SNP TSC0004456
ggatgatggtata

SEQ ID NO: 22566 - DNA, 13 bp, Artificial Sequence
  Oligonucleotide for detection of SNP TSC0004456
tataccatcatcc

SEQ ID NO: 22567 - DNA, 13 bp, Artificial Sequence
  Oligonucleotide for detection of SNP TSC0004456
ggatgagggtata

SEQ ID NO: 22568 - DNA, 13 bp, Artificial Sequence
  Oligonucleotide for detection of SNP TSC0004456
tataccctcatcc

SEQ ID NO: 22569 - DNA, 13 bp, Artificial Sequence
  Oligonucleotide for detection of SNP TSC0004456
ggatgacggtata

SEQ ID NO: 22570 - DNA, 13 bp, Artificial Sequence
  Oligonucleotide for detection of SNP TSC0004456
tataccgtcatcc

SEQ ID NO: 22571 - DNA, 13 bp, Artificial Sequence
  Oligonucleotide for detection of SNP TSC0004457
taaaaaaataaaa

SEQ ID NO: 22572 - DNA, 13 bp, Artificial Sequence
  Oligonucleotide for detection of SNP TSC0004457
ttttattttttta

SEQ ID NO: 22573 - DNA, 13 bp, Artificial Sequence
  Oligonucleotide for detection of SNP TSC0004457
ttttgttttttta

SEQ ID NO: 22574 - DNA, 13 bp, Artificial Sequence
  Oligonucleotide for detection of SNP TSC0004457
taaaaaaacaaaa

SEQ ID NO: 22575 - DNA, 13 bp, Artificial Sequence
  Oligonucleotide for detection of SNP TSC0004458
gttgtatgtaggg

SEQ ID NO: 22576 - DNA, 13 bp, Artificial Sequence
  Oligonucleotide for detection of SNP TSC0004458
ccctacatacaac

SEQ ID NO: 22577 - DNA, 13 bp, Artificial Sequence
  Oligonucleotide for detection of SNP TSC0004458
gttgtaagtaggg

SEQ ID NO: 22578 - DNA, 13 bp, Artificial Sequence
  Oligonucleotide for detection of SNP TSC0004458
ccctacttacaac

SEQ ID NO: 22579 - DNA, 13 bp, Artificial Sequence
  Oligonucleotide for detection of SNP TSC0004458
gttgtacgtaggg

SEQ ID NO: 22580 - DNA, 13 bp, Artificial Sequence
  Oligonucleotide for detection of SNP TSC0004458
ccctacgtacaac

SEQ ID NO: 22581 - DNA, 13 bp, Artificial Sequence
  Oligonucleotide for detection of SNP TSC0004458
ttttgtgtataay

SEQ ID NO: 22582 - DNA, 13 bp, Artificial Sequence
  Oligonucleotide for detection of SNP TSC0004458
rttatacacaaaa

SEQ ID NO: 22583 - DNA, 13 bp, Artificial Sequence
  Oligonucleotide for detection of SNP TSC0004458
ttttgtttataay

SEQ ID NO: 22584 - DNA, 13 bp, Artificial Sequence
  Oligonucleotide for detection of SNP TSC0004458
rttataaacaaaa

SEQ ID NO: 22585 - DNA, 13 bp, Artificial Sequence
  Oligonucleotide for detection of SNP TSC0004458
ttttgcgtataay

SEQ ID NO: 22586 - DNA, 13 bp, Artificial Sequence
  Oligonucleotide for detection of SNP TSC0004458
rttatacgcaaaa

SEQ ID NO: 22587 - DNA, 13 bp, Artificial Sequence
  Oligonucleotide for detection of SNP TSC0004459
gataaagttatta

SEQ ID NO: 22588 - DNA, 13 bp, Artificial Sequence
  Oligonucleotide for detection of SNP TSC0004459
taataactttatc

SEQ ID NO: 22589 - DNA, 13 bp, Artificial Sequence
  Oligonucleotide for detection of SNP TSC0004459
gataaaattatta

SEQ ID NO: 22590 - DNA, 13 bp, Artificial Sequence
  Oligonucleotide for detection of SNP TSC0004459
taataattttatc

SEQ ID NO: 22591 - DNA, 13 bp, Artificial Sequence
  Oligonucleotide for detection of SNP TSC0004460
attttgggggata

SEQ ID NO: 22592 - DNA, 13 bp, Artificial Sequence
  Oligonucleotide for detection of SNP TSC0004460
tatcccccaaaat

SEQ ID NO: 22593 - DNA, 13 bp, Artificial Sequence
  Oligonucleotide for detection of SNP TSC0004460
attttgagggata

SEQ ID NO: 22594 - DNA, 13 bp, Artificial Sequence
  Oligonucleotide for detection of SNP TSC0004460
tatccctcaaaat

SEQ ID NO: 22595 - DNA, 13 bp, Artificial Sequence
  Oligonucleotide for detection of SNP TSC0004461
tttatagttattg

SEQ ID NO: 22596 - DNA, 13 bp, Artificial Sequence
  Oligonucleotide for detection of SNP TSC0004461
caataactataaa

SEQ ID NO: 22597 - DNA, 13 bp, Artificial Sequence
  Oligonucleotide for detection of SNP TSC0004461
tttatatttattg

SEQ ID NO: 22598 - DNA, 13 bp, Artificial Sequence
  Oligonucleotide for detection of SNP TSC0004461
caataaatataaa

SEQ ID NO: 22599 - DNA, 13 bp, Artificial Sequence
  Oligonucleotide for detection of SNP TSC0004461
tttatagttatcg

SEQ ID NO: 22600 - DNA, 13 bp, Artificial Sequence
  Oligonucleotide for detection of SNP TSC0004461
cgataactataaa

SEQ ID NO: 22601 - DNA, 13 bp, Artificial Sequence
  Oligonucleotide for detection of SNP TSC0004461
tttatatttatcg

SEQ ID NO: 22602 - DNA, 13 bp, Artificial Sequence
  Oligonucleotide for detection of SNP TSC0004461
cgataaatataaa

SEQ ID NO: 22603 - DNA, 13 bp, Artificial Sequence
  Oligonucleotide for detection of SNP TSC0004461
tggtggttgtggg

SEQ ID NO: 22604 - DNA, 13 bp, Artificial Sequence
  Oligonucleotide for detection of SNP TSC0004461
cccacaaccacca

SEQ ID NO: 22605 - DNA, 13 bp, Artificial Sequence
  Oligonucleotide for detection of SNP TSC0004461
tggtgggtgtggg

SEQ ID NO: 22606 - DNA, 13 bp, Artificial Sequence
  Oligonucleotide for detection of SNP TSC0004461
cccacacccacca

SEQ ID NO: 22607 - DNA, 13 bp, Artificial Sequence
  Oligonucleotide for detection of SNP TSC0004461
cggtggttgtggg

SEQ ID NO: 22608 - DNA, 13 bp, Artificial Sequence
  Oligonucleotide for detection of SNP TSC0004461
cccacaaccaccg

SEQ ID NO: 22609 - DNA, 13 bp, Artificial Sequence
  Oligonucleotide for detection of SNP TSC0004461
cggtgggtgtggg

SEQ ID NO: 22610 - DNA, 13 bp, Artificial Sequence
  Oligonucleotide for detection of SNP TSC0004461
cccacacccaccg

SEQ ID NO: 22611 - DNA, 13 bp, Artificial Sequence
  Oligonucleotide for detection of SNP TSC0004462
tgagtatggaggg

SEQ ID NO: 22612 - DNA, 13 bp, Artificial Sequence
  Oligonucleotide for detection of SNP TSC0004462
ccctccatactca

SEQ ID NO: 22613 - DNA, 13 bp, Artificial Sequence
  Oligonucleotide for detection of SNP TSC0004462
cgagtatggaggg

SEQ ID NO: 22614 - DNA, 13 bp, Artificial Sequence
  Oligonucleotide for detection of SNP TSC0004462
ccctccatactcg

SEQ ID NO: 22615 - DNA, 13 bp, Artificial Sequence
  Oligonucleotide for detection of SNP TSC0004462
tgagtacggaggg

SEQ ID NO: 22616 - DNA, 13 bp, Artificial Sequence
  Oligonucleotide for detection of SNP TSC0004462
ccctccgtactca

SEQ ID NO: 22617 - DNA, 13 bp, Artificial Sequence
  Oligonucleotide for detection of SNP TSC0004462
cgagtacggaggg

SEQ ID NO: 22618 - DNA, 13 bp, Artificial Sequence
  Oligonucleotide for detection of SNP TSC0004462
ccctccgtactcg

SEQ ID NO: 22619 - DNA, 13 bp, Artificial Sequence
  Oligonucleotide for detection of SNP TSC0004462
ttttttgtgtttg

SEQ ID NO: 22620 - DNA, 13 bp, Artificial Sequence
  Oligonucleotide for detection of SNP TSC0004462
caaacacaaaaaa

SEQ ID NO: 22621 - DNA, 13 bp, Artificial Sequence
  Oligonucleotide for detection of SNP TSC0004462
ttttttatgtttg

SEQ ID NO: 22622 - DNA, 13 bp, Artificial Sequence
  Oligonucleotide for detection of SNP TSC0004462
caaacataaaaaa

SEQ ID NO: 22623 - DNA, 13 bp, Artificial Sequence
  Oligonucleotide for detection of SNP TSC0004462
tttttcgtgtttg

SEQ ID NO: 22624 - DNA, 13 bp, Artificial Sequence
  Oligonucleotide for detection of SNP TSC0004462
caaacacgaaaaa

SEQ ID NO: 22625 - DNA, 13 bp, Artificial Sequence
  Oligonucleotide for detection of SNP TSC0004462
ttttttatgttcg

SEQ ID NO: 22626 - DNA, 13 bp, Artificial Sequence
  Oligonucleotide for detection of SNP TSC0004462
cgaacataaaaaa

SEQ ID NO: 22627 - DNA, 13 bp, Artificial Sequence
  Oligonucleotide for detection of SNP TSC0004462
ttttttgtgttcg

SEQ ID NO: 22628 - DNA, 13 bp, Artificial Sequence
  Oligonucleotide for detection of SNP TSC0004462
cgaacacaaaaaa

SEQ ID NO: 22629 - DNA, 13 bp, Artificial Sequence
  Oligonucleotide for detection of SNP TSC0004462
tttttcgtgttcg

SEQ ID NO: 22630 - DNA, 13 bp, Artificial Sequence
  Oligonucleotide for detection of SNP TSC0004462
cgaacacgaaaaa

SEQ ID NO: 22631 - DNA, 13 bp, Artificial Sequence
  Oligonucleotide for detection of SNP TSC0004463
taaagaaagaagg

SEQ ID NO: 22632 - DNA, 13 bp, Artificial Sequence
  Oligonucleotide for detection of SNP TSC0004463
ccttctttcttta

SEQ ID NO: 22633 - DNA, 13 bp, Artificial Sequence
  Oligonucleotide for detection of SNP TSC0004463
taaagagagaagg

SEQ ID NO: 22634 - DNA, 13 bp, Artificial Sequence
  Oligonucleotide for detection of SNP TSC0004463
ccttctctcttta

SEQ ID NO: 22635 - DNA, 13 bp, Artificial Sequence
  Oligonucleotide for detection of SNP TSC0004464
atatttgtttttt

SEQ ID NO: 22636 - DNA, 13 bp, Artificial Sequence
  Oligonucleotide for detection of SNP TSC0004464
aaaaaacaaatat

SEQ ID NO: 22637 - DNA, 13 bp, Artificial Sequence
  Oligonucleotide for detection of SNP TSC0004464
atatttatttttt

SEQ ID NO: 22638 - DNA, 13 bp, Artificial Sequence
  Oligonucleotide for detection of SNP TSC0004464
aaaaaataaatat

SEQ ID NO: 22639 - DNA, 13 bp, Artificial Sequence
  Oligonucleotide for detection of SNP TSC0004464
atattcgtttttt

SEQ ID NO: 22640 - DNA, 13 bp, Artificial Sequence
  Oligonucleotide for detection of SNP TSC0004464
aaaaaacgaatat

SEQ ID NO: 22641 - DNA, 13 bp, Artificial Sequence
  Oligonucleotide for detection of SNP TSC0004464
agaggatgagtgt

SEQ ID NO: 22642 - DNA, 13 bp, Artificial Sequence
  Oligonucleotide for detection of SNP TSC0004464
acactcatcctct

SEQ ID NO: 22643 - DNA, 13 bp, Artificial Sequence
  Oligonucleotide for detection of SNP TSC0004464
agaggacgagtgt

SEQ ID NO: 22644 - DNA, 13 bp, Artificial Sequence
  Oligonucleotide for detection of SNP TSC0004464
acactcgtcctct

SEQ ID NO: 22645 - DNA, 13 bp, Artificial Sequence
  Oligonucleotide for detection of SNP TSC0004465
tgagttaagatcg

SEQ ID NO: 22646 - DNA, 13 bp, Artificial Sequence
  Oligonucleotide for detection of SNP TSC0004465
cgatcttaactca

SEQ ID NO: 22647 - DNA, 13 bp, Artificial Sequence
  Oligonucleotide for detection of SNP TSC0004465
tgagttgagatcg

SEQ ID NO: 22648 - DNA, 13 bp, Artificial Sequence
  Oligonucleotide for detection of SNP TSC0004465
cgatctcaactca

SEQ ID NO: 22649 - DNA, 13 bp, Artificial Sequence
  Oligonucleotide for detection of SNP TSC0004465
tgagtcgagatcg

SEQ ID NO: 22650 - DNA, 13 bp, Artificial Sequence
  Oligonucleotide for detection of SNP TSC0004465
cgatctcgactca

SEQ ID NO: 22651 - DNA, 13 bp, Artificial Sequence
  Oligonucleotide for detection of SNP TSC0004465
cgattttggttta

SEQ ID NO: 22652 - DNA, 13 bp, Artificial Sequence
  Oligonucleotide for detection of SNP TSC0004465
taaaccaaaatcg

SEQ ID NO: 22653 - DNA, 13 bp, Artificial Sequence
  Oligonucleotide for detection of SNP TSC0004465
cgatttcggttta

SEQ ID NO: 22654 - DNA, 13 bp, Artificial Sequence
  Oligonucleotide for detection of SNP TSC0004465
taaaccgaaatcg

SEQ ID NO: 22655 - DNA, 13 bp, Artificial Sequence
  Oligonucleotide for detection of SNP TSC0004466
aggggaattttty

SEQ ID NO: 22656 - DNA, 13 bp, Artificial Sequence
  Oligonucleotide for detection of SNP TSC0004466
raaaaattcccct

SEQ ID NO: 22657 - DNA, 13 bp, Artificial Sequence
  Oligonucleotide for detection of SNP TSC0004466
aggggatttttty

SEQ ID NO: 22658 - DNA, 13 bp, Artificial Sequence
  Oligonucleotide for detection of SNP TSC0004466
raaaaaatcccct

SEQ ID NO: 22659 - DNA, 13 bp, Artificial Sequence
  Oligonucleotide for detection of SNP TSC0004466
gggaagttttttt

SEQ ID NO: 22660 - DNA, 13 bp, Artificial Sequence
  Oligonucleotide for detection of SNP TSC0004466
aaaaaaacttccc

SEQ ID NO: 22661 - DNA, 13 bp, Artificial Sequence
  Oligonucleotide for detection of SNP TSC0004466
gggaaggtttttt

SEQ ID NO: 22662 - DNA, 13 bp, Artificial Sequence
  Oligonucleotide for detection of SNP TSC0004466
aaaaaaccttccc

SEQ ID NO: 22663 - DNA, 13 bp, Artificial Sequence
  Oligonucleotide for detection of SNP TSC0004467
tatattgagtgaa

SEQ ID NO: 22664 - DNA, 13 bp, Artificial Sequence
  Oligonucleotide for detection of SNP TSC0004467
ttcactcaatata

SEQ ID NO: 22665 - DNA, 13 bp, Artificial Sequence
  Oligonucleotide for detection of SNP TSC0004467
tatattaagtgaa

SEQ ID NO: 22666 - DNA, 13 bp, Artificial Sequence
  Oligonucleotide for detection of SNP TSC0004467
ttcacttaatata

SEQ ID NO: 22667 - DNA, 13 bp, Artificial Sequence
  Oligonucleotide for detection of SNP TSC0004467
tatatcgagtgaa

SEQ ID NO: 22668 - DNA, 13 bp, Artificial Sequence
  Oligonucleotide for detection of SNP TSC0004467
ttcactcgatata

SEQ ID NO: 22669 - DNA, 13 bp, Artificial Sequence
  Oligonucleotide for detection of SNP TSC0004467
tatattaagcgaa

SEQ ID NO: 22670 - DNA, 13 bp, Artificial Sequence
  Oligonucleotide for detection of SNP TSC0004467
ttcgcttaatata

SEQ ID NO: 22671 - DNA, 13 bp, Artificial Sequence
  Oligonucleotide for detection of SNP TSC0004467
tatattgagcgaa

SEQ ID NO: 22672 - DNA, 13 bp, Artificial Sequence
  Oligonucleotide for detection of SNP TSC0004467
ttcgctcaatata

SEQ ID NO: 22673 - DNA, 13 bp, Artificial Sequence
  Oligonucleotide for detection of SNP TSC0004467
tatatcgagcgaa

SEQ ID NO: 22674 - DNA, 13 bp, Artificial Sequence
  Oligonucleotide for detection of SNP TSC0004467
ttcgctcgatata

SEQ ID NO: 22675 - DNA, 13 bp, Artificial Sequence
  Oligonucleotide for detection of SNP TSC0004467
tttgtttggtgtg

SEQ ID NO: 22676 - DNA, 13 bp, Artificial Sequence
  Oligonucleotide for detection of SNP TSC0004467
cacaccaaacaaa

SEQ ID NO: 22677 - DNA, 13 bp, Artificial Sequence
  Oligonucleotide for detection of SNP TSC0004467
ttcgtttggtgtg

SEQ ID NO: 22678 - DNA, 13 bp, Artificial Sequence
  Oligonucleotide for detection of SNP TSC0004467
cacaccaaacgaa

SEQ ID NO: 22679 - DNA, 13 bp, Artificial Sequence
  Oligonucleotide for detection of SNP TSC0004467
tttgttcggtgtg

SEQ ID NO: 22680 - DNA, 13 bp, Artificial Sequence
  Oligonucleotide for detection of SNP TSC0004467
cacaccgaacaaa

SEQ ID NO: 22681 - DNA, 13 bp, Artificial Sequence
  Oligonucleotide for detection of SNP TSC0004467
ttcgttcggtgtg

SEQ ID NO: 22682 - DNA, 13 bp, Artificial Sequence
  Oligonucleotide for detection of SNP TSC0004467
cacaccgaacgaa

SEQ ID NO: 22683 - DNA, 13 bp, Artificial Sequence
  Oligonucleotide for detection of SNP TSC0004468
gtttagagtggag

SEQ ID NO: 22684 - DNA, 13 bp, Artificial Sequence
  Oligonucleotide for detection of SNP TSC0004468
ctccactctaaac

SEQ ID NO: 22685 - DNA, 13 bp, Artificial Sequence
  Oligonucleotide for detection of SNP TSC0004468
gtttagggtggag

SEQ ID NO: 22686 - DNA, 13 bp, Artificial Sequence
  Oligonucleotide for detection of SNP TSC0004468
ctccaccctaaac

SEQ ID NO: 22687 - DNA, 13 bp, Artificial Sequence
  Oligonucleotide for detection of SNP TSC0004469
agaaaaaaaagat

SEQ ID NO: 22688 - DNA, 13 bp, Artificial Sequence
  Oligonucleotide for detection of SNP TSC0004469
atcttttttttct

SEQ ID NO: 22689 - DNA, 13 bp, Artificial Sequence
  Oligonucleotide for detection of SNP TSC0004469
agaaaagaaagat

SEQ ID NO: 22690 - DNA, 13 bp, Artificial Sequence
  Oligonucleotide for detection of SNP TSC0004469
atctttcttttct

SEQ ID NO: 22691 - DNA, 13 bp, Artificial Sequence
  Oligonucleotide for detection of SNP TSC0004470
tttaaagtatgag

SEQ ID NO: 22692 - DNA, 13 bp, Artificial Sequence
  Oligonucleotide for detection of SNP TSC0004470
ctcatactttaaa

SEQ ID NO: 22693 - DNA, 13 bp, Artificial Sequence
  Oligonucleotide for detection of SNP TSC0004470
tttaaaatatgag

SEQ ID NO: 22694 - DNA, 13 bp, Artificial Sequence
  Oligonucleotide for detection of SNP TSC0004470
ctcatattttaaa

SEQ ID NO: 22695 - DNA, 13 bp, Artificial Sequence
  Oligonucleotide for detection of SNP TSC0004472
gtatgagggttga

SEQ ID NO: 22696 - DNA, 13 bp, Artificial Sequence
  Oligonucleotide for detection of SNP TSC0004472
tcaaccctcatac

SEQ ID NO: 22697 - DNA, 13 bp, Artificial Sequence
  Oligonucleotide for detection of SNP TSC0004472
gtatgatggttga

SEQ ID NO: 22698 - DNA, 13 bp, Artificial Sequence
  Oligonucleotide for detection of SNP TSC0004472
tcaaccatcatac

SEQ ID NO: 22699 - DNA, 13 bp, Artificial Sequence
  Oligonucleotide for detection of SNP TSC0004472
ttagtttttatgy

SEQ ID NO: 22700 - DNA, 13 bp, Artificial Sequence
  Oligonucleotide for detection of SNP TSC0004472
rcataaaaactaa

SEQ ID NO: 22701 - DNA, 13 bp, Artificial Sequence
  Oligonucleotide for detection of SNP TSC0004472
ttagttattatgy

SEQ ID NO: 22702 - DNA, 13 bp, Artificial Sequence
  Oligonucleotide for detection of SNP TSC0004472
rcataataactaa

SEQ ID NO: 22703 - DNA, 13 bp, Artificial Sequence
  Oligonucleotide for detection of SNP TSC0004473
tgtggattggggy

SEQ ID NO: 22704 - DNA, 13 bp, Artificial Sequence
  Oligonucleotide for detection of SNP TSC0004473
rccccaatccaca

SEQ ID NO: 22705 - DNA, 13 bp, Artificial Sequence
  Oligonucleotide for detection of SNP TSC0004473
tgtggaatggggy

SEQ ID NO: 22706 - DNA, 13 bp, Artificial Sequence
  Oligonucleotide for detection of SNP TSC0004473
rccccattccaca

SEQ ID NO: 22707 - DNA, 13 bp, Artificial Sequence
  Oligonucleotide for detection of SNP TSC0004473
cgtggattggggy

SEQ ID NO: 22708 - DNA, 13 bp, Artificial Sequence
  Oligonucleotide for detection of SNP TSC0004473
rccccaatccacg

SEQ ID NO: 22709 - DNA, 13 bp, Artificial Sequence
  Oligonucleotide for detection of SNP TSC0004473
cgtggaatggggy

SEQ ID NO: 22710 - DNA, 13 bp, Artificial Sequence
  Oligonucleotide for detection of SNP TSC0004473
rccccattccacg

SEQ ID NO: 22711 - DNA, 13 bp, Artificial Sequence
  Oligonucleotide for detection of SNP TSC0004473
gttttagtttatg

SEQ ID NO: 22712 - DNA, 13 bp, Artificial Sequence
  Oligonucleotide for detection of SNP TSC0004473
cataaactaaaac

SEQ ID NO: 22713 - DNA, 13 bp, Artificial Sequence
  Oligonucleotide for detection of SNP TSC0004473
gttttattttatg

SEQ ID NO: 22714 - DNA, 13 bp, Artificial Sequence
  Oligonucleotide for detection of SNP TSC0004473
cataaaataaaac

SEQ ID NO: 22715 - DNA, 13 bp, Artificial Sequence
  Oligonucleotide for detection of SNP TSC0004473
gttttagtttacg

SEQ ID NO: 22716 - DNA, 13 bp, Artificial Sequence
  Oligonucleotide for detection of SNP TSC0004473
cgtaaactaaaac

SEQ ID NO: 22717 - DNA, 13 bp, Artificial Sequence
  Oligonucleotide for detection of SNP TSC0004473
gttttattttacg

SEQ ID NO: 22718 - DNA, 13 bp, Artificial Sequence
  Oligonucleotide for detection of SNP TSC0004473
cgtaaaataaaac

SEQ ID NO: 22719 - DNA, 13 bp, Artificial Sequence
  Oligonucleotide for detection of SNP TSC0004474
aaaggtatgtttg

SEQ ID NO: 22720 - DNA, 13 bp, Artificial Sequence
  Oligonucleotide for detection of SNP TSC0004474
caaacataccttt

SEQ ID NO: 22721 - DNA, 13 bp, Artificial Sequence
  Oligonucleotide for detection of SNP TSC0004474
aaaggtttgtttg

SEQ ID NO: 22722 - DNA, 13 bp, Artificial Sequence
  Oligonucleotide for detection of SNP TSC0004474
caaacaaaccttt

SEQ ID NO: 22723 - DNA, 13 bp, Artificial Sequence
  Oligonucleotide for detection of SNP TSC0004474
tagatatgttttt

SEQ ID NO: 22724 - DNA, 13 bp, Artificial Sequence
  Oligonucleotide for detection of SNP TSC0004474
aaaaacatatcta

SEQ ID NO: 22725 - DNA, 13 bp, Artificial Sequence
  Oligonucleotide for detection of SNP TSC0004474
tagataagttttt

SEQ ID NO: 22726 - DNA, 13 bp, Artificial Sequence
  Oligonucleotide for detection of SNP TSC0004474
aaaaacttatcta

SEQ ID NO: 22727 - DNA, 13 bp, Artificial Sequence
  Oligonucleotide for detection of SNP TSC0004475
tgtttttggttay

SEQ ID NO: 22728 - DNA, 13 bp, Artificial Sequence
  Oligonucleotide for detection of SNP TSC0004475
rtaaccaaaaaca

SEQ ID NO: 22729 - DNA, 13 bp, Artificial Sequence
  Oligonucleotide for detection of SNP TSC0004475
tgttttcggttay

SEQ ID NO: 22730 - DNA, 13 bp, Artificial Sequence
  Oligonucleotide for detection of SNP TSC0004475
rtaaccgaaaaca

SEQ ID NO: 22731 - DNA, 13 bp, Artificial Sequence
  Oligonucleotide for detection of SNP TSC0004475
gtgattggaaata

SEQ ID NO: 22732 - DNA, 13 bp, Artificial Sequence
  Oligonucleotide for detection of SNP TSC0004475
tatttccaatcac

SEQ ID NO: 22733 - DNA, 13 bp, Artificial Sequence
  Oligonucleotide for detection of SNP TSC0004475
gtgattagaaata

SEQ ID NO: 22734 - DNA, 13 bp, Artificial Sequence
  Oligonucleotide for detection of SNP TSC0004475
tatttctaatcac

SEQ ID NO: 22735 - DNA, 13 bp, Artificial Sequence
  Oligonucleotide for detection of SNP TSC0004475
gtgatcggaaata

SEQ ID NO: 22736 - DNA, 13 bp, Artificial Sequence
  Oligonucleotide for detection of SNP TSC0004475
tatttccgatcac

SEQ ID NO: 22737 - DNA, 13 bp, Artificial Sequence
  Oligonucleotide for detection of SNP TSC0004476
ggaggaaggttgy

SEQ ID NO: 22738 - DNA, 13 bp, Artificial Sequence
  Oligonucleotide for detection of SNP TSC0004476
rcaaccttcctcc

SEQ ID NO: 22739 - DNA, 13 bp, Artificial Sequence
  Oligonucleotide for detection of SNP TSC0004476
ggaggagggttgy

SEQ ID NO: 22740 - DNA, 13 bp, Artificial Sequence
  Oligonucleotide for detection of SNP TSC0004476
rcaaccctcctcc

SEQ ID NO: 22741 - DNA, 13 bp, Artificial Sequence
  Oligonucleotide for detection of SNP TSC0004477
aaagggtgttttg

SEQ ID NO: 22742 - DNA, 13 bp, Artificial Sequence
  Oligonucleotide for detection of SNP TSC0004477
caaaacacccttt

SEQ ID NO: 22743 - DNA, 13 bp, Artificial Sequence
  Oligonucleotide for detection of SNP TSC0004477
aaagggggttttg

SEQ ID NO: 22744 - DNA, 13 bp, Artificial Sequence
  Oligonucleotide for detection of SNP TSC0004477
caaaacccccttt

SEQ ID NO: 22745 - DNA, 13 bp, Artificial Sequence
  Oligonucleotide for detection of SNP TSC0004477
aaagggcgttttg

SEQ ID NO: 22746 - DNA, 13 bp, Artificial Sequence
  Oligonucleotide for detection of SNP TSC0004477
caaaacgcccttt

SEQ ID NO: 22747 - DNA, 13 bp, Artificial Sequence
  Oligonucleotide for detection of SNP TSC0004477
taaagtgtttttt

SEQ ID NO: 22748 - DNA, 13 bp, Artificial Sequence
  Oligonucleotide for detection of SNP TSC0004477
aaaaaacacttta

SEQ ID NO: 22749 - DNA, 13 bp, Artificial Sequence
  Oligonucleotide for detection of SNP TSC0004477
taaagtttttttt

SEQ ID NO: 22750 - DNA, 13 bp, Artificial Sequence
  Oligonucleotide for detection of SNP TSC0004477
aaaaaaaacttta

SEQ ID NO: 22751 - DNA, 13 bp, Artificial Sequence
  Oligonucleotide for detection of SNP TSC0004477
taaagcgtttttt

SEQ ID NO: 22752 - DNA, 13 bp, Artificial Sequence
  Oligonucleotide for detection of SNP TSC0004477
aaaaaacgcttta

SEQ ID NO: 22753 - DNA, 13 bp, Artificial Sequence
  Oligonucleotide for detection of SNP TSC0004478
gggtttgtagttt

SEQ ID NO: 22754 - DNA, 13 bp, Artificial Sequence
  Oligonucleotide for detection of SNP TSC0004478
aaactacaaaccc

SEQ ID NO: 22755 - DNA, 13 bp, Artificial Sequence
  Oligonucleotide for detection of SNP TSC0004478
gggtttatagttt

SEQ ID NO: 22756 - DNA, 13 bp, Artificial Sequence
  Oligonucleotide for detection of SNP TSC0004478
aaactataaaccc

SEQ ID NO: 22757 - DNA, 13 bp, Artificial Sequence
  Oligonucleotide for detection of SNP TSC0004480
ttttaatttaaga

SEQ ID NO: 22758 - DNA, 13 bp, Artificial Sequence
  Oligonucleotide for detection of SNP TSC0004480
tcttaaattaaaa

SEQ ID NO: 22759 - DNA, 13 bp, Artificial Sequence
  Oligonucleotide for detection of SNP TSC0004480
ttttaagttaaga

SEQ ID NO: 22760 - DNA, 13 bp, Artificial Sequence
  Oligonucleotide for detection of SNP TSC0004480
tcttaacttaaaa

SEQ ID NO: 22761 - DNA, 13 bp, Artificial Sequence
  Oligonucleotide for detection of SNP TSC0004480
ttttaaattgaag

SEQ ID NO: 22762 - DNA, 13 bp, Artificial Sequence
  Oligonucleotide for detection of SNP TSC0004480
cttcaatttaaaa

SEQ ID NO: 22763 - DNA, 13 bp, Artificial Sequence
  Oligonucleotide for detection of SNP TSC0004480
ttttaatttgaag

SEQ ID NO: 22764 - DNA, 13 bp, Artificial Sequence
  Oligonucleotide for detection of SNP TSC0004480
cttcaaattaaaa

SEQ ID NO: 22765 - DNA, 13 bp, Artificial Sequence
  Oligonucleotide for detection of SNP TSC0004481
taatgaatattty

SEQ ID NO: 22766 - DNA, 13 bp, Artificial Sequence
  Oligonucleotide for detection of SNP TSC0004481
raaatattcatta

SEQ ID NO: 22767 - DNA, 13 bp, Artificial Sequence
  Oligonucleotide for detection of SNP TSC0004481
taatgagtattty

SEQ ID NO: 22768 - DNA, 13 bp, Artificial Sequence
  Oligonucleotide for detection of SNP TSC0004481
raaatactcatta

SEQ ID NO: 22769 - DNA, 13 bp, Artificial Sequence
  Oligonucleotide for detection of SNP TSC0004482
tttttagaatttt

SEQ ID NO: 22770 - DNA, 13 bp, Artificial Sequence
  Oligonucleotide for detection of SNP TSC0004482
aaaattctaaaaa

SEQ ID NO: 22771 - DNA, 13 bp, Artificial Sequence
  Oligonucleotide for detection of SNP TSC0004482
tttttataatttt

SEQ ID NO: 22772 - DNA, 13 bp, Artificial Sequence
  Oligonucleotide for detection of SNP TSC0004482
aaaattataaaaa

SEQ ID NO: 22773 - DNA, 13 bp, Artificial Sequence
  Oligonucleotide for detection of SNP TSC0004482
agaattttgaggg

SEQ ID NO: 22774 - DNA, 13 bp, Artificial Sequence
  Oligonucleotide for detection of SNP TSC0004482
ccctcaaaattct

SEQ ID NO: 22775 - DNA, 13 bp, Artificial Sequence
  Oligonucleotide for detection of SNP TSC0004482
agaattgtgaggg

SEQ ID NO: 22776 - DNA, 13 bp, Artificial Sequence
  Oligonucleotide for detection of SNP TSC0004482
ccctcacaattct

SEQ ID NO: 22777 - DNA, 13 bp, Artificial Sequence
  Oligonucleotide for detection of SNP TSC0004483
attttgtgggagg

SEQ ID NO: 22778 - DNA, 13 bp, Artificial Sequence
  Oligonucleotide for detection of SNP TSC0004483
cctcccacaaaat

SEQ ID NO: 22779 - DNA, 13 bp, Artificial Sequence
  Oligonucleotide for detection of SNP TSC0004483
attttgcgggagg

SEQ ID NO: 22780 - DNA, 13 bp, Artificial Sequence
  Oligonucleotide for detection of SNP TSC0004483
cctcccgcaaaat

SEQ ID NO: 22781 - DNA, 13 bp, Artificial Sequence
  Oligonucleotide for detection of SNP TSC0004483
ttttttataaagt

SEQ ID NO: 22782 - DNA, 13 bp, Artificial Sequence
  Oligonucleotide for detection of SNP TSC0004483
actttataaaaaa

SEQ ID NO: 22783 - DNA, 13 bp, Artificial Sequence
  Oligonucleotide for detection of SNP TSC0004483
ttttttgtaaagt

SEQ ID NO: 22784 - DNA, 13 bp, Artificial Sequence
  Oligonucleotide for detection of SNP TSC0004483
actttacaaaaaa

SEQ ID NO: 22785 - DNA, 13 bp, Artificial Sequence
  Oligonucleotide for detection of SNP TSC0004483
tttttcgtaaagt

SEQ ID NO: 22786 - DNA, 13 bp, Artificial Sequence
  Oligonucleotide for detection of SNP TSC0004483
actttacgaaaaa

SEQ ID NO: 22787 - DNA, 13 bp, Artificial Sequence
  Oligonucleotide for detection of SNP TSC0004484
aatgttggtggta

SEQ ID NO: 22788 - DNA, 13 bp, Artificial Sequence
  Oligonucleotide for detection of SNP TSC0004484
taccaccaacatt

SEQ ID NO: 22789 - DNA, 13 bp, Artificial Sequence
  Oligonucleotide for detection of SNP TSC0004484
aatgttagtggta

SEQ ID NO: 22790 - DNA, 13 bp, Artificial Sequence
  Oligonucleotide for detection of SNP TSC0004484
taccactaacatt

SEQ ID NO: 22791 - DNA, 13 bp, Artificial Sequence
  Oligonucleotide for detection of SNP TSC0004484
aatgttggcggta

SEQ ID NO: 22792 - DNA, 13 bp, Artificial Sequence
  Oligonucleotide for detection of SNP TSC0004484
taccgccaacatt

SEQ ID NO: 22793 - DNA, 13 bp, Artificial Sequence
  Oligonucleotide for detection of SNP TSC0004484
aatgttagcggta

SEQ ID NO: 22794 - DNA, 13 bp, Artificial Sequence
  Oligonucleotide for detection of SNP TSC0004484
taccgctaacatt

SEQ ID NO: 22795 - DNA, 13 bp, Artificial Sequence
  Oligonucleotide for detection of SNP TSC0004485
tattgtgggattg

SEQ ID NO: 22796 - DNA, 13 bp, Artificial Sequence
  Oligonucleotide for detection of SNP TSC0004485
caatcccacaata

SEQ ID NO: 22797 - DNA, 13 bp, Artificial Sequence
  Oligonucleotide for detection of SNP TSC0004485
tattgtaggattg

SEQ ID NO: 22798 - DNA, 13 bp, Artificial Sequence
  Oligonucleotide for detection of SNP TSC0004485
caatcctacaata

SEQ ID NO: 22799 - DNA, 13 bp, Artificial Sequence
  Oligonucleotide for detection of SNP TSC0004486
gagggagttttag

SEQ ID NO: 22800 - DNA, 13 bp, Artificial Sequence
  Oligonucleotide for detection of SNP TSC0004486
ctaaaactccctc

SEQ ID NO: 22801 - DNA, 13 bp, Artificial Sequence
  Oligonucleotide for detection of SNP TSC0004486
gagggaattttag

SEQ ID NO: 22802 - DNA, 13 bp, Artificial Sequence
  Oligonucleotide for detection of SNP TSC0004486
ctaaaattccctc

SEQ ID NO: 22803 - DNA, 13 bp, Artificial Sequence
  Oligonucleotide for detection of SNP TSC0004487
gatttgatggtay

SEQ ID NO: 22804 - DNA, 13 bp, Artificial Sequence
  Oligonucleotide for detection of SNP TSC0004487
rtaccatcaaatc

SEQ ID NO: 22805 - DNA, 13 bp, Artificial Sequence
  Oligonucleotide for detection of SNP TSC0004487
gatttgttggtay

SEQ ID NO: 22806 - DNA, 13 bp, Artificial Sequence
  Oligonucleotide for detection of SNP TSC0004487
rtaccaacaaatc

SEQ ID NO: 22807 - DNA, 13 bp, Artificial Sequence
  Oligonucleotide for detection of SNP TSC0004487
gattcgatggtay

SEQ ID NO: 22808 - DNA, 13 bp, Artificial Sequence
  Oligonucleotide for detection of SNP TSC0004487
rtaccatcgaatc

SEQ ID NO: 22809 - DNA, 13 bp, Artificial Sequence
  Oligonucleotide for detection of SNP TSC0004487
gattcgttggtay

SEQ ID NO: 22810 - DNA, 13 bp, Artificial Sequence
  Oligonucleotide for detection of SNP TSC0004487
rtaccaacgaatc

SEQ ID NO: 22811 - DNA, 13 bp, Artificial Sequence
  Oligonucleotide for detection of SNP TSC0004487
gtgttattgagty

SEQ ID NO: 22812 - DNA, 13 bp, Artificial Sequence
  Oligonucleotide for detection of SNP TSC0004487
ractcaataacac

SEQ ID NO: 22813 - DNA, 13 bp, Artificial Sequence
  Oligonucleotide for detection of SNP TSC0004487
gtgttagtgagty

SEQ ID NO: 22814 - DNA, 13 bp, Artificial Sequence
  Oligonucleotide for detection of SNP TSC0004487
ractcactaacac

SEQ ID NO: 22815 - DNA, 13 bp, Artificial Sequence
  Oligonucleotide for detection of SNP TSC0004487
gtgttatcgagty

SEQ ID NO: 22816 - DNA, 13 bp, Artificial Sequence
  Oligonucleotide for detection of SNP TSC0004487
ractcgataacac

SEQ ID NO: 22817 - DNA, 13 bp, Artificial Sequence
  Oligonucleotide for detection of SNP TSC0004487
gtgttagcgagty

SEQ ID NO: 22818 - DNA, 13 bp, Artificial Sequence
  Oligonucleotide for detection of SNP TSC0004487
ractcgctaacac

SEQ ID NO: 22819 - DNA, 13 bp, Artificial Sequence
  Oligonucleotide for detection of SNP TSC0004488
tgggatgtggagg

SEQ ID NO: 22820 - DNA, 13 bp, Artificial Sequence
  Oligonucleotide for detection of SNP TSC0004488
cctccacatccca

SEQ ID NO: 22821 - DNA, 13 bp, Artificial Sequence
  Oligonucleotide for detection of SNP TSC0004488
tgggatatggagg

SEQ ID NO: 22822 - DNA, 13 bp, Artificial Sequence
  Oligonucleotide for detection of SNP TSC0004488
cctccatatccca

SEQ ID NO: 22823 - DNA, 13 bp, Artificial Sequence
  Oligonucleotide for detection of SNP TSC0004488
tgggacgtggagg

SEQ ID NO: 22824 - DNA, 13 bp, Artificial Sequence
  Oligonucleotide for detection of SNP TSC0004488
cctccacgtccca

SEQ ID NO: 22825 - DNA, 13 bp, Artificial Sequence
  Oligonucleotide for detection of SNP TSC0004488
tttttatgtttta

SEQ ID NO: 22826 - DNA, 13 bp, Artificial Sequence
  Oligonucleotide for detection of SNP TSC0004488
taaaacataaaaa

SEQ ID NO: 22827 - DNA, 13 bp, Artificial Sequence
  Oligonucleotide for detection of SNP TSC0004488
tttttacgtttta

SEQ ID NO: 22828 - DNA, 13 bp, Artificial Sequence
  Oligonucleotide for detection of SNP TSC0004488
taaaacgtaaaaa

SEQ ID NO: 22829 - DNA, 13 bp, Artificial Sequence
  Oligonucleotide for detection of SNP TSC0004489
gagttagatatty

SEQ ID NO: 22830 - DNA, 13 bp, Artificial Sequence
  Oligonucleotide for detection of SNP TSC0004489
raatatctaactc

SEQ ID NO: 22831 - DNA, 13 bp, Artificial Sequence
  Oligonucleotide for detection of SNP TSC0004489
gagttatatatty

SEQ ID NO: 22832 - DNA, 13 bp, Artificial Sequence
  Oligonucleotide for detection of SNP TSC0004489
raatatataactc

SEQ ID NO: 22833 - DNA, 13 bp, Artificial Sequence
  Oligonucleotide for detection of SNP TSC0004489
gaatgtttgatty

SEQ ID NO: 22834 - DNA, 13 bp, Artificial Sequence
  Oligonucleotide for detection of SNP TSC0004489
raatcaaacattc

SEQ ID NO: 22835 - DNA, 13 bp, Artificial Sequence
  Oligonucleotide for detection of SNP TSC0004489
gaatgtgtgatty

SEQ ID NO: 22836 - DNA, 13 bp, Artificial Sequence
  Oligonucleotide for detection of SNP TSC0004489
raatcacacattc

SEQ ID NO: 22837 - DNA, 13 bp, Artificial Sequence
  Oligonucleotide for detection of SNP TSC0004490
tataatgagttag

SEQ ID NO: 22838 - DNA, 13 bp, Artificial Sequence
  Oligonucleotide for detection of SNP TSC0004490
ctaactcattata

SEQ ID NO: 22839 - DNA, 13 bp, Artificial Sequence
  Oligonucleotide for detection of SNP TSC0004490
tataataagttag

SEQ ID NO: 22840 - DNA, 13 bp, Artificial Sequence
  Oligonucleotide for detection of SNP TSC0004490
ctaacttattata

SEQ ID NO: 22841 - DNA, 13 bp, Artificial Sequence
  Oligonucleotide for detection of SNP TSC0004491
ataatttgttttg

SEQ ID NO: 22842 - DNA, 13 bp, Artificial Sequence
  Oligonucleotide for detection of SNP TSC0004491
caaaacaaattat

SEQ ID NO: 22843 - DNA, 13 bp, Artificial Sequence
  Oligonucleotide for detection of SNP TSC0004491
ataattcgttttg

SEQ ID NO: 22844 - DNA, 13 bp, Artificial Sequence
  Oligonucleotide for detection of SNP TSC0004491
caaaacgaattat

SEQ ID NO: 22845 - DNA, 13 bp, Artificial Sequence
  Oligonucleotide for detection of SNP TSC0004491
taagataagttat

SEQ ID NO: 22846 - DNA, 13 bp, Artificial Sequence
  Oligonucleotide for detection of SNP TSC0004491
ataacttatctta

SEQ ID NO: 22847 - DNA, 13 bp, Artificial Sequence
  Oligonucleotide for detection of SNP TSC0004491
taagatgagttat

SEQ ID NO: 22848 - DNA, 13 bp, Artificial Sequence
  Oligonucleotide for detection of SNP TSC0004491
ataactcatctta

SEQ ID NO: 22849 - DNA, 13 bp, Artificial Sequence
  Oligonucleotide for detection of SNP TSC0004491
taagacgagttat

SEQ ID NO: 22850 - DNA, 13 bp, Artificial Sequence
  Oligonucleotide for detection of SNP TSC0004491
ataactcgtctta

SEQ ID NO: 22851 - DNA, 13 bp, Artificial Sequence
  Oligonucleotide for detection of SNP TSC0004492
gtaggagaattgy

SEQ ID NO: 22852 - DNA, 13 bp, Artificial Sequence
  Oligonucleotide for detection of SNP TSC0004492
rcaattctcctac

SEQ ID NO: 22853 - DNA, 13 bp, Artificial Sequence
  Oligonucleotide for detection of SNP TSC0004492
gtaggaaaattgy

SEQ ID NO: 22854 - DNA, 13 bp, Artificial Sequence
  Oligonucleotide for detection of SNP TSC0004492
rcaattttcctac

SEQ ID NO: 22855 - DNA, 13 bp, Artificial Sequence
  Oligonucleotide for detection of SNP TSC0004493
aaataagtaaata

SEQ ID NO: 22856 - DNA, 13 bp, Artificial Sequence
  Oligonucleotide for detection of SNP TSC0004493
tatttacttattt

SEQ ID NO: 22857 - DNA, 13 bp, Artificial Sequence
  Oligonucleotide for detection of SNP TSC0004493
aaataaataaata

SEQ ID NO: 22858 - DNA, 13 bp, Artificial Sequence
  Oligonucleotide for detection of SNP TSC0004493
tatttatttattt

SEQ ID NO: 22859 - DNA, 13 bp, Artificial Sequence
  Oligonucleotide for detection of SNP TSC0004495
ttaagtgtgtagg

SEQ ID NO: 22860 - DNA, 13 bp, Artificial Sequence
  Oligonucleotide for detection of SNP TSC0004495
cctacacacttaa

SEQ ID NO: 22861 - DNA, 13 bp, Artificial Sequence
  Oligonucleotide for detection of SNP TSC0004495
ttaagtatgtagg

SEQ ID NO: 22862 - DNA, 13 bp, Artificial Sequence
  Oligonucleotide for detection of SNP TSC0004495
cctacatacttaa

SEQ ID NO: 22863 - DNA, 13 bp, Artificial Sequence
  Oligonucleotide for detection of SNP TSC0004497
ttgagtgttttay

SEQ ID NO: 22864 - DNA, 13 bp, Artificial Sequence
  Oligonucleotide for detection of SNP TSC0004497
rtaaaacactcaa

SEQ ID NO: 22865 - DNA, 13 bp, Artificial Sequence
  Oligonucleotide for detection of SNP TSC0004497
ttgagttttttay

SEQ ID NO: 22866 - DNA, 13 bp, Artificial Sequence
  Oligonucleotide for detection of SNP TSC0004497
rtaaaaaactcaa

SEQ ID NO: 22867 - DNA, 13 bp, Artificial Sequence
  Oligonucleotide for detection of SNP TSC0004497
gtaaggtatttag

SEQ ID NO: 22868 - DNA, 13 bp, Artificial Sequence
  Oligonucleotide for detection of SNP TSC0004497
ctaaataccttac

SEQ ID NO: 22869 - DNA, 13 bp, Artificial Sequence
  Oligonucleotide for detection of SNP TSC0004497
gtaagggatttag

SEQ ID NO: 22870 - DNA, 13 bp, Artificial Sequence
  Oligonucleotide for detection of SNP TSC0004497
ctaaatcccttac

SEQ ID NO: 22871 - DNA, 13 bp, Artificial Sequence
  Oligonucleotide for detection of SNP TSC0004498
tgtttgtagttty

SEQ ID NO: 22872 - DNA, 13 bp, Artificial Sequence
  Oligonucleotide for detection of SNP TSC0004498
raaactacaaaca

SEQ ID NO: 22873 - DNA, 13 bp, Artificial Sequence
  Oligonucleotide for detection of SNP TSC0004498
tgtttggagttty

SEQ ID NO: 22874 - DNA, 13 bp, Artificial Sequence
  Oligonucleotide for detection of SNP TSC0004498
raaactccaaaca

SEQ ID NO: 22875 - DNA, 13 bp, Artificial Sequence
  Oligonucleotide for detection of SNP TSC0004498
gggattgtaggta

SEQ ID NO: 22876 - DNA, 13 bp, Artificial Sequence
  Oligonucleotide for detection of SNP TSC0004498
tacctacaatccc

SEQ ID NO: 22877 - DNA, 13 bp, Artificial Sequence
  Oligonucleotide for detection of SNP TSC0004498
gggattttaggta

SEQ ID NO: 22878 - DNA, 13 bp, Artificial Sequence
  Oligonucleotide for detection of SNP TSC0004498
tacctaaaatccc

SEQ ID NO: 22879 - DNA, 13 bp, Artificial Sequence
  Oligonucleotide for detection of SNP TSC0004499
taattagggggaa

SEQ ID NO: 22880 - DNA, 13 bp, Artificial Sequence
  Oligonucleotide for detection of SNP TSC0004499
ttccccctaatta

SEQ ID NO: 22881 - DNA, 13 bp, Artificial Sequence
  Oligonucleotide for detection of SNP TSC0004499
taattaaggggaa

SEQ ID NO: 22882 - DNA, 13 bp, Artificial Sequence
  Oligonucleotide for detection of SNP TSC0004499
ttccccttaatta

SEQ ID NO: 22883 - DNA, 13 bp, Artificial Sequence
  Oligonucleotide for detection of SNP TSC0004500
tttgaatttggga

SEQ ID NO: 22884 - DNA, 13 bp, Artificial Sequence
  Oligonucleotide for detection of SNP TSC0004500
tcccaaattcaaa

SEQ ID NO: 22885 - DNA, 13 bp, Artificial Sequence
  Oligonucleotide for detection of SNP TSC0004500
tttgaaattggga

SEQ ID NO: 22886 - DNA, 13 bp, Artificial Sequence
  Oligonucleotide for detection of SNP TSC0004500
tcccaatttcaaa

SEQ ID NO: 22887 - DNA, 13 bp, Artificial Sequence
  Oligonucleotide for detection of SNP TSC0004500
ttttaggtttaag

SEQ ID NO: 22888 - DNA, 13 bp, Artificial Sequence
  Oligonucleotide for detection of SNP TSC0004500
cttaaacctaaaa

SEQ ID NO: 22889 - DNA, 13 bp, Artificial Sequence
  Oligonucleotide for detection of SNP TSC0004500
ttttagttttaag

SEQ ID NO: 22890 - DNA, 13 bp, Artificial Sequence
  Oligonucleotide for detection of SNP TSC0004500
cttaaaactaaaa

SEQ ID NO: 22891 - DNA, 13 bp, Artificial Sequence
  Oligonucleotide for detection of SNP TSC0004501
tatgttgtatttg

SEQ ID NO: 22892 - DNA, 13 bp, Artificial Sequence
  Oligonucleotide for detection of SNP TSC0004501
caaatacaacata

SEQ ID NO: 22893 - DNA, 13 bp, Artificial Sequence
  Oligonucleotide for detection of SNP TSC0004501
tatgttatatttg

SEQ ID NO: 22894 - DNA, 13 bp, Artificial Sequence
  Oligonucleotide for detection of SNP TSC0004501
caaatataacata

SEQ ID NO: 22895 - DNA, 13 bp, Artificial Sequence
  Oligonucleotide for detection of SNP TSC0004502
tttttatgttttg

SEQ ID NO: 22896 - DNA, 13 bp, Artificial Sequence
  Oligonucleotide for detection of SNP TSC0004502
caaaacataaaaa

SEQ ID NO: 22897 - DNA, 13 bp, Artificial Sequence
  Oligonucleotide for detection of SNP TSC0004502
tttttacgttttg

SEQ ID NO: 22898 - DNA, 13 bp, Artificial Sequence
  Oligonucleotide for detection of SNP TSC0004502
caaaacgtaaaaa

SEQ ID NO: 22899 - DNA, 13 bp, Artificial Sequence
  Oligonucleotide for detection of SNP TSC0004502
taaaatgtgaaaa

SEQ ID NO: 22900 - DNA, 13 bp, Artificial Sequence
  Oligonucleotide for detection of SNP TSC0004502
ttttcacatttta

SEQ ID NO: 22901 - DNA, 13 bp, Artificial Sequence
  Oligonucleotide for detection of SNP TSC0004502
taaaatatgaaaa

SEQ ID NO: 22902 - DNA, 13 bp, Artificial Sequence
  Oligonucleotide for detection of SNP TSC0004502
ttttcatatttta

SEQ ID NO: 22903 - DNA, 13 bp, Artificial Sequence
  Oligonucleotide for detection of SNP TSC0004502
taaaacgtgaaaa

SEQ ID NO: 22904 - DNA, 13 bp, Artificial Sequence
  Oligonucleotide for detection of SNP TSC0004502
ttttcacgtttta

SEQ ID NO: 22905 - DNA, 13 bp, Artificial Sequence
  Oligonucleotide for detection of SNP TSC0004503
aggttatgtatta

SEQ ID NO: 22906 - DNA, 13 bp, Artificial Sequence
  Oligonucleotide for detection of SNP TSC0004503
taatacataacct

SEQ ID NO: 22907 - DNA, 13 bp, Artificial Sequence
  Oligonucleotide for detection of SNP TSC0004503
aggttaggtatta

SEQ ID NO: 22908 - DNA, 13 bp, Artificial Sequence
  Oligonucleotide for detection of SNP TSC0004503
taatacctaacct

SEQ ID NO: 22909 - DNA, 13 bp, Artificial Sequence
  Oligonucleotide for detection of SNP TSC0004503
tggtatataattt

SEQ ID NO: 22910 - DNA, 13 bp, Artificial Sequence
  Oligonucleotide for detection of SNP TSC0004503
aaattatatacca

SEQ ID NO: 22911 - DNA, 13 bp, Artificial Sequence
  Oligonucleotide for detection of SNP TSC0004503
tggtatttaattt

SEQ ID NO: 22912 - DNA, 13 bp, Artificial Sequence
  Oligonucleotide for detection of SNP TSC0004503
aaattaaatacca

SEQ ID NO: 22913 - DNA, 13 bp, Artificial Sequence
  Oligonucleotide for detection of SNP TSC0004505
tgagattgaatta

SEQ ID NO: 22914 - DNA, 13 bp, Artificial Sequence
  Oligonucleotide for detection of SNP TSC0004505
taattcaatctca

SEQ ID NO: 22915 - DNA, 13 bp, Artificial Sequence
  Oligonucleotide for detection of SNP TSC0004505
tgagatcgaatta

SEQ ID NO: 22916 - DNA, 13 bp, Artificial Sequence
  Oligonucleotide for detection of SNP TSC0004505
taattcgatctca

SEQ ID NO: 22917 - DNA, 13 bp, Artificial Sequence
  Oligonucleotide for detection of SNP TSC0004505
tagtttggtttta

SEQ ID NO: 22918 - DNA, 13 bp, Artificial Sequence
  Oligonucleotide for detection of SNP TSC0004505
taaaaccaaacta

SEQ ID NO: 22919 - DNA, 13 bp, Artificial Sequence
  Oligonucleotide for detection of SNP TSC0004505
tagtttagtttta

SEQ ID NO: 22920 - DNA, 13 bp, Artificial Sequence
  Oligonucleotide for detection of SNP TSC0004505
taaaactaaacta

SEQ ID NO: 22921 - DNA, 13 bp, Artificial Sequence
  Oligonucleotide for detection of SNP TSC0004505
tagttcggtttta

SEQ ID NO: 22922 - DNA, 13 bp, Artificial Sequence
  Oligonucleotide for detection of SNP TSC0004505
taaaaccgaacta

SEQ ID NO: 22923 - DNA, 13 bp, Artificial Sequence
  Oligonucleotide for detection of SNP TSC0004506
gtttatgtgagty

SEQ ID NO: 22924 - DNA, 13 bp, Artificial Sequence
  Oligonucleotide for detection of SNP TSC0004506
ractcacataaac

SEQ ID NO: 22925 - DNA, 13 bp, Artificial Sequence
  Oligonucleotide for detection of SNP TSC0004506
gtttatatgagty

SEQ ID NO: 22926 - DNA, 13 bp, Artificial Sequence
  Oligonucleotide for detection of SNP TSC0004506
ractcatataaac

SEQ ID NO: 22927 - DNA, 13 bp, Artificial Sequence
  Oligonucleotide for detection of SNP TSC0004506
gtttacgtgagty

SEQ ID NO: 22928 - DNA, 13 bp, Artificial Sequence
  Oligonucleotide for detection of SNP TSC0004506
ractcacgtaaac

SEQ ID NO: 22929 - DNA, 13 bp, Artificial Sequence
  Oligonucleotide for detection of SNP TSC0004507
agtgttatgtatt

SEQ ID NO: 22930 - DNA, 13 bp, Artificial Sequence
  Oligonucleotide for detection of SNP TSC0004507
aatacataacact

SEQ ID NO: 22931 - DNA, 13 bp, Artificial Sequence
  Oligonucleotide for detection of SNP TSC0004507
agtgttgtgtatt

SEQ ID NO: 22932 - DNA, 13 bp, Artificial Sequence
  Oligonucleotide for detection of SNP TSC0004507
aatacacaacact

SEQ ID NO: 22933 - DNA, 13 bp, Artificial Sequence
  Oligonucleotide for detection of SNP TSC0004508
atattaaggtaat

SEQ ID NO: 22934 - DNA, 13 bp, Artificial Sequence
  Oligonucleotide for detection of SNP TSC0004508
attaccttaatat

SEQ ID NO: 22935 - DNA, 13 bp, Artificial Sequence
  Oligonucleotide for detection of SNP TSC0004508
atattagggtaat

SEQ ID NO: 22936 - DNA, 13 bp, Artificial Sequence
  Oligonucleotide for detection of SNP TSC0004508
attaccctaatat

SEQ ID NO: 22937 - DNA, 13 bp, Artificial Sequence
  Oligonucleotide for detection of SNP TSC0004509
ttatagatatgta

SEQ ID NO: 22938 - DNA, 13 bp, Artificial Sequence
  Oligonucleotide for detection of SNP TSC0004509
tacatatctataa

SEQ ID NO: 22939 - DNA, 13 bp, Artificial Sequence
  Oligonucleotide for detection of SNP TSC0004509
ttataggtatgta

SEQ ID NO: 22940 - DNA, 13 bp, Artificial Sequence
  Oligonucleotide for detection of SNP TSC0004509
tacatacctataa

SEQ ID NO: 22941 - DNA, 13 bp, Artificial Sequence
  Oligonucleotide for detection of SNP TSC0004510
aggggtaggggtt

SEQ ID NO: 22942 - DNA, 13 bp, Artificial Sequence
  Oligonucleotide for detection of SNP TSC0004510
aacccctacccct

SEQ ID NO: 22943 - DNA, 13 bp, Artificial Sequence
  Oligonucleotide for detection of SNP TSC0004510
aggggtgggggtt

SEQ ID NO: 22944 - DNA, 13 bp, Artificial Sequence
  Oligonucleotide for detection of SNP TSC0004510
aacccccacccct

SEQ ID NO: 22945 - DNA, 13 bp, Artificial Sequence
  Oligonucleotide for detection of SNP TSC0004511
ttgtaggatattt

SEQ ID NO: 22946 - DNA, 13 bp, Artificial Sequence
  Oligonucleotide for detection of SNP TSC0004511
aaatatcctacaa

SEQ ID NO: 22947 - DNA, 13 bp, Artificial Sequence
  Oligonucleotide for detection of SNP TSC0004511
ttgtagaatattt

SEQ ID NO: 22948 - DNA, 13 bp, Artificial Sequence
  Oligonucleotide for detection of SNP TSC0004511
aaatattctacaa

SEQ ID NO: 22949 - DNA, 13 bp, Artificial Sequence
  Oligonucleotide for detection of SNP TSC0004512
taatagaatgtgg

SEQ ID NO: 22950 - DNA, 13 bp, Artificial Sequence
  Oligonucleotide for detection of SNP TSC0004512
ccacattctatta

SEQ ID NO: 22951 - DNA, 13 bp, Artificial Sequence
  Oligonucleotide for detection of SNP TSC0004512
taataggatgtgg

SEQ ID NO: 22952 - DNA, 13 bp, Artificial Sequence
  Oligonucleotide for detection of SNP TSC0004512
ccacatcctatta

SEQ ID NO: 22953 - DNA, 13 bp, Artificial Sequence
  Oligonucleotide for detection of SNP TSC0004513
tttttaatgtttt

SEQ ID NO: 22954 - DNA, 13 bp, Artificial Sequence
  Oligonucleotide for detection of SNP TSC0004513
aaaacattaaaaa

SEQ ID NO: 22955 - DNA, 13 bp, Artificial Sequence
  Oligonucleotide for detection of SNP TSC0004513
tttttagtgtttt

SEQ ID NO: 22956 - DNA, 13 bp, Artificial Sequence
  Oligonucleotide for detection of SNP TSC0004513
aaaacactaaaaa

SEQ ID NO: 22957 - DNA, 13 bp, Artificial Sequence
  Oligonucleotide for detection of SNP TSC0004514
agtaagtgtttat

SEQ ID NO: 22958 - DNA, 13 bp, Artificial Sequence
  Oligonucleotide for detection of SNP TSC0004514
ataaacacttact

SEQ ID NO: 22959 - DNA, 13 bp, Artificial Sequence
  Oligonucleotide for detection of SNP TSC0004514
agtaagagtttat

SEQ ID NO: 22960 - DNA, 13 bp, Artificial Sequence
  Oligonucleotide for detection of SNP TSC0004514
ataaactcttact

SEQ ID NO: 22961 - DNA, 13 bp, Artificial Sequence
  Oligonucleotide for detection of SNP TSC0004514
atagatatttatt

SEQ ID NO: 22962 - DNA, 13 bp, Artificial Sequence
  Oligonucleotide for detection of SNP TSC0004514
aataaatatctat

SEQ ID NO: 22963 - DNA, 13 bp, Artificial Sequence
  Oligonucleotide for detection of SNP TSC0004514
atagatttttatt

SEQ ID NO: 22964 - DNA, 13 bp, Artificial Sequence
  Oligonucleotide for detection of SNP TSC0004514
aataaaaatctat

SEQ ID NO: 22965 - DNA, 13 bp, Artificial Sequence
  Oligonucleotide for detection of SNP TSC0004516
tttgtgtttaggg

SEQ ID NO: 22966 - DNA, 13 bp, Artificial Sequence
  Oligonucleotide for detection of SNP TSC0004516
ccctaaacacaaa

SEQ ID NO: 22967 - DNA, 13 bp, Artificial Sequence
  Oligonucleotide for detection of SNP TSC0004516
tttgtggttaggg

SEQ ID NO: 22968 - DNA, 13 bp, Artificial Sequence
  Oligonucleotide for detection of SNP TSC0004516
ccctaaccacaaa

SEQ ID NO: 22969 - DNA, 13 bp, Artificial Sequence
  Oligonucleotide for detection of SNP TSC0004516
ttcgtgtttaggg

SEQ ID NO: 22970 - DNA, 13 bp, Artificial Sequence
  Oligonucleotide for detection of SNP TSC0004516
ccctaaacacgaa

SEQ ID NO: 22971 - DNA, 13 bp, Artificial Sequence
  Oligonucleotide for detection of SNP TSC0004516
ttcgtggttaggg

SEQ ID NO: 22972 - DNA, 13 bp, Artificial Sequence
  Oligonucleotide for detection of SNP TSC0004516
ccctaaccacgaa

SEQ ID NO: 22973 - DNA, 13 bp, Artificial Sequence
  Oligonucleotide for detection of SNP TSC0004516
ttttgagtatgaa

SEQ ID NO: 22974 - DNA, 13 bp, Artificial Sequence
  Oligonucleotide for detection of SNP TSC0004516
ttcatactcaaaa

SEQ ID NO: 22975 - DNA, 13 bp, Artificial Sequence
  Oligonucleotide for detection of SNP TSC0004516
ttttgattatgaa

SEQ ID NO: 22976 - DNA, 13 bp, Artificial Sequence
  Oligonucleotide for detection of SNP TSC0004516
ttcataatcaaaa

SEQ ID NO: 22977 - DNA, 13 bp, Artificial Sequence
  Oligonucleotide for detection of SNP TSC0004516
ttttgagtacgaa

SEQ ID NO: 22978 - DNA, 13 bp, Artificial Sequence
  Oligonucleotide for detection of SNP TSC0004516
ttcgtactcaaaa

SEQ ID NO: 22979 - DNA, 13 bp, Artificial Sequence
  Oligonucleotide for detection of SNP TSC0004516
ttttgattacgaa

SEQ ID NO: 22980 - DNA, 13 bp, Artificial Sequence
  Oligonucleotide for detection of SNP TSC0004516
ttcgtaatcaaaa

SEQ ID NO: 22981 - DNA, 13 bp, Artificial Sequence
  Oligonucleotide for detection of SNP TSC0004517
ttatttagaggaa

SEQ ID NO: 22982 - DNA, 13 bp, Artificial Sequence
  Oligonucleotide for detection of SNP TSC0004517
ttcctctaaataa

SEQ ID NO: 22983 - DNA, 13 bp, Artificial Sequence
  Oligonucleotide for detection of SNP TSC0004517
ttattttgaggaa

SEQ ID NO: 22984 - DNA, 13 bp, Artificial Sequence
  Oligonucleotide for detection of SNP TSC0004517
ttcctcaaaataa

SEQ ID NO: 22985 - DNA, 13 bp, Artificial Sequence
  Oligonucleotide for detection of SNP TSC0004517
ttatttcgaggaa

SEQ ID NO: 22986 - DNA, 13 bp, Artificial Sequence
  Oligonucleotide for detection of SNP TSC0004517
ttcctcgaaataa

SEQ ID NO: 22987 - DNA, 13 bp, Artificial Sequence
  Oligonucleotide for detection of SNP TSC0004517
tttttttaagtag

SEQ ID NO: 22988 - DNA, 13 bp, Artificial Sequence
  Oligonucleotide for detection of SNP TSC0004517
ctacttaaaaaaa

SEQ ID NO: 22989 - DNA, 13 bp, Artificial Sequence
  Oligonucleotide for detection of SNP TSC0004517
ttttttgaagtag

SEQ ID NO: 22990 - DNA, 13 bp, Artificial Sequence
  Oligonucleotide for detection of SNP TSC0004517
ctacttcaaaaaa

SEQ ID NO: 22991 - DNA, 13 bp, Artificial Sequence
  Oligonucleotide for detection of SNP TSC0004517
tttttcgaagtag

SEQ ID NO: 22992 - DNA, 13 bp, Artificial Sequence
  Oligonucleotide for detection of SNP TSC0004517
ctacttcgaaaaa

SEQ ID NO: 22993 - DNA, 13 bp, Artificial Sequence
  Oligonucleotide for detection of SNP TSC0004518
aattaatgatttg

SEQ ID NO: 22994 - DNA, 13 bp, Artificial Sequence
  Oligonucleotide for detection of SNP TSC0004518
caaatcattaatt

SEQ ID NO: 22995 - DNA, 13 bp, Artificial Sequence
  Oligonucleotide for detection of SNP TSC0004518
aattaaagatttg

SEQ ID NO: 22996 - DNA, 13 bp, Artificial Sequence
  Oligonucleotide for detection of SNP TSC0004518
caaatctttaatt

SEQ ID NO: 22997 - DNA, 13 bp, Artificial Sequence
  Oligonucleotide for detection of SNP TSC0004518
taagttattgatt

SEQ ID NO: 22998 - DNA, 13 bp, Artificial Sequence
  Oligonucleotide for detection of SNP TSC0004518
aatcaataactta

SEQ ID NO: 22999 - DNA, 13 bp, Artificial Sequence
  Oligonucleotide for detection of SNP TSC0004518
taagtttttgatt

SEQ ID NO: 23000 - DNA, 13 bp, Artificial Sequence
  Oligonucleotide for detection of SNP TSC0004518
aatcaaaaactta

SEQ ID NO: 23001 - DNA, 13 bp, Artificial Sequence
  Oligonucleotide for detection of SNP TSC0004520
ttatagtgttgty

SEQ ID NO: 23002 - DNA, 13 bp, Artificial Sequence
  Oligonucleotide for detection of SNP TSC0004520
racaacactataa

SEQ ID NO: 23003 - DNA, 13 bp, Artificial Sequence
  Oligonucleotide for detection of SNP TSC0004520
ttatagggttgty

SEQ ID NO: 23004 - DNA, 13 bp, Artificial Sequence
  Oligonucleotide for detection of SNP TSC0004520
racaaccctataa

SEQ ID NO: 23005 - DNA, 13 bp, Artificial Sequence
  Oligonucleotide for detection of SNP TSC0004520
ttatagcgttgty

SEQ ID NO: 23006 - DNA, 13 bp, Artificial Sequence
  Oligonucleotide for detection of SNP TSC0004520
racaacgctataa

SEQ ID NO: 23007 - DNA, 13 bp, Artificial Sequence
  Oligonucleotide for detection of SNP TSC0004520
ttatagggtcgty

SEQ ID NO: 23008 - DNA, 13 bp, Artificial Sequence
  Oligonucleotide for detection of SNP TSC0004520
racgaccctataa

SEQ ID NO: 23009 - DNA, 13 bp, Artificial Sequence
  Oligonucleotide for detection of SNP TSC0004520
ttatagtgtcgty

SEQ ID NO: 23010 - DNA, 13 bp, Artificial Sequence
  Oligonucleotide for detection of SNP TSC0004520
racgacactataa

SEQ ID NO: 23011 - DNA, 13 bp, Artificial Sequence
  Oligonucleotide for detection of SNP TSC0004520
ttatagcgtcgty

SEQ ID NO: 23012 - DNA, 13 bp, Artificial Sequence
  Oligonucleotide for detection of SNP TSC0004520
racgacgctataa

SEQ ID NO: 23013 - DNA, 13 bp, Artificial Sequence
  Oligonucleotide for detection of SNP TSC0004520
ggtggtgttgtgg

SEQ ID NO: 23014 - DNA, 13 bp, Artificial Sequence
  Oligonucleotide for detection of SNP TSC0004520
ccacaacaccacc

SEQ ID NO: 23015 - DNA, 13 bp, Artificial Sequence
  Oligonucleotide for detection of SNP TSC0004520
ggtggttttgtgg

SEQ ID NO: 23016 - DNA, 13 bp, Artificial Sequence
  Oligonucleotide for detection of SNP TSC0004520
ccacaaaaccacc

SEQ ID NO: 23017 - DNA, 13 bp, Artificial Sequence
  Oligonucleotide for detection of SNP TSC0004520
ggcggtgttgtgg

SEQ ID NO: 23018 - DNA, 13 bp, Artificial Sequence
  Oligonucleotide for detection of SNP TSC0004520
ccacaacaccgcc

SEQ ID NO: 23019 - DNA, 13 bp, Artificial Sequence
  Oligonucleotide for detection of SNP TSC0004520
ggcggttttgtgg

SEQ ID NO: 23020 - DNA, 13 bp, Artificial Sequence
  Oligonucleotide for detection of SNP TSC0004520
ccacaaaaccgcc

SEQ ID NO: 23021 - DNA, 13 bp, Artificial Sequence
  Oligonucleotide for detection of SNP TSC0004520
ggtggcgttgtgg

SEQ ID NO: 23022 - DNA, 13 bp, Artificial Sequence
  Oligonucleotide for detection of SNP TSC0004520
ccacaacgccacc

SEQ ID NO: 23023 - DNA, 13 bp, Artificial Sequence
  Oligonucleotide for detection of SNP TSC0004520
ggcggcgttgtgg

SEQ ID NO: 23024 - DNA, 13 bp, Artificial Sequence
  Oligonucleotide for detection of SNP TSC0004520
ccacaacgccgcc

SEQ ID NO: 23025 - DNA, 13 bp, Artificial Sequence
  Oligonucleotide for detection of SNP TSC0004521
ttgttttggttat

SEQ ID NO: 23026 - DNA, 13 bp, Artificial Sequence
  Oligonucleotide for detection of SNP TSC0004521
ataaccaaaacaa

SEQ ID NO: 23027 - DNA, 13 bp, Artificial Sequence
  Oligonucleotide for detection of SNP TSC0004521
ttgtttcggttat

SEQ ID NO: 23028 - DNA, 13 bp, Artificial Sequence
  Oligonucleotide for detection of SNP TSC0004521
ataaccgaaacaa

SEQ ID NO: 23029 - DNA, 13 bp, Artificial Sequence
  Oligonucleotide for detection of SNP TSC0004521
atggttaaagtaa

SEQ ID NO: 23030 - DNA, 13 bp, Artificial Sequence
  Oligonucleotide for detection of SNP TSC0004521
ttactttaaccat

SEQ ID NO: 23031 - DNA, 13 bp, Artificial Sequence
  Oligonucleotide for detection of SNP TSC0004521
atggttgaagtaa

SEQ ID NO: 23032 - DNA, 13 bp, Artificial Sequence
  Oligonucleotide for detection of SNP TSC0004521
ttacttcaaccat

SEQ ID NO: 23033 - DNA, 13 bp, Artificial Sequence
  Oligonucleotide for detection of SNP TSC0004521
atggtcgaagtaa

SEQ ID NO: 23034 - DNA, 13 bp, Artificial Sequence
  Oligonucleotide for detection of SNP TSC0004521
ttacttcgaccat

SEQ ID NO: 23035 - DNA, 13 bp, Artificial Sequence
  Oligonucleotide for detection of SNP TSC0004522
ttttttttataty

SEQ ID NO: 23036 - DNA, 13 bp, Artificial Sequence
  Oligonucleotide for detection of SNP TSC0004522
ratataaaaaaaa

SEQ ID NO: 23037 - DNA, 13 bp, Artificial Sequence
  Oligonucleotide for detection of SNP TSC0004522
ggtgtaggaaaag

SEQ ID NO: 23038 - DNA, 13 bp, Artificial Sequence
  Oligonucleotide for detection of SNP TSC0004522
cttttcctacacc

SEQ ID NO: 23039 - DNA, 13 bp, Artificial Sequence
  Oligonucleotide for detection of SNP TSC0004522
ggtgtatgaaaag

SEQ ID NO: 23040 - DNA, 13 bp, Artificial Sequence
  Oligonucleotide for detection of SNP TSC0004522
cttttcatacacc

SEQ ID NO: 23041 - DNA, 13 bp, Artificial Sequence
  Oligonucleotide for detection of SNP TSC0004523
gtagatttgagga

SEQ ID NO: 23042 - DNA, 13 bp, Artificial Sequence
  Oligonucleotide for detection of SNP TSC0004523
tcctcaaatctac

SEQ ID NO: 23043 - DNA, 13 bp, Artificial Sequence
  Oligonucleotide for detection of SNP TSC0004523
gtagatatgagga

SEQ ID NO: 23044 - DNA, 13 bp, Artificial Sequence
  Oligonucleotide for detection of SNP TSC0004523
tcctcatatctac

SEQ ID NO: 23045 - DNA, 13 bp, Artificial Sequence
  Oligonucleotide for detection of SNP TSC0004523
gtagattcgagga

SEQ ID NO: 23046 - DNA, 13 bp, Artificial Sequence
  Oligonucleotide for detection of SNP TSC0004523
tcctcgaatctac

SEQ ID NO: 23047 - DNA, 13 bp, Artificial Sequence
  Oligonucleotide for detection of SNP TSC0004523
gtagatacgagga

SEQ ID NO: 23048 - DNA, 13 bp, Artificial Sequence
  Oligonucleotide for detection of SNP TSC0004523
tcctcgtatctac

SEQ ID NO: 23049 - DNA, 13 bp, Artificial Sequence
  Oligonucleotide for detection of SNP TSC0004523
tttttgggtttgy

SEQ ID NO: 23050 - DNA, 13 bp, Artificial Sequence
  Oligonucleotide for detection of SNP TSC0004523
rcaaacccaaaaa

SEQ ID NO: 23051 - DNA, 13 bp, Artificial Sequence
  Oligonucleotide for detection of SNP TSC0004523
tttttgtgtttgy

SEQ ID NO: 23052 - DNA, 13 bp, Artificial Sequence
  Oligonucleotide for detection of SNP TSC0004523
rcaaacacaaaaa

SEQ ID NO: 23053 - DNA, 13 bp, Artificial Sequence
  Oligonucleotide for detection of SNP TSC0004523
ttttcgggtttgy

SEQ ID NO: 23054 - DNA, 13 bp, Artificial Sequence
  Oligonucleotide for detection of SNP TSC0004523
rcaaacccgaaaa

SEQ ID NO: 23055 - DNA, 13 bp, Artificial Sequence
  Oligonucleotide for detection of SNP TSC0004523
ttttcgtgtttgy

SEQ ID NO: 23056 - DNA, 13 bp, Artificial Sequence
  Oligonucleotide for detection of SNP TSC0004523
rcaaacacgaaaa

SEQ ID NO: 23057 - DNA, 13 bp, Artificial Sequence
  Oligonucleotide for detection of SNP TSC0004524
ttattatgtggtt

SEQ ID NO: 23058 - DNA, 13 bp, Artificial Sequence
  Oligonucleotide for detection of SNP TSC0004524
aaccacataataa

SEQ ID NO: 23059 - DNA, 13 bp, Artificial Sequence
  Oligonucleotide for detection of SNP TSC0004524
ttattacgtggtt

SEQ ID NO: 23060 - DNA, 13 bp, Artificial Sequence
  Oligonucleotide for detection of SNP TSC0004524
aaccacgtaataa

SEQ ID NO: 23061 - DNA, 13 bp, Artificial Sequence
  Oligonucleotide for detection of SNP TSC0004524
aattatatggtga

SEQ ID NO: 23062 - DNA, 13 bp, Artificial Sequence
  Oligonucleotide for detection of SNP TSC0004524
tcaccatataatt

SEQ ID NO: 23063 - DNA, 13 bp, Artificial Sequence
  Oligonucleotide for detection of SNP TSC0004524
aattatgtggtga

SEQ ID NO: 23064 - DNA, 13 bp, Artificial Sequence
  Oligonucleotide for detection of SNP TSC0004524
tcaccacataatt

SEQ ID NO: 23065 - DNA, 13 bp, Artificial Sequence
  Oligonucleotide for detection of SNP TSC0004524
aattacgtggtga

SEQ ID NO: 23066 - DNA, 13 bp, Artificial Sequence
  Oligonucleotide for detection of SNP TSC0004524
tcaccacgtaatt

SEQ ID NO: 23067 - DNA, 13 bp, Artificial Sequence
  Oligonucleotide for detection of SNP TSC0004548
tgtaataaagtgg

SEQ ID NO: 23068 - DNA, 13 bp, Artificial Sequence
  Oligonucleotide for detection of SNP TSC0004548
ccactttattaca

SEQ ID NO: 23069 - DNA, 13 bp, Artificial Sequence
  Oligonucleotide for detection of SNP TSC0004548
tgtaatgaagtgg

SEQ ID NO: 23070 - DNA, 13 bp, Artificial Sequence
  Oligonucleotide for detection of SNP TSC0004548
ccacttcattaca

SEQ ID NO: 23071 - DNA, 13 bp, Artificial Sequence
  Oligonucleotide for detection of SNP TSC0004551
ttataaaattttg

SEQ ID NO: 23072 - DNA, 13 bp, Artificial Sequence
  Oligonucleotide for detection of SNP TSC0004551
caaaattttataa

SEQ ID NO: 23073 - DNA, 13 bp, Artificial Sequence
  Oligonucleotide for detection of SNP TSC0004551
ttataagattttg

SEQ ID NO: 23074 - DNA, 13 bp, Artificial Sequence
  Oligonucleotide for detection of SNP TSC0004551
caaaatcttataa

SEQ ID NO: 23075 - DNA, 13 bp, Artificial Sequence
  Oligonucleotide for detection of SNP TSC0004557
ggatttaattgtt

SEQ ID NO: 23076 - DNA, 13 bp, Artificial Sequence
  Oligonucleotide for detection of SNP TSC0004557
aacaattaaatcc

SEQ ID NO: 23077 - DNA, 13 bp, Artificial Sequence
  Oligonucleotide for detection of SNP TSC0004557
ggatttgattgtt

SEQ ID NO: 23078 - DNA, 13 bp, Artificial Sequence
  Oligonucleotide for detection of SNP TSC0004557
aacaatcaaatcc

SEQ ID NO: 23079 - DNA, 13 bp, Artificial Sequence
  Oligonucleotide for detection of SNP TSC0004562
gatgaaattataa

SEQ ID NO: 23080 - DNA, 13 bp, Artificial Sequence
  Oligonucleotide for detection of SNP TSC0004562
ttataatttcatc

SEQ ID NO: 23081 - DNA, 13 bp, Artificial Sequence
  Oligonucleotide for detection of SNP TSC0004562
gatgaagttataa

SEQ ID NO: 23082 - DNA, 13 bp, Artificial Sequence
  Oligonucleotide for detection of SNP TSC0004562
ttataacttcatc

SEQ ID NO: 23083 - DNA, 13 bp, Artificial Sequence
  Oligonucleotide for detection of SNP TSC0004583
gagataattttty

SEQ ID NO: 23084 - DNA, 13 bp, Artificial Sequence
  Oligonucleotide for detection of SNP TSC0004583
raaaaattatctc

SEQ ID NO: 23085 - DNA, 13 bp, Artificial Sequence
  Oligonucleotide for detection of SNP TSC0004583
gagatagttttty

SEQ ID NO: 23086 - DNA, 13 bp, Artificial Sequence
  Oligonucleotide for detection of SNP TSC0004583
raaaaactatctc

SEQ ID NO: 23087 - DNA, 13 bp, Artificial Sequence
  Oligonucleotide for detection of SNP TSC0004605
atatttatttatg

SEQ ID NO: 23088 - DNA, 13 bp, Artificial Sequence
  Oligonucleotide for detection of SNP TSC0004605
cataaataaatat

SEQ ID NO: 23089 - DNA, 13 bp, Artificial Sequence
  Oligonucleotide for detection of SNP TSC0004605
atatttttttatg

SEQ ID NO: 23090 - DNA, 13 bp, Artificial Sequence
  Oligonucleotide for detection of SNP TSC0004605
cataaaaaaatat

SEQ ID NO: 23091 - DNA, 13 bp, Artificial Sequence
  Oligonucleotide for detection of SNP TSC0004605
tataaatgaatgt

SEQ ID NO: 23092 - DNA, 13 bp, Artificial Sequence
  Oligonucleotide for detection of SNP TSC0004605
acattcatttata

SEQ ID NO: 23093 - DNA, 13 bp, Artificial Sequence
  Oligonucleotide for detection of SNP TSC0004605
tataaaagaatgt

SEQ ID NO: 23094 - DNA, 13 bp, Artificial Sequence
  Oligonucleotide for detection of SNP TSC0004605
acattcttttata

SEQ ID NO: 23095 - DNA, 13 bp, Artificial Sequence
  Oligonucleotide for detection of SNP TSC0004614
aggattatattty

SEQ ID NO: 23096 - DNA, 13 bp, Artificial Sequence
  Oligonucleotide for detection of SNP TSC0004614
raaatataatcct

SEQ ID NO: 23097 - DNA, 13 bp, Artificial Sequence
  Oligonucleotide for detection of SNP TSC0004614
aggattgtattty

SEQ ID NO: 23098 - DNA, 13 bp, Artificial Sequence
  Oligonucleotide for detection of SNP TSC0004614
raaatacaatcct

SEQ ID NO: 23099 - DNA, 13 bp, Artificial Sequence
  Oligonucleotide for detection of SNP TSC0004615
ttagaagaggaat

SEQ ID NO: 23100 - DNA, 13 bp, Artificial Sequence
  Oligonucleotide for detection of SNP TSC0004615
attcctcttctaa

SEQ ID NO: 23101 - DNA, 13 bp, Artificial Sequence
  Oligonucleotide for detection of SNP TSC0004615
ttagaataggaat

SEQ ID NO: 23102 - DNA, 13 bp, Artificial Sequence
  Oligonucleotide for detection of SNP TSC0004615
attcctattctaa

SEQ ID NO: 23103 - DNA, 13 bp, Artificial Sequence
  Oligonucleotide for detection of SNP TSC0004615
attttttttttgg

SEQ ID NO: 23104 - DNA, 13 bp, Artificial Sequence
  Oligonucleotide for detection of SNP TSC0004615
ccaaaaaaaaaat

SEQ ID NO: 23105 - DNA, 13 bp, Artificial Sequence
  Oligonucleotide for detection of SNP TSC0004615
atttttattttgg

SEQ ID NO: 23106 - DNA, 13 bp, Artificial Sequence
  Oligonucleotide for detection of SNP TSC0004615
ccaaaataaaaat

SEQ ID NO: 23107 - DNA, 13 bp, Artificial Sequence
  Oligonucleotide for detection of SNP TSC0004617
aatgataattttt

SEQ ID NO: 23108 - DNA, 13 bp, Artificial Sequence
  Oligonucleotide for detection of SNP TSC0004617
aaaaattatcatt

SEQ ID NO: 23109 - DNA, 13 bp, Artificial Sequence
  Oligonucleotide for detection of SNP TSC0004617
aatgatgattttt

SEQ ID NO: 23110 - DNA, 13 bp, Artificial Sequence
  Oligonucleotide for detection of SNP TSC0004617
aaaaatcatcatt

SEQ ID NO: 23111 - DNA, 13 bp, Artificial Sequence
  Oligonucleotide for detection of SNP TSC0004617
aatgacgattttt

SEQ ID NO: 23112 - DNA, 13 bp, Artificial Sequence
  Oligonucleotide for detection of SNP TSC0004617
aaaaatcgtcatt

SEQ ID NO: 23113 - DNA, 13 bp, Artificial Sequence
  Oligonucleotide for detection of SNP TSC0004617
agaaattgttatt

SEQ ID NO: 23114 - DNA, 13 bp, Artificial Sequence
  Oligonucleotide for detection of SNP TSC0004617
aataacaatttct

SEQ ID NO: 23115 - DNA, 13 bp, Artificial Sequence
  Oligonucleotide for detection of SNP TSC0004617
agaaatcgttatt

SEQ ID NO: 23116 - DNA, 13 bp, Artificial Sequence
  Oligonucleotide for detection of SNP TSC0004617
aataacgatttct

SEQ ID NO: 23117 - DNA, 13 bp, Artificial Sequence
  Oligonucleotide for detection of SNP TSC0004618
ttttaggagttgt

SEQ ID NO: 23118 - DNA, 13 bp, Artificial Sequence
  Oligonucleotide for detection of SNP TSC0004618
acaactcctaaaa

SEQ ID NO: 23119 - DNA, 13 bp, Artificial Sequence
  Oligonucleotide for detection of SNP TSC0004618
ttttagaagttgt

SEQ ID NO: 23120 - DNA, 13 bp, Artificial Sequence
  Oligonucleotide for detection of SNP TSC0004618
acaacttctaaaa

SEQ ID NO: 23121 - DNA, 13 bp, Artificial Sequence
  Oligonucleotide for detection of SNP TSC0004620
atgtttattttta

SEQ ID NO: 23122 - DNA, 13 bp, Artificial Sequence
  Oligonucleotide for detection of SNP TSC0004620
taaaaataaacat

SEQ ID NO: 23123 - DNA, 13 bp, Artificial Sequence
  Oligonucleotide for detection of SNP TSC0004620
atgtttgttttta

SEQ ID NO: 23124 - DNA, 13 bp, Artificial Sequence
  Oligonucleotide for detection of SNP TSC0004620
taaaaacaaacat

SEQ ID NO: 23125 - DNA, 13 bp, Artificial Sequence
  Oligonucleotide for detection of SNP TSC0004638
ttaaagtgttagg

SEQ ID NO: 23126 - DNA, 13 bp, Artificial Sequence
  Oligonucleotide for detection of SNP TSC0004638
cctaacactttaa

SEQ ID NO: 23127 - DNA, 13 bp, Artificial Sequence
  Oligonucleotide for detection of SNP TSC0004638
ttaaagcgttagg

SEQ ID NO: 23128 - DNA, 13 bp, Artificial Sequence
  Oligonucleotide for detection of SNP TSC0004638
cctaacgctttaa

SEQ ID NO: 23129 - DNA, 13 bp, Artificial Sequence
  Oligonucleotide for detection of SNP TSC0004638
tttagtgttttgg

SEQ ID NO: 23130 - DNA, 13 bp, Artificial Sequence
  Oligonucleotide for detection of SNP TSC0004638
ccaaaacactaaa

SEQ ID NO: 23131 - DNA, 13 bp, Artificial Sequence
  Oligonucleotide for detection of SNP TSC0004638
tttagtattttgg

SEQ ID NO: 23132 - DNA, 13 bp, Artificial Sequence
  Oligonucleotide for detection of SNP TSC0004638
ccaaaatactaaa

SEQ ID NO: 23133 - DNA, 13 bp, Artificial Sequence
  Oligonucleotide for detection of SNP TSC0004638
tttagcgttttgg

SEQ ID NO: 23134 - DNA, 13 bp, Artificial Sequence
  Oligonucleotide for detection of SNP TSC0004638
ccaaaacgctaaa

SEQ ID NO: 23135 - DNA, 13 bp, Artificial Sequence
  Oligonucleotide for detection of SNP TSC0004650
gattaggaattta

SEQ ID NO: 23136 - DNA, 13 bp, Artificial Sequence
  Oligonucleotide for detection of SNP TSC0004650
taaattcctaatc

SEQ ID NO: 23137 - DNA, 13 bp, Artificial Sequence
  Oligonucleotide for detection of SNP TSC0004650
gattagaaattta

SEQ ID NO: 23138 - DNA, 13 bp, Artificial Sequence
  Oligonucleotide for detection of SNP TSC0004650
taaatttctaatc

SEQ ID NO: 23139 - DNA, 13 bp, Artificial Sequence
  Oligonucleotide for detection of SNP TSC0004662
aggttgagagaty

SEQ ID NO: 23140 - DNA, 13 bp, Artificial Sequence
  Oligonucleotide for detection of SNP TSC0004662
ratctctcaacct

SEQ ID NO: 23141 - DNA, 13 bp, Artificial Sequence
  Oligonucleotide for detection of SNP TSC0004662
aggttgggagaty

SEQ ID NO: 23142 - DNA, 13 bp, Artificial Sequence
  Oligonucleotide for detection of SNP TSC0004662
ratctcccaacct

SEQ ID NO: 23143 - DNA, 13 bp, Artificial Sequence
  Oligonucleotide for detection of SNP TSC0004662
aggtcgagagaty

SEQ ID NO: 23144 - DNA, 13 bp, Artificial Sequence
  Oligonucleotide for detection of SNP TSC0004662
ratctctcgacct

SEQ ID NO: 23145 - DNA, 13 bp, Artificial Sequence
  Oligonucleotide for detection of SNP TSC0004662
aggtcgggagaty

SEQ ID NO: 23146 - DNA, 13 bp, Artificial Sequence
  Oligonucleotide for detection of SNP TSC0004662
ratctcccgacct

SEQ ID NO: 23147 - DNA, 13 bp, Artificial Sequence
  Oligonucleotide for detection of SNP TSC0004664
gagtatatataga

SEQ ID NO: 23148 - DNA, 13 bp, Artificial Sequence
  Oligonucleotide for detection of SNP TSC0004664
tctatatatactc

SEQ ID NO: 23149 - DNA, 13 bp, Artificial Sequence
  Oligonucleotide for detection of SNP TSC0004664
gagtatgtataga

SEQ ID NO: 23150 - DNA, 13 bp, Artificial Sequence
  Oligonucleotide for detection of SNP TSC0004664
tctatacatactc

SEQ ID NO: 23151 - DNA, 13 bp, Artificial Sequence
  Oligonucleotide for detection of SNP TSC0004664
gagtacgtataga

SEQ ID NO: 23152 - DNA, 13 bp, Artificial Sequence
  Oligonucleotide for detection of SNP TSC0004664
tctatacgtactc

SEQ ID NO: 23153 - DNA, 13 bp, Artificial Sequence
  Oligonucleotide for detection of SNP TSC0004664
tttgtgtgtgtty

SEQ ID NO: 23154 - DNA, 13 bp, Artificial Sequence
  Oligonucleotide for detection of SNP TSC0004664
raacacacacaaa

SEQ ID NO: 23155 - DNA, 13 bp, Artificial Sequence
  Oligonucleotide for detection of SNP TSC0004664
tttgtgcgtgtty

SEQ ID NO: 23156 - DNA, 13 bp, Artificial Sequence
  Oligonucleotide for detection of SNP TSC0004664
raacacgcacaaa

SEQ ID NO: 23157 - DNA, 13 bp, Artificial Sequence
  Oligonucleotide for detection of SNP TSC0004665
aataaatgtaata

SEQ ID NO: 23158 - DNA, 13 bp, Artificial Sequence
  Oligonucleotide for detection of SNP TSC0004665
tattacatttatt

SEQ ID NO: 23159 - DNA, 13 bp, Artificial Sequence
  Oligonucleotide for detection of SNP TSC0004665
aataaacgtaata

SEQ ID NO: 23160 - DNA, 13 bp, Artificial Sequence
  Oligonucleotide for detection of SNP TSC0004665
tattacgtttatt

SEQ ID NO: 23161 - DNA, 13 bp, Artificial Sequence
  Oligonucleotide for detection of SNP TSC0004665
tgttgtgtttgtt

SEQ ID NO: 23162 - DNA, 13 bp, Artificial Sequence
  Oligonucleotide for detection of SNP TSC0004665
aacaaacacaaca

SEQ ID NO: 23163 - DNA, 13 bp, Artificial Sequence
  Oligonucleotide for detection of SNP TSC0004665
tgttgtatttgtt

SEQ ID NO: 23164 - DNA, 13 bp, Artificial Sequence
  Oligonucleotide for detection of SNP TSC0004665
aacaaatacaaca

SEQ ID NO: 23165 - DNA, 13 bp, Artificial Sequence
  Oligonucleotide for detection of SNP TSC0004665
tgttgcgtttgtt

SEQ ID NO: 23166 - DNA, 13 bp, Artificial Sequence
  Oligonucleotide for detection of SNP TSC0004665
aacaaacgcaaca

SEQ ID NO: 23167 - DNA, 13 bp, Artificial Sequence
  Oligonucleotide for detection of SNP TSC0004667
agggaagagaggt

SEQ ID NO: 23168 - DNA, 13 bp, Artificial Sequence
  Oligonucleotide for detection of SNP TSC0004667
acctctcttccct

SEQ ID NO: 23169 - DNA, 13 bp, Artificial Sequence
  Oligonucleotide for detection of SNP TSC0004667
agggaatagaggt

SEQ ID NO: 23170 - DNA, 13 bp, Artificial Sequence
  Oligonucleotide for detection of SNP TSC0004667
acctctattccct

SEQ ID NO: 23171 - DNA, 13 bp, Artificial Sequence
  Oligonucleotide for detection of SNP TSC0004670
aatgttggggaty

SEQ ID NO: 23172 - DNA, 13 bp, Artificial Sequence
  Oligonucleotide for detection of SNP TSC0004670
ratccccaacatt

SEQ ID NO: 23173 - DNA, 13 bp, Artificial Sequence
  Oligonucleotide for detection of SNP TSC0004670
aatgttagggaty

SEQ ID NO: 23174 - DNA, 13 bp, Artificial Sequence
  Oligonucleotide for detection of SNP TSC0004670
ratccctaacatt

SEQ ID NO: 23175 - DNA, 13 bp, Artificial Sequence
  Oligonucleotide for detection of SNP TSC0004672
ggttgtaagtttg

SEQ ID NO: 23176 - DNA, 13 bp, Artificial Sequence
  Oligonucleotide for detection of SNP TSC0004672
caaacttacaacc

SEQ ID NO: 23177 - DNA, 13 bp, Artificial Sequence
  Oligonucleotide for detection of SNP TSC0004672
ggttgttagtttg

SEQ ID NO: 23178 - DNA, 13 bp, Artificial Sequence
  Oligonucleotide for detection of SNP TSC0004672
caaactaacaacc

SEQ ID NO: 23179 - DNA, 13 bp, Artificial Sequence
  Oligonucleotide for detection of SNP TSC0004672
tagatttgtagty

SEQ ID NO: 23180 - DNA, 13 bp, Artificial Sequence
  Oligonucleotide for detection of SNP TSC0004672
ractacaaatcta

SEQ ID NO: 23181 - DNA, 13 bp, Artificial Sequence
  Oligonucleotide for detection of SNP TSC0004672
tagattggtagty

SEQ ID NO: 23182 - DNA, 13 bp, Artificial Sequence
  Oligonucleotide for detection of SNP TSC0004672
ractaccaatcta

SEQ ID NO: 23183 - DNA, 13 bp, Artificial Sequence
  Oligonucleotide for detection of SNP TSC0004680
agatggagtttty

SEQ ID NO: 23184 - DNA, 13 bp, Artificial Sequence
  Oligonucleotide for detection of SNP TSC0004680
raaaactccatct

SEQ ID NO: 23185 - DNA, 13 bp, Artificial Sequence
  Oligonucleotide for detection of SNP TSC0004680
agatggggtttty

SEQ ID NO: 23186 - DNA, 13 bp, Artificial Sequence
  Oligonucleotide for detection of SNP TSC0004680
raaaaccccatct

SEQ ID NO: 23187 - DNA, 13 bp, Artificial Sequence
  Oligonucleotide for detection of SNP TSC0004688
tttaagatttttt

SEQ ID NO: 23188 - DNA, 13 bp, Artificial Sequence
  Oligonucleotide for detection of SNP TSC0004688
aaaaaatcttaaa

SEQ ID NO: 23189 - DNA, 13 bp, Artificial Sequence
  Oligonucleotide for detection of SNP TSC0004688
tttaaggtttttt

SEQ ID NO: 23190 - DNA, 13 bp, Artificial Sequence
  Oligonucleotide for detection of SNP TSC0004688
aaaaaaccttaaa

SEQ ID NO: 23191 - DNA, 13 bp, Artificial Sequence
  Oligonucleotide for detection of SNP TSC0004715
aaagtgattttty

SEQ ID NO: 23192 - DNA, 13 bp, Artificial Sequence
  Oligonucleotide for detection of SNP TSC0004715
raaaaatcacttt

SEQ ID NO: 23193 - DNA, 13 bp, Artificial Sequence
  Oligonucleotide for detection of SNP TSC0004715
aaagtgtttttty

SEQ ID NO: 23194 - DNA, 13 bp, Artificial Sequence
  Oligonucleotide for detection of SNP TSC0004715
raaaaaacacttt

SEQ ID NO: 23195 - DNA, 13 bp, Artificial Sequence
  Oligonucleotide for detection of SNP TSC0004715
gaagagttatttt

SEQ ID NO: 23196 - DNA, 13 bp, Artificial Sequence
  Oligonucleotide for detection of SNP TSC0004715
aaaataactcttc

SEQ ID NO: 23197 - DNA, 13 bp, Artificial Sequence
  Oligonucleotide for detection of SNP TSC0004715
gaagaggtatttt

SEQ ID NO: 23198 - DNA, 13 bp, Artificial Sequence
  Oligonucleotide for detection of SNP TSC0004715
aaaatacctcttc

SEQ ID NO: 23199 - DNA, 13 bp, Artificial Sequence
  Oligonucleotide for detection of SNP TSC0004716
ttataataaaaty

SEQ ID NO: 23200 - DNA, 13 bp, Artificial Sequence
  Oligonucleotide for detection of SNP TSC0004716
rattttattataa

SEQ ID NO: 23201 - DNA, 13 bp, Artificial Sequence
  Oligonucleotide for detection of SNP TSC0004716
ttataagaaaaty

SEQ ID NO: 23202 - DNA, 13 bp, Artificial Sequence
  Oligonucleotide for detection of SNP TSC0004716
rattttcttataa

SEQ ID NO: 23203 - DNA, 13 bp, Artificial Sequence
  Oligonucleotide for detection of SNP TSC0004716
gattttgttgtgg

SEQ ID NO: 23204 - DNA, 13 bp, Artificial Sequence
  Oligonucleotide for detection of SNP TSC0004716
ccacaacaaaatc

SEQ ID NO: 23205 - DNA, 13 bp, Artificial Sequence
  Oligonucleotide for detection of SNP TSC0004716
gatttttttgtgg

SEQ ID NO: 23206 - DNA, 13 bp, Artificial Sequence
  Oligonucleotide for detection of SNP TSC0004716
ccacaaaaaaatc

SEQ ID NO: 23207 - DNA, 13 bp, Artificial Sequence
  Oligonucleotide for detection of SNP TSC0004717
aataaaaaggata

SEQ ID NO: 23208 - DNA, 13 bp, Artificial Sequence
  Oligonucleotide for detection of SNP TSC0004717
tatcctttttatt

SEQ ID NO: 23209 - DNA, 13 bp, Artificial Sequence
  Oligonucleotide for detection of SNP TSC0004717
aataaataggata

SEQ ID NO: 23210 - DNA, 13 bp, Artificial Sequence
  Oligonucleotide for detection of SNP TSC0004717
tatcctatttatt

SEQ ID NO: 23211 - DNA, 13 bp, Artificial Sequence
  Oligonucleotide for detection of SNP TSC0004717
tgttttttttgtt

SEQ ID NO: 23212 - DNA, 13 bp, Artificial Sequence
  Oligonucleotide for detection of SNP TSC0004717
aacaaaaaaaaca

SEQ ID NO: 23213 - DNA, 13 bp, Artificial Sequence
  Oligonucleotide for detection of SNP TSC0004717
tgttttatttgtt

SEQ ID NO: 23214 - DNA, 13 bp, Artificial Sequence
  Oligonucleotide for detection of SNP TSC0004717
aacaaataaaaca

SEQ ID NO: 23215 - DNA, 13 bp, Artificial Sequence
  Oligonucleotide for detection of SNP TSC0004720
agaagaaattttg

SEQ ID NO: 23216 - DNA, 13 bp, Artificial Sequence
  Oligonucleotide for detection of SNP TSC0004720
caaaatttcttct

SEQ ID NO: 23217 - DNA, 13 bp, Artificial Sequence
  Oligonucleotide for detection of SNP TSC0004720
agaagatattttg

SEQ ID NO: 23218 - DNA, 13 bp, Artificial Sequence
  Oligonucleotide for detection of SNP TSC0004720
caaaatatcttct

SEQ ID NO: 23219 - DNA, 13 bp, Artificial Sequence
  Oligonucleotide for detection of SNP TSC0004720
taggatttttttt

SEQ ID NO: 23220 - DNA, 13 bp, Artificial Sequence
  Oligonucleotide for detection of SNP TSC0004720
aaaaaaaatccta

SEQ ID NO: 23221 - DNA, 13 bp, Artificial Sequence
  Oligonucleotide for detection of SNP TSC0004720
taggatatttttt

SEQ ID NO: 23222 - DNA, 13 bp, Artificial Sequence
  Oligonucleotide for detection of SNP TSC0004720
aaaaaatatccta

SEQ ID NO: 23223 - DNA, 13 bp, Artificial Sequence
  Oligonucleotide for detection of SNP TSC0004721
gtttatattatag

SEQ ID NO: 23224 - DNA, 13 bp, Artificial Sequence
  Oligonucleotide for detection of SNP TSC0004721
ctataatataaac

SEQ ID NO: 23225 - DNA, 13 bp, Artificial Sequence
  Oligonucleotide for detection of SNP TSC0004721
gtttatgttatag

SEQ ID NO: 23226 - DNA, 13 bp, Artificial Sequence
  Oligonucleotide for detection of SNP TSC0004721
ctataacataaac

SEQ ID NO: 23227 - DNA, 13 bp, Artificial Sequence
  Oligonucleotide for detection of SNP TSC0004721
gtttacgttatag

SEQ ID NO: 23228 - DNA, 13 bp, Artificial Sequence
  Oligonucleotide for detection of SNP TSC0004721
ctataacgtaaac

SEQ ID NO: 23229 - DNA, 13 bp, Artificial Sequence
  Oligonucleotide for detection of SNP TSC0004721
ttgtgatgtgaay

SEQ ID NO: 23230 - DNA, 13 bp, Artificial Sequence
  Oligonucleotide for detection of SNP TSC0004721
rttcacatcacaa

SEQ ID NO: 23231 - DNA, 13 bp, Artificial Sequence
  Oligonucleotide for detection of SNP TSC0004721
ttgtgacgtgaay

SEQ ID NO: 23232 - DNA, 13 bp, Artificial Sequence
  Oligonucleotide for detection of SNP TSC0004721
rttcacgtcacaa

SEQ ID NO: 23233 - DNA, 13 bp, Artificial Sequence
  Oligonucleotide for detection of SNP TSC0004726
agttaagatatag

SEQ ID NO: 23234 - DNA, 13 bp, Artificial Sequence
  Oligonucleotide for detection of SNP TSC0004726
ctatatcttaact

SEQ ID NO: 23235 - DNA, 13 bp, Artificial Sequence
  Oligonucleotide for detection of SNP TSC0004726
agttaatatatag

SEQ ID NO: 23236 - DNA, 13 bp, Artificial Sequence
  Oligonucleotide for detection of SNP TSC0004726
ctatatattaact

SEQ ID NO: 23237 - DNA, 13 bp, Artificial Sequence
  Oligonucleotide for detection of SNP TSC0004726
ttatgttttgatt

SEQ ID NO: 23238 - DNA, 13 bp, Artificial Sequence
  Oligonucleotide for detection of SNP TSC0004726
aatcaaaacataa

SEQ ID NO: 23239 - DNA, 13 bp, Artificial Sequence
  Oligonucleotide for detection of SNP TSC0004726
ttatgtattgatt

SEQ ID NO: 23240 - DNA, 13 bp, Artificial Sequence
  Oligonucleotide for detection of SNP TSC0004726
aatcaatacataa

SEQ ID NO: 23241 - DNA, 13 bp, Artificial Sequence
  Oligonucleotide for detection of SNP TSC0004727
ggaagttggatta

SEQ ID NO: 23242 - DNA, 13 bp, Artificial Sequence
  Oligonucleotide for detection of SNP TSC0004727
taatccaacttcc

SEQ ID NO: 23243 - DNA, 13 bp, Artificial Sequence
  Oligonucleotide for detection of SNP TSC0004727
ggaagtcggatta

SEQ ID NO: 23244 - DNA, 13 bp, Artificial Sequence
  Oligonucleotide for detection of SNP TSC0004727
taatccgacttcc

SEQ ID NO: 23245 - DNA, 13 bp, Artificial Sequence
  Oligonucleotide for detection of SNP TSC0004727
taatttgatttty

SEQ ID NO: 23246 - DNA, 13 bp, Artificial Sequence
  Oligonucleotide for detection of SNP TSC0004727
raaaatcaaatta

SEQ ID NO: 23247 - DNA, 13 bp, Artificial Sequence
  Oligonucleotide for detection of SNP TSC0004727
taatttaatttty

SEQ ID NO: 23248 - DNA, 13 bp, Artificial Sequence
  Oligonucleotide for detection of SNP TSC0004727
raaaattaaatta

SEQ ID NO: 23249 - DNA, 13 bp, Artificial Sequence
  Oligonucleotide for detection of SNP TSC0004727
taattcgatttty

SEQ ID NO: 23250 - DNA, 13 bp, Artificial Sequence
  Oligonucleotide for detection of SNP TSC0004727
raaaatcgaatta

SEQ ID NO: 23251 - DNA, 13 bp, Artificial Sequence
  Oligonucleotide for detection of SNP TSC0004733
gaggtttgggatt

SEQ ID NO: 23252 - DNA, 13 bp, Artificial Sequence
  Oligonucleotide for detection of SNP TSC0004733
aatcccaaacctc

SEQ ID NO: 23253 - DNA, 13 bp, Artificial Sequence
  Oligonucleotide for detection of SNP TSC0004733
gaggttcgggatt

SEQ ID NO: 23254 - DNA, 13 bp, Artificial Sequence
  Oligonucleotide for detection of SNP TSC0004733
aatcccgaacctc

SEQ ID NO: 23255 - DNA, 13 bp, Artificial Sequence
  Oligonucleotide for detection of SNP TSC0004733
aattttgggttty

SEQ ID NO: 23256 - DNA, 13 bp, Artificial Sequence
  Oligonucleotide for detection of SNP TSC0004733
raaacccaaaatt

SEQ ID NO: 23257 - DNA, 13 bp, Artificial Sequence
  Oligonucleotide for detection of SNP TSC0004733
aattttaggttty

SEQ ID NO: 23258 - DNA, 13 bp, Artificial Sequence
  Oligonucleotide for detection of SNP TSC0004733
raaacctaaaatt

SEQ ID NO: 23259 - DNA, 13 bp, Artificial Sequence
  Oligonucleotide for detection of SNP TSC0004733
aatttcgggttty

SEQ ID NO: 23260 - DNA, 13 bp, Artificial Sequence
  Oligonucleotide for detection of SNP TSC0004733
raaacccgaaatt

SEQ ID NO: 23261 - DNA, 13 bp, Artificial Sequence
  Oligonucleotide for detection of SNP TSC0004747
tggttaatttttt

SEQ ID NO: 23262 - DNA, 13 bp, Artificial Sequence
  Oligonucleotide for detection of SNP TSC0004747
aaaaaattaacca

SEQ ID NO: 23263 - DNA, 13 bp, Artificial Sequence
  Oligonucleotide for detection of SNP TSC0004747
tggttagtttttt

SEQ ID NO: 23264 - DNA, 13 bp, Artificial Sequence
  Oligonucleotide for detection of SNP TSC0004747
aaaaaactaacca

SEQ ID NO: 23265 - DNA, 13 bp, Artificial Sequence
  Oligonucleotide for detection of SNP TSC0004747
cggttaatttttt

SEQ ID NO: 23266 - DNA, 13 bp, Artificial Sequence
  Oligonucleotide for detection of SNP TSC0004747
aaaaaattaaccg

SEQ ID NO: 23267 - DNA, 13 bp, Artificial Sequence
  Oligonucleotide for detection of SNP TSC0004747
cggttagtttttt

SEQ ID NO: 23268 - DNA, 13 bp, Artificial Sequence
  Oligonucleotide for detection of SNP TSC0004747
aaaaaactaaccg

SEQ ID NO: 23269 - DNA, 13 bp, Artificial Sequence
  Oligonucleotide for detection of SNP TSC0004759
gtttagaaattta

SEQ ID NO: 23270 - DNA, 13 bp, Artificial Sequence
  Oligonucleotide for detection of SNP TSC0004759
taaatttctaaac

SEQ ID NO: 23271 - DNA, 13 bp, Artificial Sequence
  Oligonucleotide for detection of SNP TSC0004759
gtttaggaattta

SEQ ID NO: 23272 - DNA, 13 bp, Artificial Sequence
  Oligonucleotide for detection of SNP TSC0004759
taaattcctaaac

SEQ ID NO: 23273 - DNA, 13 bp, Artificial Sequence
  Oligonucleotide for detection of SNP TSC0004760
taaaatggtagtt

SEQ ID NO: 23274 - DNA, 13 bp, Artificial Sequence
  Oligonucleotide for detection of SNP TSC0004760
aactaccatttta

SEQ ID NO: 23275 - DNA, 13 bp, Artificial Sequence
  Oligonucleotide for detection of SNP TSC0004760
taaaattgtagtt

SEQ ID NO: 23276 - DNA, 13 bp, Artificial Sequence
  Oligonucleotide for detection of SNP TSC0004760
aactacaatttta

SEQ ID NO: 23277 - DNA, 13 bp, Artificial Sequence
  Oligonucleotide for detection of SNP TSC0004760
agttgttatttta

SEQ ID NO: 23278 - DNA, 13 bp, Artificial Sequence
  Oligonucleotide for detection of SNP TSC0004760
taaaataacaact

SEQ ID NO: 23279 - DNA, 13 bp, Artificial Sequence
  Oligonucleotide for detection of SNP TSC0004760
agttgtaatttta

SEQ ID NO: 23280 - DNA, 13 bp, Artificial Sequence
  Oligonucleotide for detection of SNP TSC0004760
taaaattacaact

SEQ ID NO: 23281 - DNA, 13 bp, Artificial Sequence
  Oligonucleotide for detection of SNP TSC0004766
gttagtattttta

SEQ ID NO: 23282 - DNA, 13 bp, Artificial Sequence
  Oligonucleotide for detection of SNP TSC0004766
taaaaatactaac

SEQ ID NO: 23283 - DNA, 13 bp, Artificial Sequence
  Oligonucleotide for detection of SNP TSC0004766
gttagttttttta

SEQ ID NO: 23284 - DNA, 13 bp, Artificial Sequence
  Oligonucleotide for detection of SNP TSC0004766
taaaaaaactaac

SEQ ID NO: 23285 - DNA, 13 bp, Artificial Sequence
  Oligonucleotide for detection of SNP TSC0004766
tggaggtgttggy

SEQ ID NO: 23286 - DNA, 13 bp, Artificial Sequence
  Oligonucleotide for detection of SNP TSC0004766
rccaacacctcca

SEQ ID NO: 23287 - DNA, 13 bp, Artificial Sequence
  Oligonucleotide for detection of SNP TSC0004766
tggaggggttggy

SEQ ID NO: 23288 - DNA, 13 bp, Artificial Sequence
  Oligonucleotide for detection of SNP TSC0004766
rccaacccctcca

SEQ ID NO: 23289 - DNA, 13 bp, Artificial Sequence
  Oligonucleotide for detection of SNP TSC0004780
gttggagtgtagt

SEQ ID NO: 23290 - DNA, 13 bp, Artificial Sequence
  Oligonucleotide for detection of SNP TSC0004780
actacactccaac

SEQ ID NO: 23291 - DNA, 13 bp, Artificial Sequence
  Oligonucleotide for detection of SNP TSC0004780
gttggaatgtagt

SEQ ID NO: 23292 - DNA, 13 bp, Artificial Sequence
  Oligonucleotide for detection of SNP TSC0004780
actacattccaac

SEQ ID NO: 23293 - DNA, 13 bp, Artificial Sequence
  Oligonucleotide for detection of SNP TSC0004780
gttggagcgtagt

SEQ ID NO: 23294 - DNA, 13 bp, Artificial Sequence
  Oligonucleotide for detection of SNP TSC0004780
actacgctccaac

SEQ ID NO: 23295 - DNA, 13 bp, Artificial Sequence
  Oligonucleotide for detection of SNP TSC0004780
gttggaacgtagt

SEQ ID NO: 23296 - DNA, 13 bp, Artificial Sequence
  Oligonucleotide for detection of SNP TSC0004780
actacgttccaac

SEQ ID NO: 23297 - DNA, 13 bp, Artificial Sequence
  Oligonucleotide for detection of SNP TSC0004783
atgatatatgatt

SEQ ID NO: 23298 - DNA, 13 bp, Artificial Sequence
  Oligonucleotide for detection of SNP TSC0004783
aatcatatatcat

SEQ ID NO: 23299 - DNA, 13 bp, Artificial Sequence
  Oligonucleotide for detection of SNP TSC0004783
atgatagatgatt

SEQ ID NO: 23300 - DNA, 13 bp, Artificial Sequence
  Oligonucleotide for detection of SNP TSC0004783
aatcatctatcat

SEQ ID NO: 23301 - DNA, 13 bp, Artificial Sequence
  Oligonucleotide for detection of SNP TSC0004783
agttatgtattat

SEQ ID NO: 23302 - DNA, 13 bp, Artificial Sequence
  Oligonucleotide for detection of SNP TSC0004783
ataatacataact

SEQ ID NO: 23303 - DNA, 13 bp, Artificial Sequence
  Oligonucleotide for detection of SNP TSC0004783
agttatttattat

SEQ ID NO: 23304 - DNA, 13 bp, Artificial Sequence
  Oligonucleotide for detection of SNP TSC0004783
ataataaataact

SEQ ID NO: 23305 - DNA, 13 bp, Artificial Sequence
  Oligonucleotide for detection of SNP TSC0004788
tttagtatatgtg

SEQ ID NO: 23306 - DNA, 13 bp, Artificial Sequence
  Oligonucleotide for detection of SNP TSC0004788
cacatatactaaa

SEQ ID NO: 23307 - DNA, 13 bp, Artificial Sequence
  Oligonucleotide for detection of SNP TSC0004788
tttagtgtatgtg

SEQ ID NO: 23308 - DNA, 13 bp, Artificial Sequence
  Oligonucleotide for detection of SNP TSC0004788
cacatacactaaa

SEQ ID NO: 23309 - DNA, 13 bp, Artificial Sequence
  Oligonucleotide for detection of SNP TSC0004788
tttagcgtatgtg

SEQ ID NO: 23310 - DNA, 13 bp, Artificial Sequence
  Oligonucleotide for detection of SNP TSC0004788
cacatacgctaaa

SEQ ID NO: 23311 - DNA, 13 bp, Artificial Sequence
  Oligonucleotide for detection of SNP TSC0004788
tatatgtgttggg

SEQ ID NO: 23312 - DNA, 13 bp, Artificial Sequence
  Oligonucleotide for detection of SNP TSC0004788
cccaacacatata

SEQ ID NO: 23313 - DNA, 13 bp, Artificial Sequence
  Oligonucleotide for detection of SNP TSC0004788
tatatgcgttggg

SEQ ID NO: 23314 - DNA, 13 bp, Artificial Sequence
  Oligonucleotide for detection of SNP TSC0004788
cccaacgcatata

SEQ ID NO: 23315 - DNA, 13 bp, Artificial Sequence
  Oligonucleotide for detection of SNP TSC0004820
atagtaggtttgy

SEQ ID NO: 23316 - DNA, 13 bp, Artificial Sequence
  Oligonucleotide for detection of SNP TSC0004820
rcaaacctactat

SEQ ID NO: 23317 - DNA, 13 bp, Artificial Sequence
  Oligonucleotide for detection of SNP TSC0004820
atagtaagtttgy

SEQ ID NO: 23318 - DNA, 13 bp, Artificial Sequence
  Oligonucleotide for detection of SNP TSC0004820
rcaaacttactat

SEQ ID NO: 23319 - DNA, 13 bp, Artificial Sequence
  Oligonucleotide for detection of SNP TSC0004821
agtagaatatagg

SEQ ID NO: 23320 - DNA, 13 bp, Artificial Sequence
  Oligonucleotide for detection of SNP TSC0004821
cctatattctact

SEQ ID NO: 23321 - DNA, 13 bp, Artificial Sequence
  Oligonucleotide for detection of SNP TSC0004821
agtagagtatagg

SEQ ID NO: 23322 - DNA, 13 bp, Artificial Sequence
  Oligonucleotide for detection of SNP TSC0004821
cctatactctact

SEQ ID NO: 23323 - DNA, 13 bp, Artificial Sequence
  Oligonucleotide for detection of SNP TSC0004828
ttttaggtgtttg

SEQ ID NO: 23324 - DNA, 13 bp, Artificial Sequence
  Oligonucleotide for detection of SNP TSC0004828
caaacacctaaaa

SEQ ID NO: 23325 - DNA, 13 bp, Artificial Sequence
  Oligonucleotide for detection of SNP TSC0004828
ttttagatgtttg

SEQ ID NO: 23326 - DNA, 13 bp, Artificial Sequence
  Oligonucleotide for detection of SNP TSC0004828
caaacatctaaaa

SEQ ID NO: 23327 - DNA, 13 bp, Artificial Sequence
  Oligonucleotide for detection of SNP TSC0004829
ggtgataaaatga

SEQ ID NO: 23328 - DNA, 13 bp, Artificial Sequence
  Oligonucleotide for detection of SNP TSC0004829
tcattttatcacc

SEQ ID NO: 23329 - DNA, 13 bp, Artificial Sequence
  Oligonucleotide for detection of SNP TSC0004829
ggtgatgaaatga

SEQ ID NO: 23330 - DNA, 13 bp, Artificial Sequence
  Oligonucleotide for detection of SNP TSC0004829
tcatttcatcacc

SEQ ID NO: 23331 - DNA, 13 bp, Artificial Sequence
  Oligonucleotide for detection of SNP TSC0004830
ttttatattgtag

SEQ ID NO: 23332 - DNA, 13 bp, Artificial Sequence
  Oligonucleotide for detection of SNP TSC0004830
ctacaatataaaa

SEQ ID NO: 23333 - DNA, 13 bp, Artificial Sequence
  Oligonucleotide for detection of SNP TSC0004830
ttttatgttgtag

SEQ ID NO: 23334 - DNA, 13 bp, Artificial Sequence
  Oligonucleotide for detection of SNP TSC0004830
ctacaacataaaa

SEQ ID NO: 23335 - DNA, 13 bp, Artificial Sequence
  Oligonucleotide for detection of SNP TSC0004830
ttttacgttgtag

SEQ ID NO: 23336 - DNA, 13 bp, Artificial Sequence
  Oligonucleotide for detection of SNP TSC0004830
ctacaacgtaaaa

SEQ ID NO: 23337 - DNA, 13 bp, Artificial Sequence
  Oligonucleotide for detection of SNP TSC0004830
ttgtagtgtagga

SEQ ID NO: 23338 - DNA, 13 bp, Artificial Sequence
  Oligonucleotide for detection of SNP TSC0004830
tcctacactacaa

SEQ ID NO: 23339 - DNA, 13 bp, Artificial Sequence
  Oligonucleotide for detection of SNP TSC0004830
ttgtagcgtagga

SEQ ID NO: 23340 - DNA, 13 bp, Artificial Sequence
  Oligonucleotide for detection of SNP TSC0004830
tcctacgctacaa

SEQ ID NO: 23341 - DNA, 13 bp, Artificial Sequence
  Oligonucleotide for detection of SNP TSC0004831
atggtagtttttt

SEQ ID NO: 23342 - DNA, 13 bp, Artificial Sequence
  Oligonucleotide for detection of SNP TSC0004831
aaaaaactaccat

SEQ ID NO: 23343 - DNA, 13 bp, Artificial Sequence
  Oligonucleotide for detection of SNP TSC0004831
atggtaatttttt

SEQ ID NO: 23344 - DNA, 13 bp, Artificial Sequence
  Oligonucleotide for detection of SNP TSC0004831
aaaaaattaccat

SEQ ID NO: 23345 - DNA, 13 bp, Artificial Sequence
  Oligonucleotide for detection of SNP TSC0004831
acggtagtttttt

SEQ ID NO: 23346 - DNA, 13 bp, Artificial Sequence
  Oligonucleotide for detection of SNP TSC0004831
aaaaaactaccgt

SEQ ID NO: 23347 - DNA, 13 bp, Artificial Sequence
  Oligonucleotide for detection of SNP TSC0004831
acggtaatttttt

SEQ ID NO: 23348 - DNA, 13 bp, Artificial Sequence
  Oligonucleotide for detection of SNP TSC0004831
aaaaaattaccgt

SEQ ID NO: 23349 - DNA, 13 bp, Artificial Sequence
  Oligonucleotide for detection of SNP TSC0004835
atatatggtttty

SEQ ID NO: 23350 - DNA, 13 bp, Artificial Sequence
  Oligonucleotide for detection of SNP TSC0004835
raaaaccatatat

SEQ ID NO: 23351 - DNA, 13 bp, Artificial Sequence
  Oligonucleotide for detection of SNP TSC0004835
atatattgtttty

SEQ ID NO: 23352 - DNA, 13 bp, Artificial Sequence
  Oligonucleotide for detection of SNP TSC0004835
raaaacaatatat

SEQ ID NO: 23353 - DNA, 13 bp, Artificial Sequence
  Oligonucleotide for detection of SNP TSC0004835
atatacggtttty

SEQ ID NO: 23354 - DNA, 13 bp, Artificial Sequence
  Oligonucleotide for detection of SNP TSC0004835
raaaaccgtatat

SEQ ID NO: 23355 - DNA, 13 bp, Artificial Sequence
  Oligonucleotide for detection of SNP TSC0004835
gagaattgtgtgt

SEQ ID NO: 23356 - DNA, 13 bp, Artificial Sequence
  Oligonucleotide for detection of SNP TSC0004835
acacacaattctc

SEQ ID NO: 23357 - DNA, 13 bp, Artificial Sequence
  Oligonucleotide for detection of SNP TSC0004835
gagaatagtgtgt

SEQ ID NO: 23358 - DNA, 13 bp, Artificial Sequence
  Oligonucleotide for detection of SNP TSC0004835
acacactattctc

SEQ ID NO: 23359 - DNA, 13 bp, Artificial Sequence
  Oligonucleotide for detection of SNP TSC0004835
gagaatcgtgtgt

SEQ ID NO: 23360 - DNA, 13 bp, Artificial Sequence
  Oligonucleotide for detection of SNP TSC0004835
acacacgattctc

SEQ ID NO: 23361 - DNA, 13 bp, Artificial Sequence
  Oligonucleotide for detection of SNP TSC0004837
ttaagggtttaaa

SEQ ID NO: 23362 - DNA, 13 bp, Artificial Sequence
  Oligonucleotide for detection of SNP TSC0004837
tttaaacccttaa

SEQ ID NO: 23363 - DNA, 13 bp, Artificial Sequence
  Oligonucleotide for detection of SNP TSC0004837
ttaaggatttaaa

SEQ ID NO: 23364 - DNA, 13 bp, Artificial Sequence
  Oligonucleotide for detection of SNP TSC0004837
tttaaatccttaa

SEQ ID NO: 23365 - DNA, 13 bp, Artificial Sequence
  Oligonucleotide for detection of SNP TSC0004838
tatgtgggaaaaa

SEQ ID NO: 23366 - DNA, 13 bp, Artificial Sequence
  Oligonucleotide for detection of SNP TSC0004838
tttttcccacata

SEQ ID NO: 23367 - DNA, 13 bp, Artificial Sequence
  Oligonucleotide for detection of SNP TSC0004838
tatgtgagaaaaa

SEQ ID NO: 23368 - DNA, 13 bp, Artificial Sequence
  Oligonucleotide for detection of SNP TSC0004838
tttttctcacata

SEQ ID NO: 23369 - DNA, 13 bp, Artificial Sequence
  Oligonucleotide for detection of SNP TSC0004839
gtttgtgggtatt

SEQ ID NO: 23370 - DNA, 13 bp, Artificial Sequence
  Oligonucleotide for detection of SNP TSC0004839
aatacccacaaac

SEQ ID NO: 23371 - DNA, 13 bp, Artificial Sequence
  Oligonucleotide for detection of SNP TSC0004839
gtttgttggtatt

SEQ ID NO: 23372 - DNA, 13 bp, Artificial Sequence
  Oligonucleotide for detection of SNP TSC0004839
aataccaacaaac

SEQ ID NO: 23373 - DNA, 13 bp, Artificial Sequence
  Oligonucleotide for detection of SNP TSC0004839
gtttgcgggtatt

SEQ ID NO: 23374 - DNA, 13 bp, Artificial Sequence
  Oligonucleotide for detection of SNP TSC0004839
aatacccgcaaac

SEQ ID NO: 23375 - DNA, 13 bp, Artificial Sequence
  Oligonucleotide for detection of SNP TSC0004839
aatgtttgtaaay

SEQ ID NO: 23376 - DNA, 13 bp, Artificial Sequence
  Oligonucleotide for detection of SNP TSC0004839
rtttacaaacatt

SEQ ID NO: 23377 - DNA, 13 bp, Artificial Sequence
  Oligonucleotide for detection of SNP TSC0004839
aatgttagtaaay

SEQ ID NO: 23378 - DNA, 13 bp, Artificial Sequence
  Oligonucleotide for detection of SNP TSC0004839
rtttactaacatt

SEQ ID NO: 23379 - DNA, 13 bp, Artificial Sequence
  Oligonucleotide for detection of SNP TSC0004839
aatgttcgtaaay

SEQ ID NO: 23380 - DNA, 13 bp, Artificial Sequence
  Oligonucleotide for detection of SNP TSC0004839
rtttacgaacatt

SEQ ID NO: 23381 - DNA, 13 bp, Artificial Sequence
  Oligonucleotide for detection of SNP TSC0004847
aaaataataagat

SEQ ID NO: 23382 - DNA, 13 bp, Artificial Sequence
  Oligonucleotide for detection of SNP TSC0004847
atcttattatttt

SEQ ID NO: 23383 - DNA, 13 bp, Artificial Sequence
  Oligonucleotide for detection of SNP TSC0004847
aaaatagtaagat

SEQ ID NO: 23384 - DNA, 13 bp, Artificial Sequence
  Oligonucleotide for detection of SNP TSC0004847
atcttactatttt

SEQ ID NO: 23385 - DNA, 13 bp, Artificial Sequence
  Oligonucleotide for detection of SNP TSC0004885
atatattgatggt

SEQ ID NO: 23386 - DNA, 13 bp, Artificial Sequence
  Oligonucleotide for detection of SNP TSC0004885
accatcaatatat

SEQ ID NO: 23387 - DNA, 13 bp, Artificial Sequence
  Oligonucleotide for detection of SNP TSC0004885
atatatcgatggt

SEQ ID NO: 23388 - DNA, 13 bp, Artificial Sequence
  Oligonucleotide for detection of SNP TSC0004885
accatcgatatat

SEQ ID NO: 23389 - DNA, 13 bp, Artificial Sequence
  Oligonucleotide for detection of SNP TSC0004885
attattgatatat

SEQ ID NO: 23390 - DNA, 13 bp, Artificial Sequence
  Oligonucleotide for detection of SNP TSC0004885
atatatcaataat

SEQ ID NO: 23391 - DNA, 13 bp, Artificial Sequence
  Oligonucleotide for detection of SNP TSC0004885
attattaatatat

SEQ ID NO: 23392 - DNA, 13 bp, Artificial Sequence
  Oligonucleotide for detection of SNP TSC0004885
atatattaataat

SEQ ID NO: 23393 - DNA, 13 bp, Artificial Sequence
  Oligonucleotide for detection of SNP TSC0004885
attatcgatatat

SEQ ID NO: 23394 - DNA, 13 bp, Artificial Sequence
  Oligonucleotide for detection of SNP TSC0004885
atatatcgataat

SEQ ID NO: 23395 - DNA, 13 bp, Artificial Sequence
  Oligonucleotide for detection of SNP TSC0004900
tttttaatatgag

SEQ ID NO: 23396 - DNA, 13 bp, Artificial Sequence
  Oligonucleotide for detection of SNP TSC0004900
ctcatattaaaaa

SEQ ID NO: 23397 - DNA, 13 bp, Artificial Sequence
  Oligonucleotide for detection of SNP TSC0004900
tttttattatgag

SEQ ID NO: 23398 - DNA, 13 bp, Artificial Sequence
  Oligonucleotide for detection of SNP TSC0004900
ctcataataaaaa

SEQ ID NO: 23399 - DNA, 13 bp, Artificial Sequence
  Oligonucleotide for detection of SNP TSC0004900
tttttaatacgag

SEQ ID NO: 23400 - DNA, 13 bp, Artificial Sequence
  Oligonucleotide for detection of SNP TSC0004900
ctcgtattaaaaa

SEQ ID NO: 23401 - DNA, 13 bp, Artificial Sequence
  Oligonucleotide for detection of SNP TSC0004900
tttttattacgag

SEQ ID NO: 23402 - DNA, 13 bp, Artificial Sequence
  Oligonucleotide for detection of SNP TSC0004900
ctcgtaataaaaa

SEQ ID NO: 23403 - DNA, 13 bp, Artificial Sequence
  Oligonucleotide for detection of SNP TSC0004900
tttgtgttaggaa

SEQ ID NO: 23404 - DNA, 13 bp, Artificial Sequence
  Oligonucleotide for detection of SNP TSC0004900
ttcctaacacaaa

SEQ ID NO: 23405 - DNA, 13 bp, Artificial Sequence
  Oligonucleotide for detection of SNP TSC0004900
tttgtgataggaa

SEQ ID NO: 23406 - DNA, 13 bp, Artificial Sequence
  Oligonucleotide for detection of SNP TSC0004900
ttcctatcacaaa

SEQ ID NO: 23407 - DNA, 13 bp, Artificial Sequence
  Oligonucleotide for detection of SNP TSC0004900
ttcgtgttaggaa

SEQ ID NO: 23408 - DNA, 13 bp, Artificial Sequence
  Oligonucleotide for detection of SNP TSC0004900
ttcctaacacgaa

SEQ ID NO: 23409 - DNA, 13 bp, Artificial Sequence
  Oligonucleotide for detection of SNP TSC0004900
ttcgtgataggaa

SEQ ID NO: 23410 - DNA, 13 bp, Artificial Sequence
  Oligonucleotide for detection of SNP TSC0004900
ttcctatcacgaa

SEQ ID NO: 23411 - DNA, 13 bp, Artificial Sequence
  Oligonucleotide for detection of SNP TSC0004906
taatttatttaag

SEQ ID NO: 23412 - DNA, 13 bp, Artificial Sequence
  Oligonucleotide for detection of SNP TSC0004906
cttaaataaatta

SEQ ID NO: 23413 - DNA, 13 bp, Artificial Sequence
  Oligonucleotide for detection of SNP TSC0004906
taatttgtttaag

SEQ ID NO: 23414 - DNA, 13 bp, Artificial Sequence
  Oligonucleotide for detection of SNP TSC0004906
cttaaacaaatta

SEQ ID NO: 23415 - DNA, 13 bp, Artificial Sequence
  Oligonucleotide for detection of SNP TSC0004907
tgggtaggtattt

SEQ ID NO: 23416 - DNA, 13 bp, Artificial Sequence
  Oligonucleotide for detection of SNP TSC0004907
aaatacctaccca

SEQ ID NO: 23417 - DNA, 13 bp, Artificial Sequence
  Oligonucleotide for detection of SNP TSC0004907
tgggtatgtattt

SEQ ID NO: 23418 - DNA, 13 bp, Artificial Sequence
  Oligonucleotide for detection of SNP TSC0004907
aaatacataccca

SEQ ID NO: 23419 - DNA, 13 bp, Artificial Sequence
  Oligonucleotide for detection of SNP TSC0004907
aggtatttgttta

SEQ ID NO: 23420 - DNA, 13 bp, Artificial Sequence
  Oligonucleotide for detection of SNP TSC0004907
taaacaaatacct

SEQ ID NO: 23421 - DNA, 13 bp, Artificial Sequence
  Oligonucleotide for detection of SNP TSC0004907
aggtatatgttta

SEQ ID NO: 23422 - DNA, 13 bp, Artificial Sequence
  Oligonucleotide for detection of SNP TSC0004907
taaacatatacct

SEQ ID NO: 23423 - DNA, 13 bp, Artificial Sequence
  Oligonucleotide for detection of SNP TSC0004908
atttatatttttg

SEQ ID NO: 23424 - DNA, 13 bp, Artificial Sequence
  Oligonucleotide for detection of SNP TSC0004908
caaaaatataaat

SEQ ID NO: 23425 - DNA, 13 bp, Artificial Sequence
  Oligonucleotide for detection of SNP TSC0004908
atttatgtttttg

SEQ ID NO: 23426 - DNA, 13 bp, Artificial Sequence
  Oligonucleotide for detection of SNP TSC0004908
caaaaacataaat

SEQ ID NO: 23427 - DNA, 13 bp, Artificial Sequence
  Oligonucleotide for detection of SNP TSC0004908
atttacgtttttg

SEQ ID NO: 23428 - DNA, 13 bp, Artificial Sequence
  Oligonucleotide for detection of SNP TSC0004908
caaaaacgtaaat

SEQ ID NO: 23429 - DNA, 13 bp, Artificial Sequence
  Oligonucleotide for detection of SNP TSC0004908
taaaggtgtaaat

SEQ ID NO: 23430 - DNA, 13 bp, Artificial Sequence
  Oligonucleotide for detection of SNP TSC0004908
atttacaccttta

SEQ ID NO: 23431 - DNA, 13 bp, Artificial Sequence
  Oligonucleotide for detection of SNP TSC0004908
taaaggcgtaaat

SEQ ID NO: 23432 - DNA, 13 bp, Artificial Sequence
  Oligonucleotide for detection of SNP TSC0004908
atttacgccttta

SEQ ID NO: 23433 - DNA, 13 bp, Artificial Sequence
  Oligonucleotide for detection of SNP TSC0004909
gggtatatgggaa

SEQ ID NO: 23434 - DNA, 13 bp, Artificial Sequence
  Oligonucleotide for detection of SNP TSC0004909
ttcccatataccc

SEQ ID NO: 23435 - DNA, 13 bp, Artificial Sequence
  Oligonucleotide for detection of SNP TSC0004909
gggtatgtgggaa

SEQ ID NO: 23436 - DNA, 13 bp, Artificial Sequence
  Oligonucleotide for detection of SNP TSC0004909
ttcccacataccc

SEQ ID NO: 23437 - DNA, 13 bp, Artificial Sequence
  Oligonucleotide for detection of SNP TSC0004909
gggtacgtgggaa

SEQ ID NO: 23438 - DNA, 13 bp, Artificial Sequence
  Oligonucleotide for detection of SNP TSC0004909
ttcccacgtaccc

SEQ ID NO: 23439 - DNA, 13 bp, Artificial Sequence
  Oligonucleotide for detection of SNP TSC0004909
tttttatgtgtty

SEQ ID NO: 23440 - DNA, 13 bp, Artificial Sequence
  Oligonucleotide for detection of SNP TSC0004909
raacacataaaaa

SEQ ID NO: 23441 - DNA, 13 bp, Artificial Sequence
  Oligonucleotide for detection of SNP TSC0004909
tttttacgtgtty

SEQ ID NO: 23442 - DNA, 13 bp, Artificial Sequence
  Oligonucleotide for detection of SNP TSC0004909
raacacgtaaaaa

SEQ ID NO: 23443 - DNA, 13 bp, Artificial Sequence
  Oligonucleotide for detection of SNP TSC0004921
atataaatgggtt

SEQ ID NO: 23444 - DNA, 13 bp, Artificial Sequence
  Oligonucleotide for detection of SNP TSC0004921
aacccatttatat

SEQ ID NO: 23445 - DNA, 13 bp, Artificial Sequence
  Oligonucleotide for detection of SNP TSC0004921
atataattgggtt

SEQ ID NO: 23446 - DNA, 13 bp, Artificial Sequence
  Oligonucleotide for detection of SNP TSC0004921
aacccaattatat

SEQ ID NO: 23447 - DNA, 13 bp, Artificial Sequence
  Oligonucleotide for detection of SNP TSC0004921
agtttatttgtgt

SEQ ID NO: 23448 - DNA, 13 bp, Artificial Sequence
  Oligonucleotide for detection of SNP TSC0004921
acacaaataaact

SEQ ID NO: 23449 - DNA, 13 bp, Artificial Sequence
  Oligonucleotide for detection of SNP TSC0004921
agtttagttgtgt

SEQ ID NO: 23450 - DNA, 13 bp, Artificial Sequence
  Oligonucleotide for detection of SNP TSC0004921
acacaactaaact

SEQ ID NO: 23451 - DNA, 13 bp, Artificial Sequence
  Oligonucleotide for detection of SNP TSC0004929
ataaaataattgt

SEQ ID NO: 23452 - DNA, 13 bp, Artificial Sequence
  Oligonucleotide for detection of SNP TSC0004929
acaattattttat

SEQ ID NO: 23453 - DNA, 13 bp, Artificial Sequence
  Oligonucleotide for detection of SNP TSC0004929
ataaaagaattgt

SEQ ID NO: 23454 - DNA, 13 bp, Artificial Sequence
  Oligonucleotide for detection of SNP TSC0004929
acaattcttttat

SEQ ID NO: 23455 - DNA, 13 bp, Artificial Sequence
  Oligonucleotide for detection of SNP TSC0004929
ataattgttttat

SEQ ID NO: 23456 - DNA, 13 bp, Artificial Sequence
  Oligonucleotide for detection of SNP TSC0004929
ataaaacaattat

SEQ ID NO: 23457 - DNA, 13 bp, Artificial Sequence
  Oligonucleotide for detection of SNP TSC0004929
ataatttttttat

SEQ ID NO: 23458 - DNA, 13 bp, Artificial Sequence
  Oligonucleotide for detection of SNP TSC0004929
ataaaaaaattat

SEQ ID NO: 23459 - DNA, 13 bp, Artificial Sequence
  Oligonucleotide for detection of SNP TSC0004940
gagtatggaaaaa

SEQ ID NO: 23460 - DNA, 13 bp, Artificial Sequence
  Oligonucleotide for detection of SNP TSC0004940
tttttccatactc

SEQ ID NO: 23461 - DNA, 13 bp, Artificial Sequence
  Oligonucleotide for detection of SNP TSC0004940
gagtatagaaaaa

SEQ ID NO: 23462 - DNA, 13 bp, Artificial Sequence
  Oligonucleotide for detection of SNP TSC0004940
tttttctatactc

SEQ ID NO: 23463 - DNA, 13 bp, Artificial Sequence
  Oligonucleotide for detection of SNP TSC0004976
tagaaaagtttta

SEQ ID NO: 23464 - DNA, 13 bp, Artificial Sequence
  Oligonucleotide for detection of SNP TSC0004976
taaaacttttcta

SEQ ID NO: 23465 - DNA, 13 bp, Artificial Sequence
  Oligonucleotide for detection of SNP TSC0004976
tagaaatgtttta

SEQ ID NO: 23466 - DNA, 13 bp, Artificial Sequence
  Oligonucleotide for detection of SNP TSC0004976
taaaacatttcta

SEQ ID NO: 23467 - DNA, 13 bp, Artificial Sequence
  Oligonucleotide for detection of SNP TSC0004976
tgggattttttta

SEQ ID NO: 23468 - DNA, 13 bp, Artificial Sequence
  Oligonucleotide for detection of SNP TSC0004976
taaaaaaatccca

SEQ ID NO: 23469 - DNA, 13 bp, Artificial Sequence
  Oligonucleotide for detection of SNP TSC0004976
tgggatattttta

SEQ ID NO: 23470 - DNA, 13 bp, Artificial Sequence
  Oligonucleotide for detection of SNP TSC0004976
taaaaatatccca

SEQ ID NO: 23471 - DNA, 13 bp, Artificial Sequence
  Oligonucleotide for detection of SNP TSC0004977
tttattgattata

SEQ ID NO: 23472 - DNA, 13 bp, Artificial Sequence
  Oligonucleotide for detection of SNP TSC0004977
tataatcaataaa

SEQ ID NO: 23473 - DNA, 13 bp, Artificial Sequence
  Oligonucleotide for detection of SNP TSC0004977
tttattaattata

SEQ ID NO: 23474 - DNA, 13 bp, Artificial Sequence
  Oligonucleotide for detection of SNP TSC0004977
tataattaataaa

SEQ ID NO: 23475 - DNA, 13 bp, Artificial Sequence
  Oligonucleotide for detection of SNP TSC0004978
agttttagaagay

SEQ ID NO: 23476 - DNA, 13 bp, Artificial Sequence
  Oligonucleotide for detection of SNP TSC0004978
rtcttctaaaact

SEQ ID NO: 23477 - DNA, 13 bp, Artificial Sequence
  Oligonucleotide for detection of SNP TSC0004978
agttttggaagay

SEQ ID NO: 23478 - DNA, 13 bp, Artificial Sequence
  Oligonucleotide for detection of SNP TSC0004978
rtcttccaaaact

SEQ ID NO: 23479 - DNA, 13 bp, Artificial Sequence
  Oligonucleotide for detection of SNP TSC0004978
agtttcggaagay

SEQ ID NO: 23480 - DNA, 13 bp, Artificial Sequence
  Oligonucleotide for detection of SNP TSC0004978
rtcttccgaaact

SEQ ID NO: 23481 - DNA, 13 bp, Artificial Sequence
  Oligonucleotide for detection of SNP TSC0004978
gttttttgaaatt

SEQ ID NO: 23482 - DNA, 13 bp, Artificial Sequence
  Oligonucleotide for detection of SNP TSC0004978
aatttcaaaaaac

SEQ ID NO: 23483 - DNA, 13 bp, Artificial Sequence
  Oligonucleotide for detection of SNP TSC0004978
gtttttcgaaatt

SEQ ID NO: 23484 - DNA, 13 bp, Artificial Sequence
  Oligonucleotide for detection of SNP TSC0004978
aatttcgaaaaac

SEQ ID NO: 23485 - DNA, 13 bp, Artificial Sequence
  Oligonucleotide for detection of SNP TSC0004979
tttttaattatag

SEQ ID NO: 23486 - DNA, 13 bp, Artificial Sequence
  Oligonucleotide for detection of SNP TSC0004979
ctataattaaaaa

SEQ ID NO: 23487 - DNA, 13 bp, Artificial Sequence
  Oligonucleotide for detection of SNP TSC0004979
tttttagttatag

SEQ ID NO: 23488 - DNA, 13 bp, Artificial Sequence
  Oligonucleotide for detection of SNP TSC0004979
ctataactaaaaa

SEQ ID NO: 23489 - DNA, 13 bp, Artificial Sequence
  Oligonucleotide for detection of SNP TSC0004987
tatattgaagatt

SEQ ID NO: 23490 - DNA, 13 bp, Artificial Sequence
  Oligonucleotide for detection of SNP TSC0004987
aatcttcaatata

SEQ ID NO: 23491 - DNA, 13 bp, Artificial Sequence
  Oligonucleotide for detection of SNP TSC0004987
tatattaaagatt

SEQ ID NO: 23492 - DNA, 13 bp, Artificial Sequence
  Oligonucleotide for detection of SNP TSC0004987
aatctttaatata

SEQ ID NO: 23493 - DNA, 13 bp, Artificial Sequence
  Oligonucleotide for detection of SNP TSC0005008
aatattagtgtgg

SEQ ID NO: 23494 - DNA, 13 bp, Artificial Sequence
  Oligonucleotide for detection of SNP TSC0005008
ccacactaatatt

SEQ ID NO: 23495 - DNA, 13 bp, Artificial Sequence
  Oligonucleotide for detection of SNP TSC0005008
aatattggtgtgg

SEQ ID NO: 23496 - DNA, 13 bp, Artificial Sequence
  Oligonucleotide for detection of SNP TSC0005008
ccacaccaatatt

SEQ ID NO: 23497 - DNA, 13 bp, Artificial Sequence
  Oligonucleotide for detection of SNP TSC0005011
gtgtgtgtgtgat

SEQ ID NO: 23498 - DNA, 13 bp, Artificial Sequence
  Oligonucleotide for detection of SNP TSC0005011
atcacacacacac

SEQ ID NO: 23499 - DNA, 13 bp, Artificial Sequence
  Oligonucleotide for detection of SNP TSC0005011
gtgtgtttgtgat

SEQ ID NO: 23500 - DNA, 13 bp, Artificial Sequence
  Oligonucleotide for detection of SNP TSC0005011
atcacaaacacac

SEQ ID NO: 23501 - DNA, 13 bp, Artificial Sequence
  Oligonucleotide for detection of SNP TSC0005011
attatatatatay

SEQ ID NO: 23502 - DNA, 13 bp, Artificial Sequence
  Oligonucleotide for detection of SNP TSC0005011
rtatatatataat

SEQ ID NO: 23503 - DNA, 13 bp, Artificial Sequence
  Oligonucleotide for detection of SNP TSC0005011
attataaatatay

SEQ ID NO: 23504 - DNA, 13 bp, Artificial Sequence
  Oligonucleotide for detection of SNP TSC0005011
rtatatttataat

SEQ ID NO: 23505 - DNA, 13 bp, Artificial Sequence
  Oligonucleotide for detection of SNP TSC0005012
ttagtatgttgty

SEQ ID NO: 23506 - DNA, 13 bp, Artificial Sequence
  Oligonucleotide for detection of SNP TSC0005012
racaacatactaa

SEQ ID NO: 23507 - DNA, 13 bp, Artificial Sequence
  Oligonucleotide for detection of SNP TSC0005012
ttagtacgttgty

SEQ ID NO: 23508 - DNA, 13 bp, Artificial Sequence
  Oligonucleotide for detection of SNP TSC0005012
racaacgtactaa

SEQ ID NO: 23509 - DNA, 13 bp, Artificial Sequence
  Oligonucleotide for detection of SNP TSC0005012
ggtaatgtattag

SEQ ID NO: 23510 - DNA, 13 bp, Artificial Sequence
  Oligonucleotide for detection of SNP TSC0005012
ctaatacattacc

SEQ ID NO: 23511 - DNA, 13 bp, Artificial Sequence
  Oligonucleotide for detection of SNP TSC0005012
ggtaatatattag

SEQ ID NO: 23512 - DNA, 13 bp, Artificial Sequence
  Oligonucleotide for detection of SNP TSC0005012
ctaatatattacc

SEQ ID NO: 23513 - DNA, 13 bp, Artificial Sequence
  Oligonucleotide for detection of SNP TSC0005012
ggtaacgtattag

SEQ ID NO: 23514 - DNA, 13 bp, Artificial Sequence
  Oligonucleotide for detection of SNP TSC0005012
ctaatacgttacc

SEQ ID NO: 23515 - DNA, 13 bp, Artificial Sequence
  Oligonucleotide for detection of SNP TSC0005018
ttgttaatgtaty

SEQ ID NO: 23516 - DNA, 13 bp, Artificial Sequence
  Oligonucleotide for detection of SNP TSC0005018
ratacattaacaa

SEQ ID NO: 23517 - DNA, 13 bp, Artificial Sequence
  Oligonucleotide for detection of SNP TSC0005018
ttgttagtgtaty

SEQ ID NO: 23518 - DNA, 13 bp, Artificial Sequence
  Oligonucleotide for detection of SNP TSC0005018
ratacactaacaa

SEQ ID NO: 23519 - DNA, 13 bp, Artificial Sequence
  Oligonucleotide for detection of SNP TSC0005038
ggaaataattaay

SEQ ID NO: 23520 - DNA, 13 bp, Artificial Sequence
  Oligonucleotide for detection of SNP TSC0005038
rttaattatttcc

SEQ ID NO: 23521 - DNA, 13 bp, Artificial Sequence
  Oligonucleotide for detection of SNP TSC0005038
ggaaattattaay

SEQ ID NO: 23522 - DNA, 13 bp, Artificial Sequence
  Oligonucleotide for detection of SNP TSC0005038
rttaataatttcc

SEQ ID NO: 23523 - DNA, 13 bp, Artificial Sequence
  Oligonucleotide for detection of SNP TSC0005038
gttaattgtttty

SEQ ID NO: 23524 - DNA, 13 bp, Artificial Sequence
  Oligonucleotide for detection of SNP TSC0005038
raaaacaattaac

SEQ ID NO: 23525 - DNA, 13 bp, Artificial Sequence
  Oligonucleotide for detection of SNP TSC0005038
gttaatggtttty

SEQ ID NO: 23526 - DNA, 13 bp, Artificial Sequence
  Oligonucleotide for detection of SNP TSC0005038
raaaaccattaac

SEQ ID NO: 23527 - DNA, 13 bp, Artificial Sequence
  Oligonucleotide for detection of SNP TSC0005047
gaagttgtattty

SEQ ID NO: 23528 - DNA, 13 bp, Artificial Sequence
  Oligonucleotide for detection of SNP TSC0005047
raaatacaacttc

SEQ ID NO: 23529 - DNA, 13 bp, Artificial Sequence
  Oligonucleotide for detection of SNP TSC0005047
gaagttttattty

SEQ ID NO: 23530 - DNA, 13 bp, Artificial Sequence
  Oligonucleotide for detection of SNP TSC0005047
raaataaaacttc

SEQ ID NO: 23531 - DNA, 13 bp, Artificial Sequence
  Oligonucleotide for detection of SNP TSC0005047
gagatataattty

SEQ ID NO: 23532 - DNA, 13 bp, Artificial Sequence
  Oligonucleotide for detection of SNP TSC0005047
raaattatatctc

SEQ ID NO: 23533 - DNA, 13 bp, Artificial Sequence
  Oligonucleotide for detection of SNP TSC0005047
gagataaaattty

SEQ ID NO: 23534 - DNA, 13 bp, Artificial Sequence
  Oligonucleotide for detection of SNP TSC0005047
raaattttatctc

SEQ ID NO: 23535 - DNA, 13 bp, Artificial Sequence
  Oligonucleotide for detection of SNP TSC0005080
tttagatggttgt

SEQ ID NO: 23536 - DNA, 13 bp, Artificial Sequence
  Oligonucleotide for detection of SNP TSC0005080
acaaccatctaaa

SEQ ID NO: 23537 - DNA, 13 bp, Artificial Sequence
  Oligonucleotide for detection of SNP TSC0005080
tttagagggttgt

SEQ ID NO: 23538 - DNA, 13 bp, Artificial Sequence
  Oligonucleotide for detection of SNP TSC0005080
acaaccctctaaa

SEQ ID NO: 23539 - DNA, 13 bp, Artificial Sequence
  Oligonucleotide for detection of SNP TSC0005080
tttagacggttgt

SEQ ID NO: 23540 - DNA, 13 bp, Artificial Sequence
  Oligonucleotide for detection of SNP TSC0005080
acaaccgtctaaa

SEQ ID NO: 23541 - DNA, 13 bp, Artificial Sequence
  Oligonucleotide for detection of SNP TSC0005080
atagttgtttaag

SEQ ID NO: 23542 - DNA, 13 bp, Artificial Sequence
  Oligonucleotide for detection of SNP TSC0005080
cttaaacaactat

SEQ ID NO: 23543 - DNA, 13 bp, Artificial Sequence
  Oligonucleotide for detection of SNP TSC0005080
atagttttttaag

SEQ ID NO: 23544 - DNA, 13 bp, Artificial Sequence
  Oligonucleotide for detection of SNP TSC0005080
cttaaaaaactat

SEQ ID NO: 23545 - DNA, 13 bp, Artificial Sequence
  Oligonucleotide for detection of SNP TSC0005080
atagtcgtttaag

SEQ ID NO: 23546 - DNA, 13 bp, Artificial Sequence
  Oligonucleotide for detection of SNP TSC0005080
cttaaacgactat

SEQ ID NO: 23547 - DNA, 13 bp, Artificial Sequence
  Oligonucleotide for detection of SNP TSC0005084
tttgtgtgaaata

SEQ ID NO: 23548 - DNA, 13 bp, Artificial Sequence
  Oligonucleotide for detection of SNP TSC0005084
tatttcacacaaa

SEQ ID NO: 23549 - DNA, 13 bp, Artificial Sequence
  Oligonucleotide for detection of SNP TSC0005084
tttgtgcgaaata

SEQ ID NO: 23550 - DNA, 13 bp, Artificial Sequence
  Oligonucleotide for detection of SNP TSC0005084
tatttcgcacaaa

SEQ ID NO: 23551 - DNA, 13 bp, Artificial Sequence
  Oligonucleotide for detection of SNP TSC0005084
tgttttgtataag

SEQ ID NO: 23552 - DNA, 13 bp, Artificial Sequence
  Oligonucleotide for detection of SNP TSC0005084
cttatacaaaaca

SEQ ID NO: 23553 - DNA, 13 bp, Artificial Sequence
  Oligonucleotide for detection of SNP TSC0005084
tgttttatataag

SEQ ID NO: 23554 - DNA, 13 bp, Artificial Sequence
  Oligonucleotide for detection of SNP TSC0005084
cttatataaaaca

SEQ ID NO: 23555 - DNA, 13 bp, Artificial Sequence
  Oligonucleotide for detection of SNP TSC0005084
tgtttcgtataag

SEQ ID NO: 23556 - DNA, 13 bp, Artificial Sequence
  Oligonucleotide for detection of SNP TSC0005084
cttatacgaaaca

SEQ ID NO: 23557 - DNA, 13 bp, Artificial Sequence
  Oligonucleotide for detection of SNP TSC0005085
ttttagttttttt

SEQ ID NO: 23558 - DNA, 13 bp, Artificial Sequence
  Oligonucleotide for detection of SNP TSC0005085
aaaaaaactaaaa

SEQ ID NO: 23559 - DNA, 13 bp, Artificial Sequence
  Oligonucleotide for detection of SNP TSC0005085
agaaaatttggga

SEQ ID NO: 23560 - DNA, 13 bp, Artificial Sequence
  Oligonucleotide for detection of SNP TSC0005085
tcccaaattttct

SEQ ID NO: 23561 - DNA, 13 bp, Artificial Sequence
  Oligonucleotide for detection of SNP TSC0005085
agaaaaattggga

SEQ ID NO: 23562 - DNA, 13 bp, Artificial Sequence
  Oligonucleotide for detection of SNP TSC0005085
tcccaatttttct

SEQ ID NO: 23563 - DNA, 13 bp, Artificial Sequence
  Oligonucleotide for detection of SNP TSC0005098
gatagttttaatg

SEQ ID NO: 23564 - DNA, 13 bp, Artificial Sequence
  Oligonucleotide for detection of SNP TSC0005098
cattaaaactatc

SEQ ID NO: 23565 - DNA, 13 bp, Artificial Sequence
  Oligonucleotide for detection of SNP TSC0005098
gatagtgttaatg

SEQ ID NO: 23566 - DNA, 13 bp, Artificial Sequence
  Oligonucleotide for detection of SNP TSC0005098
cattaacactatc

SEQ ID NO: 23567 - DNA, 13 bp, Artificial Sequence
  Oligonucleotide for detection of SNP TSC0005098
gatagttttaacg

SEQ ID NO: 23568 - DNA, 13 bp, Artificial Sequence
  Oligonucleotide for detection of SNP TSC0005098
cgttaaaactatc

SEQ ID NO: 23569 - DNA, 13 bp, Artificial Sequence
  Oligonucleotide for detection of SNP TSC0005098
gatagtgttaacg

SEQ ID NO: 23570 - DNA, 13 bp, Artificial Sequence
  Oligonucleotide for detection of SNP TSC0005098
cgttaacactatc

SEQ ID NO: 23571 - DNA, 13 bp, Artificial Sequence
  Oligonucleotide for detection of SNP TSC0005098
tgttgagattgty

SEQ ID NO: 23572 - DNA, 13 bp, Artificial Sequence
  Oligonucleotide for detection of SNP TSC0005098
racaatctcaaca

SEQ ID NO: 23573 - DNA, 13 bp, Artificial Sequence
  Oligonucleotide for detection of SNP TSC0005098
tgttgatattgty

SEQ ID NO: 23574 - DNA, 13 bp, Artificial Sequence
  Oligonucleotide for detection of SNP TSC0005098
racaatatcaaca

SEQ ID NO: 23575 - DNA, 13 bp, Artificial Sequence
  Oligonucleotide for detection of SNP TSC0005098
cgttgagattgty

SEQ ID NO: 23576 - DNA, 13 bp, Artificial Sequence
  Oligonucleotide for detection of SNP TSC0005098
racaatctcaacg

SEQ ID NO: 23577 - DNA, 13 bp, Artificial Sequence
  Oligonucleotide for detection of SNP TSC0005098
cgttgatattgty

SEQ ID NO: 23578 - DNA, 13 bp, Artificial Sequence
  Oligonucleotide for detection of SNP TSC0005098
racaatatcaacg

SEQ ID NO: 23579 - DNA, 13 bp, Artificial Sequence
  Oligonucleotide for detection of SNP TSC0005109
gttattggagttt

SEQ ID NO: 23580 - DNA, 13 bp, Artificial Sequence
  Oligonucleotide for detection of SNP TSC0005109
aaactccaataac

SEQ ID NO: 23581 - DNA, 13 bp, Artificial Sequence
  Oligonucleotide for detection of SNP TSC0005109
gttattagagttt

SEQ ID NO: 23582 - DNA, 13 bp, Artificial Sequence
  Oligonucleotide for detection of SNP TSC0005109
aaactctaataac

SEQ ID NO: 23583 - DNA, 13 bp, Artificial Sequence
  Oligonucleotide for detection of SNP TSC0005111
tttttttgataaa

SEQ ID NO: 23584 - DNA, 13 bp, Artificial Sequence
  Oligonucleotide for detection of SNP TSC0005111
tttatcaaaaaaa

SEQ ID NO: 23585 - DNA, 13 bp, Artificial Sequence
  Oligonucleotide for detection of SNP TSC0005111
ttttttcgataaa

SEQ ID NO: 23586 - DNA, 13 bp, Artificial Sequence
  Oligonucleotide for detection of SNP TSC0005111
tttatcgaaaaaa

SEQ ID NO: 23587 - DNA, 13 bp, Artificial Sequence
  Oligonucleotide for detection of SNP TSC0005111
tttgttggaggag

SEQ ID NO: 23588 - DNA, 13 bp, Artificial Sequence
  Oligonucleotide for detection of SNP TSC0005111
ctcctccaacaaa

SEQ ID NO: 23589 - DNA, 13 bp, Artificial Sequence
  Oligonucleotide for detection of SNP TSC0005111
tttgttagaggag

SEQ ID NO: 23590 - DNA, 13 bp, Artificial Sequence
  Oligonucleotide for detection of SNP TSC0005111
ctcctctaacaaa

SEQ ID NO: 23591 - DNA, 13 bp, Artificial Sequence
  Oligonucleotide for detection of SNP TSC0005111
tttgtcggaggag

SEQ ID NO: 23592 - DNA, 13 bp, Artificial Sequence
  Oligonucleotide for detection of SNP TSC0005111
ctcctccgacaaa

SEQ ID NO: 23593 - DNA, 13 bp, Artificial Sequence
  Oligonucleotide for detection of SNP TSC0005138
ttatagattgggt

SEQ ID NO: 23594 - DNA, 13 bp, Artificial Sequence
  Oligonucleotide for detection of SNP TSC0005138
acccaatctataa

SEQ ID NO: 23595 - DNA, 13 bp, Artificial Sequence
  Oligonucleotide for detection of SNP TSC0005138
ttatagtttgggt

SEQ ID NO: 23596 - DNA, 13 bp, Artificial Sequence
  Oligonucleotide for detection of SNP TSC0005138
acccaaactataa

SEQ ID NO: 23597 - DNA, 13 bp, Artificial Sequence
  Oligonucleotide for detection of SNP TSC0005138
atttagtttgtag

SEQ ID NO: 23598 - DNA, 13 bp, Artificial Sequence
  Oligonucleotide for detection of SNP TSC0005138
ctacaaactaaat

SEQ ID NO: 23599 - DNA, 13 bp, Artificial Sequence
  Oligonucleotide for detection of SNP TSC0005138
atttagattgtag

SEQ ID NO: 23600 - DNA, 13 bp, Artificial Sequence
  Oligonucleotide for detection of SNP TSC0005138
ctacaatctaaat

SEQ ID NO: 23601 - DNA, 13 bp, Artificial Sequence
  Oligonucleotide for detection of SNP TSC0005139
taatttaaatatt

SEQ ID NO: 23602 - DNA, 13 bp, Artificial Sequence
  Oligonucleotide for detection of SNP TSC0005139
aatatttaaatta

SEQ ID NO: 23603 - DNA, 13 bp, Artificial Sequence
  Oligonucleotide for detection of SNP TSC0005139
taatttgaatatt

SEQ ID NO: 23604 - DNA, 13 bp, Artificial Sequence
  Oligonucleotide for detection of SNP TSC0005139
aatattcaaatta

SEQ ID NO: 23605 - DNA, 13 bp, Artificial Sequence
  Oligonucleotide for detection of SNP TSC0005140
attataggtgtat

SEQ ID NO: 23606 - DNA, 13 bp, Artificial Sequence
  Oligonucleotide for detection of SNP TSC0005140
atacacctataat

SEQ ID NO: 23607 - DNA, 13 bp, Artificial Sequence
  Oligonucleotide for detection of SNP TSC0005140
attataagtgtat

SEQ ID NO: 23608 - DNA, 13 bp, Artificial Sequence
  Oligonucleotide for detection of SNP TSC0005140
atacacttataat

SEQ ID NO: 23609 - DNA, 13 bp, Artificial Sequence
  Oligonucleotide for detection of SNP TSC0005141
tggttgggtttgg

SEQ ID NO: 23610 - DNA, 13 bp, Artificial Sequence
  Oligonucleotide for detection of SNP TSC0005141
ccaaacccaacca

SEQ ID NO: 23611 - DNA, 13 bp, Artificial Sequence
  Oligonucleotide for detection of SNP TSC0005141
tggttgtgtttgg

SEQ ID NO: 23612 - DNA, 13 bp, Artificial Sequence
  Oligonucleotide for detection of SNP TSC0005141
ccaaacacaacca

SEQ ID NO: 23613 - DNA, 13 bp, Artificial Sequence
  Oligonucleotide for detection of SNP TSC0005141
ttaggtttaatta

SEQ ID NO: 23614 - DNA, 13 bp, Artificial Sequence
  Oligonucleotide for detection of SNP TSC0005141
taattaaacctaa

SEQ ID NO: 23615 - DNA, 13 bp, Artificial Sequence
  Oligonucleotide for detection of SNP TSC0005141
ttaggtataatta

SEQ ID NO: 23616 - DNA, 13 bp, Artificial Sequence
  Oligonucleotide for detection of SNP TSC0005141
taattatacctaa

SEQ ID NO: 23617 - DNA, 13 bp, Artificial Sequence
  Oligonucleotide for detection of SNP TSC0005146
tggttttgtgata

SEQ ID NO: 23618 - DNA, 13 bp, Artificial Sequence
  Oligonucleotide for detection of SNP TSC0005146
tatcacaaaacca

SEQ ID NO: 23619 - DNA, 13 bp, Artificial Sequence
  Oligonucleotide for detection of SNP TSC0005146
cggttttgtgata

SEQ ID NO: 23620 - DNA, 13 bp, Artificial Sequence
  Oligonucleotide for detection of SNP TSC0005146
tatcacaaaaccg

SEQ ID NO: 23621 - DNA, 13 bp, Artificial Sequence
  Oligonucleotide for detection of SNP TSC0005146
tggtttcgtgata

SEQ ID NO: 23622 - DNA, 13 bp, Artificial Sequence
  Oligonucleotide for detection of SNP TSC0005146
tatcacgaaacca

SEQ ID NO: 23623 - DNA, 13 bp, Artificial Sequence
  Oligonucleotide for detection of SNP TSC0005146
cggtttcgtgata

SEQ ID NO: 23624 - DNA, 13 bp, Artificial Sequence
  Oligonucleotide for detection of SNP TSC0005146
tatcacgaaaccg

SEQ ID NO: 23625 - DNA, 13 bp, Artificial Sequence
  Oligonucleotide for detection of SNP TSC0005146
tgttatgaaattg

SEQ ID NO: 23626 - DNA, 13 bp, Artificial Sequence
  Oligonucleotide for detection of SNP TSC0005146
caatttcataaca

SEQ ID NO: 23627 - DNA, 13 bp, Artificial Sequence
  Oligonucleotide for detection of SNP TSC0005146
tgttataaaattg

SEQ ID NO: 23628 - DNA, 13 bp, Artificial Sequence
  Oligonucleotide for detection of SNP TSC0005146
caattttataaca

SEQ ID NO: 23629 - DNA, 13 bp, Artificial Sequence
  Oligonucleotide for detection of SNP TSC0005146
tgttacgaaattg

SEQ ID NO: 23630 - DNA, 13 bp, Artificial Sequence
  Oligonucleotide for detection of SNP TSC0005146
caatttcgtaaca

SEQ ID NO: 23631 - DNA, 13 bp, Artificial Sequence
  Oligonucleotide for detection of SNP TSC0005146
tgttataaaatcg

SEQ ID NO: 23632 - DNA, 13 bp, Artificial Sequence
  Oligonucleotide for detection of SNP TSC0005146
cgattttataaca

SEQ ID NO: 23633 - DNA, 13 bp, Artificial Sequence
  Oligonucleotide for detection of SNP TSC0005146
tgttatgaaatcg

SEQ ID NO: 23634 - DNA, 13 bp, Artificial Sequence
  Oligonucleotide for detection of SNP TSC0005146
cgatttcataaca

SEQ ID NO: 23635 - DNA, 13 bp, Artificial Sequence
  Oligonucleotide for detection of SNP TSC0005146
tgttacgaaatcg

SEQ ID NO: 23636 - DNA, 13 bp, Artificial Sequence
  Oligonucleotide for detection of SNP TSC0005146
cgatttcgtaaca

SEQ ID NO: 23637 - DNA, 13 bp, Artificial Sequence
  Oligonucleotide for detection of SNP TSC0005165
ttgatagattgaa

SEQ ID NO: 23638 - DNA, 13 bp, Artificial Sequence
  Oligonucleotide for detection of SNP TSC0005165
ttcaatctatcaa

SEQ ID NO: 23639 - DNA, 13 bp, Artificial Sequence
  Oligonucleotide for detection of SNP TSC0005165
ttgataaattgaa

SEQ ID NO: 23640 - DNA, 13 bp, Artificial Sequence
  Oligonucleotide for detection of SNP TSC0005165
ttcaatttatcaa

SEQ ID NO: 23641 - DNA, 13 bp, Artificial Sequence
  Oligonucleotide for detection of SNP TSC0005169
ataaatgtatgta

SEQ ID NO: 23642 - DNA, 13 bp, Artificial Sequence
  Oligonucleotide for detection of SNP TSC0005169
tacatacatttat

SEQ ID NO: 23643 - DNA, 13 bp, Artificial Sequence
  Oligonucleotide for detection of SNP TSC0005169
ataaatttatgta

SEQ ID NO: 23644 - DNA, 13 bp, Artificial Sequence
  Oligonucleotide for detection of SNP TSC0005169
tacataaatttat

SEQ ID NO: 23645 - DNA, 13 bp, Artificial Sequence
  Oligonucleotide for detection of SNP TSC0005169
ataaacgtatgta

SEQ ID NO: 23646 - DNA, 13 bp, Artificial Sequence
  Oligonucleotide for detection of SNP TSC0005169
tacatacgtttat

SEQ ID NO: 23647 - DNA, 13 bp, Artificial Sequence
  Oligonucleotide for detection of SNP TSC0005169
tatatgagtttat

SEQ ID NO: 23648 - DNA, 13 bp, Artificial Sequence
  Oligonucleotide for detection of SNP TSC0005169
ataaactcatata

SEQ ID NO: 23649 - DNA, 13 bp, Artificial Sequence
  Oligonucleotide for detection of SNP TSC0005170
tgataggaattty

SEQ ID NO: 23650 - DNA, 13 bp, Artificial Sequence
  Oligonucleotide for detection of SNP TSC0005170
raaattcctatca

SEQ ID NO: 23651 - DNA, 13 bp, Artificial Sequence
  Oligonucleotide for detection of SNP TSC0005170
tgatagaaattty

SEQ ID NO: 23652 - DNA, 13 bp, Artificial Sequence
  Oligonucleotide for detection of SNP TSC0005170
raaatttctatca

SEQ ID NO: 23653 - DNA, 13 bp, Artificial Sequence
  Oligonucleotide for detection of SNP TSC0005171
tgtggtggtgatg

SEQ ID NO: 23654 - DNA, 13 bp, Artificial Sequence
  Oligonucleotide for detection of SNP TSC0005171
catcaccaccaca

SEQ ID NO: 23655 - DNA, 13 bp, Artificial Sequence
  Oligonucleotide for detection of SNP TSC0005171
tgtggtagtgatg

SEQ ID NO: 23656 - DNA, 13 bp, Artificial Sequence
  Oligonucleotide for detection of SNP TSC0005171
catcactaccaca

SEQ ID NO: 23657 - DNA, 13 bp, Artificial Sequence
  Oligonucleotide for detection of SNP TSC0005185
tatttagaagtay

SEQ ID NO: 23658 - DNA, 13 bp, Artificial Sequence
  Oligonucleotide for detection of SNP TSC0005185
rtacttctaaata

SEQ ID NO: 23659 - DNA, 13 bp, Artificial Sequence
  Oligonucleotide for detection of SNP TSC0005185
tatttaaaagtay

SEQ ID NO: 23660 - DNA, 13 bp, Artificial Sequence
  Oligonucleotide for detection of SNP TSC0005185
rtacttttaaata

SEQ ID NO: 23661 - DNA, 13 bp, Artificial Sequence
  Oligonucleotide for detection of SNP TSC0005199
aatggagtaaagy

SEQ ID NO: 23662 - DNA, 13 bp, Artificial Sequence
  Oligonucleotide for detection of SNP TSC0005199
rctttactccatt

SEQ ID NO: 23663 - DNA, 13 bp, Artificial Sequence
  Oligonucleotide for detection of SNP TSC0005199
aatggaataaagy

SEQ ID NO: 23664 - DNA, 13 bp, Artificial Sequence
  Oligonucleotide for detection of SNP TSC0005199
rctttattccatt

SEQ ID NO: 23665 - DNA, 13 bp, Artificial Sequence
  Oligonucleotide for detection of SNP TSC0005200
ttttttatgatgg

SEQ ID NO: 23666 - DNA, 13 bp, Artificial Sequence
  Oligonucleotide for detection of SNP TSC0005200
ccatcataaaaaa

SEQ ID NO: 23667 - DNA, 13 bp, Artificial Sequence
  Oligonucleotide for detection of SNP TSC0005200
ttttttgtgatgg

SEQ ID NO: 23668 - DNA, 13 bp, Artificial Sequence
  Oligonucleotide for detection of SNP TSC0005200
ccatcacaaaaaa

SEQ ID NO: 23669 - DNA, 13 bp, Artificial Sequence
  Oligonucleotide for detection of SNP TSC0005204
gtggaagtttagt

SEQ ID NO: 23670 - DNA, 13 bp, Artificial Sequence
  Oligonucleotide for detection of SNP TSC0005204
actaaacttccac

SEQ ID NO: 23671 - DNA, 13 bp, Artificial Sequence
  Oligonucleotide for detection of SNP TSC0005204
gtggaaatttagt

SEQ ID NO: 23672 - DNA, 13 bp, Artificial Sequence
  Oligonucleotide for detection of SNP TSC0005204
actaaatttccac

SEQ ID NO: 23673 - DNA, 13 bp, Artificial Sequence
  Oligonucleotide for detection of SNP TSC0005204
gcggaagtttagt

SEQ ID NO: 23674 - DNA, 13 bp, Artificial Sequence
  Oligonucleotide for detection of SNP TSC0005204
actaaacttccgc

SEQ ID NO: 23675 - DNA, 13 bp, Artificial Sequence
  Oligonucleotide for detection of SNP TSC0005204
gcggaaatttagt

SEQ ID NO: 23676 - DNA, 13 bp, Artificial Sequence
  Oligonucleotide for detection of SNP TSC0005204
actaaatttccgc

SEQ ID NO: 23677 - DNA, 13 bp, Artificial Sequence
  Oligonucleotide for detection of SNP TSC0005231
ttttttaaagaat

SEQ ID NO: 23678 - DNA, 13 bp, Artificial Sequence
  Oligonucleotide for detection of SNP TSC0005231
attctttaaaaaa

SEQ ID NO: 23679 - DNA, 13 bp, Artificial Sequence
  Oligonucleotide for detection of SNP TSC0005231
tttttttaagaat

SEQ ID NO: 23680 - DNA, 13 bp, Artificial Sequence
  Oligonucleotide for detection of SNP TSC0005231
attcttaaaaaaa

SEQ ID NO: 23681 - DNA, 13 bp, Artificial Sequence
  Oligonucleotide for detection of SNP TSC0005231
attttttaaaaaa

SEQ ID NO: 23682 - DNA, 13 bp, Artificial Sequence
  Oligonucleotide for detection of SNP TSC0005231
ttttttaaaaaat

SEQ ID NO: 23683 - DNA, 13 bp, Artificial Sequence
  Oligonucleotide for detection of SNP TSC0005231
atttttaaaaaaa

SEQ ID NO: 23684 - DNA, 13 bp, Artificial Sequence
  Oligonucleotide for detection of SNP TSC0005231
tttttttaaaaat

SEQ ID NO: 23685 - DNA, 13 bp, Artificial Sequence
  Oligonucleotide for detection of SNP TSC0005232
agatataaattag

SEQ ID NO: 23686 - DNA, 13 bp, Artificial Sequence
  Oligonucleotide for detection of SNP TSC0005232
ctaatttatatct

SEQ ID NO: 23687 - DNA, 13 bp, Artificial Sequence
  Oligonucleotide for detection of SNP TSC0005232
agatattaattag

SEQ ID NO: 23688 - DNA, 13 bp, Artificial Sequence
  Oligonucleotide for detection of SNP TSC0005232
ctaattaatatct

SEQ ID NO: 23689 - DNA, 13 bp, Artificial Sequence
  Oligonucleotide for detection of SNP TSC0005232
ttagtttatgttt

SEQ ID NO: 23690 - DNA, 13 bp, Artificial Sequence
  Oligonucleotide for detection of SNP TSC0005232
aaacataaactaa

SEQ ID NO: 23691 - DNA, 13 bp, Artificial Sequence
  Oligonucleotide for detection of SNP TSC0005232
ttagttaatgttt

SEQ ID NO: 23692 - DNA, 13 bp, Artificial Sequence
  Oligonucleotide for detection of SNP TSC0005232
aaacattaactaa

SEQ ID NO: 23693 - DNA, 13 bp, Artificial Sequence
  Oligonucleotide for detection of SNP TSC0005234
aaggaaggaaggg

SEQ ID NO: 23694 - DNA, 13 bp, Artificial Sequence
  Oligonucleotide for detection of SNP TSC0005234
cccttccttcctt

SEQ ID NO: 23695 - DNA, 13 bp, Artificial Sequence
  Oligonucleotide for detection of SNP TSC0005234
aaggaaagaaggg

SEQ ID NO: 23696 - DNA, 13 bp, Artificial Sequence
  Oligonucleotide for detection of SNP TSC0005234
cccttctttcctt

SEQ ID NO: 23697 - DNA, 13 bp, Artificial Sequence
  Oligonucleotide for detection of SNP TSC0005244
aaatataatttgy

SEQ ID NO: 23698 - DNA, 13 bp, Artificial Sequence
  Oligonucleotide for detection of SNP TSC0005244
rcaaattatattt

SEQ ID NO: 23699 - DNA, 13 bp, Artificial Sequence
  Oligonucleotide for detection of SNP TSC0005244
aaatattatttgy

SEQ ID NO: 23700 - DNA, 13 bp, Artificial Sequence
  Oligonucleotide for detection of SNP TSC0005244
rcaaataatattt

SEQ ID NO: 23701 - DNA, 13 bp, Artificial Sequence
  Oligonucleotide for detection of SNP TSC0005244
gtaggttatgttt

SEQ ID NO: 23702 - DNA, 13 bp, Artificial Sequence
  Oligonucleotide for detection of SNP TSC0005244
aaacataacctac

SEQ ID NO: 23703 - DNA, 13 bp, Artificial Sequence
  Oligonucleotide for detection of SNP TSC0005244
gtaggtgatgttt

SEQ ID NO: 23704 - DNA, 13 bp, Artificial Sequence
  Oligonucleotide for detection of SNP TSC0005244
aaacatcacctac

SEQ ID NO: 23705 - DNA, 13 bp, Artificial Sequence
  Oligonucleotide for detection of SNP TSC0005255
aaatttggttggt

SEQ ID NO: 23706 - DNA, 13 bp, Artificial Sequence
  Oligonucleotide for detection of SNP TSC0005255
accaaccaaattt

SEQ ID NO: 23707 - DNA, 13 bp, Artificial Sequence
  Oligonucleotide for detection of SNP TSC0005255
aaatttagttggt

SEQ ID NO: 23708 - DNA, 13 bp, Artificial Sequence
  Oligonucleotide for detection of SNP TSC0005255
accaactaaattt

SEQ ID NO: 23709 - DNA, 13 bp, Artificial Sequence
  Oligonucleotide for detection of SNP TSC0005276
tagaagttgagty

SEQ ID NO: 23710 - DNA, 13 bp, Artificial Sequence
  Oligonucleotide for detection of SNP TSC0005276
ractcaacttcta

SEQ ID NO: 23711 - DNA, 13 bp, Artificial Sequence
  Oligonucleotide for detection of SNP TSC0005276
tagaaggtgagty

SEQ ID NO: 23712 - DNA, 13 bp, Artificial Sequence
  Oligonucleotide for detection of SNP TSC0005276
ractcaccttcta

SEQ ID NO: 23713 - DNA, 13 bp, Artificial Sequence
  Oligonucleotide for detection of SNP TSC0005276
ggtttagttttta

SEQ ID NO: 23714 - DNA, 13 bp, Artificial Sequence
  Oligonucleotide for detection of SNP TSC0005276
taaaaactaaacc

SEQ ID NO: 23715 - DNA, 13 bp, Artificial Sequence
  Oligonucleotide for detection of SNP TSC0005276
ggtttatttttta

SEQ ID NO: 23716 - DNA, 13 bp, Artificial Sequence
  Oligonucleotide for detection of SNP TSC0005276
taaaaaataaacc

SEQ ID NO: 23717 - DNA, 13 bp, Artificial Sequence
  Oligonucleotide for detection of SNP TSC0005289
taatggtgtgaaa

SEQ ID NO: 23718 - DNA, 13 bp, Artificial Sequence
  Oligonucleotide for detection of SNP TSC0005289
tttcacaccatta

SEQ ID NO: 23719 - DNA, 13 bp, Artificial Sequence
  Oligonucleotide for detection of SNP TSC0005289
taatggcgtgaaa

SEQ ID NO: 23720 - DNA, 13 bp, Artificial Sequence
  Oligonucleotide for detection of SNP TSC0005289
tttcacgccatta

SEQ ID NO: 23721 - DNA, 13 bp, Artificial Sequence
  Oligonucleotide for detection of SNP TSC0005289
ttttatgttatta

SEQ ID NO: 23722 - DNA, 13 bp, Artificial Sequence
  Oligonucleotide for detection of SNP TSC0005289
taataacataaaa

SEQ ID NO: 23723 - DNA, 13 bp, Artificial Sequence
  Oligonucleotide for detection of SNP TSC0005289
ttttatattatta

SEQ ID NO: 23724 - DNA, 13 bp, Artificial Sequence
  Oligonucleotide for detection of SNP TSC0005289
taataatataaaa

SEQ ID NO: 23725 - DNA, 13 bp, Artificial Sequence
  Oligonucleotide for detection of SNP TSC0005289
ttttacgttatta

SEQ ID NO: 23726 - DNA, 13 bp, Artificial Sequence
  Oligonucleotide for detection of SNP TSC0005289
taataacgtaaaa

SEQ ID NO: 23727 - DNA, 13 bp, Artificial Sequence
  Oligonucleotide for detection of SNP TSC0005290
ggttgtattttaa

SEQ ID NO: 23728 - DNA, 13 bp, Artificial Sequence
  Oligonucleotide for detection of SNP TSC0005290
ttaaaatacaacc

SEQ ID NO: 23729 - DNA, 13 bp, Artificial Sequence
  Oligonucleotide for detection of SNP TSC0005290
ggttgtgttttaa

SEQ ID NO: 23730 - DNA, 13 bp, Artificial Sequence
  Oligonucleotide for detection of SNP TSC0005290
ttaaaacacaacc

SEQ ID NO: 23731 - DNA, 13 bp, Artificial Sequence
  Oligonucleotide for detection of SNP TSC0005290
ggttgcgttttaa

SEQ ID NO: 23732 - DNA, 13 bp, Artificial Sequence
  Oligonucleotide for detection of SNP TSC0005290
ttaaaacgcaacc

SEQ ID NO: 23733 - DNA, 13 bp, Artificial Sequence
  Oligonucleotide for detection of SNP TSC0005290
ttggagtgtagty

SEQ ID NO: 23734 - DNA, 13 bp, Artificial Sequence
  Oligonucleotide for detection of SNP TSC0005290
ractacactccaa

SEQ ID NO: 23735 - DNA, 13 bp, Artificial Sequence
  Oligonucleotide for detection of SNP TSC0005290
ttggagcgtagty

SEQ ID NO: 23736 - DNA, 13 bp, Artificial Sequence
  Oligonucleotide for detection of SNP TSC0005290
ractacgctccaa

SEQ ID NO: 23737 - DNA, 13 bp, Artificial Sequence
  Oligonucleotide for detection of SNP TSC0005295
aggtatgttgagg

SEQ ID NO: 23738 - DNA, 13 bp, Artificial Sequence
  Oligonucleotide for detection of SNP TSC0005295
cctcaacatacct

SEQ ID NO: 23739 - DNA, 13 bp, Artificial Sequence
  Oligonucleotide for detection of SNP TSC0005295
aggtattttgagg

SEQ ID NO: 23740 - DNA, 13 bp, Artificial Sequence
  Oligonucleotide for detection of SNP TSC0005295
cctcaaaatacct

SEQ ID NO: 23741 - DNA, 13 bp, Artificial Sequence
  Oligonucleotide for detection of SNP TSC0005295
ttttagtatgttt

SEQ ID NO: 23742 - DNA, 13 bp, Artificial Sequence
  Oligonucleotide for detection of SNP TSC0005295
aaacatactaaaa

SEQ ID NO: 23743 - DNA, 13 bp, Artificial Sequence
  Oligonucleotide for detection of SNP TSC0005295
ttttagaatgttt

SEQ ID NO: 23744 - DNA, 13 bp, Artificial Sequence
  Oligonucleotide for detection of SNP TSC0005295
aaacattctaaaa

SEQ ID NO: 23745 - DNA, 13 bp, Artificial Sequence
  Oligonucleotide for detection of SNP TSC0005296
aggggatggattt

SEQ ID NO: 23746 - DNA, 13 bp, Artificial Sequence
  Oligonucleotide for detection of SNP TSC0005296
aaatccatcccct

SEQ ID NO: 23747 - DNA, 13 bp, Artificial Sequence
  Oligonucleotide for detection of SNP TSC0005296
aggggacggattt

SEQ ID NO: 23748 - DNA, 13 bp, Artificial Sequence
  Oligonucleotide for detection of SNP TSC0005296
aaatccgtcccct

SEQ ID NO: 23749 - DNA, 13 bp, Artificial Sequence
  Oligonucleotide for detection of SNP TSC0005296
aagtttgtttttt

SEQ ID NO: 23750 - DNA, 13 bp, Artificial Sequence
  Oligonucleotide for detection of SNP TSC0005296
aaaaaacaaactt

SEQ ID NO: 23751 - DNA, 13 bp, Artificial Sequence
  Oligonucleotide for detection of SNP TSC0005296
aagtttatttttt

SEQ ID NO: 23752 - DNA, 13 bp, Artificial Sequence
  Oligonucleotide for detection of SNP TSC0005296
aaaaaataaactt

SEQ ID NO: 23753 - DNA, 13 bp, Artificial Sequence
  Oligonucleotide for detection of SNP TSC0005296
aagttcgtttttt

SEQ ID NO: 23754 - DNA, 13 bp, Artificial Sequence
  Oligonucleotide for detection of SNP TSC0005296
aaaaaacgaactt

SEQ ID NO: 23755 - DNA, 13 bp, Artificial Sequence
  Oligonucleotide for detection of SNP TSC0005298
agatagaaaataa

SEQ ID NO: 23756 - DNA, 13 bp, Artificial Sequence
  Oligonucleotide for detection of SNP TSC0005298
ttattttctatct

SEQ ID NO: 23757 - DNA, 13 bp, Artificial Sequence
  Oligonucleotide for detection of SNP TSC0005298
agataggaaataa

SEQ ID NO: 23758 - DNA, 13 bp, Artificial Sequence
  Oligonucleotide for detection of SNP TSC0005298
ttatttcctatct

SEQ ID NO: 23759 - DNA, 13 bp, Artificial Sequence
  Oligonucleotide for detection of SNP TSC0005307
ttgtgtagtaaty

SEQ ID NO: 23760 - DNA, 13 bp, Artificial Sequence
  Oligonucleotide for detection of SNP TSC0005307
rattactacacaa

SEQ ID NO: 23761 - DNA, 13 bp, Artificial Sequence
  Oligonucleotide for detection of SNP TSC0005307
ttgtgtggtaaty

SEQ ID NO: 23762 - DNA, 13 bp, Artificial Sequence
  Oligonucleotide for detection of SNP TSC0005307
rattaccacacaa

SEQ ID NO: 23763 - DNA, 13 bp, Artificial Sequence
  Oligonucleotide for detection of SNP TSC0005307
ttgtgcggtaaty

SEQ ID NO: 23764 - DNA, 13 bp, Artificial Sequence
  Oligonucleotide for detection of SNP TSC0005307
rattaccgcacaa

SEQ ID NO: 23765 - DNA, 13 bp, Artificial Sequence
  Oligonucleotide for detection of SNP TSC0005307
ggttgttgtatag

SEQ ID NO: 23766 - DNA, 13 bp, Artificial Sequence
  Oligonucleotide for detection of SNP TSC0005307
ctatacaacaacc

SEQ ID NO: 23767 - DNA, 13 bp, Artificial Sequence
  Oligonucleotide for detection of SNP TSC0005307
ggttgtcgtatag

SEQ ID NO: 23768 - DNA, 13 bp, Artificial Sequence
  Oligonucleotide for detection of SNP TSC0005307
ctatacgacaacc

SEQ ID NO: 23769 - DNA, 13 bp, Artificial Sequence
  Oligonucleotide for detection of SNP TSC0005308
atttttgtatttt

SEQ ID NO: 23770 - DNA, 13 bp, Artificial Sequence
  Oligonucleotide for detection of SNP TSC0005308
aaaatacaaaaat

SEQ ID NO: 23771 - DNA, 13 bp, Artificial Sequence
  Oligonucleotide for detection of SNP TSC0005308
atttttatatttt

SEQ ID NO: 23772 - DNA, 13 bp, Artificial Sequence
  Oligonucleotide for detection of SNP TSC0005308
aaaatataaaaat

SEQ ID NO: 23773 - DNA, 13 bp, Artificial Sequence
  Oligonucleotide for detection of SNP TSC0005310
tatttaaataggy

SEQ ID NO: 23774 - DNA, 13 bp, Artificial Sequence
  Oligonucleotide for detection of SNP TSC0005310
rcctatttaaata

SEQ ID NO: 23775 - DNA, 13 bp, Artificial Sequence
  Oligonucleotide for detection of SNP TSC0005310
tatttagataggy

SEQ ID NO: 23776 - DNA, 13 bp, Artificial Sequence
  Oligonucleotide for detection of SNP TSC0005310
rcctatctaaata

SEQ ID NO: 23777 - DNA, 13 bp, Artificial Sequence
  Oligonucleotide for detection of SNP TSC0005311
ttatttatttatg

SEQ ID NO: 23778 - DNA, 13 bp, Artificial Sequence
  Oligonucleotide for detection of SNP TSC0005311
cataaataaataa

SEQ ID NO: 23779 - DNA, 13 bp, Artificial Sequence
  Oligonucleotide for detection of SNP TSC0005311
ttatttttttatg

SEQ ID NO: 23780 - DNA, 13 bp, Artificial Sequence
  Oligonucleotide for detection of SNP TSC0005311
cataaaaaaataa

SEQ ID NO: 23781 - DNA, 13 bp, Artificial Sequence
  Oligonucleotide for detection of SNP TSC0005311
tataagtaagtga

SEQ ID NO: 23782 - DNA, 13 bp, Artificial Sequence
  Oligonucleotide for detection of SNP TSC0005311
tcacttacttata

SEQ ID NO: 23783 - DNA, 13 bp, Artificial Sequence
  Oligonucleotide for detection of SNP TSC0005311
tataaggaagtga

SEQ ID NO: 23784 - DNA, 13 bp, Artificial Sequence
  Oligonucleotide for detection of SNP TSC0005311
tcacttccttata

SEQ ID NO: 23785 - DNA, 13 bp, Artificial Sequence
  Oligonucleotide for detection of SNP TSC0005323
ttttaggttataa

SEQ ID NO: 23786 - DNA, 13 bp, Artificial Sequence
  Oligonucleotide for detection of SNP TSC0005323
ttataacctaaaa

SEQ ID NO: 23787 - DNA, 13 bp, Artificial Sequence
  Oligonucleotide for detection of SNP TSC0005323
ttttagtttataa

SEQ ID NO: 23788 - DNA, 13 bp, Artificial Sequence
  Oligonucleotide for detection of SNP TSC0005323
ttataaactaaaa

SEQ ID NO: 23789 - DNA, 13 bp, Artificial Sequence
  Oligonucleotide for detection of SNP TSC0005323
ttgtaatttgaga

SEQ ID NO: 23790 - DNA, 13 bp, Artificial Sequence
  Oligonucleotide for detection of SNP TSC0005323
tctcaaattacaa

SEQ ID NO: 23791 - DNA, 13 bp, Artificial Sequence
  Oligonucleotide for detection of SNP TSC0005323
ttgtaaattgaga

SEQ ID NO: 23792 - DNA, 13 bp, Artificial Sequence
  Oligonucleotide for detection of SNP TSC0005323
tctcaatttacaa

SEQ ID NO: 23793 - DNA, 13 bp, Artificial Sequence
  Oligonucleotide for detection of SNP TSC0005324
attgtaagataty

SEQ ID NO: 23794 - DNA, 13 bp, Artificial Sequence
  Oligonucleotide for detection of SNP TSC0005324
ratatcttacaat

SEQ ID NO: 23795 - DNA, 13 bp, Artificial Sequence
  Oligonucleotide for detection of SNP TSC0005324
attgtaggataty

SEQ ID NO: 23796 - DNA, 13 bp, Artificial Sequence
  Oligonucleotide for detection of SNP TSC0005324
ratatcctacaat

SEQ ID NO: 23797 - DNA, 13 bp, Artificial Sequence
  Oligonucleotide for detection of SNP TSC0005330
aggattagagaay

SEQ ID NO: 23798 - DNA, 13 bp, Artificial Sequence
  Oligonucleotide for detection of SNP TSC0005330
rttctctaatcct

SEQ ID NO: 23799 - DNA, 13 bp, Artificial Sequence
  Oligonucleotide for detection of SNP TSC0005330
aggatttgagaay

SEQ ID NO: 23800 - DNA, 13 bp, Artificial Sequence
  Oligonucleotide for detection of SNP TSC0005330
rttctcaaatcct

SEQ ID NO: 23801 - DNA, 13 bp, Artificial Sequence
  Oligonucleotide for detection of SNP TSC0005330
aggattcgagaay

SEQ ID NO: 23802 - DNA, 13 bp, Artificial Sequence
  Oligonucleotide for detection of SNP TSC0005330
rttctcgaatcct

SEQ ID NO: 23803 - DNA, 13 bp, Artificial Sequence
  Oligonucleotide for detection of SNP TSC0005330
gttttttagtttt

SEQ ID NO: 23804 - DNA, 13 bp, Artificial Sequence
  Oligonucleotide for detection of SNP TSC0005330
aaaactaaaaaac

SEQ ID NO: 23805 - DNA, 13 bp, Artificial Sequence
  Oligonucleotide for detection of SNP TSC0005330
gtttttgagtttt

SEQ ID NO: 23806 - DNA, 13 bp, Artificial Sequence
  Oligonucleotide for detection of SNP TSC0005330
aaaactcaaaaac

SEQ ID NO: 23807 - DNA, 13 bp, Artificial Sequence
  Oligonucleotide for detection of SNP TSC0005330
gttttcgagtttt

SEQ ID NO: 23808 - DNA, 13 bp, Artificial Sequence
  Oligonucleotide for detection of SNP TSC0005330
aaaactcgaaaac

SEQ ID NO: 23809 - DNA, 13 bp, Artificial Sequence
  Oligonucleotide for detection of SNP TSC0005331
tttattatgagtt

SEQ ID NO: 23810 - DNA, 13 bp, Artificial Sequence
  Oligonucleotide for detection of SNP TSC0005331
aactcataataaa

SEQ ID NO: 23811 - DNA, 13 bp, Artificial Sequence
  Oligonucleotide for detection of SNP TSC0005331
tttattttgagtt

SEQ ID NO: 23812 - DNA, 13 bp, Artificial Sequence
  Oligonucleotide for detection of SNP TSC0005331
aactcaaaataaa

SEQ ID NO: 23813 - DNA, 13 bp, Artificial Sequence
  Oligonucleotide for detection of SNP TSC0005331
aatttatgatgaa

SEQ ID NO: 23814 - DNA, 13 bp, Artificial Sequence
  Oligonucleotide for detection of SNP TSC0005331
ttcatcataaatt

SEQ ID NO: 23815 - DNA, 13 bp, Artificial Sequence
  Oligonucleotide for detection of SNP TSC0005331
aatttaggatgaa

SEQ ID NO: 23816 - DNA, 13 bp, Artificial Sequence
  Oligonucleotide for detection of SNP TSC0005331
ttcatcctaaatt

SEQ ID NO: 23817 - DNA, 13 bp, Artificial Sequence
  Oligonucleotide for detection of SNP TSC0005332
taaattagataag

SEQ ID NO: 23818 - DNA, 13 bp, Artificial Sequence
  Oligonucleotide for detection of SNP TSC0005332
cttatctaattta

SEQ ID NO: 23819 - DNA, 13 bp, Artificial Sequence
  Oligonucleotide for detection of SNP TSC0005332
taaattggataag

SEQ ID NO: 23820 - DNA, 13 bp, Artificial Sequence
  Oligonucleotide for detection of SNP TSC0005332
cttatccaattta

SEQ ID NO: 23821 - DNA, 13 bp, Artificial Sequence
  Oligonucleotide for detection of SNP TSC0005333
agattggggtatt

SEQ ID NO: 23822 - DNA, 13 bp, Artificial Sequence
  Oligonucleotide for detection of SNP TSC0005333
aataccccaatct

SEQ ID NO: 23823 - DNA, 13 bp, Artificial Sequence
  Oligonucleotide for detection of SNP TSC0005333
agattgaggtatt

SEQ ID NO: 23824 - DNA, 13 bp, Artificial Sequence
  Oligonucleotide for detection of SNP TSC0005333
aatacctcaatct

SEQ ID NO: 23825 - DNA, 13 bp, Artificial Sequence
  Oligonucleotide for detection of SNP TSC0005334
aaaagatatatga

SEQ ID NO: 23826 - DNA, 13 bp, Artificial Sequence
  Oligonucleotide for detection of SNP TSC0005334
tcatatatctttt

SEQ ID NO: 23827 - DNA, 13 bp, Artificial Sequence
  Oligonucleotide for detection of SNP TSC0005334
aaaagagatatga

SEQ ID NO: 23828 - DNA, 13 bp, Artificial Sequence
  Oligonucleotide for detection of SNP TSC0005334
tcatatctctttt

SEQ ID NO: 23829 - DNA, 13 bp, Artificial Sequence
  Oligonucleotide for detection of SNP TSC0005334
aaaagatatacga

SEQ ID NO: 23830 - DNA, 13 bp, Artificial Sequence
  Oligonucleotide for detection of SNP TSC0005334
tcgtatatctttt

SEQ ID NO: 23831 - DNA, 13 bp, Artificial Sequence
  Oligonucleotide for detection of SNP TSC0005334
aaaagagatacga

SEQ ID NO: 23832 - DNA, 13 bp, Artificial Sequence
  Oligonucleotide for detection of SNP TSC0005334
tcgtatctctttt

SEQ ID NO: 23833 - DNA, 13 bp, Artificial Sequence
  Oligonucleotide for detection of SNP TSC0005334
tcgtatgtttttt

SEQ ID NO: 23834 - DNA, 13 bp, Artificial Sequence
  Oligonucleotide for detection of SNP TSC0005334
aaaaaacatacga

SEQ ID NO: 23835 - DNA, 13 bp, Artificial Sequence
  Oligonucleotide for detection of SNP TSC0005334
tcgtatttttttt

SEQ ID NO: 23836 - DNA, 13 bp, Artificial Sequence
  Oligonucleotide for detection of SNP TSC0005334
aaaaaaaatacga

SEQ ID NO: 23837 - DNA, 13 bp, Artificial Sequence
  Oligonucleotide for detection of SNP TSC0005373
tttatgatttaat

SEQ ID NO: 23838 - DNA, 13 bp, Artificial Sequence
  Oligonucleotide for detection of SNP TSC0005373
attaaatcataaa

SEQ ID NO: 23839 - DNA, 13 bp, Artificial Sequence
  Oligonucleotide for detection of SNP TSC0005373
tttatggtttaat

SEQ ID NO: 23840 - DNA, 13 bp, Artificial Sequence
  Oligonucleotide for detection of SNP TSC0005373
attaaaccataaa

SEQ ID NO: 23841 - DNA, 13 bp, Artificial Sequence
  Oligonucleotide for detection of SNP TSC0005413
taaattggtatta

SEQ ID NO: 23842 - DNA, 13 bp, Artificial Sequence
  Oligonucleotide for detection of SNP TSC0005413
taataccaattta

SEQ ID NO: 23843 - DNA, 13 bp, Artificial Sequence
  Oligonucleotide for detection of SNP TSC0005413
taaattagtatta

SEQ ID NO: 23844 - DNA, 13 bp, Artificial Sequence
  Oligonucleotide for detection of SNP TSC0005413
taatactaattta

SEQ ID NO: 23845 - DNA, 13 bp, Artificial Sequence
  Oligonucleotide for detection of SNP TSC0005414
tagaaggataaga

SEQ ID NO: 23846 - DNA, 13 bp, Artificial Sequence
  Oligonucleotide for detection of SNP TSC0005414
tcttatccttcta

SEQ ID NO: 23847 - DNA, 13 bp, Artificial Sequence
  Oligonucleotide for detection of SNP TSC0005414
tagaagtataaga

SEQ ID NO: 23848 - DNA, 13 bp, Artificial Sequence
  Oligonucleotide for detection of SNP TSC0005414
tcttatacttcta

SEQ ID NO: 23849 - DNA, 13 bp, Artificial Sequence
  Oligonucleotide for detection of SNP TSC0005414
ttttatttttttg

SEQ ID NO: 23850 - DNA, 13 bp, Artificial Sequence
  Oligonucleotide for detection of SNP TSC0005414
caaaaaaataaaa

SEQ ID NO: 23851 - DNA, 13 bp, Artificial Sequence
  Oligonucleotide for detection of SNP TSC0005414
ttttatatttttg

SEQ ID NO: 23852 - DNA, 13 bp, Artificial Sequence
  Oligonucleotide for detection of SNP TSC0005414
caaaaatataaaa

SEQ ID NO: 23853 - DNA, 13 bp, Artificial Sequence
  Oligonucleotide for detection of SNP TSC0005417
tgtaatatttagt

SEQ ID NO: 23854 - DNA, 13 bp, Artificial Sequence
  Oligonucleotide for detection of SNP TSC0005417
actaaatattaca

SEQ ID NO: 23855 - DNA, 13 bp, Artificial Sequence
  Oligonucleotide for detection of SNP TSC0005417
tgtaatttttagt

SEQ ID NO: 23856 - DNA, 13 bp, Artificial Sequence
  Oligonucleotide for detection of SNP TSC0005417
actaaaaattaca

SEQ ID NO: 23857 - DNA, 13 bp, Artificial Sequence
  Oligonucleotide for detection of SNP TSC0005417
attgggtattata

SEQ ID NO: 23858 - DNA, 13 bp, Artificial Sequence
  Oligonucleotide for detection of SNP TSC0005417
tataatacccaat

SEQ ID NO: 23859 - DNA, 13 bp, Artificial Sequence
  Oligonucleotide for detection of SNP TSC0005417
attggggattata

SEQ ID NO: 23860 - DNA, 13 bp, Artificial Sequence
  Oligonucleotide for detection of SNP TSC0005417
tataatccccaat

SEQ ID NO: 23861 - DNA, 13 bp, Artificial Sequence
  Oligonucleotide for detection of SNP TSC0005443
gtattggttagga

SEQ ID NO: 23862 - DNA, 13 bp, Artificial Sequence
  Oligonucleotide for detection of SNP TSC0005443
tcctaaccaatac

SEQ ID NO: 23863 - DNA, 13 bp, Artificial Sequence
  Oligonucleotide for detection of SNP TSC0005443
gtattgattagga

SEQ ID NO: 23864 - DNA, 13 bp, Artificial Sequence
  Oligonucleotide for detection of SNP TSC0005443
tcctaatcaatac

SEQ ID NO: 23865 - DNA, 13 bp, Artificial Sequence
  Oligonucleotide for detection of SNP TSC0005447
tgatgagtttaaa

SEQ ID NO: 23866 - DNA, 13 bp, Artificial Sequence
  Oligonucleotide for detection of SNP TSC0005447
tttaaactcatca

SEQ ID NO: 23867 - DNA, 13 bp, Artificial Sequence
  Oligonucleotide for detection of SNP TSC0005447
tgatgaatttaaa

SEQ ID NO: 23868 - DNA, 13 bp, Artificial Sequence
  Oligonucleotide for detection of SNP TSC0005447
tttaaattcatca

SEQ ID NO: 23869 - DNA, 13 bp, Artificial Sequence
  Oligonucleotide for detection of SNP TSC0005468
tgtttaaaatatt

SEQ ID NO: 23870 - DNA, 13 bp, Artificial Sequence
  Oligonucleotide for detection of SNP TSC0005468
aatattttaaaca

SEQ ID NO: 23871 - DNA, 13 bp, Artificial Sequence
  Oligonucleotide for detection of SNP TSC0005468
tgtttataatatt

SEQ ID NO: 23872 - DNA, 13 bp, Artificial Sequence
  Oligonucleotide for detection of SNP TSC0005468
aatattataaaca

SEQ ID NO: 23873 - DNA, 13 bp, Artificial Sequence
  Oligonucleotide for detection of SNP TSC0005468
aatgttttaggta

SEQ ID NO: 23874 - DNA, 13 bp, Artificial Sequence
  Oligonucleotide for detection of SNP TSC0005468
tacctaaaacatt

SEQ ID NO: 23875 - DNA, 13 bp, Artificial Sequence
  Oligonucleotide for detection of SNP TSC0005468
aatgttgtaggta

SEQ ID NO: 23876 - DNA, 13 bp, Artificial Sequence
  Oligonucleotide for detection of SNP TSC0005468
tacctacaacatt

SEQ ID NO: 23877 - DNA, 13 bp, Artificial Sequence
  Oligonucleotide for detection of SNP TSC0005469
taataatgagaag

SEQ ID NO: 23878 - DNA, 13 bp, Artificial Sequence
  Oligonucleotide for detection of SNP TSC0005469
cttctcattatta

SEQ ID NO: 23879 - DNA, 13 bp, Artificial Sequence
  Oligonucleotide for detection of SNP TSC0005469
taataaagagaag

SEQ ID NO: 23880 - DNA, 13 bp, Artificial Sequence
  Oligonucleotide for detection of SNP TSC0005469
cttctctttatta

SEQ ID NO: 23881 - DNA, 13 bp, Artificial Sequence
  Oligonucleotide for detection of SNP TSC0005470
aatgaagtttatt

SEQ ID NO: 23882 - DNA, 13 bp, Artificial Sequence
  Oligonucleotide for detection of SNP TSC0005470
aataaacttcatt

SEQ ID NO: 23883 - DNA, 13 bp, Artificial Sequence
  Oligonucleotide for detection of SNP TSC0005470
aatgaaatttatt

SEQ ID NO: 23884 - DNA, 13 bp, Artificial Sequence
  Oligonucleotide for detection of SNP TSC0005470
aataaatttcatt

SEQ ID NO: 23885 - DNA, 13 bp, Artificial Sequence
  Oligonucleotide for detection of SNP TSC0005489
atggtttagaaaa

SEQ ID NO: 23886 - DNA, 13 bp, Artificial Sequence
  Oligonucleotide for detection of SNP TSC0005489
ttttctaaaccat

SEQ ID NO: 23887 - DNA, 13 bp, Artificial Sequence
  Oligonucleotide for detection of SNP TSC0005489
atggttgagaaaa

SEQ ID NO: 23888 - DNA, 13 bp, Artificial Sequence
  Oligonucleotide for detection of SNP TSC0005489
ttttctcaaccat

SEQ ID NO: 23889 - DNA, 13 bp, Artificial Sequence
  Oligonucleotide for detection of SNP TSC0005489
ttttttgagttat

SEQ ID NO: 23890 - DNA, 13 bp, Artificial Sequence
  Oligonucleotide for detection of SNP TSC0005489
ataactcaaaaaa

SEQ ID NO: 23891 - DNA, 13 bp, Artificial Sequence
  Oligonucleotide for detection of SNP TSC0005489
tttttttagttat

SEQ ID NO: 23892 - DNA, 13 bp, Artificial Sequence
  Oligonucleotide for detection of SNP TSC0005489
ataactaaaaaaa

SEQ ID NO: 23893 - DNA, 13 bp, Artificial Sequence
  Oligonucleotide for detection of SNP TSC0005490
agatgatgataag

SEQ ID NO: 23894 - DNA, 13 bp, Artificial Sequence
  Oligonucleotide for detection of SNP TSC0005490
cttatcatcatct

SEQ ID NO: 23895 - DNA, 13 bp, Artificial Sequence
  Oligonucleotide for detection of SNP TSC0005490
agatgacgataag

SEQ ID NO: 23896 - DNA, 13 bp, Artificial Sequence
  Oligonucleotide for detection of SNP TSC0005490
cttatcgtcatct

SEQ ID NO: 23897 - DNA, 13 bp, Artificial Sequence
  Oligonucleotide for detection of SNP TSC0005490
tttatcgttattt

SEQ ID NO: 23898 - DNA, 13 bp, Artificial Sequence
  Oligonucleotide for detection of SNP TSC0005490
aaataacgataaa

SEQ ID NO: 23899 - DNA, 13 bp, Artificial Sequence
  Oligonucleotide for detection of SNP TSC0005501
aatggtatagaga

SEQ ID NO: 23900 - DNA, 13 bp, Artificial Sequence
  Oligonucleotide for detection of SNP TSC0005501
tctctataccatt

SEQ ID NO: 23901 - DNA, 13 bp, Artificial Sequence
  Oligonucleotide for detection of SNP TSC0005501
aatggtgtagaga

SEQ ID NO: 23902 - DNA, 13 bp, Artificial Sequence
  Oligonucleotide for detection of SNP TSC0005501
tctctacaccatt

SEQ ID NO: 23903 - DNA, 13 bp, Artificial Sequence
  Oligonucleotide for detection of SNP TSC0005501
aacggtatagaga

SEQ ID NO: 23904 - DNA, 13 bp, Artificial Sequence
  Oligonucleotide for detection of SNP TSC0005501
tctctataccgtt

SEQ ID NO: 23905 - DNA, 13 bp, Artificial Sequence
  Oligonucleotide for detection of SNP TSC0005501
aacggtgtagaga

SEQ ID NO: 23906 - DNA, 13 bp, Artificial Sequence
  Oligonucleotide for detection of SNP TSC0005501
tctctacaccgtt

SEQ ID NO: 23907 - DNA, 13 bp, Artificial Sequence
  Oligonucleotide for detection of SNP TSC0005501
aatggcgtagaga

SEQ ID NO: 23908 - DNA, 13 bp, Artificial Sequence
  Oligonucleotide for detection of SNP TSC0005501
tctctacgccatt

SEQ ID NO: 23909 - DNA, 13 bp, Artificial Sequence
  Oligonucleotide for detection of SNP TSC0005501
aacggcgtagaga

SEQ ID NO: 23910 - DNA, 13 bp, Artificial Sequence
  Oligonucleotide for detection of SNP TSC0005501
tctctacgccgtt

SEQ ID NO: 23911 - DNA, 13 bp, Artificial Sequence
  Oligonucleotide for detection of SNP TSC0005501
tttttatgttgtt

SEQ ID NO: 23912 - DNA, 13 bp, Artificial Sequence
  Oligonucleotide for detection of SNP TSC0005501
aacaacataaaaa

SEQ ID NO: 23913 - DNA, 13 bp, Artificial Sequence
  Oligonucleotide for detection of SNP TSC0005501
tttttatgtcgtt

SEQ ID NO: 23914 - DNA, 13 bp, Artificial Sequence
  Oligonucleotide for detection of SNP TSC0005501
aacgacataaaaa

SEQ ID NO: 23915 - DNA, 13 bp, Artificial Sequence
  Oligonucleotide for detection of SNP TSC0005501
tttttacgttgtt

SEQ ID NO: 23916 - DNA, 13 bp, Artificial Sequence
  Oligonucleotide for detection of SNP TSC0005501
aacaacgtaaaaa

SEQ ID NO: 23917 - DNA, 13 bp, Artificial Sequence
  Oligonucleotide for detection of SNP TSC0005501
tttttacgtcgtt

SEQ ID NO: 23918 - DNA, 13 bp, Artificial Sequence
  Oligonucleotide for detection of SNP TSC0005501
aacgacgtaaaaa

SEQ ID NO: 23919 - DNA, 13 bp, Artificial Sequence
  Oligonucleotide for detection of SNP TSC0005505
agaaatgttatty

SEQ ID NO: 23920 - DNA, 13 bp, Artificial Sequence
  Oligonucleotide for detection of SNP TSC0005505
raataacatttct

SEQ ID NO: 23921 - DNA, 13 bp, Artificial Sequence
  Oligonucleotide for detection of SNP TSC0005505
agaaatattatty

SEQ ID NO: 23922 - DNA, 13 bp, Artificial Sequence
  Oligonucleotide for detection of SNP TSC0005505
raataatatttct

SEQ ID NO: 23923 - DNA, 13 bp, Artificial Sequence
  Oligonucleotide for detection of SNP TSC0005512
ggtgataatttga

SEQ ID NO: 23924 - DNA, 13 bp, Artificial Sequence
  Oligonucleotide for detection of SNP TSC0005512
tcaaattatcacc

SEQ ID NO: 23925 - DNA, 13 bp, Artificial Sequence
  Oligonucleotide for detection of SNP TSC0005512
ggtgatgatttga

SEQ ID NO: 23926 - DNA, 13 bp, Artificial Sequence
  Oligonucleotide for detection of SNP TSC0005512
tcaaatcatcacc

SEQ ID NO: 23927 - DNA, 13 bp, Artificial Sequence
  Oligonucleotide for detection of SNP TSC0005512
ggtgacgatttga

SEQ ID NO: 23928 - DNA, 13 bp, Artificial Sequence
  Oligonucleotide for detection of SNP TSC0005512
tcaaatcgtcacc

SEQ ID NO: 23929 - DNA, 13 bp, Artificial Sequence
  Oligonucleotide for detection of SNP TSC0005512
ttaagttgttaty

SEQ ID NO: 23930 - DNA, 13 bp, Artificial Sequence
  Oligonucleotide for detection of SNP TSC0005512
rataacaacttaa

SEQ ID NO: 23931 - DNA, 13 bp, Artificial Sequence
  Oligonucleotide for detection of SNP TSC0005512
ttaagtcgttaty

SEQ ID NO: 23932 - DNA, 13 bp, Artificial Sequence
  Oligonucleotide for detection of SNP TSC0005512
rataacgacttaa

SEQ ID NO: 23933 - DNA, 13 bp, Artificial Sequence
  Oligonucleotide for detection of SNP TSC0005520
ttagttgtttgtt

SEQ ID NO: 23934 - DNA, 13 bp, Artificial Sequence
  Oligonucleotide for detection of SNP TSC0005520
aacaaacaactaa

SEQ ID NO: 23935 - DNA, 13 bp, Artificial Sequence
  Oligonucleotide for detection of SNP TSC0005520
ttagttatttgtt

SEQ ID NO: 23936 - DNA, 13 bp, Artificial Sequence
  Oligonucleotide for detection of SNP TSC0005520
aacaaataactaa

SEQ ID NO: 23937 - DNA, 13 bp, Artificial Sequence
  Oligonucleotide for detection of SNP TSC0005521
tagtaggttggaa

SEQ ID NO: 23938 - DNA, 13 bp, Artificial Sequence
  Oligonucleotide for detection of SNP TSC0005521
ttccaacctacta

SEQ ID NO: 23939 - DNA, 13 bp, Artificial Sequence
  Oligonucleotide for detection of SNP TSC0005521
tagtagtttggaa

SEQ ID NO: 23940 - DNA, 13 bp, Artificial Sequence
  Oligonucleotide for detection of SNP TSC0005521
ttccaaactacta

SEQ ID NO: 23941 - DNA, 13 bp, Artificial Sequence
  Oligonucleotide for detection of SNP TSC0005521
ttttaatttgttg

SEQ ID NO: 23942 - DNA, 13 bp, Artificial Sequence
  Oligonucleotide for detection of SNP TSC0005521
caacaaattaaaa

SEQ ID NO: 23943 - DNA, 13 bp, Artificial Sequence
  Oligonucleotide for detection of SNP TSC0005521
ttttaaattgttg

SEQ ID NO: 23944 - DNA, 13 bp, Artificial Sequence
  Oligonucleotide for detection of SNP TSC0005521
caacaatttaaaa

SEQ ID NO: 23945 - DNA, 13 bp, Artificial Sequence
  Oligonucleotide for detection of SNP TSC0005544
atgagttatgtga

SEQ ID NO: 23946 - DNA, 13 bp, Artificial Sequence
  Oligonucleotide for detection of SNP TSC0005544
tcacataactcat

SEQ ID NO: 23947 - DNA, 13 bp, Artificial Sequence
  Oligonucleotide for detection of SNP TSC0005544
atgagtgatgtga

SEQ ID NO: 23948 - DNA, 13 bp, Artificial Sequence
  Oligonucleotide for detection of SNP TSC0005544
tcacatcactcat

SEQ ID NO: 23949 - DNA, 13 bp, Artificial Sequence
  Oligonucleotide for detection of SNP TSC0005544
ttatatgatttat

SEQ ID NO: 23950 - DNA, 13 bp, Artificial Sequence
  Oligonucleotide for detection of SNP TSC0005544
ataaatcatataa

SEQ ID NO: 23951 - DNA, 13 bp, Artificial Sequence
  Oligonucleotide for detection of SNP TSC0005544
ttatattatttat

SEQ ID NO: 23952 - DNA, 13 bp, Artificial Sequence
  Oligonucleotide for detection of SNP TSC0005544
ataaataatataa

SEQ ID NO: 23953 - DNA, 13 bp, Artificial Sequence
  Oligonucleotide for detection of SNP TSC0005549
tatggaatagaay

SEQ ID NO: 23954 - DNA, 13 bp, Artificial Sequence
  Oligonucleotide for detection of SNP TSC0005549
rttctattccata

SEQ ID NO: 23955 - DNA, 13 bp, Artificial Sequence
  Oligonucleotide for detection of SNP TSC0005549
tatggattagaay

SEQ ID NO: 23956 - DNA, 13 bp, Artificial Sequence
  Oligonucleotide for detection of SNP TSC0005549
rttctaatccata

SEQ ID NO: 23957 - DNA, 13 bp, Artificial Sequence
  Oligonucleotide for detection of SNP TSC0005552
agatgaaattttg

SEQ ID NO: 23958 - DNA, 13 bp, Artificial Sequence
  Oligonucleotide for detection of SNP TSC0005552
caaaatttcatct

SEQ ID NO: 23959 - DNA, 13 bp, Artificial Sequence
  Oligonucleotide for detection of SNP TSC0005552
agatgagattttg

SEQ ID NO: 23960 - DNA, 13 bp, Artificial Sequence
  Oligonucleotide for detection of SNP TSC0005552
caaaatctcatct

SEQ ID NO: 23961 - DNA, 13 bp, Artificial Sequence
  Oligonucleotide for detection of SNP TSC0005553
atttgttttggty

SEQ ID NO: 23962 - DNA, 13 bp, Artificial Sequence
  Oligonucleotide for detection of SNP TSC0005553
raccaaaacaaat

SEQ ID NO: 23963 - DNA, 13 bp, Artificial Sequence
  Oligonucleotide for detection of SNP TSC0005553
atttgtgttggty

SEQ ID NO: 23964 - DNA, 13 bp, Artificial Sequence
  Oligonucleotide for detection of SNP TSC0005553
raccaacacaaat

SEQ ID NO: 23965 - DNA, 13 bp, Artificial Sequence
  Oligonucleotide for detection of SNP TSC0005553
attcgttttggty

SEQ ID NO: 23966 - DNA, 13 bp, Artificial Sequence
  Oligonucleotide for detection of SNP TSC0005553
raccaaaacgaat

SEQ ID NO: 23967 - DNA, 13 bp, Artificial Sequence
  Oligonucleotide for detection of SNP TSC0005553
attcgtgttggty

SEQ ID NO: 23968 - DNA, 13 bp, Artificial Sequence
  Oligonucleotide for detection of SNP TSC0005553
raccaacacgaat

SEQ ID NO: 23969 - DNA, 13 bp, Artificial Sequence
  Oligonucleotide for detection of SNP TSC0005553
atttgcgttggty

SEQ ID NO: 23970 - DNA, 13 bp, Artificial Sequence
  Oligonucleotide for detection of SNP TSC0005553
raccaacgcaaat

SEQ ID NO: 23971 - DNA, 13 bp, Artificial Sequence
  Oligonucleotide for detection of SNP TSC0005553
attcgcgttggty

SEQ ID NO: 23972 - DNA, 13 bp, Artificial Sequence
  Oligonucleotide for detection of SNP TSC0005553
raccaacgcgaat

SEQ ID NO: 23973 - DNA, 13 bp, Artificial Sequence
  Oligonucleotide for detection of SNP TSC0005553
ggttaaggtgggt

SEQ ID NO: 23974 - DNA, 13 bp, Artificial Sequence
  Oligonucleotide for detection of SNP TSC0005553
acccaccttaacc

SEQ ID NO: 23975 - DNA, 13 bp, Artificial Sequence
  Oligonucleotide for detection of SNP TSC0005553
ggttaatgtgggt

SEQ ID NO: 23976 - DNA, 13 bp, Artificial Sequence
  Oligonucleotide for detection of SNP TSC0005553
acccacattaacc

SEQ ID NO: 23977 - DNA, 13 bp, Artificial Sequence
  Oligonucleotide for detection of SNP TSC0005553
ggttaaggcgggt

SEQ ID NO: 23978 - DNA, 13 bp, Artificial Sequence
  Oligonucleotide for detection of SNP TSC0005553
acccgccttaacc

SEQ ID NO: 23979 - DNA, 13 bp, Artificial Sequence
  Oligonucleotide for detection of SNP TSC0005553
ggttaacgtgggt

SEQ ID NO: 23980 - DNA, 13 bp, Artificial Sequence
  Oligonucleotide for detection of SNP TSC0005553
acccacgttaacc

SEQ ID NO: 23981 - DNA, 13 bp, Artificial Sequence
  Oligonucleotide for detection of SNP TSC0005553
ggttaatgcgggt

SEQ ID NO: 23982 - DNA, 13 bp, Artificial Sequence
  Oligonucleotide for detection of SNP TSC0005553
acccgcattaacc

SEQ ID NO: 23983 - DNA, 13 bp, Artificial Sequence
  Oligonucleotide for detection of SNP TSC0005553
ggttaacgcgggt

SEQ ID NO: 23984 - DNA, 13 bp, Artificial Sequence
  Oligonucleotide for detection of SNP TSC0005553
acccgcgttaacc

SEQ ID NO: 23985 - DNA, 13 bp, Artificial Sequence
  Oligonucleotide for detection of SNP TSC0005554
aggtgggtagaty

SEQ ID NO: 23986 - DNA, 13 bp, Artificial Sequence
  Oligonucleotide for detection of SNP TSC0005554
ratctacccacct

SEQ ID NO: 23987 - DNA, 13 bp, Artificial Sequence
  Oligonucleotide for detection of SNP TSC0005554
aggtggatagaty

SEQ ID NO: 23988 - DNA, 13 bp, Artificial Sequence
  Oligonucleotide for detection of SNP TSC0005554
ratctatccacct

SEQ ID NO: 23989 - DNA, 13 bp, Artificial Sequence
  Oligonucleotide for detection of SNP TSC0005555
agtggttattttt

SEQ ID NO: 23990 - DNA, 13 bp, Artificial Sequence
  Oligonucleotide for detection of SNP TSC0005555
aaaaataaccact

SEQ ID NO: 23991 - DNA, 13 bp, Artificial Sequence
  Oligonucleotide for detection of SNP TSC0005555
agtggtgattttt

SEQ ID NO: 23992 - DNA, 13 bp, Artificial Sequence
  Oligonucleotide for detection of SNP TSC0005555
aaaaatcaccact

SEQ ID NO: 23993 - DNA, 13 bp, Artificial Sequence
  Oligonucleotide for detection of SNP TSC0005555
agtggcgattttt

SEQ ID NO: 23994 - DNA, 13 bp, Artificial Sequence
  Oligonucleotide for detection of SNP TSC0005555
aaaaatcgccact

SEQ ID NO: 23995 - DNA, 13 bp, Artificial Sequence
  Oligonucleotide for detection of SNP TSC0005555
agagatggttatt

SEQ ID NO: 23996 - DNA, 13 bp, Artificial Sequence
  Oligonucleotide for detection of SNP TSC0005555
aataaccatctct

SEQ ID NO: 23997 - DNA, 13 bp, Artificial Sequence
  Oligonucleotide for detection of SNP TSC0005555
agagattgttatt

SEQ ID NO: 23998 - DNA, 13 bp, Artificial Sequence
  Oligonucleotide for detection of SNP TSC0005555
aataacaatctct

SEQ ID NO: 23999 - DNA, 13 bp, Artificial Sequence
  Oligonucleotide for detection of SNP TSC0005555
agagatcgttatt

SEQ ID NO: 24000 - DNA, 13 bp, Artificial Sequence
  Oligonucleotide for detection of SNP TSC0005555
aataacgatctct

SEQ ID NO: 24001 - DNA, 13 bp, Artificial Sequence
  Oligonucleotide for detection of SNP TSC0005557
tattatatttggy

SEQ ID NO: 24002 - DNA, 13 bp, Artificial Sequence
  Oligonucleotide for detection of SNP TSC0005557
rccaaatataata

SEQ ID NO: 24003 - DNA, 13 bp, Artificial Sequence
  Oligonucleotide for detection of SNP TSC0005557
tattatgtttggy

SEQ ID NO: 24004 - DNA, 13 bp, Artificial Sequence
  Oligonucleotide for detection of SNP TSC0005557
rccaaacataata

SEQ ID NO: 24005 - DNA, 13 bp, Artificial Sequence
  Oligonucleotide for detection of SNP TSC0005557
tattacgtttggy

SEQ ID NO: 24006 - DNA, 13 bp, Artificial Sequence
  Oligonucleotide for detection of SNP TSC0005557
rccaaacgtaata

SEQ ID NO: 24007 - DNA, 13 bp, Artificial Sequence
  Oligonucleotide for detection of SNP TSC0005557
gttaggtgtggtg

SEQ ID NO: 24008 - DNA, 13 bp, Artificial Sequence
  Oligonucleotide for detection of SNP TSC0005557
caccacacctaac

SEQ ID NO: 24009 - DNA, 13 bp, Artificial Sequence
  Oligonucleotide for detection of SNP TSC0005557
gttaggcgtggtg

SEQ ID NO: 24010 - DNA, 13 bp, Artificial Sequence
  Oligonucleotide for detection of SNP TSC0005557
caccacgcctaac

SEQ ID NO: 24011 - DNA, 13 bp, Artificial Sequence
  Oligonucleotide for detection of SNP TSC0005558
gttgaggtatgag

SEQ ID NO: 24012 - DNA, 13 bp, Artificial Sequence
  Oligonucleotide for detection of SNP TSC0005558
ctcatacctcaac

SEQ ID NO: 24013 - DNA, 13 bp, Artificial Sequence
  Oligonucleotide for detection of SNP TSC0005558
gttgagatatgag

SEQ ID NO: 24014 - DNA, 13 bp, Artificial Sequence
  Oligonucleotide for detection of SNP TSC0005558
ctcatatctcaac

SEQ ID NO: 24015 - DNA, 13 bp, Artificial Sequence
  Oligonucleotide for detection of SNP TSC0005572
gtgttattttatt

SEQ ID NO: 24016 - DNA, 13 bp, Artificial Sequence
  Oligonucleotide for detection of SNP TSC0005572
aataaaataacac

SEQ ID NO: 24017 - DNA, 13 bp, Artificial Sequence
  Oligonucleotide for detection of SNP TSC0005572
gtgttagtttatt

SEQ ID NO: 24018 - DNA, 13 bp, Artificial Sequence
  Oligonucleotide for detection of SNP TSC0005572
aataaactaacac

SEQ ID NO: 24019 - DNA, 13 bp, Artificial Sequence
  Oligonucleotide for detection of SNP TSC0005572
agtaaggtaatay

SEQ ID NO: 24020 - DNA, 13 bp, Artificial Sequence
  Oligonucleotide for detection of SNP TSC0005572
rtattaccttact

SEQ ID NO: 24021 - DNA, 13 bp, Artificial Sequence
  Oligonucleotide for detection of SNP TSC0005572
agtaagttaatay

SEQ ID NO: 24022 - DNA, 13 bp, Artificial Sequence
  Oligonucleotide for detection of SNP TSC0005572
rtattaacttact

SEQ ID NO: 24023 - DNA, 13 bp, Artificial Sequence
  Oligonucleotide for detection of SNP TSC0005573
tttttttgggaat

SEQ ID NO: 24024 - DNA, 13 bp, Artificial Sequence
  Oligonucleotide for detection of SNP TSC0005573
attcccaaaaaaa

SEQ ID NO: 24025 - DNA, 13 bp, Artificial Sequence
  Oligonucleotide for detection of SNP TSC0005573
ttttttcgggaat

SEQ ID NO: 24026 - DNA, 13 bp, Artificial Sequence
  Oligonucleotide for detection of SNP TSC0005573
attcccgaaaaaa

SEQ ID NO: 24027 - DNA, 13 bp, Artificial Sequence
  Oligonucleotide for detection of SNP TSC0005573
atttttggagaaa

SEQ ID NO: 24028 - DNA, 13 bp, Artificial Sequence
  Oligonucleotide for detection of SNP TSC0005573
tttctccaaaaat

SEQ ID NO: 24029 - DNA, 13 bp, Artificial Sequence
  Oligonucleotide for detection of SNP TSC0005573
atttttagagaaa

SEQ ID NO: 24030 - DNA, 13 bp, Artificial Sequence
  Oligonucleotide for detection of SNP TSC0005573
tttctctaaaaat

SEQ ID NO: 24031 - DNA, 13 bp, Artificial Sequence
  Oligonucleotide for detection of SNP TSC0005573
attttcggagaaa

SEQ ID NO: 24032 - DNA, 13 bp, Artificial Sequence
  Oligonucleotide for detection of SNP TSC0005573
tttctccgaaaat

SEQ ID NO: 24033 - DNA, 13 bp, Artificial Sequence
  Oligonucleotide for detection of SNP TSC0005574
agtttgaaatttt

SEQ ID NO: 24034 - DNA, 13 bp, Artificial Sequence
  Oligonucleotide for detection of SNP TSC0005574
aaaatttcaaact

SEQ ID NO: 24035 - DNA, 13 bp, Artificial Sequence
  Oligonucleotide for detection of SNP TSC0005574
agtttggaatttt

SEQ ID NO: 24036 - DNA, 13 bp, Artificial Sequence
  Oligonucleotide for detection of SNP TSC0005574
aaaattccaaact

SEQ ID NO: 24037 - DNA, 13 bp, Artificial Sequence
  Oligonucleotide for detection of SNP TSC0005575
tttttgggttagy

SEQ ID NO: 24038 - DNA, 13 bp, Artificial Sequence
  Oligonucleotide for detection of SNP TSC0005575
rctaacccaaaaa

SEQ ID NO: 24039 - DNA, 13 bp, Artificial Sequence
  Oligonucleotide for detection of SNP TSC0005575
tttttgtgttagy

SEQ ID NO: 24040 - DNA, 13 bp, Artificial Sequence
  Oligonucleotide for detection of SNP TSC0005575
rctaacacaaaaa

SEQ ID NO: 24041 - DNA, 13 bp, Artificial Sequence
  Oligonucleotide for detection of SNP TSC0005575
gttaatttaagaa

SEQ ID NO: 24042 - DNA, 13 bp, Artificial Sequence
  Oligonucleotide for detection of SNP TSC0005575
ttcttaaattaac

SEQ ID NO: 24043 - DNA, 13 bp, Artificial Sequence
  Oligonucleotide for detection of SNP TSC0005575
gttaatataagaa

SEQ ID NO: 24044 - DNA, 13 bp, Artificial Sequence
  Oligonucleotide for detection of SNP TSC0005575
ttcttatattaac

SEQ ID NO: 24045 - DNA, 13 bp, Artificial Sequence
  Oligonucleotide for detection of SNP TSC0005589
tgaatttttgaty

SEQ ID NO: 24046 - DNA, 13 bp, Artificial Sequence
  Oligonucleotide for detection of SNP TSC0005589
ratcaaaaattca

SEQ ID NO: 24047 - DNA, 13 bp, Artificial Sequence
  Oligonucleotide for detection of SNP TSC0005589
tgaattgttgaty

SEQ ID NO: 24048 - DNA, 13 bp, Artificial Sequence
  Oligonucleotide for detection of SNP TSC0005589
ratcaacaattca

SEQ ID NO: 24049 - DNA, 13 bp, Artificial Sequence
  Oligonucleotide for detection of SNP TSC0005589
cgaatttttgaty

SEQ ID NO: 24050 - DNA, 13 bp, Artificial Sequence
  Oligonucleotide for detection of SNP TSC0005589
ratcaaaaattcg

SEQ ID NO: 24051 - DNA, 13 bp, Artificial Sequence
  Oligonucleotide for detection of SNP TSC0005589
cgaattgttgaty

SEQ ID NO: 24052 - DNA, 13 bp, Artificial Sequence
  Oligonucleotide for detection of SNP TSC0005589
ratcaacaattcg

SEQ ID NO: 24053 - DNA, 13 bp, Artificial Sequence
  Oligonucleotide for detection of SNP TSC0005589
ggttagtagtttg

SEQ ID NO: 24054 - DNA, 13 bp, Artificial Sequence
  Oligonucleotide for detection of SNP TSC0005589
caaactactaacc

SEQ ID NO: 24055 - DNA, 13 bp, Artificial Sequence
  Oligonucleotide for detection of SNP TSC0005589
ggttagtagttcg

SEQ ID NO: 24056 - DNA, 13 bp, Artificial Sequence
  Oligonucleotide for detection of SNP TSC0005589
cgaactactaacc

SEQ ID NO: 24057 - DNA, 13 bp, Artificial Sequence
  Oligonucleotide for detection of SNP TSC0005590
ttggttagttttt

SEQ ID NO: 24058 - DNA, 13 bp, Artificial Sequence
  Oligonucleotide for detection of SNP TSC0005590
aaaaactaaccaa

SEQ ID NO: 24059 - DNA, 13 bp, Artificial Sequence
  Oligonucleotide for detection of SNP TSC0005590
ttggttggttttt

SEQ ID NO: 24060 - DNA, 13 bp, Artificial Sequence
  Oligonucleotide for detection of SNP TSC0005590
aaaaaccaaccaa

SEQ ID NO: 24061 - DNA, 13 bp, Artificial Sequence
  Oligonucleotide for detection of SNP TSC0005591
tattttattttat

SEQ ID NO: 24062 - DNA, 13 bp, Artificial Sequence
  Oligonucleotide for detection of SNP TSC0005591
ataaaataaaata

SEQ ID NO: 24063 - DNA, 13 bp, Artificial Sequence
  Oligonucleotide for detection of SNP TSC0005591
tattttgttttat

SEQ ID NO: 24064 - DNA, 13 bp, Artificial Sequence
  Oligonucleotide for detection of SNP TSC0005591
ataaaacaaaata

SEQ ID NO: 24065 - DNA, 13 bp, Artificial Sequence
  Oligonucleotide for detection of SNP TSC0005593
ttagagaggtttg

SEQ ID NO: 24066 - DNA, 13 bp, Artificial Sequence
  Oligonucleotide for detection of SNP TSC0005593
caaacctctctaa

SEQ ID NO: 24067 - DNA, 13 bp, Artificial Sequence
  Oligonucleotide for detection of SNP TSC0005593
ttagagtggtttg

SEQ ID NO: 24068 - DNA, 13 bp, Artificial Sequence
  Oligonucleotide for detection of SNP TSC0005593
caaaccactctaa

SEQ ID NO: 24069 - DNA, 13 bp, Artificial Sequence
  Oligonucleotide for detection of SNP TSC0005593
taggtttttttag

SEQ ID NO: 24070 - DNA, 13 bp, Artificial Sequence
  Oligonucleotide for detection of SNP TSC0005593
ctaaaaaaaccta

SEQ ID NO: 24071 - DNA, 13 bp, Artificial Sequence
  Oligonucleotide for detection of SNP TSC0005593
taggttattttag

SEQ ID NO: 24072 - DNA, 13 bp, Artificial Sequence
  Oligonucleotide for detection of SNP TSC0005593
ctaaaataaccta

SEQ ID NO: 24073 - DNA, 13 bp, Artificial Sequence
  Oligonucleotide for detection of SNP TSC0005594
gtgaggattttag

SEQ ID NO: 24074 - DNA, 13 bp, Artificial Sequence
  Oligonucleotide for detection of SNP TSC0005594
ctaaaatcctcac

SEQ ID NO: 24075 - DNA, 13 bp, Artificial Sequence
  Oligonucleotide for detection of SNP TSC0005594
gtgaggtttttag

SEQ ID NO: 24076 - DNA, 13 bp, Artificial Sequence
  Oligonucleotide for detection of SNP TSC0005594
ctaaaaacctcac

SEQ ID NO: 24077 - DNA, 13 bp, Artificial Sequence
  Oligonucleotide for detection of SNP TSC0005594
ttgggatttttay

SEQ ID NO: 24078 - DNA, 13 bp, Artificial Sequence
  Oligonucleotide for detection of SNP TSC0005594
rtaaaaatcccaa

SEQ ID NO: 24079 - DNA, 13 bp, Artificial Sequence
  Oligonucleotide for detection of SNP TSC0005594
ttgggagttttay

SEQ ID NO: 24080 - DNA, 13 bp, Artificial Sequence
  Oligonucleotide for detection of SNP TSC0005594
rtaaaactcccaa

SEQ ID NO: 24081 - DNA, 13 bp, Artificial Sequence
  Oligonucleotide for detection of SNP TSC0005595
tatgtgatttttt

SEQ ID NO: 24082 - DNA, 13 bp, Artificial Sequence
  Oligonucleotide for detection of SNP TSC0005595
aaaaaatcacata

SEQ ID NO: 24083 - DNA, 13 bp, Artificial Sequence
  Oligonucleotide for detection of SNP TSC0005595
tatgtggtttttt

SEQ ID NO: 24084 - DNA, 13 bp, Artificial Sequence
  Oligonucleotide for detection of SNP TSC0005595
aaaaaaccacata

SEQ ID NO: 24085 - DNA, 13 bp, Artificial Sequence
  Oligonucleotide for detection of SNP TSC0005596
gaaagaattaaty

SEQ ID NO: 24086 - DNA, 13 bp, Artificial Sequence
  Oligonucleotide for detection of SNP TSC0005596
rattaattctttc

SEQ ID NO: 24087 - DNA, 13 bp, Artificial Sequence
  Oligonucleotide for detection of SNP TSC0005596
gaaagatttaaty

SEQ ID NO: 24088 - DNA, 13 bp, Artificial Sequence
  Oligonucleotide for detection of SNP TSC0005596
rattaaatctttc

SEQ ID NO: 24089 - DNA, 13 bp, Artificial Sequence
  Oligonucleotide for detection of SNP TSC0005596
gattaatttttty

SEQ ID NO: 24090 - DNA, 13 bp, Artificial Sequence
  Oligonucleotide for detection of SNP TSC0005596
raaaaaattaatc

SEQ ID NO: 24091 - DNA, 13 bp, Artificial Sequence
  Oligonucleotide for detection of SNP TSC0005596
gattaagttttty

SEQ ID NO: 24092 - DNA, 13 bp, Artificial Sequence
  Oligonucleotide for detection of SNP TSC0005596
raaaaacttaatc

SEQ ID NO: 24093 - DNA, 13 bp, Artificial Sequence
  Oligonucleotide for detection of SNP TSC0005603
ggttgtattgtgy

SEQ ID NO: 24094 - DNA, 13 bp, Artificial Sequence
  Oligonucleotide for detection of SNP TSC0005603
rcacaatacaacc

SEQ ID NO: 24095 - DNA, 13 bp, Artificial Sequence
  Oligonucleotide for detection of SNP TSC0005603
ggttgtgttgtgy

SEQ ID NO: 24096 - DNA, 13 bp, Artificial Sequence
  Oligonucleotide for detection of SNP TSC0005603
rcacaacacaacc

SEQ ID NO: 24097 - DNA, 13 bp, Artificial Sequence
  Oligonucleotide for detection of SNP TSC0005603
ggttgcgttgtgy

SEQ ID NO: 24098 - DNA, 13 bp, Artificial Sequence
  Oligonucleotide for detection of SNP TSC0005603
rcacaacgcaacc

SEQ ID NO: 24099 - DNA, 13 bp, Artificial Sequence
  Oligonucleotide for detection of SNP TSC0005603
gtataatgtagty

SEQ ID NO: 24100 - DNA, 13 bp, Artificial Sequence
  Oligonucleotide for detection of SNP TSC0005603
ractacattatac

SEQ ID NO: 24101 - DNA, 13 bp, Artificial Sequence
  Oligonucleotide for detection of SNP TSC0005603
gtataacgtagty

SEQ ID NO: 24102 - DNA, 13 bp, Artificial Sequence
  Oligonucleotide for detection of SNP TSC0005603
ractacgttatac

SEQ ID NO: 24103 - DNA, 13 bp, Artificial Sequence
  Oligonucleotide for detection of SNP TSC0005613
tatgtggatgtta

SEQ ID NO: 24104 - DNA, 13 bp, Artificial Sequence
  Oligonucleotide for detection of SNP TSC0005613
taacatccacata

SEQ ID NO: 24105 - DNA, 13 bp, Artificial Sequence
  Oligonucleotide for detection of SNP TSC0005613
tatgtgtatgtta

SEQ ID NO: 24106 - DNA, 13 bp, Artificial Sequence
  Oligonucleotide for detection of SNP TSC0005613
taacatacacata

SEQ ID NO: 24107 - DNA, 13 bp, Artificial Sequence
  Oligonucleotide for detection of SNP TSC0005613
tacgtggatgtta

SEQ ID NO: 24108 - DNA, 13 bp, Artificial Sequence
  Oligonucleotide for detection of SNP TSC0005613
taacatccacgta

SEQ ID NO: 24109 - DNA, 13 bp, Artificial Sequence
  Oligonucleotide for detection of SNP TSC0005613
tacgtgtatgtta

SEQ ID NO: 24110 - DNA, 13 bp, Artificial Sequence
  Oligonucleotide for detection of SNP TSC0005613
taacatacacgta

SEQ ID NO: 24111 - DNA, 13 bp, Artificial Sequence
  Oligonucleotide for detection of SNP TSC0005613
tatgtggacgtta

SEQ ID NO: 24112 - DNA, 13 bp, Artificial Sequence
  Oligonucleotide for detection of SNP TSC0005613
taacgtccacata

SEQ ID NO: 24113 - DNA, 13 bp, Artificial Sequence
  Oligonucleotide for detection of SNP TSC0005613
tatgtgtacgtta

SEQ ID NO: 24114 - DNA, 13 bp, Artificial Sequence
  Oligonucleotide for detection of SNP TSC0005613
taacgtacacata

SEQ ID NO: 24115 - DNA, 13 bp, Artificial Sequence
  Oligonucleotide for detection of SNP TSC0005613
tacgtggacgtta

SEQ ID NO: 24116 - DNA, 13 bp, Artificial Sequence
  Oligonucleotide for detection of SNP TSC0005613
taacgtccacgta

SEQ ID NO: 24117 - DNA, 13 bp, Artificial Sequence
  Oligonucleotide for detection of SNP TSC0005613
tacgtgtacgtta

SEQ ID NO: 24118 - DNA, 13 bp, Artificial Sequence
  Oligonucleotide for detection of SNP TSC0005613
taacgtacacgta

SEQ ID NO: 24119 - DNA, 13 bp, Artificial Sequence
  Oligonucleotide for detection of SNP TSC0005613
taatgtttatgta

SEQ ID NO: 24120 - DNA, 13 bp, Artificial Sequence
  Oligonucleotide for detection of SNP TSC0005613
tacataaacatta

SEQ ID NO: 24121 - DNA, 13 bp, Artificial Sequence
  Oligonucleotide for detection of SNP TSC0005613
taatgtatatgta

SEQ ID NO: 24122 - DNA, 13 bp, Artificial Sequence
  Oligonucleotide for detection of SNP TSC0005613
tacatatacatta

SEQ ID NO: 24123 - DNA, 13 bp, Artificial Sequence
  Oligonucleotide for detection of SNP TSC0005613
taacgtttatgta

SEQ ID NO: 24124 - DNA, 13 bp, Artificial Sequence
  Oligonucleotide for detection of SNP TSC0005613
tacataaacgtta

SEQ ID NO: 24125 - DNA, 13 bp, Artificial Sequence
  Oligonucleotide for detection of SNP TSC0005613
taacgtatatgta

SEQ ID NO: 24126 - DNA, 13 bp, Artificial Sequence
  Oligonucleotide for detection of SNP TSC0005613
tacatatacgtta

SEQ ID NO: 24127 - DNA, 13 bp, Artificial Sequence
  Oligonucleotide for detection of SNP TSC0005613
taatgtttacgta

SEQ ID NO: 24128 - DNA, 13 bp, Artificial Sequence
  Oligonucleotide for detection of SNP TSC0005613
tacgtaaacatta

SEQ ID NO: 24129 - DNA, 13 bp, Artificial Sequence
  Oligonucleotide for detection of SNP TSC0005613
taatgtatacgta

SEQ ID NO: 24130 - DNA, 13 bp, Artificial Sequence
  Oligonucleotide for detection of SNP TSC0005613
tacgtatacatta

SEQ ID NO: 24131 - DNA, 13 bp, Artificial Sequence
  Oligonucleotide for detection of SNP TSC0005613
taacgtttacgta

SEQ ID NO: 24132 - DNA, 13 bp, Artificial Sequence
  Oligonucleotide for detection of SNP TSC0005613
tacgtaaacgtta

SEQ ID NO: 24133 - DNA, 13 bp, Artificial Sequence
  Oligonucleotide for detection of SNP TSC0005613
taacgtatacgta

SEQ ID NO: 24134 - DNA, 13 bp, Artificial Sequence
  Oligonucleotide for detection of SNP TSC0005613
tacgtatacgtta

SEQ ID NO: 24135 - DNA, 13 bp, Artificial Sequence
  Oligonucleotide for detection of SNP TSC0005636
gaatgaattaata

SEQ ID NO: 24136 - DNA, 13 bp, Artificial Sequence
  Oligonucleotide for detection of SNP TSC0005636
tattaattcattc

SEQ ID NO: 24137 - DNA, 13 bp, Artificial Sequence
  Oligonucleotide for detection of SNP TSC0005636
gaatgagttaata

SEQ ID NO: 24138 - DNA, 13 bp, Artificial Sequence
  Oligonucleotide for detection of SNP TSC0005636
tattaactcattc

SEQ ID NO: 24139 - DNA, 13 bp, Artificial Sequence
  Oligonucleotide for detection of SNP TSC0005637
aattttatgttga

SEQ ID NO: 24140 - DNA, 13 bp, Artificial Sequence
  Oligonucleotide for detection of SNP TSC0005637
tcaacataaaatt

SEQ ID NO: 24141 - DNA, 13 bp, Artificial Sequence
  Oligonucleotide for detection of SNP TSC0005637
aattttttgttga

SEQ ID NO: 24142 - DNA, 13 bp, Artificial Sequence
  Oligonucleotide for detection of SNP TSC0005637
tcaacaaaaaatt

SEQ ID NO: 24143 - DNA, 13 bp, Artificial Sequence
  Oligonucleotide for detection of SNP TSC0005640
tttagagtgtagt

SEQ ID NO: 24144 - DNA, 13 bp, Artificial Sequence
  Oligonucleotide for detection of SNP TSC0005640
actacactctaaa

SEQ ID NO: 24145 - DNA, 13 bp, Artificial Sequence
  Oligonucleotide for detection of SNP TSC0005640
tttagaatgtagt

SEQ ID NO: 24146 - DNA, 13 bp, Artificial Sequence
  Oligonucleotide for detection of SNP TSC0005640
actacattctaaa

SEQ ID NO: 24147 - DNA, 13 bp, Artificial Sequence
  Oligonucleotide for detection of SNP TSC0005640
tttagagcgtagt

SEQ ID NO: 24148 - DNA, 13 bp, Artificial Sequence
  Oligonucleotide for detection of SNP TSC0005640
actacgctctaaa

SEQ ID NO: 24149 - DNA, 13 bp, Artificial Sequence
  Oligonucleotide for detection of SNP TSC0005640
tttagaacgtagt

SEQ ID NO: 24150 - DNA, 13 bp, Artificial Sequence
  Oligonucleotide for detection of SNP TSC0005640
actacgttctaaa

SEQ ID NO: 24151 - DNA, 13 bp, Artificial Sequence
  Oligonucleotide for detection of SNP TSC0005644
tattagatatttt

SEQ ID NO: 24152 - DNA, 13 bp, Artificial Sequence
  Oligonucleotide for detection of SNP TSC0005644
aaaatatctaata

SEQ ID NO: 24153 - DNA, 13 bp, Artificial Sequence
  Oligonucleotide for detection of SNP TSC0005644
tattaggtatttt

SEQ ID NO: 24154 - DNA, 13 bp, Artificial Sequence
  Oligonucleotide for detection of SNP TSC0005644
aaaatacctaata

SEQ ID NO: 24155 - DNA, 13 bp, Artificial Sequence
  Oligonucleotide for detection of SNP TSC0005660
aggttgtggaata

SEQ ID NO: 24156 - DNA, 13 bp, Artificial Sequence
  Oligonucleotide for detection of SNP TSC0005660
tattccacaacct

SEQ ID NO: 24157 - DNA, 13 bp, Artificial Sequence
  Oligonucleotide for detection of SNP TSC0005660
aggttgcggaata

SEQ ID NO: 24158 - DNA, 13 bp, Artificial Sequence
  Oligonucleotide for detection of SNP TSC0005660
tattccgcaacct

SEQ ID NO: 24159 - DNA, 13 bp, Artificial Sequence
  Oligonucleotide for detection of SNP TSC0005660
tgttttgtagttt

SEQ ID NO: 24160 - DNA, 13 bp, Artificial Sequence
  Oligonucleotide for detection of SNP TSC0005660
aaactacaaaaca

SEQ ID NO: 24161 - DNA, 13 bp, Artificial Sequence
  Oligonucleotide for detection of SNP TSC0005660
tgttttatagttt

SEQ ID NO: 24162 - DNA, 13 bp, Artificial Sequence
  Oligonucleotide for detection of SNP TSC0005660
aaactataaaaca

SEQ ID NO: 24163 - DNA, 13 bp, Artificial Sequence
  Oligonucleotide for detection of SNP TSC0005660
tgtttcgtagttt

SEQ ID NO: 24164 - DNA, 13 bp, Artificial Sequence
  Oligonucleotide for detection of SNP TSC0005660
aaactacgaaaca

SEQ ID NO: 24165 - DNA, 13 bp, Artificial Sequence
  Oligonucleotide for detection of SNP TSC0005661
atgttatggtttt

SEQ ID NO: 24166 - DNA, 13 bp, Artificial Sequence
  Oligonucleotide for detection of SNP TSC0005661
aaaaccataacat

SEQ ID NO: 24167 - DNA, 13 bp, Artificial Sequence
  Oligonucleotide for detection of SNP TSC0005661
atgttacggtttt

SEQ ID NO: 24168 - DNA, 13 bp, Artificial Sequence
  Oligonucleotide for detection of SNP TSC0005661
aaaaccgtaacat

SEQ ID NO: 24169 - DNA, 13 bp, Artificial Sequence
  Oligonucleotide for detection of SNP TSC0005661
aaaattgtagtat

SEQ ID NO: 24170 - DNA, 13 bp, Artificial Sequence
  Oligonucleotide for detection of SNP TSC0005661
atactacaatttt

SEQ ID NO: 24171 - DNA, 13 bp, Artificial Sequence
  Oligonucleotide for detection of SNP TSC0005661
aaaattatagtat

SEQ ID NO: 24172 - DNA, 13 bp, Artificial Sequence
  Oligonucleotide for detection of SNP TSC0005661
atactataatttt

SEQ ID NO: 24173 - DNA, 13 bp, Artificial Sequence
  Oligonucleotide for detection of SNP TSC0005661
aaaatcgtagtat

SEQ ID NO: 24174 - DNA, 13 bp, Artificial Sequence
  Oligonucleotide for detection of SNP TSC0005661
atactacgatttt

SEQ ID NO: 24175 - DNA, 13 bp, Artificial Sequence
  Oligonucleotide for detection of SNP TSC0005672
aaatttattatag

SEQ ID NO: 24176 - DNA, 13 bp, Artificial Sequence
  Oligonucleotide for detection of SNP TSC0005672
ctataataaattt

SEQ ID NO: 24177 - DNA, 13 bp, Artificial Sequence
  Oligonucleotide for detection of SNP TSC0005672
aaatttgttatag

SEQ ID NO: 24178 - DNA, 13 bp, Artificial Sequence
  Oligonucleotide for detection of SNP TSC0005672
ctataacaaattt

SEQ ID NO: 24179 - DNA, 13 bp, Artificial Sequence
  Oligonucleotide for detection of SNP TSC0005673
ttagttattataa

SEQ ID NO: 24180 - DNA, 13 bp, Artificial Sequence
  Oligonucleotide for detection of SNP TSC0005673
ttataataactaa

SEQ ID NO: 24181 - DNA, 13 bp, Artificial Sequence
  Oligonucleotide for detection of SNP TSC0005673
ttagttgttataa

SEQ ID NO: 24182 - DNA, 13 bp, Artificial Sequence
  Oligonucleotide for detection of SNP TSC0005673
ttataacaactaa

SEQ ID NO: 24183 - DNA, 13 bp, Artificial Sequence
  Oligonucleotide for detection of SNP TSC0005673
ttagtcgttataa

SEQ ID NO: 24184 - DNA, 13 bp, Artificial Sequence
  Oligonucleotide for detection of SNP TSC0005673
ttataacgactaa

SEQ ID NO: 24185 - DNA, 13 bp, Artificial Sequence
  Oligonucleotide for detection of SNP TSC0005673
ttatggtggttag

SEQ ID NO: 24186 - DNA, 13 bp, Artificial Sequence
  Oligonucleotide for detection of SNP TSC0005673
ctaaccaccataa

SEQ ID NO: 24187 - DNA, 13 bp, Artificial Sequence
  Oligonucleotide for detection of SNP TSC0005673
ttatggcggttag

SEQ ID NO: 24188 - DNA, 13 bp, Artificial Sequence
  Oligonucleotide for detection of SNP TSC0005673
ctaaccgccataa

SEQ ID NO: 24189 - DNA, 13 bp, Artificial Sequence
  Oligonucleotide for detection of SNP TSC0005696
tttttgatttgay

SEQ ID NO: 24190 - DNA, 13 bp, Artificial Sequence
  Oligonucleotide for detection of SNP TSC0005696
rtcaaatcaaaaa

SEQ ID NO: 24191 - DNA, 13 bp, Artificial Sequence
  Oligonucleotide for detection of SNP TSC0005696
tttttgttttgay

SEQ ID NO: 24192 - DNA, 13 bp, Artificial Sequence
  Oligonucleotide for detection of SNP TSC0005696
rtcaaaacaaaaa

SEQ ID NO: 24193 - DNA, 13 bp, Artificial Sequence
  Oligonucleotide for detection of SNP TSC0005696
gttagattaaagg

SEQ ID NO: 24194 - DNA, 13 bp, Artificial Sequence
  Oligonucleotide for detection of SNP TSC0005696
cctttaatctaac

SEQ ID NO: 24195 - DNA, 13 bp, Artificial Sequence
  Oligonucleotide for detection of SNP TSC0005696
gttagaataaagg

SEQ ID NO: 24196 - DNA, 13 bp, Artificial Sequence
  Oligonucleotide for detection of SNP TSC0005696
cctttattctaac

SEQ ID NO: 24197 - DNA, 13 bp, Artificial Sequence
  Oligonucleotide for detection of SNP TSC0005697
ttgaatttgggag

SEQ ID NO: 24198 - DNA, 13 bp, Artificial Sequence
  Oligonucleotide for detection of SNP TSC0005697
ctcccaaattcaa

SEQ ID NO: 24199 - DNA, 13 bp, Artificial Sequence
  Oligonucleotide for detection of SNP TSC0005697
ttgaatgtgggag

SEQ ID NO: 24200 - DNA, 13 bp, Artificial Sequence
  Oligonucleotide for detection of SNP TSC0005697
ctcccacattcaa

SEQ ID NO: 24201 - DNA, 13 bp, Artificial Sequence
  Oligonucleotide for detection of SNP TSC0005697
tttttagatttaa

SEQ ID NO: 24202 - DNA, 13 bp, Artificial Sequence
  Oligonucleotide for detection of SNP TSC0005697
ttaaatctaaaaa

SEQ ID NO: 24203 - DNA, 13 bp, Artificial Sequence
  Oligonucleotide for detection of SNP TSC0005697
tttttatatttaa

SEQ ID NO: 24204 - DNA, 13 bp, Artificial Sequence
  Oligonucleotide for detection of SNP TSC0005697
ttaaatataaaaa

SEQ ID NO: 24205 - DNA, 13 bp, Artificial Sequence
  Oligonucleotide for detection of SNP TSC0005698
atttgtagttaga

SEQ ID NO: 24206 - DNA, 13 bp, Artificial Sequence
  Oligonucleotide for detection of SNP TSC0005698
tctaactacaaat

SEQ ID NO: 24207 - DNA, 13 bp, Artificial Sequence
  Oligonucleotide for detection of SNP TSC0005698
atttgtggttaga

SEQ ID NO: 24208 - DNA, 13 bp, Artificial Sequence
  Oligonucleotide for detection of SNP TSC0005698
tctaaccacaaat

SEQ ID NO: 24209 - DNA, 13 bp, Artificial Sequence
  Oligonucleotide for detection of SNP TSC0005698
atttgcggttaga

SEQ ID NO: 24210 - DNA, 13 bp, Artificial Sequence
  Oligonucleotide for detection of SNP TSC0005698
tctaaccgcaaat

SEQ ID NO: 24211 - DNA, 13 bp, Artificial Sequence
  Oligonucleotide for detection of SNP TSC0005698
tttgattgtaggt

SEQ ID NO: 24212 - DNA, 13 bp, Artificial Sequence
  Oligonucleotide for detection of SNP TSC0005698
acctacaatcaaa

SEQ ID NO: 24213 - DNA, 13 bp, Artificial Sequence
  Oligonucleotide for detection of SNP TSC0005698
tttgatcgtaggt

SEQ ID NO: 24214 - DNA, 13 bp, Artificial Sequence
  Oligonucleotide for detection of SNP TSC0005698
acctacgatcaaa

SEQ ID NO: 24215 - DNA, 13 bp, Artificial Sequence
  Oligonucleotide for detection of SNP TSC0005715
aggggtgattgtt

SEQ ID NO: 24216 - DNA, 13 bp, Artificial Sequence
  Oligonucleotide for detection of SNP TSC0005715
aacaatcacccct

SEQ ID NO: 24217 - DNA, 13 bp, Artificial Sequence
  Oligonucleotide for detection of SNP TSC0005715
aggggttattgtt

SEQ ID NO: 24218 - DNA, 13 bp, Artificial Sequence
  Oligonucleotide for detection of SNP TSC0005715
aacaataacccct

SEQ ID NO: 24219 - DNA, 13 bp, Artificial Sequence
  Oligonucleotide for detection of SNP TSC0005715
aggggcgattgtt

SEQ ID NO: 24220 - DNA, 13 bp, Artificial Sequence
  Oligonucleotide for detection of SNP TSC0005715
aacaatcgcccct

SEQ ID NO: 24221 - DNA, 13 bp, Artificial Sequence
  Oligonucleotide for detection of SNP TSC0005715
agtagttgttttt

SEQ ID NO: 24222 - DNA, 13 bp, Artificial Sequence
  Oligonucleotide for detection of SNP TSC0005715
aaaaacaactact

SEQ ID NO: 24223 - DNA, 13 bp, Artificial Sequence
  Oligonucleotide for detection of SNP TSC0005715
agtagtagttttt

SEQ ID NO: 24224 - DNA, 13 bp, Artificial Sequence
  Oligonucleotide for detection of SNP TSC0005715
aaaaactactact

SEQ ID NO: 24225 - DNA, 13 bp, Artificial Sequence
  Oligonucleotide for detection of SNP TSC0005715
agtagtcgttttt

SEQ ID NO: 24226 - DNA, 13 bp, Artificial Sequence
  Oligonucleotide for detection of SNP TSC0005715
aaaaacgactact

SEQ ID NO: 24227 - DNA, 13 bp, Artificial Sequence
  Oligonucleotide for detection of SNP TSC0005716
gtagattggattg

SEQ ID NO: 24228 - DNA, 13 bp, Artificial Sequence
  Oligonucleotide for detection of SNP TSC0005716
caatccaatctac

SEQ ID NO: 24229 - DNA, 13 bp, Artificial Sequence
  Oligonucleotide for detection of SNP TSC0005716
gtagatcggattg

SEQ ID NO: 24230 - DNA, 13 bp, Artificial Sequence
  Oligonucleotide for detection of SNP TSC0005716
caatccgatctac

SEQ ID NO: 24231 - DNA, 13 bp, Artificial Sequence
  Oligonucleotide for detection of SNP TSC0005716
tagtttgatttgy

SEQ ID NO: 24232 - DNA, 13 bp, Artificial Sequence
  Oligonucleotide for detection of SNP TSC0005716
rcaaatcaaacta

SEQ ID NO: 24233 - DNA, 13 bp, Artificial Sequence
  Oligonucleotide for detection of SNP TSC0005716
tagtttaatttgy

SEQ ID NO: 24234 - DNA, 13 bp, Artificial Sequence
  Oligonucleotide for detection of SNP TSC0005716
rcaaattaaacta

SEQ ID NO: 24235 - DNA, 13 bp, Artificial Sequence
  Oligonucleotide for detection of SNP TSC0005716
tagttcgatttgy

SEQ ID NO: 24236 - DNA, 13 bp, Artificial Sequence
  Oligonucleotide for detection of SNP TSC0005716
rcaaatcgaacta

SEQ ID NO: 24237 - DNA, 13 bp, Artificial Sequence
  Oligonucleotide for detection of SNP TSC0005731
gagttttgttaga

SEQ ID NO: 24238 - DNA, 13 bp, Artificial Sequence
  Oligonucleotide for detection of SNP TSC0005731
tctaacaaaactc

SEQ ID NO: 24239 - DNA, 13 bp, Artificial Sequence
  Oligonucleotide for detection of SNP TSC0005731
gagtttcgttaga

SEQ ID NO: 24240 - DNA, 13 bp, Artificial Sequence
  Oligonucleotide for detection of SNP TSC0005731
tctaacgaaactc

SEQ ID NO: 24241 - DNA, 13 bp, Artificial Sequence
  Oligonucleotide for detection of SNP TSC0005731
tttaatgagatty

SEQ ID NO: 24242 - DNA, 13 bp, Artificial Sequence
  Oligonucleotide for detection of SNP TSC0005731
raatctcattaaa

SEQ ID NO: 24243 - DNA, 13 bp, Artificial Sequence
  Oligonucleotide for detection of SNP TSC0005731
tttaataagatty

SEQ ID NO: 24244 - DNA, 13 bp, Artificial Sequence
  Oligonucleotide for detection of SNP TSC0005731
raatcttattaaa

SEQ ID NO: 24245 - DNA, 13 bp, Artificial Sequence
  Oligonucleotide for detection of SNP TSC0005731
tttaacgagatty

SEQ ID NO: 24246 - DNA, 13 bp, Artificial Sequence
  Oligonucleotide for detection of SNP TSC0005731
raatctcgttaaa

SEQ ID NO: 24247 - DNA, 13 bp, Artificial Sequence
  Oligonucleotide for detection of SNP TSC0005732
gggttaatgttag

SEQ ID NO: 24248 - DNA, 13 bp, Artificial Sequence
  Oligonucleotide for detection of SNP TSC0005732
ctaacattaaccc

SEQ ID NO: 24249 - DNA, 13 bp, Artificial Sequence
  Oligonucleotide for detection of SNP TSC0005732
gggttagtgttag

SEQ ID NO: 24250 - DNA, 13 bp, Artificial Sequence
  Oligonucleotide for detection of SNP TSC0005732
ctaacactaaccc

SEQ ID NO: 24251 - DNA, 13 bp, Artificial Sequence
  Oligonucleotide for detection of SNP TSC0005733
tttatggtggtta

SEQ ID NO: 24252 - DNA, 13 bp, Artificial Sequence
  Oligonucleotide for detection of SNP TSC0005733
taaccaccataaa

SEQ ID NO: 24253 - DNA, 13 bp, Artificial Sequence
  Oligonucleotide for detection of SNP TSC0005733
tttatgatggtta

SEQ ID NO: 24254 - DNA, 13 bp, Artificial Sequence
  Oligonucleotide for detection of SNP TSC0005733
taaccatcataaa

SEQ ID NO: 24255 - DNA, 13 bp, Artificial Sequence
  Oligonucleotide for detection of SNP TSC0005733
tttacggtggtta

SEQ ID NO: 24256 - DNA, 13 bp, Artificial Sequence
  Oligonucleotide for detection of SNP TSC0005733
taaccaccgtaaa

SEQ ID NO: 24257 - DNA, 13 bp, Artificial Sequence
  Oligonucleotide for detection of SNP TSC0005733
tttacgatggtta

SEQ ID NO: 24258 - DNA, 13 bp, Artificial Sequence
  Oligonucleotide for detection of SNP TSC0005733
taaccatcgtaaa

SEQ ID NO: 24259 - DNA, 13 bp, Artificial Sequence
  Oligonucleotide for detection of SNP TSC0005734
tttttaatattta

SEQ ID NO: 24260 - DNA, 13 bp, Artificial Sequence
  Oligonucleotide for detection of SNP TSC0005734
taaatattaaaaa

SEQ ID NO: 24261 - DNA, 13 bp, Artificial Sequence
  Oligonucleotide for detection of SNP TSC0005734
tttttagtattta

SEQ ID NO: 24262 - DNA, 13 bp, Artificial Sequence
  Oligonucleotide for detection of SNP TSC0005734
taaatactaaaaa

SEQ ID NO: 24263 - DNA, 13 bp, Artificial Sequence
  Oligonucleotide for detection of SNP TSC0005739
gagattgtgtaty

SEQ ID NO: 24264 - DNA, 13 bp, Artificial Sequence
  Oligonucleotide for detection of SNP TSC0005739
ratacacaatctc

SEQ ID NO: 24265 - DNA, 13 bp, Artificial Sequence
  Oligonucleotide for detection of SNP TSC0005739
gagattatgtaty

SEQ ID NO: 24266 - DNA, 13 bp, Artificial Sequence
  Oligonucleotide for detection of SNP TSC0005739
ratacataatctc

SEQ ID NO: 24267 - DNA, 13 bp, Artificial Sequence
  Oligonucleotide for detection of SNP TSC0005739
gagatcgtgtaty

SEQ ID NO: 24268 - DNA, 13 bp, Artificial Sequence
  Oligonucleotide for detection of SNP TSC0005739
ratacacgatctc

SEQ ID NO: 24269 - DNA, 13 bp, Artificial Sequence
  Oligonucleotide for detection of SNP TSC0005744
aagtggataatay

SEQ ID NO: 24270 - DNA, 13 bp, Artificial Sequence
  Oligonucleotide for detection of SNP TSC0005744
rtattatccactt

SEQ ID NO: 24271 - DNA, 13 bp, Artificial Sequence
  Oligonucleotide for detection of SNP TSC0005744
aagtgggtaatay

SEQ ID NO: 24272 - DNA, 13 bp, Artificial Sequence
  Oligonucleotide for detection of SNP TSC0005744
rtattacccactt

SEQ ID NO: 24273 - DNA, 13 bp, Artificial Sequence
  Oligonucleotide for detection of SNP TSC0005765
aaatttgttgtgy

SEQ ID NO: 24274 - DNA, 13 bp, Artificial Sequence
  Oligonucleotide for detection of SNP TSC0005765
rcacaacaaattt

SEQ ID NO: 24275 - DNA, 13 bp, Artificial Sequence
  Oligonucleotide for detection of SNP TSC0005765
aaattttttgtgy

SEQ ID NO: 24276 - DNA, 13 bp, Artificial Sequence
  Oligonucleotide for detection of SNP TSC0005765
rcacaaaaaattt

SEQ ID NO: 24277 - DNA, 13 bp, Artificial Sequence
  Oligonucleotide for detection of SNP TSC0005765
aaatttgtcgtgy

SEQ ID NO: 24278 - DNA, 13 bp, Artificial Sequence
  Oligonucleotide for detection of SNP TSC0005765
rcacgacaaattt

SEQ ID NO: 24279 - DNA, 13 bp, Artificial Sequence
  Oligonucleotide for detection of SNP TSC0005765
aaatttttcgtgy

SEQ ID NO: 24280 - DNA, 13 bp, Artificial Sequence
  Oligonucleotide for detection of SNP TSC0005765
rcacgaaaaattt

SEQ ID NO: 24281 - DNA, 13 bp, Artificial Sequence
  Oligonucleotide for detection of SNP TSC0005765
gtatgatagattt

SEQ ID NO: 24282 - DNA, 13 bp, Artificial Sequence
  Oligonucleotide for detection of SNP TSC0005765
aaatctatcatac

SEQ ID NO: 24283 - DNA, 13 bp, Artificial Sequence
  Oligonucleotide for detection of SNP TSC0005765
gtatgaaagattt

SEQ ID NO: 24284 - DNA, 13 bp, Artificial Sequence
  Oligonucleotide for detection of SNP TSC0005765
aaatctttcatac

SEQ ID NO: 24285 - DNA, 13 bp, Artificial Sequence
  Oligonucleotide for detection of SNP TSC0005765
gtacgatagattt

SEQ ID NO: 24286 - DNA, 13 bp, Artificial Sequence
  Oligonucleotide for detection of SNP TSC0005765
aaatctatcgtac

SEQ ID NO: 24287 - DNA, 13 bp, Artificial Sequence
  Oligonucleotide for detection of SNP TSC0005765
gtacgaaagattt

SEQ ID NO: 24288 - DNA, 13 bp, Artificial Sequence
  Oligonucleotide for detection of SNP TSC0005765
aaatctttcgtac

SEQ ID NO: 24289 - DNA, 13 bp, Artificial Sequence
  Oligonucleotide for detection of SNP TSC0005767
tttaggatggggy

SEQ ID NO: 24290 - DNA, 13 bp, Artificial Sequence
  Oligonucleotide for detection of SNP TSC0005767
rccccatcctaaa

SEQ ID NO: 24291 - DNA, 13 bp, Artificial Sequence
  Oligonucleotide for detection of SNP TSC0005767
tttaggttggggy

SEQ ID NO: 24292 - DNA, 13 bp, Artificial Sequence
  Oligonucleotide for detection of SNP TSC0005767
rccccaacctaaa

SEQ ID NO: 24293 - DNA, 13 bp, Artificial Sequence
  Oligonucleotide for detection of SNP TSC0005767
gttttattttggg

SEQ ID NO: 24294 - DNA, 13 bp, Artificial Sequence
  Oligonucleotide for detection of SNP TSC0005767
cccaaaataaaac

SEQ ID NO: 24295 - DNA, 13 bp, Artificial Sequence
  Oligonucleotide for detection of SNP TSC0005767
gttttaatttggg

SEQ ID NO: 24296 - DNA, 13 bp, Artificial Sequence
  Oligonucleotide for detection of SNP TSC0005767
cccaaattaaaac

SEQ ID NO: 24297 - DNA, 13 bp, Artificial Sequence
  Oligonucleotide for detection of SNP TSC0005772
tgtgagagttaty

SEQ ID NO: 24298 - DNA, 13 bp, Artificial Sequence
  Oligonucleotide for detection of SNP TSC0005772
rataactctcaca

SEQ ID NO: 24299 - DNA, 13 bp, Artificial Sequence
  Oligonucleotide for detection of SNP TSC0005772
tgtgagggttaty

SEQ ID NO: 24300 - DNA, 13 bp, Artificial Sequence
  Oligonucleotide for detection of SNP TSC0005772
rataaccctcaca

SEQ ID NO: 24301 - DNA, 13 bp, Artificial Sequence
  Oligonucleotide for detection of SNP TSC0005777
taatatgaatgat

SEQ ID NO: 24302 - DNA, 13 bp, Artificial Sequence
  Oligonucleotide for detection of SNP TSC0005777
atcattcatatta

SEQ ID NO: 24303 - DNA, 13 bp, Artificial Sequence
  Oligonucleotide for detection of SNP TSC0005777
taatataaatgat

SEQ ID NO: 24304 - DNA, 13 bp, Artificial Sequence
  Oligonucleotide for detection of SNP TSC0005777
atcatttatatta

SEQ ID NO: 24305 - DNA, 13 bp, Artificial Sequence
  Oligonucleotide for detection of SNP TSC0005778
gtttataagtgag

SEQ ID NO: 24306 - DNA, 13 bp, Artificial Sequence
  Oligonucleotide for detection of SNP TSC0005778
ctcacttataaac

SEQ ID NO: 24307 - DNA, 13 bp, Artificial Sequence
  Oligonucleotide for detection of SNP TSC0005778
gtttatgagtgag

SEQ ID NO: 24308 - DNA, 13 bp, Artificial Sequence
  Oligonucleotide for detection of SNP TSC0005778
ctcactcataaac

SEQ ID NO: 24309 - DNA, 13 bp, Artificial Sequence
  Oligonucleotide for detection of SNP TSC0005778
gtttacgagtgag

SEQ ID NO: 24310 - DNA, 13 bp, Artificial Sequence
  Oligonucleotide for detection of SNP TSC0005778
ctcactcgtaaac

SEQ ID NO: 24311 - DNA, 13 bp, Artificial Sequence
  Oligonucleotide for detection of SNP TSC0005778
tttatttgtaggy

SEQ ID NO: 24312 - DNA, 13 bp, Artificial Sequence
  Oligonucleotide for detection of SNP TSC0005778
rcctacaaataaa

SEQ ID NO: 24313 - DNA, 13 bp, Artificial Sequence
  Oligonucleotide for detection of SNP TSC0005778
tttattcgtaggy

SEQ ID NO: 24314 - DNA, 13 bp, Artificial Sequence
  Oligonucleotide for detection of SNP TSC0005778
rcctacgaataaa

SEQ ID NO: 24315 - DNA, 13 bp, Artificial Sequence
  Oligonucleotide for detection of SNP TSC0005779
taataaatggttt

SEQ ID NO: 24316 - DNA, 13 bp, Artificial Sequence
  Oligonucleotide for detection of SNP TSC0005779
aaaccatttatta

SEQ ID NO: 24317 - DNA, 13 bp, Artificial Sequence
  Oligonucleotide for detection of SNP TSC0005779
taataattggttt

SEQ ID NO: 24318 - DNA, 13 bp, Artificial Sequence
  Oligonucleotide for detection of SNP TSC0005779
aaaccaattatta

SEQ ID NO: 24319 - DNA, 13 bp, Artificial Sequence
  Oligonucleotide for detection of SNP TSC0005779
aggttatttattg

SEQ ID NO: 24320 - DNA, 13 bp, Artificial Sequence
  Oligonucleotide for detection of SNP TSC0005779
caataaataacct

SEQ ID NO: 24321 - DNA, 13 bp, Artificial Sequence
  Oligonucleotide for detection of SNP TSC0005779
aggttaattattg

SEQ ID NO: 24322 - DNA, 13 bp, Artificial Sequence
  Oligonucleotide for detection of SNP TSC0005779
caataattaacct

SEQ ID NO: 24323 - DNA, 13 bp, Artificial Sequence
  Oligonucleotide for detection of SNP TSC0005780
gaatgatatttat

SEQ ID NO: 24324 - DNA, 13 bp, Artificial Sequence
  Oligonucleotide for detection of SNP TSC0005780
ataaatatcattc

SEQ ID NO: 24325 - DNA, 13 bp, Artificial Sequence
  Oligonucleotide for detection of SNP TSC0005780
gaatgagatttat

SEQ ID NO: 24326 - DNA, 13 bp, Artificial Sequence
  Oligonucleotide for detection of SNP TSC0005780
ataaatctcattc

SEQ ID NO: 24327 - DNA, 13 bp, Artificial Sequence
  Oligonucleotide for detection of SNP TSC0005780
ataagtgttatty

SEQ ID NO: 24328 - DNA, 13 bp, Artificial Sequence
  Oligonucleotide for detection of SNP TSC0005780
raataacacttat

SEQ ID NO: 24329 - DNA, 13 bp, Artificial Sequence
  Oligonucleotide for detection of SNP TSC0005780
ataagttttatty

SEQ ID NO: 24330 - DNA, 13 bp, Artificial Sequence
  Oligonucleotide for detection of SNP TSC0005780
raataaaacttat

SEQ ID NO: 24331 - DNA, 13 bp, Artificial Sequence
  Oligonucleotide for detection of SNP TSC0005790
ttatttagaagaa

SEQ ID NO: 24332 - DNA, 13 bp, Artificial Sequence
  Oligonucleotide for detection of SNP TSC0005790
ttcttctaaataa

SEQ ID NO: 24333 - DNA, 13 bp, Artificial Sequence
  Oligonucleotide for detection of SNP TSC0005790
ttattttgaagaa

SEQ ID NO: 24334 - DNA, 13 bp, Artificial Sequence
  Oligonucleotide for detection of SNP TSC0005790
ttcttcaaaataa

SEQ ID NO: 24335 - DNA, 13 bp, Artificial Sequence
  Oligonucleotide for detection of SNP TSC0005790
tttttttgagtaa

SEQ ID NO: 24336 - DNA, 13 bp, Artificial Sequence
  Oligonucleotide for detection of SNP TSC0005790
ttactcaaaaaaa

SEQ ID NO: 24337 - DNA, 13 bp, Artificial Sequence
  Oligonucleotide for detection of SNP TSC0005790
ttttttagagtaa

SEQ ID NO: 24338 - DNA, 13 bp, Artificial Sequence
  Oligonucleotide for detection of SNP TSC0005790
ttactctaaaaaa

SEQ ID NO: 24339 - DNA, 13 bp, Artificial Sequence
  Oligonucleotide for detection of SNP TSC0005791
ttgttatgttgay

SEQ ID NO: 24340 - DNA, 13 bp, Artificial Sequence
  Oligonucleotide for detection of SNP TSC0005791
rtcaacataacaa

SEQ ID NO: 24341 - DNA, 13 bp, Artificial Sequence
  Oligonucleotide for detection of SNP TSC0005791
ttgttaggttgay

SEQ ID NO: 24342 - DNA, 13 bp, Artificial Sequence
  Oligonucleotide for detection of SNP TSC0005791
rtcaacctaacaa

SEQ ID NO: 24343 - DNA, 13 bp, Artificial Sequence
  Oligonucleotide for detection of SNP TSC0005791
ttgttacgttgay

SEQ ID NO: 24344 - DNA, 13 bp, Artificial Sequence
  Oligonucleotide for detection of SNP TSC0005791
rtcaacgtaacaa

SEQ ID NO: 24345 - DNA, 13 bp, Artificial Sequence
  Oligonucleotide for detection of SNP TSC0005791
gttagtgtggtag

SEQ ID NO: 24346 - DNA, 13 bp, Artificial Sequence
  Oligonucleotide for detection of SNP TSC0005791
ctaccacactaac

SEQ ID NO: 24347 - DNA, 13 bp, Artificial Sequence
  Oligonucleotide for detection of SNP TSC0005791
gttagtttggtag

SEQ ID NO: 24348 - DNA, 13 bp, Artificial Sequence
  Oligonucleotide for detection of SNP TSC0005791
ctaccaaactaac

SEQ ID NO: 24349 - DNA, 13 bp, Artificial Sequence
  Oligonucleotide for detection of SNP TSC0005791
gttagcgtggtag

SEQ ID NO: 24350 - DNA, 13 bp, Artificial Sequence
  Oligonucleotide for detection of SNP TSC0005791
ctaccacgctaac

SEQ ID NO: 24351 - DNA, 13 bp, Artificial Sequence
  Oligonucleotide for detection of SNP TSC0005792
aatagggtattay

SEQ ID NO: 24352 - DNA, 13 bp, Artificial Sequence
  Oligonucleotide for detection of SNP TSC0005792
rtaataccctatt

SEQ ID NO: 24353 - DNA, 13 bp, Artificial Sequence
  Oligonucleotide for detection of SNP TSC0005792
aataggatattay

SEQ ID NO: 24354 - DNA, 13 bp, Artificial Sequence
  Oligonucleotide for detection of SNP TSC0005792
rtaatatcctatt

SEQ ID NO: 24355 - DNA, 13 bp, Artificial Sequence
  Oligonucleotide for detection of SNP TSC0005797
atgtaagttgtay

SEQ ID NO: 24356 - DNA, 13 bp, Artificial Sequence
  Oligonucleotide for detection of SNP TSC0005797
rtacaacttacat

SEQ ID NO: 24357 - DNA, 13 bp, Artificial Sequence
  Oligonucleotide for detection of SNP TSC0005797
atgtaaattgtay

SEQ ID NO: 24358 - DNA, 13 bp, Artificial Sequence
  Oligonucleotide for detection of SNP TSC0005797
rtacaatttacat

SEQ ID NO: 24359 - DNA, 13 bp, Artificial Sequence
  Oligonucleotide for detection of SNP TSC0005797
acgtaagttgtay

SEQ ID NO: 24360 - DNA, 13 bp, Artificial Sequence
  Oligonucleotide for detection of SNP TSC0005797
rtacaacttacgt

SEQ ID NO: 24361 - DNA, 13 bp, Artificial Sequence
  Oligonucleotide for detection of SNP TSC0005797
acgtaaattgtay

SEQ ID NO: 24362 - DNA, 13 bp, Artificial Sequence
  Oligonucleotide for detection of SNP TSC0005797
rtacaatttacgt

SEQ ID NO: 24363 - DNA, 13 bp, Artificial Sequence
  Oligonucleotide for detection of SNP TSC0005798
agagtaatattty

SEQ ID NO: 24364 - DNA, 13 bp, Artificial Sequence
  Oligonucleotide for detection of SNP TSC0005798
raaatattactct

SEQ ID NO: 24365 - DNA, 13 bp, Artificial Sequence
  Oligonucleotide for detection of SNP TSC0005798
agagtattattty

SEQ ID NO: 24366 - DNA, 13 bp, Artificial Sequence
  Oligonucleotide for detection of SNP TSC0005798
raaataatactct

SEQ ID NO: 24367 - DNA, 13 bp, Artificial Sequence
  Oligonucleotide for detection of SNP TSC0005798
gaaatgttgtttt

SEQ ID NO: 24368 - DNA, 13 bp, Artificial Sequence
  Oligonucleotide for detection of SNP TSC0005798
aaaacaacatttc

SEQ ID NO: 24369 - DNA, 13 bp, Artificial Sequence
  Oligonucleotide for detection of SNP TSC0005798
gaaatggtgtttt

SEQ ID NO: 24370 - DNA, 13 bp, Artificial Sequence
  Oligonucleotide for detection of SNP TSC0005798
aaaacaccatttc

SEQ ID NO: 24371 - DNA, 13 bp, Artificial Sequence
  Oligonucleotide for detection of SNP TSC0005799
atagagataggtt

SEQ ID NO: 24372 - DNA, 13 bp, Artificial Sequence
  Oligonucleotide for detection of SNP TSC0005799
aacctatctctat

SEQ ID NO: 24373 - DNA, 13 bp, Artificial Sequence
  Oligonucleotide for detection of SNP TSC0005799
atagaggtaggtt

SEQ ID NO: 24374 - DNA, 13 bp, Artificial Sequence
  Oligonucleotide for detection of SNP TSC0005799
aacctacctctat

SEQ ID NO: 24375 - DNA, 13 bp, Artificial Sequence
  Oligonucleotide for detection of SNP TSC0005800
gttattttttgty

SEQ ID NO: 24376 - DNA, 13 bp, Artificial Sequence
  Oligonucleotide for detection of SNP TSC0005800
racaaaaaataac

SEQ ID NO: 24377 - DNA, 13 bp, Artificial Sequence
  Oligonucleotide for detection of SNP TSC0005800
ggtagatagtagy

SEQ ID NO: 24378 - DNA, 13 bp, Artificial Sequence
  Oligonucleotide for detection of SNP TSC0005800
rctactatctacc

SEQ ID NO: 24379 - DNA, 13 bp, Artificial Sequence
  Oligonucleotide for detection of SNP TSC0005800
ggtagagagtagy

SEQ ID NO: 24380 - DNA, 13 bp, Artificial Sequence
  Oligonucleotide for detection of SNP TSC0005800
rctactctctacc

SEQ ID NO: 24381 - DNA, 13 bp, Artificial Sequence
  Oligonucleotide for detection of SNP TSC0005817
tatattaggggtt

SEQ ID NO: 24382 - DNA, 13 bp, Artificial Sequence
  Oligonucleotide for detection of SNP TSC0005817
aacccctaatata

SEQ ID NO: 24383 - DNA, 13 bp, Artificial Sequence
  Oligonucleotide for detection of SNP TSC0005817
tatattgggggtt

SEQ ID NO: 24384 - DNA, 13 bp, Artificial Sequence
  Oligonucleotide for detection of SNP TSC0005817
aacccccaatata

SEQ ID NO: 24385 - DNA, 13 bp, Artificial Sequence
  Oligonucleotide for detection of SNP TSC0005817
tatatcgggggtt

SEQ ID NO: 24386 - DNA, 13 bp, Artificial Sequence
  Oligonucleotide for detection of SNP TSC0005817
aacccccgatata

SEQ ID NO: 24387 - DNA, 13 bp, Artificial Sequence
  Oligonucleotide for detection of SNP TSC0005817
agtttttgatgtg

SEQ ID NO: 24388 - DNA, 13 bp, Artificial Sequence
  Oligonucleotide for detection of SNP TSC0005817
cacatcaaaaact

SEQ ID NO: 24389 - DNA, 13 bp, Artificial Sequence
  Oligonucleotide for detection of SNP TSC0005817
agttttcgatgtg

SEQ ID NO: 24390 - DNA, 13 bp, Artificial Sequence
  Oligonucleotide for detection of SNP TSC0005817
cacatcgaaaact

SEQ ID NO: 24391 - DNA, 13 bp, Artificial Sequence
  Oligonucleotide for detection of SNP TSC0005818
tgggtgtggtgag

SEQ ID NO: 24392 - DNA, 13 bp, Artificial Sequence
  Oligonucleotide for detection of SNP TSC0005818
ctcaccacaccca

SEQ ID NO: 24393 - DNA, 13 bp, Artificial Sequence
  Oligonucleotide for detection of SNP TSC0005818
tgggtgcggtgag

SEQ ID NO: 24394 - DNA, 13 bp, Artificial Sequence
  Oligonucleotide for detection of SNP TSC0005818
ctcaccgcaccca

SEQ ID NO: 24395 - DNA, 13 bp, Artificial Sequence
  Oligonucleotide for detection of SNP TSC0005818
tttattgtattta

SEQ ID NO: 24396 - DNA, 13 bp, Artificial Sequence
  Oligonucleotide for detection of SNP TSC0005818
taaatacaataaa

SEQ ID NO: 24397 - DNA, 13 bp, Artificial Sequence
  Oligonucleotide for detection of SNP TSC0005818
tttattatattta

SEQ ID NO: 24398 - DNA, 13 bp, Artificial Sequence
  Oligonucleotide for detection of SNP TSC0005818
taaatataataaa

SEQ ID NO: 24399 - DNA, 13 bp, Artificial Sequence
  Oligonucleotide for detection of SNP TSC0005818
tttatcgtattta

SEQ ID NO: 24400 - DNA, 13 bp, Artificial Sequence
  Oligonucleotide for detection of SNP TSC0005818
taaatacgataaa

SEQ ID NO: 24401 - DNA, 13 bp, Artificial Sequence
  Oligonucleotide for detection of SNP TSC0005819
gttgggaagatay

SEQ ID NO: 24402 - DNA, 13 bp, Artificial Sequence
  Oligonucleotide for detection of SNP TSC0005819
rtatcttcccaac

SEQ ID NO: 24403 - DNA, 13 bp, Artificial Sequence
  Oligonucleotide for detection of SNP TSC0005819
gttggggagatay

SEQ ID NO: 24404 - DNA, 13 bp, Artificial Sequence
  Oligonucleotide for detection of SNP TSC0005819
rtatctccccaac

SEQ ID NO: 24405 - DNA, 13 bp, Artificial Sequence
  Oligonucleotide for detection of SNP TSC0005820
gttgttggtttaa

SEQ ID NO: 24406 - DNA, 13 bp, Artificial Sequence
  Oligonucleotide for detection of SNP TSC0005820
ttaaaccaacaac

SEQ ID NO: 24407 - DNA, 13 bp, Artificial Sequence
  Oligonucleotide for detection of SNP TSC0005820
gttgttagtttaa

SEQ ID NO: 24408 - DNA, 13 bp, Artificial Sequence
  Oligonucleotide for detection of SNP TSC0005820
ttaaactaacaac

SEQ ID NO: 24409 - DNA, 13 bp, Artificial Sequence
  Oligonucleotide for detection of SNP TSC0005821
gagtgtagttagg

SEQ ID NO: 24410 - DNA, 13 bp, Artificial Sequence
  Oligonucleotide for detection of SNP TSC0005821
cctaactacactc

SEQ ID NO: 24411 - DNA, 13 bp, Artificial Sequence
  Oligonucleotide for detection of SNP TSC0005821
gagtgtggttagg

SEQ ID NO: 24412 - DNA, 13 bp, Artificial Sequence
  Oligonucleotide for detection of SNP TSC0005821
cctaaccacactc

SEQ ID NO: 24413 - DNA, 13 bp, Artificial Sequence
  Oligonucleotide for detection of SNP TSC0005824
ttttgagaaggay

SEQ ID NO: 24414 - DNA, 13 bp, Artificial Sequence
  Oligonucleotide for detection of SNP TSC0005824
rtccttctcaaaa

SEQ ID NO: 24415 - DNA, 13 bp, Artificial Sequence
  Oligonucleotide for detection of SNP TSC0005824
ttttgaaaaggay

SEQ ID NO: 24416 - DNA, 13 bp, Artificial Sequence
  Oligonucleotide for detection of SNP TSC0005824
rtccttttcaaaa

SEQ ID NO: 24417 - DNA, 13 bp, Artificial Sequence
  Oligonucleotide for detection of SNP TSC0005826
ttttaataaataa

SEQ ID NO: 24418 - DNA, 13 bp, Artificial Sequence
  Oligonucleotide for detection of SNP TSC0005826
ttatttattaaaa

SEQ ID NO: 24419 - DNA, 13 bp, Artificial Sequence
  Oligonucleotide for detection of SNP TSC0005826
ttttaagaaataa

SEQ ID NO: 24420 - DNA, 13 bp, Artificial Sequence
  Oligonucleotide for detection of SNP TSC0005826
ttatttcttaaaa

SEQ ID NO: 24421 - DNA, 13 bp, Artificial Sequence
  Oligonucleotide for detection of SNP TSC0005826
ttgtttgttagaa

SEQ ID NO: 24422 - DNA, 13 bp, Artificial Sequence
  Oligonucleotide for detection of SNP TSC0005826
ttctaacaaacaa

SEQ ID NO: 24423 - DNA, 13 bp, Artificial Sequence
  Oligonucleotide for detection of SNP TSC0005826
ttgttttttagaa

SEQ ID NO: 24424 - DNA, 13 bp, Artificial Sequence
  Oligonucleotide for detection of SNP TSC0005826
ttctaaaaaacaa

SEQ ID NO: 24425 - DNA, 13 bp, Artificial Sequence
  Oligonucleotide for detection of SNP TSC0005827
taagaggaattgy

SEQ ID NO: 24426 - DNA, 13 bp, Artificial Sequence
  Oligonucleotide for detection of SNP TSC0005827
rcaattcctctta

SEQ ID NO: 24427 - DNA, 13 bp, Artificial Sequence
  Oligonucleotide for detection of SNP TSC0005827
taagagtaattgy

SEQ ID NO: 24428 - DNA, 13 bp, Artificial Sequence
  Oligonucleotide for detection of SNP TSC0005827
rcaattactctta

SEQ ID NO: 24429 - DNA, 13 bp, Artificial Sequence
  Oligonucleotide for detection of SNP TSC0005827
taagaggaatcgy

SEQ ID NO: 24430 - DNA, 13 bp, Artificial Sequence
  Oligonucleotide for detection of SNP TSC0005827
rcgattcctctta

SEQ ID NO: 24431 - DNA, 13 bp, Artificial Sequence
  Oligonucleotide for detection of SNP TSC0005827
taagagtaatcgy

SEQ ID NO: 24432 - DNA, 13 bp, Artificial Sequence
  Oligonucleotide for detection of SNP TSC0005827
rcgattactctta

SEQ ID NO: 24433 - DNA, 13 bp, Artificial Sequence
  Oligonucleotide for detection of SNP TSC0005827
gtggtttttttta

SEQ ID NO: 24434 - DNA, 13 bp, Artificial Sequence
  Oligonucleotide for detection of SNP TSC0005827
taaaaaaaaccac

SEQ ID NO: 24435 - DNA, 13 bp, Artificial Sequence
  Oligonucleotide for detection of SNP TSC0005827
gtggttattttta

SEQ ID NO: 24436 - DNA, 13 bp, Artificial Sequence
  Oligonucleotide for detection of SNP TSC0005827
taaaaataaccac

SEQ ID NO: 24437 - DNA, 13 bp, Artificial Sequence
  Oligonucleotide for detection of SNP TSC0005827
gcggtttttttta

SEQ ID NO: 24438 - DNA, 13 bp, Artificial Sequence
  Oligonucleotide for detection of SNP TSC0005827
taaaaaaaaccgc

SEQ ID NO: 24439 - DNA, 13 bp, Artificial Sequence
  Oligonucleotide for detection of SNP TSC0005827
gcggttattttta

SEQ ID NO: 24440 - DNA, 13 bp, Artificial Sequence
  Oligonucleotide for detection of SNP TSC0005827
taaaaataaccgc

SEQ ID NO: 24441 - DNA, 13 bp, Artificial Sequence
  Oligonucleotide for detection of SNP TSC0005837
gggtgagaagtag

SEQ ID NO: 24442 - DNA, 13 bp, Artificial Sequence
  Oligonucleotide for detection of SNP TSC0005837
ctacttctcaccc

SEQ ID NO: 24443 - DNA, 13 bp, Artificial Sequence
  Oligonucleotide for detection of SNP TSC0005837
gggtgaaaagtag

SEQ ID NO: 24444 - DNA, 13 bp, Artificial Sequence
  Oligonucleotide for detection of SNP TSC0005837
ctacttttcaccc

SEQ ID NO: 24445 - DNA, 13 bp, Artificial Sequence
  Oligonucleotide for detection of SNP TSC0005838
ttaaattgtaaga

SEQ ID NO: 24446 - DNA, 13 bp, Artificial Sequence
  Oligonucleotide for detection of SNP TSC0005838
tcttacaatttaa

SEQ ID NO: 24447 - DNA, 13 bp, Artificial Sequence
  Oligonucleotide for detection of SNP TSC0005838
ttaaatcgtaaga

SEQ ID NO: 24448 - DNA, 13 bp, Artificial Sequence
  Oligonucleotide for detection of SNP TSC0005838
tcttacgatttaa

SEQ ID NO: 24449 - DNA, 13 bp, Artificial Sequence
  Oligonucleotide for detection of SNP TSC0005838
ttttatgatttaa

SEQ ID NO: 24450 - DNA, 13 bp, Artificial Sequence
  Oligonucleotide for detection of SNP TSC0005838
ttaaatcataaaa

SEQ ID NO: 24451 - DNA, 13 bp, Artificial Sequence
  Oligonucleotide for detection of SNP TSC0005838
ttttataatttaa

SEQ ID NO: 24452 - DNA, 13 bp, Artificial Sequence
  Oligonucleotide for detection of SNP TSC0005838
ttaaattataaaa

SEQ ID NO: 24453 - DNA, 13 bp, Artificial Sequence
  Oligonucleotide for detection of SNP TSC0005838
ttttacgatttaa

SEQ ID NO: 24454 - DNA, 13 bp, Artificial Sequence
  Oligonucleotide for detection of SNP TSC0005838
ttaaatcgtaaaa

SEQ ID NO: 24455 - DNA, 13 bp, Artificial Sequence
  Oligonucleotide for detection of SNP TSC0005839
gtgttgtttgaay

SEQ ID NO: 24456 - DNA, 13 bp, Artificial Sequence
  Oligonucleotide for detection of SNP TSC0005839
rttcaaacaacac

SEQ ID NO: 24457 - DNA, 13 bp, Artificial Sequence
  Oligonucleotide for detection of SNP TSC0005839
gtgttggttgaay

SEQ ID NO: 24458 - DNA, 13 bp, Artificial Sequence
  Oligonucleotide for detection of SNP TSC0005839
rttcaaccaacac

SEQ ID NO: 24459 - DNA, 13 bp, Artificial Sequence
  Oligonucleotide for detection of SNP TSC0005839
gcgttgtttgaay

SEQ ID NO: 24460 - DNA, 13 bp, Artificial Sequence
  Oligonucleotide for detection of SNP TSC0005839
rttcaaacaacgc

SEQ ID NO: 24461 - DNA, 13 bp, Artificial Sequence
  Oligonucleotide for detection of SNP TSC0005839
gcgttggttgaay

SEQ ID NO: 24462 - DNA, 13 bp, Artificial Sequence
  Oligonucleotide for detection of SNP TSC0005839
rttcaaccaacgc

SEQ ID NO: 24463 - DNA, 13 bp, Artificial Sequence
  Oligonucleotide for detection of SNP TSC0005839
gtgttgttcgaay

SEQ ID NO: 24464 - DNA, 13 bp, Artificial Sequence
  Oligonucleotide for detection of SNP TSC0005839
rttcgaacaacac

SEQ ID NO: 24465 - DNA, 13 bp, Artificial Sequence
  Oligonucleotide for detection of SNP TSC0005839
gtgttggtcgaay

SEQ ID NO: 24466 - DNA, 13 bp, Artificial Sequence
  Oligonucleotide for detection of SNP TSC0005839
rttcgaccaacac

SEQ ID NO: 24467 - DNA, 13 bp, Artificial Sequence
  Oligonucleotide for detection of SNP TSC0005839
gcgttgttcgaay

SEQ ID NO: 24468 - DNA, 13 bp, Artificial Sequence
  Oligonucleotide for detection of SNP TSC0005839
rttcgaacaacgc

SEQ ID NO: 24469 - DNA, 13 bp, Artificial Sequence
  Oligonucleotide for detection of SNP TSC0005839
gcgttggtcgaay

SEQ ID NO: 24470 - DNA, 13 bp, Artificial Sequence
  Oligonucleotide for detection of SNP TSC0005839
rttcgaccaacgc

SEQ ID NO: 24471 - DNA, 13 bp, Artificial Sequence
  Oligonucleotide for detection of SNP TSC0005839
gtttgagtagtgy

SEQ ID NO: 24472 - DNA, 13 bp, Artificial Sequence
  Oligonucleotide for detection of SNP TSC0005839
rcactactcaaac

SEQ ID NO: 24473 - DNA, 13 bp, Artificial Sequence
  Oligonucleotide for detection of SNP TSC0005839
gtttgattagtgy

SEQ ID NO: 24474 - DNA, 13 bp, Artificial Sequence
  Oligonucleotide for detection of SNP TSC0005839
rcactaatcaaac

SEQ ID NO: 24475 - DNA, 13 bp, Artificial Sequence
  Oligonucleotide for detection of SNP TSC0005839
gttcgagtagtgy

SEQ ID NO: 24476 - DNA, 13 bp, Artificial Sequence
  Oligonucleotide for detection of SNP TSC0005839
rcactactcgaac

SEQ ID NO: 24477 - DNA, 13 bp, Artificial Sequence
  Oligonucleotide for detection of SNP TSC0005839
gttcgattagtgy

SEQ ID NO: 24478 - DNA, 13 bp, Artificial Sequence
  Oligonucleotide for detection of SNP TSC0005839
rcactaatcgaac

SEQ ID NO: 24479 - DNA, 13 bp, Artificial Sequence
  Oligonucleotide for detection of SNP TSC0005839
gtttgagtagcgy

SEQ ID NO: 24480 - DNA, 13 bp, Artificial Sequence
  Oligonucleotide for detection of SNP TSC0005839
rcgctactcaaac

SEQ ID NO: 24481 - DNA, 13 bp, Artificial Sequence
  Oligonucleotide for detection of SNP TSC0005839
gtttgattagcgy

SEQ ID NO: 24482 - DNA, 13 bp, Artificial Sequence
  Oligonucleotide for detection of SNP TSC0005839
rcgctaatcaaac

SEQ ID NO: 24483 - DNA, 13 bp, Artificial Sequence
  Oligonucleotide for detection of SNP TSC0005839
gttcgagtagcgy

SEQ ID NO: 24484 - DNA, 13 bp, Artificial Sequence
  Oligonucleotide for detection of SNP TSC0005839
rcgctactcgaac

SEQ ID NO: 24485 - DNA, 13 bp, Artificial Sequence
  Oligonucleotide for detection of SNP TSC0005839
gttcgattagcgy

SEQ ID NO: 24486 - DNA, 13 bp, Artificial Sequence
  Oligonucleotide for detection of SNP TSC0005839
rcgctaatcgaac

SEQ ID NO: 24487 - DNA, 13 bp, Artificial Sequence
  Oligonucleotide for detection of SNP TSC0005840
ttttttatttgaa

SEQ ID NO: 24488 - DNA, 13 bp, Artificial Sequence
  Oligonucleotide for detection of SNP TSC0005840
ttcaaataaaaaa

SEQ ID NO: 24489 - DNA, 13 bp, Artificial Sequence
  Oligonucleotide for detection of SNP TSC0005841
gtagttgttttgg

SEQ ID NO: 24490 - DNA, 13 bp, Artificial Sequence
  Oligonucleotide for detection of SNP TSC0005841
ccaaaacaactac

SEQ ID NO: 24491 - DNA, 13 bp, Artificial Sequence
  Oligonucleotide for detection of SNP TSC0005841
gtagttattttgg

SEQ ID NO: 24492 - DNA, 13 bp, Artificial Sequence
  Oligonucleotide for detection of SNP TSC0005841
ccaaaataactac

SEQ ID NO: 24493 - DNA, 13 bp, Artificial Sequence
  Oligonucleotide for detection of SNP TSC0005842
aagtttataaaty

SEQ ID NO: 24494 - DNA, 13 bp, Artificial Sequence
  Oligonucleotide for detection of SNP TSC0005842
ratttataaactt

SEQ ID NO: 24495 - DNA, 13 bp, Artificial Sequence
  Oligonucleotide for detection of SNP TSC0005842
aagtttttaaaty

SEQ ID NO: 24496 - DNA, 13 bp, Artificial Sequence
  Oligonucleotide for detection of SNP TSC0005842
ratttaaaaactt

SEQ ID NO: 24497 - DNA, 13 bp, Artificial Sequence
  Oligonucleotide for detection of SNP TSC0005842
gatttataggttt

SEQ ID NO: 24498 - DNA, 13 bp, Artificial Sequence
  Oligonucleotide for detection of SNP TSC0005842
aaacctataaatc

SEQ ID NO: 24499 - DNA, 13 bp, Artificial Sequence
  Oligonucleotide for detection of SNP TSC0005842
gatttagaggttt

SEQ ID NO: 24500 - DNA, 13 bp, Artificial Sequence
  Oligonucleotide for detection of SNP TSC0005842
aaacctctaaatc

SEQ ID NO: 24501 - DNA, 13 bp, Artificial Sequence
  Oligonucleotide for detection of SNP TSC0005849
ttatttaggttta

SEQ ID NO: 24502 - DNA, 13 bp, Artificial Sequence
  Oligonucleotide for detection of SNP TSC0005849
taaacctaaataa

SEQ ID NO: 24503 - DNA, 13 bp, Artificial Sequence
  Oligonucleotide for detection of SNP TSC0005849
ttatttgggttta

SEQ ID NO: 24504 - DNA, 13 bp, Artificial Sequence
  Oligonucleotide for detection of SNP TSC0005849
taaacccaaataa

SEQ ID NO: 24505 - DNA, 13 bp, Artificial Sequence
  Oligonucleotide for detection of SNP TSC0005849
ttattcgggttta

SEQ ID NO: 24506 - DNA, 13 bp, Artificial Sequence
  Oligonucleotide for detection of SNP TSC0005849
taaacccgaataa

SEQ ID NO: 24507 - DNA, 13 bp, Artificial Sequence
  Oligonucleotide for detection of SNP TSC0005849
tgaatttgggtga

SEQ ID NO: 24508 - DNA, 13 bp, Artificial Sequence
  Oligonucleotide for detection of SNP TSC0005849
tcacccaaattca

SEQ ID NO: 24509 - DNA, 13 bp, Artificial Sequence
  Oligonucleotide for detection of SNP TSC0005849
tgaattcgggtga

SEQ ID NO: 24510 - DNA, 13 bp, Artificial Sequence
  Oligonucleotide for detection of SNP TSC0005849
tcacccgaattca

SEQ ID NO: 24511 - DNA, 13 bp, Artificial Sequence
  Oligonucleotide for detection of SNP TSC0005851
ttggaaaagtttg

SEQ ID NO: 24512 - DNA, 13 bp, Artificial Sequence
  Oligonucleotide for detection of SNP TSC0005851
caaacttttccaa

SEQ ID NO: 24513 - DNA, 13 bp, Artificial Sequence
  Oligonucleotide for detection of SNP TSC0005851
ttggaagagtttg

SEQ ID NO: 24514 - DNA, 13 bp, Artificial Sequence
  Oligonucleotide for detection of SNP TSC0005851
caaactcttccaa

SEQ ID NO: 24515 - DNA, 13 bp, Artificial Sequence
  Oligonucleotide for detection of SNP TSC0005852
tgttgggttttag

SEQ ID NO: 24516 - DNA, 13 bp, Artificial Sequence
  Oligonucleotide for detection of SNP TSC0005852
ctaaaacccaaca

SEQ ID NO: 24517 - DNA, 13 bp, Artificial Sequence
  Oligonucleotide for detection of SNP TSC0005852
tgttggtttttag

SEQ ID NO: 24518 - DNA, 13 bp, Artificial Sequence
  Oligonucleotide for detection of SNP TSC0005852
ctaaaaaccaaca

SEQ ID NO: 24519 - DNA, 13 bp, Artificial Sequence
  Oligonucleotide for detection of SNP TSC0005852
cgttgggttttag

SEQ ID NO: 24520 - DNA, 13 bp, Artificial Sequence
  Oligonucleotide for detection of SNP TSC0005852
ctaaaacccaacg

SEQ ID NO: 24521 - DNA, 13 bp, Artificial Sequence
  Oligonucleotide for detection of SNP TSC0005852
cgttggtttttag

SEQ ID NO: 24522 - DNA, 13 bp, Artificial Sequence
  Oligonucleotide for detection of SNP TSC0005852
ctaaaaaccaacg

SEQ ID NO: 24523 - DNA, 13 bp, Artificial Sequence
  Oligonucleotide for detection of SNP TSC0005852
ttggagtttaatg

SEQ ID NO: 24524 - DNA, 13 bp, Artificial Sequence
  Oligonucleotide for detection of SNP TSC0005852
cattaaactccaa

SEQ ID NO: 24525 - DNA, 13 bp, Artificial Sequence
  Oligonucleotide for detection of SNP TSC0005852
ttggagattaatg

SEQ ID NO: 24526 - DNA, 13 bp, Artificial Sequence
  Oligonucleotide for detection of SNP TSC0005852
cattaatctccaa

SEQ ID NO: 24527 - DNA, 13 bp, Artificial Sequence
  Oligonucleotide for detection of SNP TSC0005852
ttggagtttaacg

SEQ ID NO: 24528 - DNA, 13 bp, Artificial Sequence
  Oligonucleotide for detection of SNP TSC0005852
cgttaaactccaa

SEQ ID NO: 24529 - DNA, 13 bp, Artificial Sequence
  Oligonucleotide for detection of SNP TSC0005852
ttggagattaacg

SEQ ID NO: 24530 - DNA, 13 bp, Artificial Sequence
  Oligonucleotide for detection of SNP TSC0005852
cgttaatctccaa

SEQ ID NO: 24531 - DNA, 13 bp, Artificial Sequence
  Oligonucleotide for detection of SNP TSC0005853
tttagattttgty

SEQ ID NO: 24532 - DNA, 13 bp, Artificial Sequence
  Oligonucleotide for detection of SNP TSC0005853
racaaaatctaaa

SEQ ID NO: 24533 - DNA, 13 bp, Artificial Sequence
  Oligonucleotide for detection of SNP TSC0005853
tttagagtttgty

SEQ ID NO: 24534 - DNA, 13 bp, Artificial Sequence
  Oligonucleotide for detection of SNP TSC0005853
racaaactctaaa

SEQ ID NO: 24535 - DNA, 13 bp, Artificial Sequence
  Oligonucleotide for detection of SNP TSC0005853
ggtagggtttggg

SEQ ID NO: 24536 - DNA, 13 bp, Artificial Sequence
  Oligonucleotide for detection of SNP TSC0005853
cccaaaccctacc

SEQ ID NO: 24537 - DNA, 13 bp, Artificial Sequence
  Oligonucleotide for detection of SNP TSC0005853
ggtaggttttggg

SEQ ID NO: 24538 - DNA, 13 bp, Artificial Sequence
  Oligonucleotide for detection of SNP TSC0005853
cccaaaacctacc

SEQ ID NO: 24539 - DNA, 13 bp, Artificial Sequence
  Oligonucleotide for detection of SNP TSC0005854
tttttggtgatat

SEQ ID NO: 24540 - DNA, 13 bp, Artificial Sequence
  Oligonucleotide for detection of SNP TSC0005854
atatcaccaaaaa

SEQ ID NO: 24541 - DNA, 13 bp, Artificial Sequence
  Oligonucleotide for detection of SNP TSC0005854
tttttgttgatat

SEQ ID NO: 24542 - DNA, 13 bp, Artificial Sequence
  Oligonucleotide for detection of SNP TSC0005854
atatcaacaaaaa

SEQ ID NO: 24543 - DNA, 13 bp, Artificial Sequence
  Oligonucleotide for detection of SNP TSC0005854
ttttcggtgatat

SEQ ID NO: 24544 - DNA, 13 bp, Artificial Sequence
  Oligonucleotide for detection of SNP TSC0005854
atatcaccgaaaa

SEQ ID NO: 24545 - DNA, 13 bp, Artificial Sequence
  Oligonucleotide for detection of SNP TSC0005854
ttttcgttgatat

SEQ ID NO: 24546 - DNA, 13 bp, Artificial Sequence
  Oligonucleotide for detection of SNP TSC0005854
atatcaacgaaaa

SEQ ID NO: 24547 - DNA, 13 bp, Artificial Sequence
  Oligonucleotide for detection of SNP TSC0005854
atattattgaaga

SEQ ID NO: 24548 - DNA, 13 bp, Artificial Sequence
  Oligonucleotide for detection of SNP TSC0005854
tcttcaataatat

SEQ ID NO: 24549 - DNA, 13 bp, Artificial Sequence
  Oligonucleotide for detection of SNP TSC0005854
atattaatgaaga

SEQ ID NO: 24550 - DNA, 13 bp, Artificial Sequence
  Oligonucleotide for detection of SNP TSC0005854
tcttcattaatat

SEQ ID NO: 24551 - DNA, 13 bp, Artificial Sequence
  Oligonucleotide for detection of SNP TSC0005854
atattatcgaaga

SEQ ID NO: 24552 - DNA, 13 bp, Artificial Sequence
  Oligonucleotide for detection of SNP TSC0005854
tcttcgataatat

SEQ ID NO: 24553 - DNA, 13 bp, Artificial Sequence
  Oligonucleotide for detection of SNP TSC0005854
atattaacgaaga

SEQ ID NO: 24554 - DNA, 13 bp, Artificial Sequence
  Oligonucleotide for detection of SNP TSC0005854
tcttcgttaatat

SEQ ID NO: 24555 - DNA, 13 bp, Artificial Sequence
  Oligonucleotide for detection of SNP TSC0005855
gatagatttttgy

SEQ ID NO: 24556 - DNA, 13 bp, Artificial Sequence
  Oligonucleotide for detection of SNP TSC0005855
rcaaaaatctatc

SEQ ID NO: 24557 - DNA, 13 bp, Artificial Sequence
  Oligonucleotide for detection of SNP TSC0005855
gatagagttttgy

SEQ ID NO: 24558 - DNA, 13 bp, Artificial Sequence
  Oligonucleotide for detection of SNP TSC0005855
rcaaaactctatc

SEQ ID NO: 24559 - DNA, 13 bp, Artificial Sequence
  Oligonucleotide for detection of SNP TSC0005855
gtagaagtttgty

SEQ ID NO: 24560 - DNA, 13 bp, Artificial Sequence
  Oligonucleotide for detection of SNP TSC0005855
racaaacttctac

SEQ ID NO: 24561 - DNA, 13 bp, Artificial Sequence
  Oligonucleotide for detection of SNP TSC0005855
gtagaattttgty

SEQ ID NO: 24562 - DNA, 13 bp, Artificial Sequence
  Oligonucleotide for detection of SNP TSC0005855
racaaaattctac

SEQ ID NO: 24563 - DNA, 13 bp, Artificial Sequence
  Oligonucleotide for detection of SNP TSC0005856
tttttatggagga

SEQ ID NO: 24564 - DNA, 13 bp, Artificial Sequence
  Oligonucleotide for detection of SNP TSC0005856
tcctccataaaaa

SEQ ID NO: 24565 - DNA, 13 bp, Artificial Sequence
  Oligonucleotide for detection of SNP TSC0005856
tttttacggagga

SEQ ID NO: 24566 - DNA, 13 bp, Artificial Sequence
  Oligonucleotide for detection of SNP TSC0005856
tcctccgtaaaaa

SEQ ID NO: 24567 - DNA, 13 bp, Artificial Sequence
  Oligonucleotide for detection of SNP TSC0005856
ttttttgtgagaa

SEQ ID NO: 24568 - DNA, 13 bp, Artificial Sequence
  Oligonucleotide for detection of SNP TSC0005856
ttctcacaaaaaa

SEQ ID NO: 24569 - DNA, 13 bp, Artificial Sequence
  Oligonucleotide for detection of SNP TSC0005856
ttttttatgagaa

SEQ ID NO: 24570 - DNA, 13 bp, Artificial Sequence
  Oligonucleotide for detection of SNP TSC0005856
ttctcataaaaaa

SEQ ID NO: 24571 - DNA, 13 bp, Artificial Sequence
  Oligonucleotide for detection of SNP TSC0005856
tttttcgtgagaa

SEQ ID NO: 24572 - DNA, 13 bp, Artificial Sequence
  Oligonucleotide for detection of SNP TSC0005856
ttctcacgaaaaa

SEQ ID NO: 24573 - DNA, 13 bp, Artificial Sequence
  Oligonucleotide for detection of SNP TSC0005857
ttttttagggaag

SEQ ID NO: 24574 - DNA, 13 bp, Artificial Sequence
  Oligonucleotide for detection of SNP TSC0005857
cttccctaaaaaa

SEQ ID NO: 24575 - DNA, 13 bp, Artificial Sequence
  Oligonucleotide for detection of SNP TSC0005857
ttttttggggaag

SEQ ID NO: 24576 - DNA, 13 bp, Artificial Sequence
  Oligonucleotide for detection of SNP TSC0005857
cttccccaaaaaa

SEQ ID NO: 24577 - DNA, 13 bp, Artificial Sequence
  Oligonucleotide for detection of SNP TSC0005858
agtgtagtatggt

SEQ ID NO: 24578 - DNA, 13 bp, Artificial Sequence
  Oligonucleotide for detection of SNP TSC0005858
accatactacact

SEQ ID NO: 24579 - DNA, 13 bp, Artificial Sequence
  Oligonucleotide for detection of SNP TSC0005858
agtgtaatatggt

SEQ ID NO: 24580 - DNA, 13 bp, Artificial Sequence
  Oligonucleotide for detection of SNP TSC0005858
accatattacact

SEQ ID NO: 24581 - DNA, 13 bp, Artificial Sequence
  Oligonucleotide for detection of SNP TSC0005859
aagtttatggtty

SEQ ID NO: 24582 - DNA, 13 bp, Artificial Sequence
  Oligonucleotide for detection of SNP TSC0005859
raaccataaactt

SEQ ID NO: 24583 - DNA, 13 bp, Artificial Sequence
  Oligonucleotide for detection of SNP TSC0005859
aagtttttggtty

SEQ ID NO: 24584 - DNA, 13 bp, Artificial Sequence
  Oligonucleotide for detection of SNP TSC0005859
raaccaaaaactt

SEQ ID NO: 24585 - DNA, 13 bp, Artificial Sequence
  Oligonucleotide for detection of SNP TSC0005859
ggattatgagttt

SEQ ID NO: 24586 - DNA, 13 bp, Artificial Sequence
  Oligonucleotide for detection of SNP TSC0005859
aaactcataatcc

SEQ ID NO: 24587 - DNA, 13 bp, Artificial Sequence
  Oligonucleotide for detection of SNP TSC0005859
ggattaggagttt

SEQ ID NO: 24588 - DNA, 13 bp, Artificial Sequence
  Oligonucleotide for detection of SNP TSC0005859
aaactcctaatcc

SEQ ID NO: 24589 - DNA, 13 bp, Artificial Sequence
  Oligonucleotide for detection of SNP TSC0005860
tttagtaatatag

SEQ ID NO: 24590 - DNA, 13 bp, Artificial Sequence
  Oligonucleotide for detection of SNP TSC0005860
ctatattactaaa

SEQ ID NO: 24591 - DNA, 13 bp, Artificial Sequence
  Oligonucleotide for detection of SNP TSC0005860
tttagtgatatag

SEQ ID NO: 24592 - DNA, 13 bp, Artificial Sequence
  Oligonucleotide for detection of SNP TSC0005860
ctatatcactaaa

SEQ ID NO: 24593 - DNA, 13 bp, Artificial Sequence
  Oligonucleotide for detection of SNP TSC0005861
ataggaatttttt

SEQ ID NO: 24594 - DNA, 13 bp, Artificial Sequence
  Oligonucleotide for detection of SNP TSC0005861
aaaaaattcctat

SEQ ID NO: 24595 - DNA, 13 bp, Artificial Sequence
  Oligonucleotide for detection of SNP TSC0005861
ataggagtttttt

SEQ ID NO: 24596 - DNA, 13 bp, Artificial Sequence
  Oligonucleotide for detection of SNP TSC0005861
aaaaaactcctat

SEQ ID NO: 24597 - DNA, 13 bp, Artificial Sequence
  Oligonucleotide for detection of SNP TSC0005870
ataaataaaatta

SEQ ID NO: 24598 - DNA, 13 bp, Artificial Sequence
  Oligonucleotide for detection of SNP TSC0005870
taattttatttat

SEQ ID NO: 24599 - DNA, 13 bp, Artificial Sequence
  Oligonucleotide for detection of SNP TSC0005870
ataaatgaaatta

SEQ ID NO: 24600 - DNA, 13 bp, Artificial Sequence
  Oligonucleotide for detection of SNP TSC0005870
taatttcatttat

SEQ ID NO: 24601 - DNA, 13 bp, Artificial Sequence
  Oligonucleotide for detection of SNP TSC0005880
gtttagttttttt

SEQ ID NO: 24602 - DNA, 13 bp, Artificial Sequence
  Oligonucleotide for detection of SNP TSC0005880
aaaaaaactaaac

SEQ ID NO: 24603 - DNA, 13 bp, Artificial Sequence
  Oligonucleotide for detection of SNP TSC0005880
gtttaggtttttt

SEQ ID NO: 24604 - DNA, 13 bp, Artificial Sequence
  Oligonucleotide for detection of SNP TSC0005880
aaaaaacctaaac

SEQ ID NO: 24605 - DNA, 13 bp, Artificial Sequence
  Oligonucleotide for detection of SNP TSC0005880
agaggggttgaay

SEQ ID NO: 24606 - DNA, 13 bp, Artificial Sequence
  Oligonucleotide for detection of SNP TSC0005880
rttcaacccctct

SEQ ID NO: 24607 - DNA, 13 bp, Artificial Sequence
  Oligonucleotide for detection of SNP TSC0005880
agagggtttgaay

SEQ ID NO: 24608 - DNA, 13 bp, Artificial Sequence
  Oligonucleotide for detection of SNP TSC0005880
rttcaaaccctct

SEQ ID NO: 24609 - DNA, 13 bp, Artificial Sequence
  Oligonucleotide for detection of SNP TSC0005881
tttttaattattt

SEQ ID NO: 24610 - DNA, 13 bp, Artificial Sequence
  Oligonucleotide for detection of SNP TSC0005881
aaataattaaaaa

SEQ ID NO: 24611 - DNA, 13 bp, Artificial Sequence
  Oligonucleotide for detection of SNP TSC0005881
tttttatttattt

SEQ ID NO: 24612 - DNA, 13 bp, Artificial Sequence
  Oligonucleotide for detection of SNP TSC0005881
aaataaataaaaa

SEQ ID NO: 24613 - DNA, 13 bp, Artificial Sequence
  Oligonucleotide for detection of SNP TSC0005881
aagtgattggagg

SEQ ID NO: 24614 - DNA, 13 bp, Artificial Sequence
  Oligonucleotide for detection of SNP TSC0005881
cctccaatcactt

SEQ ID NO: 24615 - DNA, 13 bp, Artificial Sequence
  Oligonucleotide for detection of SNP TSC0005881
aagtgagtggagg

SEQ ID NO: 24616 - DNA, 13 bp, Artificial Sequence
  Oligonucleotide for detection of SNP TSC0005881
cctccactcactt

SEQ ID NO: 24617 - DNA, 13 bp, Artificial Sequence
  Oligonucleotide for detection of SNP TSC0005886
gattatgtattag

SEQ ID NO: 24618 - DNA, 13 bp, Artificial Sequence
  Oligonucleotide for detection of SNP TSC0005886
ctaatacataatc

SEQ ID NO: 24619 - DNA, 13 bp, Artificial Sequence
  Oligonucleotide for detection of SNP TSC0005886
gattatttattag

SEQ ID NO: 24620 - DNA, 13 bp, Artificial Sequence
  Oligonucleotide for detection of SNP TSC0005886
ctaataaataatc

SEQ ID NO: 24621 - DNA, 13 bp, Artificial Sequence
  Oligonucleotide for detection of SNP TSC0005886
gattacgtattag

SEQ ID NO: 24622 - DNA, 13 bp, Artificial Sequence
  Oligonucleotide for detection of SNP TSC0005886
ctaatacgtaatc

SEQ ID NO: 24623 - DNA, 13 bp, Artificial Sequence
  Oligonucleotide for detection of SNP TSC0005886
ttaatatgtgaty

SEQ ID NO: 24624 - DNA, 13 bp, Artificial Sequence
  Oligonucleotide for detection of SNP TSC0005886
ratcacatattaa

SEQ ID NO: 24625 - DNA, 13 bp, Artificial Sequence
  Oligonucleotide for detection of SNP TSC0005886
ttaataagtgaty

SEQ ID NO: 24626 - DNA, 13 bp, Artificial Sequence
  Oligonucleotide for detection of SNP TSC0005886
ratcacttattaa

SEQ ID NO: 24627 - DNA, 13 bp, Artificial Sequence
  Oligonucleotide for detection of SNP TSC0005886
ttaatacgtgaty

SEQ ID NO: 24628 - DNA, 13 bp, Artificial Sequence
  Oligonucleotide for detection of SNP TSC0005886
ratcacgtattaa

SEQ ID NO: 24629 - DNA, 13 bp, Artificial Sequence
  Oligonucleotide for detection of SNP TSC0005889
gaggttgttttaa

SEQ ID NO: 24630 - DNA, 13 bp, Artificial Sequence
  Oligonucleotide for detection of SNP TSC0005889
ttaaaacaacctc

SEQ ID NO: 24631 - DNA, 13 bp, Artificial Sequence
  Oligonucleotide for detection of SNP TSC0005889
gaggttattttaa

SEQ ID NO: 24632 - DNA, 13 bp, Artificial Sequence
  Oligonucleotide for detection of SNP TSC0005889
ttaaaataacctc

SEQ ID NO: 24633 - DNA, 13 bp, Artificial Sequence
  Oligonucleotide for detection of SNP TSC0005892
gtttatattttgt

SEQ ID NO: 24634 - DNA, 13 bp, Artificial Sequence
  Oligonucleotide for detection of SNP TSC0005892
acaaaatataaac

SEQ ID NO: 24635 - DNA, 13 bp, Artificial Sequence
  Oligonucleotide for detection of SNP TSC0005892
gtttatgttttgt

SEQ ID NO: 24636 - DNA, 13 bp, Artificial Sequence
  Oligonucleotide for detection of SNP TSC0005892
acaaaacataaac

SEQ ID NO: 24637 - DNA, 13 bp, Artificial Sequence
  Oligonucleotide for detection of SNP TSC0005892
gtttacgttttgt

SEQ ID NO: 24638 - DNA, 13 bp, Artificial Sequence
  Oligonucleotide for detection of SNP TSC0005892
acaaaacgtaaac

SEQ ID NO: 24639 - DNA, 13 bp, Artificial Sequence
  Oligonucleotide for detection of SNP TSC0005892
ataaaatgtaagy

SEQ ID NO: 24640 - DNA, 13 bp, Artificial Sequence
  Oligonucleotide for detection of SNP TSC0005892
rcttacattttat

SEQ ID NO: 24641 - DNA, 13 bp, Artificial Sequence
  Oligonucleotide for detection of SNP TSC0005892
ataaaacgtaagy

SEQ ID NO: 24642 - DNA, 13 bp, Artificial Sequence
  Oligonucleotide for detection of SNP TSC0005892
rcttacgttttat

SEQ ID NO: 24643 - DNA, 13 bp, Artificial Sequence
  Oligonucleotide for detection of SNP TSC0005896
gtatagggaaaty

SEQ ID NO: 24644 - DNA, 13 bp, Artificial Sequence
  Oligonucleotide for detection of SNP TSC0005896
ratttccctatac

SEQ ID NO: 24645 - DNA, 13 bp, Artificial Sequence
  Oligonucleotide for detection of SNP TSC0005896
gtatagtgaaaty

SEQ ID NO: 24646 - DNA, 13 bp, Artificial Sequence
  Oligonucleotide for detection of SNP TSC0005896
ratttcactatac

SEQ ID NO: 24647 - DNA, 13 bp, Artificial Sequence
  Oligonucleotide for detection of SNP TSC0005896
gatttttttgtgy

SEQ ID NO: 24648 - DNA, 13 bp, Artificial Sequence
  Oligonucleotide for detection of SNP TSC0005896
rcacaaaaaaatc

SEQ ID NO: 24649 - DNA, 13 bp, Artificial Sequence
  Oligonucleotide for detection of SNP TSC0005896
gattttattgtgy

SEQ ID NO: 24650 - DNA, 13 bp, Artificial Sequence
  Oligonucleotide for detection of SNP TSC0005896
rcacaataaaatc

SEQ ID NO: 24651 - DNA, 13 bp, Artificial Sequence
  Oligonucleotide for detection of SNP TSC0005911
tttaataaattty

SEQ ID NO: 24652 - DNA, 13 bp, Artificial Sequence
  Oligonucleotide for detection of SNP TSC0005911
raaatttattaaa

SEQ ID NO: 24653 - DNA, 13 bp, Artificial Sequence
  Oligonucleotide for detection of SNP TSC0005911
tttaattaattty

SEQ ID NO: 24654 - DNA, 13 bp, Artificial Sequence
  Oligonucleotide for detection of SNP TSC0005911
raaattaattaaa

SEQ ID NO: 24655 - DNA, 13 bp, Artificial Sequence
  Oligonucleotide for detection of SNP TSC0005911
gaggtttattgag

SEQ ID NO: 24656 - DNA, 13 bp, Artificial Sequence
  Oligonucleotide for detection of SNP TSC0005911
ctcaataaacctc

SEQ ID NO: 24657 - DNA, 13 bp, Artificial Sequence
  Oligonucleotide for detection of SNP TSC0005911
gaggttgattgag

SEQ ID NO: 24658 - DNA, 13 bp, Artificial Sequence
  Oligonucleotide for detection of SNP TSC0005911
ctcaatcaacctc

SEQ ID NO: 24659 - DNA, 13 bp, Artificial Sequence
  Oligonucleotide for detection of SNP TSC0005912
ttaaatattgtat

SEQ ID NO: 24660 - DNA, 13 bp, Artificial Sequence
  Oligonucleotide for detection of SNP TSC0005912
atacaatatttaa

SEQ ID NO: 24661 - DNA, 13 bp, Artificial Sequence
  Oligonucleotide for detection of SNP TSC0005912
ttaaatgttgtat

SEQ ID NO: 24662 - DNA, 13 bp, Artificial Sequence
  Oligonucleotide for detection of SNP TSC0005912
atacaacatttaa

SEQ ID NO: 24663 - DNA, 13 bp, Artificial Sequence
  Oligonucleotide for detection of SNP TSC0005912
ttaaacgttgtat

SEQ ID NO: 24664 - DNA, 13 bp, Artificial Sequence
  Oligonucleotide for detection of SNP TSC0005912
atacaacgtttaa

SEQ ID NO: 24665 - DNA, 13 bp, Artificial Sequence
  Oligonucleotide for detection of SNP TSC0005912
atgtaatgtttgg

SEQ ID NO: 24666 - DNA, 13 bp, Artificial Sequence
  Oligonucleotide for detection of SNP TSC0005912
ccaaacattacat

SEQ ID NO: 24667 - DNA, 13 bp, Artificial Sequence
  Oligonucleotide for detection of SNP TSC0005912
atgtaacgtttgg

SEQ ID NO: 24668 - DNA, 13 bp, Artificial Sequence
  Oligonucleotide for detection of SNP TSC0005912
ccaaacgttacat

SEQ ID NO: 24669 - DNA, 13 bp, Artificial Sequence
  Oligonucleotide for detection of SNP TSC0005913
tttgtagaataaa

SEQ ID NO: 24670 - DNA, 13 bp, Artificial Sequence
  Oligonucleotide for detection of SNP TSC0005913
tttattctacaaa

SEQ ID NO: 24671 - DNA, 13 bp, Artificial Sequence
  Oligonucleotide for detection of SNP TSC0005913
tttgtaaaataaa

SEQ ID NO: 24672 - DNA, 13 bp, Artificial Sequence
  Oligonucleotide for detection of SNP TSC0005913
tttattttacaaa

SEQ ID NO: 24673 - DNA, 13 bp, Artificial Sequence
  Oligonucleotide for detection of SNP TSC0005914
aatattatattta

SEQ ID NO: 24674 - DNA, 13 bp, Artificial Sequence
  Oligonucleotide for detection of SNP TSC0005914
taaatataatatt

SEQ ID NO: 24675 - DNA, 13 bp, Artificial Sequence
  Oligonucleotide for detection of SNP TSC0005914
aatattttattta

SEQ ID NO: 24676 - DNA, 13 bp, Artificial Sequence
  Oligonucleotide for detection of SNP TSC0005914
taaataaaatatt

SEQ ID NO: 24677 - DNA, 13 bp, Artificial Sequence
  Oligonucleotide for detection of SNP TSC0005914
tggatgtgatgtt

SEQ ID NO: 24678 - DNA, 13 bp, Artificial Sequence
  Oligonucleotide for detection of SNP TSC0005914
aacatcacatcca

SEQ ID NO: 24679 - DNA, 13 bp, Artificial Sequence
  Oligonucleotide for detection of SNP TSC0005914
tggatgggatgtt

SEQ ID NO: 24680 - DNA, 13 bp, Artificial Sequence
  Oligonucleotide for detection of SNP TSC0005914
aacatcccatcca

SEQ ID NO: 24681 - DNA, 13 bp, Artificial Sequence
  Oligonucleotide for detection of SNP TSC0005916
gaggggattttty

SEQ ID NO: 24682 - DNA, 13 bp, Artificial Sequence
  Oligonucleotide for detection of SNP TSC0005916
raaaaatcccctc

SEQ ID NO: 24683 - DNA, 13 bp, Artificial Sequence
  Oligonucleotide for detection of SNP TSC0005916
gaggggtttttty

SEQ ID NO: 24684 - DNA, 13 bp, Artificial Sequence
  Oligonucleotide for detection of SNP TSC0005916
raaaaaacccctc

SEQ ID NO: 24685 - DNA, 13 bp, Artificial Sequence
  Oligonucleotide for detection of SNP TSC0005916
gggggatttttty

SEQ ID NO: 24686 - DNA, 13 bp, Artificial Sequence
  Oligonucleotide for detection of SNP TSC0005916
raaaaaatccccc

SEQ ID NO: 24687 - DNA, 13 bp, Artificial Sequence
  Oligonucleotide for detection of SNP TSC0005916
gggggaattttty

SEQ ID NO: 24688 - DNA, 13 bp, Artificial Sequence
  Oligonucleotide for detection of SNP TSC0005916
raaaaattccccc

SEQ ID NO: 24689 - DNA, 13 bp, Artificial Sequence
  Oligonucleotide for detection of SNP TSC0005920
tgttatgtttttt

SEQ ID NO: 24690 - DNA, 13 bp, Artificial Sequence
  Oligonucleotide for detection of SNP TSC0005920
aaaaaacataaca

SEQ ID NO: 24691 - DNA, 13 bp, Artificial Sequence
  Oligonucleotide for detection of SNP TSC0005920
tgttatatttttt

SEQ ID NO: 24692 - DNA, 13 bp, Artificial Sequence
  Oligonucleotide for detection of SNP TSC0005920
aaaaaatataaca

SEQ ID NO: 24693 - DNA, 13 bp, Artificial Sequence
  Oligonucleotide for detection of SNP TSC0005921
ataaatgaaatga

SEQ ID NO: 24694 - DNA, 13 bp, Artificial Sequence
  Oligonucleotide for detection of SNP TSC0005921
tcatttcatttat

SEQ ID NO: 24695 - DNA, 13 bp, Artificial Sequence
  Oligonucleotide for detection of SNP TSC0005921
ataaataaaatga

SEQ ID NO: 24696 - DNA, 13 bp, Artificial Sequence
  Oligonucleotide for detection of SNP TSC0005921
tcattttatttat

SEQ ID NO: 24697 - DNA, 13 bp, Artificial Sequence
  Oligonucleotide for detection of SNP TSC0005922
atggggataggty

SEQ ID NO: 24698 - DNA, 13 bp, Artificial Sequence
  Oligonucleotide for detection of SNP TSC0005922
racctatccccat

SEQ ID NO: 24699 - DNA, 13 bp, Artificial Sequence
  Oligonucleotide for detection of SNP TSC0005922
atggggttaggty

SEQ ID NO: 24700 - DNA, 13 bp, Artificial Sequence
  Oligonucleotide for detection of SNP TSC0005922
racctaaccccat

SEQ ID NO: 24701 - DNA, 13 bp, Artificial Sequence
  Oligonucleotide for detection of SNP TSC0005922
gatttatttttat

SEQ ID NO: 24702 - DNA, 13 bp, Artificial Sequence
  Oligonucleotide for detection of SNP TSC0005922
ataaaaataaatc

SEQ ID NO: 24703 - DNA, 13 bp, Artificial Sequence
  Oligonucleotide for detection of SNP TSC0005922
gatttagttttat

SEQ ID NO: 24704 - DNA, 13 bp, Artificial Sequence
  Oligonucleotide for detection of SNP TSC0005922
ataaaactaaatc

SEQ ID NO: 24705 - DNA, 13 bp, Artificial Sequence
  Oligonucleotide for detection of SNP TSC0005941
tttattatgtata

SEQ ID NO: 24706 - DNA, 13 bp, Artificial Sequence
  Oligonucleotide for detection of SNP TSC0005941
tatacataataaa

SEQ ID NO: 24707 - DNA, 13 bp, Artificial Sequence
  Oligonucleotide for detection of SNP TSC0005941
tttattgtgtata

SEQ ID NO: 24708 - DNA, 13 bp, Artificial Sequence
  Oligonucleotide for detection of SNP TSC0005941
tatacacaataaa

SEQ ID NO: 24709 - DNA, 13 bp, Artificial Sequence
  Oligonucleotide for detection of SNP TSC0005941
tttatcgtgtata

SEQ ID NO: 24710 - DNA, 13 bp, Artificial Sequence
  Oligonucleotide for detection of SNP TSC0005941
tatacacgataaa

SEQ ID NO: 24711 - DNA, 13 bp, Artificial Sequence
  Oligonucleotide for detection of SNP TSC0005941
tatatatggtgga

SEQ ID NO: 24712 - DNA, 13 bp, Artificial Sequence
  Oligonucleotide for detection of SNP TSC0005941
tccaccatatata

SEQ ID NO: 24713 - DNA, 13 bp, Artificial Sequence
  Oligonucleotide for detection of SNP TSC0005941
tatatacggtgga

SEQ ID NO: 24714 - DNA, 13 bp, Artificial Sequence
  Oligonucleotide for detection of SNP TSC0005941
tccaccgtatata

SEQ ID NO: 24715 - DNA, 13 bp, Artificial Sequence
  Oligonucleotide for detection of SNP TSC0005945
aattatatatttg

SEQ ID NO: 24716 - DNA, 13 bp, Artificial Sequence
  Oligonucleotide for detection of SNP TSC0005945
caaatatataatt

SEQ ID NO: 24717 - DNA, 13 bp, Artificial Sequence
  Oligonucleotide for detection of SNP TSC0005945
aattatgtatttg

SEQ ID NO: 24718 - DNA, 13 bp, Artificial Sequence
  Oligonucleotide for detection of SNP TSC0005945
caaatacataatt

SEQ ID NO: 24719 - DNA, 13 bp, Artificial Sequence
  Oligonucleotide for detection of SNP TSC0005950
ggttgtgtggtag

SEQ ID NO: 24720 - DNA, 13 bp, Artificial Sequence
  Oligonucleotide for detection of SNP TSC0005950
ctaccacacaacc

SEQ ID NO: 24721 - DNA, 13 bp, Artificial Sequence
  Oligonucleotide for detection of SNP TSC0005950
ggttgtatggtag

SEQ ID NO: 24722 - DNA, 13 bp, Artificial Sequence
  Oligonucleotide for detection of SNP TSC0005950
ctaccatacaacc

SEQ ID NO: 24723 - DNA, 13 bp, Artificial Sequence
  Oligonucleotide for detection of SNP TSC0005963
gtattttttagtt

SEQ ID NO: 24724 - DNA, 13 bp, Artificial Sequence
  Oligonucleotide for detection of SNP TSC0005963
aactaaaaaatac

SEQ ID NO: 24725 - DNA, 13 bp, Artificial Sequence
  Oligonucleotide for detection of SNP TSC0005963
gtatttgttagtt

SEQ ID NO: 24726 - DNA, 13 bp, Artificial Sequence
  Oligonucleotide for detection of SNP TSC0005963
aactaacaaatac

SEQ ID NO: 24727 - DNA, 13 bp, Artificial Sequence
  Oligonucleotide for detection of SNP TSC0005963
agttaggaagtay

SEQ ID NO: 24728 - DNA, 13 bp, Artificial Sequence
  Oligonucleotide for detection of SNP TSC0005963
rtacttcctaact

SEQ ID NO: 24729 - DNA, 13 bp, Artificial Sequence
  Oligonucleotide for detection of SNP TSC0005963
agttagtaagtay

SEQ ID NO: 24730 - DNA, 13 bp, Artificial Sequence
  Oligonucleotide for detection of SNP TSC0005963
rtacttactaact

SEQ ID NO: 24731 - DNA, 13 bp, Artificial Sequence
  Oligonucleotide for detection of SNP TSC0005965
ttggtaagtgaga

SEQ ID NO: 24732 - DNA, 13 bp, Artificial Sequence
  Oligonucleotide for detection of SNP TSC0005965
tctcacttaccaa

SEQ ID NO: 24733 - DNA, 13 bp, Artificial Sequence
  Oligonucleotide for detection of SNP TSC0005965
ttggtatgtgaga

SEQ ID NO: 24734 - DNA, 13 bp, Artificial Sequence
  Oligonucleotide for detection of SNP TSC0005965
tctcacataccaa

SEQ ID NO: 24735 - DNA, 13 bp, Artificial Sequence
  Oligonucleotide for detection of SNP TSC0005965
ttttatttgttag

SEQ ID NO: 24736 - DNA, 13 bp, Artificial Sequence
  Oligonucleotide for detection of SNP TSC0005965
ctaacaaataaaa

SEQ ID NO: 24737 - DNA, 13 bp, Artificial Sequence
  Oligonucleotide for detection of SNP TSC0005965
ttttatatgttag

SEQ ID NO: 24738 - DNA, 13 bp, Artificial Sequence
  Oligonucleotide for detection of SNP TSC0005965
ctaacatataaaa

SEQ ID NO: 24739 - DNA, 13 bp, Artificial Sequence
  Oligonucleotide for detection of SNP TSC0005966
aagagagggtagg

SEQ ID NO: 24740 - DNA, 13 bp, Artificial Sequence
  Oligonucleotide for detection of SNP TSC0005966
cctaccctctctt

SEQ ID NO: 24741 - DNA, 13 bp, Artificial Sequence
  Oligonucleotide for detection of SNP TSC0005966
aagagaaggtagg

SEQ ID NO: 24742 - DNA, 13 bp, Artificial Sequence
  Oligonucleotide for detection of SNP TSC0005966
cctaccttctctt

SEQ ID NO: 24743 - DNA, 13 bp, Artificial Sequence
  Oligonucleotide for detection of SNP TSC0005967
ttttagaagtaga

SEQ ID NO: 24744 - DNA, 13 bp, Artificial Sequence
  Oligonucleotide for detection of SNP TSC0005967
tctacttctaaaa

SEQ ID NO: 24745 - DNA, 13 bp, Artificial Sequence
  Oligonucleotide for detection of SNP TSC0005967
ttttaggagtaga

SEQ ID NO: 24746 - DNA, 13 bp, Artificial Sequence
  Oligonucleotide for detection of SNP TSC0005967
tctactcctaaaa

SEQ ID NO: 24747 - DNA, 13 bp, Artificial Sequence
  Oligonucleotide for detection of SNP TSC0005970
gttatggtgggty

SEQ ID NO: 24748 - DNA, 13 bp, Artificial Sequence
  Oligonucleotide for detection of SNP TSC0005970
racccaccataac

SEQ ID NO: 24749 - DNA, 13 bp, Artificial Sequence
  Oligonucleotide for detection of SNP TSC0005970
gttatgatgggty

SEQ ID NO: 24750 - DNA, 13 bp, Artificial Sequence
  Oligonucleotide for detection of SNP TSC0005970
racccatcataac

SEQ ID NO: 24751 - DNA, 13 bp, Artificial Sequence
  Oligonucleotide for detection of SNP TSC0005971
gtgttagtattga

SEQ ID NO: 24752 - DNA, 13 bp, Artificial Sequence
  Oligonucleotide for detection of SNP TSC0005971
tcaatactaacac

SEQ ID NO: 24753 - DNA, 13 bp, Artificial Sequence
  Oligonucleotide for detection of SNP TSC0005971
gtgttaatattga

SEQ ID NO: 24754 - DNA, 13 bp, Artificial Sequence
  Oligonucleotide for detection of SNP TSC0005971
tcaatattaacac

SEQ ID NO: 24755 - DNA, 13 bp, Artificial Sequence
  Oligonucleotide for detection of SNP TSC0005972
aatagtattatta

SEQ ID NO: 24756 - DNA, 13 bp, Artificial Sequence
  Oligonucleotide for detection of SNP TSC0005972
taataatactatt

SEQ ID NO: 24757 - DNA, 13 bp, Artificial Sequence
  Oligonucleotide for detection of SNP TSC0005972
aatagttttatta

SEQ ID NO: 24758 - DNA, 13 bp, Artificial Sequence
  Oligonucleotide for detection of SNP TSC0005972
taataaaactatt

SEQ ID NO: 24759 - DNA, 13 bp, Artificial Sequence
  Oligonucleotide for detection of SNP TSC0005972
tgataatgttgtt

SEQ ID NO: 24760 - DNA, 13 bp, Artificial Sequence
  Oligonucleotide for detection of SNP TSC0005972
aacaacattatca

SEQ ID NO: 24761 - DNA, 13 bp, Artificial Sequence
  Oligonucleotide for detection of SNP TSC0005972
tgataaggttgtt

SEQ ID NO: 24762 - DNA, 13 bp, Artificial Sequence
  Oligonucleotide for detection of SNP TSC0005972
aacaaccttatca

SEQ ID NO: 24763 - DNA, 13 bp, Artificial Sequence
  Oligonucleotide for detection of SNP TSC0005979
taatatatatgta

SEQ ID NO: 24764 - DNA, 13 bp, Artificial Sequence
  Oligonucleotide for detection of SNP TSC0005979
tacatatatatta

SEQ ID NO: 24765 - DNA, 13 bp, Artificial Sequence
  Oligonucleotide for detection of SNP TSC0005979
taatatgtatgta

SEQ ID NO: 24766 - DNA, 13 bp, Artificial Sequence
  Oligonucleotide for detection of SNP TSC0005979
tacatacatatta

SEQ ID NO: 24767 - DNA, 13 bp, Artificial Sequence
  Oligonucleotide for detection of SNP TSC0005979
taatacgtatgta

SEQ ID NO: 24768 - DNA, 13 bp, Artificial Sequence
  Oligonucleotide for detection of SNP TSC0005979
tacatacgtatta

SEQ ID NO: 24769 - DNA, 13 bp, Artificial Sequence
  Oligonucleotide for detection of SNP TSC0005979
tatatgtgtgttg

SEQ ID NO: 24770 - DNA, 13 bp, Artificial Sequence
  Oligonucleotide for detection of SNP TSC0005979
caacacacatata

SEQ ID NO: 24771 - DNA, 13 bp, Artificial Sequence
  Oligonucleotide for detection of SNP TSC0005979
tatatgcgtgttg

SEQ ID NO: 24772 - DNA, 13 bp, Artificial Sequence
  Oligonucleotide for detection of SNP TSC0005979
caacacgcatata

SEQ ID NO: 24773 - DNA, 13 bp, Artificial Sequence
  Oligonucleotide for detection of SNP TSC0005984
agtttagaattag

SEQ ID NO: 24774 - DNA, 13 bp, Artificial Sequence
  Oligonucleotide for detection of SNP TSC0005984
ctaattctaaact

SEQ ID NO: 24775 - DNA, 13 bp, Artificial Sequence
  Oligonucleotide for detection of SNP TSC0005984
agtttataattag

SEQ ID NO: 24776 - DNA, 13 bp, Artificial Sequence
  Oligonucleotide for detection of SNP TSC0005984
ctaattataaact

SEQ ID NO: 24777 - DNA, 13 bp, Artificial Sequence
  Oligonucleotide for detection of SNP TSC0005984
ttaattttgagtt

SEQ ID NO: 24778 - DNA, 13 bp, Artificial Sequence
  Oligonucleotide for detection of SNP TSC0005984
aactcaaaattaa

SEQ ID NO: 24779 - DNA, 13 bp, Artificial Sequence
  Oligonucleotide for detection of SNP TSC0005984
ttaattatgagtt

SEQ ID NO: 24780 - DNA, 13 bp, Artificial Sequence
  Oligonucleotide for detection of SNP TSC0005984
aactcataattaa

SEQ ID NO: 24781 - DNA, 13 bp, Artificial Sequence
  Oligonucleotide for detection of SNP TSC0005993
tttgagtgtagga

SEQ ID NO: 24782 - DNA, 13 bp, Artificial Sequence
  Oligonucleotide for detection of SNP TSC0005993
tcctacactcaaa

SEQ ID NO: 24783 - DNA, 13 bp, Artificial Sequence
  Oligonucleotide for detection of SNP TSC0005993
tttgagcgtagga

SEQ ID NO: 24784 - DNA, 13 bp, Artificial Sequence
  Oligonucleotide for detection of SNP TSC0005993
tcctacgctcaaa

SEQ ID NO: 24785 - DNA, 13 bp, Artificial Sequence
  Oligonucleotide for detection of SNP TSC0005993
ttttgtgtttaga

SEQ ID NO: 24786 - DNA, 13 bp, Artificial Sequence
  Oligonucleotide for detection of SNP TSC0005993
tctaaacacaaaa

SEQ ID NO: 24787 - DNA, 13 bp, Artificial Sequence
  Oligonucleotide for detection of SNP TSC0005993
ttttgtatttaga

SEQ ID NO: 24788 - DNA, 13 bp, Artificial Sequence
  Oligonucleotide for detection of SNP TSC0005993
tctaaatacaaaa

SEQ ID NO: 24789 - DNA, 13 bp, Artificial Sequence
  Oligonucleotide for detection of SNP TSC0005993
ttttgcgtttaga

SEQ ID NO: 24790 - DNA, 13 bp, Artificial Sequence
  Oligonucleotide for detection of SNP TSC0005993
tctaaacgcaaaa

SEQ ID NO: 24791 - DNA, 13 bp, Artificial Sequence
  Oligonucleotide for detection of SNP TSC0005994
tgtggtatattgt

SEQ ID NO: 24792 - DNA, 13 bp, Artificial Sequence
  Oligonucleotide for detection of SNP TSC0005994
acaatataccaca

SEQ ID NO: 24793 - DNA, 13 bp, Artificial Sequence
  Oligonucleotide for detection of SNP TSC0005994
tgtggtgtattgt

SEQ ID NO: 24794 - DNA, 13 bp, Artificial Sequence
  Oligonucleotide for detection of SNP TSC0005994
acaatacaccaca

SEQ ID NO: 24795 - DNA, 13 bp, Artificial Sequence
  Oligonucleotide for detection of SNP TSC0005995
taggtttgatgat

SEQ ID NO: 24796 - DNA, 13 bp, Artificial Sequence
  Oligonucleotide for detection of SNP TSC0005995
atcatcaaaccta

SEQ ID NO: 24797 - DNA, 13 bp, Artificial Sequence
  Oligonucleotide for detection of SNP TSC0005995
taggttggatgat

SEQ ID NO: 24798 - DNA, 13 bp, Artificial Sequence
  Oligonucleotide for detection of SNP TSC0005995
atcatccaaccta

SEQ ID NO: 24799 - DNA, 13 bp, Artificial Sequence
  Oligonucleotide for detection of SNP TSC0005995
taggttcgatgat

SEQ ID NO: 24800 - DNA, 13 bp, Artificial Sequence
  Oligonucleotide for detection of SNP TSC0005995
atcatcgaaccta

SEQ ID NO: 24801 - DNA, 13 bp, Artificial Sequence
  Oligonucleotide for detection of SNP TSC0005995
attattgaattta

SEQ ID NO: 24802 - DNA, 13 bp, Artificial Sequence
  Oligonucleotide for detection of SNP TSC0005995
taaattcaataat

SEQ ID NO: 24803 - DNA, 13 bp, Artificial Sequence
  Oligonucleotide for detection of SNP TSC0005995
attatttaattta

SEQ ID NO: 24804 - DNA, 13 bp, Artificial Sequence
  Oligonucleotide for detection of SNP TSC0005995
taaattaaataat

SEQ ID NO: 24805 - DNA, 13 bp, Artificial Sequence
  Oligonucleotide for detection of SNP TSC0005995
attatcgaattta

SEQ ID NO: 24806 - DNA, 13 bp, Artificial Sequence
  Oligonucleotide for detection of SNP TSC0005995
taaattcgataat

SEQ ID NO: 24807 - DNA, 13 bp, Artificial Sequence
  Oligonucleotide for detection of SNP TSC0005996
taagaaagatgat

SEQ ID NO: 24808 - DNA, 13 bp, Artificial Sequence
  Oligonucleotide for detection of SNP TSC0005996
atcatctttctta

SEQ ID NO: 24809 - DNA, 13 bp, Artificial Sequence
  Oligonucleotide for detection of SNP TSC0005996
taagaaggatgat

SEQ ID NO: 24810 - DNA, 13 bp, Artificial Sequence
  Oligonucleotide for detection of SNP TSC0005996
atcatccttctta

SEQ ID NO: 24811 - DNA, 13 bp, Artificial Sequence
  Oligonucleotide for detection of SNP TSC0005997
gattttagaaaat

SEQ ID NO: 24812 - DNA, 13 bp, Artificial Sequence
  Oligonucleotide for detection of SNP TSC0005997
attttctaaaatc

SEQ ID NO: 24813 - DNA, 13 bp, Artificial Sequence
  Oligonucleotide for detection of SNP TSC0005997
gattttggaaaat

SEQ ID NO: 24814 - DNA, 13 bp, Artificial Sequence
  Oligonucleotide for detection of SNP TSC0005997
attttccaaaatc

SEQ ID NO: 24815 - DNA, 13 bp, Artificial Sequence
  Oligonucleotide for detection of SNP TSC0005997
gatttcggaaaat

SEQ ID NO: 24816 - DNA, 13 bp, Artificial Sequence
  Oligonucleotide for detection of SNP TSC0005997
attttccgaaatc

SEQ ID NO: 24817 - DNA, 13 bp, Artificial Sequence
  Oligonucleotide for detection of SNP TSC0005997
attttttgagaty

SEQ ID NO: 24818 - DNA, 13 bp, Artificial Sequence
  Oligonucleotide for detection of SNP TSC0005997
ratctcaaaaaat

SEQ ID NO: 24819 - DNA, 13 bp, Artificial Sequence
  Oligonucleotide for detection of SNP TSC0005997
atttttcgagaty

SEQ ID NO: 24820 - DNA, 13 bp, Artificial Sequence
  Oligonucleotide for detection of SNP TSC0005997
ratctcgaaaaat

SEQ ID NO: 24821 - DNA, 13 bp, Artificial Sequence
  Oligonucleotide for detection of SNP TSC0005998
tattattaaagag

SEQ ID NO: 24822 - DNA, 13 bp, Artificial Sequence
  Oligonucleotide for detection of SNP TSC0005998
ctctttaataata

SEQ ID NO: 24823 - DNA, 13 bp, Artificial Sequence
  Oligonucleotide for detection of SNP TSC0005998
tattatgaaagag

SEQ ID NO: 24824 - DNA, 13 bp, Artificial Sequence
  Oligonucleotide for detection of SNP TSC0005998
ctctttcataata

SEQ ID NO: 24825 - DNA, 13 bp, Artificial Sequence
  Oligonucleotide for detection of SNP TSC0005998
ttttttgatggtg

SEQ ID NO: 24826 - DNA, 13 bp, Artificial Sequence
  Oligonucleotide for detection of SNP TSC0005998
caccatcaaaaaa

SEQ ID NO: 24827 - DNA, 13 bp, Artificial Sequence
  Oligonucleotide for detection of SNP TSC0005998
tttttttatggtg

SEQ ID NO: 24828 - DNA, 13 bp, Artificial Sequence
  Oligonucleotide for detection of SNP TSC0005998
caccataaaaaaa

SEQ ID NO: 24829 - DNA, 13 bp, Artificial Sequence
  Oligonucleotide for detection of SNP TSC0005999
tatttaaaaaaag

SEQ ID NO: 24830 - DNA, 13 bp, Artificial Sequence
  Oligonucleotide for detection of SNP TSC0005999
ctttttttaaata

SEQ ID NO: 24831 - DNA, 13 bp, Artificial Sequence
  Oligonucleotide for detection of SNP TSC0005999
tatttagaaaaag

SEQ ID NO: 24832 - DNA, 13 bp, Artificial Sequence
  Oligonucleotide for detection of SNP TSC0005999
ctttttctaaata

SEQ ID NO: 24833 - DNA, 13 bp, Artificial Sequence
  Oligonucleotide for detection of SNP TSC0006000
ttgtaggggtggg

SEQ ID NO: 24834 - DNA, 13 bp, Artificial Sequence
  Oligonucleotide for detection of SNP TSC0006000
cccacccctacaa

SEQ ID NO: 24835 - DNA, 13 bp, Artificial Sequence
  Oligonucleotide for detection of SNP TSC0006000
ttgtagaggtggg

SEQ ID NO: 24836 - DNA, 13 bp, Artificial Sequence
  Oligonucleotide for detection of SNP TSC0006000
cccacctctacaa

SEQ ID NO: 24837 - DNA, 13 bp, Artificial Sequence
  Oligonucleotide for detection of SNP TSC0006001
atatataaaaata

SEQ ID NO: 24838 - DNA, 13 bp, Artificial Sequence
  Oligonucleotide for detection of SNP TSC0006001
tatttttatatat

SEQ ID NO: 24839 - DNA, 13 bp, Artificial Sequence
  Oligonucleotide for detection of SNP TSC0006001
atatattaaaata

SEQ ID NO: 24840 - DNA, 13 bp, Artificial Sequence
  Oligonucleotide for detection of SNP TSC0006001
tattttaatatat

SEQ ID NO: 24841 - DNA, 13 bp, Artificial Sequence
  Oligonucleotide for detection of SNP TSC0006001
tgtttttgtatat

SEQ ID NO: 24842 - DNA, 13 bp, Artificial Sequence
  Oligonucleotide for detection of SNP TSC0006001
atatacaaaaaca

SEQ ID NO: 24843 - DNA, 13 bp, Artificial Sequence
  Oligonucleotide for detection of SNP TSC0006001
tgttttggtatat

SEQ ID NO: 24844 - DNA, 13 bp, Artificial Sequence
  Oligonucleotide for detection of SNP TSC0006001
atataccaaaaca

SEQ ID NO: 24845 - DNA, 13 bp, Artificial Sequence
  Oligonucleotide for detection of SNP TSC0006002
ttttgttgttgtg

SEQ ID NO: 24846 - DNA, 13 bp, Artificial Sequence
  Oligonucleotide for detection of SNP TSC0006002
cacaacaacaaaa

SEQ ID NO: 24847 - DNA, 13 bp, Artificial Sequence
  Oligonucleotide for detection of SNP TSC0006002
tttcgttgttgtg

SEQ ID NO: 24848 - DNA, 13 bp, Artificial Sequence
  Oligonucleotide for detection of SNP TSC0006002
cacaacaacgaaa

SEQ ID NO: 24849 - DNA, 13 bp, Artificial Sequence
  Oligonucleotide for detection of SNP TSC0006002
ttttgtcgttgtg

SEQ ID NO: 24850 - DNA, 13 bp, Artificial Sequence
  Oligonucleotide for detection of SNP TSC0006002
cacaacgacaaaa

SEQ ID NO: 24851 - DNA, 13 bp, Artificial Sequence
  Oligonucleotide for detection of SNP TSC0006002
ttttgttgtcgtg

SEQ ID NO: 24852 - DNA, 13 bp, Artificial Sequence
  Oligonucleotide for detection of SNP TSC0006002
cacgacaacaaaa

SEQ ID NO: 24853 - DNA, 13 bp, Artificial Sequence
  Oligonucleotide for detection of SNP TSC0006002
tttcgttgtcgtg

SEQ ID NO: 24854 - DNA, 13 bp, Artificial Sequence
  Oligonucleotide for detection of SNP TSC0006002
cacgacaacgaaa

SEQ ID NO: 24855 - DNA, 13 bp, Artificial Sequence
  Oligonucleotide for detection of SNP TSC0006002
tttcgtcgttgtg

SEQ ID NO: 24856 - DNA, 13 bp, Artificial Sequence
  Oligonucleotide for detection of SNP TSC0006002
cacaacgacgaaa

SEQ ID NO: 24857 - DNA, 13 bp, Artificial Sequence
  Oligonucleotide for detection of SNP TSC0006002
ttttgtcgtcgtg

SEQ ID NO: 24858 - DNA, 13 bp, Artificial Sequence
  Oligonucleotide for detection of SNP TSC0006002
cacgacgacaaaa

SEQ ID NO: 24859 - DNA, 13 bp, Artificial Sequence
  Oligonucleotide for detection of SNP TSC0006002
tttcgtcgtcgtg

SEQ ID NO: 24860 - DNA, 13 bp, Artificial Sequence
  Oligonucleotide for detection of SNP TSC0006002
cacgacgacgaaa

SEQ ID NO: 24861 - DNA, 13 bp, Artificial Sequence
  Oligonucleotide for detection of SNP TSC0006002
tatggtgatgggg

SEQ ID NO: 24862 - DNA, 13 bp, Artificial Sequence
  Oligonucleotide for detection of SNP TSC0006002
ccccatcaccata

SEQ ID NO: 24863 - DNA, 13 bp, Artificial Sequence
  Oligonucleotide for detection of SNP TSC0006002
tatggtaatgggg

SEQ ID NO: 24864 - DNA, 13 bp, Artificial Sequence
  Oligonucleotide for detection of SNP TSC0006002
ccccattaccata

SEQ ID NO: 24865 - DNA, 13 bp, Artificial Sequence
  Oligonucleotide for detection of SNP TSC0006002
tacggtgatgggg

SEQ ID NO: 24866 - DNA, 13 bp, Artificial Sequence
  Oligonucleotide for detection of SNP TSC0006002
ccccatcaccgta

SEQ ID NO: 24867 - DNA, 13 bp, Artificial Sequence
  Oligonucleotide for detection of SNP TSC0006002
tacggtaatgggg

SEQ ID NO: 24868 - DNA, 13 bp, Artificial Sequence
  Oligonucleotide for detection of SNP TSC0006002
ccccattaccgta

SEQ ID NO: 24869 - DNA, 13 bp, Artificial Sequence
  Oligonucleotide for detection of SNP TSC0006002
tatggcgatgggg

SEQ ID NO: 24870 - DNA, 13 bp, Artificial Sequence
  Oligonucleotide for detection of SNP TSC0006002
ccccatcgccata

SEQ ID NO: 24871 - DNA, 13 bp, Artificial Sequence
  Oligonucleotide for detection of SNP TSC0006002
tatggtaacgggg

SEQ ID NO: 24872 - DNA, 13 bp, Artificial Sequence
  Oligonucleotide for detection of SNP TSC0006002
ccccgttaccata

SEQ ID NO: 24873 - DNA, 13 bp, Artificial Sequence
  Oligonucleotide for detection of SNP TSC0006002
tatggtgacgggg

SEQ ID NO: 24874 - DNA, 13 bp, Artificial Sequence
  Oligonucleotide for detection of SNP TSC0006002
ccccgtcaccata

SEQ ID NO: 24875 - DNA, 13 bp, Artificial Sequence
  Oligonucleotide for detection of SNP TSC0006002
tacggtaacgggg

SEQ ID NO: 24876 - DNA, 13 bp, Artificial Sequence
  Oligonucleotide for detection of SNP TSC0006002
ccccgttaccgta

SEQ ID NO: 24877 - DNA, 13 bp, Artificial Sequence
  Oligonucleotide for detection of SNP TSC0006002
tacggcgatgggg

SEQ ID NO: 24878 - DNA, 13 bp, Artificial Sequence
  Oligonucleotide for detection of SNP TSC0006002
ccccatcgccgta

SEQ ID NO: 24879 - DNA, 13 bp, Artificial Sequence
  Oligonucleotide for detection of SNP TSC0006002
tacggtgacgggg

SEQ ID NO: 24880 - DNA, 13 bp, Artificial Sequence
  Oligonucleotide for detection of SNP TSC0006002
ccccgtcaccgta

SEQ ID NO: 24881 - DNA, 13 bp, Artificial Sequence
  Oligonucleotide for detection of SNP TSC0006002
tatggcgacgggg

SEQ ID NO: 24882 - DNA, 13 bp, Artificial Sequence
  Oligonucleotide for detection of SNP TSC0006002
ccccgtcgccata

SEQ ID NO: 24883 - DNA, 13 bp, Artificial Sequence
  Oligonucleotide for detection of SNP TSC0006002
tacggcgacgggg

SEQ ID NO: 24884 - DNA, 13 bp, Artificial Sequence
  Oligonucleotide for detection of SNP TSC0006002
ccccgtcgccgta

SEQ ID NO: 24885 - DNA, 13 bp, Artificial Sequence
  Oligonucleotide for detection of SNP TSC0006005
atatgtagaattg

SEQ ID NO: 24886 - DNA, 13 bp, Artificial Sequence
  Oligonucleotide for detection of SNP TSC0006005
caattctacatat

SEQ ID NO: 24887 - DNA, 13 bp, Artificial Sequence
  Oligonucleotide for detection of SNP TSC0006005
atatgttgaattg

SEQ ID NO: 24888 - DNA, 13 bp, Artificial Sequence
  Oligonucleotide for detection of SNP TSC0006005
caattcaacatat

SEQ ID NO: 24889 - DNA, 13 bp, Artificial Sequence
  Oligonucleotide for detection of SNP TSC0006005
taattttatatgt

SEQ ID NO: 24890 - DNA, 13 bp, Artificial Sequence
  Oligonucleotide for detection of SNP TSC0006005
acatataaaatta

SEQ ID NO: 24891 - DNA, 13 bp, Artificial Sequence
  Oligonucleotide for detection of SNP TSC0006005
taatttaatatgt

SEQ ID NO: 24892 - DNA, 13 bp, Artificial Sequence
  Oligonucleotide for detection of SNP TSC0006005
acatattaaatta

SEQ ID NO: 24893 - DNA, 13 bp, Artificial Sequence
  Oligonucleotide for detection of SNP TSC0006006
agattgtgtttay

SEQ ID NO: 24894 - DNA, 13 bp, Artificial Sequence
  Oligonucleotide for detection of SNP TSC0006006
rtaaacacaatct

SEQ ID NO: 24895 - DNA, 13 bp, Artificial Sequence
  Oligonucleotide for detection of SNP TSC0006006
agatcgtgtttay

SEQ ID NO: 24896 - DNA, 13 bp, Artificial Sequence
  Oligonucleotide for detection of SNP TSC0006006
rtaaacacgatct

SEQ ID NO: 24897 - DNA, 13 bp, Artificial Sequence
  Oligonucleotide for detection of SNP TSC0006006
agattgcgtttay

SEQ ID NO: 24898 - DNA, 13 bp, Artificial Sequence
  Oligonucleotide for detection of SNP TSC0006006
rtaaacgcaatct

SEQ ID NO: 24899 - DNA, 13 bp, Artificial Sequence
  Oligonucleotide for detection of SNP TSC0006006
agatcgcgtttay

SEQ ID NO: 24900 - DNA, 13 bp, Artificial Sequence
  Oligonucleotide for detection of SNP TSC0006006
rtaaacgcgatct

SEQ ID NO: 24901 - DNA, 13 bp, Artificial Sequence
  Oligonucleotide for detection of SNP TSC0006006
gtgggtgtggttt

SEQ ID NO: 24902 - DNA, 13 bp, Artificial Sequence
  Oligonucleotide for detection of SNP TSC0006006
aaaccacacccac

SEQ ID NO: 24903 - DNA, 13 bp, Artificial Sequence
  Oligonucleotide for detection of SNP TSC0006006
gtgggtatggttt

SEQ ID NO: 24904 - DNA, 13 bp, Artificial Sequence
  Oligonucleotide for detection of SNP TSC0006006
aaaccatacccac

SEQ ID NO: 24905 - DNA, 13 bp, Artificial Sequence
  Oligonucleotide for detection of SNP TSC0006006
gtgggcgtggttt

SEQ ID NO: 24906 - DNA, 13 bp, Artificial Sequence
  Oligonucleotide for detection of SNP TSC0006006
aaaccacgcccac

SEQ ID NO: 24907 - DNA, 13 bp, Artificial Sequence
  Oligonucleotide for detection of SNP TSC0006006
gtgggtacggttt

SEQ ID NO: 24908 - DNA, 13 bp, Artificial Sequence
  Oligonucleotide for detection of SNP TSC0006006
aaaccgtacccac

SEQ ID NO: 24909 - DNA, 13 bp, Artificial Sequence
  Oligonucleotide for detection of SNP TSC0006006
gtgggtgcggttt

SEQ ID NO: 24910 - DNA, 13 bp, Artificial Sequence
  Oligonucleotide for detection of SNP TSC0006006
aaaccgcacccac

SEQ ID NO: 24911 - DNA, 13 bp, Artificial Sequence
  Oligonucleotide for detection of SNP TSC0006006
gtgggcgcggttt

SEQ ID NO: 24912 - DNA, 13 bp, Artificial Sequence
  Oligonucleotide for detection of SNP TSC0006006
aaaccgcgcccac

SEQ ID NO: 24913 - DNA, 13 bp, Artificial Sequence
  Oligonucleotide for detection of SNP TSC0006007
tttggaagttaga

SEQ ID NO: 24914 - DNA, 13 bp, Artificial Sequence
  Oligonucleotide for detection of SNP TSC0006007
tctaacttccaaa

SEQ ID NO: 24915 - DNA, 13 bp, Artificial Sequence
  Oligonucleotide for detection of SNP TSC0006007
tttggaggttaga

SEQ ID NO: 24916 - DNA, 13 bp, Artificial Sequence
  Oligonucleotide for detection of SNP TSC0006007
tctaacctccaaa

SEQ ID NO: 24917 - DNA, 13 bp, Artificial Sequence
  Oligonucleotide for detection of SNP TSC0006008
attgaatgtttta

SEQ ID NO: 24918 - DNA, 13 bp, Artificial Sequence
  Oligonucleotide for detection of SNP TSC0006008
taaaacattcaat

SEQ ID NO: 24919 - DNA, 13 bp, Artificial Sequence
  Oligonucleotide for detection of SNP TSC0006008
attgaacgtttta

SEQ ID NO: 24920 - DNA, 13 bp, Artificial Sequence
  Oligonucleotide for detection of SNP TSC0006008
taaaacgttcaat

SEQ ID NO: 24921 - DNA, 13 bp, Artificial Sequence
  Oligonucleotide for detection of SNP TSC0006008
taaggtgtttagt

SEQ ID NO: 24922 - DNA, 13 bp, Artificial Sequence
  Oligonucleotide for detection of SNP TSC0006008
actaaacacctta

SEQ ID NO: 24923 - DNA, 13 bp, Artificial Sequence
  Oligonucleotide for detection of SNP TSC0006008
taaggtatttagt

SEQ ID NO: 24924 - DNA, 13 bp, Artificial Sequence
  Oligonucleotide for detection of SNP TSC0006008
actaaatacctta

SEQ ID NO: 24925 - DNA, 13 bp, Artificial Sequence
  Oligonucleotide for detection of SNP TSC0006008
taaggcgtttagt

SEQ ID NO: 24926 - DNA, 13 bp, Artificial Sequence
  Oligonucleotide for detection of SNP TSC0006008
actaaacgcctta

SEQ ID NO: 24927 - DNA, 13 bp, Artificial Sequence
  Oligonucleotide for detection of SNP TSC0006012
tattgaagaaatt

SEQ ID NO: 24928 - DNA, 13 bp, Artificial Sequence
  Oligonucleotide for detection of SNP TSC0006012
aatttcttcaata

SEQ ID NO: 24929 - DNA, 13 bp, Artificial Sequence
  Oligonucleotide for detection of SNP TSC0006012
tattgaggaaatt

SEQ ID NO: 24930 - DNA, 13 bp, Artificial Sequence
  Oligonucleotide for detection of SNP TSC0006012
aatttcctcaata

SEQ ID NO: 24931 - DNA, 13 bp, Artificial Sequence
  Oligonucleotide for detection of SNP TSC0006014
tattgaatatttt

SEQ ID NO: 24932 - DNA, 13 bp, Artificial Sequence
  Oligonucleotide for detection of SNP TSC0006014
aaaatattcaata

SEQ ID NO: 24933 - DNA, 13 bp, Artificial Sequence
  Oligonucleotide for detection of SNP TSC0006014
tattgagtatttt

SEQ ID NO: 24934 - DNA, 13 bp, Artificial Sequence
  Oligonucleotide for detection of SNP TSC0006014
aaaatactcaata

SEQ ID NO: 24935 - DNA, 13 bp, Artificial Sequence
  Oligonucleotide for detection of SNP TSC0006019
ttttttgttttga

SEQ ID NO: 24936 - DNA, 13 bp, Artificial Sequence
  Oligonucleotide for detection of SNP TSC0006019
tcaaaacaaaaaa

SEQ ID NO: 24937 - DNA, 13 bp, Artificial Sequence
  Oligonucleotide for detection of SNP TSC0006019
ttttttattttga

SEQ ID NO: 24938 - DNA, 13 bp, Artificial Sequence
  Oligonucleotide for detection of SNP TSC0006019
tcaaaataaaaaa

SEQ ID NO: 24939 - DNA, 13 bp, Artificial Sequence
  Oligonucleotide for detection of SNP TSC0006020
atatgtattttga

SEQ ID NO: 24940 - DNA, 13 bp, Artificial Sequence
  Oligonucleotide for detection of SNP TSC0006020
tcaaaatacatat

SEQ ID NO: 24941 - DNA, 13 bp, Artificial Sequence
  Oligonucleotide for detection of SNP TSC0006020
atatgtgttttga

SEQ ID NO: 24942 - DNA, 13 bp, Artificial Sequence
  Oligonucleotide for detection of SNP TSC0006020
tcaaaacacatat

SEQ ID NO: 24943 - DNA, 13 bp, Artificial Sequence
  Oligonucleotide for detection of SNP TSC0006021
ggattaagtttgt

SEQ ID NO: 24944 - DNA, 13 bp, Artificial Sequence
  Oligonucleotide for detection of SNP TSC0006021
acaaacttaatcc

SEQ ID NO: 24945 - DNA, 13 bp, Artificial Sequence
  Oligonucleotide for detection of SNP TSC0006021
ggattaggtttgt

SEQ ID NO: 24946 - DNA, 13 bp, Artificial Sequence
  Oligonucleotide for detection of SNP TSC0006021
acaaacctaatcc

SEQ ID NO: 24947 - DNA, 13 bp, Artificial Sequence
  Oligonucleotide for detection of SNP TSC0006022
tgttttgagtaat

SEQ ID NO: 24948 - DNA, 13 bp, Artificial Sequence
  Oligonucleotide for detection of SNP TSC0006022
attactcaaaaca

SEQ ID NO: 24949 - DNA, 13 bp, Artificial Sequence
  Oligonucleotide for detection of SNP TSC0006022
tgttttaagtaat

SEQ ID NO: 24950 - DNA, 13 bp, Artificial Sequence
  Oligonucleotide for detection of SNP TSC0006022
attacttaaaaca

SEQ ID NO: 24951 - DNA, 13 bp, Artificial Sequence
  Oligonucleotide for detection of SNP TSC0006027
aagagttgagggt

SEQ ID NO: 24952 - DNA, 13 bp, Artificial Sequence
  Oligonucleotide for detection of SNP TSC0006027
accctcaactctt

SEQ ID NO: 24953 - DNA, 13 bp, Artificial Sequence
  Oligonucleotide for detection of SNP TSC0006027
aagagtcgagggt

SEQ ID NO: 24954 - DNA, 13 bp, Artificial Sequence
  Oligonucleotide for detection of SNP TSC0006027
accctcgactctt

SEQ ID NO: 24955 - DNA, 13 bp, Artificial Sequence
  Oligonucleotide for detection of SNP TSC0006027
atttttaattttt

SEQ ID NO: 24956 - DNA, 13 bp, Artificial Sequence
  Oligonucleotide for detection of SNP TSC0006027
aaaaattaaaaat

SEQ ID NO: 24957 - DNA, 13 bp, Artificial Sequence
  Oligonucleotide for detection of SNP TSC0006027
attttcgattttt

SEQ ID NO: 24958 - DNA, 13 bp, Artificial Sequence
  Oligonucleotide for detection of SNP TSC0006027
aaaaatcgaaaat

SEQ ID NO: 24959 - DNA, 13 bp, Artificial Sequence
  Oligonucleotide for detection of SNP TSC0006035
tatgtaattagtg

SEQ ID NO: 24960 - DNA, 13 bp, Artificial Sequence
  Oligonucleotide for detection of SNP TSC0006035
cactaattacata

SEQ ID NO: 24961 - DNA, 13 bp, Artificial Sequence
  Oligonucleotide for detection of SNP TSC0006035
tatgtagttagtg

SEQ ID NO: 24962 - DNA, 13 bp, Artificial Sequence
  Oligonucleotide for detection of SNP TSC0006035
cactaactacata

SEQ ID NO: 24963 - DNA, 13 bp, Artificial Sequence
  Oligonucleotide for detection of SNP TSC0006035
tatgtaattagcg

SEQ ID NO: 24964 - DNA, 13 bp, Artificial Sequence
  Oligonucleotide for detection of SNP TSC0006035
cgctaattacata

SEQ ID NO: 24965 - DNA, 13 bp, Artificial Sequence
  Oligonucleotide for detection of SNP TSC0006035
tatgtagttagcg

SEQ ID NO: 24966 - DNA, 13 bp, Artificial Sequence
  Oligonucleotide for detection of SNP TSC0006035
cgctaactacata

SEQ ID NO: 24967 - DNA, 13 bp, Artificial Sequence
  Oligonucleotide for detection of SNP TSC0006041
aagtgtattgagg

SEQ ID NO: 24968 - DNA, 13 bp, Artificial Sequence
  Oligonucleotide for detection of SNP TSC0006041
cctcaatacactt

SEQ ID NO: 24969 - DNA, 13 bp, Artificial Sequence
  Oligonucleotide for detection of SNP TSC0006041
aagtgtgttgagg

SEQ ID NO: 24970 - DNA, 13 bp, Artificial Sequence
  Oligonucleotide for detection of SNP TSC0006041
cctcaacacactt

SEQ ID NO: 24971 - DNA, 13 bp, Artificial Sequence
  Oligonucleotide for detection of SNP TSC0006041
aagcgtattgagg

SEQ ID NO: 24972 - DNA, 13 bp, Artificial Sequence
  Oligonucleotide for detection of SNP TSC0006041
cctcaatacgctt

SEQ ID NO: 24973 - DNA, 13 bp, Artificial Sequence
  Oligonucleotide for detection of SNP TSC0006041
aagcgtgttgagg

SEQ ID NO: 24974 - DNA, 13 bp, Artificial Sequence
  Oligonucleotide for detection of SNP TSC0006041
cctcaacacgctt

SEQ ID NO: 24975 - DNA, 13 bp, Artificial Sequence
  Oligonucleotide for detection of SNP TSC0006041
aagtgtatcgagg

SEQ ID NO: 24976 - DNA, 13 bp, Artificial Sequence
  Oligonucleotide for detection of SNP TSC0006041
cctcgatacactt

SEQ ID NO: 24977 - DNA, 13 bp, Artificial Sequence
  Oligonucleotide for detection of SNP TSC0006041
aagtgtgtcgagg

SEQ ID NO: 24978 - DNA, 13 bp, Artificial Sequence
  Oligonucleotide for detection of SNP TSC0006041
cctcgacacactt

SEQ ID NO: 24979 - DNA, 13 bp, Artificial Sequence
  Oligonucleotide for detection of SNP TSC0006041
aagcgtatcgagg

SEQ ID NO: 24980 - DNA, 13 bp, Artificial Sequence
  Oligonucleotide for detection of SNP TSC0006041
cctcgatacgctt

SEQ ID NO: 24981 - DNA, 13 bp, Artificial Sequence
  Oligonucleotide for detection of SNP TSC0006041
aagcgtgtcgagg

SEQ ID NO: 24982 - DNA, 13 bp, Artificial Sequence
  Oligonucleotide for detection of SNP TSC0006041
cctcgacacgctt

SEQ ID NO: 24983 - DNA, 13 bp, Artificial Sequence
  Oligonucleotide for detection of SNP TSC0006050
tttttttttttta

SEQ ID NO: 24984 - DNA, 13 bp, Artificial Sequence
  Oligonucleotide for detection of SNP TSC0006050
taaaaaaaaaaaa

SEQ ID NO: 24985 - DNA, 13 bp, Artificial Sequence
  Oligonucleotide for detection of SNP TSC0006050
tagaagtgggaaa

SEQ ID NO: 24986 - DNA, 13 bp, Artificial Sequence
  Oligonucleotide for detection of SNP TSC0006050
tttcccacttcta

SEQ ID NO: 24987 - DNA, 13 bp, Artificial Sequence
  Oligonucleotide for detection of SNP TSC0006050
tagaagggggaaa

SEQ ID NO: 24988 - DNA, 13 bp, Artificial Sequence
  Oligonucleotide for detection of SNP TSC0006050
tttcccccttcta

SEQ ID NO: 24989 - DNA, 13 bp, Artificial Sequence
  Oligonucleotide for detection of SNP TSC0006051
gtaataatttttt

SEQ ID NO: 24990 - DNA, 13 bp, Artificial Sequence
  Oligonucleotide for detection of SNP TSC0006051
aaaaaattattac

SEQ ID NO: 24991 - DNA, 13 bp, Artificial Sequence
  Oligonucleotide for detection of SNP TSC0006051
gtaatattttttt

SEQ ID NO: 24992 - DNA, 13 bp, Artificial Sequence
  Oligonucleotide for detection of SNP TSC0006051
aaaaaaatattac

SEQ ID NO: 24993 - DNA, 13 bp, Artificial Sequence
  Oligonucleotide for detection of SNP TSC0006051
aaaaaattattay

SEQ ID NO: 24994 - DNA, 13 bp, Artificial Sequence
  Oligonucleotide for detection of SNP TSC0006051
rtaataatttttt

SEQ ID NO: 24995 - DNA, 13 bp, Artificial Sequence
  Oligonucleotide for detection of SNP TSC0006051
aaaaaaatattay

SEQ ID NO: 24996 - DNA, 13 bp, Artificial Sequence
  Oligonucleotide for detection of SNP TSC0006051
rtaatattttttt

SEQ ID NO: 24997 - DNA, 13 bp, Artificial Sequence
  Oligonucleotide for detection of SNP TSC0006052
gaagttataaaag

SEQ ID NO: 24998 - DNA, 13 bp, Artificial Sequence
  Oligonucleotide for detection of SNP TSC0006052
cttttataacttc

SEQ ID NO: 24999 - DNA, 13 bp, Artificial Sequence
  Oligonucleotide for detection of SNP TSC0006052
gaagttgtaaaag

SEQ ID NO: 25000 - DNA, 13 bp, Artificial Sequence
  Oligonucleotide for detection of SNP TSC0006052
cttttacaacttc

SEQ ID NO: 25001 - DNA, 13 bp, Artificial Sequence
  Oligonucleotide for detection of SNP TSC0006055
atgtatatatttt

SEQ ID NO: 25002 - DNA, 13 bp, Artificial Sequence
  Oligonucleotide for detection of SNP TSC0006055
aaaatatatacat

SEQ ID NO: 25003 - DNA, 13 bp, Artificial Sequence
  Oligonucleotide for detection of SNP TSC0006055
atgtatgtatttt

SEQ ID NO: 25004 - DNA, 13 bp, Artificial Sequence
  Oligonucleotide for detection of SNP TSC0006055
aaaatacatacat

SEQ ID NO: 25005 - DNA, 13 bp, Artificial Sequence
  Oligonucleotide for detection of SNP TSC0006056
aaagatatatgtt

SEQ ID NO: 25006 - DNA, 13 bp, Artificial Sequence
  Oligonucleotide for detection of SNP TSC0006056
aacatatatcttt

SEQ ID NO: 25007 - DNA, 13 bp, Artificial Sequence
  Oligonucleotide for detection of SNP TSC0006056
aaagatgtatgtt

SEQ ID NO: 25008 - DNA, 13 bp, Artificial Sequence
  Oligonucleotide for detection of SNP TSC0006056
aacatacatcttt

SEQ ID NO: 25009 - DNA, 13 bp, Artificial Sequence
  Oligonucleotide for detection of SNP TSC0006057
tattttagttttg

SEQ ID NO: 25010 - DNA, 13 bp, Artificial Sequence
  Oligonucleotide for detection of SNP TSC0006057
caaaactaaaata

SEQ ID NO: 25011 - DNA, 13 bp, Artificial Sequence
  Oligonucleotide for detection of SNP TSC0006057
tattttggttttg

SEQ ID NO: 25012 - DNA, 13 bp, Artificial Sequence
  Oligonucleotide for detection of SNP TSC0006057
caaaaccaaaata

SEQ ID NO: 25013 - DNA, 13 bp, Artificial Sequence
  Oligonucleotide for detection of SNP TSC0006057
tatttcggttttg

SEQ ID NO: 25014 - DNA, 13 bp, Artificial Sequence
  Oligonucleotide for detection of SNP TSC0006057
caaaaccgaaata

SEQ ID NO: 25015 - DNA, 13 bp, Artificial Sequence
  Oligonucleotide for detection of SNP TSC0006057
tagggttgaagta

SEQ ID NO: 25016 - DNA, 13 bp, Artificial Sequence
  Oligonucleotide for detection of SNP TSC0006057
tacttcaacccta

SEQ ID NO: 25017 - DNA, 13 bp, Artificial Sequence
  Oligonucleotide for detection of SNP TSC0006057
tagggtcgaagta

SEQ ID NO: 25018 - DNA, 13 bp, Artificial Sequence
  Oligonucleotide for detection of SNP TSC0006057
tacttcgacccta

SEQ ID NO: 25019 - DNA, 13 bp, Artificial Sequence
  Oligonucleotide for detection of SNP TSC0006066
tatggtagagaga

SEQ ID NO: 25020 - DNA, 13 bp, Artificial Sequence
  Oligonucleotide for detection of SNP TSC0006066
tctctctaccata

SEQ ID NO: 25021 - DNA, 13 bp, Artificial Sequence
  Oligonucleotide for detection of SNP TSC0006066
tatggtggagaga

SEQ ID NO: 25022 - DNA, 13 bp, Artificial Sequence
  Oligonucleotide for detection of SNP TSC0006066
tctctccaccata

SEQ ID NO: 25023 - DNA, 13 bp, Artificial Sequence
  Oligonucleotide for detection of SNP TSC0006066
tatggcggagaga

SEQ ID NO: 25024 - DNA, 13 bp, Artificial Sequence
  Oligonucleotide for detection of SNP TSC0006066
tctctccgccata

SEQ ID NO: 25025 - DNA, 13 bp, Artificial Sequence
  Oligonucleotide for detection of SNP TSC0006066
tttttttgttata

SEQ ID NO: 25026 - DNA, 13 bp, Artificial Sequence
  Oligonucleotide for detection of SNP TSC0006066
tataacaaaaaaa

SEQ ID NO: 25027 - DNA, 13 bp, Artificial Sequence
  Oligonucleotide for detection of SNP TSC0006066
ttttttcgttata

SEQ ID NO: 25028 - DNA, 13 bp, Artificial Sequence
  Oligonucleotide for detection of SNP TSC0006066
tataacgaaaaaa

SEQ ID NO: 25029 - DNA, 13 bp, Artificial Sequence
  Oligonucleotide for detection of SNP TSC0006067
ttatttatttatt

SEQ ID NO: 25030 - DNA, 13 bp, Artificial Sequence
  Oligonucleotide for detection of SNP TSC0006067
aataaataaataa

SEQ ID NO: 25031 - DNA, 13 bp, Artificial Sequence
  Oligonucleotide for detection of SNP TSC0006067
ttatttgtttatt

SEQ ID NO: 25032 - DNA, 13 bp, Artificial Sequence
  Oligonucleotide for detection of SNP TSC0006067
aataaacaaataa

SEQ ID NO: 25033 - DNA, 13 bp, Artificial Sequence
  Oligonucleotide for detection of SNP TSC0006068
atttatagtttaa

SEQ ID NO: 25034 - DNA, 13 bp, Artificial Sequence
  Oligonucleotide for detection of SNP TSC0006068
ttaaactataaat

SEQ ID NO: 25035 - DNA, 13 bp, Artificial Sequence
  Oligonucleotide for detection of SNP TSC0006068
atttattgtttaa

SEQ ID NO: 25036 - DNA, 13 bp, Artificial Sequence
  Oligonucleotide for detection of SNP TSC0006068
ttaaacaataaat

SEQ ID NO: 25037 - DNA, 13 bp, Artificial Sequence
  Oligonucleotide for detection of SNP TSC0006068
ttaagttataaat

SEQ ID NO: 25038 - DNA, 13 bp, Artificial Sequence
  Oligonucleotide for detection of SNP TSC0006068
atttataacttaa

SEQ ID NO: 25039 - DNA, 13 bp, Artificial Sequence
  Oligonucleotide for detection of SNP TSC0006068
ttaagtaataaat

SEQ ID NO: 25040 - DNA, 13 bp, Artificial Sequence
  Oligonucleotide for detection of SNP TSC0006068
atttattacttaa

SEQ ID NO: 25041 - DNA, 13 bp, Artificial Sequence
  Oligonucleotide for detection of SNP TSC0006070
gttttaagttagg

SEQ ID NO: 25042 - DNA, 13 bp, Artificial Sequence
  Oligonucleotide for detection of SNP TSC0006070
cctaacttaaaac

SEQ ID NO: 25043 - DNA, 13 bp, Artificial Sequence
  Oligonucleotide for detection of SNP TSC0006070
gttttaggttagg

SEQ ID NO: 25044 - DNA, 13 bp, Artificial Sequence
  Oligonucleotide for detection of SNP TSC0006070
cctaacctaaaac

SEQ ID NO: 25045 - DNA, 13 bp, Artificial Sequence
  Oligonucleotide for detection of SNP TSC0006071
tatgaaattgttg

SEQ ID NO: 25046 - DNA, 13 bp, Artificial Sequence
  Oligonucleotide for detection of SNP TSC0006071
caacaatttcata

SEQ ID NO: 25047 - DNA, 13 bp, Artificial Sequence
  Oligonucleotide for detection of SNP TSC0006071
tatgaagttgttg

SEQ ID NO: 25048 - DNA, 13 bp, Artificial Sequence
  Oligonucleotide for detection of SNP TSC0006071
caacaacttcata

SEQ ID NO: 25049 - DNA, 13 bp, Artificial Sequence
  Oligonucleotide for detection of SNP TSC0006071
tacgaaattgttg

SEQ ID NO: 25050 - DNA, 13 bp, Artificial Sequence
  Oligonucleotide for detection of SNP TSC0006071
caacaatttcgta

SEQ ID NO: 25051 - DNA, 13 bp, Artificial Sequence
  Oligonucleotide for detection of SNP TSC0006071
tacgaagttgttg

SEQ ID NO: 25052 - DNA, 13 bp, Artificial Sequence
  Oligonucleotide for detection of SNP TSC0006071
caacaacttcgta

SEQ ID NO: 25053 - DNA, 13 bp, Artificial Sequence
  Oligonucleotide for detection of SNP TSC0006071
tatgaaattgtcg

SEQ ID NO: 25054 - DNA, 13 bp, Artificial Sequence
  Oligonucleotide for detection of SNP TSC0006071
cgacaatttcata

SEQ ID NO: 25055 - DNA, 13 bp, Artificial Sequence
  Oligonucleotide for detection of SNP TSC0006071
tatgaagttgtcg

SEQ ID NO: 25056 - DNA, 13 bp, Artificial Sequence
  Oligonucleotide for detection of SNP TSC0006071
cgacaacttcata

SEQ ID NO: 25057 - DNA, 13 bp, Artificial Sequence
  Oligonucleotide for detection of SNP TSC0006071
tacgaaattgtcg

SEQ ID NO: 25058 - DNA, 13 bp, Artificial Sequence
  Oligonucleotide for detection of SNP TSC0006071
cgacaatttcgta

SEQ ID NO: 25059 - DNA, 13 bp, Artificial Sequence
  Oligonucleotide for detection of SNP TSC0006071
tacgaagttgtcg

SEQ ID NO: 25060 - DNA, 13 bp, Artificial Sequence
  Oligonucleotide for detection of SNP TSC0006071
cgacaacttcgta

SEQ ID NO: 25061 - DNA, 13 bp, Artificial Sequence
  Oligonucleotide for detection of SNP TSC0006089
tgggtttaaatga

SEQ ID NO: 25062 - DNA, 13 bp, Artificial Sequence
  Oligonucleotide for detection of SNP TSC0006089
tcatttaaaccca

SEQ ID NO: 25063 - DNA, 13 bp, Artificial Sequence
  Oligonucleotide for detection of SNP TSC0006089
tgggttgaaatga

SEQ ID NO: 25064 - DNA, 13 bp, Artificial Sequence
  Oligonucleotide for detection of SNP TSC0006089
tcatttcaaccca

SEQ ID NO: 25065 - DNA, 13 bp, Artificial Sequence
  Oligonucleotide for detection of SNP TSC0006089
cgggtttaaatga

SEQ ID NO: 25066 - DNA, 13 bp, Artificial Sequence
  Oligonucleotide for detection of SNP TSC0006089
tcatttaaacccg

SEQ ID NO: 25067 - DNA, 13 bp, Artificial Sequence
  Oligonucleotide for detection of SNP TSC0006089
cgggttgaaatga

SEQ ID NO: 25068 - DNA, 13 bp, Artificial Sequence
  Oligonucleotide for detection of SNP TSC0006089
tcatttcaacccg

SEQ ID NO: 25069 - DNA, 13 bp, Artificial Sequence
  Oligonucleotide for detection of SNP TSC0006089
ttatttgagtttg

SEQ ID NO: 25070 - DNA, 13 bp, Artificial Sequence
  Oligonucleotide for detection of SNP TSC0006089
caaactcaaataa

SEQ ID NO: 25071 - DNA, 13 bp, Artificial Sequence
  Oligonucleotide for detection of SNP TSC0006089
ttattttagtttg

SEQ ID NO: 25072 - DNA, 13 bp, Artificial Sequence
  Oligonucleotide for detection of SNP TSC0006089
caaactaaaataa

SEQ ID NO: 25073 - DNA, 13 bp, Artificial Sequence
  Oligonucleotide for detection of SNP TSC0006089
ttatttgagttcg

SEQ ID NO: 25074 - DNA, 13 bp, Artificial Sequence
  Oligonucleotide for detection of SNP TSC0006089
cgaactcaaataa

SEQ ID NO: 25075 - DNA, 13 bp, Artificial Sequence
  Oligonucleotide for detection of SNP TSC0006089
ttattttagttcg

SEQ ID NO: 25076 - DNA, 13 bp, Artificial Sequence
  Oligonucleotide for detection of SNP TSC0006089
cgaactaaaataa

SEQ ID NO: 25077 - DNA, 13 bp, Artificial Sequence
  Oligonucleotide for detection of SNP TSC0006091
gtaggggagggat

SEQ ID NO: 25078 - DNA, 13 bp, Artificial Sequence
  Oligonucleotide for detection of SNP TSC0006091
atccctcccctac

SEQ ID NO: 25079 - DNA, 13 bp, Artificial Sequence
  Oligonucleotide for detection of SNP TSC0006091
gtagggaagggat

SEQ ID NO: 25080 - DNA, 13 bp, Artificial Sequence
  Oligonucleotide for detection of SNP TSC0006091
atcccttccctac

SEQ ID NO: 25081 - DNA, 13 bp, Artificial Sequence
  Oligonucleotide for detection of SNP TSC0006096
tagtggaagttgg

SEQ ID NO: 25082 - DNA, 13 bp, Artificial Sequence
  Oligonucleotide for detection of SNP TSC0006096
ccaacttccacta

SEQ ID NO: 25083 - DNA, 13 bp, Artificial Sequence
  Oligonucleotide for detection of SNP TSC0006096
tagtggtagttgg

SEQ ID NO: 25084 - DNA, 13 bp, Artificial Sequence
  Oligonucleotide for detection of SNP TSC0006096
ccaactaccacta

SEQ ID NO: 25085 - DNA, 13 bp, Artificial Sequence
  Oligonucleotide for detection of SNP TSC0006096
ttagtttttattg

SEQ ID NO: 25086 - DNA, 13 bp, Artificial Sequence
  Oligonucleotide for detection of SNP TSC0006096
caataaaaactaa

SEQ ID NO: 25087 - DNA, 13 bp, Artificial Sequence
  Oligonucleotide for detection of SNP TSC0006096
ttagttgttattg

SEQ ID NO: 25088 - DNA, 13 bp, Artificial Sequence
  Oligonucleotide for detection of SNP TSC0006096
caataacaactaa

SEQ ID NO: 25089 - DNA, 13 bp, Artificial Sequence
  Oligonucleotide for detection of SNP TSC0006097
taataagaagaaa

SEQ ID NO: 25090 - DNA, 13 bp, Artificial Sequence
  Oligonucleotide for detection of SNP TSC0006097
tttcttcttatta

SEQ ID NO: 25091 - DNA, 13 bp, Artificial Sequence
  Oligonucleotide for detection of SNP TSC0006097
taataataagaaa

SEQ ID NO: 25092 - DNA, 13 bp, Artificial Sequence
  Oligonucleotide for detection of SNP TSC0006097
tttcttattatta

SEQ ID NO: 25093 - DNA, 13 bp, Artificial Sequence
  Oligonucleotide for detection of SNP TSC0006100
ttgattgttgagy

SEQ ID NO: 25094 - DNA, 13 bp, Artificial Sequence
  Oligonucleotide for detection of SNP TSC0006100
rctcaacaatcaa

SEQ ID NO: 25095 - DNA, 13 bp, Artificial Sequence
  Oligonucleotide for detection of SNP TSC0006100
ttgattattgagy

SEQ ID NO: 25096 - DNA, 13 bp, Artificial Sequence
  Oligonucleotide for detection of SNP TSC0006100
rctcaataatcaa

SEQ ID NO: 25097 - DNA, 13 bp, Artificial Sequence
  Oligonucleotide for detection of SNP TSC0006101
taataagtaagaa

SEQ ID NO: 25098 - DNA, 13 bp, Artificial Sequence
  Oligonucleotide for detection of SNP TSC0006101
ttcttacttatta

SEQ ID NO: 25099 - DNA, 13 bp, Artificial Sequence
  Oligonucleotide for detection of SNP TSC0006101
taataattaagaa

SEQ ID NO: 25100 - DNA, 13 bp, Artificial Sequence
  Oligonucleotide for detection of SNP TSC0006101
ttcttaattatta

SEQ ID NO: 25101 - DNA, 13 bp, Artificial Sequence
  Oligonucleotide for detection of SNP TSC0006101
tttttaattatta

SEQ ID NO: 25102 - DNA, 13 bp, Artificial Sequence
  Oligonucleotide for detection of SNP TSC0006101
taataattaaaaa

SEQ ID NO: 25103 - DNA, 13 bp, Artificial Sequence
  Oligonucleotide for detection of SNP TSC0006102
aagtttataatta

SEQ ID NO: 25104 - DNA, 13 bp, Artificial Sequence
  Oligonucleotide for detection of SNP TSC0006102
taattataaactt

SEQ ID NO: 25105 - DNA, 13 bp, Artificial Sequence
  Oligonucleotide for detection of SNP TSC0006102
aagtttgtaatta

SEQ ID NO: 25106 - DNA, 13 bp, Artificial Sequence
  Oligonucleotide for detection of SNP TSC0006102
taattacaaactt

SEQ ID NO: 25107 - DNA, 13 bp, Artificial Sequence
  Oligonucleotide for detection of SNP TSC0006110
atatttaatttaa

SEQ ID NO: 25108 - DNA, 13 bp, Artificial Sequence
  Oligonucleotide for detection of SNP TSC0006110
ttaaattaaatat

SEQ ID NO: 25109 - DNA, 13 bp, Artificial Sequence
  Oligonucleotide for detection of SNP TSC0006110
atattttatttaa

SEQ ID NO: 25110 - DNA, 13 bp, Artificial Sequence
  Oligonucleotide for detection of SNP TSC0006110
ttaaataaaatat

SEQ ID NO: 25111 - DNA, 13 bp, Artificial Sequence
  Oligonucleotide for detection of SNP TSC0006110
ttaagttgagtat

SEQ ID NO: 25112 - DNA, 13 bp, Artificial Sequence
  Oligonucleotide for detection of SNP TSC0006110
atactcaacttaa

SEQ ID NO: 25113 - DNA, 13 bp, Artificial Sequence
  Oligonucleotide for detection of SNP TSC0006110
ttaagtggagtat

SEQ ID NO: 25114 - DNA, 13 bp, Artificial Sequence
  Oligonucleotide for detection of SNP TSC0006110
atactccacttaa

SEQ ID NO: 25115 - DNA, 13 bp, Artificial Sequence
  Oligonucleotide for detection of SNP TSC0006115
atgtaaaatgaag

SEQ ID NO: 25116 - DNA, 13 bp, Artificial Sequence
  Oligonucleotide for detection of SNP TSC0006115
cttcattttacat

SEQ ID NO: 25117 - DNA, 13 bp, Artificial Sequence
  Oligonucleotide for detection of SNP TSC0006115
atgtaagatgaag

SEQ ID NO: 25118 - DNA, 13 bp, Artificial Sequence
  Oligonucleotide for detection of SNP TSC0006115
cttcatcttacat

SEQ ID NO: 25119 - DNA, 13 bp, Artificial Sequence
  Oligonucleotide for detection of SNP TSC0006115
acgtaaaatgaag

SEQ ID NO: 25120 - DNA, 13 bp, Artificial Sequence
  Oligonucleotide for detection of SNP TSC0006115
cttcattttacgt

SEQ ID NO: 25121 - DNA, 13 bp, Artificial Sequence
  Oligonucleotide for detection of SNP TSC0006115
acgtaagatgaag

SEQ ID NO: 25122 - DNA, 13 bp, Artificial Sequence
  Oligonucleotide for detection of SNP TSC0006115
cttcatcttacgt

SEQ ID NO: 25123 - DNA, 13 bp, Artificial Sequence
  Oligonucleotide for detection of SNP TSC0006116
ttttttaaaatty

SEQ ID NO: 25124 - DNA, 13 bp, Artificial Sequence
  Oligonucleotide for detection of SNP TSC0006116
raattttaaaaaa

SEQ ID NO: 25125 - DNA, 13 bp, Artificial Sequence
  Oligonucleotide for detection of SNP TSC0006116
ttttttgaaatty

SEQ ID NO: 25126 - DNA, 13 bp, Artificial Sequence
  Oligonucleotide for detection of SNP TSC0006116
raatttcaaaaaa

SEQ ID NO: 25127 - DNA, 13 bp, Artificial Sequence
  Oligonucleotide for detection of SNP TSC0006119
ttaagtatgtata

SEQ ID NO: 25128 - DNA, 13 bp, Artificial Sequence
  Oligonucleotide for detection of SNP TSC0006119
tatacatacttaa

SEQ ID NO: 25129 - DNA, 13 bp, Artificial Sequence
  Oligonucleotide for detection of SNP TSC0006119
ttaagtgtgtata

SEQ ID NO: 25130 - DNA, 13 bp, Artificial Sequence
  Oligonucleotide for detection of SNP TSC0006119
tatacacacttaa

SEQ ID NO: 25131 - DNA, 13 bp, Artificial Sequence
  Oligonucleotide for detection of SNP TSC0006120
attataagtgttt

SEQ ID NO: 25132 - DNA, 13 bp, Artificial Sequence
  Oligonucleotide for detection of SNP TSC0006120
aaacacttataat

SEQ ID NO: 25133 - DNA, 13 bp, Artificial Sequence
  Oligonucleotide for detection of SNP TSC0006120
attatatgtgttt

SEQ ID NO: 25134 - DNA, 13 bp, Artificial Sequence
  Oligonucleotide for detection of SNP TSC0006120
aaacacatataat

SEQ ID NO: 25135 - DNA, 13 bp, Artificial Sequence
  Oligonucleotide for detection of SNP TSC0006120
aggtatttgtaat

SEQ ID NO: 25136 - DNA, 13 bp, Artificial Sequence
  Oligonucleotide for detection of SNP TSC0006120
attacaaatacct

SEQ ID NO: 25137 - DNA, 13 bp, Artificial Sequence
  Oligonucleotide for detection of SNP TSC0006120
aggtatatgtaat

SEQ ID NO: 25138 - DNA, 13 bp, Artificial Sequence
  Oligonucleotide for detection of SNP TSC0006120
attacatatacct

SEQ ID NO: 25139 - DNA, 13 bp, Artificial Sequence
  Oligonucleotide for detection of SNP TSC0006121
attatttgttatt

SEQ ID NO: 25140 - DNA, 13 bp, Artificial Sequence
  Oligonucleotide for detection of SNP TSC0006121
aataacaaataat

SEQ ID NO: 25141 - DNA, 13 bp, Artificial Sequence
  Oligonucleotide for detection of SNP TSC0006121
attattcgttatt

SEQ ID NO: 25142 - DNA, 13 bp, Artificial Sequence
  Oligonucleotide for detection of SNP TSC0006121
aataacgaataat

SEQ ID NO: 25143 - DNA, 13 bp, Artificial Sequence
  Oligonucleotide for detection of SNP TSC0006121
agtaatgaatggt

SEQ ID NO: 25144 - DNA, 13 bp, Artificial Sequence
  Oligonucleotide for detection of SNP TSC0006121
accattcattact

SEQ ID NO: 25145 - DNA, 13 bp, Artificial Sequence
  Oligonucleotide for detection of SNP TSC0006121
agtaataaatggt

SEQ ID NO: 25146 - DNA, 13 bp, Artificial Sequence
  Oligonucleotide for detection of SNP TSC0006121
accatttattact

SEQ ID NO: 25147 - DNA, 13 bp, Artificial Sequence
  Oligonucleotide for detection of SNP TSC0006121
agtaacgaatggt

SEQ ID NO: 25148 - DNA, 13 bp, Artificial Sequence
  Oligonucleotide for detection of SNP TSC0006121
accattcgttact

SEQ ID NO: 25149 - DNA, 13 bp, Artificial Sequence
  Oligonucleotide for detection of SNP TSC0006122
tagtttatattgt

SEQ ID NO: 25150 - DNA, 13 bp, Artificial Sequence
  Oligonucleotide for detection of SNP TSC0006122
acaatataaacta

SEQ ID NO: 25151 - DNA, 13 bp, Artificial Sequence
  Oligonucleotide for detection of SNP TSC0006122
tagtttgtattgt

SEQ ID NO: 25152 - DNA, 13 bp, Artificial Sequence
  Oligonucleotide for detection of SNP TSC0006122
acaatacaaacta

SEQ ID NO: 25153 - DNA, 13 bp, Artificial Sequence
  Oligonucleotide for detection of SNP TSC0006122
tagttcgtattgt

SEQ ID NO: 25154 - DNA, 13 bp, Artificial Sequence
  Oligonucleotide for detection of SNP TSC0006122
acaatacgaacta

SEQ ID NO: 25155 - DNA, 13 bp, Artificial Sequence
  Oligonucleotide for detection of SNP TSC0006122
atagtgtgaatta

SEQ ID NO: 25156 - DNA, 13 bp, Artificial Sequence
  Oligonucleotide for detection of SNP TSC0006122
taattcacactat

SEQ ID NO: 25157 - DNA, 13 bp, Artificial Sequence
  Oligonucleotide for detection of SNP TSC0006122
atagtgcgaatta

SEQ ID NO: 25158 - DNA, 13 bp, Artificial Sequence
  Oligonucleotide for detection of SNP TSC0006122
taattcgcactat

SEQ ID NO: 25159 - DNA, 13 bp, Artificial Sequence
  Oligonucleotide for detection of SNP TSC0006129
ttgattatgttay

SEQ ID NO: 25160 - DNA, 13 bp, Artificial Sequence
  Oligonucleotide for detection of SNP TSC0006129
rtaacataatcaa

SEQ ID NO: 25161 - DNA, 13 bp, Artificial Sequence
  Oligonucleotide for detection of SNP TSC0006129
ttgattgtgttay

SEQ ID NO: 25162 - DNA, 13 bp, Artificial Sequence
  Oligonucleotide for detection of SNP TSC0006129
rtaacacaatcaa

SEQ ID NO: 25163 - DNA, 13 bp, Artificial Sequence
  Oligonucleotide for detection of SNP TSC0006129
ttgatcgtgttay

SEQ ID NO: 25164 - DNA, 13 bp, Artificial Sequence
  Oligonucleotide for detection of SNP TSC0006129
rtaacacgatcaa

SEQ ID NO: 25165 - DNA, 13 bp, Artificial Sequence
  Oligonucleotide for detection of SNP TSC0006129
gtggtatgattaa

SEQ ID NO: 25166 - DNA, 13 bp, Artificial Sequence
  Oligonucleotide for detection of SNP TSC0006129
ttaatcataccac

SEQ ID NO: 25167 - DNA, 13 bp, Artificial Sequence
  Oligonucleotide for detection of SNP TSC0006129
gtggtacgattaa

SEQ ID NO: 25168 - DNA, 13 bp, Artificial Sequence
  Oligonucleotide for detection of SNP TSC0006129
ttaatcgtaccac

SEQ ID NO: 25169 - DNA, 13 bp, Artificial Sequence
  Oligonucleotide for detection of SNP TSC0006132
ttattgagtttaa

SEQ ID NO: 25170 - DNA, 13 bp, Artificial Sequence
  Oligonucleotide for detection of SNP TSC0006132
ttaaactcaataa

SEQ ID NO: 25171 - DNA, 13 bp, Artificial Sequence
  Oligonucleotide for detection of SNP TSC0006132
ttattgtgtttaa

SEQ ID NO: 25172 - DNA, 13 bp, Artificial Sequence
  Oligonucleotide for detection of SNP TSC0006132
ttaaacacaataa

SEQ ID NO: 25173 - DNA, 13 bp, Artificial Sequence
  Oligonucleotide for detection of SNP TSC0006132
ttaagtttagtag

SEQ ID NO: 25174 - DNA, 13 bp, Artificial Sequence
  Oligonucleotide for detection of SNP TSC0006132
ctactaaacttaa

SEQ ID NO: 25175 - DNA, 13 bp, Artificial Sequence
  Oligonucleotide for detection of SNP TSC0006132
ttaagtatagtag

SEQ ID NO: 25176 - DNA, 13 bp, Artificial Sequence
  Oligonucleotide for detection of SNP TSC0006132
ctactatacttaa

SEQ ID NO: 25177 - DNA, 13 bp, Artificial Sequence
  Oligonucleotide for detection of SNP TSC0006145
gtaatatttgaaa

SEQ ID NO: 25178 - DNA, 13 bp, Artificial Sequence
  Oligonucleotide for detection of SNP TSC0006145
tttcaaatattac

SEQ ID NO: 25179 - DNA, 13 bp, Artificial Sequence
  Oligonucleotide for detection of SNP TSC0006145
gtaatagttgaaa

SEQ ID NO: 25180 - DNA, 13 bp, Artificial Sequence
  Oligonucleotide for detection of SNP TSC0006145
tttcaactattac

SEQ ID NO: 25181 - DNA, 13 bp, Artificial Sequence
  Oligonucleotide for detection of SNP TSC0006145
ttttaagtattay

SEQ ID NO: 25182 - DNA, 13 bp, Artificial Sequence
  Oligonucleotide for detection of SNP TSC0006145
rtaatacttaaaa

SEQ ID NO: 25183 - DNA, 13 bp, Artificial Sequence
  Oligonucleotide for detection of SNP TSC0006145
ttttaattattay

SEQ ID NO: 25184 - DNA, 13 bp, Artificial Sequence
  Oligonucleotide for detection of SNP TSC0006145
rtaataattaaaa

SEQ ID NO: 25185 - DNA, 13 bp, Artificial Sequence
  Oligonucleotide for detection of SNP TSC0006149
ttatttttttatt

SEQ ID NO: 25186 - DNA, 13 bp, Artificial Sequence
  Oligonucleotide for detection of SNP TSC0006149
aataaaaaaataa

SEQ ID NO: 25187 - DNA, 13 bp, Artificial Sequence
  Oligonucleotide for detection of SNP TSC0006149
aatgggtgagtga

SEQ ID NO: 25188 - DNA, 13 bp, Artificial Sequence
  Oligonucleotide for detection of SNP TSC0006149
tcactcacccatt

SEQ ID NO: 25189 - DNA, 13 bp, Artificial Sequence
  Oligonucleotide for detection of SNP TSC0006149
aatgggagagtga

SEQ ID NO: 25190 - DNA, 13 bp, Artificial Sequence
  Oligonucleotide for detection of SNP TSC0006149
tcactctcccatt

SEQ ID NO: 25191 - DNA, 13 bp, Artificial Sequence
  Oligonucleotide for detection of SNP TSC0006154
ataggtatatata

SEQ ID NO: 25192 - DNA, 13 bp, Artificial Sequence
  Oligonucleotide for detection of SNP TSC0006154
tatatatacctat

SEQ ID NO: 25193 - DNA, 13 bp, Artificial Sequence
  Oligonucleotide for detection of SNP TSC0006154
ataggtgtatata

SEQ ID NO: 25194 - DNA, 13 bp, Artificial Sequence
  Oligonucleotide for detection of SNP TSC0006154
tatatacacctat

SEQ ID NO: 25195 - DNA, 13 bp, Artificial Sequence
  Oligonucleotide for detection of SNP TSC0006154
ataggcgtatata

SEQ ID NO: 25196 - DNA, 13 bp, Artificial Sequence
  Oligonucleotide for detection of SNP TSC0006154
tatatacgcctat

SEQ ID NO: 25197 - DNA, 13 bp, Artificial Sequence
  Oligonucleotide for detection of SNP TSC0006154
tgtgtgtgtttgt

SEQ ID NO: 25198 - DNA, 13 bp, Artificial Sequence
  Oligonucleotide for detection of SNP TSC0006154
acaaacacacaca

SEQ ID NO: 25199 - DNA, 13 bp, Artificial Sequence
  Oligonucleotide for detection of SNP TSC0006154
tgtgtgcgtttgt

SEQ ID NO: 25200 - DNA, 13 bp, Artificial Sequence
  Oligonucleotide for detection of SNP TSC0006154
acaaacgcacaca

SEQ ID NO: 25201 - DNA, 13 bp, Artificial Sequence
  Oligonucleotide for detection of SNP TSC0006159
aagaaaagaatta

SEQ ID NO: 25202 - DNA, 13 bp, Artificial Sequence
  Oligonucleotide for detection of SNP TSC0006159
taattcttttctt

SEQ ID NO: 25203 - DNA, 13 bp, Artificial Sequence
  Oligonucleotide for detection of SNP TSC0006159
aagaaaggaatta

SEQ ID NO: 25204 - DNA, 13 bp, Artificial Sequence
  Oligonucleotide for detection of SNP TSC0006159
taattcctttctt

SEQ ID NO: 25205 - DNA, 13 bp, Artificial Sequence
  Oligonucleotide for detection of SNP TSC0006163
ggaaaggttagat

SEQ ID NO: 25206 - DNA, 13 bp, Artificial Sequence
  Oligonucleotide for detection of SNP TSC0006163
atctaacctttcc

SEQ ID NO: 25207 - DNA, 13 bp, Artificial Sequence
  Oligonucleotide for detection of SNP TSC0006163
ggaaagtttagat

SEQ ID NO: 25208 - DNA, 13 bp, Artificial Sequence
  Oligonucleotide for detection of SNP TSC0006163
atctaaactttcc

SEQ ID NO: 25209 - DNA, 13 bp, Artificial Sequence
  Oligonucleotide for detection of SNP TSC0006163
atttaatttttty

SEQ ID NO: 25210 - DNA, 13 bp, Artificial Sequence
  Oligonucleotide for detection of SNP TSC0006163
raaaaaattaaat

SEQ ID NO: 25211 - DNA, 13 bp, Artificial Sequence
  Oligonucleotide for detection of SNP TSC0006163
atttaaattttty

SEQ ID NO: 25212 - DNA, 13 bp, Artificial Sequence
  Oligonucleotide for detection of SNP TSC0006163
raaaaatttaaat

SEQ ID NO: 25213 - DNA, 13 bp, Artificial Sequence
  Oligonucleotide for detection of SNP TSC0006165
gttgttagttatt

SEQ ID NO: 25214 - DNA, 13 bp, Artificial Sequence
  Oligonucleotide for detection of SNP TSC0006165
aataactaacaac

SEQ ID NO: 25215 - DNA, 13 bp, Artificial Sequence
  Oligonucleotide for detection of SNP TSC0006165
gttgttggttatt

SEQ ID NO: 25216 - DNA, 13 bp, Artificial Sequence
  Oligonucleotide for detection of SNP TSC0006165
aataaccaacaac

SEQ ID NO: 25217 - DNA, 13 bp, Artificial Sequence
  Oligonucleotide for detection of SNP TSC0006166
atttattttttty

SEQ ID NO: 25218 - DNA, 13 bp, Artificial Sequence
  Oligonucleotide for detection of SNP TSC0006166
raaaaaaataaat

SEQ ID NO: 25219 - DNA, 13 bp, Artificial Sequence
  Oligonucleotide for detection of SNP TSC0006166
atttatgttttty

SEQ ID NO: 25220 - DNA, 13 bp, Artificial Sequence
  Oligonucleotide for detection of SNP TSC0006166
raaaaacataaat

SEQ ID NO: 25221 - DNA, 13 bp, Artificial Sequence
  Oligonucleotide for detection of SNP TSC0006166
atttacgttttty

SEQ ID NO: 25222 - DNA, 13 bp, Artificial Sequence
  Oligonucleotide for detection of SNP TSC0006166
raaaaacgtaaat

SEQ ID NO: 25223 - DNA, 13 bp, Artificial Sequence
  Oligonucleotide for detection of SNP TSC0006166
ggaaaaggtgaat

SEQ ID NO: 25224 - DNA, 13 bp, Artificial Sequence
  Oligonucleotide for detection of SNP TSC0006166
attcaccttttcc

SEQ ID NO: 25225 - DNA, 13 bp, Artificial Sequence
  Oligonucleotide for detection of SNP TSC0006166
ggaaaatgtgaat

SEQ ID NO: 25226 - DNA, 13 bp, Artificial Sequence
  Oligonucleotide for detection of SNP TSC0006166
attcacattttcc

SEQ ID NO: 25227 - DNA, 13 bp, Artificial Sequence
  Oligonucleotide for detection of SNP TSC0006166
ggaaaacgtgaat

SEQ ID NO: 25228 - DNA, 13 bp, Artificial Sequence
  Oligonucleotide for detection of SNP TSC0006166
attcacgttttcc

SEQ ID NO: 25229 - DNA, 13 bp, Artificial Sequence
  Oligonucleotide for detection of SNP TSC0006167
tgataatgagggg

SEQ ID NO: 25230 - DNA, 13 bp, Artificial Sequence
  Oligonucleotide for detection of SNP TSC0006167
cccctcattatca

SEQ ID NO: 25231 - DNA, 13 bp, Artificial Sequence
  Oligonucleotide for detection of SNP TSC0006167
tgataacgagggg

SEQ ID NO: 25232 - DNA, 13 bp, Artificial Sequence
  Oligonucleotide for detection of SNP TSC0006167
cccctcgttatca

SEQ ID NO: 25233 - DNA, 13 bp, Artificial Sequence
  Oligonucleotide for detection of SNP TSC0006167
ttttttgttatta

SEQ ID NO: 25234 - DNA, 13 bp, Artificial Sequence
  Oligonucleotide for detection of SNP TSC0006167
taataacaaaaaa

SEQ ID NO: 25235 - DNA, 13 bp, Artificial Sequence
  Oligonucleotide for detection of SNP TSC0006167
tttttcgttatta

SEQ ID NO: 25236 - DNA, 13 bp, Artificial Sequence
  Oligonucleotide for detection of SNP TSC0006167
taataacgaaaaa

SEQ ID NO: 25237 - DNA, 13 bp, Artificial Sequence
  Oligonucleotide for detection of SNP TSC0006168
gtaatttttttty

SEQ ID NO: 25238 - DNA, 13 bp, Artificial Sequence
  Oligonucleotide for detection of SNP TSC0006168
raaaaaaaattac

SEQ ID NO: 25239 - DNA, 13 bp, Artificial Sequence
  Oligonucleotide for detection of SNP TSC0006168
gtaattgttttty

SEQ ID NO: 25240 - DNA, 13 bp, Artificial Sequence
  Oligonucleotide for detection of SNP TSC0006168
raaaaacaattac

SEQ ID NO: 25241 - DNA, 13 bp, Artificial Sequence
  Oligonucleotide for detection of SNP TSC0006168
gggagagaattgy

SEQ ID NO: 25242 - DNA, 13 bp, Artificial Sequence
  Oligonucleotide for detection of SNP TSC0006168
rcaattctctccc

SEQ ID NO: 25243 - DNA, 13 bp, Artificial Sequence
  Oligonucleotide for detection of SNP TSC0006168
gggagataattgy

SEQ ID NO: 25244 - DNA, 13 bp, Artificial Sequence
  Oligonucleotide for detection of SNP TSC0006168
rcaattatctccc

SEQ ID NO: 25245 - DNA, 13 bp, Artificial Sequence
  Oligonucleotide for detection of SNP TSC0006170
aggtataagttay

SEQ ID NO: 25246 - DNA, 13 bp, Artificial Sequence
  Oligonucleotide for detection of SNP TSC0006170
rtaacttatacct

SEQ ID NO: 25247 - DNA, 13 bp, Artificial Sequence
  Oligonucleotide for detection of SNP TSC0006170
aggtatgagttay

SEQ ID NO: 25248 - DNA, 13 bp, Artificial Sequence
  Oligonucleotide for detection of SNP TSC0006170
rtaactcatacct

SEQ ID NO: 25249 - DNA, 13 bp, Artificial Sequence
  Oligonucleotide for detection of SNP TSC0006170
aggtacgagttay

SEQ ID NO: 25250 - DNA, 13 bp, Artificial Sequence
  Oligonucleotide for detection of SNP TSC0006170
rtaactcgtacct

SEQ ID NO: 25251 - DNA, 13 bp, Artificial Sequence
  Oligonucleotide for detection of SNP TSC0006170
gtgatttgtgttt

SEQ ID NO: 25252 - DNA, 13 bp, Artificial Sequence
  Oligonucleotide for detection of SNP TSC0006170
aaacacaaatcac

SEQ ID NO: 25253 - DNA, 13 bp, Artificial Sequence
  Oligonucleotide for detection of SNP TSC0006170
gtgattcgtgttt

SEQ ID NO: 25254 - DNA, 13 bp, Artificial Sequence
  Oligonucleotide for detection of SNP TSC0006170
aaacacgaatcac

SEQ ID NO: 25255 - DNA, 13 bp, Artificial Sequence
  Oligonucleotide for detection of SNP TSC0006172
tagttgggtgtgg

SEQ ID NO: 25256 - DNA, 13 bp, Artificial Sequence
  Oligonucleotide for detection of SNP TSC0006172
ccacacccaacta

SEQ ID NO: 25257 - DNA, 13 bp, Artificial Sequence
  Oligonucleotide for detection of SNP TSC0006172
tagttgtgtgtgg

SEQ ID NO: 25258 - DNA, 13 bp, Artificial Sequence
  Oligonucleotide for detection of SNP TSC0006172
ccacacacaacta

SEQ ID NO: 25259 - DNA, 13 bp, Artificial Sequence
  Oligonucleotide for detection of SNP TSC0006172
ttatatttagtta

SEQ ID NO: 25260 - DNA, 13 bp, Artificial Sequence
  Oligonucleotide for detection of SNP TSC0006172
taactaaatataa

SEQ ID NO: 25261 - DNA, 13 bp, Artificial Sequence
  Oligonucleotide for detection of SNP TSC0006172
ttatatatagtta

SEQ ID NO: 25262 - DNA, 13 bp, Artificial Sequence
  Oligonucleotide for detection of SNP TSC0006172
taactatatataa

SEQ ID NO: 25263 - DNA, 13 bp, Artificial Sequence
  Oligonucleotide for detection of SNP TSC0006177
atgtgtatgtgag

SEQ ID NO: 25264 - DNA, 13 bp, Artificial Sequence
  Oligonucleotide for detection of SNP TSC0006177
ctcacatacacat

SEQ ID NO: 25265 - DNA, 13 bp, Artificial Sequence
  Oligonucleotide for detection of SNP TSC0006177
atgtgtgtgtgag

SEQ ID NO: 25266 - DNA, 13 bp, Artificial Sequence
  Oligonucleotide for detection of SNP TSC0006177
ctcacacacacat

SEQ ID NO: 25267 - DNA, 13 bp, Artificial Sequence
  Oligonucleotide for detection of SNP TSC0006177
acgtgtatgtgag

SEQ ID NO: 25268 - DNA, 13 bp, Artificial Sequence
  Oligonucleotide for detection of SNP TSC0006177
ctcacatacacgt

SEQ ID NO: 25269 - DNA, 13 bp, Artificial Sequence
  Oligonucleotide for detection of SNP TSC0006177
acgtgtgtgtgag

SEQ ID NO: 25270 - DNA, 13 bp, Artificial Sequence
  Oligonucleotide for detection of SNP TSC0006177
ctcacacacacgt

SEQ ID NO: 25271 - DNA, 13 bp, Artificial Sequence
  Oligonucleotide for detection of SNP TSC0006185
tagtatgttttaa

SEQ ID NO: 25272 - DNA, 13 bp, Artificial Sequence
  Oligonucleotide for detection of SNP TSC0006185
ttaaaacatacta

SEQ ID NO: 25273 - DNA, 13 bp, Artificial Sequence
  Oligonucleotide for detection of SNP TSC0006185
tagtattttttaa

SEQ ID NO: 25274 - DNA, 13 bp, Artificial Sequence
  Oligonucleotide for detection of SNP TSC0006185
ttaaaaaatacta

SEQ ID NO: 25275 - DNA, 13 bp, Artificial Sequence
  Oligonucleotide for detection of SNP TSC0006185
tagtacgttttaa

SEQ ID NO: 25276 - DNA, 13 bp, Artificial Sequence
  Oligonucleotide for detection of SNP TSC0006185
ttaaaacgtacta

SEQ ID NO: 25277 - DNA, 13 bp, Artificial Sequence
  Oligonucleotide for detection of SNP TSC0006185
ttaaaatgtatta

SEQ ID NO: 25278 - DNA, 13 bp, Artificial Sequence
  Oligonucleotide for detection of SNP TSC0006185
taatacattttaa

SEQ ID NO: 25279 - DNA, 13 bp, Artificial Sequence
  Oligonucleotide for detection of SNP TSC0006185
ttaaaaagtatta

SEQ ID NO: 25280 - DNA, 13 bp, Artificial Sequence
  Oligonucleotide for detection of SNP TSC0006185
taatactttttaa

SEQ ID NO: 25281 - DNA, 13 bp, Artificial Sequence
  Oligonucleotide for detection of SNP TSC0006185
ttaaaacgtatta

SEQ ID NO: 25282 - DNA, 13 bp, Artificial Sequence
  Oligonucleotide for detection of SNP TSC0006185
taatacgttttaa

SEQ ID NO: 25283 - DNA, 13 bp, Artificial Sequence
  Oligonucleotide for detection of SNP TSC0006186
agggtaattgttt

SEQ ID NO: 25284 - DNA, 13 bp, Artificial Sequence
  Oligonucleotide for detection of SNP TSC0006186
aaacaattaccct

SEQ ID NO: 25285 - DNA, 13 bp, Artificial Sequence
  Oligonucleotide for detection of SNP TSC0006186
agggtatttgttt

SEQ ID NO: 25286 - DNA, 13 bp, Artificial Sequence
  Oligonucleotide for detection of SNP TSC0006186
aaacaaataccct

SEQ ID NO: 25287 - DNA, 13 bp, Artificial Sequence
  Oligonucleotide for detection of SNP TSC0006186
agggtaatcgttt

SEQ ID NO: 25288 - DNA, 13 bp, Artificial Sequence
  Oligonucleotide for detection of SNP TSC0006186
aaacgattaccct

SEQ ID NO: 25289 - DNA, 13 bp, Artificial Sequence
  Oligonucleotide for detection of SNP TSC0006186
agggtattcgttt

SEQ ID NO: 25290 - DNA, 13 bp, Artificial Sequence
  Oligonucleotide for detection of SNP TSC0006186
aaacgaataccct

SEQ ID NO: 25291 - DNA, 13 bp, Artificial Sequence
  Oligonucleotide for detection of SNP TSC0006186
aagtggttgtttt

SEQ ID NO: 25292 - DNA, 13 bp, Artificial Sequence
  Oligonucleotide for detection of SNP TSC0006186
aaaacaaccactt

SEQ ID NO: 25293 - DNA, 13 bp, Artificial Sequence
  Oligonucleotide for detection of SNP TSC0006186
aagtggatgtttt

SEQ ID NO: 25294 - DNA, 13 bp, Artificial Sequence
  Oligonucleotide for detection of SNP TSC0006186
aaaacatccactt

SEQ ID NO: 25295 - DNA, 13 bp, Artificial Sequence
  Oligonucleotide for detection of SNP TSC0006186
aagcggttgtttt

SEQ ID NO: 25296 - DNA, 13 bp, Artificial Sequence
  Oligonucleotide for detection of SNP TSC0006186
aaaacaaccgctt

SEQ ID NO: 25297 - DNA, 13 bp, Artificial Sequence
  Oligonucleotide for detection of SNP TSC0006186
aagcggatgtttt

SEQ ID NO: 25298 - DNA, 13 bp, Artificial Sequence
  Oligonucleotide for detection of SNP TSC0006186
aaaacatccgctt

SEQ ID NO: 25299 - DNA, 13 bp, Artificial Sequence
  Oligonucleotide for detection of SNP TSC0006187
atatggatgaaag

SEQ ID NO: 25300 - DNA, 13 bp, Artificial Sequence
  Oligonucleotide for detection of SNP TSC0006187
ctttcatccatat

SEQ ID NO: 25301 - DNA, 13 bp, Artificial Sequence
  Oligonucleotide for detection of SNP TSC0006187
atatgggtgaaag

SEQ ID NO: 25302 - DNA, 13 bp, Artificial Sequence
  Oligonucleotide for detection of SNP TSC0006187
ctttcacccatat

SEQ ID NO: 25303 - DNA, 13 bp, Artificial Sequence
  Oligonucleotide for detection of SNP TSC0006188
agggggaaagaga

SEQ ID NO: 25304 - DNA, 13 bp, Artificial Sequence
  Oligonucleotide for detection of SNP TSC0006188
tctctttccccct

SEQ ID NO: 25305 - DNA, 13 bp, Artificial Sequence
  Oligonucleotide for detection of SNP TSC0006188
aggggggaagaga

SEQ ID NO: 25306 - DNA, 13 bp, Artificial Sequence
  Oligonucleotide for detection of SNP TSC0006188
tctcttcccccct

SEQ ID NO: 25307 - DNA, 13 bp, Artificial Sequence
  Oligonucleotide for detection of SNP TSC0006195
tatcgtatttagy

SEQ ID NO: 25308 - DNA, 13 bp, Artificial Sequence
  Oligonucleotide for detection of SNP TSC0006195
rctaaatacgata

SEQ ID NO: 25309 - DNA, 13 bp, Artificial Sequence
  Oligonucleotide for detection of SNP TSC0006195
tatcgtgtttagy

SEQ ID NO: 25310 - DNA, 13 bp, Artificial Sequence
  Oligonucleotide for detection of SNP TSC0006195
rctaaacacgata

SEQ ID NO: 25311 - DNA, 13 bp, Artificial Sequence
  Oligonucleotide for detection of SNP TSC0006196
tattatatttagy

SEQ ID NO: 25312 - DNA, 13 bp, Artificial Sequence
  Oligonucleotide for detection of SNP TSC0006196
rctaaatataata

SEQ ID NO: 25313 - DNA, 13 bp, Artificial Sequence
  Oligonucleotide for detection of SNP TSC0006196
gttgggtgtggtg

SEQ ID NO: 25314 - DNA, 13 bp, Artificial Sequence
  Oligonucleotide for detection of SNP TSC0006196
caccacacccaac

SEQ ID NO: 25315 - DNA, 13 bp, Artificial Sequence
  Oligonucleotide for detection of SNP TSC0006196
gttgggcgtggtg

SEQ ID NO: 25316 - DNA, 13 bp, Artificial Sequence
  Oligonucleotide for detection of SNP TSC0006196
caccacgcccaac

SEQ ID NO: 25317 - DNA, 13 bp, Artificial Sequence
  Oligonucleotide for detection of SNP TSC0006203
tttggagtaggtt

SEQ ID NO: 25318 - DNA, 13 bp, Artificial Sequence
  Oligonucleotide for detection of SNP TSC0006203
aacctactccaaa

SEQ ID NO: 25319 - DNA, 13 bp, Artificial Sequence
  Oligonucleotide for detection of SNP TSC0006203
tttggaataggtt

SEQ ID NO: 25320 - DNA, 13 bp, Artificial Sequence
  Oligonucleotide for detection of SNP TSC0006203
aacctattccaaa

SEQ ID NO: 25321 - DNA, 13 bp, Artificial Sequence
  Oligonucleotide for detection of SNP TSC0006212
ttgtttaaattta

SEQ ID NO: 25322 - DNA, 13 bp, Artificial Sequence
  Oligonucleotide for detection of SNP TSC0006212
taaatttaaacaa

SEQ ID NO: 25323 - DNA, 13 bp, Artificial Sequence
  Oligonucleotide for detection of SNP TSC0006212
ttgtttgaattta

SEQ ID NO: 25324 - DNA, 13 bp, Artificial Sequence
  Oligonucleotide for detection of SNP TSC0006212
taaattcaaacaa

SEQ ID NO: 25325 - DNA, 13 bp, Artificial Sequence
  Oligonucleotide for detection of SNP TSC0006212
ttgttcgaattta

SEQ ID NO: 25326 - DNA, 13 bp, Artificial Sequence
  Oligonucleotide for detection of SNP TSC0006212
taaattcgaacaa

SEQ ID NO: 25327 - DNA, 13 bp, Artificial Sequence
  Oligonucleotide for detection of SNP TSC0006212
tggatttgagtag

SEQ ID NO: 25328 - DNA, 13 bp, Artificial Sequence
  Oligonucleotide for detection of SNP TSC0006212
ctactcaaatcca

SEQ ID NO: 25329 - DNA, 13 bp, Artificial Sequence
  Oligonucleotide for detection of SNP TSC0006212
tggattcgagtag

SEQ ID NO: 25330 - DNA, 13 bp, Artificial Sequence
  Oligonucleotide for detection of SNP TSC0006212
ctactcgaatcca

SEQ ID NO: 25331 - DNA, 13 bp, Artificial Sequence
  Oligonucleotide for detection of SNP TSC0006220
tgtattgttttaa

SEQ ID NO: 25332 - DNA, 13 bp, Artificial Sequence
  Oligonucleotide for detection of SNP TSC0006220
ttaaaacaataca

SEQ ID NO: 25333 - DNA, 13 bp, Artificial Sequence
  Oligonucleotide for detection of SNP TSC0006220
ttagagtaatgta

SEQ ID NO: 25334 - DNA, 13 bp, Artificial Sequence
  Oligonucleotide for detection of SNP TSC0006220
tacattactctaa

SEQ ID NO: 25335 - DNA, 13 bp, Artificial Sequence
  Oligonucleotide for detection of SNP TSC0006220
ttagagaaatgta

SEQ ID NO: 25336 - DNA, 13 bp, Artificial Sequence
  Oligonucleotide for detection of SNP TSC0006220
tacatttctctaa

SEQ ID NO: 25337 - DNA, 13 bp, Artificial Sequence
  Oligonucleotide for detection of SNP TSC0006222
tatttggtaaaty

SEQ ID NO: 25338 - DNA, 13 bp, Artificial Sequence
  Oligonucleotide for detection of SNP TSC0006222
ratttaccaaata

SEQ ID NO: 25339 - DNA, 13 bp, Artificial Sequence
  Oligonucleotide for detection of SNP TSC0006222
tatttgttaaaty

SEQ ID NO: 25340 - DNA, 13 bp, Artificial Sequence
  Oligonucleotide for detection of SNP TSC0006222
ratttaacaaata

SEQ ID NO: 25341 - DNA, 13 bp, Artificial Sequence
  Oligonucleotide for detection of SNP TSC0006222
gatttgttaaata

SEQ ID NO: 25342 - DNA, 13 bp, Artificial Sequence
  Oligonucleotide for detection of SNP TSC0006222
tatttaacaaatc

SEQ ID NO: 25343 - DNA, 13 bp, Artificial Sequence
  Oligonucleotide for detection of SNP TSC0006222
gatttgataaata

SEQ ID NO: 25344 - DNA, 13 bp, Artificial Sequence
  Oligonucleotide for detection of SNP TSC0006222
tatttatcaaatc

SEQ ID NO: 25345 - DNA, 13 bp, Artificial Sequence
  Oligonucleotide for detection of SNP TSC0006236
aatattaggaagg

SEQ ID NO: 25346 - DNA, 13 bp, Artificial Sequence
  Oligonucleotide for detection of SNP TSC0006236
ccttcctaatatt

SEQ ID NO: 25347 - DNA, 13 bp, Artificial Sequence
  Oligonucleotide for detection of SNP TSC0006236
aatattgggaagg

SEQ ID NO: 25348 - DNA, 13 bp, Artificial Sequence
  Oligonucleotide for detection of SNP TSC0006236
ccttcccaatatt

SEQ ID NO: 25349 - DNA, 13 bp, Artificial Sequence
  Oligonucleotide for detection of SNP TSC0006236
aatatcgggaagg

SEQ ID NO: 25350 - DNA, 13 bp, Artificial Sequence
  Oligonucleotide for detection of SNP TSC0006236
ccttcccgatatt

SEQ ID NO: 25351 - DNA, 13 bp, Artificial Sequence
  Oligonucleotide for detection of SNP TSC0006236
tttttttggtgtt

SEQ ID NO: 25352 - DNA, 13 bp, Artificial Sequence
  Oligonucleotide for detection of SNP TSC0006236
aacaccaaaaaaa

SEQ ID NO: 25353 - DNA, 13 bp, Artificial Sequence
  Oligonucleotide for detection of SNP TSC0006236
ttttttcggtgtt

SEQ ID NO: 25354 - DNA, 13 bp, Artificial Sequence
  Oligonucleotide for detection of SNP TSC0006236
aacaccgaaaaaa

SEQ ID NO: 25355 - DNA, 13 bp, Artificial Sequence
  Oligonucleotide for detection of SNP TSC0006252
gagatagtatgtg

SEQ ID NO: 25356 - DNA, 13 bp, Artificial Sequence
  Oligonucleotide for detection of SNP TSC0006252
cacatactatctc

SEQ ID NO: 25357 - DNA, 13 bp, Artificial Sequence
  Oligonucleotide for detection of SNP TSC0006252
gagataatatgtg

SEQ ID NO: 25358 - DNA, 13 bp, Artificial Sequence
  Oligonucleotide for detection of SNP TSC0006252
cacatattatctc

SEQ ID NO: 25359 - DNA, 13 bp, Artificial Sequence
  Oligonucleotide for detection of SNP TSC0006253
ttgtgttggtgty

SEQ ID NO: 25360 - DNA, 13 bp, Artificial Sequence
  Oligonucleotide for detection of SNP TSC0006253
racaccaacacaa

SEQ ID NO: 25361 - DNA, 13 bp, Artificial Sequence
  Oligonucleotide for detection of SNP TSC0006253
ttgtgtcggtgty

SEQ ID NO: 25362 - DNA, 13 bp, Artificial Sequence
  Oligonucleotide for detection of SNP TSC0006253
racaccgacacaa

SEQ ID NO: 25363 - DNA, 13 bp, Artificial Sequence
  Oligonucleotide for detection of SNP TSC0006253
gatattggtataa

SEQ ID NO: 25364 - DNA, 13 bp, Artificial Sequence
  Oligonucleotide for detection of SNP TSC0006253
ttataccaatatc

SEQ ID NO: 25365 - DNA, 13 bp, Artificial Sequence
  Oligonucleotide for detection of SNP TSC0006253
gatattagtataa

SEQ ID NO: 25366 - DNA, 13 bp, Artificial Sequence
  Oligonucleotide for detection of SNP TSC0006253
ttatactaatatc

SEQ ID NO: 25367 - DNA, 13 bp, Artificial Sequence
  Oligonucleotide for detection of SNP TSC0006253
gatatcggtataa

SEQ ID NO: 25368 - DNA, 13 bp, Artificial Sequence
  Oligonucleotide for detection of SNP TSC0006253
ttataccgatatc

SEQ ID NO: 25369 - DNA, 13 bp, Artificial Sequence
  Oligonucleotide for detection of SNP TSC0006256
atttgtaatatat

SEQ ID NO: 25370 - DNA, 13 bp, Artificial Sequence
  Oligonucleotide for detection of SNP TSC0006256
atatattacaaat

SEQ ID NO: 25371 - DNA, 13 bp, Artificial Sequence
  Oligonucleotide for detection of SNP TSC0006256
atttgtgatatat

SEQ ID NO: 25372 - DNA, 13 bp, Artificial Sequence
  Oligonucleotide for detection of SNP TSC0006256
atatatcacaaat

SEQ ID NO: 25373 - DNA, 13 bp, Artificial Sequence
  Oligonucleotide for detection of SNP TSC0006259
attttaggtaaty

SEQ ID NO: 25374 - DNA, 13 bp, Artificial Sequence
  Oligonucleotide for detection of SNP TSC0006259
rattacctaaaat

SEQ ID NO: 25375 - DNA, 13 bp, Artificial Sequence
  Oligonucleotide for detection of SNP TSC0006259
attttatgtaaty

SEQ ID NO: 25376 - DNA, 13 bp, Artificial Sequence
  Oligonucleotide for detection of SNP TSC0006259
rattacataaaat

SEQ ID NO: 25377 - DNA, 13 bp, Artificial Sequence
  Oligonucleotide for detection of SNP TSC0006259
ggttgtttgagat

SEQ ID NO: 25378 - DNA, 13 bp, Artificial Sequence
  Oligonucleotide for detection of SNP TSC0006259
atctcaaacaacc

SEQ ID NO: 25379 - DNA, 13 bp, Artificial Sequence
  Oligonucleotide for detection of SNP TSC0006259
ggttgtatgagat

SEQ ID NO: 25380 - DNA, 13 bp, Artificial Sequence
  Oligonucleotide for detection of SNP TSC0006259
atctcatacaacc

SEQ ID NO: 25381 - DNA, 13 bp, Artificial Sequence
  Oligonucleotide for detection of SNP TSC0006263
tgtatggtttaaa

SEQ ID NO: 25382 - DNA, 13 bp, Artificial Sequence
  Oligonucleotide for detection of SNP TSC0006263
tttaaaccataca

SEQ ID NO: 25383 - DNA, 13 bp, Artificial Sequence
  Oligonucleotide for detection of SNP TSC0006263
tgtatgttttaaa

SEQ ID NO: 25384 - DNA, 13 bp, Artificial Sequence
  Oligonucleotide for detection of SNP TSC0006263
tttaaaacataca

SEQ ID NO: 25385 - DNA, 13 bp, Artificial Sequence
  Oligonucleotide for detection of SNP TSC0006263
cgtatggtttaaa

SEQ ID NO: 25386 - DNA, 13 bp, Artificial Sequence
  Oligonucleotide for detection of SNP TSC0006263
tttaaaccatacg

SEQ ID NO: 25387 - DNA, 13 bp, Artificial Sequence
  Oligonucleotide for detection of SNP TSC0006263
cgtatgttttaaa

SEQ ID NO: 25388 - DNA, 13 bp, Artificial Sequence
  Oligonucleotide for detection of SNP TSC0006263
tttaaaacatacg

SEQ ID NO: 25389 - DNA, 13 bp, Artificial Sequence
  Oligonucleotide for detection of SNP TSC0006263
tttaaattatatg

SEQ ID NO: 25390 - DNA, 13 bp, Artificial Sequence
  Oligonucleotide for detection of SNP TSC0006263
catataatttaaa

SEQ ID NO: 25391 - DNA, 13 bp, Artificial Sequence
  Oligonucleotide for detection of SNP TSC0006263
tttaaaatatatg

SEQ ID NO: 25392 - DNA, 13 bp, Artificial Sequence
  Oligonucleotide for detection of SNP TSC0006263
catatattttaaa

SEQ ID NO: 25393 - DNA, 13 bp, Artificial Sequence
  Oligonucleotide for detection of SNP TSC0006263
tttaaattatacg

SEQ ID NO: 25394 - DNA, 13 bp, Artificial Sequence
  Oligonucleotide for detection of SNP TSC0006263
cgtataatttaaa

SEQ ID NO: 25395 - DNA, 13 bp, Artificial Sequence
  Oligonucleotide for detection of SNP TSC0006263
tttaaaatatacg

SEQ ID NO: 25396 - DNA, 13 bp, Artificial Sequence
  Oligonucleotide for detection of SNP TSC0006263
cgtatattttaaa

SEQ ID NO: 25397 - DNA, 13 bp, Artificial Sequence
  Oligonucleotide for detection of SNP TSC0006264
tatttggaaggta

SEQ ID NO: 25398 - DNA, 13 bp, Artificial Sequence
  Oligonucleotide for detection of SNP TSC0006264
taccttccaaata

SEQ ID NO: 25399 - DNA, 13 bp, Artificial Sequence
  Oligonucleotide for detection of SNP TSC0006264
tatttgtaaggta

SEQ ID NO: 25400 - DNA, 13 bp, Artificial Sequence
  Oligonucleotide for detection of SNP TSC0006264
taccttacaaata

SEQ ID NO: 25401 - DNA, 13 bp, Artificial Sequence
  Oligonucleotide for detection of SNP TSC0006264
tattttttaaatg

SEQ ID NO: 25402 - DNA, 13 bp, Artificial Sequence
  Oligonucleotide for detection of SNP TSC0006264
catttaaaaaata

SEQ ID NO: 25403 - DNA, 13 bp, Artificial Sequence
  Oligonucleotide for detection of SNP TSC0006264
tattttataaatg

SEQ ID NO: 25404 - DNA, 13 bp, Artificial Sequence
  Oligonucleotide for detection of SNP TSC0006264
catttataaaata

SEQ ID NO: 25405 - DNA, 13 bp, Artificial Sequence
  Oligonucleotide for detection of SNP TSC0006267
tttagatgggttt

SEQ ID NO: 25406 - DNA, 13 bp, Artificial Sequence
  Oligonucleotide for detection of SNP TSC0006267
aaacccatctaaa

SEQ ID NO: 25407 - DNA, 13 bp, Artificial Sequence
  Oligonucleotide for detection of SNP TSC0006267
tttagacgggttt

SEQ ID NO: 25408 - DNA, 13 bp, Artificial Sequence
  Oligonucleotide for detection of SNP TSC0006267
aaacccgtctaaa

SEQ ID NO: 25409 - DNA, 13 bp, Artificial Sequence
  Oligonucleotide for detection of SNP TSC0006267
aggtttgtttgag

SEQ ID NO: 25410 - DNA, 13 bp, Artificial Sequence
  Oligonucleotide for detection of SNP TSC0006267
ctcaaacaaacct

SEQ ID NO: 25411 - DNA, 13 bp, Artificial Sequence
  Oligonucleotide for detection of SNP TSC0006267
aggtttatttgag

SEQ ID NO: 25412 - DNA, 13 bp, Artificial Sequence
  Oligonucleotide for detection of SNP TSC0006267
ctcaaataaacct

SEQ ID NO: 25413 - DNA, 13 bp, Artificial Sequence
  Oligonucleotide for detection of SNP TSC0006267
aggttcgtttgag

SEQ ID NO: 25414 - DNA, 13 bp, Artificial Sequence
  Oligonucleotide for detection of SNP TSC0006267
ctcaaacgaacct

SEQ ID NO: 25415 - DNA, 13 bp, Artificial Sequence
  Oligonucleotide for detection of SNP TSC0006275
gggggtagtttty

SEQ ID NO: 25416 - DNA, 13 bp, Artificial Sequence
  Oligonucleotide for detection of SNP TSC0006275
raaaactaccccc

SEQ ID NO: 25417 - DNA, 13 bp, Artificial Sequence
  Oligonucleotide for detection of SNP TSC0006275
gggggtggtttty

SEQ ID NO: 25418 - DNA, 13 bp, Artificial Sequence
  Oligonucleotide for detection of SNP TSC0006275
raaaaccaccccc

SEQ ID NO: 25419 - DNA, 13 bp, Artificial Sequence
  Oligonucleotide for detection of SNP TSC0006275
gggggcggtttty

SEQ ID NO: 25420 - DNA, 13 bp, Artificial Sequence
  Oligonucleotide for detection of SNP TSC0006275
raaaaccgccccc

SEQ ID NO: 25421 - DNA, 13 bp, Artificial Sequence
  Oligonucleotide for detection of SNP TSC0006275
ggaaattgtttty

SEQ ID NO: 25422 - DNA, 13 bp, Artificial Sequence
  Oligonucleotide for detection of SNP TSC0006275
raaaacaatttcc

SEQ ID NO: 25423 - DNA, 13 bp, Artificial Sequence
  Oligonucleotide for detection of SNP TSC0006275
ggaaatcgtttty

SEQ ID NO: 25424 - DNA, 13 bp, Artificial Sequence
  Oligonucleotide for detection of SNP TSC0006275
raaaacgatttcc

SEQ ID NO: 25425 - DNA, 13 bp, Artificial Sequence
  Oligonucleotide for detection of SNP TSC0006276
gaatttatattag

SEQ ID NO: 25426 - DNA, 13 bp, Artificial Sequence
  Oligonucleotide for detection of SNP TSC0006276
ctaatataaattc

SEQ ID NO: 25427 - DNA, 13 bp, Artificial Sequence
  Oligonucleotide for detection of SNP TSC0006276
gaatttgtattag

SEQ ID NO: 25428 - DNA, 13 bp, Artificial Sequence
  Oligonucleotide for detection of SNP TSC0006276
ctaatacaaattc

SEQ ID NO: 25429 - DNA, 13 bp, Artificial Sequence
  Oligonucleotide for detection of SNP TSC0006276
gaattcgtattag

SEQ ID NO: 25430 - DNA, 13 bp, Artificial Sequence
  Oligonucleotide for detection of SNP TSC0006276
ctaatacgaattc

SEQ ID NO: 25431 - DNA, 13 bp, Artificial Sequence
  Oligonucleotide for detection of SNP TSC0006276
ttagtatggatty

SEQ ID NO: 25432 - DNA, 13 bp, Artificial Sequence
  Oligonucleotide for detection of SNP TSC0006276
raatccatactaa

SEQ ID NO: 25433 - DNA, 13 bp, Artificial Sequence
  Oligonucleotide for detection of SNP TSC0006276
ttagtacggatty

SEQ ID NO: 25434 - DNA, 13 bp, Artificial Sequence
  Oligonucleotide for detection of SNP TSC0006276
raatccgtactaa

SEQ ID NO: 25435 - DNA, 13 bp, Artificial Sequence
  Oligonucleotide for detection of SNP TSC0006281
gtgtatagattaa

SEQ ID NO: 25436 - DNA, 13 bp, Artificial Sequence
  Oligonucleotide for detection of SNP TSC0006281
ttaatctatacac

SEQ ID NO: 25437 - DNA, 13 bp, Artificial Sequence
  Oligonucleotide for detection of SNP TSC0006281
gtgtatggattaa

SEQ ID NO: 25438 - DNA, 13 bp, Artificial Sequence
  Oligonucleotide for detection of SNP TSC0006281
ttaatccatacac

SEQ ID NO: 25439 - DNA, 13 bp, Artificial Sequence
  Oligonucleotide for detection of SNP TSC0006281
gtgtacggattaa

SEQ ID NO: 25440 - DNA, 13 bp, Artificial Sequence
  Oligonucleotide for detection of SNP TSC0006281
ttaatccgtacac

SEQ ID NO: 25441 - DNA, 13 bp, Artificial Sequence
  Oligonucleotide for detection of SNP TSC0006281
ttgatttgtgtay

SEQ ID NO: 25442 - DNA, 13 bp, Artificial Sequence
  Oligonucleotide for detection of SNP TSC0006281
rtacacaaatcaa

SEQ ID NO: 25443 - DNA, 13 bp, Artificial Sequence
  Oligonucleotide for detection of SNP TSC0006281
ttgattcgtgtay

SEQ ID NO: 25444 - DNA, 13 bp, Artificial Sequence
  Oligonucleotide for detection of SNP TSC0006281
rtacacgaatcaa

SEQ ID NO: 25445 - DNA, 13 bp, Artificial Sequence
  Oligonucleotide for detection of SNP TSC0006282
gtttagggttgtt

SEQ ID NO: 25446 - DNA, 13 bp, Artificial Sequence
  Oligonucleotide for detection of SNP TSC0006282
aacaaccctaaac

SEQ ID NO: 25447 - DNA, 13 bp, Artificial Sequence
  Oligonucleotide for detection of SNP TSC0006282
gtttagagttgtt

SEQ ID NO: 25448 - DNA, 13 bp, Artificial Sequence
  Oligonucleotide for detection of SNP TSC0006282
aacaactctaaac

SEQ ID NO: 25449 - DNA, 13 bp, Artificial Sequence
  Oligonucleotide for detection of SNP TSC0006283
gtatgtagggtat

SEQ ID NO: 25450 - DNA, 13 bp, Artificial Sequence
  Oligonucleotide for detection of SNP TSC0006283
ataccctacatac

SEQ ID NO: 25451 - DNA, 13 bp, Artificial Sequence
  Oligonucleotide for detection of SNP TSC0006283
gtatgtggggtat

SEQ ID NO: 25452 - DNA, 13 bp, Artificial Sequence
  Oligonucleotide for detection of SNP TSC0006283
ataccccacatac

SEQ ID NO: 25453 - DNA, 13 bp, Artificial Sequence
  Oligonucleotide for detection of SNP TSC0006283
gtacgtagggtat

SEQ ID NO: 25454 - DNA, 13 bp, Artificial Sequence
  Oligonucleotide for detection of SNP TSC0006283
ataccctacgtac

SEQ ID NO: 25455 - DNA, 13 bp, Artificial Sequence
  Oligonucleotide for detection of SNP TSC0006283
gtacgtggggtat

SEQ ID NO: 25456 - DNA, 13 bp, Artificial Sequence
  Oligonucleotide for detection of SNP TSC0006283
ataccccacgtac

SEQ ID NO: 25457 - DNA, 13 bp, Artificial Sequence
  Oligonucleotide for detection of SNP TSC0006283
gtatgcggggtat

SEQ ID NO: 25458 - DNA, 13 bp, Artificial Sequence
  Oligonucleotide for detection of SNP TSC0006283
ataccccgcatac

SEQ ID NO: 25459 - DNA, 13 bp, Artificial Sequence
  Oligonucleotide for detection of SNP TSC0006283
gtacgcggggtat

SEQ ID NO: 25460 - DNA, 13 bp, Artificial Sequence
  Oligonucleotide for detection of SNP TSC0006283
ataccccgcgtac

SEQ ID NO: 25461 - DNA, 13 bp, Artificial Sequence
  Oligonucleotide for detection of SNP TSC0006283
atgttttgtgtgy

SEQ ID NO: 25462 - DNA, 13 bp, Artificial Sequence
  Oligonucleotide for detection of SNP TSC0006283
rcacacaaaacat

SEQ ID NO: 25463 - DNA, 13 bp, Artificial Sequence
  Oligonucleotide for detection of SNP TSC0006283
atgttttgcgtgy

SEQ ID NO: 25464 - DNA, 13 bp, Artificial Sequence
  Oligonucleotide for detection of SNP TSC0006283
rcacgcaaaacat

SEQ ID NO: 25465 - DNA, 13 bp, Artificial Sequence
  Oligonucleotide for detection of SNP TSC0006283
atgtttcgtgtgy

SEQ ID NO: 25466 - DNA, 13 bp, Artificial Sequence
  Oligonucleotide for detection of SNP TSC0006283
rcacacgaaacat

SEQ ID NO: 25467 - DNA, 13 bp, Artificial Sequence
  Oligonucleotide for detection of SNP TSC0006283
atgtttcgcgtgy

SEQ ID NO: 25468 - DNA, 13 bp, Artificial Sequence
  Oligonucleotide for detection of SNP TSC0006283
rcacgcgaaacat

SEQ ID NO: 25469 - DNA, 13 bp, Artificial Sequence
  Oligonucleotide for detection of SNP TSC0006284
ttagaaatagttt

SEQ ID NO: 25470 - DNA, 13 bp, Artificial Sequence
  Oligonucleotide for detection of SNP TSC0006284
aaactatttctaa

SEQ ID NO: 25471 - DNA, 13 bp, Artificial Sequence
  Oligonucleotide for detection of SNP TSC0006284
ttagaagtagttt

SEQ ID NO: 25472 - DNA, 13 bp, Artificial Sequence
  Oligonucleotide for detection of SNP TSC0006284
aaactacttctaa

SEQ ID NO: 25473 - DNA, 13 bp, Artificial Sequence
  Oligonucleotide for detection of SNP TSC0006305
gttttttgtatty

SEQ ID NO: 25474 - DNA, 13 bp, Artificial Sequence
  Oligonucleotide for detection of SNP TSC0006305
raatacaaaaaac

SEQ ID NO: 25475 - DNA, 13 bp, Artificial Sequence
  Oligonucleotide for detection of SNP TSC0006305
gtttttcgtatty

SEQ ID NO: 25476 - DNA, 13 bp, Artificial Sequence
  Oligonucleotide for detection of SNP TSC0006305
raatacgaaaaac

SEQ ID NO: 25477 - DNA, 13 bp, Artificial Sequence
  Oligonucleotide for detection of SNP TSC0006305
gaatgtgaagaay

SEQ ID NO: 25478 - DNA, 13 bp, Artificial Sequence
  Oligonucleotide for detection of SNP TSC0006305
rttcttcacattc

SEQ ID NO: 25479 - DNA, 13 bp, Artificial Sequence
  Oligonucleotide for detection of SNP TSC0006305
gaatgtaaagaay

SEQ ID NO: 25480 - DNA, 13 bp, Artificial Sequence
  Oligonucleotide for detection of SNP TSC0006305
rttctttacattc

SEQ ID NO: 25481 - DNA, 13 bp, Artificial Sequence
  Oligonucleotide for detection of SNP TSC0006305
gaatgcgaagaay

SEQ ID NO: 25482 - DNA, 13 bp, Artificial Sequence
  Oligonucleotide for detection of SNP TSC0006305
rttcttcgcattc

SEQ ID NO: 25483 - DNA, 13 bp, Artificial Sequence
  Oligonucleotide for detection of SNP TSC0006306
ttttttaaaatgt

SEQ ID NO: 25484 - DNA, 13 bp, Artificial Sequence
  Oligonucleotide for detection of SNP TSC0006306
acattttaaaaaa

SEQ ID NO: 25485 - DNA, 13 bp, Artificial Sequence
  Oligonucleotide for detection of SNP TSC0006306
ttttttgaaatgt

SEQ ID NO: 25486 - DNA, 13 bp, Artificial Sequence
  Oligonucleotide for detection of SNP TSC0006306
acatttcaaaaaa

SEQ ID NO: 25487 - DNA, 13 bp, Artificial Sequence
  Oligonucleotide for detection of SNP TSC0006308
tttattatagtaa

SEQ ID NO: 25488 - DNA, 13 bp, Artificial Sequence
  Oligonucleotide for detection of SNP TSC0006308
ttactataataaa

SEQ ID NO: 25489 - DNA, 13 bp, Artificial Sequence
  Oligonucleotide for detection of SNP TSC0006308
tttattgtagtaa

SEQ ID NO: 25490 - DNA, 13 bp, Artificial Sequence
  Oligonucleotide for detection of SNP TSC0006308
ttactacaataaa

SEQ ID NO: 25491 - DNA, 13 bp, Artificial Sequence
  Oligonucleotide for detection of SNP TSC0006309
gtatttggtttta

SEQ ID NO: 25492 - DNA, 13 bp, Artificial Sequence
  Oligonucleotide for detection of SNP TSC0006309
taaaaccaaatac

SEQ ID NO: 25493 - DNA, 13 bp, Artificial Sequence
  Oligonucleotide for detection of SNP TSC0006309
gtatttagtttta

SEQ ID NO: 25494 - DNA, 13 bp, Artificial Sequence
  Oligonucleotide for detection of SNP TSC0006309
taaaactaaatac

SEQ ID NO: 25495 - DNA, 13 bp, Artificial Sequence
  Oligonucleotide for detection of SNP TSC0006332
taaatgatatgga

SEQ ID NO: 25496 - DNA, 13 bp, Artificial Sequence
  Oligonucleotide for detection of SNP TSC0006332
tccatatcattta

SEQ ID NO: 25497 - DNA, 13 bp, Artificial Sequence
  Oligonucleotide for detection of SNP TSC0006332
taaatgttatgga

SEQ ID NO: 25498 - DNA, 13 bp, Artificial Sequence
  Oligonucleotide for detection of SNP TSC0006332
tccataacattta

SEQ ID NO: 25499 - DNA, 13 bp, Artificial Sequence
  Oligonucleotide for detection of SNP TSC0006332
tttatattattta

SEQ ID NO: 25500 - DNA, 13 bp, Artificial Sequence
  Oligonucleotide for detection of SNP TSC0006332
taaataatataaa

SEQ ID NO: 25501 - DNA, 13 bp, Artificial Sequence
  Oligonucleotide for detection of SNP TSC0006332
tttatagtattta

SEQ ID NO: 25502 - DNA, 13 bp, Artificial Sequence
  Oligonucleotide for detection of SNP TSC0006332
taaatactataaa

SEQ ID NO: 25503 - DNA, 13 bp, Artificial Sequence
  Oligonucleotide for detection of SNP TSC0006336
ttttttatgaagy

SEQ ID NO: 25504 - DNA, 13 bp, Artificial Sequence
  Oligonucleotide for detection of SNP TSC0006336
rcttcataaaaaa

SEQ ID NO: 25505 - DNA, 13 bp, Artificial Sequence
  Oligonucleotide for detection of SNP TSC0006336
ttttttgtgaagy

SEQ ID NO: 25506 - DNA, 13 bp, Artificial Sequence
  Oligonucleotide for detection of SNP TSC0006336
rcttcacaaaaaa

SEQ ID NO: 25507 - DNA, 13 bp, Artificial Sequence
  Oligonucleotide for detection of SNP TSC0006342
ttttaatggatgt

SEQ ID NO: 25508 - DNA, 13 bp, Artificial Sequence
  Oligonucleotide for detection of SNP TSC0006342
acatccattaaaa

SEQ ID NO: 25509 - DNA, 13 bp, Artificial Sequence
  Oligonucleotide for detection of SNP TSC0006342
ttttaacggatgt

SEQ ID NO: 25510 - DNA, 13 bp, Artificial Sequence
  Oligonucleotide for detection of SNP TSC0006342
acatccgttaaaa

SEQ ID NO: 25511 - DNA, 13 bp, Artificial Sequence
  Oligonucleotide for detection of SNP TSC0006342
atatttgttaaaa

SEQ ID NO: 25512 - DNA, 13 bp, Artificial Sequence
  Oligonucleotide for detection of SNP TSC0006342
ttttaacaaatat

SEQ ID NO: 25513 - DNA, 13 bp, Artificial Sequence
  Oligonucleotide for detection of SNP TSC0006342
atatttattaaaa

SEQ ID NO: 25514 - DNA, 13 bp, Artificial Sequence
  Oligonucleotide for detection of SNP TSC0006342
ttttaataaatat

SEQ ID NO: 25515 - DNA, 13 bp, Artificial Sequence
  Oligonucleotide for detection of SNP TSC0006342
atattcgttaaaa

SEQ ID NO: 25516 - DNA, 13 bp, Artificial Sequence
  Oligonucleotide for detection of SNP TSC0006342
ttttaacgaatat

SEQ ID NO: 25517 - DNA, 13 bp, Artificial Sequence
  Oligonucleotide for detection of SNP TSC0006343
gttagtaggtagg

SEQ ID NO: 25518 - DNA, 13 bp, Artificial Sequence
  Oligonucleotide for detection of SNP TSC0006343
cctacctactaac

SEQ ID NO: 25519 - DNA, 13 bp, Artificial Sequence
  Oligonucleotide for detection of SNP TSC0006343
gttagtgggtagg

SEQ ID NO: 25520 - DNA, 13 bp, Artificial Sequence
  Oligonucleotide for detection of SNP TSC0006343
cctacccactaac

SEQ ID NO: 25521 - DNA, 13 bp, Artificial Sequence
  Oligonucleotide for detection of SNP TSC0006344
ttgtatattagtt

SEQ ID NO: 25522 - DNA, 13 bp, Artificial Sequence
  Oligonucleotide for detection of SNP TSC0006344
aactaatatacaa

SEQ ID NO: 25523 - DNA, 13 bp, Artificial Sequence
  Oligonucleotide for detection of SNP TSC0006344
ttgtattttagtt

SEQ ID NO: 25524 - DNA, 13 bp, Artificial Sequence
  Oligonucleotide for detection of SNP TSC0006344
aactaaaatacaa

SEQ ID NO: 25525 - DNA, 13 bp, Artificial Sequence
  Oligonucleotide for detection of SNP TSC0006344
tcgtatattagtt

SEQ ID NO: 25526 - DNA, 13 bp, Artificial Sequence
  Oligonucleotide for detection of SNP TSC0006344
aactaatatacga

SEQ ID NO: 25527 - DNA, 13 bp, Artificial Sequence
  Oligonucleotide for detection of SNP TSC0006344
tcgtattttagtt

SEQ ID NO: 25528 - DNA, 13 bp, Artificial Sequence
  Oligonucleotide for detection of SNP TSC0006344
aactaaaatacga

SEQ ID NO: 25529 - DNA, 13 bp, Artificial Sequence
  Oligonucleotide for detection of SNP TSC0006344
agttggtgtatgg

SEQ ID NO: 25530 - DNA, 13 bp, Artificial Sequence
  Oligonucleotide for detection of SNP TSC0006344
ccatacaccaact

SEQ ID NO: 25531 - DNA, 13 bp, Artificial Sequence
  Oligonucleotide for detection of SNP TSC0006344
agttggggtatgg

SEQ ID NO: 25532 - DNA, 13 bp, Artificial Sequence
  Oligonucleotide for detection of SNP TSC0006344
ccataccccaact

SEQ ID NO: 25533 - DNA, 13 bp, Artificial Sequence
  Oligonucleotide for detection of SNP TSC0006344
agttggtgtacgg

SEQ ID NO: 25534 - DNA, 13 bp, Artificial Sequence
  Oligonucleotide for detection of SNP TSC0006344
ccgtacaccaact

SEQ ID NO: 25535 - DNA, 13 bp, Artificial Sequence
  Oligonucleotide for detection of SNP TSC0006344
agttggggtacgg

SEQ ID NO: 25536 - DNA, 13 bp, Artificial Sequence
  Oligonucleotide for detection of SNP TSC0006344
ccgtaccccaact

SEQ ID NO: 25537 - DNA, 13 bp, Artificial Sequence
  Oligonucleotide for detection of SNP TSC0006357
tagagaggaaagg

SEQ ID NO: 25538 - DNA, 13 bp, Artificial Sequence
  Oligonucleotide for detection of SNP TSC0006357
cctttcctctcta

SEQ ID NO: 25539 - DNA, 13 bp, Artificial Sequence
  Oligonucleotide for detection of SNP TSC0006357
tagagaagaaagg

SEQ ID NO: 25540 - DNA, 13 bp, Artificial Sequence
  Oligonucleotide for detection of SNP TSC0006357
cctttcttctcta

SEQ ID NO: 25541 - DNA, 13 bp, Artificial Sequence
  Oligonucleotide for detection of SNP TSC0006359
tttttatgtaata

SEQ ID NO: 25542 - DNA, 13 bp, Artificial Sequence
  Oligonucleotide for detection of SNP TSC0006359
tattacataaaaa

SEQ ID NO: 25543 - DNA, 13 bp, Artificial Sequence
  Oligonucleotide for detection of SNP TSC0006359
tttttacgtaata

SEQ ID NO: 25544 - DNA, 13 bp, Artificial Sequence
  Oligonucleotide for detection of SNP TSC0006359
tattacgtaaaaa

SEQ ID NO: 25545 - DNA, 13 bp, Artificial Sequence
  Oligonucleotide for detection of SNP TSC0006359
tgttgtgtgaaaa

SEQ ID NO: 25546 - DNA, 13 bp, Artificial Sequence
  Oligonucleotide for detection of SNP TSC0006359
ttttcacacaaca

SEQ ID NO: 25547 - DNA, 13 bp, Artificial Sequence
  Oligonucleotide for detection of SNP TSC0006359
tgttgtatgaaaa

SEQ ID NO: 25548 - DNA, 13 bp, Artificial Sequence
  Oligonucleotide for detection of SNP TSC0006359
ttttcatacaaca

SEQ ID NO: 25549 - DNA, 13 bp, Artificial Sequence
  Oligonucleotide for detection of SNP TSC0006359
tgttgcgtgaaaa

SEQ ID NO: 25550 - DNA, 13 bp, Artificial Sequence
  Oligonucleotide for detection of SNP TSC0006359
ttttcacgcaaca

SEQ ID NO: 25551 - DNA, 13 bp, Artificial Sequence
  Oligonucleotide for detection of SNP TSC0006360
atatagggattta

SEQ ID NO: 25552 - DNA, 13 bp, Artificial Sequence
  Oligonucleotide for detection of SNP TSC0006360
taaatccctatat

SEQ ID NO: 25553 - DNA, 13 bp, Artificial Sequence
  Oligonucleotide for detection of SNP TSC0006360
atatagagattta

SEQ ID NO: 25554 - DNA, 13 bp, Artificial Sequence
  Oligonucleotide for detection of SNP TSC0006360
taaatctctatat

SEQ ID NO: 25555 - DNA, 13 bp, Artificial Sequence
  Oligonucleotide for detection of SNP TSC0006361
aatattaagagga

SEQ ID NO: 25556 - DNA, 13 bp, Artificial Sequence
  Oligonucleotide for detection of SNP TSC0006361
tcctcttaatatt

SEQ ID NO: 25557 - DNA, 13 bp, Artificial Sequence
  Oligonucleotide for detection of SNP TSC0006361
aatattgagagga

SEQ ID NO: 25558 - DNA, 13 bp, Artificial Sequence
  Oligonucleotide for detection of SNP TSC0006361
tcctctcaatatt

SEQ ID NO: 25559 - DNA, 13 bp, Artificial Sequence
  Oligonucleotide for detection of SNP TSC0006361
aatatcgagagga

SEQ ID NO: 25560 - DNA, 13 bp, Artificial Sequence
  Oligonucleotide for detection of SNP TSC0006361
tcctctcgatatt

SEQ ID NO: 25561 - DNA, 13 bp, Artificial Sequence
  Oligonucleotide for detection of SNP TSC0006361
tttttttgatgtt

SEQ ID NO: 25562 - DNA, 13 bp, Artificial Sequence
  Oligonucleotide for detection of SNP TSC0006361
aacatcaaaaaaa

SEQ ID NO: 25563 - DNA, 13 bp, Artificial Sequence
  Oligonucleotide for detection of SNP TSC0006361
ttttttcgatgtt

SEQ ID NO: 25564 - DNA, 13 bp, Artificial Sequence
  Oligonucleotide for detection of SNP TSC0006361
aacatcgaaaaaa

SEQ ID NO: 25565 - DNA, 13 bp, Artificial Sequence
  Oligonucleotide for detection of SNP TSC0006362
ttttttatttggg

SEQ ID NO: 25566 - DNA, 13 bp, Artificial Sequence
  Oligonucleotide for detection of SNP TSC0006362
cccaaataaaaaa

SEQ ID NO: 25567 - DNA, 13 bp, Artificial Sequence
  Oligonucleotide for detection of SNP TSC0006363
aatataatatgaa

SEQ ID NO: 25568 - DNA, 13 bp, Artificial Sequence
  Oligonucleotide for detection of SNP TSC0006363
ttcatattatatt

SEQ ID NO: 25569 - DNA, 13 bp, Artificial Sequence
  Oligonucleotide for detection of SNP TSC0006363
aatatagtatgaa

SEQ ID NO: 25570 - DNA, 13 bp, Artificial Sequence
  Oligonucleotide for detection of SNP TSC0006363
ttcatactatatt

SEQ ID NO: 25571 - DNA, 13 bp, Artificial Sequence
  Oligonucleotide for detection of SNP TSC0006364
ttttatagtggtg

SEQ ID NO: 25572 - DNA, 13 bp, Artificial Sequence
  Oligonucleotide for detection of SNP TSC0006364
caccactataaaa

SEQ ID NO: 25573 - DNA, 13 bp, Artificial Sequence
  Oligonucleotide for detection of SNP TSC0006364
ttttatggtggtg

SEQ ID NO: 25574 - DNA, 13 bp, Artificial Sequence
  Oligonucleotide for detection of SNP TSC0006364
caccaccataaaa

SEQ ID NO: 25575 - DNA, 13 bp, Artificial Sequence
  Oligonucleotide for detection of SNP TSC0006364
ttttacggtggtg

SEQ ID NO: 25576 - DNA, 13 bp, Artificial Sequence
  Oligonucleotide for detection of SNP TSC0006364
caccaccgtaaaa

SEQ ID NO: 25577 - DNA, 13 bp, Artificial Sequence
  Oligonucleotide for detection of SNP TSC0006365
atagttatttatt

SEQ ID NO: 25578 - DNA, 13 bp, Artificial Sequence
  Oligonucleotide for detection of SNP TSC0006365
aataaataactat

SEQ ID NO: 25579 - DNA, 13 bp, Artificial Sequence
  Oligonucleotide for detection of SNP TSC0006366
aatgtaatatata

SEQ ID NO: 25580 - DNA, 13 bp, Artificial Sequence
  Oligonucleotide for detection of SNP TSC0006366
tatatattacatt

SEQ ID NO: 25581 - DNA, 13 bp, Artificial Sequence
  Oligonucleotide for detection of SNP TSC0006366
aatgtagtatata

SEQ ID NO: 25582 - DNA, 13 bp, Artificial Sequence
  Oligonucleotide for detection of SNP TSC0006366
tatatactacatt

SEQ ID NO: 25583 - DNA, 13 bp, Artificial Sequence
  Oligonucleotide for detection of SNP TSC0006367
tgatgagtaaagy

SEQ ID NO: 25584 - DNA, 13 bp, Artificial Sequence
  Oligonucleotide for detection of SNP TSC0006367
rctttactcatca

SEQ ID NO: 25585 - DNA, 13 bp, Artificial Sequence
  Oligonucleotide for detection of SNP TSC0006367
tgatgaataaagy

SEQ ID NO: 25586 - DNA, 13 bp, Artificial Sequence
  Oligonucleotide for detection of SNP TSC0006367
rctttattcatca

SEQ ID NO: 25587 - DNA, 13 bp, Artificial Sequence
  Oligonucleotide for detection of SNP TSC0006369
gtttttattgttt

SEQ ID NO: 25588 - DNA, 13 bp, Artificial Sequence
  Oligonucleotide for detection of SNP TSC0006369
aaacaataaaaac

SEQ ID NO: 25589 - DNA, 13 bp, Artificial Sequence
  Oligonucleotide for detection of SNP TSC0006369
gtttttgttgttt

SEQ ID NO: 25590 - DNA, 13 bp, Artificial Sequence
  Oligonucleotide for detection of SNP TSC0006369
aaacaacaaaaac

SEQ ID NO: 25591 - DNA, 13 bp, Artificial Sequence
  Oligonucleotide for detection of SNP TSC0006369
gttttcgttgttt

SEQ ID NO: 25592 - DNA, 13 bp, Artificial Sequence
  Oligonucleotide for detection of SNP TSC0006369
aaacaacgaaaac

SEQ ID NO: 25593 - DNA, 13 bp, Artificial Sequence
  Oligonucleotide for detection of SNP TSC0006369
agatagtgagaay

SEQ ID NO: 25594 - DNA, 13 bp, Artificial Sequence
  Oligonucleotide for detection of SNP TSC0006369
rttctcactatct

SEQ ID NO: 25595 - DNA, 13 bp, Artificial Sequence
  Oligonucleotide for detection of SNP TSC0006369
agatagcgagaay

SEQ ID NO: 25596 - DNA, 13 bp, Artificial Sequence
  Oligonucleotide for detection of SNP TSC0006369
rttctcgctatct

SEQ ID NO: 25597 - DNA, 13 bp, Artificial Sequence
  Oligonucleotide for detection of SNP TSC0006370
tttagaaatttgt

SEQ ID NO: 25598 - DNA, 13 bp, Artificial Sequence
  Oligonucleotide for detection of SNP TSC0006370
acaaatttctaaa

SEQ ID NO: 25599 - DNA, 13 bp, Artificial Sequence
  Oligonucleotide for detection of SNP TSC0006370
tttagatatttgt

SEQ ID NO: 25600 - DNA, 13 bp, Artificial Sequence
  Oligonucleotide for detection of SNP TSC0006370
acaaatatctaaa

SEQ ID NO: 25601 - DNA, 13 bp, Artificial Sequence
  Oligonucleotide for detection of SNP TSC0006370
ataaatttttaga

SEQ ID NO: 25602 - DNA, 13 bp, Artificial Sequence
  Oligonucleotide for detection of SNP TSC0006370
tctaaaaatttat

SEQ ID NO: 25603 - DNA, 13 bp, Artificial Sequence
  Oligonucleotide for detection of SNP TSC0006370
ataaatgtttaga

SEQ ID NO: 25604 - DNA, 13 bp, Artificial Sequence
  Oligonucleotide for detection of SNP TSC0006370
tctaaacatttat

SEQ ID NO: 25605 - DNA, 13 bp, Artificial Sequence
  Oligonucleotide for detection of SNP TSC0006373
tatatagaatata

SEQ ID NO: 25606 - DNA, 13 bp, Artificial Sequence
  Oligonucleotide for detection of SNP TSC0006373
tatattctatata

SEQ ID NO: 25607 - DNA, 13 bp, Artificial Sequence
  Oligonucleotide for detection of SNP TSC0006373
tatattgtgtgtg

SEQ ID NO: 25608 - DNA, 13 bp, Artificial Sequence
  Oligonucleotide for detection of SNP TSC0006373
cacacacaatata

SEQ ID NO: 25609 - DNA, 13 bp, Artificial Sequence
  Oligonucleotide for detection of SNP TSC0006373
tatattttgtgtg

SEQ ID NO: 25610 - DNA, 13 bp, Artificial Sequence
  Oligonucleotide for detection of SNP TSC0006373
cacacaaaatata

SEQ ID NO: 25611 - DNA, 13 bp, Artificial Sequence
  Oligonucleotide for detection of SNP TSC0006377
attttaatatgag

SEQ ID NO: 25612 - DNA, 13 bp, Artificial Sequence
  Oligonucleotide for detection of SNP TSC0006377
ctcatattaaaat

SEQ ID NO: 25613 - DNA, 13 bp, Artificial Sequence
  Oligonucleotide for detection of SNP TSC0006377
attttagtatgag

SEQ ID NO: 25614 - DNA, 13 bp, Artificial Sequence
  Oligonucleotide for detection of SNP TSC0006377
ctcatactaaaat

SEQ ID NO: 25615 - DNA, 13 bp, Artificial Sequence
  Oligonucleotide for detection of SNP TSC0006380
atttaatgattta

SEQ ID NO: 25616 - DNA, 13 bp, Artificial Sequence
  Oligonucleotide for detection of SNP TSC0006380
taaatcattaaat

SEQ ID NO: 25617 - DNA, 13 bp, Artificial Sequence
  Oligonucleotide for detection of SNP TSC0006380
atttaacgattta

SEQ ID NO: 25618 - DNA, 13 bp, Artificial Sequence
  Oligonucleotide for detection of SNP TSC0006380
taaatcgttaaat

SEQ ID NO: 25619 - DNA, 13 bp, Artificial Sequence
  Oligonucleotide for detection of SNP TSC0006380
tgggttgttgggt

SEQ ID NO: 25620 - DNA, 13 bp, Artificial Sequence
  Oligonucleotide for detection of SNP TSC0006380
acccaacaaccca

SEQ ID NO: 25621 - DNA, 13 bp, Artificial Sequence
  Oligonucleotide for detection of SNP TSC0006380
tgggttattgggt

SEQ ID NO: 25622 - DNA, 13 bp, Artificial Sequence
  Oligonucleotide for detection of SNP TSC0006380
acccaataaccca

SEQ ID NO: 25623 - DNA, 13 bp, Artificial Sequence
  Oligonucleotide for detection of SNP TSC0006380
tgggtcgttgggt

SEQ ID NO: 25624 - DNA, 13 bp, Artificial Sequence
  Oligonucleotide for detection of SNP TSC0006380
acccaacgaccca

SEQ ID NO: 25625 - DNA, 13 bp, Artificial Sequence
  Oligonucleotide for detection of SNP TSC0006387
tattttgttttta

SEQ ID NO: 25626 - DNA, 13 bp, Artificial Sequence
  Oligonucleotide for detection of SNP TSC0006387
taaaaacaaaata

SEQ ID NO: 25627 - DNA, 13 bp, Artificial Sequence
  Oligonucleotide for detection of SNP TSC0006387
tatttttttttta

SEQ ID NO: 25628 - DNA, 13 bp, Artificial Sequence
  Oligonucleotide for detection of SNP TSC0006387
taaaaaaaaaata

SEQ ID NO: 25629 - DNA, 13 bp, Artificial Sequence
  Oligonucleotide for detection of SNP TSC0006387
tatttcgttttta

SEQ ID NO: 25630 - DNA, 13 bp, Artificial Sequence
  Oligonucleotide for detection of SNP TSC0006387
taaaaacgaaata

SEQ ID NO: 25631 - DNA, 13 bp, Artificial Sequence
  Oligonucleotide for detection of SNP TSC0006387
tagagatgaaata

SEQ ID NO: 25632 - DNA, 13 bp, Artificial Sequence
  Oligonucleotide for detection of SNP TSC0006387
tatttcatctcta

SEQ ID NO: 25633 - DNA, 13 bp, Artificial Sequence
  Oligonucleotide for detection of SNP TSC0006387
tagagaagaaata

SEQ ID NO: 25634 - DNA, 13 bp, Artificial Sequence
  Oligonucleotide for detection of SNP TSC0006387
tatttcttctcta

SEQ ID NO: 25635 - DNA, 13 bp, Artificial Sequence
  Oligonucleotide for detection of SNP TSC0006387
tagagacgaaata

SEQ ID NO: 25636 - DNA, 13 bp, Artificial Sequence
  Oligonucleotide for detection of SNP TSC0006387
tatttcgtctcta

SEQ ID NO: 25637 - DNA, 13 bp, Artificial Sequence
  Oligonucleotide for detection of SNP TSC0006388
agaataatagtat

SEQ ID NO: 25638 - DNA, 13 bp, Artificial Sequence
  Oligonucleotide for detection of SNP TSC0006388
atactattattct

SEQ ID NO: 25639 - DNA, 13 bp, Artificial Sequence
  Oligonucleotide for detection of SNP TSC0006388
agaatattagtat

SEQ ID NO: 25640 - DNA, 13 bp, Artificial Sequence
  Oligonucleotide for detection of SNP TSC0006388
atactaatattct

SEQ ID NO: 25641 - DNA, 13 bp, Artificial Sequence
  Oligonucleotide for detection of SNP TSC0006401
ttaaagaggttay

SEQ ID NO: 25642 - DNA, 13 bp, Artificial Sequence
  Oligonucleotide for detection of SNP TSC0006401
rtaacctctttaa

SEQ ID NO: 25643 - DNA, 13 bp, Artificial Sequence
  Oligonucleotide for detection of SNP TSC0006401
ttaaaggggttay

SEQ ID NO: 25644 - DNA, 13 bp, Artificial Sequence
  Oligonucleotide for detection of SNP TSC0006401
rtaacccctttaa

SEQ ID NO: 25645 - DNA, 13 bp, Artificial Sequence
  Oligonucleotide for detection of SNP TSC0006404
gtttatgtttagg

SEQ ID NO: 25646 - DNA, 13 bp, Artificial Sequence
  Oligonucleotide for detection of SNP TSC0006404
cctaaacataaac

SEQ ID NO: 25647 - DNA, 13 bp, Artificial Sequence
  Oligonucleotide for detection of SNP TSC0006414
tgagttgttttat

SEQ ID NO: 25648 - DNA, 13 bp, Artificial Sequence
  Oligonucleotide for detection of SNP TSC0006414
ataaaacaactca

SEQ ID NO: 25649 - DNA, 13 bp, Artificial Sequence
  Oligonucleotide for detection of SNP TSC0006414
tgagttattttat

SEQ ID NO: 25650 - DNA, 13 bp, Artificial Sequence
  Oligonucleotide for detection of SNP TSC0006414
ataaaataactca

SEQ ID NO: 25651 - DNA, 13 bp, Artificial Sequence
  Oligonucleotide for detection of SNP TSC0006418
taagtaaattatg

SEQ ID NO: 25652 - DNA, 13 bp, Artificial Sequence
  Oligonucleotide for detection of SNP TSC0006418
cataatttactta

SEQ ID NO: 25653 - DNA, 13 bp, Artificial Sequence
  Oligonucleotide for detection of SNP TSC0006418
taagtagattatg

SEQ ID NO: 25654 - DNA, 13 bp, Artificial Sequence
  Oligonucleotide for detection of SNP TSC0006418
cataatctactta

SEQ ID NO: 25655 - DNA, 13 bp, Artificial Sequence
  Oligonucleotide for detection of SNP TSC0006419
tgtggttgtttat

SEQ ID NO: 25656 - DNA, 13 bp, Artificial Sequence
  Oligonucleotide for detection of SNP TSC0006419
ataaacaaccaca

SEQ ID NO: 25657 - DNA, 13 bp, Artificial Sequence
  Oligonucleotide for detection of SNP TSC0006419
tgtggtcgtttat

SEQ ID NO: 25658 - DNA, 13 bp, Artificial Sequence
  Oligonucleotide for detection of SNP TSC0006419
ataaacgaccaca

SEQ ID NO: 25659 - DNA, 13 bp, Artificial Sequence
  Oligonucleotide for detection of SNP TSC0006419
atgaatggttata

SEQ ID NO: 25660 - DNA, 13 bp, Artificial Sequence
  Oligonucleotide for detection of SNP TSC0006419
tataaccattcat

SEQ ID NO: 25661 - DNA, 13 bp, Artificial Sequence
  Oligonucleotide for detection of SNP TSC0006419
atgaatagttata

SEQ ID NO: 25662 - DNA, 13 bp, Artificial Sequence
  Oligonucleotide for detection of SNP TSC0006419
tataactattcat

SEQ ID NO: 25663 - DNA, 13 bp, Artificial Sequence
  Oligonucleotide for detection of SNP TSC0006419
atgaacggttata

SEQ ID NO: 25664 - DNA, 13 bp, Artificial Sequence
  Oligonucleotide for detection of SNP TSC0006419
tataaccgttcat

SEQ ID NO: 25665 - DNA, 13 bp, Artificial Sequence
  Oligonucleotide for detection of SNP TSC0006424
aaaaagaaaaatg

SEQ ID NO: 25666 - DNA, 13 bp, Artificial Sequence
  Oligonucleotide for detection of SNP TSC0006424
catttttcttttt

SEQ ID NO: 25667 - DNA, 13 bp, Artificial Sequence
  Oligonucleotide for detection of SNP TSC0006424
aaaaaggaaaatg

SEQ ID NO: 25668 - DNA, 13 bp, Artificial Sequence
  Oligonucleotide for detection of SNP TSC0006424
cattttccttttt

SEQ ID NO: 25669 - DNA, 13 bp, Artificial Sequence
  Oligonucleotide for detection of SNP TSC0006425
gttgggaatagag

SEQ ID NO: 25670 - DNA, 13 bp, Artificial Sequence
  Oligonucleotide for detection of SNP TSC0006425
ctctattcccaac

SEQ ID NO: 25671 - DNA, 13 bp, Artificial Sequence
  Oligonucleotide for detection of SNP TSC0006425
gttggggatagag

SEQ ID NO: 25672 - DNA, 13 bp, Artificial Sequence
  Oligonucleotide for detection of SNP TSC0006425
ctctatccccaac

SEQ ID NO: 25673 - DNA, 13 bp, Artificial Sequence
  Oligonucleotide for detection of SNP TSC0006425
gtcgggaatagag

SEQ ID NO: 25674 - DNA, 13 bp, Artificial Sequence
  Oligonucleotide for detection of SNP TSC0006425
ctctattcccgac

SEQ ID NO: 25675 - DNA, 13 bp, Artificial Sequence
  Oligonucleotide for detection of SNP TSC0006425
gtcggggatagag

SEQ ID NO: 25676 - DNA, 13 bp, Artificial Sequence
  Oligonucleotide for detection of SNP TSC0006425
ctctatccccgac

SEQ ID NO: 25677 - DNA, 13 bp, Artificial Sequence
  Oligonucleotide for detection of SNP TSC0006426
gagttgtagagtt

SEQ ID NO: 25678 - DNA, 13 bp, Artificial Sequence
  Oligonucleotide for detection of SNP TSC0006426
aactctacaactc

SEQ ID NO: 25679 - DNA, 13 bp, Artificial Sequence
  Oligonucleotide for detection of SNP TSC0006426
gagttggagagtt

SEQ ID NO: 25680 - DNA, 13 bp, Artificial Sequence
  Oligonucleotide for detection of SNP TSC0006426
aactctccaactc

SEQ ID NO: 25681 - DNA, 13 bp, Artificial Sequence
  Oligonucleotide for detection of SNP TSC0006426
aattttgtaatty

SEQ ID NO: 25682 - DNA, 13 bp, Artificial Sequence
  Oligonucleotide for detection of SNP TSC0006426
raattacaaaatt

SEQ ID NO: 25683 - DNA, 13 bp, Artificial Sequence
  Oligonucleotide for detection of SNP TSC0006426
aattttttaatty

SEQ ID NO: 25684 - DNA, 13 bp, Artificial Sequence
  Oligonucleotide for detection of SNP TSC0006426
raattaaaaaatt

SEQ ID NO: 25685 - DNA, 13 bp, Artificial Sequence
  Oligonucleotide for detection of SNP TSC0006438
atttaagaataat

SEQ ID NO: 25686 - DNA, 13 bp, Artificial Sequence
  Oligonucleotide for detection of SNP TSC0006438
attattcttaaat

SEQ ID NO: 25687 - DNA, 13 bp, Artificial Sequence
  Oligonucleotide for detection of SNP TSC0006438
atttaataataat

SEQ ID NO: 25688 - DNA, 13 bp, Artificial Sequence
  Oligonucleotide for detection of SNP TSC0006438
attattattaaat

SEQ ID NO: 25689 - DNA, 13 bp, Artificial Sequence
  Oligonucleotide for detection of SNP TSC0006438
attatttttaggt

SEQ ID NO: 25690 - DNA, 13 bp, Artificial Sequence
  Oligonucleotide for detection of SNP TSC0006438
acctaaaaataat

SEQ ID NO: 25691 - DNA, 13 bp, Artificial Sequence
  Oligonucleotide for detection of SNP TSC0006438
attattattaggt

SEQ ID NO: 25692 - DNA, 13 bp, Artificial Sequence
  Oligonucleotide for detection of SNP TSC0006438
acctaataataat

SEQ ID NO: 25693 - DNA, 13 bp, Artificial Sequence
  Oligonucleotide for detection of SNP TSC0006441
ttaatgataatat

SEQ ID NO: 25694 - DNA, 13 bp, Artificial Sequence
  Oligonucleotide for detection of SNP TSC0006441
atattatcattaa

SEQ ID NO: 25695 - DNA, 13 bp, Artificial Sequence
  Oligonucleotide for detection of SNP TSC0006441
ttaatggtaatat

SEQ ID NO: 25696 - DNA, 13 bp, Artificial Sequence
  Oligonucleotide for detection of SNP TSC0006441
atattaccattaa

SEQ ID NO: 25697 - DNA, 13 bp, Artificial Sequence
  Oligonucleotide for detection of SNP TSC0006441
ttaacgataatat

SEQ ID NO: 25698 - DNA, 13 bp, Artificial Sequence
  Oligonucleotide for detection of SNP TSC0006441
atattatcgttaa

SEQ ID NO: 25699 - DNA, 13 bp, Artificial Sequence
  Oligonucleotide for detection of SNP TSC0006441
ttaacggtaatat

SEQ ID NO: 25700 - DNA, 13 bp, Artificial Sequence
  Oligonucleotide for detection of SNP TSC0006441
atattaccgttaa

SEQ ID NO: 25701 - DNA, 13 bp, Artificial Sequence
  Oligonucleotide for detection of SNP TSC0006460
ggtaaagtatagg

SEQ ID NO: 25702 - DNA, 13 bp, Artificial Sequence
  Oligonucleotide for detection of SNP TSC0006460
cctatactttacc

SEQ ID NO: 25703 - DNA, 13 bp, Artificial Sequence
  Oligonucleotide for detection of SNP TSC0006460
ggtaaaatatagg

SEQ ID NO: 25704 - DNA, 13 bp, Artificial Sequence
  Oligonucleotide for detection of SNP TSC0006460
cctatattttacc

SEQ ID NO: 25705 - DNA, 13 bp, Artificial Sequence
  Oligonucleotide for detection of SNP TSC0006474
ttgtaaaggaaat

SEQ ID NO: 25706 - DNA, 13 bp, Artificial Sequence
  Oligonucleotide for detection of SNP TSC0006474
atttcctttacaa

SEQ ID NO: 25707 - DNA, 13 bp, Artificial Sequence
  Oligonucleotide for detection of SNP TSC0006474
ttgtaagggaaat

SEQ ID NO: 25708 - DNA, 13 bp, Artificial Sequence
  Oligonucleotide for detection of SNP TSC0006474
atttcccttacaa

SEQ ID NO: 25709 - DNA, 13 bp, Artificial Sequence
  Oligonucleotide for detection of SNP TSC0006475
aaagtaggggtta

SEQ ID NO: 25710 - DNA, 13 bp, Artificial Sequence
  Oligonucleotide for detection of SNP TSC0006475
taacccctacttt

SEQ ID NO: 25711 - DNA, 13 bp, Artificial Sequence
  Oligonucleotide for detection of SNP TSC0006475
aaagtaagggtta

SEQ ID NO: 25712 - DNA, 13 bp, Artificial Sequence
  Oligonucleotide for detection of SNP TSC0006475
taacccttacttt

SEQ ID NO: 25713 - DNA, 13 bp, Artificial Sequence
  Oligonucleotide for detection of SNP TSC0006484
agtgaaaatagag

SEQ ID NO: 25714 - DNA, 13 bp, Artificial Sequence
  Oligonucleotide for detection of SNP TSC0006484
ctctattttcact

SEQ ID NO: 25715 - DNA, 13 bp, Artificial Sequence
  Oligonucleotide for detection of SNP TSC0006484
agtgaagatagag

SEQ ID NO: 25716 - DNA, 13 bp, Artificial Sequence
  Oligonucleotide for detection of SNP TSC0006484
ctctatcttcact

SEQ ID NO: 25717 - DNA, 13 bp, Artificial Sequence
  Oligonucleotide for detection of SNP TSC0006485
gattggatattty

SEQ ID NO: 25718 - DNA, 13 bp, Artificial Sequence
  Oligonucleotide for detection of SNP TSC0006485
raaatatccaatc

SEQ ID NO: 25719 - DNA, 13 bp, Artificial Sequence
  Oligonucleotide for detection of SNP TSC0006485
gattggttattty

SEQ ID NO: 25720 - DNA, 13 bp, Artificial Sequence
  Oligonucleotide for detection of SNP TSC0006485
raaataaccaatc

SEQ ID NO: 25721 - DNA, 13 bp, Artificial Sequence
  Oligonucleotide for detection of SNP TSC0006485
ggaatatttaaty

SEQ ID NO: 25722 - DNA, 13 bp, Artificial Sequence
  Oligonucleotide for detection of SNP TSC0006485
rattaaatattcc

SEQ ID NO: 25723 - DNA, 13 bp, Artificial Sequence
  Oligonucleotide for detection of SNP TSC0006485
ggaatagttaaty

SEQ ID NO: 25724 - DNA, 13 bp, Artificial Sequence
  Oligonucleotide for detection of SNP TSC0006485
rattaactattcc

SEQ ID NO: 25725 - DNA, 13 bp, Artificial Sequence
  Oligonucleotide for detection of SNP TSC0006486
gttgtaattgtty

SEQ ID NO: 25726 - DNA, 13 bp, Artificial Sequence
  Oligonucleotide for detection of SNP TSC0006486
raacaattacaac

SEQ ID NO: 25727 - DNA, 13 bp, Artificial Sequence
  Oligonucleotide for detection of SNP TSC0006486
gttgtagttgtty

SEQ ID NO: 25728 - DNA, 13 bp, Artificial Sequence
  Oligonucleotide for detection of SNP TSC0006486
raacaactacaac

SEQ ID NO: 25729 - DNA, 13 bp, Artificial Sequence
  Oligonucleotide for detection of SNP TSC0006501
gtagtaatttttt

SEQ ID NO: 25730 - DNA, 13 bp, Artificial Sequence
  Oligonucleotide for detection of SNP TSC0006501
aaaaaattactac

SEQ ID NO: 25731 - DNA, 13 bp, Artificial Sequence
  Oligonucleotide for detection of SNP TSC0006501
gtagtagtttttt

SEQ ID NO: 25732 - DNA, 13 bp, Artificial Sequence
  Oligonucleotide for detection of SNP TSC0006501
aaaaaactactac

SEQ ID NO: 25733 - DNA, 13 bp, Artificial Sequence
  Oligonucleotide for detection of SNP TSC0006502
ttttttatgtgty

SEQ ID NO: 25734 - DNA, 13 bp, Artificial Sequence
  Oligonucleotide for detection of SNP TSC0006502
racacataaaaaa

SEQ ID NO: 25735 - DNA, 13 bp, Artificial Sequence
  Oligonucleotide for detection of SNP TSC0006506
agggttggtggta

SEQ ID NO: 25736 - DNA, 13 bp, Artificial Sequence
  Oligonucleotide for detection of SNP TSC0006506
taccaccaaccct

SEQ ID NO: 25737 - DNA, 13 bp, Artificial Sequence
  Oligonucleotide for detection of SNP TSC0006506
agggtttgtggta

SEQ ID NO: 25738 - DNA, 13 bp, Artificial Sequence
  Oligonucleotide for detection of SNP TSC0006506
taccacaaaccct

SEQ ID NO: 25739 - DNA, 13 bp, Artificial Sequence
  Oligonucleotide for detection of SNP TSC0006506
tgttattagtttt

SEQ ID NO: 25740 - DNA, 13 bp, Artificial Sequence
  Oligonucleotide for detection of SNP TSC0006506
aaaactaataaca

SEQ ID NO: 25741 - DNA, 13 bp, Artificial Sequence
  Oligonucleotide for detection of SNP TSC0006506
tgttataagtttt

SEQ ID NO: 25742 - DNA, 13 bp, Artificial Sequence
  Oligonucleotide for detection of SNP TSC0006506
aaaacttataaca

SEQ ID NO: 25743 - DNA, 13 bp, Artificial Sequence
  Oligonucleotide for detection of SNP TSC0006507
tttttgattattg

SEQ ID NO: 25744 - DNA, 13 bp, Artificial Sequence
  Oligonucleotide for detection of SNP TSC0006507
caataatcaaaaa

SEQ ID NO: 25745 - DNA, 13 bp, Artificial Sequence
  Oligonucleotide for detection of SNP TSC0006507
tttttgtttattg

SEQ ID NO: 25746 - DNA, 13 bp, Artificial Sequence
  Oligonucleotide for detection of SNP TSC0006507
caataaacaaaaa

SEQ ID NO: 25747 - DNA, 13 bp, Artificial Sequence
  Oligonucleotide for detection of SNP TSC0006507
taataattaaagg

SEQ ID NO: 25748 - DNA, 13 bp, Artificial Sequence
  Oligonucleotide for detection of SNP TSC0006507
cctttaattatta

SEQ ID NO: 25749 - DNA, 13 bp, Artificial Sequence
  Oligonucleotide for detection of SNP TSC0006507
taataaataaagg

SEQ ID NO: 25750 - DNA, 13 bp, Artificial Sequence
  Oligonucleotide for detection of SNP TSC0006507
cctttatttatta

SEQ ID NO: 25751 - DNA, 13 bp, Artificial Sequence
  Oligonucleotide for detection of SNP TSC0006511
atgagggtttgty

SEQ ID NO: 25752 - DNA, 13 bp, Artificial Sequence
  Oligonucleotide for detection of SNP TSC0006511
racaaaccctcat

SEQ ID NO: 25753 - DNA, 13 bp, Artificial Sequence
  Oligonucleotide for detection of SNP TSC0006511
atgaggttttgty

SEQ ID NO: 25754 - DNA, 13 bp, Artificial Sequence
  Oligonucleotide for detection of SNP TSC0006511
racaaaacctcat

SEQ ID NO: 25755 - DNA, 13 bp, Artificial Sequence
  Oligonucleotide for detection of SNP TSC0006511
acgagggtttgty

SEQ ID NO: 25756 - DNA, 13 bp, Artificial Sequence
  Oligonucleotide for detection of SNP TSC0006511
racaaaccctcgt

SEQ ID NO: 25757 - DNA, 13 bp, Artificial Sequence
  Oligonucleotide for detection of SNP TSC0006511
acgaggttttgty

SEQ ID NO: 25758 - DNA, 13 bp, Artificial Sequence
  Oligonucleotide for detection of SNP TSC0006511
racaaaacctcgt

SEQ ID NO: 25759 - DNA, 13 bp, Artificial Sequence
  Oligonucleotide for detection of SNP TSC0006511
ggtaaatttttgt

SEQ ID NO: 25760 - DNA, 13 bp, Artificial Sequence
  Oligonucleotide for detection of SNP TSC0006511
acaaaaatttacc

SEQ ID NO: 25761 - DNA, 13 bp, Artificial Sequence
  Oligonucleotide for detection of SNP TSC0006511
ggtaaaattttgt

SEQ ID NO: 25762 - DNA, 13 bp, Artificial Sequence
  Oligonucleotide for detection of SNP TSC0006511
acaaaattttacc

SEQ ID NO: 25763 - DNA, 13 bp, Artificial Sequence
  Oligonucleotide for detection of SNP TSC0006511
ggtaaattttcgt

SEQ ID NO: 25764 - DNA, 13 bp, Artificial Sequence
  Oligonucleotide for detection of SNP TSC0006511
acgaaaatttacc

SEQ ID NO: 25765 - DNA, 13 bp, Artificial Sequence
  Oligonucleotide for detection of SNP TSC0006511
ggtaaaatttcgt

SEQ ID NO: 25766 - DNA, 13 bp, Artificial Sequence
  Oligonucleotide for detection of SNP TSC0006511
acgaaattttacc

SEQ ID NO: 25767 - DNA, 13 bp, Artificial Sequence
  Oligonucleotide for detection of SNP TSC0006513
ttttgttgttttt

SEQ ID NO: 25768 - DNA, 13 bp, Artificial Sequence
  Oligonucleotide for detection of SNP TSC0006513
aaaaacaacaaaa

SEQ ID NO: 25769 - DNA, 13 bp, Artificial Sequence
  Oligonucleotide for detection of SNP TSC0006513
ttttgtcgttttt

SEQ ID NO: 25770 - DNA, 13 bp, Artificial Sequence
  Oligonucleotide for detection of SNP TSC0006513
aaaaacgacaaaa

SEQ ID NO: 25771 - DNA, 13 bp, Artificial Sequence
  Oligonucleotide for detection of SNP TSC0006513
agggatggtaaag

SEQ ID NO: 25772 - DNA, 13 bp, Artificial Sequence
  Oligonucleotide for detection of SNP TSC0006513
ctttaccatccct

SEQ ID NO: 25773 - DNA, 13 bp, Artificial Sequence
  Oligonucleotide for detection of SNP TSC0006513
agggatagtaaag

SEQ ID NO: 25774 - DNA, 13 bp, Artificial Sequence
  Oligonucleotide for detection of SNP TSC0006513
ctttactatccct

SEQ ID NO: 25775 - DNA, 13 bp, Artificial Sequence
  Oligonucleotide for detection of SNP TSC0006513
agggacggtaaag

SEQ ID NO: 25776 - DNA, 13 bp, Artificial Sequence
  Oligonucleotide for detection of SNP TSC0006513
ctttaccgtccct

SEQ ID NO: 25777 - DNA, 13 bp, Artificial Sequence
  Oligonucleotide for detection of SNP TSC0006516
tgttagttaatty

SEQ ID NO: 25778 - DNA, 13 bp, Artificial Sequence
  Oligonucleotide for detection of SNP TSC0006516
raattaactaaca

SEQ ID NO: 25779 - DNA, 13 bp, Artificial Sequence
  Oligonucleotide for detection of SNP TSC0006516
tgttaggtaatty

SEQ ID NO: 25780 - DNA, 13 bp, Artificial Sequence
  Oligonucleotide for detection of SNP TSC0006516
raattacctaaca

SEQ ID NO: 25781 - DNA, 13 bp, Artificial Sequence
  Oligonucleotide for detection of SNP TSC0006516
gaattagttgata

SEQ ID NO: 25782 - DNA, 13 bp, Artificial Sequence
  Oligonucleotide for detection of SNP TSC0006516
tatcaactaattc

SEQ ID NO: 25783 - DNA, 13 bp, Artificial Sequence
  Oligonucleotide for detection of SNP TSC0006516
gaattatttgata

SEQ ID NO: 25784 - DNA, 13 bp, Artificial Sequence
  Oligonucleotide for detection of SNP TSC0006516
tatcaaataattc

SEQ ID NO: 25785 - DNA, 13 bp, Artificial Sequence
  Oligonucleotide for detection of SNP TSC0006528
atgattaagtttt

SEQ ID NO: 25786 - DNA, 13 bp, Artificial Sequence
  Oligonucleotide for detection of SNP TSC0006528
aaaacttaatcat

SEQ ID NO: 25787 - DNA, 13 bp, Artificial Sequence
  Oligonucleotide for detection of SNP TSC0006528
atgattgagtttt

SEQ ID NO: 25788 - DNA, 13 bp, Artificial Sequence
  Oligonucleotide for detection of SNP TSC0006528
aaaactcaatcat

SEQ ID NO: 25789 - DNA, 13 bp, Artificial Sequence
  Oligonucleotide for detection of SNP TSC0006530
gtttgagggttat

SEQ ID NO: 25790 - DNA, 13 bp, Artificial Sequence
  Oligonucleotide for detection of SNP TSC0006530
ataaccctcaaac

SEQ ID NO: 25791 - DNA, 13 bp, Artificial Sequence
  Oligonucleotide for detection of SNP TSC0006530
gtttgaaggttat

SEQ ID NO: 25792 - DNA, 13 bp, Artificial Sequence
  Oligonucleotide for detection of SNP TSC0006530
ataaccttcaaac

SEQ ID NO: 25793 - DNA, 13 bp, Artificial Sequence
  Oligonucleotide for detection of SNP TSC0006530
gttcgagggttat

SEQ ID NO: 25794 - DNA, 13 bp, Artificial Sequence
  Oligonucleotide for detection of SNP TSC0006530
ataaccctcgaac

SEQ ID NO: 25795 - DNA, 13 bp, Artificial Sequence
  Oligonucleotide for detection of SNP TSC0006530
gttcgaaggttat

SEQ ID NO: 25796 - DNA, 13 bp, Artificial Sequence
  Oligonucleotide for detection of SNP TSC0006530
ataaccttcgaac

SEQ ID NO: 25797 - DNA, 13 bp, Artificial Sequence
  Oligonucleotide for detection of SNP TSC0006535
aatttttgaatty

SEQ ID NO: 25798 - DNA, 13 bp, Artificial Sequence
  Oligonucleotide for detection of SNP TSC0006535
raattcaaaaatt

SEQ ID NO: 25799 - DNA, 13 bp, Artificial Sequence
  Oligonucleotide for detection of SNP TSC0006535
aattttggaatty

SEQ ID NO: 25800 - DNA, 13 bp, Artificial Sequence
  Oligonucleotide for detection of SNP TSC0006535
raattccaaaatt

SEQ ID NO: 25801 - DNA, 13 bp, Artificial Sequence
  Oligonucleotide for detection of SNP TSC0006535
aattttcgaatty

SEQ ID NO: 25802 - DNA, 13 bp, Artificial Sequence
  Oligonucleotide for detection of SNP TSC0006535
raattcgaaaatt

SEQ ID NO: 25803 - DNA, 13 bp, Artificial Sequence
  Oligonucleotide for detection of SNP TSC0006535
gaatttgaaaatt

SEQ ID NO: 25804 - DNA, 13 bp, Artificial Sequence
  Oligonucleotide for detection of SNP TSC0006535
aattttcaaattc

SEQ ID NO: 25805 - DNA, 13 bp, Artificial Sequence
  Oligonucleotide for detection of SNP TSC0006535
gaattttaaaatt

SEQ ID NO: 25806 - DNA, 13 bp, Artificial Sequence
  Oligonucleotide for detection of SNP TSC0006535
aattttaaaattc

SEQ ID NO: 25807 - DNA, 13 bp, Artificial Sequence
  Oligonucleotide for detection of SNP TSC0006535
gaattcgaaaatt

SEQ ID NO: 25808 - DNA, 13 bp, Artificial Sequence
  Oligonucleotide for detection of SNP TSC0006535
aattttcgaattc

SEQ ID NO: 25809 - DNA, 13 bp, Artificial Sequence
  Oligonucleotide for detection of SNP TSC0006540
ttatttaagaaaa

SEQ ID NO: 25810 - DNA, 13 bp, Artificial Sequence
  Oligonucleotide for detection of SNP TSC0006540
ttttcttaaataa

SEQ ID NO: 25811 - DNA, 13 bp, Artificial Sequence
  Oligonucleotide for detection of SNP TSC0006540
ttattttagaaaa

SEQ ID NO: 25812 - DNA, 13 bp, Artificial Sequence
  Oligonucleotide for detection of SNP TSC0006540
ttttctaaaataa

SEQ ID NO: 25813 - DNA, 13 bp, Artificial Sequence
  Oligonucleotide for detection of SNP TSC0006540
tttttttaaatgg

SEQ ID NO: 25814 - DNA, 13 bp, Artificial Sequence
  Oligonucleotide for detection of SNP TSC0006540
ccatttaaaaaaa

SEQ ID NO: 25815 - DNA, 13 bp, Artificial Sequence
  Oligonucleotide for detection of SNP TSC0006540
ttttttgaaatgg

SEQ ID NO: 25816 - DNA, 13 bp, Artificial Sequence
  Oligonucleotide for detection of SNP TSC0006540
ccatttcaaaaaa

SEQ ID NO: 25817 - DNA, 13 bp, Artificial Sequence
  Oligonucleotide for detection of SNP TSC0006542
taatgggagtgtt

SEQ ID NO: 25818 - DNA, 13 bp, Artificial Sequence
  Oligonucleotide for detection of SNP TSC0006542
aacactcccatta

SEQ ID NO: 25819 - DNA, 13 bp, Artificial Sequence
  Oligonucleotide for detection of SNP TSC0006542
taatggaagtgtt

SEQ ID NO: 25820 - DNA, 13 bp, Artificial Sequence
  Oligonucleotide for detection of SNP TSC0006542
aacacttccatta

SEQ ID NO: 25821 - DNA, 13 bp, Artificial Sequence
  Oligonucleotide for detection of SNP TSC0006545
ttttatataaatt

SEQ ID NO: 25822 - DNA, 13 bp, Artificial Sequence
  Oligonucleotide for detection of SNP TSC0006545
aatttatataaaa

SEQ ID NO: 25823 - DNA, 13 bp, Artificial Sequence
  Oligonucleotide for detection of SNP TSC0006545
ttttatttaaatt

SEQ ID NO: 25824 - DNA, 13 bp, Artificial Sequence
  Oligonucleotide for detection of SNP TSC0006545
aatttaaataaaa

SEQ ID NO: 25825 - DNA, 13 bp, Artificial Sequence
  Oligonucleotide for detection of SNP TSC0006546
ggtatggttttgy

SEQ ID NO: 25826 - DNA, 13 bp, Artificial Sequence
  Oligonucleotide for detection of SNP TSC0006546
rcaaaaccatacc

SEQ ID NO: 25827 - DNA, 13 bp, Artificial Sequence
  Oligonucleotide for detection of SNP TSC0006546
ggtatgattttgy

SEQ ID NO: 25828 - DNA, 13 bp, Artificial Sequence
  Oligonucleotide for detection of SNP TSC0006546
rcaaaatcatacc

SEQ ID NO: 25829 - DNA, 13 bp, Artificial Sequence
  Oligonucleotide for detection of SNP TSC0006557
atgttggtttgtg

SEQ ID NO: 25830 - DNA, 13 bp, Artificial Sequence
  Oligonucleotide for detection of SNP TSC0006557
cacaaaccaacat

SEQ ID NO: 25831 - DNA, 13 bp, Artificial Sequence
  Oligonucleotide for detection of SNP TSC0006557
atgttgatttgtg

SEQ ID NO: 25832 - DNA, 13 bp, Artificial Sequence
  Oligonucleotide for detection of SNP TSC0006557
cacaaatcaacat

SEQ ID NO: 25833 - DNA, 13 bp, Artificial Sequence
  Oligonucleotide for detection of SNP TSC0006557
atgttggttcgtg

SEQ ID NO: 25834 - DNA, 13 bp, Artificial Sequence
  Oligonucleotide for detection of SNP TSC0006557
cacgaaccaacat

SEQ ID NO: 25835 - DNA, 13 bp, Artificial Sequence
  Oligonucleotide for detection of SNP TSC0006557
atgttgattcgtg

SEQ ID NO: 25836 - DNA, 13 bp, Artificial Sequence
  Oligonucleotide for detection of SNP TSC0006557
cacgaatcaacat

SEQ ID NO: 25837 - DNA, 13 bp, Artificial Sequence
  Oligonucleotide for detection of SNP TSC0006578
tggttaagtttty

SEQ ID NO: 25838 - DNA, 13 bp, Artificial Sequence
  Oligonucleotide for detection of SNP TSC0006578
raaaacttaacca

SEQ ID NO: 25839 - DNA, 13 bp, Artificial Sequence
  Oligonucleotide for detection of SNP TSC0006578
tggttaggtttty

SEQ ID NO: 25840 - DNA, 13 bp, Artificial Sequence
  Oligonucleotide for detection of SNP TSC0006578
raaaacctaacca

SEQ ID NO: 25841 - DNA, 13 bp, Artificial Sequence
  Oligonucleotide for detection of SNP TSC0006585
tagatgttatgty

SEQ ID NO: 25842 - DNA, 13 bp, Artificial Sequence
  Oligonucleotide for detection of SNP TSC0006585
racataacatcta

SEQ ID NO: 25843 - DNA, 13 bp, Artificial Sequence
  Oligonucleotide for detection of SNP TSC0006585
tagatggtatgty

SEQ ID NO: 25844 - DNA, 13 bp, Artificial Sequence
  Oligonucleotide for detection of SNP TSC0006585
racataccatcta

SEQ ID NO: 25845 - DNA, 13 bp, Artificial Sequence
  Oligonucleotide for detection of SNP TSC0006585
ggtatagtatttg

SEQ ID NO: 25846 - DNA, 13 bp, Artificial Sequence
  Oligonucleotide for detection of SNP TSC0006585
caaatactatacc

SEQ ID NO: 25847 - DNA, 13 bp, Artificial Sequence
  Oligonucleotide for detection of SNP TSC0006585
ggtatattatttg

SEQ ID NO: 25848 - DNA, 13 bp, Artificial Sequence
  Oligonucleotide for detection of SNP TSC0006585
caaataatatacc

SEQ ID NO: 25849 - DNA, 13 bp, Artificial Sequence
  Oligonucleotide for detection of SNP TSC0006592
gtattatggggtg

SEQ ID NO: 25850 - DNA, 13 bp, Artificial Sequence
  Oligonucleotide for detection of SNP TSC0006592
caccccataatac

SEQ ID NO: 25851 - DNA, 13 bp, Artificial Sequence
  Oligonucleotide for detection of SNP TSC0006592
gtattacggggtg

SEQ ID NO: 25852 - DNA, 13 bp, Artificial Sequence
  Oligonucleotide for detection of SNP TSC0006592
caccccgtaatac

SEQ ID NO: 25853 - DNA, 13 bp, Artificial Sequence
  Oligonucleotide for detection of SNP TSC0006592
tattttgtgatgy

SEQ ID NO: 25854 - DNA, 13 bp, Artificial Sequence
  Oligonucleotide for detection of SNP TSC0006592
rcatcacaaaata

SEQ ID NO: 25855 - DNA, 13 bp, Artificial Sequence
  Oligonucleotide for detection of SNP TSC0006592
tattttatgatgy

SEQ ID NO: 25856 - DNA, 13 bp, Artificial Sequence
  Oligonucleotide for detection of SNP TSC0006592
rcatcataaaata

SEQ ID NO: 25857 - DNA, 13 bp, Artificial Sequence
  Oligonucleotide for detection of SNP TSC0006592
tatttcgtgatgy

SEQ ID NO: 25858 - DNA, 13 bp, Artificial Sequence
  Oligonucleotide for detection of SNP TSC0006592
rcatcacgaaata

SEQ ID NO: 25859 - DNA, 13 bp, Artificial Sequence
  Oligonucleotide for detection of SNP TSC0006595
tttattggtttaa

SEQ ID NO: 25860 - DNA, 13 bp, Artificial Sequence
  Oligonucleotide for detection of SNP TSC0006595
ttaaaccaataaa

SEQ ID NO: 25861 - DNA, 13 bp, Artificial Sequence
  Oligonucleotide for detection of SNP TSC0006595
tttattagtttaa

SEQ ID NO: 25862 - DNA, 13 bp, Artificial Sequence
  Oligonucleotide for detection of SNP TSC0006595
ttaaactaataaa

SEQ ID NO: 25863 - DNA, 13 bp, Artificial Sequence
  Oligonucleotide for detection of SNP TSC0006597
ttatttatattag

SEQ ID NO: 25864 - DNA, 13 bp, Artificial Sequence
  Oligonucleotide for detection of SNP TSC0006597
ctaatataaataa

SEQ ID NO: 25865 - DNA, 13 bp, Artificial Sequence
  Oligonucleotide for detection of SNP TSC0006597
ttatttgtattag

SEQ ID NO: 25866 - DNA, 13 bp, Artificial Sequence
  Oligonucleotide for detection of SNP TSC0006597
ctaatacaaataa

SEQ ID NO: 25867 - DNA, 13 bp, Artificial Sequence
  Oligonucleotide for detection of SNP TSC0006597
ttattcgtattag

SEQ ID NO: 25868 - DNA, 13 bp, Artificial Sequence
  Oligonucleotide for detection of SNP TSC0006597
ctaatacgaataa

SEQ ID NO: 25869 - DNA, 13 bp, Artificial Sequence
  Oligonucleotide for detection of SNP TSC0006597
ttgatgtgggtgg

SEQ ID NO: 25870 - DNA, 13 bp, Artificial Sequence
  Oligonucleotide for detection of SNP TSC0006597
ccacccacatcaa

SEQ ID NO: 25871 - DNA, 13 bp, Artificial Sequence
  Oligonucleotide for detection of SNP TSC0006597
ttgatgcgggtgg

SEQ ID NO: 25872 - DNA, 13 bp, Artificial Sequence
  Oligonucleotide for detection of SNP TSC0006597
ccacccgcatcaa

SEQ ID NO: 25873 - DNA, 13 bp, Artificial Sequence
  Oligonucleotide for detection of SNP TSC0006598
taggttggggagg

SEQ ID NO: 25874 - DNA, 13 bp, Artificial Sequence
  Oligonucleotide for detection of SNP TSC0006598
cctccccaaccta

SEQ ID NO: 25875 - DNA, 13 bp, Artificial Sequence
  Oligonucleotide for detection of SNP TSC0006598
taggttagggagg

SEQ ID NO: 25876 - DNA, 13 bp, Artificial Sequence
  Oligonucleotide for detection of SNP TSC0006598
cctccctaaccta

SEQ ID NO: 25877 - DNA, 13 bp, Artificial Sequence
  Oligonucleotide for detection of SNP TSC0006604
atgatagaggatt

SEQ ID NO: 25878 - DNA, 13 bp, Artificial Sequence
  Oligonucleotide for detection of SNP TSC0006604
aatcctctatcat

SEQ ID NO: 25879 - DNA, 13 bp, Artificial Sequence
  Oligonucleotide for detection of SNP TSC0006604
atgataaaggatt

SEQ ID NO: 25880 - DNA, 13 bp, Artificial Sequence
  Oligonucleotide for detection of SNP TSC0006604
aatcctttatcat

SEQ ID NO: 25881 - DNA, 13 bp, Artificial Sequence
  Oligonucleotide for detection of SNP TSC0006606
atatgaattagtt

SEQ ID NO: 25882 - DNA, 13 bp, Artificial Sequence
  Oligonucleotide for detection of SNP TSC0006606
aactaattcatat

SEQ ID NO: 25883 - DNA, 13 bp, Artificial Sequence
  Oligonucleotide for detection of SNP TSC0006606
atatgagttagtt

SEQ ID NO: 25884 - DNA, 13 bp, Artificial Sequence
  Oligonucleotide for detection of SNP TSC0006606
aactaactcatat

SEQ ID NO: 25885 - DNA, 13 bp, Artificial Sequence
  Oligonucleotide for detection of SNP TSC0006607
ggtgttatatgat

SEQ ID NO: 25886 - DNA, 13 bp, Artificial Sequence
  Oligonucleotide for detection of SNP TSC0006607
atcatataacacc

SEQ ID NO: 25887 - DNA, 13 bp, Artificial Sequence
  Oligonucleotide for detection of SNP TSC0006607
ggtgttgtatgat

SEQ ID NO: 25888 - DNA, 13 bp, Artificial Sequence
  Oligonucleotide for detection of SNP TSC0006607
atcatacaacacc

SEQ ID NO: 25889 - DNA, 13 bp, Artificial Sequence
  Oligonucleotide for detection of SNP TSC0006607
ggtgtcgtatgat

SEQ ID NO: 25890 - DNA, 13 bp, Artificial Sequence
  Oligonucleotide for detection of SNP TSC0006607
atcatacgacacc

SEQ ID NO: 25891 - DNA, 13 bp, Artificial Sequence
  Oligonucleotide for detection of SNP TSC0006607
attatgtggtaty

SEQ ID NO: 25892 - DNA, 13 bp, Artificial Sequence
  Oligonucleotide for detection of SNP TSC0006607
rataccacataat

SEQ ID NO: 25893 - DNA, 13 bp, Artificial Sequence
  Oligonucleotide for detection of SNP TSC0006607
attatgcggtaty

SEQ ID NO: 25894 - DNA, 13 bp, Artificial Sequence
  Oligonucleotide for detection of SNP TSC0006607
rataccgcataat

SEQ ID NO: 25895 - DNA, 13 bp, Artificial Sequence
  Oligonucleotide for detection of SNP TSC0006627
gtttagatattty

SEQ ID NO: 25896 - DNA, 13 bp, Artificial Sequence
  Oligonucleotide for detection of SNP TSC0006627
raaatatctaaac

SEQ ID NO: 25897 - DNA, 13 bp, Artificial Sequence
  Oligonucleotide for detection of SNP TSC0006627
gtttaggtattty

SEQ ID NO: 25898 - DNA, 13 bp, Artificial Sequence
  Oligonucleotide for detection of SNP TSC0006627
raaatacctaaac

SEQ ID NO: 25899 - DNA, 13 bp, Artificial Sequence
  Oligonucleotide for detection of SNP TSC0006637
ttagatattttat

SEQ ID NO: 25900 - DNA, 13 bp, Artificial Sequence
  Oligonucleotide for detection of SNP TSC0006637
ataaaatatctaa

SEQ ID NO: 25901 - DNA, 13 bp, Artificial Sequence
  Oligonucleotide for detection of SNP TSC0006637
ttagattttttat

SEQ ID NO: 25902 - DNA, 13 bp, Artificial Sequence
  Oligonucleotide for detection of SNP TSC0006637
ataaaaaatctaa

SEQ ID NO: 25903 - DNA, 13 bp, Artificial Sequence
  Oligonucleotide for detection of SNP TSC0006637
atgaagtatttga

SEQ ID NO: 25904 - DNA, 13 bp, Artificial Sequence
  Oligonucleotide for detection of SNP TSC0006637
tcaaatacttcat

SEQ ID NO: 25905 - DNA, 13 bp, Artificial Sequence
  Oligonucleotide for detection of SNP TSC0006637
atgaagaatttga

SEQ ID NO: 25906 - DNA, 13 bp, Artificial Sequence
  Oligonucleotide for detection of SNP TSC0006637
tcaaattcttcat

SEQ ID NO: 25907 - DNA, 13 bp, Artificial Sequence
  Oligonucleotide for detection of SNP TSC0006638
atgggggttgtty

SEQ ID NO: 25908 - DNA, 13 bp, Artificial Sequence
  Oligonucleotide for detection of SNP TSC0006638
raacaacccccat

SEQ ID NO: 25909 - DNA, 13 bp, Artificial Sequence
  Oligonucleotide for detection of SNP TSC0006638
atggggattgtty

SEQ ID NO: 25910 - DNA, 13 bp, Artificial Sequence
  Oligonucleotide for detection of SNP TSC0006638
raacaatccccat

SEQ ID NO: 25911 - DNA, 13 bp, Artificial Sequence
  Oligonucleotide for detection of SNP TSC0006638
acgggggttgtty

SEQ ID NO: 25912 - DNA, 13 bp, Artificial Sequence
  Oligonucleotide for detection of SNP TSC0006638
raacaacccccgt

SEQ ID NO: 25913 - DNA, 13 bp, Artificial Sequence
  Oligonucleotide for detection of SNP TSC0006638
acggggattgtty

SEQ ID NO: 25914 - DNA, 13 bp, Artificial Sequence
  Oligonucleotide for detection of SNP TSC0006638
raacaatccccgt

SEQ ID NO: 25915 - DNA, 13 bp, Artificial Sequence
  Oligonucleotide for detection of SNP TSC0006639
ttgttttggagaa

SEQ ID NO: 25916 - DNA, 13 bp, Artificial Sequence
  Oligonucleotide for detection of SNP TSC0006639
ttctccaaaacaa

SEQ ID NO: 25917 - DNA, 13 bp, Artificial Sequence
  Oligonucleotide for detection of SNP TSC0006639
ttgtttcggagaa

SEQ ID NO: 25918 - DNA, 13 bp, Artificial Sequence
  Oligonucleotide for detection of SNP TSC0006639
ttctccgaaacaa

SEQ ID NO: 25919 - DNA, 13 bp, Artificial Sequence
  Oligonucleotide for detection of SNP TSC0006639
ttttttggggtaa

SEQ ID NO: 25920 - DNA, 13 bp, Artificial Sequence
  Oligonucleotide for detection of SNP TSC0006639
ttaccccaaaaaa

SEQ ID NO: 25921 - DNA, 13 bp, Artificial Sequence
  Oligonucleotide for detection of SNP TSC0006639
ttttttagggtaa

SEQ ID NO: 25922 - DNA, 13 bp, Artificial Sequence
  Oligonucleotide for detection of SNP TSC0006639
ttaccctaaaaaa

SEQ ID NO: 25923 - DNA, 13 bp, Artificial Sequence
  Oligonucleotide for detection of SNP TSC0006639
tttttcggggtaa

SEQ ID NO: 25924 - DNA, 13 bp, Artificial Sequence
  Oligonucleotide for detection of SNP TSC0006639
ttaccccgaaaaa

SEQ ID NO: 25925 - DNA, 13 bp, Artificial Sequence
  Oligonucleotide for detection of SNP TSC0006640
attattattttgy

SEQ ID NO: 25926 - DNA, 13 bp, Artificial Sequence
  Oligonucleotide for detection of SNP TSC0006640
rcaaaataataat

SEQ ID NO: 25927 - DNA, 13 bp, Artificial Sequence
  Oligonucleotide for detection of SNP TSC0006640
attattgttttgy

SEQ ID NO: 25928 - DNA, 13 bp, Artificial Sequence
  Oligonucleotide for detection of SNP TSC0006640
rcaaaacaataat

SEQ ID NO: 25929 - DNA, 13 bp, Artificial Sequence
  Oligonucleotide for detection of SNP TSC0006640
attattatttcgy

SEQ ID NO: 25930 - DNA, 13 bp, Artificial Sequence
  Oligonucleotide for detection of SNP TSC0006640
rcgaaataataat

SEQ ID NO: 25931 - DNA, 13 bp, Artificial Sequence
  Oligonucleotide for detection of SNP TSC0006640
attatcgttttgy

SEQ ID NO: 25932 - DNA, 13 bp, Artificial Sequence
  Oligonucleotide for detection of SNP TSC0006640
rcaaaacgataat

SEQ ID NO: 25933 - DNA, 13 bp, Artificial Sequence
  Oligonucleotide for detection of SNP TSC0006640
attattgtttcgy

SEQ ID NO: 25934 - DNA, 13 bp, Artificial Sequence
  Oligonucleotide for detection of SNP TSC0006640
rcgaaacaataat

SEQ ID NO: 25935 - DNA, 13 bp, Artificial Sequence
  Oligonucleotide for detection of SNP TSC0006640
attatcgtttcgy

SEQ ID NO: 25936 - DNA, 13 bp, Artificial Sequence
  Oligonucleotide for detection of SNP TSC0006640
rcgaaacgataat

SEQ ID NO: 25937 - DNA, 13 bp, Artificial Sequence
  Oligonucleotide for detection of SNP TSC0006640
gtgaggtggtgat

SEQ ID NO: 25938 - DNA, 13 bp, Artificial Sequence
  Oligonucleotide for detection of SNP TSC0006640
atcaccacctcac

SEQ ID NO: 25939 - DNA, 13 bp, Artificial Sequence
  Oligonucleotide for detection of SNP TSC0006640
gcgaggtggtgat

SEQ ID NO: 25940 - DNA, 13 bp, Artificial Sequence
  Oligonucleotide for detection of SNP TSC0006640
atcaccacctcgc

SEQ ID NO: 25941 - DNA, 13 bp, Artificial Sequence
  Oligonucleotide for detection of SNP TSC0006640
gtgaggcggtgat

SEQ ID NO: 25942 - DNA, 13 bp, Artificial Sequence
  Oligonucleotide for detection of SNP TSC0006640
atcaccgcctcac

SEQ ID NO: 25943 - DNA, 13 bp, Artificial Sequence
  Oligonucleotide for detection of SNP TSC0006640
gcgaggcggtgat

SEQ ID NO: 25944 - DNA, 13 bp, Artificial Sequence
  Oligonucleotide for detection of SNP TSC0006640
atcaccgcctcgc

SEQ ID NO: 25945 - DNA, 13 bp, Artificial Sequence
  Oligonucleotide for detection of SNP TSC0006641
tttagggtattaa

SEQ ID NO: 25946 - DNA, 13 bp, Artificial Sequence
  Oligonucleotide for detection of SNP TSC0006641
ttaataccctaaa

SEQ ID NO: 25947 - DNA, 13 bp, Artificial Sequence
  Oligonucleotide for detection of SNP TSC0006641
tttaggttattaa

SEQ ID NO: 25948 - DNA, 13 bp, Artificial Sequence
  Oligonucleotide for detection of SNP TSC0006641
ttaataacctaaa

SEQ ID NO: 25949 - DNA, 13 bp, Artificial Sequence
  Oligonucleotide for detection of SNP TSC0006641
ttagtgttttggg

SEQ ID NO: 25950 - DNA, 13 bp, Artificial Sequence
  Oligonucleotide for detection of SNP TSC0006641
cccaaaacactaa

SEQ ID NO: 25951 - DNA, 13 bp, Artificial Sequence
  Oligonucleotide for detection of SNP TSC0006641
ttagtgatttggg

SEQ ID NO: 25952 - DNA, 13 bp, Artificial Sequence
  Oligonucleotide for detection of SNP TSC0006641
cccaaatcactaa

SEQ ID NO: 25953 - DNA, 13 bp, Artificial Sequence
  Oligonucleotide for detection of SNP TSC0006650
agatattgtatay

SEQ ID NO: 25954 - DNA, 13 bp, Artificial Sequence
  Oligonucleotide for detection of SNP TSC0006650
rtatacaatatct

SEQ ID NO: 25955 - DNA, 13 bp, Artificial Sequence
  Oligonucleotide for detection of SNP TSC0006650
agatatcgtatay

SEQ ID NO: 25956 - DNA, 13 bp, Artificial Sequence
  Oligonucleotide for detection of SNP TSC0006650
rtatacgatatct

SEQ ID NO: 25957 - DNA, 13 bp, Artificial Sequence
  Oligonucleotide for detection of SNP TSC0006650
gtgtgtggtattt

SEQ ID NO: 25958 - DNA, 13 bp, Artificial Sequence
  Oligonucleotide for detection of SNP TSC0006650
aaataccacacac

SEQ ID NO: 25959 - DNA, 13 bp, Artificial Sequence
  Oligonucleotide for detection of SNP TSC0006650
gtgtgtagtattt

SEQ ID NO: 25960 - DNA, 13 bp, Artificial Sequence
  Oligonucleotide for detection of SNP TSC0006650
aaatactacacac

SEQ ID NO: 25961 - DNA, 13 bp, Artificial Sequence
  Oligonucleotide for detection of SNP TSC0006650
gtgtgcggtattt

SEQ ID NO: 25962 - DNA, 13 bp, Artificial Sequence
  Oligonucleotide for detection of SNP TSC0006650
aaataccgcacac

SEQ ID NO: 25963 - DNA, 13 bp, Artificial Sequence
  Oligonucleotide for detection of SNP TSC0006651
tttaaggtttaat

SEQ ID NO: 25964 - DNA, 13 bp, Artificial Sequence
  Oligonucleotide for detection of SNP TSC0006651
attaaaccttaaa

SEQ ID NO: 25965 - DNA, 13 bp, Artificial Sequence
  Oligonucleotide for detection of SNP TSC0006651
tttaagatttaat

SEQ ID NO: 25966 - DNA, 13 bp, Artificial Sequence
  Oligonucleotide for detection of SNP TSC0006651
attaaatcttaaa

SEQ ID NO: 25967 - DNA, 13 bp, Artificial Sequence
  Oligonucleotide for detection of SNP TSC0006663
gtttgtgtttggg

SEQ ID NO: 25968 - DNA, 13 bp, Artificial Sequence
  Oligonucleotide for detection of SNP TSC0006663
cccaaacacaaac

SEQ ID NO: 25969 - DNA, 13 bp, Artificial Sequence
  Oligonucleotide for detection of SNP TSC0006663
gtttgcgtttggg

SEQ ID NO: 25970 - DNA, 13 bp, Artificial Sequence
  Oligonucleotide for detection of SNP TSC0006663
cccaaacgcaaac

SEQ ID NO: 25971 - DNA, 13 bp, Artificial Sequence
  Oligonucleotide for detection of SNP TSC0006663
tttaaatgtaggy

SEQ ID NO: 25972 - DNA, 13 bp, Artificial Sequence
  Oligonucleotide for detection of SNP TSC0006663
rcctacatttaaa

SEQ ID NO: 25973 - DNA, 13 bp, Artificial Sequence
  Oligonucleotide for detection of SNP TSC0006663
tttaaacgtaggy

SEQ ID NO: 25974 - DNA, 13 bp, Artificial Sequence
  Oligonucleotide for detection of SNP TSC0006663
rcctacgtttaaa

SEQ ID NO: 25975 - DNA, 13 bp, Artificial Sequence
  Oligonucleotide for detection of SNP TSC0006669
tagtttagtagta

SEQ ID NO: 25976 - DNA, 13 bp, Artificial Sequence
  Oligonucleotide for detection of SNP TSC0006669
tactactaaacta

SEQ ID NO: 25977 - DNA, 13 bp, Artificial Sequence
  Oligonucleotide for detection of SNP TSC0006669
tagtttggtagta

SEQ ID NO: 25978 - DNA, 13 bp, Artificial Sequence
  Oligonucleotide for detection of SNP TSC0006669
tactaccaaacta

SEQ ID NO: 25979 - DNA, 13 bp, Artificial Sequence
  Oligonucleotide for detection of SNP TSC0006669
tagttcggtagta

SEQ ID NO: 25980 - DNA, 13 bp, Artificial Sequence
  Oligonucleotide for detection of SNP TSC0006669
tactaccgaacta

SEQ ID NO: 25981 - DNA, 13 bp, Artificial Sequence
  Oligonucleotide for detection of SNP TSC0006669
tattgttgggttg

SEQ ID NO: 25982 - DNA, 13 bp, Artificial Sequence
  Oligonucleotide for detection of SNP TSC0006669
caacccaacaata

SEQ ID NO: 25983 - DNA, 13 bp, Artificial Sequence
  Oligonucleotide for detection of SNP TSC0006669
tattgtcgggttg

SEQ ID NO: 25984 - DNA, 13 bp, Artificial Sequence
  Oligonucleotide for detection of SNP TSC0006669
caacccgacaata

SEQ ID NO: 25985 - DNA, 13 bp, Artificial Sequence
  Oligonucleotide for detection of SNP TSC0006676
gtgttaataaata

SEQ ID NO: 25986 - DNA, 13 bp, Artificial Sequence
  Oligonucleotide for detection of SNP TSC0006676
tatttattaacac

SEQ ID NO: 25987 - DNA, 13 bp, Artificial Sequence
  Oligonucleotide for detection of SNP TSC0006676
gtgttagtaaata

SEQ ID NO: 25988 - DNA, 13 bp, Artificial Sequence
  Oligonucleotide for detection of SNP TSC0006676
tatttactaacac

SEQ ID NO: 25989 - DNA, 13 bp, Artificial Sequence
  Oligonucleotide for detection of SNP TSC0006676
gcgttaataaata

SEQ ID NO: 25990 - DNA, 13 bp, Artificial Sequence
  Oligonucleotide for detection of SNP TSC0006676
tatttattaacgc

SEQ ID NO: 25991 - DNA, 13 bp, Artificial Sequence
  Oligonucleotide for detection of SNP TSC0006676
gcgttagtaaata

SEQ ID NO: 25992 - DNA, 13 bp, Artificial Sequence
  Oligonucleotide for detection of SNP TSC0006676
tatttactaacgc

SEQ ID NO: 25993 - DNA, 13 bp, Artificial Sequence
  Oligonucleotide for detection of SNP TSC0006701
gggaaggatgaaa

SEQ ID NO: 25994 - DNA, 13 bp, Artificial Sequence
  Oligonucleotide for detection of SNP TSC0006701
tttcatccttccc

SEQ ID NO: 25995 - DNA, 13 bp, Artificial Sequence
  Oligonucleotide for detection of SNP TSC0006701
gggaagaatgaaa

SEQ ID NO: 25996 - DNA, 13 bp, Artificial Sequence
  Oligonucleotide for detection of SNP TSC0006701
tttcattcttccc

SEQ ID NO: 25997 - DNA, 13 bp, Artificial Sequence
  Oligonucleotide for detection of SNP TSC0006705
ttttaatgtgtta

SEQ ID NO: 25998 - DNA, 13 bp, Artificial Sequence
  Oligonucleotide for detection of SNP TSC0006705
taacacattaaaa

SEQ ID NO: 25999 - DNA, 13 bp, Artificial Sequence
  Oligonucleotide for detection of SNP TSC0006705
ttttaacgtgtta

SEQ ID NO: 26000 - DNA, 13 bp, Artificial Sequence
  Oligonucleotide for detection of SNP TSC0006705
taacacgttaaaa

SEQ ID NO: 26001 - DNA, 13 bp, Artificial Sequence
  Oligonucleotide for detection of SNP TSC0006705
tagtatgttggaa

SEQ ID NO: 26002 - DNA, 13 bp, Artificial Sequence
  Oligonucleotide for detection of SNP TSC0006705
ttccaacatacta

SEQ ID NO: 26003 - DNA, 13 bp, Artificial Sequence
  Oligonucleotide for detection of SNP TSC0006705
tagtatattggaa

SEQ ID NO: 26004 - DNA, 13 bp, Artificial Sequence
  Oligonucleotide for detection of SNP TSC0006705
ttccaatatacta

SEQ ID NO: 26005 - DNA, 13 bp, Artificial Sequence
  Oligonucleotide for detection of SNP TSC0006705
tagtacgttggaa

SEQ ID NO: 26006 - DNA, 13 bp, Artificial Sequence
  Oligonucleotide for detection of SNP TSC0006705
ttccaacgtacta

SEQ ID NO: 26007 - DNA, 13 bp, Artificial Sequence
  Oligonucleotide for detection of SNP TSC0006706
atttttgggttta

SEQ ID NO: 26008 - DNA, 13 bp, Artificial Sequence
  Oligonucleotide for detection of SNP TSC0006706
taaacccaaaaat

SEQ ID NO: 26009 - DNA, 13 bp, Artificial Sequence
  Oligonucleotide for detection of SNP TSC0006706
attttttggttta

SEQ ID NO: 26010 - DNA, 13 bp, Artificial Sequence
  Oligonucleotide for detection of SNP TSC0006706
taaaccaaaaaat

SEQ ID NO: 26011 - DNA, 13 bp, Artificial Sequence
  Oligonucleotide for detection of SNP TSC0006706
attttcgggttta

SEQ ID NO: 26012 - DNA, 13 bp, Artificial Sequence
  Oligonucleotide for detection of SNP TSC0006706
taaacccgaaaat

SEQ ID NO: 26013 - DNA, 13 bp, Artificial Sequence
  Oligonucleotide for detection of SNP TSC0006706
taagtttgaggat

SEQ ID NO: 26014 - DNA, 13 bp, Artificial Sequence
  Oligonucleotide for detection of SNP TSC0006706
atcctcaaactta

SEQ ID NO: 26015 - DNA, 13 bp, Artificial Sequence
  Oligonucleotide for detection of SNP TSC0006706
taagttagaggat

SEQ ID NO: 26016 - DNA, 13 bp, Artificial Sequence
  Oligonucleotide for detection of SNP TSC0006706
atcctctaactta

SEQ ID NO: 26017 - DNA, 13 bp, Artificial Sequence
  Oligonucleotide for detection of SNP TSC0006706
taagttcgaggat

SEQ ID NO: 26018 - DNA, 13 bp, Artificial Sequence
  Oligonucleotide for detection of SNP TSC0006706
atcctcgaactta

SEQ ID NO: 26019 - DNA, 13 bp, Artificial Sequence
  Oligonucleotide for detection of SNP TSC0006717
attaatatttttt

SEQ ID NO: 26020 - DNA, 13 bp, Artificial Sequence
  Oligonucleotide for detection of SNP TSC0006717
aaaaaatattaat

SEQ ID NO: 26021 - DNA, 13 bp, Artificial Sequence
  Oligonucleotide for detection of SNP TSC0006717
attaatttttttt

SEQ ID NO: 26022 - DNA, 13 bp, Artificial Sequence
  Oligonucleotide for detection of SNP TSC0006717
aaaaaaaattaat

SEQ ID NO: 26023 - DNA, 13 bp, Artificial Sequence
  Oligonucleotide for detection of SNP TSC0006717
agagggtgttagt

SEQ ID NO: 26024 - DNA, 13 bp, Artificial Sequence
  Oligonucleotide for detection of SNP TSC0006717
actaacaccctct

SEQ ID NO: 26025 - DNA, 13 bp, Artificial Sequence
  Oligonucleotide for detection of SNP TSC0006717
agagggggttagt

SEQ ID NO: 26026 - DNA, 13 bp, Artificial Sequence
  Oligonucleotide for detection of SNP TSC0006717
actaaccccctct

SEQ ID NO: 26027 - DNA, 13 bp, Artificial Sequence
  Oligonucleotide for detection of SNP TSC0006723
taattgaagtttt

SEQ ID NO: 26028 - DNA, 13 bp, Artificial Sequence
  Oligonucleotide for detection of SNP TSC0006723
aaaacttcaatta

SEQ ID NO: 26029 - DNA, 13 bp, Artificial Sequence
  Oligonucleotide for detection of SNP TSC0006723
taattgtagtttt

SEQ ID NO: 26030 - DNA, 13 bp, Artificial Sequence
  Oligonucleotide for detection of SNP TSC0006723
aaaactacaatta

SEQ ID NO: 26031 - DNA, 13 bp, Artificial Sequence
  Oligonucleotide for detection of SNP TSC0006723
aaagttttaatta

SEQ ID NO: 26032 - DNA, 13 bp, Artificial Sequence
  Oligonucleotide for detection of SNP TSC0006723
taattaaaacttt

SEQ ID NO: 26033 - DNA, 13 bp, Artificial Sequence
  Oligonucleotide for detection of SNP TSC0006723
aaagttgtaatta

SEQ ID NO: 26034 - DNA, 13 bp, Artificial Sequence
  Oligonucleotide for detection of SNP TSC0006723
taattacaacttt

SEQ ID NO: 26035 - DNA, 13 bp, Artificial Sequence
  Oligonucleotide for detection of SNP TSC0006724
ttggaggttatgg

SEQ ID NO: 26036 - DNA, 13 bp, Artificial Sequence
  Oligonucleotide for detection of SNP TSC0006724
ccataacctccaa

SEQ ID NO: 26037 - DNA, 13 bp, Artificial Sequence
  Oligonucleotide for detection of SNP TSC0006724
ttggagattatgg

SEQ ID NO: 26038 - DNA, 13 bp, Artificial Sequence
  Oligonucleotide for detection of SNP TSC0006724
ccataatctccaa

SEQ ID NO: 26039 - DNA, 13 bp, Artificial Sequence
  Oligonucleotide for detection of SNP TSC0006725
tattttaattaaa

SEQ ID NO: 26040 - DNA, 13 bp, Artificial Sequence
  Oligonucleotide for detection of SNP TSC0006725
tttaattaaaata

SEQ ID NO: 26041 - DNA, 13 bp, Artificial Sequence
  Oligonucleotide for detection of SNP TSC0006725
tattttgattaaa

SEQ ID NO: 26042 - DNA, 13 bp, Artificial Sequence
  Oligonucleotide for detection of SNP TSC0006725
tttaatcaaaata

SEQ ID NO: 26043 - DNA, 13 bp, Artificial Sequence
  Oligonucleotide for detection of SNP TSC0006725
tatttcgattaaa

SEQ ID NO: 26044 - DNA, 13 bp, Artificial Sequence
  Oligonucleotide for detection of SNP TSC0006725
tttaatcgaaata

SEQ ID NO: 26045 - DNA, 13 bp, Artificial Sequence
  Oligonucleotide for detection of SNP TSC0006725
tttgattggggtg

SEQ ID NO: 26046 - DNA, 13 bp, Artificial Sequence
  Oligonucleotide for detection of SNP TSC0006725
caccccaatcaaa

SEQ ID NO: 26047 - DNA, 13 bp, Artificial Sequence
  Oligonucleotide for detection of SNP TSC0006725
tttgatcggggtg

SEQ ID NO: 26048 - DNA, 13 bp, Artificial Sequence
  Oligonucleotide for detection of SNP TSC0006725
caccccgatcaaa

SEQ ID NO: 26049 - DNA, 13 bp, Artificial Sequence
  Oligonucleotide for detection of SNP TSC0006729
attataaatttta

SEQ ID NO: 26050 - DNA, 13 bp, Artificial Sequence
  Oligonucleotide for detection of SNP TSC0006729
taaaatttataat

SEQ ID NO: 26051 - DNA, 13 bp, Artificial Sequence
  Oligonucleotide for detection of SNP TSC0006729
attatatatttta

SEQ ID NO: 26052 - DNA, 13 bp, Artificial Sequence
  Oligonucleotide for detection of SNP TSC0006729
taaaatatataat

SEQ ID NO: 26053 - DNA, 13 bp, Artificial Sequence
  Oligonucleotide for detection of SNP TSC0006729
taaaatttatgat

SEQ ID NO: 26054 - DNA, 13 bp, Artificial Sequence
  Oligonucleotide for detection of SNP TSC0006729
atcataaatttta

SEQ ID NO: 26055 - DNA, 13 bp, Artificial Sequence
  Oligonucleotide for detection of SNP TSC0006729
taaaatatatgat

SEQ ID NO: 26056 - DNA, 13 bp, Artificial Sequence
  Oligonucleotide for detection of SNP TSC0006729
atcatatatttta

SEQ ID NO: 26057 - DNA, 13 bp, Artificial Sequence
  Oligonucleotide for detection of SNP TSC0006730
tttgggatgaata

SEQ ID NO: 26058 - DNA, 13 bp, Artificial Sequence
  Oligonucleotide for detection of SNP TSC0006730
tattcatcccaaa

SEQ ID NO: 26059 - DNA, 13 bp, Artificial Sequence
  Oligonucleotide for detection of SNP TSC0006730
tttgggttgaata

SEQ ID NO: 26060 - DNA, 13 bp, Artificial Sequence
  Oligonucleotide for detection of SNP TSC0006730
tattcaacccaaa

SEQ ID NO: 26061 - DNA, 13 bp, Artificial Sequence
  Oligonucleotide for detection of SNP TSC0006730
tatttattttaga

SEQ ID NO: 26062 - DNA, 13 bp, Artificial Sequence
  Oligonucleotide for detection of SNP TSC0006730
tctaaaataaata

SEQ ID NO: 26063 - DNA, 13 bp, Artificial Sequence
  Oligonucleotide for detection of SNP TSC0006730
tatttaatttaga

SEQ ID NO: 26064 - DNA, 13 bp, Artificial Sequence
  Oligonucleotide for detection of SNP TSC0006730
tctaaattaaata

SEQ ID NO: 26065 - DNA, 13 bp, Artificial Sequence
  Oligonucleotide for detection of SNP TSC0006742
ttattatgttggg

SEQ ID NO: 26066 - DNA, 13 bp, Artificial Sequence
  Oligonucleotide for detection of SNP TSC0006742
cccaacataataa

SEQ ID NO: 26067 - DNA, 13 bp, Artificial Sequence
  Oligonucleotide for detection of SNP TSC0006742
ttattacgttggg

SEQ ID NO: 26068 - DNA, 13 bp, Artificial Sequence
  Oligonucleotide for detection of SNP TSC0006742
cccaacgtaataa

SEQ ID NO: 26069 - DNA, 13 bp, Artificial Sequence
  Oligonucleotide for detection of SNP TSC0006742
tttaatgtaatga

SEQ ID NO: 26070 - DNA, 13 bp, Artificial Sequence
  Oligonucleotide for detection of SNP TSC0006742
tcattacattaaa

SEQ ID NO: 26071 - DNA, 13 bp, Artificial Sequence
  Oligonucleotide for detection of SNP TSC0006742
tttaatataatga

SEQ ID NO: 26072 - DNA, 13 bp, Artificial Sequence
  Oligonucleotide for detection of SNP TSC0006742
tcattatattaaa

SEQ ID NO: 26073 - DNA, 13 bp, Artificial Sequence
  Oligonucleotide for detection of SNP TSC0006742
tttaacgtaatga

SEQ ID NO: 26074 - DNA, 13 bp, Artificial Sequence
  Oligonucleotide for detection of SNP TSC0006742
tcattacgttaaa

SEQ ID NO: 26075 - DNA, 13 bp, Artificial Sequence
  Oligonucleotide for detection of SNP TSC0006745
aaatatagttata

SEQ ID NO: 26076 - DNA, 13 bp, Artificial Sequence
  Oligonucleotide for detection of SNP TSC0006745
tataactatattt

SEQ ID NO: 26077 - DNA, 13 bp, Artificial Sequence
  Oligonucleotide for detection of SNP TSC0006745
aaatatggttata

SEQ ID NO: 26078 - DNA, 13 bp, Artificial Sequence
  Oligonucleotide for detection of SNP TSC0006745
tataaccatattt

SEQ ID NO: 26079 - DNA, 13 bp, Artificial Sequence
  Oligonucleotide for detection of SNP TSC0006747
aaaagagaatggt

SEQ ID NO: 26080 - DNA, 13 bp, Artificial Sequence
  Oligonucleotide for detection of SNP TSC0006747
accattctctttt

SEQ ID NO: 26081 - DNA, 13 bp, Artificial Sequence
  Oligonucleotide for detection of SNP TSC0006747
aaaagaaaatggt

SEQ ID NO: 26082 - DNA, 13 bp, Artificial Sequence
  Oligonucleotide for detection of SNP TSC0006747
accattttctttt

SEQ ID NO: 26083 - DNA, 13 bp, Artificial Sequence
  Oligonucleotide for detection of SNP TSC0006749
ggtagataaagta

SEQ ID NO: 26084 - DNA, 13 bp, Artificial Sequence
  Oligonucleotide for detection of SNP TSC0006749
tactttatctacc

SEQ ID NO: 26085 - DNA, 13 bp, Artificial Sequence
  Oligonucleotide for detection of SNP TSC0006749
ggtagagaaagta

SEQ ID NO: 26086 - DNA, 13 bp, Artificial Sequence
  Oligonucleotide for detection of SNP TSC0006749
tactttctctacc

SEQ ID NO: 26087 - DNA, 13 bp, Artificial Sequence
  Oligonucleotide for detection of SNP TSC0006749
tattttgtttaty

SEQ ID NO: 26088 - DNA, 13 bp, Artificial Sequence
  Oligonucleotide for detection of SNP TSC0006749
rataaacaaaata

SEQ ID NO: 26089 - DNA, 13 bp, Artificial Sequence
  Oligonucleotide for detection of SNP TSC0006749
tattttttttaty

SEQ ID NO: 26090 - DNA, 13 bp, Artificial Sequence
  Oligonucleotide for detection of SNP TSC0006749
rataaaaaaaata

SEQ ID NO: 26091 - DNA, 13 bp, Artificial Sequence
  Oligonucleotide for detection of SNP TSC0006760
gtagaagtatttg

SEQ ID NO: 26092 - DNA, 13 bp, Artificial Sequence
  Oligonucleotide for detection of SNP TSC0006760
caaatacttctac

SEQ ID NO: 26093 - DNA, 13 bp, Artificial Sequence
  Oligonucleotide for detection of SNP TSC0006760
gtagaaatatttg

SEQ ID NO: 26094 - DNA, 13 bp, Artificial Sequence
  Oligonucleotide for detection of SNP TSC0006760
caaatatttctac

SEQ ID NO: 26095 - DNA, 13 bp, Artificial Sequence
  Oligonucleotide for detection of SNP TSC0006770
tttattgtagttt

SEQ ID NO: 26096 - DNA, 13 bp, Artificial Sequence
  Oligonucleotide for detection of SNP TSC0006770
aaactacaataaa

SEQ ID NO: 26097 - DNA, 13 bp, Artificial Sequence
  Oligonucleotide for detection of SNP TSC0006770
tttattatagttt

SEQ ID NO: 26098 - DNA, 13 bp, Artificial Sequence
  Oligonucleotide for detection of SNP TSC0006770
aaactataataaa

SEQ ID NO: 26099 - DNA, 13 bp, Artificial Sequence
  Oligonucleotide for detection of SNP TSC0006772
ttgttgtatttta

SEQ ID NO: 26100 - DNA, 13 bp, Artificial Sequence
  Oligonucleotide for detection of SNP TSC0006772
taaaatacaacaa

SEQ ID NO: 26101 - DNA, 13 bp, Artificial Sequence
  Oligonucleotide for detection of SNP TSC0006772
ttgttggatttta

SEQ ID NO: 26102 - DNA, 13 bp, Artificial Sequence
  Oligonucleotide for detection of SNP TSC0006772
taaaatccaacaa

SEQ ID NO: 26103 - DNA, 13 bp, Artificial Sequence
  Oligonucleotide for detection of SNP TSC0006772
tgaaatgtaatag

SEQ ID NO: 26104 - DNA, 13 bp, Artificial Sequence
  Oligonucleotide for detection of SNP TSC0006772
ctattacatttca

SEQ ID NO: 26105 - DNA, 13 bp, Artificial Sequence
  Oligonucleotide for detection of SNP TSC0006772
tgaaatttaatag

SEQ ID NO: 26106 - DNA, 13 bp, Artificial Sequence
  Oligonucleotide for detection of SNP TSC0006772
ctattaaatttca

SEQ ID NO: 26107 - DNA, 13 bp, Artificial Sequence
  Oligonucleotide for detection of SNP TSC0006776
gtatttattattt

SEQ ID NO: 26108 - DNA, 13 bp, Artificial Sequence
  Oligonucleotide for detection of SNP TSC0006776
aaataataaatac

SEQ ID NO: 26109 - DNA, 13 bp, Artificial Sequence
  Oligonucleotide for detection of SNP TSC0006776
gtatttgttattt

SEQ ID NO: 26110 - DNA, 13 bp, Artificial Sequence
  Oligonucleotide for detection of SNP TSC0006776
aaataacaaatac

SEQ ID NO: 26111 - DNA, 13 bp, Artificial Sequence
  Oligonucleotide for detection of SNP TSC0006777
tggtagtaggtaa

SEQ ID NO: 26112 - DNA, 13 bp, Artificial Sequence
  Oligonucleotide for detection of SNP TSC0006777
ttacctactacca

SEQ ID NO: 26113 - DNA, 13 bp, Artificial Sequence
  Oligonucleotide for detection of SNP TSC0006777
tggtaggaggtaa

SEQ ID NO: 26114 - DNA, 13 bp, Artificial Sequence
  Oligonucleotide for detection of SNP TSC0006777
ttacctcctacca

SEQ ID NO: 26115 - DNA, 13 bp, Artificial Sequence
  Oligonucleotide for detection of SNP TSC0006777
ttattttttatta

SEQ ID NO: 26116 - DNA, 13 bp, Artificial Sequence
  Oligonucleotide for detection of SNP TSC0006777
taataaaaaataa

SEQ ID NO: 26117 - DNA, 13 bp, Artificial Sequence
  Oligonucleotide for detection of SNP TSC0006782
tgggagatgaagt

SEQ ID NO: 26118 - DNA, 13 bp, Artificial Sequence
  Oligonucleotide for detection of SNP TSC0006782
acttcatctccca

SEQ ID NO: 26119 - DNA, 13 bp, Artificial Sequence
  Oligonucleotide for detection of SNP TSC0006782
tgggaggtgaagt

SEQ ID NO: 26120 - DNA, 13 bp, Artificial Sequence
  Oligonucleotide for detection of SNP TSC0006782
acttcacctccca

SEQ ID NO: 26121 - DNA, 13 bp, Artificial Sequence
  Oligonucleotide for detection of SNP TSC0006788
ataaagggtaata

SEQ ID NO: 26122 - DNA, 13 bp, Artificial Sequence
  Oligonucleotide for detection of SNP TSC0006788
tattaccctttat

SEQ ID NO: 26123 - DNA, 13 bp, Artificial Sequence
  Oligonucleotide for detection of SNP TSC0006788
ataaagtgtaata

SEQ ID NO: 26124 - DNA, 13 bp, Artificial Sequence
  Oligonucleotide for detection of SNP TSC0006788
tattacactttat

SEQ ID NO: 26125 - DNA, 13 bp, Artificial Sequence
  Oligonucleotide for detection of SNP TSC0006788
tattattttttgt

SEQ ID NO: 26126 - DNA, 13 bp, Artificial Sequence
  Oligonucleotide for detection of SNP TSC0006788
acaaaaaataata

SEQ ID NO: 26127 - DNA, 13 bp, Artificial Sequence
  Oligonucleotide for detection of SNP TSC0006788
tattatattttgt

SEQ ID NO: 26128 - DNA, 13 bp, Artificial Sequence
  Oligonucleotide for detection of SNP TSC0006788
acaaaatataata

SEQ ID NO: 26129 - DNA, 13 bp, Artificial Sequence
  Oligonucleotide for detection of SNP TSC0006789
aagagatagaaat

SEQ ID NO: 26130 - DNA, 13 bp, Artificial Sequence
  Oligonucleotide for detection of SNP TSC0006789
atttctatctctt

SEQ ID NO: 26131 - DNA, 13 bp, Artificial Sequence
  Oligonucleotide for detection of SNP TSC0006789
aagagagagaaat

SEQ ID NO: 26132 - DNA, 13 bp, Artificial Sequence
  Oligonucleotide for detection of SNP TSC0006789
atttctctctctt

SEQ ID NO: 26133 - DNA, 13 bp, Artificial Sequence
  Oligonucleotide for detection of SNP TSC0006792
gttgtaaatgtty

SEQ ID NO: 26134 - DNA, 13 bp, Artificial Sequence
  Oligonucleotide for detection of SNP TSC0006792
raacatttacaac

SEQ ID NO: 26135 - DNA, 13 bp, Artificial Sequence
  Oligonucleotide for detection of SNP TSC0006792
gttgtagatgtty

SEQ ID NO: 26136 - DNA, 13 bp, Artificial Sequence
  Oligonucleotide for detection of SNP TSC0006792
raacatctacaac

SEQ ID NO: 26137 - DNA, 13 bp, Artificial Sequence
  Oligonucleotide for detection of SNP TSC0006792
gtcgtaaatgtty

SEQ ID NO: 26138 - DNA, 13 bp, Artificial Sequence
  Oligonucleotide for detection of SNP TSC0006792
raacatttacgac

SEQ ID NO: 26139 - DNA, 13 bp, Artificial Sequence
  Oligonucleotide for detection of SNP TSC0006792
gtcgtagatgtty

SEQ ID NO: 26140 - DNA, 13 bp, Artificial Sequence
  Oligonucleotide for detection of SNP TSC0006792
raacatctacgac

SEQ ID NO: 26141 - DNA, 13 bp, Artificial Sequence
  Oligonucleotide for detection of SNP TSC0006799
ggaagttgaggta

SEQ ID NO: 26142 - DNA, 13 bp, Artificial Sequence
  Oligonucleotide for detection of SNP TSC0006799
tacctcaacttcc

SEQ ID NO: 26143 - DNA, 13 bp, Artificial Sequence
  Oligonucleotide for detection of SNP TSC0006799
ggaagtcgaggta

SEQ ID NO: 26144 - DNA, 13 bp, Artificial Sequence
  Oligonucleotide for detection of SNP TSC0006799
tacctcgacttcc

SEQ ID NO: 26145 - DNA, 13 bp, Artificial Sequence
  Oligonucleotide for detection of SNP TSC0006803
aagtgtgggaatg

SEQ ID NO: 26146 - DNA, 13 bp, Artificial Sequence
  Oligonucleotide for detection of SNP TSC0006803
cattcccacactt

SEQ ID NO: 26147 - DNA, 13 bp, Artificial Sequence
  Oligonucleotide for detection of SNP TSC0006803
aagtgtaggaatg

SEQ ID NO: 26148 - DNA, 13 bp, Artificial Sequence
  Oligonucleotide for detection of SNP TSC0006803
cattcctacactt

SEQ ID NO: 26149 - DNA, 13 bp, Artificial Sequence
  Oligonucleotide for detection of SNP TSC0006804
tgtaatgttataa

SEQ ID NO: 26150 - DNA, 13 bp, Artificial Sequence
  Oligonucleotide for detection of SNP TSC0006804
ttataacattaca

SEQ ID NO: 26151 - DNA, 13 bp, Artificial Sequence
  Oligonucleotide for detection of SNP TSC0006804
tgtaatattataa

SEQ ID NO: 26152 - DNA, 13 bp, Artificial Sequence
  Oligonucleotide for detection of SNP TSC0006804
ttataatattaca

SEQ ID NO: 26153 - DNA, 13 bp, Artificial Sequence
  Oligonucleotide for detection of SNP TSC0006811
ttatgtggtttty

SEQ ID NO: 26154 - DNA, 13 bp, Artificial Sequence
  Oligonucleotide for detection of SNP TSC0006811
raaaaccacataa

SEQ ID NO: 26155 - DNA, 13 bp, Artificial Sequence
  Oligonucleotide for detection of SNP TSC0006811
ttatgttgtttty

SEQ ID NO: 26156 - DNA, 13 bp, Artificial Sequence
  Oligonucleotide for detection of SNP TSC0006811
raaaacaacataa

SEQ ID NO: 26157 - DNA, 13 bp, Artificial Sequence
  Oligonucleotide for detection of SNP TSC0006811
ttatgcggtttty

SEQ ID NO: 26158 - DNA, 13 bp, Artificial Sequence
  Oligonucleotide for detection of SNP TSC0006811
raaaaccgcataa

SEQ ID NO: 26159 - DNA, 13 bp, Artificial Sequence
  Oligonucleotide for detection of SNP TSC0006811
gaaagttgtataa

SEQ ID NO: 26160 - DNA, 13 bp, Artificial Sequence
  Oligonucleotide for detection of SNP TSC0006811
ttatacaactttc

SEQ ID NO: 26161 - DNA, 13 bp, Artificial Sequence
  Oligonucleotide for detection of SNP TSC0006811
gaaagtagtataa

SEQ ID NO: 26162 - DNA, 13 bp, Artificial Sequence
  Oligonucleotide for detection of SNP TSC0006811
ttatactactttc

SEQ ID NO: 26163 - DNA, 13 bp, Artificial Sequence
  Oligonucleotide for detection of SNP TSC0006811
gaaagtcgtataa

SEQ ID NO: 26164 - DNA, 13 bp, Artificial Sequence
  Oligonucleotide for detection of SNP TSC0006811
ttatacgactttc

SEQ ID NO: 26165 - DNA, 13 bp, Artificial Sequence
  Oligonucleotide for detection of SNP TSC0006812
tttttaaagttat

SEQ ID NO: 26166 - DNA, 13 bp, Artificial Sequence
  Oligonucleotide for detection of SNP TSC0006812
ataactttaaaaa

SEQ ID NO: 26167 - DNA, 13 bp, Artificial Sequence
  Oligonucleotide for detection of SNP TSC0006812
tttttatagttat

SEQ ID NO: 26168 - DNA, 13 bp, Artificial Sequence
  Oligonucleotide for detection of SNP TSC0006812
ataactataaaaa

SEQ ID NO: 26169 - DNA, 13 bp, Artificial Sequence
  Oligonucleotide for detection of SNP TSC0006812
ataattttaaaaa

SEQ ID NO: 26170 - DNA, 13 bp, Artificial Sequence
  Oligonucleotide for detection of SNP TSC0006812
tttttaaaattat

SEQ ID NO: 26171 - DNA, 13 bp, Artificial Sequence
  Oligonucleotide for detection of SNP TSC0006812
ataattgtaaaaa

SEQ ID NO: 26172 - DNA, 13 bp, Artificial Sequence
  Oligonucleotide for detection of SNP TSC0006812
tttttacaattat

SEQ ID NO: 26173 - DNA, 13 bp, Artificial Sequence
  Oligonucleotide for detection of SNP TSC0006813
ttttttggttgaa

SEQ ID NO: 26174 - DNA, 13 bp, Artificial Sequence
  Oligonucleotide for detection of SNP TSC0006813
ttcaaccaaaaaa

SEQ ID NO: 26175 - DNA, 13 bp, Artificial Sequence
  Oligonucleotide for detection of SNP TSC0006813
tttttttgttgaa

SEQ ID NO: 26176 - DNA, 13 bp, Artificial Sequence
  Oligonucleotide for detection of SNP TSC0006813
ttcaacaaaaaaa

SEQ ID NO: 26177 - DNA, 13 bp, Artificial Sequence
  Oligonucleotide for detection of SNP TSC0006813
tttttcggttgaa

SEQ ID NO: 26178 - DNA, 13 bp, Artificial Sequence
  Oligonucleotide for detection of SNP TSC0006813
ttcaaccgaaaaa

SEQ ID NO: 26179 - DNA, 13 bp, Artificial Sequence
  Oligonucleotide for detection of SNP TSC0006813
tttagttgaagag

SEQ ID NO: 26180 - DNA, 13 bp, Artificial Sequence
  Oligonucleotide for detection of SNP TSC0006813
ctcttcaactaaa

SEQ ID NO: 26181 - DNA, 13 bp, Artificial Sequence
  Oligonucleotide for detection of SNP TSC0006813
tttagtagaagag

SEQ ID NO: 26182 - DNA, 13 bp, Artificial Sequence
  Oligonucleotide for detection of SNP TSC0006813
ctcttctactaaa

SEQ ID NO: 26183 - DNA, 13 bp, Artificial Sequence
  Oligonucleotide for detection of SNP TSC0006813
tttagtcgaagag

SEQ ID NO: 26184 - DNA, 13 bp, Artificial Sequence
  Oligonucleotide for detection of SNP TSC0006813
ctcttcgactaaa

SEQ ID NO: 26185 - DNA, 13 bp, Artificial Sequence
  Oligonucleotide for detection of SNP TSC0006821
ttgttaaagtata

SEQ ID NO: 26186 - DNA, 13 bp, Artificial Sequence
  Oligonucleotide for detection of SNP TSC0006821
tatactttaacaa

SEQ ID NO: 26187 - DNA, 13 bp, Artificial Sequence
  Oligonucleotide for detection of SNP TSC0006821
ttgttagagtata

SEQ ID NO: 26188 - DNA, 13 bp, Artificial Sequence
  Oligonucleotide for detection of SNP TSC0006821
tatactctaacaa

SEQ ID NO: 26189 - DNA, 13 bp, Artificial Sequence
  Oligonucleotide for detection of SNP TSC0006828
ttttttaggtaty

SEQ ID NO: 26190 - DNA, 13 bp, Artificial Sequence
  Oligonucleotide for detection of SNP TSC0006828
ratacctaaaaaa

SEQ ID NO: 26191 - DNA, 13 bp, Artificial Sequence
  Oligonucleotide for detection of SNP TSC0006830
gatttttggtagy

SEQ ID NO: 26192 - DNA, 13 bp, Artificial Sequence
  Oligonucleotide for detection of SNP TSC0006830
rctaccaaaaatc

SEQ ID NO: 26193 - DNA, 13 bp, Artificial Sequence
  Oligonucleotide for detection of SNP TSC0006830
gattttcggtagy

SEQ ID NO: 26194 - DNA, 13 bp, Artificial Sequence
  Oligonucleotide for detection of SNP TSC0006830
rctaccgaaaatc

SEQ ID NO: 26195 - DNA, 13 bp, Artificial Sequence
  Oligonucleotide for detection of SNP TSC0006830
gttgttggaagty

SEQ ID NO: 26196 - DNA, 13 bp, Artificial Sequence
  Oligonucleotide for detection of SNP TSC0006830
racttccaacaac

SEQ ID NO: 26197 - DNA, 13 bp, Artificial Sequence
  Oligonucleotide for detection of SNP TSC0006830
gttgttagaagty

SEQ ID NO: 26198 - DNA, 13 bp, Artificial Sequence
  Oligonucleotide for detection of SNP TSC0006830
racttctaacaac

SEQ ID NO: 26199 - DNA, 13 bp, Artificial Sequence
  Oligonucleotide for detection of SNP TSC0006830
gttgtcggaagty

SEQ ID NO: 26200 - DNA, 13 bp, Artificial Sequence
  Oligonucleotide for detection of SNP TSC0006830
racttccgacaac

SEQ ID NO: 26201 - DNA, 13 bp, Artificial Sequence
  Oligonucleotide for detection of SNP TSC0006832
attgggtatagat

SEQ ID NO: 26202 - DNA, 13 bp, Artificial Sequence
  Oligonucleotide for detection of SNP TSC0006832
atctatacccaat

SEQ ID NO: 26203 - DNA, 13 bp, Artificial Sequence
  Oligonucleotide for detection of SNP TSC0006832
attggggatagat

SEQ ID NO: 26204 - DNA, 13 bp, Artificial Sequence
  Oligonucleotide for detection of SNP TSC0006832
atctatccccaat

SEQ ID NO: 26205 - DNA, 13 bp, Artificial Sequence
  Oligonucleotide for detection of SNP TSC0006832
atttgtgtttagt

SEQ ID NO: 26206 - DNA, 13 bp, Artificial Sequence
  Oligonucleotide for detection of SNP TSC0006832
actaaacacaaat

SEQ ID NO: 26207 - DNA, 13 bp, Artificial Sequence
  Oligonucleotide for detection of SNP TSC0006832
atttgtttttagt

SEQ ID NO: 26208 - DNA, 13 bp, Artificial Sequence
  Oligonucleotide for detection of SNP TSC0006832
actaaaaacaaat

SEQ ID NO: 26209 - DNA, 13 bp, Artificial Sequence
  Oligonucleotide for detection of SNP TSC0006838
gtagttgtggaaa

SEQ ID NO: 26210 - DNA, 13 bp, Artificial Sequence
  Oligonucleotide for detection of SNP TSC0006838
tttccacaactac

SEQ ID NO: 26211 - DNA, 13 bp, Artificial Sequence
  Oligonucleotide for detection of SNP TSC0006838
gtagttatggaaa

SEQ ID NO: 26212 - DNA, 13 bp, Artificial Sequence
  Oligonucleotide for detection of SNP TSC0006838
tttccataactac

SEQ ID NO: 26213 - DNA, 13 bp, Artificial Sequence
  Oligonucleotide for detection of SNP TSC0006839
ttgagagaaaatg

SEQ ID NO: 26214 - DNA, 13 bp, Artificial Sequence
  Oligonucleotide for detection of SNP TSC0006839
cattttctctcaa

SEQ ID NO: 26215 - DNA, 13 bp, Artificial Sequence
  Oligonucleotide for detection of SNP TSC0006839
ttgagataaaatg

SEQ ID NO: 26216 - DNA, 13 bp, Artificial Sequence
  Oligonucleotide for detection of SNP TSC0006839
cattttatctcaa

SEQ ID NO: 26217 - DNA, 13 bp, Artificial Sequence
  Oligonucleotide for detection of SNP TSC0006840
agttgggtgttaa

SEQ ID NO: 26218 - DNA, 13 bp, Artificial Sequence
  Oligonucleotide for detection of SNP TSC0006840
ttaacacccaact

SEQ ID NO: 26219 - DNA, 13 bp, Artificial Sequence
  Oligonucleotide for detection of SNP TSC0006840
agttggatgttaa

SEQ ID NO: 26220 - DNA, 13 bp, Artificial Sequence
  Oligonucleotide for detection of SNP TSC0006840
ttaacatccaact

SEQ ID NO: 26221 - DNA, 13 bp, Artificial Sequence
  Oligonucleotide for detection of SNP TSC0006841
ttaataagtttta

SEQ ID NO: 26222 - DNA, 13 bp, Artificial Sequence
  Oligonucleotide for detection of SNP TSC0006841
taaaacttattaa

SEQ ID NO: 26223 - DNA, 13 bp, Artificial Sequence
  Oligonucleotide for detection of SNP TSC0006841
ttaataggtttta

SEQ ID NO: 26224 - DNA, 13 bp, Artificial Sequence
  Oligonucleotide for detection of SNP TSC0006841
taaaacctattaa

SEQ ID NO: 26225 - DNA, 13 bp, Artificial Sequence
  Oligonucleotide for detection of SNP TSC0006848
tagttaatatgag

SEQ ID NO: 26226 - DNA, 13 bp, Artificial Sequence
  Oligonucleotide for detection of SNP TSC0006848
ctcatattaacta

SEQ ID NO: 26227 - DNA, 13 bp, Artificial Sequence
  Oligonucleotide for detection of SNP TSC0006848
tagttattatgag

SEQ ID NO: 26228 - DNA, 13 bp, Artificial Sequence
  Oligonucleotide for detection of SNP TSC0006848
ctcataataacta

SEQ ID NO: 26229 - DNA, 13 bp, Artificial Sequence
  Oligonucleotide for detection of SNP TSC0006848
tttatgttgatta

SEQ ID NO: 26230 - DNA, 13 bp, Artificial Sequence
  Oligonucleotide for detection of SNP TSC0006848
taatcaacataaa

SEQ ID NO: 26231 - DNA, 13 bp, Artificial Sequence
  Oligonucleotide for detection of SNP TSC0006848
tttatggtgatta

SEQ ID NO: 26232 - DNA, 13 bp, Artificial Sequence
  Oligonucleotide for detection of SNP TSC0006848
taatcaccataaa

SEQ ID NO: 26233 - DNA, 13 bp, Artificial Sequence
  Oligonucleotide for detection of SNP TSC0006852
tttgtagttttty

SEQ ID NO: 26234 - DNA, 13 bp, Artificial Sequence
  Oligonucleotide for detection of SNP TSC0006852
raaaaactacaaa

SEQ ID NO: 26235 - DNA, 13 bp, Artificial Sequence
  Oligonucleotide for detection of SNP TSC0006852
tttgtaattttty

SEQ ID NO: 26236 - DNA, 13 bp, Artificial Sequence
  Oligonucleotide for detection of SNP TSC0006852
raaaaattacaaa

SEQ ID NO: 26237 - DNA, 13 bp, Artificial Sequence
  Oligonucleotide for detection of SNP TSC0006853
tttttagtttttt

SEQ ID NO: 26238 - DNA, 13 bp, Artificial Sequence
  Oligonucleotide for detection of SNP TSC0006853
aaaaaactaaaaa

SEQ ID NO: 26239 - DNA, 13 bp, Artificial Sequence
  Oligonucleotide for detection of SNP TSC0006865
aagatatggagtg

SEQ ID NO: 26240 - DNA, 13 bp, Artificial Sequence
  Oligonucleotide for detection of SNP TSC0006865
cactccatatctt

SEQ ID NO: 26241 - DNA, 13 bp, Artificial Sequence
  Oligonucleotide for detection of SNP TSC0006865
aagatacggagtg

SEQ ID NO: 26242 - DNA, 13 bp, Artificial Sequence
  Oligonucleotide for detection of SNP TSC0006865
cactccgtatctt

SEQ ID NO: 26243 - DNA, 13 bp, Artificial Sequence
  Oligonucleotide for detection of SNP TSC0006865
tattttgtatttt

SEQ ID NO: 26244 - DNA, 13 bp, Artificial Sequence
  Oligonucleotide for detection of SNP TSC0006865
aaaatacaaaata

SEQ ID NO: 26245 - DNA, 13 bp, Artificial Sequence
  Oligonucleotide for detection of SNP TSC0006865
tattttatatttt

SEQ ID NO: 26246 - DNA, 13 bp, Artificial Sequence
  Oligonucleotide for detection of SNP TSC0006865
aaaatataaaata

SEQ ID NO: 26247 - DNA, 13 bp, Artificial Sequence
  Oligonucleotide for detection of SNP TSC0006865
tatttcgtatttt

SEQ ID NO: 26248 - DNA, 13 bp, Artificial Sequence
  Oligonucleotide for detection of SNP TSC0006865
aaaatacgaaata

SEQ ID NO: 26249 - DNA, 13 bp, Artificial Sequence
  Oligonucleotide for detection of SNP TSC0006872
ttatgaaaaataa

SEQ ID NO: 26250 - DNA, 13 bp, Artificial Sequence
  Oligonucleotide for detection of SNP TSC0006872
ttatttttcataa

SEQ ID NO: 26251 - DNA, 13 bp, Artificial Sequence
  Oligonucleotide for detection of SNP TSC0006872
ttatgagaaataa

SEQ ID NO: 26252 - DNA, 13 bp, Artificial Sequence
  Oligonucleotide for detection of SNP TSC0006872
ttatttctcataa

SEQ ID NO: 26253 - DNA, 13 bp, Artificial Sequence
  Oligonucleotide for detection of SNP TSC0006873
atatttagttagy

SEQ ID NO: 26254 - DNA, 13 bp, Artificial Sequence
  Oligonucleotide for detection of SNP TSC0006873
rctaactaaatat

SEQ ID NO: 26255 - DNA, 13 bp, Artificial Sequence
  Oligonucleotide for detection of SNP TSC0006873
atatttggttagy

SEQ ID NO: 26256 - DNA, 13 bp, Artificial Sequence
  Oligonucleotide for detection of SNP TSC0006873
rctaaccaaatat

SEQ ID NO: 26257 - DNA, 13 bp, Artificial Sequence
  Oligonucleotide for detection of SNP TSC0006879
tggattgaatggg

SEQ ID NO: 26258 - DNA, 13 bp, Artificial Sequence
  Oligonucleotide for detection of SNP TSC0006879
cccattcaatcca

SEQ ID NO: 26259 - DNA, 13 bp, Artificial Sequence
  Oligonucleotide for detection of SNP TSC0006879
tggattaaatggg

SEQ ID NO: 26260 - DNA, 13 bp, Artificial Sequence
  Oligonucleotide for detection of SNP TSC0006879
cccatttaatcca

SEQ ID NO: 26261 - DNA, 13 bp, Artificial Sequence
  Oligonucleotide for detection of SNP TSC0006886
tttttttgatttt

SEQ ID NO: 26262 - DNA, 13 bp, Artificial Sequence
  Oligonucleotide for detection of SNP TSC0006886
aaaatcaaaaaaa

SEQ ID NO: 26263 - DNA, 13 bp, Artificial Sequence
  Oligonucleotide for detection of SNP TSC0006886
ttttttcgatttt

SEQ ID NO: 26264 - DNA, 13 bp, Artificial Sequence
  Oligonucleotide for detection of SNP TSC0006886
aaaatcgaaaaaa

SEQ ID NO: 26265 - DNA, 13 bp, Artificial Sequence
  Oligonucleotide for detection of SNP TSC0006886
aaagttgggaaaa

SEQ ID NO: 26266 - DNA, 13 bp, Artificial Sequence
  Oligonucleotide for detection of SNP TSC0006886
ttttcccaacttt

SEQ ID NO: 26267 - DNA, 13 bp, Artificial Sequence
  Oligonucleotide for detection of SNP TSC0006886
aaagttaggaaaa

SEQ ID NO: 26268 - DNA, 13 bp, Artificial Sequence
  Oligonucleotide for detection of SNP TSC0006886
ttttcctaacttt

SEQ ID NO: 26269 - DNA, 13 bp, Artificial Sequence
  Oligonucleotide for detection of SNP TSC0006886
aaagtcgggaaaa

SEQ ID NO: 26270 - DNA, 13 bp, Artificial Sequence
  Oligonucleotide for detection of SNP TSC0006886
ttttcccgacttt

SEQ ID NO: 26271 - DNA, 13 bp, Artificial Sequence
  Oligonucleotide for detection of SNP TSC0006893
agataaggtaagt

SEQ ID NO: 26272 - DNA, 13 bp, Artificial Sequence
  Oligonucleotide for detection of SNP TSC0006893
acttaccttatct

SEQ ID NO: 26273 - DNA, 13 bp, Artificial Sequence
  Oligonucleotide for detection of SNP TSC0006893
agataaagtaagt

SEQ ID NO: 26274 - DNA, 13 bp, Artificial Sequence
  Oligonucleotide for detection of SNP TSC0006893
acttactttatct

SEQ ID NO: 26275 - DNA, 13 bp, Artificial Sequence
  Oligonucleotide for detection of SNP TSC0006895
gagaataaagaga

SEQ ID NO: 26276 - DNA, 13 bp, Artificial Sequence
  Oligonucleotide for detection of SNP TSC0006895
tctctttattctc

SEQ ID NO: 26277 - DNA, 13 bp, Artificial Sequence
  Oligonucleotide for detection of SNP TSC0006895
gagaatgaagaga

SEQ ID NO: 26278 - DNA, 13 bp, Artificial Sequence
  Oligonucleotide for detection of SNP TSC0006895
tctcttcattctc

SEQ ID NO: 26279 - DNA, 13 bp, Artificial Sequence
  Oligonucleotide for detection of SNP TSC0006895
gagaacgaagaga

SEQ ID NO: 26280 - DNA, 13 bp, Artificial Sequence
  Oligonucleotide for detection of SNP TSC0006895
tctcttcgttctc

SEQ ID NO: 26281 - DNA, 13 bp, Artificial Sequence
  Oligonucleotide for detection of SNP TSC0006896
tagaggatgtagt

SEQ ID NO: 26282 - DNA, 13 bp, Artificial Sequence
  Oligonucleotide for detection of SNP TSC0006896
actacatcctcta

SEQ ID NO: 26283 - DNA, 13 bp, Artificial Sequence
  Oligonucleotide for detection of SNP TSC0006896
tagaggttgtagt

SEQ ID NO: 26284 - DNA, 13 bp, Artificial Sequence
  Oligonucleotide for detection of SNP TSC0006896
actacaacctcta

SEQ ID NO: 26285 - DNA, 13 bp, Artificial Sequence
  Oligonucleotide for detection of SNP TSC0006896
attgtattttttg

SEQ ID NO: 26286 - DNA, 13 bp, Artificial Sequence
  Oligonucleotide for detection of SNP TSC0006896
caaaaaatacaat

SEQ ID NO: 26287 - DNA, 13 bp, Artificial Sequence
  Oligonucleotide for detection of SNP TSC0006896
attgtaatttttg

SEQ ID NO: 26288 - DNA, 13 bp, Artificial Sequence
  Oligonucleotide for detection of SNP TSC0006896
caaaaattacaat

SEQ ID NO: 26289 - DNA, 13 bp, Artificial Sequence
  Oligonucleotide for detection of SNP TSC0006897
attatttgggagg

SEQ ID NO: 26290 - DNA, 13 bp, Artificial Sequence
  Oligonucleotide for detection of SNP TSC0006897
cctcccaaataat

SEQ ID NO: 26291 - DNA, 13 bp, Artificial Sequence
  Oligonucleotide for detection of SNP TSC0006897
attattcgggagg

SEQ ID NO: 26292 - DNA, 13 bp, Artificial Sequence
  Oligonucleotide for detection of SNP TSC0006897
cctcccgaataat

SEQ ID NO: 26293 - DNA, 13 bp, Artificial Sequence
  Oligonucleotide for detection of SNP TSC0006897
ttttttgagtggt

SEQ ID NO: 26294 - DNA, 13 bp, Artificial Sequence
  Oligonucleotide for detection of SNP TSC0006897
accactcaaaaaa

SEQ ID NO: 26295 - DNA, 13 bp, Artificial Sequence
  Oligonucleotide for detection of SNP TSC0006897
ttttttaagtggt

SEQ ID NO: 26296 - DNA, 13 bp, Artificial Sequence
  Oligonucleotide for detection of SNP TSC0006897
accacttaaaaaa

SEQ ID NO: 26297 - DNA, 13 bp, Artificial Sequence
  Oligonucleotide for detection of SNP TSC0006897
tttttcgagtggt

SEQ ID NO: 26298 - DNA, 13 bp, Artificial Sequence
  Oligonucleotide for detection of SNP TSC0006897
accactcgaaaaa

SEQ ID NO: 26299 - DNA, 13 bp, Artificial Sequence
  Oligonucleotide for detection of SNP TSC0006901
aaaaaggttattt

SEQ ID NO: 26300 - DNA, 13 bp, Artificial Sequence
  Oligonucleotide for detection of SNP TSC0006901
aaataaccttttt

SEQ ID NO: 26301 - DNA, 13 bp, Artificial Sequence
  Oligonucleotide for detection of SNP TSC0006901
aaaaagattattt

SEQ ID NO: 26302 - DNA, 13 bp, Artificial Sequence
  Oligonucleotide for detection of SNP TSC0006901
aaataatcttttt

SEQ ID NO: 26303 - DNA, 13 bp, Artificial Sequence
  Oligonucleotide for detection of SNP TSC0006912
gtgagttggagta

SEQ ID NO: 26304 - DNA, 13 bp, Artificial Sequence
  Oligonucleotide for detection of SNP TSC0006912
tactccaactcac

SEQ ID NO: 26305 - DNA, 13 bp, Artificial Sequence
  Oligonucleotide for detection of SNP TSC0006912
gtgagtgggagta

SEQ ID NO: 26306 - DNA, 13 bp, Artificial Sequence
  Oligonucleotide for detection of SNP TSC0006912
tactcccactcac

SEQ ID NO: 26307 - DNA, 13 bp, Artificial Sequence
  Oligonucleotide for detection of SNP TSC0006912
gtgagtcggagta

SEQ ID NO: 26308 - DNA, 13 bp, Artificial Sequence
  Oligonucleotide for detection of SNP TSC0006912
tactccgactcac

SEQ ID NO: 26309 - DNA, 13 bp, Artificial Sequence
  Oligonucleotide for detection of SNP TSC0006912
tgttttgatttay

SEQ ID NO: 26310 - DNA, 13 bp, Artificial Sequence
  Oligonucleotide for detection of SNP TSC0006912
rtaaatcaaaaca

SEQ ID NO: 26311 - DNA, 13 bp, Artificial Sequence
  Oligonucleotide for detection of SNP TSC0006912
tgtttttatttay

SEQ ID NO: 26312 - DNA, 13 bp, Artificial Sequence
  Oligonucleotide for detection of SNP TSC0006912
rtaaataaaaaca

SEQ ID NO: 26313 - DNA, 13 bp, Artificial Sequence
  Oligonucleotide for detection of SNP TSC0006912
tgtttcgatttay

SEQ ID NO: 26314 - DNA, 13 bp, Artificial Sequence
  Oligonucleotide for detection of SNP TSC0006912
rtaaatcgaaaca

SEQ ID NO: 26315 - DNA, 13 bp, Artificial Sequence
  Oligonucleotide for detection of SNP TSC0006913
agtttagttttty

SEQ ID NO: 26316 - DNA, 13 bp, Artificial Sequence
  Oligonucleotide for detection of SNP TSC0006913
raaaaactaaact

SEQ ID NO: 26317 - DNA, 13 bp, Artificial Sequence
  Oligonucleotide for detection of SNP TSC0006913
agtttaattttty

SEQ ID NO: 26318 - DNA, 13 bp, Artificial Sequence
  Oligonucleotide for detection of SNP TSC0006913
raaaaattaaact

SEQ ID NO: 26319 - DNA, 13 bp, Artificial Sequence
  Oligonucleotide for detection of SNP TSC0006914
gtttttatttata

SEQ ID NO: 26320 - DNA, 13 bp, Artificial Sequence
  Oligonucleotide for detection of SNP TSC0006914
tataaataaaaac

SEQ ID NO: 26321 - DNA, 13 bp, Artificial Sequence
  Oligonucleotide for detection of SNP TSC0006914
gtttttgtttata

SEQ ID NO: 26322 - DNA, 13 bp, Artificial Sequence
  Oligonucleotide for detection of SNP TSC0006914
tataaacaaaaac

SEQ ID NO: 26323 - DNA, 13 bp, Artificial Sequence
  Oligonucleotide for detection of SNP TSC0006914
gttttcgtttata

SEQ ID NO: 26324 - DNA, 13 bp, Artificial Sequence
  Oligonucleotide for detection of SNP TSC0006914
tataaacgaaaac

SEQ ID NO: 26325 - DNA, 13 bp, Artificial Sequence
  Oligonucleotide for detection of SNP TSC0006914
tgtgggtgggaay

SEQ ID NO: 26326 - DNA, 13 bp, Artificial Sequence
  Oligonucleotide for detection of SNP TSC0006914
rttcccacccaca

SEQ ID NO: 26327 - DNA, 13 bp, Artificial Sequence
  Oligonucleotide for detection of SNP TSC0006914
tgtgggcgggaay

SEQ ID NO: 26328 - DNA, 13 bp, Artificial Sequence
  Oligonucleotide for detection of SNP TSC0006914
rttcccgcccaca

SEQ ID NO: 26329 - DNA, 13 bp, Artificial Sequence
  Oligonucleotide for detection of SNP TSC0006919
tattgtagaggat

SEQ ID NO: 26330 - DNA, 13 bp, Artificial Sequence
  Oligonucleotide for detection of SNP TSC0006919
atcctctacaata

SEQ ID NO: 26331 - DNA, 13 bp, Artificial Sequence
  Oligonucleotide for detection of SNP TSC0006919
tattgtggaggat

SEQ ID NO: 26332 - DNA, 13 bp, Artificial Sequence
  Oligonucleotide for detection of SNP TSC0006919
atcctccacaata

SEQ ID NO: 26333 - DNA, 13 bp, Artificial Sequence
  Oligonucleotide for detection of SNP TSC0006928
ttggggaagggag

SEQ ID NO: 26334 - DNA, 13 bp, Artificial Sequence
  Oligonucleotide for detection of SNP TSC0006928
ctcccttccccaa

SEQ ID NO: 26335 - DNA, 13 bp, Artificial Sequence
  Oligonucleotide for detection of SNP TSC0006928
ttgggggagggag

SEQ ID NO: 26336 - DNA, 13 bp, Artificial Sequence
  Oligonucleotide for detection of SNP TSC0006928
ctccctcccccaa

SEQ ID NO: 26337 - DNA, 13 bp, Artificial Sequence
  Oligonucleotide for detection of SNP TSC0006929
tattttatgggat

SEQ ID NO: 26338 - DNA, 13 bp, Artificial Sequence
  Oligonucleotide for detection of SNP TSC0006929
atcccataaaata

SEQ ID NO: 26339 - DNA, 13 bp, Artificial Sequence
  Oligonucleotide for detection of SNP TSC0006929
tattttttgggat

SEQ ID NO: 26340 - DNA, 13 bp, Artificial Sequence
  Oligonucleotide for detection of SNP TSC0006929
atcccaaaaaata

SEQ ID NO: 26341 - DNA, 13 bp, Artificial Sequence
  Oligonucleotide for detection of SNP TSC0006929
tattttacgggat

SEQ ID NO: 26342 - DNA, 13 bp, Artificial Sequence
  Oligonucleotide for detection of SNP TSC0006929
atcccgtaaaata

SEQ ID NO: 26343 - DNA, 13 bp, Artificial Sequence
  Oligonucleotide for detection of SNP TSC0006929
tatttttcgggat

SEQ ID NO: 26344 - DNA, 13 bp, Artificial Sequence
  Oligonucleotide for detection of SNP TSC0006929
atcccgaaaaata

SEQ ID NO: 26345 - DNA, 13 bp, Artificial Sequence
  Oligonucleotide for detection of SNP TSC0006929
attttgtggggtg

SEQ ID NO: 26346 - DNA, 13 bp, Artificial Sequence
  Oligonucleotide for detection of SNP TSC0006929
caccccacaaaat

SEQ ID NO: 26347 - DNA, 13 bp, Artificial Sequence
  Oligonucleotide for detection of SNP TSC0006929
attttgaggggtg

SEQ ID NO: 26348 - DNA, 13 bp, Artificial Sequence
  Oligonucleotide for detection of SNP TSC0006929
cacccctcaaaat

SEQ ID NO: 26349 - DNA, 13 bp, Artificial Sequence
  Oligonucleotide for detection of SNP TSC0006929
atttcgtggggtg

SEQ ID NO: 26350 - DNA, 13 bp, Artificial Sequence
  Oligonucleotide for detection of SNP TSC0006929
caccccacgaaat

SEQ ID NO: 26351 - DNA, 13 bp, Artificial Sequence
  Oligonucleotide for detection of SNP TSC0006929
atttcgaggggtg

SEQ ID NO: 26352 - DNA, 13 bp, Artificial Sequence
  Oligonucleotide for detection of SNP TSC0006929
cacccctcgaaat

SEQ ID NO: 26353 - DNA, 13 bp, Artificial Sequence
  Oligonucleotide for detection of SNP TSC0006931
tattttgtaagat

SEQ ID NO: 26354 - DNA, 13 bp, Artificial Sequence
  Oligonucleotide for detection of SNP TSC0006931
atcttacaaaata

SEQ ID NO: 26355 - DNA, 13 bp, Artificial Sequence
  Oligonucleotide for detection of SNP TSC0006931
tattttataagat

SEQ ID NO: 26356 - DNA, 13 bp, Artificial Sequence
  Oligonucleotide for detection of SNP TSC0006931
atcttataaaata

SEQ ID NO: 26357 - DNA, 13 bp, Artificial Sequence
  Oligonucleotide for detection of SNP TSC0006933
gtttgtaatgaty

SEQ ID NO: 26358 - DNA, 13 bp, Artificial Sequence
  Oligonucleotide for detection of SNP TSC0006933
ratcattacaaac

SEQ ID NO: 26359 - DNA, 13 bp, Artificial Sequence
  Oligonucleotide for detection of SNP TSC0006933
gtttgtgatgaty

SEQ ID NO: 26360 - DNA, 13 bp, Artificial Sequence
  Oligonucleotide for detection of SNP TSC0006933
ratcatcacaaac

SEQ ID NO: 26361 - DNA, 13 bp, Artificial Sequence
  Oligonucleotide for detection of SNP TSC0006934
atgtttattttgt

SEQ ID NO: 26362 - DNA, 13 bp, Artificial Sequence
  Oligonucleotide for detection of SNP TSC0006934
acaaaataaacat

SEQ ID NO: 26363 - DNA, 13 bp, Artificial Sequence
  Oligonucleotide for detection of SNP TSC0006934
atgttttttttgt

SEQ ID NO: 26364 - DNA, 13 bp, Artificial Sequence
  Oligonucleotide for detection of SNP TSC0006934
acaaaaaaaacat

SEQ ID NO: 26365 - DNA, 13 bp, Artificial Sequence
  Oligonucleotide for detection of SNP TSC0006934
ataaagtagatat

SEQ ID NO: 26366 - DNA, 13 bp, Artificial Sequence
  Oligonucleotide for detection of SNP TSC0006934
atatctactttat

SEQ ID NO: 26367 - DNA, 13 bp, Artificial Sequence
  Oligonucleotide for detection of SNP TSC0006934
ataaaggagatat

SEQ ID NO: 26368 - DNA, 13 bp, Artificial Sequence
  Oligonucleotide for detection of SNP TSC0006934
atatctcctttat

SEQ ID NO: 26369 - DNA, 13 bp, Artificial Sequence
  Oligonucleotide for detection of SNP TSC0006943
tttatatgtaaaa

SEQ ID NO: 26370 - DNA, 13 bp, Artificial Sequence
  Oligonucleotide for detection of SNP TSC0006943
ttttacatataaa

SEQ ID NO: 26371 - DNA, 13 bp, Artificial Sequence
  Oligonucleotide for detection of SNP TSC0006943
tttatacgtaaaa

SEQ ID NO: 26372 - DNA, 13 bp, Artificial Sequence
  Oligonucleotide for detection of SNP TSC0006943
ttttacgtataaa

SEQ ID NO: 26373 - DNA, 13 bp, Artificial Sequence
  Oligonucleotide for detection of SNP TSC0006943
ttttgtgtatgaa

SEQ ID NO: 26374 - DNA, 13 bp, Artificial Sequence
  Oligonucleotide for detection of SNP TSC0006943
ttcatacacaaaa

SEQ ID NO: 26375 - DNA, 13 bp, Artificial Sequence
  Oligonucleotide for detection of SNP TSC0006943
ttttgtatatgaa

SEQ ID NO: 26376 - DNA, 13 bp, Artificial Sequence
  Oligonucleotide for detection of SNP TSC0006943
ttcatatacaaaa

SEQ ID NO: 26377 - DNA, 13 bp, Artificial Sequence
  Oligonucleotide for detection of SNP TSC0006943
ttttgcgtatgaa

SEQ ID NO: 26378 - DNA, 13 bp, Artificial Sequence
  Oligonucleotide for detection of SNP TSC0006943
ttcatacgcaaaa

SEQ ID NO: 26379 - DNA, 13 bp, Artificial Sequence
  Oligonucleotide for detection of SNP TSC0006951
tttttaatgaata

SEQ ID NO: 26380 - DNA, 13 bp, Artificial Sequence
  Oligonucleotide for detection of SNP TSC0006951
tattcattaaaaa

SEQ ID NO: 26381 - DNA, 13 bp, Artificial Sequence
  Oligonucleotide for detection of SNP TSC0006951
tttttagtgaata

SEQ ID NO: 26382 - DNA, 13 bp, Artificial Sequence
  Oligonucleotide for detection of SNP TSC0006951
tattcactaaaaa

SEQ ID NO: 26383 - DNA, 13 bp, Artificial Sequence
  Oligonucleotide for detection of SNP TSC0006952
taggagattgagg

SEQ ID NO: 26384 - DNA, 13 bp, Artificial Sequence
  Oligonucleotide for detection of SNP TSC0006952
cctcaatctccta

SEQ ID NO: 26385 - DNA, 13 bp, Artificial Sequence
  Oligonucleotide for detection of SNP TSC0006952
taggaggttgagg

SEQ ID NO: 26386 - DNA, 13 bp, Artificial Sequence
  Oligonucleotide for detection of SNP TSC0006952
cctcaacctccta

SEQ ID NO: 26387 - DNA, 13 bp, Artificial Sequence
  Oligonucleotide for detection of SNP TSC0006953
gtagaagttttta

SEQ ID NO: 26388 - DNA, 13 bp, Artificial Sequence
  Oligonucleotide for detection of SNP TSC0006953
taaaaacttctac

SEQ ID NO: 26389 - DNA, 13 bp, Artificial Sequence
  Oligonucleotide for detection of SNP TSC0006953
gtagaaattttta

SEQ ID NO: 26390 - DNA, 13 bp, Artificial Sequence
  Oligonucleotide for detection of SNP TSC0006953
taaaaatttctac

SEQ ID NO: 26391 - DNA, 13 bp, Artificial Sequence
  Oligonucleotide for detection of SNP TSC0006954
agaaatagaggat

SEQ ID NO: 26392 - DNA, 13 bp, Artificial Sequence
  Oligonucleotide for detection of SNP TSC0006954
atcctctatttct

SEQ ID NO: 26393 - DNA, 13 bp, Artificial Sequence
  Oligonucleotide for detection of SNP TSC0006954
agaaatggaggat

SEQ ID NO: 26394 - DNA, 13 bp, Artificial Sequence
  Oligonucleotide for detection of SNP TSC0006954
atcctccatttct

SEQ ID NO: 26395 - DNA, 13 bp, Artificial Sequence
  Oligonucleotide for detection of SNP TSC0006955
ttttttttatgta

SEQ ID NO: 26396 - DNA, 13 bp, Artificial Sequence
  Oligonucleotide for detection of SNP TSC0006955
tacataaaaaaaa

SEQ ID NO: 26397 - DNA, 13 bp, Artificial Sequence
  Oligonucleotide for detection of SNP TSC0006955
tatatagagagaa

SEQ ID NO: 26398 - DNA, 13 bp, Artificial Sequence
  Oligonucleotide for detection of SNP TSC0006955
ttctctctatata

SEQ ID NO: 26399 - DNA, 13 bp, Artificial Sequence
  Oligonucleotide for detection of SNP TSC0006955
tatatatagagaa

SEQ ID NO: 26400 - DNA, 13 bp, Artificial Sequence
  Oligonucleotide for detection of SNP TSC0006955
ttctctatatata

SEQ ID NO: 26401 - DNA, 13 bp, Artificial Sequence
  Oligonucleotide for detection of SNP TSC0006956
aaaaagaattttt

SEQ ID NO: 26402 - DNA, 13 bp, Artificial Sequence
  Oligonucleotide for detection of SNP TSC0006956
aaaaattcttttt

SEQ ID NO: 26403 - DNA, 13 bp, Artificial Sequence
  Oligonucleotide for detection of SNP TSC0006956
aaaaagtattttt

SEQ ID NO: 26404 - DNA, 13 bp, Artificial Sequence
  Oligonucleotide for detection of SNP TSC0006956
aaaaatacttttt

SEQ ID NO: 26405 - DNA, 13 bp, Artificial Sequence
  Oligonucleotide for detection of SNP TSC0006956
aggagtttttttt

SEQ ID NO: 26406 - DNA, 13 bp, Artificial Sequence
  Oligonucleotide for detection of SNP TSC0006956
aaaaaaaactcct

SEQ ID NO: 26407 - DNA, 13 bp, Artificial Sequence
  Oligonucleotide for detection of SNP TSC0006956
aggagtatttttt

SEQ ID NO: 26408 - DNA, 13 bp, Artificial Sequence
  Oligonucleotide for detection of SNP TSC0006956
aaaaaatactcct

SEQ ID NO: 26409 - DNA, 13 bp, Artificial Sequence
  Oligonucleotide for detection of SNP TSC0006957
ggggagaatatty

SEQ ID NO: 26410 - DNA, 13 bp, Artificial Sequence
  Oligonucleotide for detection of SNP TSC0006957
raatattctcccc

SEQ ID NO: 26411 - DNA, 13 bp, Artificial Sequence
  Oligonucleotide for detection of SNP TSC0006957
ggggagtatatty

SEQ ID NO: 26412 - DNA, 13 bp, Artificial Sequence
  Oligonucleotide for detection of SNP TSC0006957
raatatactcccc

SEQ ID NO: 26413 - DNA, 13 bp, Artificial Sequence
  Oligonucleotide for detection of SNP TSC0006957
gaatattttttty

SEQ ID NO: 26414 - DNA, 13 bp, Artificial Sequence
  Oligonucleotide for detection of SNP TSC0006957
raaaaaaatattc

SEQ ID NO: 26415 - DNA, 13 bp, Artificial Sequence
  Oligonucleotide for detection of SNP TSC0006957
gaatatgttttty

SEQ ID NO: 26416 - DNA, 13 bp, Artificial Sequence
  Oligonucleotide for detection of SNP TSC0006957
raaaaacatattc

SEQ ID NO: 26417 - DNA, 13 bp, Artificial Sequence
  Oligonucleotide for detection of SNP TSC0006958
tttgtaatatgtt

SEQ ID NO: 26418 - DNA, 13 bp, Artificial Sequence
  Oligonucleotide for detection of SNP TSC0006958
aacatattacaaa

SEQ ID NO: 26419 - DNA, 13 bp, Artificial Sequence
  Oligonucleotide for detection of SNP TSC0006958
tttgtagtatgtt

SEQ ID NO: 26420 - DNA, 13 bp, Artificial Sequence
  Oligonucleotide for detection of SNP TSC0006958
aacatactacaaa

SEQ ID NO: 26421 - DNA, 13 bp, Artificial Sequence
  Oligonucleotide for detection of SNP TSC0006964
tttttgagtaggg

SEQ ID NO: 26422 - DNA, 13 bp, Artificial Sequence
  Oligonucleotide for detection of SNP TSC0006964
ccctactcaaaaa

SEQ ID NO: 26423 - DNA, 13 bp, Artificial Sequence
  Oligonucleotide for detection of SNP TSC0006964
tttttgggtaggg

SEQ ID NO: 26424 - DNA, 13 bp, Artificial Sequence
  Oligonucleotide for detection of SNP TSC0006964
ccctacccaaaaa

SEQ ID NO: 26425 - DNA, 13 bp, Artificial Sequence
  Oligonucleotide for detection of SNP TSC0006965
ttagagatataaa

SEQ ID NO: 26426 - DNA, 13 bp, Artificial Sequence
  Oligonucleotide for detection of SNP TSC0006965
tttatatctctaa

SEQ ID NO: 26427 - DNA, 13 bp, Artificial Sequence
  Oligonucleotide for detection of SNP TSC0006965
ttagaggtataaa

SEQ ID NO: 26428 - DNA, 13 bp, Artificial Sequence
  Oligonucleotide for detection of SNP TSC0006965
tttatacctctaa

SEQ ID NO: 26429 - DNA, 13 bp, Artificial Sequence
  Oligonucleotide for detection of SNP TSC0006966
agatggaggagaa

SEQ ID NO: 26430 - DNA, 13 bp, Artificial Sequence
  Oligonucleotide for detection of SNP TSC0006966
ttctcctccatct

SEQ ID NO: 26431 - DNA, 13 bp, Artificial Sequence
  Oligonucleotide for detection of SNP TSC0006966
agatgggggagaa

SEQ ID NO: 26432 - DNA, 13 bp, Artificial Sequence
  Oligonucleotide for detection of SNP TSC0006966
ttctcccccatct

SEQ ID NO: 26433 - DNA, 13 bp, Artificial Sequence
  Oligonucleotide for detection of SNP TSC0006974
agagagggtttta

SEQ ID NO: 26434 - DNA, 13 bp, Artificial Sequence
  Oligonucleotide for detection of SNP TSC0006974
taaaaccctctct

SEQ ID NO: 26435 - DNA, 13 bp, Artificial Sequence
  Oligonucleotide for detection of SNP TSC0006974
agagagagtttta

SEQ ID NO: 26436 - DNA, 13 bp, Artificial Sequence
  Oligonucleotide for detection of SNP TSC0006974
taaaactctctct

SEQ ID NO: 26437 - DNA, 13 bp, Artificial Sequence
  Oligonucleotide for detection of SNP TSC0006983
agattttgtggag

SEQ ID NO: 26438 - DNA, 13 bp, Artificial Sequence
  Oligonucleotide for detection of SNP TSC0006983
ctccacaaaatct

SEQ ID NO: 26439 - DNA, 13 bp, Artificial Sequence
  Oligonucleotide for detection of SNP TSC0006983
agatttcgtggag

SEQ ID NO: 26440 - DNA, 13 bp, Artificial Sequence
  Oligonucleotide for detection of SNP TSC0006983
ctccacgaaatct

SEQ ID NO: 26441 - DNA, 13 bp, Artificial Sequence
  Oligonucleotide for detection of SNP TSC0006983
ttttatgggattt

SEQ ID NO: 26442 - DNA, 13 bp, Artificial Sequence
  Oligonucleotide for detection of SNP TSC0006983
aaatcccataaaa

SEQ ID NO: 26443 - DNA, 13 bp, Artificial Sequence
  Oligonucleotide for detection of SNP TSC0006983
ttttataggattt

SEQ ID NO: 26444 - DNA, 13 bp, Artificial Sequence
  Oligonucleotide for detection of SNP TSC0006983
aaatcctataaaa

SEQ ID NO: 26445 - DNA, 13 bp, Artificial Sequence
  Oligonucleotide for detection of SNP TSC0006983
ttttacgggattt

SEQ ID NO: 26446 - DNA, 13 bp, Artificial Sequence
  Oligonucleotide for detection of SNP TSC0006983
aaatcccgtaaaa

SEQ ID NO: 26447 - DNA, 13 bp, Artificial Sequence
  Oligonucleotide for detection of SNP TSC0007002
tttttaggttaty

SEQ ID NO: 26448 - DNA, 13 bp, Artificial Sequence
  Oligonucleotide for detection of SNP TSC0007002
rataacctaaaaa

SEQ ID NO: 26449 - DNA, 13 bp, Artificial Sequence
  Oligonucleotide for detection of SNP TSC0007002
tttttaagttaty

SEQ ID NO: 26450 - DNA, 13 bp, Artificial Sequence
  Oligonucleotide for detection of SNP TSC0007002
rataacttaaaaa

SEQ ID NO: 26451 - DNA, 13 bp, Artificial Sequence
  Oligonucleotide for detection of SNP TSC0007003
ttgtaggtgtata

SEQ ID NO: 26452 - DNA, 13 bp, Artificial Sequence
  Oligonucleotide for detection of SNP TSC0007003
tatacacctacaa

SEQ ID NO: 26453 - DNA, 13 bp, Artificial Sequence
  Oligonucleotide for detection of SNP TSC0007003
ttgtagttgtata

SEQ ID NO: 26454 - DNA, 13 bp, Artificial Sequence
  Oligonucleotide for detection of SNP TSC0007003
tatacaactacaa

SEQ ID NO: 26455 - DNA, 13 bp, Artificial Sequence
  Oligonucleotide for detection of SNP TSC0007003
tgtatatttataa

SEQ ID NO: 26456 - DNA, 13 bp, Artificial Sequence
  Oligonucleotide for detection of SNP TSC0007003
ttataaatataca

SEQ ID NO: 26457 - DNA, 13 bp, Artificial Sequence
  Oligonucleotide for detection of SNP TSC0007003
tgtataattataa

SEQ ID NO: 26458 - DNA, 13 bp, Artificial Sequence
  Oligonucleotide for detection of SNP TSC0007003
ttataattataca

SEQ ID NO: 26459 - DNA, 13 bp, Artificial Sequence
  Oligonucleotide for detection of SNP TSC0007009
tagggtgtgtgta

SEQ ID NO: 26460 - DNA, 13 bp, Artificial Sequence
  Oligonucleotide for detection of SNP TSC0007009
tacacacacccta

SEQ ID NO: 26461 - DNA, 13 bp, Artificial Sequence
  Oligonucleotide for detection of SNP TSC0007009
tagggtttgtgta

SEQ ID NO: 26462 - DNA, 13 bp, Artificial Sequence
  Oligonucleotide for detection of SNP TSC0007009
tacacaaacccta

SEQ ID NO: 26463 - DNA, 13 bp, Artificial Sequence
  Oligonucleotide for detection of SNP TSC0007009
tatatatattttg

SEQ ID NO: 26464 - DNA, 13 bp, Artificial Sequence
  Oligonucleotide for detection of SNP TSC0007009
caaaatatatata

SEQ ID NO: 26465 - DNA, 13 bp, Artificial Sequence
  Oligonucleotide for detection of SNP TSC0007009
tatataaattttg

SEQ ID NO: 26466 - DNA, 13 bp, Artificial Sequence
  Oligonucleotide for detection of SNP TSC0007009
caaaatttatata

SEQ ID NO: 26467 - DNA, 13 bp, Artificial Sequence
  Oligonucleotide for detection of SNP TSC0007010
gtgtgttgtatat

SEQ ID NO: 26468 - DNA, 13 bp, Artificial Sequence
  Oligonucleotide for detection of SNP TSC0007010
atatacaacacac

SEQ ID NO: 26469 - DNA, 13 bp, Artificial Sequence
  Oligonucleotide for detection of SNP TSC0007010
gtgtgtcgtatat

SEQ ID NO: 26470 - DNA, 13 bp, Artificial Sequence
  Oligonucleotide for detection of SNP TSC0007010
atatacgacacac

SEQ ID NO: 26471 - DNA, 13 bp, Artificial Sequence
  Oligonucleotide for detection of SNP TSC0007010
atatgtgatatay

SEQ ID NO: 26472 - DNA, 13 bp, Artificial Sequence
  Oligonucleotide for detection of SNP TSC0007010
rtatatcacatat

SEQ ID NO: 26473 - DNA, 13 bp, Artificial Sequence
  Oligonucleotide for detection of SNP TSC0007010
atatgtaatatay

SEQ ID NO: 26474 - DNA, 13 bp, Artificial Sequence
  Oligonucleotide for detection of SNP TSC0007010
rtatattacatat

SEQ ID NO: 26475 - DNA, 13 bp, Artificial Sequence
  Oligonucleotide for detection of SNP TSC0007010
atatgcgatatay

SEQ ID NO: 26476 - DNA, 13 bp, Artificial Sequence
  Oligonucleotide for detection of SNP TSC0007010
rtatatcgcatat

SEQ ID NO: 26477 - DNA, 13 bp, Artificial Sequence
  Oligonucleotide for detection of SNP TSC0007011
gaatgaggtttty

SEQ ID NO: 26478 - DNA, 13 bp, Artificial Sequence
  Oligonucleotide for detection of SNP TSC0007011
raaaacctcattc

SEQ ID NO: 26479 - DNA, 13 bp, Artificial Sequence
  Oligonucleotide for detection of SNP TSC0007011
gaatgaagtttty

SEQ ID NO: 26480 - DNA, 13 bp, Artificial Sequence
  Oligonucleotide for detection of SNP TSC0007011
raaaacttcattc

SEQ ID NO: 26481 - DNA, 13 bp, Artificial Sequence
  Oligonucleotide for detection of SNP TSC0007020
aattttaattatt

SEQ ID NO: 26482 - DNA, 13 bp, Artificial Sequence
  Oligonucleotide for detection of SNP TSC0007020
aataattaaaatt

SEQ ID NO: 26483 - DNA, 13 bp, Artificial Sequence
  Oligonucleotide for detection of SNP TSC0007020
aattttgattatt

SEQ ID NO: 26484 - DNA, 13 bp, Artificial Sequence
  Oligonucleotide for detection of SNP TSC0007020
aataatcaaaatt

SEQ ID NO: 26485 - DNA, 13 bp, Artificial Sequence
  Oligonucleotide for detection of SNP TSC0007020
aatttcgattatt

SEQ ID NO: 26486 - DNA, 13 bp, Artificial Sequence
  Oligonucleotide for detection of SNP TSC0007020
aataatcgaaatt

SEQ ID NO: 26487 - DNA, 13 bp, Artificial Sequence
  Oligonucleotide for detection of SNP TSC0007020
aatggttggaatt

SEQ ID NO: 26488 - DNA, 13 bp, Artificial Sequence
  Oligonucleotide for detection of SNP TSC0007020
aattccaaccatt

SEQ ID NO: 26489 - DNA, 13 bp, Artificial Sequence
  Oligonucleotide for detection of SNP TSC0007020
aatggtcggaatt

SEQ ID NO: 26490 - DNA, 13 bp, Artificial Sequence
  Oligonucleotide for detection of SNP TSC0007020
aattccgaccatt

SEQ ID NO: 26491 - DNA, 13 bp, Artificial Sequence
  Oligonucleotide for detection of SNP TSC0007021
aggatatttattt

SEQ ID NO: 26492 - DNA, 13 bp, Artificial Sequence
  Oligonucleotide for detection of SNP TSC0007021
aaataaatatcct

SEQ ID NO: 26493 - DNA, 13 bp, Artificial Sequence
  Oligonucleotide for detection of SNP TSC0007021
aggatagttattt

SEQ ID NO: 26494 - DNA, 13 bp, Artificial Sequence
  Oligonucleotide for detection of SNP TSC0007021
aaataactatcct

SEQ ID NO: 26495 - DNA, 13 bp, Artificial Sequence
  Oligonucleotide for detection of SNP TSC0007021
agataggtgtttt

SEQ ID NO: 26496 - DNA, 13 bp, Artificial Sequence
  Oligonucleotide for detection of SNP TSC0007021
aaaacacctatct

SEQ ID NO: 26497 - DNA, 13 bp, Artificial Sequence
  Oligonucleotide for detection of SNP TSC0007021
agatagttgtttt

SEQ ID NO: 26498 - DNA, 13 bp, Artificial Sequence
  Oligonucleotide for detection of SNP TSC0007021
aaaacaactatct

SEQ ID NO: 26499 - DNA, 13 bp, Artificial Sequence
  Oligonucleotide for detection of SNP TSC0007041
tttttaaggaagg

SEQ ID NO: 26500 - DNA, 13 bp, Artificial Sequence
  Oligonucleotide for detection of SNP TSC0007041
ccttccttaaaaa

SEQ ID NO: 26501 - DNA, 13 bp, Artificial Sequence
  Oligonucleotide for detection of SNP TSC0007041
tttttagggaagg

SEQ ID NO: 26502 - DNA, 13 bp, Artificial Sequence
  Oligonucleotide for detection of SNP TSC0007041
ccttccctaaaaa

SEQ ID NO: 26503 - DNA, 13 bp, Artificial Sequence
  Oligonucleotide for detection of SNP TSC0007042
ggtttttggatat

SEQ ID NO: 26504 - DNA, 13 bp, Artificial Sequence
  Oligonucleotide for detection of SNP TSC0007042
atatccaaaaacc

SEQ ID NO: 26505 - DNA, 13 bp, Artificial Sequence
  Oligonucleotide for detection of SNP TSC0007042
ggttttcggatat

SEQ ID NO: 26506 - DNA, 13 bp, Artificial Sequence
  Oligonucleotide for detection of SNP TSC0007042
atatccgaaaacc

SEQ ID NO: 26507 - DNA, 13 bp, Artificial Sequence
  Oligonucleotide for detection of SNP TSC0007042
atatttgggagty

SEQ ID NO: 26508 - DNA, 13 bp, Artificial Sequence
  Oligonucleotide for detection of SNP TSC0007042
ractcccaaatat

SEQ ID NO: 26509 - DNA, 13 bp, Artificial Sequence
  Oligonucleotide for detection of SNP TSC0007042
atatttaggagty

SEQ ID NO: 26510 - DNA, 13 bp, Artificial Sequence
  Oligonucleotide for detection of SNP TSC0007042
ractcctaaatat

SEQ ID NO: 26511 - DNA, 13 bp, Artificial Sequence
  Oligonucleotide for detection of SNP TSC0007042
atattcgggagty

SEQ ID NO: 26512 - DNA, 13 bp, Artificial Sequence
  Oligonucleotide for detection of SNP TSC0007042
ractcccgaatat

SEQ ID NO: 26513 - DNA, 13 bp, Artificial Sequence
  Oligonucleotide for detection of SNP TSC0007048
gatattataatty

SEQ ID NO: 26514 - DNA, 13 bp, Artificial Sequence
  Oligonucleotide for detection of SNP TSC0007048
raattataatatc

SEQ ID NO: 26515 - DNA, 13 bp, Artificial Sequence
  Oligonucleotide for detection of SNP TSC0007048
gatattttaatty

SEQ ID NO: 26516 - DNA, 13 bp, Artificial Sequence
  Oligonucleotide for detection of SNP TSC0007048
raattaaaatatc

SEQ ID NO: 26517 - DNA, 13 bp, Artificial Sequence
  Oligonucleotide for detection of SNP TSC0007048
gaattgtaataty

SEQ ID NO: 26518 - DNA, 13 bp, Artificial Sequence
  Oligonucleotide for detection of SNP TSC0007048
ratattacaattc

SEQ ID NO: 26519 - DNA, 13 bp, Artificial Sequence
  Oligonucleotide for detection of SNP TSC0007048
gaattgaaataty

SEQ ID NO: 26520 - DNA, 13 bp, Artificial Sequence
  Oligonucleotide for detection of SNP TSC0007048
ratatttcaattc

SEQ ID NO: 26521 - DNA, 13 bp, Artificial Sequence
  Oligonucleotide for detection of SNP TSC0007049
gaataatgattgg

SEQ ID NO: 26522 - DNA, 13 bp, Artificial Sequence
  Oligonucleotide for detection of SNP TSC0007049
ccaatcattattc

SEQ ID NO: 26523 - DNA, 13 bp, Artificial Sequence
  Oligonucleotide for detection of SNP TSC0007049
gaataacgattgg

SEQ ID NO: 26524 - DNA, 13 bp, Artificial Sequence
  Oligonucleotide for detection of SNP TSC0007049
ccaatcgttattc

SEQ ID NO: 26525 - DNA, 13 bp, Artificial Sequence
  Oligonucleotide for detection of SNP TSC0007049
ttagttgttatty

SEQ ID NO: 26526 - DNA, 13 bp, Artificial Sequence
  Oligonucleotide for detection of SNP TSC0007049
raataacaactaa

SEQ ID NO: 26527 - DNA, 13 bp, Artificial Sequence
  Oligonucleotide for detection of SNP TSC0007049
ttagttattatty

SEQ ID NO: 26528 - DNA, 13 bp, Artificial Sequence
  Oligonucleotide for detection of SNP TSC0007049
raataataactaa

SEQ ID NO: 26529 - DNA, 13 bp, Artificial Sequence
  Oligonucleotide for detection of SNP TSC0007049
ttagtcgttatty

SEQ ID NO: 26530 - DNA, 13 bp, Artificial Sequence
  Oligonucleotide for detection of SNP TSC0007049
raataacgactaa

SEQ ID NO: 26531 - DNA, 13 bp, Artificial Sequence
  Oligonucleotide for detection of SNP TSC0007050
atttttgaaaaaa

SEQ ID NO: 26532 - DNA, 13 bp, Artificial Sequence
  Oligonucleotide for detection of SNP TSC0007050
ttttttcaaaaat

SEQ ID NO: 26533 - DNA, 13 bp, Artificial Sequence
  Oligonucleotide for detection of SNP TSC0007050
tttttttgggggt

SEQ ID NO: 26534 - DNA, 13 bp, Artificial Sequence
  Oligonucleotide for detection of SNP TSC0007050
acccccaaaaaaa

SEQ ID NO: 26535 - DNA, 13 bp, Artificial Sequence
  Oligonucleotide for detection of SNP TSC0007050
ttttttcgggggt

SEQ ID NO: 26536 - DNA, 13 bp, Artificial Sequence
  Oligonucleotide for detection of SNP TSC0007050
acccccgaaaaaa

SEQ ID NO: 26537 - DNA, 13 bp, Artificial Sequence
  Oligonucleotide for detection of SNP TSC0007051
ggagtttggttay

SEQ ID NO: 26538 - DNA, 13 bp, Artificial Sequence
  Oligonucleotide for detection of SNP TSC0007051
rtaaccaaactcc

SEQ ID NO: 26539 - DNA, 13 bp, Artificial Sequence
  Oligonucleotide for detection of SNP TSC0007051
ggagttcggttay

SEQ ID NO: 26540 - DNA, 13 bp, Artificial Sequence
  Oligonucleotide for detection of SNP TSC0007051
rtaaccgaactcc

SEQ ID NO: 26541 - DNA, 13 bp, Artificial Sequence
  Oligonucleotide for detection of SNP TSC0007051
gtagttgaattty

SEQ ID NO: 26542 - DNA, 13 bp, Artificial Sequence
  Oligonucleotide for detection of SNP TSC0007051
raaattcaactac

SEQ ID NO: 26543 - DNA, 13 bp, Artificial Sequence
  Oligonucleotide for detection of SNP TSC0007051
gtagttaaattty

SEQ ID NO: 26544 - DNA, 13 bp, Artificial Sequence
  Oligonucleotide for detection of SNP TSC0007051
raaatttaactac

SEQ ID NO: 26545 - DNA, 13 bp, Artificial Sequence
  Oligonucleotide for detection of SNP TSC0007051
gtagtcgaattty

SEQ ID NO: 26546 - DNA, 13 bp, Artificial Sequence
  Oligonucleotide for detection of SNP TSC0007051
raaattcgactac

SEQ ID NO: 26547 - DNA, 13 bp, Artificial Sequence
  Oligonucleotide for detection of SNP TSC0007060
atgtttatttggy

SEQ ID NO: 26548 - DNA, 13 bp, Artificial Sequence
  Oligonucleotide for detection of SNP TSC0007060
rccaaataaacat

SEQ ID NO: 26549 - DNA, 13 bp, Artificial Sequence
  Oligonucleotide for detection of SNP TSC0007060
atgtttttttggy

SEQ ID NO: 26550 - DNA, 13 bp, Artificial Sequence
  Oligonucleotide for detection of SNP TSC0007060
rccaaaaaaacat

SEQ ID NO: 26551 - DNA, 13 bp, Artificial Sequence
  Oligonucleotide for detection of SNP TSC0007060
gttagataagtat

SEQ ID NO: 26552 - DNA, 13 bp, Artificial Sequence
  Oligonucleotide for detection of SNP TSC0007060
atacttatctaac

SEQ ID NO: 26553 - DNA, 13 bp, Artificial Sequence
  Oligonucleotide for detection of SNP TSC0007060
gttagagaagtat

SEQ ID NO: 26554 - DNA, 13 bp, Artificial Sequence
  Oligonucleotide for detection of SNP TSC0007060
atacttctctaac

SEQ ID NO: 26555 - DNA, 13 bp, Artificial Sequence
  Oligonucleotide for detection of SNP TSC0007063
aagagagagtgtg

SEQ ID NO: 26556 - DNA, 13 bp, Artificial Sequence
  Oligonucleotide for detection of SNP TSC0007063
cacactctctctt

SEQ ID NO: 26557 - DNA, 13 bp, Artificial Sequence
  Oligonucleotide for detection of SNP TSC0007063
aagagatagtgtg

SEQ ID NO: 26558 - DNA, 13 bp, Artificial Sequence
  Oligonucleotide for detection of SNP TSC0007063
cacactatctctt

SEQ ID NO: 26559 - DNA, 13 bp, Artificial Sequence
  Oligonucleotide for detection of SNP TSC0007068
tgttttatatttt

SEQ ID NO: 26560 - DNA, 13 bp, Artificial Sequence
  Oligonucleotide for detection of SNP TSC0007068
aaaatataaaaca

SEQ ID NO: 26561 - DNA, 13 bp, Artificial Sequence
  Oligonucleotide for detection of SNP TSC0007068
tgttttgtatttt

SEQ ID NO: 26562 - DNA, 13 bp, Artificial Sequence
  Oligonucleotide for detection of SNP TSC0007068
aaaatacaaaaca

SEQ ID NO: 26563 - DNA, 13 bp, Artificial Sequence
  Oligonucleotide for detection of SNP TSC0007068
tgtttcgtatttt

SEQ ID NO: 26564 - DNA, 13 bp, Artificial Sequence
  Oligonucleotide for detection of SNP TSC0007068
aaaatacgaaaca

SEQ ID NO: 26565 - DNA, 13 bp, Artificial Sequence
  Oligonucleotide for detection of SNP TSC0007068
agaatgtgaaata

SEQ ID NO: 26566 - DNA, 13 bp, Artificial Sequence
  Oligonucleotide for detection of SNP TSC0007068
tatttcacattct

SEQ ID NO: 26567 - DNA, 13 bp, Artificial Sequence
  Oligonucleotide for detection of SNP TSC0007068
agaatgcgaaata

SEQ ID NO: 26568 - DNA, 13 bp, Artificial Sequence
  Oligonucleotide for detection of SNP TSC0007068
tatttcgcattct

SEQ ID NO: 26569 - DNA, 13 bp, Artificial Sequence
  Oligonucleotide for detection of SNP TSC0007069
aataaatggatgy

SEQ ID NO: 26570 - DNA, 13 bp, Artificial Sequence
  Oligonucleotide for detection of SNP TSC0007069
rcatccatttatt

SEQ ID NO: 26571 - DNA, 13 bp, Artificial Sequence
  Oligonucleotide for detection of SNP TSC0007069
aataaacggatgy

SEQ ID NO: 26572 - DNA, 13 bp, Artificial Sequence
  Oligonucleotide for detection of SNP TSC0007069
rcatccgtttatt

SEQ ID NO: 26573 - DNA, 13 bp, Artificial Sequence
  Oligonucleotide for detection of SNP TSC0007069
gtatttgtttatt

SEQ ID NO: 26574 - DNA, 13 bp, Artificial Sequence
  Oligonucleotide for detection of SNP TSC0007069
aataaacaaatac

SEQ ID NO: 26575 - DNA, 13 bp, Artificial Sequence
  Oligonucleotide for detection of SNP TSC0007069
gtatttatttatt

SEQ ID NO: 26576 - DNA, 13 bp, Artificial Sequence
  Oligonucleotide for detection of SNP TSC0007069
aataaataaatac

SEQ ID NO: 26577 - DNA, 13 bp, Artificial Sequence
  Oligonucleotide for detection of SNP TSC0007069
gtattcgtttatt

SEQ ID NO: 26578 - DNA, 13 bp, Artificial Sequence
  Oligonucleotide for detection of SNP TSC0007069
aataaacgaatac

SEQ ID NO: 26579 - DNA, 13 bp, Artificial Sequence
  Oligonucleotide for detection of SNP TSC0007076
ttattaattgtgt

SEQ ID NO: 26580 - DNA, 13 bp, Artificial Sequence
  Oligonucleotide for detection of SNP TSC0007076
acacaattaataa

SEQ ID NO: 26581 - DNA, 13 bp, Artificial Sequence
  Oligonucleotide for detection of SNP TSC0007076
ttattatttgtgt

SEQ ID NO: 26582 - DNA, 13 bp, Artificial Sequence
  Oligonucleotide for detection of SNP TSC0007076
acacaaataataa

SEQ ID NO: 26583 - DNA, 13 bp, Artificial Sequence
  Oligonucleotide for detection of SNP TSC0007076
atatagttaataa

SEQ ID NO: 26584 - DNA, 13 bp, Artificial Sequence
  Oligonucleotide for detection of SNP TSC0007076
ttattaactatat

SEQ ID NO: 26585 - DNA, 13 bp, Artificial Sequence
  Oligonucleotide for detection of SNP TSC0007076
atatagataataa

SEQ ID NO: 26586 - DNA, 13 bp, Artificial Sequence
  Oligonucleotide for detection of SNP TSC0007076
ttattatctatat

SEQ ID NO: 26587 - DNA, 13 bp, Artificial Sequence
  Oligonucleotide for detection of SNP TSC0007082
gttttttgtttty

SEQ ID NO: 26588 - DNA, 13 bp, Artificial Sequence
  Oligonucleotide for detection of SNP TSC0007082
raaaacaaaaaac

SEQ ID NO: 26589 - DNA, 13 bp, Artificial Sequence
  Oligonucleotide for detection of SNP TSC0007082
gtttttcgtttty

SEQ ID NO: 26590 - DNA, 13 bp, Artificial Sequence
  Oligonucleotide for detection of SNP TSC0007082
raaaacgaaaaac

SEQ ID NO: 26591 - DNA, 13 bp, Artificial Sequence
  Oligonucleotide for detection of SNP TSC0007082
ggaaattgagggy

SEQ ID NO: 26592 - DNA, 13 bp, Artificial Sequence
  Oligonucleotide for detection of SNP TSC0007082
rccctcaatttcc

SEQ ID NO: 26593 - DNA, 13 bp, Artificial Sequence
  Oligonucleotide for detection of SNP TSC0007082
ggaaatggagggy

SEQ ID NO: 26594 - DNA, 13 bp, Artificial Sequence
  Oligonucleotide for detection of SNP TSC0007082
rccctccatttcc

SEQ ID NO: 26595 - DNA, 13 bp, Artificial Sequence
  Oligonucleotide for detection of SNP TSC0007082
ggaaacggagggy

SEQ ID NO: 26596 - DNA, 13 bp, Artificial Sequence
  Oligonucleotide for detection of SNP TSC0007082
rccctccgtttcc

SEQ ID NO: 26597 - DNA, 13 bp, Artificial Sequence
  Oligonucleotide for detection of SNP TSC0007084
ttaagatgaaatt

SEQ ID NO: 26598 - DNA, 13 bp, Artificial Sequence
  Oligonucleotide for detection of SNP TSC0007084
aatttcatcttaa

SEQ ID NO: 26599 - DNA, 13 bp, Artificial Sequence
  Oligonucleotide for detection of SNP TSC0007084
ttaagacgaaatt

SEQ ID NO: 26600 - DNA, 13 bp, Artificial Sequence
  Oligonucleotide for detection of SNP TSC0007084
aatttcgtcttaa

SEQ ID NO: 26601 - DNA, 13 bp, Artificial Sequence
  Oligonucleotide for detection of SNP TSC0007084
agttttgttttga

SEQ ID NO: 26602 - DNA, 13 bp, Artificial Sequence
  Oligonucleotide for detection of SNP TSC0007084
tcaaaacaaaact

SEQ ID NO: 26603 - DNA, 13 bp, Artificial Sequence
  Oligonucleotide for detection of SNP TSC0007084
agttttattttga

SEQ ID NO: 26604 - DNA, 13 bp, Artificial Sequence
  Oligonucleotide for detection of SNP TSC0007084
tcaaaataaaact

SEQ ID NO: 26605 - DNA, 13 bp, Artificial Sequence
  Oligonucleotide for detection of SNP TSC0007084
agtttcgttttga

SEQ ID NO: 26606 - DNA, 13 bp, Artificial Sequence
  Oligonucleotide for detection of SNP TSC0007084
tcaaaacgaaact

SEQ ID NO: 26607 - DNA, 13 bp, Artificial Sequence
  Oligonucleotide for detection of SNP TSC0007089
tagaaaatagagg

SEQ ID NO: 26608 - DNA, 13 bp, Artificial Sequence
  Oligonucleotide for detection of SNP TSC0007089
cctctattttcta

SEQ ID NO: 26609 - DNA, 13 bp, Artificial Sequence
  Oligonucleotide for detection of SNP TSC0007089
tagaaagtagagg

SEQ ID NO: 26610 - DNA, 13 bp, Artificial Sequence
  Oligonucleotide for detection of SNP TSC0007089
cctctactttcta

SEQ ID NO: 26611 - DNA, 13 bp, Artificial Sequence
  Oligonucleotide for detection of SNP TSC0007093
ttatttatattgt

SEQ ID NO: 26612 - DNA, 13 bp, Artificial Sequence
  Oligonucleotide for detection of SNP TSC0007093
acaatataaataa

SEQ ID NO: 26613 - DNA, 13 bp, Artificial Sequence
  Oligonucleotide for detection of SNP TSC0007093
ttatttgtattgt

SEQ ID NO: 26614 - DNA, 13 bp, Artificial Sequence
  Oligonucleotide for detection of SNP TSC0007093
acaatacaaataa

SEQ ID NO: 26615 - DNA, 13 bp, Artificial Sequence
  Oligonucleotide for detection of SNP TSC0007093
ttattcgtattgt

SEQ ID NO: 26616 - DNA, 13 bp, Artificial Sequence
  Oligonucleotide for detection of SNP TSC0007093
acaatacgaataa

SEQ ID NO: 26617 - DNA, 13 bp, Artificial Sequence
  Oligonucleotide for detection of SNP TSC0007093
ataatatggatgg

SEQ ID NO: 26618 - DNA, 13 bp, Artificial Sequence
  Oligonucleotide for detection of SNP TSC0007093
ccatccatattat

SEQ ID NO: 26619 - DNA, 13 bp, Artificial Sequence
  Oligonucleotide for detection of SNP TSC0007093
ataatacggatgg

SEQ ID NO: 26620 - DNA, 13 bp, Artificial Sequence
  Oligonucleotide for detection of SNP TSC0007093
ccatccgtattat

SEQ ID NO: 26621 - DNA, 13 bp, Artificial Sequence
  Oligonucleotide for detection of SNP TSC0007096
gttttttgttagt

SEQ ID NO: 26622 - DNA, 13 bp, Artificial Sequence
  Oligonucleotide for detection of SNP TSC0007096
actaacaaaaaac

SEQ ID NO: 26623 - DNA, 13 bp, Artificial Sequence
  Oligonucleotide for detection of SNP TSC0007096
gtttttcgttagt

SEQ ID NO: 26624 - DNA, 13 bp, Artificial Sequence
  Oligonucleotide for detection of SNP TSC0007096
actaacgaaaaac

SEQ ID NO: 26625 - DNA, 13 bp, Artificial Sequence
  Oligonucleotide for detection of SNP TSC0007096
attggtggaggay

SEQ ID NO: 26626 - DNA, 13 bp, Artificial Sequence
  Oligonucleotide for detection of SNP TSC0007096
rtcctccaccaat

SEQ ID NO: 26627 - DNA, 13 bp, Artificial Sequence
  Oligonucleotide for detection of SNP TSC0007096
attggtagaggay

SEQ ID NO: 26628 - DNA, 13 bp, Artificial Sequence
  Oligonucleotide for detection of SNP TSC0007096
rtcctctaccaat

SEQ ID NO: 26629 - DNA, 13 bp, Artificial Sequence
  Oligonucleotide for detection of SNP TSC0007096
attggcggaggay

SEQ ID NO: 26630 - DNA, 13 bp, Artificial Sequence
  Oligonucleotide for detection of SNP TSC0007096
rtcctccgccaat

SEQ ID NO: 26631 - DNA, 13 bp, Artificial Sequence
  Oligonucleotide for detection of SNP TSC0007097
gatattgttaatt

SEQ ID NO: 26632 - DNA, 13 bp, Artificial Sequence
  Oligonucleotide for detection of SNP TSC0007097
aattaacaatatc

SEQ ID NO: 26633 - DNA, 13 bp, Artificial Sequence
  Oligonucleotide for detection of SNP TSC0007097
gatatttttaatt

SEQ ID NO: 26634 - DNA, 13 bp, Artificial Sequence
  Oligonucleotide for detection of SNP TSC0007097
aattaaaaatatc

SEQ ID NO: 26635 - DNA, 13 bp, Artificial Sequence
  Oligonucleotide for detection of SNP TSC0007097
gatatcgttaatt

SEQ ID NO: 26636 - DNA, 13 bp, Artificial Sequence
  Oligonucleotide for detection of SNP TSC0007097
aattaacgatatc

SEQ ID NO: 26637 - DNA, 13 bp, Artificial Sequence
  Oligonucleotide for detection of SNP TSC0007097
agttaatgatgty

SEQ ID NO: 26638 - DNA, 13 bp, Artificial Sequence
  Oligonucleotide for detection of SNP TSC0007097
racatcattaact

SEQ ID NO: 26639 - DNA, 13 bp, Artificial Sequence
  Oligonucleotide for detection of SNP TSC0007097
agttaaagatgty

SEQ ID NO: 26640 - DNA, 13 bp, Artificial Sequence
  Oligonucleotide for detection of SNP TSC0007097
racatctttaact

SEQ ID NO: 26641 - DNA, 13 bp, Artificial Sequence
  Oligonucleotide for detection of SNP TSC0007097
agttaacgatgty

SEQ ID NO: 26642 - DNA, 13 bp, Artificial Sequence
  Oligonucleotide for detection of SNP TSC0007097
racatcgttaact

SEQ ID NO: 26643 - DNA, 13 bp, Artificial Sequence
  Oligonucleotide for detection of SNP TSC0007098
gattgaatgtatt

SEQ ID NO: 26644 - DNA, 13 bp, Artificial Sequence
  Oligonucleotide for detection of SNP TSC0007098
aatacattcaatc

SEQ ID NO: 26645 - DNA, 13 bp, Artificial Sequence
  Oligonucleotide for detection of SNP TSC0007098
gattgattgtatt

SEQ ID NO: 26646 - DNA, 13 bp, Artificial Sequence
  Oligonucleotide for detection of SNP TSC0007098
aatacaatcaatc

SEQ ID NO: 26647 - DNA, 13 bp, Artificial Sequence
  Oligonucleotide for detection of SNP TSC0007098
aatatatttaaty

SEQ ID NO: 26648 - DNA, 13 bp, Artificial Sequence
  Oligonucleotide for detection of SNP TSC0007098
rattaaatatatt

SEQ ID NO: 26649 - DNA, 13 bp, Artificial Sequence
  Oligonucleotide for detection of SNP TSC0007098
aatatagttaaty

SEQ ID NO: 26650 - DNA, 13 bp, Artificial Sequence
  Oligonucleotide for detection of SNP TSC0007098
rattaactatatt

SEQ ID NO: 26651 - DNA, 13 bp, Artificial Sequence
  Oligonucleotide for detection of SNP TSC0007099
gtgtagtgtttat

SEQ ID NO: 26652 - DNA, 13 bp, Artificial Sequence
  Oligonucleotide for detection of SNP TSC0007099
ataaacactacac

SEQ ID NO: 26653 - DNA, 13 bp, Artificial Sequence
  Oligonucleotide for detection of SNP TSC0007099
gtgtagcgtttat

SEQ ID NO: 26654 - DNA, 13 bp, Artificial Sequence
  Oligonucleotide for detection of SNP TSC0007099
ataaacgctacac

SEQ ID NO: 26655 - DNA, 13 bp, Artificial Sequence
  Oligonucleotide for detection of SNP TSC0007099
atggatgttgtay

SEQ ID NO: 26656 - DNA, 13 bp, Artificial Sequence
  Oligonucleotide for detection of SNP TSC0007099
rtacaacatccat

SEQ ID NO: 26657 - DNA, 13 bp, Artificial Sequence
  Oligonucleotide for detection of SNP TSC0007099
atggatattgtay

SEQ ID NO: 26658 - DNA, 13 bp, Artificial Sequence
  Oligonucleotide for detection of SNP TSC0007099
rtacaatatccat

SEQ ID NO: 26659 - DNA, 13 bp, Artificial Sequence
  Oligonucleotide for detection of SNP TSC0007099
atggacgttgtay

SEQ ID NO: 26660 - DNA, 13 bp, Artificial Sequence
  Oligonucleotide for detection of SNP TSC0007099
rtacaacgtccat

SEQ ID NO: 26661 - DNA, 13 bp, Artificial Sequence
  Oligonucleotide for detection of SNP TSC0007114
gttgtaggagttt

SEQ ID NO: 26662 - DNA, 13 bp, Artificial Sequence
  Oligonucleotide for detection of SNP TSC0007114
aaactcctacaac

SEQ ID NO: 26663 - DNA, 13 bp, Artificial Sequence
  Oligonucleotide for detection of SNP TSC0007114
gttgtaagagttt

SEQ ID NO: 26664 - DNA, 13 bp, Artificial Sequence
  Oligonucleotide for detection of SNP TSC0007114
aaactcttacaac

SEQ ID NO: 26665 - DNA, 13 bp, Artificial Sequence
  Oligonucleotide for detection of SNP TSC0007120
tagagtgtgaaat

SEQ ID NO: 26666 - DNA, 13 bp, Artificial Sequence
  Oligonucleotide for detection of SNP TSC0007120
atttcacactcta

SEQ ID NO: 26667 - DNA, 13 bp, Artificial Sequence
  Oligonucleotide for detection of SNP TSC0007120
tagagtatgaaat

SEQ ID NO: 26668 - DNA, 13 bp, Artificial Sequence
  Oligonucleotide for detection of SNP TSC0007120
atttcatactcta

SEQ ID NO: 26669 - DNA, 13 bp, Artificial Sequence
  Oligonucleotide for detection of SNP TSC0007123
tagtgggttttga

SEQ ID NO: 26670 - DNA, 13 bp, Artificial Sequence
  Oligonucleotide for detection of SNP TSC0007123
tcaaaacccacta

SEQ ID NO: 26671 - DNA, 13 bp, Artificial Sequence
  Oligonucleotide for detection of SNP TSC0007123
tagtggattttga

SEQ ID NO: 26672 - DNA, 13 bp, Artificial Sequence
  Oligonucleotide for detection of SNP TSC0007123
tcaaaatccacta

SEQ ID NO: 26673 - DNA, 13 bp, Artificial Sequence
  Oligonucleotide for detection of SNP TSC0007131
gtgttgttggagg

SEQ ID NO: 26674 - DNA, 13 bp, Artificial Sequence
  Oligonucleotide for detection of SNP TSC0007131
cctccaacaacac

SEQ ID NO: 26675 - DNA, 13 bp, Artificial Sequence
  Oligonucleotide for detection of SNP TSC0007131
gtgttggtggagg

SEQ ID NO: 26676 - DNA, 13 bp, Artificial Sequence
  Oligonucleotide for detection of SNP TSC0007131
cctccaccaacac

SEQ ID NO: 26677 - DNA, 13 bp, Artificial Sequence
  Oligonucleotide for detection of SNP TSC0007131
tttttagtaatay

SEQ ID NO: 26678 - DNA, 13 bp, Artificial Sequence
  Oligonucleotide for detection of SNP TSC0007131
rtattactaaaaa

SEQ ID NO: 26679 - DNA, 13 bp, Artificial Sequence
  Oligonucleotide for detection of SNP TSC0007131
tttttattaatay

SEQ ID NO: 26680 - DNA, 13 bp, Artificial Sequence
  Oligonucleotide for detection of SNP TSC0007131
rtattaataaaaa

SEQ ID NO: 26681 - DNA, 13 bp, Artificial Sequence
  Oligonucleotide for detection of SNP TSC0007134
attaattgttttg

SEQ ID NO: 26682 - DNA, 13 bp, Artificial Sequence
  Oligonucleotide for detection of SNP TSC0007134
caaaacaattaat

SEQ ID NO: 26683 - DNA, 13 bp, Artificial Sequence
  Oligonucleotide for detection of SNP TSC0007134
attaatcgttttg

SEQ ID NO: 26684 - DNA, 13 bp, Artificial Sequence
  Oligonucleotide for detection of SNP TSC0007134
caaaacgattaat

SEQ ID NO: 26685 - DNA, 13 bp, Artificial Sequence
  Oligonucleotide for detection of SNP TSC0007134
taaaatggttgat

SEQ ID NO: 26686 - DNA, 13 bp, Artificial Sequence
  Oligonucleotide for detection of SNP TSC0007134
atcaaccatttta

SEQ ID NO: 26687 - DNA, 13 bp, Artificial Sequence
  Oligonucleotide for detection of SNP TSC0007134
taaaatagttgat

SEQ ID NO: 26688 - DNA, 13 bp, Artificial Sequence
  Oligonucleotide for detection of SNP TSC0007134
atcaactatttta

SEQ ID NO: 26689 - DNA, 13 bp, Artificial Sequence
  Oligonucleotide for detection of SNP TSC0007134
taaaacggttgat

SEQ ID NO: 26690 - DNA, 13 bp, Artificial Sequence
  Oligonucleotide for detection of SNP TSC0007134
atcaaccgtttta

SEQ ID NO: 26691 - DNA, 13 bp, Artificial Sequence
  Oligonucleotide for detection of SNP TSC0007135
ataaaagattaat

SEQ ID NO: 26692 - DNA, 13 bp, Artificial Sequence
  Oligonucleotide for detection of SNP TSC0007135
attaatcttttat

SEQ ID NO: 26693 - DNA, 13 bp, Artificial Sequence
  Oligonucleotide for detection of SNP TSC0007135
ataaaaaattaat

SEQ ID NO: 26694 - DNA, 13 bp, Artificial Sequence
  Oligonucleotide for detection of SNP TSC0007135
attaattttttat

SEQ ID NO: 26695 - DNA, 13 bp, Artificial Sequence
  Oligonucleotide for detection of SNP TSC0007136
ttttaaatatttt

SEQ ID NO: 26696 - DNA, 13 bp, Artificial Sequence
  Oligonucleotide for detection of SNP TSC0007136
aaaatatttaaaa

SEQ ID NO: 26697 - DNA, 13 bp, Artificial Sequence
  Oligonucleotide for detection of SNP TSC0007136
ttttaattatttt

SEQ ID NO: 26698 - DNA, 13 bp, Artificial Sequence
  Oligonucleotide for detection of SNP TSC0007136
aaaataattaaaa

SEQ ID NO: 26699 - DNA, 13 bp, Artificial Sequence
  Oligonucleotide for detection of SNP TSC0007136
aaaatatttgaga

SEQ ID NO: 26700 - DNA, 13 bp, Artificial Sequence
  Oligonucleotide for detection of SNP TSC0007136
tctcaaatatttt

SEQ ID NO: 26701 - DNA, 13 bp, Artificial Sequence
  Oligonucleotide for detection of SNP TSC0007136
aaaataattgaga

SEQ ID NO: 26702 - DNA, 13 bp, Artificial Sequence
  Oligonucleotide for detection of SNP TSC0007136
tctcaattatttt

SEQ ID NO: 26703 - DNA, 13 bp, Artificial Sequence
  Oligonucleotide for detection of SNP TSC0007138
ttagtgaaaatgt

SEQ ID NO: 26704 - DNA, 13 bp, Artificial Sequence
  Oligonucleotide for detection of SNP TSC0007138
acattttcactaa

SEQ ID NO: 26705 - DNA, 13 bp, Artificial Sequence
  Oligonucleotide for detection of SNP TSC0007138
ttagtgtaaatgt

SEQ ID NO: 26706 - DNA, 13 bp, Artificial Sequence
  Oligonucleotide for detection of SNP TSC0007138
acatttacactaa

SEQ ID NO: 26707 - DNA, 13 bp, Artificial Sequence
  Oligonucleotide for detection of SNP TSC0007138
ttagcgaaaatgt

SEQ ID NO: 26708 - DNA, 13 bp, Artificial Sequence
  Oligonucleotide for detection of SNP TSC0007138
acattttcgctaa

SEQ ID NO: 26709 - DNA, 13 bp, Artificial Sequence
  Oligonucleotide for detection of SNP TSC0007138
ttagcgtaaatgt

SEQ ID NO: 26710 - DNA, 13 bp, Artificial Sequence
  Oligonucleotide for detection of SNP TSC0007138
acatttacgctaa

SEQ ID NO: 26711 - DNA, 13 bp, Artificial Sequence
  Oligonucleotide for detection of SNP TSC0007138
atatttttgttga

SEQ ID NO: 26712 - DNA, 13 bp, Artificial Sequence
  Oligonucleotide for detection of SNP TSC0007138
tcaacaaaaatat

SEQ ID NO: 26713 - DNA, 13 bp, Artificial Sequence
  Oligonucleotide for detection of SNP TSC0007138
atatttatgttga

SEQ ID NO: 26714 - DNA, 13 bp, Artificial Sequence
  Oligonucleotide for detection of SNP TSC0007138
tcaacataaatat

SEQ ID NO: 26715 - DNA, 13 bp, Artificial Sequence
  Oligonucleotide for detection of SNP TSC0007138
atattttcgttga

SEQ ID NO: 26716 - DNA, 13 bp, Artificial Sequence
  Oligonucleotide for detection of SNP TSC0007138
tcaacgaaaatat

SEQ ID NO: 26717 - DNA, 13 bp, Artificial Sequence
  Oligonucleotide for detection of SNP TSC0007138
atatttacgttga

SEQ ID NO: 26718 - DNA, 13 bp, Artificial Sequence
  Oligonucleotide for detection of SNP TSC0007138
tcaacgtaaatat

SEQ ID NO: 26719 - DNA, 13 bp, Artificial Sequence
  Oligonucleotide for detection of SNP TSC0007139
tttttgagtgtgt

SEQ ID NO: 26720 - DNA, 13 bp, Artificial Sequence
  Oligonucleotide for detection of SNP TSC0007139
acacactcaaaaa

SEQ ID NO: 26721 - DNA, 13 bp, Artificial Sequence
  Oligonucleotide for detection of SNP TSC0007139
tttttgtgtgtgt

SEQ ID NO: 26722 - DNA, 13 bp, Artificial Sequence
  Oligonucleotide for detection of SNP TSC0007139
acacacacaaaaa

SEQ ID NO: 26723 - DNA, 13 bp, Artificial Sequence
  Oligonucleotide for detection of SNP TSC0007139
atatatttaaaaa

SEQ ID NO: 26724 - DNA, 13 bp, Artificial Sequence
  Oligonucleotide for detection of SNP TSC0007139
tttttaaatatat

SEQ ID NO: 26725 - DNA, 13 bp, Artificial Sequence
  Oligonucleotide for detection of SNP TSC0007139
atatatataaaaa

SEQ ID NO: 26726 - DNA, 13 bp, Artificial Sequence
  Oligonucleotide for detection of SNP TSC0007139
tttttatatatat

SEQ ID NO: 26727 - DNA, 13 bp, Artificial Sequence
  Oligonucleotide for detection of SNP TSC0007147
attgttatattta

SEQ ID NO: 26728 - DNA, 13 bp, Artificial Sequence
  Oligonucleotide for detection of SNP TSC0007147
taaatataacaat

SEQ ID NO: 26729 - DNA, 13 bp, Artificial Sequence
  Oligonucleotide for detection of SNP TSC0007147
attgttgtattta

SEQ ID NO: 26730 - DNA, 13 bp, Artificial Sequence
  Oligonucleotide for detection of SNP TSC0007147
taaatacaacaat

SEQ ID NO: 26731 - DNA, 13 bp, Artificial Sequence
  Oligonucleotide for detection of SNP TSC0007147
attgtcgtattta

SEQ ID NO: 26732 - DNA, 13 bp, Artificial Sequence
  Oligonucleotide for detection of SNP TSC0007147
taaatacgacaat

SEQ ID NO: 26733 - DNA, 13 bp, Artificial Sequence
  Oligonucleotide for detection of SNP TSC0007147
tagatgtggtaat

SEQ ID NO: 26734 - DNA, 13 bp, Artificial Sequence
  Oligonucleotide for detection of SNP TSC0007147
attaccacatcta

SEQ ID NO: 26735 - DNA, 13 bp, Artificial Sequence
  Oligonucleotide for detection of SNP TSC0007147
tagatgcggtaat

SEQ ID NO: 26736 - DNA, 13 bp, Artificial Sequence
  Oligonucleotide for detection of SNP TSC0007147
attaccgcatcta

SEQ ID NO: 26737 - DNA, 13 bp, Artificial Sequence
  Oligonucleotide for detection of SNP TSC0007149
tagatatgggata

SEQ ID NO: 26738 - DNA, 13 bp, Artificial Sequence
  Oligonucleotide for detection of SNP TSC0007149
tatcccatatcta

SEQ ID NO: 26739 - DNA, 13 bp, Artificial Sequence
  Oligonucleotide for detection of SNP TSC0007149
tagatacgggata

SEQ ID NO: 26740 - DNA, 13 bp, Artificial Sequence
  Oligonucleotide for detection of SNP TSC0007149
tatcccgtatcta

SEQ ID NO: 26741 - DNA, 13 bp, Artificial Sequence
  Oligonucleotide for detection of SNP TSC0007149
tattttgtgtttg

SEQ ID NO: 26742 - DNA, 13 bp, Artificial Sequence
  Oligonucleotide for detection of SNP TSC0007149
caaacacaaaata

SEQ ID NO: 26743 - DNA, 13 bp, Artificial Sequence
  Oligonucleotide for detection of SNP TSC0007149
tattttatgtttg

SEQ ID NO: 26744 - DNA, 13 bp, Artificial Sequence
  Oligonucleotide for detection of SNP TSC0007149
caaacataaaata

SEQ ID NO: 26745 - DNA, 13 bp, Artificial Sequence
  Oligonucleotide for detection of SNP TSC0007149
tatttcgtgtttg

SEQ ID NO: 26746 - DNA, 13 bp, Artificial Sequence
  Oligonucleotide for detection of SNP TSC0007149
caaacacgaaata

SEQ ID NO: 26747 - DNA, 13 bp, Artificial Sequence
  Oligonucleotide for detection of SNP TSC0007150
tgggtaataaatg

SEQ ID NO: 26748 - DNA, 13 bp, Artificial Sequence
  Oligonucleotide for detection of SNP TSC0007150
catttattaccca

SEQ ID NO: 26749 - DNA, 13 bp, Artificial Sequence
  Oligonucleotide for detection of SNP TSC0007150
tgggtagtaaatg

SEQ ID NO: 26750 - DNA, 13 bp, Artificial Sequence
  Oligonucleotide for detection of SNP TSC0007150
catttactaccca

SEQ ID NO: 26751 - DNA, 13 bp, Artificial Sequence
  Oligonucleotide for detection of SNP TSC0007152
attattgttttga

SEQ ID NO: 26752 - DNA, 13 bp, Artificial Sequence
  Oligonucleotide for detection of SNP TSC0007152
tcaaaacaataat

SEQ ID NO: 26753 - DNA, 13 bp, Artificial Sequence
  Oligonucleotide for detection of SNP TSC0007152
attattattttga

SEQ ID NO: 26754 - DNA, 13 bp, Artificial Sequence
  Oligonucleotide for detection of SNP TSC0007152
tcaaaataataat

SEQ ID NO: 26755 - DNA, 13 bp, Artificial Sequence
  Oligonucleotide for detection of SNP TSC0007153
aagtatgttttag

SEQ ID NO: 26756 - DNA, 13 bp, Artificial Sequence
  Oligonucleotide for detection of SNP TSC0007153
ctaaaacatactt

SEQ ID NO: 26757 - DNA, 13 bp, Artificial Sequence
  Oligonucleotide for detection of SNP TSC0007153
aagtattttttag

SEQ ID NO: 26758 - DNA, 13 bp, Artificial Sequence
  Oligonucleotide for detection of SNP TSC0007153
ctaaaaaatactt

SEQ ID NO: 26759 - DNA, 13 bp, Artificial Sequence
  Oligonucleotide for detection of SNP TSC0007153
aagtacgttttag

SEQ ID NO: 26760 - DNA, 13 bp, Artificial Sequence
  Oligonucleotide for detection of SNP TSC0007153
ctaaaacgtactt

SEQ ID NO: 26761 - DNA, 13 bp, Artificial Sequence
  Oligonucleotide for detection of SNP TSC0007153
ttgagatgtattt

SEQ ID NO: 26762 - DNA, 13 bp, Artificial Sequence
  Oligonucleotide for detection of SNP TSC0007153
aaatacatctcaa

SEQ ID NO: 26763 - DNA, 13 bp, Artificial Sequence
  Oligonucleotide for detection of SNP TSC0007153
ttgagaagtattt

SEQ ID NO: 26764 - DNA, 13 bp, Artificial Sequence
  Oligonucleotide for detection of SNP TSC0007153
aaatacttctcaa

SEQ ID NO: 26765 - DNA, 13 bp, Artificial Sequence
  Oligonucleotide for detection of SNP TSC0007153
ttgagacgtattt

SEQ ID NO: 26766 - DNA, 13 bp, Artificial Sequence
  Oligonucleotide for detection of SNP TSC0007153
aaatacgtctcaa

SEQ ID NO: 26767 - DNA, 13 bp, Artificial Sequence
  Oligonucleotide for detection of SNP TSC0007155
agtatttttttag

SEQ ID NO: 26768 - DNA, 13 bp, Artificial Sequence
  Oligonucleotide for detection of SNP TSC0007155
ctaaaaaaatact

SEQ ID NO: 26769 - DNA, 13 bp, Artificial Sequence
  Oligonucleotide for detection of SNP TSC0007155
agtattgttttag

SEQ ID NO: 26770 - DNA, 13 bp, Artificial Sequence
  Oligonucleotide for detection of SNP TSC0007155
ctaaaacaatact

SEQ ID NO: 26771 - DNA, 13 bp, Artificial Sequence
  Oligonucleotide for detection of SNP TSC0007155
ttgaaagagtgtt

SEQ ID NO: 26772 - DNA, 13 bp, Artificial Sequence
  Oligonucleotide for detection of SNP TSC0007155
aacactctttcaa

SEQ ID NO: 26773 - DNA, 13 bp, Artificial Sequence
  Oligonucleotide for detection of SNP TSC0007155
ttgaaatagtgtt

SEQ ID NO: 26774 - DNA, 13 bp, Artificial Sequence
  Oligonucleotide for detection of SNP TSC0007155
aacactatttcaa

SEQ ID NO: 26775 - DNA, 13 bp, Artificial Sequence
  Oligonucleotide for detection of SNP TSC0007162
aattgagtattaa

SEQ ID NO: 26776 - DNA, 13 bp, Artificial Sequence
  Oligonucleotide for detection of SNP TSC0007162
ttaatactcaatt

SEQ ID NO: 26777 - DNA, 13 bp, Artificial Sequence
  Oligonucleotide for detection of SNP TSC0007162
aattgattattaa

SEQ ID NO: 26778 - DNA, 13 bp, Artificial Sequence
  Oligonucleotide for detection of SNP TSC0007162
ttaataatcaatt

SEQ ID NO: 26779 - DNA, 13 bp, Artificial Sequence
  Oligonucleotide for detection of SNP TSC0007162
ttaatatttaatt

SEQ ID NO: 26780 - DNA, 13 bp, Artificial Sequence
  Oligonucleotide for detection of SNP TSC0007162
aattaaatattaa

SEQ ID NO: 26781 - DNA, 13 bp, Artificial Sequence
  Oligonucleotide for detection of SNP TSC0007162
ttaataattaatt

SEQ ID NO: 26782 - DNA, 13 bp, Artificial Sequence
  Oligonucleotide for detection of SNP TSC0007162
aattaattattaa

SEQ ID NO: 26783 - DNA, 13 bp, Artificial Sequence
  Oligonucleotide for detection of SNP TSC0007170
tttgttgtttgty

SEQ ID NO: 26784 - DNA, 13 bp, Artificial Sequence
  Oligonucleotide for detection of SNP TSC0007170
racaaacaacaaa

SEQ ID NO: 26785 - DNA, 13 bp, Artificial Sequence
  Oligonucleotide for detection of SNP TSC0007170
tttgttttttgty

SEQ ID NO: 26786 - DNA, 13 bp, Artificial Sequence
  Oligonucleotide for detection of SNP TSC0007170
racaaaaaacaaa

SEQ ID NO: 26787 - DNA, 13 bp, Artificial Sequence
  Oligonucleotide for detection of SNP TSC0007170
tttgtcgtttgty

SEQ ID NO: 26788 - DNA, 13 bp, Artificial Sequence
  Oligonucleotide for detection of SNP TSC0007170
racaaacgacaaa

SEQ ID NO: 26789 - DNA, 13 bp, Artificial Sequence
  Oligonucleotide for detection of SNP TSC0007170
gatagatgataag

SEQ ID NO: 26790 - DNA, 13 bp, Artificial Sequence
  Oligonucleotide for detection of SNP TSC0007170
cttatcatctatc

SEQ ID NO: 26791 - DNA, 13 bp, Artificial Sequence
  Oligonucleotide for detection of SNP TSC0007170
gatagaagataag

SEQ ID NO: 26792 - DNA, 13 bp, Artificial Sequence
  Oligonucleotide for detection of SNP TSC0007170
cttatcttctatc

SEQ ID NO: 26793 - DNA, 13 bp, Artificial Sequence
  Oligonucleotide for detection of SNP TSC0007170
gatagacgataag

SEQ ID NO: 26794 - DNA, 13 bp, Artificial Sequence
  Oligonucleotide for detection of SNP TSC0007170
cttatcgtctatc

SEQ ID NO: 26795 - DNA, 13 bp, Artificial Sequence
  Oligonucleotide for detection of SNP TSC0007171
tgtaggagttaty

SEQ ID NO: 26796 - DNA, 13 bp, Artificial Sequence
  Oligonucleotide for detection of SNP TSC0007171
rataactcctaca

SEQ ID NO: 26797 - DNA, 13 bp, Artificial Sequence
  Oligonucleotide for detection of SNP TSC0007171
tgtaggggttaty

SEQ ID NO: 26798 - DNA, 13 bp, Artificial Sequence
  Oligonucleotide for detection of SNP TSC0007171
rataacccctaca

SEQ ID NO: 26799 - DNA, 13 bp, Artificial Sequence
  Oligonucleotide for detection of SNP TSC0007173
gaaataagatata

SEQ ID NO: 26800 - DNA, 13 bp, Artificial Sequence
  Oligonucleotide for detection of SNP TSC0007173
tatatcttatttc

SEQ ID NO: 26801 - DNA, 13 bp, Artificial Sequence
  Oligonucleotide for detection of SNP TSC0007173
gaaataggatata

SEQ ID NO: 26802 - DNA, 13 bp, Artificial Sequence
  Oligonucleotide for detection of SNP TSC0007173
tatatcctatttc

SEQ ID NO: 26803 - DNA, 13 bp, Artificial Sequence
  Oligonucleotide for detection of SNP TSC0007174
atataagaaatta

SEQ ID NO: 26804 - DNA, 13 bp, Artificial Sequence
  Oligonucleotide for detection of SNP TSC0007174
taatttcttatat

SEQ ID NO: 26805 - DNA, 13 bp, Artificial Sequence
  Oligonucleotide for detection of SNP TSC0007174
atataataaatta

SEQ ID NO: 26806 - DNA, 13 bp, Artificial Sequence
  Oligonucleotide for detection of SNP TSC0007174
taatttattatat

SEQ ID NO: 26807 - DNA, 13 bp, Artificial Sequence
  Oligonucleotide for detection of SNP TSC0007174
tgattttttatat

SEQ ID NO: 26808 - DNA, 13 bp, Artificial Sequence
  Oligonucleotide for detection of SNP TSC0007174
atataaaaaatca

SEQ ID NO: 26809 - DNA, 13 bp, Artificial Sequence
  Oligonucleotide for detection of SNP TSC0007174
tgatttattatat

SEQ ID NO: 26810 - DNA, 13 bp, Artificial Sequence
  Oligonucleotide for detection of SNP TSC0007174
atataataaatca

SEQ ID NO: 26811 - DNA, 13 bp, Artificial Sequence
  Oligonucleotide for detection of SNP TSC0007175
gattttattattg

SEQ ID NO: 26812 - DNA, 13 bp, Artificial Sequence
  Oligonucleotide for detection of SNP TSC0007175
caataataaaatc

SEQ ID NO: 26813 - DNA, 13 bp, Artificial Sequence
  Oligonucleotide for detection of SNP TSC0007175
gattttgttattg

SEQ ID NO: 26814 - DNA, 13 bp, Artificial Sequence
  Oligonucleotide for detection of SNP TSC0007175
caataacaaaatc

SEQ ID NO: 26815 - DNA, 13 bp, Artificial Sequence
  Oligonucleotide for detection of SNP TSC0007175
gatttcgttattg

SEQ ID NO: 26816 - DNA, 13 bp, Artificial Sequence
  Oligonucleotide for detection of SNP TSC0007175
caataacgaaatc

SEQ ID NO: 26817 - DNA, 13 bp, Artificial Sequence
  Oligonucleotide for detection of SNP TSC0007175
tagtagtgaagty

SEQ ID NO: 26818 - DNA, 13 bp, Artificial Sequence
  Oligonucleotide for detection of SNP TSC0007175
racttcactacta

SEQ ID NO: 26819 - DNA, 13 bp, Artificial Sequence
  Oligonucleotide for detection of SNP TSC0007175
tagtagcgaagty

SEQ ID NO: 26820 - DNA, 13 bp, Artificial Sequence
  Oligonucleotide for detection of SNP TSC0007175
racttcgctacta

SEQ ID NO: 26821 - DNA, 13 bp, Artificial Sequence
  Oligonucleotide for detection of SNP TSC0007182
atatttatattty

SEQ ID NO: 26822 - DNA, 13 bp, Artificial Sequence
  Oligonucleotide for detection of SNP TSC0007182
raaatataaatat

SEQ ID NO: 26823 - DNA, 13 bp, Artificial Sequence
  Oligonucleotide for detection of SNP TSC0007182
atatttttattty

SEQ ID NO: 26824 - DNA, 13 bp, Artificial Sequence
  Oligonucleotide for detection of SNP TSC0007182
raaataaaaatat

SEQ ID NO: 26825 - DNA, 13 bp, Artificial Sequence
  Oligonucleotide for detection of SNP TSC0007182
ggagtataagtgt

SEQ ID NO: 26826 - DNA, 13 bp, Artificial Sequence
  Oligonucleotide for detection of SNP TSC0007182
acacttatactcc

SEQ ID NO: 26827 - DNA, 13 bp, Artificial Sequence
  Oligonucleotide for detection of SNP TSC0007182
ggagtagaagtgt

SEQ ID NO: 26828 - DNA, 13 bp, Artificial Sequence
  Oligonucleotide for detection of SNP TSC0007182
acacttctactcc

SEQ ID NO: 26829 - DNA, 13 bp, Artificial Sequence
  Oligonucleotide for detection of SNP TSC0007185
aaatttattttgt

SEQ ID NO: 26830 - DNA, 13 bp, Artificial Sequence
  Oligonucleotide for detection of SNP TSC0007185
acaaaataaattt

SEQ ID NO: 26831 - DNA, 13 bp, Artificial Sequence
  Oligonucleotide for detection of SNP TSC0007185
aaattttttttgt

SEQ ID NO: 26832 - DNA, 13 bp, Artificial Sequence
  Oligonucleotide for detection of SNP TSC0007185
acaaaaaaaattt

SEQ ID NO: 26833 - DNA, 13 bp, Artificial Sequence
  Oligonucleotide for detection of SNP TSC0007185
atagaatgagttt

SEQ ID NO: 26834 - DNA, 13 bp, Artificial Sequence
  Oligonucleotide for detection of SNP TSC0007185
aaactcattctat

SEQ ID NO: 26835 - DNA, 13 bp, Artificial Sequence
  Oligonucleotide for detection of SNP TSC0007185
atagaaggagttt

SEQ ID NO: 26836 - DNA, 13 bp, Artificial Sequence
  Oligonucleotide for detection of SNP TSC0007185
aaactccttctat

SEQ ID NO: 26837 - DNA, 13 bp, Artificial Sequence
  Oligonucleotide for detection of SNP TSC0007187
tagtttatttttt

SEQ ID NO: 26838 - DNA, 13 bp, Artificial Sequence
  Oligonucleotide for detection of SNP TSC0007187
aaaaaataaacta

SEQ ID NO: 26839 - DNA, 13 bp, Artificial Sequence
  Oligonucleotide for detection of SNP TSC0007187
tagtttgtttttt

SEQ ID NO: 26840 - DNA, 13 bp, Artificial Sequence
  Oligonucleotide for detection of SNP TSC0007187
aaaaaacaaacta

SEQ ID NO: 26841 - DNA, 13 bp, Artificial Sequence
  Oligonucleotide for detection of SNP TSC0007188
ttttttatagttt

SEQ ID NO: 26842 - DNA, 13 bp, Artificial Sequence
  Oligonucleotide for detection of SNP TSC0007188
aaactataaaaaa

SEQ ID NO: 26843 - DNA, 13 bp, Artificial Sequence
  Oligonucleotide for detection of SNP TSC0007188
ttttttgtagttt

SEQ ID NO: 26844 - DNA, 13 bp, Artificial Sequence
  Oligonucleotide for detection of SNP TSC0007188
aaactacaaaaaa

SEQ ID NO: 26845 - DNA, 13 bp, Artificial Sequence
  Oligonucleotide for detection of SNP TSC0007188
tttttcgtagttt

SEQ ID NO: 26846 - DNA, 13 bp, Artificial Sequence
  Oligonucleotide for detection of SNP TSC0007188
aaactacgaaaaa

SEQ ID NO: 26847 - DNA, 13 bp, Artificial Sequence
  Oligonucleotide for detection of SNP TSC0007188
aggttatggagag

SEQ ID NO: 26848 - DNA, 13 bp, Artificial Sequence
  Oligonucleotide for detection of SNP TSC0007188
ctctccataacct

SEQ ID NO: 26849 - DNA, 13 bp, Artificial Sequence
  Oligonucleotide for detection of SNP TSC0007188
aggttacggagag

SEQ ID NO: 26850 - DNA, 13 bp, Artificial Sequence
  Oligonucleotide for detection of SNP TSC0007188
ctctccgtaacct

SEQ ID NO: 26851 - DNA, 13 bp, Artificial Sequence
  Oligonucleotide for detection of SNP TSC0007191
aaaggagatttaa

SEQ ID NO: 26852 - DNA, 13 bp, Artificial Sequence
  Oligonucleotide for detection of SNP TSC0007191
ttaaatctccttt

SEQ ID NO: 26853 - DNA, 13 bp, Artificial Sequence
  Oligonucleotide for detection of SNP TSC0007191
aaaggaaatttaa

SEQ ID NO: 26854 - DNA, 13 bp, Artificial Sequence
  Oligonucleotide for detection of SNP TSC0007191
ttaaatttccttt

SEQ ID NO: 26855 - DNA, 13 bp, Artificial Sequence
  Oligonucleotide for detection of SNP TSC0007205
aaatttggggttg

SEQ ID NO: 26856 - DNA, 13 bp, Artificial Sequence
  Oligonucleotide for detection of SNP TSC0007205
caaccccaaattt

SEQ ID NO: 26857 - DNA, 13 bp, Artificial Sequence
  Oligonucleotide for detection of SNP TSC0007205
aaatttagggttg

SEQ ID NO: 26858 - DNA, 13 bp, Artificial Sequence
  Oligonucleotide for detection of SNP TSC0007205
caaccctaaattt

SEQ ID NO: 26859 - DNA, 13 bp, Artificial Sequence
  Oligonucleotide for detection of SNP TSC0007214
ggaggtgagttta

SEQ ID NO: 26860 - DNA, 13 bp, Artificial Sequence
  Oligonucleotide for detection of SNP TSC0007214
taaactcacctcc

SEQ ID NO: 26861 - DNA, 13 bp, Artificial Sequence
  Oligonucleotide for detection of SNP TSC0007214
ggaggtaagttta

SEQ ID NO: 26862 - DNA, 13 bp, Artificial Sequence
  Oligonucleotide for detection of SNP TSC0007214
taaacttacctcc

SEQ ID NO: 26863 - DNA, 13 bp, Artificial Sequence
  Oligonucleotide for detection of SNP TSC0007227
agggagaagatgg

SEQ ID NO: 26864 - DNA, 13 bp, Artificial Sequence
  Oligonucleotide for detection of SNP TSC0007227
ccatcttctccct

SEQ ID NO: 26865 - DNA, 13 bp, Artificial Sequence
  Oligonucleotide for detection of SNP TSC0007227
agggaggagatgg

SEQ ID NO: 26866 - DNA, 13 bp, Artificial Sequence
  Oligonucleotide for detection of SNP TSC0007227
ccatctcctccct

SEQ ID NO: 26867 - DNA, 13 bp, Artificial Sequence
  Oligonucleotide for detection of SNP TSC0007239
gtttttattttga

SEQ ID NO: 26868 - DNA, 13 bp, Artificial Sequence
  Oligonucleotide for detection of SNP TSC0007239
tcaaaataaaaac

SEQ ID NO: 26869 - DNA, 13 bp, Artificial Sequence
  Oligonucleotide for detection of SNP TSC0007240
aattttattagtt

SEQ ID NO: 26870 - DNA, 13 bp, Artificial Sequence
  Oligonucleotide for detection of SNP TSC0007240
aactaataaaatt

SEQ ID NO: 26871 - DNA, 13 bp, Artificial Sequence
  Oligonucleotide for detection of SNP TSC0007240
aatttttttagtt

SEQ ID NO: 26872 - DNA, 13 bp, Artificial Sequence
  Oligonucleotide for detection of SNP TSC0007240
aactaaaaaaatt

SEQ ID NO: 26873 - DNA, 13 bp, Artificial Sequence
  Oligonucleotide for detection of SNP TSC0007240
aattaatgagatt

SEQ ID NO: 26874 - DNA, 13 bp, Artificial Sequence
  Oligonucleotide for detection of SNP TSC0007240
aatctcattaatt

SEQ ID NO: 26875 - DNA, 13 bp, Artificial Sequence
  Oligonucleotide for detection of SNP TSC0007240
aattaaagagatt

SEQ ID NO: 26876 - DNA, 13 bp, Artificial Sequence
  Oligonucleotide for detection of SNP TSC0007240
aatctctttaatt

SEQ ID NO: 26877 - DNA, 13 bp, Artificial Sequence
  Oligonucleotide for detection of SNP TSC0007246
tattaagataaty

SEQ ID NO: 26878 - DNA, 13 bp, Artificial Sequence
  Oligonucleotide for detection of SNP TSC0007246
rattatcttaata

SEQ ID NO: 26879 - DNA, 13 bp, Artificial Sequence
  Oligonucleotide for detection of SNP TSC0007246
tattaaaataaty

SEQ ID NO: 26880 - DNA, 13 bp, Artificial Sequence
  Oligonucleotide for detection of SNP TSC0007246
rattattttaata

SEQ ID NO: 26881 - DNA, 13 bp, Artificial Sequence
  Oligonucleotide for detection of SNP TSC0007251
tattaaaatttaa

SEQ ID NO: 26882 - DNA, 13 bp, Artificial Sequence
  Oligonucleotide for detection of SNP TSC0007251
ttaaattttaata

SEQ ID NO: 26883 - DNA, 13 bp, Artificial Sequence
  Oligonucleotide for detection of SNP TSC0007251
tattaagatttaa

SEQ ID NO: 26884 - DNA, 13 bp, Artificial Sequence
  Oligonucleotide for detection of SNP TSC0007251
ttaaatcttaata

SEQ ID NO: 26885 - DNA, 13 bp, Artificial Sequence
  Oligonucleotide for detection of SNP TSC0007256
ttatttatgagty

SEQ ID NO: 26886 - DNA, 13 bp, Artificial Sequence
  Oligonucleotide for detection of SNP TSC0007256
ractcataaataa

SEQ ID NO: 26887 - DNA, 13 bp, Artificial Sequence
  Oligonucleotide for detection of SNP TSC0007256
ttatttttgagty

SEQ ID NO: 26888 - DNA, 13 bp, Artificial Sequence
  Oligonucleotide for detection of SNP TSC0007256
ractcaaaaataa

SEQ ID NO: 26889 - DNA, 13 bp, Artificial Sequence
  Oligonucleotide for detection of SNP TSC0007256
ggtttatagatgg

SEQ ID NO: 26890 - DNA, 13 bp, Artificial Sequence
  Oligonucleotide for detection of SNP TSC0007256
ccatctataaacc

SEQ ID NO: 26891 - DNA, 13 bp, Artificial Sequence
  Oligonucleotide for detection of SNP TSC0007256
ggtttaaagatgg

SEQ ID NO: 26892 - DNA, 13 bp, Artificial Sequence
  Oligonucleotide for detection of SNP TSC0007256
ccatctttaaacc

SEQ ID NO: 26893 - DNA, 13 bp, Artificial Sequence
  Oligonucleotide for detection of SNP TSC0007257
tattttatttttg

SEQ ID NO: 26894 - DNA, 13 bp, Artificial Sequence
  Oligonucleotide for detection of SNP TSC0007257
caaaaataaaata

SEQ ID NO: 26895 - DNA, 13 bp, Artificial Sequence
  Oligonucleotide for detection of SNP TSC0007257
tattttattttcg

SEQ ID NO: 26896 - DNA, 13 bp, Artificial Sequence
  Oligonucleotide for detection of SNP TSC0007257
cgaaaataaaata

SEQ ID NO: 26897 - DNA, 13 bp, Artificial Sequence
  Oligonucleotide for detection of SNP TSC0007257
tatttttttttcg

SEQ ID NO: 26898 - DNA, 13 bp, Artificial Sequence
  Oligonucleotide for detection of SNP TSC0007257
cgaaaaaaaaata

SEQ ID NO: 26899 - DNA, 13 bp, Artificial Sequence
  Oligonucleotide for detection of SNP TSC0007257
tgggggtggaatg

SEQ ID NO: 26900 - DNA, 13 bp, Artificial Sequence
  Oligonucleotide for detection of SNP TSC0007257
cattccaccccca

SEQ ID NO: 26901 - DNA, 13 bp, Artificial Sequence
  Oligonucleotide for detection of SNP TSC0007257
tgggggaggaatg

SEQ ID NO: 26902 - DNA, 13 bp, Artificial Sequence
  Oligonucleotide for detection of SNP TSC0007257
cattcctccccca

SEQ ID NO: 26903 - DNA, 13 bp, Artificial Sequence
  Oligonucleotide for detection of SNP TSC0007257
cgggggtggaatg

SEQ ID NO: 26904 - DNA, 13 bp, Artificial Sequence
  Oligonucleotide for detection of SNP TSC0007257
cattccacccccg

SEQ ID NO: 26905 - DNA, 13 bp, Artificial Sequence
  Oligonucleotide for detection of SNP TSC0007257
cgggggaggaatg

SEQ ID NO: 26906 - DNA, 13 bp, Artificial Sequence
  Oligonucleotide for detection of SNP TSC0007257
cattcctcccccg

SEQ ID NO: 26907 - DNA, 13 bp, Artificial Sequence
  Oligonucleotide for detection of SNP TSC0007258
ggaggtggttaty

SEQ ID NO: 26908 - DNA, 13 bp, Artificial Sequence
  Oligonucleotide for detection of SNP TSC0007258
rataaccacctcc

SEQ ID NO: 26909 - DNA, 13 bp, Artificial Sequence
  Oligonucleotide for detection of SNP TSC0007258
ggaggtagttaty

SEQ ID NO: 26910 - DNA, 13 bp, Artificial Sequence
  Oligonucleotide for detection of SNP TSC0007258
rataactacctcc

SEQ ID NO: 26911 - DNA, 13 bp, Artificial Sequence
  Oligonucleotide for detection of SNP TSC0007266
atttttatttaga

SEQ ID NO: 26912 - DNA, 13 bp, Artificial Sequence
  Oligonucleotide for detection of SNP TSC0007266
tctaaataaaaat

SEQ ID NO: 26913 - DNA, 13 bp, Artificial Sequence
  Oligonucleotide for detection of SNP TSC0007266
atttttgtttaga

SEQ ID NO: 26914 - DNA, 13 bp, Artificial Sequence
  Oligonucleotide for detection of SNP TSC0007266
tctaaacaaaaat

SEQ ID NO: 26915 - DNA, 13 bp, Artificial Sequence
  Oligonucleotide for detection of SNP TSC0007266
attttcgtttaga

SEQ ID NO: 26916 - DNA, 13 bp, Artificial Sequence
  Oligonucleotide for detection of SNP TSC0007266
tctaaacgaaaat

SEQ ID NO: 26917 - DNA, 13 bp, Artificial Sequence
  Oligonucleotide for detection of SNP TSC0007266
tttagatgagaat

SEQ ID NO: 26918 - DNA, 13 bp, Artificial Sequence
  Oligonucleotide for detection of SNP TSC0007266
attctcatctaaa

SEQ ID NO: 26919 - DNA, 13 bp, Artificial Sequence
  Oligonucleotide for detection of SNP TSC0007266
tttagacgagaat

SEQ ID NO: 26920 - DNA, 13 bp, Artificial Sequence
  Oligonucleotide for detection of SNP TSC0007266
attctcgtctaaa

SEQ ID NO: 26921 - DNA, 13 bp, Artificial Sequence
  Oligonucleotide for detection of SNP TSC0007280
aatattgaatagg

SEQ ID NO: 26922 - DNA, 13 bp, Artificial Sequence
  Oligonucleotide for detection of SNP TSC0007280
cctattcaatatt

SEQ ID NO: 26923 - DNA, 13 bp, Artificial Sequence
  Oligonucleotide for detection of SNP TSC0007280
aatatttaatagg

SEQ ID NO: 26924 - DNA, 13 bp, Artificial Sequence
  Oligonucleotide for detection of SNP TSC0007280
cctattaaatatt

SEQ ID NO: 26925 - DNA, 13 bp, Artificial Sequence
  Oligonucleotide for detection of SNP TSC0007280
tttatttaatgtt

SEQ ID NO: 26926 - DNA, 13 bp, Artificial Sequence
  Oligonucleotide for detection of SNP TSC0007280
aacattaaataaa

SEQ ID NO: 26927 - DNA, 13 bp, Artificial Sequence
  Oligonucleotide for detection of SNP TSC0007280
tttattaaatgtt

SEQ ID NO: 26928 - DNA, 13 bp, Artificial Sequence
  Oligonucleotide for detection of SNP TSC0007280
aacatttaataaa

SEQ ID NO: 26929 - DNA, 13 bp, Artificial Sequence
  Oligonucleotide for detection of SNP TSC0007283
gtaatttattaty

SEQ ID NO: 26930 - DNA, 13 bp, Artificial Sequence
  Oligonucleotide for detection of SNP TSC0007283
rataataaattac

SEQ ID NO: 26931 - DNA, 13 bp, Artificial Sequence
  Oligonucleotide for detection of SNP TSC0007283
gtaattgattaty

SEQ ID NO: 26932 - DNA, 13 bp, Artificial Sequence
  Oligonucleotide for detection of SNP TSC0007283
rataatcaattac

SEQ ID NO: 26933 - DNA, 13 bp, Artificial Sequence
  Oligonucleotide for detection of SNP TSC0007283
gtaatcgattaty

SEQ ID NO: 26934 - DNA, 13 bp, Artificial Sequence
  Oligonucleotide for detection of SNP TSC0007283
rataatcgattac

SEQ ID NO: 26935 - DNA, 13 bp, Artificial Sequence
  Oligonucleotide for detection of SNP TSC0007283
gatgatggattgy

SEQ ID NO: 26936 - DNA, 13 bp, Artificial Sequence
  Oligonucleotide for detection of SNP TSC0007283
rcaatccatcatc

SEQ ID NO: 26937 - DNA, 13 bp, Artificial Sequence
  Oligonucleotide for detection of SNP TSC0007283
gatgattgattgy

SEQ ID NO: 26938 - DNA, 13 bp, Artificial Sequence
  Oligonucleotide for detection of SNP TSC0007283
rcaatcaatcatc

SEQ ID NO: 26939 - DNA, 13 bp, Artificial Sequence
  Oligonucleotide for detection of SNP TSC0007283
gatgatcgattgy

SEQ ID NO: 26940 - DNA, 13 bp, Artificial Sequence
  Oligonucleotide for detection of SNP TSC0007283
rcaatcgatcatc

SEQ ID NO: 26941 - DNA, 13 bp, Artificial Sequence
  Oligonucleotide for detection of SNP TSC0007292
attatggttgtay

SEQ ID NO: 26942 - DNA, 13 bp, Artificial Sequence
  Oligonucleotide for detection of SNP TSC0007292
rtacaaccataat

SEQ ID NO: 26943 - DNA, 13 bp, Artificial Sequence
  Oligonucleotide for detection of SNP TSC0007292
attatgattgtay

SEQ ID NO: 26944 - DNA, 13 bp, Artificial Sequence
  Oligonucleotide for detection of SNP TSC0007292
rtacaatcataat

SEQ ID NO: 26945 - DNA, 13 bp, Artificial Sequence
  Oligonucleotide for detection of SNP TSC0007310
gaggtatggtagg

SEQ ID NO: 26946 - DNA, 13 bp, Artificial Sequence
  Oligonucleotide for detection of SNP TSC0007310
cctaccatacctc

SEQ ID NO: 26947 - DNA, 13 bp, Artificial Sequence
  Oligonucleotide for detection of SNP TSC0007310
gaggtagggtagg

SEQ ID NO: 26948 - DNA, 13 bp, Artificial Sequence
  Oligonucleotide for detection of SNP TSC0007310
cctaccctacctc

SEQ ID NO: 26949 - DNA, 13 bp, Artificial Sequence
  Oligonucleotide for detection of SNP TSC0007310
gaggtacggtagg

SEQ ID NO: 26950 - DNA, 13 bp, Artificial Sequence
  Oligonucleotide for detection of SNP TSC0007310
cctaccgtacctc

SEQ ID NO: 26951 - DNA, 13 bp, Artificial Sequence
  Oligonucleotide for detection of SNP TSC0007310
tttattttattty

SEQ ID NO: 26952 - DNA, 13 bp, Artificial Sequence
  Oligonucleotide for detection of SNP TSC0007310
raaataaaataaa

SEQ ID NO: 26953 - DNA, 13 bp, Artificial Sequence
  Oligonucleotide for detection of SNP TSC0007311
tgggtagtttaty

SEQ ID NO: 26954 - DNA, 13 bp, Artificial Sequence
  Oligonucleotide for detection of SNP TSC0007311
rataaactaccca

SEQ ID NO: 26955 - DNA, 13 bp, Artificial Sequence
  Oligonucleotide for detection of SNP TSC0007311
tgggtattttaty

SEQ ID NO: 26956 - DNA, 13 bp, Artificial Sequence
  Oligonucleotide for detection of SNP TSC0007311
rataaaataccca

SEQ ID NO: 26957 - DNA, 13 bp, Artificial Sequence
  Oligonucleotide for detection of SNP TSC0007311
gataggttattta

SEQ ID NO: 26958 - DNA, 13 bp, Artificial Sequence
  Oligonucleotide for detection of SNP TSC0007311
taaataacctatc

SEQ ID NO: 26959 - DNA, 13 bp, Artificial Sequence
  Oligonucleotide for detection of SNP TSC0007311
gataggatattta

SEQ ID NO: 26960 - DNA, 13 bp, Artificial Sequence
  Oligonucleotide for detection of SNP TSC0007311
taaatatcctatc

SEQ ID NO: 26961 - DNA, 13 bp, Artificial Sequence
  Oligonucleotide for detection of SNP TSC0007327
agaggaattaagg

SEQ ID NO: 26962 - DNA, 13 bp, Artificial Sequence
  Oligonucleotide for detection of SNP TSC0007327
ccttaattcctct

SEQ ID NO: 26963 - DNA, 13 bp, Artificial Sequence
  Oligonucleotide for detection of SNP TSC0007327
agaggagttaagg

SEQ ID NO: 26964 - DNA, 13 bp, Artificial Sequence
  Oligonucleotide for detection of SNP TSC0007327
ccttaactcctct

SEQ ID NO: 26965 - DNA, 13 bp, Artificial Sequence
  Oligonucleotide for detection of SNP TSC0007329
gagttagattgaa

SEQ ID NO: 26966 - DNA, 13 bp, Artificial Sequence
  Oligonucleotide for detection of SNP TSC0007329
ttcaatctaactc

SEQ ID NO: 26967 - DNA, 13 bp, Artificial Sequence
  Oligonucleotide for detection of SNP TSC0007329
gagttatattgaa

SEQ ID NO: 26968 - DNA, 13 bp, Artificial Sequence
  Oligonucleotide for detection of SNP TSC0007329
ttcaatataactc

SEQ ID NO: 26969 - DNA, 13 bp, Artificial Sequence
  Oligonucleotide for detection of SNP TSC0007329
tttagtttgatty

SEQ ID NO: 26970 - DNA, 13 bp, Artificial Sequence
  Oligonucleotide for detection of SNP TSC0007329
raatcaaactaaa

SEQ ID NO: 26971 - DNA, 13 bp, Artificial Sequence
  Oligonucleotide for detection of SNP TSC0007329
tttagtatgatty

SEQ ID NO: 26972 - DNA, 13 bp, Artificial Sequence
  Oligonucleotide for detection of SNP TSC0007329
raatcatactaaa

SEQ ID NO: 26973 - DNA, 13 bp, Artificial Sequence
  Oligonucleotide for detection of SNP TSC0007330
ttttagtgttgty

SEQ ID NO: 26974 - DNA, 13 bp, Artificial Sequence
  Oligonucleotide for detection of SNP TSC0007330
racaacactaaaa

SEQ ID NO: 26975 - DNA, 13 bp, Artificial Sequence
  Oligonucleotide for detection of SNP TSC0007330
ttttagcgttgty

SEQ ID NO: 26976 - DNA, 13 bp, Artificial Sequence
  Oligonucleotide for detection of SNP TSC0007330
racaacgctaaaa

SEQ ID NO: 26977 - DNA, 13 bp, Artificial Sequence
  Oligonucleotide for detection of SNP TSC0007330
gatagtgttggga

SEQ ID NO: 26978 - DNA, 13 bp, Artificial Sequence
  Oligonucleotide for detection of SNP TSC0007330
tcccaacactatc

SEQ ID NO: 26979 - DNA, 13 bp, Artificial Sequence
  Oligonucleotide for detection of SNP TSC0007330
gatagtattggga

SEQ ID NO: 26980 - DNA, 13 bp, Artificial Sequence
  Oligonucleotide for detection of SNP TSC0007330
tcccaatactatc

SEQ ID NO: 26981 - DNA, 13 bp, Artificial Sequence
  Oligonucleotide for detection of SNP TSC0007330
gatagcgttggga

SEQ ID NO: 26982 - DNA, 13 bp, Artificial Sequence
  Oligonucleotide for detection of SNP TSC0007330
tcccaacgctatc

SEQ ID NO: 26983 - DNA, 13 bp, Artificial Sequence
  Oligonucleotide for detection of SNP TSC0007333
ggagatatatatt

SEQ ID NO: 26984 - DNA, 13 bp, Artificial Sequence
  Oligonucleotide for detection of SNP TSC0007333
aatatatatctcc

SEQ ID NO: 26985 - DNA, 13 bp, Artificial Sequence
  Oligonucleotide for detection of SNP TSC0007333
ggagatgtatatt

SEQ ID NO: 26986 - DNA, 13 bp, Artificial Sequence
  Oligonucleotide for detection of SNP TSC0007333
aatatacatctcc

SEQ ID NO: 26987 - DNA, 13 bp, Artificial Sequence
  Oligonucleotide for detection of SNP TSC0007333
ggagacgtatatt

SEQ ID NO: 26988 - DNA, 13 bp, Artificial Sequence
  Oligonucleotide for detection of SNP TSC0007333
aatatacgtctcc

SEQ ID NO: 26989 - DNA, 13 bp, Artificial Sequence
  Oligonucleotide for detection of SNP TSC0007333
aatgtgtgtttty

SEQ ID NO: 26990 - DNA, 13 bp, Artificial Sequence
  Oligonucleotide for detection of SNP TSC0007333
raaaacacacatt

SEQ ID NO: 26991 - DNA, 13 bp, Artificial Sequence
  Oligonucleotide for detection of SNP TSC0007333
aatgtgcgtttty

SEQ ID NO: 26992 - DNA, 13 bp, Artificial Sequence
  Oligonucleotide for detection of SNP TSC0007333
raaaacgcacatt

SEQ ID NO: 26993 - DNA, 13 bp, Artificial Sequence
  Oligonucleotide for detection of SNP TSC0007334
gtttagagagtgt

SEQ ID NO: 26994 - DNA, 13 bp, Artificial Sequence
  Oligonucleotide for detection of SNP TSC0007334
acactctctaaac

SEQ ID NO: 26995 - DNA, 13 bp, Artificial Sequence
  Oligonucleotide for detection of SNP TSC0007334
gtttagggagtgt

SEQ ID NO: 26996 - DNA, 13 bp, Artificial Sequence
  Oligonucleotide for detection of SNP TSC0007334
acactccctaaac

SEQ ID NO: 26997 - DNA, 13 bp, Artificial Sequence
  Oligonucleotide for detection of SNP TSC0007338
gaatagagtgtga

SEQ ID NO: 26998 - DNA, 13 bp, Artificial Sequence
  Oligonucleotide for detection of SNP TSC0007338
tcacactctattc

SEQ ID NO: 26999 - DNA, 13 bp, Artificial Sequence
  Oligonucleotide for detection of SNP TSC0007338
gaatagggtgtga

SEQ ID NO: 27000 - DNA, 13 bp, Artificial Sequence
  Oligonucleotide for detection of SNP TSC0007338
tcacaccctattc

SEQ ID NO: 27001 - DNA, 13 bp, Artificial Sequence
  Oligonucleotide for detection of SNP TSC0007339
gtggtaaaaattg

SEQ ID NO: 27002 - DNA, 13 bp, Artificial Sequence
  Oligonucleotide for detection of SNP TSC0007339
caatttttaccac

SEQ ID NO: 27003 - DNA, 13 bp, Artificial Sequence
  Oligonucleotide for detection of SNP TSC0007339
gtggtagaaattg

SEQ ID NO: 27004 - DNA, 13 bp, Artificial Sequence
  Oligonucleotide for detection of SNP TSC0007339
caatttctaccac

SEQ ID NO: 27005 - DNA, 13 bp, Artificial Sequence
  Oligonucleotide for detection of SNP TSC0007340
atttttttgtaat

SEQ ID NO: 27006 - DNA, 13 bp, Artificial Sequence
  Oligonucleotide for detection of SNP TSC0007340
attacaaaaaaat

SEQ ID NO: 27007 - DNA, 13 bp, Artificial Sequence
  Oligonucleotide for detection of SNP TSC0007340
atttttgtgtaat

SEQ ID NO: 27008 - DNA, 13 bp, Artificial Sequence
  Oligonucleotide for detection of SNP TSC0007340
attacacaaaaat

SEQ ID NO: 27009 - DNA, 13 bp, Artificial Sequence
  Oligonucleotide for detection of SNP TSC0007340
attgtagagaaat

SEQ ID NO: 27010 - DNA, 13 bp, Artificial Sequence
  Oligonucleotide for detection of SNP TSC0007340
atttctctacaat

SEQ ID NO: 27011 - DNA, 13 bp, Artificial Sequence
  Oligonucleotide for detection of SNP TSC0007340
attgtatagaaat

SEQ ID NO: 27012 - DNA, 13 bp, Artificial Sequence
  Oligonucleotide for detection of SNP TSC0007340
atttctatacaat

SEQ ID NO: 27013 - DNA, 13 bp, Artificial Sequence
  Oligonucleotide for detection of SNP TSC0007341
gagtttagaagtt

SEQ ID NO: 27014 - DNA, 13 bp, Artificial Sequence
  Oligonucleotide for detection of SNP TSC0007341
aacttctaaactc

SEQ ID NO: 27015 - DNA, 13 bp, Artificial Sequence
  Oligonucleotide for detection of SNP TSC0007341
gagtttggaagtt

SEQ ID NO: 27016 - DNA, 13 bp, Artificial Sequence
  Oligonucleotide for detection of SNP TSC0007341
aacttccaaactc

SEQ ID NO: 27017 - DNA, 13 bp, Artificial Sequence
  Oligonucleotide for detection of SNP TSC0007341
gagttcggaagtt

SEQ ID NO: 27018 - DNA, 13 bp, Artificial Sequence
  Oligonucleotide for detection of SNP TSC0007341
aacttccgaactc

SEQ ID NO: 27019 - DNA, 13 bp, Artificial Sequence
  Oligonucleotide for detection of SNP TSC0007341
aatttttgggtty

SEQ ID NO: 27020 - DNA, 13 bp, Artificial Sequence
  Oligonucleotide for detection of SNP TSC0007341
raacccaaaaatt

SEQ ID NO: 27021 - DNA, 13 bp, Artificial Sequence
  Oligonucleotide for detection of SNP TSC0007341
aattttcgggtty

SEQ ID NO: 27022 - DNA, 13 bp, Artificial Sequence
  Oligonucleotide for detection of SNP TSC0007341
raacccgaaaatt

SEQ ID NO: 27023 - DNA, 13 bp, Artificial Sequence
  Oligonucleotide for detection of SNP TSC0007346
tattgtgagggta

SEQ ID NO: 27024 - DNA, 13 bp, Artificial Sequence
  Oligonucleotide for detection of SNP TSC0007346
taccctcacaata

SEQ ID NO: 27025 - DNA, 13 bp, Artificial Sequence
  Oligonucleotide for detection of SNP TSC0007346
tattgtaagggta

SEQ ID NO: 27026 - DNA, 13 bp, Artificial Sequence
  Oligonucleotide for detection of SNP TSC0007346
tacccttacaata

SEQ ID NO: 27027 - DNA, 13 bp, Artificial Sequence
  Oligonucleotide for detection of SNP TSC0007347
gaaattattgttg

SEQ ID NO: 27028 - DNA, 13 bp, Artificial Sequence
  Oligonucleotide for detection of SNP TSC0007347
caacaataatttc

SEQ ID NO: 27029 - DNA, 13 bp, Artificial Sequence
  Oligonucleotide for detection of SNP TSC0007347
gaaatttttgttg

SEQ ID NO: 27030 - DNA, 13 bp, Artificial Sequence
  Oligonucleotide for detection of SNP TSC0007347
caacaaaaatttc

SEQ ID NO: 27031 - DNA, 13 bp, Artificial Sequence
  Oligonucleotide for detection of SNP TSC0007347
gaaattatcgttg

SEQ ID NO: 27032 - DNA, 13 bp, Artificial Sequence
  Oligonucleotide for detection of SNP TSC0007347
caacgataatttc

SEQ ID NO: 27033 - DNA, 13 bp, Artificial Sequence
  Oligonucleotide for detection of SNP TSC0007347
gaaattttcgttg

SEQ ID NO: 27034 - DNA, 13 bp, Artificial Sequence
  Oligonucleotide for detection of SNP TSC0007347
caacgaaaatttc

SEQ ID NO: 27035 - DNA, 13 bp, Artificial Sequence
  Oligonucleotide for detection of SNP TSC0007347
tagtgataattty

SEQ ID NO: 27036 - DNA, 13 bp, Artificial Sequence
  Oligonucleotide for detection of SNP TSC0007347
raaattatcacta

SEQ ID NO: 27037 - DNA, 13 bp, Artificial Sequence
  Oligonucleotide for detection of SNP TSC0007347
tagtgagaattty

SEQ ID NO: 27038 - DNA, 13 bp, Artificial Sequence
  Oligonucleotide for detection of SNP TSC0007347
raaattctcacta

SEQ ID NO: 27039 - DNA, 13 bp, Artificial Sequence
  Oligonucleotide for detection of SNP TSC0007347
tagcgataattty

SEQ ID NO: 27040 - DNA, 13 bp, Artificial Sequence
  Oligonucleotide for detection of SNP TSC0007347
raaattatcgcta

SEQ ID NO: 27041 - DNA, 13 bp, Artificial Sequence
  Oligonucleotide for detection of SNP TSC0007347
tagcgagaattty

SEQ ID NO: 27042 - DNA, 13 bp, Artificial Sequence
  Oligonucleotide for detection of SNP TSC0007347
raaattctcgcta

SEQ ID NO: 27043 - DNA, 13 bp, Artificial Sequence
  Oligonucleotide for detection of SNP TSC0007352
tatggttttgtgt

SEQ ID NO: 27044 - DNA, 13 bp, Artificial Sequence
  Oligonucleotide for detection of SNP TSC0007352
acacaaaaccata

SEQ ID NO: 27045 - DNA, 13 bp, Artificial Sequence
  Oligonucleotide for detection of SNP TSC0007352
tatggtgttgtgt

SEQ ID NO: 27046 - DNA, 13 bp, Artificial Sequence
  Oligonucleotide for detection of SNP TSC0007352
acacaacaccata

SEQ ID NO: 27047 - DNA, 13 bp, Artificial Sequence
  Oligonucleotide for detection of SNP TSC0007352
atataggattata

SEQ ID NO: 27048 - DNA, 13 bp, Artificial Sequence
  Oligonucleotide for detection of SNP TSC0007352
tataatcctatat

SEQ ID NO: 27049 - DNA, 13 bp, Artificial Sequence
  Oligonucleotide for detection of SNP TSC0007352
atatagtattata

SEQ ID NO: 27050 - DNA, 13 bp, Artificial Sequence
  Oligonucleotide for detection of SNP TSC0007352
tataatactatat

SEQ ID NO: 27051 - DNA, 13 bp, Artificial Sequence
  Oligonucleotide for detection of SNP TSC0007367
gattttatatgty

SEQ ID NO: 27052 - DNA, 13 bp, Artificial Sequence
  Oligonucleotide for detection of SNP TSC0007367
racatataaaatc

SEQ ID NO: 27053 - DNA, 13 bp, Artificial Sequence
  Oligonucleotide for detection of SNP TSC0007367
gattttgtatgty

SEQ ID NO: 27054 - DNA, 13 bp, Artificial Sequence
  Oligonucleotide for detection of SNP TSC0007367
racatacaaaatc

SEQ ID NO: 27055 - DNA, 13 bp, Artificial Sequence
  Oligonucleotide for detection of SNP TSC0007368
atttttatttgty

SEQ ID NO: 27056 - DNA, 13 bp, Artificial Sequence
  Oligonucleotide for detection of SNP TSC0007368
racaaataaaaat

SEQ ID NO: 27057 - DNA, 13 bp, Artificial Sequence
  Oligonucleotide for detection of SNP TSC0007368
atttttgtttgty

SEQ ID NO: 27058 - DNA, 13 bp, Artificial Sequence
  Oligonucleotide for detection of SNP TSC0007368
racaaacaaaaat

SEQ ID NO: 27059 - DNA, 13 bp, Artificial Sequence
  Oligonucleotide for detection of SNP TSC0007373
tgtttaggtaata

SEQ ID NO: 27060 - DNA, 13 bp, Artificial Sequence
  Oligonucleotide for detection of SNP TSC0007373
tattacctaaaca

SEQ ID NO: 27061 - DNA, 13 bp, Artificial Sequence
  Oligonucleotide for detection of SNP TSC0007373
tgtttaagtaata

SEQ ID NO: 27062 - DNA, 13 bp, Artificial Sequence
  Oligonucleotide for detection of SNP TSC0007373
tattacttaaaca

SEQ ID NO: 27063 - DNA, 13 bp, Artificial Sequence
  Oligonucleotide for detection of SNP TSC0007376
atttttattattg

SEQ ID NO: 27064 - DNA, 13 bp, Artificial Sequence
  Oligonucleotide for detection of SNP TSC0007376
caataataaaaat

SEQ ID NO: 27065 - DNA, 13 bp, Artificial Sequence
  Oligonucleotide for detection of SNP TSC0007376
atttttgttattg

SEQ ID NO: 27066 - DNA, 13 bp, Artificial Sequence
  Oligonucleotide for detection of SNP TSC0007376
caataacaaaaat

SEQ ID NO: 27067 - DNA, 13 bp, Artificial Sequence
  Oligonucleotide for detection of SNP TSC0007377
ggttaaaaaagaa

SEQ ID NO: 27068 - DNA, 13 bp, Artificial Sequence
  Oligonucleotide for detection of SNP TSC0007377
ttcttttttaacc

SEQ ID NO: 27069 - DNA, 13 bp, Artificial Sequence
  Oligonucleotide for detection of SNP TSC0007377
ggttaataaagaa

SEQ ID NO: 27070 - DNA, 13 bp, Artificial Sequence
  Oligonucleotide for detection of SNP TSC0007377
ttctttattaacc

SEQ ID NO: 27071 - DNA, 13 bp, Artificial Sequence
  Oligonucleotide for detection of SNP TSC0007377
tttttttttggty

SEQ ID NO: 27072 - DNA, 13 bp, Artificial Sequence
  Oligonucleotide for detection of SNP TSC0007377
raccaaaaaaaaa

SEQ ID NO: 27073 - DNA, 13 bp, Artificial Sequence
  Oligonucleotide for detection of SNP TSC0007377
ttttttgttggty

SEQ ID NO: 27074 - DNA, 13 bp, Artificial Sequence
  Oligonucleotide for detection of SNP TSC0007377
raccaacaaaaaa

SEQ ID NO: 27075 - DNA, 13 bp, Artificial Sequence
  Oligonucleotide for detection of SNP TSC0007378
aaggaatgtgggt

SEQ ID NO: 27076 - DNA, 13 bp, Artificial Sequence
  Oligonucleotide for detection of SNP TSC0007378
acccacattcctt

SEQ ID NO: 27077 - DNA, 13 bp, Artificial Sequence
  Oligonucleotide for detection of SNP TSC0007378
aaggaacgtgggt

SEQ ID NO: 27078 - DNA, 13 bp, Artificial Sequence
  Oligonucleotide for detection of SNP TSC0007378
acccacgttcctt

SEQ ID NO: 27079 - DNA, 13 bp, Artificial Sequence
  Oligonucleotide for detection of SNP TSC0007378
aaggaatgcgggt

SEQ ID NO: 27080 - DNA, 13 bp, Artificial Sequence
  Oligonucleotide for detection of SNP TSC0007378
acccgcattcctt

SEQ ID NO: 27081 - DNA, 13 bp, Artificial Sequence
  Oligonucleotide for detection of SNP TSC0007378
aaggaacgcgggt

SEQ ID NO: 27082 - DNA, 13 bp, Artificial Sequence
  Oligonucleotide for detection of SNP TSC0007378
acccgcgttcctt

SEQ ID NO: 27083 - DNA, 13 bp, Artificial Sequence
  Oligonucleotide for detection of SNP TSC0007378
atttgtgtttttt

SEQ ID NO: 27084 - DNA, 13 bp, Artificial Sequence
  Oligonucleotide for detection of SNP TSC0007378
aaaaaacacaaat

SEQ ID NO: 27085 - DNA, 13 bp, Artificial Sequence
  Oligonucleotide for detection of SNP TSC0007378
atttgtatttttt

SEQ ID NO: 27086 - DNA, 13 bp, Artificial Sequence
  Oligonucleotide for detection of SNP TSC0007378
aaaaaatacaaat

SEQ ID NO: 27087 - DNA, 13 bp, Artificial Sequence
  Oligonucleotide for detection of SNP TSC0007378
attcgtgtttttt

SEQ ID NO: 27088 - DNA, 13 bp, Artificial Sequence
  Oligonucleotide for detection of SNP TSC0007378
aaaaaacacgaat

SEQ ID NO: 27089 - DNA, 13 bp, Artificial Sequence
  Oligonucleotide for detection of SNP TSC0007378
attcgtatttttt

SEQ ID NO: 27090 - DNA, 13 bp, Artificial Sequence
  Oligonucleotide for detection of SNP TSC0007378
aaaaaatacgaat

SEQ ID NO: 27091 - DNA, 13 bp, Artificial Sequence
  Oligonucleotide for detection of SNP TSC0007378
atttgcgtttttt

SEQ ID NO: 27092 - DNA, 13 bp, Artificial Sequence
  Oligonucleotide for detection of SNP TSC0007378
aaaaaacgcaaat

SEQ ID NO: 27093 - DNA, 13 bp, Artificial Sequence
  Oligonucleotide for detection of SNP TSC0007378
attcgcgtttttt

SEQ ID NO: 27094 - DNA, 13 bp, Artificial Sequence
  Oligonucleotide for detection of SNP TSC0007378
aaaaaacgcgaat

SEQ ID NO: 27095 - DNA, 13 bp, Artificial Sequence
  Oligonucleotide for detection of SNP TSC0007379
tatattttaatty

SEQ ID NO: 27096 - DNA, 13 bp, Artificial Sequence
  Oligonucleotide for detection of SNP TSC0007379
raattaaaatata

SEQ ID NO: 27097 - DNA, 13 bp, Artificial Sequence
  Oligonucleotide for detection of SNP TSC0007379
tatattgtaatty

SEQ ID NO: 27098 - DNA, 13 bp, Artificial Sequence
  Oligonucleotide for detection of SNP TSC0007379
raattacaatata

SEQ ID NO: 27099 - DNA, 13 bp, Artificial Sequence
  Oligonucleotide for detection of SNP TSC0007379
tatatcgtaatty

SEQ ID NO: 27100 - DNA, 13 bp, Artificial Sequence
  Oligonucleotide for detection of SNP TSC0007379
raattacgatata

SEQ ID NO: 27101 - DNA, 13 bp, Artificial Sequence
  Oligonucleotide for detection of SNP TSC0007379
ggattagggtgta

SEQ ID NO: 27102 - DNA, 13 bp, Artificial Sequence
  Oligonucleotide for detection of SNP TSC0007379
tacaccctaatcc

SEQ ID NO: 27103 - DNA, 13 bp, Artificial Sequence
  Oligonucleotide for detection of SNP TSC0007379
ggattatggtgta

SEQ ID NO: 27104 - DNA, 13 bp, Artificial Sequence
  Oligonucleotide for detection of SNP TSC0007379
tacaccataatcc

SEQ ID NO: 27105 - DNA, 13 bp, Artificial Sequence
  Oligonucleotide for detection of SNP TSC0007379
ggattacggtgta

SEQ ID NO: 27106 - DNA, 13 bp, Artificial Sequence
  Oligonucleotide for detection of SNP TSC0007379
tacaccgtaatcc

SEQ ID NO: 27107 - DNA, 13 bp, Artificial Sequence
  Oligonucleotide for detection of SNP TSC0007380
ttttttattattt

SEQ ID NO: 27108 - DNA, 13 bp, Artificial Sequence
  Oligonucleotide for detection of SNP TSC0007380
aaataataaaaaa

SEQ ID NO: 27109 - DNA, 13 bp, Artificial Sequence
  Oligonucleotide for detection of SNP TSC0007380
tttttttttattt

SEQ ID NO: 27110 - DNA, 13 bp, Artificial Sequence
  Oligonucleotide for detection of SNP TSC0007380
aaataaaaaaaaa

SEQ ID NO: 27111 - DNA, 13 bp, Artificial Sequence
  Oligonucleotide for detection of SNP TSC0007380
aggtaataaaagg

SEQ ID NO: 27112 - DNA, 13 bp, Artificial Sequence
  Oligonucleotide for detection of SNP TSC0007380
ccttttattacct

SEQ ID NO: 27113 - DNA, 13 bp, Artificial Sequence
  Oligonucleotide for detection of SNP TSC0007380
aggtaaaaaaagg

SEQ ID NO: 27114 - DNA, 13 bp, Artificial Sequence
  Oligonucleotide for detection of SNP TSC0007380
cctttttttacct

SEQ ID NO: 27115 - DNA, 13 bp, Artificial Sequence
  Oligonucleotide for detection of SNP TSC0007381
tagtgatgtgaaa

SEQ ID NO: 27116 - DNA, 13 bp, Artificial Sequence
  Oligonucleotide for detection of SNP TSC0007381
tttcacatcacta

SEQ ID NO: 27117 - DNA, 13 bp, Artificial Sequence
  Oligonucleotide for detection of SNP TSC0007381
tagtgacgtgaaa

SEQ ID NO: 27118 - DNA, 13 bp, Artificial Sequence
  Oligonucleotide for detection of SNP TSC0007381
tttcacgtcacta

SEQ ID NO: 27119 - DNA, 13 bp, Artificial Sequence
  Oligonucleotide for detection of SNP TSC0007381
ttttatgttattg

SEQ ID NO: 27120 - DNA, 13 bp, Artificial Sequence
  Oligonucleotide for detection of SNP TSC0007381
caataacataaaa

SEQ ID NO: 27121 - DNA, 13 bp, Artificial Sequence
  Oligonucleotide for detection of SNP TSC0007381
ttttatattattg

SEQ ID NO: 27122 - DNA, 13 bp, Artificial Sequence
  Oligonucleotide for detection of SNP TSC0007381
caataatataaaa

SEQ ID NO: 27123 - DNA, 13 bp, Artificial Sequence
  Oligonucleotide for detection of SNP TSC0007381
ttttacgttattg

SEQ ID NO: 27124 - DNA, 13 bp, Artificial Sequence
  Oligonucleotide for detection of SNP TSC0007381
caataacgtaaaa

SEQ ID NO: 27125 - DNA, 13 bp, Artificial Sequence
  Oligonucleotide for detection of SNP TSC0007383
ttttttatggtta

SEQ ID NO: 27126 - DNA, 13 bp, Artificial Sequence
  Oligonucleotide for detection of SNP TSC0007383
taaccataaaaaa

SEQ ID NO: 27127 - DNA, 13 bp, Artificial Sequence
  Oligonucleotide for detection of SNP TSC0007383
ttttttgtggtta

SEQ ID NO: 27128 - DNA, 13 bp, Artificial Sequence
  Oligonucleotide for detection of SNP TSC0007383
taaccacaaaaaa

SEQ ID NO: 27129 - DNA, 13 bp, Artificial Sequence
  Oligonucleotide for detection of SNP TSC0007383
tttttcgtggtta

SEQ ID NO: 27130 - DNA, 13 bp, Artificial Sequence
  Oligonucleotide for detection of SNP TSC0007383
taaccacgaaaaa

SEQ ID NO: 27131 - DNA, 13 bp, Artificial Sequence
  Oligonucleotide for detection of SNP TSC0007383
taattatggagga

SEQ ID NO: 27132 - DNA, 13 bp, Artificial Sequence
  Oligonucleotide for detection of SNP TSC0007383
tcctccataatta

SEQ ID NO: 27133 - DNA, 13 bp, Artificial Sequence
  Oligonucleotide for detection of SNP TSC0007383
taattacggagga

SEQ ID NO: 27134 - DNA, 13 bp, Artificial Sequence
  Oligonucleotide for detection of SNP TSC0007383
tcctccgtaatta

SEQ ID NO: 27135 - DNA, 13 bp, Artificial Sequence
  Oligonucleotide for detection of SNP TSC0007384
tgatttaaatgty

SEQ ID NO: 27136 - DNA, 13 bp, Artificial Sequence
  Oligonucleotide for detection of SNP TSC0007384
racatttaaatca

SEQ ID NO: 27137 - DNA, 13 bp, Artificial Sequence
  Oligonucleotide for detection of SNP TSC0007384
tgattttaatgty

SEQ ID NO: 27138 - DNA, 13 bp, Artificial Sequence
  Oligonucleotide for detection of SNP TSC0007384
racattaaaatca

SEQ ID NO: 27139 - DNA, 13 bp, Artificial Sequence
  Oligonucleotide for detection of SNP TSC0007384
gatatttaagtta

SEQ ID NO: 27140 - DNA, 13 bp, Artificial Sequence
  Oligonucleotide for detection of SNP TSC0007384
taacttaaatatc

SEQ ID NO: 27141 - DNA, 13 bp, Artificial Sequence
  Oligonucleotide for detection of SNP TSC0007384
gatattaaagtta

SEQ ID NO: 27142 - DNA, 13 bp, Artificial Sequence
  Oligonucleotide for detection of SNP TSC0007384
taactttaatatc

SEQ ID NO: 27143 - DNA, 13 bp, Artificial Sequence
  Oligonucleotide for detection of SNP TSC0007385
gaagaggggatag

SEQ ID NO: 27144 - DNA, 13 bp, Artificial Sequence
  Oligonucleotide for detection of SNP TSC0007385
ctatcccctcttc

SEQ ID NO: 27145 - DNA, 13 bp, Artificial Sequence
  Oligonucleotide for detection of SNP TSC0007385
gaagagaggatag

SEQ ID NO: 27146 - DNA, 13 bp, Artificial Sequence
  Oligonucleotide for detection of SNP TSC0007385
ctatcctctcttc

SEQ ID NO: 27147 - DNA, 13 bp, Artificial Sequence
  Oligonucleotide for detection of SNP TSC0007386
aaaggatgagtta

SEQ ID NO: 27148 - DNA, 13 bp, Artificial Sequence
  Oligonucleotide for detection of SNP TSC0007386
taactcatccttt

SEQ ID NO: 27149 - DNA, 13 bp, Artificial Sequence
  Oligonucleotide for detection of SNP TSC0007386
aaaggacgagtta

SEQ ID NO: 27150 - DNA, 13 bp, Artificial Sequence
  Oligonucleotide for detection of SNP TSC0007386
taactcgtccttt

SEQ ID NO: 27151 - DNA, 13 bp, Artificial Sequence
  Oligonucleotide for detection of SNP TSC0007386
tgatttgtttttt

SEQ ID NO: 27152 - DNA, 13 bp, Artificial Sequence
  Oligonucleotide for detection of SNP TSC0007386
aaaaaacaaatca

SEQ ID NO: 27153 - DNA, 13 bp, Artificial Sequence
  Oligonucleotide for detection of SNP TSC0007386
tgatttatttttt

SEQ ID NO: 27154 - DNA, 13 bp, Artificial Sequence
  Oligonucleotide for detection of SNP TSC0007386
aaaaaataaatca

SEQ ID NO: 27155 - DNA, 13 bp, Artificial Sequence
  Oligonucleotide for detection of SNP TSC0007386
tgattcgtttttt

SEQ ID NO: 27156 - DNA, 13 bp, Artificial Sequence
  Oligonucleotide for detection of SNP TSC0007386
aaaaaacgaatca

SEQ ID NO: 27157 - DNA, 13 bp, Artificial Sequence
  Oligonucleotide for detection of SNP TSC0007387
ttagatgttttty

SEQ ID NO: 27158 - DNA, 13 bp, Artificial Sequence
  Oligonucleotide for detection of SNP TSC0007387
raaaaacatctaa

SEQ ID NO: 27159 - DNA, 13 bp, Artificial Sequence
  Oligonucleotide for detection of SNP TSC0007387
ttagatattttty

SEQ ID NO: 27160 - DNA, 13 bp, Artificial Sequence
  Oligonucleotide for detection of SNP TSC0007387
raaaaatatctaa

SEQ ID NO: 27161 - DNA, 13 bp, Artificial Sequence
  Oligonucleotide for detection of SNP TSC0007388
gtataagttatty

SEQ ID NO: 27162 - DNA, 13 bp, Artificial Sequence
  Oligonucleotide for detection of SNP TSC0007388
raataacttatac

SEQ ID NO: 27163 - DNA, 13 bp, Artificial Sequence
  Oligonucleotide for detection of SNP TSC0007388
gtataatttatty

SEQ ID NO: 27164 - DNA, 13 bp, Artificial Sequence
  Oligonucleotide for detection of SNP TSC0007388
raataaattatac

SEQ ID NO: 27165 - DNA, 13 bp, Artificial Sequence
  Oligonucleotide for detection of SNP TSC0007388
gagtaatttatgy

SEQ ID NO: 27166 - DNA, 13 bp, Artificial Sequence
  Oligonucleotide for detection of SNP TSC0007388
rcataaattactc

SEQ ID NO: 27167 - DNA, 13 bp, Artificial Sequence
  Oligonucleotide for detection of SNP TSC0007388
gagtaaattatgy

SEQ ID NO: 27168 - DNA, 13 bp, Artificial Sequence
  Oligonucleotide for detection of SNP TSC0007388
rcataatttactc

SEQ ID NO: 27169 - DNA, 13 bp, Artificial Sequence
  Oligonucleotide for detection of SNP TSC0007389
ttatgtataaggg

SEQ ID NO: 27170 - DNA, 13 bp, Artificial Sequence
  Oligonucleotide for detection of SNP TSC0007389
cccttatacataa

SEQ ID NO: 27171 - DNA, 13 bp, Artificial Sequence
  Oligonucleotide for detection of SNP TSC0007389
ttatgtgtaaggg

SEQ ID NO: 27172 - DNA, 13 bp, Artificial Sequence
  Oligonucleotide for detection of SNP TSC0007389
cccttacacataa

SEQ ID NO: 27173 - DNA, 13 bp, Artificial Sequence
  Oligonucleotide for detection of SNP TSC0007392
ttttagatattat

SEQ ID NO: 27174 - DNA, 13 bp, Artificial Sequence
  Oligonucleotide for detection of SNP TSC0007392
ataatatctaaaa

SEQ ID NO: 27175 - DNA, 13 bp, Artificial Sequence
  Oligonucleotide for detection of SNP TSC0007392
ttttaggtattat

SEQ ID NO: 27176 - DNA, 13 bp, Artificial Sequence
  Oligonucleotide for detection of SNP TSC0007392
ataatacctaaaa

SEQ ID NO: 27177 - DNA, 13 bp, Artificial Sequence
  Oligonucleotide for detection of SNP TSC0007393
tagtaaaaagaaa

SEQ ID NO: 27178 - DNA, 13 bp, Artificial Sequence
  Oligonucleotide for detection of SNP TSC0007393
tttctttttacta

SEQ ID NO: 27179 - DNA, 13 bp, Artificial Sequence
  Oligonucleotide for detection of SNP TSC0007393
tagtaagaagaaa

SEQ ID NO: 27180 - DNA, 13 bp, Artificial Sequence
  Oligonucleotide for detection of SNP TSC0007393
tttcttcttacta

SEQ ID NO: 27181 - DNA, 13 bp, Artificial Sequence
  Oligonucleotide for detection of SNP TSC0007403
tattttatattty

SEQ ID NO: 27182 - DNA, 13 bp, Artificial Sequence
  Oligonucleotide for detection of SNP TSC0007403
raaatataaaata

SEQ ID NO: 27183 - DNA, 13 bp, Artificial Sequence
  Oligonucleotide for detection of SNP TSC0007403
tattttgtattty

SEQ ID NO: 27184 - DNA, 13 bp, Artificial Sequence
  Oligonucleotide for detection of SNP TSC0007403
raaatacaaaata

SEQ ID NO: 27185 - DNA, 13 bp, Artificial Sequence
  Oligonucleotide for detection of SNP TSC0007404
tgttagattttty

SEQ ID NO: 27186 - DNA, 13 bp, Artificial Sequence
  Oligonucleotide for detection of SNP TSC0007404
raaaaatctaaca

SEQ ID NO: 27187 - DNA, 13 bp, Artificial Sequence
  Oligonucleotide for detection of SNP TSC0007404
tgttagtttttty

SEQ ID NO: 27188 - DNA, 13 bp, Artificial Sequence
  Oligonucleotide for detection of SNP TSC0007404
raaaaaactaaca

SEQ ID NO: 27189 - DNA, 13 bp, Artificial Sequence
  Oligonucleotide for detection of SNP TSC0007404
gaagggtttggta

SEQ ID NO: 27190 - DNA, 13 bp, Artificial Sequence
  Oligonucleotide for detection of SNP TSC0007404
taccaaacccttc

SEQ ID NO: 27191 - DNA, 13 bp, Artificial Sequence
  Oligonucleotide for detection of SNP TSC0007404
gaaggggttggta

SEQ ID NO: 27192 - DNA, 13 bp, Artificial Sequence
  Oligonucleotide for detection of SNP TSC0007404
taccaaccccttc

SEQ ID NO: 27193 - DNA, 13 bp, Artificial Sequence
  Oligonucleotide for detection of SNP TSC0007405
ttaggaggtattg

SEQ ID NO: 27194 - DNA, 13 bp, Artificial Sequence
  Oligonucleotide for detection of SNP TSC0007405
caatacctcctaa

SEQ ID NO: 27195 - DNA, 13 bp, Artificial Sequence
  Oligonucleotide for detection of SNP TSC0007405
ttaggaagtattg

SEQ ID NO: 27196 - DNA, 13 bp, Artificial Sequence
  Oligonucleotide for detection of SNP TSC0007405
caatacttcctaa

SEQ ID NO: 27197 - DNA, 13 bp, Artificial Sequence
  Oligonucleotide for detection of SNP TSC0007411
gaagaaaaagtta

SEQ ID NO: 27198 - DNA, 13 bp, Artificial Sequence
  Oligonucleotide for detection of SNP TSC0007411
taactttttcttc

SEQ ID NO: 27199 - DNA, 13 bp, Artificial Sequence
  Oligonucleotide for detection of SNP TSC0007411
gaagaagaagtta

SEQ ID NO: 27200 - DNA, 13 bp, Artificial Sequence
  Oligonucleotide for detection of SNP TSC0007411
taacttcttcttc

SEQ ID NO: 27201 - DNA, 13 bp, Artificial Sequence
  Oligonucleotide for detection of SNP TSC0007412
ggttgttgtgaty

SEQ ID NO: 27202 - DNA, 13 bp, Artificial Sequence
  Oligonucleotide for detection of SNP TSC0007412
ratcacaacaacc

SEQ ID NO: 27203 - DNA, 13 bp, Artificial Sequence
  Oligonucleotide for detection of SNP TSC0007412
ggttgtggtgaty

SEQ ID NO: 27204 - DNA, 13 bp, Artificial Sequence
  Oligonucleotide for detection of SNP TSC0007412
ratcaccacaacc

SEQ ID NO: 27205 - DNA, 13 bp, Artificial Sequence
  Oligonucleotide for detection of SNP TSC0007412
ggttgtcgtgaty

SEQ ID NO: 27206 - DNA, 13 bp, Artificial Sequence
  Oligonucleotide for detection of SNP TSC0007412
ratcacgacaacc

SEQ ID NO: 27207 - DNA, 13 bp, Artificial Sequence
  Oligonucleotide for detection of SNP TSC0007412
ggttgcggtgaty

SEQ ID NO: 27208 - DNA, 13 bp, Artificial Sequence
  Oligonucleotide for detection of SNP TSC0007412
ratcaccgcaacc

SEQ ID NO: 27209 - DNA, 13 bp, Artificial Sequence
  Oligonucleotide for detection of SNP TSC0007412
gattatggtaaty

SEQ ID NO: 27210 - DNA, 13 bp, Artificial Sequence
  Oligonucleotide for detection of SNP TSC0007412
rattaccataatc

SEQ ID NO: 27211 - DNA, 13 bp, Artificial Sequence
  Oligonucleotide for detection of SNP TSC0007412
gattattgtaaty

SEQ ID NO: 27212 - DNA, 13 bp, Artificial Sequence
  Oligonucleotide for detection of SNP TSC0007412
rattacaataatc

SEQ ID NO: 27213 - DNA, 13 bp, Artificial Sequence
  Oligonucleotide for detection of SNP TSC0007412
gattacggtaaty

SEQ ID NO: 27214 - DNA, 13 bp, Artificial Sequence
  Oligonucleotide for detection of SNP TSC0007412
rattaccgtaatc

SEQ ID NO: 27215 - DNA, 13 bp, Artificial Sequence
  Oligonucleotide for detection of SNP TSC0007412
gattatcgtaaty

SEQ ID NO: 27216 - DNA, 13 bp, Artificial Sequence
  Oligonucleotide for detection of SNP TSC0007412
rattacgataatc

SEQ ID NO: 27217 - DNA, 13 bp, Artificial Sequence
  Oligonucleotide for detection of SNP TSC0007413
gtttttggagaay

SEQ ID NO: 27218 - DNA, 13 bp, Artificial Sequence
  Oligonucleotide for detection of SNP TSC0007413
rttctccaaaaac

SEQ ID NO: 27219 - DNA, 13 bp, Artificial Sequence
  Oligonucleotide for detection of SNP TSC0007413
gttttttgagaay

SEQ ID NO: 27220 - DNA, 13 bp, Artificial Sequence
  Oligonucleotide for detection of SNP TSC0007413
rttctcaaaaaac

SEQ ID NO: 27221 - DNA, 13 bp, Artificial Sequence
  Oligonucleotide for detection of SNP TSC0007413
gttttcggagaay

SEQ ID NO: 27222 - DNA, 13 bp, Artificial Sequence
  Oligonucleotide for detection of SNP TSC0007413
rttctccgaaaac

SEQ ID NO: 27223 - DNA, 13 bp, Artificial Sequence
  Oligonucleotide for detection of SNP TSC0007413
gttttttgggagy

SEQ ID NO: 27224 - DNA, 13 bp, Artificial Sequence
  Oligonucleotide for detection of SNP TSC0007413
rctcccaaaaaac

SEQ ID NO: 27225 - DNA, 13 bp, Artificial Sequence
  Oligonucleotide for detection of SNP TSC0007413
gtttttagggagy

SEQ ID NO: 27226 - DNA, 13 bp, Artificial Sequence
  Oligonucleotide for detection of SNP TSC0007413
rctccctaaaaac

SEQ ID NO: 27227 - DNA, 13 bp, Artificial Sequence
  Oligonucleotide for detection of SNP TSC0007413
gtttttcgggagy

SEQ ID NO: 27228 - DNA, 13 bp, Artificial Sequence
  Oligonucleotide for detection of SNP TSC0007413
rctcccgaaaaac

SEQ ID NO: 27229 - DNA, 13 bp, Artificial Sequence
  Oligonucleotide for detection of SNP TSC0007414
atgggggggttgy

SEQ ID NO: 27230 - DNA, 13 bp, Artificial Sequence
  Oligonucleotide for detection of SNP TSC0007414
rcaacccccccat

SEQ ID NO: 27231 - DNA, 13 bp, Artificial Sequence
  Oligonucleotide for detection of SNP TSC0007414
atggggtggttgy

SEQ ID NO: 27232 - DNA, 13 bp, Artificial Sequence
  Oligonucleotide for detection of SNP TSC0007414
rcaaccaccccat

SEQ ID NO: 27233 - DNA, 13 bp, Artificial Sequence
  Oligonucleotide for detection of SNP TSC0007414
gtagtttttttat

SEQ ID NO: 27234 - DNA, 13 bp, Artificial Sequence
  Oligonucleotide for detection of SNP TSC0007414
ataaaaaaactac

SEQ ID NO: 27235 - DNA, 13 bp, Artificial Sequence
  Oligonucleotide for detection of SNP TSC0007414
gtagttattttat

SEQ ID NO: 27236 - DNA, 13 bp, Artificial Sequence
  Oligonucleotide for detection of SNP TSC0007414
ataaaataactac

SEQ ID NO: 27237 - DNA, 13 bp, Artificial Sequence
  Oligonucleotide for detection of SNP TSC0007425
aaatggtgatgat

SEQ ID NO: 27238 - DNA, 13 bp, Artificial Sequence
  Oligonucleotide for detection of SNP TSC0007425
atcatcaccattt

SEQ ID NO: 27239 - DNA, 13 bp, Artificial Sequence
  Oligonucleotide for detection of SNP TSC0007425
aaatggcgatgat

SEQ ID NO: 27240 - DNA, 13 bp, Artificial Sequence
  Oligonucleotide for detection of SNP TSC0007425
atcatcgccattt

SEQ ID NO: 27241 - DNA, 13 bp, Artificial Sequence
  Oligonucleotide for detection of SNP TSC0007425
attattgttattt

SEQ ID NO: 27242 - DNA, 13 bp, Artificial Sequence
  Oligonucleotide for detection of SNP TSC0007425
aaataacaataat

SEQ ID NO: 27243 - DNA, 13 bp, Artificial Sequence
  Oligonucleotide for detection of SNP TSC0007425
attattattattt

SEQ ID NO: 27244 - DNA, 13 bp, Artificial Sequence
  Oligonucleotide for detection of SNP TSC0007425
aaataataataat

SEQ ID NO: 27245 - DNA, 13 bp, Artificial Sequence
  Oligonucleotide for detection of SNP TSC0007425
attatcgttattt

SEQ ID NO: 27246 - DNA, 13 bp, Artificial Sequence
  Oligonucleotide for detection of SNP TSC0007425
aaataacgataat

SEQ ID NO: 27247 - DNA, 13 bp, Artificial Sequence
  Oligonucleotide for detection of SNP TSC0007450
gtttttagtttta

SEQ ID NO: 27248 - DNA, 13 bp, Artificial Sequence
  Oligonucleotide for detection of SNP TSC0007450
taaaactaaaaac

SEQ ID NO: 27249 - DNA, 13 bp, Artificial Sequence
  Oligonucleotide for detection of SNP TSC0007450
gtttttggtttta

SEQ ID NO: 27250 - DNA, 13 bp, Artificial Sequence
  Oligonucleotide for detection of SNP TSC0007450
taaaaccaaaaac

SEQ ID NO: 27251 - DNA, 13 bp, Artificial Sequence
  Oligonucleotide for detection of SNP TSC0007450
gttttcggtttta

SEQ ID NO: 27252 - DNA, 13 bp, Artificial Sequence
  Oligonucleotide for detection of SNP TSC0007450
taaaaccgaaaac

SEQ ID NO: 27253 - DNA, 13 bp, Artificial Sequence
  Oligonucleotide for detection of SNP TSC0007450
tggggttgaggay

SEQ ID NO: 27254 - DNA, 13 bp, Artificial Sequence
  Oligonucleotide for detection of SNP TSC0007450
rtcctcaacccca

SEQ ID NO: 27255 - DNA, 13 bp, Artificial Sequence
  Oligonucleotide for detection of SNP TSC0007450
tggggtcgaggay

SEQ ID NO: 27256 - DNA, 13 bp, Artificial Sequence
  Oligonucleotide for detection of SNP TSC0007450
rtcctcgacccca

SEQ ID NO: 27257 - DNA, 13 bp, Artificial Sequence
  Oligonucleotide for detection of SNP TSC0007454
ttaaaaattatty

SEQ ID NO: 27258 - DNA, 13 bp, Artificial Sequence
  Oligonucleotide for detection of SNP TSC0007454
raataatttttaa

SEQ ID NO: 27259 - DNA, 13 bp, Artificial Sequence
  Oligonucleotide for detection of SNP TSC0007454
ttaaaatttatty

SEQ ID NO: 27260 - DNA, 13 bp, Artificial Sequence
  Oligonucleotide for detection of SNP TSC0007454
raataaattttaa

SEQ ID NO: 27261 - DNA, 13 bp, Artificial Sequence
  Oligonucleotide for detection of SNP TSC0007454
ggatagtttttag

SEQ ID NO: 27262 - DNA, 13 bp, Artificial Sequence
  Oligonucleotide for detection of SNP TSC0007454
ctaaaaactatcc

SEQ ID NO: 27263 - DNA, 13 bp, Artificial Sequence
  Oligonucleotide for detection of SNP TSC0007454
ggataggttttag

SEQ ID NO: 27264 - DNA, 13 bp, Artificial Sequence
  Oligonucleotide for detection of SNP TSC0007454
ctaaaacctatcc

SEQ ID NO: 27265 - DNA, 13 bp, Artificial Sequence
  Oligonucleotide for detection of SNP TSC0007456
ttttgataatgaa

SEQ ID NO: 27266 - DNA, 13 bp, Artificial Sequence
  Oligonucleotide for detection of SNP TSC0007456
ttcattatcaaaa

SEQ ID NO: 27267 - DNA, 13 bp, Artificial Sequence
  Oligonucleotide for detection of SNP TSC0007456
ttttgagaatgaa

SEQ ID NO: 27268 - DNA, 13 bp, Artificial Sequence
  Oligonucleotide for detection of SNP TSC0007456
ttcattctcaaaa

SEQ ID NO: 27269 - DNA, 13 bp, Artificial Sequence
  Oligonucleotide for detection of SNP TSC0007456
tttattgttagga

SEQ ID NO: 27270 - DNA, 13 bp, Artificial Sequence
  Oligonucleotide for detection of SNP TSC0007456
tcctaacaataaa

SEQ ID NO: 27271 - DNA, 13 bp, Artificial Sequence
  Oligonucleotide for detection of SNP TSC0007456
tttatttttagga

SEQ ID NO: 27272 - DNA, 13 bp, Artificial Sequence
  Oligonucleotide for detection of SNP TSC0007456
tcctaaaaataaa

SEQ ID NO: 27273 - DNA, 13 bp, Artificial Sequence
  Oligonucleotide for detection of SNP TSC0007464
aagtaagaggttt

SEQ ID NO: 27274 - DNA, 13 bp, Artificial Sequence
  Oligonucleotide for detection of SNP TSC0007464
aaacctcttactt

SEQ ID NO: 27275 - DNA, 13 bp, Artificial Sequence
  Oligonucleotide for detection of SNP TSC0007464
aagtaaaaggttt

SEQ ID NO: 27276 - DNA, 13 bp, Artificial Sequence
  Oligonucleotide for detection of SNP TSC0007464
aaaccttttactt

SEQ ID NO: 27277 - DNA, 13 bp, Artificial Sequence
  Oligonucleotide for detection of SNP TSC0007466
aatattaggggta

SEQ ID NO: 27278 - DNA, 13 bp, Artificial Sequence
  Oligonucleotide for detection of SNP TSC0007466
tacccctaatatt

SEQ ID NO: 27279 - DNA, 13 bp, Artificial Sequence
  Oligonucleotide for detection of SNP TSC0007466
aatatttggggta

SEQ ID NO: 27280 - DNA, 13 bp, Artificial Sequence
  Oligonucleotide for detection of SNP TSC0007466
taccccaaatatt

SEQ ID NO: 27281 - DNA, 13 bp, Artificial Sequence
  Oligonucleotide for detection of SNP TSC0007466
tgtttttggtgtt

SEQ ID NO: 27282 - DNA, 13 bp, Artificial Sequence
  Oligonucleotide for detection of SNP TSC0007466
aacaccaaaaaca

SEQ ID NO: 27283 - DNA, 13 bp, Artificial Sequence
  Oligonucleotide for detection of SNP TSC0007466
tgttttaggtgtt

SEQ ID NO: 27284 - DNA, 13 bp, Artificial Sequence
  Oligonucleotide for detection of SNP TSC0007466
aacacctaaaaca

SEQ ID NO: 27285 - DNA, 13 bp, Artificial Sequence
  Oligonucleotide for detection of SNP TSC0007468
tgtttagttggtg

SEQ ID NO: 27286 - DNA, 13 bp, Artificial Sequence
  Oligonucleotide for detection of SNP TSC0007468
caccaactaaaca

SEQ ID NO: 27287 - DNA, 13 bp, Artificial Sequence
  Oligonucleotide for detection of SNP TSC0007468
tgtttaattggtg

SEQ ID NO: 27288 - DNA, 13 bp, Artificial Sequence
  Oligonucleotide for detection of SNP TSC0007468
caccaattaaaca

SEQ ID NO: 27289 - DNA, 13 bp, Artificial Sequence
  Oligonucleotide for detection of SNP TSC0007476
atttagttggtta

SEQ ID NO: 27290 - DNA, 13 bp, Artificial Sequence
  Oligonucleotide for detection of SNP TSC0007476
taaccaactaaat

SEQ ID NO: 27291 - DNA, 13 bp, Artificial Sequence
  Oligonucleotide for detection of SNP TSC0007476
atttaggtggtta

SEQ ID NO: 27292 - DNA, 13 bp, Artificial Sequence
  Oligonucleotide for detection of SNP TSC0007476
taaccacctaaat

SEQ ID NO: 27293 - DNA, 13 bp, Artificial Sequence
  Oligonucleotide for detection of SNP TSC0007476
tggttaattagat

SEQ ID NO: 27294 - DNA, 13 bp, Artificial Sequence
  Oligonucleotide for detection of SNP TSC0007476
atctaattaacca

SEQ ID NO: 27295 - DNA, 13 bp, Artificial Sequence
  Oligonucleotide for detection of SNP TSC0007476
tggttatttagat

SEQ ID NO: 27296 - DNA, 13 bp, Artificial Sequence
  Oligonucleotide for detection of SNP TSC0007476
atctaaataacca

SEQ ID NO: 27297 - DNA, 13 bp, Artificial Sequence
  Oligonucleotide for detection of SNP TSC0007479
ttatatatattat

SEQ ID NO: 27298 - DNA, 13 bp, Artificial Sequence
  Oligonucleotide for detection of SNP TSC0007479
ataatatatataa

SEQ ID NO: 27299 - DNA, 13 bp, Artificial Sequence
  Oligonucleotide for detection of SNP TSC0007479
ttatatgtattat

SEQ ID NO: 27300 - DNA, 13 bp, Artificial Sequence
  Oligonucleotide for detection of SNP TSC0007479
ataatacatataa

SEQ ID NO: 27301 - DNA, 13 bp, Artificial Sequence
  Oligonucleotide for detection of SNP TSC0007486
ttaaataattgty

SEQ ID NO: 27302 - DNA, 13 bp, Artificial Sequence
  Oligonucleotide for detection of SNP TSC0007486
racaattatttaa

SEQ ID NO: 27303 - DNA, 13 bp, Artificial Sequence
  Oligonucleotide for detection of SNP TSC0007486
ttaaattattgty

SEQ ID NO: 27304 - DNA, 13 bp, Artificial Sequence
  Oligonucleotide for detection of SNP TSC0007486
racaataatttaa

SEQ ID NO: 27305 - DNA, 13 bp, Artificial Sequence
  Oligonucleotide for detection of SNP TSC0007486
ggtagttgtttaa

SEQ ID NO: 27306 - DNA, 13 bp, Artificial Sequence
  Oligonucleotide for detection of SNP TSC0007486
ttaaacaactacc

SEQ ID NO: 27307 - DNA, 13 bp, Artificial Sequence
  Oligonucleotide for detection of SNP TSC0007486
ggtagtagtttaa

SEQ ID NO: 27308 - DNA, 13 bp, Artificial Sequence
  Oligonucleotide for detection of SNP TSC0007486
ttaaactactacc

SEQ ID NO: 27309 - DNA, 13 bp, Artificial Sequence
  Oligonucleotide for detection of SNP TSC0007487
attgttgtatttt

SEQ ID NO: 27310 - DNA, 13 bp, Artificial Sequence
  Oligonucleotide for detection of SNP TSC0007487
aaaatacaacaat

SEQ ID NO: 27311 - DNA, 13 bp, Artificial Sequence
  Oligonucleotide for detection of SNP TSC0007487
attgttatatttt

SEQ ID NO: 27312 - DNA, 13 bp, Artificial Sequence
  Oligonucleotide for detection of SNP TSC0007487
aaaatataacaat

SEQ ID NO: 27313 - DNA, 13 bp, Artificial Sequence
  Oligonucleotide for detection of SNP TSC0007488
ttaaaggggttgt

SEQ ID NO: 27314 - DNA, 13 bp, Artificial Sequence
  Oligonucleotide for detection of SNP TSC0007488
acaacccctttaa

SEQ ID NO: 27315 - DNA, 13 bp, Artificial Sequence
  Oligonucleotide for detection of SNP TSC0007488
ttaaagaggttgt

SEQ ID NO: 27316 - DNA, 13 bp, Artificial Sequence
  Oligonucleotide for detection of SNP TSC0007488
acaacctctttaa

SEQ ID NO: 27317 - DNA, 13 bp, Artificial Sequence
  Oligonucleotide for detection of SNP TSC0007489
taaaatgttgttg

SEQ ID NO: 27318 - DNA, 13 bp, Artificial Sequence
  Oligonucleotide for detection of SNP TSC0007489
caacaacatttta

SEQ ID NO: 27319 - DNA, 13 bp, Artificial Sequence
  Oligonucleotide for detection of SNP TSC0007489
taaaatattgttg

SEQ ID NO: 27320 - DNA, 13 bp, Artificial Sequence
  Oligonucleotide for detection of SNP TSC0007489
caacaatatttta

SEQ ID NO: 27321 - DNA, 13 bp, Artificial Sequence
  Oligonucleotide for detection of SNP TSC0007502
gttagtgtgtgta

SEQ ID NO: 27322 - DNA, 13 bp, Artificial Sequence
  Oligonucleotide for detection of SNP TSC0007502
tacacacactaac

SEQ ID NO: 27323 - DNA, 13 bp, Artificial Sequence
  Oligonucleotide for detection of SNP TSC0007502
gttagtatgtgta

SEQ ID NO: 27324 - DNA, 13 bp, Artificial Sequence
  Oligonucleotide for detection of SNP TSC0007502
tacacatactaac

SEQ ID NO: 27325 - DNA, 13 bp, Artificial Sequence
  Oligonucleotide for detection of SNP TSC0007511
gatgtggataatg

SEQ ID NO: 27326 - DNA, 13 bp, Artificial Sequence
  Oligonucleotide for detection of SNP TSC0007511
cattatccacatc

SEQ ID NO: 27327 - DNA, 13 bp, Artificial Sequence
  Oligonucleotide for detection of SNP TSC0007511
gatgtgaataatg

SEQ ID NO: 27328 - DNA, 13 bp, Artificial Sequence
  Oligonucleotide for detection of SNP TSC0007511
cattattcacatc

SEQ ID NO: 27329 - DNA, 13 bp, Artificial Sequence
  Oligonucleotide for detection of SNP TSC0007511
gatgtggataacg

SEQ ID NO: 27330 - DNA, 13 bp, Artificial Sequence
  Oligonucleotide for detection of SNP TSC0007511
cgttatccacatc

SEQ ID NO: 27331 - DNA, 13 bp, Artificial Sequence
  Oligonucleotide for detection of SNP TSC0007511
gatgtgaataacg

SEQ ID NO: 27332 - DNA, 13 bp, Artificial Sequence
  Oligonucleotide for detection of SNP TSC0007511
cgttattcacatc

SEQ ID NO: 27333 - DNA, 13 bp, Artificial Sequence
  Oligonucleotide for detection of SNP TSC0007512
atgtgaaatgtgg

SEQ ID NO: 27334 - DNA, 13 bp, Artificial Sequence
  Oligonucleotide for detection of SNP TSC0007512
ccacatttcacat

SEQ ID NO: 27335 - DNA, 13 bp, Artificial Sequence
  Oligonucleotide for detection of SNP TSC0007512
atgtgatatgtgg

SEQ ID NO: 27336 - DNA, 13 bp, Artificial Sequence
  Oligonucleotide for detection of SNP TSC0007512
ccacatatcacat

SEQ ID NO: 27337 - DNA, 13 bp, Artificial Sequence
  Oligonucleotide for detection of SNP TSC0007512
ttatattttatat

SEQ ID NO: 27338 - DNA, 13 bp, Artificial Sequence
  Oligonucleotide for detection of SNP TSC0007512
atataaaatataa

SEQ ID NO: 27339 - DNA, 13 bp, Artificial Sequence
  Oligonucleotide for detection of SNP TSC0007512
ttatatgttatat

SEQ ID NO: 27340 - DNA, 13 bp, Artificial Sequence
  Oligonucleotide for detection of SNP TSC0007512
atataacatataa

SEQ ID NO: 27341 - DNA, 13 bp, Artificial Sequence
  Oligonucleotide for detection of SNP TSC0007513
ggtttagtgagty

SEQ ID NO: 27342 - DNA, 13 bp, Artificial Sequence
  Oligonucleotide for detection of SNP TSC0007513
ractcactaaacc

SEQ ID NO: 27343 - DNA, 13 bp, Artificial Sequence
  Oligonucleotide for detection of SNP TSC0007513
ggtttattgagty

SEQ ID NO: 27344 - DNA, 13 bp, Artificial Sequence
  Oligonucleotide for detection of SNP TSC0007513
ractcaataaacc

SEQ ID NO: 27345 - DNA, 13 bp, Artificial Sequence
  Oligonucleotide for detection of SNP TSC0007513
ggtttattgggty

SEQ ID NO: 27346 - DNA, 13 bp, Artificial Sequence
  Oligonucleotide for detection of SNP TSC0007513
racccaataaacc

SEQ ID NO: 27347 - DNA, 13 bp, Artificial Sequence
  Oligonucleotide for detection of SNP TSC0007513
ggtttaatgggty

SEQ ID NO: 27348 - DNA, 13 bp, Artificial Sequence
  Oligonucleotide for detection of SNP TSC0007513
racccattaaacc

SEQ ID NO: 27349 - DNA, 13 bp, Artificial Sequence
  Oligonucleotide for detection of SNP TSC0007519
ggtgttatttaaa

SEQ ID NO: 27350 - DNA, 13 bp, Artificial Sequence
  Oligonucleotide for detection of SNP TSC0007519
tttaaataacacc

SEQ ID NO: 27351 - DNA, 13 bp, Artificial Sequence
  Oligonucleotide for detection of SNP TSC0007519
ggtgttgtttaaa

SEQ ID NO: 27352 - DNA, 13 bp, Artificial Sequence
  Oligonucleotide for detection of SNP TSC0007519
tttaaacaacacc

SEQ ID NO: 27353 - DNA, 13 bp, Artificial Sequence
  Oligonucleotide for detection of SNP TSC0007521
gttaattgtgtty

SEQ ID NO: 27354 - DNA, 13 bp, Artificial Sequence
  Oligonucleotide for detection of SNP TSC0007521
raacacaattaac

SEQ ID NO: 27355 - DNA, 13 bp, Artificial Sequence
  Oligonucleotide for detection of SNP TSC0007521
gttaatcgtgtty

SEQ ID NO: 27356 - DNA, 13 bp, Artificial Sequence
  Oligonucleotide for detection of SNP TSC0007521
raacacgattaac

SEQ ID NO: 27357 - DNA, 13 bp, Artificial Sequence
  Oligonucleotide for detection of SNP TSC0007521
gaatatggttgay

SEQ ID NO: 27358 - DNA, 13 bp, Artificial Sequence
  Oligonucleotide for detection of SNP TSC0007521
rtcaaccatattc

SEQ ID NO: 27359 - DNA, 13 bp, Artificial Sequence
  Oligonucleotide for detection of SNP TSC0007521
gaatatagttgay

SEQ ID NO: 27360 - DNA, 13 bp, Artificial Sequence
  Oligonucleotide for detection of SNP TSC0007521
rtcaactatattc

SEQ ID NO: 27361 - DNA, 13 bp, Artificial Sequence
  Oligonucleotide for detection of SNP TSC0007521
gaatacggttgay

SEQ ID NO: 27362 - DNA, 13 bp, Artificial Sequence
  Oligonucleotide for detection of SNP TSC0007521
rtcaaccgtattc

SEQ ID NO: 27363 - DNA, 13 bp, Artificial Sequence
  Oligonucleotide for detection of SNP TSC0007522
ttgaatatgaatg

SEQ ID NO: 27364 - DNA, 13 bp, Artificial Sequence
  Oligonucleotide for detection of SNP TSC0007522
cattcatattcaa

SEQ ID NO: 27365 - DNA, 13 bp, Artificial Sequence
  Oligonucleotide for detection of SNP TSC0007522
ttgaatgtgaatg

SEQ ID NO: 27366 - DNA, 13 bp, Artificial Sequence
  Oligonucleotide for detection of SNP TSC0007522
cattcacattcaa

SEQ ID NO: 27367 - DNA, 13 bp, Artificial Sequence
  Oligonucleotide for detection of SNP TSC0007523
atggagattttat

SEQ ID NO: 27368 - DNA, 13 bp, Artificial Sequence
  Oligonucleotide for detection of SNP TSC0007523
ataaaatctccat

SEQ ID NO: 27369 - DNA, 13 bp, Artificial Sequence
  Oligonucleotide for detection of SNP TSC0007523
atggagtttttat

SEQ ID NO: 27370 - DNA, 13 bp, Artificial Sequence
  Oligonucleotide for detection of SNP TSC0007523
ataaaaactccat

SEQ ID NO: 27371 - DNA, 13 bp, Artificial Sequence
  Oligonucleotide for detection of SNP TSC0007523
atgaagtttttat

SEQ ID NO: 27372 - DNA, 13 bp, Artificial Sequence
  Oligonucleotide for detection of SNP TSC0007523
ataaaaacttcat

SEQ ID NO: 27373 - DNA, 13 bp, Artificial Sequence
  Oligonucleotide for detection of SNP TSC0007523
atgaaggttttat

SEQ ID NO: 27374 - DNA, 13 bp, Artificial Sequence
  Oligonucleotide for detection of SNP TSC0007523
ataaaaccttcat

SEQ ID NO: 27375 - DNA, 13 bp, Artificial Sequence
  Oligonucleotide for detection of SNP TSC0007524
tgtaagtgtttga

SEQ ID NO: 27376 - DNA, 13 bp, Artificial Sequence
  Oligonucleotide for detection of SNP TSC0007524
tcaaacacttaca

SEQ ID NO: 27377 - DNA, 13 bp, Artificial Sequence
  Oligonucleotide for detection of SNP TSC0007524
tgtaagggtttga

SEQ ID NO: 27378 - DNA, 13 bp, Artificial Sequence
  Oligonucleotide for detection of SNP TSC0007524
tcaaacccttaca

SEQ ID NO: 27379 - DNA, 13 bp, Artificial Sequence
  Oligonucleotide for detection of SNP TSC0007524
tgtaagcgtttga

SEQ ID NO: 27380 - DNA, 13 bp, Artificial Sequence
  Oligonucleotide for detection of SNP TSC0007524
tcaaacgcttaca

SEQ ID NO: 27381 - DNA, 13 bp, Artificial Sequence
  Oligonucleotide for detection of SNP TSC0007524
ttaaatgtttgta

SEQ ID NO: 27382 - DNA, 13 bp, Artificial Sequence
  Oligonucleotide for detection of SNP TSC0007524
tacaaacatttaa

SEQ ID NO: 27383 - DNA, 13 bp, Artificial Sequence
  Oligonucleotide for detection of SNP TSC0007524
ttaaatttttgta

SEQ ID NO: 27384 - DNA, 13 bp, Artificial Sequence
  Oligonucleotide for detection of SNP TSC0007524
tacaaaaatttaa

SEQ ID NO: 27385 - DNA, 13 bp, Artificial Sequence
  Oligonucleotide for detection of SNP TSC0007524
ttaaacgtttgta

SEQ ID NO: 27386 - DNA, 13 bp, Artificial Sequence
  Oligonucleotide for detection of SNP TSC0007524
tacaaacgtttaa

SEQ ID NO: 27387 - DNA, 13 bp, Artificial Sequence
  Oligonucleotide for detection of SNP TSC0007558
tttttgatagtgt

SEQ ID NO: 27388 - DNA, 13 bp, Artificial Sequence
  Oligonucleotide for detection of SNP TSC0007558
acactatcaaaaa

SEQ ID NO: 27389 - DNA, 13 bp, Artificial Sequence
  Oligonucleotide for detection of SNP TSC0007558
tttttgttagtgt

SEQ ID NO: 27390 - DNA, 13 bp, Artificial Sequence
  Oligonucleotide for detection of SNP TSC0007558
acactaacaaaaa

SEQ ID NO: 27391 - DNA, 13 bp, Artificial Sequence
  Oligonucleotide for detection of SNP TSC0007558
atattattaagag

SEQ ID NO: 27392 - DNA, 13 bp, Artificial Sequence
  Oligonucleotide for detection of SNP TSC0007558
ctcttaataatat

SEQ ID NO: 27393 - DNA, 13 bp, Artificial Sequence
  Oligonucleotide for detection of SNP TSC0007558
atattagtaagag

SEQ ID NO: 27394 - DNA, 13 bp, Artificial Sequence
  Oligonucleotide for detection of SNP TSC0007558
ctcttactaatat

SEQ ID NO: 27395 - DNA, 13 bp, Artificial Sequence
  Oligonucleotide for detection of SNP TSC0007559
gaggtaggttata

SEQ ID NO: 27396 - DNA, 13 bp, Artificial Sequence
  Oligonucleotide for detection of SNP TSC0007559
tataacctacctc

SEQ ID NO: 27397 - DNA, 13 bp, Artificial Sequence
  Oligonucleotide for detection of SNP TSC0007559
gaggtaagttata

SEQ ID NO: 27398 - DNA, 13 bp, Artificial Sequence
  Oligonucleotide for detection of SNP TSC0007559
tataacttacctc

SEQ ID NO: 27399 - DNA, 13 bp, Artificial Sequence
  Oligonucleotide for detection of SNP TSC0007579
ggttgtaagtttt

SEQ ID NO: 27400 - DNA, 13 bp, Artificial Sequence
  Oligonucleotide for detection of SNP TSC0007579
aaaacttacaacc

SEQ ID NO: 27401 - DNA, 13 bp, Artificial Sequence
  Oligonucleotide for detection of SNP TSC0007579
ggttgtgagtttt

SEQ ID NO: 27402 - DNA, 13 bp, Artificial Sequence
  Oligonucleotide for detection of SNP TSC0007579
aaaactcacaacc

SEQ ID NO: 27403 - DNA, 13 bp, Artificial Sequence
  Oligonucleotide for detection of SNP TSC0007579
ggttgcgagtttt

SEQ ID NO: 27404 - DNA, 13 bp, Artificial Sequence
  Oligonucleotide for detection of SNP TSC0007579
aaaactcgcaacc

SEQ ID NO: 27405 - DNA, 13 bp, Artificial Sequence
  Oligonucleotide for detection of SNP TSC0007579
aaagtttgtagty

SEQ ID NO: 27406 - DNA, 13 bp, Artificial Sequence
  Oligonucleotide for detection of SNP TSC0007579
ractacaaacttt

SEQ ID NO: 27407 - DNA, 13 bp, Artificial Sequence
  Oligonucleotide for detection of SNP TSC0007579
aaagttcgtagty

SEQ ID NO: 27408 - DNA, 13 bp, Artificial Sequence
  Oligonucleotide for detection of SNP TSC0007579
ractacgaacttt

SEQ ID NO: 27409 - DNA, 13 bp, Artificial Sequence
  Oligonucleotide for detection of SNP TSC0007594
gatttatgtgggg

SEQ ID NO: 27410 - DNA, 13 bp, Artificial Sequence
  Oligonucleotide for detection of SNP TSC0007594
ccccacataaatc

SEQ ID NO: 27411 - DNA, 13 bp, Artificial Sequence
  Oligonucleotide for detection of SNP TSC0007594
gatttaggtgggg

SEQ ID NO: 27412 - DNA, 13 bp, Artificial Sequence
  Oligonucleotide for detection of SNP TSC0007594
ccccacctaaatc

SEQ ID NO: 27413 - DNA, 13 bp, Artificial Sequence
  Oligonucleotide for detection of SNP TSC0007594
gatttacgtgggg

SEQ ID NO: 27414 - DNA, 13 bp, Artificial Sequence
  Oligonucleotide for detection of SNP TSC0007594
ccccacgtaaatc

SEQ ID NO: 27415 - DNA, 13 bp, Artificial Sequence
  Oligonucleotide for detection of SNP TSC0007594
ttttatgtgagty

SEQ ID NO: 27416 - DNA, 13 bp, Artificial Sequence
  Oligonucleotide for detection of SNP TSC0007594
ractcacataaaa

SEQ ID NO: 27417 - DNA, 13 bp, Artificial Sequence
  Oligonucleotide for detection of SNP TSC0007594
ttttatttgagty

SEQ ID NO: 27418 - DNA, 13 bp, Artificial Sequence
  Oligonucleotide for detection of SNP TSC0007594
ractcaaataaaa

SEQ ID NO: 27419 - DNA, 13 bp, Artificial Sequence
  Oligonucleotide for detection of SNP TSC0007594
ttttacgtgagty

SEQ ID NO: 27420 - DNA, 13 bp, Artificial Sequence
  Oligonucleotide for detection of SNP TSC0007594
ractcacgtaaaa

SEQ ID NO: 27421 - DNA, 13 bp, Artificial Sequence
  Oligonucleotide for detection of SNP TSC0007602
tagtgtatttaga

SEQ ID NO: 27422 - DNA, 13 bp, Artificial Sequence
  Oligonucleotide for detection of SNP TSC0007602
tctaaatacacta

SEQ ID NO: 27423 - DNA, 13 bp, Artificial Sequence
  Oligonucleotide for detection of SNP TSC0007602
tagtgtgtttaga

SEQ ID NO: 27424 - DNA, 13 bp, Artificial Sequence
  Oligonucleotide for detection of SNP TSC0007602
tctaaacacacta

SEQ ID NO: 27425 - DNA, 13 bp, Artificial Sequence
  Oligonucleotide for detection of SNP TSC0007602
tagcgtatttaga

SEQ ID NO: 27426 - DNA, 13 bp, Artificial Sequence
  Oligonucleotide for detection of SNP TSC0007602
tctaaatacgcta

SEQ ID NO: 27427 - DNA, 13 bp, Artificial Sequence
  Oligonucleotide for detection of SNP TSC0007602
tagcgtgtttaga

SEQ ID NO: 27428 - DNA, 13 bp, Artificial Sequence
  Oligonucleotide for detection of SNP TSC0007602
tctaaacacgcta

SEQ ID NO: 27429 - DNA, 13 bp, Artificial Sequence
  Oligonucleotide for detection of SNP TSC0007602
tagtgcgtttaga

SEQ ID NO: 27430 - DNA, 13 bp, Artificial Sequence
  Oligonucleotide for detection of SNP TSC0007602
tctaaacgcacta

SEQ ID NO: 27431 - DNA, 13 bp, Artificial Sequence
  Oligonucleotide for detection of SNP TSC0007602
tagcgcgtttaga

SEQ ID NO: 27432 - DNA, 13 bp, Artificial Sequence
  Oligonucleotide for detection of SNP TSC0007602
tctaaacgcgcta

SEQ ID NO: 27433 - DNA, 13 bp, Artificial Sequence
  Oligonucleotide for detection of SNP TSC0007602
tttggatgtgttg

SEQ ID NO: 27434 - DNA, 13 bp, Artificial Sequence
  Oligonucleotide for detection of SNP TSC0007602
caacacatccaaa

SEQ ID NO: 27435 - DNA, 13 bp, Artificial Sequence
  Oligonucleotide for detection of SNP TSC0007602
tttggatgcgttg

SEQ ID NO: 27436 - DNA, 13 bp, Artificial Sequence
  Oligonucleotide for detection of SNP TSC0007602
caacgcatccaaa

SEQ ID NO: 27437 - DNA, 13 bp, Artificial Sequence
  Oligonucleotide for detection of SNP TSC0007602
tttggacgtgttg

SEQ ID NO: 27438 - DNA, 13 bp, Artificial Sequence
  Oligonucleotide for detection of SNP TSC0007602
caacacgtccaaa

SEQ ID NO: 27439 - DNA, 13 bp, Artificial Sequence
  Oligonucleotide for detection of SNP TSC0007602
tttggacgcgttg

SEQ ID NO: 27440 - DNA, 13 bp, Artificial Sequence
  Oligonucleotide for detection of SNP TSC0007602
caacgcgtccaaa

SEQ ID NO: 27441 - DNA, 13 bp, Artificial Sequence
  Oligonucleotide for detection of SNP TSC0007609
aaatggattttga

SEQ ID NO: 27442 - DNA, 13 bp, Artificial Sequence
  Oligonucleotide for detection of SNP TSC0007609
tcaaaatccattt

SEQ ID NO: 27443 - DNA, 13 bp, Artificial Sequence
  Oligonucleotide for detection of SNP TSC0007609
aaatgggttttga

SEQ ID NO: 27444 - DNA, 13 bp, Artificial Sequence
  Oligonucleotide for detection of SNP TSC0007609
tcaaaacccattt

SEQ ID NO: 27445 - DNA, 13 bp, Artificial Sequence
  Oligonucleotide for detection of SNP TSC0007610
ttttgtgtgttty

SEQ ID NO: 27446 - DNA, 13 bp, Artificial Sequence
  Oligonucleotide for detection of SNP TSC0007610
raaacacacaaaa

SEQ ID NO: 27447 - DNA, 13 bp, Artificial Sequence
  Oligonucleotide for detection of SNP TSC0007610
ttttgtttgttty

SEQ ID NO: 27448 - DNA, 13 bp, Artificial Sequence
  Oligonucleotide for detection of SNP TSC0007610
raaacaaacaaaa

SEQ ID NO: 27449 - DNA, 13 bp, Artificial Sequence
  Oligonucleotide for detection of SNP TSC0007610
ggaatatatagga

SEQ ID NO: 27450 - DNA, 13 bp, Artificial Sequence
  Oligonucleotide for detection of SNP TSC0007610
tcctatatattcc

SEQ ID NO: 27451 - DNA, 13 bp, Artificial Sequence
  Oligonucleotide for detection of SNP TSC0007610
ggaataaatagga

SEQ ID NO: 27452 - DNA, 13 bp, Artificial Sequence
  Oligonucleotide for detection of SNP TSC0007610
tcctatttattcc

SEQ ID NO: 27453 - DNA, 13 bp, Artificial Sequence
  Oligonucleotide for detection of SNP TSC0007612
ttgtaaatatttg

SEQ ID NO: 27454 - DNA, 13 bp, Artificial Sequence
  Oligonucleotide for detection of SNP TSC0007612
caaatatttacaa

SEQ ID NO: 27455 - DNA, 13 bp, Artificial Sequence
  Oligonucleotide for detection of SNP TSC0007612
ttgtaattatttg

SEQ ID NO: 27456 - DNA, 13 bp, Artificial Sequence
  Oligonucleotide for detection of SNP TSC0007612
caaataattacaa

SEQ ID NO: 27457 - DNA, 13 bp, Artificial Sequence
  Oligonucleotide for detection of SNP TSC0007612
ttgtaaatattcg

SEQ ID NO: 27458 - DNA, 13 bp, Artificial Sequence
  Oligonucleotide for detection of SNP TSC0007612
cgaatatttacaa

SEQ ID NO: 27459 - DNA, 13 bp, Artificial Sequence
  Oligonucleotide for detection of SNP TSC0007612
ttgtaattattcg

SEQ ID NO: 27460 - DNA, 13 bp, Artificial Sequence
  Oligonucleotide for detection of SNP TSC0007612
cgaataattacaa

SEQ ID NO: 27461 - DNA, 13 bp, Artificial Sequence
  Oligonucleotide for detection of SNP TSC0007612
tgaatgtttgtag

SEQ ID NO: 27462 - DNA, 13 bp, Artificial Sequence
  Oligonucleotide for detection of SNP TSC0007612
ctacaaacattca

SEQ ID NO: 27463 - DNA, 13 bp, Artificial Sequence
  Oligonucleotide for detection of SNP TSC0007612
tgaatggttgtag

SEQ ID NO: 27464 - DNA, 13 bp, Artificial Sequence
  Oligonucleotide for detection of SNP TSC0007612
ctacaaccattca

SEQ ID NO: 27465 - DNA, 13 bp, Artificial Sequence
  Oligonucleotide for detection of SNP TSC0007612
cgaatgtttgtag

SEQ ID NO: 27466 - DNA, 13 bp, Artificial Sequence
  Oligonucleotide for detection of SNP TSC0007612
ctacaaacattcg

SEQ ID NO: 27467 - DNA, 13 bp, Artificial Sequence
  Oligonucleotide for detection of SNP TSC0007612
cgaatggttgtag

SEQ ID NO: 27468 - DNA, 13 bp, Artificial Sequence
  Oligonucleotide for detection of SNP TSC0007612
ctacaaccattcg

SEQ ID NO: 27469 - DNA, 13 bp, Artificial Sequence
  Oligonucleotide for detection of SNP TSC0007613
tggtttaggttaa

SEQ ID NO: 27470 - DNA, 13 bp, Artificial Sequence
  Oligonucleotide for detection of SNP TSC0007613
ttaacctaaacca

SEQ ID NO: 27471 - DNA, 13 bp, Artificial Sequence
  Oligonucleotide for detection of SNP TSC0007613
tggtttgggttaa

SEQ ID NO: 27472 - DNA, 13 bp, Artificial Sequence
  Oligonucleotide for detection of SNP TSC0007613
ttaacccaaacca

SEQ ID NO: 27473 - DNA, 13 bp, Artificial Sequence
  Oligonucleotide for detection of SNP TSC0007628
tttagtattatta

SEQ ID NO: 27474 - DNA, 13 bp, Artificial Sequence
  Oligonucleotide for detection of SNP TSC0007628
taataatactaaa

SEQ ID NO: 27475 - DNA, 13 bp, Artificial Sequence
  Oligonucleotide for detection of SNP TSC0007628
tttagtgttatta

SEQ ID NO: 27476 - DNA, 13 bp, Artificial Sequence
  Oligonucleotide for detection of SNP TSC0007628
taataacactaaa

SEQ ID NO: 27477 - DNA, 13 bp, Artificial Sequence
  Oligonucleotide for detection of SNP TSC0007628
tttagcgttatta

SEQ ID NO: 27478 - DNA, 13 bp, Artificial Sequence
  Oligonucleotide for detection of SNP TSC0007628
taataacgctaaa

SEQ ID NO: 27479 - DNA, 13 bp, Artificial Sequence
  Oligonucleotide for detection of SNP TSC0007628
tgatagtgttggg

SEQ ID NO: 27480 - DNA, 13 bp, Artificial Sequence
  Oligonucleotide for detection of SNP TSC0007628
cccaacactatca

SEQ ID NO: 27481 - DNA, 13 bp, Artificial Sequence
  Oligonucleotide for detection of SNP TSC0007628
tgatagcgttggg

SEQ ID NO: 27482 - DNA, 13 bp, Artificial Sequence
  Oligonucleotide for detection of SNP TSC0007628
cccaacgctatca

SEQ ID NO: 27483 - DNA, 13 bp, Artificial Sequence
  Oligonucleotide for detection of SNP TSC0007640
gaatatattaagg

SEQ ID NO: 27484 - DNA, 13 bp, Artificial Sequence
  Oligonucleotide for detection of SNP TSC0007640
ccttaatatattc

SEQ ID NO: 27485 - DNA, 13 bp, Artificial Sequence
  Oligonucleotide for detection of SNP TSC0007640
gaatatgttaagg

SEQ ID NO: 27486 - DNA, 13 bp, Artificial Sequence
  Oligonucleotide for detection of SNP TSC0007640
ccttaacatattc

SEQ ID NO: 27487 - DNA, 13 bp, Artificial Sequence
  Oligonucleotide for detection of SNP TSC0007640
gaatacgttaagg

SEQ ID NO: 27488 - DNA, 13 bp, Artificial Sequence
  Oligonucleotide for detection of SNP TSC0007640
ccttaacgtattc

SEQ ID NO: 27489 - DNA, 13 bp, Artificial Sequence
  Oligonucleotide for detection of SNP TSC0007640
ttttaatgtatty

SEQ ID NO: 27490 - DNA, 13 bp, Artificial Sequence
  Oligonucleotide for detection of SNP TSC0007640
raatacattaaaa

SEQ ID NO: 27491 - DNA, 13 bp, Artificial Sequence
  Oligonucleotide for detection of SNP TSC0007640
ttttaacgtatty

SEQ ID NO: 27492 - DNA, 13 bp, Artificial Sequence
  Oligonucleotide for detection of SNP TSC0007640
raatacgttaaaa

SEQ ID NO: 27493 - DNA, 13 bp, Artificial Sequence
  Oligonucleotide for detection of SNP TSC0007641
taaatagagaaga

SEQ ID NO: 27494 - DNA, 13 bp, Artificial Sequence
  Oligonucleotide for detection of SNP TSC0007641
tcttctctattta

SEQ ID NO: 27495 - DNA, 13 bp, Artificial Sequence
  Oligonucleotide for detection of SNP TSC0007641
taaatatagaaga

SEQ ID NO: 27496 - DNA, 13 bp, Artificial Sequence
  Oligonucleotide for detection of SNP TSC0007641
tcttctatattta

SEQ ID NO: 27497 - DNA, 13 bp, Artificial Sequence
  Oligonucleotide for detection of SNP TSC0007641
ttttttttgttta

SEQ ID NO: 27498 - DNA, 13 bp, Artificial Sequence
  Oligonucleotide for detection of SNP TSC0007641
taaacaaaaaaaa

SEQ ID NO: 27499 - DNA, 13 bp, Artificial Sequence
  Oligonucleotide for detection of SNP TSC0007642
aggtttgaagtag

SEQ ID NO: 27500 - DNA, 13 bp, Artificial Sequence
  Oligonucleotide for detection of SNP TSC0007642
ctacttcaaacct

SEQ ID NO: 27501 - DNA, 13 bp, Artificial Sequence
  Oligonucleotide for detection of SNP TSC0007642
aggttttaagtag

SEQ ID NO: 27502 - DNA, 13 bp, Artificial Sequence
  Oligonucleotide for detection of SNP TSC0007642
ctacttaaaacct

SEQ ID NO: 27503 - DNA, 13 bp, Artificial Sequence
  Oligonucleotide for detection of SNP TSC0007642
ttgttttaagttt

SEQ ID NO: 27504 - DNA, 13 bp, Artificial Sequence
  Oligonucleotide for detection of SNP TSC0007642
aaacttaaaacaa

SEQ ID NO: 27505 - DNA, 13 bp, Artificial Sequence
  Oligonucleotide for detection of SNP TSC0007642
ttgtttaaagttt

SEQ ID NO: 27506 - DNA, 13 bp, Artificial Sequence
  Oligonucleotide for detection of SNP TSC0007642
aaactttaaacaa

SEQ ID NO: 27507 - DNA, 13 bp, Artificial Sequence
  Oligonucleotide for detection of SNP TSC0007650
agttattggaata

SEQ ID NO: 27508 - DNA, 13 bp, Artificial Sequence
  Oligonucleotide for detection of SNP TSC0007650
tattccaataact

SEQ ID NO: 27509 - DNA, 13 bp, Artificial Sequence
  Oligonucleotide for detection of SNP TSC0007650
agttatcggaata

SEQ ID NO: 27510 - DNA, 13 bp, Artificial Sequence
  Oligonucleotide for detection of SNP TSC0007650
tattccgataact

SEQ ID NO: 27511 - DNA, 13 bp, Artificial Sequence
  Oligonucleotide for detection of SNP TSC0007650
tgttttgatagtt

SEQ ID NO: 27512 - DNA, 13 bp, Artificial Sequence
  Oligonucleotide for detection of SNP TSC0007650
aactatcaaaaca

SEQ ID NO: 27513 - DNA, 13 bp, Artificial Sequence
  Oligonucleotide for detection of SNP TSC0007650
tgttttaatagtt

SEQ ID NO: 27514 - DNA, 13 bp, Artificial Sequence
  Oligonucleotide for detection of SNP TSC0007650
aactattaaaaca

SEQ ID NO: 27515 - DNA, 13 bp, Artificial Sequence
  Oligonucleotide for detection of SNP TSC0007650
tgtttcgatagtt

SEQ ID NO: 27516 - DNA, 13 bp, Artificial Sequence
  Oligonucleotide for detection of SNP TSC0007650
aactatcgaaaca

SEQ ID NO: 27517 - DNA, 13 bp, Artificial Sequence
  Oligonucleotide for detection of SNP TSC0007653
tttattatatttt

SEQ ID NO: 27518 - DNA, 13 bp, Artificial Sequence
  Oligonucleotide for detection of SNP TSC0007653
aaaatataataaa

SEQ ID NO: 27519 - DNA, 13 bp, Artificial Sequence
  Oligonucleotide for detection of SNP TSC0007653
tttattgtatttt

SEQ ID NO: 27520 - DNA, 13 bp, Artificial Sequence
  Oligonucleotide for detection of SNP TSC0007653
aaaatacaataaa

SEQ ID NO: 27521 - DNA, 13 bp, Artificial Sequence
  Oligonucleotide for detection of SNP TSC0007654
gatgtaaaaaaat

SEQ ID NO: 27522 - DNA, 13 bp, Artificial Sequence
  Oligonucleotide for detection of SNP TSC0007654
atttttttacatc

SEQ ID NO: 27523 - DNA, 13 bp, Artificial Sequence
  Oligonucleotide for detection of SNP TSC0007654
gatgtataaaaat

SEQ ID NO: 27524 - DNA, 13 bp, Artificial Sequence
  Oligonucleotide for detection of SNP TSC0007654
atttttatacatc

SEQ ID NO: 27525 - DNA, 13 bp, Artificial Sequence
  Oligonucleotide for detection of SNP TSC0007654
atttttttataty

SEQ ID NO: 27526 - DNA, 13 bp, Artificial Sequence
  Oligonucleotide for detection of SNP TSC0007654
ratataaaaaaat

SEQ ID NO: 27527 - DNA, 13 bp, Artificial Sequence
  Oligonucleotide for detection of SNP TSC0007654
atttttgtataty

SEQ ID NO: 27528 - DNA, 13 bp, Artificial Sequence
  Oligonucleotide for detection of SNP TSC0007654
ratatacaaaaat

SEQ ID NO: 27529 - DNA, 13 bp, Artificial Sequence
  Oligonucleotide for detection of SNP TSC0007655
gaatgagagttag

SEQ ID NO: 27530 - DNA, 13 bp, Artificial Sequence
  Oligonucleotide for detection of SNP TSC0007655
ctaactctcattc

SEQ ID NO: 27531 - DNA, 13 bp, Artificial Sequence
  Oligonucleotide for detection of SNP TSC0007655
gaatgaaagttag

SEQ ID NO: 27532 - DNA, 13 bp, Artificial Sequence
  Oligonucleotide for detection of SNP TSC0007655
ctaactttcattc

SEQ ID NO: 27533 - DNA, 13 bp, Artificial Sequence
  Oligonucleotide for detection of SNP TSC0007662
ttaggtatgatay

SEQ ID NO: 27534 - DNA, 13 bp, Artificial Sequence
  Oligonucleotide for detection of SNP TSC0007662
rtatcatacctaa

SEQ ID NO: 27535 - DNA, 13 bp, Artificial Sequence
  Oligonucleotide for detection of SNP TSC0007662
ttaggtttgatay

SEQ ID NO: 27536 - DNA, 13 bp, Artificial Sequence
  Oligonucleotide for detection of SNP TSC0007662
rtatcaaacctaa

SEQ ID NO: 27537 - DNA, 13 bp, Artificial Sequence
  Oligonucleotide for detection of SNP TSC0007662
gtgttatgtttag

SEQ ID NO: 27538 - DNA, 13 bp, Artificial Sequence
  Oligonucleotide for detection of SNP TSC0007662
ctaaacataacac

SEQ ID NO: 27539 - DNA, 13 bp, Artificial Sequence
  Oligonucleotide for detection of SNP TSC0007666
taaagatgtttty

SEQ ID NO: 27540 - DNA, 13 bp, Artificial Sequence
  Oligonucleotide for detection of SNP TSC0007666
raaaacatcttta

SEQ ID NO: 27541 - DNA, 13 bp, Artificial Sequence
  Oligonucleotide for detection of SNP TSC0007666
taaagacgtttty

SEQ ID NO: 27542 - DNA, 13 bp, Artificial Sequence
  Oligonucleotide for detection of SNP TSC0007666
raaaacgtcttta

SEQ ID NO: 27543 - DNA, 13 bp, Artificial Sequence
  Oligonucleotide for detection of SNP TSC0007666
gggaatgttttta

SEQ ID NO: 27544 - DNA, 13 bp, Artificial Sequence
  Oligonucleotide for detection of SNP TSC0007666
taaaaacattccc

SEQ ID NO: 27545 - DNA, 13 bp, Artificial Sequence
  Oligonucleotide for detection of SNP TSC0007666
gggaatattttta

SEQ ID NO: 27546 - DNA, 13 bp, Artificial Sequence
  Oligonucleotide for detection of SNP TSC0007666
taaaaatattccc

SEQ ID NO: 27547 - DNA, 13 bp, Artificial Sequence
  Oligonucleotide for detection of SNP TSC0007666
gggaacgttttta

SEQ ID NO: 27548 - DNA, 13 bp, Artificial Sequence
  Oligonucleotide for detection of SNP TSC0007666
taaaaacgttccc

SEQ ID NO: 27549 - DNA, 13 bp, Artificial Sequence
  Oligonucleotide for detection of SNP TSC0007667
taagggaaagaag

SEQ ID NO: 27550 - DNA, 13 bp, Artificial Sequence
  Oligonucleotide for detection of SNP TSC0007667
cttctttccctta

SEQ ID NO: 27551 - DNA, 13 bp, Artificial Sequence
  Oligonucleotide for detection of SNP TSC0007667
taagggtaagaag

SEQ ID NO: 27552 - DNA, 13 bp, Artificial Sequence
  Oligonucleotide for detection of SNP TSC0007667
cttcttaccctta

SEQ ID NO: 27553 - DNA, 13 bp, Artificial Sequence
  Oligonucleotide for detection of SNP TSC0007668
ttttagagtttgt

SEQ ID NO: 27554 - DNA, 13 bp, Artificial Sequence
  Oligonucleotide for detection of SNP TSC0007668
acaaactctaaaa

SEQ ID NO: 27555 - DNA, 13 bp, Artificial Sequence
  Oligonucleotide for detection of SNP TSC0007668
ttttagggtttgt

SEQ ID NO: 27556 - DNA, 13 bp, Artificial Sequence
  Oligonucleotide for detection of SNP TSC0007668
acaaaccctaaaa

SEQ ID NO: 27557 - DNA, 13 bp, Artificial Sequence
  Oligonucleotide for detection of SNP TSC0007669
atatttaaaaagt

SEQ ID NO: 27558 - DNA, 13 bp, Artificial Sequence
  Oligonucleotide for detection of SNP TSC0007669
actttttaaatat

SEQ ID NO: 27559 - DNA, 13 bp, Artificial Sequence
  Oligonucleotide for detection of SNP TSC0007669
atatttgaaaagt

SEQ ID NO: 27560 - DNA, 13 bp, Artificial Sequence
  Oligonucleotide for detection of SNP TSC0007669
acttttcaaatat

SEQ ID NO: 27561 - DNA, 13 bp, Artificial Sequence
  Oligonucleotide for detection of SNP TSC0007676
ttaggtatttaat

SEQ ID NO: 27562 - DNA, 13 bp, Artificial Sequence
  Oligonucleotide for detection of SNP TSC0007676
attaaatacctaa

SEQ ID NO: 27563 - DNA, 13 bp, Artificial Sequence
  Oligonucleotide for detection of SNP TSC0007676
ttaggtttttaat

SEQ ID NO: 27564 - DNA, 13 bp, Artificial Sequence
  Oligonucleotide for detection of SNP TSC0007676
attaaaaacctaa

SEQ ID NO: 27565 - DNA, 13 bp, Artificial Sequence
  Oligonucleotide for detection of SNP TSC0007676
attaagtatttgg

SEQ ID NO: 27566 - DNA, 13 bp, Artificial Sequence
  Oligonucleotide for detection of SNP TSC0007676
ccaaatacttaat

SEQ ID NO: 27567 - DNA, 13 bp, Artificial Sequence
  Oligonucleotide for detection of SNP TSC0007676
attaaggatttgg

SEQ ID NO: 27568 - DNA, 13 bp, Artificial Sequence
  Oligonucleotide for detection of SNP TSC0007676
ccaaatccttaat

SEQ ID NO: 27569 - DNA, 13 bp, Artificial Sequence
  Oligonucleotide for detection of SNP TSC0007678
gatgtagatgttt

SEQ ID NO: 27570 - DNA, 13 bp, Artificial Sequence
  Oligonucleotide for detection of SNP TSC0007678
aaacatctacatc

SEQ ID NO: 27571 - DNA, 13 bp, Artificial Sequence
  Oligonucleotide for detection of SNP TSC0007678
gatgtatatgttt

SEQ ID NO: 27572 - DNA, 13 bp, Artificial Sequence
  Oligonucleotide for detection of SNP TSC0007678
aaacatatacatc

SEQ ID NO: 27573 - DNA, 13 bp, Artificial Sequence
  Oligonucleotide for detection of SNP TSC0007678
aggtatttataty

SEQ ID NO: 27574 - DNA, 13 bp, Artificial Sequence
  Oligonucleotide for detection of SNP TSC0007678
ratataaatacct

SEQ ID NO: 27575 - DNA, 13 bp, Artificial Sequence
  Oligonucleotide for detection of SNP TSC0007678
aggtatatataty

SEQ ID NO: 27576 - DNA, 13 bp, Artificial Sequence
  Oligonucleotide for detection of SNP TSC0007678
ratatatatacct

SEQ ID NO: 27577 - DNA, 13 bp, Artificial Sequence
  Oligonucleotide for detection of SNP TSC0007680
atattgattagat

SEQ ID NO: 27578 - DNA, 13 bp, Artificial Sequence
  Oligonucleotide for detection of SNP TSC0007680
atctaatcaatat

SEQ ID NO: 27579 - DNA, 13 bp, Artificial Sequence
  Oligonucleotide for detection of SNP TSC0007680
atattggttagat

SEQ ID NO: 27580 - DNA, 13 bp, Artificial Sequence
  Oligonucleotide for detection of SNP TSC0007680
atctaaccaatat

SEQ ID NO: 27581 - DNA, 13 bp, Artificial Sequence
  Oligonucleotide for detection of SNP TSC0007684
ttaaaaggtaaaa

SEQ ID NO: 27582 - DNA, 13 bp, Artificial Sequence
  Oligonucleotide for detection of SNP TSC0007684
ttttaccttttaa

SEQ ID NO: 27583 - DNA, 13 bp, Artificial Sequence
  Oligonucleotide for detection of SNP TSC0007684
ttaaaaagtaaaa

SEQ ID NO: 27584 - DNA, 13 bp, Artificial Sequence
  Oligonucleotide for detection of SNP TSC0007684
ttttactttttaa

SEQ ID NO: 27585 - DNA, 13 bp, Artificial Sequence
  Oligonucleotide for detection of SNP TSC0007685
attataggagtaa

SEQ ID NO: 27586 - DNA, 13 bp, Artificial Sequence
  Oligonucleotide for detection of SNP TSC0007685
ttactcctataat

SEQ ID NO: 27587 - DNA, 13 bp, Artificial Sequence
  Oligonucleotide for detection of SNP TSC0007685
attataagagtaa

SEQ ID NO: 27588 - DNA, 13 bp, Artificial Sequence
  Oligonucleotide for detection of SNP TSC0007685
ttactcttataat

SEQ ID NO: 27589 - DNA, 13 bp, Artificial Sequence
  Oligonucleotide for detection of SNP TSC0007687
ggagttgtgtata

SEQ ID NO: 27590 - DNA, 13 bp, Artificial Sequence
  Oligonucleotide for detection of SNP TSC0007687
tatacacaactcc

SEQ ID NO: 27591 - DNA, 13 bp, Artificial Sequence
  Oligonucleotide for detection of SNP TSC0007687
ggagttatgtata

SEQ ID NO: 27592 - DNA, 13 bp, Artificial Sequence
  Oligonucleotide for detection of SNP TSC0007687
tatacataactcc

SEQ ID NO: 27593 - DNA, 13 bp, Artificial Sequence
  Oligonucleotide for detection of SNP TSC0007689
ttataagaaaaag

SEQ ID NO: 27594 - DNA, 13 bp, Artificial Sequence
  Oligonucleotide for detection of SNP TSC0007689
ctttttcttataa

SEQ ID NO: 27595 - DNA, 13 bp, Artificial Sequence
  Oligonucleotide for detection of SNP TSC0007689
ttataataaaaag

SEQ ID NO: 27596 - DNA, 13 bp, Artificial Sequence
  Oligonucleotide for detection of SNP TSC0007689
ctttttattataa

SEQ ID NO: 27597 - DNA, 13 bp, Artificial Sequence
  Oligonucleotide for detection of SNP TSC0007689
tttttttttatga

SEQ ID NO: 27598 - DNA, 13 bp, Artificial Sequence
  Oligonucleotide for detection of SNP TSC0007689
tcataaaaaaaaa

SEQ ID NO: 27599 - DNA, 13 bp, Artificial Sequence
  Oligonucleotide for detection of SNP TSC0007695
ttgtggggttatg

SEQ ID NO: 27600 - DNA, 13 bp, Artificial Sequence
  Oligonucleotide for detection of SNP TSC0007695
cataaccccacaa

SEQ ID NO: 27601 - DNA, 13 bp, Artificial Sequence
  Oligonucleotide for detection of SNP TSC0007695
ttgtggagttatg

SEQ ID NO: 27602 - DNA, 13 bp, Artificial Sequence
  Oligonucleotide for detection of SNP TSC0007695
cataactccacaa

SEQ ID NO: 27603 - DNA, 13 bp, Artificial Sequence
  Oligonucleotide for detection of SNP TSC0007699
ttagtagtatgaa

SEQ ID NO: 27604 - DNA, 13 bp, Artificial Sequence
  Oligonucleotide for detection of SNP TSC0007699
ttcatactactaa

SEQ ID NO: 27605 - DNA, 13 bp, Artificial Sequence
  Oligonucleotide for detection of SNP TSC0007699
ttagtaatatgaa

SEQ ID NO: 27606 - DNA, 13 bp, Artificial Sequence
  Oligonucleotide for detection of SNP TSC0007699
ttcatattactaa

SEQ ID NO: 27607 - DNA, 13 bp, Artificial Sequence
  Oligonucleotide for detection of SNP TSC0007708
gtttttatgtatt

SEQ ID NO: 27608 - DNA, 13 bp, Artificial Sequence
  Oligonucleotide for detection of SNP TSC0007708
aatacataaaaac

SEQ ID NO: 27609 - DNA, 13 bp, Artificial Sequence
  Oligonucleotide for detection of SNP TSC0007708
gtttttgtgtatt

SEQ ID NO: 27610 - DNA, 13 bp, Artificial Sequence
  Oligonucleotide for detection of SNP TSC0007708
aatacacaaaaac

SEQ ID NO: 27611 - DNA, 13 bp, Artificial Sequence
  Oligonucleotide for detection of SNP TSC0007711
aaatgaaataaaa

SEQ ID NO: 27612 - DNA, 13 bp, Artificial Sequence
  Oligonucleotide for detection of SNP TSC0007711
ttttatttcattt

SEQ ID NO: 27613 - DNA, 13 bp, Artificial Sequence
  Oligonucleotide for detection of SNP TSC0007711
aaatgatataaaa

SEQ ID NO: 27614 - DNA, 13 bp, Artificial Sequence
  Oligonucleotide for detection of SNP TSC0007711
ttttatatcattt

SEQ ID NO: 27615 - DNA, 13 bp, Artificial Sequence
  Oligonucleotide for detection of SNP TSC0007711
ttttgttttattt

SEQ ID NO: 27616 - DNA, 13 bp, Artificial Sequence
  Oligonucleotide for detection of SNP TSC0007711
aaataaaacaaaa

SEQ ID NO: 27617 - DNA, 13 bp, Artificial Sequence
  Oligonucleotide for detection of SNP TSC0007718
tgggttatatagy

SEQ ID NO: 27618 - DNA, 13 bp, Artificial Sequence
  Oligonucleotide for detection of SNP TSC0007718
rctatataaccca

SEQ ID NO: 27619 - DNA, 13 bp, Artificial Sequence
  Oligonucleotide for detection of SNP TSC0007718
tgggttgtatagy

SEQ ID NO: 27620 - DNA, 13 bp, Artificial Sequence
  Oligonucleotide for detection of SNP TSC0007718
rctatacaaccca

SEQ ID NO: 27621 - DNA, 13 bp, Artificial Sequence
  Oligonucleotide for detection of SNP TSC0007718
tgggtcgtatagy

SEQ ID NO: 27622 - DNA, 13 bp, Artificial Sequence
  Oligonucleotide for detection of SNP TSC0007718
rctatacgaccca

SEQ ID NO: 27623 - DNA, 13 bp, Artificial Sequence
  Oligonucleotide for detection of SNP TSC0007718
gttatgtggttta

SEQ ID NO: 27624 - DNA, 13 bp, Artificial Sequence
  Oligonucleotide for detection of SNP TSC0007718
taaaccacataac

SEQ ID NO: 27625 - DNA, 13 bp, Artificial Sequence
  Oligonucleotide for detection of SNP TSC0007718
gttatgcggttta

SEQ ID NO: 27626 - DNA, 13 bp, Artificial Sequence
  Oligonucleotide for detection of SNP TSC0007718
taaaccgcataac

SEQ ID NO: 27627 - DNA, 13 bp, Artificial Sequence
  Oligonucleotide for detection of SNP TSC0007720
ttttaagtaatat

SEQ ID NO: 27628 - DNA, 13 bp, Artificial Sequence
  Oligonucleotide for detection of SNP TSC0007720
atattacttaaaa

SEQ ID NO: 27629 - DNA, 13 bp, Artificial Sequence
  Oligonucleotide for detection of SNP TSC0007720
ttttaaataatat

SEQ ID NO: 27630 - DNA, 13 bp, Artificial Sequence
  Oligonucleotide for detection of SNP TSC0007720
atattatttaaaa

SEQ ID NO: 27631 - DNA, 13 bp, Artificial Sequence
  Oligonucleotide for detection of SNP TSC0007722
tggattgtggatt

SEQ ID NO: 27632 - DNA, 13 bp, Artificial Sequence
  Oligonucleotide for detection of SNP TSC0007722
aatccacaatcca

SEQ ID NO: 27633 - DNA, 13 bp, Artificial Sequence
  Oligonucleotide for detection of SNP TSC0007722
tggattatggatt

SEQ ID NO: 27634 - DNA, 13 bp, Artificial Sequence
  Oligonucleotide for detection of SNP TSC0007722
aatccataatcca

SEQ ID NO: 27635 - DNA, 13 bp, Artificial Sequence
  Oligonucleotide for detection of SNP TSC0007726
tttgtttgtaatt

SEQ ID NO: 27636 - DNA, 13 bp, Artificial Sequence
  Oligonucleotide for detection of SNP TSC0007726
aattacaaacaaa

SEQ ID NO: 27637 - DNA, 13 bp, Artificial Sequence
  Oligonucleotide for detection of SNP TSC0007726
tttgttcgtaatt

SEQ ID NO: 27638 - DNA, 13 bp, Artificial Sequence
  Oligonucleotide for detection of SNP TSC0007726
aattacgaacaaa

SEQ ID NO: 27639 - DNA, 13 bp, Artificial Sequence
  Oligonucleotide for detection of SNP TSC0007726
aattgtgagtaaa

SEQ ID NO: 27640 - DNA, 13 bp, Artificial Sequence
  Oligonucleotide for detection of SNP TSC0007726
tttactcacaatt

SEQ ID NO: 27641 - DNA, 13 bp, Artificial Sequence
  Oligonucleotide for detection of SNP TSC0007726
aattgtaagtaaa

SEQ ID NO: 27642 - DNA, 13 bp, Artificial Sequence
  Oligonucleotide for detection of SNP TSC0007726
tttacttacaatt

SEQ ID NO: 27643 - DNA, 13 bp, Artificial Sequence
  Oligonucleotide for detection of SNP TSC0007726
aattgcgagtaaa

SEQ ID NO: 27644 - DNA, 13 bp, Artificial Sequence
  Oligonucleotide for detection of SNP TSC0007726
tttactcgcaatt

SEQ ID NO: 27645 - DNA, 13 bp, Artificial Sequence
  Oligonucleotide for detection of SNP TSC0007742
ataaatataatga

SEQ ID NO: 27646 - DNA, 13 bp, Artificial Sequence
  Oligonucleotide for detection of SNP TSC0007742
tcattatatttat

SEQ ID NO: 27647 - DNA, 13 bp, Artificial Sequence
  Oligonucleotide for detection of SNP TSC0007742
ataaatgtaatga

SEQ ID NO: 27648 - DNA, 13 bp, Artificial Sequence
  Oligonucleotide for detection of SNP TSC0007742
tcattacatttat

SEQ ID NO: 27649 - DNA, 13 bp, Artificial Sequence
  Oligonucleotide for detection of SNP TSC0007742
ataaacgtaatga

SEQ ID NO: 27650 - DNA, 13 bp, Artificial Sequence
  Oligonucleotide for detection of SNP TSC0007742
tcattacgtttat

SEQ ID NO: 27651 - DNA, 13 bp, Artificial Sequence
  Oligonucleotide for detection of SNP TSC0007742
ttattatgtttat

SEQ ID NO: 27652 - DNA, 13 bp, Artificial Sequence
  Oligonucleotide for detection of SNP TSC0007742
ataaacataataa

SEQ ID NO: 27653 - DNA, 13 bp, Artificial Sequence
  Oligonucleotide for detection of SNP TSC0007742
ttattacgtttat

SEQ ID NO: 27654 - DNA, 13 bp, Artificial Sequence
  Oligonucleotide for detection of SNP TSC0007742
ataaacgtaataa

SEQ ID NO: 27655 - DNA, 13 bp, Artificial Sequence
  Oligonucleotide for detection of SNP TSC0007744
ttttttgttagat

SEQ ID NO: 27656 - DNA, 13 bp, Artificial Sequence
  Oligonucleotide for detection of SNP TSC0007744
atctaacaaaaaa

SEQ ID NO: 27657 - DNA, 13 bp, Artificial Sequence
  Oligonucleotide for detection of SNP TSC0007744
ttttttattagat

SEQ ID NO: 27658 - DNA, 13 bp, Artificial Sequence
  Oligonucleotide for detection of SNP TSC0007744
atctaataaaaaa

SEQ ID NO: 27659 - DNA, 13 bp, Artificial Sequence
  Oligonucleotide for detection of SNP TSC0007749
gttttagattata

SEQ ID NO: 27660 - DNA, 13 bp, Artificial Sequence
  Oligonucleotide for detection of SNP TSC0007749
tataatctaaaac

SEQ ID NO: 27661 - DNA, 13 bp, Artificial Sequence
  Oligonucleotide for detection of SNP TSC0007749
gttttaaattata

SEQ ID NO: 27662 - DNA, 13 bp, Artificial Sequence
  Oligonucleotide for detection of SNP TSC0007749
tataatttaaaac

SEQ ID NO: 27663 - DNA, 13 bp, Artificial Sequence
  Oligonucleotide for detection of SNP TSC0007751
tgttgaagtataa

SEQ ID NO: 27664 - DNA, 13 bp, Artificial Sequence
  Oligonucleotide for detection of SNP TSC0007751
ttatacttcaaca

SEQ ID NO: 27665 - DNA, 13 bp, Artificial Sequence
  Oligonucleotide for detection of SNP TSC0007751
tgttgaggtataa

SEQ ID NO: 27666 - DNA, 13 bp, Artificial Sequence
  Oligonucleotide for detection of SNP TSC0007751
ttatacctcaaca

SEQ ID NO: 27667 - DNA, 13 bp, Artificial Sequence
  Oligonucleotide for detection of SNP TSC0007752
ttagtaagttttt

SEQ ID NO: 27668 - DNA, 13 bp, Artificial Sequence
  Oligonucleotide for detection of SNP TSC0007752
aaaaacttactaa

SEQ ID NO: 27669 - DNA, 13 bp, Artificial Sequence
  Oligonucleotide for detection of SNP TSC0007752
agagatttgttag

SEQ ID NO: 27670 - DNA, 13 bp, Artificial Sequence
  Oligonucleotide for detection of SNP TSC0007752
ctaacaaatctct

SEQ ID NO: 27671 - DNA, 13 bp, Artificial Sequence
  Oligonucleotide for detection of SNP TSC0007752
agagatatgttag

SEQ ID NO: 27672 - DNA, 13 bp, Artificial Sequence
  Oligonucleotide for detection of SNP TSC0007752
ctaacatatctct

SEQ ID NO: 27673 - DNA, 13 bp, Artificial Sequence
  Oligonucleotide for detection of SNP TSC0007753
tttttagtggttt

SEQ ID NO: 27674 - DNA, 13 bp, Artificial Sequence
  Oligonucleotide for detection of SNP TSC0007753
aaaccactaaaaa

SEQ ID NO: 27675 - DNA, 13 bp, Artificial Sequence
  Oligonucleotide for detection of SNP TSC0007753
tttttattggttt

SEQ ID NO: 27676 - DNA, 13 bp, Artificial Sequence
  Oligonucleotide for detection of SNP TSC0007753
aaaccaataaaaa

SEQ ID NO: 27677 - DNA, 13 bp, Artificial Sequence
  Oligonucleotide for detection of SNP TSC0007753
aaattattggaag

SEQ ID NO: 27678 - DNA, 13 bp, Artificial Sequence
  Oligonucleotide for detection of SNP TSC0007753
cttccaataattt

SEQ ID NO: 27679 - DNA, 13 bp, Artificial Sequence
  Oligonucleotide for detection of SNP TSC0007753
aaattaatggaag

SEQ ID NO: 27680 - DNA, 13 bp, Artificial Sequence
  Oligonucleotide for detection of SNP TSC0007753
cttccattaattt

SEQ ID NO: 27681 - DNA, 13 bp, Artificial Sequence
  Oligonucleotide for detection of SNP TSC0007758
ataatgttatatt

SEQ ID NO: 27682 - DNA, 13 bp, Artificial Sequence
  Oligonucleotide for detection of SNP TSC0007758
aatataacattat

SEQ ID NO: 27683 - DNA, 13 bp, Artificial Sequence
  Oligonucleotide for detection of SNP TSC0007758
ataatggtatatt

SEQ ID NO: 27684 - DNA, 13 bp, Artificial Sequence
  Oligonucleotide for detection of SNP TSC0007758
aatataccattat

SEQ ID NO: 27685 - DNA, 13 bp, Artificial Sequence
  Oligonucleotide for detection of SNP TSC0007758
agtgtagtattat

SEQ ID NO: 27686 - DNA, 13 bp, Artificial Sequence
  Oligonucleotide for detection of SNP TSC0007758
ataatactacact

SEQ ID NO: 27687 - DNA, 13 bp, Artificial Sequence
  Oligonucleotide for detection of SNP TSC0007758
agtgtattattat

SEQ ID NO: 27688 - DNA, 13 bp, Artificial Sequence
  Oligonucleotide for detection of SNP TSC0007758
ataataatacact

SEQ ID NO: 27689 - DNA, 13 bp, Artificial Sequence
  Oligonucleotide for detection of SNP TSC0007765
gtatttaaagaty

SEQ ID NO: 27690 - DNA, 13 bp, Artificial Sequence
  Oligonucleotide for detection of SNP TSC0007765
ratctttaaatac

SEQ ID NO: 27691 - DNA, 13 bp, Artificial Sequence
  Oligonucleotide for detection of SNP TSC0007765
gtatttgaagaty

SEQ ID NO: 27692 - DNA, 13 bp, Artificial Sequence
  Oligonucleotide for detection of SNP TSC0007765
ratcttcaaatac

SEQ ID NO: 27693 - DNA, 13 bp, Artificial Sequence
  Oligonucleotide for detection of SNP TSC0007767
tggtataaagtta

SEQ ID NO: 27694 - DNA, 13 bp, Artificial Sequence
  Oligonucleotide for detection of SNP TSC0007767
taactttatacca

SEQ ID NO: 27695 - DNA, 13 bp, Artificial Sequence
  Oligonucleotide for detection of SNP TSC0007767
tggtatgaagtta

SEQ ID NO: 27696 - DNA, 13 bp, Artificial Sequence
  Oligonucleotide for detection of SNP TSC0007767
taacttcatacca

SEQ ID NO: 27697 - DNA, 13 bp, Artificial Sequence
  Oligonucleotide for detection of SNP TSC0007768
ttgataggaatta

SEQ ID NO: 27698 - DNA, 13 bp, Artificial Sequence
  Oligonucleotide for detection of SNP TSC0007768
taattcctatcaa

SEQ ID NO: 27699 - DNA, 13 bp, Artificial Sequence
  Oligonucleotide for detection of SNP TSC0007768
ttgataagaatta

SEQ ID NO: 27700 - DNA, 13 bp, Artificial Sequence
  Oligonucleotide for detection of SNP TSC0007768
taattcttatcaa

SEQ ID NO: 27701 - DNA, 13 bp, Artificial Sequence
  Oligonucleotide for detection of SNP TSC0007772
gttaaaggtgagg

SEQ ID NO: 27702 - DNA, 13 bp, Artificial Sequence
  Oligonucleotide for detection of SNP TSC0007772
cctcacctttaac

SEQ ID NO: 27703 - DNA, 13 bp, Artificial Sequence
  Oligonucleotide for detection of SNP TSC0007772
gttaaatgtgagg

SEQ ID NO: 27704 - DNA, 13 bp, Artificial Sequence
  Oligonucleotide for detection of SNP TSC0007772
cctcacatttaac

SEQ ID NO: 27705 - DNA, 13 bp, Artificial Sequence
  Oligonucleotide for detection of SNP TSC0007772
ttttatttttaay

SEQ ID NO: 27706 - DNA, 13 bp, Artificial Sequence
  Oligonucleotide for detection of SNP TSC0007772
rttaaaaataaaa

SEQ ID NO: 27707 - DNA, 13 bp, Artificial Sequence
  Oligonucleotide for detection of SNP TSC0007772
ttttatatttaay

SEQ ID NO: 27708 - DNA, 13 bp, Artificial Sequence
  Oligonucleotide for detection of SNP TSC0007772
rttaaatataaaa

SEQ ID NO: 27709 - DNA, 13 bp, Artificial Sequence
  Oligonucleotide for detection of SNP TSC0007773
gaatgtaaatata

SEQ ID NO: 27710 - DNA, 13 bp, Artificial Sequence
  Oligonucleotide for detection of SNP TSC0007773
tatatttacattc

SEQ ID NO: 27711 - DNA, 13 bp, Artificial Sequence
  Oligonucleotide for detection of SNP TSC0007773
gaatgtgaatata

SEQ ID NO: 27712 - DNA, 13 bp, Artificial Sequence
  Oligonucleotide for detection of SNP TSC0007773
tatattcacattc

SEQ ID NO: 27713 - DNA, 13 bp, Artificial Sequence
  Oligonucleotide for detection of SNP TSC0007779
agggtaggtatta

SEQ ID NO: 27714 - DNA, 13 bp, Artificial Sequence
  Oligonucleotide for detection of SNP TSC0007779
taatacctaccct

SEQ ID NO: 27715 - DNA, 13 bp, Artificial Sequence
  Oligonucleotide for detection of SNP TSC0007779
agggtaagtatta

SEQ ID NO: 27716 - DNA, 13 bp, Artificial Sequence
  Oligonucleotide for detection of SNP TSC0007779
taatacttaccct

SEQ ID NO: 27717 - DNA, 13 bp, Artificial Sequence
  Oligonucleotide for detection of SNP TSC0007781
taaatgatagtga

SEQ ID NO: 27718 - DNA, 13 bp, Artificial Sequence
  Oligonucleotide for detection of SNP TSC0007781
tcactatcattta

SEQ ID NO: 27719 - DNA, 13 bp, Artificial Sequence
  Oligonucleotide for detection of SNP TSC0007781
taaatggtagtga

SEQ ID NO: 27720 - DNA, 13 bp, Artificial Sequence
  Oligonucleotide for detection of SNP TSC0007781
tcactaccattta

SEQ ID NO: 27721 - DNA, 13 bp, Artificial Sequence
  Oligonucleotide for detection of SNP TSC0007782
tggtagtgtgatt

SEQ ID NO: 27722 - DNA, 13 bp, Artificial Sequence
  Oligonucleotide for detection of SNP TSC0007782
aatcacactacca

SEQ ID NO: 27723 - DNA, 13 bp, Artificial Sequence
  Oligonucleotide for detection of SNP TSC0007782
tggtagcgtgatt

SEQ ID NO: 27724 - DNA, 13 bp, Artificial Sequence
  Oligonucleotide for detection of SNP TSC0007782
aatcacgctacca

SEQ ID NO: 27725 - DNA, 13 bp, Artificial Sequence
  Oligonucleotide for detection of SNP TSC0007782
agttatgttgtta

SEQ ID NO: 27726 - DNA, 13 bp, Artificial Sequence
  Oligonucleotide for detection of SNP TSC0007782
taacaacataact

SEQ ID NO: 27727 - DNA, 13 bp, Artificial Sequence
  Oligonucleotide for detection of SNP TSC0007782
agttatattgtta

SEQ ID NO: 27728 - DNA, 13 bp, Artificial Sequence
  Oligonucleotide for detection of SNP TSC0007782
taacaatataact

SEQ ID NO: 27729 - DNA, 13 bp, Artificial Sequence
  Oligonucleotide for detection of SNP TSC0007782
agttacgttgtta

SEQ ID NO: 27730 - DNA, 13 bp, Artificial Sequence
  Oligonucleotide for detection of SNP TSC0007782
taacaacgtaact

SEQ ID NO: 27731 - DNA, 13 bp, Artificial Sequence
  Oligonucleotide for detection of SNP TSC0007783
tatgatattatay

SEQ ID NO: 27732 - DNA, 13 bp, Artificial Sequence
  Oligonucleotide for detection of SNP TSC0007783
rtataatatcata

SEQ ID NO: 27733 - DNA, 13 bp, Artificial Sequence
  Oligonucleotide for detection of SNP TSC0007783
tatgatgttatay

SEQ ID NO: 27734 - DNA, 13 bp, Artificial Sequence
  Oligonucleotide for detection of SNP TSC0007783
rtataacatcata

SEQ ID NO: 27735 - DNA, 13 bp, Artificial Sequence
  Oligonucleotide for detection of SNP TSC0007784
tttttagaatatt

SEQ ID NO: 27736 - DNA, 13 bp, Artificial Sequence
  Oligonucleotide for detection of SNP TSC0007784
aatattctaaaaa

SEQ ID NO: 27737 - DNA, 13 bp, Artificial Sequence
  Oligonucleotide for detection of SNP TSC0007784
tttttaaaatatt

SEQ ID NO: 27738 - DNA, 13 bp, Artificial Sequence
  Oligonucleotide for detection of SNP TSC0007784
aatattttaaaaa

SEQ ID NO: 27739 - DNA, 13 bp, Artificial Sequence
  Oligonucleotide for detection of SNP TSC0007786
gatttggtataga

SEQ ID NO: 27740 - DNA, 13 bp, Artificial Sequence
  Oligonucleotide for detection of SNP TSC0007786
tctataccaaatc

SEQ ID NO: 27741 - DNA, 13 bp, Artificial Sequence
  Oligonucleotide for detection of SNP TSC0007786
gatttgatataga

SEQ ID NO: 27742 - DNA, 13 bp, Artificial Sequence
  Oligonucleotide for detection of SNP TSC0007786
tctatatcaaatc

SEQ ID NO: 27743 - DNA, 13 bp, Artificial Sequence
  Oligonucleotide for detection of SNP TSC0007787
taaatgtgatata

SEQ ID NO: 27744 - DNA, 13 bp, Artificial Sequence
  Oligonucleotide for detection of SNP TSC0007787
tatatcacattta

SEQ ID NO: 27745 - DNA, 13 bp, Artificial Sequence
  Oligonucleotide for detection of SNP TSC0007787
taaatgggatata

SEQ ID NO: 27746 - DNA, 13 bp, Artificial Sequence
  Oligonucleotide for detection of SNP TSC0007787
tatatcccattta

SEQ ID NO: 27747 - DNA, 13 bp, Artificial Sequence
  Oligonucleotide for detection of SNP TSC0007787
taaatgcgatata

SEQ ID NO: 27748 - DNA, 13 bp, Artificial Sequence
  Oligonucleotide for detection of SNP TSC0007787
tatatcgcattta

SEQ ID NO: 27749 - DNA, 13 bp, Artificial Sequence
  Oligonucleotide for detection of SNP TSC0007787
tgtattgtattta

SEQ ID NO: 27750 - DNA, 13 bp, Artificial Sequence
  Oligonucleotide for detection of SNP TSC0007787
taaatacaataca

SEQ ID NO: 27751 - DNA, 13 bp, Artificial Sequence
  Oligonucleotide for detection of SNP TSC0007787
tgtattttattta

SEQ ID NO: 27752 - DNA, 13 bp, Artificial Sequence
  Oligonucleotide for detection of SNP TSC0007787
taaataaaataca

SEQ ID NO: 27753 - DNA, 13 bp, Artificial Sequence
  Oligonucleotide for detection of SNP TSC0007787
tgtatcgtattta

SEQ ID NO: 27754 - DNA, 13 bp, Artificial Sequence
  Oligonucleotide for detection of SNP TSC0007787
taaatacgataca

SEQ ID NO: 27755 - DNA, 13 bp, Artificial Sequence
  Oligonucleotide for detection of SNP TSC0007788
tatatggtagagg

SEQ ID NO: 27756 - DNA, 13 bp, Artificial Sequence
  Oligonucleotide for detection of SNP TSC0007788
cctctaccatata

SEQ ID NO: 27757 - DNA, 13 bp, Artificial Sequence
  Oligonucleotide for detection of SNP TSC0007788
tatatgatagagg

SEQ ID NO: 27758 - DNA, 13 bp, Artificial Sequence
  Oligonucleotide for detection of SNP TSC0007788
cctctatcatata

SEQ ID NO: 27759 - DNA, 13 bp, Artificial Sequence
  Oligonucleotide for detection of SNP TSC0007789
ttgtttattttty

SEQ ID NO: 27760 - DNA, 13 bp, Artificial Sequence
  Oligonucleotide for detection of SNP TSC0007789
raaaaataaacaa

SEQ ID NO: 27761 - DNA, 13 bp, Artificial Sequence
  Oligonucleotide for detection of SNP TSC0007789
ttgtttgttttty

SEQ ID NO: 27762 - DNA, 13 bp, Artificial Sequence
  Oligonucleotide for detection of SNP TSC0007789
raaaaacaaacaa

SEQ ID NO: 27763 - DNA, 13 bp, Artificial Sequence
  Oligonucleotide for detection of SNP TSC0007790
aattagggtttta

SEQ ID NO: 27764 - DNA, 13 bp, Artificial Sequence
  Oligonucleotide for detection of SNP TSC0007790
taaaaccctaatt

SEQ ID NO: 27765 - DNA, 13 bp, Artificial Sequence
  Oligonucleotide for detection of SNP TSC0007790
aattagtgtttta

SEQ ID NO: 27766 - DNA, 13 bp, Artificial Sequence
  Oligonucleotide for detection of SNP TSC0007790
taaaacactaatt

SEQ ID NO: 27767 - DNA, 13 bp, Artificial Sequence
  Oligonucleotide for detection of SNP TSC0007790
tgaaattttaatt

SEQ ID NO: 27768 - DNA, 13 bp, Artificial Sequence
  Oligonucleotide for detection of SNP TSC0007790
aattaaaatttca

SEQ ID NO: 27769 - DNA, 13 bp, Artificial Sequence
  Oligonucleotide for detection of SNP TSC0007790
tgaaatattaatt

SEQ ID NO: 27770 - DNA, 13 bp, Artificial Sequence
  Oligonucleotide for detection of SNP TSC0007790
aattaatatttca

SEQ ID NO: 27771 - DNA, 13 bp, Artificial Sequence
  Oligonucleotide for detection of SNP TSC0007810
atggaaggtatga

SEQ ID NO: 27772 - DNA, 13 bp, Artificial Sequence
  Oligonucleotide for detection of SNP TSC0007810
tcataccttccat

SEQ ID NO: 27773 - DNA, 13 bp, Artificial Sequence
  Oligonucleotide for detection of SNP TSC0007810
atggaatgtatga

SEQ ID NO: 27774 - DNA, 13 bp, Artificial Sequence
  Oligonucleotide for detection of SNP TSC0007810
tcatacattccat

SEQ ID NO: 27775 - DNA, 13 bp, Artificial Sequence
  Oligonucleotide for detection of SNP TSC0007810
ttatattttttat

SEQ ID NO: 27776 - DNA, 13 bp, Artificial Sequence
  Oligonucleotide for detection of SNP TSC0007810
ataaaaaatataa

SEQ ID NO: 27777 - DNA, 13 bp, Artificial Sequence
  Oligonucleotide for detection of SNP TSC0007810
ttatatattttat

SEQ ID NO: 27778 - DNA, 13 bp, Artificial Sequence
  Oligonucleotide for detection of SNP TSC0007810
ataaaatatataa

SEQ ID NO: 27779 - DNA, 13 bp, Artificial Sequence
  Oligonucleotide for detection of SNP TSC0007815
aaatttagaaaat

SEQ ID NO: 27780 - DNA, 13 bp, Artificial Sequence
  Oligonucleotide for detection of SNP TSC0007815
attttctaaattt

SEQ ID NO: 27781 - DNA, 13 bp, Artificial Sequence
  Oligonucleotide for detection of SNP TSC0007815
aaatttggaaaat

SEQ ID NO: 27782 - DNA, 13 bp, Artificial Sequence
  Oligonucleotide for detection of SNP TSC0007815
attttccaaattt

SEQ ID NO: 27783 - DNA, 13 bp, Artificial Sequence
  Oligonucleotide for detection of SNP TSC0007815
aaattcggaaaat

SEQ ID NO: 27784 - DNA, 13 bp, Artificial Sequence
  Oligonucleotide for detection of SNP TSC0007815
attttccgaattt

SEQ ID NO: 27785 - DNA, 13 bp, Artificial Sequence
  Oligonucleotide for detection of SNP TSC0007815
attttttggattt

SEQ ID NO: 27786 - DNA, 13 bp, Artificial Sequence
  Oligonucleotide for detection of SNP TSC0007815
aaatccaaaaaat

SEQ ID NO: 27787 - DNA, 13 bp, Artificial Sequence
  Oligonucleotide for detection of SNP TSC0007815
atttttcggattt

SEQ ID NO: 27788 - DNA, 13 bp, Artificial Sequence
  Oligonucleotide for detection of SNP TSC0007815
aaatccgaaaaat

SEQ ID NO: 27789 - DNA, 13 bp, Artificial Sequence
  Oligonucleotide for detection of SNP TSC0007819
ttatttgtaatay

SEQ ID NO: 27790 - DNA, 13 bp, Artificial Sequence
  Oligonucleotide for detection of SNP TSC0007819
rtattacaaataa

SEQ ID NO: 27791 - DNA, 13 bp, Artificial Sequence
  Oligonucleotide for detection of SNP TSC0007819
ttatttataatay

SEQ ID NO: 27792 - DNA, 13 bp, Artificial Sequence
  Oligonucleotide for detection of SNP TSC0007819
rtattataaataa

SEQ ID NO: 27793 - DNA, 13 bp, Artificial Sequence
  Oligonucleotide for detection of SNP TSC0007821
ttttggatatgtt

SEQ ID NO: 27794 - DNA, 13 bp, Artificial Sequence
  Oligonucleotide for detection of SNP TSC0007821
aacatatccaaaa

SEQ ID NO: 27795 - DNA, 13 bp, Artificial Sequence
  Oligonucleotide for detection of SNP TSC0007821
ttttggttatgtt

SEQ ID NO: 27796 - DNA, 13 bp, Artificial Sequence
  Oligonucleotide for detection of SNP TSC0007821
aacataaccaaaa

SEQ ID NO: 27797 - DNA, 13 bp, Artificial Sequence
  Oligonucleotide for detection of SNP TSC0007821
ttttggatacgtt

SEQ ID NO: 27798 - DNA, 13 bp, Artificial Sequence
  Oligonucleotide for detection of SNP TSC0007821
aacgtatccaaaa

SEQ ID NO: 27799 - DNA, 13 bp, Artificial Sequence
  Oligonucleotide for detection of SNP TSC0007821
ttttggttacgtt

SEQ ID NO: 27800 - DNA, 13 bp, Artificial Sequence
  Oligonucleotide for detection of SNP TSC0007821
aacgtaaccaaaa

SEQ ID NO: 27801 - DNA, 13 bp, Artificial Sequence
  Oligonucleotide for detection of SNP TSC0007821
aatgtatttagag

SEQ ID NO: 27802 - DNA, 13 bp, Artificial Sequence
  Oligonucleotide for detection of SNP TSC0007821
ctctaaatacatt

SEQ ID NO: 27803 - DNA, 13 bp, Artificial Sequence
  Oligonucleotide for detection of SNP TSC0007821
aatgtagttagag

SEQ ID NO: 27804 - DNA, 13 bp, Artificial Sequence
  Oligonucleotide for detection of SNP TSC0007821
ctctaactacatt

SEQ ID NO: 27805 - DNA, 13 bp, Artificial Sequence
  Oligonucleotide for detection of SNP TSC0007821
aacgtatttagag

SEQ ID NO: 27806 - DNA, 13 bp, Artificial Sequence
  Oligonucleotide for detection of SNP TSC0007821
ctctaaatacgtt

SEQ ID NO: 27807 - DNA, 13 bp, Artificial Sequence
  Oligonucleotide for detection of SNP TSC0007821
aacgtagttagag

SEQ ID NO: 27808 - DNA, 13 bp, Artificial Sequence
  Oligonucleotide for detection of SNP TSC0007821
ctctaactacgtt

SEQ ID NO: 27809 - DNA, 13 bp, Artificial Sequence
  Oligonucleotide for detection of SNP TSC0007827
aaggttagaagta

SEQ ID NO: 27810 - DNA, 13 bp, Artificial Sequence
  Oligonucleotide for detection of SNP TSC0007827
tacttctaacctt

SEQ ID NO: 27811 - DNA, 13 bp, Artificial Sequence
  Oligonucleotide for detection of SNP TSC0007827
aaggttggaagta

SEQ ID NO: 27812 - DNA, 13 bp, Artificial Sequence
  Oligonucleotide for detection of SNP TSC0007827
tacttccaacctt

SEQ ID NO: 27813 - DNA, 13 bp, Artificial Sequence
  Oligonucleotide for detection of SNP TSC0007827
aaggtcggaagta

SEQ ID NO: 27814 - DNA, 13 bp, Artificial Sequence
  Oligonucleotide for detection of SNP TSC0007827
tacttccgacctt

SEQ ID NO: 27815 - DNA, 13 bp, Artificial Sequence
  Oligonucleotide for detection of SNP TSC0007827
tatttttgatttt

SEQ ID NO: 27816 - DNA, 13 bp, Artificial Sequence
  Oligonucleotide for detection of SNP TSC0007827
aaaatcaaaaata

SEQ ID NO: 27817 - DNA, 13 bp, Artificial Sequence
  Oligonucleotide for detection of SNP TSC0007827
tattttcgatttt

SEQ ID NO: 27818 - DNA, 13 bp, Artificial Sequence
  Oligonucleotide for detection of SNP TSC0007827
aaaatcgaaaata

SEQ ID NO: 27819 - DNA, 13 bp, Artificial Sequence
  Oligonucleotide for detection of SNP TSC0007835
attttagttttta

SEQ ID NO: 27820 - DNA, 13 bp, Artificial Sequence
  Oligonucleotide for detection of SNP TSC0007835
taaaaactaaaat

SEQ ID NO: 27821 - DNA, 13 bp, Artificial Sequence
  Oligonucleotide for detection of SNP TSC0007835
attttaattttta

SEQ ID NO: 27822 - DNA, 13 bp, Artificial Sequence
  Oligonucleotide for detection of SNP TSC0007835
taaaaattaaaat

SEQ ID NO: 27823 - DNA, 13 bp, Artificial Sequence
  Oligonucleotide for detection of SNP TSC0007836
gtaaattgtgtta

SEQ ID NO: 27824 - DNA, 13 bp, Artificial Sequence
  Oligonucleotide for detection of SNP TSC0007836
taacacaatttac

SEQ ID NO: 27825 - DNA, 13 bp, Artificial Sequence
  Oligonucleotide for detection of SNP TSC0007836
gtaaatcgtgtta

SEQ ID NO: 27826 - DNA, 13 bp, Artificial Sequence
  Oligonucleotide for detection of SNP TSC0007836
taacacgatttac

SEQ ID NO: 27827 - DNA, 13 bp, Artificial Sequence
  Oligonucleotide for detection of SNP TSC0007836
taatatgatttay

SEQ ID NO: 27828 - DNA, 13 bp, Artificial Sequence
  Oligonucleotide for detection of SNP TSC0007836
rtaaatcatatta

SEQ ID NO: 27829 - DNA, 13 bp, Artificial Sequence
  Oligonucleotide for detection of SNP TSC0007836
taatataatttay

SEQ ID NO: 27830 - DNA, 13 bp, Artificial Sequence
  Oligonucleotide for detection of SNP TSC0007836
rtaaattatatta

SEQ ID NO: 27831 - DNA, 13 bp, Artificial Sequence
  Oligonucleotide for detection of SNP TSC0007836
taatacgatttay

SEQ ID NO: 27832 - DNA, 13 bp, Artificial Sequence
  Oligonucleotide for detection of SNP TSC0007836
rtaaatcgtatta

SEQ ID NO: 27833 - DNA, 13 bp, Artificial Sequence
  Oligonucleotide for detection of SNP TSC0007837
gtaaatgtgttay

SEQ ID NO: 27834 - DNA, 13 bp, Artificial Sequence
  Oligonucleotide for detection of SNP TSC0007837
rtaacacatttac

SEQ ID NO: 27835 - DNA, 13 bp, Artificial Sequence
  Oligonucleotide for detection of SNP TSC0007837
gtaaatttgttay

SEQ ID NO: 27836 - DNA, 13 bp, Artificial Sequence
  Oligonucleotide for detection of SNP TSC0007837
rtaacaaatttac

SEQ ID NO: 27837 - DNA, 13 bp, Artificial Sequence
  Oligonucleotide for detection of SNP TSC0007837
gtgatatatttay

SEQ ID NO: 27838 - DNA, 13 bp, Artificial Sequence
  Oligonucleotide for detection of SNP TSC0007837
rtaaatatatcac

SEQ ID NO: 27839 - DNA, 13 bp, Artificial Sequence
  Oligonucleotide for detection of SNP TSC0007837
gtgataaatttay

SEQ ID NO: 27840 - DNA, 13 bp, Artificial Sequence
  Oligonucleotide for detection of SNP TSC0007837
rtaaatttatcac

SEQ ID NO: 27841 - DNA, 13 bp, Artificial Sequence
  Oligonucleotide for detection of SNP TSC0007838
aagtatattattt

SEQ ID NO: 27842 - DNA, 13 bp, Artificial Sequence
  Oligonucleotide for detection of SNP TSC0007838
aaataatatactt

SEQ ID NO: 27843 - DNA, 13 bp, Artificial Sequence
  Oligonucleotide for detection of SNP TSC0007838
aagtattttattt

SEQ ID NO: 27844 - DNA, 13 bp, Artificial Sequence
  Oligonucleotide for detection of SNP TSC0007838
aaataaaatactt

SEQ ID NO: 27845 - DNA, 13 bp, Artificial Sequence
  Oligonucleotide for detection of SNP TSC0007838
aagtaatgtgttt

SEQ ID NO: 27846 - DNA, 13 bp, Artificial Sequence
  Oligonucleotide for detection of SNP TSC0007838
aaacacattactt

SEQ ID NO: 27847 - DNA, 13 bp, Artificial Sequence
  Oligonucleotide for detection of SNP TSC0007838
aagtaaggtgttt

SEQ ID NO: 27848 - DNA, 13 bp, Artificial Sequence
  Oligonucleotide for detection of SNP TSC0007838
aaacaccttactt

SEQ ID NO: 27849 - DNA, 13 bp, Artificial Sequence
  Oligonucleotide for detection of SNP TSC0007839
agattaggagttt

SEQ ID NO: 27850 - DNA, 13 bp, Artificial Sequence
  Oligonucleotide for detection of SNP TSC0007839
aaactcctaatct

SEQ ID NO: 27851 - DNA, 13 bp, Artificial Sequence
  Oligonucleotide for detection of SNP TSC0007839
agattatgagttt

SEQ ID NO: 27852 - DNA, 13 bp, Artificial Sequence
  Oligonucleotide for detection of SNP TSC0007839
aaactcataatct

SEQ ID NO: 27853 - DNA, 13 bp, Artificial Sequence
  Oligonucleotide for detection of SNP TSC0007839
aagtttttaattt

SEQ ID NO: 27854 - DNA, 13 bp, Artificial Sequence
  Oligonucleotide for detection of SNP TSC0007839
aaattaaaaactt

SEQ ID NO: 27855 - DNA, 13 bp, Artificial Sequence
  Oligonucleotide for detection of SNP TSC0007839
aagtttataattt

SEQ ID NO: 27856 - DNA, 13 bp, Artificial Sequence
  Oligonucleotide for detection of SNP TSC0007839
aaattataaactt

SEQ ID NO: 27857 - DNA, 13 bp, Artificial Sequence
  Oligonucleotide for detection of SNP TSC0007846
aaaaatgagttat

SEQ ID NO: 27858 - DNA, 13 bp, Artificial Sequence
  Oligonucleotide for detection of SNP TSC0007846
ataactcattttt

SEQ ID NO: 27859 - DNA, 13 bp, Artificial Sequence
  Oligonucleotide for detection of SNP TSC0007846
aaaaataagttat

SEQ ID NO: 27860 - DNA, 13 bp, Artificial Sequence
  Oligonucleotide for detection of SNP TSC0007846
ataacttattttt

SEQ ID NO: 27861 - DNA, 13 bp, Artificial Sequence
  Oligonucleotide for detection of SNP TSC0007854
ttaagtaatttty

SEQ ID NO: 27862 - DNA, 13 bp, Artificial Sequence
  Oligonucleotide for detection of SNP TSC0007854
raaaattacttaa

SEQ ID NO: 27863 - DNA, 13 bp, Artificial Sequence
  Oligonucleotide for detection of SNP TSC0007854
ttaagtgatttty

SEQ ID NO: 27864 - DNA, 13 bp, Artificial Sequence
  Oligonucleotide for detection of SNP TSC0007854
raaaatcacttaa

SEQ ID NO: 27865 - DNA, 13 bp, Artificial Sequence
  Oligonucleotide for detection of SNP TSC0007854
ttaagcgatttty

SEQ ID NO: 27866 - DNA, 13 bp, Artificial Sequence
  Oligonucleotide for detection of SNP TSC0007854
raaaatcgcttaa

SEQ ID NO: 27867 - DNA, 13 bp, Artificial Sequence
  Oligonucleotide for detection of SNP TSC0007854
gagaattgtttga

SEQ ID NO: 27868 - DNA, 13 bp, Artificial Sequence
  Oligonucleotide for detection of SNP TSC0007854
tcaaacaattctc

SEQ ID NO: 27869 - DNA, 13 bp, Artificial Sequence
  Oligonucleotide for detection of SNP TSC0007854
gagaatcgtttga

SEQ ID NO: 27870 - DNA, 13 bp, Artificial Sequence
  Oligonucleotide for detection of SNP TSC0007854
tcaaacgattctc

SEQ ID NO: 27871 - DNA, 13 bp, Artificial Sequence
  Oligonucleotide for detection of SNP TSC0007855
tttgttttgttay

SEQ ID NO: 27872 - DNA, 13 bp, Artificial Sequence
  Oligonucleotide for detection of SNP TSC0007855
rtaacaaaacaaa

SEQ ID NO: 27873 - DNA, 13 bp, Artificial Sequence
  Oligonucleotide for detection of SNP TSC0007855
tttgttgtgttay

SEQ ID NO: 27874 - DNA, 13 bp, Artificial Sequence
  Oligonucleotide for detection of SNP TSC0007855
rtaacacaacaaa

SEQ ID NO: 27875 - DNA, 13 bp, Artificial Sequence
  Oligonucleotide for detection of SNP TSC0007855
tttgtcgtgttay

SEQ ID NO: 27876 - DNA, 13 bp, Artificial Sequence
  Oligonucleotide for detection of SNP TSC0007855
rtaacacgacaaa

SEQ ID NO: 27877 - DNA, 13 bp, Artificial Sequence
  Oligonucleotide for detection of SNP TSC0007855
gtgataggataga

SEQ ID NO: 27878 - DNA, 13 bp, Artificial Sequence
  Oligonucleotide for detection of SNP TSC0007855
tctatcctatcac

SEQ ID NO: 27879 - DNA, 13 bp, Artificial Sequence
  Oligonucleotide for detection of SNP TSC0007855
gtgatatgataga

SEQ ID NO: 27880 - DNA, 13 bp, Artificial Sequence
  Oligonucleotide for detection of SNP TSC0007855
tctatcatatcac

SEQ ID NO: 27881 - DNA, 13 bp, Artificial Sequence
  Oligonucleotide for detection of SNP TSC0007855
gtgatacgataga

SEQ ID NO: 27882 - DNA, 13 bp, Artificial Sequence
  Oligonucleotide for detection of SNP TSC0007855
tctatcgtatcac

SEQ ID NO: 27883 - DNA, 13 bp, Artificial Sequence
  Oligonucleotide for detection of SNP TSC0007856
tggtagaagaaat

SEQ ID NO: 27884 - DNA, 13 bp, Artificial Sequence
  Oligonucleotide for detection of SNP TSC0007856
atttcttctacca

SEQ ID NO: 27885 - DNA, 13 bp, Artificial Sequence
  Oligonucleotide for detection of SNP TSC0007856
tggtaggagaaat

SEQ ID NO: 27886 - DNA, 13 bp, Artificial Sequence
  Oligonucleotide for detection of SNP TSC0007856
atttctcctacca

SEQ ID NO: 27887 - DNA, 13 bp, Artificial Sequence
  Oligonucleotide for detection of SNP TSC0007857
agttatattagtt

SEQ ID NO: 27888 - DNA, 13 bp, Artificial Sequence
  Oligonucleotide for detection of SNP TSC0007857
aactaatataact

SEQ ID NO: 27889 - DNA, 13 bp, Artificial Sequence
  Oligonucleotide for detection of SNP TSC0007857
agttatgttagtt

SEQ ID NO: 27890 - DNA, 13 bp, Artificial Sequence
  Oligonucleotide for detection of SNP TSC0007857
aactaacataact

SEQ ID NO: 27891 - DNA, 13 bp, Artificial Sequence
  Oligonucleotide for detection of SNP TSC0007857
agttacgttagtt

SEQ ID NO: 27892 - DNA, 13 bp, Artificial Sequence
  Oligonucleotide for detection of SNP TSC0007857
aactaacgtaact

SEQ ID NO: 27893 - DNA, 13 bp, Artificial Sequence
  Oligonucleotide for detection of SNP TSC0007857
agttaatgtggtt

SEQ ID NO: 27894 - DNA, 13 bp, Artificial Sequence
  Oligonucleotide for detection of SNP TSC0007857
aaccacattaact

SEQ ID NO: 27895 - DNA, 13 bp, Artificial Sequence
  Oligonucleotide for detection of SNP TSC0007857
agttaacgtggtt

SEQ ID NO: 27896 - DNA, 13 bp, Artificial Sequence
  Oligonucleotide for detection of SNP TSC0007857
aaccacgttaact

SEQ ID NO: 27897 - DNA, 13 bp, Artificial Sequence
  Oligonucleotide for detection of SNP TSC0007859
ggagatgtttgay

SEQ ID NO: 27898 - DNA, 13 bp, Artificial Sequence
  Oligonucleotide for detection of SNP TSC0007859
rtcaaacatctcc

SEQ ID NO: 27899 - DNA, 13 bp, Artificial Sequence
  Oligonucleotide for detection of SNP TSC0007859
ggagatatttgay

SEQ ID NO: 27900 - DNA, 13 bp, Artificial Sequence
  Oligonucleotide for detection of SNP TSC0007859
rtcaaatatctcc

SEQ ID NO: 27901 - DNA, 13 bp, Artificial Sequence
  Oligonucleotide for detection of SNP TSC0007861
taaaatgtatttt

SEQ ID NO: 27902 - DNA, 13 bp, Artificial Sequence
  Oligonucleotide for detection of SNP TSC0007861
aaaatacatttta

SEQ ID NO: 27903 - DNA, 13 bp, Artificial Sequence
  Oligonucleotide for detection of SNP TSC0007861
taaaatttatttt

SEQ ID NO: 27904 - DNA, 13 bp, Artificial Sequence
  Oligonucleotide for detection of SNP TSC0007861
aaaataaatttta

SEQ ID NO: 27905 - DNA, 13 bp, Artificial Sequence
  Oligonucleotide for detection of SNP TSC0007861
taaaacgtatttt

SEQ ID NO: 27906 - DNA, 13 bp, Artificial Sequence
  Oligonucleotide for detection of SNP TSC0007861
aaaatacgtttta

SEQ ID NO: 27907 - DNA, 13 bp, Artificial Sequence
  Oligonucleotide for detection of SNP TSC0007861
aagatgtgttttg

SEQ ID NO: 27908 - DNA, 13 bp, Artificial Sequence
  Oligonucleotide for detection of SNP TSC0007861
caaaacacatctt

SEQ ID NO: 27909 - DNA, 13 bp, Artificial Sequence
  Oligonucleotide for detection of SNP TSC0007861
aagatgagttttg

SEQ ID NO: 27910 - DNA, 13 bp, Artificial Sequence
  Oligonucleotide for detection of SNP TSC0007861
caaaactcatctt

SEQ ID NO: 27911 - DNA, 13 bp, Artificial Sequence
  Oligonucleotide for detection of SNP TSC0007861
aagatgcgttttg

SEQ ID NO: 27912 - DNA, 13 bp, Artificial Sequence
  Oligonucleotide for detection of SNP TSC0007861
caaaacgcatctt

SEQ ID NO: 27913 - DNA, 13 bp, Artificial Sequence
  Oligonucleotide for detection of SNP TSC0007862
aagaagagaagtg

SEQ ID NO: 27914 - DNA, 13 bp, Artificial Sequence
  Oligonucleotide for detection of SNP TSC0007862
cacttctcttctt

SEQ ID NO: 27915 - DNA, 13 bp, Artificial Sequence
  Oligonucleotide for detection of SNP TSC0007862
aagaagggaagtg

SEQ ID NO: 27916 - DNA, 13 bp, Artificial Sequence
  Oligonucleotide for detection of SNP TSC0007862
cacttcccttctt

SEQ ID NO: 27917 - DNA, 13 bp, Artificial Sequence
  Oligonucleotide for detection of SNP TSC0007865
ggtaggagaattg

SEQ ID NO: 27918 - DNA, 13 bp, Artificial Sequence
  Oligonucleotide for detection of SNP TSC0007865
caattctcctacc

SEQ ID NO: 27919 - DNA, 13 bp, Artificial Sequence
  Oligonucleotide for detection of SNP TSC0007865
ggtaggggaattg

SEQ ID NO: 27920 - DNA, 13 bp, Artificial Sequence
  Oligonucleotide for detection of SNP TSC0007865
caattcccctacc

SEQ ID NO: 27921 - DNA, 13 bp, Artificial Sequence
  Oligonucleotide for detection of SNP TSC0007868
ggttttaaaatta

SEQ ID NO: 27922 - DNA, 13 bp, Artificial Sequence
  Oligonucleotide for detection of SNP TSC0007868
taattttaaaacc

SEQ ID NO: 27923 - DNA, 13 bp, Artificial Sequence
  Oligonucleotide for detection of SNP TSC0007868
ggtttttaaatta

SEQ ID NO: 27924 - DNA, 13 bp, Artificial Sequence
  Oligonucleotide for detection of SNP TSC0007868
taatttaaaaacc

SEQ ID NO: 27925 - DNA, 13 bp, Artificial Sequence
  Oligonucleotide for detection of SNP TSC0007868
tgattttggagty

SEQ ID NO: 27926 - DNA, 13 bp, Artificial Sequence
  Oligonucleotide for detection of SNP TSC0007868
ractccaaaatca

SEQ ID NO: 27927 - DNA, 13 bp, Artificial Sequence
  Oligonucleotide for detection of SNP TSC0007868
tgatttgggagty

SEQ ID NO: 27928 - DNA, 13 bp, Artificial Sequence
  Oligonucleotide for detection of SNP TSC0007868
ractcccaaatca

SEQ ID NO: 27929 - DNA, 13 bp, Artificial Sequence
  Oligonucleotide for detection of SNP TSC0007869
gattagatgttay

SEQ ID NO: 27930 - DNA, 13 bp, Artificial Sequence
  Oligonucleotide for detection of SNP TSC0007869
rtaacatctaatc

SEQ ID NO: 27931 - DNA, 13 bp, Artificial Sequence
  Oligonucleotide for detection of SNP TSC0007869
gattaggtgttay

SEQ ID NO: 27932 - DNA, 13 bp, Artificial Sequence
  Oligonucleotide for detection of SNP TSC0007869
rtaacacctaatc

SEQ ID NO: 27933 - DNA, 13 bp, Artificial Sequence
  Oligonucleotide for detection of SNP TSC0007872
atttaagtgggty

SEQ ID NO: 27934 - DNA, 13 bp, Artificial Sequence
  Oligonucleotide for detection of SNP TSC0007872
racccacttaaat

SEQ ID NO: 27935 - DNA, 13 bp, Artificial Sequence
  Oligonucleotide for detection of SNP TSC0007872
atttaaatgggty

SEQ ID NO: 27936 - DNA, 13 bp, Artificial Sequence
  Oligonucleotide for detection of SNP TSC0007872
racccatttaaat

SEQ ID NO: 27937 - DNA, 13 bp, Artificial Sequence
  Oligonucleotide for detection of SNP TSC0007873
agtattatgtagy

SEQ ID NO: 27938 - DNA, 13 bp, Artificial Sequence
  Oligonucleotide for detection of SNP TSC0007873
rctacataatact

SEQ ID NO: 27939 - DNA, 13 bp, Artificial Sequence
  Oligonucleotide for detection of SNP TSC0007873
agtattgtgtagy

SEQ ID NO: 27940 - DNA, 13 bp, Artificial Sequence
  Oligonucleotide for detection of SNP TSC0007873
rctacacaatact

SEQ ID NO: 27941 - DNA, 13 bp, Artificial Sequence
  Oligonucleotide for detection of SNP TSC0007874
aaatagatttttt

SEQ ID NO: 27942 - DNA, 13 bp, Artificial Sequence
  Oligonucleotide for detection of SNP TSC0007874
aaaaaatctattt

SEQ ID NO: 27943 - DNA, 13 bp, Artificial Sequence
  Oligonucleotide for detection of SNP TSC0007874
aaataggtttttt

SEQ ID NO: 27944 - DNA, 13 bp, Artificial Sequence
  Oligonucleotide for detection of SNP TSC0007874
aaaaaacctattt

SEQ ID NO: 27945 - DNA, 13 bp, Artificial Sequence
  Oligonucleotide for detection of SNP TSC0007875
atatgaattttty

SEQ ID NO: 27946 - DNA, 13 bp, Artificial Sequence
  Oligonucleotide for detection of SNP TSC0007875
raaaaattcatat

SEQ ID NO: 27947 - DNA, 13 bp, Artificial Sequence
  Oligonucleotide for detection of SNP TSC0007875
atatgatttttty

SEQ ID NO: 27948 - DNA, 13 bp, Artificial Sequence
  Oligonucleotide for detection of SNP TSC0007875
raaaaaatcatat

SEQ ID NO: 27949 - DNA, 13 bp, Artificial Sequence
  Oligonucleotide for detection of SNP TSC0007875
gaaaagtttatgt

SEQ ID NO: 27950 - DNA, 13 bp, Artificial Sequence
  Oligonucleotide for detection of SNP TSC0007875
acataaacttttc

SEQ ID NO: 27951 - DNA, 13 bp, Artificial Sequence
  Oligonucleotide for detection of SNP TSC0007875
gaaaagattatgt

SEQ ID NO: 27952 - DNA, 13 bp, Artificial Sequence
  Oligonucleotide for detection of SNP TSC0007875
acataatcttttc

SEQ ID NO: 27953 - DNA, 13 bp, Artificial Sequence
  Oligonucleotide for detection of SNP TSC0007876
aagttaggtgatt

SEQ ID NO: 27954 - DNA, 13 bp, Artificial Sequence
  Oligonucleotide for detection of SNP TSC0007876
aatcacctaactt

SEQ ID NO: 27955 - DNA, 13 bp, Artificial Sequence
  Oligonucleotide for detection of SNP TSC0007876
aagttatgtgatt

SEQ ID NO: 27956 - DNA, 13 bp, Artificial Sequence
  Oligonucleotide for detection of SNP TSC0007876
aatcacataactt

SEQ ID NO: 27957 - DNA, 13 bp, Artificial Sequence
  Oligonucleotide for detection of SNP TSC0007876
aattatttggttt

SEQ ID NO: 27958 - DNA, 13 bp, Artificial Sequence
  Oligonucleotide for detection of SNP TSC0007876
aaaccaaataatt

SEQ ID NO: 27959 - DNA, 13 bp, Artificial Sequence
  Oligonucleotide for detection of SNP TSC0007876
aattatatggttt

SEQ ID NO: 27960 - DNA, 13 bp, Artificial Sequence
  Oligonucleotide for detection of SNP TSC0007876
aaaccatataatt

SEQ ID NO: 27961 - DNA, 13 bp, Artificial Sequence
  Oligonucleotide for detection of SNP TSC0007877
agtttagttgatt

SEQ ID NO: 27962 - DNA, 13 bp, Artificial Sequence
  Oligonucleotide for detection of SNP TSC0007877
aatcaactaaact

SEQ ID NO: 27963 - DNA, 13 bp, Artificial Sequence
  Oligonucleotide for detection of SNP TSC0007877
agtttaattgatt

SEQ ID NO: 27964 - DNA, 13 bp, Artificial Sequence
  Oligonucleotide for detection of SNP TSC0007877
aatcaattaaact

SEQ ID NO: 27965 - DNA, 13 bp, Artificial Sequence
  Oligonucleotide for detection of SNP TSC0007878
gtaggaaaattay

SEQ ID NO: 27966 - DNA, 13 bp, Artificial Sequence
  Oligonucleotide for detection of SNP TSC0007878
rtaattttcctac

SEQ ID NO: 27967 - DNA, 13 bp, Artificial Sequence
  Oligonucleotide for detection of SNP TSC0007878
gtaggagaattay

SEQ ID NO: 27968 - DNA, 13 bp, Artificial Sequence
  Oligonucleotide for detection of SNP TSC0007878
rtaattctcctac

SEQ ID NO: 27969 - DNA, 13 bp, Artificial Sequence
  Oligonucleotide for detection of SNP TSC0007879
agttgaaattgtg

SEQ ID NO: 27970 - DNA, 13 bp, Artificial Sequence
  Oligonucleotide for detection of SNP TSC0007879
cacaatttcaact

SEQ ID NO: 27971 - DNA, 13 bp, Artificial Sequence
  Oligonucleotide for detection of SNP TSC0007879
agttgaaatcgtg

SEQ ID NO: 27972 - DNA, 13 bp, Artificial Sequence
  Oligonucleotide for detection of SNP TSC0007879
cacgatttcaact

SEQ ID NO: 27973 - DNA, 13 bp, Artificial Sequence
  Oligonucleotide for detection of SNP TSC0007882
attagtagttata

SEQ ID NO: 27974 - DNA, 13 bp, Artificial Sequence
  Oligonucleotide for detection of SNP TSC0007882
tataactactaat

SEQ ID NO: 27975 - DNA, 13 bp, Artificial Sequence
  Oligonucleotide for detection of SNP TSC0007882
attagttgttata

SEQ ID NO: 27976 - DNA, 13 bp, Artificial Sequence
  Oligonucleotide for detection of SNP TSC0007882
tataacaactaat

SEQ ID NO: 27977 - DNA, 13 bp, Artificial Sequence
  Oligonucleotide for detection of SNP TSC0007882
attagtcgttata

SEQ ID NO: 27978 - DNA, 13 bp, Artificial Sequence
  Oligonucleotide for detection of SNP TSC0007882
tataacgactaat

SEQ ID NO: 27979 - DNA, 13 bp, Artificial Sequence
  Oligonucleotide for detection of SNP TSC0007882
tgtggttgttaat

SEQ ID NO: 27980 - DNA, 13 bp, Artificial Sequence
  Oligonucleotide for detection of SNP TSC0007882
attaacaaccaca

SEQ ID NO: 27981 - DNA, 13 bp, Artificial Sequence
  Oligonucleotide for detection of SNP TSC0007882
tgtggtggttaat

SEQ ID NO: 27982 - DNA, 13 bp, Artificial Sequence
  Oligonucleotide for detection of SNP TSC0007882
attaaccaccaca

SEQ ID NO: 27983 - DNA, 13 bp, Artificial Sequence
  Oligonucleotide for detection of SNP TSC0007882
tgtggcggttaat

SEQ ID NO: 27984 - DNA, 13 bp, Artificial Sequence
  Oligonucleotide for detection of SNP TSC0007882
attaaccgccaca

SEQ ID NO: 27985 - DNA, 13 bp, Artificial Sequence
  Oligonucleotide for detection of SNP TSC0007888
gtatatgagaatg

SEQ ID NO: 27986 - DNA, 13 bp, Artificial Sequence
  Oligonucleotide for detection of SNP TSC0007888
cattctcatatac

SEQ ID NO: 27987 - DNA, 13 bp, Artificial Sequence
  Oligonucleotide for detection of SNP TSC0007888
gtatataagaatg

SEQ ID NO: 27988 - DNA, 13 bp, Artificial Sequence
  Oligonucleotide for detection of SNP TSC0007888
cattcttatatac

SEQ ID NO: 27989 - DNA, 13 bp, Artificial Sequence
  Oligonucleotide for detection of SNP TSC0007891
ggaaaggtatatt

SEQ ID NO: 27990 - DNA, 13 bp, Artificial Sequence
  Oligonucleotide for detection of SNP TSC0007891
aatatacctttcc

SEQ ID NO: 27991 - DNA, 13 bp, Artificial Sequence
  Oligonucleotide for detection of SNP TSC0007891
ggaaagatatatt

SEQ ID NO: 27992 - DNA, 13 bp, Artificial Sequence
  Oligonucleotide for detection of SNP TSC0007891
aatatatctttcc

SEQ ID NO: 27993 - DNA, 13 bp, Artificial Sequence
  Oligonucleotide for detection of SNP TSC0007897
ttgtttaggttgg

SEQ ID NO: 27994 - DNA, 13 bp, Artificial Sequence
  Oligonucleotide for detection of SNP TSC0007897
ccaacctaaacaa

SEQ ID NO: 27995 - DNA, 13 bp, Artificial Sequence
  Oligonucleotide for detection of SNP TSC0007897
ttgttttggttgg

SEQ ID NO: 27996 - DNA, 13 bp, Artificial Sequence
  Oligonucleotide for detection of SNP TSC0007897
ccaaccaaaacaa

SEQ ID NO: 27997 - DNA, 13 bp, Artificial Sequence
  Oligonucleotide for detection of SNP TSC0007897
ttgtttcggttgg

SEQ ID NO: 27998 - DNA, 13 bp, Artificial Sequence
  Oligonucleotide for detection of SNP TSC0007897
ccaaccgaaacaa

SEQ ID NO: 27999 - DNA, 13 bp, Artificial Sequence
  Oligonucleotide for detection of SNP TSC0007897
ttagtttaggtaa

SEQ ID NO: 28000 - DNA, 13 bp, Artificial Sequence
  Oligonucleotide for detection of SNP TSC0007897
ttacctaaactaa

SEQ ID NO: 28001 - DNA, 13 bp, Artificial Sequence
  Oligonucleotide for detection of SNP TSC0007897
ttagttgaggtaa

SEQ ID NO: 28002 - DNA, 13 bp, Artificial Sequence
  Oligonucleotide for detection of SNP TSC0007897
ttacctcaactaa

SEQ ID NO: 28003 - DNA, 13 bp, Artificial Sequence
  Oligonucleotide for detection of SNP TSC0007897
ttagtcgaggtaa

SEQ ID NO: 28004 - DNA, 13 bp, Artificial Sequence
  Oligonucleotide for detection of SNP TSC0007897
ttacctcgactaa

SEQ ID NO: 28005 - DNA, 13 bp, Artificial Sequence
  Oligonucleotide for detection of SNP TSC0007902
tgagttgattaty

SEQ ID NO: 28006 - DNA, 13 bp, Artificial Sequence
  Oligonucleotide for detection of SNP TSC0007902
rataatcaactca

SEQ ID NO: 28007 - DNA, 13 bp, Artificial Sequence
  Oligonucleotide for detection of SNP TSC0007902
tgagttaattaty

SEQ ID NO: 28008 - DNA, 13 bp, Artificial Sequence
  Oligonucleotide for detection of SNP TSC0007902
rataattaactca

SEQ ID NO: 28009 - DNA, 13 bp, Artificial Sequence
  Oligonucleotide for detection of SNP TSC0007907
tagtttgtttgtg

SEQ ID NO: 28010 - DNA, 13 bp, Artificial Sequence
  Oligonucleotide for detection of SNP TSC0007907
cacaaacaaacta

SEQ ID NO: 28011 - DNA, 13 bp, Artificial Sequence
  Oligonucleotide for detection of SNP TSC0007907
tagtttatttgtg

SEQ ID NO: 28012 - DNA, 13 bp, Artificial Sequence
  Oligonucleotide for detection of SNP TSC0007907
cacaaataaacta

SEQ ID NO: 28013 - DNA, 13 bp, Artificial Sequence
  Oligonucleotide for detection of SNP TSC0007908
ttagattatttga

SEQ ID NO: 28014 - DNA, 13 bp, Artificial Sequence
  Oligonucleotide for detection of SNP TSC0007908
tcaaataatctaa

SEQ ID NO: 28015 - DNA, 13 bp, Artificial Sequence
  Oligonucleotide for detection of SNP TSC0007908
ttagatgatttga

SEQ ID NO: 28016 - DNA, 13 bp, Artificial Sequence
  Oligonucleotide for detection of SNP TSC0007908
tcaaatcatctaa

SEQ ID NO: 28017 - DNA, 13 bp, Artificial Sequence
  Oligonucleotide for detection of SNP TSC0007908
ttaaatgatttaa

SEQ ID NO: 28018 - DNA, 13 bp, Artificial Sequence
  Oligonucleotide for detection of SNP TSC0007908
ttaaatcatttaa

SEQ ID NO: 28019 - DNA, 13 bp, Artificial Sequence
  Oligonucleotide for detection of SNP TSC0007908
ttaaattatttaa

SEQ ID NO: 28020 - DNA, 13 bp, Artificial Sequence
  Oligonucleotide for detection of SNP TSC0007908
ttaaataatttaa

SEQ ID NO: 28021 - DNA, 13 bp, Artificial Sequence
  Oligonucleotide for detection of SNP TSC0007910
attattaatttgg

SEQ ID NO: 28022 - DNA, 13 bp, Artificial Sequence
  Oligonucleotide for detection of SNP TSC0007910
ccaaattaataat

SEQ ID NO: 28023 - DNA, 13 bp, Artificial Sequence
  Oligonucleotide for detection of SNP TSC0007910
attatttatttgg

SEQ ID NO: 28024 - DNA, 13 bp, Artificial Sequence
  Oligonucleotide for detection of SNP TSC0007910
ccaaataaataat

SEQ ID NO: 28025 - DNA, 13 bp, Artificial Sequence
  Oligonucleotide for detection of SNP TSC0007910
ttaagttagtagt

SEQ ID NO: 28026 - DNA, 13 bp, Artificial Sequence
  Oligonucleotide for detection of SNP TSC0007910
actactaacttaa

SEQ ID NO: 28027 - DNA, 13 bp, Artificial Sequence
  Oligonucleotide for detection of SNP TSC0007910
ttaagtaagtagt

SEQ ID NO: 28028 - DNA, 13 bp, Artificial Sequence
  Oligonucleotide for detection of SNP TSC0007910
actacttacttaa

SEQ ID NO: 28029 - DNA, 13 bp, Artificial Sequence
  Oligonucleotide for detection of SNP TSC0007912
ggttttaaattty

SEQ ID NO: 28030 - DNA, 13 bp, Artificial Sequence
  Oligonucleotide for detection of SNP TSC0007912
raaatttaaaacc

SEQ ID NO: 28031 - DNA, 13 bp, Artificial Sequence
  Oligonucleotide for detection of SNP TSC0007915
taaggtaaattat

SEQ ID NO: 28032 - DNA, 13 bp, Artificial Sequence
  Oligonucleotide for detection of SNP TSC0007915
ataatttacctta

SEQ ID NO: 28033 - DNA, 13 bp, Artificial Sequence
  Oligonucleotide for detection of SNP TSC0007915
taaggtgaattat

SEQ ID NO: 28034 - DNA, 13 bp, Artificial Sequence
  Oligonucleotide for detection of SNP TSC0007915
ataattcacctta

SEQ ID NO: 28035 - DNA, 13 bp, Artificial Sequence
  Oligonucleotide for detection of SNP TSC0007915
taaggcgaattat

SEQ ID NO: 28036 - DNA, 13 bp, Artificial Sequence
  Oligonucleotide for detection of SNP TSC0007915
ataattcgcctta

SEQ ID NO: 28037 - DNA, 13 bp, Artificial Sequence
  Oligonucleotide for detection of SNP TSC0007915
atgatttgttttg

SEQ ID NO: 28038 - DNA, 13 bp, Artificial Sequence
  Oligonucleotide for detection of SNP TSC0007915
caaaacaaatcat

SEQ ID NO: 28039 - DNA, 13 bp, Artificial Sequence
  Oligonucleotide for detection of SNP TSC0007915
atgattcgttttg

SEQ ID NO: 28040 - DNA, 13 bp, Artificial Sequence
  Oligonucleotide for detection of SNP TSC0007915
caaaacgaatcat

SEQ ID NO: 28041 - DNA, 13 bp, Artificial Sequence
  Oligonucleotide for detection of SNP TSC0007916
ggtttagtgggat

SEQ ID NO: 28042 - DNA, 13 bp, Artificial Sequence
  Oligonucleotide for detection of SNP TSC0007916
atcccactaaacc

SEQ ID NO: 28043 - DNA, 13 bp, Artificial Sequence
  Oligonucleotide for detection of SNP TSC0007916
ggtttaatgggat

SEQ ID NO: 28044 - DNA, 13 bp, Artificial Sequence
  Oligonucleotide for detection of SNP TSC0007916
atcccattaaacc

SEQ ID NO: 28045 - DNA, 13 bp, Artificial Sequence
  Oligonucleotide for detection of SNP TSC0007919
agaagtggagtay

SEQ ID NO: 28046 - DNA, 13 bp, Artificial Sequence
  Oligonucleotide for detection of SNP TSC0007919
rtactccacttct

SEQ ID NO: 28047 - DNA, 13 bp, Artificial Sequence
  Oligonucleotide for detection of SNP TSC0007919
agaagttgagtay

SEQ ID NO: 28048 - DNA, 13 bp, Artificial Sequence
  Oligonucleotide for detection of SNP TSC0007919
rtactcaacttct

SEQ ID NO: 28049 - DNA, 13 bp, Artificial Sequence
  Oligonucleotide for detection of SNP TSC0007919
agaagcggagtay

SEQ ID NO: 28050 - DNA, 13 bp, Artificial Sequence
  Oligonucleotide for detection of SNP TSC0007919
rtactccgcttct

SEQ ID NO: 28051 - DNA, 13 bp, Artificial Sequence
  Oligonucleotide for detection of SNP TSC0007919
gtgttttgttttt

SEQ ID NO: 28052 - DNA, 13 bp, Artificial Sequence
  Oligonucleotide for detection of SNP TSC0007919
aaaaacaaaacac

SEQ ID NO: 28053 - DNA, 13 bp, Artificial Sequence
  Oligonucleotide for detection of SNP TSC0007919
gtgtttagttttt

SEQ ID NO: 28054 - DNA, 13 bp, Artificial Sequence
  Oligonucleotide for detection of SNP TSC0007919
aaaaactaaacac

SEQ ID NO: 28055 - DNA, 13 bp, Artificial Sequence
  Oligonucleotide for detection of SNP TSC0007919
gtgtttcgttttt

SEQ ID NO: 28056 - DNA, 13 bp, Artificial Sequence
  Oligonucleotide for detection of SNP TSC0007919
aaaaacgaaacac

SEQ ID NO: 28057 - DNA, 13 bp, Artificial Sequence
  Oligonucleotide for detection of SNP TSC0007923
ggttttgggaagg

SEQ ID NO: 28058 - DNA, 13 bp, Artificial Sequence
  Oligonucleotide for detection of SNP TSC0007923
ccttcccaaaacc

SEQ ID NO: 28059 - DNA, 13 bp, Artificial Sequence
  Oligonucleotide for detection of SNP TSC0007923
ggttttaggaagg

SEQ ID NO: 28060 - DNA, 13 bp, Artificial Sequence
  Oligonucleotide for detection of SNP TSC0007923
ccttcctaaaacc

SEQ ID NO: 28061 - DNA, 13 bp, Artificial Sequence
  Oligonucleotide for detection of SNP TSC0007926
atagtaatttgaa

SEQ ID NO: 28062 - DNA, 13 bp, Artificial Sequence
  Oligonucleotide for detection of SNP TSC0007926
ttcaaattactat

SEQ ID NO: 28063 - DNA, 13 bp, Artificial Sequence
  Oligonucleotide for detection of SNP TSC0007926
atagtagtttgaa

SEQ ID NO: 28064 - DNA, 13 bp, Artificial Sequence
  Oligonucleotide for detection of SNP TSC0007926
ttcaaactactat

SEQ ID NO: 28065 - DNA, 13 bp, Artificial Sequence
  Oligonucleotide for detection of SNP TSC0007927
atattgttataay

SEQ ID NO: 28066 - DNA, 13 bp, Artificial Sequence
  Oligonucleotide for detection of SNP TSC0007927
rttataacaatat

SEQ ID NO: 28067 - DNA, 13 bp, Artificial Sequence
  Oligonucleotide for detection of SNP TSC0007927
atattggtataay

SEQ ID NO: 28068 - DNA, 13 bp, Artificial Sequence
  Oligonucleotide for detection of SNP TSC0007927
rttataccaatat

SEQ ID NO: 28069 - DNA, 13 bp, Artificial Sequence
  Oligonucleotide for detection of SNP TSC0007927
gttatggtagtat

SEQ ID NO: 28070 - DNA, 13 bp, Artificial Sequence
  Oligonucleotide for detection of SNP TSC0007927
atactaccataac

SEQ ID NO: 28071 - DNA, 13 bp, Artificial Sequence
  Oligonucleotide for detection of SNP TSC0007927
gttatgttagtat

SEQ ID NO: 28072 - DNA, 13 bp, Artificial Sequence
  Oligonucleotide for detection of SNP TSC0007927
atactaacataac

SEQ ID NO: 28073 - DNA, 13 bp, Artificial Sequence
  Oligonucleotide for detection of SNP TSC0007937
ttaatggaagagy

SEQ ID NO: 28074 - DNA, 13 bp, Artificial Sequence
  Oligonucleotide for detection of SNP TSC0007937
rctcttccattaa

SEQ ID NO: 28075 - DNA, 13 bp, Artificial Sequence
  Oligonucleotide for detection of SNP TSC0007937
ttaatgaaagagy

SEQ ID NO: 28076 - DNA, 13 bp, Artificial Sequence
  Oligonucleotide for detection of SNP TSC0007937
rctctttcattaa

SEQ ID NO: 28077 - DNA, 13 bp, Artificial Sequence
  Oligonucleotide for detection of SNP TSC0007941
ttttaaattaaaa

SEQ ID NO: 28078 - DNA, 13 bp, Artificial Sequence
  Oligonucleotide for detection of SNP TSC0007941
ttttaatttaaaa

SEQ ID NO: 28079 - DNA, 13 bp, Artificial Sequence
  Oligonucleotide for detection of SNP TSC0007941
ttttaagttaaaa

SEQ ID NO: 28080 - DNA, 13 bp, Artificial Sequence
  Oligonucleotide for detection of SNP TSC0007941
ttttaacttaaaa

SEQ ID NO: 28081 - DNA, 13 bp, Artificial Sequence
  Oligonucleotide for detection of SNP TSC0007945
gtttgggatatag

SEQ ID NO: 28082 - DNA, 13 bp, Artificial Sequence
  Oligonucleotide for detection of SNP TSC0007945
ctatatcccaaac

SEQ ID NO: 28083 - DNA, 13 bp, Artificial Sequence
  Oligonucleotide for detection of SNP TSC0007945
gtttggtatatag

SEQ ID NO: 28084 - DNA, 13 bp, Artificial Sequence
  Oligonucleotide for detection of SNP TSC0007945
ctatataccaaac

SEQ ID NO: 28085 - DNA, 13 bp, Artificial Sequence
  Oligonucleotide for detection of SNP TSC0007945
ttgtattttaagy

SEQ ID NO: 28086 - DNA, 13 bp, Artificial Sequence
  Oligonucleotide for detection of SNP TSC0007945
rcttaaaatacaa

SEQ ID NO: 28087 - DNA, 13 bp, Artificial Sequence
  Oligonucleotide for detection of SNP TSC0007945
ttgtatattaagy

SEQ ID NO: 28088 - DNA, 13 bp, Artificial Sequence
  Oligonucleotide for detection of SNP TSC0007945
rcttaatatacaa

SEQ ID NO: 28089 - DNA, 13 bp, Artificial Sequence
  Oligonucleotide for detection of SNP TSC0007949
ttattgtgttagg

SEQ ID NO: 28090 - DNA, 13 bp, Artificial Sequence
  Oligonucleotide for detection of SNP TSC0007949
cctaacacaataa

SEQ ID NO: 28091 - DNA, 13 bp, Artificial Sequence
  Oligonucleotide for detection of SNP TSC0007949
ttattgcgttagg

SEQ ID NO: 28092 - DNA, 13 bp, Artificial Sequence
  Oligonucleotide for detection of SNP TSC0007949
cctaacgcaataa

SEQ ID NO: 28093 - DNA, 13 bp, Artificial Sequence
  Oligonucleotide for detection of SNP TSC0007950
tgtttagaggggg

SEQ ID NO: 28094 - DNA, 13 bp, Artificial Sequence
  Oligonucleotide for detection of SNP TSC0007950
ccccctctaaaca

SEQ ID NO: 28095 - DNA, 13 bp, Artificial Sequence
  Oligonucleotide for detection of SNP TSC0007950
tgtttataggggg

SEQ ID NO: 28096 - DNA, 13 bp, Artificial Sequence
  Oligonucleotide for detection of SNP TSC0007950
ccccctataaaca

SEQ ID NO: 28097 - DNA, 13 bp, Artificial Sequence
  Oligonucleotide for detection of SNP TSC0007950
ttttttttaggta

SEQ ID NO: 28098 - DNA, 13 bp, Artificial Sequence
  Oligonucleotide for detection of SNP TSC0007950
tacctaaaaaaaa

SEQ ID NO: 28099 - DNA, 13 bp, Artificial Sequence
  Oligonucleotide for detection of SNP TSC0007950
ttttttataggta

SEQ ID NO: 28100 - DNA, 13 bp, Artificial Sequence
  Oligonucleotide for detection of SNP TSC0007950
tacctataaaaaa

SEQ ID NO: 28101 - DNA, 13 bp, Artificial Sequence
  Oligonucleotide for detection of SNP TSC0007951
taggtagagtgta

SEQ ID NO: 28102 - DNA, 13 bp, Artificial Sequence
  Oligonucleotide for detection of SNP TSC0007951
tacactctaccta

SEQ ID NO: 28103 - DNA, 13 bp, Artificial Sequence
  Oligonucleotide for detection of SNP TSC0007951
taggtaaagtgta

SEQ ID NO: 28104 - DNA, 13 bp, Artificial Sequence
  Oligonucleotide for detection of SNP TSC0007951
tacactttaccta

SEQ ID NO: 28105 - DNA, 13 bp, Artificial Sequence
  Oligonucleotide for detection of SNP TSC0007951
taggtagagcgta

SEQ ID NO: 28106 - DNA, 13 bp, Artificial Sequence
  Oligonucleotide for detection of SNP TSC0007951
tacgctctaccta

SEQ ID NO: 28107 - DNA, 13 bp, Artificial Sequence
  Oligonucleotide for detection of SNP TSC0007951
taggtaaagcgta

SEQ ID NO: 28108 - DNA, 13 bp, Artificial Sequence
  Oligonucleotide for detection of SNP TSC0007951
tacgctttaccta

SEQ ID NO: 28109 - DNA, 13 bp, Artificial Sequence
  Oligonucleotide for detection of SNP TSC0007954
ttgtttattgtag

SEQ ID NO: 28110 - DNA, 13 bp, Artificial Sequence
  Oligonucleotide for detection of SNP TSC0007954
ctacaataaacaa

SEQ ID NO: 28111 - DNA, 13 bp, Artificial Sequence
  Oligonucleotide for detection of SNP TSC0007954
ttgttttttgtag

SEQ ID NO: 28112 - DNA, 13 bp, Artificial Sequence
  Oligonucleotide for detection of SNP TSC0007954
ctacaaaaaacaa

SEQ ID NO: 28113 - DNA, 13 bp, Artificial Sequence
  Oligonucleotide for detection of SNP TSC0007954
ttataatgaataa

SEQ ID NO: 28114 - DNA, 13 bp, Artificial Sequence
  Oligonucleotide for detection of SNP TSC0007954
ttattcattataa

SEQ ID NO: 28115 - DNA, 13 bp, Artificial Sequence
  Oligonucleotide for detection of SNP TSC0007954
ttataaggaataa

SEQ ID NO: 28116 - DNA, 13 bp, Artificial Sequence
  Oligonucleotide for detection of SNP TSC0007954
ttattccttataa

SEQ ID NO: 28117 - DNA, 13 bp, Artificial Sequence
  Oligonucleotide for detection of SNP TSC0007955
ttttataagggat

SEQ ID NO: 28118 - DNA, 13 bp, Artificial Sequence
  Oligonucleotide for detection of SNP TSC0007955
atcccttataaaa

SEQ ID NO: 28119 - DNA, 13 bp, Artificial Sequence
  Oligonucleotide for detection of SNP TSC0007955
ttttatgagggat

SEQ ID NO: 28120 - DNA, 13 bp, Artificial Sequence
  Oligonucleotide for detection of SNP TSC0007955
atccctcataaaa

SEQ ID NO: 28121 - DNA, 13 bp, Artificial Sequence
  Oligonucleotide for detection of SNP TSC0007956
tttagtattaatt

SEQ ID NO: 28122 - DNA, 13 bp, Artificial Sequence
  Oligonucleotide for detection of SNP TSC0007956
aattaatactaaa

SEQ ID NO: 28123 - DNA, 13 bp, Artificial Sequence
  Oligonucleotide for detection of SNP TSC0007956
tttagttttaatt

SEQ ID NO: 28124 - DNA, 13 bp, Artificial Sequence
  Oligonucleotide for detection of SNP TSC0007956
aattaaaactaaa

SEQ ID NO: 28125 - DNA, 13 bp, Artificial Sequence
  Oligonucleotide for detection of SNP TSC0007956
aattagtgttaag

SEQ ID NO: 28126 - DNA, 13 bp, Artificial Sequence
  Oligonucleotide for detection of SNP TSC0007956
cttaacactaatt

SEQ ID NO: 28127 - DNA, 13 bp, Artificial Sequence
  Oligonucleotide for detection of SNP TSC0007956
aattagggttaag

SEQ ID NO: 28128 - DNA, 13 bp, Artificial Sequence
  Oligonucleotide for detection of SNP TSC0007956
cttaaccctaatt

SEQ ID NO: 28129 - DNA, 13 bp, Artificial Sequence
  Oligonucleotide for detection of SNP TSC0007957
ttgataaattttt

SEQ ID NO: 28130 - DNA, 13 bp, Artificial Sequence
  Oligonucleotide for detection of SNP TSC0007957
aaaaatttatcaa

SEQ ID NO: 28131 - DNA, 13 bp, Artificial Sequence
  Oligonucleotide for detection of SNP TSC0007957
ttgatagattttt

SEQ ID NO: 28132 - DNA, 13 bp, Artificial Sequence
  Oligonucleotide for detection of SNP TSC0007957
aaaaatctatcaa

SEQ ID NO: 28133 - DNA, 13 bp, Artificial Sequence
  Oligonucleotide for detection of SNP TSC0007958
tttattgaaaaat

SEQ ID NO: 28134 - DNA, 13 bp, Artificial Sequence
  Oligonucleotide for detection of SNP TSC0007958
atttttcaataaa

SEQ ID NO: 28135 - DNA, 13 bp, Artificial Sequence
  Oligonucleotide for detection of SNP TSC0007958
tttattaaaaaat

SEQ ID NO: 28136 - DNA, 13 bp, Artificial Sequence
  Oligonucleotide for detection of SNP TSC0007958
attttttaataaa

SEQ ID NO: 28137 - DNA, 13 bp, Artificial Sequence
  Oligonucleotide for detection of SNP TSC0007959
gatataaatttgg

SEQ ID NO: 28138 - DNA, 13 bp, Artificial Sequence
  Oligonucleotide for detection of SNP TSC0007959
ccaaatttatatc

SEQ ID NO: 28139 - DNA, 13 bp, Artificial Sequence
  Oligonucleotide for detection of SNP TSC0007959
gatatagatttgg

SEQ ID NO: 28140 - DNA, 13 bp, Artificial Sequence
  Oligonucleotide for detection of SNP TSC0007959
ccaaatctatatc

SEQ ID NO: 28141 - DNA, 13 bp, Artificial Sequence
  Oligonucleotide for detection of SNP TSC0007963
tgtagtaagttgt

SEQ ID NO: 28142 - DNA, 13 bp, Artificial Sequence
  Oligonucleotide for detection of SNP TSC0007963
acaacttactaca

SEQ ID NO: 28143 - DNA, 13 bp, Artificial Sequence
  Oligonucleotide for detection of SNP TSC0007963
tgtagtgagttgt

SEQ ID NO: 28144 - DNA, 13 bp, Artificial Sequence
  Oligonucleotide for detection of SNP TSC0007963
acaactcactaca

SEQ ID NO: 28145 - DNA, 13 bp, Artificial Sequence
  Oligonucleotide for detection of SNP TSC0007963
tgtagtaagtcgt

SEQ ID NO: 28146 - DNA, 13 bp, Artificial Sequence
  Oligonucleotide for detection of SNP TSC0007963
acgacttactaca

SEQ ID NO: 28147 - DNA, 13 bp, Artificial Sequence
  Oligonucleotide for detection of SNP TSC0007963
tgtagtgagtcgt

SEQ ID NO: 28148 - DNA, 13 bp, Artificial Sequence
  Oligonucleotide for detection of SNP TSC0007963
acgactcactaca

SEQ ID NO: 28149 - DNA, 13 bp, Artificial Sequence
  Oligonucleotide for detection of SNP TSC0007964
atagttatttgaa

SEQ ID NO: 28150 - DNA, 13 bp, Artificial Sequence
  Oligonucleotide for detection of SNP TSC0007964
ttcaaataactat

SEQ ID NO: 28151 - DNA, 13 bp, Artificial Sequence
  Oligonucleotide for detection of SNP TSC0007964
atagttttttgaa

SEQ ID NO: 28152 - DNA, 13 bp, Artificial Sequence
  Oligonucleotide for detection of SNP TSC0007964
ttcaaaaaactat

SEQ ID NO: 28153 - DNA, 13 bp, Artificial Sequence
  Oligonucleotide for detection of SNP TSC0007964
tttaggtggttgt

SEQ ID NO: 28154 - DNA, 13 bp, Artificial Sequence
  Oligonucleotide for detection of SNP TSC0007964
acaaccacctaaa

SEQ ID NO: 28155 - DNA, 13 bp, Artificial Sequence
  Oligonucleotide for detection of SNP TSC0007964
tttaggaggttgt

SEQ ID NO: 28156 - DNA, 13 bp, Artificial Sequence
  Oligonucleotide for detection of SNP TSC0007964
acaacctcctaaa

SEQ ID NO: 28157 - DNA, 13 bp, Artificial Sequence
  Oligonucleotide for detection of SNP TSC0007969
ttaaaaattatag

SEQ ID NO: 28158 - DNA, 13 bp, Artificial Sequence
  Oligonucleotide for detection of SNP TSC0007969
ctataatttttaa

SEQ ID NO: 28159 - DNA, 13 bp, Artificial Sequence
  Oligonucleotide for detection of SNP TSC0007969
ttaaaatttatag

SEQ ID NO: 28160 - DNA, 13 bp, Artificial Sequence
  Oligonucleotide for detection of SNP TSC0007969
ctataaattttaa

SEQ ID NO: 28161 - DNA, 13 bp, Artificial Sequence
  Oligonucleotide for detection of SNP TSC0007969
ttgtggtttttgg

SEQ ID NO: 28162 - DNA, 13 bp, Artificial Sequence
  Oligonucleotide for detection of SNP TSC0007969
ccaaaaaccacaa

SEQ ID NO: 28163 - DNA, 13 bp, Artificial Sequence
  Oligonucleotide for detection of SNP TSC0007969
ttgtggattttgg

SEQ ID NO: 28164 - DNA, 13 bp, Artificial Sequence
  Oligonucleotide for detection of SNP TSC0007969
ccaaaatccacaa

SEQ ID NO: 28165 - DNA, 13 bp, Artificial Sequence
  Oligonucleotide for detection of SNP TSC0007970
tttgttattttaa

SEQ ID NO: 28166 - DNA, 13 bp, Artificial Sequence
  Oligonucleotide for detection of SNP TSC0007970
ttaaaataacaaa

SEQ ID NO: 28167 - DNA, 13 bp, Artificial Sequence
  Oligonucleotide for detection of SNP TSC0007970
tttgtttttttaa

SEQ ID NO: 28168 - DNA, 13 bp, Artificial Sequence
  Oligonucleotide for detection of SNP TSC0007970
ttaaaaaaacaaa

SEQ ID NO: 28169 - DNA, 13 bp, Artificial Sequence
  Oligonucleotide for detection of SNP TSC0007970
ttgagatagtaag

SEQ ID NO: 28170 - DNA, 13 bp, Artificial Sequence
  Oligonucleotide for detection of SNP TSC0007970
cttactatctcaa

SEQ ID NO: 28171 - DNA, 13 bp, Artificial Sequence
  Oligonucleotide for detection of SNP TSC0007970
ttgagaaagtaag

SEQ ID NO: 28172 - DNA, 13 bp, Artificial Sequence
  Oligonucleotide for detection of SNP TSC0007970
cttactttctcaa

SEQ ID NO: 28173 - DNA, 13 bp, Artificial Sequence
  Oligonucleotide for detection of SNP TSC0007973
agatagatgaagy

SEQ ID NO: 28174 - DNA, 13 bp, Artificial Sequence
  Oligonucleotide for detection of SNP TSC0007973
rcttcatctatct

SEQ ID NO: 28175 - DNA, 13 bp, Artificial Sequence
  Oligonucleotide for detection of SNP TSC0007973
agataggtgaagy

SEQ ID NO: 28176 - DNA, 13 bp, Artificial Sequence
  Oligonucleotide for detection of SNP TSC0007973
rcttcacctatct

SEQ ID NO: 28177 - DNA, 13 bp, Artificial Sequence
  Oligonucleotide for detection of SNP TSC0007974
attattatataty

SEQ ID NO: 28178 - DNA, 13 bp, Artificial Sequence
  Oligonucleotide for detection of SNP TSC0007974
ratatataataat

SEQ ID NO: 28179 - DNA, 13 bp, Artificial Sequence
  Oligonucleotide for detection of SNP TSC0007974
attattgtataty

SEQ ID NO: 28180 - DNA, 13 bp, Artificial Sequence
  Oligonucleotide for detection of SNP TSC0007974
ratatacaataat

SEQ ID NO: 28181 - DNA, 13 bp, Artificial Sequence
  Oligonucleotide for detection of SNP TSC0007975
attttggttggtt

SEQ ID NO: 28182 - DNA, 13 bp, Artificial Sequence
  Oligonucleotide for detection of SNP TSC0007975
aaccaaccaaaat

SEQ ID NO: 28183 - DNA, 13 bp, Artificial Sequence
  Oligonucleotide for detection of SNP TSC0007975
attttgattggtt

SEQ ID NO: 28184 - DNA, 13 bp, Artificial Sequence
  Oligonucleotide for detection of SNP TSC0007975
aaccaatcaaaat

SEQ ID NO: 28185 - DNA, 13 bp, Artificial Sequence
  Oligonucleotide for detection of SNP TSC0007976
ttttaggaatgta

SEQ ID NO: 28186 - DNA, 13 bp, Artificial Sequence
  Oligonucleotide for detection of SNP TSC0007976
tacattcctaaaa

SEQ ID NO: 28187 - DNA, 13 bp, Artificial Sequence
  Oligonucleotide for detection of SNP TSC0007976
ttttagaaatgta

SEQ ID NO: 28188 - DNA, 13 bp, Artificial Sequence
  Oligonucleotide for detection of SNP TSC0007976
tacatttctaaaa

SEQ ID NO: 28189 - DNA, 13 bp, Artificial Sequence
  Oligonucleotide for detection of SNP TSC0007980
tggaagggggaaa

SEQ ID NO: 28190 - DNA, 13 bp, Artificial Sequence
  Oligonucleotide for detection of SNP TSC0007980
tttcccccttcca

SEQ ID NO: 28191 - DNA, 13 bp, Artificial Sequence
  Oligonucleotide for detection of SNP TSC0007980
tggaagagggaaa

SEQ ID NO: 28192 - DNA, 13 bp, Artificial Sequence
  Oligonucleotide for detection of SNP TSC0007980
tttccctcttcca

SEQ ID NO: 28193 - DNA, 13 bp, Artificial Sequence
  Oligonucleotide for detection of SNP TSC0007980
cggaagggggaaa

SEQ ID NO: 28194 - DNA, 13 bp, Artificial Sequence
  Oligonucleotide for detection of SNP TSC0007980
tttcccccttccg

SEQ ID NO: 28195 - DNA, 13 bp, Artificial Sequence
  Oligonucleotide for detection of SNP TSC0007980
cggaagagggaaa

SEQ ID NO: 28196 - DNA, 13 bp, Artificial Sequence
  Oligonucleotide for detection of SNP TSC0007980
tttccctcttccg

SEQ ID NO: 28197 - DNA, 13 bp, Artificial Sequence
  Oligonucleotide for detection of SNP TSC0007984
gtgtaaaatagtg

SEQ ID NO: 28198 - DNA, 13 bp, Artificial Sequence
  Oligonucleotide for detection of SNP TSC0007984
cactattttacac

SEQ ID NO: 28199 - DNA, 13 bp, Artificial Sequence
  Oligonucleotide for detection of SNP TSC0007984
gtgtaagatagtg

SEQ ID NO: 28200 - DNA, 13 bp, Artificial Sequence
  Oligonucleotide for detection of SNP TSC0007984
cactatcttacac

SEQ ID NO: 28201 - DNA, 13 bp, Artificial Sequence
  Oligonucleotide for detection of SNP TSC0007985
taatatggtgaaa

SEQ ID NO: 28202 - DNA, 13 bp, Artificial Sequence
  Oligonucleotide for detection of SNP TSC0007985
tttcaccatatta

SEQ ID NO: 28203 - DNA, 13 bp, Artificial Sequence
  Oligonucleotide for detection of SNP TSC0007985
taatatagtgaaa

SEQ ID NO: 28204 - DNA, 13 bp, Artificial Sequence
  Oligonucleotide for detection of SNP TSC0007985
tttcactatatta

SEQ ID NO: 28205 - DNA, 13 bp, Artificial Sequence
  Oligonucleotide for detection of SNP TSC0007986
tattatgtatagy

SEQ ID NO: 28206 - DNA, 13 bp, Artificial Sequence
  Oligonucleotide for detection of SNP TSC0007986
rctatacataata

SEQ ID NO: 28207 - DNA, 13 bp, Artificial Sequence
  Oligonucleotide for detection of SNP TSC0007986
tattatttatagy

SEQ ID NO: 28208 - DNA, 13 bp, Artificial Sequence
  Oligonucleotide for detection of SNP TSC0007986
rctataaataata

SEQ ID NO: 28209 - DNA, 13 bp, Artificial Sequence
  Oligonucleotide for detection of SNP TSC0007986
tattacgtatagy

SEQ ID NO: 28210 - DNA, 13 bp, Artificial Sequence
  Oligonucleotide for detection of SNP TSC0007986
rctatacgtaata

SEQ ID NO: 28211 - DNA, 13 bp, Artificial Sequence
  Oligonucleotide for detection of SNP TSC0007986
gttgtgtgtggta

SEQ ID NO: 28212 - DNA, 13 bp, Artificial Sequence
  Oligonucleotide for detection of SNP TSC0007986
taccacacacaac

SEQ ID NO: 28213 - DNA, 13 bp, Artificial Sequence
  Oligonucleotide for detection of SNP TSC0007986
gttgtgagtggta

SEQ ID NO: 28214 - DNA, 13 bp, Artificial Sequence
  Oligonucleotide for detection of SNP TSC0007986
taccactcacaac

SEQ ID NO: 28215 - DNA, 13 bp, Artificial Sequence
  Oligonucleotide for detection of SNP TSC0007986
gttgtgcgtggta

SEQ ID NO: 28216 - DNA, 13 bp, Artificial Sequence
  Oligonucleotide for detection of SNP TSC0007986
taccacgcacaac

SEQ ID NO: 28217 - DNA, 13 bp, Artificial Sequence
  Oligonucleotide for detection of SNP TSC0007987
tttatggttgtaa

SEQ ID NO: 28218 - DNA, 13 bp, Artificial Sequence
  Oligonucleotide for detection of SNP TSC0007987
ttacaaccataaa

SEQ ID NO: 28219 - DNA, 13 bp, Artificial Sequence
  Oligonucleotide for detection of SNP TSC0007993
tttaaggaaattt

SEQ ID NO: 28220 - DNA, 13 bp, Artificial Sequence
  Oligonucleotide for detection of SNP TSC0007993
aaatttccttaaa

SEQ ID NO: 28221 - DNA, 13 bp, Artificial Sequence
  Oligonucleotide for detection of SNP TSC0007993
tttaagtaaattt

SEQ ID NO: 28222 - DNA, 13 bp, Artificial Sequence
  Oligonucleotide for detection of SNP TSC0007993
aaatttacttaaa

SEQ ID NO: 28223 - DNA, 13 bp, Artificial Sequence
  Oligonucleotide for detection of SNP TSC0007993
aaatttttttgga

SEQ ID NO: 28224 - DNA, 13 bp, Artificial Sequence
  Oligonucleotide for detection of SNP TSC0007993
tccaaaaaaattt

SEQ ID NO: 28225 - DNA, 13 bp, Artificial Sequence
  Oligonucleotide for detection of SNP TSC0007993
aaatttatttgga

SEQ ID NO: 28226 - DNA, 13 bp, Artificial Sequence
  Oligonucleotide for detection of SNP TSC0007993
tccaaataaattt

SEQ ID NO: 28227 - DNA, 13 bp, Artificial Sequence
  Oligonucleotide for detection of SNP TSC0007994
gtagaaatgatty

SEQ ID NO: 28228 - DNA, 13 bp, Artificial Sequence
  Oligonucleotide for detection of SNP TSC0007994
raatcatttctac

SEQ ID NO: 28229 - DNA, 13 bp, Artificial Sequence
  Oligonucleotide for detection of SNP TSC0007994
gtagaagtgatty

SEQ ID NO: 28230 - DNA, 13 bp, Artificial Sequence
  Oligonucleotide for detection of SNP TSC0007994
raatcacttctac

SEQ ID NO: 28231 - DNA, 13 bp, Artificial Sequence
  Oligonucleotide for detection of SNP TSC0007999
atttttatgatta

SEQ ID NO: 28232 - DNA, 13 bp, Artificial Sequence
  Oligonucleotide for detection of SNP TSC0007999
taatcataaaaat

SEQ ID NO: 28233 - DNA, 13 bp, Artificial Sequence
  Oligonucleotide for detection of SNP TSC0007999
atttttgtgatta

SEQ ID NO: 28234 - DNA, 13 bp, Artificial Sequence
  Oligonucleotide for detection of SNP TSC0007999
taatcacaaaaat

SEQ ID NO: 28235 - DNA, 13 bp, Artificial Sequence
  Oligonucleotide for detection of SNP TSC0007999
attttcgtgatta

SEQ ID NO: 28236 - DNA, 13 bp, Artificial Sequence
  Oligonucleotide for detection of SNP TSC0007999
taatcacgaaaat

SEQ ID NO: 28237 - DNA, 13 bp, Artificial Sequence
  Oligonucleotide for detection of SNP TSC0007999
tgattatgggggt

SEQ ID NO: 28238 - DNA, 13 bp, Artificial Sequence
  Oligonucleotide for detection of SNP TSC0007999
acccccataatca

SEQ ID NO: 28239 - DNA, 13 bp, Artificial Sequence
  Oligonucleotide for detection of SNP TSC0007999
tgattacgggggt

SEQ ID NO: 28240 - DNA, 13 bp, Artificial Sequence
  Oligonucleotide for detection of SNP TSC0007999
acccccgtaatca

SEQ ID NO: 28241 - DNA, 13 bp, Artificial Sequence
  Oligonucleotide for detection of SNP TSC0008002
ttgagtgtgggty

SEQ ID NO: 28242 - DNA, 13 bp, Artificial Sequence
  Oligonucleotide for detection of SNP TSC0008002
racccacactcaa

SEQ ID NO: 28243 - DNA, 13 bp, Artificial Sequence
  Oligonucleotide for detection of SNP TSC0008002
ttgagtttgggty

SEQ ID NO: 28244 - DNA, 13 bp, Artificial Sequence
  Oligonucleotide for detection of SNP TSC0008002
racccaaactcaa

SEQ ID NO: 28245 - DNA, 13 bp, Artificial Sequence
  Oligonucleotide for detection of SNP TSC0008002
ggtttatatttaa

SEQ ID NO: 28246 - DNA, 13 bp, Artificial Sequence
  Oligonucleotide for detection of SNP TSC0008002
ttaaatataaacc

SEQ ID NO: 28247 - DNA, 13 bp, Artificial Sequence
  Oligonucleotide for detection of SNP TSC0008002
ggtttaaatttaa

SEQ ID NO: 28248 - DNA, 13 bp, Artificial Sequence
  Oligonucleotide for detection of SNP TSC0008002
ttaaatttaaacc

SEQ ID NO: 28249 - DNA, 13 bp, Artificial Sequence
  Oligonucleotide for detection of SNP TSC0008005
aagtttaaatttt

SEQ ID NO: 28250 - DNA, 13 bp, Artificial Sequence
  Oligonucleotide for detection of SNP TSC0008005
aaaatttaaactt

SEQ ID NO: 28251 - DNA, 13 bp, Artificial Sequence
  Oligonucleotide for detection of SNP TSC0008005
aagtttgaatttt

SEQ ID NO: 28252 - DNA, 13 bp, Artificial Sequence
  Oligonucleotide for detection of SNP TSC0008005
aaaattcaaactt

SEQ ID NO: 28253 - DNA, 13 bp, Artificial Sequence
  Oligonucleotide for detection of SNP TSC0008017
ttttttatttatg

SEQ ID NO: 28254 - DNA, 13 bp, Artificial Sequence
  Oligonucleotide for detection of SNP TSC0008017
cataaataaaaaa

SEQ ID NO: 28255 - DNA, 13 bp, Artificial Sequence
  Oligonucleotide for detection of SNP TSC0008017
ttttttgtttatg

SEQ ID NO: 28256 - DNA, 13 bp, Artificial Sequence
  Oligonucleotide for detection of SNP TSC0008017
cataaacaaaaaa

SEQ ID NO: 28257 - DNA, 13 bp, Artificial Sequence
  Oligonucleotide for detection of SNP TSC0008020
tatttttgattaa

SEQ ID NO: 28258 - DNA, 13 bp, Artificial Sequence
  Oligonucleotide for detection of SNP TSC0008020
ttaatcaaaaata

SEQ ID NO: 28259 - DNA, 13 bp, Artificial Sequence
  Oligonucleotide for detection of SNP TSC0008020
tattttcgattaa

SEQ ID NO: 28260 - DNA, 13 bp, Artificial Sequence
  Oligonucleotide for detection of SNP TSC0008020
ttaatcgaaaata

SEQ ID NO: 28261 - DNA, 13 bp, Artificial Sequence
  Oligonucleotide for detection of SNP TSC0008020
ttggttgggaatg

SEQ ID NO: 28262 - DNA, 13 bp, Artificial Sequence
  Oligonucleotide for detection of SNP TSC0008020
cattcccaaccaa

SEQ ID NO: 28263 - DNA, 13 bp, Artificial Sequence
  Oligonucleotide for detection of SNP TSC0008020
ttggttaggaatg

SEQ ID NO: 28264 - DNA, 13 bp, Artificial Sequence
  Oligonucleotide for detection of SNP TSC0008020
cattcctaaccaa

SEQ ID NO: 28265 - DNA, 13 bp, Artificial Sequence
  Oligonucleotide for detection of SNP TSC0008020
ttggtcgggaatg

SEQ ID NO: 28266 - DNA, 13 bp, Artificial Sequence
  Oligonucleotide for detection of SNP TSC0008020
cattcccgaccaa

SEQ ID NO: 28267 - DNA, 13 bp, Artificial Sequence
  Oligonucleotide for detection of SNP TSC0008021
tttttagaataat

SEQ ID NO: 28268 - DNA, 13 bp, Artificial Sequence
  Oligonucleotide for detection of SNP TSC0008021
attattctaaaaa

SEQ ID NO: 28269 - DNA, 13 bp, Artificial Sequence
  Oligonucleotide for detection of SNP TSC0008021
tttttaaaataat

SEQ ID NO: 28270 - DNA, 13 bp, Artificial Sequence
  Oligonucleotide for detection of SNP TSC0008021
attattttaaaaa

SEQ ID NO: 28271 - DNA, 13 bp, Artificial Sequence
  Oligonucleotide for detection of SNP TSC0008027
aggttattgggty

SEQ ID NO: 28272 - DNA, 13 bp, Artificial Sequence
  Oligonucleotide for detection of SNP TSC0008027
racccaataacct

SEQ ID NO: 28273 - DNA, 13 bp, Artificial Sequence
  Oligonucleotide for detection of SNP TSC0008027
aggttagtgggty

SEQ ID NO: 28274 - DNA, 13 bp, Artificial Sequence
  Oligonucleotide for detection of SNP TSC0008027
racccactaacct

SEQ ID NO: 28275 - DNA, 13 bp, Artificial Sequence
  Oligonucleotide for detection of SNP TSC0008027
ggtttagtggttt

SEQ ID NO: 28276 - DNA, 13 bp, Artificial Sequence
  Oligonucleotide for detection of SNP TSC0008027
aaaccactaaacc

SEQ ID NO: 28277 - DNA, 13 bp, Artificial Sequence
  Oligonucleotide for detection of SNP TSC0008027
ggtttattggttt

SEQ ID NO: 28278 - DNA, 13 bp, Artificial Sequence
  Oligonucleotide for detection of SNP TSC0008027
aaaccaataaacc

SEQ ID NO: 28279 - DNA, 13 bp, Artificial Sequence
  Oligonucleotide for detection of SNP TSC0008028
tgtttaagatata

SEQ ID NO: 28280 - DNA, 13 bp, Artificial Sequence
  Oligonucleotide for detection of SNP TSC0008028
tatatcttaaaca

SEQ ID NO: 28281 - DNA, 13 bp, Artificial Sequence
  Oligonucleotide for detection of SNP TSC0008028
tgtttaggatata

SEQ ID NO: 28282 - DNA, 13 bp, Artificial Sequence
  Oligonucleotide for detection of SNP TSC0008028
tatatcctaaaca

SEQ ID NO: 28283 - DNA, 13 bp, Artificial Sequence
  Oligonucleotide for detection of SNP TSC0008029
tgatgtatagtag

SEQ ID NO: 28284 - DNA, 13 bp, Artificial Sequence
  Oligonucleotide for detection of SNP TSC0008029
ctactatacatca

SEQ ID NO: 28285 - DNA, 13 bp, Artificial Sequence
  Oligonucleotide for detection of SNP TSC0008029
tgatgtgtagtag

SEQ ID NO: 28286 - DNA, 13 bp, Artificial Sequence
  Oligonucleotide for detection of SNP TSC0008029
ctactacacatca

SEQ ID NO: 28287 - DNA, 13 bp, Artificial Sequence
  Oligonucleotide for detection of SNP TSC0008029
tgatgcgtagtag

SEQ ID NO: 28288 - DNA, 13 bp, Artificial Sequence
  Oligonucleotide for detection of SNP TSC0008029
ctactacgcatca

SEQ ID NO: 28289 - DNA, 13 bp, Artificial Sequence
  Oligonucleotide for detection of SNP TSC0008029
ttgttatgtatta

SEQ ID NO: 28290 - DNA, 13 bp, Artificial Sequence
  Oligonucleotide for detection of SNP TSC0008029
taatacataacaa

SEQ ID NO: 28291 - DNA, 13 bp, Artificial Sequence
  Oligonucleotide for detection of SNP TSC0008029
ttgttacgtatta

SEQ ID NO: 28292 - DNA, 13 bp, Artificial Sequence
  Oligonucleotide for detection of SNP TSC0008029
taatacgtaacaa

SEQ ID NO: 28293 - DNA, 13 bp, Artificial Sequence
  Oligonucleotide for detection of SNP TSC0008030
ttaggggaagggg

SEQ ID NO: 28294 - DNA, 13 bp, Artificial Sequence
  Oligonucleotide for detection of SNP TSC0008030
ccccttcccctaa

SEQ ID NO: 28295 - DNA, 13 bp, Artificial Sequence
  Oligonucleotide for detection of SNP TSC0008030
ttagggaaagggg

SEQ ID NO: 28296 - DNA, 13 bp, Artificial Sequence
  Oligonucleotide for detection of SNP TSC0008030
cccctttccctaa

SEQ ID NO: 28297 - DNA, 13 bp, Artificial Sequence
  Oligonucleotide for detection of SNP TSC0008031
atttttgttatag

SEQ ID NO: 28298 - DNA, 13 bp, Artificial Sequence
  Oligonucleotide for detection of SNP TSC0008031
ctataacaaaaat

SEQ ID NO: 28299 - DNA, 13 bp, Artificial Sequence
  Oligonucleotide for detection of SNP TSC0008031
atttttattatag

SEQ ID NO: 28300 - DNA, 13 bp, Artificial Sequence
  Oligonucleotide for detection of SNP TSC0008031
ctataataaaaat

SEQ ID NO: 28301 - DNA, 13 bp, Artificial Sequence
  Oligonucleotide for detection of SNP TSC0008036
ttatatggttggg

SEQ ID NO: 28302 - DNA, 13 bp, Artificial Sequence
  Oligonucleotide for detection of SNP TSC0008036
cccaaccatataa

SEQ ID NO: 28303 - DNA, 13 bp, Artificial Sequence
  Oligonucleotide for detection of SNP TSC0008036
ttatatagttggg

SEQ ID NO: 28304 - DNA, 13 bp, Artificial Sequence
  Oligonucleotide for detection of SNP TSC0008036
cccaactatataa

SEQ ID NO: 28305 - DNA, 13 bp, Artificial Sequence
  Oligonucleotide for detection of SNP TSC0008045
tagtatttagtag

SEQ ID NO: 28306 - DNA, 13 bp, Artificial Sequence
  Oligonucleotide for detection of SNP TSC0008045
ctactaaatacta

SEQ ID NO: 28307 - DNA, 13 bp, Artificial Sequence
  Oligonucleotide for detection of SNP TSC0008045
tagtatgtagtag

SEQ ID NO: 28308 - DNA, 13 bp, Artificial Sequence
  Oligonucleotide for detection of SNP TSC0008045
ctactacatacta

SEQ ID NO: 28309 - DNA, 13 bp, Artificial Sequence
  Oligonucleotide for detection of SNP TSC0008045
tagtacgtagtag

SEQ ID NO: 28310 - DNA, 13 bp, Artificial Sequence
  Oligonucleotide for detection of SNP TSC0008045
ctactacgtacta

SEQ ID NO: 28311 - DNA, 13 bp, Artificial Sequence
  Oligonucleotide for detection of SNP TSC0008045
ttgttgggtattg

SEQ ID NO: 28312 - DNA, 13 bp, Artificial Sequence
  Oligonucleotide for detection of SNP TSC0008045
caatacccaacaa

SEQ ID NO: 28313 - DNA, 13 bp, Artificial Sequence
  Oligonucleotide for detection of SNP TSC0008045
ttgttgtgtattg

SEQ ID NO: 28314 - DNA, 13 bp, Artificial Sequence
  Oligonucleotide for detection of SNP TSC0008045
caatacacaacaa

SEQ ID NO: 28315 - DNA, 13 bp, Artificial Sequence
  Oligonucleotide for detection of SNP TSC0008045
ttgttgcgtattg

SEQ ID NO: 28316 - DNA, 13 bp, Artificial Sequence
  Oligonucleotide for detection of SNP TSC0008045
caatacgcaacaa

SEQ ID NO: 28317 - DNA, 13 bp, Artificial Sequence
  Oligonucleotide for detection of SNP TSC0008047
tttttaattaaag

SEQ ID NO: 28318 - DNA, 13 bp, Artificial Sequence
  Oligonucleotide for detection of SNP TSC0008047
ctttaattaaaaa

SEQ ID NO: 28319 - DNA, 13 bp, Artificial Sequence
  Oligonucleotide for detection of SNP TSC0008047
tttttagttaaag

SEQ ID NO: 28320 - DNA, 13 bp, Artificial Sequence
  Oligonucleotide for detection of SNP TSC0008047
ctttaactaaaaa

SEQ ID NO: 28321 - DNA, 13 bp, Artificial Sequence
  Oligonucleotide for detection of SNP TSC0008049
ttgatatggttgg

SEQ ID NO: 28322 - DNA, 13 bp, Artificial Sequence
  Oligonucleotide for detection of SNP TSC0008049
ccaaccatatcaa

SEQ ID NO: 28323 - DNA, 13 bp, Artificial Sequence
  Oligonucleotide for detection of SNP TSC0008049
ttgatacggttgg

SEQ ID NO: 28324 - DNA, 13 bp, Artificial Sequence
  Oligonucleotide for detection of SNP TSC0008049
ccaaccgtatcaa

SEQ ID NO: 28325 - DNA, 13 bp, Artificial Sequence
  Oligonucleotide for detection of SNP TSC0008049
ttaattgtattag

SEQ ID NO: 28326 - DNA, 13 bp, Artificial Sequence
  Oligonucleotide for detection of SNP TSC0008049
ctaatacaattaa

SEQ ID NO: 28327 - DNA, 13 bp, Artificial Sequence
  Oligonucleotide for detection of SNP TSC0008049
ttaattatattag

SEQ ID NO: 28328 - DNA, 13 bp, Artificial Sequence
  Oligonucleotide for detection of SNP TSC0008049
ctaatataattaa

SEQ ID NO: 28329 - DNA, 13 bp, Artificial Sequence
  Oligonucleotide for detection of SNP TSC0008049
ttaatcgtattag

SEQ ID NO: 28330 - DNA, 13 bp, Artificial Sequence
  Oligonucleotide for detection of SNP TSC0008049
ctaatacgattaa

SEQ ID NO: 28331 - DNA, 13 bp, Artificial Sequence
  Oligonucleotide for detection of SNP TSC0008053
ggtttttgttatt

SEQ ID NO: 28332 - DNA, 13 bp, Artificial Sequence
  Oligonucleotide for detection of SNP TSC0008053
aataacaaaaacc

SEQ ID NO: 28333 - DNA, 13 bp, Artificial Sequence
  Oligonucleotide for detection of SNP TSC0008053
ggttttcgttatt

SEQ ID NO: 28334 - DNA, 13 bp, Artificial Sequence
  Oligonucleotide for detection of SNP TSC0008053
aataacgaaaacc

SEQ ID NO: 28335 - DNA, 13 bp, Artificial Sequence
  Oligonucleotide for detection of SNP TSC0008053
agtagtggaaaty

SEQ ID NO: 28336 - DNA, 13 bp, Artificial Sequence
  Oligonucleotide for detection of SNP TSC0008053
ratttccactact

SEQ ID NO: 28337 - DNA, 13 bp, Artificial Sequence
  Oligonucleotide for detection of SNP TSC0008053
agtagtagaaaty

SEQ ID NO: 28338 - DNA, 13 bp, Artificial Sequence
  Oligonucleotide for detection of SNP TSC0008053
ratttctactact

SEQ ID NO: 28339 - DNA, 13 bp, Artificial Sequence
  Oligonucleotide for detection of SNP TSC0008053
agtagcggaaaty

SEQ ID NO: 28340 - DNA, 13 bp, Artificial Sequence
  Oligonucleotide for detection of SNP TSC0008053
ratttccgctact

SEQ ID NO: 28341 - DNA, 13 bp, Artificial Sequence
  Oligonucleotide for detection of SNP TSC0008055
ttgtatagaattt

SEQ ID NO: 28342 - DNA, 13 bp, Artificial Sequence
  Oligonucleotide for detection of SNP TSC0008055
aaattctatacaa

SEQ ID NO: 28343 - DNA, 13 bp, Artificial Sequence
  Oligonucleotide for detection of SNP TSC0008055
ttgtatggaattt

SEQ ID NO: 28344 - DNA, 13 bp, Artificial Sequence
  Oligonucleotide for detection of SNP TSC0008055
aaattccatacaa

SEQ ID NO: 28345 - DNA, 13 bp, Artificial Sequence
  Oligonucleotide for detection of SNP TSC0008082
gtagagattagtg

SEQ ID NO: 28346 - DNA, 13 bp, Artificial Sequence
  Oligonucleotide for detection of SNP TSC0008082
cactaatctctac

SEQ ID NO: 28347 - DNA, 13 bp, Artificial Sequence
  Oligonucleotide for detection of SNP TSC0008082
gtagagtttagtg

SEQ ID NO: 28348 - DNA, 13 bp, Artificial Sequence
  Oligonucleotide for detection of SNP TSC0008082
cactaaactctac

SEQ ID NO: 28349 - DNA, 13 bp, Artificial Sequence
  Oligonucleotide for detection of SNP TSC0008082
tattgatttttgy

SEQ ID NO: 28350 - DNA, 13 bp, Artificial Sequence
  Oligonucleotide for detection of SNP TSC0008082
rcaaaaatcaata

SEQ ID NO: 28351 - DNA, 13 bp, Artificial Sequence
  Oligonucleotide for detection of SNP TSC0008082
tattgaattttgy

SEQ ID NO: 28352 - DNA, 13 bp, Artificial Sequence
  Oligonucleotide for detection of SNP TSC0008082
rcaaaattcaata

SEQ ID NO: 28353 - DNA, 13 bp, Artificial Sequence
  Oligonucleotide for detection of SNP TSC0008083
ttttattatggag

SEQ ID NO: 28354 - DNA, 13 bp, Artificial Sequence
  Oligonucleotide for detection of SNP TSC0008083
ctccataataaaa

SEQ ID NO: 28355 - DNA, 13 bp, Artificial Sequence
  Oligonucleotide for detection of SNP TSC0008083
ttttatgatggag

SEQ ID NO: 28356 - DNA, 13 bp, Artificial Sequence
  Oligonucleotide for detection of SNP TSC0008083
ctccatcataaaa

SEQ ID NO: 28357 - DNA, 13 bp, Artificial Sequence
  Oligonucleotide for detection of SNP TSC0008083
ttttatgatggga

SEQ ID NO: 28358 - DNA, 13 bp, Artificial Sequence
  Oligonucleotide for detection of SNP TSC0008083
tcccatcataaaa

SEQ ID NO: 28359 - DNA, 13 bp, Artificial Sequence
  Oligonucleotide for detection of SNP TSC0008083
ttttattatggga

SEQ ID NO: 28360 - DNA, 13 bp, Artificial Sequence
  Oligonucleotide for detection of SNP TSC0008083
tcccataataaaa

SEQ ID NO: 28361 - DNA, 13 bp, Artificial Sequence
  Oligonucleotide for detection of SNP TSC0008084
agagagagttttt

SEQ ID NO: 28362 - DNA, 13 bp, Artificial Sequence
  Oligonucleotide for detection of SNP TSC0008084
aaaaactctctct

SEQ ID NO: 28363 - DNA, 13 bp, Artificial Sequence
  Oligonucleotide for detection of SNP TSC0008084
agagagggttttt

SEQ ID NO: 28364 - DNA, 13 bp, Artificial Sequence
  Oligonucleotide for detection of SNP TSC0008084
aaaaaccctctct

SEQ ID NO: 28365 - DNA, 13 bp, Artificial Sequence
  Oligonucleotide for detection of SNP TSC0008085
ttttagaggtagy

SEQ ID NO: 28366 - DNA, 13 bp, Artificial Sequence
  Oligonucleotide for detection of SNP TSC0008085
rctacctctaaaa

SEQ ID NO: 28367 - DNA, 13 bp, Artificial Sequence
  Oligonucleotide for detection of SNP TSC0008085
ttttagtggtagy

SEQ ID NO: 28368 - DNA, 13 bp, Artificial Sequence
  Oligonucleotide for detection of SNP TSC0008085
rctaccactaaaa

SEQ ID NO: 28369 - DNA, 13 bp, Artificial Sequence
  Oligonucleotide for detection of SNP TSC0008085
gttatttttaaaa

SEQ ID NO: 28370 - DNA, 13 bp, Artificial Sequence
  Oligonucleotide for detection of SNP TSC0008085
ttttaaaaataac

SEQ ID NO: 28371 - DNA, 13 bp, Artificial Sequence
  Oligonucleotide for detection of SNP TSC0008085
gttattattaaaa

SEQ ID NO: 28372 - DNA, 13 bp, Artificial Sequence
  Oligonucleotide for detection of SNP TSC0008085
ttttaataataac

SEQ ID NO: 28373 - DNA, 13 bp, Artificial Sequence
  Oligonucleotide for detection of SNP TSC0008088
atttggaaaagtt

SEQ ID NO: 28374 - DNA, 13 bp, Artificial Sequence
  Oligonucleotide for detection of SNP TSC0008088
aacttttccaaat

SEQ ID NO: 28375 - DNA, 13 bp, Artificial Sequence
  Oligonucleotide for detection of SNP TSC0008088
atttgggaaagtt

SEQ ID NO: 28376 - DNA, 13 bp, Artificial Sequence
  Oligonucleotide for detection of SNP TSC0008088
aactttcccaaat

SEQ ID NO: 28377 - DNA, 13 bp, Artificial Sequence
  Oligonucleotide for detection of SNP TSC0008089
attgtttgagtty

SEQ ID NO: 28378 - DNA, 13 bp, Artificial Sequence
  Oligonucleotide for detection of SNP TSC0008089
raactcaaacaat

SEQ ID NO: 28379 - DNA, 13 bp, Artificial Sequence
  Oligonucleotide for detection of SNP TSC0008089
attgttcgagtty

SEQ ID NO: 28380 - DNA, 13 bp, Artificial Sequence
  Oligonucleotide for detection of SNP TSC0008089
raactcgaacaat

SEQ ID NO: 28381 - DNA, 13 bp, Artificial Sequence
  Oligonucleotide for detection of SNP TSC0008089
gggtttgagtaat

SEQ ID NO: 28382 - DNA, 13 bp, Artificial Sequence
  Oligonucleotide for detection of SNP TSC0008089
attactcaaaccc

SEQ ID NO: 28383 - DNA, 13 bp, Artificial Sequence
  Oligonucleotide for detection of SNP TSC0008089
gggtttaagtaat

SEQ ID NO: 28384 - DNA, 13 bp, Artificial Sequence
  Oligonucleotide for detection of SNP TSC0008089
attacttaaaccc

SEQ ID NO: 28385 - DNA, 13 bp, Artificial Sequence
  Oligonucleotide for detection of SNP TSC0008089
gggttcgagtaat

SEQ ID NO: 28386 - DNA, 13 bp, Artificial Sequence
  Oligonucleotide for detection of SNP TSC0008089
attactcgaaccc

SEQ ID NO: 28387 - DNA, 13 bp, Artificial Sequence
  Oligonucleotide for detection of SNP TSC0008097
gagtatgttatat

SEQ ID NO: 28388 - DNA, 13 bp, Artificial Sequence
  Oligonucleotide for detection of SNP TSC0008097
atataacatactc

SEQ ID NO: 28389 - DNA, 13 bp, Artificial Sequence
  Oligonucleotide for detection of SNP TSC0008097
gagtatattatat

SEQ ID NO: 28390 - DNA, 13 bp, Artificial Sequence
  Oligonucleotide for detection of SNP TSC0008097
atataatatactc

SEQ ID NO: 28391 - DNA, 13 bp, Artificial Sequence
  Oligonucleotide for detection of SNP TSC0008098
tagtagtgtgaaa

SEQ ID NO: 28392 - DNA, 13 bp, Artificial Sequence
  Oligonucleotide for detection of SNP TSC0008098
tttcacactacta

SEQ ID NO: 28393 - DNA, 13 bp, Artificial Sequence
  Oligonucleotide for detection of SNP TSC0008098
tagtagcgtgaaa

SEQ ID NO: 28394 - DNA, 13 bp, Artificial Sequence
  Oligonucleotide for detection of SNP TSC0008098
tttcacgctacta

SEQ ID NO: 28395 - DNA, 13 bp, Artificial Sequence
  Oligonucleotide for detection of SNP TSC0008098
ttttatgttgttg

SEQ ID NO: 28396 - DNA, 13 bp, Artificial Sequence
  Oligonucleotide for detection of SNP TSC0008098
caacaacataaaa

SEQ ID NO: 28397 - DNA, 13 bp, Artificial Sequence
  Oligonucleotide for detection of SNP TSC0008098
ttttatattgttg

SEQ ID NO: 28398 - DNA, 13 bp, Artificial Sequence
  Oligonucleotide for detection of SNP TSC0008098
caacaatataaaa

SEQ ID NO: 28399 - DNA, 13 bp, Artificial Sequence
  Oligonucleotide for detection of SNP TSC0008098
ttttacgttgttg

SEQ ID NO: 28400 - DNA, 13 bp, Artificial Sequence
  Oligonucleotide for detection of SNP TSC0008098
caacaacgtaaaa

SEQ ID NO: 28401 - DNA, 13 bp, Artificial Sequence
  Oligonucleotide for detection of SNP TSC0008109
tgatatattttat

SEQ ID NO: 28402 - DNA, 13 bp, Artificial Sequence
  Oligonucleotide for detection of SNP TSC0008109
ataaaatatatca

SEQ ID NO: 28403 - DNA, 13 bp, Artificial Sequence
  Oligonucleotide for detection of SNP TSC0008109
tgatattttttat

SEQ ID NO: 28404 - DNA, 13 bp, Artificial Sequence
  Oligonucleotide for detection of SNP TSC0008109
ataaaaaatatca

SEQ ID NO: 28405 - DNA, 13 bp, Artificial Sequence
  Oligonucleotide for detection of SNP TSC0008109
atagggtatgtta

SEQ ID NO: 28406 - DNA, 13 bp, Artificial Sequence
  Oligonucleotide for detection of SNP TSC0008109
taacataccctat

SEQ ID NO: 28407 - DNA, 13 bp, Artificial Sequence
  Oligonucleotide for detection of SNP TSC0008109
ataggggatgtta

SEQ ID NO: 28408 - DNA, 13 bp, Artificial Sequence
  Oligonucleotide for detection of SNP TSC0008109
taacatcccctat

SEQ ID NO: 28409 - DNA, 13 bp, Artificial Sequence
  Oligonucleotide for detection of SNP TSC0008110
gaatattgtgtay

SEQ ID NO: 28410 - DNA, 13 bp, Artificial Sequence
  Oligonucleotide for detection of SNP TSC0008110
rtacacaatattc

SEQ ID NO: 28411 - DNA, 13 bp, Artificial Sequence
  Oligonucleotide for detection of SNP TSC0008110
gaatatcgtgtay

SEQ ID NO: 28412 - DNA, 13 bp, Artificial Sequence
  Oligonucleotide for detection of SNP TSC0008110
rtacacgatattc

SEQ ID NO: 28413 - DNA, 13 bp, Artificial Sequence
  Oligonucleotide for detection of SNP TSC0008110
gtgtatggtgtty

SEQ ID NO: 28414 - DNA, 13 bp, Artificial Sequence
  Oligonucleotide for detection of SNP TSC0008110
raacaccatacac

SEQ ID NO: 28415 - DNA, 13 bp, Artificial Sequence
  Oligonucleotide for detection of SNP TSC0008110
gtgtatagtgtty

SEQ ID NO: 28416 - DNA, 13 bp, Artificial Sequence
  Oligonucleotide for detection of SNP TSC0008110
raacactatacac

SEQ ID NO: 28417 - DNA, 13 bp, Artificial Sequence
  Oligonucleotide for detection of SNP TSC0008110
gtgtacggtgtty

SEQ ID NO: 28418 - DNA, 13 bp, Artificial Sequence
  Oligonucleotide for detection of SNP TSC0008110
raacaccgtacac

SEQ ID NO: 28419 - DNA, 13 bp, Artificial Sequence
  Oligonucleotide for detection of SNP TSC0008121
tttttggtatgta

SEQ ID NO: 28420 - DNA, 13 bp, Artificial Sequence
  Oligonucleotide for detection of SNP TSC0008121
tacataccaaaaa

SEQ ID NO: 28421 - DNA, 13 bp, Artificial Sequence
  Oligonucleotide for detection of SNP TSC0008121
tttttgatatgta

SEQ ID NO: 28422 - DNA, 13 bp, Artificial Sequence
  Oligonucleotide for detection of SNP TSC0008121
tacatatcaaaaa

SEQ ID NO: 28423 - DNA, 13 bp, Artificial Sequence
  Oligonucleotide for detection of SNP TSC0008128
atattgggttggy

SEQ ID NO: 28424 - DNA, 13 bp, Artificial Sequence
  Oligonucleotide for detection of SNP TSC0008128
rccaacccaatat

SEQ ID NO: 28425 - DNA, 13 bp, Artificial Sequence
  Oligonucleotide for detection of SNP TSC0008128
atattgtgttggy

SEQ ID NO: 28426 - DNA, 13 bp, Artificial Sequence
  Oligonucleotide for detection of SNP TSC0008128
rccaacacaatat

SEQ ID NO: 28427 - DNA, 13 bp, Artificial Sequence
  Oligonucleotide for detection of SNP TSC0008128
gttaatttagtat

SEQ ID NO: 28428 - DNA, 13 bp, Artificial Sequence
  Oligonucleotide for detection of SNP TSC0008128
atactaaattaac

SEQ ID NO: 28429 - DNA, 13 bp, Artificial Sequence
  Oligonucleotide for detection of SNP TSC0008128
gttaatatagtat

SEQ ID NO: 28430 - DNA, 13 bp, Artificial Sequence
  Oligonucleotide for detection of SNP TSC0008128
atactatattaac

SEQ ID NO: 28431 - DNA, 13 bp, Artificial Sequence
  Oligonucleotide for detection of SNP TSC0008137
tttaagatttttg

SEQ ID NO: 28432 - DNA, 13 bp, Artificial Sequence
  Oligonucleotide for detection of SNP TSC0008137
caaaaatcttaaa

SEQ ID NO: 28433 - DNA, 13 bp, Artificial Sequence
  Oligonucleotide for detection of SNP TSC0008137
tttaagttttttg

SEQ ID NO: 28434 - DNA, 13 bp, Artificial Sequence
  Oligonucleotide for detection of SNP TSC0008137
caaaaaacttaaa

SEQ ID NO: 28435 - DNA, 13 bp, Artificial Sequence
  Oligonucleotide for detection of SNP TSC0008137
taagagttttgga

SEQ ID NO: 28436 - DNA, 13 bp, Artificial Sequence
  Oligonucleotide for detection of SNP TSC0008137
tccaaaactctta

SEQ ID NO: 28437 - DNA, 13 bp, Artificial Sequence
  Oligonucleotide for detection of SNP TSC0008137
taagaggtttgga

SEQ ID NO: 28438 - DNA, 13 bp, Artificial Sequence
  Oligonucleotide for detection of SNP TSC0008137
tccaaacctctta

SEQ ID NO: 28439 - DNA, 13 bp, Artificial Sequence
  Oligonucleotide for detection of SNP TSC0008156
tagttaaagattg

SEQ ID NO: 28440 - DNA, 13 bp, Artificial Sequence
  Oligonucleotide for detection of SNP TSC0008156
caatctttaacta

SEQ ID NO: 28441 - DNA, 13 bp, Artificial Sequence
  Oligonucleotide for detection of SNP TSC0008156
tagttagagattg

SEQ ID NO: 28442 - DNA, 13 bp, Artificial Sequence
  Oligonucleotide for detection of SNP TSC0008156
caatctctaacta

SEQ ID NO: 28443 - DNA, 13 bp, Artificial Sequence
  Oligonucleotide for detection of SNP TSC0008166
ttatttatttgta

SEQ ID NO: 28444 - DNA, 13 bp, Artificial Sequence
  Oligonucleotide for detection of SNP TSC0008166
tacaaataaataa

SEQ ID NO: 28445 - DNA, 13 bp, Artificial Sequence
  Oligonucleotide for detection of SNP TSC0008166
ttatttttttgta

SEQ ID NO: 28446 - DNA, 13 bp, Artificial Sequence
  Oligonucleotide for detection of SNP TSC0008166
tacaaaaaaataa

SEQ ID NO: 28447 - DNA, 13 bp, Artificial Sequence
  Oligonucleotide for detection of SNP TSC0008166
tatagatagatag

SEQ ID NO: 28448 - DNA, 13 bp, Artificial Sequence
  Oligonucleotide for detection of SNP TSC0008166
ctatctatctata

SEQ ID NO: 28449 - DNA, 13 bp, Artificial Sequence
  Oligonucleotide for detection of SNP TSC0008166
tatagaaagatag

SEQ ID NO: 28450 - DNA, 13 bp, Artificial Sequence
  Oligonucleotide for detection of SNP TSC0008166
ctatctttctata

SEQ ID NO: 28451 - DNA, 13 bp, Artificial Sequence
  Oligonucleotide for detection of SNP TSC0008171
ggattagagtagg

SEQ ID NO: 28452 - DNA, 13 bp, Artificial Sequence
  Oligonucleotide for detection of SNP TSC0008171
cctactctaatcc

SEQ ID NO: 28453 - DNA, 13 bp, Artificial Sequence
  Oligonucleotide for detection of SNP TSC0008171
ggattaaagtagg

SEQ ID NO: 28454 - DNA, 13 bp, Artificial Sequence
  Oligonucleotide for detection of SNP TSC0008171
cctactttaatcc

SEQ ID NO: 28455 - DNA, 13 bp, Artificial Sequence
  Oligonucleotide for detection of SNP TSC0008172
ggtaaagaggtgt

SEQ ID NO: 28456 - DNA, 13 bp, Artificial Sequence
  Oligonucleotide for detection of SNP TSC0008172
acacctctttacc

SEQ ID NO: 28457 - DNA, 13 bp, Artificial Sequence
  Oligonucleotide for detection of SNP TSC0008172
ggtaaaaaggtgt

SEQ ID NO: 28458 - DNA, 13 bp, Artificial Sequence
  Oligonucleotide for detection of SNP TSC0008172
acacctttttacc

SEQ ID NO: 28459 - DNA, 13 bp, Artificial Sequence
  Oligonucleotide for detection of SNP TSC0008178
ttgtttaaggtta

SEQ ID NO: 28460 - DNA, 13 bp, Artificial Sequence
  Oligonucleotide for detection of SNP TSC0008178
taaccttaaacaa

SEQ ID NO: 28461 - DNA, 13 bp, Artificial Sequence
  Oligonucleotide for detection of SNP TSC0008178
ttgtttgaggtta

SEQ ID NO: 28462 - DNA, 13 bp, Artificial Sequence
  Oligonucleotide for detection of SNP TSC0008178
taacctcaaacaa

SEQ ID NO: 28463 - DNA, 13 bp, Artificial Sequence
  Oligonucleotide for detection of SNP TSC0008190
aaaatttaagtaa

SEQ ID NO: 28464 - DNA, 13 bp, Artificial Sequence
  Oligonucleotide for detection of SNP TSC0008190
ttacttaaatttt

SEQ ID NO: 28465 - DNA, 13 bp, Artificial Sequence
  Oligonucleotide for detection of SNP TSC0008190
aaaattgaagtaa

SEQ ID NO: 28466 - DNA, 13 bp, Artificial Sequence
  Oligonucleotide for detection of SNP TSC0008190
ttacttcaatttt

SEQ ID NO: 28467 - DNA, 13 bp, Artificial Sequence
  Oligonucleotide for detection of SNP TSC0008190
ttgtttgaatttt

SEQ ID NO: 28468 - DNA, 13 bp, Artificial Sequence
  Oligonucleotide for detection of SNP TSC0008190
aaaattcaaacaa

SEQ ID NO: 28469 - DNA, 13 bp, Artificial Sequence
  Oligonucleotide for detection of SNP TSC0008190
ttgttttaatttt

SEQ ID NO: 28470 - DNA, 13 bp, Artificial Sequence
  Oligonucleotide for detection of SNP TSC0008190
aaaattaaaacaa

SEQ ID NO: 28471 - DNA, 13 bp, Artificial Sequence
  Oligonucleotide for detection of SNP TSC0008191
attgattggttga

SEQ ID NO: 28472 - DNA, 13 bp, Artificial Sequence
  Oligonucleotide for detection of SNP TSC0008191
tcaaccaatcaat

SEQ ID NO: 28473 - DNA, 13 bp, Artificial Sequence
  Oligonucleotide for detection of SNP TSC0008191
attgatcggttga

SEQ ID NO: 28474 - DNA, 13 bp, Artificial Sequence
  Oligonucleotide for detection of SNP TSC0008191
tcaaccgatcaat

SEQ ID NO: 28475 - DNA, 13 bp, Artificial Sequence
  Oligonucleotide for detection of SNP TSC0008191
ttagttggttaat

SEQ ID NO: 28476 - DNA, 13 bp, Artificial Sequence
  Oligonucleotide for detection of SNP TSC0008191
attaaccaactaa

SEQ ID NO: 28477 - DNA, 13 bp, Artificial Sequence
  Oligonucleotide for detection of SNP TSC0008191
ttagttagttaat

SEQ ID NO: 28478 - DNA, 13 bp, Artificial Sequence
  Oligonucleotide for detection of SNP TSC0008191
attaactaactaa

SEQ ID NO: 28479 - DNA, 13 bp, Artificial Sequence
  Oligonucleotide for detection of SNP TSC0008191
ttagtcggttaat

SEQ ID NO: 28480 - DNA, 13 bp, Artificial Sequence
  Oligonucleotide for detection of SNP TSC0008191
attaaccgactaa

SEQ ID NO: 28481 - DNA, 13 bp, Artificial Sequence
  Oligonucleotide for detection of SNP TSC0008193
atagggataagta

SEQ ID NO: 28482 - DNA, 13 bp, Artificial Sequence
  Oligonucleotide for detection of SNP TSC0008193
tacttatccctat

SEQ ID NO: 28483 - DNA, 13 bp, Artificial Sequence
  Oligonucleotide for detection of SNP TSC0008193
ataggggtaagta

SEQ ID NO: 28484 - DNA, 13 bp, Artificial Sequence
  Oligonucleotide for detection of SNP TSC0008193
tacttacccctat

SEQ ID NO: 28485 - DNA, 13 bp, Artificial Sequence
  Oligonucleotide for detection of SNP TSC0008194
gggttagttttty

SEQ ID NO: 28486 - DNA, 13 bp, Artificial Sequence
  Oligonucleotide for detection of SNP TSC0008194
raaaaactaaccc

SEQ ID NO: 28487 - DNA, 13 bp, Artificial Sequence
  Oligonucleotide for detection of SNP TSC0008194
gggttaattttty

SEQ ID NO: 28488 - DNA, 13 bp, Artificial Sequence
  Oligonucleotide for detection of SNP TSC0008194
raaaaattaaccc

SEQ ID NO: 28489 - DNA, 13 bp, Artificial Sequence
  Oligonucleotide for detection of SNP TSC0008201
tattttaaagaaa

SEQ ID NO: 28490 - DNA, 13 bp, Artificial Sequence
  Oligonucleotide for detection of SNP TSC0008201
tttctttaaaata

SEQ ID NO: 28491 - DNA, 13 bp, Artificial Sequence
  Oligonucleotide for detection of SNP TSC0008201
tattttgaagaaa

SEQ ID NO: 28492 - DNA, 13 bp, Artificial Sequence
  Oligonucleotide for detection of SNP TSC0008201
tttcttcaaaata

SEQ ID NO: 28493 - DNA, 13 bp, Artificial Sequence
  Oligonucleotide for detection of SNP TSC0008201
tatttcgaagaaa

SEQ ID NO: 28494 - DNA, 13 bp, Artificial Sequence
  Oligonucleotide for detection of SNP TSC0008201
tttcttcgaaata

SEQ ID NO: 28495 - DNA, 13 bp, Artificial Sequence
  Oligonucleotide for detection of SNP TSC0008201
tttttttggggtg

SEQ ID NO: 28496 - DNA, 13 bp, Artificial Sequence
  Oligonucleotide for detection of SNP TSC0008201
caccccaaaaaaa

SEQ ID NO: 28497 - DNA, 13 bp, Artificial Sequence
  Oligonucleotide for detection of SNP TSC0008201
ttttttcggggtg

SEQ ID NO: 28498 - DNA, 13 bp, Artificial Sequence
  Oligonucleotide for detection of SNP TSC0008201
caccccgaaaaaa

SEQ ID NO: 28499 - DNA, 13 bp, Artificial Sequence
  Oligonucleotide for detection of SNP TSC0008202
taataagttattt

SEQ ID NO: 28500 - DNA, 13 bp, Artificial Sequence
  Oligonucleotide for detection of SNP TSC0008202
aaataacttatta

SEQ ID NO: 28501 - DNA, 13 bp, Artificial Sequence
  Oligonucleotide for detection of SNP TSC0008202
taataatttattt

SEQ ID NO: 28502 - DNA, 13 bp, Artificial Sequence
  Oligonucleotide for detection of SNP TSC0008202
aaataaattatta

SEQ ID NO: 28503 - DNA, 13 bp, Artificial Sequence
  Oligonucleotide for detection of SNP TSC0008202
agatgatttatta

SEQ ID NO: 28504 - DNA, 13 bp, Artificial Sequence
  Oligonucleotide for detection of SNP TSC0008202
taataaatcatct

SEQ ID NO: 28505 - DNA, 13 bp, Artificial Sequence
  Oligonucleotide for detection of SNP TSC0008202
agatgaattatta

SEQ ID NO: 28506 - DNA, 13 bp, Artificial Sequence
  Oligonucleotide for detection of SNP TSC0008202
taataattcatct

SEQ ID NO: 28507 - DNA, 13 bp, Artificial Sequence
  Oligonucleotide for detection of SNP TSC0008204
gattgatggatgt

SEQ ID NO: 28508 - DNA, 13 bp, Artificial Sequence
  Oligonucleotide for detection of SNP TSC0008204
acatccatcaatc

SEQ ID NO: 28509 - DNA, 13 bp, Artificial Sequence
  Oligonucleotide for detection of SNP TSC0008204
gattgacggatgt

SEQ ID NO: 28510 - DNA, 13 bp, Artificial Sequence
  Oligonucleotide for detection of SNP TSC0008204
acatccgtcaatc

SEQ ID NO: 28511 - DNA, 13 bp, Artificial Sequence
  Oligonucleotide for detection of SNP TSC0008204
atatttgttaaty

SEQ ID NO: 28512 - DNA, 13 bp, Artificial Sequence
  Oligonucleotide for detection of SNP TSC0008204
rattaacaaatat

SEQ ID NO: 28513 - DNA, 13 bp, Artificial Sequence
  Oligonucleotide for detection of SNP TSC0008204
atatttattaaty

SEQ ID NO: 28514 - DNA, 13 bp, Artificial Sequence
  Oligonucleotide for detection of SNP TSC0008204
rattaataaatat

SEQ ID NO: 28515 - DNA, 13 bp, Artificial Sequence
  Oligonucleotide for detection of SNP TSC0008204
atattcgttaaty

SEQ ID NO: 28516 - DNA, 13 bp, Artificial Sequence
  Oligonucleotide for detection of SNP TSC0008204
rattaacgaatat

SEQ ID NO: 28517 - DNA, 13 bp, Artificial Sequence
  Oligonucleotide for detection of SNP TSC0008205
aaaaatatattta

SEQ ID NO: 28518 - DNA, 13 bp, Artificial Sequence
  Oligonucleotide for detection of SNP TSC0008205
taaatatattttt

SEQ ID NO: 28519 - DNA, 13 bp, Artificial Sequence
  Oligonucleotide for detection of SNP TSC0008205
aaaaatttattta

SEQ ID NO: 28520 - DNA, 13 bp, Artificial Sequence
  Oligonucleotide for detection of SNP TSC0008205
taaataaattttt

SEQ ID NO: 28521 - DNA, 13 bp, Artificial Sequence
  Oligonucleotide for detection of SNP TSC0008205
tagatgtattttt

SEQ ID NO: 28522 - DNA, 13 bp, Artificial Sequence
  Oligonucleotide for detection of SNP TSC0008205
aaaaatacatcta

SEQ ID NO: 28523 - DNA, 13 bp, Artificial Sequence
  Oligonucleotide for detection of SNP TSC0008205
tagatggattttt

SEQ ID NO: 28524 - DNA, 13 bp, Artificial Sequence
  Oligonucleotide for detection of SNP TSC0008205
aaaaatccatcta

SEQ ID NO: 28525 - DNA, 13 bp, Artificial Sequence
  Oligonucleotide for detection of SNP TSC0008207
ttttttatgtatt

SEQ ID NO: 28526 - DNA, 13 bp, Artificial Sequence
  Oligonucleotide for detection of SNP TSC0008207
aatacataaaaaa

SEQ ID NO: 28527 - DNA, 13 bp, Artificial Sequence
  Oligonucleotide for detection of SNP TSC0008207
ttttttgtgtatt

SEQ ID NO: 28528 - DNA, 13 bp, Artificial Sequence
  Oligonucleotide for detection of SNP TSC0008207
aatacacaaaaaa

SEQ ID NO: 28529 - DNA, 13 bp, Artificial Sequence
  Oligonucleotide for detection of SNP TSC0008213
gtttttttttttg

SEQ ID NO: 28530 - DNA, 13 bp, Artificial Sequence
  Oligonucleotide for detection of SNP TSC0008213
caaaaaaaaaaac

SEQ ID NO: 28531 - DNA, 13 bp, Artificial Sequence
  Oligonucleotide for detection of SNP TSC0008213
tagaagtggaaay

SEQ ID NO: 28532 - DNA, 13 bp, Artificial Sequence
  Oligonucleotide for detection of SNP TSC0008213
rtttccacttcta

SEQ ID NO: 28533 - DNA, 13 bp, Artificial Sequence
  Oligonucleotide for detection of SNP TSC0008213
tagaagaggaaay

SEQ ID NO: 28534 - DNA, 13 bp, Artificial Sequence
  Oligonucleotide for detection of SNP TSC0008213
rtttcctcttcta

SEQ ID NO: 28535 - DNA, 13 bp, Artificial Sequence
  Oligonucleotide for detection of SNP TSC0008213
tagaagcggaaay

SEQ ID NO: 28536 - DNA, 13 bp, Artificial Sequence
  Oligonucleotide for detection of SNP TSC0008213
rtttccgcttcta

SEQ ID NO: 28537 - DNA, 13 bp, Artificial Sequence
  Oligonucleotide for detection of SNP TSC0008214
atttttgtaatgt

SEQ ID NO: 28538 - DNA, 13 bp, Artificial Sequence
  Oligonucleotide for detection of SNP TSC0008214
acattacaaaaat

SEQ ID NO: 28539 - DNA, 13 bp, Artificial Sequence
  Oligonucleotide for detection of SNP TSC0008214
atttttataatgt

SEQ ID NO: 28540 - DNA, 13 bp, Artificial Sequence
  Oligonucleotide for detection of SNP TSC0008214
acattataaaaat

SEQ ID NO: 28541 - DNA, 13 bp, Artificial Sequence
  Oligonucleotide for detection of SNP TSC0008229
gattaaaatgtta

SEQ ID NO: 28542 - DNA, 13 bp, Artificial Sequence
  Oligonucleotide for detection of SNP TSC0008229
taacattttaatc

SEQ ID NO: 28543 - DNA, 13 bp, Artificial Sequence
  Oligonucleotide for detection of SNP TSC0008229
gattaagatgtta

SEQ ID NO: 28544 - DNA, 13 bp, Artificial Sequence
  Oligonucleotide for detection of SNP TSC0008229
taacatcttaatc

SEQ ID NO: 28545 - DNA, 13 bp, Artificial Sequence
  Oligonucleotide for detection of SNP TSC0008232
ggattagggtaaa

SEQ ID NO: 28546 - DNA, 13 bp, Artificial Sequence
  Oligonucleotide for detection of SNP TSC0008232
tttaccctaatcc

SEQ ID NO: 28547 - DNA, 13 bp, Artificial Sequence
  Oligonucleotide for detection of SNP TSC0008232
ggattaaggtaaa

SEQ ID NO: 28548 - DNA, 13 bp, Artificial Sequence
  Oligonucleotide for detection of SNP TSC0008232
tttaccttaatcc

SEQ ID NO: 28549 - DNA, 13 bp, Artificial Sequence
  Oligonucleotide for detection of SNP TSC0008235
ttttaggtgttta

SEQ ID NO: 28550 - DNA, 13 bp, Artificial Sequence
  Oligonucleotide for detection of SNP TSC0008235
taaacacctaaaa

SEQ ID NO: 28551 - DNA, 13 bp, Artificial Sequence
  Oligonucleotide for detection of SNP TSC0008235
ttttagttgttta

SEQ ID NO: 28552 - DNA, 13 bp, Artificial Sequence
  Oligonucleotide for detection of SNP TSC0008235
taaacaactaaaa

SEQ ID NO: 28553 - DNA, 13 bp, Artificial Sequence
  Oligonucleotide for detection of SNP TSC0008235
tgggtatttgggg

SEQ ID NO: 28554 - DNA, 13 bp, Artificial Sequence
  Oligonucleotide for detection of SNP TSC0008235
ccccaaataccca

SEQ ID NO: 28555 - DNA, 13 bp, Artificial Sequence
  Oligonucleotide for detection of SNP TSC0008235
tgggtaattgggg

SEQ ID NO: 28556 - DNA, 13 bp, Artificial Sequence
  Oligonucleotide for detection of SNP TSC0008235
ccccaattaccca

SEQ ID NO: 28557 - DNA, 13 bp, Artificial Sequence
  Oligonucleotide for detection of SNP TSC0008237
gaggaatggatay

SEQ ID NO: 28558 - DNA, 13 bp, Artificial Sequence
  Oligonucleotide for detection of SNP TSC0008237
rtatccattcctc

SEQ ID NO: 28559 - DNA, 13 bp, Artificial Sequence
  Oligonucleotide for detection of SNP TSC0008237
gaggaacggatay

SEQ ID NO: 28560 - DNA, 13 bp, Artificial Sequence
  Oligonucleotide for detection of SNP TSC0008237
rtatccgttcctc

SEQ ID NO: 28561 - DNA, 13 bp, Artificial Sequence
  Oligonucleotide for detection of SNP TSC0008237
gtgtttgttttty

SEQ ID NO: 28562 - DNA, 13 bp, Artificial Sequence
  Oligonucleotide for detection of SNP TSC0008237
raaaaacaaacac

SEQ ID NO: 28563 - DNA, 13 bp, Artificial Sequence
  Oligonucleotide for detection of SNP TSC0008237
gtgtttattttty

SEQ ID NO: 28564 - DNA, 13 bp, Artificial Sequence
  Oligonucleotide for detection of SNP TSC0008237
raaaaataaacac

SEQ ID NO: 28565 - DNA, 13 bp, Artificial Sequence
  Oligonucleotide for detection of SNP TSC0008237
gtgttcgttttty

SEQ ID NO: 28566 - DNA, 13 bp, Artificial Sequence
  Oligonucleotide for detection of SNP TSC0008237
raaaaacgaacac

SEQ ID NO: 28567 - DNA, 13 bp, Artificial Sequence
  Oligonucleotide for detection of SNP TSC0008238
gatatggttaggt

SEQ ID NO: 28568 - DNA, 13 bp, Artificial Sequence
  Oligonucleotide for detection of SNP TSC0008238
acctaaccatatc

SEQ ID NO: 28569 - DNA, 13 bp, Artificial Sequence
  Oligonucleotide for detection of SNP TSC0008238
gatatgtttaggt

SEQ ID NO: 28570 - DNA, 13 bp, Artificial Sequence
  Oligonucleotide for detection of SNP TSC0008238
acctaaacatatc

SEQ ID NO: 28571 - DNA, 13 bp, Artificial Sequence
  Oligonucleotide for detection of SNP TSC0008238
atttaattatgty

SEQ ID NO: 28572 - DNA, 13 bp, Artificial Sequence
  Oligonucleotide for detection of SNP TSC0008238
racataattaaat

SEQ ID NO: 28573 - DNA, 13 bp, Artificial Sequence
  Oligonucleotide for detection of SNP TSC0008238
atttaaatatgty

SEQ ID NO: 28574 - DNA, 13 bp, Artificial Sequence
  Oligonucleotide for detection of SNP TSC0008238
racatatttaaat

SEQ ID NO: 28575 - DNA, 13 bp, Artificial Sequence
  Oligonucleotide for detection of SNP TSC0008242
gttgataaaaaaa

SEQ ID NO: 28576 - DNA, 13 bp, Artificial Sequence
  Oligonucleotide for detection of SNP TSC0008242
tttttttatcaac

SEQ ID NO: 28577 - DNA, 13 bp, Artificial Sequence
  Oligonucleotide for detection of SNP TSC0008242
gttgattaaaaaa

SEQ ID NO: 28578 - DNA, 13 bp, Artificial Sequence
  Oligonucleotide for detection of SNP TSC0008242
ttttttaatcaac

SEQ ID NO: 28579 - DNA, 13 bp, Artificial Sequence
  Oligonucleotide for detection of SNP TSC0008242
gtcgataaaaaaa

SEQ ID NO: 28580 - DNA, 13 bp, Artificial Sequence
  Oligonucleotide for detection of SNP TSC0008242
tttttttatcgac

SEQ ID NO: 28581 - DNA, 13 bp, Artificial Sequence
  Oligonucleotide for detection of SNP TSC0008242
gtcgattaaaaaa

SEQ ID NO: 28582 - DNA, 13 bp, Artificial Sequence
  Oligonucleotide for detection of SNP TSC0008242
ttttttaatcgac

SEQ ID NO: 28583 - DNA, 13 bp, Artificial Sequence
  Oligonucleotide for detection of SNP TSC0008242
tttttttgttgay

SEQ ID NO: 28584 - DNA, 13 bp, Artificial Sequence
  Oligonucleotide for detection of SNP TSC0008242
rtcaacaaaaaaa

SEQ ID NO: 28585 - DNA, 13 bp, Artificial Sequence
  Oligonucleotide for detection of SNP TSC0008242
ttttttagttgay

SEQ ID NO: 28586 - DNA, 13 bp, Artificial Sequence
  Oligonucleotide for detection of SNP TSC0008242
rtcaactaaaaaa

SEQ ID NO: 28587 - DNA, 13 bp, Artificial Sequence
  Oligonucleotide for detection of SNP TSC0008242
tttttttgtcgay

SEQ ID NO: 28588 - DNA, 13 bp, Artificial Sequence
  Oligonucleotide for detection of SNP TSC0008242
rtcgacaaaaaaa

SEQ ID NO: 28589 - DNA, 13 bp, Artificial Sequence
  Oligonucleotide for detection of SNP TSC0008242
ttttttagtcgay

SEQ ID NO: 28590 - DNA, 13 bp, Artificial Sequence
  Oligonucleotide for detection of SNP TSC0008242
rtcgactaaaaaa

SEQ ID NO: 28591 - DNA, 13 bp, Artificial Sequence
  Oligonucleotide for detection of SNP TSC0008244
ttatagggtatty

SEQ ID NO: 28592 - DNA, 13 bp, Artificial Sequence
  Oligonucleotide for detection of SNP TSC0008244
raataccctataa

SEQ ID NO: 28593 - DNA, 13 bp, Artificial Sequence
  Oligonucleotide for detection of SNP TSC0008244
ttatagtgtatty

SEQ ID NO: 28594 - DNA, 13 bp, Artificial Sequence
  Oligonucleotide for detection of SNP TSC0008244
raatacactataa

SEQ ID NO: 28595 - DNA, 13 bp, Artificial Sequence
  Oligonucleotide for detection of SNP TSC0008244
ggatattttgtga

SEQ ID NO: 28596 - DNA, 13 bp, Artificial Sequence
  Oligonucleotide for detection of SNP TSC0008244
tcacaaaatatcc

SEQ ID NO: 28597 - DNA, 13 bp, Artificial Sequence
  Oligonucleotide for detection of SNP TSC0008244
ggatatattgtga

SEQ ID NO: 28598 - DNA, 13 bp, Artificial Sequence
  Oligonucleotide for detection of SNP TSC0008244
tcacaatatatcc

SEQ ID NO: 28599 - DNA, 13 bp, Artificial Sequence
  Oligonucleotide for detection of SNP TSC0008245
tatatgaatgtat

SEQ ID NO: 28600 - DNA, 13 bp, Artificial Sequence
  Oligonucleotide for detection of SNP TSC0008245
atacattcatata

SEQ ID NO: 28601 - DNA, 13 bp, Artificial Sequence
  Oligonucleotide for detection of SNP TSC0008245
tatatgtatgtat

SEQ ID NO: 28602 - DNA, 13 bp, Artificial Sequence
  Oligonucleotide for detection of SNP TSC0008245
atacatacatata

SEQ ID NO: 28603 - DNA, 13 bp, Artificial Sequence
  Oligonucleotide for detection of SNP TSC0008245
atatatttatgta

SEQ ID NO: 28604 - DNA, 13 bp, Artificial Sequence
  Oligonucleotide for detection of SNP TSC0008245
tacataaatatat

SEQ ID NO: 28605 - DNA, 13 bp, Artificial Sequence
  Oligonucleotide for detection of SNP TSC0008245
atatatatatgta

SEQ ID NO: 28606 - DNA, 13 bp, Artificial Sequence
  Oligonucleotide for detection of SNP TSC0008245
tacatatatatat

SEQ ID NO: 28607 - DNA, 13 bp, Artificial Sequence
  Oligonucleotide for detection of SNP TSC0008247
ttaataggttatt

SEQ ID NO: 28608 - DNA, 13 bp, Artificial Sequence
  Oligonucleotide for detection of SNP TSC0008247
aataacctattaa

SEQ ID NO: 28609 - DNA, 13 bp, Artificial Sequence
  Oligonucleotide for detection of SNP TSC0008247
ttaataagttatt

SEQ ID NO: 28610 - DNA, 13 bp, Artificial Sequence
  Oligonucleotide for detection of SNP TSC0008247
aataacttattaa

SEQ ID NO: 28611 - DNA, 13 bp, Artificial Sequence
  Oligonucleotide for detection of SNP TSC0008248
gttgggataatta

SEQ ID NO: 28612 - DNA, 13 bp, Artificial Sequence
  Oligonucleotide for detection of SNP TSC0008248
taattatcccaac

SEQ ID NO: 28613 - DNA, 13 bp, Artificial Sequence
  Oligonucleotide for detection of SNP TSC0008248
gttgggttaatta

SEQ ID NO: 28614 - DNA, 13 bp, Artificial Sequence
  Oligonucleotide for detection of SNP TSC0008248
taattaacccaac

SEQ ID NO: 28615 - DNA, 13 bp, Artificial Sequence
  Oligonucleotide for detection of SNP TSC0008248
tgattattttagy

SEQ ID NO: 28616 - DNA, 13 bp, Artificial Sequence
  Oligonucleotide for detection of SNP TSC0008248
rctaaaataatca

SEQ ID NO: 28617 - DNA, 13 bp, Artificial Sequence
  Oligonucleotide for detection of SNP TSC0008248
tgattagtttagy

SEQ ID NO: 28618 - DNA, 13 bp, Artificial Sequence
  Oligonucleotide for detection of SNP TSC0008248
rctaaactaatca

SEQ ID NO: 28619 - DNA, 13 bp, Artificial Sequence
  Oligonucleotide for detection of SNP TSC0008249
ggtgggtggagga

SEQ ID NO: 28620 - DNA, 13 bp, Artificial Sequence
  Oligonucleotide for detection of SNP TSC0008249
tcctccacccacc

SEQ ID NO: 28621 - DNA, 13 bp, Artificial Sequence
  Oligonucleotide for detection of SNP TSC0008249
ggtggggggagga

SEQ ID NO: 28622 - DNA, 13 bp, Artificial Sequence
  Oligonucleotide for detection of SNP TSC0008249
tcctccccccacc

SEQ ID NO: 28623 - DNA, 13 bp, Artificial Sequence
  Oligonucleotide for detection of SNP TSC0008250
ttatttatttaay

SEQ ID NO: 28624 - DNA, 13 bp, Artificial Sequence
  Oligonucleotide for detection of SNP TSC0008250
rttaaataaataa

SEQ ID NO: 28625 - DNA, 13 bp, Artificial Sequence
  Oligonucleotide for detection of SNP TSC0008250
ttatttgtttaay

SEQ ID NO: 28626 - DNA, 13 bp, Artificial Sequence
  Oligonucleotide for detection of SNP TSC0008250
rttaaacaaataa

SEQ ID NO: 28627 - DNA, 13 bp, Artificial Sequence
  Oligonucleotide for detection of SNP TSC0008250
ttattcgtttaay

SEQ ID NO: 28628 - DNA, 13 bp, Artificial Sequence
  Oligonucleotide for detection of SNP TSC0008250
rttaaacgaataa

SEQ ID NO: 28629 - DNA, 13 bp, Artificial Sequence
  Oligonucleotide for detection of SNP TSC0008250
gttgggtgggtgg

SEQ ID NO: 28630 - DNA, 13 bp, Artificial Sequence
  Oligonucleotide for detection of SNP TSC0008250
ccacccacccaac

SEQ ID NO: 28631 - DNA, 13 bp, Artificial Sequence
  Oligonucleotide for detection of SNP TSC0008250
gttgggcgggtgg

SEQ ID NO: 28632 - DNA, 13 bp, Artificial Sequence
  Oligonucleotide for detection of SNP TSC0008250
ccacccgcccaac

SEQ ID NO: 28633 - DNA, 13 bp, Artificial Sequence
  Oligonucleotide for detection of SNP TSC0008251
agggagagagaga

SEQ ID NO: 28634 - DNA, 13 bp, Artificial Sequence
  Oligonucleotide for detection of SNP TSC0008251
tctctctctccct

SEQ ID NO: 28635 - DNA, 13 bp, Artificial Sequence
  Oligonucleotide for detection of SNP TSC0008251
agggagggagaga

SEQ ID NO: 28636 - DNA, 13 bp, Artificial Sequence
  Oligonucleotide for detection of SNP TSC0008251
tctctccctccct

SEQ ID NO: 28637 - DNA, 13 bp, Artificial Sequence
  Oligonucleotide for detection of SNP TSC0008256
ttttatgtagtta

SEQ ID NO: 28638 - DNA, 13 bp, Artificial Sequence
  Oligonucleotide for detection of SNP TSC0008256
taactacataaaa

SEQ ID NO: 28639 - DNA, 13 bp, Artificial Sequence
  Oligonucleotide for detection of SNP TSC0008256
ttttatttagtta

SEQ ID NO: 28640 - DNA, 13 bp, Artificial Sequence
  Oligonucleotide for detection of SNP TSC0008256
taactaaataaaa

SEQ ID NO: 28641 - DNA, 13 bp, Artificial Sequence
  Oligonucleotide for detection of SNP TSC0008256
tggttgtatggga

SEQ ID NO: 28642 - DNA, 13 bp, Artificial Sequence
  Oligonucleotide for detection of SNP TSC0008256
tcccatacaacca

SEQ ID NO: 28643 - DNA, 13 bp, Artificial Sequence
  Oligonucleotide for detection of SNP TSC0008256
tggttgaatggga

SEQ ID NO: 28644 - DNA, 13 bp, Artificial Sequence
  Oligonucleotide for detection of SNP TSC0008256
tcccattcaacca

SEQ ID NO: 28645 - DNA, 13 bp, Artificial Sequence
  Oligonucleotide for detection of SNP TSC0008281
ggttgtatgtaga

SEQ ID NO: 28646 - DNA, 13 bp, Artificial Sequence
  Oligonucleotide for detection of SNP TSC0008281
tctacatacaacc

SEQ ID NO: 28647 - DNA, 13 bp, Artificial Sequence
  Oligonucleotide for detection of SNP TSC0008281
ggttgtttgtaga

SEQ ID NO: 28648 - DNA, 13 bp, Artificial Sequence
  Oligonucleotide for detection of SNP TSC0008281
tctacaaacaacc

SEQ ID NO: 28649 - DNA, 13 bp, Artificial Sequence
  Oligonucleotide for detection of SNP TSC0008281
tttatatgtagty

SEQ ID NO: 28650 - DNA, 13 bp, Artificial Sequence
  Oligonucleotide for detection of SNP TSC0008281
ractacatataaa

SEQ ID NO: 28651 - DNA, 13 bp, Artificial Sequence
  Oligonucleotide for detection of SNP TSC0008281
tttataagtagty

SEQ ID NO: 28652 - DNA, 13 bp, Artificial Sequence
  Oligonucleotide for detection of SNP TSC0008281
ractacttataaa

SEQ ID NO: 28653 - DNA, 13 bp, Artificial Sequence
  Oligonucleotide for detection of SNP TSC0008296
aggaaagtaattt

SEQ ID NO: 28654 - DNA, 13 bp, Artificial Sequence
  Oligonucleotide for detection of SNP TSC0008296
aaattactttcct

SEQ ID NO: 28655 - DNA, 13 bp, Artificial Sequence
  Oligonucleotide for detection of SNP TSC0008296
aggaaaataattt

SEQ ID NO: 28656 - DNA, 13 bp, Artificial Sequence
  Oligonucleotide for detection of SNP TSC0008296
aaattattttcct

SEQ ID NO: 28657 - DNA, 13 bp, Artificial Sequence
  Oligonucleotide for detection of SNP TSC0008303
ggtatttaataaa

SEQ ID NO: 28658 - DNA, 13 bp, Artificial Sequence
  Oligonucleotide for detection of SNP TSC0008303
tttattaaatacc

SEQ ID NO: 28659 - DNA, 13 bp, Artificial Sequence
  Oligonucleotide for detection of SNP TSC0008303
ggtattgaataaa

SEQ ID NO: 28660 - DNA, 13 bp, Artificial Sequence
  Oligonucleotide for detection of SNP TSC0008303
tttattcaatacc

SEQ ID NO: 28661 - DNA, 13 bp, Artificial Sequence
  Oligonucleotide for detection of SNP TSC0008303
tttattgagtaty

SEQ ID NO: 28662 - DNA, 13 bp, Artificial Sequence
  Oligonucleotide for detection of SNP TSC0008303
ratactcaataaa

SEQ ID NO: 28663 - DNA, 13 bp, Artificial Sequence
  Oligonucleotide for detection of SNP TSC0008303
tttatttagtaty

SEQ ID NO: 28664 - DNA, 13 bp, Artificial Sequence
  Oligonucleotide for detection of SNP TSC0008303
ratactaaataaa

SEQ ID NO: 28665 - DNA, 13 bp, Artificial Sequence
  Oligonucleotide for detection of SNP TSC0008304
agaatagttatty

SEQ ID NO: 28666 - DNA, 13 bp, Artificial Sequence
  Oligonucleotide for detection of SNP TSC0008304
raataactattct

SEQ ID NO: 28667 - DNA, 13 bp, Artificial Sequence
  Oligonucleotide for detection of SNP TSC0008304
agaataattatty

SEQ ID NO: 28668 - DNA, 13 bp, Artificial Sequence
  Oligonucleotide for detection of SNP TSC0008304
raataattattct

SEQ ID NO: 28669 - DNA, 13 bp, Artificial Sequence
  Oligonucleotide for detection of SNP TSC0008311
agtgttattgggy

SEQ ID NO: 28670 - DNA, 13 bp, Artificial Sequence
  Oligonucleotide for detection of SNP TSC0008311
rcccaataacact

SEQ ID NO: 28671 - DNA, 13 bp, Artificial Sequence
  Oligonucleotide for detection of SNP TSC0008311
agtgttgttgggy

SEQ ID NO: 28672 - DNA, 13 bp, Artificial Sequence
  Oligonucleotide for detection of SNP TSC0008311
rcccaacaacact

SEQ ID NO: 28673 - DNA, 13 bp, Artificial Sequence
  Oligonucleotide for detection of SNP TSC0008313
agttattgttgay

SEQ ID NO: 28674 - DNA, 13 bp, Artificial Sequence
  Oligonucleotide for detection of SNP TSC0008313
rtcaacaataact

SEQ ID NO: 28675 - DNA, 13 bp, Artificial Sequence
  Oligonucleotide for detection of SNP TSC0008313
agttatcgttgay

SEQ ID NO: 28676 - DNA, 13 bp, Artificial Sequence
  Oligonucleotide for detection of SNP TSC0008313
rtcaacgataact

SEQ ID NO: 28677 - DNA, 13 bp, Artificial Sequence
  Oligonucleotide for detection of SNP TSC0008313
gttagtgatggtt

SEQ ID NO: 28678 - DNA, 13 bp, Artificial Sequence
  Oligonucleotide for detection of SNP TSC0008313
aaccatcactaac

SEQ ID NO: 28679 - DNA, 13 bp, Artificial Sequence
  Oligonucleotide for detection of SNP TSC0008313
gttagtaatggtt

SEQ ID NO: 28680 - DNA, 13 bp, Artificial Sequence
  Oligonucleotide for detection of SNP TSC0008313
aaccattactaac

SEQ ID NO: 28681 - DNA, 13 bp, Artificial Sequence
  Oligonucleotide for detection of SNP TSC0008313
gttagcgatggtt

SEQ ID NO: 28682 - DNA, 13 bp, Artificial Sequence
  Oligonucleotide for detection of SNP TSC0008313
aaccatcgctaac

SEQ ID NO: 28683 - DNA, 13 bp, Artificial Sequence
  Oligonucleotide for detection of SNP TSC0008314
aaattaagtatty

SEQ ID NO: 28684 - DNA, 13 bp, Artificial Sequence
  Oligonucleotide for detection of SNP TSC0008314
raatacttaattt

SEQ ID NO: 28685 - DNA, 13 bp, Artificial Sequence
  Oligonucleotide for detection of SNP TSC0008314
aaattatgtatty

SEQ ID NO: 28686 - DNA, 13 bp, Artificial Sequence
  Oligonucleotide for detection of SNP TSC0008314
raatacataattt

SEQ ID NO: 28687 - DNA, 13 bp, Artificial Sequence
  Oligonucleotide for detection of SNP TSC0008314
aaattacgtatty

SEQ ID NO: 28688 - DNA, 13 bp, Artificial Sequence
  Oligonucleotide for detection of SNP TSC0008314
raatacgtaattt

SEQ ID NO: 28689 - DNA, 13 bp, Artificial Sequence
  Oligonucleotide for detection of SNP TSC0008314
gggtgtttgattt

SEQ ID NO: 28690 - DNA, 13 bp, Artificial Sequence
  Oligonucleotide for detection of SNP TSC0008314
aaatcaaacaccc

SEQ ID NO: 28691 - DNA, 13 bp, Artificial Sequence
  Oligonucleotide for detection of SNP TSC0008314
gggtgtgtgattt

SEQ ID NO: 28692 - DNA, 13 bp, Artificial Sequence
  Oligonucleotide for detection of SNP TSC0008314
aaatcacacaccc

SEQ ID NO: 28693 - DNA, 13 bp, Artificial Sequence
  Oligonucleotide for detection of SNP TSC0008314
gggtgcgtgattt

SEQ ID NO: 28694 - DNA, 13 bp, Artificial Sequence
  Oligonucleotide for detection of SNP TSC0008314
aaatcacgcaccc

SEQ ID NO: 28695 - DNA, 13 bp, Artificial Sequence
  Oligonucleotide for detection of SNP TSC0008315
gtaaatgttattt

SEQ ID NO: 28696 - DNA, 13 bp, Artificial Sequence
  Oligonucleotide for detection of SNP TSC0008315
aaataacatttac

SEQ ID NO: 28697 - DNA, 13 bp, Artificial Sequence
  Oligonucleotide for detection of SNP TSC0008315
gtaaatattattt

SEQ ID NO: 28698 - DNA, 13 bp, Artificial Sequence
  Oligonucleotide for detection of SNP TSC0008315
aaataatatttac

SEQ ID NO: 28699 - DNA, 13 bp, Artificial Sequence
  Oligonucleotide for detection of SNP TSC0008335
aatatgtgtaaat

SEQ ID NO: 28700 - DNA, 13 bp, Artificial Sequence
  Oligonucleotide for detection of SNP TSC0008335
atttacacatatt

SEQ ID NO: 28701 - DNA, 13 bp, Artificial Sequence
  Oligonucleotide for detection of SNP TSC0008335
aatatgcgtaaat

SEQ ID NO: 28702 - DNA, 13 bp, Artificial Sequence
  Oligonucleotide for detection of SNP TSC0008335
atttacgcatatt

SEQ ID NO: 28703 - DNA, 13 bp, Artificial Sequence
  Oligonucleotide for detection of SNP TSC0008335
atttgtgtatatt

SEQ ID NO: 28704 - DNA, 13 bp, Artificial Sequence
  Oligonucleotide for detection of SNP TSC0008335
aatatacacaaat

SEQ ID NO: 28705 - DNA, 13 bp, Artificial Sequence
  Oligonucleotide for detection of SNP TSC0008335
atttgtatatatt

SEQ ID NO: 28706 - DNA, 13 bp, Artificial Sequence
  Oligonucleotide for detection of SNP TSC0008335
aatatatacaaat

SEQ ID NO: 28707 - DNA, 13 bp, Artificial Sequence
  Oligonucleotide for detection of SNP TSC0008335
atttgcgtatatt

SEQ ID NO: 28708 - DNA, 13 bp, Artificial Sequence
  Oligonucleotide for detection of SNP TSC0008335
aatatacgcaaat

SEQ ID NO: 28709 - DNA, 13 bp, Artificial Sequence
  Oligonucleotide for detection of SNP TSC0008336
aaaataattaaat

SEQ ID NO: 28710 - DNA, 13 bp, Artificial Sequence
  Oligonucleotide for detection of SNP TSC0008336
atttaattatttt

SEQ ID NO: 28711 - DNA, 13 bp, Artificial Sequence
  Oligonucleotide for detection of SNP TSC0008336
aaaatagttaaat

SEQ ID NO: 28712 - DNA, 13 bp, Artificial Sequence
  Oligonucleotide for detection of SNP TSC0008336
atttaactatttt

SEQ ID NO: 28713 - DNA, 13 bp, Artificial Sequence
  Oligonucleotide for detection of SNP TSC0008342
taatttagatatg

SEQ ID NO: 28714 - DNA, 13 bp, Artificial Sequence
  Oligonucleotide for detection of SNP TSC0008342
catatctaaatta

SEQ ID NO: 28715 - DNA, 13 bp, Artificial Sequence
  Oligonucleotide for detection of SNP TSC0008342
taattttgatatg

SEQ ID NO: 28716 - DNA, 13 bp, Artificial Sequence
  Oligonucleotide for detection of SNP TSC0008342
catatcaaaatta

SEQ ID NO: 28717 - DNA, 13 bp, Artificial Sequence
  Oligonucleotide for detection of SNP TSC0008342
taatttcgatatg

SEQ ID NO: 28718 - DNA, 13 bp, Artificial Sequence
  Oligonucleotide for detection of SNP TSC0008342
catatcgaaatta

SEQ ID NO: 28719 - DNA, 13 bp, Artificial Sequence
  Oligonucleotide for detection of SNP TSC0008342
tatatttgagtta

SEQ ID NO: 28720 - DNA, 13 bp, Artificial Sequence
  Oligonucleotide for detection of SNP TSC0008342
taactcaaatata

SEQ ID NO: 28721 - DNA, 13 bp, Artificial Sequence
  Oligonucleotide for detection of SNP TSC0008342
tatattggagtta

SEQ ID NO: 28722 - DNA, 13 bp, Artificial Sequence
  Oligonucleotide for detection of SNP TSC0008342
taactccaatata

SEQ ID NO: 28723 - DNA, 13 bp, Artificial Sequence
  Oligonucleotide for detection of SNP TSC0008342
tatatcggagtta

SEQ ID NO: 28724 - DNA, 13 bp, Artificial Sequence
  Oligonucleotide for detection of SNP TSC0008342
taactccgatata

SEQ ID NO: 28725 - DNA, 13 bp, Artificial Sequence
  Oligonucleotide for detection of SNP TSC0008350
gttgtagttattt

SEQ ID NO: 28726 - DNA, 13 bp, Artificial Sequence
  Oligonucleotide for detection of SNP TSC0008350
aaataactacaac

SEQ ID NO: 28727 - DNA, 13 bp, Artificial Sequence
  Oligonucleotide for detection of SNP TSC0008350
gttgtaattattt

SEQ ID NO: 28728 - DNA, 13 bp, Artificial Sequence
  Oligonucleotide for detection of SNP TSC0008350
aaataattacaac

SEQ ID NO: 28729 - DNA, 13 bp, Artificial Sequence
  Oligonucleotide for detection of SNP TSC0008350
gtcgtagttattt

SEQ ID NO: 28730 - DNA, 13 bp, Artificial Sequence
  Oligonucleotide for detection of SNP TSC0008350
aaataactacgac

SEQ ID NO: 28731 - DNA, 13 bp, Artificial Sequence
  Oligonucleotide for detection of SNP TSC0008350
gtcgtaattattt

SEQ ID NO: 28732 - DNA, 13 bp, Artificial Sequence
  Oligonucleotide for detection of SNP TSC0008350
aaataattacgac

SEQ ID NO: 28733 - DNA, 13 bp, Artificial Sequence
  Oligonucleotide for detection of SNP TSC0008353
aaatttatattgy

SEQ ID NO: 28734 - DNA, 13 bp, Artificial Sequence
  Oligonucleotide for detection of SNP TSC0008353
rcaatataaattt

SEQ ID NO: 28735 - DNA, 13 bp, Artificial Sequence
  Oligonucleotide for detection of SNP TSC0008353
aaatttgtattgy

SEQ ID NO: 28736 - DNA, 13 bp, Artificial Sequence
  Oligonucleotide for detection of SNP TSC0008353
rcaatacaaattt

SEQ ID NO: 28737 - DNA, 13 bp, Artificial Sequence
  Oligonucleotide for detection of SNP TSC0008353
aaattcgtattgy

SEQ ID NO: 28738 - DNA, 13 bp, Artificial Sequence
  Oligonucleotide for detection of SNP TSC0008353
rcaatacgaattt

SEQ ID NO: 28739 - DNA, 13 bp, Artificial Sequence
  Oligonucleotide for detection of SNP TSC0008353
gtaatgtggattt

SEQ ID NO: 28740 - DNA, 13 bp, Artificial Sequence
  Oligonucleotide for detection of SNP TSC0008353
aaatccacattac

SEQ ID NO: 28741 - DNA, 13 bp, Artificial Sequence
  Oligonucleotide for detection of SNP TSC0008353
gtaatgcggattt

SEQ ID NO: 28742 - DNA, 13 bp, Artificial Sequence
  Oligonucleotide for detection of SNP TSC0008353
aaatccgcattac

SEQ ID NO: 28743 - DNA, 13 bp, Artificial Sequence
  Oligonucleotide for detection of SNP TSC0008356
agttgaagtttaa

SEQ ID NO: 28744 - DNA, 13 bp, Artificial Sequence
  Oligonucleotide for detection of SNP TSC0008356
ttaaacttcaact

SEQ ID NO: 28745 - DNA, 13 bp, Artificial Sequence
  Oligonucleotide for detection of SNP TSC0008356
agttgaggtttaa

SEQ ID NO: 28746 - DNA, 13 bp, Artificial Sequence
  Oligonucleotide for detection of SNP TSC0008356
ttaaacctcaact

SEQ ID NO: 28747 - DNA, 13 bp, Artificial Sequence
  Oligonucleotide for detection of SNP TSC0008356
agtcgaagtttaa

SEQ ID NO: 28748 - DNA, 13 bp, Artificial Sequence
  Oligonucleotide for detection of SNP TSC0008356
ttaaacttcgact

SEQ ID NO: 28749 - DNA, 13 bp, Artificial Sequence
  Oligonucleotide for detection of SNP TSC0008356
agtcgaggtttaa

SEQ ID NO: 28750 - DNA, 13 bp, Artificial Sequence
  Oligonucleotide for detection of SNP TSC0008356
ttaaacctcgact

SEQ ID NO: 28751 - DNA, 13 bp, Artificial Sequence
  Oligonucleotide for detection of SNP TSC0008359
tttgtttagtgtt

SEQ ID NO: 28752 - DNA, 13 bp, Artificial Sequence
  Oligonucleotide for detection of SNP TSC0008359
aacactaaacaaa

SEQ ID NO: 28753 - DNA, 13 bp, Artificial Sequence
  Oligonucleotide for detection of SNP TSC0008359
tttgttgagtgtt

SEQ ID NO: 28754 - DNA, 13 bp, Artificial Sequence
  Oligonucleotide for detection of SNP TSC0008359
aacactcaacaaa

SEQ ID NO: 28755 - DNA, 13 bp, Artificial Sequence
  Oligonucleotide for detection of SNP TSC0008359
agtattgagtaaa

SEQ ID NO: 28756 - DNA, 13 bp, Artificial Sequence
  Oligonucleotide for detection of SNP TSC0008359
tttactcaatact

SEQ ID NO: 28757 - DNA, 13 bp, Artificial Sequence
  Oligonucleotide for detection of SNP TSC0008359
agtatttagtaaa

SEQ ID NO: 28758 - DNA, 13 bp, Artificial Sequence
  Oligonucleotide for detection of SNP TSC0008359
tttactaaatact

SEQ ID NO: 28759 - DNA, 13 bp, Artificial Sequence
  Oligonucleotide for detection of SNP TSC0008360
ggtaataagtagy

SEQ ID NO: 28760 - DNA, 13 bp, Artificial Sequence
  Oligonucleotide for detection of SNP TSC0008360
rctacttattacc

SEQ ID NO: 28761 - DNA, 13 bp, Artificial Sequence
  Oligonucleotide for detection of SNP TSC0008360
ggtaattagtagy

SEQ ID NO: 28762 - DNA, 13 bp, Artificial Sequence
  Oligonucleotide for detection of SNP TSC0008360
rctactaattacc

SEQ ID NO: 28763 - DNA, 13 bp, Artificial Sequence
  Oligonucleotide for detection of SNP TSC0008360
gttatttgttgty

SEQ ID NO: 28764 - DNA, 13 bp, Artificial Sequence
  Oligonucleotide for detection of SNP TSC0008360
racaacaaataac

SEQ ID NO: 28765 - DNA, 13 bp, Artificial Sequence
  Oligonucleotide for detection of SNP TSC0008360
gttattggttgty

SEQ ID NO: 28766 - DNA, 13 bp, Artificial Sequence
  Oligonucleotide for detection of SNP TSC0008360
racaaccaataac

SEQ ID NO: 28767 - DNA, 13 bp, Artificial Sequence
  Oligonucleotide for detection of SNP TSC0008361
ttatatatattag

SEQ ID NO: 28768 - DNA, 13 bp, Artificial Sequence
  Oligonucleotide for detection of SNP TSC0008361
ctaatatatataa

SEQ ID NO: 28769 - DNA, 13 bp, Artificial Sequence
  Oligonucleotide for detection of SNP TSC0008361
ttatatgtattag

SEQ ID NO: 28770 - DNA, 13 bp, Artificial Sequence
  Oligonucleotide for detection of SNP TSC0008361
ctaatacatataa

SEQ ID NO: 28771 - DNA, 13 bp, Artificial Sequence
  Oligonucleotide for detection of SNP TSC0008361
ttatacgtattag

SEQ ID NO: 28772 - DNA, 13 bp, Artificial Sequence
  Oligonucleotide for detection of SNP TSC0008361
ctaatacgtataa

SEQ ID NO: 28773 - DNA, 13 bp, Artificial Sequence
  Oligonucleotide for detection of SNP TSC0008361
ttggtgtgtgtgg

SEQ ID NO: 28774 - DNA, 13 bp, Artificial Sequence
  Oligonucleotide for detection of SNP TSC0008361
ccacacacaccaa

SEQ ID NO: 28775 - DNA, 13 bp, Artificial Sequence
  Oligonucleotide for detection of SNP TSC0008361
ttggtgcgtgtgg

SEQ ID NO: 28776 - DNA, 13 bp, Artificial Sequence
  Oligonucleotide for detection of SNP TSC0008361
ccacacgcaccaa

SEQ ID NO: 28777 - DNA, 13 bp, Artificial Sequence
  Oligonucleotide for detection of SNP TSC0008367
gtagagagttaaa

SEQ ID NO: 28778 - DNA, 13 bp, Artificial Sequence
  Oligonucleotide for detection of SNP TSC0008367
tttaactctctac

SEQ ID NO: 28779 - DNA, 13 bp, Artificial Sequence
  Oligonucleotide for detection of SNP TSC0008367
gtagagtgttaaa

SEQ ID NO: 28780 - DNA, 13 bp, Artificial Sequence
  Oligonucleotide for detection of SNP TSC0008367
tttaacactctac

SEQ ID NO: 28781 - DNA, 13 bp, Artificial Sequence
  Oligonucleotide for detection of SNP TSC0008367
tttggttttttay

SEQ ID NO: 28782 - DNA, 13 bp, Artificial Sequence
  Oligonucleotide for detection of SNP TSC0008367
rtaaaaaaccaaa

SEQ ID NO: 28783 - DNA, 13 bp, Artificial Sequence
  Oligonucleotide for detection of SNP TSC0008367
tttggtattttay

SEQ ID NO: 28784 - DNA, 13 bp, Artificial Sequence
  Oligonucleotide for detection of SNP TSC0008367
rtaaaataccaaa

SEQ ID NO: 28785 - DNA, 13 bp, Artificial Sequence
  Oligonucleotide for detection of SNP TSC0008368
tagagaatgagga

SEQ ID NO: 28786 - DNA, 13 bp, Artificial Sequence
  Oligonucleotide for detection of SNP TSC0008368
tcctcattctcta

SEQ ID NO: 28787 - DNA, 13 bp, Artificial Sequence
  Oligonucleotide for detection of SNP TSC0008368
tagagagtgagga

SEQ ID NO: 28788 - DNA, 13 bp, Artificial Sequence
  Oligonucleotide for detection of SNP TSC0008368
tcctcactctcta

SEQ ID NO: 28789 - DNA, 13 bp, Artificial Sequence
  Oligonucleotide for detection of SNP TSC0008369
attaattgatttt

SEQ ID NO: 28790 - DNA, 13 bp, Artificial Sequence
  Oligonucleotide for detection of SNP TSC0008369
aaaatcaattaat

SEQ ID NO: 28791 - DNA, 13 bp, Artificial Sequence
  Oligonucleotide for detection of SNP TSC0008369
attaatcgatttt

SEQ ID NO: 28792 - DNA, 13 bp, Artificial Sequence
  Oligonucleotide for detection of SNP TSC0008369
aaaatcgattaat

SEQ ID NO: 28793 - DNA, 13 bp, Artificial Sequence
  Oligonucleotide for detection of SNP TSC0008369
aagattgattgat

SEQ ID NO: 28794 - DNA, 13 bp, Artificial Sequence
  Oligonucleotide for detection of SNP TSC0008369
atcaatcaatctt

SEQ ID NO: 28795 - DNA, 13 bp, Artificial Sequence
  Oligonucleotide for detection of SNP TSC0008369
aagattaattgat

SEQ ID NO: 28796 - DNA, 13 bp, Artificial Sequence
  Oligonucleotide for detection of SNP TSC0008369
atcaattaatctt

SEQ ID NO: 28797 - DNA, 13 bp, Artificial Sequence
  Oligonucleotide for detection of SNP TSC0008369
aagatcgattgat

SEQ ID NO: 28798 - DNA, 13 bp, Artificial Sequence
  Oligonucleotide for detection of SNP TSC0008369
atcaatcgatctt

SEQ ID NO: 28799 - DNA, 13 bp, Artificial Sequence
  Oligonucleotide for detection of SNP TSC0008380
tatatagaaaatg

SEQ ID NO: 28800 - DNA, 13 bp, Artificial Sequence
  Oligonucleotide for detection of SNP TSC0008380
cattttctatata

SEQ ID NO: 28801 - DNA, 13 bp, Artificial Sequence
  Oligonucleotide for detection of SNP TSC0008380
tatataaaaaatg

SEQ ID NO: 28802 - DNA, 13 bp, Artificial Sequence
  Oligonucleotide for detection of SNP TSC0008380
cattttttatata

SEQ ID NO: 28803 - DNA, 13 bp, Artificial Sequence
  Oligonucleotide for detection of SNP TSC0008383
aattaaaattggy

SEQ ID NO: 28804 - DNA, 13 bp, Artificial Sequence
  Oligonucleotide for detection of SNP TSC0008383
rccaattttaatt

SEQ ID NO: 28805 - DNA, 13 bp, Artificial Sequence
  Oligonucleotide for detection of SNP TSC0008383
aattaagattggy

SEQ ID NO: 28806 - DNA, 13 bp, Artificial Sequence
  Oligonucleotide for detection of SNP TSC0008383
rccaatcttaatt

SEQ ID NO: 28807 - DNA, 13 bp, Artificial Sequence
  Oligonucleotide for detection of SNP TSC0008389
aaaaaaaaaaatt

SEQ ID NO: 28808 - DNA, 13 bp, Artificial Sequence
  Oligonucleotide for detection of SNP TSC0008389
aattttttttttt

SEQ ID NO: 28809 - DNA, 13 bp, Artificial Sequence
  Oligonucleotide for detection of SNP TSC0008389
aaaaaagaaaatt

SEQ ID NO: 28810 - DNA, 13 bp, Artificial Sequence
  Oligonucleotide for detection of SNP TSC0008389
aattttctttttt

SEQ ID NO: 28811 - DNA, 13 bp, Artificial Sequence
  Oligonucleotide for detection of SNP TSC0008395
attgaagatttat

SEQ ID NO: 28812 - DNA, 13 bp, Artificial Sequence
  Oligonucleotide for detection of SNP TSC0008395
ataaatcttcaat

SEQ ID NO: 28813 - DNA, 13 bp, Artificial Sequence
  Oligonucleotide for detection of SNP TSC0008395
attgaaaatttat

SEQ ID NO: 28814 - DNA, 13 bp, Artificial Sequence
  Oligonucleotide for detection of SNP TSC0008395
ataaattttcaat

SEQ ID NO: 28815 - DNA, 13 bp, Artificial Sequence
  Oligonucleotide for detection of SNP TSC0008396
ttagagaaggatt

SEQ ID NO: 28816 - DNA, 13 bp, Artificial Sequence
  Oligonucleotide for detection of SNP TSC0008396
aatccttctctaa

SEQ ID NO: 28817 - DNA, 13 bp, Artificial Sequence
  Oligonucleotide for detection of SNP TSC0008396
ttagagtaggatt

SEQ ID NO: 28818 - DNA, 13 bp, Artificial Sequence
  Oligonucleotide for detection of SNP TSC0008396
aatcctactctaa

SEQ ID NO: 28819 - DNA, 13 bp, Artificial Sequence
  Oligonucleotide for detection of SNP TSC0008396
aatttttttttga

SEQ ID NO: 28820 - DNA, 13 bp, Artificial Sequence
  Oligonucleotide for detection of SNP TSC0008396
tcaaaaaaaaatt

SEQ ID NO: 28821 - DNA, 13 bp, Artificial Sequence
  Oligonucleotide for detection of SNP TSC0008396
aattttgttttga

SEQ ID NO: 28822 - DNA, 13 bp, Artificial Sequence
  Oligonucleotide for detection of SNP TSC0008396
tcaaaacaaaatt

SEQ ID NO: 28823 - DNA, 13 bp, Artificial Sequence
  Oligonucleotide for detection of SNP TSC0008397
aaggttgattttt

SEQ ID NO: 28824 - DNA, 13 bp, Artificial Sequence
  Oligonucleotide for detection of SNP TSC0008397
aaaaatcaacctt

SEQ ID NO: 28825 - DNA, 13 bp, Artificial Sequence
  Oligonucleotide for detection of SNP TSC0008397
aaggttaattttt

SEQ ID NO: 28826 - DNA, 13 bp, Artificial Sequence
  Oligonucleotide for detection of SNP TSC0008397
aaaaattaacctt

SEQ ID NO: 28827 - DNA, 13 bp, Artificial Sequence
  Oligonucleotide for detection of SNP TSC0008399
gttttggagatgt

SEQ ID NO: 28828 - DNA, 13 bp, Artificial Sequence
  Oligonucleotide for detection of SNP TSC0008399
acatctccaaaac

SEQ ID NO: 28829 - DNA, 13 bp, Artificial Sequence
  Oligonucleotide for detection of SNP TSC0008399
gttttgaagatgt

SEQ ID NO: 28830 - DNA, 13 bp, Artificial Sequence
  Oligonucleotide for detection of SNP TSC0008399
acatcttcaaaac

SEQ ID NO: 28831 - DNA, 13 bp, Artificial Sequence
  Oligonucleotide for detection of SNP TSC0008406
gatagatggatgg

SEQ ID NO: 28832 - DNA, 13 bp, Artificial Sequence
  Oligonucleotide for detection of SNP TSC0008406
ccatccatctatc

SEQ ID NO: 28833 - DNA, 13 bp, Artificial Sequence
  Oligonucleotide for detection of SNP TSC0008406
gatagacggatgg

SEQ ID NO: 28834 - DNA, 13 bp, Artificial Sequence
  Oligonucleotide for detection of SNP TSC0008406
ccatccgtctatc

SEQ ID NO: 28835 - DNA, 13 bp, Artificial Sequence
  Oligonucleotide for detection of SNP TSC0008406
ttatttgtttaty

SEQ ID NO: 28836 - DNA, 13 bp, Artificial Sequence
  Oligonucleotide for detection of SNP TSC0008406
rataaacaaataa

SEQ ID NO: 28837 - DNA, 13 bp, Artificial Sequence
  Oligonucleotide for detection of SNP TSC0008406
ttatttatttaty

SEQ ID NO: 28838 - DNA, 13 bp, Artificial Sequence
  Oligonucleotide for detection of SNP TSC0008406
rataaataaataa

SEQ ID NO: 28839 - DNA, 13 bp, Artificial Sequence
  Oligonucleotide for detection of SNP TSC0008406
ttattcgtttaty

SEQ ID NO: 28840 - DNA, 13 bp, Artificial Sequence
  Oligonucleotide for detection of SNP TSC0008406
rataaacgaataa

SEQ ID NO: 28841 - DNA, 13 bp, Artificial Sequence
  Oligonucleotide for detection of SNP TSC0008408
aggaagattttgg

SEQ ID NO: 28842 - DNA, 13 bp, Artificial Sequence
  Oligonucleotide for detection of SNP TSC0008408
ccaaaatcttcct

SEQ ID NO: 28843 - DNA, 13 bp, Artificial Sequence
  Oligonucleotide for detection of SNP TSC0008408
aggaagtttttgg

SEQ ID NO: 28844 - DNA, 13 bp, Artificial Sequence
  Oligonucleotide for detection of SNP TSC0008408
ccaaaaacttcct

SEQ ID NO: 28845 - DNA, 13 bp, Artificial Sequence
  Oligonucleotide for detection of SNP TSC0008408
aggaagatttcgg

SEQ ID NO: 28846 - DNA, 13 bp, Artificial Sequence
  Oligonucleotide for detection of SNP TSC0008408
ccgaaatcttcct

SEQ ID NO: 28847 - DNA, 13 bp, Artificial Sequence
  Oligonucleotide for detection of SNP TSC0008408
aggaagttttcgg

SEQ ID NO: 28848 - DNA, 13 bp, Artificial Sequence
  Oligonucleotide for detection of SNP TSC0008408
ccgaaaacttcct

SEQ ID NO: 28849 - DNA, 13 bp, Artificial Sequence
  Oligonucleotide for detection of SNP TSC0008408
ttgaagttttttt

SEQ ID NO: 28850 - DNA, 13 bp, Artificial Sequence
  Oligonucleotide for detection of SNP TSC0008408
aaaaaaacttcaa

SEQ ID NO: 28851 - DNA, 13 bp, Artificial Sequence
  Oligonucleotide for detection of SNP TSC0008408
ttgaaggtttttt

SEQ ID NO: 28852 - DNA, 13 bp, Artificial Sequence
  Oligonucleotide for detection of SNP TSC0008408
aaaaaaccttcaa

SEQ ID NO: 28853 - DNA, 13 bp, Artificial Sequence
  Oligonucleotide for detection of SNP TSC0008408
tcgaagttttttt

SEQ ID NO: 28854 - DNA, 13 bp, Artificial Sequence
  Oligonucleotide for detection of SNP TSC0008408
aaaaaaacttcga

SEQ ID NO: 28855 - DNA, 13 bp, Artificial Sequence
  Oligonucleotide for detection of SNP TSC0008408
tcgaaggtttttt

SEQ ID NO: 28856 - DNA, 13 bp, Artificial Sequence
  Oligonucleotide for detection of SNP TSC0008408
aaaaaaccttcga

SEQ ID NO: 28857 - DNA, 13 bp, Artificial Sequence
  Oligonucleotide for detection of SNP TSC0008409
ggttttgtttttt

SEQ ID NO: 28858 - DNA, 13 bp, Artificial Sequence
  Oligonucleotide for detection of SNP TSC0008409
aaaaaacaaaacc

SEQ ID NO: 28859 - DNA, 13 bp, Artificial Sequence
  Oligonucleotide for detection of SNP TSC0008409
ggttttatttttt

SEQ ID NO: 28860 - DNA, 13 bp, Artificial Sequence
  Oligonucleotide for detection of SNP TSC0008409
aaaaaataaaacc

SEQ ID NO: 28861 - DNA, 13 bp, Artificial Sequence
  Oligonucleotide for detection of SNP TSC0008417
aagaggtggagaa

SEQ ID NO: 28862 - DNA, 13 bp, Artificial Sequence
  Oligonucleotide for detection of SNP TSC0008417
ttctccacctctt

SEQ ID NO: 28863 - DNA, 13 bp, Artificial Sequence
  Oligonucleotide for detection of SNP TSC0008417
aagaggcggagaa

SEQ ID NO: 28864 - DNA, 13 bp, Artificial Sequence
  Oligonucleotide for detection of SNP TSC0008417
ttctccgcctctt

SEQ ID NO: 28865 - DNA, 13 bp, Artificial Sequence
  Oligonucleotide for detection of SNP TSC0008419
ttgttttggtgtt

SEQ ID NO: 28866 - DNA, 13 bp, Artificial Sequence
  Oligonucleotide for detection of SNP TSC0008419
aacaccaaaacaa

SEQ ID NO: 28867 - DNA, 13 bp, Artificial Sequence
  Oligonucleotide for detection of SNP TSC0008419
ttgtttcggtgtt

SEQ ID NO: 28868 - DNA, 13 bp, Artificial Sequence
  Oligonucleotide for detection of SNP TSC0008419
aacaccgaaacaa

SEQ ID NO: 28869 - DNA, 13 bp, Artificial Sequence
  Oligonucleotide for detection of SNP TSC0008419
agtattggaatag

SEQ ID NO: 28870 - DNA, 13 bp, Artificial Sequence
  Oligonucleotide for detection of SNP TSC0008419
ctattccaatact

SEQ ID NO: 28871 - DNA, 13 bp, Artificial Sequence
  Oligonucleotide for detection of SNP TSC0008419
agtattagaatag

SEQ ID NO: 28872 - DNA, 13 bp, Artificial Sequence
  Oligonucleotide for detection of SNP TSC0008419
ctattctaatact

SEQ ID NO: 28873 - DNA, 13 bp, Artificial Sequence
  Oligonucleotide for detection of SNP TSC0008419
agtatcggaatag

SEQ ID NO: 28874 - DNA, 13 bp, Artificial Sequence
  Oligonucleotide for detection of SNP TSC0008419
ctattccgatact

SEQ ID NO: 28875 - DNA, 13 bp, Artificial Sequence
  Oligonucleotide for detection of SNP TSC0008420
aatatgggtttta

SEQ ID NO: 28876 - DNA, 13 bp, Artificial Sequence
  Oligonucleotide for detection of SNP TSC0008420
taaaacccatatt

SEQ ID NO: 28877 - DNA, 13 bp, Artificial Sequence
  Oligonucleotide for detection of SNP TSC0008420
aatatgtgtttta

SEQ ID NO: 28878 - DNA, 13 bp, Artificial Sequence
  Oligonucleotide for detection of SNP TSC0008420
taaaacacatatt

SEQ ID NO: 28879 - DNA, 13 bp, Artificial Sequence
  Oligonucleotide for detection of SNP TSC0008420
tgagatttatatt

SEQ ID NO: 28880 - DNA, 13 bp, Artificial Sequence
  Oligonucleotide for detection of SNP TSC0008420
aatataaatctca

SEQ ID NO: 28881 - DNA, 13 bp, Artificial Sequence
  Oligonucleotide for detection of SNP TSC0008420
tgagatatatatt

SEQ ID NO: 28882 - DNA, 13 bp, Artificial Sequence
  Oligonucleotide for detection of SNP TSC0008420
aatatatatctca

SEQ ID NO: 28883 - DNA, 13 bp, Artificial Sequence
  Oligonucleotide for detection of SNP TSC0008433
tagaaaattattg

SEQ ID NO: 28884 - DNA, 13 bp, Artificial Sequence
  Oligonucleotide for detection of SNP TSC0008433
caataattttcta

SEQ ID NO: 28885 - DNA, 13 bp, Artificial Sequence
  Oligonucleotide for detection of SNP TSC0008433
tagaaatttattg

SEQ ID NO: 28886 - DNA, 13 bp, Artificial Sequence
  Oligonucleotide for detection of SNP TSC0008433
caataaatttcta

SEQ ID NO: 28887 - DNA, 13 bp, Artificial Sequence
  Oligonucleotide for detection of SNP TSC0008433
taataatttttta

SEQ ID NO: 28888 - DNA, 13 bp, Artificial Sequence
  Oligonucleotide for detection of SNP TSC0008433
taaaaaattatta

SEQ ID NO: 28889 - DNA, 13 bp, Artificial Sequence
  Oligonucleotide for detection of SNP TSC0008433
taataagttttta

SEQ ID NO: 28890 - DNA, 13 bp, Artificial Sequence
  Oligonucleotide for detection of SNP TSC0008433
taaaaacttatta

SEQ ID NO: 28891 - DNA, 13 bp, Artificial Sequence
  Oligonucleotide for detection of SNP TSC0008439
aatagggttatta

SEQ ID NO: 28892 - DNA, 13 bp, Artificial Sequence
  Oligonucleotide for detection of SNP TSC0008439
taataaccctatt

SEQ ID NO: 28893 - DNA, 13 bp, Artificial Sequence
  Oligonucleotide for detection of SNP TSC0008439
aataggattatta

SEQ ID NO: 28894 - DNA, 13 bp, Artificial Sequence
  Oligonucleotide for detection of SNP TSC0008439
taataatcctatt

SEQ ID NO: 28895 - DNA, 13 bp, Artificial Sequence
  Oligonucleotide for detection of SNP TSC0008440
ataatagaggatt

SEQ ID NO: 28896 - DNA, 13 bp, Artificial Sequence
  Oligonucleotide for detection of SNP TSC0008440
aatcctctattat

SEQ ID NO: 28897 - DNA, 13 bp, Artificial Sequence
  Oligonucleotide for detection of SNP TSC0008440
ataataaaggatt

SEQ ID NO: 28898 - DNA, 13 bp, Artificial Sequence
  Oligonucleotide for detection of SNP TSC0008440
aatcctttattat

SEQ ID NO: 28899 - DNA, 13 bp, Artificial Sequence
  Oligonucleotide for detection of SNP TSC0008441
ttttatattttaa

SEQ ID NO: 28900 - DNA, 13 bp, Artificial Sequence
  Oligonucleotide for detection of SNP TSC0008441
ttaaaatataaaa

SEQ ID NO: 28901 - DNA, 13 bp, Artificial Sequence
  Oligonucleotide for detection of SNP TSC0008441
ttttatgttttaa

SEQ ID NO: 28902 - DNA, 13 bp, Artificial Sequence
  Oligonucleotide for detection of SNP TSC0008441
ttaaaacataaaa

SEQ ID NO: 28903 - DNA, 13 bp, Artificial Sequence
  Oligonucleotide for detection of SNP TSC0008447
agttttaaggtaa

SEQ ID NO: 28904 - DNA, 13 bp, Artificial Sequence
  Oligonucleotide for detection of SNP TSC0008447
ttaccttaaaact

SEQ ID NO: 28905 - DNA, 13 bp, Artificial Sequence
  Oligonucleotide for detection of SNP TSC0008447
agttttgaggtaa

SEQ ID NO: 28906 - DNA, 13 bp, Artificial Sequence
  Oligonucleotide for detection of SNP TSC0008447
ttacctcaaaact

SEQ ID NO: 28907 - DNA, 13 bp, Artificial Sequence
  Oligonucleotide for detection of SNP TSC0008456
gtttttgtattat

SEQ ID NO: 28908 - DNA, 13 bp, Artificial Sequence
  Oligonucleotide for detection of SNP TSC0008456
ataatacaaaaac

SEQ ID NO: 28909 - DNA, 13 bp, Artificial Sequence
  Oligonucleotide for detection of SNP TSC0008457
tatttattgttgt

SEQ ID NO: 28910 - DNA, 13 bp, Artificial Sequence
  Oligonucleotide for detection of SNP TSC0008457
acaacaataaata

SEQ ID NO: 28911 - DNA, 13 bp, Artificial Sequence
  Oligonucleotide for detection of SNP TSC0008457
tatttagtgttgt

SEQ ID NO: 28912 - DNA, 13 bp, Artificial Sequence
  Oligonucleotide for detection of SNP TSC0008457
acaacactaaata

SEQ ID NO: 28913 - DNA, 13 bp, Artificial Sequence
  Oligonucleotide for detection of SNP TSC0008457
ataatagtaaatg

SEQ ID NO: 28914 - DNA, 13 bp, Artificial Sequence
  Oligonucleotide for detection of SNP TSC0008457
catttactattat

SEQ ID NO: 28915 - DNA, 13 bp, Artificial Sequence
  Oligonucleotide for detection of SNP TSC0008457
ataatattaaatg

SEQ ID NO: 28916 - DNA, 13 bp, Artificial Sequence
  Oligonucleotide for detection of SNP TSC0008457
catttaatattat

SEQ ID NO: 28917 - DNA, 13 bp, Artificial Sequence
  Oligonucleotide for detection of SNP TSC0008458
gtttttgaaattt

SEQ ID NO: 28918 - DNA, 13 bp, Artificial Sequence
  Oligonucleotide for detection of SNP TSC0008458
aaatttcaaaaac

SEQ ID NO: 28919 - DNA, 13 bp, Artificial Sequence
  Oligonucleotide for detection of SNP TSC0008458
gtttttaaaattt

SEQ ID NO: 28920 - DNA, 13 bp, Artificial Sequence
  Oligonucleotide for detection of SNP TSC0008458
aaattttaaaaac

SEQ ID NO: 28921 - DNA, 13 bp, Artificial Sequence
  Oligonucleotide for detection of SNP TSC0008459
agttgaattgtga

SEQ ID NO: 28922 - DNA, 13 bp, Artificial Sequence
  Oligonucleotide for detection of SNP TSC0008459
tcacaattcaact

SEQ ID NO: 28923 - DNA, 13 bp, Artificial Sequence
  Oligonucleotide for detection of SNP TSC0008459
agttgatttgtga

SEQ ID NO: 28924 - DNA, 13 bp, Artificial Sequence
  Oligonucleotide for detection of SNP TSC0008459
tcacaaatcaact

SEQ ID NO: 28925 - DNA, 13 bp, Artificial Sequence
  Oligonucleotide for detection of SNP TSC0008459
ttataatttaatt

SEQ ID NO: 28926 - DNA, 13 bp, Artificial Sequence
  Oligonucleotide for detection of SNP TSC0008459
aattaaattataa

SEQ ID NO: 28927 - DNA, 13 bp, Artificial Sequence
  Oligonucleotide for detection of SNP TSC0008459
ttataaattaatt

SEQ ID NO: 28928 - DNA, 13 bp, Artificial Sequence
  Oligonucleotide for detection of SNP TSC0008459
aattaatttataa

SEQ ID NO: 28929 - DNA, 13 bp, Artificial Sequence
  Oligonucleotide for detection of SNP TSC0008465
taaattgagatat

SEQ ID NO: 28930 - DNA, 13 bp, Artificial Sequence
  Oligonucleotide for detection of SNP TSC0008465
atatctcaattta

SEQ ID NO: 28931 - DNA, 13 bp, Artificial Sequence
  Oligonucleotide for detection of SNP TSC0008465
taaattaagatat

SEQ ID NO: 28932 - DNA, 13 bp, Artificial Sequence
  Oligonucleotide for detection of SNP TSC0008465
atatcttaattta

SEQ ID NO: 28933 - DNA, 13 bp, Artificial Sequence
  Oligonucleotide for detection of SNP TSC0008473
ttaggggagagaa

SEQ ID NO: 28934 - DNA, 13 bp, Artificial Sequence
  Oligonucleotide for detection of SNP TSC0008473
ttctctcccctaa

SEQ ID NO: 28935 - DNA, 13 bp, Artificial Sequence
  Oligonucleotide for detection of SNP TSC0008473
ttagggtagagaa

SEQ ID NO: 28936 - DNA, 13 bp, Artificial Sequence
  Oligonucleotide for detection of SNP TSC0008473
ttctctaccctaa

SEQ ID NO: 28937 - DNA, 13 bp, Artificial Sequence
  Oligonucleotide for detection of SNP TSC0008473
tttttttttttag

SEQ ID NO: 28938 - DNA, 13 bp, Artificial Sequence
  Oligonucleotide for detection of SNP TSC0008473
ctaaaaaaaaaaa

SEQ ID NO: 28939 - DNA, 13 bp, Artificial Sequence
  Oligonucleotide for detection of SNP TSC0008473
ttttttattttag

SEQ ID NO: 28940 - DNA, 13 bp, Artificial Sequence
  Oligonucleotide for detection of SNP TSC0008473
ctaaaataaaaaa

SEQ ID NO: 28941 - DNA, 13 bp, Artificial Sequence
  Oligonucleotide for detection of SNP TSC0008474
gtagagagatttg

SEQ ID NO: 28942 - DNA, 13 bp, Artificial Sequence
  Oligonucleotide for detection of SNP TSC0008474
caaatctctctac

SEQ ID NO: 28943 - DNA, 13 bp, Artificial Sequence
  Oligonucleotide for detection of SNP TSC0008474
gtagagggatttg

SEQ ID NO: 28944 - DNA, 13 bp, Artificial Sequence
  Oligonucleotide for detection of SNP TSC0008474
caaatccctctac

SEQ ID NO: 28945 - DNA, 13 bp, Artificial Sequence
  Oligonucleotide for detection of SNP TSC0008477
tttttagaaaata

SEQ ID NO: 28946 - DNA, 13 bp, Artificial Sequence
  Oligonucleotide for detection of SNP TSC0008477
tattttctaaaaa

SEQ ID NO: 28947 - DNA, 13 bp, Artificial Sequence
  Oligonucleotide for detection of SNP TSC0008477
tttttaaaaaata

SEQ ID NO: 28948 - DNA, 13 bp, Artificial Sequence
  Oligonucleotide for detection of SNP TSC0008477
tattttttaaaaa

SEQ ID NO: 28949 - DNA, 13 bp, Artificial Sequence
  Oligonucleotide for detection of SNP TSC0008479
tgtgtttggttgg

SEQ ID NO: 28950 - DNA, 13 bp, Artificial Sequence
  Oligonucleotide for detection of SNP TSC0008479
ccaaccaaacaca

SEQ ID NO: 28951 - DNA, 13 bp, Artificial Sequence
  Oligonucleotide for detection of SNP TSC0008479
cgtgtttggttgg

SEQ ID NO: 28952 - DNA, 13 bp, Artificial Sequence
  Oligonucleotide for detection of SNP TSC0008479
ccaaccaaacacg

SEQ ID NO: 28953 - DNA, 13 bp, Artificial Sequence
  Oligonucleotide for detection of SNP TSC0008479
tgcgtttggttgg

SEQ ID NO: 28954 - DNA, 13 bp, Artificial Sequence
  Oligonucleotide for detection of SNP TSC0008479
ccaaccaaacgca

SEQ ID NO: 28955 - DNA, 13 bp, Artificial Sequence
  Oligonucleotide for detection of SNP TSC0008479
tgtgttcggttgg

SEQ ID NO: 28956 - DNA, 13 bp, Artificial Sequence
  Oligonucleotide for detection of SNP TSC0008479
ccaaccgaacaca

SEQ ID NO: 28957 - DNA, 13 bp, Artificial Sequence
  Oligonucleotide for detection of SNP TSC0008479
tgtgtttggtcgg

SEQ ID NO: 28958 - DNA, 13 bp, Artificial Sequence
  Oligonucleotide for detection of SNP TSC0008479
ccgaccaaacaca

SEQ ID NO: 28959 - DNA, 13 bp, Artificial Sequence
  Oligonucleotide for detection of SNP TSC0008479
cgcgtttggttgg

SEQ ID NO: 28960 - DNA, 13 bp, Artificial Sequence
  Oligonucleotide for detection of SNP TSC0008479
ccaaccaaacgcg

SEQ ID NO: 28961 - DNA, 13 bp, Artificial Sequence
  Oligonucleotide for detection of SNP TSC0008479
cgtgtttggtcgg

SEQ ID NO: 28962 - DNA, 13 bp, Artificial Sequence
  Oligonucleotide for detection of SNP TSC0008479
ccgaccaaacacg

SEQ ID NO: 28963 - DNA, 13 bp, Artificial Sequence
  Oligonucleotide for detection of SNP TSC0008479
cgtgttcggttgg

SEQ ID NO: 28964 - DNA, 13 bp, Artificial Sequence
  Oligonucleotide for detection of SNP TSC0008479
ccaaccgaacacg

SEQ ID NO: 28965 - DNA, 13 bp, Artificial Sequence
  Oligonucleotide for detection of SNP TSC0008479
tgcgtttggtcgg

SEQ ID NO: 28966 - DNA, 13 bp, Artificial Sequence
  Oligonucleotide for detection of SNP TSC0008479
ccgaccaaacgca

SEQ ID NO: 28967 - DNA, 13 bp, Artificial Sequence
  Oligonucleotide for detection of SNP TSC0008479
cgcgtttggtcgg

SEQ ID NO: 28968 - DNA, 13 bp, Artificial Sequence
  Oligonucleotide for detection of SNP TSC0008479
ccgaccaaacgcg

SEQ ID NO: 28969 - DNA, 13 bp, Artificial Sequence
  Oligonucleotide for detection of SNP TSC0008479
tgcgttcggttgg

SEQ ID NO: 28970 - DNA, 13 bp, Artificial Sequence
  Oligonucleotide for detection of SNP TSC0008479
ccaaccgaacgca

SEQ ID NO: 28971 - DNA, 13 bp, Artificial Sequence
  Oligonucleotide for detection of SNP TSC0008479
tgtgttcggtcgg

SEQ ID NO: 28972 - DNA, 13 bp, Artificial Sequence
  Oligonucleotide for detection of SNP TSC0008479
ccgaccgaacaca

SEQ ID NO: 28973 - DNA, 13 bp, Artificial Sequence
  Oligonucleotide for detection of SNP TSC0008479
cgcgttcggttgg

SEQ ID NO: 28974 - DNA, 13 bp, Artificial Sequence
  Oligonucleotide for detection of SNP TSC0008479
ccaaccgaacgcg

SEQ ID NO: 28975 - DNA, 13 bp, Artificial Sequence
  Oligonucleotide for detection of SNP TSC0008479
cgtgttcggtcgg

SEQ ID NO: 28976 - DNA, 13 bp, Artificial Sequence
  Oligonucleotide for detection of SNP TSC0008479
ccgaccgaacacg

SEQ ID NO: 28977 - DNA, 13 bp, Artificial Sequence
  Oligonucleotide for detection of SNP TSC0008479
tgcgttcggtcgg

SEQ ID NO: 28978 - DNA, 13 bp, Artificial Sequence
  Oligonucleotide for detection of SNP TSC0008479
ccgaccgaacgca

SEQ ID NO: 28979 - DNA, 13 bp, Artificial Sequence
  Oligonucleotide for detection of SNP TSC0008479
cgcgttcggtcgg

SEQ ID NO: 28980 - DNA, 13 bp, Artificial Sequence
  Oligonucleotide for detection of SNP TSC0008479
ccgaccgaacgcg

SEQ ID NO: 28981 - DNA, 13 bp, Artificial Sequence
  Oligonucleotide for detection of SNP TSC0008479
ttggttgggtgtg

SEQ ID NO: 28982 - DNA, 13 bp, Artificial Sequence
  Oligonucleotide for detection of SNP TSC0008479
cacacccaaccaa

SEQ ID NO: 28983 - DNA, 13 bp, Artificial Sequence
  Oligonucleotide for detection of SNP TSC0008479
ttggttaggtgtg

SEQ ID NO: 28984 - DNA, 13 bp, Artificial Sequence
  Oligonucleotide for detection of SNP TSC0008479
cacacctaaccaa

SEQ ID NO: 28985 - DNA, 13 bp, Artificial Sequence
  Oligonucleotide for detection of SNP TSC0008479
tcggttgggtgtg

SEQ ID NO: 28986 - DNA, 13 bp, Artificial Sequence
  Oligonucleotide for detection of SNP TSC0008479
cacacccaaccga

SEQ ID NO: 28987 - DNA, 13 bp, Artificial Sequence
  Oligonucleotide for detection of SNP TSC0008479
tcggttaggtgtg

SEQ ID NO: 28988 - DNA, 13 bp, Artificial Sequence
  Oligonucleotide for detection of SNP TSC0008479
cacacctaaccga

SEQ ID NO: 28989 - DNA, 13 bp, Artificial Sequence
  Oligonucleotide for detection of SNP TSC0008479
ttggtcgggtgtg

SEQ ID NO: 28990 - DNA, 13 bp, Artificial Sequence
  Oligonucleotide for detection of SNP TSC0008479
cacacccgaccaa

SEQ ID NO: 28991 - DNA, 13 bp, Artificial Sequence
  Oligonucleotide for detection of SNP TSC0008479
ttggttaggcgtg

SEQ ID NO: 28992 - DNA, 13 bp, Artificial Sequence
  Oligonucleotide for detection of SNP TSC0008479
cacgcctaaccaa

SEQ ID NO: 28993 - DNA, 13 bp, Artificial Sequence
  Oligonucleotide for detection of SNP TSC0008479
ttggttgggcgtg

SEQ ID NO: 28994 - DNA, 13 bp, Artificial Sequence
  Oligonucleotide for detection of SNP TSC0008479
cacgcccaaccaa

SEQ ID NO: 28995 - DNA, 13 bp, Artificial Sequence
  Oligonucleotide for detection of SNP TSC0008479
ttggttaggtgcg

SEQ ID NO: 28996 - DNA, 13 bp, Artificial Sequence
  Oligonucleotide for detection of SNP TSC0008479
cgcacctaaccaa

SEQ ID NO: 28997 - DNA, 13 bp, Artificial Sequence
  Oligonucleotide for detection of SNP TSC0008479
ttggttgggtgcg

SEQ ID NO: 28998 - DNA, 13 bp, Artificial Sequence
  Oligonucleotide for detection of SNP TSC0008479
cgcacccaaccaa

SEQ ID NO: 28999 - DNA, 13 bp, Artificial Sequence
  Oligonucleotide for detection of SNP TSC0008479
tcggttaggcgtg

SEQ ID NO: 29000 - DNA, 13 bp, Artificial Sequence
  Oligonucleotide for detection of SNP TSC0008479
cacgcctaaccga

SEQ ID NO: 29001 - DNA, 13 bp, Artificial Sequence
  Oligonucleotide for detection of SNP TSC0008479
tcggtcgggtgtg

SEQ ID NO: 29002 - DNA, 13 bp, Artificial Sequence
  Oligonucleotide for detection of SNP TSC0008479
cacacccgaccga

SEQ ID NO: 29003 - DNA, 13 bp, Artificial Sequence
  Oligonucleotide for detection of SNP TSC0008479
tcggttaggtgcg

SEQ ID NO: 29004 - DNA, 13 bp, Artificial Sequence
  Oligonucleotide for detection of SNP TSC0008479
cgcacctaaccga

SEQ ID NO: 29005 - DNA, 13 bp, Artificial Sequence
  Oligonucleotide for detection of SNP TSC0008479
tcggttgggcgtg

SEQ ID NO: 29006 - DNA, 13 bp, Artificial Sequence
  Oligonucleotide for detection of SNP TSC0008479
cacgcccaaccga

SEQ ID NO: 29007 - DNA, 13 bp, Artificial Sequence
  Oligonucleotide for detection of SNP TSC0008479
ttggttaggcgcg

SEQ ID NO: 29008 - DNA, 13 bp, Artificial Sequence
  Oligonucleotide for detection of SNP TSC0008479
cgcgcctaaccaa

SEQ ID NO: 29009 - DNA, 13 bp, Artificial Sequence
  Oligonucleotide for detection of SNP TSC0008479
tcggttgggtgcg

SEQ ID NO: 29010 - DNA, 13 bp, Artificial Sequence
  Oligonucleotide for detection of SNP TSC0008479
cgcacccaaccga

SEQ ID NO: 29011 - DNA, 13 bp, Artificial Sequence
  Oligonucleotide for detection of SNP TSC0008479
tcggttaggcgcg

SEQ ID NO: 29012 - DNA, 13 bp, Artificial Sequence
  Oligonucleotide for detection of SNP TSC0008479
cgcgcctaaccga

SEQ ID NO: 29013 - DNA, 13 bp, Artificial Sequence
  Oligonucleotide for detection of SNP TSC0008479
ttggtcgggcgtg

SEQ ID NO: 29014 - DNA, 13 bp, Artificial Sequence
  Oligonucleotide for detection of SNP TSC0008479
cacgcccgaccaa

SEQ ID NO: 29015 - DNA, 13 bp, Artificial Sequence
  Oligonucleotide for detection of SNP TSC0008479
ttggtcgggtgcg

SEQ ID NO: 29016 - DNA, 13 bp, Artificial Sequence
  Oligonucleotide for detection of SNP TSC0008479
cgcacccgaccaa

SEQ ID NO: 29017 - DNA, 13 bp, Artificial Sequence
  Oligonucleotide for detection of SNP TSC0008479
ttggttgggcgcg

SEQ ID NO: 29018 - DNA, 13 bp, Artificial Sequence
  Oligonucleotide for detection of SNP TSC0008479
cgcgcccaaccaa

SEQ ID NO: 29019 - DNA, 13 bp, Artificial Sequence
  Oligonucleotide for detection of SNP TSC0008479
tcggtcgggcgtg

SEQ ID NO: 29020 - DNA, 13 bp, Artificial Sequence
  Oligonucleotide for detection of SNP TSC0008479
cacgcccgaccga

SEQ ID NO: 29021 - DNA, 13 bp, Artificial Sequence
  Oligonucleotide for detection of SNP TSC0008479
tcggtcgggtgcg

SEQ ID NO: 29022 - DNA, 13 bp, Artificial Sequence
  Oligonucleotide for detection of SNP TSC0008479
cgcacccgaccga

SEQ ID NO: 29023 - DNA, 13 bp, Artificial Sequence
  Oligonucleotide for detection of SNP TSC0008479
tcggttgggcgcg

SEQ ID NO: 29024 - DNA, 13 bp, Artificial Sequence
  Oligonucleotide for detection of SNP TSC0008479
cgcgcccaaccga

SEQ ID NO: 29025 - DNA, 13 bp, Artificial Sequence
  Oligonucleotide for detection of SNP TSC0008479
ttggtcgggcgcg

SEQ ID NO: 29026 - DNA, 13 bp, Artificial Sequence
  Oligonucleotide for detection of SNP TSC0008479
cgcgcccgaccaa

SEQ ID NO: 29027 - DNA, 13 bp, Artificial Sequence
  Oligonucleotide for detection of SNP TSC0008479
tcggtcgggcgcg

SEQ ID NO: 29028 - DNA, 13 bp, Artificial Sequence
  Oligonucleotide for detection of SNP TSC0008479
cgcgcccgaccga

SEQ ID NO: 29029 - DNA, 13 bp, Artificial Sequence
  Oligonucleotide for detection of SNP TSC0008480
ttatttattgaty

SEQ ID NO: 29030 - DNA, 13 bp, Artificial Sequence
  Oligonucleotide for detection of SNP TSC0008480
ratcaataaataa

SEQ ID NO: 29031 - DNA, 13 bp, Artificial Sequence
  Oligonucleotide for detection of SNP TSC0008480
ttattttttgaty

SEQ ID NO: 29032 - DNA, 13 bp, Artificial Sequence
  Oligonucleotide for detection of SNP TSC0008480
ratcaaaaaataa

SEQ ID NO: 29033 - DNA, 13 bp, Artificial Sequence
  Oligonucleotide for detection of SNP TSC0008480
ggttagtagatgg

SEQ ID NO: 29034 - DNA, 13 bp, Artificial Sequence
  Oligonucleotide for detection of SNP TSC0008480
ccatctactaacc

SEQ ID NO: 29035 - DNA, 13 bp, Artificial Sequence
  Oligonucleotide for detection of SNP TSC0008480
ggttaggagatgg

SEQ ID NO: 29036 - DNA, 13 bp, Artificial Sequence
  Oligonucleotide for detection of SNP TSC0008480
ccatctcctaacc

SEQ ID NO: 29037 - DNA, 13 bp, Artificial Sequence
  Oligonucleotide for detection of SNP TSC0008490
ttgtgtagaagtt

SEQ ID NO: 29038 - DNA, 13 bp, Artificial Sequence
  Oligonucleotide for detection of SNP TSC0008490
aacttctacacaa

SEQ ID NO: 29039 - DNA, 13 bp, Artificial Sequence
  Oligonucleotide for detection of SNP TSC0008490
ttgtgtggaagtt

SEQ ID NO: 29040 - DNA, 13 bp, Artificial Sequence
  Oligonucleotide for detection of SNP TSC0008490
aacttccacacaa

SEQ ID NO: 29041 - DNA, 13 bp, Artificial Sequence
  Oligonucleotide for detection of SNP TSC0008490
ttgtgcggaagtt

SEQ ID NO: 29042 - DNA, 13 bp, Artificial Sequence
  Oligonucleotide for detection of SNP TSC0008490
aacttccgcacaa

SEQ ID NO: 29043 - DNA, 13 bp, Artificial Sequence
  Oligonucleotide for detection of SNP TSC0008490
aatttttgtatag

SEQ ID NO: 29044 - DNA, 13 bp, Artificial Sequence
  Oligonucleotide for detection of SNP TSC0008490
ctatacaaaaatt

SEQ ID NO: 29045 - DNA, 13 bp, Artificial Sequence
  Oligonucleotide for detection of SNP TSC0008490
aattttcgtatag

SEQ ID NO: 29046 - DNA, 13 bp, Artificial Sequence
  Oligonucleotide for detection of SNP TSC0008490
ctatacgaaaatt

SEQ ID NO: 29047 - DNA, 13 bp, Artificial Sequence
  Oligonucleotide for detection of SNP TSC0008491
gtttggtggggta

SEQ ID NO: 29048 - DNA, 13 bp, Artificial Sequence
  Oligonucleotide for detection of SNP TSC0008491
taccccaccaaac

SEQ ID NO: 29049 - DNA, 13 bp, Artificial Sequence
  Oligonucleotide for detection of SNP TSC0008491
gtttggcggggta

SEQ ID NO: 29050 - DNA, 13 bp, Artificial Sequence
  Oligonucleotide for detection of SNP TSC0008491
taccccgccaaac

SEQ ID NO: 29051 - DNA, 13 bp, Artificial Sequence
  Oligonucleotide for detection of SNP TSC0008491
tgttttgttaaay

SEQ ID NO: 29052 - DNA, 13 bp, Artificial Sequence
  Oligonucleotide for detection of SNP TSC0008491
rtttaacaaaaca

SEQ ID NO: 29053 - DNA, 13 bp, Artificial Sequence
  Oligonucleotide for detection of SNP TSC0008491
tgttttattaaay

SEQ ID NO: 29054 - DNA, 13 bp, Artificial Sequence
  Oligonucleotide for detection of SNP TSC0008491
rtttaataaaaca

SEQ ID NO: 29055 - DNA, 13 bp, Artificial Sequence
  Oligonucleotide for detection of SNP TSC0008491
tgtttcgttaaay

SEQ ID NO: 29056 - DNA, 13 bp, Artificial Sequence
  Oligonucleotide for detection of SNP TSC0008491
rtttaacgaaaca

SEQ ID NO: 29057 - DNA, 13 bp, Artificial Sequence
  Oligonucleotide for detection of SNP TSC0008493
agaaaatgtaaay

SEQ ID NO: 29058 - DNA, 13 bp, Artificial Sequence
  Oligonucleotide for detection of SNP TSC0008493
rtttacattttct

SEQ ID NO: 29059 - DNA, 13 bp, Artificial Sequence
  Oligonucleotide for detection of SNP TSC0008493
agaaaacgtaaay

SEQ ID NO: 29060 - DNA, 13 bp, Artificial Sequence
  Oligonucleotide for detection of SNP TSC0008493
rtttacgttttct

SEQ ID NO: 29061 - DNA, 13 bp, Artificial Sequence
  Oligonucleotide for detection of SNP TSC0008493
gtttgtgtttttt

SEQ ID NO: 29062 - DNA, 13 bp, Artificial Sequence
  Oligonucleotide for detection of SNP TSC0008493
aaaaaacacaaac

SEQ ID NO: 29063 - DNA, 13 bp, Artificial Sequence
  Oligonucleotide for detection of SNP TSC0008493
gtttgtatttttt

SEQ ID NO: 29064 - DNA, 13 bp, Artificial Sequence
  Oligonucleotide for detection of SNP TSC0008493
aaaaaatacaaac

SEQ ID NO: 29065 - DNA, 13 bp, Artificial Sequence
  Oligonucleotide for detection of SNP TSC0008493
gtttgcgtttttt

SEQ ID NO: 29066 - DNA, 13 bp, Artificial Sequence
  Oligonucleotide for detection of SNP TSC0008493
aaaaaacgcaaac

SEQ ID NO: 29067 - DNA, 13 bp, Artificial Sequence
  Oligonucleotide for detection of SNP TSC0008500
gaatttattttgy

SEQ ID NO: 29068 - DNA, 13 bp, Artificial Sequence
  Oligonucleotide for detection of SNP TSC0008500
rcaaaataaattc

SEQ ID NO: 29069 - DNA, 13 bp, Artificial Sequence
  Oligonucleotide for detection of SNP TSC0008500
gaattttttttgy

SEQ ID NO: 29070 - DNA, 13 bp, Artificial Sequence
  Oligonucleotide for detection of SNP TSC0008500
rcaaaaaaaattc

SEQ ID NO: 29071 - DNA, 13 bp, Artificial Sequence
  Oligonucleotide for detection of SNP TSC0008500
gtaagatagatty

SEQ ID NO: 29072 - DNA, 13 bp, Artificial Sequence
  Oligonucleotide for detection of SNP TSC0008500
raatctatcttac

SEQ ID NO: 29073 - DNA, 13 bp, Artificial Sequence
  Oligonucleotide for detection of SNP TSC0008500
gtaagagagatty

SEQ ID NO: 29074 - DNA, 13 bp, Artificial Sequence
  Oligonucleotide for detection of SNP TSC0008500
raatctctcttac

SEQ ID NO: 29075 - DNA, 13 bp, Artificial Sequence
  Oligonucleotide for detection of SNP TSC0008502
ttttaagagaatt

SEQ ID NO: 29076 - DNA, 13 bp, Artificial Sequence
  Oligonucleotide for detection of SNP TSC0008502
aattctcttaaaa

SEQ ID NO: 29077 - DNA, 13 bp, Artificial Sequence
  Oligonucleotide for detection of SNP TSC0008502
ttttaaaagaatt

SEQ ID NO: 29078 - DNA, 13 bp, Artificial Sequence
  Oligonucleotide for detection of SNP TSC0008502
aattcttttaaaa

SEQ ID NO: 29079 - DNA, 13 bp, Artificial Sequence
  Oligonucleotide for detection of SNP TSC0008504
ggaggtaggtggg

SEQ ID NO: 29080 - DNA, 13 bp, Artificial Sequence
  Oligonucleotide for detection of SNP TSC0008504
cccacctacctcc

SEQ ID NO: 29081 - DNA, 13 bp, Artificial Sequence
  Oligonucleotide for detection of SNP TSC0008504
ggaggtgggtggg

SEQ ID NO: 29082 - DNA, 13 bp, Artificial Sequence
  Oligonucleotide for detection of SNP TSC0008504
cccacccacctcc

SEQ ID NO: 29083 - DNA, 13 bp, Artificial Sequence
  Oligonucleotide for detection of SNP TSC0008504
ggaggcgggtggg

SEQ ID NO: 29084 - DNA, 13 bp, Artificial Sequence
  Oligonucleotide for detection of SNP TSC0008504
cccacccgcctcc

SEQ ID NO: 29085 - DNA, 13 bp, Artificial Sequence
  Oligonucleotide for detection of SNP TSC0008504
tttatttgtttty

SEQ ID NO: 29086 - DNA, 13 bp, Artificial Sequence
  Oligonucleotide for detection of SNP TSC0008504
raaaacaaataaa

SEQ ID NO: 29087 - DNA, 13 bp, Artificial Sequence
  Oligonucleotide for detection of SNP TSC0008504
tttattcgtttty

SEQ ID NO: 29088 - DNA, 13 bp, Artificial Sequence
  Oligonucleotide for detection of SNP TSC0008504
raaaacgaataaa

SEQ ID NO: 29089 - DNA, 13 bp, Artificial Sequence
  Oligonucleotide for detection of SNP TSC0008507
ataaaggattaty

SEQ ID NO: 29090 - DNA, 13 bp, Artificial Sequence
  Oligonucleotide for detection of SNP TSC0008507
rataatcctttat

SEQ ID NO: 29091 - DNA, 13 bp, Artificial Sequence
  Oligonucleotide for detection of SNP TSC0008507
ataaagaattaty

SEQ ID NO: 29092 - DNA, 13 bp, Artificial Sequence
  Oligonucleotide for detection of SNP TSC0008507
rataattctttat

SEQ ID NO: 29093 - DNA, 13 bp, Artificial Sequence
  Oligonucleotide for detection of SNP TSC0008508
tttgttgttgttt

SEQ ID NO: 29094 - DNA, 13 bp, Artificial Sequence
  Oligonucleotide for detection of SNP TSC0008508
aaacaacaacaaa

SEQ ID NO: 29095 - DNA, 13 bp, Artificial Sequence
  Oligonucleotide for detection of SNP TSC0008508
tttgttattgttt

SEQ ID NO: 29096 - DNA, 13 bp, Artificial Sequence
  Oligonucleotide for detection of SNP TSC0008508
aaacaataacaaa

SEQ ID NO: 29097 - DNA, 13 bp, Artificial Sequence
  Oligonucleotide for detection of SNP TSC0008509
ttttaggatttay

SEQ ID NO: 29098 - DNA, 13 bp, Artificial Sequence
  Oligonucleotide for detection of SNP TSC0008509
rtaaatcctaaaa

SEQ ID NO: 29099 - DNA, 13 bp, Artificial Sequence
  Oligonucleotide for detection of SNP TSC0008509
ttttagaatttay

SEQ ID NO: 29100 - DNA, 13 bp, Artificial Sequence
  Oligonucleotide for detection of SNP TSC0008509
rtaaattctaaaa

SEQ ID NO: 29101 - DNA, 13 bp, Artificial Sequence
  Oligonucleotide for detection of SNP TSC0008510
attttaattattg

SEQ ID NO: 29102 - DNA, 13 bp, Artificial Sequence
  Oligonucleotide for detection of SNP TSC0008510
caataattaaaat

SEQ ID NO: 29103 - DNA, 13 bp, Artificial Sequence
  Oligonucleotide for detection of SNP TSC0008510
attttagttattg

SEQ ID NO: 29104 - DNA, 13 bp, Artificial Sequence
  Oligonucleotide for detection of SNP TSC0008510
caataactaaaat

SEQ ID NO: 29105 - DNA, 13 bp, Artificial Sequence
  Oligonucleotide for detection of SNP TSC0008510
attttaattatcg

SEQ ID NO: 29106 - DNA, 13 bp, Artificial Sequence
  Oligonucleotide for detection of SNP TSC0008510
cgataattaaaat

SEQ ID NO: 29107 - DNA, 13 bp, Artificial Sequence
  Oligonucleotide for detection of SNP TSC0008510
attttagttatcg

SEQ ID NO: 29108 - DNA, 13 bp, Artificial Sequence
  Oligonucleotide for detection of SNP TSC0008510
cgataactaaaat

SEQ ID NO: 29109 - DNA, 13 bp, Artificial Sequence
  Oligonucleotide for detection of SNP TSC0008511
aaaaagattaaag

SEQ ID NO: 29110 - DNA, 13 bp, Artificial Sequence
  Oligonucleotide for detection of SNP TSC0008511
ctttaatcttttt

SEQ ID NO: 29111 - DNA, 13 bp, Artificial Sequence
  Oligonucleotide for detection of SNP TSC0008511
aaaaaggttaaag

SEQ ID NO: 29112 - DNA, 13 bp, Artificial Sequence
  Oligonucleotide for detection of SNP TSC0008511
ctttaaccttttt

SEQ ID NO: 29113 - DNA, 13 bp, Artificial Sequence
  Oligonucleotide for detection of SNP TSC0008512
ttaggggttggta

SEQ ID NO: 29114 - DNA, 13 bp, Artificial Sequence
  Oligonucleotide for detection of SNP TSC0008512
taccaacccctaa

SEQ ID NO: 29115 - DNA, 13 bp, Artificial Sequence
  Oligonucleotide for detection of SNP TSC0008512
ttagggattggta

SEQ ID NO: 29116 - DNA, 13 bp, Artificial Sequence
  Oligonucleotide for detection of SNP TSC0008512
taccaatccctaa

SEQ ID NO: 29117 - DNA, 13 bp, Artificial Sequence
  Oligonucleotide for detection of SNP TSC0008515
tgttttatggtty

SEQ ID NO: 29118 - DNA, 13 bp, Artificial Sequence
  Oligonucleotide for detection of SNP TSC0008515
raaccataaaaca

SEQ ID NO: 29119 - DNA, 13 bp, Artificial Sequence
  Oligonucleotide for detection of SNP TSC0008515
tgttttgtggtty

SEQ ID NO: 29120 - DNA, 13 bp, Artificial Sequence
  Oligonucleotide for detection of SNP TSC0008515
raaccacaaaaca

SEQ ID NO: 29121 - DNA, 13 bp, Artificial Sequence
  Oligonucleotide for detection of SNP TSC0008515
tgtttcgtggtty

SEQ ID NO: 29122 - DNA, 13 bp, Artificial Sequence
  Oligonucleotide for detection of SNP TSC0008515
raaccacgaaaca

SEQ ID NO: 29123 - DNA, 13 bp, Artificial Sequence
  Oligonucleotide for detection of SNP TSC0008515
gggttatggagta

SEQ ID NO: 29124 - DNA, 13 bp, Artificial Sequence
  Oligonucleotide for detection of SNP TSC0008515
tactccataaccc

SEQ ID NO: 29125 - DNA, 13 bp, Artificial Sequence
  Oligonucleotide for detection of SNP TSC0008515
gggttacggagta

SEQ ID NO: 29126 - DNA, 13 bp, Artificial Sequence
  Oligonucleotide for detection of SNP TSC0008515
tactccgtaaccc

SEQ ID NO: 29127 - DNA, 13 bp, Artificial Sequence
  Oligonucleotide for detection of SNP TSC0008516
agagatggtagga

SEQ ID NO: 29128 - DNA, 13 bp, Artificial Sequence
  Oligonucleotide for detection of SNP TSC0008516
tcctaccatctct

SEQ ID NO: 29129 - DNA, 13 bp, Artificial Sequence
  Oligonucleotide for detection of SNP TSC0008516
agagatagtagga

SEQ ID NO: 29130 - DNA, 13 bp, Artificial Sequence
  Oligonucleotide for detection of SNP TSC0008516
tcctactatctct

SEQ ID NO: 29131 - DNA, 13 bp, Artificial Sequence
  Oligonucleotide for detection of SNP TSC0008516
agagacggtagga

SEQ ID NO: 29132 - DNA, 13 bp, Artificial Sequence
  Oligonucleotide for detection of SNP TSC0008516
tcctaccgtctct

SEQ ID NO: 29133 - DNA, 13 bp, Artificial Sequence
  Oligonucleotide for detection of SNP TSC0008518
tttagaattatty

SEQ ID NO: 29134 - DNA, 13 bp, Artificial Sequence
  Oligonucleotide for detection of SNP TSC0008518
raataattctaaa

SEQ ID NO: 29135 - DNA, 13 bp, Artificial Sequence
  Oligonucleotide for detection of SNP TSC0008518
tttagatttatty

SEQ ID NO: 29136 - DNA, 13 bp, Artificial Sequence
  Oligonucleotide for detection of SNP TSC0008518
raataaatctaaa

SEQ ID NO: 29137 - DNA, 13 bp, Artificial Sequence
  Oligonucleotide for detection of SNP TSC0008518
gagtgattttgaa

SEQ ID NO: 29138 - DNA, 13 bp, Artificial Sequence
  Oligonucleotide for detection of SNP TSC0008518
ttcaaaatcactc

SEQ ID NO: 29139 - DNA, 13 bp, Artificial Sequence
  Oligonucleotide for detection of SNP TSC0008518
gagtgagtttgaa

SEQ ID NO: 29140 - DNA, 13 bp, Artificial Sequence
  Oligonucleotide for detection of SNP TSC0008518
ttcaaactcactc

SEQ ID NO: 29141 - DNA, 13 bp, Artificial Sequence
  Oligonucleotide for detection of SNP TSC0008528
gggtgggaatatt

SEQ ID NO: 29142 - DNA, 13 bp, Artificial Sequence
  Oligonucleotide for detection of SNP TSC0008528
aatattcccaccc

SEQ ID NO: 29143 - DNA, 13 bp, Artificial Sequence
  Oligonucleotide for detection of SNP TSC0008528
gggtggaaatatt

SEQ ID NO: 29144 - DNA, 13 bp, Artificial Sequence
  Oligonucleotide for detection of SNP TSC0008528
aatatttccaccc

SEQ ID NO: 29145 - DNA, 13 bp, Artificial Sequence
  Oligonucleotide for detection of SNP TSC0008535
tatgagtgtttta

SEQ ID NO: 29146 - DNA, 13 bp, Artificial Sequence
  Oligonucleotide for detection of SNP TSC0008535
taaaacactcata

SEQ ID NO: 29147 - DNA, 13 bp, Artificial Sequence
  Oligonucleotide for detection of SNP TSC0008535
tatgagggtttta

SEQ ID NO: 29148 - DNA, 13 bp, Artificial Sequence
  Oligonucleotide for detection of SNP TSC0008535
taaaaccctcata

SEQ ID NO: 29149 - DNA, 13 bp, Artificial Sequence
  Oligonucleotide for detection of SNP TSC0008535
tatgagcgtttta

SEQ ID NO: 29150 - DNA, 13 bp, Artificial Sequence
  Oligonucleotide for detection of SNP TSC0008535
taaaacgctcata

SEQ ID NO: 29151 - DNA, 13 bp, Artificial Sequence
  Oligonucleotide for detection of SNP TSC0008535
tggggtgtttatg

SEQ ID NO: 29152 - DNA, 13 bp, Artificial Sequence
  Oligonucleotide for detection of SNP TSC0008535
cataaacacccca

SEQ ID NO: 29153 - DNA, 13 bp, Artificial Sequence
  Oligonucleotide for detection of SNP TSC0008535
tggggtttttatg

SEQ ID NO: 29154 - DNA, 13 bp, Artificial Sequence
  Oligonucleotide for detection of SNP TSC0008535
cataaaaacccca

SEQ ID NO: 29155 - DNA, 13 bp, Artificial Sequence
  Oligonucleotide for detection of SNP TSC0008535
tggggcgtttatg

SEQ ID NO: 29156 - DNA, 13 bp, Artificial Sequence
  Oligonucleotide for detection of SNP TSC0008535
cataaacgcccca

SEQ ID NO: 29157 - DNA, 13 bp, Artificial Sequence
  Oligonucleotide for detection of SNP TSC0008536
aaaattaataaaa

SEQ ID NO: 29158 - DNA, 13 bp, Artificial Sequence
  Oligonucleotide for detection of SNP TSC0008536
ttttattaatttt

SEQ ID NO: 29159 - DNA, 13 bp, Artificial Sequence
  Oligonucleotide for detection of SNP TSC0008536
aaaattgataaaa

SEQ ID NO: 29160 - DNA, 13 bp, Artificial Sequence
  Oligonucleotide for detection of SNP TSC0008536
ttttatcaatttt

SEQ ID NO: 29161 - DNA, 13 bp, Artificial Sequence
  Oligonucleotide for detection of SNP TSC0008537
tattaggttggtt

SEQ ID NO: 29162 - DNA, 13 bp, Artificial Sequence
  Oligonucleotide for detection of SNP TSC0008537
aaccaacctaata

SEQ ID NO: 29163 - DNA, 13 bp, Artificial Sequence
  Oligonucleotide for detection of SNP TSC0008537
tattagtttggtt

SEQ ID NO: 29164 - DNA, 13 bp, Artificial Sequence
  Oligonucleotide for detection of SNP TSC0008537
aaccaaactaata

SEQ ID NO: 29165 - DNA, 13 bp, Artificial Sequence
  Oligonucleotide for detection of SNP TSC0008537
aattagtttaata

SEQ ID NO: 29166 - DNA, 13 bp, Artificial Sequence
  Oligonucleotide for detection of SNP TSC0008537
tattaaactaatt

SEQ ID NO: 29167 - DNA, 13 bp, Artificial Sequence
  Oligonucleotide for detection of SNP TSC0008537
aattagattaata

SEQ ID NO: 29168 - DNA, 13 bp, Artificial Sequence
  Oligonucleotide for detection of SNP TSC0008537
tattaatctaatt

SEQ ID NO: 29169 - DNA, 13 bp, Artificial Sequence
  Oligonucleotide for detection of SNP TSC0008538
tatttaatataga

SEQ ID NO: 29170 - DNA, 13 bp, Artificial Sequence
  Oligonucleotide for detection of SNP TSC0008538
tctatattaaata

SEQ ID NO: 29171 - DNA, 13 bp, Artificial Sequence
  Oligonucleotide for detection of SNP TSC0008538
tatttagtataga

SEQ ID NO: 29172 - DNA, 13 bp, Artificial Sequence
  Oligonucleotide for detection of SNP TSC0008538
tctatactaaata

SEQ ID NO: 29173 - DNA, 13 bp, Artificial Sequence
  Oligonucleotide for detection of SNP TSC0008539
gggttttatttta

SEQ ID NO: 29174 - DNA, 13 bp, Artificial Sequence
  Oligonucleotide for detection of SNP TSC0008539
taaaataaaaccc

SEQ ID NO: 29175 - DNA, 13 bp, Artificial Sequence
  Oligonucleotide for detection of SNP TSC0008539
gggtttgatttta

SEQ ID NO: 29176 - DNA, 13 bp, Artificial Sequence
  Oligonucleotide for detection of SNP TSC0008539
taaaatcaaaccc

SEQ ID NO: 29177 - DNA, 13 bp, Artificial Sequence
  Oligonucleotide for detection of SNP TSC0008539
gggttcgatttta

SEQ ID NO: 29178 - DNA, 13 bp, Artificial Sequence
  Oligonucleotide for detection of SNP TSC0008539
taaaatcgaaccc

SEQ ID NO: 29179 - DNA, 13 bp, Artificial Sequence
  Oligonucleotide for detection of SNP TSC0008539
tgaggtggagtty

SEQ ID NO: 29180 - DNA, 13 bp, Artificial Sequence
  Oligonucleotide for detection of SNP TSC0008539
raactccacctca

SEQ ID NO: 29181 - DNA, 13 bp, Artificial Sequence
  Oligonucleotide for detection of SNP TSC0008539
tgaggttgagtty

SEQ ID NO: 29182 - DNA, 13 bp, Artificial Sequence
  Oligonucleotide for detection of SNP TSC0008539
raactcaacctca

SEQ ID NO: 29183 - DNA, 13 bp, Artificial Sequence
  Oligonucleotide for detection of SNP TSC0008539
tgaggtcgagtty

SEQ ID NO: 29184 - DNA, 13 bp, Artificial Sequence
  Oligonucleotide for detection of SNP TSC0008539
raactcgacctca

SEQ ID NO: 29185 - DNA, 13 bp, Artificial Sequence
  Oligonucleotide for detection of SNP TSC0008541
atttatgtatagg

SEQ ID NO: 29186 - DNA, 13 bp, Artificial Sequence
  Oligonucleotide for detection of SNP TSC0008541
cctatacataaat

SEQ ID NO: 29187 - DNA, 13 bp, Artificial Sequence
  Oligonucleotide for detection of SNP TSC0008541
atttatatatagg

SEQ ID NO: 29188 - DNA, 13 bp, Artificial Sequence
  Oligonucleotide for detection of SNP TSC0008541
cctatatataaat

SEQ ID NO: 29189 - DNA, 13 bp, Artificial Sequence
  Oligonucleotide for detection of SNP TSC0008542
attatggtggaag

SEQ ID NO: 29190 - DNA, 13 bp, Artificial Sequence
  Oligonucleotide for detection of SNP TSC0008542
cttccaccataat

SEQ ID NO: 29191 - DNA, 13 bp, Artificial Sequence
  Oligonucleotide for detection of SNP TSC0008542
attatgttggaag

SEQ ID NO: 29192 - DNA, 13 bp, Artificial Sequence
  Oligonucleotide for detection of SNP TSC0008542
cttccaacataat

SEQ ID NO: 29193 - DNA, 13 bp, Artificial Sequence
  Oligonucleotide for detection of SNP TSC0008542
tttttattatgat

SEQ ID NO: 29194 - DNA, 13 bp, Artificial Sequence
  Oligonucleotide for detection of SNP TSC0008542
atcataataaaaa

SEQ ID NO: 29195 - DNA, 13 bp, Artificial Sequence
  Oligonucleotide for detection of SNP TSC0008542
tttttaatatgat

SEQ ID NO: 29196 - DNA, 13 bp, Artificial Sequence
  Oligonucleotide for detection of SNP TSC0008542
atcatattaaaaa

SEQ ID NO: 29197 - DNA, 13 bp, Artificial Sequence
  Oligonucleotide for detection of SNP TSC0008543
gtggatgtgttgt

SEQ ID NO: 29198 - DNA, 13 bp, Artificial Sequence
  Oligonucleotide for detection of SNP TSC0008543
acaacacatccac

SEQ ID NO: 29199 - DNA, 13 bp, Artificial Sequence
  Oligonucleotide for detection of SNP TSC0008543
gtggatatgttgt

SEQ ID NO: 29200 - DNA, 13 bp, Artificial Sequence
  Oligonucleotide for detection of SNP TSC0008543
acaacatatccac

SEQ ID NO: 29201 - DNA, 13 bp, Artificial Sequence
  Oligonucleotide for detection of SNP TSC0008544
gtttgaggttaga

SEQ ID NO: 29202 - DNA, 13 bp, Artificial Sequence
  Oligonucleotide for detection of SNP TSC0008544
tctaacctcaaac

SEQ ID NO: 29203 - DNA, 13 bp, Artificial Sequence
  Oligonucleotide for detection of SNP TSC0008544
gtttgaagttaga

SEQ ID NO: 29204 - DNA, 13 bp, Artificial Sequence
  Oligonucleotide for detection of SNP TSC0008544
tctaacttcaaac

SEQ ID NO: 29205 - DNA, 13 bp, Artificial Sequence
  Oligonucleotide for detection of SNP TSC0008545
aagtttatggttt

SEQ ID NO: 29206 - DNA, 13 bp, Artificial Sequence
  Oligonucleotide for detection of SNP TSC0008545
aaaccataaactt

SEQ ID NO: 29207 - DNA, 13 bp, Artificial Sequence
  Oligonucleotide for detection of SNP TSC0008545
aagtttgtggttt

SEQ ID NO: 29208 - DNA, 13 bp, Artificial Sequence
  Oligonucleotide for detection of SNP TSC0008545
aaaccacaaactt

SEQ ID NO: 29209 - DNA, 13 bp, Artificial Sequence
  Oligonucleotide for detection of SNP TSC0008546
aagaaatggatty

SEQ ID NO: 29210 - DNA, 13 bp, Artificial Sequence
  Oligonucleotide for detection of SNP TSC0008546
raatccatttctt

SEQ ID NO: 29211 - DNA, 13 bp, Artificial Sequence
  Oligonucleotide for detection of SNP TSC0008546
aagaaacggatty

SEQ ID NO: 29212 - DNA, 13 bp, Artificial Sequence
  Oligonucleotide for detection of SNP TSC0008546
raatccgtttctt

SEQ ID NO: 29213 - DNA, 13 bp, Artificial Sequence
  Oligonucleotide for detection of SNP TSC0008557
taattatggttta

SEQ ID NO: 29214 - DNA, 13 bp, Artificial Sequence
  Oligonucleotide for detection of SNP TSC0008557
taaaccataatta

SEQ ID NO: 29215 - DNA, 13 bp, Artificial Sequence
  Oligonucleotide for detection of SNP TSC0008557
taattacggttta

SEQ ID NO: 29216 - DNA, 13 bp, Artificial Sequence
  Oligonucleotide for detection of SNP TSC0008557
taaaccgtaatta

SEQ ID NO: 29217 - DNA, 13 bp, Artificial Sequence
  Oligonucleotide for detection of SNP TSC0008557
tgaattgtgatta

SEQ ID NO: 29218 - DNA, 13 bp, Artificial Sequence
  Oligonucleotide for detection of SNP TSC0008557
taatcacaattca

SEQ ID NO: 29219 - DNA, 13 bp, Artificial Sequence
  Oligonucleotide for detection of SNP TSC0008557
tgaattatgatta

SEQ ID NO: 29220 - DNA, 13 bp, Artificial Sequence
  Oligonucleotide for detection of SNP TSC0008557
taatcataattca

SEQ ID NO: 29221 - DNA, 13 bp, Artificial Sequence
  Oligonucleotide for detection of SNP TSC0008557
tgaatcgtgatta

SEQ ID NO: 29222 - DNA, 13 bp, Artificial Sequence
  Oligonucleotide for detection of SNP TSC0008557
taatcacgattca

SEQ ID NO: 29223 - DNA, 13 bp, Artificial Sequence
  Oligonucleotide for detection of SNP TSC0008575
ttaagtagggggg

SEQ ID NO: 29224 - DNA, 13 bp, Artificial Sequence
  Oligonucleotide for detection of SNP TSC0008575
cccccctacttaa

SEQ ID NO: 29225 - DNA, 13 bp, Artificial Sequence
  Oligonucleotide for detection of SNP TSC0008575
ttaagtggggggg

SEQ ID NO: 29226 - DNA, 13 bp, Artificial Sequence
  Oligonucleotide for detection of SNP TSC0008575
cccccccacttaa

SEQ ID NO: 29227 - DNA, 13 bp, Artificial Sequence
  Oligonucleotide for detection of SNP TSC0008576
taagggagaggag

SEQ ID NO: 29228 - DNA, 13 bp, Artificial Sequence
  Oligonucleotide for detection of SNP TSC0008576
ctcctctccctta

SEQ ID NO: 29229 - DNA, 13 bp, Artificial Sequence
  Oligonucleotide for detection of SNP TSC0008576
taagggggaggag

SEQ ID NO: 29230 - DNA, 13 bp, Artificial Sequence
  Oligonucleotide for detection of SNP TSC0008576
ctcctccccctta

SEQ ID NO: 29231 - DNA, 13 bp, Artificial Sequence
  Oligonucleotide for detection of SNP TSC0008577
tatatttggttaa

SEQ ID NO: 29232 - DNA, 13 bp, Artificial Sequence
  Oligonucleotide for detection of SNP TSC0008577
ttaaccaaatata

SEQ ID NO: 29233 - DNA, 13 bp, Artificial Sequence
  Oligonucleotide for detection of SNP TSC0008577
tatattcggttaa

SEQ ID NO: 29234 - DNA, 13 bp, Artificial Sequence
  Oligonucleotide for detection of SNP TSC0008577
ttaaccgaatata

SEQ ID NO: 29235 - DNA, 13 bp, Artificial Sequence
  Oligonucleotide for detection of SNP TSC0008578
gatttttggttat

SEQ ID NO: 29236 - DNA, 13 bp, Artificial Sequence
  Oligonucleotide for detection of SNP TSC0008578
ataaccaaaaatc

SEQ ID NO: 29237 - DNA, 13 bp, Artificial Sequence
  Oligonucleotide for detection of SNP TSC0008578
gattttgggttat

SEQ ID NO: 29238 - DNA, 13 bp, Artificial Sequence
  Oligonucleotide for detection of SNP TSC0008578
ataacccaaaatc

SEQ ID NO: 29239 - DNA, 13 bp, Artificial Sequence
  Oligonucleotide for detection of SNP TSC0008578
gattttcggttat

SEQ ID NO: 29240 - DNA, 13 bp, Artificial Sequence
  Oligonucleotide for detection of SNP TSC0008578
ataaccgaaaatc

SEQ ID NO: 29241 - DNA, 13 bp, Artificial Sequence
  Oligonucleotide for detection of SNP TSC0008578
gatttcgggttat

SEQ ID NO: 29242 - DNA, 13 bp, Artificial Sequence
  Oligonucleotide for detection of SNP TSC0008578
ataacccgaaatc

SEQ ID NO: 29243 - DNA, 13 bp, Artificial Sequence
  Oligonucleotide for detection of SNP TSC0008578
atgattggaagty

SEQ ID NO: 29244 - DNA, 13 bp, Artificial Sequence
  Oligonucleotide for detection of SNP TSC0008578
racttccaatcat

SEQ ID NO: 29245 - DNA, 13 bp, Artificial Sequence
  Oligonucleotide for detection of SNP TSC0008578
atgatttgaagty

SEQ ID NO: 29246 - DNA, 13 bp, Artificial Sequence
  Oligonucleotide for detection of SNP TSC0008578
racttcaaatcat

SEQ ID NO: 29247 - DNA, 13 bp, Artificial Sequence
  Oligonucleotide for detection of SNP TSC0008578
atgatcggaagty

SEQ ID NO: 29248 - DNA, 13 bp, Artificial Sequence
  Oligonucleotide for detection of SNP TSC0008578
racttccgatcat

SEQ ID NO: 29249 - DNA, 13 bp, Artificial Sequence
  Oligonucleotide for detection of SNP TSC0008578
atgattcgaagty

SEQ ID NO: 29250 - DNA, 13 bp, Artificial Sequence
  Oligonucleotide for detection of SNP TSC0008578
racttcgaatcat

SEQ ID NO: 29251 - DNA, 13 bp, Artificial Sequence
  Oligonucleotide for detection of SNP TSC0008579
ttatagttatgta

SEQ ID NO: 29252 - DNA, 13 bp, Artificial Sequence
  Oligonucleotide for detection of SNP TSC0008579
tacataactataa

SEQ ID NO: 29253 - DNA, 13 bp, Artificial Sequence
  Oligonucleotide for detection of SNP TSC0008579
tgtatgtttgtaa

SEQ ID NO: 29254 - DNA, 13 bp, Artificial Sequence
  Oligonucleotide for detection of SNP TSC0008579
ttacaaacataca

SEQ ID NO: 29255 - DNA, 13 bp, Artificial Sequence
  Oligonucleotide for detection of SNP TSC0008579
tgtatgattgtaa

SEQ ID NO: 29256 - DNA, 13 bp, Artificial Sequence
  Oligonucleotide for detection of SNP TSC0008579
ttacaatcataca

SEQ ID NO: 29257 - DNA, 13 bp, Artificial Sequence
  Oligonucleotide for detection of SNP TSC0008582
gaataaggtaggg

SEQ ID NO: 29258 - DNA, 13 bp, Artificial Sequence
  Oligonucleotide for detection of SNP TSC0008582
ccctaccttattc

SEQ ID NO: 29259 - DNA, 13 bp, Artificial Sequence
  Oligonucleotide for detection of SNP TSC0008582
gaataatgtaggg

SEQ ID NO: 29260 - DNA, 13 bp, Artificial Sequence
  Oligonucleotide for detection of SNP TSC0008582
ccctacattattc

SEQ ID NO: 29261 - DNA, 13 bp, Artificial Sequence
  Oligonucleotide for detection of SNP TSC0008582
ttttgttttatty

SEQ ID NO: 29262 - DNA, 13 bp, Artificial Sequence
  Oligonucleotide for detection of SNP TSC0008582
raataaaacaaaa

SEQ ID NO: 29263 - DNA, 13 bp, Artificial Sequence
  Oligonucleotide for detection of SNP TSC0008582
ttttgtattatty

SEQ ID NO: 29264 - DNA, 13 bp, Artificial Sequence
  Oligonucleotide for detection of SNP TSC0008582
raataatacaaaa

SEQ ID NO: 29265 - DNA, 13 bp, Artificial Sequence
  Oligonucleotide for detection of SNP TSC0008606
gatgtggatgatg

SEQ ID NO: 29266 - DNA, 13 bp, Artificial Sequence
  Oligonucleotide for detection of SNP TSC0008606
catcatccacatc

SEQ ID NO: 29267 - DNA, 13 bp, Artificial Sequence
  Oligonucleotide for detection of SNP TSC0008606
gatgtgaatgatg

SEQ ID NO: 29268 - DNA, 13 bp, Artificial Sequence
  Oligonucleotide for detection of SNP TSC0008606
catcattcacatc

SEQ ID NO: 29269 - DNA, 13 bp, Artificial Sequence
  Oligonucleotide for detection of SNP TSC0008612
gttggtaaggatg

SEQ ID NO: 29270 - DNA, 13 bp, Artificial Sequence
  Oligonucleotide for detection of SNP TSC0008612
catccttaccaac

SEQ ID NO: 29271 - DNA, 13 bp, Artificial Sequence
  Oligonucleotide for detection of SNP TSC0008612
gttggtgaggatg

SEQ ID NO: 29272 - DNA, 13 bp, Artificial Sequence
  Oligonucleotide for detection of SNP TSC0008612
catcctcaccaac

SEQ ID NO: 29273 - DNA, 13 bp, Artificial Sequence
  Oligonucleotide for detection of SNP TSC0008612
gttggcgaggatg

SEQ ID NO: 29274 - DNA, 13 bp, Artificial Sequence
  Oligonucleotide for detection of SNP TSC0008612
catcctcgccaac

SEQ ID NO: 29275 - DNA, 13 bp, Artificial Sequence
  Oligonucleotide for detection of SNP TSC0008612
tatttttgttagy

SEQ ID NO: 29276 - DNA, 13 bp, Artificial Sequence
  Oligonucleotide for detection of SNP TSC0008612
rctaacaaaaata

SEQ ID NO: 29277 - DNA, 13 bp, Artificial Sequence
  Oligonucleotide for detection of SNP TSC0008612
tattttcgttagy

SEQ ID NO: 29278 - DNA, 13 bp, Artificial Sequence
  Oligonucleotide for detection of SNP TSC0008612
rctaacgaaaata

SEQ ID NO: 29279 - DNA, 13 bp, Artificial Sequence
  Oligonucleotide for detection of SNP TSC0008617
aagaaaatatgtt

SEQ ID NO: 29280 - DNA, 13 bp, Artificial Sequence
  Oligonucleotide for detection of SNP TSC0008617
aacatattttctt

SEQ ID NO: 29281 - DNA, 13 bp, Artificial Sequence
  Oligonucleotide for detection of SNP TSC0008617
aagaaagtatgtt

SEQ ID NO: 29282 - DNA, 13 bp, Artificial Sequence
  Oligonucleotide for detection of SNP TSC0008617
aacatactttctt

SEQ ID NO: 29283 - DNA, 13 bp, Artificial Sequence
  Oligonucleotide for detection of SNP TSC0008617
aagaaaatacgtt

SEQ ID NO: 29284 - DNA, 13 bp, Artificial Sequence
  Oligonucleotide for detection of SNP TSC0008617
aacgtattttctt

SEQ ID NO: 29285 - DNA, 13 bp, Artificial Sequence
  Oligonucleotide for detection of SNP TSC0008617
aagaaagtacgtt

SEQ ID NO: 29286 - DNA, 13 bp, Artificial Sequence
  Oligonucleotide for detection of SNP TSC0008617
aacgtactttctt

SEQ ID NO: 29287 - DNA, 13 bp, Artificial Sequence
  Oligonucleotide for detection of SNP TSC0008618
aaattaagttatt

SEQ ID NO: 29288 - DNA, 13 bp, Artificial Sequence
  Oligonucleotide for detection of SNP TSC0008618
aataacttaattt

SEQ ID NO: 29289 - DNA, 13 bp, Artificial Sequence
  Oligonucleotide for detection of SNP TSC0008618
aaattaggttatt

SEQ ID NO: 29290 - DNA, 13 bp, Artificial Sequence
  Oligonucleotide for detection of SNP TSC0008618
aataacctaattt

SEQ ID NO: 29291 - DNA, 13 bp, Artificial Sequence
  Oligonucleotide for detection of SNP TSC0008619
aaatatatagtag

SEQ ID NO: 29292 - DNA, 13 bp, Artificial Sequence
  Oligonucleotide for detection of SNP TSC0008619
ctactatatattt

SEQ ID NO: 29293 - DNA, 13 bp, Artificial Sequence
  Oligonucleotide for detection of SNP TSC0008619
aaatatttagtag

SEQ ID NO: 29294 - DNA, 13 bp, Artificial Sequence
  Oligonucleotide for detection of SNP TSC0008619
ctactaaatattt

SEQ ID NO: 29295 - DNA, 13 bp, Artificial Sequence
  Oligonucleotide for detection of SNP TSC0008619
ttgttgtgtattt

SEQ ID NO: 29296 - DNA, 13 bp, Artificial Sequence
  Oligonucleotide for detection of SNP TSC0008619
aaatacacaacaa

SEQ ID NO: 29297 - DNA, 13 bp, Artificial Sequence
  Oligonucleotide for detection of SNP TSC0008619
ttgttgagtattt

SEQ ID NO: 29298 - DNA, 13 bp, Artificial Sequence
  Oligonucleotide for detection of SNP TSC0008619
aaatactcaacaa

SEQ ID NO: 29299 - DNA, 13 bp, Artificial Sequence
  Oligonucleotide for detection of SNP TSC0008637
tgattagttagtg

SEQ ID NO: 29300 - DNA, 13 bp, Artificial Sequence
  Oligonucleotide for detection of SNP TSC0008637
cactaactaatca

SEQ ID NO: 29301 - DNA, 13 bp, Artificial Sequence
  Oligonucleotide for detection of SNP TSC0008637
tgattaattagtg

SEQ ID NO: 29302 - DNA, 13 bp, Artificial Sequence
  Oligonucleotide for detection of SNP TSC0008637
cactaattaatca

SEQ ID NO: 29303 - DNA, 13 bp, Artificial Sequence
  Oligonucleotide for detection of SNP TSC0008638
gagtgtatgtggg

SEQ ID NO: 29304 - DNA, 13 bp, Artificial Sequence
  Oligonucleotide for detection of SNP TSC0008638
cccacatacactc

SEQ ID NO: 29305 - DNA, 13 bp, Artificial Sequence
  Oligonucleotide for detection of SNP TSC0008638
gagtgtgtgtggg

SEQ ID NO: 29306 - DNA, 13 bp, Artificial Sequence
  Oligonucleotide for detection of SNP TSC0008638
cccacacacactc

SEQ ID NO: 29307 - DNA, 13 bp, Artificial Sequence
  Oligonucleotide for detection of SNP TSC0008638
gagtgcgtgtggg

SEQ ID NO: 29308 - DNA, 13 bp, Artificial Sequence
  Oligonucleotide for detection of SNP TSC0008638
cccacacgcactc

(The sequence listing continues in the following parts.)

1. A set of oligonucleotides or PNA (peptide nucleic acid) oligomers for the detection of single nucleotide polymorphisms (SNPs, single nucleotide polymorphisms) and for the detection of the cytosine methylation state in chemically pretreated genomic DNA, selected from the base sequences SEQ-ID: 1 to SEQ-ID: 382046.

2. The set of oligonucleotides for the detection of single nucleotide polymorphisms (SNPs, single nucleotide polymorphisms) and of the state of cytosine methylation in chemically pretreated genomic DNA according to claim 1, further characterized in that the base sequences mostly at the 5′ end and/or at the 3′ end can each be extended by another base, whereby the bases can be either A, T or C.

3. The set of oligonucleotides for the detection of single nucleotide polymorphisms (SNPs, single nucleotide polymorphisms) and of the state of cytosine methylation in chemically pretreated genomic DNA according to claim 1, further characterized in that the base sequences mostly at the 5′ end and/or at the 3′ end can each be extended by another base, whereby the bases can be either A, T or G.

4. The set of oligonucleotides for the detection of single nucleotide polymorphisms (SNPs, single nucleotide polymorphisms) and of the state of cytosine methylation in chemically pretreated genomic DNA according to claim 1, further characterized in that the base sequences mostly at the 5′ end and/or at the 3′ end can each be extended by at least two additional bases, whereby the bases can be either A, T or C.

5. The set of oligonucleotides for the detection of single nucleotide polymorphisms (SNPs, single nucleotide polymorphisms) and of the state of cytosine methylation in chemically pretreated genomic DNA according to claim 1, further characterized in that the base sequences mostly at the 5′ end and/or at the 3′ end can each be extended by at least two additional bases, whereby the bases can be either A, T or G.

6. The set of PNA (peptide nucleic acid) oligomers for the detection of single nucleotide polymorphisms (SNPs, single nucleotide polymorphisms) and of the state of cytosine methylation in chemically pretreated genomic DNA according to claim 1, further characterized in that a nucleobase is omitted each time at the 5′ end and/or at the 3′ end of the oligomer.

7. The set of PNA (peptide nucleic acid) oligomers for the detection of single nucleotide polymorphisms (SNPs, single nucleotide polymorphisms) and of the state of cytosine methylation in chemically pretreated genomic DNA according to claim 1, further characterized in that at least two nucleobases are omitted each time at the 5′ end and/or at the 3′ end of the oligomer.

8. The set of oligomer probes (oligonucleotides and/or PNA oligomers) for the detection of the state of cytosine methylation and/or of single nucleotide polymorphisms in chemically pretreated genomic DNA, comprising at least 10 of the oligonucleotide or PNA sequences of claim 1.

9. The set of oligomer probes (oligonucleotides and/or PNA oligomers) for the detection of the state of cytosine methylation and/or of single nucleotide polymorphisms in chemically pretreated genomic DNA, comprising at least 100 of the oligonucleotide or PNA sequences of claim 1.

10. A method for the analysis of a representative set of cytosine methylations and single nucleotide polymorphisms in genomic DNA samples for the distinguishing of cell types, hereby characterized in that the following steps are conducted:
a) unmethylated cytosine bases at the 5-position in a genomic DNA sample are converted by chemical treatment to uracil, thymidine or another base that is dissimilar to cytosine in its hybridization behavior;
b) more than ten different fragments, each of which is less than 2000 base pairs long, are amplified simultaneously from this chemically treated genomic DNA with the use of synthetic oligonucleotides as primers;
c) the amplified products are hybridized to a set of oligonucleotides or PNA oligomers, comprising at least 10 sequences of claim 1;
d) the non-hybridized amplified products are removed;
e) the hybridized amplified products are detected.

11. The method according to claim 10, further characterized in that the chemical treatment is conducted by means of a solution of a bisulfite, hydrogen sulfite or disulfite.

12. The method according to claim 10, further characterized in that the amplification is conducted by means of the polymerase chain reaction (PCR).

13. The method according to claim 10, further characterized in that the oligonucleotides or PNA oligomers are bound to defined sites on a solid phase.

14. The method according to claim 13, further characterized in that different oligonucleotide and/or PNA oligomer sequences are arranged on a planar solid phase in the form of a rectangular or hexagonal grid.

15. The method according to claim 13, further characterized in that the labelings introduced on the amplified products can be identified at any position of the solid phase on which an oligonucleotide sequence is found.

16. The method according to claim 10, further characterized in that at least one primer is bound to a solid phase in the amplification.

17. The method according to claim 16, further characterized in that different amplified products are arranged on the solid phase in the form of a rectangular or hexagonal grid.

18. The method according to claim 10, further characterized in that the labels of the amplified products are fluorescent labels.

19. The method according to claim 10, further characterized in that the labels of the amplified products are radionuclides.

20. The method according to claim 10, further characterized in that the amplified products bear detachable mass labels, which are detected in a mass spectrometer.

21. The method according to claim 10, further characterized in that the amplified products, fragments of the amplified products, or probes complementary to the amplified probes are detected in the mass spectrometer.

22. The method according to claim 20, further characterized in that, for better detectability in the mass spectrometer, the produced fragments have a single positive or negative net charge.

23. The method according to claim 20, further characterized in that the detection is conducted and visualized by means of matrix-assisted laser desorption/ionization mass spectrometry (MALDI) or by means of electrospray mass spectrometry (ESI).

24. The method according to claim 10, wherein the polymerases are heat-stable DNA polymerases.

25. The method according to claim 10, further characterized in that the amplification of several DNA segments is conducted simultaneously in one reaction vessel.

26. The method according to claim 14, further characterized in that the solid-phase support surface is comprised of silicon, glass, polystyrene, aluminum, steel, iron, copper, nickel, silver, or gold.

27. The method according to claim 10, wherein the genomic DNA has been obtained from a DNA sample, wherein sources for DNA include, e.g., cell lines, blood, sputum, stool, urine, cerebrospinal fluid, tissue embedded in paraffin, histological slides and all possible combinations thereof.

28. Use of a set of oligonucleotides and/or PNA oligomers according to claim 1 for the diagnosis and/or prognosis of adverse events for patients or individuals.

29. The use of a set of oligonucleotides and/or PNA oligomers according to claim 28 for the diagnosis and/or prognosis of adverse events for patients or individuals, whereby these adverse events belong to at least one of the following categories: undesired drug interactions; cancer diseases; CNS malfunctions, damage or disease; symptoms of aggression or behavioral disturbances; clinical, psychological and social consequences of brain lesions; psychotic disturbances and personality disorders; dementia and/or associated syndromes; cardiovascular disorder, malfunction and damage; malfunction, damage or disorder of the gastrointestinal tract; malfunction, damage or disorder of the respiratory system; lesion, inflammation, infection, immunity and/or convalescence; malfunction, damage or disease of the body as an abnormality in the development process; malfunction, damage or disorder of the skin, the muscles, the connective tissue or the bones; endocrine and metabolic malfunction, damage or disorder; headaches or sexual malfunctions.

30. The use of a set of oligonucleotides and/or PNA oligomers according to claim 1 for the investigation of cell types or tissues or for the investigation of cell differentiation.

31. A kit containing at least 10 oligonucleotides or PNA oligomers for the detection of single nucleotide polymorphisms (SNPs, single nucleotide polymorphisms) and for the detection of the cytosine methylation state in chemically pretreated genomic DNA, selected from the base sequences SEQ-ID: 1 to SEQ-ID: 382046, primers for producing the amplified products and instructions for conducting the method according to one of claims 10 to 27.
